United States Patent Application Publication US 2005/0244851 A1 - sequence listing, part 89

SEQ ID NO: 3467248 - DNA, 25 bp, Homo sapien
tattccacctgtactgatcttcctc

SEQ ID NO: 3467249 - DNA, 25 bp, Homo sapien
tcttcctcttaacttattctaggca

SEQ ID NO: 3467250 - DNA, 25 bp, Homo sapien
tatgactttcgtaggagaaatgacc

SEQ ID NO: 3467251 - DNA, 25 bp, Homo sapien
ctaggcattcatattggcagccaca

SEQ ID NO: 3467252 - DNA, 25 bp, Homo sapien
ttattcaaagtgtcccgggagaaca

SEQ ID NO: 3467253 - DNA, 25 bp, Homo sapien
ctacaatcagaaagagactgtggtt

SEQ ID NO: 3467254 - DNA, 25 bp, Homo sapien
tgcttcagacatggacacgatcgcg

SEQ ID NO: 3467255 - DNA, 25 bp, Homo sapien
tatggttgcctaggaccacgaggac

SEQ ID NO: 3467256 - DNA, 25 bp, Homo sapien
ccatgaagggcgtaagtgaccggtc

SEQ ID NO: 3467257 - DNA, 25 bp, Homo sapien
gtatattgaccatgaagggcgtaag

SEQ ID NO: 3467258 - DNA, 25 bp, Homo sapien
aatagagcactttagtacaggtgct

SEQ ID NO: 3467259 - DNA, 25 bp, Homo sapien
cgtaagtgaccggtcagtgaaatag

SEQ ID NO: 3467260 - DNA, 25 bp, Homo sapien
ctttgacagtgccaaactcaggatc

SEQ ID NO: 3467261 - DNA, 25 bp, Homo sapien
ttccttcccgatcaatagctgcttt

SEQ ID NO: 3467262 - DNA, 25 bp, Homo sapien
gtgataccggtgatttccttcccga

SEQ ID NO: 3467263 - DNA, 25 bp, Homo sapien
ggatccagtgctttgaagtgatacc

SEQ ID NO: 3467264 - DNA, 25 bp, Homo sapien
ccagggatggcatcatcatcatgga

SEQ ID NO: 3467265 - DNA, 25 bp, Homo sapien
ctccatggtcttcttccacccaagc

SEQ ID NO: 3467266 - DNA, 25 bp, Homo sapien
tcttccacccaagctacaattttcc

SEQ ID NO: 3467267 - DNA, 25 bp, Homo sapien
ttttcccttcccatccagggatggc

SEQ ID NO: 3467268 - DNA, 25 bp, Homo sapien
tcaaaaagatatgggtagcagcacc

SEQ ID NO: 3467269 - DNA, 25 bp, Homo sapien
tattgtgccctaaaagatcagccta

SEQ ID NO: 3467270 - DNA, 25 bp, Homo sapien
tacaaacgctgggactctgattgct

SEQ ID NO: 3467271 - DNA, 25 bp, Homo sapien
tgattgctgcaaccattgaggccaa

SEQ ID NO: 3467272 - DNA, 25 bp, Homo sapien
cagacagtagaaggagtgtgcaatc

SEQ ID NO: 3467273 - DNA, 25 bp, Homo sapien
ccatcctggtcaaaaagagctgaaa

SEQ ID NO: 3467274 - DNA, 25 bp, Homo sapien
tgccaccaggcgacaatactatgaa

SEQ ID NO: 3467275 - DNA, 25 bp, Homo sapien
gaaggctcctctcgctttggaaact

SEQ ID NO: 3467276 - DNA, 25 bp, Homo sapien
tagaaatactaattgtaaaatatct

SEQ ID NO: 3467277 - DNA, 25 bp, Homo sapien
caataaagtaattcttatctccact

SEQ ID NO: 3467278 - DNA, 25 bp, Homo sapien
agtaattcttatctccactccacat

SEQ ID NO: 3467279 - DNA, 25 bp, Homo sapien
taaagtaattcttatctccactcca

SEQ ID NO: 3467280 - DNA, 25 bp, Homo sapien
gggcgtggccaagctttctggaaaa

SEQ ID NO: 3467281 - DNA, 25 bp, Homo sapien
aaagctggaagtgagcccgggaact

SEQ ID NO: 3467282 - DNA, 25 bp, Homo sapien
ccgcgcaggctgtactggttgcaaa

SEQ ID NO: 3467283 - DNA, 25 bp, Homo sapien
tgacctctgcttctgcgcatccgaa

SEQ ID NO: 3467284 - DNA, 25 bp, Homo sapien
cgttgtcgtaaaatggttcccgcag

SEQ ID NO: 3467285 - DNA, 25 bp, Homo sapien
gcacgcacgctctttctctacggag

SEQ ID NO: 3467286 - DNA, 25 bp, Homo sapien
aagagcagcggcgttgccgtcagcc

SEQ ID NO: 3467287 - DNA, 25 bp, Homo sapien
ccaggccagaaatgcgcggcacgca

SEQ ID NO: 3467288 - DNA, 25 bp, Homo sapien
caaaaccaacgccgtctccggagtg

SEQ ID NO: 3467289 - DNA, 25 bp, Homo sapien
attctgagcccgtcgcgcacagacg

SEQ ID NO: 3467290 - DNA, 25 bp, Homo sapien
accgagcctcgagtcccgcccatgg

SEQ ID NO: 3467291 - DNA, 25 bp, Homo sapien
cgagtcccgcccatggggctacatt

SEQ ID NO: 3467292 - DNA, 25 bp, Homo sapien
tcctgcaaggccgtccaccgagcct

SEQ ID NO: 3467293 - DNA, 25 bp, Homo sapien
tcgcgaggtcactcgtggagttccg

SEQ ID NO: 3467294 - DNA, 25 bp, Homo sapien
gccagatcgcgaggtcactcgtgga

SEQ ID NO: 3467295 - DNA, 25 bp, Homo sapien
ctgttgcgacgagcgggagccgggc

SEQ ID NO: 3467296 - DNA, 25 bp, Homo sapien
agccgggccagatcgcgaggtcact

SEQ ID NO: 3467297 - DNA, 25 bp, Homo sapien
gcggccgggcgaccccaaaagctgc

SEQ ID NO: 3467298 - DNA, 25 bp, Homo sapien
gaccccgccataccctgtagtcacg

SEQ ID NO: 3467299 - DNA, 25 bp, Homo sapien
gggaagactgtaatagcggcggccg

SEQ ID NO: 3467300 - DNA, 25 bp, Homo sapien
ctgcagcagtaagcggttccgcggc

SEQ ID NO: 3467301 - DNA, 25 bp, Homo sapien
caattcaatttcatgcaaagtgtat

SEQ ID NO: 3467302 - DNA, 25 bp, Homo sapien
caatttcatgcaaagtgtatacagt

SEQ ID NO: 3467303 - DNA, 25 bp, Homo sapien
tttaaggactacctaactctcagtc

SEQ ID NO: 3467304 - DNA, 25 bp, Homo sapien
ctctcagtctggcttaagatttcat

SEQ ID NO: 3467305 - DNA, 25 bp, Homo sapien
tttcccaacgggctatggtgcctgc

SEQ ID NO: 3467306 - DNA, 25 bp, Homo sapien
ccaacgggctatggtgcctgcctgc

SEQ ID NO: 3467307 - DNA, 25 bp, Homo sapien
tctgcaattaggtcaccttcattga

SEQ ID NO: 3467308 - DNA, 25 bp, Homo sapien
ctctgcaattaggtcaccttcattg

SEQ ID NO: 3467309 - DNA, 25 bp, Homo sapien
cacccaagaatgatcaataaaaaaa

SEQ ID NO: 3467310 - DNA, 25 bp, Homo sapien
ccaagaatgatcaataaaaaaaata

SEQ ID NO: 3467311 - DNA, 25 bp, Homo sapien
cccaagaatgatcaataaaaaaaat

SEQ ID NO: 3467312 - DNA, 25 bp, Homo sapien
caagaatgatcaataaaaaaaataa

SEQ ID NO: 3467313 - DNA, 25 bp, Homo sapien
tgtgatacagatgatcgctccgatg

SEQ ID NO: 3467314 - DNA, 25 bp, Homo sapien
caggctctcaaatccaacagtggct

SEQ ID NO: 3467315 - DNA, 25 bp, Homo sapien
cgatgggaacatccctggtaccttc

SEQ ID NO: 3467316 - DNA, 25 bp, Homo sapien
ttgccatataacactcctccaggct

SEQ ID NO: 3467317 - DNA, 25 bp, Homo sapien
ttttaaaggcctcaatatcctcagg

SEQ ID NO: 3467318 - DNA, 25 bp, Homo sapien
ccgcttgtggggtaggtgctgctga

SEQ ID NO: 3467319 - DNA, 25 bp, Homo sapien
agaaggtgtaggtggcgaagcagtg

SEQ ID NO: 3467320 - DNA, 25 bp, Homo sapien
gggatatgagctaccaggagcctga

SEQ ID NO: 3467321 - DNA, 25 bp, Homo sapien
ctgctctaagtgtgattggctggat

SEQ ID NO: 3467322 - DNA, 25 bp, Homo sapien
caaatggctgtcagttctttatcac

SEQ ID NO: 3467323 - DNA, 25 bp, Homo sapien
gcctgctttccacggcaaacagcgg

SEQ ID NO: 3467324 - DNA, 25 bp, Homo sapien
aaacagcggtcccagtacaaatggc

SEQ ID NO: 3467325 - DNA, 25 bp, Homo sapien
gtgggagagagggcaggaagaagta

SEQ ID NO: 3467326 - DNA, 25 bp, Homo sapien
tgggagagagggcaggaagaagtac

SEQ ID NO: 3467327 - DNA, 25 bp, Homo sapien
ggtgggagagagggcaggaagaagt

SEQ ID NO: 3467328 - DNA, 25 bp, Homo sapien
ctgccagtaagtctccttcacttag

SEQ ID NO: 3467329 - DNA, 25 bp, Homo sapien
tgccagtaagtctccttcacttagc

SEQ ID NO: 3467330 - DNA, 25 bp, Homo sapien
ccttcacttagcttctcacccactt

SEQ ID NO: 3467331 - DNA, 25 bp, Homo sapien
ccttcagggaccaggatttttgcca

SEQ ID NO: 3467332 - DNA, 25 bp, Homo sapien
gttggcctatagtcagcaaatgctg

SEQ ID NO: 3467333 - DNA, 25 bp, Homo sapien
tttttctacaatgatacagagtggg

SEQ ID NO: 3467334 - DNA, 25 bp, Homo sapien
taaatctgttacttcggttggccta

SEQ ID NO: 3467335 - DNA, 25 bp, Homo sapien
ggggagttggaggaacagcggccac

SEQ ID NO: 3467336 - DNA, 25 bp, Homo sapien
ctggggagttggaggaacagcggcc

SEQ ID NO: 3467337 - DNA, 25 bp, Homo sapien
tggggagttggaggaacagcggcca

SEQ ID NO: 3467338 - DNA, 25 bp, Homo sapien
tctctactgccaacttctttgcaag

SEQ ID NO: 3467339 - DNA, 25 bp, Homo sapien
gatcaatccctttctctactgccaa

SEQ ID NO: 3467340 - DNA, 25 bp, Homo sapien
ggtgctgaaggtgtaggagctaaag

SEQ ID NO: 3467341 - DNA, 25 bp, Homo sapien
tttgcaagagggctaacaaacaccc

SEQ ID NO: 3467342 - DNA, 25 bp, Homo sapien
tccctactctgtggtggcaacaaaa

SEQ ID NO: 3467343 - DNA, 25 bp, Homo sapien
tcaaccaagcactaacagaggtttc

SEQ ID NO: 3467344 - DNA, 25 bp, Homo sapien
tattaagtcattccaaatcacccca

SEQ ID NO: 3467345 - DNA, 25 bp, Homo sapien
taaagtgtatgggtagattctaggc

SEQ ID NO: 3467346 - DNA, 25 bp, Homo sapien
caggccccatgctcttatcacaaag

SEQ ID NO: 3467347 - DNA, 25 bp, Homo sapien
gacacatagtacaagccatcaaacc

SEQ ID NO: 3467348 - DNA, 25 bp, Homo sapien
aaacttatttaagcaccaggcagta

SEQ ID NO: 3467349 - DNA, 25 bp, Homo sapien
aatgctaggtggtctgattccaggc

SEQ ID NO: 3467350 - DNA, 25 bp, Homo sapien
tgtcttgggattggcttgacttcta

SEQ ID NO: 3467351 - DNA, 25 bp, Homo sapien
tagtaaggtaacgagtattgctgaa

SEQ ID NO: 3467352 - DNA, 25 bp, Homo sapien
gaatctctgaggtccaaaaaattta

SEQ ID NO: 3467353 - DNA, 25 bp, Homo sapien
tcagctcatacctaagggattttcc

SEQ ID NO: 3467354 - DNA, 25 bp, Homo sapien
aagagtcgatatccttcttggtgat

SEQ ID NO: 3467355 - DNA, 25 bp, Homo sapien
ggcacaaaagagtcgatatccttct

SEQ ID NO: 3467356 - DNA, 25 bp, Homo sapien
agcaactttactaggcacaaaagag

SEQ ID NO: 3467357 - DNA, 25 bp, Homo sapien
tactaggcacaaaagagtcgatatc

SEQ ID NO: 3467358 - DNA, 25 bp, Homo sapien
caatgaccagtttgtgtcaaaataa

SEQ ID NO: 3467359 - DNA, 25 bp, Homo sapien
agacggaaattagccacgttgccct

SEQ ID NO: 3467360 - DNA, 25 bp, Homo sapien
ttatagaatacctatttctgtcccc

SEQ ID NO: 3467361 - DNA, 25 bp, Homo sapien
gtatcagagtatgttcaatgaccag

SEQ ID NO: 3467362 - DNA, 25 bp, Homo sapien
tgtgggaggcacaacagctgccgga

SEQ ID NO: 3467363 - DNA, 25 bp, Homo sapien
ccgacgaatgttgctgattgggata

SEQ ID NO: 3467364 - DNA, 25 bp, Homo sapien
aagacacctgtaggaactggtgcca

SEQ ID NO: 3467365 - DNA, 25 bp, Homo sapien
ctgtgaagacacctgtaggaactgg

SEQ ID NO: 3467366 - DNA, 25 bp, Homo sapien
gattgcattaatcgctgtgcaataa

SEQ ID NO: 3467367 - DNA, 25 bp, Homo sapien
tctcccatatttacatcgatagaaa

SEQ ID NO: 3467368 - DNA, 25 bp, Homo sapien
ttacatcgatagaaaggtaataatg

SEQ ID NO: 3467369 - DNA, 25 bp, Homo sapien
tttgattgcattaatcgctgtgcaa

SEQ ID NO: 3467370 - DNA, 25 bp, Homo sapien
ttatgatgaagtcattgacagaaat

SEQ ID NO: 3467371 - DNA, 25 bp, Homo sapien
tttaaacatgccaaagctgaagctt

SEQ ID NO: 3467372 - DNA, 25 bp, Homo sapien
ttgcttcgggaacttttaaacatgc

SEQ ID NO: 3467373 - DNA, 25 bp, Homo sapien
aagctgaagcttttatgatgaagtc

SEQ ID NO: 3467374 - DNA, 25 bp, Homo sapien
ccttggattttgagtggacgtacat

SEQ ID NO: 3467375 - DNA, 25 bp, Homo sapien
tggattttgagtggacgtacattgg

SEQ ID NO: 3467376 - DNA, 25 bp, Homo sapien
gaactccttggattttgagtggacg

SEQ ID NO: 3467377 - DNA, 25 bp, Homo sapien
caatcagaactccttggattttgag

SEQ ID NO: 3467378 - DNA, 25 bp, Homo sapien
tgaccgacacgtgaatgcagctgaa

SEQ ID NO: 3467379 - DNA, 25 bp, Homo sapien
tctgccttgaccgacacgtgaatgc

SEQ ID NO: 3467380 - DNA, 25 bp, Homo sapien
tgccgtctgccttgaccgacacgtg

SEQ ID NO: 3467381 - DNA, 25 bp, Homo sapien
atcgtctaacatcccctgccgtctg

SEQ ID NO: 3467382 - DNA, 25 bp, Homo sapien
ctccttttatatgtgcattaaacac

SEQ ID NO: 3467383 - DNA, 25 bp, Homo sapien
ggctgtagtttaccctctcttgctt

SEQ ID NO: 3467384 - DNA, 25 bp, Homo sapien
tgtggctgtagtttaccctctcttg

SEQ ID NO: 3467385 - DNA, 25 bp, Homo sapien
tcatgtggctgtagtttaccctctc

SEQ ID NO: 3467386 - DNA, 25 bp, Homo sapien
atcagaaaacttgacaaatgttctg

SEQ ID NO: 3467387 - DNA, 25 bp, Homo sapien
aaattatagtttgtcaacataaatc

SEQ ID NO: 3467388 - DNA, 25 bp, Homo sapien
taaatcagaaaacttgacaaatgtt

SEQ ID NO: 3467389 - DNA, 25 bp, Homo sapien
aatcagaaaacttgacaaatgttct

SEQ ID NO: 3467390 - DNA, 25 bp, Homo sapien
tctgcagggaccagtttatcctctg

SEQ ID NO: 3467391 - DNA, 25 bp, Homo sapien
ccaattgccaaaatacatgcttgag

SEQ ID NO: 3467392 - DNA, 25 bp, Homo sapien
catgcttgaggtgggttaataatag

SEQ ID NO: 3467393 - DNA, 25 bp, Homo sapien
aattggagatcgtaaaagtgccacc

SEQ ID NO: 3467394 - DNA, 25 bp, Homo sapien
cgggcactacactggatccatgtga

SEQ ID NO: 3467395 - DNA, 25 bp, Homo sapien
gacttgagcattgtggatcacgata

SEQ ID NO: 3467396 - DNA, 25 bp, Homo sapien
ttgaatttgctgcacaccgggcact

SEQ ID NO: 3467397 - DNA, 25 bp, Homo sapien
tccagtaagcacaacttgaatttgc

SEQ ID NO: 3467398 - DNA, 25 bp, Homo sapien
tcacaactgagtgtaacagacatca

SEQ ID NO: 3467399 - DNA, 25 bp, Homo sapien
cactgggctccaactgctccatcca

SEQ ID NO: 3467400 - DNA, 25 bp, Homo sapien
caccacccggtgatcacaactgagt

SEQ ID NO: 3467401 - DNA, 25 bp, Homo sapien
ttacaacaacatagtgataggtttt

SEQ ID NO: 3467402 - DNA, 25 bp, Homo sapien
tgtgacctgggagagtttagaaatt

SEQ ID NO: 3467403 - DNA, 25 bp, Homo sapien
cctgggagagtttagaaattcttga

SEQ ID NO: 3467404 - DNA, 25 bp, Homo sapien
gaatgaatcagtgtgacctgggaga

SEQ ID NO: 3467405 - DNA, 25 bp, Homo sapien
gagagtttagaaattcttgagttag

SEQ ID NO: 3467406 - DNA, 25 bp, Homo sapien
gacgatgctggagtagaaggacaca

SEQ ID NO: 3467407 - DNA, 25 bp, Homo sapien
gctaggcaaggccacatacatgtcc

SEQ ID NO: 3467408 - DNA, 25 bp, Homo sapien
cacaatatttgggtgtaatcggcat

SEQ ID NO: 3467409 - DNA, 25 bp, Homo sapien
gaagtacttatcaccaaagggctag

SEQ ID NO: 3467410 - DNA, 25 bp, Homo sapien
tctgtgtggaatatatggagtgtca

SEQ ID NO: 3467411 - DNA, 25 bp, Homo sapien
tgatggtcccttgtgataagcttgt

SEQ ID NO: 3467412 - DNA, 25 bp, Homo sapien
gggaacaacagaaccacaagcatta

SEQ ID NO: 3467413 - DNA, 25 bp, Homo sapien
ggagtgtcacttgtgtaccatgtaa

SEQ ID NO: 3467414 - DNA, 25 bp, Homo sapien
gtaagagactgaatcgatttagatt

SEQ ID NO: 3467415 - DNA, 25 bp, Homo sapien
ttctttcagttctggtaagagactg

SEQ ID NO: 3467416 - DNA, 25 bp, Homo sapien
tctttcagttctggtaagagactga

SEQ ID NO: 3467417 - DNA, 25 bp, Homo sapien
gaatcgatttagattatagctcaga

SEQ ID NO: 3467418 - DNA, 25 bp, Homo sapien
tttcaggccggaagtcgtgctcctg

SEQ ID NO: 3467419 - DNA, 25 bp, Homo sapien
ccagagactcccacaagggagggtt

SEQ ID NO: 3467420 - DNA, 25 bp, Homo sapien
ctgagaaatcgtcccaccaacaggc

SEQ ID NO: 3467421 - DNA, 25 bp, Homo sapien
gacactccagaggttgacgggtgca

SEQ ID NO: 3467422 - DNA, 25 bp, Homo sapien
cggttgggccccagaaagtatctag

SEQ ID NO: 3467423 - DNA, 25 bp, Homo sapien
gcggaattcggacagcccggttgac

SEQ ID NO: 3467424 - DNA, 25 bp, Homo sapien
aggcagatctctctcccggactgag

SEQ ID NO: 3467425 - DNA, 25 bp, Homo sapien
gagtccttcgtgaaaacgcagcctt

SEQ ID NO: 3467426 - DNA, 25 bp, Homo sapien
gatcctgaggaaatcaggcatcttg

SEQ ID NO: 3467427 - DNA, 25 bp, Homo sapien
cttgatcctgaggaaatcaggcatc

SEQ ID NO: 3467428 - DNA, 25 bp, Homo sapien
cccttgatcctgaggaaatcaggca

SEQ ID NO: 3467429 - DNA, 25 bp, Homo sapien
tgatcctgaggaaatcaggcatctt

SEQ ID NO: 3467430 - DNA, 25 bp, Homo sapien
tgccggatgacattcctcaggagga

SEQ ID NO: 3467431 - DNA, 25 bp, Homo sapien
tgagcatctgtgtgccggatgacat

SEQ ID NO: 3467432 - DNA, 25 bp, Homo sapien
tgacattcctcaggaggaccttccc

SEQ ID NO: 3467433 - DNA, 25 bp, Homo sapien
gtgagcatctgtgtgccggatgaca

SEQ ID NO: 3467434 - DNA, 25 bp, Homo sapien
agcgttgaggagtaactaggttgta

SEQ ID NO: 3467435 - DNA, 25 bp, Homo sapien
agtaagcgttgaggagtaactaggt

SEQ ID NO: 3467436 - DNA, 25 bp, Homo sapien
tcagtaagcgttgaggagtaactag

SEQ ID NO: 3467437 - DNA, 25 bp, Homo sapien
taagcgttgaggagtaactaggttg

SEQ ID NO: 3467438 - DNA, 25 bp, Homo sapien
cccggtaagcatcttccatctgttt

SEQ ID NO: 3467439 - DNA, 25 bp, Homo sapien
ttggtcccccggtaagcatcttcca

SEQ ID NO: 3467440 - DNA, 25 bp, Homo sapien
ttgaactgctgggtagcattttcct

SEQ ID NO: 3467441 - DNA, 25 bp, Homo sapien
actgctgggtagcattttccttttg

SEQ ID NO: 3467442 - DNA, 25 bp, Homo sapien
atagagaggtcccaataacagtggg

SEQ ID NO: 3467443 - DNA, 25 bp, Homo sapien
gaacaaggtctaacccatgggaata

SEQ ID NO: 3467444 - DNA, 25 bp, Homo sapien
tcccaataacagtgggaacaaggtc

SEQ ID NO: 3467445 - DNA, 25 bp, Homo sapien
acagtgggaacaaggtctaacccat

SEQ ID NO: 3467446 - DNA, 25 bp, Homo sapien
ctttggcctccaatagtatctttga

SEQ ID NO: 3467447 - DNA, 25 bp, Homo sapien
ttgcttcataatcatagaacttttt

SEQ ID NO: 3467448 - DNA, 25 bp, Homo sapien
atcaaaaccatcactgcgcatccgg

SEQ ID NO: 3467449 - DNA, 25 bp, Homo sapien
ccaggatttagccttaagaaaatca

SEQ ID NO: 3467450 - DNA, 25 bp, Homo sapien
caggccaaatattaatgctcacagg

SEQ ID NO: 3467451 - DNA, 25 bp, Homo sapien
ggaattgcctaccacataaatggaa

SEQ ID NO: 3467452 - DNA, 25 bp, Homo sapien
cattcaaagtgtagtgcctccagcc

SEQ ID NO: 3467453 - DNA, 25 bp, Homo sapien
gataagtacacgttctcaggccaaa

SEQ ID NO: 3467454 - DNA, 25 bp, Homo sapien
tacactatcacttcagacatacaag

SEQ ID NO: 3467455 - DNA, 25 bp, Homo sapien
tgtccatttgtaagagaacttgcca

SEQ ID NO: 3467456 - DNA, 25 bp, Homo sapien
gactttggagtacatgcatacacaa

SEQ ID NO: 3467457 - DNA, 25 bp, Homo sapien
cactctgctctttagctatgaagca

SEQ ID NO: 3467458 - DNA, 25 bp, Homo sapien
ataactctttataaccactgtgacc

SEQ ID NO: 3467459 - DNA, 25 bp, Homo sapien
tgggaaaacagggatcacctcctaa

SEQ ID NO: 3467460 - DNA, 25 bp, Homo sapien
tggcaagtatattcttcgtaaaagt

SEQ ID NO: 3467461 - DNA, 25 bp, Homo sapien
gccaaacatcaaccagagaatggga

SEQ ID NO: 3467462 - DNA, 25 bp, Homo sapien
tctaagctgccatactgagttactg

SEQ ID NO: 3467463 - DNA, 25 bp, Homo sapien
tcccgttggtaatatcttgctgatc

SEQ ID NO: 3467464 - DNA, 25 bp, Homo sapien
ctacagaggtatgggcttttttctc

SEQ ID NO: 3467465 - DNA, 25 bp, Homo sapien
gagaactcactcgaggaatctgctg

SEQ ID NO: 3467466 - DNA, 25 bp, Homo sapien
gacttcttgtgtttgcgggattcat

SEQ ID NO: 3467467 - DNA, 25 bp, Homo sapien
aagtatagctataggccccatccag

SEQ ID NO: 3467468 - DNA, 25 bp, Homo sapien
caatattccgattggtgtacccagg

SEQ ID NO: 3467469 - DNA, 25 bp, Homo sapien
catacagatggcacaagacagctct

SEQ ID NO: 3467470 - DNA, 25 bp, Homo sapien
tatagaaggatcaaagcaccaaggc

SEQ ID NO: 3467471 - DNA, 25 bp, Homo sapien
cagcccattaagtgacaaccaggaa

SEQ ID NO: 3467472 - DNA, 25 bp, Homo sapien
gaaatctgtcccgtaaagagaacaa

SEQ ID NO: 3467473 - DNA, 25 bp, Homo sapien
tgggcctcctcataaccaatgagtg

SEQ ID NO: 3467474 - DNA, 25 bp, Homo sapien
aaaaatgcacttgcgttctgccagc

SEQ ID NO: 3467475 - DNA, 25 bp, Homo sapien
taaatatcccaaaaggtagcacctg

SEQ ID NO: 3467476 - DNA, 25 bp, Homo sapien
ggtcaggacccaaatagagccaatt

SEQ ID NO: 3467477 - DNA, 25 bp, Homo sapien
tcaggtactttcagggcacagaaac

SEQ ID NO: 3467478 - DNA, 25 bp, Homo sapien
tcatagttaagggatagggcacctc

SEQ ID NO: 3467479 - DNA, 25 bp, Homo sapien
tggaagaaccatcgaagcctaaggc

SEQ ID NO: 3467480 - DNA, 25 bp, Homo sapien
ctctgattggcaggaacactagaaa

SEQ ID NO: 3467481 - DNA, 25 bp, Homo sapien
taaatgttccatggccagtagtgca

SEQ ID NO: 3467482 - DNA, 25 bp, Homo sapien
tccaggttgtatgacatcagttact

SEQ ID NO: 3467483 - DNA, 25 bp, Homo sapien
ctaagcagatttaagggtcagtggg

SEQ ID NO: 3467484 - DNA, 25 bp, Homo sapien
gacttgttactaagcagatttaagg

SEQ ID NO: 3467485 - DNA, 25 bp, Homo sapien
gcaaaggacttgttactaagcagat

SEQ ID NO: 3467486 - DNA, 25 bp, Homo sapien
ttgttactaagcagatttaagggtc

SEQ ID NO: 3467487 - DNA, 25 bp, Homo sapien
tcaaggtcatccaccaacccggaac

SEQ ID NO: 3467488 - DNA, 25 bp, Homo sapien
ccacttaggcgacaattcccaccca

SEQ ID NO: 3467489 - DNA, 25 bp, Homo sapien
gctcaaggtcatccaccaacccgga

SEQ ID NO: 3467490 - DNA, 25 bp, Homo sapien
ggaaccacttaggcgacaattccca

SEQ ID NO: 3467491 - DNA, 25 bp, Homo sapien
gcctcctagggcaccgcaaacggca

SEQ ID NO: 3467492 - DNA, 25 bp, Homo sapien
tagggcaccgcaaacggcactcagc

SEQ ID NO: 3467493 - DNA, 25 bp, Homo sapien
ctcggcctcctagggcaccgcaaac

SEQ ID NO: 3467494 - DNA, 25 bp, Homo sapien
cctagggcaccgcaaacggcactca

SEQ ID NO: 3467495 - DNA, 25 bp, Homo sapien
tgggataggtcggtcctgaagaaat

SEQ ID NO: 3467496 - DNA, 25 bp, Homo sapien
ttctgggataggtcggtcctgaaga

SEQ ID NO: 3467497 - DNA, 25 bp, Homo sapien
tctgggataggtcggtcctgaagaa

SEQ ID NO: 3467498 - DNA, 25 bp, Homo sapien
cattctgggataggtcggtcctgaa

SEQ ID NO: 3467499 - DNA, 25 bp, Homo sapien
aataagcagccggaagcagacccag

SEQ ID NO: 3467500 - DNA, 25 bp, Homo sapien
caaccctctcgctagtccagtggag

SEQ ID NO: 3467501 - DNA, 25 bp, Homo sapien
gctgcagccagggaatagtccatcg

SEQ ID NO: 3467502 - DNA, 25 bp, Homo sapien
gggaatagtccatcgcagagcaagg

SEQ ID NO: 3467503 - DNA, 25 bp, Homo sapien
ttcaaggaatctcaaggaaggcagt

SEQ ID NO: 3467504 - DNA, 25 bp, Homo sapien
gagtctacagacaaccctaagaatt

SEQ ID NO: 3467505 - DNA, 25 bp, Homo sapien
cagggtggttcaatcatgtagagtc

SEQ ID NO: 3467506 - DNA, 25 bp, Homo sapien
caagcaagagagataaggaatggca

SEQ ID NO: 3467507 - DNA, 25 bp, Homo sapien
tatgcaactggaatcttttatttgg

SEQ ID NO: 3467508 - DNA, 25 bp, Homo sapien
atatgcaactggaatcttttatttg

SEQ ID NO: 3467509 - DNA, 25 bp, Homo sapien
catatgcaactggaatcttttattt

SEQ ID NO: 3467510 - DNA, 25 bp, Homo sapien
gagatcgtgccgagccaagatcgca

SEQ ID NO: 3467511 - DNA, 25 bp, Homo sapien
agctgagatcgtgctgagccgagat

SEQ ID NO: 3467512 - DNA, 25 bp, Homo sapien
tgagatcgtgctgagccgagatcgt

SEQ ID NO: 3467513 - DNA, 25 bp, Homo sapien
gccgagatcgtgccgagccaagatc

SEQ ID NO: 3467514 - DNA, 25 bp, Homo sapien
ctttagagacaaagtcttactctgt

SEQ ID NO: 3467515 - DNA, 25 bp, Homo sapien
tggcctgatcatagctcactacagc

SEQ ID NO: 3467516 - DNA, 25 bp, Homo sapien
cagtggcctgatcatagctcactac

SEQ ID NO: 3467517 - DNA, 25 bp, Homo sapien
actctgttgcccacgctggagtgca

SEQ ID NO: 3467518 - DNA, 25 bp, Homo sapien
aacaatctgtcaagttcaaatgcaa

SEQ ID NO: 3467519 - DNA, 25 bp, Homo sapien
gactatacagataacttggctgcaa

SEQ ID NO: 3467520 - DNA, 25 bp, Homo sapien
gccttttgcgtgtgtatgtcagtaa

SEQ ID NO: 3467521 - DNA, 25 bp, Homo sapien
aatgcaatgtctccatttgccactc

SEQ ID NO: 3467522 - DNA, 25 bp, Homo sapien
caaaggttaaagctgaaagtgccaa

SEQ ID NO: 3467523 - DNA, 25 bp, Homo sapien
cagatgcccacatcgtgatagttga

SEQ ID NO: 3467524 - DNA, 25 bp, Homo sapien
aaagtgccaaaagccctgccttggc

SEQ ID NO: 3467525 - DNA, 25 bp, Homo sapien
aaggcatccccatgaacatagtcag

SEQ ID NO: 3467526 - DNA, 25 bp, Homo sapien
tttgatacatctacagggaaacttg

SEQ ID NO: 3467527 - DNA, 25 bp, Homo sapien
catatactaatcgtaataaagttgg

SEQ ID NO: 3467528 - DNA, 25 bp, Homo sapien
ttacagttggtagtattttgataca

SEQ ID NO: 3467529 - DNA, 25 bp, Homo sapien
tggaagtttgatcatatactaatcg

SEQ ID NO: 3467530 - DNA, 25 bp, Homo sapien
tacattttcacattagagattccca

SEQ ID NO: 3467531 - DNA, 25 bp, Homo sapien
aatacattttcacattagagattcc

SEQ ID NO: 3467532 - DNA, 25 bp, Homo sapien
ttattttcatagaatacattttcac

SEQ ID NO: 3467533 - DNA, 25 bp, Homo sapien
agaatacattttcacattagagatt

SEQ ID NO: 3467534 - DNA, 25 bp, Homo sapien
cacagcgcatgacgtgcttcaccat

SEQ ID NO: 3467535 - DNA, 25 bp, Homo sapien
gaaacttgcaggcaaatccttactg

SEQ ID NO: 3467536 - DNA, 25 bp, Homo sapien
caggcaaatccttactgcacccttt

SEQ ID NO: 3467537 - DNA, 25 bp, Homo sapien
tgcaccctttgttacatcacagcgc

SEQ ID NO: 3467538 - DNA, 25 bp, Homo sapien
taagttctctgttggattccagtgt

SEQ ID NO: 3467539 - DNA, 25 bp, Homo sapien
gctgagcagacttcctcgcttcctt

SEQ ID NO: 3467540 - DNA, 25 bp, Homo sapien
ggagcctctataggttcccagatga

SEQ ID NO: 3467541 - DNA, 25 bp, Homo sapien
ctttctccgcattaagggagcctct

SEQ ID NO: 3467542 - DNA, 25 bp, Homo sapien
catcttcttctgttacagagctcat

SEQ ID NO: 3467543 - DNA, 25 bp, Homo sapien
cttcatcttcttctgttacagagct

SEQ ID NO: 3467544 - DNA, 25 bp, Homo sapien
ttcatcttcttctgttacagagctc

SEQ ID NO: 3467545 - DNA, 25 bp, Homo sapien
tcatcttcttctgttacagagctca

SEQ ID NO: 3467546 - DNA, 25 bp, Homo sapien
ggagcagtggacttatgaaagcaaa

SEQ ID NO: 3467547 - DNA, 25 bp, Homo sapien
taagctatgacagatgaatgtaccc

SEQ ID NO: 3467548 - DNA, 25 bp, Homo sapien
caggagttgggtaatggccgacaca

SEQ ID NO: 3467549 - DNA, 25 bp, Homo sapien
taagtcacgattaacagctgggcgc

SEQ ID NO: 3467550 - DNA, 25 bp, Homo sapien
ccaactgagcaataggagtgggttt

SEQ ID NO: 3467551 - DNA, 25 bp, Homo sapien
agctattactacagtactgccagag

SEQ ID NO: 3467552 - DNA, 25 bp, Homo sapien
tacaattgatttagctcatcgttgc

SEQ ID NO: 3467553 - DNA, 25 bp, Homo sapien
tcatcgttgcaactgcccaactgag

SEQ ID NO: 3467554 - DNA, 25 bp, Homo sapien
tctcaatgcccaaagtcagccttga

SEQ ID NO: 3467555 - DNA, 25 bp, Homo sapien
tttgcaatgacgaaaaggaggtatg

SEQ ID NO: 3467556 - DNA, 25 bp, Homo sapien
tagagcttgtcctttcgagaggttc

SEQ ID NO: 3467557 - DNA, 25 bp, Homo sapien
ttactgtaagtgatttgctgcctct

SEQ ID NO: 3467558 - DNA, 25 bp, Homo sapien
tttgaggccaaaagatgaccccatc

SEQ ID NO: 3467559 - DNA, 25 bp, Homo sapien
tcaagcttgtttggcatttgaggcc

SEQ ID NO: 3467560 - DNA, 25 bp, Homo sapien
gcttgcaggctcctttgtgagtcta

SEQ ID NO: 3467561 - DNA, 25 bp, Homo sapien
tccaaaggcatgcagtttcatcccc

SEQ ID NO: 3467562 - DNA, 25 bp, Homo sapien
taagtagtgattcaccctgggctgc

SEQ ID NO: 3467563 - DNA, 25 bp, Homo sapien
gccatctgacaatccaccttgggtc

SEQ ID NO: 3467564 - DNA, 25 bp, Homo sapien
tgggctgcctgccaaagtcacaggc

SEQ ID NO: 3467565 - DNA, 25 bp, Homo sapien
ggttccatgaaaatatgagcctggt

SEQ ID NO: 3467566 - DNA, 25 bp, Homo sapien
gtagtgacgcatgccctcaatccca

SEQ ID NO: 3467567 - DNA, 25 bp, Homo sapien
catcatacgaaggatactttctagc

SEQ ID NO: 3467568 - DNA, 25 bp, Homo sapien
tcactgttcaaaacgaagactagct

SEQ ID NO: 3467569 - DNA, 25 bp, Homo sapien
gctattaaaatttcatgccgggcgc

SEQ ID NO: 3467570 - DNA, 25 bp, Homo sapien
ggtcaagagaagtcaggctcattcc

SEQ ID NO: 3467571 - DNA, 25 bp, Homo sapien
tgtacccatcatcccctagttgttg

SEQ ID NO: 3467572 - DNA, 25 bp, Homo sapien
caaagaaagtctaagtaggcagctc

SEQ ID NO: 3467573 - DNA, 25 bp, Homo sapien
cagaagtagtatggctggaagcaac

SEQ ID NO: 3467574 - DNA, 25 bp, Homo sapien
atggctaagaaattttgtttccact

SEQ ID NO: 3467575 - DNA, 25 bp, Homo sapien
tggctaagaaattttgtttccacta

SEQ ID NO: 3467576 - DNA, 25 bp, Homo sapien
ggaatactcgtgaaacaaaaatctc

SEQ ID NO: 3467577 - DNA, 25 bp, Homo sapien
caggccccacggaaaggcagctttt

SEQ ID NO: 3467578 - DNA, 25 bp, Homo sapien
tccacttggaatactcgtgaaacaa

SEQ ID NO: 3467579 - DNA, 25 bp, Homo sapien
agagccaggccccacggaaaggcag

SEQ ID NO: 3467580 - DNA, 25 bp, Homo sapien
cgaacgcgagggagtgaagaccccg

SEQ ID NO: 3467581 - DNA, 25 bp, Homo sapien
agcagcccctgcacgagtcacgtga

SEQ ID NO: 3467582 - DNA, 25 bp, Homo sapien
tcctcgtcagcgaacgcgagggagt

SEQ ID NO: 3467583 - DNA, 25 bp, Homo sapien
atggggaccttcctcgtcagcgaac

SEQ ID NO: 3467584 - DNA, 25 bp, Homo sapien
tccttgtgtcacagtccgtcacatt

SEQ ID NO: 3467585 - DNA, 25 bp, Homo sapien
acagtccgtcacattctcacaggcg

SEQ ID NO: 3467586 - DNA, 25 bp, Homo sapien
cacattctcacaggcgcccatccct

SEQ ID NO: 3467587 - DNA, 25 bp, Homo sapien
ccttccttgtgtcacagtccgtcac

SEQ ID NO: 3467588 - DNA, 25 bp, Homo sapien
gctggtcttcgtcgtgtgccaaaca

SEQ ID NO: 3467589 - DNA, 25 bp, Homo sapien
tagtgacctggctgttactaagcac

SEQ ID NO: 3467590 - DNA, 25 bp, Homo sapien
cactgtgcacctatgtcaaacgaaa

SEQ ID NO: 3467591 - DNA, 25 bp, Homo sapien
taagttcgttttcctgtcatggctc

SEQ ID NO: 3467592 - DNA, 25 bp, Homo sapien
tcaggctttacaaggtgatttgcca

SEQ ID NO: 3467593 - DNA, 25 bp, Homo sapien
gcaatttctattatcaggctttaca

SEQ ID NO: 3467594 - DNA, 25 bp, Homo sapien
ggcctcttgcaatttctattatcag

SEQ ID NO: 3467595 - DNA, 25 bp, Homo sapien
aattctcttggcctcttgcaatttc

SEQ ID NO: 3467596 - DNA, 25 bp, Homo sapien
aggacagctgtggactatctggcac

SEQ ID NO: 3467597 - DNA, 25 bp, Homo sapien
gctgtggactatctggcactggaga

SEQ ID NO: 3467598 - DNA, 25 bp, Homo sapien
taaaatagtccggaaatttcagaga

SEQ ID NO: 3467599 - DNA, 25 bp, Homo sapien
aagagaggacagctgtggactatct

SEQ ID NO: 3467600 - DNA, 25 bp, Homo sapien
aaagctttgcataggtagacaacat

SEQ ID NO: 3467601 - DNA, 25 bp, Homo sapien
cttaaaagctttgcataggtagaca

SEQ ID NO: 3467602 - DNA, 25 bp, Homo sapien
acattagattaatttccttgctcac

SEQ ID NO: 3467603 - DNA, 25 bp, Homo sapien
ttgcataggtagacaacattagatt

SEQ ID NO: 3467604 - DNA, 25 bp, Homo sapien
ttatctgtgtaatgtgtttgcaatc

SEQ ID NO: 3467605 - DNA, 25 bp, Homo sapien
tcaatgtaagatgcatctactgctg

SEQ ID NO: 3467606 - DNA, 25 bp, Homo sapien
aagttttcaatagcattggcttctt

SEQ ID NO: 3467607 - DNA, 25 bp, Homo sapien
tcactgtaaacctctgtcgcaggaa

SEQ ID NO: 3467608 - DNA, 25 bp, Homo sapien
gccgagagcttttattagtcataca

SEQ ID NO: 3467609 - DNA, 25 bp, Homo sapien
atggccagcttaggacattaacatg

SEQ ID NO: 3467610 - DNA, 25 bp, Homo sapien
taacaactcgagagctttcaaagca

SEQ ID NO: 3467611 - DNA, 25 bp, Homo sapien
gacgtagttcatgttaatggccagc

SEQ ID NO: 3467612 - DNA, 25 bp, Homo sapien
ggaaatccactgcagtggcagaatg

SEQ ID NO: 3467613 - DNA, 25 bp, Homo sapien
gttttgagtactactaaacagtgaa

SEQ ID NO: 3467614 - DNA, 25 bp, Homo sapien
tttgagtactactaaacagtgaaca

SEQ ID NO: 3467615 - DNA, 25 bp, Homo sapien
cagttttgagtactactaaacagtg

SEQ ID NO: 3467616 - DNA, 25 bp, Homo sapien
caattacattagaacgtgtggcagt

SEQ ID NO: 3467617 - DNA, 25 bp, Homo sapien
ttttaaggcagtccccgcaaaatgc

SEQ ID NO: 3467618 - DNA, 25 bp, Homo sapien
aagaataccaagtccctgaatcctg

SEQ ID NO: 3467619 - DNA, 25 bp, Homo sapien
caggactctgcggaattgctatctc

SEQ ID NO: 3467620 - DNA, 25 bp, Homo sapien
tgagttagtttatgtaaagctttta

SEQ ID NO: 3467621 - DNA, 25 bp, Homo sapien
taattcatattacttctaaggctat

SEQ ID NO: 3467622 - DNA, 25 bp, Homo sapien
tggctccagactggttggtttcaaa

SEQ ID NO: 3467623 - DNA, 25 bp, Homo sapien
aaatatgccctctcctaaataagaa

SEQ ID NO: 3467624 - DNA, 25 bp, Homo sapien
ccgacactgcccaaagacggctttt

SEQ ID NO: 3467625 - DNA, 25 bp, Homo sapien
aacacatggcagaccccgacactgc

SEQ ID NO: 3467626 - DNA, 25 bp, Homo sapien
gcttttttctgaggagtatttccca

SEQ ID NO: 3467627 - DNA, 25 bp, Homo sapien
tggtcagcagcggtgcaacacatgg

SEQ ID NO: 3467628 - DNA, 25 bp, Homo sapien
ggaaaatgtccccagactcgagcag

SEQ ID NO: 3467629 - DNA, 25 bp, Homo sapien
tgtccccagactcgagcagagatgc

SEQ ID NO: 3467630 - DNA, 25 bp, Homo sapien
ccagactcgagcagagatgccccgt

SEQ ID NO: 3467631 - DNA, 25 bp, Homo sapien
ttaggaaaatgtccccagactcgag

SEQ ID NO: 3467632 - DNA, 25 bp, Homo sapien
ccaggtccaattcgaagtagagagc

SEQ ID NO: 3467633 - DNA, 25 bp, Homo sapien
ggtccaattcgaagtagagagccat

SEQ ID NO: 3467634 - DNA, 25 bp, Homo sapien
tcccaggtccaattcgaagtagaga

SEQ ID NO: 3467635 - DNA, 25 bp, Homo sapien
ttcccaggtccaattcgaagtagag

SEQ ID NO: 3467636 - DNA, 25 bp, Homo sapien
tgagtactaagacaaatccatggga

SEQ ID NO: 3467637 - DNA, 25 bp, Homo sapien
tttggtacaaaccacagagggcttc

SEQ ID NO: 3467638 - DNA, 25 bp, Homo sapien
ggagacattgcccttccttcaggaa

SEQ ID NO: 3467639 - DNA, 25 bp, Homo sapien
taatgcatattccacagaaccagcc

SEQ ID NO: 3467640 - DNA, 25 bp, Homo sapien
acccacttggattcgcctcccttcg

SEQ ID NO: 3467641 - DNA, 25 bp, Homo sapien
cctccacccacttggattcgcctcc

SEQ ID NO: 3467642 - DNA, 25 bp, Homo sapien
tccacccacttggattcgcctccct

SEQ ID NO: 3467643 - DNA, 25 bp, Homo sapien
acttggattcgcctcccttcgccac

SEQ ID NO: 3467644 - DNA, 25 bp, Homo sapien
cgttcaggaacagggtcatccgcct

SEQ ID NO: 3467645 - DNA, 25 bp, Homo sapien
gccgttcaggaacagggtcatccgc

SEQ ID NO: 3467646 - DNA, 25 bp, Homo sapien
ctgccgttcaggaacagggtcatcc

SEQ ID NO: 3467647 - DNA, 25 bp, Homo sapien
tcaggaacagggtcatccgcctcat

SEQ ID NO: 3467648 - DNA, 25 bp, Homo sapien
catatacaacaactacctttccgtt

SEQ ID NO: 3467649 - DNA, 25 bp, Homo sapien
aagttccatatacaacaactacctt

SEQ ID NO: 3467650 - DNA, 25 bp, Homo sapien
gttccatatacaacaactacctttc

SEQ ID NO: 3467651 - DNA, 25 bp, Homo sapien
tccatatacaacaactacctttccg

SEQ ID NO: 3467652 - DNA, 25 bp, Homo sapien
tcaatcagtccacctttcccattat

SEQ ID NO: 3467653 - DNA, 25 bp, Homo sapien
aatcagtccacctttcccattatac

SEQ ID NO: 3467654 - DNA, 25 bp, Homo sapien
ttcaaagcaatatcatcaatcagtc

SEQ ID NO: 3467655 - DNA, 25 bp, Homo sapien
ctgttcaaagcaatatcatcaatca

SEQ ID NO: 3467656 - DNA, 25 bp, Homo sapien
tcactaaagtgctccgtgtagttgt

SEQ ID NO: 3467657 - DNA, 25 bp, Homo sapien
tccaacatttaatgtcagccactct

SEQ ID NO: 3467658 - DNA, 25 bp, Homo sapien
gtaccgccctccaacatttaatgtc

SEQ ID NO: 3467659 - DNA, 25 bp, Homo sapien
taaagtgctccgtgtagttgtaaag

SEQ ID NO: 3467660 - DNA, 25 bp, Homo sapien
gagctcgttcaagatttgaacagca

SEQ ID NO: 3467661 - DNA, 25 bp, Homo sapien
tgcaagattacagcagcttaaactg

SEQ ID NO: 3467662 - DNA, 25 bp, Homo sapien
gcaagattacagcagcttaaactgg

SEQ ID NO: 3467663 - DNA, 25 bp, Homo sapien
ctgatccagagagatgagctcgttc

SEQ ID NO: 3467664 - DNA, 25 bp, Homo sapien
accagaaggatcctcaaaattacac

SEQ ID NO: 3467665 - DNA, 25 bp, Homo sapien
agaccagaaggatcctcaaaattac

SEQ ID NO: 3467666 - DNA, 25 bp, Homo sapien
ctttaagaccagaaggatcctcaaa

SEQ ID NO: 3467667 - DNA, 25 bp, Homo sapien
taagaccagaaggatcctcaaaatt

SEQ ID NO: 3467668 - DNA, 25 bp, Homo sapien
tctacacctttcagattaacacctt

SEQ ID NO: 3467669 - DNA, 25 bp, Homo sapien
ttttaatgtagccaccctcaggtta

SEQ ID NO: 3467670 - DNA, 25 bp, Homo sapien
atctaaatcagttcctgccagagtc

SEQ ID NO: 3467671 - DNA, 25 bp, Homo sapien
ccagagtcgctcctctgaggttaca

SEQ ID NO: 3467672 - DNA, 25 bp, Homo sapien
tttgtgacatgtatagtggtgttag

SEQ ID NO: 3467673 - DNA, 25 bp, Homo sapien
tatagctcccttcatgttggaccct

SEQ ID NO: 3467674 - DNA, 25 bp, Homo sapien
ctcttcaaatatagctcccttcatg

SEQ ID NO: 3467675 - DNA, 25 bp, Homo sapien
tgacatgtatagtggtgttagcatc

SEQ ID NO: 3467676 - DNA, 25 bp, Homo sapien
gctcaaacctggacatgaaacgttc

SEQ ID NO: 3467677 - DNA, 25 bp, Homo sapien
aacttgctcctgtatgtcactgtgc

SEQ ID NO: 3467678 - DNA, 25 bp, Homo sapien
gcactgttggccttatatgtatcac

SEQ ID NO: 3467679 - DNA, 25 bp, Homo sapien
aaaacattcttgcatggatccggga

SEQ ID NO: 3467680 - DNA, 25 bp, Homo sapien
acagcttactgtagacgacgctaag

SEQ ID NO: 3467681 - DNA, 25 bp, Homo sapien
gatggttatatatcgtaatagttta

SEQ ID NO: 3467682 - DNA, 25 bp, Homo sapien
caagatttatgtttgtatagatggt

SEQ ID NO: 3467683 - DNA, 25 bp, Homo sapien
ccctagagttatttaagtaccacag

SEQ ID NO: 3467684 - DNA, 25 bp, Homo sapien
gtaatcacccttgtaccgcacatag

SEQ ID NO: 3467685 - DNA, 25 bp, Homo sapien
tccactttattcataaagttggtct

SEQ ID NO: 3467686 - DNA, 25 bp, Homo sapien
ctcagtgcagaggtagtaatcaccc

SEQ ID NO: 3467687 - DNA, 25 bp, Homo sapien
tccagagtttcaatgtccactttat

SEQ ID NO: 3467688 - DNA, 25 bp, Homo sapien
gataagaaaactgcaatgtaagccc

SEQ ID NO: 3467689 - DNA, 25 bp, Homo sapien
ccaactagccaaagtagatcagtac

SEQ ID NO: 3467690 - DNA, 25 bp, Homo sapien
tgtaagccctaatttcttgcctctg

SEQ ID NO: 3467691 - DNA, 25 bp, Homo sapien
ctaaccatagctaggaagaacaccc

SEQ ID NO: 3467692 - DNA, 25 bp, Homo sapien
caggtcataatgaggatgtgcagtt

SEQ ID NO: 3467693 - DNA, 25 bp, Homo sapien
atgaggatgtgcagttgctccattc

SEQ ID NO: 3467694 - DNA, 25 bp, Homo sapien
aaaggagttccccatattgtatgct

SEQ ID NO: 3467695 - DNA, 25 bp, Homo sapien
gttccccatattgtatgctgttcca

SEQ ID NO: 3467696 - DNA, 25 bp, Homo sapien
tatttctaaaaagacctttattgca

SEQ ID NO: 3467697 - DNA, 25 bp, Homo sapien
cacattaagttccagttcataaact

SEQ ID NO: 3467698 - DNA, 25 bp, Homo sapien
caattactagcaagcattttactgt

SEQ ID NO: 3467699 - DNA, 25 bp, Homo sapien
ccaaatgtctatcaagtagtcaagc

SEQ ID NO: 3467700 - DNA, 25 bp, Homo sapien
aagctccctgcagttgcctgcacat

SEQ ID NO: 3467701 - DNA, 25 bp, Homo sapien
tctaggcacttgtatacagaaatat

SEQ ID NO: 3467702 - DNA, 25 bp, Homo sapien
tatattctaggcacttgtatacaga

SEQ ID NO: 3467703 - DNA, 25 bp, Homo sapien
cagacaccattctgagtgttcttag

SEQ ID NO: 3467704 - DNA, 25 bp, Homo sapien
gagtgttcttagtactatattctag

SEQ ID NO: 3467705 - DNA, 25 bp, Homo sapien
gacactgggaggagaacgtcacaca

SEQ ID NO: 3467706 - DNA, 25 bp, Homo sapien
ctgggaggagaacgtcacacaccag

SEQ ID NO: 3467707 - DNA, 25 bp, Homo sapien
cactgggaggagaacgtcacacacc

SEQ ID NO: 3467708 - DNA, 25 bp, Homo sapien
tggacactgggaggagaacgtcaca

SEQ ID NO: 3467709 - DNA, 25 bp, Homo sapien
ctatcttacctgttttacatatatt

SEQ ID NO: 3467710 - DNA, 25 bp, Homo sapien
aagtcctatcttacctgttttacat

SEQ ID NO: 3467711 - DNA, 25 bp, Homo sapien
atgaaaagtcctatcttacctgttt

SEQ ID NO: 3467712 - DNA, 25 bp, Homo sapien
aatgaaaagtcctatcttacctgtt

SEQ ID NO: 3467713 - DNA, 25 bp, Homo sapien
ctggactccatggattgtctcccca

SEQ ID NO: 3467714 - DNA, 25 bp, Homo sapien
caccttctctggaggaacccgaata

SEQ ID NO: 3467715 - DNA, 25 bp, Homo sapien
caaagctatggtagtaagaaggttt

SEQ ID NO: 3467716 - DNA, 25 bp, Homo sapien
tctgagtaaaagctgaatcaaccta

SEQ ID NO: 3467717 - DNA, 25 bp, Homo sapien
tttcaagcagtcagctggctagggt

SEQ ID NO: 3467718 - DNA, 25 bp, Homo sapien
gcatcaaaatgcaaccttggtctca

SEQ ID NO: 3467719 - DNA, 25 bp, Homo sapien
tggtctcattatcaccatagcgtga

SEQ ID NO: 3467720 - DNA, 25 bp, Homo sapien
gaaatacatgtttactgtctcccag

SEQ ID NO: 3467721 - DNA, 25 bp, Homo sapien
gacacgttactgatgccctaaacaa

SEQ ID NO: 3467722 - DNA, 25 bp, Homo sapien
gggaactgcttagaatagcttgggt

SEQ ID NO: 3467723 - DNA, 25 bp, Homo sapien
aactagagttgtctgaaatgtgcca

SEQ ID NO: 3467724 - DNA, 25 bp, Homo sapien
acatgaaaccgcgtattacactggg

SEQ ID NO: 3467725 - DNA, 25 bp, Homo sapien
ttagaagtggcaattttccacaggt

SEQ ID NO: 3467726 - DNA, 25 bp, Homo sapien
gggttcccagcttatcccatctgaa

SEQ ID NO: 3467727 - DNA, 25 bp, Homo sapien
tgtccagtgcgtttttccaccacat

SEQ ID NO: 3467728 - DNA, 25 bp, Homo sapien
tatcttgacagcacaaatcaattat

SEQ ID NO: 3467729 - DNA, 25 bp, Homo sapien
acaaaaggtttgctgtagtatctcc

SEQ ID NO: 3467730 - DNA, 25 bp, Homo sapien
tcaattataacacagccctggtcct

SEQ ID NO: 3467731 - DNA, 25 bp, Homo sapien
gattctgtaactggtaaacttctag

SEQ ID NO: 3467732 - DNA, 25 bp, Homo sapien
ttttcaagtctggaaggctttactg

SEQ ID NO: 3467733 - DNA, 25 bp, Homo sapien
aatgcgaccaattgggatttacttc

SEQ ID NO: 3467734 - DNA, 25 bp, Homo sapien
tatacaatatcatccagaaagaagg

SEQ ID NO: 3467735 - DNA, 25 bp, Homo sapien
tcaggaatggaagggtagcttaaca

SEQ ID NO: 3467736 - DNA, 25 bp, Homo sapien
aagatttggctgctgaattatggac

SEQ ID NO: 3467737 - DNA, 25 bp, Homo sapien
cttcgagggaaagatttggctgctg

SEQ ID NO: 3467738 - DNA, 25 bp, Homo sapien
ggaaagatttggctgctgaattatg

SEQ ID NO: 3467739 - DNA, 25 bp, Homo sapien
cgagggaaagatttggctgctgaat

SEQ ID NO: 3467740 - DNA, 25 bp, Homo sapien
taggacaatggactcaggttgtctc

SEQ ID NO: 3467741 - DNA, 25 bp, Homo sapien
gtataggacaatggactcaggttgt

SEQ ID NO: 3467742 - DNA, 25 bp, Homo sapien
tataggacaatggactcaggttgtc

SEQ ID NO: 3467743 - DNA, 25 bp, Homo sapien
cctcaggggcattcaaactgacatt

SEQ ID NO: 3467744 - DNA, 25 bp, Homo sapien
tagtagatctgaggaaattcaatgc

SEQ ID NO: 3467745 - DNA, 25 bp, Homo sapien
tttttgccactgaatcgatcatagt

SEQ ID NO: 3467746 - DNA, 25 bp, Homo sapien
gaatcgatcatagtagatctgagga

SEQ ID NO: 3467747 - DNA, 25 bp, Homo sapien
ttttctaggtcctcctgatgtagat

SEQ ID NO: 3467748 - DNA, 25 bp, Homo sapien
ctaaatgccgaaagccacagccata

SEQ ID NO: 3467749 - DNA, 25 bp, Homo sapien
gaatcccccactaaatgccgaaagc

SEQ ID NO: 3467750 - DNA, 25 bp, Homo sapien
tcaaccttgatcagagaatccccca

SEQ ID NO: 3467751 - DNA, 25 bp, Homo sapien
ccttgatcagagaatcccccactaa

SEQ ID NO: 3467752 - DNA, 25 bp, Homo sapien
gcctactgagttgaatatgggagaa

SEQ ID NO: 3467753 - DNA, 25 bp, Homo sapien
cacaggctgtcaatagaatattcca

SEQ ID NO: 3467754 - DNA, 25 bp, Homo sapien
tcaatttggattccctagaaggaac

SEQ ID NO: 3467755 - DNA, 25 bp, Homo sapien
gagtctttgcagtcccagattccat

SEQ ID NO: 3467756 - DNA, 25 bp, Homo sapien
aaaggcaagtagtaagtagggagct

SEQ ID NO: 3467757 - DNA, 25 bp, Homo sapien
tagtaagtagggagctttctatggc

SEQ ID NO: 3467758 - DNA, 25 bp, Homo sapien
tatggcttttgtcactccaagcatg

SEQ ID NO: 3467759 - DNA, 25 bp, Homo sapien
gtcactccaagcatgaatttggctg

SEQ ID NO: 3467760 - DNA, 25 bp, Homo sapien
cattggttcctggtgctggaacaaa

SEQ ID NO: 3467761 - DNA, 25 bp, Homo sapien
aacaggttctgagggataaaagcca

SEQ ID NO: 3467762 - DNA, 25 bp, Homo sapien
gttgggagtgatcaccacagaaaga

SEQ ID NO: 3467763 - DNA, 25 bp, Homo sapien
ggttctgagggataaaagccatctt

SEQ ID NO: 3467764 - DNA, 25 bp, Homo sapien
tggaacccataaggcatctgcacag

SEQ ID NO: 3467765 - DNA, 25 bp, Homo sapien
tgctcggcccagctcttcaaagttc

SEQ ID NO: 3467766 - DNA, 25 bp, Homo sapien
gcacaggtacctctgctcggcccag

SEQ ID NO: 3467767 - DNA, 25 bp, Homo sapien
cttggcatccaaaactaggataaaa

SEQ ID NO: 3467768 - DNA, 25 bp, Homo sapien
ctccagtctttatgtccaagtgcac

SEQ ID NO: 3467769 - DNA, 25 bp, Homo sapien
tctccagtctttatgtccaagtgca

SEQ ID NO: 3467770 - DNA, 25 bp, Homo sapien
ttctccagtctttatgtccaagtgc

SEQ ID NO: 3467771 - DNA, 25 bp, Homo sapien
gtttggacttctaacgaacccatca

SEQ ID NO: 3467772 - DNA, 25 bp, Homo sapien
ggaacatagtattcaataggtagct

SEQ ID NO: 3467773 - DNA, 25 bp, Homo sapien
aatagggaacatagtattcaatagg

SEQ ID NO: 3467774 - DNA, 25 bp, Homo sapien
ttggacttctaacgaacccatcacc

SEQ ID NO: 3467775 - DNA, 25 bp, Homo sapien
aaaaccgaagcttgtatgcactcga

SEQ ID NO: 3467776 - DNA, 25 bp, Homo sapien
ccatggcgtgacttggcagtggcaa

SEQ ID NO: 3467777 - DNA, 25 bp, Homo sapien
ggtacggtgccctttatgctctgtc

SEQ ID NO: 3467778 - DNA, 25 bp, Homo sapien
gtgttaatggccatgacacctccag

SEQ ID NO: 3467779 - DNA, 25 bp, Homo sapien
tgagtgagggcagtcttccgcacct

SEQ ID NO: 3467780 - DNA, 25 bp, Homo sapien
ctaggccatgatgagtgagggcagt

SEQ ID NO: 3467781 - DNA, 25 bp, Homo sapien
ccatgatgagtgagggcagtcttcc

SEQ ID NO: 3467782 - DNA, 25 bp, Homo sapien
gatgagtgagggcagtcttccgcac

SEQ ID NO: 3467783 - DNA, 25 bp, Homo sapien
ataggctcattgcagttgggtgcag

SEQ ID NO: 3467784 - DNA, 25 bp, Homo sapien
ggcagacaaaagtgggcttggtgct

SEQ ID NO: 3467785 - DNA, 25 bp, Homo sapien
tgcagttgggtgcaggcagacaaaa

SEQ ID NO: 3467786 - DNA, 25 bp, Homo sapien
ggtgcaggcagacaaaagtgggctt

SEQ ID NO: 3467787 - DNA, 25 bp, Homo sapien
tttccctctcagttttacagaggcc

SEQ ID NO: 3467788 - DNA, 25 bp, Homo sapien
tccctctcagttttacagaggccta

SEQ ID NO: 3467789 - DNA, 25 bp, Homo sapien
tgcacaactgcagccaaccactttt

SEQ ID NO: 3467790 - DNA, 25 bp, Homo sapien
ctgcagccaaccacttttcgggggt

SEQ ID NO: 3467791 - DNA, 25 bp, Homo sapien
tcgatgacatccttgacttaagatt

SEQ ID NO: 3467792 - DNA, 25 bp, Homo sapien
gatatatccaataaatgaaatttaa

SEQ ID NO: 3467793 - DNA, 25 bp, Homo sapien
ctcttcaaaaggttgtatcaatact

SEQ ID NO: 3467794 - DNA, 25 bp, Homo sapien
ttaagaaacatgagtgccaaagttt

SEQ ID NO: 3467795 - DNA, 25 bp, Homo sapien
cttaggaccaatggtaacaggcaga

SEQ ID NO: 3467796 - DNA, 25 bp, Homo sapien
gggccttggtcatatgctcactcaa

SEQ ID NO: 3467797 - DNA, 25 bp, Homo sapien
cagaattcaggtatccttaggtcaa

SEQ ID NO: 3467798 - DNA, 25 bp, Homo sapien
tgcctagattataacatgccactga

SEQ ID NO: 3467799 - DNA, 25 bp, Homo sapien
tatggacttgccagaggtcatccag

SEQ ID NO: 3467800 - DNA, 25 bp, Homo sapien
ggccgcacatcccattgccccactt

SEQ ID NO: 3467801 - DNA, 25 bp, Homo sapien
tggagtggcctgcaccaagaagcag

SEQ ID NO: 3467802 - DNA, 25 bp, Homo sapien
gtcagggttcgtgtgctcctcctcc

SEQ ID NO: 3467803 - DNA, 25 bp, Homo sapien
caagaagcagggtcagggttcgtgt

SEQ ID NO: 3467804 - DNA, 25 bp, Homo sapien
gattgttgcacacgtattgagatga

SEQ ID NO: 3467805 - DNA, 25 bp, Homo sapien
catttctgttaagacctctgtggta

SEQ ID NO: 3467806 - DNA, 25 bp, Homo sapien
cttggctgcgttgtctcagaaggct

SEQ ID NO: 3467807 - DNA, 25 bp, Homo sapien
ggaaacttggactcaaaaactgaca

SEQ ID NO: 3467808 - DNA, 25 bp, Homo sapien
tatccacaagcatgtatggacccat

SEQ ID NO: 3467809 - DNA, 25 bp, Homo sapien
ttgagagcacaaataggaccacgtg

SEQ ID NO: 3467810 - DNA, 25 bp, Homo sapien
tgatgaaaagcaggacaagtcactg

SEQ ID NO: 3467811 - DNA, 25 bp, Homo sapien
tccaggtactggagaggacagctcc

SEQ ID NO: 3467812 - DNA, 25 bp, Homo sapien
aggtattcatgtgttatgttggttt

SEQ ID NO: 3467813 - DNA, 25 bp, Homo sapien
ggtattcatgtgttatgttggtttg

SEQ ID NO: 3467814 - DNA, 25 bp, Homo sapien
ttacataggtattcatgtgttatgt

SEQ ID NO: 3467815 - DNA, 25 bp, Homo sapien
ttgttacataggtattcatgtgtta

SEQ ID NO: 3467816 - DNA, 25 bp, Homo sapien
tgaggtcacgccacgtagttagggc

SEQ ID NO: 3467817 - DNA, 25 bp, Homo sapien
ccagggccacagtccgctttataga

SEQ ID NO: 3467818 - DNA, 25 bp, Homo sapien
tgactcaatcggatgaaccccaggg

SEQ ID NO: 3467819 - DNA, 25 bp, Homo sapien
taagggtgtctctcgctatctgaat

SEQ ID NO: 3467820 - DNA, 25 bp, Homo sapien
ctcccgccgcgcggccggtgcctcc

SEQ ID NO: 3467821 - DNA, 25 bp, Homo sapien
tcccgccgcgcggccggtgcctcct

SEQ ID NO: 3467822 - DNA, 25 bp, Homo sapien
gctcgcgctgaaggagatgcggcgg

SEQ ID NO: 3467823 - DNA, 25 bp, Homo sapien
agcgacggccaccaccttccgtgct

SEQ ID NO: 3467824 - DNA, 25 bp, Homo sapien
ctgtacaatcggtggctcgcgctga

SEQ ID NO: 3467825 - DNA, 25 bp, Homo sapien
gtgcctggcagcgacggccaccacc

SEQ ID NO: 3467826 - DNA, 25 bp, Homo sapien
taacataggcgagtttaacactgct

SEQ ID NO: 3467827 - DNA, 25 bp, Homo sapien
tacgccgcgccaggtactgtgtaac

SEQ ID NO: 3467828 - DNA, 25 bp, Homo sapien
gatatggtggccaatgctcctggca

SEQ ID NO: 3467829 - DNA, 25 bp, Homo sapien
tcttcgagtcgcagaaccgggtgtg

SEQ ID NO: 3467830 - DNA, 25 bp, Homo sapien
gcaactgatctgctcatgggccttc

SEQ ID NO: 3467831 - DNA, 25 bp, Homo sapien
ccccttgttccacagcaactgatct

SEQ ID NO: 3467832 - DNA, 25 bp, Homo sapien
cttgttccacagcaactgatctgct

SEQ ID NO: 3467833 - DNA, 25 bp, Homo sapien
acttcaacccccttgttccacagca

SEQ ID NO: 3467834 - DNA, 25 bp, Homo sapien
gcccatggccatttggattgttgca

SEQ ID NO: 3467835 - DNA, 25 bp, Homo sapien
gccatttggattgttgcatttccca

SEQ ID NO: 3467836 - DNA, 25 bp, Homo sapien
tgtgcccatggccatttggattgtt

SEQ ID NO: 3467837 - DNA, 25 bp, Homo sapien
tataattgtgcccatggccatttgg

SEQ ID NO: 3467838 - DNA, 25 bp, Homo sapien
tactttcttcgaacactgctggcaa

SEQ ID NO: 3467839 - DNA, 25 bp, Homo sapien
gccttggccatacctaatcagaaag

SEQ ID NO: 3467840 - DNA, 25 bp, Homo sapien
aaggctcaaagcattcacactgtgt

SEQ ID NO: 3467841 - DNA, 25 bp, Homo sapien
ggctgtacctcaaagaatcaagtct

SEQ ID NO: 3467842 - DNA, 25 bp, Homo sapien
tagtgacgggagatcacaccattcc

SEQ ID NO: 3467843 - DNA, 25 bp, Homo sapien
taccatagattaaggaagaggctgt

SEQ ID NO: 3467844 - DNA, 25 bp, Homo sapien
ggctgtagctaaaccagtaatccta

SEQ ID NO: 3467845 - DNA, 25 bp, Homo sapien
tacactgagactgagataccataga

SEQ ID NO: 3467846 - DNA, 25 bp, Homo sapien
tcaggtgtccagctacacagcaagc

SEQ ID NO: 3467847 - DNA, 25 bp, Homo sapien
gcaagctggtccaatactgagcagt

SEQ ID NO: 3467848 - DNA, 25 bp, Homo sapien
gacacaatcgagacaaaggagctta

SEQ ID NO: 3467849 - DNA, 25 bp, Homo sapien
tagcaaccaaagcaagacacaatcg

SEQ ID NO: 3467850 - DNA, 25 bp, Homo sapien
ccagcaatctgcaaaaaccacacaa

SEQ ID NO: 3467851 - DNA, 25 bp, Homo sapien
agcaatctgcaaaaaccacacaaat

SEQ ID NO: 3467852 - DNA, 25 bp, Homo sapien
cccagcaatctgcaaaaaccacaca

SEQ ID NO: 3467853 - DNA, 25 bp, Homo sapien
cacatatacaagggccaacaatgaa

SEQ ID NO: 3467854 - DNA, 25 bp, Homo sapien
acatatacaagggccaacaatgaag

SEQ ID NO: 3467855 - DNA, 25 bp, Homo sapien
cacacatatacaagggccaacaatg

SEQ ID NO: 3467856 - DNA, 25 bp, Homo sapien
acacatatacaagggccaacaatga

SEQ ID NO: 3467857 - DNA, 25 bp, Homo sapien
tattaaaggcagtacaatgtgcaga

SEQ ID NO: 3467858 - DNA, 25 bp, Homo sapien
tcagcatggaagcaccatgtacttc

SEQ ID NO: 3467859 - DNA, 25 bp, Homo sapien
tgcacatttgccttcatcccagaga

SEQ ID NO: 3467860 - DNA, 25 bp, Homo sapien
tctccatattaaacggctggcaaat

SEQ ID NO: 3467861 - DNA, 25 bp, Homo sapien
taaccattcccgtagcagggtcaat

SEQ ID NO: 3467862 - DNA, 25 bp, Homo sapien
gccagattcataaccattcccgtag

SEQ ID NO: 3467863 - DNA, 25 bp, Homo sapien
gagatcagccagattcataaccatt

SEQ ID NO: 3467864 - DNA, 25 bp, Homo sapien
gattcataaccattcccgtagcagg

SEQ ID NO: 3467865 - DNA, 25 bp, Homo sapien
agattcttatgatcaaggggctgca

SEQ ID NO: 3467866 - DNA, 25 bp, Homo sapien
tccatatccagattcttatgatcaa

SEQ ID NO: 3467867 - DNA, 25 bp, Homo sapien
atatccagattcttatgatcaaggg

SEQ ID NO: 3467868 - DNA, 25 bp, Homo sapien
cagattcttatgatcaaggggctgc

SEQ ID NO: 3467869 - DNA, 25 bp, Homo sapien
cttgttttacaatccacataaggca

SEQ ID NO: 3467870 - DNA, 25 bp, Homo sapien
taaggcaagatacagtgccacccac

SEQ ID NO: 3467871 - DNA, 25 bp, Homo sapien
tcagaaatcacacaacaatcaaagt

SEQ ID NO: 3467872 - DNA, 25 bp, Homo sapien
gaaattctagtttcgaaagatttca

SEQ ID NO: 3467873 - DNA, 25 bp, Homo sapien
ccacaatattattgtcagtttcgta

SEQ ID NO: 3467874 - DNA, 25 bp, Homo sapien
tattgtcagtttcgtatacttttac

SEQ ID NO: 3467875 - DNA, 25 bp, Homo sapien
gaggttgtcccagatataaacagct

SEQ ID NO: 3467876 - DNA, 25 bp, Homo sapien
tggaggttgtcccagatataaacag

SEQ ID NO: 3467877 - DNA, 25 bp, Homo sapien
caatcacgtgttgacctcttaatat

SEQ ID NO: 3467878 - DNA, 25 bp, Homo sapien
aatgtgtacgtacaacaatcacgtg

SEQ ID NO: 3467879 - DNA, 25 bp, Homo sapien
gctttgtgcaatgctaaccccaata

SEQ ID NO: 3467880 - DNA, 25 bp, Homo sapien
ggcactccagagcacaatgtgtacg

SEQ ID NO: 3467881 - DNA, 25 bp, Homo sapien
taagattcacctactcgaagtcaca

SEQ ID NO: 3467882 - DNA, 25 bp, Homo sapien
gattcacctactcgaagtcacataa

SEQ ID NO: 3467883 - DNA, 25 bp, Homo sapien
ttctttaagattcacctactcgaag

SEQ ID NO: 3467884 - DNA, 25 bp, Homo sapien
cctactcgaagtcacataagcattt

SEQ ID NO: 3467885 - DNA, 25 bp, Homo sapien
tacgcagtctgaatcagtggtggga

SEQ ID NO: 3467886 - DNA, 25 bp, Homo sapien
gacccatggccatatctgcctgctg

SEQ ID NO: 3467887 - DNA, 25 bp, Homo sapien
ggtgggaacaaggtttcctcatgaa

SEQ ID NO: 3467888 - DNA, 25 bp, Homo sapien
gggcattcctgttatagaccaggga

SEQ ID NO: 3467889 - DNA, 25 bp, Homo sapien
gatcggctgcttcaagatgcttcag

SEQ ID NO: 3467890 - DNA, 25 bp, Homo sapien
tggtttggaactcaggagaaaagag

SEQ ID NO: 3467891 - DNA, 25 bp, Homo sapien
gagggaacgaatactgaatgggtaa

SEQ ID NO: 3467892 - DNA, 25 bp, Homo sapien
gctgtttatgagaagtgtatggcca

SEQ ID NO: 3467893 - DNA, 25 bp, Homo sapien
tacaaatgatcgttcggctctggtc

SEQ ID NO: 3467894 - DNA, 25 bp, Homo sapien
tccagaagtgtcttgcagcagaacc

SEQ ID NO: 3467895 - DNA, 25 bp, Homo sapien
cacgtgtacgcaattgatcaaagca

SEQ ID NO: 3467896 - DNA, 25 bp, Homo sapien
caactgatgagctacttgaaagcgg

SEQ ID NO: 3467897 - DNA, 25 bp, Homo sapien
tgaatagctggaactacagatgcat

SEQ ID NO: 3467898 - DNA, 25 bp, Homo sapien
ccaggctcaatcaatacccccacct

SEQ ID NO: 3467899 - DNA, 25 bp, Homo sapien
cagcctcctgaatagctggaactac

SEQ ID NO: 3467900 - DNA, 25 bp, Homo sapien
atctcccaggctcaatcaatacccc

SEQ ID NO: 3467901 - DNA, 25 bp, Homo sapien
cagactcgaaggcttggccaaccaa

SEQ ID NO: 3467902 - DNA, 25 bp, Homo sapien
gagtatcagactcgaaggcttggcc

SEQ ID NO: 3467903 - DNA, 25 bp, Homo sapien
ttacacccaagagtatcagactcga

SEQ ID NO: 3467904 - DNA, 25 bp, Homo sapien
cgaaggcttggccaaccaagtcttc

SEQ ID NO: 3467905 - DNA, 25 bp, Homo sapien
cacccaacggaggttccgatgccat

SEQ ID NO: 3467906 - DNA, 25 bp, Homo sapien
ccttagccttagctgccaagattcc

SEQ ID NO: 3467907 - DNA, 25 bp, Homo sapien
ttccgatgccattttccagtgccaa

SEQ ID NO: 3467908 - DNA, 25 bp, Homo sapien
caaccttagccttagctgccaagat

SEQ ID NO: 3467909 - DNA, 25 bp, Homo sapien
cctcctttctcgagtgcccacccac

SEQ ID NO: 3467910 - DNA, 25 bp, Homo sapien
tcattctggatcatatttgcactga

SEQ ID NO: 3467911 - DNA, 25 bp, Homo sapien
ttgtgtcattctggatcatatttgc

SEQ ID NO: 3467912 - DNA, 25 bp, Homo sapien
gatcatatttgcactgattaaccta

SEQ ID NO: 3467913 - DNA, 25 bp, Homo sapien
aacattgtgtcattctggatcatat

SEQ ID NO: 3467914 - DNA, 25 bp, Homo sapien
cagaaacagagtcggggctttggac

SEQ ID NO: 3467915 - DNA, 25 bp, Homo sapien
ttggactgggcacctttccattaac

SEQ ID NO: 3467916 - DNA, 25 bp, Homo sapien
ggatggccgtcctcaggtctggatt

SEQ ID NO: 3467917 - DNA, 25 bp, Homo sapien
cgtcctcaggtctggattggatctg

SEQ ID NO: 3467918 - DNA, 25 bp, Homo sapien
ctggaatgcagtagcgcaacctccg

SEQ ID NO: 3467919 - DNA, 25 bp, Homo sapien
aatgcagtagcgcaacctccgttca

SEQ ID NO: 3467920 - DNA, 25 bp, Homo sapien
atgcagtagcgcaacctccgttcac

SEQ ID NO: 3467921 - DNA, 25 bp, Homo sapien
ggaatgcagtagcgcaacctccgtt

SEQ ID NO: 3467922 - DNA, 25 bp, Homo sapien
aaggttcaagaaaggagattcagaa

SEQ ID NO: 3467923 - DNA, 25 bp, Homo sapien
cagaaaaataggtaacttgtctaag

SEQ ID NO: 3467924 - DNA, 25 bp, Homo sapien
aaaaggttcaagaaaggagattcag

SEQ ID NO: 3467925 - DNA, 25 bp, Homo sapien
agattcagaaaaataggtaacttgt

SEQ ID NO: 3467926 - DNA, 25 bp, Homo sapien
gccgcttccataggagctgtttctg

SEQ ID NO: 3467927 - DNA, 25 bp, Homo sapien
atctgtggctccaaatgccgcttcc

SEQ ID NO: 3467928 - DNA, 25 bp, Homo sapien
ggagctgtttctgttcaataccaca

SEQ ID NO: 3467929 - DNA, 25 bp, Homo sapien
tgttcaataccacatagacacaatg

SEQ ID NO: 3467930 - DNA, 25 bp, Homo sapien
cattcctggtgatgtcttgggccaa

SEQ ID NO: 3467931 - DNA, 25 bp, Homo sapien
gatctgcatgtatgacttcacccag

SEQ ID NO: 3467932 - DNA, 25 bp, Homo sapien
catatctacgaaagcaatgcagtct

SEQ ID NO: 3467933 - DNA, 25 bp, Homo sapien
gatgaatactacaccataaccctag

SEQ ID NO: 3467934 - DNA, 25 bp, Homo sapien
gctgaaatgacaggcgtaaaagaaa

SEQ ID NO: 3467935 - DNA, 25 bp, Homo sapien
gaaaaccatattcaggacattccct

SEQ ID NO: 3467936 - DNA, 25 bp, Homo sapien
aatgacaggcgtaaaagaaaaccat

SEQ ID NO: 3467937 - DNA, 25 bp, Homo sapien
tccctttcttgagcaaaactgcaat

SEQ ID NO: 3467938 - DNA, 25 bp, Homo sapien
taattagggcctcctcaggtctttc

SEQ ID NO: 3467939 - DNA, 25 bp, Homo sapien
caaggtcggccagaggtgagtaatt

SEQ ID NO: 3467940 - DNA, 25 bp, Homo sapien
tgatcagataggcagtttacagctc

SEQ ID NO: 3467941 - DNA, 25 bp, Homo sapien
ccagggattcgtccaagcttttcaa

SEQ ID NO: 3467942 - DNA, 25 bp, Homo sapien
taattttagaagtggagactaaagc

SEQ ID NO: 3467943 - DNA, 25 bp, Homo sapien
tatgtaagactgatattactgcctt

SEQ ID NO: 3467944 - DNA, 25 bp, Homo sapien
acttgcctacacagcatattatgta

SEQ ID NO: 3467945 - DNA, 25 bp, Homo sapien
ctgaacaggacccaatactaaagtt

SEQ ID NO: 3467946 - DNA, 25 bp, Homo sapien
ctgcataccctcctgtaagccacca

SEQ ID NO: 3467947 - DNA, 25 bp, Homo sapien
ataccctcctgtaagccaccaatgt

SEQ ID NO: 3467948 - DNA, 25 bp, Homo sapien
taagccaccaatgtcaccaagggtc

SEQ ID NO: 3467949 - DNA, 25 bp, Homo sapien
tcctgtaagccaccaatgtcaccaa

SEQ ID NO: 3467950 - DNA, 25 bp, Homo sapien
caggatgatcctccccttcagaact

SEQ ID NO: 3467951 - DNA, 25 bp, Homo sapien
ggtctacaccaaagatactgaaggg

SEQ ID NO: 3467952 - DNA, 25 bp, Homo sapien
ccttcagaactgcagtaggacctag

SEQ ID NO: 3467953 - DNA, 25 bp, Homo sapien
cctagaaaggccagcagatatgaaa

SEQ ID NO: 3467954 - DNA, 25 bp, Homo sapien
gacaccctggaatgatggacggaca

SEQ ID NO: 3467955 - DNA, 25 bp, Homo sapien
tcttcctggatcacgtgggagctcc

SEQ ID NO: 3467956 - DNA, 25 bp, Homo sapien
gatagttagggcatgcactgcgacc

SEQ ID NO: 3467957 - DNA, 25 bp, Homo sapien
taaattagcgacaggttgccacatc

SEQ ID NO: 3467958 - DNA, 25 bp, Homo sapien
caacaaaaagtcaagcaacctgcct

SEQ ID NO: 3467959 - DNA, 25 bp, Homo sapien
gacacaggaccaagtgctatacaaa

SEQ ID NO: 3467960 - DNA, 25 bp, Homo sapien
gaattcctaccataccagcttcctg

SEQ ID NO: 3467961 - DNA, 25 bp, Homo sapien
gcctgaggccacataactgtgagga

SEQ ID NO: 3467962 - DNA, 25 bp, Homo sapien
ccagagaacgtgaagggacctgctc

SEQ ID NO: 3467963 - DNA, 25 bp, Homo sapien
tagagacgagatgaggcagcatcct

SEQ ID NO: 3467964 - DNA, 25 bp, Homo sapien
tctcctccgcgttggtgaagacaag

SEQ ID NO: 3467965 - DNA, 25 bp, Homo sapien
catcctctctggaaccgaacgggct

SEQ ID NO: 3467966 - DNA, 25 bp, Homo sapien
gcccaccagcttcacagggccaggg

SEQ ID NO: 3467967 - DNA, 25 bp, Homo sapien
accagcttcacagggccaggggtca

SEQ ID NO: 3467968 - DNA, 25 bp, Homo sapien
ccaccagcttcacagggccaggggt

SEQ ID NO: 3467969 - DNA, 25 bp, Homo sapien
gcttcacagggccaggggtcagtca

SEQ ID NO: 3467970 - DNA, 25 bp, Homo sapien
ttgagaattggaggcggcagaagga

SEQ ID NO: 3467971 - DNA, 25 bp, Homo sapien
cctgcgtggggcctagagcagccta

SEQ ID NO: 3467972 - DNA, 25 bp, Homo sapien
cagaaggaacctgcgtggggcctag

SEQ ID NO: 3467973 - DNA, 25 bp, Homo sapien
gggcctagagcagcctaaagcccct

SEQ ID NO: 3467974 - DNA, 25 bp, Homo sapien
ccggtgccacacttctcccttgaat

SEQ ID NO: 3467975 - DNA, 25 bp, Homo sapien
cccggtgccacacttctcccttgaa

SEQ ID NO: 3467976 - DNA, 25 bp, Homo sapien
cttccccggtgccacacttctccct

SEQ ID NO: 3467977 - DNA, 25 bp, Homo sapien
tccccggtgccacacttctcccttg

SEQ ID NO: 3467978 - DNA, 25 bp, Homo sapien
ccacttctcagtccttactatggga

SEQ ID NO: 3467979 - DNA, 25 bp, Homo sapien
tggcgcctaaggaagacctgccctg

SEQ ID NO: 3467980 - DNA, 25 bp, Homo sapien
catctgcaaggcacggctttcacca

SEQ ID NO: 3467981 - DNA, 25 bp, Homo sapien
ccgctctggcgcctaaggaagacct

SEQ ID NO: 3467982 - DNA, 25 bp, Homo sapien
agctgtggcagcaggtcccgcagcc

SEQ ID NO: 3467983 - DNA, 25 bp, Homo sapien
ctgtggcagcaggtcccgcagcctt

SEQ ID NO: 3467984 - DNA, 25 bp, Homo sapien
gtggcagcaggtcccgcagccttct

SEQ ID NO: 3467985 - DNA, 25 bp, Homo sapien
cagctgtggcagcaggtcccgcagc

SEQ ID NO: 3467986 - DNA, 25 bp, Homo sapien
tgattggagcaagaattattaggcc

SEQ ID NO: 3467987 - DNA, 25 bp, Homo sapien
caagaattattaggccacactcatc

SEQ ID NO: 3467988 - DNA, 25 bp, Homo sapien
gcccacattttagacagtcgctgat

SEQ ID NO: 3467989 - DNA, 25 bp, Homo sapien
tggcactgggtgctcaggttgccca

SEQ ID NO: 3467990 - DNA, 25 bp, Homo sapien
tgggaggtggtgactgtcctggcag

SEQ ID NO: 3467991 - DNA, 25 bp, Homo sapien
ctgggaggtggtgactgtcctggca

SEQ ID NO: 3467992 - DNA, 25 bp, Homo sapien
aggtggtgactgtcctggcaggggc

SEQ ID NO: 3467993 - DNA, 25 bp, Homo sapien
ggaggtggtgactgtcctggcaggg

SEQ ID NO: 3467994 - DNA, 25 bp, Homo sapien
cggccgcgtctccccgaaccgcgct

SEQ ID NO: 3467995 - DNA, 25 bp, Homo sapien
cgtctccccgaaccgcgctcagccg

SEQ ID NO: 3467996 - DNA, 25 bp, Homo sapien
ccccgaaccgcgctcagccgccacg

SEQ ID NO: 3467997 - DNA, 25 bp, Homo sapien
cagaaaccctcccggaggacgctcg

SEQ ID NO: 3467998 - DNA, 25 bp, Homo sapien
cacaaatcacgggtacagaataacc

SEQ ID NO: 3467999 - DNA, 25 bp, Homo sapien
gagacagtggttcctcatctggtgc

SEQ ID NO: 3468000 - DNA, 25 bp, Homo sapien
atctggtgccgaggaccgtggctca

SEQ ID NO: 3468001 - DNA, 25 bp, Homo sapien
ggtgtcacccaacttaacgtcttgc

SEQ ID NO: 3468002 - DNA, 25 bp, Homo sapien
caaagtaaaattcccctggagtgct

SEQ ID NO: 3468003 - DNA, 25 bp, Homo sapien
tcttgagcactgagggctaaccctt

SEQ ID NO: 3468004 - DNA, 25 bp, Homo sapien
ttagagtactagtaaagatgctgcc

SEQ ID NO: 3468005 - DNA, 25 bp, Homo sapien
gagtgctctggtctctaaggcttga

SEQ ID NO: 3468006 - DNA, 25 bp, Homo sapien
atgagacacacaaattcggattgca

SEQ ID NO: 3468007 - DNA, 25 bp, Homo sapien
cacggtaaccattacacacacagca

SEQ ID NO: 3468008 - DNA, 25 bp, Homo sapien
acacaaattcggattgcagggaagc

SEQ ID NO: 3468009 - DNA, 25 bp, Homo sapien
gaagctctcacggtaaccattacac

SEQ ID NO: 3468010 - DNA, 25 bp, Homo sapien
gcgttgtcacaatccatgaaccgga

SEQ ID NO: 3468011 - DNA, 25 bp, Homo sapien
tgccctctgtacctgacggcagggt

SEQ ID NO: 3468012 - DNA, 25 bp, Homo sapien
agcctcctaaaacctggtatgaaag

SEQ ID NO: 3468013 - DNA, 25 bp, Homo sapien
accggattgtccttgtttaacagca

SEQ ID NO: 3468014 - DNA, 25 bp, Homo sapien
gtcctcagatgctgtttcaatctta

SEQ ID NO: 3468015 - DNA, 25 bp, Homo sapien
ttaaggttttgtgcagaaccagtcc

SEQ ID NO: 3468016 - DNA, 25 bp, Homo sapien
aaggttttgtgcagaaccagtcctc

SEQ ID NO: 3468017 - DNA, 25 bp, Homo sapien
ccagtcctcagatgctgtttcaatc

SEQ ID NO: 3468018 - DNA, 25 bp, Homo sapien
tgaagatctctaaccaacacacagg

SEQ ID NO: 3468019 - DNA, 25 bp, Homo sapien
gaaactcattacgtaggagagtagg

SEQ ID NO: 3468020 - DNA, 25 bp, Homo sapien
ggtgctcacatccatttttagaaac

SEQ ID NO: 3468021 - DNA, 25 bp, Homo sapien
gaataaacaaatgtcaaagtccttg

SEQ ID NO: 3468022 - DNA, 25 bp, Homo sapien
gaataatccgatcccaagtccacaa

SEQ ID NO: 3468023 - DNA, 25 bp, Homo sapien
gactagcagtgagtgttgaagccaa

SEQ ID NO: 3468024 - DNA, 25 bp, Homo sapien
caattacacacagagagttggtcta

SEQ ID NO: 3468025 - DNA, 25 bp, Homo sapien
aaaacagagcgtcaaaggactagca

SEQ ID NO: 3468026 - DNA, 25 bp, Homo sapien
ttcacaggactgtaatcatggcatt

SEQ ID NO: 3468027 - DNA, 25 bp, Homo sapien
gaggaatggactcagttcaccaggt

SEQ ID NO: 3468028 - DNA, 25 bp, Homo sapien
gaccaggaatagagattgagcctaa

SEQ ID NO: 3468029 - DNA, 25 bp, Homo sapien
gacgatagctatggaagaccaggaa

SEQ ID NO: 3468030 - DNA, 25 bp, Homo sapien
actggcatcttataatcaccctggg

SEQ ID NO: 3468031 - DNA, 25 bp, Homo sapien
cctgggcatgggtgaacttggtctc

SEQ ID NO: 3468032 - DNA, 25 bp, Homo sapien
tggtgaggtcatcaagacctgggca

SEQ ID NO: 3468033 - DNA, 25 bp, Homo sapien
cttagatggcaaactggaggaacac

SEQ ID NO: 3468034 - DNA, 25 bp, Homo sapien
ccatgaggccccaaggttgtcactg

SEQ ID NO: 3468035 - DNA, 25 bp, Homo sapien
caaatgttcccggttggcaagagca

SEQ ID NO: 3468036 - DNA, 25 bp, Homo sapien
caaaagagctcaaggcaaatgttcc

SEQ ID NO: 3468037 - DNA, 25 bp, Homo sapien
tgagcacccaggctaacaaagtttc

SEQ ID NO: 3468038 - DNA, 25 bp, Homo sapien
agtagcaacagcaaatttggtaaga

SEQ ID NO: 3468039 - DNA, 25 bp, Homo sapien
gggtacatagtgatttcagaatatg

SEQ ID NO: 3468040 - DNA, 25 bp, Homo sapien
agcaaaatccagcagttctcataca

SEQ ID NO: 3468041 - DNA, 25 bp, Homo sapien
tttggtaagaaagcaaaatccagca

SEQ ID NO: 3468042 - DNA, 25 bp, Homo sapien
tttttttggcagaaatgatgggact

SEQ ID NO: 3468043 - DNA, 25 bp, Homo sapien
ttttttttggcagaaatgatgggac

SEQ ID NO: 3468044 - DNA, 25 bp, Homo sapien
ttttttggcagaaatgatgggactg

SEQ ID NO: 3468045 - DNA, 25 bp, Homo sapien
cctgctgccaccagctccttcttga

SEQ ID NO: 3468046 - DNA, 25 bp, Homo sapien
gctgccaccagctccttcttgatcc

SEQ ID NO: 3468047 - DNA, 25 bp, Homo sapien
tgctgccaccagctccttcttgatc

SEQ ID NO: 3468048 - DNA, 25 bp, Homo sapien
ctgccaccagctccttcttgatcca

SEQ ID NO: 3468049 - DNA, 25 bp, Homo sapien
tgctagtagaacaccgaccacgtgg

SEQ ID NO: 3468050 - DNA, 25 bp, Homo sapien
ctgctagtagaacaccgaccacgtg

SEQ ID NO: 3468051 - DNA, 25 bp, Homo sapien
gctgctagtagaacaccgaccacgt

SEQ ID NO: 3468052 - DNA, 25 bp, Homo sapien
ctagtagaacaccgaccacgtggct

SEQ ID NO: 3468053 - DNA, 25 bp, Homo sapien
gaagtcctccacactgctcccgcag

SEQ ID NO: 3468054 - DNA, 25 bp, Homo sapien
cttccaggaagtcctccacactgct

SEQ ID NO: 3468055 - DNA, 25 bp, Homo sapien
tgctcccgcagccactcatgtccat

SEQ ID NO: 3468056 - DNA, 25 bp, Homo sapien
acactgctcccgcagccactcatgt

SEQ ID NO: 3468057 - DNA, 25 bp, Homo sapien
ccccttcttcccacaggatgggctc

SEQ ID NO: 3468058 - DNA, 25 bp, Homo sapien
ccttcttcccacaggatgggctcct

SEQ ID NO: 3468059 - DNA, 25 bp, Homo sapien
ttccccttcttcccacaggatgggc

SEQ ID NO: 3468060 - DNA, 25 bp, Homo sapien
ttcttcccacaggatgggctcctca

SEQ ID NO: 3468061 - DNA, 25 bp, Homo sapien
ccaacagacccagcacagggacgca

SEQ ID NO: 3468062 - DNA, 25 bp, Homo sapien
tgcgcaaggactcccaacagaccca

SEQ ID NO: 3468063 - DNA, 25 bp, Homo sapien
ctgcgcaaggactcccaacagaccc

SEQ ID NO: 3468064 - DNA, 25 bp, Homo sapien
cacagggacgcacacgctgcctgct

SEQ ID NO: 3468065 - DNA, 25 bp, Homo sapien
agatctggtcacatcagtgccctgc

SEQ ID NO: 3468066 - DNA, 25 bp, Homo sapien
gatctggtcacatcagtgccctgct

SEQ ID NO: 3468067 - DNA, 25 bp, Homo sapien
tcagtgccctgcttcgggtaaatgc

SEQ ID NO: 3468068 - DNA, 25 bp, Homo sapien
ctgcttcgggtaaatgctgggtttt

SEQ ID NO: 3468069 - DNA, 25 bp, Homo sapien
gctgctgggataaactagcaaatca

SEQ ID NO: 3468070 - DNA, 25 bp, Homo sapien
ctgctgggataaactagcaaatcaa

SEQ ID NO: 3468071 - DNA, 25 bp, Homo sapien
aaatcaaaggtcaattgactggcat

SEQ ID NO: 3468072 - DNA, 25 bp, Homo sapien
agcaaatcaaaggtcaattgactgg

SEQ ID NO: 3468073 - DNA, 25 bp, Homo sapien
aagtcctggcgtcagattcaaagtc

SEQ ID NO: 3468074 - DNA, 25 bp, Homo sapien
cctgggtgggagtgcgtaattggac

SEQ ID NO: 3468075 - DNA, 25 bp, Homo sapien
cgtaattggactggctcaagtccca

SEQ ID NO: 3468076 - DNA, 25 bp, Homo sapien
ttgcatctttgaagtcctggcgtca

SEQ ID NO: 3468077 - DNA, 25 bp, Homo sapien
caggactatggctttctcaaaacca

SEQ ID NO: 3468078 - DNA, 25 bp, Homo sapien
tgaaatacttcatcaccatggtttt

SEQ ID NO: 3468079 - DNA, 25 bp, Homo sapien
cacaatcacgtgtgaccagagcctt

SEQ ID NO: 3468080 - DNA, 25 bp, Homo sapien
tttgctatcccactctgatgccata

SEQ ID NO: 3468081 - DNA, 25 bp, Homo sapien
cataggtcggataacaaagctccag

SEQ ID NO: 3468082 - DNA, 25 bp, Homo sapien
ttaattaagagccataggtcggata

SEQ ID NO: 3468083 - DNA, 25 bp, Homo sapien
cagaaattagctttgaaggtgatca

SEQ ID NO: 3468084 - DNA, 25 bp, Homo sapien
ctccagaaattagctttgaaggtga

SEQ ID NO: 3468085 - DNA, 25 bp, Homo sapien
gaaaggtaataagccagcgtccaaa

SEQ ID NO: 3468086 - DNA, 25 bp, Homo sapien
gaaaatggcaggcatcaggagctcc

SEQ ID NO: 3468087 - DNA, 25 bp, Homo sapien
cagcatccggtgcatactttccaca

SEQ ID NO: 3468088 - DNA, 25 bp, Homo sapien
agcgtccaaacttgttcccggcagg

SEQ ID NO: 3468089 - DNA, 25 bp, Homo sapien
tccacatttctgactctgagccgat

SEQ ID NO: 3468090 - DNA, 25 bp, Homo sapien
cacatttctgactctgagccgatgc

SEQ ID NO: 3468091 - DNA, 25 bp, Homo sapien
gatccacatttctgactctgagccg

SEQ ID NO: 3468092 - DNA, 25 bp, Homo sapien
agatccacatttctgactctgagcc

SEQ ID NO: 3468093 - DNA, 25 bp, Homo sapien
gcacctacaaaactctcctgtggct

SEQ ID NO: 3468094 - DNA, 25 bp, Homo sapien
tctctgagaagttgccagcaccctc

SEQ ID NO: 3468095 - DNA, 25 bp, Homo sapien
tgcgttccacacgactgggtcgcca

SEQ ID NO: 3468096 - DNA, 25 bp, Homo sapien
acattccagcatccccactgcgttc

SEQ ID NO: 3468097 - DNA, 25 bp, Homo sapien
ggcaggtccgattagggcagcttaa

SEQ ID NO: 3468098 - DNA, 25 bp, Homo sapien
tcaggaacccattcttgaggggaca

SEQ ID NO: 3468099 - DNA, 25 bp, Homo sapien
cattctgggacaggagagccttggg

SEQ ID NO: 3468100 - DNA, 25 bp, Homo sapien
cataaaggacagatcggtccaaggg

SEQ ID NO: 3468101 - DNA, 25 bp, Homo sapien
gatagagactcctccacagaaagtg

SEQ ID NO: 3468102 - DNA, 25 bp, Homo sapien
agagggagcacttccactggttcca

SEQ ID NO: 3468103 - DNA, 25 bp, Homo sapien
caaggacccctcttgactggaacta

SEQ ID NO: 3468104 - DNA, 25 bp, Homo sapien
tagagaactgtaagtccacgggaga

SEQ ID NO: 3468105 - DNA, 25 bp, Homo sapien
ctggagcaaaactgggatgcagagg

SEQ ID NO: 3468106 - DNA, 25 bp, Homo sapien
tggagcaaaactgggatgcagagga

SEQ ID NO: 3468107 - DNA, 25 bp, Homo sapien
agaggaggtaggttgtggattgcac

SEQ ID NO: 3468108 - DNA, 25 bp, Homo sapien
tgcagaggaggtaggttgtggattg

SEQ ID NO: 3468109 - DNA, 25 bp, Homo sapien
taatgtgttagatggtgccgctgcc

SEQ ID NO: 3468110 - DNA, 25 bp, Homo sapien
tctataggtcataagccctgggcca

SEQ ID NO: 3468111 - DNA, 25 bp, Homo sapien
tataccaggtgatcatcgaggctgc

SEQ ID NO: 3468112 - DNA, 25 bp, Homo sapien
tcaacgcacaagtacagtcctaggg

SEQ ID NO: 3468113 - DNA, 25 bp, Homo sapien
tctggacacaagcatgcctgtacag

SEQ ID NO: 3468114 - DNA, 25 bp, Homo sapien
cagcttaactcttgccctacgggca

SEQ ID NO: 3468115 - DNA, 25 bp, Homo sapien
tcctgcgctataaactggctgagtc

SEQ ID NO: 3468116 - DNA, 25 bp, Homo sapien
tatacaacaagtggagctatgctcc

SEQ ID NO: 3468117 - DNA, 25 bp, Homo sapien
ccccagctcacgctctgcagtgaca

SEQ ID NO: 3468118 - DNA, 25 bp, Homo sapien
ttctgaagactccagtcagctgatt

SEQ ID NO: 3468119 - DNA, 25 bp, Homo sapien
ccaaccccttccatcaagggcctgc

SEQ ID NO: 3468120 - DNA, 25 bp, Homo sapien
cccagctcacgctctgcagtgacat

SEQ ID NO: 3468121 - DNA, 25 bp, Homo sapien
tgttcttccacgatggtgccttgca

SEQ ID NO: 3468122 - DNA, 25 bp, Homo sapien
tcagcaggttcgatgtcagatgaag

SEQ ID NO: 3468123 - DNA, 25 bp, Homo sapien
tggaatatcagcacaacacaagggt

SEQ ID NO: 3468124 - DNA, 25 bp, Homo sapien
caagggtagtcaacaacacagggca

SEQ ID NO: 3468125 - DNA, 25 bp, Homo sapien
tcttccagatagacataggtgagtc

SEQ ID NO: 3468126 - DNA, 25 bp, Homo sapien
gatgctattatttctccctgcggcc

SEQ ID NO: 3468127 - DNA, 25 bp, Homo sapien
atacacatgcgcacaaaactcctgg

SEQ ID NO: 3468128 - DNA, 25 bp, Homo sapien
aagccaaatacacggttttcatcag

SEQ ID NO: 3468129 - DNA, 25 bp, Homo sapien
ggttaaaaatatccgctgggtcagc

SEQ ID NO: 3468130 - DNA, 25 bp, Homo sapien
tgggtcagccaaccctcagacaaca

SEQ ID NO: 3468131 - DNA, 25 bp, Homo sapien
tatcagggcctcgaactggaaggtt

SEQ ID NO: 3468132 - DNA, 25 bp, Homo sapien
ttcttgctacatgttccaggagagg

SEQ ID NO: 3468133 - DNA, 25 bp, Homo sapien
tttgaacgttaagcaacttgagagc

SEQ ID NO: 3468134 - DNA, 25 bp, Homo sapien
ttttgaacgttaagcaacttgagag

SEQ ID NO: 3468135 - DNA, 25 bp, Homo sapien
acgggggcttgattgaaatggccag

SEQ ID NO: 3468136 - DNA, 25 bp, Homo sapien
gggggcttgattgaaatggccagtt

SEQ ID NO: 3468137 - DNA, 25 bp, Homo sapien
ggggcttgattgaaatggccagttt

SEQ ID NO: 3468138 - DNA, 25 bp, Homo sapien
cgggggcttgattgaaatggccagt

SEQ ID NO: 3468139 - DNA, 25 bp, Homo sapien
gtatagctgacccttcatatctgca

SEQ ID NO: 3468140 - DNA, 25 bp, Homo sapien
gcatccttggactttggtacccaag

SEQ ID NO: 3468141 - DNA, 25 bp, Homo sapien
tctctaataacatgtatagctgacc

SEQ ID NO: 3468142 - DNA, 25 bp, Homo sapien
tgagcatccttggactttggtaccc

SEQ ID NO: 3468143 - DNA, 25 bp, Homo sapien
gagcactgagctaggaacacgcatt

SEQ ID NO: 3468144 - DNA, 25 bp, Homo sapien
tatgaaggctgttccatgactccca

SEQ ID NO: 3468145 - DNA, 25 bp, Homo sapien
cattaacatcaaatgggaccaggac

SEQ ID NO: 3468146 - DNA, 25 bp, Homo sapien
gaaccttcctcatacacgctggtga

SEQ ID NO: 3468147 - DNA, 25 bp, Homo sapien
tcatcggtgacccttgtggaggaag

SEQ ID NO: 3468148 - DNA, 25 bp, Homo sapien
gatccctcgctactctttcaggaag

SEQ ID NO: 3468149 - DNA, 25 bp, Homo sapien
ggaaagctggtcacctatgcctggt

SEQ ID NO: 3468150 - DNA, 25 bp, Homo sapien
ttttacatcttgactacggtggagg

SEQ ID NO: 3468151 - DNA, 25 bp, Homo sapien
acaagaagtcttcagccagtgagag

SEQ ID NO: 3468152 - DNA, 25 bp, Homo sapien
ccagtgagaggagagcagtaaaacc

SEQ ID NO: 3468153 - DNA, 25 bp, Homo sapien
taaaaccttccctatcactctcagg

SEQ ID NO: 3468154 - DNA, 25 bp, Homo sapien
ccaaggacaagaagtcttcagccag

SEQ ID NO: 3468155 - DNA, 25 bp, Homo sapien
tgtgacaaggaaatccagtgagtag

SEQ ID NO: 3468156 - DNA, 25 bp, Homo sapien
catggaagtaggtgagttgctgtga

SEQ ID NO: 3468157 - DNA, 25 bp, Homo sapien
ctgtgacaaggaaatccagtgagta

SEQ ID NO: 3468158 - DNA, 25 bp, Homo sapien
gtgacaaggaaatccagtgagtaga

SEQ ID NO: 3468159 - DNA, 25 bp, Homo sapien
tgaacagcctgggtcacgctcctgt

SEQ ID NO: 3468160 - DNA, 25 bp, Homo sapien
aaatgagtgctcttgtatgtttaga

SEQ ID NO: 3468161 - DNA, 25 bp, Homo sapien
cattcatgatgaacagcctgggtca

SEQ ID NO: 3468162 - DNA, 25 bp, Homo sapien
ctctctggaaatgagtgctcttgta

SEQ ID NO: 3468163 - DNA, 25 bp, Homo sapien
cagagaggaagagttgtgagtccat

SEQ ID NO: 3468164 - DNA, 25 bp, Homo sapien
acagagaggaagagttgtgagtcca

SEQ ID NO: 3468165 - DNA, 25 bp, Homo sapien
ctgacagagaggaagagttgtgagt

SEQ ID NO: 3468166 - DNA, 25 bp, Homo sapien
gacagagaggaagagttgtgagtcc

SEQ ID NO: 3468167 - DNA, 25 bp, Homo sapien
tttgatcttgagctccctggaagcc

SEQ ID NO: 3468168 - DNA, 25 bp, Homo sapien
tgttgccacctgtttcatagctgca

SEQ ID NO: 3468169 - DNA, 25 bp, Homo sapien
ttcatagctgcattggtggtcactc

SEQ ID NO: 3468170 - DNA, 25 bp, Homo sapien
tcttctgtctctttgcccccggatt

SEQ ID NO: 3468171 - DNA, 25 bp, Homo sapien
ggaggaaagagcaactctaaatgct

SEQ ID NO: 3468172 - DNA, 25 bp, Homo sapien
cagatttcctggttcctaatacaag

SEQ ID NO: 3468173 - DNA, 25 bp, Homo sapien
caaggtctttctccaaacgtgtgtt

SEQ ID NO: 3468174 - DNA, 25 bp, Homo sapien
tctaaatgcttgcttgagagccaag

SEQ ID NO: 3468175 - DNA, 25 bp, Homo sapien
gggtcttagatagctgccagtcctt

SEQ ID NO: 3468176 - DNA, 25 bp, Homo sapien
caccttgattttgacgtcaaggccc

SEQ ID NO: 3468177 - DNA, 25 bp, Homo sapien
agtcctttctaaccagcttctgcac

SEQ ID NO: 3468178 - DNA, 25 bp, Homo sapien
caggcaggctctgatgtgaacctgg

SEQ ID NO: 3468179 - DNA, 25 bp, Homo sapien
tttgcaagggcaacaagtctcaagc

SEQ ID NO: 3468180 - DNA, 25 bp, Homo sapien
accgtgtgttgtcttcaaggcagaa

SEQ ID NO: 3468181 - DNA, 25 bp, Homo sapien
tctgcataggcaataacacaccgtg

SEQ ID NO: 3468182 - DNA, 25 bp, Homo sapien
caggaaatggctaaatggcaggtca

SEQ ID NO: 3468183 - DNA, 25 bp, Homo sapien
gtaaggtctatggacttagcaaaac

SEQ ID NO: 3468184 - DNA, 25 bp, Homo sapien
cggcgtaaggtctatggacttagca

SEQ ID NO: 3468185 - DNA, 25 bp, Homo sapien
ccgtgccccggcgtaaggtctatgg

SEQ ID NO: 3468186 - DNA, 25 bp, Homo sapien
tcacttagggagagcccgtgccccg

SEQ ID NO: 3468187 - DNA, 25 bp, Homo sapien
aagtcttccaagtctgcacttggga

SEQ ID NO: 3468188 - DNA, 25 bp, Homo sapien
ggtatttgactgatggattcctgct

SEQ ID NO: 3468189 - DNA, 25 bp, Homo sapien
tgggatctgagttgggccagtcacc

SEQ ID NO: 3468190 - DNA, 25 bp, Homo sapien
gactgatggattcctgctattagca

SEQ ID NO: 3468191 - DNA, 25 bp, Homo sapien
gtgacagctctctgattaggcagca

SEQ ID NO: 3468192 - DNA, 25 bp, Homo sapien
ttttgatttgtgatggaaaataggg

SEQ ID NO: 3468193 - DNA, 25 bp, Homo sapien
cgctgcttcttatgttggtgagctg

SEQ ID NO: 3468194 - DNA, 25 bp, Homo sapien
tgagctgttgctggagtttttgatt

SEQ ID NO: 3468195 - DNA, 25 bp, Homo sapien
atgaaatgggaactggtctctcctg

SEQ ID NO: 3468196 - DNA, 25 bp, Homo sapien
tgaacagatggcagatcatccgatg

SEQ ID NO: 3468197 - DNA, 25 bp, Homo sapien
tcatccgatgcagccggtgccattc

SEQ ID NO: 3468198 - DNA, 25 bp, Homo sapien
gcatgcacccaacctgaccatgagt

SEQ ID NO: 3468199 - DNA, 25 bp, Homo sapien
ttccaacctgtttcattagagtcaa

SEQ ID NO: 3468200 - DNA, 25 bp, Homo sapien
aaatgtcttgcttatcataatactc

SEQ ID NO: 3468201 - DNA, 25 bp, Homo sapien
taaatgagcatgtaacatattgact

SEQ ID NO: 3468202 - DNA, 25 bp, Homo sapien
tagagtcaaacgtgctaaatgagca

SEQ ID NO: 3468203 - DNA, 25 bp, Homo sapien
gatattgtttcatcaagttcaaaca

SEQ ID NO: 3468204 - DNA, 25 bp, Homo sapien
taggacccacaaagtccgatattgt

SEQ ID NO: 3468205 - DNA, 25 bp, Homo sapien
tcttcacggcaacttcatgggtagg

SEQ ID NO: 3468206 - DNA, 25 bp, Homo sapien
acattttgtcatgactgtccaaccg

SEQ ID NO: 3468207 - DNA, 25 bp, Homo sapien
cccagaggtcatgtatcataatggc

SEQ ID NO: 3468208 - DNA, 25 bp, Homo sapien
ggtggcagtaagaaaaacggcacat

SEQ ID NO: 3468209 - DNA, 25 bp, Homo sapien
tattaaccacctacagggagagcac

SEQ ID NO: 3468210 - DNA, 25 bp, Homo sapien
tcataatggctaggagtttgggctc

SEQ ID NO: 3468211 - DNA, 25 bp, Homo sapien
ttgtgtgctttaagctccaccatgg

SEQ ID NO: 3468212 - DNA, 25 bp, Homo sapien
ggtggcaccaatcccagttgtgtgc

SEQ ID NO: 3468213 - DNA, 25 bp, Homo sapien
gactgaagtcatccaccatgcatca

SEQ ID NO: 3468214 - DNA, 25 bp, Homo sapien
gcctgatcttaatgagaagccactg

SEQ ID NO: 3468215 - DNA, 25 bp, Homo sapien
cactgagtcggccacaaagaaggta

SEQ ID NO: 3468216 - DNA, 25 bp, Homo sapien
cttccgggctcgagacaccacggct

SEQ ID NO: 3468217 - DNA, 25 bp, Homo sapien
tgctgtcgttgttaaacccaacaag

SEQ ID NO: 3468218 - DNA, 25 bp, Homo sapien
gggaaacaaccttgaccactgtgcc

SEQ ID NO: 3468219 - DNA, 25 bp, Homo sapien
cagatgacttagtccttggcttaag

SEQ ID NO: 3468220 - DNA, 25 bp, Homo sapien
tgtggcaatcatgacactaccaagt

SEQ ID NO: 3468221 - DNA, 25 bp, Homo sapien
taccaagtaaagcattggtggcatg

SEQ ID NO: 3468222 - DNA, 25 bp, Homo sapien
tatcgccgtgcatgtgcagagaaca

SEQ ID NO: 3468223 - DNA, 25 bp, Homo sapien
cagtgggagcttcgagcttgagcca

SEQ ID NO: 3468224 - DNA, 25 bp, Homo sapien
tctgggaatgcctggtaactctgag

SEQ ID NO: 3468225 - DNA, 25 bp, Homo sapien
tgaccaccacaggatggaacggctt

SEQ ID NO: 3468226 - DNA, 25 bp, Homo sapien
tacagggtcctaagattgttccaca

SEQ ID NO: 3468227 - DNA, 25 bp, Homo sapien
ggtcttgtcagccaagcattggtgg

SEQ ID NO: 3468228 - DNA, 25 bp, Homo sapien
atacgaagacggcagcaaaggtgaa

SEQ ID NO: 3468229 - DNA, 25 bp, Homo sapien
acagggctcccctagtgatacgaag

SEQ ID NO: 3468230 - DNA, 25 bp, Homo sapien
tgataaagagcttcctataacttct

SEQ ID NO: 3468231 - DNA, 25 bp, Homo sapien
tgccctacccctagcactaaccctg

SEQ ID NO: 3468232 - DNA, 25 bp, Homo sapien
ctaaaagggtatcttgaatcctggt

SEQ ID NO: 3468233 - DNA, 25 bp, Homo sapien
tgctctcggtcatatttgctgcttg

SEQ ID NO: 3468234 - DNA, 25 bp, Homo sapien
gatattttataatacttacaaggta

SEQ ID NO: 3468235 - DNA, 25 bp, Homo sapien
tccaagataatcttctggccaacag

SEQ ID NO: 3468236 - DNA, 25 bp, Homo sapien
tttcctgctccaagataatcttctg

SEQ ID NO: 3468237 - DNA, 25 bp, Homo sapien
agaaaaacaacaaagcgctggcttg

SEQ ID NO: 3468238 - DNA, 25 bp, Homo sapien
gaggcaccagaatctttgtctgcac

SEQ ID NO: 3468239 - DNA, 25 bp, Homo sapien
acaaacacaattggatcattcttct

SEQ ID NO: 3468240 - DNA, 25 bp, Homo sapien
tacaaacacaattggatcattcttc

SEQ ID NO: 3468241 - DNA, 25 bp, Homo sapien
acaatccttcagaggcttctcttgg

SEQ ID NO: 3468242 - DNA, 25 bp, Homo sapien
tcacctacagttttacccctgactc

SEQ ID NO: 3468243 - DNA, 25 bp, Homo sapien
ctacagttttacccctgactctgga

SEQ ID NO: 3468244 - DNA, 25 bp, Homo sapien
cctacagttttacccctgactctgg

SEQ ID NO: 3468245 - DNA, 25 bp, Homo sapien
acctacagttttacccctgactctg

SEQ ID NO: 3468246 - DNA, 25 bp, Homo sapien
gggcacccagggcaccttgtccgta

SEQ ID NO: 3468247 - DNA, 25 bp, Homo sapien
tgcgatcttcgccttccgggaaggt

SEQ ID NO: 3468248 - DNA, 25 bp, Homo sapien
aggtctctacccctggccgggctga

SEQ ID NO: 3468249 - DNA, 25 bp, Homo sapien
gtacacgcctgtgggttctccggcc

SEQ ID NO: 3468250 - DNA, 25 bp, Homo sapien
gcaggcggcctaccctgcagccctg

SEQ ID NO: 3468251 - DNA, 25 bp, Homo sapien
ttcaaagtcacaccgaaaaatccca

SEQ ID NO: 3468252 - DNA, 25 bp, Homo sapien
agccggtgcactgggctttcaaagt

SEQ ID NO: 3468253 - DNA, 25 bp, Homo sapien
aaccctgagcgggtaacgaggcagt

SEQ ID NO: 3468254 - DNA, 25 bp, Homo sapien
cctaaggaatgtggagtattgccaa

SEQ ID NO: 3468255 - DNA, 25 bp, Homo sapien
gcgagtagttatctcctaaggaatg

SEQ ID NO: 3468256 - DNA, 25 bp, Homo sapien
gtggagtattgccaaggatggccct

SEQ ID NO: 3468257 - DNA, 25 bp, Homo sapien
ttctcctgtacaaagtatatgcgag

SEQ ID NO: 3468258 - DNA, 25 bp, Homo sapien
aatgcagctggatcctgttgtagaa

SEQ ID NO: 3468259 - DNA, 25 bp, Homo sapien
tgcagctggatcctgttgtagaaat

SEQ ID NO: 3468260 - DNA, 25 bp, Homo sapien
caaatgcagctggatcctgttgtag

SEQ ID NO: 3468261 - DNA, 25 bp, Homo sapien
agctggatcctgttgtagaaatgac

SEQ ID NO: 3468262 - DNA, 25 bp, Homo sapien
ttttttaggcaagtggagcaggttg

SEQ ID NO: 3468263 - DNA, 25 bp, Homo sapien
caggttgtgaccctgcaatccagcc

SEQ ID NO: 3468264 - DNA, 25 bp, Homo sapien
aagctgtctttgttgggatgattcc

SEQ ID NO: 3468265 - DNA, 25 bp, Homo sapien
gcctgagaaggcataaacagcatct

SEQ ID NO: 3468266 - DNA, 25 bp, Homo sapien
cctgttctagtaggttcttgtccaa

SEQ ID NO: 3468267 - DNA, 25 bp, Homo sapien
taggtccccatagcccttcacttgg

SEQ ID NO: 3468268 - DNA, 25 bp, Homo sapien
ttcaggcacctgttctagtaggttc

SEQ ID NO: 3468269 - DNA, 25 bp, Homo sapien
tgtgtgacgactccatcttctaggt

SEQ ID NO: 3468270 - DNA, 25 bp, Homo sapien
ggctagcaggttgtttgtgattaac

SEQ ID NO: 3468271 - DNA, 25 bp, Homo sapien
tacttatcaggacccatcactgaca

SEQ ID NO: 3468272 - DNA, 25 bp, Homo sapien
tactttcaagatgtattagtcagtg

SEQ ID NO: 3468273 - DNA, 25 bp, Homo sapien
ggtcatgctggagggtctacatgca

SEQ ID NO: 3468274 - DNA, 25 bp, Homo sapien
tgacaccaatgaccccaaagaaaca

SEQ ID NO: 3468275 - DNA, 25 bp, Homo sapien
caccaatgaccccaaagaaacattt

SEQ ID NO: 3468276 - DNA, 25 bp, Homo sapien
gacaccaatgaccccaaagaaacat

SEQ ID NO: 3468277 - DNA, 25 bp, Homo sapien
ctgacaccaatgaccccaaagaaac

SEQ ID NO: 3468278 - DNA, 25 bp, Homo sapien
tatcagagactattgggcctggcag

SEQ ID NO: 3468279 - DNA, 25 bp, Homo sapien
taacaatagttgtcagtgcctgggc

SEQ ID NO: 3468280 - DNA, 25 bp, Homo sapien
aattctcacctcgtaagcgttgctg

SEQ ID NO: 3468281 - DNA, 25 bp, Homo sapien
gatagctgctgtttagtgagtgcca

SEQ ID NO: 3468282 - DNA, 25 bp, Homo sapien
caaaactctctcatcgtgggcataa

SEQ ID NO: 3468283 - DNA, 25 bp, Homo sapien
tcatggcctgtctgtttggagaggc

SEQ ID NO: 3468284 - DNA, 25 bp, Homo sapien
gtcctctccaatgaaccaactttat

SEQ ID NO: 3468285 - DNA, 25 bp, Homo sapien
gcctgcaaatgagaaagtgccccac

SEQ ID NO: 3468286 - DNA, 25 bp, Homo sapien
gcaacatattgctcttcggtctact

SEQ ID NO: 3468287 - DNA, 25 bp, Homo sapien
tctattccttacaaccacctgagtg

SEQ ID NO: 3468288 - DNA, 25 bp, Homo sapien
tgatttgcatggagagcatgtacca

SEQ ID NO: 3468289 - DNA, 25 bp, Homo sapien
gacactgtgcacatggtaccactgg

SEQ ID NO: 3468290 - DNA, 25 bp, Homo sapien
cagagaaggtggaacttgaatttca

SEQ ID NO: 3468291 - DNA, 25 bp, Homo sapien
cactgggatagacgatttaaggact

SEQ ID NO: 3468292 - DNA, 25 bp, Homo sapien
tgtcaatgaaaagccaatcataatc

SEQ ID NO: 3468293 - DNA, 25 bp, Homo sapien
aatcataatctggaaacactgggat

SEQ ID NO: 3468294 - DNA, 25 bp, Homo sapien
caacagtcagcgatttgtcatggct

SEQ ID NO: 3468295 - DNA, 25 bp, Homo sapien
tgaatgcgccaacgctcaacgcagt

SEQ ID NO: 3468296 - DNA, 25 bp, Homo sapien
atctaccccatgaatgcgccaacgc

SEQ ID NO: 3468297 - DNA, 25 bp, Homo sapien
ccaacagtcagcgatttgtcatggc

SEQ ID NO: 3468298 - DNA, 25 bp, Homo sapien
ccaaatgatgcacggattctgctcc

SEQ ID NO: 3468299 - DNA, 25 bp, Homo sapien
catcctggagccctcgatatgaacc

SEQ ID NO: 3468300 - DNA, 25 bp, Homo sapien
gctccaaggctgagaatgcagactg

SEQ ID NO: 3468301 - DNA, 25 bp, Homo sapien
tcgatatgaaccaaatgatgcacgg

SEQ ID NO: 3468302 - DNA, 25 bp, Homo sapien
ttcttttccttgtcatccaaccaga

SEQ ID NO: 3468303 - DNA, 25 bp, Homo sapien
ttttccttgtcatccaaccagataa

SEQ ID NO: 3468304 - DNA, 25 bp, Homo sapien
ttccttgtcatccaaccagataaac

SEQ ID NO: 3468305 - DNA, 25 bp, Homo sapien
ccttgtcatccaaccagataaacac

SEQ ID NO: 3468306 - DNA, 25 bp, Homo sapien
ccactcatacttctcagttccatct

SEQ ID NO: 3468307 - DNA, 25 bp, Homo sapien
ttttccactcatacttctcagttcc

SEQ ID NO: 3468308 - DNA, 25 bp, Homo sapien
ttccactcatacttctcagttccat

SEQ ID NO: 3468309 - DNA, 25 bp, Homo sapien
tattttccactcatacttctcagtt

SEQ ID NO: 3468310 - DNA, 25 bp, Homo sapien
ccagacaaatgtggctgaaagattg

SEQ ID NO: 3468311 - DNA, 25 bp, Homo sapien
gctgaaagattgtcagagccctgcc

SEQ ID NO: 3468312 - DNA, 25 bp, Homo sapien
gccatcagtggccatgaagacccct

SEQ ID NO: 3468313 - DNA, 25 bp, Homo sapien
tgcatgggcagcattatattcctgg

SEQ ID NO: 3468314 - DNA, 25 bp, Homo sapien
gtaaaccagtccaaatagagtgctt

SEQ ID NO: 3468315 - DNA, 25 bp, Homo sapien
tgtaaaccagtccaaatagagtgct

SEQ ID NO: 3468316 - DNA, 25 bp, Homo sapien
tctgtaaaccagtccaaatagagtg

SEQ ID NO: 3468317 - DNA, 25 bp, Homo sapien
cctctgtaaaccagtccaaatagag

SEQ ID NO: 3468318 - DNA, 25 bp, Homo sapien
tggtgccagataccagaatcactcc

SEQ ID NO: 3468319 - DNA, 25 bp, Homo sapien
tgagcagtgcattgatactctcggg

SEQ ID NO: 3468320 - DNA, 25 bp, Homo sapien
tcagcgggtacatggacctaagcca

SEQ ID NO: 3468321 - DNA, 25 bp, Homo sapien
gataccagaatcactccctggatcc

SEQ ID NO: 3468322 - DNA, 25 bp, Homo sapien
tttcgaggtgccctcaaagtcaggg

SEQ ID NO: 3468323 - DNA, 25 bp, Homo sapien
caagctttcaaccagtttcgaggtg

SEQ ID NO: 3468324 - DNA, 25 bp, Homo sapien
aagtcagggccagccgtttggaagc

SEQ ID NO: 3468325 - DNA, 25 bp, Homo sapien
catctgtgtcttccgggtatacctg

SEQ ID NO: 3468326 - DNA, 25 bp, Homo sapien
tacaataggagtagtatctgctggg

SEQ ID NO: 3468327 - DNA, 25 bp, Homo sapien
tttccactccctacaataggagtag

SEQ ID NO: 3468328 - DNA, 25 bp, Homo sapien
acaggtgcgtgcacggtctgagtca

SEQ ID NO: 3468329 - DNA, 25 bp, Homo sapien
caggtgcgtgcacggtctgagtcac

SEQ ID NO: 3468330 - DNA, 25 bp, Homo sapien
tgggctctttcctgatctcatccct

SEQ ID NO: 3468331 - DNA, 25 bp, Homo sapien
gcatcctgttgccagtattctgcat

SEQ ID NO: 3468332 - DNA, 25 bp, Homo sapien
agtattctgcatccgctttccgcct

SEQ ID NO: 3468333 - DNA, 25 bp, Homo sapien
gggctctttcctgatctcatccctg

SEQ ID NO: 3468334 - DNA, 25 bp, Homo sapien
ggagcctaggccattcagaaccttc

SEQ ID NO: 3468335 - DNA, 25 bp, Homo sapien
aatttctaagatgcccagggacttc

SEQ ID NO: 3468336 - DNA, 25 bp, Homo sapien
catccatggagatggtaactgtgat

SEQ ID NO: 3468337 - DNA, 25 bp, Homo sapien
ggagtcagtgggaatggtcatacca

SEQ ID NO: 3468338 - DNA, 25 bp, Homo sapien
gagatgtccacatcgcagcctggga

SEQ ID NO: 3468339 - DNA, 25 bp, Homo sapien
ggttctagcccaaggtgagcactga

SEQ ID NO: 3468340 - DNA, 25 bp, Homo sapien
gggtctgatcctgagccactctggc

SEQ ID NO: 3468341 - DNA, 25 bp, Homo sapien
tctctgctgagtcatggttggaaac

SEQ ID NO: 3468342 - DNA, 25 bp, Homo sapien
aaggagtaattgcaggtccgattcc

SEQ ID NO: 3468343 - DNA, 25 bp, Homo sapien
tccacagggcccagtttggggactg

SEQ ID NO: 3468344 - DNA, 25 bp, Homo sapien
gggactgaatcagaggatccttctg

SEQ ID NO: 3468345 - DNA, 25 bp, Homo sapien
gacaattcactgtccatcttccagc

SEQ ID NO: 3468346 - DNA, 25 bp, Homo sapien
ggcttgcagatcaaggggatccact

SEQ ID NO: 3468347 - DNA, 25 bp, Homo sapien
tgaacccccagcgtgcagagagagg

SEQ ID NO: 3468348 - DNA, 25 bp, Homo sapien
cagggcttgcagatcaaggggatcc

SEQ ID NO: 3468349 - DNA, 25 bp, Homo sapien
agatcaaggggatccactgtccatg

SEQ ID NO: 3468350 - DNA, 25 bp, Homo sapien
aagagacgactgctctccactgctc

SEQ ID NO: 3468351 - DNA, 25 bp, Homo sapien
catgtagatcagaagagacgactgc

SEQ ID NO: 3468352 - DNA, 25 bp, Homo sapien
tgtagatcagaagagacgactgctc

SEQ ID NO: 3468353 - DNA, 25 bp, Homo sapien
agatcagaagagacgactgctctcc

SEQ ID NO: 3468354 - DNA, 25 bp, Homo sapien
aatttgggcactgtttaccagagaa

SEQ ID NO: 3468355 - DNA, 25 bp, Homo sapien
tctctttactagtcagtagccaagg

SEQ ID NO: 3468356 - DNA, 25 bp, Homo sapien
tgggacaataaattacacgtgatat

SEQ ID NO: 3468357 - DNA, 25 bp, Homo sapien
taaagaaaatctatagtacctctcc

SEQ ID NO: 3468358 - DNA, 25 bp, Homo sapien
acctgtgttcctggtatgagcacag

SEQ ID NO: 3468359 - DNA, 25 bp, Homo sapien
gaaagatatcctgtagtgaactaca

SEQ ID NO: 3468360 - DNA, 25 bp, Homo sapien
ttggagatggtctctgctgcatgga

SEQ ID NO: 3468361 - DNA, 25 bp, Homo sapien
tggaggcagaaagatatcctgtagt

SEQ ID NO: 3468362 - DNA, 25 bp, Homo sapien
gggctctgaacactcctcgctgaac

SEQ ID NO: 3468363 - DNA, 25 bp, Homo sapien
gctggttgcttatctagcacctggg

SEQ ID NO: 3468364 - DNA, 25 bp, Homo sapien
gagactgtgcctgtgcatgatgata

SEQ ID NO: 3468365 - DNA, 25 bp, Homo sapien
tgtgcctgtgcatgatgatatgaaa

SEQ ID NO: 3468366 - DNA, 25 bp, Homo sapien
gctggatgctcattttcaaatccca

SEQ ID NO: 3468367 - DNA, 25 bp, Homo sapien
cagtgctggatgctcattttcaaat

SEQ ID NO: 3468368 - DNA, 25 bp, Homo sapien
ctcattttcaaatcccatctcttgg

SEQ ID NO: 3468369 - DNA, 25 bp, Homo sapien
ttaaacaacccagtgctggatgctc

SEQ ID NO: 3468370 - DNA, 25 bp, Homo sapien
tcttggccagtaacttgcgaaacac

SEQ ID NO: 3468371 - DNA, 25 bp, Homo sapien
catttgtgacattcctagaagagag

SEQ ID NO: 3468372 - DNA, 25 bp, Homo sapien
caatgcatattgtggcaaagggacg

SEQ ID NO: 3468373 - DNA, 25 bp, Homo sapien
gggacgccacacgactttctgaaga

SEQ ID NO: 3468374 - DNA, 25 bp, Homo sapien
cccagccaccatggtgctgtgtgtg

SEQ ID NO: 3468375 - DNA, 25 bp, Homo sapien
cagcccagccaccatggtgctgtgt

SEQ ID NO: 3468376 - DNA, 25 bp, Homo sapien
cccagcccagccaccatggtgctgt

SEQ ID NO: 3468377 - DNA, 25 bp, Homo sapien
gcccagccaccatggtgctgtgtgt

SEQ ID NO: 3468378 - DNA, 25 bp, Homo sapien
tgatggctccagatgcaacttgcag

SEQ ID NO: 3468379 - DNA, 25 bp, Homo sapien
actgatggctccagatgcaacttgc

SEQ ID NO: 3468380 - DNA, 25 bp, Homo sapien
ctgatggctccagatgcaacttgca

SEQ ID NO: 3468381 - DNA, 25 bp, Homo sapien
ctttgggaattcccaacagaaatga

SEQ ID NO: 3468382 - DNA, 25 bp, Homo sapien
ggatgatgggacccatgagagaggg

SEQ ID NO: 3468383 - DNA, 25 bp, Homo sapien
agaaatgagatgcagggagggatga

SEQ ID NO: 3468384 - DNA, 25 bp, Homo sapien
gaaatgagatgcagggagggatgat

SEQ ID NO: 3468385 - DNA, 25 bp, Homo sapien
ttttgccaccttgcacggctaacct

SEQ ID NO: 3468386 - DNA, 25 bp, Homo sapien
caccagaaatctggttaaacttatg

SEQ ID NO: 3468387 - DNA, 25 bp, Homo sapien
tatggctgccgtcatcattgcttcc

SEQ ID NO: 3468388 - DNA, 25 bp, Homo sapien
gggagatgacagtgcatcccacttc

SEQ ID NO: 3468389 - DNA, 25 bp, Homo sapien
gtgtggacatctgccggtcctggca

SEQ ID NO: 3468390 - DNA, 25 bp, Homo sapien
ggcccccctgggtgtggacatctgc

SEQ ID NO: 3468391 - DNA, 25 bp, Homo sapien
gagggttcttctgggtcttgtgggc

SEQ ID NO: 3468392 - DNA, 25 bp, Homo sapien
gacatctgccggtcctggcagagcc

SEQ ID NO: 3468393 - DNA, 25 bp, Homo sapien
cctgggcttttctgagccagtgcta

SEQ ID NO: 3468394 - DNA, 25 bp, Homo sapien
catttaccacatcaattttggaaag

SEQ ID NO: 3468395 - DNA, 25 bp, Homo sapien
taaaaatccactttgcaaagatata

SEQ ID NO: 3468396 - DNA, 25 bp, Homo sapien
gggcttttctgagccagtgctactg

SEQ ID NO: 3468397 - DNA, 25 bp, Homo sapien
tcaagttcaaggtcatctaattgag

SEQ ID NO: 3468398 - DNA, 25 bp, Homo sapien
ccagagtttggattggtcaagttca

SEQ ID NO: 3468399 - DNA, 25 bp, Homo sapien
gttcaaggtcatctaattgagtcat

SEQ ID NO: 3468400 - DNA, 25 bp, Homo sapien
cagagtttggattggtcaagttcaa

SEQ ID NO: 3468401 - DNA, 25 bp, Homo sapien
gacaggacacaggttgtctcaaaaa

SEQ ID NO: 3468402 - DNA, 25 bp, Homo sapien
caggacacaggttgtctcaaaaagc

SEQ ID NO: 3468403 - DNA, 25 bp, Homo sapien
agggacaggacacaggttgtctcaa

SEQ ID NO: 3468404 - DNA, 25 bp, Homo sapien
aggacacaggttgtctcaaaaagca

SEQ ID NO: 3468405 - DNA, 25 bp, Homo sapien
tgtcttgagtgtaggtccagaggct

SEQ ID NO: 3468406 - DNA, 25 bp, Homo sapien
tggtgcattggctgtcttgagtgta

SEQ ID NO: 3468407 - DNA, 25 bp, Homo sapien
agaggctgcaaggaggcactttgtc

SEQ ID NO: 3468408 - DNA, 25 bp, Homo sapien
caaggaggcactttgtctttcctct

SEQ ID NO: 3468409 - DNA, 25 bp, Homo sapien
gagcccttttaggatgaggcataaa

SEQ ID NO: 3468410 - DNA, 25 bp, Homo sapien
aatgaaagggagcccttttaggatg

SEQ ID NO: 3468411 - DNA, 25 bp, Homo sapien
cttctatagcagaggaggatgctgc

SEQ ID NO: 3468412 - DNA, 25 bp, Homo sapien
cctgtgaaacaggttgaagctccca

SEQ ID NO: 3468413 - DNA, 25 bp, Homo sapien
gatgctgctaacaggagctagtgga

SEQ ID NO: 3468414 - DNA, 25 bp, Homo sapien
gagaaggtgcctgaagcctcatgta

SEQ ID NO: 3468415 - DNA, 25 bp, Homo sapien
tgaaacaattgccagaacttaactt

SEQ ID NO: 3468416 - DNA, 25 bp, Homo sapien
ttgaaacaattgccagaacttaact

SEQ ID NO: 3468417 - DNA, 25 bp, Homo sapien
tttgaaacaattgccagaacttaac

SEQ ID NO: 3468418 - DNA, 25 bp, Homo sapien
cgattagggagatattcctttgagc

SEQ ID NO: 3468419 - DNA, 25 bp, Homo sapien
ctgtctgtattttctcgattaggga

SEQ ID NO: 3468420 - DNA, 25 bp, Homo sapien
gatgccagggatgtatgctttgaac

SEQ ID NO: 3468421 - DNA, 25 bp, Homo sapien
gggctttaatgatgccagggatgta

SEQ ID NO: 3468422 - DNA, 25 bp, Homo sapien
caaggtgcacactatctgctttggg

SEQ ID NO: 3468423 - DNA, 25 bp, Homo sapien
gcctggtagaacagacagcttgcct

SEQ ID NO: 3468424 - DNA, 25 bp, Homo sapien
tctctgactataatgccaagccctg

SEQ ID NO: 3468425 - DNA, 25 bp, Homo sapien
tgcctaaagtcagcaagccaggaag

SEQ ID NO: 3468426 - DNA, 25 bp, Homo sapien
cggcttcggctgatggctattttcc

SEQ ID NO: 3468427 - DNA, 25 bp, Homo sapien
gtgctcccggcttcggctgatggct

SEQ ID NO: 3468428 - DNA, 25 bp, Homo sapien
ttttccttggagagtcagcttgcca

SEQ ID NO: 3468429 - DNA, 25 bp, Homo sapien
tccttggagagtcagcttgccagct

SEQ ID NO: 3468430 - DNA, 25 bp, Homo sapien
ttctgtccagcaagaaaggtctagg

SEQ ID NO: 3468431 - DNA, 25 bp, Homo sapien
tgtccagcaagaaaggtctaggcct

SEQ ID NO: 3468432 - DNA, 25 bp, Homo sapien
cagcaagaaaggtctaggcctgctt

SEQ ID NO: 3468433 - DNA, 25 bp, Homo sapien
tccagcaagaaaggtctaggcctgc

SEQ ID NO: 3468434 - DNA, 25 bp, Homo sapien
agtgaactgtgattggcagatgtcc

SEQ ID NO: 3468435 - DNA, 25 bp, Homo sapien
actgtgattggcagatgtcccccaa

SEQ ID NO: 3468436 - DNA, 25 bp, Homo sapien
tgaactgtgattggcagatgtcccc

SEQ ID NO: 3468437 - DNA, 25 bp, Homo sapien
aactgtgattggcagatgtccccca

SEQ ID NO: 3468438 - DNA, 25 bp, Homo sapien
ctgaagcccagatcaagggctgggc

SEQ ID NO: 3468439 - DNA, 25 bp, Homo sapien
gaagcccagatcaagggctgggcct

SEQ ID NO: 3468440 - DNA, 25 bp, Homo sapien
tcaagggctgggcctgtattgagcc

SEQ ID NO: 3468441 - DNA, 25 bp, Homo sapien
gatcaagggctgggcctgtattgag

SEQ ID NO: 3468442 - DNA, 25 bp, Homo sapien
tgaattcacagactggagtttgagt

SEQ ID NO: 3468443 - DNA, 25 bp, Homo sapien
ccagagtgaattcacagactggagt

SEQ ID NO: 3468444 - DNA, 25 bp, Homo sapien
cagactggagtttgagtttgcagag

SEQ ID NO: 3468445 - DNA, 25 bp, Homo sapien
cacagactggagtttgagtttgcag

SEQ ID NO: 3468446 - DNA, 25 bp, Homo sapien
gtgcagcagtaaccatttcccaggt

SEQ ID NO: 3468447 - DNA, 25 bp, Homo sapien
tgtatggtgcagcagtaaccatttc

SEQ ID NO: 3468448 - DNA, 25 bp, Homo sapien
gttgctaaagccccctcctgtatgg

SEQ ID NO: 3468449 - DNA, 25 bp, Homo sapien
ttcccaggttcatcccagtcaacat

SEQ ID NO: 3468450 - DNA, 25 bp, Homo sapien
tcagaggagaccaaggtactgagac

SEQ ID NO: 3468451 - DNA, 25 bp, Homo sapien
cagaggagaccaaggtactgagact

SEQ ID NO: 3468452 - DNA, 25 bp, Homo sapien
ggagaccaaggtactgagactcatc

SEQ ID NO: 3468453 - DNA, 25 bp, Homo sapien
gaggagaccaaggtactgagactca

SEQ ID NO: 3468454 - DNA, 25 bp, Homo sapien
taggtccatctttatccaaaggcca

SEQ ID NO: 3468455 - DNA, 25 bp, Homo sapien
tatgctaggtccatctttatccaaa

SEQ ID NO: 3468456 - DNA, 25 bp, Homo sapien
tttttatgctaggtccatctttatc

SEQ ID NO: 3468457 - DNA, 25 bp, Homo sapien
tgctaggtccatctttatccaaagg

SEQ ID NO: 3468458 - DNA, 25 bp, Homo sapien
atctccgggtcttgtggctgagaag

SEQ ID NO: 3468459 - DNA, 25 bp, Homo sapien
tgtggtcgataaagaatcgattttc

SEQ ID NO: 3468460 - DNA, 25 bp, Homo sapien
aggacacaggtcagacctgcgtgcc

SEQ ID NO: 3468461 - DNA, 25 bp, Homo sapien
cagctggactgtggtcgataaagaa

SEQ ID NO: 3468462 - DNA, 25 bp, Homo sapien
acaggtcagacctgcgtgcctggct

SEQ ID NO: 3468463 - DNA, 25 bp, Homo sapien
agaaggccttgtgctaactcgagga

SEQ ID NO: 3468464 - DNA, 25 bp, Homo sapien
ctaactcgaggaaagctgccattcc

SEQ ID NO: 3468465 - DNA, 25 bp, Homo sapien
gctaactcgaggaaagctgccattc

SEQ ID NO: 3468466 - DNA, 25 bp, Homo sapien
gaaggccttgtgctaactcgaggaa

SEQ ID NO: 3468467 - DNA, 25 bp, Homo sapien
cagggtcctcgccatcagaataaca

SEQ ID NO: 3468468 - DNA, 25 bp, Homo sapien
tcagggtcctcgccatcagaataac

SEQ ID NO: 3468469 - DNA, 25 bp, Homo sapien
ggctggccttgaatggctgaagctc

SEQ ID NO: 3468470 - DNA, 25 bp, Homo sapien
gtctggaagggctggccttgaatgg

SEQ ID NO: 3468471 - DNA, 25 bp, Homo sapien
tctggaagggctggccttgaatggc

SEQ ID NO: 3468472 - DNA, 25 bp, Homo sapien
aagggctggccttgaatggctgaag

SEQ ID NO: 3468473 - DNA, 25 bp, Homo sapien
caaagctggggcagctgagctcggc

SEQ ID NO: 3468474 - DNA, 25 bp, Homo sapien
aaagctggggcagctgagctcggcc

SEQ ID NO: 3468475 - DNA, 25 bp, Homo sapien
gcaaagctggggcagctgagctcgg

SEQ ID NO: 3468476 - DNA, 25 bp, Homo sapien
ctgcttcttgcaatccaaaaatcta

SEQ ID NO: 3468477 - DNA, 25 bp, Homo sapien
ggtcgttggcacatccctaggttgt

SEQ ID NO: 3468478 - DNA, 25 bp, Homo sapien
ggaacgctgtttgggtttctgcttc

SEQ ID NO: 3468479 - DNA, 25 bp, Homo sapien
caaaaatcctgcattacttgaggaa

SEQ ID NO: 3468480 - DNA, 25 bp, Homo sapien
tgtgtagatctgcagttctgttcgg

SEQ ID NO: 3468481 - DNA, 25 bp, Homo sapien
cttgtgtagatctgcagttctgttc

SEQ ID NO: 3468482 - DNA, 25 bp, Homo sapien
tgtagatctgcagttctgttcggct

SEQ ID NO: 3468483 - DNA, 25 bp, Homo sapien
tagatctgcagttctgttcggctgc

SEQ ID NO: 3468484 - DNA, 25 bp, Homo sapien
taaggagaggaaaccgtggccattc

SEQ ID NO: 3468485 - DNA, 25 bp, Homo sapien
tgtggacgagaaggaagataactcc

SEQ ID NO: 3468486 - DNA, 25 bp, Homo sapien
taactccctgagtagatggcccaga

SEQ ID NO: 3468487 - DNA, 25 bp, Homo sapien
ggcatggtacctatcaaagaagaga

SEQ ID NO: 3468488 - DNA, 25 bp, Homo sapien
gtcttgttctgaacccacaagtttc

SEQ ID NO: 3468489 - DNA, 25 bp, Homo sapien
tcacctttcctatcttctctcgtag

SEQ ID NO: 3468490 - DNA, 25 bp, Homo sapien
tttgtcttgttctgaacccacaagt

SEQ ID NO: 3468491 - DNA, 25 bp, Homo sapien
agaacttggctcatatttttgtctt

SEQ ID NO: 3468492 - DNA, 25 bp, Homo sapien
tcatagtcaattcagggaaagaaga

SEQ ID NO: 3468493 - DNA, 25 bp, Homo sapien
ctcatagtcaattcagggaaagaag

SEQ ID NO: 3468494 - DNA, 25 bp, Homo sapien
caattcagggaaagaagaagcccac

SEQ ID NO: 3468495 - DNA, 25 bp, Homo sapien
cctcatagtcaattcagggaaagaa

SEQ ID NO: 3468496 - DNA, 25 bp, Homo sapien
cctttttattagcacagttatgctc

SEQ ID NO: 3468497 - DNA, 25 bp, Homo sapien
tccctttttattagcacagttatgc

SEQ ID NO: 3468498 - DNA, 25 bp, Homo sapien
ctttttattagcacagttatgctcc

SEQ ID NO: 3468499 - DNA, 25 bp, Homo sapien
ccctttttattagcacagttatgct

SEQ ID NO: 3468500 - DNA, 25 bp, Homo sapien
ggtctctggcaagtcccaaggcaat

SEQ ID NO: 3468501 - DNA, 25 bp, Homo sapien
ggaatcttcaggtctctggcaagtc

SEQ ID NO: 3468502 - DNA, 25 bp, Homo sapien
caatagtttctgctgcaagtgacag

SEQ ID NO: 3468503 - DNA, 25 bp, Homo sapien
caagtcccaaggcaatagtttctgc

SEQ ID NO: 3468504 - DNA, 25 bp, Homo sapien
aaggtccgagcttgctggtaactga

SEQ ID NO: 3468505 - DNA, 25 bp, Homo sapien
cctggaaggtccgagcttgctggta

SEQ ID NO: 3468506 - DNA, 25 bp, Homo sapien
taactgagctcagggaacggaggcc

SEQ ID NO: 3468507 - DNA, 25 bp, Homo sapien
tgctggtaactgagctcagggaacg

SEQ ID NO: 3468508 - DNA, 25 bp, Homo sapien
ctgaaaggtgaaggtggagaaagct

SEQ ID NO: 3468509 - DNA, 25 bp, Homo sapien
attgcagtgaatgggccctttctct

SEQ ID NO: 3468510 - DNA, 25 bp, Homo sapien
gagggacttaattgatcaataattc

SEQ ID NO: 3468511 - DNA, 25 bp, Homo sapien
tgtttaatacccagcagggcattgc

SEQ ID NO: 3468512 - DNA, 25 bp, Homo sapien
tttgagggacttaattgatcaataa

SEQ ID NO: 3468513 - DNA, 25 bp, Homo sapien
atttgaggataaactgtgcgcagac

SEQ ID NO: 3468514 - DNA, 25 bp, Homo sapien
tctagggctgtgttaactccaatcc

SEQ ID NO: 3468515 - DNA, 25 bp, Homo sapien
ttcggctataatggccctctagggc

SEQ ID NO: 3468516 - DNA, 25 bp, Homo sapien
caaagcttcaatacagccaattaca

SEQ ID NO: 3468517 - DNA, 25 bp, Homo sapien
tttctctcttagtgccatttccaaa

SEQ ID NO: 3468518 - DNA, 25 bp, Homo sapien
tttcccatagagttggccagtgggg

SEQ ID NO: 3468519 - DNA, 25 bp, Homo sapien
ggtcctatacctcctaatgacatcc

SEQ ID NO: 3468520 - DNA, 25 bp, Homo sapien
agaagagcctccaactgtcccattt

SEQ ID NO: 3468521 - DNA, 25 bp, Homo sapien
gcctaagtatatcctctcttgaata

SEQ ID NO: 3468522 - DNA, 25 bp, Homo sapien
ctgattggcatgtgaagaatgttac

SEQ ID NO: 3468523 - DNA, 25 bp, Homo sapien
gagcttctccttgcctaagtatatc

SEQ ID NO: 3468524 - DNA, 25 bp, Homo sapien
tcctctcttgaataactgattggca

SEQ ID NO: 3468525 - DNA, 25 bp, Homo sapien
caacagtctctttgtcccgatagcc

SEQ ID NO: 3468526 - DNA, 25 bp, Homo sapien
gggagcagcattaatgagctcaaat

SEQ ID NO: 3468527 - DNA, 25 bp, Homo sapien
gagctcaaattgtagccagaacttt

SEQ ID NO: 3468528 - DNA, 25 bp, Homo sapien
tggaaatccacagttaccaacagtc

SEQ ID NO: 3468529 - DNA, 25 bp, Homo sapien
ttgacggagtctgcataaccaggtg

SEQ ID NO: 3468530 - DNA, 25 bp, Homo sapien
ggaaaggctttgcattctggtctgc

SEQ ID NO: 3468531 - DNA, 25 bp, Homo sapien
tcccatgtcttgtgtgaatactaac

SEQ ID NO: 3468532 - DNA, 25 bp, Homo sapien
tgggtgtcctctcctcctggaaagg

SEQ ID NO: 3468533 - DNA, 25 bp, Homo sapien
ttggagaggagtcacacggggctgc

SEQ ID NO: 3468534 - DNA, 25 bp, Homo sapien
tcatggagctaatgtctccggggac

SEQ ID NO: 3468535 - DNA, 25 bp, Homo sapien
ctctgggctgggaccatggtttctg

SEQ ID NO: 3468536 - DNA, 25 bp, Homo sapien
gagctaatgtctccggggacactct

SEQ ID NO: 3468537 - DNA, 25 bp, Homo sapien
aggagttgctgagggagccccaaat

SEQ ID NO: 3468538 - DNA, 25 bp, Homo sapien
cacaattgcagtaaggggagggact

SEQ ID NO: 3468539 - DNA, 25 bp, Homo sapien
tgagggagccccaaatttgcgtaag

SEQ ID NO: 3468540 - DNA, 25 bp, Homo sapien
caaatttgcgtaaggcctgattcct

SEQ ID NO: 3468541 - DNA, 25 bp, Homo sapien
gcgtgcagaactcctgcatcactga

SEQ ID NO: 3468542 - DNA, 25 bp, Homo sapien
tagcctttctatccgcagagatgat

SEQ ID NO: 3468543 - DNA, 25 bp, Homo sapien
gaggccgttctggactagcctttct

SEQ ID NO: 3468544 - DNA, 25 bp, Homo sapien
cacggcgtgcagaactcctgcatca

SEQ ID NO: 3468545 - DNA, 25 bp, Homo sapien
tggatctaagtggccccgggggaga

SEQ ID NO: 3468546 - DNA, 25 bp, Homo sapien
aggagctgctccttgaaagtatatg

SEQ ID NO: 3468547 - DNA, 25 bp, Homo sapien
tatatggggaagtggatctaagtgg

SEQ ID NO: 3468548 - DNA, 25 bp, Homo sapien
gagctgctccttgaaagtatatggg

SEQ ID NO: 3468549 - DNA, 25 bp, Homo sapien
catgtcttcaaagccgtgctgtctt

SEQ ID NO: 3468550 - DNA, 25 bp, Homo sapien
tccagacatgtcttcaaagccgtgc

SEQ ID NO: 3468551 - DNA, 25 bp, Homo sapien
cgtctttatcttggtgcccgtgaac

SEQ ID NO: 3468552 - DNA, 25 bp, Homo sapien
gcagataacagtgccgataggagag

SEQ ID NO: 3468553 - DNA, 25 bp, Homo sapien
acagttgctgcagaacagggggcgg

SEQ ID NO: 3468554 - DNA, 25 bp, Homo sapien
ggagctggagagagcgtctagggcc

SEQ ID NO: 3468555 - DNA, 25 bp, Homo sapien
ctggagagagcgtctagggccagcg

SEQ ID NO: 3468556 - DNA, 25 bp, Homo sapien
agagagcgtctagggccagcgctgg

SEQ ID NO: 3468557 - DNA, 25 bp, Homo sapien
catggtgtcatgaagatggcaagat

SEQ ID NO: 3468558 - DNA, 25 bp, Homo sapien
gagactacagttggactcggtcctg

SEQ ID NO: 3468559 - DNA, 25 bp, Homo sapien
gaaaatgcctttaggcggattagga

SEQ ID NO: 3468560 - DNA, 25 bp, Homo sapien
taccccagggttgtggatagaggta

SEQ ID NO: 3468561 - DNA, 25 bp, Homo sapien
cttgccaggacccacgctgaaaagc

SEQ ID NO: 3468562 - DNA, 25 bp, Homo sapien
tgccaggacccacgctgaaaagcca

SEQ ID NO: 3468563 - DNA, 25 bp, Homo sapien
gaaaagccaggcttctacaatgacc

SEQ ID NO: 3468564 - DNA, 25 bp, Homo sapien
gccaggcttctacaatgaccctcat

SEQ ID NO: 3468565 - DNA, 25 bp, Homo sapien
gccaaggagtgcatagaaaggcctt

SEQ ID NO: 3468566 - DNA, 25 bp, Homo sapien
ggagcctgggttctttgacgtcatt

SEQ ID NO: 3468567 - DNA, 25 bp, Homo sapien
gcagcggtgctgttgtaagaagaaa

SEQ ID NO: 3468568 - DNA, 25 bp, Homo sapien
aagtctgaaactgtggcagcggtgc

SEQ ID NO: 3468569 - DNA, 25 bp, Homo sapien
gttgtttttcctgataataaacaga

SEQ ID NO: 3468570 - DNA, 25 bp, Homo sapien
agataagaaagaggaatctcatgga

SEQ ID NO: 3468571 - DNA, 25 bp, Homo sapien
gaagctgagttttggcagataagaa

SEQ ID NO: 3468572 - DNA, 25 bp, Homo sapien
ttttcctgataataaacagactcct

SEQ ID NO: 3468573 - DNA, 25 bp, Homo sapien
ttgtttttaagaagcccatgcggtc

SEQ ID NO: 3468574 - DNA, 25 bp, Homo sapien
gggaagcggccatttctacctgctg

SEQ ID NO: 3468575 - DNA, 25 bp, Homo sapien
tagttctgcagacctaatggacttc

SEQ ID NO: 3468576 - DNA, 25 bp, Homo sapien
gcccaagaaaatgacatcccacgat

SEQ ID NO: 3468577 - DNA, 25 bp, Homo sapien
cactaaaagccaatgaatcatgtcc

SEQ ID NO: 3468578 - DNA, 25 bp, Homo sapien
gcaattatagcaaatttgcctaatg

SEQ ID NO: 3468579 - DNA, 25 bp, Homo sapien
gaagatgtcggatgctggcagctgc

SEQ ID NO: 3468580 - DNA, 25 bp, Homo sapien
agctgccttgataacctcggtttta

SEQ ID NO: 3468581 - DNA, 25 bp, Homo sapien
tggtgcacgactccaagagggttct

SEQ ID NO: 3468582 - DNA, 25 bp, Homo sapien
gctttacatgtggatgcaacttcac

SEQ ID NO: 3468583 - DNA, 25 bp, Homo sapien
cgacaagctcgggtgctgagcagct

SEQ ID NO: 3468584 - DNA, 25 bp, Homo sapien
tgtcacccctgtggcgtcgctgtga

SEQ ID NO: 3468585 - DNA, 25 bp, Homo sapien
gcagttgactggcagcaggtctgcg

SEQ ID NO: 3468586 - DNA, 25 bp, Homo sapien
ctggcagttgactggcagcaggtct

SEQ ID NO: 3468587 - DNA, 25 bp, Homo sapien
cagaactcaggccagtgatctcttt

SEQ ID NO: 3468588 - DNA, 25 bp, Homo sapien
gtggcctgtttcagaactcaggcca

SEQ ID NO: 3468589 - DNA, 25 bp, Homo sapien
cacagcccagataggacaaggacat

SEQ ID NO: 3468590 - DNA, 25 bp, Homo sapien
cagaggaccacagcccagataggac

SEQ ID NO: 3468591 - DNA, 25 bp, Homo sapien
aacatatagtgtgcagctgagagct

SEQ ID NO: 3468592 - DNA, 25 bp, Homo sapien
ctggaaaggctctgcgatgagaaga

SEQ ID NO: 3468593 - DNA, 25 bp, Homo sapien
catgtgacgttaccccaatgcagtc

SEQ ID NO: 3468594 - DNA, 25 bp, Homo sapien
catcaggaggtcattgaagctcaga

SEQ ID NO: 3468595 - DNA, 25 bp, Homo sapien
ccagttgttgcgtagcttctccaga

SEQ ID NO: 3468596 - DNA, 25 bp, Homo sapien
ctttgccagcctcctatttgaaggg

SEQ ID NO: 3468597 - DNA, 25 bp, Homo sapien
taatcttcgggcaaaggctttcaac

SEQ ID NO: 3468598 - DNA, 25 bp, Homo sapien
taaaaggatgctgccacctggacta

SEQ ID NO: 3468599 - DNA, 25 bp, Homo sapien
ctagaacctcgctgccctgtatgtg

SEQ ID NO: 3468600 - DNA, 25 bp, Homo sapien
tcagggcccctacagtaaaggtcag

SEQ ID NO: 3468601 - DNA, 25 bp, Homo sapien
tgaatgagttgtcagttcctttccg

SEQ ID NO: 3468602 - DNA, 25 bp, Homo sapien
caacaagtctcttgtgagtatccat

SEQ ID NO: 3468603 - DNA, 25 bp, Homo sapien
ttactctttcaacaagtctcttgtg

SEQ ID NO: 3468604 - DNA, 25 bp, Homo sapien
ctttccgctttcatttactctttca

SEQ ID NO: 3468605 - DNA, 25 bp, Homo sapien
ccttgaagaacacccttccagaggg

SEQ ID NO: 3468606 - DNA, 25 bp, Homo sapien
gccttgaagaacacccttccagagg

SEQ ID NO: 3468607 - DNA, 25 bp, Homo sapien
gggctgtgtccaggtagtgccaagg

SEQ ID NO: 3468608 - DNA, 25 bp, Homo sapien
ctgtgtccaggtagtgccaaggcaa

SEQ ID NO: 3468609 - DNA, 25 bp, Homo sapien
tggggctgtgtccaggtagtgccaa

SEQ ID NO: 3468610 - DNA, 25 bp, Homo sapien
gctgtgtccaggtagtgccaaggca

SEQ ID NO: 3468611 - DNA, 25 bp, Homo sapien
gcgctttctggcttcctgggtcctg

SEQ ID NO: 3468612 - DNA, 25 bp, Homo sapien
tgcgctttctggcttcctgggtcct

SEQ ID NO: 3468613 - DNA, 25 bp, Homo sapien
cgctttctggcttcctgggtcctgc

SEQ ID NO: 3468614 - DNA, 25 bp, Homo sapien
ctgcgctttctggcttcctgggtcc

SEQ ID NO: 3468615 - DNA, 25 bp, Homo sapien
ggagtgatactaattgctaccacca

SEQ ID NO: 3468616 - DNA, 25 bp, Homo sapien
attccacaggactaggagtgatact

SEQ ID NO: 3468617 - DNA, 25 bp, Homo sapien
caggactaggagtgatactaattgc

SEQ ID NO: 3468618 - DNA, 25 bp, Homo sapien
tgatactaattgctaccaccacaac

SEQ ID NO: 3468619 - DNA, 25 bp, Homo sapien
ggaatccttcctccacaacaaatgc

SEQ ID NO: 3468620 - DNA, 25 bp, Homo sapien
gggaacaggaatccttcctccacaa

SEQ ID NO: 3468621 - DNA, 25 bp, Homo sapien
aacaggaatccttcctccacaacaa

SEQ ID NO: 3468622 - DNA, 25 bp, Homo sapien
cactggggaacaggaatccttcctc

SEQ ID NO: 3468623 - DNA, 25 bp, Homo sapien
tagagccaggatcctagccttgatc

SEQ ID NO: 3468624 - DNA, 25 bp, Homo sapien
ccacgacctagagccaggatcctag

SEQ ID NO: 3468625 - DNA, 25 bp, Homo sapien
agtgaaccacgacctagagccagga

SEQ ID NO: 3468626 - DNA, 25 bp, Homo sapien
ctcctacccatccaaaactgatggg

SEQ ID NO: 3468627 - DNA, 25 bp, Homo sapien
tgggtcacgaaagagattcaaagtc

SEQ ID NO: 3468628 - DNA, 25 bp, Homo sapien
ggtcacgaaagagattcaaagtcat

SEQ ID NO: 3468629 - DNA, 25 bp, Homo sapien
ctgggtcacgaaagagattcaaagt

SEQ ID NO: 3468630 - DNA, 25 bp, Homo sapien
gggtcacgaaagagattcaaagtca

SEQ ID NO: 3468631 - DNA, 25 bp, Homo sapien
tctacattaccagtcagccagcagt

SEQ ID NO: 3468632 - DNA, 25 bp, Homo sapien
gacagcataggataagcaagaccag

SEQ ID NO: 3468633 - DNA, 25 bp, Homo sapien
gatgctgacaggtaacttgccctct

SEQ ID NO: 3468634 - DNA, 25 bp, Homo sapien
tgtggcttcccatatctttctgtga

SEQ ID NO: 3468635 - DNA, 25 bp, Homo sapien
gcttttatcttgtctaaaaagagta

SEQ ID NO: 3468636 - DNA, 25 bp, Homo sapien
aaagagtagttcttctaactttcat

SEQ ID NO: 3468637 - DNA, 25 bp, Homo sapien
tgtctaaaaagagtagttcttctaa

SEQ ID NO: 3468638 - DNA, 25 bp, Homo sapien
ttatcttgtctaaaaagagtagttc

SEQ ID NO: 3468639 - DNA, 25 bp, Homo sapien
tgccaacttcaagtctccaagctca

SEQ ID NO: 3468640 - DNA, 25 bp, Homo sapien
tactaagaaggctgaggccaccatg

SEQ ID NO: 3468641 - DNA, 25 bp, Homo sapien
gccccaaagtagaggtgacttcacc

SEQ ID NO: 3468642 - DNA, 25 bp, Homo sapien
gacttcacctccttctttactaaga

SEQ ID NO: 3468643 - DNA, 25 bp, Homo sapien
gagcagagagtgactaccaaagttg

SEQ ID NO: 3468644 - DNA, 25 bp, Homo sapien
tgatctgtgttgtctgaagttcaga

SEQ ID NO: 3468645 - DNA, 25 bp, Homo sapien
atgacgtgcaatcaccaacatagag

SEQ ID NO: 3468646 - DNA, 25 bp, Homo sapien
ccccttccctaaaatgacgtgcaat

SEQ ID NO: 3468647 - DNA, 25 bp, Homo sapien
ttcatccacttcatagatgtgtctt

SEQ ID NO: 3468648 - DNA, 25 bp, Homo sapien
tctctccagtaggaagacattgaag

SEQ ID NO: 3468649 - DNA, 25 bp, Homo sapien
tcctctctccagtaggaagacattg

SEQ ID NO: 3468650 - DNA, 25 bp, Homo sapien
aagacattgaagtggtttggctgtg

SEQ ID NO: 3468651 - DNA, 25 bp, Homo sapien
taggaagacattgaagtggtttggc

SEQ ID NO: 3468652 - DNA, 25 bp, Homo sapien
ccgtaagccaggctcgaccaccctt

SEQ ID NO: 3468653 - DNA, 25 bp, Homo sapien
ggctcgaccacccttgtcagcaatg

SEQ ID NO: 3468654 - DNA, 25 bp, Homo sapien
aaaaattcgtctgtgacaaaagtgc

SEQ ID NO: 3468655 - DNA, 25 bp, Homo sapien
tgtcagcaatgtggacaaaaaattc

SEQ ID NO: 3468656 - DNA, 25 bp, Homo sapien
aaaggtgttctcagacgactgctca

SEQ ID NO: 3468657 - DNA, 25 bp, Homo sapien
tccgttgcagaattagggtaagtcc

SEQ ID NO: 3468658 - DNA, 25 bp, Homo sapien
gactgctcaacagacaggacaatgg

SEQ ID NO: 3468659 - DNA, 25 bp, Homo sapien
tgtgccacgtgtaggaaaggtgttc

SEQ ID NO: 3468660 - DNA, 25 bp, Homo sapien
gtgtgggtgacttttggaaatgcac

SEQ ID NO: 3468661 - DNA, 25 bp, Homo sapien
ggcaggaagtgtgggtgacttttgg

SEQ ID NO: 3468662 - DNA, 25 bp, Homo sapien
tcaggcaggaagtgtgggtgacttt

SEQ ID NO: 3468663 - DNA, 25 bp, Homo sapien
ctgtgatcaggcaggaagtgtgggt

SEQ ID NO: 3468664 - DNA, 25 bp, Homo sapien
gtaaaagcggacagaccaggaaggc

SEQ ID NO: 3468665 - DNA, 25 bp, Homo sapien
ggagtaaaagcggacagaccaggaa

SEQ ID NO: 3468666 - DNA, 25 bp, Homo sapien
accaggaaggcctgactttatccac

SEQ ID NO: 3468667 - DNA, 25 bp, Homo sapien
taaaagcggacagaccaggaaggcc

SEQ ID NO: 3468668 - DNA, 25 bp, Homo sapien
tacgtctggatcgaagctgtaccaa

SEQ ID NO: 3468669 - DNA, 25 bp, Homo sapien
tggtgagtgaaaccttggtcctctg

SEQ ID NO: 3468670 - DNA, 25 bp, Homo sapien
gatgttgctattaatggtccccagg

SEQ ID NO: 3468671 - DNA, 25 bp, Homo sapien
tctcctggcattttagggtctacgt

SEQ ID NO: 3468672 - DNA, 25 bp, Homo sapien
tgattttcttgtttgttgtctgctg

SEQ ID NO: 3468673 - DNA, 25 bp, Homo sapien
attttcttgtttgttgtctgctgac

SEQ ID NO: 3468674 - DNA, 25 bp, Homo sapien
tcatgattttcttgtttgttgtctg

SEQ ID NO: 3468675 - DNA, 25 bp, Homo sapien
catgattttcttgtttgttgtctgc

SEQ ID NO: 3468676 - DNA, 25 bp, Homo sapien
aattggatgtttctgtcttattgaa

SEQ ID NO: 3468677 - DNA, 25 bp, Homo sapien
tgatacattcgagatgaatcagtga

SEQ ID NO: 3468678 - DNA, 25 bp, Homo sapien
ttcctgagctgatacattcgagatg

SEQ ID NO: 3468679 - DNA, 25 bp, Homo sapien
gatgaatcagtgaggccctcaatga

SEQ ID NO: 3468680 - DNA, 25 bp, Homo sapien
tgttgttctgaagcccctgctccaa

SEQ ID NO: 3468681 - DNA, 25 bp, Homo sapien
gggcagctgcaaggctcctttgcaa

SEQ ID NO: 3468682 - DNA, 25 bp, Homo sapien
caaactgtgttcaggtgtgtgggct

SEQ ID NO: 3468683 - DNA, 25 bp, Homo sapien
tcctcatggactgactgttgttctg

SEQ ID NO: 3468684 - DNA, 25 bp, Homo sapien
tcaccttttttctccccttgctgta

SEQ ID NO: 3468685 - DNA, 25 bp, Homo sapien
ttatgtatagcctgcaatttcacct

SEQ ID NO: 3468686 - DNA, 25 bp, Homo sapien
ttttctccccttgctgtaggaaagc

SEQ ID NO: 3468687 - DNA, 25 bp, Homo sapien
gcctgcaatttcaccttttttctcc

SEQ ID NO: 3468688 - DNA, 25 bp, Homo sapien
ggcccactccgcatcctgagcagcc

SEQ ID NO: 3468689 - DNA, 25 bp, Homo sapien
gggacagcggcccactccgcatcct

SEQ ID NO: 3468690 - DNA, 25 bp, Homo sapien
gagacagcagctgaggtatggcctg

SEQ ID NO: 3468691 - DNA, 25 bp, Homo sapien
catattcatcagatgggagacagca

SEQ ID NO: 3468692 - DNA, 25 bp, Homo sapien
caggattgtcctgatagaagctact

SEQ ID NO: 3468693 - DNA, 25 bp, Homo sapien
acatcttctttggttggcacaaaac

SEQ ID NO: 3468694 - DNA, 25 bp, Homo sapien
aagccagtacttttgagcagcagca

SEQ ID NO: 3468695 - DNA, 25 bp, Homo sapien
tcttggtttaccctgggtgacatct

SEQ ID NO: 3468696 - DNA, 25 bp, Homo sapien
tagccacctgttggactcgtccact

SEQ ID NO: 3468697 - DNA, 25 bp, Homo sapien
ctgttggactcgtccacttcggttt

SEQ ID NO: 3468698 - DNA, 25 bp, Homo sapien
gactcagggatatctagccacctgt

SEQ ID NO: 3468699 - DNA, 25 bp, Homo sapien
gatatctagccacctgttggactcg

SEQ ID NO: 3468700 - DNA, 25 bp, Homo sapien
acaaggccttgcacaaattcacccc

SEQ ID NO: 3468701 - DNA, 25 bp, Homo sapien
aaggccttgcacaaattcacccctt

SEQ ID NO: 3468702 - DNA, 25 bp, Homo sapien
atacaaggccttgcacaaattcacc

SEQ ID NO: 3468703 - DNA, 25 bp, Homo sapien
aggccttgcacaaattcaccccttc

SEQ ID NO: 3468704 - DNA, 25 bp, Homo sapien
caggatggttagttcttcctgttca

SEQ ID NO: 3468705 - DNA, 25 bp, Homo sapien
cttcctgttcatcaagggccagttc

SEQ ID NO: 3468706 - DNA, 25 bp, Homo sapien
agacattttcttccaccaggatggt

SEQ ID NO: 3468707 - DNA, 25 bp, Homo sapien
tcatcaagggccagttcaatggcca

SEQ ID NO: 3468708 - DNA, 25 bp, Homo sapien
tagacttatcagctaggcacaaaag

SEQ ID NO: 3468709 - DNA, 25 bp, Homo sapien
tattgagctctaatttccacaaacg

SEQ ID NO: 3468710 - DNA, 25 bp, Homo sapien
tctacatccccaaatatggcttgct

SEQ ID NO: 3468711 - DNA, 25 bp, Homo sapien
tggcacctgctgagcatatgtcctt

SEQ ID NO: 3468712 - DNA, 25 bp, Homo sapien
ttcccaggtaactgtgaagatactt

SEQ ID NO: 3468713 - DNA, 25 bp, Homo sapien
tcccaggtaactgtgaagatacttt

SEQ ID NO: 3468714 - DNA, 25 bp, Homo sapien
ttttctcagccatgaaggcttcaca

SEQ ID NO: 3468715 - DNA, 25 bp, Homo sapien
tgaaggcttcacacaggtctccctg

SEQ ID NO: 3468716 - DNA, 25 bp, Homo sapien
atgaaggcttcacacaggtctccct

SEQ ID NO: 3468717 - DNA, 25 bp, Homo sapien
cttagttgttctgctgaagaaatca

SEQ ID NO: 3468718 - DNA, 25 bp, Homo sapien
gggtgtggacacggcatcccagacc

SEQ ID NO: 3468719 - DNA, 25 bp, Homo sapien
gcactttggagctgagacgaagact

SEQ ID NO: 3468720 - DNA, 25 bp, Homo sapien
agcagaggttcccagatggcacttt

SEQ ID NO: 3468721 - DNA, 25 bp, Homo sapien
ctcctctcttcttcgcattgtcctc

SEQ ID NO: 3468722 - DNA, 25 bp, Homo sapien
ttcttcgcattgtcctcttttcctc

SEQ ID NO: 3468723 - DNA, 25 bp, Homo sapien
ctgtctaatgctgggcccctttttg

SEQ ID NO: 3468724 - DNA, 25 bp, Homo sapien
ctcctgtctaatgctgggccccttt

SEQ ID NO: 3468725 - DNA, 25 bp, Homo sapien
aaattccttgatacctctgcaagaa

SEQ ID NO: 3468726 - DNA, 25 bp, Homo sapien
ctgcaaaagaaattccttgatacct

SEQ ID NO: 3468727 - DNA, 25 bp, Homo sapien
gaaattccttgatacctctgcaaga

SEQ ID NO: 3468728 - DNA, 25 bp, Homo sapien
aaagaaattccttgatacctctgca

SEQ ID NO: 3468729 - DNA, 25 bp, Homo sapien
cctttgctccttgggtgccaagatt

SEQ ID NO: 3468730 - DNA, 25 bp, Homo sapien
aggctggcagacatttttatccttg

SEQ ID NO: 3468731 - DNA, 25 bp, Homo sapien
gctggcagacatttttatccttgct

SEQ ID NO: 3468732 - DNA, 25 bp, Homo sapien
ggcagacatttttatccttgctcct

SEQ ID NO: 3468733 - DNA, 25 bp, Homo sapien
tcagaataccattcggcatcagccc

SEQ ID NO: 3468734 - DNA, 25 bp, Homo sapien
gccaaggctaaatgtaggtctctct

SEQ ID NO: 3468735 - DNA, 25 bp, Homo sapien
ggtctctctaggttcatatatatct

SEQ ID NO: 3468736 - DNA, 25 bp, Homo sapien
ctttgggtccagagagatgcctatc

SEQ ID NO: 3468737 - DNA, 25 bp, Homo sapien
ccaccacgccggccacaaatagtgc

SEQ ID NO: 3468738 - DNA, 25 bp, Homo sapien
gtccttccaccacgccggccacaaa

SEQ ID NO: 3468739 - DNA, 25 bp, Homo sapien
ttccaccacgccggccacaaatagt

SEQ ID NO: 3468740 - DNA, 25 bp, Homo sapien
ccttccaccacgccggccacaaata

SEQ ID NO: 3468741 - DNA, 25 bp, Homo sapien
cgcgctgatcggagaatgagtgaca

SEQ ID NO: 3468742 - DNA, 25 bp, Homo sapien
gcaactcggagatccttgcgctggc

SEQ ID NO: 3468743 - DNA, 25 bp, Homo sapien
tcttgccgcggtaaattctgtgccc

SEQ ID NO: 3468744 - DNA, 25 bp, Homo sapien
gcagaattgtttcctgccagcggca

SEQ ID NO: 3468745 - DNA, 25 bp, Homo sapien
tccaaatgaaatccttagtttggca

SEQ ID NO: 3468746 - DNA, 25 bp, Homo sapien
aatgaaatccttagtttggcagcat

SEQ ID NO: 3468747 - DNA, 25 bp, Homo sapien
caaatgaaatccttagtttggcagc

SEQ ID NO: 3468748 - DNA, 25 bp, Homo sapien
aacaaagtccaaatgaaatccttag

SEQ ID NO: 3468749 - DNA, 25 bp, Homo sapien
aaaataatagcgttcctcctaggag

SEQ ID NO: 3468750 - DNA, 25 bp, Homo sapien
gacgcgctcctttcacagctaaacg

SEQ ID NO: 3468751 - DNA, 25 bp, Homo sapien
taaacgaaaatgaccagccttagca

SEQ ID NO: 3468752 - DNA, 25 bp, Homo sapien
ttagcagtccacgtaaaaccaccca

SEQ ID NO: 3468753 - DNA, 25 bp, Homo sapien
tattgttcactcttcccggagccgg

SEQ ID NO: 3468754 - DNA, 25 bp, Homo sapien
acaccaacaacaacggccgtgcgat

SEQ ID NO: 3468755 - DNA, 25 bp, Homo sapien
gggaagcaaagcagcgatcctgact

SEQ ID NO: 3468756 - DNA, 25 bp, Homo sapien
ttagacccaggaatataacgatctg

SEQ ID NO: 3468757 - DNA, 25 bp, Homo sapien
tcccatccttcagtgctcgcggccg

SEQ ID NO: 3468758 - DNA, 25 bp, Homo sapien
ttcctcctgtcaaaacgcggcgctc

SEQ ID NO: 3468759 - DNA, 25 bp, Homo sapien
gctcgcggccgagggtaggctttgc

SEQ ID NO: 3468760 - DNA, 25 bp, Homo sapien
cggcgctcgaccctcccatccttca

SEQ ID NO: 3468761 - DNA, 25 bp, Homo sapien
ggtgggcacgcacagaagaattttc

SEQ ID NO: 3468762 - DNA, 25 bp, Homo sapien
cacactttgccaggatcgggaacct

SEQ ID NO: 3468763 - DNA, 25 bp, Homo sapien
ccgttaggctgaagcaccgggagac

SEQ ID NO: 3468764 - DNA, 25 bp, Homo sapien
gtacaacggtacctggagctgcgac

SEQ ID NO: 3468765 - DNA, 25 bp, Homo sapien
caggcgggggaccggccgcagggcg

SEQ ID NO: 3468766 - DNA, 25 bp, Homo sapien
cgggcaggcgggggaccggccgcag

SEQ ID NO: 3468767 - DNA, 25 bp, Homo sapien
gcaggcgggggaccggccgcagggc

SEQ ID NO: 3468768 - DNA, 25 bp, Homo sapien
attccgcggcgcgagagtgagcgct

SEQ ID NO: 3468769 - DNA, 25 bp, Homo sapien
ggagcactcccggtgaccacctagt

SEQ ID NO: 3468770 - DNA, 25 bp, Homo sapien
gcgcgtaggtgtgcctgccaggatg

SEQ ID NO: 3468771 - DNA, 25 bp, Homo sapien
tccaagtcggcgtgaaagaggcgag

SEQ ID NO: 3468772 - DNA, 25 bp, Homo sapien
aagaggtcgctttcattccagggaa

SEQ ID NO: 3468773 - DNA, 25 bp, Homo sapien
tcacgatgatggaaaggaccgccag

SEQ ID NO: 3468774 - DNA, 25 bp, Homo sapien
aaatatccgggctccattgtcacgc

SEQ ID NO: 3468775 - DNA, 25 bp, Homo sapien
tccacgggatccaaatactgatgac

SEQ ID NO: 3468776 - DNA, 25 bp, Homo sapien
tcagttaccactgccctggacatgc

SEQ ID NO: 3468777 - DNA, 25 bp, Homo sapien
ggttagcttgccttatatgtaaatt

SEQ ID NO: 3468778 - DNA, 25 bp, Homo sapien
cttgacgtattaaggttagcttgcc

SEQ ID NO: 3468779 - DNA, 25 bp, Homo sapien
cagcccatcggactcacttgacgta

SEQ ID NO: 3468780 - DNA, 25 bp, Homo sapien
ccgatggtatcttgttagaaaccca

SEQ ID NO: 3468781 - DNA, 25 bp, Homo sapien
gaaacccagtcctatccattccttg

SEQ ID NO: 3468782 - DNA, 25 bp, Homo sapien
taaccattccagatcgttcaagcga

SEQ ID NO: 3468783 - DNA, 25 bp, Homo sapien
cttgactcttgcaagtttaactggc

SEQ ID NO: 3468784 - DNA, 25 bp, Homo sapien
tcatagcccacacgtctacaatgtc

SEQ ID NO: 3468785 - DNA, 25 bp, Homo sapien
cacacgtctacaatgtctggattat

SEQ ID NO: 3468786 - DNA, 25 bp, Homo sapien
taaatcatagcccacacgtctacaa

SEQ ID NO: 3468787 - DNA, 25 bp, Homo sapien
tagcccacacgtctacaatgtctgg

SEQ ID NO: 3468788 - DNA, 25 bp, Homo sapien
tcttcgcagcttgaactaagcaaaa

SEQ ID NO: 3468789 - DNA, 25 bp, Homo sapien
gcagcttgaactaagcaaaagtgct

SEQ ID NO: 3468790 - DNA, 25 bp, Homo sapien
tcgcagcttgaactaagcaaaagtg

SEQ ID NO: 3468791 - DNA, 25 bp, Homo sapien
gatttcttcgcagcttgaactaagc

SEQ ID NO: 3468792 - DNA, 25 bp, Homo sapien
gcttcattcgggcacttactgatat

SEQ ID NO: 3468793 - DNA, 25 bp, Homo sapien
ctgcctgcttcattcgggcacttac

SEQ ID NO: 3468794 - DNA, 25 bp, Homo sapien
ctgcttcattcgggcacttactgat

SEQ ID NO: 3468795 - DNA, 25 bp, Homo sapien
gcctgcttcattcgggcacttactg

SEQ ID NO: 3468796 - DNA, 25 bp, Homo sapien
ggttttggactgtcttcacccacaa

SEQ ID NO: 3468797 - DNA, 25 bp, Homo sapien
cacaaagtatcacgacacaattcta

SEQ ID NO: 3468798 - DNA, 25 bp, Homo sapien
gctgttaggccttccttaataaaga

SEQ ID NO: 3468799 - DNA, 25 bp, Homo sapien
aaagcaaacttatctgatacagctg

SEQ ID NO: 3468800 - DNA, 25 bp, Homo sapien
cagaggatctgtgttcaacagacaa

SEQ ID NO: 3468801 - DNA, 25 bp, Homo sapien
tgtatgaaaccttttaactcagtga

SEQ ID NO: 3468802 - DNA, 25 bp, Homo sapien
tatggaccactctacataagcccaa

SEQ ID NO: 3468803 - DNA, 25 bp, Homo sapien
tcttcagaacagcaacccaaacaca

SEQ ID NO: 3468804 - DNA, 25 bp, Homo sapien
ccttaagctatcaaaatggtggaga

SEQ ID NO: 3468805 - DNA, 25 bp, Homo sapien
gctgagtaacagctccccagaataa

SEQ ID NO: 3468806 - DNA, 25 bp, Homo sapien
tactactgtagtaatgtggtaaagc

SEQ ID NO: 3468807 - DNA, 25 bp, Homo sapien
taaagctattagatatgtgaaaggg

SEQ ID NO: 3468808 - DNA, 25 bp, Homo sapien
tagccattaacacgtacttattgtg

SEQ ID NO: 3468809 - DNA, 25 bp, Homo sapien
tagtggatgtaatcagttcatagcc

SEQ ID NO: 3468810 - DNA, 25 bp, Homo sapien
cattgttgaacctgagtgaagttac

SEQ ID NO: 3468811 - DNA, 25 bp, Homo sapien
tcgaacttactgagatactgaatcc

SEQ ID NO: 3468812 - DNA, 25 bp, Homo sapien
gaatcatcaattagctgccaccaga

SEQ ID NO: 3468813 - DNA, 25 bp, Homo sapien
taaagaagtctaactgcctccagga

SEQ ID NO: 3468814 - DNA, 25 bp, Homo sapien
tcctgttgttgggaggcactgctct

SEQ ID NO: 3468815 - DNA, 25 bp, Homo sapien
gaaccctgcctagtgcatccttgtg

SEQ ID NO: 3468816 - DNA, 25 bp, Homo sapien
taactgatggagaaattcccctgaa

SEQ ID NO: 3468817 - DNA, 25 bp, Homo sapien
gatctgggcacacacgattaaatcg

SEQ ID NO: 3468818 - DNA, 25 bp, Homo sapien
catcttagtgtcgagagttgtttgg

SEQ ID NO: 3468819 - DNA, 25 bp, Homo sapien
cgtgtgtgtatgaaagacattcgga

SEQ ID NO: 3468820 - DNA, 25 bp, Homo sapien
gcttacactgggaattgtagacagt

SEQ ID NO: 3468821 - DNA, 25 bp, Homo sapien
cattgtcatgaataacagggtcttc

SEQ ID NO: 3468822 - DNA, 25 bp, Homo sapien
tcttagcctgtacactggtctctgc

SEQ ID NO: 3468823 - DNA, 25 bp, Homo sapien
gataaatacaagcttccatgtgcct

SEQ ID NO: 3468824 - DNA, 25 bp, Homo sapien
tattgaatgctagagtccttttcag

SEQ ID NO: 3468825 - DNA, 25 bp, Homo sapien
tcttgccccatgcattaaacattca

SEQ ID NO: 3468826 - DNA, 25 bp, Homo sapien
cttttcaggttttcggcaaggctat

SEQ ID NO: 3468827 - DNA, 25 bp, Homo sapien
caaacataggtggtttaaagctact

SEQ ID NO: 3468828 - DNA, 25 bp, Homo sapien
taaaatgcctcccaaggtagtggtg

SEQ ID NO: 3468829 - DNA, 25 bp, Homo sapien
gcctggccttctacggtctatttag

SEQ ID NO: 3468830 - DNA, 25 bp, Homo sapien
aatattaatagtcatgctgacggcc

SEQ ID NO: 3468831 - DNA, 25 bp, Homo sapien
cggtgatgtcgctgtttaaaatgcc

SEQ ID NO: 3468832 - DNA, 25 bp, Homo sapien
ctacccaaggctataacacaaagaa

SEQ ID NO: 3468833 - DNA, 25 bp, Homo sapien
ccattggttcgcatcaagttgtcaa

SEQ ID NO: 3468834 - DNA, 25 bp, Homo sapien
tcctattacaccctgatgagcgggt

SEQ ID NO: 3468835 - DNA, 25 bp, Homo sapien
catgacaagaagagacctaaagatc

SEQ ID NO: 3468836 - DNA, 25 bp, Homo sapien
gacggtggagggagtccaccagtgc

SEQ ID NO: 3468837 - DNA, 25 bp, Homo sapien
ggagggagtccaccagtgctggttt

SEQ ID NO: 3468838 - DNA, 25 bp, Homo sapien
ggtggagggagtccaccagtgctgg

SEQ ID NO: 3468839 - DNA, 25 bp, Homo sapien
agggagtccaccagtgctggttttc

SEQ ID NO: 3468840 - DNA, 25 bp, Homo sapien
tgccgagctgccgaagcctgactgt

SEQ ID NO: 3468841 - DNA, 25 bp, Homo sapien
gagaagttctcaccgcccagccgtg

SEQ ID NO: 3468842 - DNA, 25 bp, Homo sapien
tgactcatccatcccctgaaaacgg

SEQ ID NO: 3468843 - DNA, 25 bp, Homo sapien
tgtgacccgctgagaagttctcacc

SEQ ID NO: 3468844 - DNA, 25 bp, Homo sapien
tctttcatccatttatctttctgtc

SEQ ID NO: 3468845 - DNA, 25 bp, Homo sapien
ttctgtccatctttctatcttcctt

SEQ ID NO: 3468846 - DNA, 25 bp, Homo sapien
tttctctttcatctattattctatc

SEQ ID NO: 3468847 - DNA, 25 bp, Homo sapien
tctctttcatctattattctatcat

SEQ ID NO: 3468848 - DNA, 25 bp, Homo sapien
tatctttggacatgagatacttggg

SEQ ID NO: 3468849 - DNA, 25 bp, Homo sapien
gggatctgtcaaatatctttggaca

SEQ ID NO: 3468850 - DNA, 25 bp, Homo sapien
catctatgagcatatttggtggact

SEQ ID NO: 3468851 - DNA, 25 bp, Homo sapien
tccaacatctatgagcatatttggt

SEQ ID NO: 3468852 - DNA, 25 bp, Homo sapien
actcgtggcctcataatacgcccac

SEQ ID NO: 3468853 - DNA, 25 bp, Homo sapien
aactcgtggcctcataatacgccca

SEQ ID NO: 3468854 - DNA, 25 bp, Homo sapien
gaactcgtggcctcataatacgccc

SEQ ID NO: 3468855 - DNA, 25 bp, Homo sapien
gcaagttgagtataactgcaaatag

SEQ ID NO: 3468856 - DNA, 25 bp, Homo sapien
gatagtaaaggcgttattggagttg

SEQ ID NO: 3468857 - DNA, 25 bp, Homo sapien
tgcaaataggcagatagtaaaggcg

SEQ ID NO: 3468858 - DNA, 25 bp, Homo sapien
catatagtgtaaagagaatgtgtgt

SEQ ID NO: 3468859 - DNA, 25 bp, Homo sapien
tcttatttaaccttgccgagccagg

SEQ ID NO: 3468860 - DNA, 25 bp, Homo sapien
ttacaataagactaccacagcgctg

SEQ ID NO: 3468861 - DNA, 25 bp, Homo sapien
tatggcacgtaggaaaagctcaaca

SEQ ID NO: 3468862 - DNA, 25 bp, Homo sapien
ttagcagactacttccagccgatga

SEQ ID NO: 3468863 - DNA, 25 bp, Homo sapien
cagtttagaactacagactctcagg

SEQ ID NO: 3468864 - DNA, 25 bp, Homo sapien
catagggcatctccattacacgcaa

SEQ ID NO: 3468865 - DNA, 25 bp, Homo sapien
gcaattccaatgacaaaaacgacta

SEQ ID NO: 3468866 - DNA, 25 bp, Homo sapien
tactagcacctaatacctgtcaagt

SEQ ID NO: 3468867 - DNA, 25 bp, Homo sapien
tggaggtttcctaccaagatctttc

SEQ ID NO: 3468868 - DNA, 25 bp, Homo sapien
tgataacctgttcacacttcagagc

SEQ ID NO: 3468869 - DNA, 25 bp, Homo sapien
gagtgggcgcctccttaaagtctgt

SEQ ID NO: 3468870 - DNA, 25 bp, Homo sapien
taactctcagggtggtgcaaacaga

SEQ ID NO: 3468871 - DNA, 25 bp, Homo sapien
gacaatgttagatagatagaacagg

SEQ ID NO: 3468872 - DNA, 25 bp, Homo sapien
tacggtgattactaagatcacttcc

SEQ ID NO: 3468873 - DNA, 25 bp, Homo sapien
tctataaaatagagggctgaatacg

SEQ ID NO: 3468874 - DNA, 25 bp, Homo sapien
taacctggagcccagtttctgtatc

SEQ ID NO: 3468875 - DNA, 25 bp, Homo sapien
taagaacccatccacggtaagatgc

SEQ ID NO: 3468876 - DNA, 25 bp, Homo sapien
cagaggagcaccgaatcaggaggca

SEQ ID NO: 3468877 - DNA, 25 bp, Homo sapien
gacaatcctgatgtcagttcaactg

SEQ ID NO: 3468878 - DNA, 25 bp, Homo sapien
taaccttgtcaccaagtgtgcagca

SEQ ID NO: 3468879 - DNA, 25 bp, Homo sapien
ccacaatgctaagctgtctctaaaa

SEQ ID NO: 3468880 - DNA, 25 bp, Homo sapien
ccctggccattgtggaattagtact

SEQ ID NO: 3468881 - DNA, 25 bp, Homo sapien
caatctagtcagaactccctggcca

SEQ ID NO: 3468882 - DNA, 25 bp, Homo sapien
caataacgggtctcacttaacagaa

SEQ ID NO: 3468883 - DNA, 25 bp, Homo sapien
cagggtttaacaggactctcaatac

SEQ ID NO: 3468884 - DNA, 25 bp, Homo sapien
aagggtcctcataaccaagcagcag

SEQ ID NO: 3468885 - DNA, 25 bp, Homo sapien
aaccgaagcctgtggtaaatggtag

SEQ ID NO: 3468886 - DNA, 25 bp, Homo sapien
gaggagaaactgtatcctgcctggt

SEQ ID NO: 3468887 - DNA, 25 bp, Homo sapien
taaacacataaaccgaagcctgtgg

SEQ ID NO: 3468888 - DNA, 25 bp, Homo sapien
catggcttccctagtatgtttcagg

SEQ ID NO: 3468889 - DNA, 25 bp, Homo sapien
gaactcagaaaacgtcagctattgc

SEQ ID NO: 3468890 - DNA, 25 bp, Homo sapien
tctgaattcctgtgggcctaatagc

SEQ ID NO: 3468891 - DNA, 25 bp, Homo sapien
tatgggctgcctgcgttaaaagaac

SEQ ID NO: 3468892 - DNA, 25 bp, Homo sapien
taatctccaccactaaataaacgtg

SEQ ID NO: 3468893 - DNA, 25 bp, Homo sapien
actgtcactgagagatacgtcagag

SEQ ID NO: 3468894 - DNA, 25 bp, Homo sapien
catcttgatggataatgcatgaggc

SEQ ID NO: 3468895 - DNA, 25 bp, Homo sapien
tatgtttacaataattccccacagg

SEQ ID NO: 3468896 - DNA, 25 bp, Homo sapien
tgcttccaacacatccctctttctc

SEQ ID NO: 3468897 - DNA, 25 bp, Homo sapien
cattagatacatctgtgtgcttcca

SEQ ID NO: 3468898 - DNA, 25 bp, Homo sapien
taccccttgcaagggtggcgcactg

SEQ ID NO: 3468899 - DNA, 25 bp, Homo sapien
actgccaggtttagcttccattaga

SEQ ID NO: 3468900 - DNA, 25 bp, Homo sapien
tcaacaatgcaggacaacagcaggg

SEQ ID NO: 3468901 - DNA, 25 bp, Homo sapien
tgtaataccttctcctgaacctgag

SEQ ID NO: 3468902 - DNA, 25 bp, Homo sapien
gaaaacagtcagattacgtccttgg

SEQ ID NO: 3468903 - DNA, 25 bp, Homo sapien
cacatcatcaggttggaaagcaaag

SEQ ID NO: 3468904 - DNA, 25 bp, Homo sapien
catgctacccttcagagtgtgtgtc

SEQ ID NO: 3468905 - DNA, 25 bp, Homo sapien
cgaacacgactggtcaaacatgcta

SEQ ID NO: 3468906 - DNA, 25 bp, Homo sapien
aaatccaagtgtctcgtttactgca

SEQ ID NO: 3468907 - DNA, 25 bp, Homo sapien
gctgtaatcacccatacacctggga

SEQ ID NO: 3468908 - DNA, 25 bp, Homo sapien
caaactcgatccccatccatggaaa

SEQ ID NO: 3468909 - DNA, 25 bp, Homo sapien
tcaaactcgatccccatccatggaa

SEQ ID NO: 3468910 - DNA, 25 bp, Homo sapien
ggcagttcctgctaatagtgacggg

SEQ ID NO: 3468911 - DNA, 25 bp, Homo sapien
tctctggcagttcctgctaatagtg

SEQ ID NO: 3468912 - DNA, 25 bp, Homo sapien
gggccgtcattcttgccgtttgcta

SEQ ID NO: 3468913 - DNA, 25 bp, Homo sapien
tgccgtttgctatttgaaagcactg

SEQ ID NO: 3468914 - DNA, 25 bp, Homo sapien
taagggccgtgaaaatatgtgtaca

SEQ ID NO: 3468915 - DNA, 25 bp, Homo sapien
caaatggtagagaaaatcaatgccc

SEQ ID NO: 3468916 - DNA, 25 bp, Homo sapien
gatggcagaccttgtcacatatgaa

SEQ ID NO: 3468917 - DNA, 25 bp, Homo sapien
catcctgctgtagcactgaatgtaa

SEQ ID NO: 3468918 - DNA, 25 bp, Homo sapien
taggcaaaccgacctgctaaggtag

SEQ ID NO: 3468919 - DNA, 25 bp, Homo sapien
gatagtctctgcaagcaagttcaca

SEQ ID NO: 3468920 - DNA, 25 bp, Homo sapien
tctaggtggcaacaggaatccaatg

SEQ ID NO: 3468921 - DNA, 25 bp, Homo sapien
cctgagctgtatgttctgggttcaa

SEQ ID NO: 3468922 - DNA, 25 bp, Homo sapien
cagaatcttgtttggtgttctgcgc

SEQ ID NO: 3468923 - DNA, 25 bp, Homo sapien
attcaagcagaatcttgtttggtgt

SEQ ID NO: 3468924 - DNA, 25 bp, Homo sapien
tcaagcagaatcttgtttggtgttc

SEQ ID NO: 3468925 - DNA, 25 bp, Homo sapien
tcttgtttggtgttctgcgcttcat

SEQ ID NO: 3468926 - DNA, 25 bp, Homo sapien
ttaacaagaatgttgaagaccacca

SEQ ID NO: 3468927 - DNA, 25 bp, Homo sapien
tctataagcagagccctcagtgacc

SEQ ID NO: 3468928 - DNA, 25 bp, Homo sapien
caaaagtgccgaatgccaagtgggt

SEQ ID NO: 3468929 - DNA, 25 bp, Homo sapien
tctttgtttggaaccggtacagcca

SEQ ID NO: 3468930 - DNA, 25 bp, Homo sapien
gctcatgatgaacacctagggcaac

SEQ ID NO: 3468931 - DNA, 25 bp, Homo sapien
cacctggaactctttcgggggcaca

SEQ ID NO: 3468932 - DNA, 25 bp, Homo sapien
ttgatcagtctcaggaataaactgt

SEQ ID NO: 3468933 - DNA, 25 bp, Homo sapien
gaacagaatcaggataagggagccc

SEQ ID NO: 3468934 - DNA, 25 bp, Homo sapien
gataactcagtaattgcacatttga

SEQ ID NO: 3468935 - DNA, 25 bp, Homo sapien
tgaccatactcaacaggcaggggga

SEQ ID NO: 3468936 - DNA, 25 bp, Homo sapien
tctttactagcatgacatactgacc

SEQ ID NO: 3468937 - DNA, 25 bp, Homo sapien
tgcttaagaggaaacaaggtgactt

SEQ ID NO: 3468938 - DNA, 25 bp, Homo sapien
cctacacactccaggttctgctgaa

SEQ ID NO: 3468939 - DNA, 25 bp, Homo sapien
caggaaggcctgtggagaagtggcc

SEQ ID NO: 3468940 - DNA, 25 bp, Homo sapien
ctgtgggtgacccaagtcagcacca

SEQ ID NO: 3468941 - DNA, 25 bp, Homo sapien
gaggctttgggcagcagactctgga

SEQ ID NO: 3468942 - DNA, 25 bp, Homo sapien
gacccaagtcagcaccatatcagga

SEQ ID NO: 3468943 - DNA, 25 bp, Homo sapien
caactgtcatcttacactcaagagc

SEQ ID NO: 3468944 - DNA, 25 bp, Homo sapien
cccatgtgttcatagaaccaactgt

SEQ ID NO: 3468945 - DNA, 25 bp, Homo sapien
gtgttcatagaaccaactgtcatct

SEQ ID NO: 3468946 - DNA, 25 bp, Homo sapien
catgtgttcatagaaccaactgtca

SEQ ID NO: 3468947 - DNA, 25 bp, Homo sapien
gacatccagccaaggagtacttacg

SEQ ID NO: 3468948 - DNA, 25 bp, Homo sapien
gatgagcttcatgcaatacacgaga

SEQ ID NO: 3468949 - DNA, 25 bp, Homo sapien
gacagcttggaagaagtaccaccac

SEQ ID NO: 3468950 - DNA, 25 bp, Homo sapien
tgggctgacgggacaaaactaagga

SEQ ID NO: 3468951 - DNA, 25 bp, Homo sapien
actccctgcagagtgtgcatttgaa

SEQ ID NO: 3468952 - DNA, 25 bp, Homo sapien
acttgtgctgtctccaagcagccat

SEQ ID NO: 3468953 - DNA, 25 bp, Homo sapien
gaaacagattattcatatagccact

SEQ ID NO: 3468954 - DNA, 25 bp, Homo sapien
tattcatatagccactcaacttgtg

SEQ ID NO: 3468955 - DNA, 25 bp, Homo sapien
gatacaaggcgaagcatttccctct

SEQ ID NO: 3468956 - DNA, 25 bp, Homo sapien
gagaattttagatcctgcccgtgcc

SEQ ID NO: 3468957 - DNA, 25 bp, Homo sapien
gaaaccttgacaaaatgactcgtcg

SEQ ID NO: 3468958 - DNA, 25 bp, Homo sapien
ccaggaggctccagacgatgttttc

SEQ ID NO: 3468959 - DNA, 25 bp, Homo sapien
cggagcttcctggtataaagacaag

SEQ ID NO: 3468960 - DNA, 25 bp, Homo sapien
gacaagccatacagacaactttcag

SEQ ID NO: 3468961 - DNA, 25 bp, Homo sapien
accaaatgcacttgaaggagaccct

SEQ ID NO: 3468962 - DNA, 25 bp, Homo sapien
cactcatagagcaagcaggtttcca

SEQ ID NO: 3468963 - DNA, 25 bp, Homo sapien
tctgctcctcgtttatctgctggga

SEQ ID NO: 3468964 - DNA, 25 bp, Homo sapien
tgctcctcgtttatctgctgggagc

SEQ ID NO: 3468965 - DNA, 25 bp, Homo sapien
catctgctcctcgtttatctgctgg

SEQ ID NO: 3468966 - DNA, 25 bp, Homo sapien
gtgttcatctgctcctcgtttatct

SEQ ID NO: 3468967 - DNA, 25 bp, Homo sapien
ccctggctgggaacaatatccacct

SEQ ID NO: 3468968 - DNA, 25 bp, Homo sapien
gggaacaatatccacctgcagagaa

SEQ ID NO: 3468969 - DNA, 25 bp, Homo sapien
gaagaatttggactctccaacgctg

SEQ ID NO: 3468970 - DNA, 25 bp, Homo sapien
gaatttggactctccaacgctgatc

SEQ ID NO: 3468971 - DNA, 25 bp, Homo sapien
aagaggaagagattatttttaagct

SEQ ID NO: 3468972 - DNA, 25 bp, Homo sapien
agaggaagagattatttttaagcta

SEQ ID NO: 3468973 - DNA, 25 bp, Homo sapien
taaatgccggcgtcgtcgatgttgg

SEQ ID NO: 3468974 - DNA, 25 bp, Homo sapien
gaggaggaatcatcattccacacca

SEQ ID NO: 3468975 - DNA, 25 bp, Homo sapien
gaaagatcttcacgttgacggtggc

SEQ ID NO: 3468976 - DNA, 25 bp, Homo sapien
cactgagatccgctgctggtttggg

SEQ ID NO: 3468977 - DNA, 25 bp, Homo sapien
ggcgcattcttgaacatgagcttct

SEQ ID NO: 3468978 - DNA, 25 bp, Homo sapien
accacatcacacacaatcacggcat

SEQ ID NO: 3468979 - DNA, 25 bp, Homo sapien
gacatctcggcctttgtgtttccag

SEQ ID NO: 3468980 - DNA, 25 bp, Homo sapien
aactcctgtggggttggcgcattct

SEQ ID NO: 3468981 - DNA, 25 bp, Homo sapien
tctgcaggtagttgttggacaggac

SEQ ID NO: 3468982 - DNA, 25 bp, Homo sapien
tctgttttcttgatgccccggatct

SEQ ID NO: 3468983 - DNA, 25 bp, Homo sapien
ttctgccctcacagcgataagtgcc

SEQ ID NO: 3468984 - DNA, 25 bp, Homo sapien
ttgttggacaggactatgaatcgga

SEQ ID NO: 3468985 - DNA, 25 bp, Homo sapien
caatgcagagatcaggaagaacgga

SEQ ID NO: 3468986 - DNA, 25 bp, Homo sapien
gctgcagaacggtgaaggacattca

SEQ ID NO: 3468987 - DNA, 25 bp, Homo sapien
gattctgactattctgaggcctgag

SEQ ID NO: 3468988 - DNA, 25 bp, Homo sapien
ccctcgtagttgaaggaagatccaa

SEQ ID NO: 3468989 - DNA, 25 bp, Homo sapien
gtgtcatggggtggttgtgaaaatt

SEQ ID NO: 3468990 - DNA, 25 bp, Homo sapien
ctgaaggaaaaaagggtgtcatggg

SEQ ID NO: 3468991 - DNA, 25 bp, Homo sapien
catggggtggttgtgaaaatttgga

SEQ ID NO: 3468992 - DNA, 25 bp, Homo sapien
tgaaaatttggaagaacccaatggc

SEQ ID NO: 3468993 - DNA, 25 bp, Homo sapien
catcgcacaccagggtgacggactg

SEQ ID NO: 3468994 - DNA, 25 bp, Homo sapien
ggaagccttcggcatcgcacaccag

SEQ ID NO: 3468995 - DNA, 25 bp, Homo sapien
cggactggccgaggttggcggtggc

SEQ ID NO: 3468996 - DNA, 25 bp, Homo sapien
attcacaatattctgcctggcctgg

SEQ ID NO: 3468997 - DNA, 25 bp, Homo sapien
caaagactttgaggtggatggtcgc

SEQ ID NO: 3468998 - DNA, 25 bp, Homo sapien
cgctgaagatgtacttctcatcgtc

SEQ ID NO: 3468999 - DNA, 25 bp, Homo sapien
tgcagatgtactcagcctcgtcgtt

SEQ ID NO: 3469000 - DNA, 25 bp, Homo sapien
gctgggaactatcgtcgctgaagat

SEQ ID NO: 3469001 - DNA, 25 bp, Homo sapien
gctgtagactctactcccacttgca

SEQ ID NO: 3469002 - DNA, 25 bp, Homo sapien
ctcccacttgcagaacctgtcccat

SEQ ID NO: 3469003 - DNA, 25 bp, Homo sapien
ctcactgctgtagactctactccca

SEQ ID NO: 3469004 - DNA, 25 bp, Homo sapien
cccagtgatgggccacaatggcaag

SEQ ID NO: 3469005 - DNA, 25 bp, Homo sapien
gtgacaacacggaaaccataataat

SEQ ID NO: 3469006 - DNA, 25 bp, Homo sapien
gacaacacggaaaccataataatca

SEQ ID NO: 3469007 - DNA, 25 bp, Homo sapien
tccaaggcttacaatgatgtaggca

SEQ ID NO: 3469008 - DNA, 25 bp, Homo sapien
tctccaaggcttacaatgatgtagg

SEQ ID NO: 3469009 - DNA, 25 bp, Homo sapien
tcgctgctgatgttccgggtagaag

SEQ ID NO: 3469010 - DNA, 25 bp, Homo sapien
gcagtctggttctctacatatgtga

SEQ ID NO: 3469011 - DNA, 25 bp, Homo sapien
cacaggtaagagtgacctgctcctc

SEQ ID NO: 3469012 - DNA, 25 bp, Homo sapien
ggtctccggaggcttcacaggtaag

SEQ ID NO: 3469013 - DNA, 25 bp, Homo sapien
ttttggcccactcaataatcaaggg

SEQ ID NO: 3469014 - DNA, 25 bp, Homo sapien
tgccaggaaggttgctacaatgttc

SEQ ID NO: 3469015 - DNA, 25 bp, Homo sapien
aatacaggcagacacaatggcaacc

SEQ ID NO: 3469016 - DNA, 25 bp, Homo sapien
aagatagctttctggtggcctacaa

SEQ ID NO: 3469017 - DNA, 25 bp, Homo sapien
agatgttcaaagaggcatatgatgg

SEQ ID NO: 3469018 - DNA, 25 bp, Homo sapien
ttgtcagtcatttcaaaggcataga

SEQ ID NO: 3469019 - DNA, 25 bp, Homo sapien
aggcatagagatgttcaaagaggca

SEQ ID NO: 3469020 - DNA, 25 bp, Homo sapien
tgtcagtcatttcaaaggcatagag

SEQ ID NO: 3469021 - DNA, 25 bp, Homo sapien
gaagcttgtcggttacatgccaggg

SEQ ID NO: 3469022 - DNA, 25 bp, Homo sapien
ggtgggccaacacgtcaaatgtgct

SEQ ID NO: 3469023 - DNA, 25 bp, Homo sapien
tcatagcaacgcaacccagggaatg

SEQ ID NO: 3469024 - DNA, 25 bp, Homo sapien
gagggctccagtccttaacagcaga

SEQ ID NO: 3469025 - DNA, 25 bp, Homo sapien
agatatgaataccagtaggaccaga

SEQ ID NO: 3469026 - DNA, 25 bp, Homo sapien
aatgtatcacactgcattccgtgca

SEQ ID NO: 3469027 - DNA, 25 bp, Homo sapien
ggtgacatgactagttctaaccaca

SEQ ID NO: 3469028 - DNA, 25 bp, Homo sapien
caaggcccactttcaatggtgtgtt

SEQ ID NO: 3469029 - DNA, 25 bp, Homo sapien
tgcttctctggtcgagtccacgaag

SEQ ID NO: 3469030 - DNA, 25 bp, Homo sapien
gcttctctggtcgagtccacgaagc

SEQ ID NO: 3469031 - DNA, 25 bp, Homo sapien
ttgcttctctggtcgagtccacgaa

SEQ ID NO: 3469032 - DNA, 25 bp, Homo sapien
cagagatacgtttagcaatttggga

SEQ ID NO: 3469033 - DNA, 25 bp, Homo sapien
ggtccagagccacatcaaccatgtg

SEQ ID NO: 3469034 - DNA, 25 bp, Homo sapien
tgggaaaaccaacgagagatgtcat

SEQ ID NO: 3469035 - DNA, 25 bp, Homo sapien
caaaactaaagactggctagtggtc

SEQ ID NO: 3469036 - DNA, 25 bp, Homo sapien
gagaatggaacttctgagccctagg

SEQ ID NO: 3469037 - DNA, 25 bp, Homo sapien
caaggaaagttgtatgaggccaagc

SEQ ID NO: 3469038 - DNA, 25 bp, Homo sapien
tggacaataaagcacccaacctgtg

SEQ ID NO: 3469039 - DNA, 25 bp, Homo sapien
gacactcatgataaggacacttctg

SEQ ID NO: 3469040 - DNA, 25 bp, Homo sapien
taacctgagccttcttttgcactca

SEQ ID NO: 3469041 - DNA, 25 bp, Homo sapien
aatgaaactggccataacctgagcc

SEQ ID NO: 3469042 - DNA, 25 bp, Homo sapien
gaaactggccataacctgagccttc

SEQ ID NO: 3469043 - DNA, 25 bp, Homo sapien
aaatgaaactggccataacctgagc

SEQ ID NO: 3469044 - DNA, 25 bp, Homo sapien
caggcagagggaacttaaggacaac

SEQ ID NO: 3469045 - DNA, 25 bp, Homo sapien
aatgaatgtacgcaagaacaggacc

SEQ ID NO: 3469046 - DNA, 25 bp, Homo sapien
gaaaacagttgcgtgaacagccata

SEQ ID NO: 3469047 - DNA, 25 bp, Homo sapien
caaaaagtcatgctgaccacccagg

SEQ ID NO: 3469048 - DNA, 25 bp, Homo sapien
gagtttgccagagctcaactccaga

SEQ ID NO: 3469049 - DNA, 25 bp, Homo sapien
caattaagtgtcttggagttgtcct

SEQ ID NO: 3469050 - DNA, 25 bp, Homo sapien
caggtctgtcggagtttgccagagc

SEQ ID NO: 3469051 - DNA, 25 bp, Homo sapien
attaagtgtcttggagttgtccttc

SEQ ID NO: 3469052 - DNA, 25 bp, Homo sapien
taactggtatgagatagtatggcat

SEQ ID NO: 3469053 - DNA, 25 bp, Homo sapien
ttgtgagcactgctgtaataaacat

SEQ ID NO: 3469054 - DNA, 25 bp, Homo sapien
tgctattgtgagcactgctgtaata

SEQ ID NO: 3469055 - DNA, 25 bp, Homo sapien
actggtatgagatagtatggcattg

SEQ ID NO: 3469056 - DNA, 25 bp, Homo sapien
tggaacacttcactagaaagccttg

SEQ ID NO: 3469057 - DNA, 25 bp, Homo sapien
ccttgtgacacccagtttgttggag

SEQ ID NO: 3469058 - DNA, 25 bp, Homo sapien
ggagatgccacacattaatgagaga

SEQ ID NO: 3469059 - DNA, 25 bp, Homo sapien
gacaacaaacaggtgtggaacactt

SEQ ID NO: 3469060 - DNA, 25 bp, Homo sapien
gctcttcagggtcagcgacgacaca

SEQ ID NO: 3469061 - DNA, 25 bp, Homo sapien
cacttcaaggtacatggactgggag

SEQ ID NO: 3469062 - DNA, 25 bp, Homo sapien
ttgctggcggtgcagatgtactctc

SEQ ID NO: 3469063 - DNA, 25 bp, Homo sapien
tccggcatcagtgtactggatgctc

SEQ ID NO: 3469064 - DNA, 25 bp, Homo sapien
ggataggcaaatacctcgcaggtga

SEQ ID NO: 3469065 - DNA, 25 bp, Homo sapien
ggccatcccgaaaccatgagatcgt

SEQ ID NO: 3469066 - DNA, 25 bp, Homo sapien
tgttgtagatcttgatattgctgta

SEQ ID NO: 3469067 - DNA, 25 bp, Homo sapien
tattgctgtaattggagcttggcag

SEQ ID NO: 3469068 - DNA, 25 bp, Homo sapien
cccaatgcggttcactgcagtacag

SEQ ID NO: 3469069 - DNA, 25 bp, Homo sapien
aaatcattctcagagtctggggtca

SEQ ID NO: 3469070 - DNA, 25 bp, Homo sapien
aggactcctgcccaatgcggttcac

SEQ ID NO: 3469071 - DNA, 25 bp, Homo sapien
gtacagttgtagttcccaaaatcat

SEQ ID NO: 3469072 - DNA, 25 bp, Homo sapien
ctggagtatggctccacctggtcga

SEQ ID NO: 3469073 - DNA, 25 bp, Homo sapien
gcctctggttcatcaaactgcacct

SEQ ID NO: 3469074 - DNA, 25 bp, Homo sapien
ccttggcatcataccacttggaatg

SEQ ID NO: 3469075 - DNA, 25 bp, Homo sapien
ccacctggtcgatggatggtgaaga

SEQ ID NO: 3469076 - DNA, 25 bp, Homo sapien
tactggaagggtcatgagaaccagg

SEQ ID NO: 3469077 - DNA, 25 bp, Homo sapien
ccatactggaagggtcatgagaacc

SEQ ID NO: 3469078 - DNA, 25 bp, Homo sapien
catactggaagggtcatgagaacca

SEQ ID NO: 3469079 - DNA, 25 bp, Homo sapien
ctggaagggtcatgagaaccaggct

SEQ ID NO: 3469080 - DNA, 25 bp, Homo sapien
gccgccagccttacggcgtacgttg

SEQ ID NO: 3469081 - DNA, 25 bp, Homo sapien
ccacgatggtgacgatgccctccat

SEQ ID NO: 3469082 - DNA, 25 bp, Homo sapien
tgaactcggaggccgcgctgatctc

SEQ ID NO: 3469083 - DNA, 25 bp, Homo sapien
gcgtacgttgtttcgggcttcaggc

SEQ ID NO: 3469084 - DNA, 25 bp, Homo sapien
aaagaggccgtgaggaatgctcttg

SEQ ID NO: 3469085 - DNA, 25 bp, Homo sapien
caattctcttgaaagaggccgtgag

SEQ ID NO: 3469086 - DNA, 25 bp, Homo sapien
tcagggggaagcaattctcttgaaa

SEQ ID NO: 3469087 - DNA, 25 bp, Homo sapien
gaagtagtcccatcagcagtcacaa

SEQ ID NO: 3469088 - DNA, 25 bp, Homo sapien
gcatctgagatactgggacactgaa

SEQ ID NO: 3469089 - DNA, 25 bp, Homo sapien
gaaaaacctcagtgtatctccgcca

SEQ ID NO: 3469090 - DNA, 25 bp, Homo sapien
tatttggaggctgctacgtaagagc

SEQ ID NO: 3469091 - DNA, 25 bp, Homo sapien
ggggtagacgagctagcagatgccg

SEQ ID NO: 3469092 - DNA, 25 bp, Homo sapien
aggggtagacgagctagcagatgcc

SEQ ID NO: 3469093 - DNA, 25 bp, Homo sapien
aacaggggtagacgagctagcagat

SEQ ID NO: 3469094 - DNA, 25 bp, Homo sapien
tggaacaggggtagacgagctagca

SEQ ID NO: 3469095 - DNA, 25 bp, Homo sapien
gctggttctgtggttgcaagggcag

SEQ ID NO: 3469096 - DNA, 25 bp, Homo sapien
agctggttctgtggttgcaagggca

SEQ ID NO: 3469097 - DNA, 25 bp, Homo sapien
tagctggttctgtggttgcaagggc

SEQ ID NO: 3469098 - DNA, 25 bp, Homo sapien
tagaagtcggctctacaacaagcga

SEQ ID NO: 3469099 - DNA, 25 bp, Homo sapien
gggaaaacaacaggcagcgctgtaa

SEQ ID NO: 3469100 - DNA, 25 bp, Homo sapien
gtctggccgagagcaactcagccct

SEQ ID NO: 3469101 - DNA, 25 bp, Homo sapien
tacaacaagcgatcagaggtctggc

SEQ ID NO: 3469102 - DNA, 25 bp, Homo sapien
gaccagcttggaacatgttacagca

SEQ ID NO: 3469103 - DNA, 25 bp, Homo sapien
tatgaagaccagcttggaacatgtt

SEQ ID NO: 3469104 - DNA, 25 bp, Homo sapien
ttggaacatgttacagcagtgattc

SEQ ID NO: 3469105 - DNA, 25 bp, Homo sapien
agagcattatgaagaccagcttgga

SEQ ID NO: 3469106 - DNA, 25 bp, Homo sapien
taaaatctaaaactcccacacagct

SEQ ID NO: 3469107 - DNA, 25 bp, Homo sapien
gaacatgcacgcatactcatatgga

SEQ ID NO: 3469108 - DNA, 25 bp, Homo sapien
cacagctttgatgcttgaacactat

SEQ ID NO: 3469109 - DNA, 25 bp, Homo sapien
ttcaggagattcaggtcctccacac

SEQ ID NO: 3469110 - DNA, 25 bp, Homo sapien
caaaagattgtattaaattaagaag

SEQ ID NO: 3469111 - DNA, 25 bp, Homo sapien
ttgtattaaattaagaagagtcatt

SEQ ID NO: 3469112 - DNA, 25 bp, Homo sapien
aagattgtattaaattaagaagagt

SEQ ID NO: 3469113 - DNA, 25 bp, Homo sapien
gattgtattaaattaagaagagtca

SEQ ID NO: 3469114 - DNA, 25 bp, Homo sapien
tatgggtcatcaaggaaaagtcccg

SEQ ID NO: 3469115 - DNA, 25 bp, Homo sapien
tgatacgcacgcacatgatattggt

SEQ ID NO: 3469116 - DNA, 25 bp, Homo sapien
aatgagtgtgccctatgtgccaggc

SEQ ID NO: 3469117 - DNA, 25 bp, Homo sapien
gaaacattgggagggcagtgaaact

SEQ ID NO: 3469118 - DNA, 25 bp, Homo sapien
gctgacatccctataaagctgaggg

SEQ ID NO: 3469119 - DNA, 25 bp, Homo sapien
gcccaatttattggcgtggactgca

SEQ ID NO: 3469120 - DNA, 25 bp, Homo sapien
caggaggagaacgaaacacaagagc

SEQ ID NO: 3469121 - DNA, 25 bp, Homo sapien
ggaaggtacacagggctaacacaca

SEQ ID NO: 3469122 - DNA, 25 bp, Homo sapien
tcttgccctggcttaaaatgtctgg

SEQ ID NO: 3469123 - DNA, 25 bp, Homo sapien
taaggagtgtttctacggcaactgc

SEQ ID NO: 3469124 - DNA, 25 bp, Homo sapien
ggtgaaggcccagatctttttccag

SEQ ID NO: 3469125 - DNA, 25 bp, Homo sapien
cagccaagatgactgctaaggagtg

SEQ ID NO: 3469126 - DNA, 25 bp, Homo sapien
ggagcccgagcaccaagagttagct

SEQ ID NO: 3469127 - DNA, 25 bp, Homo sapien
tatttctcactcaaaggagcccgag

SEQ ID NO: 3469128 - DNA, 25 bp, Homo sapien
gatctgcacaaagtttcaggtgtct

SEQ ID NO: 3469129 - DNA, 25 bp, Homo sapien
tctgagcgtaaacctgtgataaatg

SEQ ID NO: 3469130 - DNA, 25 bp, Homo sapien
taggcaggtcctatgaaattctccc

SEQ ID NO: 3469131 - DNA, 25 bp, Homo sapien
catagaggccacatatagtcagata

SEQ ID NO: 3469132 - DNA, 25 bp, Homo sapien
aatcggcaggttgctcccagaagac

SEQ ID NO: 3469133 - DNA, 25 bp, Homo sapien
gaaagaaagaacgtaccatagaggc

SEQ ID NO: 3469134 - DNA, 25 bp, Homo sapien
cgactttcagccaattttagggaga

SEQ ID NO: 3469135 - DNA, 25 bp, Homo sapien
aaatatgggccctgaattggatgct

SEQ ID NO: 3469136 - DNA, 25 bp, Homo sapien
taatttgaatcggagaaaagccatc

SEQ ID NO: 3469137 - DNA, 25 bp, Homo sapien
tagggagatgcactccaaggtcaac

SEQ ID NO: 3469138 - DNA, 25 bp, Homo sapien
tacttatcatcatagggccagcagc

SEQ ID NO: 3469139 - DNA, 25 bp, Homo sapien
tagcactgtgaatccaaggtcgaga

SEQ ID NO: 3469140 - DNA, 25 bp, Homo sapien
catgtgacaaactgctagggctagg

SEQ ID NO: 3469141 - DNA, 25 bp, Homo sapien
tcaccagggattggatctaagcacc

SEQ ID NO: 3469142 - DNA, 25 bp, Homo sapien
cgctcggtacctgaccagatagtgt

SEQ ID NO: 3469143 - DNA, 25 bp, Homo sapien
tgcttgatcaggttcactttaatag

SEQ ID NO: 3469144 - DNA, 25 bp, Homo sapien
ggagccgccgtcatcctgcttgatc

SEQ ID NO: 3469145 - DNA, 25 bp, Homo sapien
ctttaatagagtttccatcctctcc

SEQ ID NO: 3469146 - DNA, 25 bp, Homo sapien
tgggccgaggtcctgaacacaaaat

SEQ ID NO: 3469147 - DNA, 25 bp, Homo sapien
aatgagccgccttggattttccttg

SEQ ID NO: 3469148 - DNA, 25 bp, Homo sapien
actgccagacgggagcctgatctct

SEQ ID NO: 3469149 - DNA, 25 bp, Homo sapien
gggacttcagcatgacgtggtcact

SEQ ID NO: 3469150 - DNA, 25 bp, Homo sapien
gatattaccaagcaggattcagccc

SEQ ID NO: 3469151 - DNA, 25 bp, Homo sapien
caagctgggccctcctaggatgaag

SEQ ID NO: 3469152 - DNA, 25 bp, Homo sapien
tgaggagcgcactgttacaagccgt

SEQ ID NO: 3469153 - DNA, 25 bp, Homo sapien
cacacagaatggttgctcagcagct

SEQ ID NO: 3469154 - DNA, 25 bp, Homo sapien
tggggagtgggtatgcgctagtgct

SEQ ID NO: 3469155 - DNA, 25 bp, Homo sapien
ccgtggggagtgggtatgcgctagt

SEQ ID NO: 3469156 - DNA, 25 bp, Homo sapien
gggagtgggtatgcgctagtgctgc

SEQ ID NO: 3469157 - DNA, 25 bp, Homo sapien
agtgggtatgcgctagtgctgcctc

SEQ ID NO: 3469158 - DNA, 25 bp, Homo sapien
ctgtataaatagtccaaaaatgagc

SEQ ID NO: 3469159 - DNA, 25 bp, Homo sapien
tcactgattatctacacaacaatgt

SEQ ID NO: 3469160 - DNA, 25 bp, Homo sapien
gtaaacttcataaagccctcactga

SEQ ID NO: 3469161 - DNA, 25 bp, Homo sapien
aaaaacatgatccaaacctgctgta

SEQ ID NO: 3469162 - DNA, 25 bp, Homo sapien
cagggagattatgaaggtggagctg

SEQ ID NO: 3469163 - DNA, 25 bp, Homo sapien
aggacagggagattatgaaggtgga

SEQ ID NO: 3469164 - DNA, 25 bp, Homo sapien
caggacagggagattatgaaggtgg

SEQ ID NO: 3469165 - DNA, 25 bp, Homo sapien
gacagggagattatgaaggtggagc

SEQ ID NO: 3469166 - DNA, 25 bp, Homo sapien
gagtttccccataacctcgaggtca

SEQ ID NO: 3469167 - DNA, 25 bp, Homo sapien
tttccccataacctcgaggtcagag

SEQ ID NO: 3469168 - DNA, 25 bp, Homo sapien
gtgcaccttggatgcaaagaaggct

SEQ ID NO: 3469169 - DNA, 25 bp, Homo sapien
caaagaaggcttctggggaagagtt

SEQ ID NO: 3469170 - DNA, 25 bp, Homo sapien
ctggcacacggtacaggttccctaa

SEQ ID NO: 3469171 - DNA, 25 bp, Homo sapien
gagcctgtcattccaagtcatacat

SEQ ID NO: 3469172 - DNA, 25 bp, Homo sapien
caggttccctaatgccagtctccag

SEQ ID NO: 3469173 - DNA, 25 bp, Homo sapien
gtctcttcaaccacaagagcctgtc

SEQ ID NO: 3469174 - DNA, 25 bp, Homo sapien
aatacctaccatgctgctagcctgt

SEQ ID NO: 3469175 - DNA, 25 bp, Homo sapien
tacatgcttatgatctagccatccc

SEQ ID NO: 3469176 - DNA, 25 bp, Homo sapien
agctcaacccgctttagggccttga

SEQ ID NO: 3469177 - DNA, 25 bp, Homo sapien
tgatctcttatctagtgtggcacct

SEQ ID NO: 3469178 - DNA, 25 bp, Homo sapien
catctaggagctcaggcctgcttgg

SEQ ID NO: 3469179 - DNA, 25 bp, Homo sapien
tcaggcctgcttggaccagacttca

SEQ ID NO: 3469180 - DNA, 25 bp, Homo sapien
gctcaggcctgcttggaccagactt

SEQ ID NO: 3469181 - DNA, 25 bp, Homo sapien
aggcctgcttggaccagacttcagg

SEQ ID NO: 3469182 - DNA, 25 bp, Homo sapien
tgagatgcgagacctccagaccctg

SEQ ID NO: 3469183 - DNA, 25 bp, Homo sapien
taacagactgagatgcgagacctcc

SEQ ID NO: 3469184 - DNA, 25 bp, Homo sapien
agagatggctggtggttaacagact

SEQ ID NO: 3469185 - DNA, 25 bp, Homo sapien
gctggtggttaacagactgagatgc

SEQ ID NO: 3469186 - DNA, 25 bp, Homo sapien
aggttgaccgcaatgcacatgaaca

SEQ ID NO: 3469187 - DNA, 25 bp, Homo sapien
ggcccggcttttccacacaggttga

SEQ ID NO: 3469188 - DNA, 25 bp, Homo sapien
gaagtagcaggtgatgtccacaacc

SEQ ID NO: 3469189 - DNA, 25 bp, Homo sapien
aatgcacatgaacaggccacacttg

SEQ ID NO: 3469190 - DNA, 25 bp, Homo sapien
tccgttcgaacctccacgatgggct

SEQ ID NO: 3469191 - DNA, 25 bp, Homo sapien
tcgggctccgtcagtggcgtggtct

SEQ ID NO: 3469192 - DNA, 25 bp, Homo sapien
tccacgatgggctccttggactcat

SEQ ID NO: 3469193 - DNA, 25 bp, Homo sapien
ctccatcatggtttggggtcctctc

SEQ ID NO: 3469194 - DNA, 25 bp, Homo sapien
tgtcagagttagtggtgacggtggt

SEQ ID NO: 3469195 - DNA, 25 bp, Homo sapien
gcaaaggtttcggtgatagtgtcag

SEQ ID NO: 3469196 - DNA, 25 bp, Homo sapien
gtgacagaaggcagcatgtcctcga

SEQ ID NO: 3469197 - DNA, 25 bp, Homo sapien
tgtcctcgacagtggccgtagtgtc

SEQ ID NO: 3469198 - DNA, 25 bp, Homo sapien
tttgagtcaggcgtggccgtggccg

SEQ ID NO: 3469199 - DNA, 25 bp, Homo sapien
agagtttgagtcaggcgtggccgtg

SEQ ID NO: 3469200 - DNA, 25 bp, Homo sapien
tgagtcaggcgtggccgtggccggc

SEQ ID NO: 3469201 - DNA, 25 bp, Homo sapien
cgtggccggcggggcaatactggag

SEQ ID NO: 3469202 - DNA, 25 bp, Homo sapien
agaggcgctgggccccttggaaggg

SEQ ID NO: 3469203 - DNA, 25 bp, Homo sapien
agggggcagaggcgctgggcccctt

SEQ ID NO: 3469204 - DNA, 25 bp, Homo sapien
gaaggggtggcctggccagccggta

SEQ ID NO: 3469205 - DNA, 25 bp, Homo sapien
ggcagaggcgctgggccccttggaa

SEQ ID NO: 3469206 - DNA, 25 bp, Homo sapien
ccgctgctgctagaggactggctgc

SEQ ID NO: 3469207 - DNA, 25 bp, Homo sapien
tagaagacaaattgctagcggcagg

SEQ ID NO: 3469208 - DNA, 25 bp, Homo sapien
tttgctggcgcaggcgaaacagagc

SEQ ID NO: 3469209 - DNA, 25 bp, Homo sapien
cagcctcgctcttcgggctagcaag

SEQ ID NO: 3469210 - DNA, 25 bp, Homo sapien
aggacacaacccgatgacagcagac

SEQ ID NO: 3469211 - DNA, 25 bp, Homo sapien
acaacccgatgacagcagacaaaga

SEQ ID NO: 3469212 - DNA, 25 bp, Homo sapien
acacaacccgatgacagcagacaaa

SEQ ID NO: 3469213 - DNA, 25 bp, Homo sapien
accacaggacacaacccgatgacag

SEQ ID NO: 3469214 - DNA, 25 bp, Homo sapien
ggagccccgagtcttcccagccact

SEQ ID NO: 3469215 - DNA, 25 bp, Homo sapien
tctcttgaactttgagacccagcag

SEQ ID NO: 3469216 - DNA, 25 bp, Homo sapien
cagccatttgatgctggggagcccc

SEQ ID NO: 3469217 - DNA, 25 bp, Homo sapien
ttgaactttgagacccagcagccat

SEQ ID NO: 3469218 - DNA, 25 bp, Homo sapien
ggaccgtcttgacttcggctggcgc

SEQ ID NO: 3469219 - DNA, 25 bp, Homo sapien
ttcggctggcgctggcttcgtttct

SEQ ID NO: 3469220 - DNA, 25 bp, Homo sapien
ttgctctcgttctcctttgtctgtg

SEQ ID NO: 3469221 - DNA, 25 bp, Homo sapien
cctttgtctgtgtggcgtcattggg

SEQ ID NO: 3469222 - DNA, 25 bp, Homo sapien
ggcagctattttacacggacattta

SEQ ID NO: 3469223 - DNA, 25 bp, Homo sapien
caagtgagtgtgcaacaaagggacc

SEQ ID NO: 3469224 - DNA, 25 bp, Homo sapien
tgtgccaatcgggtaacaccaagtg

SEQ ID NO: 3469225 - DNA, 25 bp, Homo sapien
gggtgacacactttgcatactgaac

SEQ ID NO: 3469226 - DNA, 25 bp, Homo sapien
taaagcaagcgtgggatgatcctac

SEQ ID NO: 3469227 - DNA, 25 bp, Homo sapien
gtggcggctaatcagaaagtggtct

SEQ ID NO: 3469228 - DNA, 25 bp, Homo sapien
tgtaaagttgtcctgtgctaaagca

SEQ ID NO: 3469229 - DNA, 25 bp, Homo sapien
aataatgtgtgttcaccaagaccag

SEQ ID NO: 3469230 - DNA, 25 bp, Homo sapien
ccaggaaagttgtgttatgactcca

SEQ ID NO: 3469231 - DNA, 25 bp, Homo sapien
cctaagtgaacagaaggccgatgtt

SEQ ID NO: 3469232 - DNA, 25 bp, Homo sapien
cacagtgcacaagcttgcagttcta

SEQ ID NO: 3469233 - DNA, 25 bp, Homo sapien
aaatttctatacaaagggctggctt

SEQ ID NO: 3469234 - DNA, 25 bp, Homo sapien
tgcatgctgagacaaacctatgtgt

SEQ ID NO: 3469235 - DNA, 25 bp, Homo sapien
ctttgtaccttaggagaggagcgca

SEQ ID NO: 3469236 - DNA, 25 bp, Homo sapien
tgttaatggaggtctgaaaaccgcc

SEQ ID NO: 3469237 - DNA, 25 bp, Homo sapien
cctcaagtgaaaacctgggactcgg

SEQ ID NO: 3469238 - DNA, 25 bp, Homo sapien
tatagctccacgaaaatgtgtcagg

SEQ ID NO: 3469239 - DNA, 25 bp, Homo sapien
cagcacatatagctccacgaaaatg

SEQ ID NO: 3469240 - DNA, 25 bp, Homo sapien
gagatgacagcacatatagctccac

SEQ ID NO: 3469241 - DNA, 25 bp, Homo sapien
catatagctccacgaaaatgtgtca

SEQ ID NO: 3469242 - DNA, 25 bp, Homo sapien
tctctaggcacatgtgagccttgtg

SEQ ID NO: 3469243 - DNA, 25 bp, Homo sapien
tgtgagccttgtgggtagaggtgtg

SEQ ID NO: 3469244 - DNA, 25 bp, Homo sapien
atgtgagccttgtgggtagaggtgt

SEQ ID NO: 3469245 - DNA, 25 bp, Homo sapien
ctctctaggcacatgtgagccttgt

SEQ ID NO: 3469246 - DNA, 25 bp, Homo sapien
gctcactgactggacattgccacca

SEQ ID NO: 3469247 - DNA, 25 bp, Homo sapien
ctcttccccatcgtgaaggtgctgc

SEQ ID NO: 3469248 - DNA, 25 bp, Homo sapien
tcttccccatcgtgaaggtgctgct

SEQ ID NO: 3469249 - DNA, 25 bp, Homo sapien
aaggtgctgctcactgactggacat

SEQ ID NO: 3469250 - DNA, 25 bp, Homo sapien
cttgggcctcagataaccacagctt

SEQ ID NO: 3469251 - DNA, 25 bp, Homo sapien
taaccacagctttgggacacgcagg

SEQ ID NO: 3469252 - DNA, 25 bp, Homo sapien
ggacacgcaggtagacccaataaca

SEQ ID NO: 3469253 - DNA, 25 bp, Homo sapien
ggtagacccaataacaataatcctg

SEQ ID NO: 3469254 - DNA, 25 bp, Homo sapien
ctgacttcttagtgttgtggctggt

SEQ ID NO: 3469255 - DNA, 25 bp, Homo sapien
ctcacttgctgacttcttagtgttg

SEQ ID NO: 3469256 - DNA, 25 bp, Homo sapien
cttgctgacttcttagtgttgtggc

SEQ ID NO: 3469257 - DNA, 25 bp, Homo sapien
tgctgacttcttagtgttgtggctg

SEQ ID NO: 3469258 - DNA, 25 bp, Homo sapien
catggcccattagacaaagacccct

SEQ ID NO: 3469259 - DNA, 25 bp, Homo sapien
cctgctaagagtgattggtgttgac

SEQ ID NO: 3469260 - DNA, 25 bp, Homo sapien
aaagacccctcaccatggatgctgg

SEQ ID NO: 3469261 - DNA, 25 bp, Homo sapien
gatgctggagctgcaattgatttga

SEQ ID NO: 3469262 - DNA, 25 bp, Homo sapien
aaaggggccacggatgttctgctcc

SEQ ID NO: 3469263 - DNA, 25 bp, Homo sapien
gggccacggatgttctgctcctctt

SEQ ID NO: 3469264 - DNA, 25 bp, Homo sapien
ccacggatgttctgctcctcttggc

SEQ ID NO: 3469265 - DNA, 25 bp, Homo sapien
acaaaggggccacggatgttctgct

SEQ ID NO: 3469266 - DNA, 25 bp, Homo sapien
ctgattcgcccagctttggacagga

SEQ ID NO: 3469267 - DNA, 25 bp, Homo sapien
gattcgcccagctttggacaggaaa

SEQ ID NO: 3469268 - DNA, 25 bp, Homo sapien
caggaaatggcgcagtgacctgcct

SEQ ID NO: 3469269 - DNA, 25 bp, Homo sapien
ctttggacaggaaatggcgcagtga

SEQ ID NO: 3469270 - DNA, 25 bp, Homo sapien
tctggggcccaaagcagcgtcctct

SEQ ID NO: 3469271 - DNA, 25 bp, Homo sapien
atgcaggtcccagaccgcagccgtc

SEQ ID NO: 3469272 - DNA, 25 bp, Homo sapien
gaggccaggccgcacgcactgttgc

SEQ ID NO: 3469273 - DNA, 25 bp, Homo sapien
aaggccagtgcaggaccagctccca

SEQ ID NO: 3469274 - DNA, 25 bp, Homo sapien
cagtgcccccctacgctagggtgag

SEQ ID NO: 3469275 - DNA, 25 bp, Homo sapien
agtgcccccctacgctagggtgaga

SEQ ID NO: 3469276 - DNA, 25 bp, Homo sapien
gccagtgcccccctacgctagggtg

SEQ ID NO: 3469277 - DNA, 25 bp, Homo sapien
tgcccccctacgctagggtgagagg

SEQ ID NO: 3469278 - DNA, 25 bp, Homo sapien
tgcccaacggtatgaaggttagaag

SEQ ID NO: 3469279 - DNA, 25 bp, Homo sapien
tgtctcccagggcatggatctcagg

SEQ ID NO: 3469280 - DNA, 25 bp, Homo sapien
gaacagaggcctagtccagtgaatt

SEQ ID NO: 3469281 - DNA, 25 bp, Homo sapien
ttttcaactcccacggaacagaggc

SEQ ID NO: 3469282 - DNA, 25 bp, Homo sapien
tccagtgcagaaaacgctctgcaaa

SEQ ID NO: 3469283 - DNA, 25 bp, Homo sapien
gtgcagaaaacgctctgcaaatagt

SEQ ID NO: 3469284 - DNA, 25 bp, Homo sapien
tgcagaaaacgctctgcaaatagtt

SEQ ID NO: 3469285 - DNA, 25 bp, Homo sapien
cagtgcagaaaacgctctgcaaata

SEQ ID NO: 3469286 - DNA, 25 bp, Homo sapien
tatgtcaatgaataacagcagggtg

SEQ ID NO: 3469287 - DNA, 25 bp, Homo sapien
aacagaacggtcaggcttattagcc

SEQ ID NO: 3469288 - DNA, 25 bp, Homo sapien
ttctaaaactaagagccaagtgatt

SEQ ID NO: 3469289 - DNA, 25 bp, Homo sapien
gggtgatccctttcattccaactgc

SEQ ID NO: 3469290 - DNA, 25 bp, Homo sapien
tttaagaaatttctgcaaatctttc

SEQ ID NO: 3469291 - DNA, 25 bp, Homo sapien
catttttaagaaatttctgcaaatc

SEQ ID NO: 3469292 - DNA, 25 bp, Homo sapien
gaaatttctgcaaatctttctcttt

SEQ ID NO: 3469293 - DNA, 25 bp, Homo sapien
agatttcatccacatttttaagaaa

SEQ ID NO: 3469294 - DNA, 25 bp, Homo sapien
ggtcatgaacaaacaggtggcaggt

SEQ ID NO: 3469295 - DNA, 25 bp, Homo sapien
tcatttacgatgtcacccaagctag

SEQ ID NO: 3469296 - DNA, 25 bp, Homo sapien
tgagatccaacctgcctgaacttgg

SEQ ID NO: 3469297 - DNA, 25 bp, Homo sapien
tctactctaaaacgggaggaatctc

SEQ ID NO: 3469298 - DNA, 25 bp, Homo sapien
caactgtcagtcatctaagtggctc

SEQ ID NO: 3469299 - DNA, 25 bp, Homo sapien
ggtatgagtgcaagccctaattcaa

SEQ ID NO: 3469300 - DNA, 25 bp, Homo sapien
tgagaaatgcaagcaacccgggtaa

SEQ ID NO: 3469301 - DNA, 25 bp, Homo sapien
tggtttcagctggactcacacatat

SEQ ID NO: 3469302 - DNA, 25 bp, Homo sapien
aattacccaattctaccagtctgca

SEQ ID NO: 3469303 - DNA, 25 bp, Homo sapien
gaatgctatgtactgagggagacag

SEQ ID NO: 3469304 - DNA, 25 bp, Homo sapien
tacaggcagctcaaaatcgcaaaac

SEQ ID NO: 3469305 - DNA, 25 bp, Homo sapien
tagctattagctttaaggaacagag

SEQ ID NO: 3469306 - DNA, 25 bp, Homo sapien
catagtcttgttcaaggtggtcctg

SEQ ID NO: 3469307 - DNA, 25 bp, Homo sapien
gtcttcctccataagcagtagtctc

SEQ ID NO: 3469308 - DNA, 25 bp, Homo sapien
agctttctgttgcacaactgggtca

SEQ ID NO: 3469309 - DNA, 25 bp, Homo sapien
tcctccataagcagtagtctctttt

SEQ ID NO: 3469310 - DNA, 25 bp, Homo sapien
cactgtaagtacttatataacttct

SEQ ID NO: 3469311 - DNA, 25 bp, Homo sapien
tcactgtaagtacttatataacttc

SEQ ID NO: 3469312 - DNA, 25 bp, Homo sapien
aactactgcctaggtgtaggtcttc

SEQ ID NO: 3469313 - DNA, 25 bp, Homo sapien
tgagattaaactactgcctaggtgt

SEQ ID NO: 3469314 - DNA, 25 bp, Homo sapien
gccttgctggacagtttgagattaa

SEQ ID NO: 3469315 - DNA, 25 bp, Homo sapien
cttgctggacagtttgagattaaac

SEQ ID NO: 3469316 - DNA, 25 bp, Homo sapien
cagctgtggcttatgagttggaaat

SEQ ID NO: 3469317 - DNA, 25 bp, Homo sapien
tgggaccgagtctgcaaaacaaggc

SEQ ID NO: 3469318 - DNA, 25 bp, Homo sapien
tgcccaggtcaagggacctcagctg

SEQ ID NO: 3469319 - DNA, 25 bp, Homo sapien
tatgggcacaattgctatgggaccg

SEQ ID NO: 3469320 - DNA, 25 bp, Homo sapien
ctcttggctcgttcctttgcatcct

SEQ ID NO: 3469321 - DNA, 25 bp, Homo sapien
catccgccaagactttgttttccct

SEQ ID NO: 3469322 - DNA, 25 bp, Homo sapien
acagagaacagaccatcaatgattt

SEQ ID NO: 3469323 - DNA, 25 bp, Homo sapien
aacagagaacagaccatcaatgatt

SEQ ID NO: 3469324 - DNA, 25 bp, Homo sapien
ggaacagagaacagaccatcaatga

SEQ ID NO: 3469325 - DNA, 25 bp, Homo sapien
gaacagagaacagaccatcaatgat

SEQ ID NO: 3469326 - DNA, 25 bp, Homo sapien
ctgggctcggttggtgtacagcact

SEQ ID NO: 3469327 - DNA, 25 bp, Homo sapien
tccaaaccctcactgtagcgcagga

SEQ ID NO: 3469328 - DNA, 25 bp, Homo sapien
gctcggttggtgtacagcactttca

SEQ ID NO: 3469329 - DNA, 25 bp, Homo sapien
cgcaggatagctgtttcataattgc

SEQ ID NO: 3469330 - DNA, 25 bp, Homo sapien
taggttttctctctagcaagcaaca

SEQ ID NO: 3469331 - DNA, 25 bp, Homo sapien
cggtttgtaacaccagggagcacat

SEQ ID NO: 3469332 - DNA, 25 bp, Homo sapien
gcaagcaacactcaatttacagggt

SEQ ID NO: 3469333 - DNA, 25 bp, Homo sapien
gagaggaatcactccctcaaacctt

SEQ ID NO: 3469334 - DNA, 25 bp, Homo sapien
tggcacacttgcactgggcaactga

SEQ ID NO: 3469335 - DNA, 25 bp, Homo sapien
gagttgaatacagggacctcttcca

SEQ ID NO: 3469336 - DNA, 25 bp, Homo sapien
tagcaacagtggacagccattacca

SEQ ID NO: 3469337 - DNA, 25 bp, Homo sapien
ggaacctgacaagggatgctacaga

SEQ ID NO: 3469338 - DNA, 25 bp, Homo sapien
ctgtaatgaaaccaacagctgatat

SEQ ID NO: 3469339 - DNA, 25 bp, Homo sapien
cagaaagaacattcgaacagtagaa

SEQ ID NO: 3469340 - DNA, 25 bp, Homo sapien
gaatgtcagcgagaactatccccta

SEQ ID NO: 3469341 - DNA, 25 bp, Homo sapien
gaaaccaacagctgatattcacaca

SEQ ID NO: 3469342 - DNA, 25 bp, Homo sapien
agagcccactcacaatccaccagtg

SEQ ID NO: 3469343 - DNA, 25 bp, Homo sapien
tcacaatccaccagtgccttctcat

SEQ ID NO: 3469344 - DNA, 25 bp, Homo sapien
cttgagagcccactcacaatccacc

SEQ ID NO: 3469345 - DNA, 25 bp, Homo sapien
caatccaccagtgccttctcatagt

SEQ ID NO: 3469346 - DNA, 25 bp, Homo sapien
ggccaggttggcttttcccatgtga

SEQ ID NO: 3469347 - DNA, 25 bp, Homo sapien
cccatgtgaaaatatgcttttgtgc

SEQ ID NO: 3469348 - DNA, 25 bp, Homo sapien
tcccatgtgaaaatatgcttttgtg

SEQ ID NO: 3469349 - DNA, 25 bp, Homo sapien
cacactgtagttcttcagggccagg

SEQ ID NO: 3469350 - DNA, 25 bp, Homo sapien
tctatatggaatctacagaacgggc

SEQ ID NO: 3469351 - DNA, 25 bp, Homo sapien
gtgatggctgcctgactctgtgaat

SEQ ID NO: 3469352 - DNA, 25 bp, Homo sapien
tagagttaccatacggccctgctat

SEQ ID NO: 3469353 - DNA, 25 bp, Homo sapien
gaaagactgatggttgcctaacgtt

SEQ ID NO: 3469354 - DNA, 25 bp, Homo sapien
caaagttgaaggctctcacttctca

SEQ ID NO: 3469355 - DNA, 25 bp, Homo sapien
taatgggacaagtagacatctacag

SEQ ID NO: 3469356 - DNA, 25 bp, Homo sapien
caaaatcactcaatggtaatgggac

SEQ ID NO: 3469357 - DNA, 25 bp, Homo sapien
tttctttgcaaaaatcgacacgata

SEQ ID NO: 3469358 - DNA, 25 bp, Homo sapien
gcaggagacaggcataggaacacaa

SEQ ID NO: 3469359 - DNA, 25 bp, Homo sapien
tttgacatttttgttcaggcgtctc

SEQ ID NO: 3469360 - DNA, 25 bp, Homo sapien
catttttgttcaggcgtctccagtt

SEQ ID NO: 3469361 - DNA, 25 bp, Homo sapien
gacaggcataggaacacaatgtgca

SEQ ID NO: 3469362 - DNA, 25 bp, Homo sapien
cacctgggtttgcagcttggggttt

SEQ ID NO: 3469363 - DNA, 25 bp, Homo sapien
ttcacctgggtttgcagcttggggt

SEQ ID NO: 3469364 - DNA, 25 bp, Homo sapien
ctttcacctgggtttgcagcttggg

SEQ ID NO: 3469365 - DNA, 25 bp, Homo sapien
ctgggtttgcagcttggggtttatt

SEQ ID NO: 3469366 - DNA, 25 bp, Homo sapien
gaaagcacggaaggcattctaaggc

SEQ ID NO: 3469367 - DNA, 25 bp, Homo sapien
ttactatttgcaagggagcacagca

SEQ ID NO: 3469368 - DNA, 25 bp, Homo sapien
gagttcagatgaaggacctcagcag

SEQ ID NO: 3469369 - DNA, 25 bp, Homo sapien
tgcaggaaagaggatccgccgctgc

SEQ ID NO: 3469370 - DNA, 25 bp, Homo sapien
tcagtcaggatctcaatccccccag

SEQ ID NO: 3469371 - DNA, 25 bp, Homo sapien
cagcatagaacaaggggatctggtc

SEQ ID NO: 3469372 - DNA, 25 bp, Homo sapien
tgaagatctacttgattcaggtaac

SEQ ID NO: 3469373 - DNA, 25 bp, Homo sapien
tcttggtggtcacggctgtgttctt

SEQ ID NO: 3469374 - DNA, 25 bp, Homo sapien
agcgtatatctttaatcaatatttg

SEQ ID NO: 3469375 - DNA, 25 bp, Homo sapien
agctacattagcgtatatctttaat

SEQ ID NO: 3469376 - DNA, 25 bp, Homo sapien
acagcactcatgagatcacacacat

SEQ ID NO: 3469377 - DNA, 25 bp, Homo sapien
gacagcactcatgagatcacacaca

SEQ ID NO: 3469378 - DNA, 25 bp, Homo sapien
ccacgtgtacgtgttgtgttgtgta

SEQ ID NO: 3469379 - DNA, 25 bp, Homo sapien
agtgtacgcatgctctgtagagagg

SEQ ID NO: 3469380 - DNA, 25 bp, Homo sapien
tggactgacatgagtacttatggtg

SEQ ID NO: 3469381 - DNA, 25 bp, Homo sapien
tatatcgagtgtgtgccacgtgtac

SEQ ID NO: 3469382 - DNA, 25 bp, Homo sapien
aatatggaatgccacggtacccacg

SEQ ID NO: 3469383 - DNA, 25 bp, Homo sapien
gccacctgctaatgagaaacctaat

SEQ ID NO: 3469384 - DNA, 25 bp, Homo sapien
tacccacgtgaatggtttggcagga

SEQ ID NO: 3469385 - DNA, 25 bp, Homo sapien
tgggaagtaccagcatatccatctg

SEQ ID NO: 3469386 - DNA, 25 bp, Homo sapien
cgttgtcactgatgatactaaatcc

SEQ ID NO: 3469387 - DNA, 25 bp, Homo sapien
tcttatgacctcgttgtcactgatg

SEQ ID NO: 3469388 - DNA, 25 bp, Homo sapien
ctaaatccattgtgcattctgaata

SEQ ID NO: 3469389 - DNA, 25 bp, Homo sapien
ctgatgatactaaatccattgtgca

SEQ ID NO: 3469390 - DNA, 25 bp, Homo sapien
catgggtcaccaggatcaatcacgg

SEQ ID NO: 3469391 - DNA, 25 bp, Homo sapien
gtatagttttataatccagagccat

SEQ ID NO: 3469392 - DNA, 25 bp, Homo sapien
tcaccaaatacaggtttgagaaagt

SEQ ID NO: 3469393 - DNA, 25 bp, Homo sapien
tggttttatttcacccctagattca

SEQ ID NO: 3469394 - DNA, 25 bp, Homo sapien
ttcctgctgcacactgcttgccaga

SEQ ID NO: 3469395 - DNA, 25 bp, Homo sapien
gccagagcttgagaacagacacaca

SEQ ID NO: 3469396 - DNA, 25 bp, Homo sapien
ctgctgcacactgcttgccagagct

SEQ ID NO: 3469397 - DNA, 25 bp, Homo sapien
gcttgccagagcttgagaacagaca

SEQ ID NO: 3469398 - DNA, 25 bp, Homo sapien
ttgccagtgcatgaacagaagtcat

SEQ ID NO: 3469399 - DNA, 25 bp, Homo sapien
cattgccagtgcatgaacagaagtc

SEQ ID NO: 3469400 - DNA, 25 bp, Homo sapien
ctcattgccagtgcatgaacagaag

SEQ ID NO: 3469401 - DNA, 25 bp, Homo sapien
gccagtgcatgaacagaagtcatga

SEQ ID NO: 3469402 - DNA, 25 bp, Homo sapien
tggtgtatcactagcacacgctggt

SEQ ID NO: 3469403 - DNA, 25 bp, Homo sapien
agagggcggccaacagcctggccct

SEQ ID NO: 3469404 - DNA, 25 bp, Homo sapien
ttggaggacaagagggcggccaaca

SEQ ID NO: 3469405 - DNA, 25 bp, Homo sapien
tggccctgtcatggtgtatcactag

SEQ ID NO: 3469406 - DNA, 25 bp, Homo sapien
ctctcagtctgggcgagatgcagca

SEQ ID NO: 3469407 - DNA, 25 bp, Homo sapien
ctggtcaggtcaaggtggttgatga

SEQ ID NO: 3469408 - DNA, 25 bp, Homo sapien
tcaaggtggttgatgatcaggctcc

SEQ ID NO: 3469409 - DNA, 25 bp, Homo sapien
tgatcaggctccgtccgctctcagt

SEQ ID NO: 3469410 - DNA, 25 bp, Homo sapien
tgagacctggtttataactggttcc

SEQ ID NO: 3469411 - DNA, 25 bp, Homo sapien
ggtttataactggttcctatgagaa

SEQ ID NO: 3469412 - DNA, 25 bp, Homo sapien
acagaattgtgagacctggtttata

SEQ ID NO: 3469413 - DNA, 25 bp, Homo sapien
agtaacagaattgtgagacctggtt

SEQ ID NO: 3469414 - DNA, 25 bp, Homo sapien
gaaatgacaccagcgcttccaataa

SEQ ID NO: 3469415 - DNA, 25 bp, Homo sapien
gcctccttatccgagaaatcaagaa

SEQ ID NO: 3469416 - DNA, 25 bp, Homo sapien
gagccaagtctgtgaacagtcccat

SEQ ID NO: 3469417 - DNA, 25 bp, Homo sapien
gaacagtcccatagcagtgttggcc

SEQ ID NO: 3469418 - DNA, 25 bp, Homo sapien
ggagaacacctggaaggttggcctg

SEQ ID NO: 3469419 - DNA, 25 bp, Homo sapien
gtttcaataactgagaattgtgtaa

SEQ ID NO: 3469420 - DNA, 25 bp, Homo sapien
tgtttcaataactgagaattgtgta

SEQ ID NO: 3469421 - DNA, 25 bp, Homo sapien
aaaggcccacgaaccaaccagatag

SEQ ID NO: 3469422 - DNA, 25 bp, Homo sapien
gcccacgaaccaaccagatagcttc

SEQ ID NO: 3469423 - DNA, 25 bp, Homo sapien
aggcccacgaaccaaccagatagct

SEQ ID NO: 3469424 - DNA, 25 bp, Homo sapien
caaaaggcccacgaaccaaccagat

SEQ ID NO: 3469425 - DNA, 25 bp, Homo sapien
gatggcaatgcactggcacagagcc

SEQ ID NO: 3469426 - DNA, 25 bp, Homo sapien
tgtcttcgggtagtgggctcagcac

SEQ ID NO: 3469427 - DNA, 25 bp, Homo sapien
caaattcctcacaggccgccatgtg

SEQ ID NO: 3469428 - DNA, 25 bp, Homo sapien
agagccgaggagctgcttaccttgg

SEQ ID NO: 3469429 - DNA, 25 bp, Homo sapien
tggacaaagaaccacgatccactgg

SEQ ID NO: 3469430 - DNA, 25 bp, Homo sapien
tatcacgatgatgggatcaaatcca

SEQ ID NO: 3469431 - DNA, 25 bp, Homo sapien
caaatgtcccaagacacagagtggc

SEQ ID NO: 3469432 - DNA, 25 bp, Homo sapien
tgagccaaattgagccaaatgtccc

SEQ ID NO: 3469433 - DNA, 25 bp, Homo sapien
cactcatcgagttgtcagggagagc

SEQ ID NO: 3469434 - DNA, 25 bp, Homo sapien
catggcatagagtatagcagatcct

SEQ ID NO: 3469435 - DNA, 25 bp, Homo sapien
tcaaatcaggatcaggcaagatggc

SEQ ID NO: 3469436 - DNA, 25 bp, Homo sapien
gctaactagatacagccaggtggaa

SEQ ID NO: 3469437 - DNA, 25 bp, Homo sapien
gacacaggttcatcatgagtcccag

SEQ ID NO: 3469438 - DNA, 25 bp, Homo sapien
tcatgagtcccaggagtgtgtagat

SEQ ID NO: 3469439 - DNA, 25 bp, Homo sapien
gataacctctctgaacaggtccaca

SEQ ID NO: 3469440 - DNA, 25 bp, Homo sapien
cccaggagtgtgtagataacctctc

SEQ ID NO: 3469441 - DNA, 25 bp, Homo sapien
tgtgtacaggttgtcccagggctcc

SEQ ID NO: 3469442 - DNA, 25 bp, Homo sapien
tcagcggagcttcttctgagcaccg

SEQ ID NO: 3469443 - DNA, 25 bp, Homo sapien
tccacggccagtgtgtgagtgtaca

SEQ ID NO: 3469444 - DNA, 25 bp, Homo sapien
gctcagcacaccttggatacccagt

SEQ ID NO: 3469445 - DNA, 25 bp, Homo sapien
ttagtaaagacaggcaccttctgct

SEQ ID NO: 3469446 - DNA, 25 bp, Homo sapien
tagtaaagacaggcaccttctgctc

SEQ ID NO: 3469447 - DNA, 25 bp, Homo sapien
tatgcctggaggatagatgcctgcc

SEQ ID NO: 3469448 - DNA, 25 bp, Homo sapien
tggaaagatatagaggtggcacccc

SEQ ID NO: 3469449 - DNA, 25 bp, Homo sapien
tctgatgaaagctacgatgccccgt

SEQ ID NO: 3469450 - DNA, 25 bp, Homo sapien
gctagacaaggaccagatgcccatg

SEQ ID NO: 3469451 - DNA, 25 bp, Homo sapien
caaggcctcctcaacaattttcaga

SEQ ID NO: 3469452 - DNA, 25 bp, Homo sapien
ggcctcctcaacaattttcagagag

SEQ ID NO: 3469453 - DNA, 25 bp, Homo sapien
tgctcgcaaggcctcctcaacaatt

SEQ ID NO: 3469454 - DNA, 25 bp, Homo sapien
tcgcaaggcctcctcaacaattttc

SEQ ID NO: 3469455 - DNA, 25 bp, Homo sapien
gaagagaatgatgctgatgaatggc

SEQ ID NO: 3469456 - DNA, 25 bp, Homo sapien
gaacgaggactgacttgctaaggct

SEQ ID NO: 3469457 - DNA, 25 bp, Homo sapien
cattttcccatttgagaacgaggac

SEQ ID NO: 3469458 - DNA, 25 bp, Homo sapien
gctgacagtcctgcatgaggaactt

SEQ ID NO: 3469459 - DNA, 25 bp, Homo sapien
aaaatcagtgctatgattgctcttg

SEQ ID NO: 3469460 - DNA, 25 bp, Homo sapien
aaatcagtgctatgattgctcttga

SEQ ID NO: 3469461 - DNA, 25 bp, Homo sapien
taaaatcagtgctatgattgctctt

SEQ ID NO: 3469462 - DNA, 25 bp, Homo sapien
aataaaatcagtgctatgattgctc

SEQ ID NO: 3469463 - DNA, 25 bp, Homo sapien
cataacgtgatgcagtctcacctcc

SEQ ID NO: 3469464 - DNA, 25 bp, Homo sapien
gcttcatgataactattcgtgcaga

SEQ ID NO: 3469465 - DNA, 25 bp, Homo sapien
agtcttattacttcttcccgagctt

SEQ ID NO: 3469466 - DNA, 25 bp, Homo sapien
tattcgtgcagatagctagtatctt

SEQ ID NO: 3469467 - DNA, 25 bp, Homo sapien
tgaacctctgggacaagggctccct

SEQ ID NO: 3469468 - DNA, 25 bp, Homo sapien
agcctgggcattctacctgtgtgca

SEQ ID NO: 3469469 - DNA, 25 bp, Homo sapien
tctgggagaggttaacagcattgct

SEQ ID NO: 3469470 - DNA, 25 bp, Homo sapien
cctgtgtgcatccaaaaggttaatt

SEQ ID NO: 3469471 - DNA, 25 bp, Homo sapien
ggtaagaagaacattagcaggctgc

SEQ ID NO: 3469472 - DNA, 25 bp, Homo sapien
gcattccagggagttggtaagaaga

SEQ ID NO: 3469473 - DNA, 25 bp, Homo sapien
aaaggcttgccgcttccatggtgga

SEQ ID NO: 3469474 - DNA, 25 bp, Homo sapien
cagggtatgcaacaggatccaggag

SEQ ID NO: 3469475 - DNA, 25 bp, Homo sapien
tgcctgcaagctttaacaagacctg

SEQ ID NO: 3469476 - DNA, 25 bp, Homo sapien
ccagagcaatgcctgcgttcacctg

SEQ ID NO: 3469477 - DNA, 25 bp, Homo sapien
tttagcagggaagacgcaacgttgg

SEQ ID NO: 3469478 - DNA, 25 bp, Homo sapien
caacgttgggcacctccatgcagtt

SEQ ID NO: 3469479 - DNA, 25 bp, Homo sapien
tcagcctggctccgtgtccacagca

SEQ ID NO: 3469480 - DNA, 25 bp, Homo sapien
gcctggctccgtgtccacagcatac

SEQ ID NO: 3469481 - DNA, 25 bp, Homo sapien
cagcctggctccgtgtccacagcat

SEQ ID NO: 3469482 - DNA, 25 bp, Homo sapien
agcctggctccgtgtccacagcata

SEQ ID NO: 3469483 - DNA, 25 bp, Homo sapien
tgcatgaacatgtgacccttgctgg

SEQ ID NO: 3469484 - DNA, 25 bp, Homo sapien
cactggggacctcggcatgctgttc

SEQ ID NO: 3469485 - DNA, 25 bp, Homo sapien
ttcctccatttgtttaggctgaggc

SEQ ID NO: 3469486 - DNA, 25 bp, Homo sapien
ccttgctggccgttcctccatttgt

SEQ ID NO: 3469487 - DNA, 25 bp, Homo sapien
gaacgtcagtcctatcactctgggt

SEQ ID NO: 3469488 - DNA, 25 bp, Homo sapien
taagtgccacggttcaggcttctgg

SEQ ID NO: 3469489 - DNA, 25 bp, Homo sapien
aacaccctctcagatggaagctggc

SEQ ID NO: 3469490 - DNA, 25 bp, Homo sapien
tcaggctgatcagacaggaccttgc

SEQ ID NO: 3469491 - DNA, 25 bp, Homo sapien
aatttctaggccatgaagctttctc

SEQ ID NO: 3469492 - DNA, 25 bp, Homo sapien
tttattagcataggaacaacacacg

SEQ ID NO: 3469493 - DNA, 25 bp, Homo sapien
taggaacaacacacggtgtgcatct

SEQ ID NO: 3469494 - DNA, 25 bp, Homo sapien
gatgtatttcatcgtagagttgaga

SEQ ID NO: 3469495 - DNA, 25 bp, Homo sapien
cagcctaatgcccactctcttgtta

SEQ ID NO: 3469496 - DNA, 25 bp, Homo sapien
gaagtcgagtaagccagtgcacaga

SEQ ID NO: 3469497 - DNA, 25 bp, Homo sapien
tctagaatcgttgctacaagggagt

SEQ ID NO: 3469498 - DNA, 25 bp, Homo sapien
tcaaaggagggtacaatggaagtcg

SEQ ID NO: 3469499 - DNA, 25 bp, Homo sapien
gctgctaccaacaaatctgatgttt

SEQ ID NO: 3469500 - DNA, 25 bp, Homo sapien
aatgctgctaccaacaaatctgatg

SEQ ID NO: 3469501 - DNA, 25 bp, Homo sapien
tgaaatgctgctaccaacaaatctg

SEQ ID NO: 3469502 - DNA, 25 bp, Homo sapien
gaaatgctgctaccaacaaatctga

SEQ ID NO: 3469503 - DNA, 25 bp, Homo sapien
caatgatgccaatgcaactctctct

SEQ ID NO: 3469504 - DNA, 25 bp, Homo sapien
cactgaatttaacggcacatgcagt

SEQ ID NO: 3469505 - DNA, 25 bp, Homo sapien
aggccaccaatgatgccaatgcaac

SEQ ID NO: 3469506 - DNA, 25 bp, Homo sapien
taacggcacatgcagtggctgcagg

SEQ ID NO: 3469507 - DNA, 25 bp, Homo sapien
gctttggcacctttagcagagaaca

SEQ ID NO: 3469508 - DNA, 25 bp, Homo sapien
gattcccagaatgattcacgcagag

SEQ ID NO: 3469509 - DNA, 25 bp, Homo sapien
tctaacccatggaacagggtgccta

SEQ ID NO: 3469510 - DNA, 25 bp, Homo sapien
ttcacgcagagttctcctaacaggg

SEQ ID NO: 3469511 - DNA, 25 bp, Homo sapien
tttagagtgaccctggggcaactgg

SEQ ID NO: 3469512 - DNA, 25 bp, Homo sapien
cctggggcaactggaagggagcgtt

SEQ ID NO: 3469513 - DNA, 25 bp, Homo sapien
ttagggacttgcagtccacaggtga

SEQ ID NO: 3469514 - DNA, 25 bp, Homo sapien
caggtgaccctggtttagagtgacc

SEQ ID NO: 3469515 - DNA, 25 bp, Homo sapien
cgttttcaaagctccacggaattct

SEQ ID NO: 3469516 - DNA, 25 bp, Homo sapien
gccatgcgcagtacatcaatctgaa

SEQ ID NO: 3469517 - DNA, 25 bp, Homo sapien
ggaagagaatacacctatcatagcc

SEQ ID NO: 3469518 - DNA, 25 bp, Homo sapien
tctgattagcatcgagccgttctcc

SEQ ID NO: 3469519 - DNA, 25 bp, Homo sapien
gcagactctcttccaaattggagat

SEQ ID NO: 3469520 - DNA, 25 bp, Homo sapien
aattggagatgactgctctcggcag

SEQ ID NO: 3469521 - DNA, 25 bp, Homo sapien
gagacagagcttcaggtgcagcaga

SEQ ID NO: 3469522 - DNA, 25 bp, Homo sapien
gagatgactgctctcggcaggcact

SEQ ID NO: 3469523 - DNA, 25 bp, Homo sapien
tggagagggagaatactagcatgtg

SEQ ID NO: 3469524 - DNA, 25 bp, Homo sapien
ggagaatactagcatgtgaaacatc

SEQ ID NO: 3469525 - DNA, 25 bp, Homo sapien
agaatactagcatgtgaaacatctc

SEQ ID NO: 3469526 - DNA, 25 bp, Homo sapien
gagggagaatactagcatgtgaaac

SEQ ID NO: 3469527 - DNA, 25 bp, Homo sapien
gggcggtggcgggggtggatccaca

SEQ ID NO: 3469528 - DNA, 25 bp, Homo sapien
tggggcggtggcgggggtggatcca

SEQ ID NO: 3469529 - DNA, 25 bp, Homo sapien
ggccttctgaaagatggcgctggta

SEQ ID NO: 3469530 - DNA, 25 bp, Homo sapien
ggaacaagccgtgtctccaagggtg

SEQ ID NO: 3469531 - DNA, 25 bp, Homo sapien
gaaagatggcgctggtattttccat

SEQ ID NO: 3469532 - DNA, 25 bp, Homo sapien
tcctggcaagtggagatgaggcctt

SEQ ID NO: 3469533 - DNA, 25 bp, Homo sapien
tgcttgttgaaccagaagactctga

SEQ ID NO: 3469534 - DNA, 25 bp, Homo sapien
tgtaacggaacccttggagagcctc

SEQ ID NO: 3469535 - DNA, 25 bp, Homo sapien
gaggaccaaaagctcattccctggg

SEQ ID NO: 3469536 - DNA, 25 bp, Homo sapien
tgtttacaatagcagcccgtgacct

SEQ ID NO: 3469537 - DNA, 25 bp, Homo sapien
aagtggagataatacccacctcaca

SEQ ID NO: 3469538 - DNA, 25 bp, Homo sapien
cctgggtgggaaagtactattctgt

SEQ ID NO: 3469539 - DNA, 25 bp, Homo sapien
gagttaagaacacagcttggggtca

SEQ ID NO: 3469540 - DNA, 25 bp, Homo sapien
agaacacagcttggggtcaaattct

SEQ ID NO: 3469541 - DNA, 25 bp, Homo sapien
tatctgtggtatcaatccctggtgg

SEQ ID NO: 3469542 - DNA, 25 bp, Homo sapien
cacagggcagaatgtctccagggag

SEQ ID NO: 3469543 - DNA, 25 bp, Homo sapien
tacatgcttgccttcagtgagacgg

SEQ ID NO: 3469544 - DNA, 25 bp, Homo sapien
tgtttgccaccagtcacaggagaga

SEQ ID NO: 3469545 - DNA, 25 bp, Homo sapien
tctggaccattagttcagagggttc

SEQ ID NO: 3469546 - DNA, 25 bp, Homo sapien
ttagacaatgaatcagatggactcc

SEQ ID NO: 3469547 - DNA, 25 bp, Homo sapien
gatggactccaacaaagcagataca

SEQ ID NO: 3469548 - DNA, 25 bp, Homo sapien
taccctcgggttccaaatttgcaga

SEQ ID NO: 3469549 - DNA, 25 bp, Homo sapien
cacctttagggtagagtcacataga

SEQ ID NO: 3469550 - DNA, 25 bp, Homo sapien
cagaaaagagcatatagggatggcc

SEQ ID NO: 3469551 - DNA, 25 bp, Homo sapien
gcaaggaggctatggcaataagtca

SEQ ID NO: 3469552 - DNA, 25 bp, Homo sapien
cagcaatgcctaataccacagaatg

SEQ ID NO: 3469553 - DNA, 25 bp, Homo sapien
gacacccattgggaagctggcctaa

SEQ ID NO: 3469554 - DNA, 25 bp, Homo sapien
tgaaacagaggatataggagtgagt

SEQ ID NO: 3469555 - DNA, 25 bp, Homo sapien
gaacccgtttcattagacagatctg

SEQ ID NO: 3469556 - DNA, 25 bp, Homo sapien
gacagatctgaaaccagtcaagtat

SEQ ID NO: 3469557 - DNA, 25 bp, Homo sapien
ctagatcttggaccagttgcttaac

SEQ ID NO: 3469558 - DNA, 25 bp, Homo sapien
aggcagcaccacacaagccttcagg

SEQ ID NO: 3469559 - DNA, 25 bp, Homo sapien
ggtggttgagtacctggtctagatc

SEQ ID NO: 3469560 - DNA, 25 bp, Homo sapien
cagggaaaggatgaatcgcatgggt

SEQ ID NO: 3469561 - DNA, 25 bp, Homo sapien
gagacactccctgttctccttcaac

SEQ ID NO: 3469562 - DNA, 25 bp, Homo sapien
tagagacactccctgttctccttca

SEQ ID NO: 3469563 - DNA, 25 bp, Homo sapien
agagacactccctgttctccttcaa

SEQ ID NO: 3469564 - DNA, 25 bp, Homo sapien
ttagagacactccctgttctccttc

SEQ ID NO: 3469565 - DNA, 25 bp, Homo sapien
tattatggaataggactcagcaact

SEQ ID NO: 3469566 - DNA, 25 bp, Homo sapien
gccacttggatgaggccccagagaa

SEQ ID NO: 3469567 - DNA, 25 bp, Homo sapien
tgacggcacctgtgtaaggactatg

SEQ ID NO: 3469568 - DNA, 25 bp, Homo sapien
tagctaaaatctggaaaccgctcag

SEQ ID NO: 3469569 - DNA, 25 bp, Homo sapien
gtggccgaaggagccgccgcttcct

SEQ ID NO: 3469570 - DNA, 25 bp, Homo sapien
ggtggccgaaggagccgccgcttcc

SEQ ID NO: 3469571 - DNA, 25 bp, Homo sapien
tggccgaaggagccgccgcttcctg

SEQ ID NO: 3469572 - DNA, 25 bp, Homo sapien
cctgtgccgcgcctggaacacctgg

SEQ ID NO: 3469573 - DNA, 25 bp, Homo sapien
cctcgaagtcgtcgcgggtgaagac

SEQ ID NO: 3469574 - DNA, 25 bp, Homo sapien
gccgctggccactaggcgccagtcg

SEQ ID NO: 3469575 - DNA, 25 bp, Homo sapien
ttgatggcgtactccgtccgccagc

SEQ ID NO: 3469576 - DNA, 25 bp, Homo sapien
tggcggcgtcgggtggaaggcaggg

SEQ ID NO: 3469577 - DNA, 25 bp, Homo sapien
gtcgggtggaaggcagggggcgcac

SEQ ID NO: 3469578 - DNA, 25 bp, Homo sapien
ctggcggcgtcgggtggaaggcagg

SEQ ID NO: 3469579 - DNA, 25 bp, Homo sapien
gcgtcgggtggaaggcagggggcgc

SEQ ID NO: 3469580 - DNA, 25 bp, Homo sapien
gatagacacgatgtgctgaaacttg

SEQ ID NO: 3469581 - DNA, 25 bp, Homo sapien
gctgcttgcacaccccgtagataga

SEQ ID NO: 3469582 - DNA, 25 bp, Homo sapien
cttcaatgaggtaattcacatcaga

SEQ ID NO: 3469583 - DNA, 25 bp, Homo sapien
ccagggagccgttggccataaactc

SEQ ID NO: 3469584 - DNA, 25 bp, Homo sapien
tgctgtccaggagtatgttgcccgg

SEQ ID NO: 3469585 - DNA, 25 bp, Homo sapien
agcagaggcggcttaatgctgtgca

SEQ ID NO: 3469586 - DNA, 25 bp, Homo sapien
gatgatgcggaacctgagcttccag

SEQ ID NO: 3469587 - DNA, 25 bp, Homo sapien
gcaggaagttcatggccaagctggt

SEQ ID NO: 3469588 - DNA, 25 bp, Homo sapien
cgcagagccgacctctcgatgtact

SEQ ID NO: 3469589 - DNA, 25 bp, Homo sapien
tgtacacatcatatttaggtcctgg

SEQ ID NO: 3469590 - DNA, 25 bp, Homo sapien
gggccttgttactctccaggaacat

SEQ ID NO: 3469591 - DNA, 25 bp, Homo sapien
tactgcatccgggtggactgttcca

SEQ ID NO: 3469592 - DNA, 25 bp, Homo sapien
tctgaatgacttagttgaacatcca

SEQ ID NO: 3469593 - DNA, 25 bp, Homo sapien
gcagagaaccctttctgaatgactt

SEQ ID NO: 3469594 - DNA, 25 bp, Homo sapien
gttgaacatccaagatcaccccagc

SEQ ID NO: 3469595 - DNA, 25 bp, Homo sapien
ttagttgaacatccaagatcacccc

SEQ ID NO: 3469596 - DNA, 25 bp, Homo sapien
gtagctcccagatgacaattgcaaa

SEQ ID NO: 3469597 - DNA, 25 bp, Homo sapien
tctgagtgagtagctcccagatgac

SEQ ID NO: 3469598 - DNA, 25 bp, Homo sapien
tgagtgagtagctcccagatgacaa

SEQ ID NO: 3469599 - DNA, 25 bp, Homo sapien
gtgagtagctcccagatgacaattg

SEQ ID NO: 3469600 - DNA, 25 bp, Homo sapien
ctttcctttagctgtgacgtgagct

SEQ ID NO: 3469601 - DNA, 25 bp, Homo sapien
ttcctttcctttagctgtgacgtga

SEQ ID NO: 3469602 - DNA, 25 bp, Homo sapien
tcctttcctttagctgtgacgtgag

SEQ ID NO: 3469603 - DNA, 25 bp, Homo sapien
ctttcctttcctttagctgtgacgt

SEQ ID NO: 3469604 - DNA, 25 bp, Homo sapien
gtcccagcagcgtttcatcaggtcc

SEQ ID NO: 3469605 - DNA, 25 bp, Homo sapien
tcccagcagcgtttcatcaggtcca

SEQ ID NO: 3469606 - DNA, 25 bp, Homo sapien
cgcttggccattggtcagagacagg

SEQ ID NO: 3469607 - DNA, 25 bp, Homo sapien
gcctcgcttggccattggtcagaga

SEQ ID NO: 3469608 - DNA, 25 bp, Homo sapien
cagtatgtctgtctcgatggtaatg

SEQ ID NO: 3469609 - DNA, 25 bp, Homo sapien
gcagcgacagcttgcaggacacctt

SEQ ID NO: 3469610 - DNA, 25 bp, Homo sapien
ccacacgactctgcagcagtgacag

SEQ ID NO: 3469611 - DNA, 25 bp, Homo sapien
ctgggactgccacacgactctgcag

SEQ ID NO: 3469612 - DNA, 25 bp, Homo sapien
tgtccatcagttcctggctgatgtc

SEQ ID NO: 3469613 - DNA, 25 bp, Homo sapien
agttcctggctgatgtcctcattaa

SEQ ID NO: 3469614 - DNA, 25 bp, Homo sapien
cactgtccatcagttcctggctgat

SEQ ID NO: 3469615 - DNA, 25 bp, Homo sapien
gttcctggctgatgtcctcattaac

SEQ ID NO: 3469616 - DNA, 25 bp, Homo sapien
agggcccgcttcaggtagtttcctg

SEQ ID NO: 3469617 - DNA, 25 bp, Homo sapien
ctgaagggcccgcttcaggtagttt

SEQ ID NO: 3469618 - DNA, 25 bp, Homo sapien
tgaagggcccgcttcaggtagtttc

SEQ ID NO: 3469619 - DNA, 25 bp, Homo sapien
gcccgcttcaggtagtttcctgagt

SEQ ID NO: 3469620 - DNA, 25 bp, Homo sapien
atctctcgggaccaaattcttacgg

SEQ ID NO: 3469621 - DNA, 25 bp, Homo sapien
ccaggctaacatggccaaagtaggc

SEQ ID NO: 3469622 - DNA, 25 bp, Homo sapien
ccgtagccgctctggtcaagggcat

SEQ ID NO: 3469623 - DNA, 25 bp, Homo sapien
ggaccgctccactcttcagcaggtg

SEQ ID NO: 3469624 - DNA, 25 bp, Homo sapien
tgggcagctcaaggctggctccgta

SEQ ID NO: 3469625 - DNA, 25 bp, Homo sapien
cagccctggtgggtgggcagctcaa

SEQ ID NO: 3469626 - DNA, 25 bp, Homo sapien
gccctggtgggtgggcagctcaagg

SEQ ID NO: 3469627 - DNA, 25 bp, Homo sapien
tggtgggtgggcagctcaaggctgg

SEQ ID NO: 3469628 - DNA, 25 bp, Homo sapien
ggagtccagttcacagctccaagag

SEQ ID NO: 3469629 - DNA, 25 bp, Homo sapien
cccgtggcgtgcagctaggtgcagg

SEQ ID NO: 3469630 - DNA, 25 bp, Homo sapien
caagagcacccatgtttgcgtggct

SEQ ID NO: 3469631 - DNA, 25 bp, Homo sapien
acccatgtttgcgtggctctctgcc

SEQ ID NO: 3469632 - DNA, 25 bp, Homo sapien
gacatttgcgtgatgttctaggagg

SEQ ID NO: 3469633 - DNA, 25 bp, Homo sapien
ctcgaccagcactttgaggatggct

SEQ ID NO: 3469634 - DNA, 25 bp, Homo sapien
caccttgttgcgggcgtggacattt

SEQ ID NO: 3469635 - DNA, 25 bp, Homo sapien
ttctaggaggttgatgacactcagg

SEQ ID NO: 3469636 - DNA, 25 bp, Homo sapien
agagtggccactgacggctccttgc

SEQ ID NO: 3469637 - DNA, 25 bp, Homo sapien
ccctgctttcggctgcggagggcca

SEQ ID NO: 3469638 - DNA, 25 bp, Homo sapien
tcctggcttagaaccacccagagtg

SEQ ID NO: 3469639 - DNA, 25 bp, Homo sapien
tctaggaaggacatgatgccctgct

SEQ ID NO: 3469640 - DNA, 25 bp, Homo sapien
ggcctcaaactcttgatatcaggtg

SEQ ID NO: 3469641 - DNA, 25 bp, Homo sapien
aggtgatctgcctgcctcagcctcc

SEQ ID NO: 3469642 - DNA, 25 bp, Homo sapien
gagccaccacggctggccaagttgt

SEQ ID NO: 3469643 - DNA, 25 bp, Homo sapien
gctggcctcaaactcttgatatcag

SEQ ID NO: 3469644 - DNA, 25 bp, Homo sapien
cctgtgaactcagaagcgagtggca

SEQ ID NO: 3469645 - DNA, 25 bp, Homo sapien
gggagcttgcatccccataaaggag

SEQ ID NO: 3469646 - DNA, 25 bp, Homo sapien
cttggattggagagggtattcattt

SEQ ID NO: 3469647 - DNA, 25 bp, Homo sapien
cagttcctactccatccaggcgaga

SEQ ID NO: 3469648 - DNA, 25 bp, Homo sapien
gaggactggatggaacacagaaaca

SEQ ID NO: 3469649 - DNA, 25 bp, Homo sapien
tgtaatccgattcagcaagcaggga

SEQ ID NO: 3469650 - DNA, 25 bp, Homo sapien
cagggaggaagcaccctctgagctc

SEQ ID NO: 3469651 - DNA, 25 bp, Homo sapien
cacagaaacaagtagggcgtggtga

SEQ ID NO: 3469652 - DNA, 25 bp, Homo sapien
tcagcctacaccaaggcactgaagg

SEQ ID NO: 3469653 - DNA, 25 bp, Homo sapien
agggggcctcggtgtctcagcctac

SEQ ID NO: 3469654 - DNA, 25 bp, Homo sapien
ggcactgaaggagagtctccctttc

SEQ ID NO: 3469655 - DNA, 25 bp, Homo sapien
ctgatccgtaggtgtttcccagggg

SEQ ID NO: 3469656 - DNA, 25 bp, Homo sapien
gataaatatcacacctgtgcaggag

SEQ ID NO: 3469657 - DNA, 25 bp, Homo sapien
caccattcagtctccagggatgcct

SEQ ID NO: 3469658 - DNA, 25 bp, Homo sapien
taggctaggattggagccaggccct

SEQ ID NO: 3469659 - DNA, 25 bp, Homo sapien
tgcctgtagggcattccatgtacac

SEQ ID NO: 3469660 - DNA, 25 bp, Homo sapien
gggaaattcagttcacttgcactca

SEQ ID NO: 3469661 - DNA, 25 bp, Homo sapien
ttgggaaattcagttcacttgcact

SEQ ID NO: 3469662 - DNA, 25 bp, Homo sapien
caaacaagactccatgggaccagag

SEQ ID NO: 3469663 - DNA, 25 bp, Homo sapien
cttgcactcaaacaagactccatgg

SEQ ID NO: 3469664 - DNA, 25 bp, Homo sapien
catcgtcttcggcaacgtgctggtg

SEQ ID NO: 3469665 - DNA, 25 bp, Homo sapien
tacctgatcgtcagcctcgcagtgg

SEQ ID NO: 3469666 - DNA, 25 bp, Homo sapien
tcgccacactggtcatgccctgggt

SEQ ID NO: 3469667 - DNA, 25 bp, Homo sapien
tgtgcatggctgtgtcccgcgagaa

SEQ ID NO: 3469668 - DNA, 25 bp, Homo sapien
atcaaattgggtgggcgcacaggaa

SEQ ID NO: 3469669 - DNA, 25 bp, Homo sapien
aattcatcttcacttagtgcatcaa

SEQ ID NO: 3469670 - DNA, 25 bp, Homo sapien
cacttagtgcatcaaaaggctgatt

SEQ ID NO: 3469671 - DNA, 25 bp, Homo sapien
cacaggaagtttgattagcaacatt

SEQ ID NO: 3469672 - DNA, 25 bp, Homo sapien
taagtactacaaccacaacggccga

SEQ ID NO: 3469673 - DNA, 25 bp, Homo sapien
aacggccgaacttgacgcacagatc

SEQ ID NO: 3469674 - DNA, 25 bp, Homo sapien
gatccccattaaaagaagaagcgtg

SEQ ID NO: 3469675 - DNA, 25 bp, Homo sapien
agaagaagcgtgcaggctttcctgc

SEQ ID NO: 3469676 - DNA, 25 bp, Homo sapien
gggaagaattccagaagatgtgtgg

SEQ ID NO: 3469677 - DNA, 25 bp, Homo sapien
gaagaattccagaagatgtgtggtt

SEQ ID NO: 3469678 - DNA, 25 bp, Homo sapien
aagaattccagaagatgtgtggttt

SEQ ID NO: 3469679 - DNA, 25 bp, Homo sapien
gaattccagaagatgtgtggtttga

SEQ ID NO: 3469680 - DNA, 25 bp, Homo sapien
ttctcttccgctccctccgtggctc

SEQ ID NO: 3469681 - DNA, 25 bp, Homo sapien
ttttctcttccgctccctccgtggc

SEQ ID NO: 3469682 - DNA, 25 bp, Homo sapien
tttctcttccgctccctccgtggct

SEQ ID NO: 3469683 - DNA, 25 bp, Homo sapien
ctcttccgctccctccgtggctcat

SEQ ID NO: 3469684 - DNA, 25 bp, Homo sapien
catggagaaaatgcactgggggggc

SEQ ID NO: 3469685 - DNA, 25 bp, Homo sapien
actgggggggctgttgaggaaacat

SEQ ID NO: 3469686 - DNA, 25 bp, Homo sapien
ttgaggaaacatacacaggtgtgtt

SEQ ID NO: 3469687 - DNA, 25 bp, Homo sapien
caggtgtgtttgttcaggtcagcct

SEQ ID NO: 3469688 - DNA, 25 bp, Homo sapien
tttactttttccagtaggagatgag

SEQ ID NO: 3469689 - DNA, 25 bp, Homo sapien
aggagatgagggaattctttgctgt

SEQ ID NO: 3469690 - DNA, 25 bp, Homo sapien
ttttactttttccagtaggagatga

SEQ ID NO: 3469691 - DNA, 25 bp, Homo sapien
agtaggagatgagggaattctttgc

SEQ ID NO: 3469692 - DNA, 25 bp, Homo sapien
tgggatgcccttggaaggcacagcc

SEQ ID NO: 3469693 - DNA, 25 bp, Homo sapien
ggatgcccttggaaggcacagcctc

SEQ ID NO: 3469694 - DNA, 25 bp, Homo sapien
ctgggatgcccttggaaggcacagc

SEQ ID NO: 3469695 - DNA, 25 bp, Homo sapien
gatgcccttggaaggcacagcctct

SEQ ID NO: 3469696 - DNA, 25 bp, Homo sapien
tctggctggattctcccgctcccac

SEQ ID NO: 3469697 - DNA, 25 bp, Homo sapien
tgaactttcgttctccttcgccttc

SEQ ID NO: 3469698 - DNA, 25 bp, Homo sapien
ccgctcccacggttgccgctgtcct

SEQ ID NO: 3469699 - DNA, 25 bp, Homo sapien
tccttggtcctgaactttcgttctc

SEQ ID NO: 3469700 - DNA, 25 bp, Homo sapien
tggaagcctcaagcagccggcgccg

SEQ ID NO: 3469701 - DNA, 25 bp, Homo sapien
cttgaaggtaagcaccggccggatg

SEQ ID NO: 3469702 - DNA, 25 bp, Homo sapien
ccaggaccagaagtttgtgcggcca

SEQ ID NO: 3469703 - DNA, 25 bp, Homo sapien
cctgggatccggctctgcatgggct

SEQ ID NO: 3469704 - DNA, 25 bp, Homo sapien
ccagtgcctggaaagcaatctctgt

SEQ ID NO: 3469705 - DNA, 25 bp, Homo sapien
gatgctgagcaaaaggatgtcttct

SEQ ID NO: 3469706 - DNA, 25 bp, Homo sapien
gacacttgttgcgagtctgccctgt

SEQ ID NO: 3469707 - DNA, 25 bp, Homo sapien
tagttgagaagcaagacaggaacac

SEQ ID NO: 3469708 - DNA, 25 bp, Homo sapien
tttcgtgaatgacatttgaacttca

SEQ ID NO: 3469709 - DNA, 25 bp, Homo sapien
actttctggttttcgtgaatgacat

SEQ ID NO: 3469710 - DNA, 25 bp, Homo sapien
aacatgagggtaataactttctggt

SEQ ID NO: 3469711 - DNA, 25 bp, Homo sapien
gcatgaacatgagggtaataacttt

SEQ ID NO: 3469712 - DNA, 25 bp, Homo sapien
aacagagacttgaaggtgatagaca

SEQ ID NO: 3469713 - DNA, 25 bp, Homo sapien
agacttgaaggtgatagacaggtga

SEQ ID NO: 3469714 - DNA, 25 bp, Homo sapien
taaaggtgatagataggtgaggaaa

SEQ ID NO: 3469715 - DNA, 25 bp, Homo sapien
gagggaataaaggtgatagataggt

SEQ ID NO: 3469716 - DNA, 25 bp, Homo sapien
atttggttttcatggtggagtggtg

SEQ ID NO: 3469717 - DNA, 25 bp, Homo sapien
tggtggagtggtgtggaaccgctga

SEQ ID NO: 3469718 - DNA, 25 bp, Homo sapien
atggtggagtggtgtggaaccgctg

SEQ ID NO: 3469719 - DNA, 25 bp, Homo sapien
gactgtgtccatccatagggaagct

SEQ ID NO: 3469720 - DNA, 25 bp, Homo sapien
tcaactgtgctttgggtcagtcctc

SEQ ID NO: 3469721 - DNA, 25 bp, Homo sapien
tgtagctggctaggatgctcactgt

SEQ ID NO: 3469722 - DNA, 25 bp, Homo sapien
tcaaaaaggctaagtgacaacctcc

SEQ ID NO: 3469723 - DNA, 25 bp, Homo sapien
gatgaatgactcaccttgcccagca

SEQ ID NO: 3469724 - DNA, 25 bp, Homo sapien
tgtcctgtcctgggtgaaagtgctc

SEQ ID NO: 3469725 - DNA, 25 bp, Homo sapien
cctgtcctgggtgaaagtgctccca

SEQ ID NO: 3469726 - DNA, 25 bp, Homo sapien
cttttcctggtgatgatgaatgact

SEQ ID NO: 3469727 - DNA, 25 bp, Homo sapien
tgcagccgtcctagatctcttgggt

SEQ ID NO: 3469728 - DNA, 25 bp, Homo sapien
gagatgtctttgactccggatcctc

SEQ ID NO: 3469729 - DNA, 25 bp, Homo sapien
catggtgacgtgtgtatctctctgc

SEQ ID NO: 3469730 - DNA, 25 bp, Homo sapien
tagaagtaggccttgggcttccagc

SEQ ID NO: 3469731 - DNA, 25 bp, Homo sapien
cgatcacaaggttccacagtaggct

SEQ ID NO: 3469732 - DNA, 25 bp, Homo sapien
ccaaaactgaagaacccagagtctg

SEQ ID NO: 3469733 - DNA, 25 bp, Homo sapien
ctgtctgcaagctgaaagccagtct

SEQ ID NO: 3469734 - DNA, 25 bp, Homo sapien
tctgcaagctgaaagccagtctgag

SEQ ID NO: 3469735 - DNA, 25 bp, Homo sapien
gaagcagcagtactcaagtggatga

SEQ ID NO: 3469736 - DNA, 25 bp, Homo sapien
agagtgaggcatctccccggaagca

SEQ ID NO: 3469737 - DNA, 25 bp, Homo sapien
agccaattttggcatcagcagacat

SEQ ID NO: 3469738 - DNA, 25 bp, Homo sapien
cagttaaccacctggtctgagggaa

SEQ ID NO: 3469739 - DNA, 25 bp, Homo sapien
ccagtcaaattcagcagtggcgggg

SEQ ID NO: 3469740 - DNA, 25 bp, Homo sapien
caaattcagcagtggcggggggttg

SEQ ID NO: 3469741 - DNA, 25 bp, Homo sapien
gtcaaattcagcagtggcggggggt

SEQ ID NO: 3469742 - DNA, 25 bp, Homo sapien
tgaaattaatgttaataagtaatgg

SEQ ID NO: 3469743 - DNA, 25 bp, Homo sapien
gaggctccagggaatttaaccatgc

SEQ ID NO: 3469744 - DNA, 25 bp, Homo sapien
tcagaaggaaccgaagcaggatggt

SEQ ID NO: 3469745 - DNA, 25 bp, Homo sapien
gaattgtgtaagtcgaaccattgag

SEQ ID NO: 3469746 - DNA, 25 bp, Homo sapien
gcagctgatctggacacataaattt

SEQ ID NO: 3469747 - DNA, 25 bp, Homo sapien
cctatcatgtatgcccggaggccta

SEQ ID NO: 3469748 - DNA, 25 bp, Homo sapien
tacaggagctacatcccctatcatg

SEQ ID NO: 3469749 - DNA, 25 bp, Homo sapien
gcagactgaagtcacacacctgatt

SEQ ID NO: 3469750 - DNA, 25 bp, Homo sapien
aaaaaggcctctcaagatgggctca

SEQ ID NO: 3469751 - DNA, 25 bp, Homo sapien
caaattgcagatccaatcccgtcgt

SEQ ID NO: 3469752 - DNA, 25 bp, Homo sapien
caaacttcttatggcgcctgcgatc

SEQ ID NO: 3469753 - DNA, 25 bp, Homo sapien
gacaacaaagagtccgagggcacgg

SEQ ID NO: 3469754 - DNA, 25 bp, Homo sapien
ttaacaattgccacgacagcagctc

SEQ ID NO: 3469755 - DNA, 25 bp, Homo sapien
ttcttcaggcaaaacgatgccaaat

SEQ ID NO: 3469756 - DNA, 25 bp, Homo sapien
gctgagacctgctggacgttgacca

SEQ ID NO: 3469757 - DNA, 25 bp, Homo sapien
cctgctggacgttgaccagaaggcc

SEQ ID NO: 3469758 - DNA, 25 bp, Homo sapien
tcaggcaaaacgatgccaaataccc

SEQ ID NO: 3469759 - DNA, 25 bp, Homo sapien
cagaggcaggaacatgtcataggtt

SEQ ID NO: 3469760 - DNA, 25 bp, Homo sapien
ttcttaggccttggagcttatctct

SEQ ID NO: 3469761 - DNA, 25 bp, Homo sapien
ggtttttatggcagagtcatccttg

SEQ ID NO: 3469762 - DNA, 25 bp, Homo sapien
atgttcactgggaaaagtgctgtct

SEQ ID NO: 3469763 - DNA, 25 bp, Homo sapien
tagtagatagacaagggaagccctt

SEQ ID NO: 3469764 - DNA, 25 bp, Homo sapien
gaaaaagaagtagtagatagacaag

SEQ ID NO: 3469765 - DNA, 25 bp, Homo sapien
ttgaaaatctatcaggtactacgtt

SEQ ID NO: 3469766 - DNA, 25 bp, Homo sapien
tactacgttcagtacctgagtgaca

SEQ ID NO: 3469767 - DNA, 25 bp, Homo sapien
tggcagaagacccaatgggccagga

SEQ ID NO: 3469768 - DNA, 25 bp, Homo sapien
agaagacccaatgggccaggaaaca

SEQ ID NO: 3469769 - DNA, 25 bp, Homo sapien
tggaatggcagaagacccaatgggc

SEQ ID NO: 3469770 - DNA, 25 bp, Homo sapien
aggtggaatggcagaagacccaatg

SEQ ID NO: 3469771 - DNA, 25 bp, Homo sapien
gcactggccagtggtagtagccctt

SEQ ID NO: 3469772 - DNA, 25 bp, Homo sapien
gagcagggagacatctgatttgttg

SEQ ID NO: 3469773 - DNA, 25 bp, Homo sapien
tgaaccagacactgacgtgggagag

SEQ ID NO: 3469774 - DNA, 25 bp, Homo sapien
tccagtgggccctccaaattcacag

SEQ ID NO: 3469775 - DNA, 25 bp, Homo sapien
ctgggatgaggacggcagctccagc

SEQ ID NO: 3469776 - DNA, 25 bp, Homo sapien
ggatgaggacggcagctccagccag

SEQ ID NO: 3469777 - DNA, 25 bp, Homo sapien
gcagctccagccagaatcacaggca

SEQ ID NO: 3469778 - DNA, 25 bp, Homo sapien
cagctccagccagaatcacaggcat

SEQ ID NO: 3469779 - DNA, 25 bp, Homo sapien
gcagcctctggaagcgggctcaggg

SEQ ID NO: 3469780 - DNA, 25 bp, Homo sapien
agcctctggaagcgggctcagggac

SEQ ID NO: 3469781 - DNA, 25 bp, Homo sapien
cctctggaagcgggctcagggacct

SEQ ID NO: 3469782 - DNA, 25 bp, Homo sapien
ctctggaagcgggctcagggacctt

SEQ ID NO: 3469783 - DNA, 25 bp, Homo sapien
tctgataccccaggctctgtctgaa

SEQ ID NO: 3469784 - DNA, 25 bp, Homo sapien
aatttcctctctaccacgaagaccg

SEQ ID NO: 3469785 - DNA, 25 bp, Homo sapien
tttctgataccccaggctctgtctg

SEQ ID NO: 3469786 - DNA, 25 bp, Homo sapien
accgtgaacgctttccttctttctg

SEQ ID NO: 3469787 - DNA, 25 bp, Homo sapien
tctttggccaggctaccagtcagat

SEQ ID NO: 3469788 - DNA, 25 bp, Homo sapien
ggccaggctaccagtcagatctgca

SEQ ID NO: 3469789 - DNA, 25 bp, Homo sapien
tctgcagatgcagaatctctcactt

SEQ ID NO: 3469790 - DNA, 25 bp, Homo sapien
cttattagcatctgccagtccagct

SEQ ID NO: 3469791 - DNA, 25 bp, Homo sapien
aacaagatagcactgagggctcctg

SEQ ID NO: 3469792 - DNA, 25 bp, Homo sapien
tgggtcaccttgtgctttgaaacaa

SEQ ID NO: 3469793 - DNA, 25 bp, Homo sapien
gggagacagatgtggccctcgggca

SEQ ID NO: 3469794 - DNA, 25 bp, Homo sapien
tggccctcgggcaagaggtgacaaa

SEQ ID NO: 3469795 - DNA, 25 bp, Homo sapien
tggagcttgagaaaggtccacaagg

SEQ ID NO: 3469796 - DNA, 25 bp, Homo sapien
gaaaggtccacaagggcctgccctg

SEQ ID NO: 3469797 - DNA, 25 bp, Homo sapien
ttgagaaaggtccacaagggcctgc

SEQ ID NO: 3469798 - DNA, 25 bp, Homo sapien
gcttgagaaaggtccacaagggcct

SEQ ID NO: 3469799 - DNA, 25 bp, Homo sapien
tggtgcagcaagtgctcggtctcct

SEQ ID NO: 3469800 - DNA, 25 bp, Homo sapien
tcgttcagcagttttaccactgtca

SEQ ID NO: 3469801 - DNA, 25 bp, Homo sapien
ctcgttcagcagttttaccactgtc

SEQ ID NO: 3469802 - DNA, 25 bp, Homo sapien
ggtgcagcaagtgctcggtctcctg

SEQ ID NO: 3469803 - DNA, 25 bp, Homo sapien
ttcagctgagttatttctttttgac

SEQ ID NO: 3469804 - DNA, 25 bp, Homo sapien
cagctgagttatttctttttgacac

SEQ ID NO: 3469805 - DNA, 25 bp, Homo sapien
cttcagctgagttatttctttttga

SEQ ID NO: 3469806 - DNA, 25 bp, Homo sapien
tcagctgagttatttctttttgaca

SEQ ID NO: 3469807 - DNA, 25 bp, Homo sapien
aatcattttcatctgtttcttctga

SEQ ID NO: 3469808 - DNA, 25 bp, Homo sapien
tcattttcatctgtttcttctgatg

SEQ ID NO: 3469809 - DNA, 25 bp, Homo sapien
tcaaatcattttcatctgtttcttc

SEQ ID NO: 3469810 - DNA, 25 bp, Homo sapien
aaatcattttcatctgtttcttctg

SEQ ID NO: 3469811 - DNA, 25 bp, Homo sapien
gctgatacctatcaaatatctctga

SEQ ID NO: 3469812 - DNA, 25 bp, Homo sapien
tccaactcctgcagttacttccagg

SEQ ID NO: 3469813 - DNA, 25 bp, Homo sapien
agtaaacaacattgcctcctgacct

SEQ ID NO: 3469814 - DNA, 25 bp, Homo sapien
aaatgcagcatattgctgataccta

SEQ ID NO: 3469815 - DNA, 25 bp, Homo sapien
cttttctgtctttggcactctttgt

SEQ ID NO: 3469816 - DNA, 25 bp, Homo sapien
acttctttgaatcgcccattggttt

SEQ ID NO: 3469817 - DNA, 25 bp, Homo sapien
gaaagctatgtcttgaatatgtgga

SEQ ID NO: 3469818 - DNA, 25 bp, Homo sapien
gcagctgcccttgctaaaattaaat

SEQ ID NO: 3469819 - DNA, 25 bp, Homo sapien
ggcagctgcgttctcttccagtgaa

SEQ ID NO: 3469820 - DNA, 25 bp, Homo sapien
tgtttgtattgttggtaagagctca

SEQ ID NO: 3469821 - DNA, 25 bp, Homo sapien
cattgaatttgccaggtcaggattc

SEQ ID NO: 3469822 - DNA, 25 bp, Homo sapien
aaactgcagtcctagtgtgcattga

SEQ ID NO: 3469823 - DNA, 25 bp, Homo sapien
tatgttgatcatagcagagaatcta

SEQ ID NO: 3469824 - DNA, 25 bp, Homo sapien
gtcaggacgtctcagcagtggcagt

SEQ ID NO: 3469825 - DNA, 25 bp, Homo sapien
tctcttggcatttaggccctggaat

SEQ ID NO: 3469826 - DNA, 25 bp, Homo sapien
tttgggaccggctaattcttcgctg

SEQ ID NO: 3469827 - DNA, 25 bp, Homo sapien
tagattctagtagcacctcttccag

SEQ ID NO: 3469828 - DNA, 25 bp, Homo sapien
aaaattatatgcagtggaatcagaa

SEQ ID NO: 3469829 - DNA, 25 bp, Homo sapien
aattatatgcagtggaatcagaagt

SEQ ID NO: 3469830 - DNA, 25 bp, Homo sapien
atcagaagtcagcttagttggtatg

SEQ ID NO: 3469831 - DNA, 25 bp, Homo sapien
agtcagcttagttggtatggcaaat

SEQ ID NO: 3469832 - DNA, 25 bp, Homo sapien
gctaccatgaggatgcgggctacct

SEQ ID NO: 3469833 - DNA, 25 bp, Homo sapien
tggctgaagcggatgcctccaaagt

SEQ ID NO: 3469834 - DNA, 25 bp, Homo sapien
aactcccaccgaggtatgatgtcag

SEQ ID NO: 3469835 - DNA, 25 bp, Homo sapien
cgagctggacttttgcacggaaact

SEQ ID NO: 3469836 - DNA, 25 bp, Homo sapien
ctagatgaccaggttcctaggtctt

SEQ ID NO: 3469837 - DNA, 25 bp, Homo sapien
tcctccactggagcacaggataggg

SEQ ID NO: 3469838 - DNA, 25 bp, Homo sapien
caggttcctaggtcttagcatgagg

SEQ ID NO: 3469839 - DNA, 25 bp, Homo sapien
cctaggtcttagcatgaggtggaag

SEQ ID NO: 3469840 - DNA, 25 bp, Homo sapien
gatgacatcgccatctctttgaagt

SEQ ID NO: 3469841 - DNA, 25 bp, Homo sapien
cttgctgatgacatcgccatctctt

SEQ ID NO: 3469842 - DNA, 25 bp, Homo sapien
tgctgatgacatcgccatctctttg

SEQ ID NO: 3469843 - DNA, 25 bp, Homo sapien
ctgatgacatcgccatctctttgaa

SEQ ID NO: 3469844 - DNA, 25 bp, Homo sapien
ttgggctgcaggtacttgatggtcc

SEQ ID NO: 3469845 - DNA, 25 bp, Homo sapien
ggtacttgatggtccttgccagcat

SEQ ID NO: 3469846 - DNA, 25 bp, Homo sapien
ctgggttgggctgcaggtacttgat

SEQ ID NO: 3469847 - DNA, 25 bp, Homo sapien
tgcaggtacttgatggtccttgcca

SEQ ID NO: 3469848 - DNA, 25 bp, Homo sapien
cacaccgcgttcagcatggtcagct

SEQ ID NO: 3469849 - DNA, 25 bp, Homo sapien
cggatcttgcacaccgcgttcagca

SEQ ID NO: 3469850 - DNA, 25 bp, Homo sapien
cttgcacaccgcgttcagcatggtc

SEQ ID NO: 3469851 - DNA, 25 bp, Homo sapien
ggatcttgcacaccgcgttcagcat

SEQ ID NO: 3469852 - DNA, 25 bp, Homo sapien
ctctgccaggtgcttcatggactcg

SEQ ID NO: 3469853 - DNA, 25 bp, Homo sapien
gtgcttcatggactcgccggcatcc

SEQ ID NO: 3469854 - DNA, 25 bp, Homo sapien
gactcgccggcatccagcagtgcgt

SEQ ID NO: 3469855 - DNA, 25 bp, Homo sapien
ccaggtgcttcatggactcgccggc

SEQ ID NO: 3469856 - DNA, 25 bp, Homo sapien
acaggttctggaggaggtcaatgaa

SEQ ID NO: 3469857 - DNA, 25 bp, Homo sapien
ctggaggaggtcaatgaagttctgc

SEQ ID NO: 3469858 - DNA, 25 bp, Homo sapien
ggaggtcaatgaagttctgcttgac

SEQ ID NO: 3469859 - DNA, 25 bp, Homo sapien
ttctggaggaggtcaatgaagttct

SEQ ID NO: 3469860 - DNA, 25 bp, Homo sapien
gctggatccccttcaggtctttctc

SEQ ID NO: 3469861 - DNA, 25 bp, Homo sapien
tggtgctggatccccttcaggtctt

SEQ ID NO: 3469862 - DNA, 25 bp, Homo sapien
gtgctggatccccttcaggtctttc

SEQ ID NO: 3469863 - DNA, 25 bp, Homo sapien
ctacaggtggtgctggatccccttc

SEQ ID NO: 3469864 - DNA, 25 bp, Homo sapien
gtgtccaggaccgcatgctggtttc

SEQ ID NO: 3469865 - DNA, 25 bp, Homo sapien
ctgctcaatgtcggtgtccaggacc

SEQ ID NO: 3469866 - DNA, 25 bp, Homo sapien
tgtccaggaccgcatgctggtttct

SEQ ID NO: 3469867 - DNA, 25 bp, Homo sapien
ctcaatgtcggtgtccaggaccgca

SEQ ID NO: 3469868 - DNA, 25 bp, Homo sapien
ttcgaaggtgtctttgtcggttaca

SEQ ID NO: 3469869 - DNA, 25 bp, Homo sapien
aaggtgtctttgtcggttacagcaa

SEQ ID NO: 3469870 - DNA, 25 bp, Homo sapien
gaaggtgtctttgtcggttacagca

SEQ ID NO: 3469871 - DNA, 25 bp, Homo sapien
cgaaggtgtctttgtcggttacagc

SEQ ID NO: 3469872 - DNA, 25 bp, Homo sapien
cccgactggtcgaagggggacatca

SEQ ID NO: 3469873 - DNA, 25 bp, Homo sapien
ctggtcgaagggggacatcaagtcc

SEQ ID NO: 3469874 - DNA, 25 bp, Homo sapien
tggtcgaagggggacatcaagtccc

SEQ ID NO: 3469875 - DNA, 25 bp, Homo sapien
actggtcgaagggggacatcaagtc

SEQ ID NO: 3469876 - DNA, 25 bp, Homo sapien
gagggactgcctaacccatccacag

SEQ ID NO: 3469877 - DNA, 25 bp, Homo sapien
gactgcctaacccatccacagccag

SEQ ID NO: 3469878 - DNA, 25 bp, Homo sapien
tgttattggagggactgcctaaccc

SEQ ID NO: 3469879 - DNA, 25 bp, Homo sapien
gggactgcctaacccatccacagcc

SEQ ID NO: 3469880 - DNA, 25 bp, Homo sapien
catccaaagtggtcaaaagttcatc

SEQ ID NO: 3469881 - DNA, 25 bp, Homo sapien
agtggtcaaaagttcatctggcatg

SEQ ID NO: 3469882 - DNA, 25 bp, Homo sapien
catccaatctgtcccggagaaggca

SEQ ID NO: 3469883 - DNA, 25 bp, Homo sapien
agtgtcatccaaagtggtcaaaagt

SEQ ID NO: 3469884 - DNA, 25 bp, Homo sapien
tagtctcctggactaggggggcaaa

SEQ ID NO: 3469885 - DNA, 25 bp, Homo sapien
tttgttaaacttcctgggagatggc

SEQ ID NO: 3469886 - DNA, 25 bp, Homo sapien
taaacttcctgggagatggccaatt

SEQ ID NO: 3469887 - DNA, 25 bp, Homo sapien
aacttcctgggagatggccaattgg

SEQ ID NO: 3469888 - DNA, 25 bp, Homo sapien
cttcctgggagatggccaattgggt

SEQ ID NO: 3469889 - DNA, 25 bp, Homo sapien
gagggatcatggcaacgtaagcagt

SEQ ID NO: 3469890 - DNA, 25 bp, Homo sapien
tgagggatcatggcaacgtaagcag

SEQ ID NO: 3469891 - DNA, 25 bp, Homo sapien
ctgagggatcatggcaacgtaagca

SEQ ID NO: 3469892 - DNA, 25 bp, Homo sapien
ggctcatacagatgccactatcatt

SEQ ID NO: 3469893 - DNA, 25 bp, Homo sapien
ctgggctcatacagatgccactatc

SEQ ID NO: 3469894 - DNA, 25 bp, Homo sapien
gggctcatacagatgccactatcat

SEQ ID NO: 3469895 - DNA, 25 bp, Homo sapien
tgggctcatacagatgccactatca

SEQ ID NO: 3469896 - DNA, 25 bp, Homo sapien
ttttcaacttcttatccagtttctc

SEQ ID NO: 3469897 - DNA, 25 bp, Homo sapien
aacttcttatccagtttctcaccct

SEQ ID NO: 3469898 - DNA, 25 bp, Homo sapien
tcaacttcttatccagtttctcacc

SEQ ID NO: 3469899 - DNA, 25 bp, Homo sapien
ctgctgtcttgttttactccatttt

SEQ ID NO: 3469900 - DNA, 25 bp, Homo sapien
tgcactcaccagtgagagcctcctg

SEQ ID NO: 3469901 - DNA, 25 bp, Homo sapien
tatcaaatctttcaggtactggatc

SEQ ID NO: 3469902 - DNA, 25 bp, Homo sapien
tagagcctcgttcttcttttccagc

SEQ ID NO: 3469903 - DNA, 25 bp, Homo sapien
gggaatccgccctctcttttagagc

SEQ ID NO: 3469904 - DNA, 25 bp, Homo sapien
cagaggctccatgtacaagcacatt

SEQ ID NO: 3469905 - DNA, 25 bp, Homo sapien
ctacagcagaggctccatgtacaag

SEQ ID NO: 3469906 - DNA, 25 bp, Homo sapien
agctacagcagaggctccatgtaca

SEQ ID NO: 3469907 - DNA, 25 bp, Homo sapien
cacagctacagcagaggctccatgt

SEQ ID NO: 3469908 - DNA, 25 bp, Homo sapien
tgattaagtttacaatgaccagaga

SEQ ID NO: 3469909 - DNA, 25 bp, Homo sapien
gaggctggcctcttggctattcttg

SEQ ID NO: 3469910 - DNA, 25 bp, Homo sapien
catgcacacacaaatctgcaagtat

SEQ ID NO: 3469911 - DNA, 25 bp, Homo sapien
cagttcgttagtttcacacatgcac

SEQ ID NO: 3469912 - DNA, 25 bp, Homo sapien
aaaaggcttctgattggatattgtg

SEQ ID NO: 3469913 - DNA, 25 bp, Homo sapien
aaaaaattgatacaactatgcagat

SEQ ID NO: 3469914 - DNA, 25 bp, Homo sapien
tctgattggatattgtgttttaacc

SEQ ID NO: 3469915 - DNA, 25 bp, Homo sapien
caagtcatcgtacccggccttcttt

SEQ ID NO: 3469916 - DNA, 25 bp, Homo sapien
ggagcatcccagaagttgccaagga

SEQ ID NO: 3469917 - DNA, 25 bp, Homo sapien
tccagcagtgtgtcagaagagtccc

SEQ ID NO: 3469918 - DNA, 25 bp, Homo sapien
gaaactcctagggtgcatggcactt

SEQ ID NO: 3469919 - DNA, 25 bp, Homo sapien
tcaatcgggatttggtggaacctcc

SEQ ID NO: 3469920 - DNA, 25 bp, Homo sapien
ttaatgtactgctcaagcaagcact

SEQ ID NO: 3469921 - DNA, 25 bp, Homo sapien
cgggacacccatgaacggaggcttt

SEQ ID NO: 3469922 - DNA, 25 bp, Homo sapien
catgcccaggttaagagcatcaggg

SEQ ID NO: 3469923 - DNA, 25 bp, Homo sapien
ctttattccacggtcattcggcagt

SEQ ID NO: 3469924 - DNA, 25 bp, Homo sapien
tggagccggaggtcagtcctacaaa

SEQ ID NO: 3469925 - DNA, 25 bp, Homo sapien
tatgcttattcagtagtgtcctcaa

SEQ ID NO: 3469926 - DNA, 25 bp, Homo sapien
tctctataagtaaccatgtctgtgg

SEQ ID NO: 3469927 - DNA, 25 bp, Homo sapien
ttttgttccaagaaatccctctggc

SEQ ID NO: 3469928 - DNA, 25 bp, Homo sapien
taagacacctgtgtacatgggtaga

SEQ ID NO: 3469929 - DNA, 25 bp, Homo sapien
gacccccaacatcttgctatggttt

SEQ ID NO: 3469930 - DNA, 25 bp, Homo sapien
tttctcctaacagggttcctctcca

SEQ ID NO: 3469931 - DNA, 25 bp, Homo sapien
cagttgatgctatccttactggtgc

SEQ ID NO: 3469932 - DNA, 25 bp, Homo sapien
cctaccagatggaatgccgctcaat

SEQ ID NO: 3469933 - DNA, 25 bp, Homo sapien
tccttctccgtttgccagttgatgc

SEQ ID NO: 3469934 - DNA, 25 bp, Homo sapien
caccaggatgcaggcccacagggga

SEQ ID NO: 3469935 - DNA, 25 bp, Homo sapien
agccaccaggatgcaggcccacagg

SEQ ID NO: 3469936 - DNA, 25 bp, Homo sapien
gcagccaccaggatgcaggcccaca

SEQ ID NO: 3469937 - DNA, 25 bp, Homo sapien
gccaccaggatgcaggcccacaggg

SEQ ID NO: 3469938 - DNA, 25 bp, Homo sapien
tctgtaatagctgcttgctgagatg

SEQ ID NO: 3469939 - DNA, 25 bp, Homo sapien
ccaatatagcatggacgaacaggtc

SEQ ID NO: 3469940 - DNA, 25 bp, Homo sapien
ggtccagttgtaaacaggtctcact

SEQ ID NO: 3469941 - DNA, 25 bp, Homo sapien
cgaacaggtccaggtagactgtggt

SEQ ID NO: 3469942 - DNA, 25 bp, Homo sapien
tcaaaagacgttaacaagaatagga

SEQ ID NO: 3469943 - DNA, 25 bp, Homo sapien
accatacacttgtctttaatatttg

SEQ ID NO: 3469944 - DNA, 25 bp, Homo sapien
ggtaccatacacttgtctttaatat

SEQ ID NO: 3469945 - DNA, 25 bp, Homo sapien
ctcttggtaccatacacttgtcttt

SEQ ID NO: 3469946 - DNA, 25 bp, Homo sapien
tcttggtaccatacacttgtcttta

SEQ ID NO: 3469947 - DNA, 25 bp, Homo sapien
ggagttccaggataaaaattcatca

SEQ ID NO: 3469948 - DNA, 25 bp, Homo sapien
tggagttccaggataaaaattcatc

SEQ ID NO: 3469949 - DNA, 25 bp, Homo sapien
gagttccaggataaaaattcatcat

SEQ ID NO: 3469950 - DNA, 25 bp, Homo sapien
agttccaggataaaaattcatcatt

SEQ ID NO: 3469951 - DNA, 25 bp, Homo sapien
cattgatgatgatatcgggggccca

SEQ ID NO: 3469952 - DNA, 25 bp, Homo sapien
agatggcacttagaggtagggagat

SEQ ID NO: 3469953 - DNA, 25 bp, Homo sapien
gatggcacttagaggtagggagatc

SEQ ID NO: 3469954 - DNA, 25 bp, Homo sapien
tgatgatgatatcgggggcccagat

SEQ ID NO: 3469955 - DNA, 25 bp, Homo sapien
tggtcccagatgagttcacataaac

SEQ ID NO: 3469956 - DNA, 25 bp, Homo sapien
ggtcagggtatctttcaatgtccac

SEQ ID NO: 3469957 - DNA, 25 bp, Homo sapien
ggcttatagttctcaatggtcccag

SEQ ID NO: 3469958 - DNA, 25 bp, Homo sapien
gagaccacctggatgggcttatagt

SEQ ID NO: 3469959 - DNA, 25 bp, Homo sapien
tcaaaaacgcctttttgtcatgctg

SEQ ID NO: 3469960 - DNA, 25 bp, Homo sapien
aaaaacgcctttttgtcatgctgaa

SEQ ID NO: 3469961 - DNA, 25 bp, Homo sapien
aaacgcctttttgtcatgctgaatg

SEQ ID NO: 3469962 - DNA, 25 bp, Homo sapien
acgcctttttgtcatgctgaatgtc

SEQ ID NO: 3469963 - DNA, 25 bp, Homo sapien
tgaataccaggcctctggtgtctgt

SEQ ID NO: 3469964 - DNA, 25 bp, Homo sapien
accaggcctctggtgtctgttatct

SEQ ID NO: 3469965 - DNA, 25 bp, Homo sapien
tcaggcctctggtgtctgaatacca

SEQ ID NO: 3469966 - DNA, 25 bp, Homo sapien
gcctctggtgtctgaataccaggcc

SEQ ID NO: 3469967 - DNA, 25 bp, Homo sapien
aattggctgcaaatacctaaaccag

SEQ ID NO: 3469968 - DNA, 25 bp, Homo sapien
tctccagccattgggtctgggagca

SEQ ID NO: 3469969 - DNA, 25 bp, Homo sapien
taaaccagagcgacactcactgctt

SEQ ID NO: 3469970 - DNA, 25 bp, Homo sapien
tctgggagcacatcccgactctgtg

SEQ ID NO: 3469971 - DNA, 25 bp, Homo sapien
ctggccgggaacaagtggtctgatg

SEQ ID NO: 3469972 - DNA, 25 bp, Homo sapien
cagactcagatttggccaaattcat

SEQ ID NO: 3469973 - DNA, 25 bp, Homo sapien
aagtggtctgatgaaaagaggatct

SEQ ID NO: 3469974 - DNA, 25 bp, Homo sapien
aaaagaggatctaggccaacagact

SEQ ID NO: 3469975 - DNA, 25 bp, Homo sapien
agcagactcacgacatagaccaggg

SEQ ID NO: 3469976 - DNA, 25 bp, Homo sapien
catgagaaagatgctaggaatcagc

SEQ ID NO: 3469977 - DNA, 25 bp, Homo sapien
tacactccgtggcacctggttggac

SEQ ID NO: 3469978 - DNA, 25 bp, Homo sapien
tcttgaacacaatcctggctcggca

SEQ ID NO: 3469979 - DNA, 25 bp, Homo sapien
tctaggcctgtcagcatcggtgtcc

SEQ ID NO: 3469980 - DNA, 25 bp, Homo sapien
tttgaccaacacgatggacttagct

SEQ ID NO: 3469981 - DNA, 25 bp, Homo sapien
gtgtcccctcgaaggcacaagaagg

SEQ ID NO: 3469982 - DNA, 25 bp, Homo sapien
caccacgctgctcatcatggaggaa

SEQ ID NO: 3469983 - DNA, 25 bp, Homo sapien
aggtgctctccatacagcgaggact

SEQ ID NO: 3469984 - DNA, 25 bp, Homo sapien
aagagcagtcggtcaaagcgggaca

SEQ ID NO: 3469985 - DNA, 25 bp, Homo sapien
catgaaaaggtagctttggaagagc

SEQ ID NO: 3469986 - DNA, 25 bp, Homo sapien
ggtgtagatccccagcatgaaaagg

SEQ ID NO: 3469987 - DNA, 25 bp, Homo sapien
tgcctcctgttggtctgtctggtcc

SEQ ID NO: 3469988 - DNA, 25 bp, Homo sapien
ctaagtgccagcacaattactgaag

SEQ ID NO: 3469989 - DNA, 25 bp, Homo sapien
cctaagtgccagcacaattactgaa

SEQ ID NO: 3469990 - DNA, 25 bp, Homo sapien
tcctaagtgccagcacaattactga

SEQ ID NO: 3469991 - DNA, 25 bp, Homo sapien
agtgccagcacaattactgaagaac

SEQ ID NO: 3469992 - DNA, 25 bp, Homo sapien
gaagttaagctcacagaggtcccct

SEQ ID NO: 3469993 - DNA, 25 bp, Homo sapien
tctaagacatagttgggaaggagag

SEQ ID NO: 3469994 - DNA, 25 bp, Homo sapien
tcccctggctaggtaatggcagagc

SEQ ID NO: 3469995 - DNA, 25 bp, Homo sapien
ggcagagccaggaccgtaatcatca

SEQ ID NO: 3469996 - DNA, 25 bp, Homo sapien
tccttggacggcacacgcagagcca

SEQ ID NO: 3469997 - DNA, 25 bp, Homo sapien
ccttggacggcacacgcagagccat

SEQ ID NO: 3469998 - DNA, 25 bp, Homo sapien
tctccttggacggcacacgcagagc

SEQ ID NO: 3469999 - DNA, 25 bp, Homo sapien
tctctccttggacggcacacgcaga

SEQ ID NO: 3470000 - DNA, 25 bp, Homo sapien
tggcctggttagttgcacagaggcc

SEQ ID NO: 3470001 - DNA, 25 bp, Homo sapien
tgcagccctcatttgctttgtcttc

SEQ ID NO: 3470002 - DNA, 25 bp, Homo sapien
aggtttggcctggttagttgcacag

SEQ ID NO: 3470003 - DNA, 25 bp, Homo sapien
gtgcttgcagccctcatttgctttg

SEQ ID NO: 3470004 - DNA, 25 bp, Homo sapien
tgtggaaatgagtcccatctccgat

SEQ ID NO: 3470005 - DNA, 25 bp, Homo sapien
aaatgagtcccatctccgatccatc

SEQ ID NO: 3470006 - DNA, 25 bp, Homo sapien
tcatcctgtggaaatgagtcccatc

SEQ ID NO: 3470007 - DNA, 25 bp, Homo sapien
ccatctccgatccatccttttcaga

SEQ ID NO: 3470008 - DNA, 25 bp, Homo sapien
ttaggccagcgtggtggcagcaaca

SEQ ID NO: 3470009 - DNA, 25 bp, Homo sapien
taggccagcgtggtggcagcaacac

SEQ ID NO: 3470010 - DNA, 25 bp, Homo sapien
gttttcctgcaatcagtccttcagc

SEQ ID NO: 3470011 - DNA, 25 bp, Homo sapien
gtgctcaggacgaggcccaccaagg

SEQ ID NO: 3470012 - DNA, 25 bp, Homo sapien
aggagtgcctccgagtgctcaggac

SEQ ID NO: 3470013 - DNA, 25 bp, Homo sapien
cagtccttcagctggatcatgtttc

SEQ ID NO: 3470014 - DNA, 25 bp, Homo sapien
agcagcgcctgctggacccacagca

SEQ ID NO: 3470015 - DNA, 25 bp, Homo sapien
aaggcgagcagcgcctgctggaccc

SEQ ID NO: 3470016 - DNA, 25 bp, Homo sapien
tctccctgtgccaggagtgtgggga

SEQ ID NO: 3470017 - DNA, 25 bp, Homo sapien
gtgtggggaggagcaaggcgagcag

SEQ ID NO: 3470018 - DNA, 25 bp, Homo sapien
tcaaaaggtaatccgacagcctcag

SEQ ID NO: 3470019 - DNA, 25 bp, Homo sapien
aatggatacggtggttggcttcctc

SEQ ID NO: 3470020 - DNA, 25 bp, Homo sapien
cgttgaggatggcatagacaatgac

SEQ ID NO: 3470021 - DNA, 25 bp, Homo sapien
gggcgcacacccttcctgtagttgg

SEQ ID NO: 3470022 - DNA, 25 bp, Homo sapien
tgccggtaccagatgtaggtggtca

SEQ ID NO: 3470023 - DNA, 25 bp, Homo sapien
tgtaggtggtcagcacctgattctt

SEQ ID NO: 3470024 - DNA, 25 bp, Homo sapien
tggtcagcacctgattcttctcatc

SEQ ID NO: 3470025 - DNA, 25 bp, Homo sapien
ctgccggtaccagatgtaggtggtc

SEQ ID NO: 3470026 - DNA, 25 bp, Homo sapien
actcaggcagacttcaccctcagtg

SEQ ID NO: 3470027 - DNA, 25 bp, Homo sapien
tggtgtcagtggcgcccaattccct

SEQ ID NO: 3470028 - DNA, 25 bp, Homo sapien
atctccagtgagggtcgcctgcaac

SEQ ID NO: 3470029 - DNA, 25 bp, Homo sapien
ctgcaactcaggcagacttcaccct

SEQ ID NO: 3470030 - DNA, 25 bp, Homo sapien
cattgatgagaatgtccgggaccca

SEQ ID NO: 3470031 - DNA, 25 bp, Homo sapien
aactcattgatgagaatgtccggga

SEQ ID NO: 3470032 - DNA, 25 bp, Homo sapien
agaatgtccgggacccagatgctgt

SEQ ID NO: 3470033 - DNA, 25 bp, Homo sapien
tgatgagaatgtccgggacccagat

SEQ ID NO: 3470034 - DNA, 25 bp, Homo sapien
tagatgtcgaggctacaggcagtca

SEQ ID NO: 3470035 - DNA, 25 bp, Homo sapien
cagccaactggtgaaggtcagcgag

SEQ ID NO: 3470036 - DNA, 25 bp, Homo sapien
tgccgaatatacacgtacgggatat

SEQ ID NO: 3470037 - DNA, 25 bp, Homo sapien
agttctgaacttcgccttgatgccg

SEQ ID NO: 3470038 - DNA, 25 bp, Homo sapien
cagctttggaatctagtacccagag

SEQ ID NO: 3470039 - DNA, 25 bp, Homo sapien
tggaatctagtacccagagcctgct

SEQ ID NO: 3470040 - DNA, 25 bp, Homo sapien
agccagctttggaatctagtaccca

SEQ ID NO: 3470041 - DNA, 25 bp, Homo sapien
ctttggaatctagtacccagagcct

SEQ ID NO: 3470042 - DNA, 25 bp, Homo sapien
tggcaagcgccacaaagagatgttg

SEQ ID NO: 3470043 - DNA, 25 bp, Homo sapien
ttccatgctgaactcccgaaagtag

SEQ ID NO: 3470044 - DNA, 25 bp, Homo sapien
gttcatgaagacactcctgtcggat

SEQ ID NO: 3470045 - DNA, 25 bp, Homo sapien
tcatttctgcatagtagttactgct

SEQ ID NO: 3470046 - DNA, 25 bp, Homo sapien
atgatcaggaagaccgagtagccca

SEQ ID NO: 3470047 - DNA, 25 bp, Homo sapien
tggccggcagcgtgtcagaaacgat

SEQ ID NO: 3470048 - DNA, 25 bp, Homo sapien
aagagaccctctcgccactgttggg

SEQ ID NO: 3470049 - DNA, 25 bp, Homo sapien
gcccaggaggagtgtaatcttgaaa

SEQ ID NO: 3470050 - DNA, 25 bp, Homo sapien
cagactgagctctgctgccaggagg

SEQ ID NO: 3470051 - DNA, 25 bp, Homo sapien
ctgagctctgctgccaggaggggcc

SEQ ID NO: 3470052 - DNA, 25 bp, Homo sapien
gctctgctgccaggaggggccttac

SEQ ID NO: 3470053 - DNA, 25 bp, Homo sapien
gagctctgctgccaggaggggcctt

SEQ ID NO: 3470054 - DNA, 25 bp, Homo sapien
gaggcaagagacacatgcaggaggt

SEQ ID NO: 3470055 - DNA, 25 bp, Homo sapien
agagccatgcacaccacaaagtaga

SEQ ID NO: 3470056 - DNA, 25 bp, Homo sapien
gatggtctcggccaaacttatcacc

SEQ ID NO: 3470057 - DNA, 25 bp, Homo sapien
agtagccaggcgattctctccagaa

SEQ ID NO: 3470058 - DNA, 25 bp, Homo sapien
aggtcttgcttgtgcaccagccgca

SEQ ID NO: 3470059 - DNA, 25 bp, Homo sapien
cagcaccgctagcaggtaaatgtgg

SEQ ID NO: 3470060 - DNA, 25 bp, Homo sapien
gatctcatcccgcttttccaggaat

SEQ ID NO: 3470061 - DNA, 25 bp, Homo sapien
gatggaccagagcataaccagggtg

SEQ ID NO: 3470062 - DNA, 25 bp, Homo sapien
gaattgccggatggaggacagctcc

SEQ ID NO: 3470063 - DNA, 25 bp, Homo sapien
tgttcagggaagctgccacaagtga

SEQ ID NO: 3470064 - DNA, 25 bp, Homo sapien
tttaaagccatggtgagctgctggg

SEQ ID NO: 3470065 - DNA, 25 bp, Homo sapien
gcattggaaacagggcacgggactt

SEQ ID NO: 3470066 - DNA, 25 bp, Homo sapien
actagagtggacttagggagtgccc

SEQ ID NO: 3470067 - DNA, 25 bp, Homo sapien
gaaagatatatctgcagagggagca

SEQ ID NO: 3470068 - DNA, 25 bp, Homo sapien
gagggagcaataaaccgcaaagcaa

SEQ ID NO: 3470069 - DNA, 25 bp, Homo sapien
tccaaggccaagttccactgatgaa

SEQ ID NO: 3470070 - DNA, 25 bp, Homo sapien
gaagcccagtactgtacagatgaaa

SEQ ID NO: 3470071 - DNA, 25 bp, Homo sapien
tagtgactgacagcataatggtgga

SEQ ID NO: 3470072 - DNA, 25 bp, Homo sapien
gacagcataatggtggatcttcagc

SEQ ID NO: 3470073 - DNA, 25 bp, Homo sapien
ctggctaggaggctgtcatagtgac

SEQ ID NO: 3470074 - DNA, 25 bp, Homo sapien
caaaccatctgccttgcagtaccta

SEQ ID NO: 3470075 - DNA, 25 bp, Homo sapien
tctattcatgggacggtgagccttt

SEQ ID NO: 3470076 - DNA, 25 bp, Homo sapien
taagaagttccaagatctgcagatg

SEQ ID NO: 3470077 - DNA, 25 bp, Homo sapien
cagcaggttcaggatcaaggaagag

SEQ ID NO: 3470078 - DNA, 25 bp, Homo sapien
aagttccggtcagaaagccagcagg

SEQ ID NO: 3470079 - DNA, 25 bp, Homo sapien
tggaaggttccctgggtgagaagag

SEQ ID NO: 3470080 - DNA, 25 bp, Homo sapien
gtaaaatgtaaatgccgaacagctg

SEQ ID NO: 3470081 - DNA, 25 bp, Homo sapien
taaaatgtaaatgccgaacagctgc

SEQ ID NO: 3470082 - DNA, 25 bp, Homo sapien
tttatgatgccaaatggtctgtagg

SEQ ID NO: 3470083 - DNA, 25 bp, Homo sapien
tttagctgggaaaccatatggcacg

SEQ ID NO: 3470084 - DNA, 25 bp, Homo sapien
gaacgggcgccattctttagctggg

SEQ ID NO: 3470085 - DNA, 25 bp, Homo sapien
taatgaacctaattgccagcgaagg

SEQ ID NO: 3470086 - DNA, 25 bp, Homo sapien
ggagagtgaattcaagctgggcttc

SEQ ID NO: 3470087 - DNA, 25 bp, Homo sapien
aggcgcctctgccaatgatggctct

SEQ ID NO: 3470088 - DNA, 25 bp, Homo sapien
ggaactgagaggactccacacacag

SEQ ID NO: 3470089 - DNA, 25 bp, Homo sapien
gcagggaatgggaaggcgcctctgc

SEQ ID NO: 3470090 - DNA, 25 bp, Homo sapien
tctcgacaagaaaggcaagcatgtg

SEQ ID NO: 3470091 - DNA, 25 bp, Homo sapien
ctcttctcgacaagaaaggcaagca

SEQ ID NO: 3470092 - DNA, 25 bp, Homo sapien
ttctcgacaagaaaggcaagcatgt

SEQ ID NO: 3470093 - DNA, 25 bp, Homo sapien
gcatgtgagtgttcactttggccat

SEQ ID NO: 3470094 - DNA, 25 bp, Homo sapien
tggctctccatgtaccattactcca

SEQ ID NO: 3470095 - DNA, 25 bp, Homo sapien
ccctctgccatgagtttaagttgta

SEQ ID NO: 3470096 - DNA, 25 bp, Homo sapien
taccattactccaagtgattgagcc

SEQ ID NO: 3470097 - DNA, 25 bp, Homo sapien
tctccctctgccatgagtttaagtt

SEQ ID NO: 3470098 - DNA, 25 bp, Homo sapien
cagctgagcgcagctgtttgtggtc

SEQ ID NO: 3470099 - DNA, 25 bp, Homo sapien
tctaattgcagctgagcgcagctgt

SEQ ID NO: 3470100 - DNA, 25 bp, Homo sapien
cgcagctgtttgtggtcctgttctc

SEQ ID NO: 3470101 - DNA, 25 bp, Homo sapien
tgagcgcagctgtttgtggtcctgt

SEQ ID NO: 3470102 - DNA, 25 bp, Homo sapien
cagatccacttgaccacgaggaagt

SEQ ID NO: 3470103 - DNA, 25 bp, Homo sapien
aaggagaggcctccagatccacttg

SEQ ID NO: 3470104 - DNA, 25 bp, Homo sapien
gatccacttgaccacgaggaagtga

SEQ ID NO: 3470105 - DNA, 25 bp, Homo sapien
tccagatccacttgaccacgaggaa

SEQ ID NO: 3470106 - DNA, 25 bp, Homo sapien
gaagcagcatgagtcctattatggg

SEQ ID NO: 3470107 - DNA, 25 bp, Homo sapien
ggctctaggccaacattgaatagtt

SEQ ID NO: 3470108 - DNA, 25 bp, Homo sapien
catcactagggaagggtgcattttc

SEQ ID NO: 3470109 - DNA, 25 bp, Homo sapien
catatcgtgtgcatgaaatgaagca

SEQ ID NO: 3470110 - DNA, 25 bp, Homo sapien
ccacttagcgctgaaggctggctgc

SEQ ID NO: 3470111 - DNA, 25 bp, Homo sapien
gtttattgggcccagataaagcagc

SEQ ID NO: 3470112 - DNA, 25 bp, Homo sapien
aggtttattgggcccagataaagca

SEQ ID NO: 3470113 - DNA, 25 bp, Homo sapien
tttattgggcccagataaagcagca

SEQ ID NO: 3470114 - DNA, 25 bp, Homo sapien
tgatccgggttcacaagagccgctc

SEQ ID NO: 3470115 - DNA, 25 bp, Homo sapien
aactgtagggtcatggaaggtggca

SEQ ID NO: 3470116 - DNA, 25 bp, Homo sapien
caggcggtagagtttacacatcgga

SEQ ID NO: 3470117 - DNA, 25 bp, Homo sapien
tatctgttcgctgaaggccaggcgg

SEQ ID NO: 3470118 - DNA, 25 bp, Homo sapien
gcgcctctccatctttagtgctggc

SEQ ID NO: 3470119 - DNA, 25 bp, Homo sapien
gcctccgccgcgtcccacgtcaacg

SEQ ID NO: 3470120 - DNA, 25 bp, Homo sapien
tccgccgcgtcccacgtcaacgccg

SEQ ID NO: 3470121 - DNA, 25 bp, Homo sapien
gcgtcccacgtcaacgccgagcccc

SEQ ID NO: 3470122 - DNA, 25 bp, Homo sapien
gccgcgtcccacgtcaacgccgagc

SEQ ID NO: 3470123 - DNA, 25 bp, Homo sapien
ggcagttcgcagtacccgctctcat

SEQ ID NO: 3470124 - DNA, 25 bp, Homo sapien
agcatcgcccggcagttcgcagtac

SEQ ID NO: 3470125 - DNA, 25 bp, Homo sapien
gtacccgctctcatcgccctcaact

SEQ ID NO: 3470126 - DNA, 25 bp, Homo sapien
gcggcagcgacagcatcgcccggca

SEQ ID NO: 3470127 - DNA, 25 bp, Homo sapien
aggggtgttgctggggaactgttgc

SEQ ID NO: 3470128 - DNA, 25 bp, Homo sapien
gggtgtgcgtgcctgtcggggggtg

SEQ ID NO: 3470129 - DNA, 25 bp, Homo sapien
cgtgcctgtcggggggtgtgtgcct

SEQ ID NO: 3470130 - DNA, 25 bp, Homo sapien
ggtgttgctggggaactgttgctct

SEQ ID NO: 3470131 - DNA, 25 bp, Homo sapien
gtgtcaccgccggtcccgccgagag

SEQ ID NO: 3470132 - DNA, 25 bp, Homo sapien
gaggagggcccgcagcgctgcagac

SEQ ID NO: 3470133 - DNA, 25 bp, Homo sapien
gcggccgggagcgcacggcgagctc

SEQ ID NO: 3470134 - DNA, 25 bp, Homo sapien
ggcccgcagcgctgcagaccctctg

SEQ ID NO: 3470135 - DNA, 25 bp, Homo sapien
gagctccggggatcgaccgcgctct

SEQ ID NO: 3470136 - DNA, 25 bp, Homo sapien
gaagcaacttttcccgaggagctag

SEQ ID NO: 3470137 - DNA, 25 bp, Homo sapien
tggagacgacttcagcaaacttggg

SEQ ID NO: 3470138 - DNA, 25 bp, Homo sapien
aagagccggcgataacccgcccgag

SEQ ID NO: 3470139 - DNA, 25 bp, Homo sapien
agggaaatctgggcgcccacgggca

SEQ ID NO: 3470140 - DNA, 25 bp, Homo sapien
aaagaatggaagcttggcgccctga

SEQ ID NO: 3470141 - DNA, 25 bp, Homo sapien
aagcttggcgccctgaaacaagcct

SEQ ID NO: 3470142 - DNA, 25 bp, Homo sapien
ttggcgccctgaaacaagccttttg

SEQ ID NO: 3470143 - DNA, 25 bp, Homo sapien
ccaccgcgtgctttcccgcagacat

SEQ ID NO: 3470144 - DNA, 25 bp, Homo sapien
ttgggatgagcattcagccgagccg

SEQ ID NO: 3470145 - DNA, 25 bp, Homo sapien
tgggatgagcattcagccgagccga

SEQ ID NO: 3470146 - DNA, 25 bp, Homo sapien
tcccgcagacatcggggtttctgag

SEQ ID NO: 3470147 - DNA, 25 bp, Homo sapien
tctatcagttcaggagccaccaagc

SEQ ID NO: 3470148 - DNA, 25 bp, Homo sapien
cccagaaggagctctatcagttcag

SEQ ID NO: 3470149 - DNA, 25 bp, Homo sapien
gccaccaagctcacgcagaaaggat

SEQ ID NO: 3470150 - DNA, 25 bp, Homo sapien
aaggattcacaggacggctggtcaa

SEQ ID NO: 3470151 - DNA, 25 bp, Homo sapien
cccacaactgcccggtggacaggag

SEQ ID NO: 3470152 - DNA, 25 bp, Homo sapien
tgcccacaactgcccggtggacagg

SEQ ID NO: 3470153 - DNA, 25 bp, Homo sapien
cacaactgcccggtggacaggagga

SEQ ID NO: 3470154 - DNA, 25 bp, Homo sapien
acaactgcccggtggacaggaggat

SEQ ID NO: 3470155 - DNA, 25 bp, Homo sapien
tgggctctcctccgcaaaggctatc

SEQ ID NO: 3470156 - DNA, 25 bp, Homo sapien
agcagagtcaaactcattggaggcc

SEQ ID NO: 3470157 - DNA, 25 bp, Homo sapien
ctgcctcactacaggagccccagaa

SEQ ID NO: 3470158 - DNA, 25 bp, Homo sapien
gcaaaggctatcctctcaccatcag

SEQ ID NO: 3470159 - DNA, 25 bp, Homo sapien
tgctcccctcggctcaggcatgagg

SEQ ID NO: 3470160 - DNA, 25 bp, Homo sapien
gggcttcctgggccaatagaggagg

SEQ ID NO: 3470161 - DNA, 25 bp, Homo sapien
ccttctgggctctgcgtggcggggc

SEQ ID NO: 3470162 - DNA, 25 bp, Homo sapien
ctcggctcaggcatgaggctttctt

SEQ ID NO: 3470163 - DNA, 25 bp, Homo sapien
cccgtggggtggctagggttctgca

SEQ ID NO: 3470164 - DNA, 25 bp, Homo sapien
ctgcagctggatcatgcccattttt

SEQ ID NO: 3470165 - DNA, 25 bp, Homo sapien
gtccggtgggcgtggaactcctggc

SEQ ID NO: 3470166 - DNA, 25 bp, Homo sapien
cacatcgcacaaagtcccggccagc

SEQ ID NO: 3470167 - DNA, 25 bp, Homo sapien
atctcggccgcatacagcaggtcat

SEQ ID NO: 3470168 - DNA, 25 bp, Homo sapien
gactattgcggtggaagaggatctc

SEQ ID NO: 3470169 - DNA, 25 bp, Homo sapien
tccgccttggcttgcagcgtggctg

SEQ ID NO: 3470170 - DNA, 25 bp, Homo sapien
aaggtctttggcgagaggaagtcca

SEQ ID NO: 3470171 - DNA, 25 bp, Homo sapien
ggagagactgtcctatggtcatcaa

SEQ ID NO: 3470172 - DNA, 25 bp, Homo sapien
gatgttcttgaggtaccgagccttg

SEQ ID NO: 3470173 - DNA, 25 bp, Homo sapien
tgtcattgtcgtctgaggcctggat

SEQ ID NO: 3470174 - DNA, 25 bp, Homo sapien
tggtgggactcatggctgaaagacc

SEQ ID NO: 3470175 - DNA, 25 bp, Homo sapien
tctcgcccatagtgtagctccctag

SEQ ID NO: 3470176 - DNA, 25 bp, Homo sapien
gtcagccttgtggttgggcaacacg

SEQ ID NO: 3470177 - DNA, 25 bp, Homo sapien
gcactggtgatgacgctgcttcgag

SEQ ID NO: 3470178 - DNA, 25 bp, Homo sapien
ggtcacggaagacggcatgctcaat

SEQ ID NO: 3470179 - DNA, 25 bp, Homo sapien
acacgctgcactgctctccgatggt

SEQ ID NO: 3470180 - DNA, 25 bp, Homo sapien
cagcttgctgaacagctccctctgg

SEQ ID NO: 3470181 - DNA, 25 bp, Homo sapien
gatggtccggctctctgacttcatg

SEQ ID NO: 3470182 - DNA, 25 bp, Homo sapien
ctcgttatcaggaagctcgacccca

SEQ ID NO: 3470183 - DNA, 25 bp, Homo sapien
ggttgcggtgagcagagatcacacc

SEQ ID NO: 3470184 - DNA, 25 bp, Homo sapien
gaatcaccttaacccgggatgcaga

SEQ ID NO: 3470185 - DNA, 25 bp, Homo sapien
gagaatcaccttaacccgggatgca

SEQ ID NO: 3470186 - DNA, 25 bp, Homo sapien
aggagaatcaccttaacccgggatg

SEQ ID NO: 3470187 - DNA, 25 bp, Homo sapien
caggaaccaggacctgatgagagcc

SEQ ID NO: 3470188 - DNA, 25 bp, Homo sapien
tggtatcttttgtggccctctcggg

SEQ ID NO: 3470189 - DNA, 25 bp, Homo sapien
tcatagcacacagccgaaataattc

SEQ ID NO: 3470190 - DNA, 25 bp, Homo sapien
ttcacatccggaaagatgatacatc

SEQ ID NO: 3470191 - DNA, 25 bp, Homo sapien
accgctgcggtgactatgtgcccat

SEQ ID NO: 3470192 - DNA, 25 bp, Homo sapien
ccacatgtgacacggaggattccag

SEQ ID NO: 3470193 - DNA, 25 bp, Homo sapien
taaacaacacaagggacagatggtc

SEQ ID NO: 3470194 - DNA, 25 bp, Homo sapien
aaagtacatctagctgggacccgag

SEQ ID NO: 3470195 - DNA, 25 bp, Homo sapien
caccagcttgggatcaaatcatggg

SEQ ID NO: 3470196 - DNA, 25 bp, Homo sapien
tgttgagccaacagcttacccttca

SEQ ID NO: 3470197 - DNA, 25 bp, Homo sapien
agtggacggcttgtacatcttgctg

SEQ ID NO: 3470198 - DNA, 25 bp, Homo sapien
gaaacaggctctacaactccactaa

SEQ ID NO: 3470199 - DNA, 25 bp, Homo sapien
ccatgggagactagggactataaat

SEQ ID NO: 3470200 - DNA, 25 bp, Homo sapien
taaagaccaagctgcgtgagccatg

SEQ ID NO: 3470201 - DNA, 25 bp, Homo sapien
caagagttgcgacggtgtctgtgca

SEQ ID NO: 3470202 - DNA, 25 bp, Homo sapien
tgcagctgacctaagtgcttgtctg

SEQ ID NO: 3470203 - DNA, 25 bp, Homo sapien
gattgacgtcaaggaagatggttgt

SEQ ID NO: 3470204 - DNA, 25 bp, Homo sapien
ggttgtagcctccaatggtggtatc

SEQ ID NO: 3470205 - DNA, 25 bp, Homo sapien
ctttaggattgacgtcaaggaagat

SEQ ID NO: 3470206 - DNA, 25 bp, Homo sapien
tcaaggaagatggttgtagcctcca

SEQ ID NO: 3470207 - DNA, 25 bp, Homo sapien
ctaaaaaggatacttcctggaaatg

SEQ ID NO: 3470208 - DNA, 25 bp, Homo sapien
tggattcaaaaaggattttggcaaa

SEQ ID NO: 3470209 - DNA, 25 bp, Homo sapien
aatggaaatggattcaaaaaggatt

SEQ ID NO: 3470210 - DNA, 25 bp, Homo sapien
cctggaaatggaaatggattcaaaa

SEQ ID NO: 3470211 - DNA, 25 bp, Homo sapien
ctcacacctataatcccagcacttt

SEQ ID NO: 3470212 - DNA, 25 bp, Homo sapien
taaaaacttaggccaggcgcagtgg

SEQ ID NO: 3470213 - DNA, 25 bp, Homo sapien
ggtgcacccctgtggtcccaggtac

SEQ ID NO: 3470214 - DNA, 25 bp, Homo sapien
gcactatgccattctttttaatttt

SEQ ID NO: 3470215 - DNA, 25 bp, Homo sapien
tctttaggactttgggctatgatgg

SEQ ID NO: 3470216 - DNA, 25 bp, Homo sapien
ctttaggactttgggctatgatggg

SEQ ID NO: 3470217 - DNA, 25 bp, Homo sapien
gctttccccgaaagtgcagttcact

SEQ ID NO: 3470218 - DNA, 25 bp, Homo sapien
gtgcagttcactcctttgtcaccag

SEQ ID NO: 3470219 - DNA, 25 bp, Homo sapien
tctgggccagattccggcatgcttt

SEQ ID NO: 3470220 - DNA, 25 bp, Homo sapien
tgaggaggcgtcatctccaaaccct

SEQ ID NO: 3470221 - DNA, 25 bp, Homo sapien
attacagcagttaaaaggagtcttc

SEQ ID NO: 3470222 - DNA, 25 bp, Homo sapien
ttacagcagttaaaaggagtcttcc

SEQ ID NO: 3470223 - DNA, 25 bp, Homo sapien
tacagcagttaaaaggagtcttccc

SEQ ID NO: 3470224 - DNA, 25 bp, Homo sapien
tggagacagggacacttagacaacc

SEQ ID NO: 3470225 - DNA, 25 bp, Homo sapien
tagtgaataagccagtccctctcgt

SEQ ID NO: 3470226 - DNA, 25 bp, Homo sapien
caaagcaggtggagagtgccttcct

SEQ ID NO: 3470227 - DNA, 25 bp, Homo sapien
ttggacacattgagagcccacgcct

SEQ ID NO: 3470228 - DNA, 25 bp, Homo sapien
cacacagtttgcaagtggcagcatg

SEQ ID NO: 3470229 - DNA, 25 bp, Homo sapien
gacaggactgctagctaagtaagga

SEQ ID NO: 3470230 - DNA, 25 bp, Homo sapien
cagttcacagtccttgatggccaac

SEQ ID NO: 3470231 - DNA, 25 bp, Homo sapien
catgaaaatctgaacccgggtctgc

SEQ ID NO: 3470232 - DNA, 25 bp, Homo sapien
agcaagaggtactgaatacctatga

SEQ ID NO: 3470233 - DNA, 25 bp, Homo sapien
gaatacctatgatgtccagggcact

SEQ ID NO: 3470234 - DNA, 25 bp, Homo sapien
cgaagcggggctgtataactgaata

SEQ ID NO: 3470235 - DNA, 25 bp, Homo sapien
gtccagggcactagactctgaaggg

SEQ ID NO: 3470236 - DNA, 25 bp, Homo sapien
gggctcaaagtctgaaccaatgacg

SEQ ID NO: 3470237 - DNA, 25 bp, Homo sapien
ttccacccaaaaccaacagttgcat

SEQ ID NO: 3470238 - DNA, 25 bp, Homo sapien
gaaaaaatgtccgttgacaattcag

SEQ ID NO: 3470239 - DNA, 25 bp, Homo sapien
tgacgttgtcactattccaaacaca

SEQ ID NO: 3470240 - DNA, 25 bp, Homo sapien
gacagtcatgctaaaagggtgccat

SEQ ID NO: 3470241 - DNA, 25 bp, Homo sapien
taaaccctaaagagcgcattgactg

SEQ ID NO: 3470242 - DNA, 25 bp, Homo sapien
ggttacataagacacgacactgtgg

SEQ ID NO: 3470243 - DNA, 25 bp, Homo sapien
cattgactgagactgcagggcgcgt

SEQ ID NO: 3470244 - DNA, 25 bp, Homo sapien
aagtatgagaaagtgggcgagtgaa

SEQ ID NO: 3470245 - DNA, 25 bp, Homo sapien
gagcctcgcagttgtttaaaaagac

SEQ ID NO: 3470246 - DNA, 25 bp, Homo sapien
ctatgtataagaaattggtggccgg

SEQ ID NO: 3470247 - DNA, 25 bp, Homo sapien
ggtcttcttgcaaaggtcccaattc

SEQ ID NO: 3470248 - DNA, 25 bp, Homo sapien
ccctccccatctgggataccatcag

SEQ ID NO: 3470249 - DNA, 25 bp, Homo sapien
tccccatctgggataccatcagttt

SEQ ID NO: 3470250 - DNA, 25 bp, Homo sapien
ccatctgggataccatcagtttctt

SEQ ID NO: 3470251 - DNA, 25 bp, Homo sapien
cccatctgggataccatcagtttct

SEQ ID NO: 3470252 - DNA, 25 bp, Homo sapien
ctttggtaaatgagctcaaactggg

SEQ ID NO: 3470253 - DNA, 25 bp, Homo sapien
tttggtaaatgagctcaaactgggc

SEQ ID NO: 3470254 - DNA, 25 bp, Homo sapien
tctggaaaacgcacagcaaaccaca

SEQ ID NO: 3470255 - DNA, 25 bp, Homo sapien
gagagattctggaaaacgcacagca

SEQ ID NO: 3470256 - DNA, 25 bp, Homo sapien
tgaatctgatagtcatccaagagag

SEQ ID NO: 3470257 - DNA, 25 bp, Homo sapien
gcaaaacaacaccaatccactcttc

SEQ ID NO: 3470258 - DNA, 25 bp, Homo sapien
tattgaagtgcgtctggaagcctca

SEQ ID NO: 3470259 - DNA, 25 bp, Homo sapien
gaagaatgtgtctcaacagtagcca

SEQ ID NO: 3470260 - DNA, 25 bp, Homo sapien
gacaatgcagttaatgttccccact

SEQ ID NO: 3470261 - DNA, 25 bp, Homo sapien
gaccgtcttgtggttcgcagcgcta

SEQ ID NO: 3470262 - DNA, 25 bp, Homo sapien
tgctccccaacattgtggccgacat

SEQ ID NO: 3470263 - DNA, 25 bp, Homo sapien
tattctgtctttcaacagacattca

SEQ ID NO: 3470264 - DNA, 25 bp, Homo sapien
ctttggacttcatccattattctgt

SEQ ID NO: 3470265 - DNA, 25 bp, Homo sapien
actgctccccaacattgtggccgac

SEQ ID NO: 3470266 - DNA, 25 bp, Homo sapien
tctcacctagaccacttgacgggct

SEQ ID NO: 3470267 - DNA, 25 bp, Homo sapien
ataaaaggtcggcttctctctctgc

SEQ ID NO: 3470268 - DNA, 25 bp, Homo sapien
tcctattatttcactcccgggatta

SEQ ID NO: 3470269 - DNA, 25 bp, Homo sapien
gggctcctaggtggttcctctgact

SEQ ID NO: 3470270 - DNA, 25 bp, Homo sapien
caagggaagagtttatagctcacga

SEQ ID NO: 3470271 - DNA, 25 bp, Homo sapien
agctcacgaacccagacctaaggaa

SEQ ID NO: 3470272 - DNA, 25 bp, Homo sapien
ctagaccctgtggattttagaaagt

SEQ ID NO: 3470273 - DNA, 25 bp, Homo sapien
tacaaaggattaattaggagcaagg

SEQ ID NO: 3470274 - DNA, 25 bp, Homo sapien
ctggagcggagtggtgtggtttcgg

SEQ ID NO: 3470275 - DNA, 25 bp, Homo sapien
gctggagcggagtggtgtggtttcg

SEQ ID NO: 3470276 - DNA, 25 bp, Homo sapien
ggagcggagtggtgtggtttcggct

SEQ ID NO: 3470277 - DNA, 25 bp, Homo sapien
tggagcggagtggtgtggtttcggc

SEQ ID NO: 3470278 - DNA, 25 bp, Homo sapien
cagggtcatgacatctcacatctca

SEQ ID NO: 3470279 - DNA, 25 bp, Homo sapien
aggaacaaaggttatgctagaagac

SEQ ID NO: 3470280 - DNA, 25 bp, Homo sapien
catgacatctcacatctcaggaaat

SEQ ID NO: 3470281 - DNA, 25 bp, Homo sapien
ggaacaaaggttatgctagaagacc

SEQ ID NO: 3470282 - DNA, 25 bp, Homo sapien
caagcctggtcacatgtaagcctgg

SEQ ID NO: 3470283 - DNA, 25 bp, Homo sapien
tagacgtcgtgatctttaagagcca

SEQ ID NO: 3470284 - DNA, 25 bp, Homo sapien
ggataactatccaagctgcatcaga

SEQ ID NO: 3470285 - DNA, 25 bp, Homo sapien
gagagagagaattccacctaagttt

SEQ ID NO: 3470286 - DNA, 25 bp, Homo sapien
tctaataacccctggcataagcgca

SEQ ID NO: 3470287 - DNA, 25 bp, Homo sapien
cagagcttagcaaggctggaattcc

SEQ ID NO: 3470288 - DNA, 25 bp, Homo sapien
atgagggcctcgcatcacacttacg

SEQ ID NO: 3470289 - DNA, 25 bp, Homo sapien
gaggactctgttgcatgctgtggcc

SEQ ID NO: 3470290 - DNA, 25 bp, Homo sapien
gccacatttcatttacggtgcggca

SEQ ID NO: 3470291 - DNA, 25 bp, Homo sapien
caaggtcactggatagaaagcgggc

SEQ ID NO: 3470292 - DNA, 25 bp, Homo sapien
ttatcaagatacatgtggcaatgcc

SEQ ID NO: 3470293 - DNA, 25 bp, Homo sapien
gaaaagggagcctagggatgcaaca

SEQ ID NO: 3470294 - DNA, 25 bp, Homo sapien
tgctcctcagtcacatggcctgttt

SEQ ID NO: 3470295 - DNA, 25 bp, Homo sapien
taggctccaggcaacctaagtagaa

SEQ ID NO: 3470296 - DNA, 25 bp, Homo sapien
taatatgaatgctacctgctcctca

SEQ ID NO: 3470297 - DNA, 25 bp, Homo sapien
ctctccgtgaagttgattgccatcg

SEQ ID NO: 3470298 - DNA, 25 bp, Homo sapien
tataggcaaagacaacctcataatg

SEQ ID NO: 3470299 - DNA, 25 bp, Homo sapien
accgctgccacaagaacctgccaag

SEQ ID NO: 3470300 - DNA, 25 bp, Homo sapien
ttaatccttaaccaccgctgccaca

SEQ ID NO: 3470301 - DNA, 25 bp, Homo sapien
gcaaagacaacctcataatgagcat

SEQ ID NO: 3470302 - DNA, 25 bp, Homo sapien
attcaccgtgtgcacaggagcctcg

SEQ ID NO: 3470303 - DNA, 25 bp, Homo sapien
tcagccagcacacattcaccgtgtg

SEQ ID NO: 3470304 - DNA, 25 bp, Homo sapien
acacattcaccgtgtgcacaggagc

SEQ ID NO: 3470305 - DNA, 25 bp, Homo sapien
ctcatcagccagcacacattcaccg

SEQ ID NO: 3470306 - DNA, 25 bp, Homo sapien
tatcatacaatatgcaccctttggg

SEQ ID NO: 3470307 - DNA, 25 bp, Homo sapien
tcctctgtagggatataccatactt

SEQ ID NO: 3470308 - DNA, 25 bp, Homo sapien
cattcactggtttgtagcatattca

SEQ ID NO: 3470309 - DNA, 25 bp, Homo sapien
gcatattcatagaactgtgcaacca

SEQ ID NO: 3470310 - DNA, 25 bp, Homo sapien
tggactccagtaaagtcaggctgct

SEQ ID NO: 3470311 - DNA, 25 bp, Homo sapien
tgttaagcgcctaccgtatgctgga

SEQ ID NO: 3470312 - DNA, 25 bp, Homo sapien
tataacctcagagtatgccagggtg

SEQ ID NO: 3470313 - DNA, 25 bp, Homo sapien
ttctacagggaaggcaagccgactc

SEQ ID NO: 3470314 - DNA, 25 bp, Homo sapien
tccagagagagctgaccacaacagc

SEQ ID NO: 3470315 - DNA, 25 bp, Homo sapien
acgtggccatctgagattatcagcc

SEQ ID NO: 3470316 - DNA, 25 bp, Homo sapien
taaggtttaattgcacgtggccatc

SEQ ID NO: 3470317 - DNA, 25 bp, Homo sapien
cactcacatcttcccaatctagtcc

SEQ ID NO: 3470318 - DNA, 25 bp, Homo sapien
ttaattgcacgtggccatctgagat

SEQ ID NO: 3470319 - DNA, 25 bp, Homo sapien
gtggaaatagaattccaaccgattc

SEQ ID NO: 3470320 - DNA, 25 bp, Homo sapien
tggctaccagtagactctccatggc

SEQ ID NO: 3470321 - DNA, 25 bp, Homo sapien
cagtctgcagaacagccaatgtgga

SEQ ID NO: 3470322 - DNA, 25 bp, Homo sapien
ctaccagtagactctccatggcaca

SEQ ID NO: 3470323 - DNA, 25 bp, Homo sapien
tgcgccatccctgcaacgtccccag

SEQ ID NO: 3470324 - DNA, 25 bp, Homo sapien
cgccccagtctctgcgccatccctg

SEQ ID NO: 3470325 - DNA, 25 bp, Homo sapien
gcgccatccctgcaacgtccccagg

SEQ ID NO: 3470326 - DNA, 25 bp, Homo sapien
gccccagtctctgcgccatccctgc

SEQ ID NO: 3470327 - DNA, 25 bp, Homo sapien
gccgcaaactatccaggaaccgctt

SEQ ID NO: 3470328 - DNA, 25 bp, Homo sapien
agagctcgcacccgtacgtcttcat

SEQ ID NO: 3470329 - DNA, 25 bp, Homo sapien
cagtaagtgcattctcagccgcaaa

SEQ ID NO: 3470330 - DNA, 25 bp, Homo sapien
ctgaatgagccagtaagtgcattct

SEQ ID NO: 3470331 - DNA, 25 bp, Homo sapien
tggatcttctgtgtcataagcctgg

SEQ ID NO: 3470332 - DNA, 25 bp, Homo sapien
taaaggctcctgtataatgtgaacc

SEQ ID NO: 3470333 - DNA, 25 bp, Homo sapien
tggaaggtagatcacacagggcact

SEQ ID NO: 3470334 - DNA, 25 bp, Homo sapien
cctgggaaacccacgagagcttgaa

SEQ ID NO: 3470335 - DNA, 25 bp, Homo sapien
caacacaatgcggaaccacatgggc

SEQ ID NO: 3470336 - DNA, 25 bp, Homo sapien
aacacaatgcggaaccacatgggcc

SEQ ID NO: 3470337 - DNA, 25 bp, Homo sapien
tccaacacaatgcggaaccacatgg

SEQ ID NO: 3470338 - DNA, 25 bp, Homo sapien
catccaacacaatgcggaaccacat

SEQ ID NO: 3470339 - DNA, 25 bp, Homo sapien
agaacagaatgcacgaagacatggg

SEQ ID NO: 3470340 - DNA, 25 bp, Homo sapien
gacagtagacgcgctgagagagata

SEQ ID NO: 3470341 - DNA, 25 bp, Homo sapien
aagacatggggacagtagacgcgct

SEQ ID NO: 3470342 - DNA, 25 bp, Homo sapien
ggaagaacagaatgcacgaagacat

SEQ ID NO: 3470343 - DNA, 25 bp, Homo sapien
acagcagagacactggctaactcac

SEQ ID NO: 3470344 - DNA, 25 bp, Homo sapien
gagtatgcaagcaaccctttctttt

SEQ ID NO: 3470345 - DNA, 25 bp, Homo sapien
ctgacatgagtatgcaagcaaccct

SEQ ID NO: 3470346 - DNA, 25 bp, Homo sapien
atgctgctgatgtgtgattcacagc

SEQ ID NO: 3470347 - DNA, 25 bp, Homo sapien
tccgcagggcagttgcacagtcaca

SEQ ID NO: 3470348 - DNA, 25 bp, Homo sapien
ttgcacagtcacactcttgtctgaa

SEQ ID NO: 3470349 - DNA, 25 bp, Homo sapien
ccagggaaccgccagctccgcaggg

SEQ ID NO: 3470350 - DNA, 25 bp, Homo sapien
tcaggtggaaccaaagtcagcttcc

SEQ ID NO: 3470351 - DNA, 25 bp, Homo sapien
gtacatactgtacccacaagtctgg

SEQ ID NO: 3470352 - DNA, 25 bp, Homo sapien
acaagtctggctcgcagccaggcct

SEQ ID NO: 3470353 - DNA, 25 bp, Homo sapien
tgtacccacaagtctggctcgcagc

SEQ ID NO: 3470354 - DNA, 25 bp, Homo sapien
tactgtacccacaagtctggctcgc

SEQ ID NO: 3470355 - DNA, 25 bp, Homo sapien
gagacagtggatcaacagatgcttc

SEQ ID NO: 3470356 - DNA, 25 bp, Homo sapien
tacgacaaggagtggcgaagagaca

SEQ ID NO: 3470357 - DNA, 25 bp, Homo sapien
gcttcaatgccagatccccaaaagg

SEQ ID NO: 3470358 - DNA, 25 bp, Homo sapien
taggaatcacttctcgtgttacgac

SEQ ID NO: 3470359 - DNA, 25 bp, Homo sapien
tggacggtagtcaagcctgcattaa

SEQ ID NO: 3470360 - DNA, 25 bp, Homo sapien
gcatctgcaagcgatcataaactct

SEQ ID NO: 3470361 - DNA, 25 bp, Homo sapien
gtgtgttcttggaggcgcatctgca

SEQ ID NO: 3470362 - DNA, 25 bp, Homo sapien
tcctctctcccgtgtacgggcttgg

SEQ ID NO: 3470363 - DNA, 25 bp, Homo sapien
tcctaagaacgcttccggcagggtg

SEQ ID NO: 3470364 - DNA, 25 bp, Homo sapien
tctgcgaagccaagggaagacgaaa

SEQ ID NO: 3470365 - DNA, 25 bp, Homo sapien
caaggcaacccagaacgtaggaagg

SEQ ID NO: 3470366 - DNA, 25 bp, Homo sapien
aagagcactgaaagtaagggccgca

SEQ ID NO: 3470367 - DNA, 25 bp, Homo sapien
tatatcgggaagcacagttacatgc

SEQ ID NO: 3470368 - DNA, 25 bp, Homo sapien
cagaaagatggagtactcccgtgac

SEQ ID NO: 3470369 - DNA, 25 bp, Homo sapien
cagaggacacgttcagcttggcaag

SEQ ID NO: 3470370 - DNA, 25 bp, Homo sapien
agccggctcctagctcctgatagag

SEQ ID NO: 3470371 - DNA, 25 bp, Homo sapien
tttaccatatccctgataccctgcg

SEQ ID NO: 3470372 - DNA, 25 bp, Homo sapien
actgtcctgtatttggagctctctt

SEQ ID NO: 3470373 - DNA, 25 bp, Homo sapien
cttgggctttaccatatccctgata

SEQ ID NO: 3470374 - DNA, 25 bp, Homo sapien
ttcccagtggactgtaagctctgtg

SEQ ID NO: 3470375 - DNA, 25 bp, Homo sapien
cctggtacacggcttaagagagctt

SEQ ID NO: 3470376 - DNA, 25 bp, Homo sapien
gcagtcatgacatgtgttcacaggg

SEQ ID NO: 3470377 - DNA, 25 bp, Homo sapien
agctccctcacaattagaaactgcc

SEQ ID NO: 3470378 - DNA, 25 bp, Homo sapien
gggtagcagccaagactacctttca

SEQ ID NO: 3470379 - DNA, 25 bp, Homo sapien
gagtctctgtgcctgagcaatgctc

SEQ ID NO: 3470380 - DNA, 25 bp, Homo sapien
ccagagtctctgtgcctgagcaatg

SEQ ID NO: 3470381 - DNA, 25 bp, Homo sapien
tctctgtgcctgagcaatgctcagt

SEQ ID NO: 3470382 - DNA, 25 bp, Homo sapien
tgtgcctgagcaatgctcagtccca

SEQ ID NO: 3470383 - DNA, 25 bp, Homo sapien
cagttaccactagagcaatagtcca

SEQ ID NO: 3470384 - DNA, 25 bp, Homo sapien
ggcagttaccactagagcaatagtc

SEQ ID NO: 3470385 - DNA, 25 bp, Homo sapien
gcagttaccactagagcaatagtcc

SEQ ID NO: 3470386 - DNA, 25 bp, Homo sapien
tccagggcatcctccttcgaaaact

SEQ ID NO: 3470387 - DNA, 25 bp, Homo sapien
gtgcaccgcactgatcacagacaaa

SEQ ID NO: 3470388 - DNA, 25 bp, Homo sapien
tccttcgaaaactgtgcaccgcact

SEQ ID NO: 3470389 - DNA, 25 bp, Homo sapien
gaaaactgtgcaccgcactgatcac

SEQ ID NO: 3470390 - DNA, 25 bp, Homo sapien
gaggaccagccaactgtggccacac

SEQ ID NO: 3470391 - DNA, 25 bp, Homo sapien
ggccacacgagggtttcagtttcat

SEQ ID NO: 3470392 - DNA, 25 bp, Homo sapien
tagacaatgtctcagctctcgcaga

SEQ ID NO: 3470393 - DNA, 25 bp, Homo sapien
tgcgtacacgctgattttagacaat

SEQ ID NO: 3470394 - DNA, 25 bp, Homo sapien
gccagatgggatcacgtaaagcagt

SEQ ID NO: 3470395 - DNA, 25 bp, Homo sapien
cagggttactgagagattggccaga

SEQ ID NO: 3470396 - DNA, 25 bp, Homo sapien
tatgacataagagtagcttccaacc

SEQ ID NO: 3470397 - DNA, 25 bp, Homo sapien
tccatggccccacaaataggaagtg

SEQ ID NO: 3470398 - DNA, 25 bp, Homo sapien
cacatctttgataacacttgtaact

SEQ ID NO: 3470399 - DNA, 25 bp, Homo sapien
ttacactcccatgagagttctggtt

SEQ ID NO: 3470400 - DNA, 25 bp, Homo sapien
agctaacctcttgaggaattgccag

SEQ ID NO: 3470401 - DNA, 25 bp, Homo sapien
tgcctgcctcagctaacctcttgag

SEQ ID NO: 3470402 - DNA, 25 bp, Homo sapien
gcttttcccactccaatagctttag

SEQ ID NO: 3470403 - DNA, 25 bp, Homo sapien
gtcatcaggcaactcccttcctcct

SEQ ID NO: 3470404 - DNA, 25 bp, Homo sapien
tggcttcccaacggtacctggtctc

SEQ ID NO: 3470405 - DNA, 25 bp, Homo sapien
acattttcagcgctccctgtcatca

SEQ ID NO: 3470406 - DNA, 25 bp, Homo sapien
gaacaccagcttgagcccgtcaaga

SEQ ID NO: 3470407 - DNA, 25 bp, Homo sapien
tagaacaccagcttgagcccgtcaa

SEQ ID NO: 3470408 - DNA, 25 bp, Homo sapien
ctagaacaccagcttgagcccgtca

SEQ ID NO: 3470409 - DNA, 25 bp, Homo sapien
aacaccagcttgagcccgtcaagat

SEQ ID NO: 3470410 - DNA, 25 bp, Homo sapien
tttgatccattgatccgcacatgag

SEQ ID NO: 3470411 - DNA, 25 bp, Homo sapien
ccattgatccgcacatgagagctga

SEQ ID NO: 3470412 - DNA, 25 bp, Homo sapien
gggagggaagacaatgctaaaatgt

SEQ ID NO: 3470413 - DNA, 25 bp, Homo sapien
atccgcacatgagagctgatgccca

SEQ ID NO: 3470414 - DNA, 25 bp, Homo sapien
tcagccgccagaggtatgccgtttc

SEQ ID NO: 3470415 - DNA, 25 bp, Homo sapien
cagccgacaacacagtggatgagaa

SEQ ID NO: 3470416 - DNA, 25 bp, Homo sapien
gaggtatgccgtttctggactgcaa

SEQ ID NO: 3470417 - DNA, 25 bp, Homo sapien
tgcaagactcttgcagccgacaaca

SEQ ID NO: 3470418 - DNA, 25 bp, Homo sapien
gtcccaggtcccagcatacatgtcc

SEQ ID NO: 3470419 - DNA, 25 bp, Homo sapien
ggtcccagcatacatgtccaaaatc

SEQ ID NO: 3470420 - DNA, 25 bp, Homo sapien
ggcccagcatccgtgtctggcatcc

SEQ ID NO: 3470421 - DNA, 25 bp, Homo sapien
cggggcccagcatccgtgtctggca

SEQ ID NO: 3470422 - DNA, 25 bp, Homo sapien
ccagcggcatccatgtccgtcatcc

SEQ ID NO: 3470423 - DNA, 25 bp, Homo sapien
gcccagcggcatccatgtccgtcat

SEQ ID NO: 3470424 - DNA, 25 bp, Homo sapien
agcggcatccatgtccgtcatcccc

SEQ ID NO: 3470425 - DNA, 25 bp, Homo sapien
cccagcggcatccatgtccgtcatc

SEQ ID NO: 3470426 - DNA, 25 bp, Homo sapien
ggaagggcaaggtctgtgtcctgcc

SEQ ID NO: 3470427 - DNA, 25 bp, Homo sapien
gtgcccggccccacatgtatggttt

SEQ ID NO: 3470428 - DNA, 25 bp, Homo sapien
tgagagaagcaaggaaacgaagcca

SEQ ID NO: 3470429 - DNA, 25 bp, Homo sapien
gaaaaatacagaccatcaatgcaag

SEQ ID NO: 3470430 - DNA, 25 bp, Homo sapien
tatgaagcaagtccatagcagagcc

SEQ ID NO: 3470431 - DNA, 25 bp, Homo sapien
ttaacagacatgttatctaagtgag

SEQ ID NO: 3470432 - DNA, 25 bp, Homo sapien
gatggtacaattatctaaatgttta

SEQ ID NO: 3470433 - DNA, 25 bp, Homo sapien
taagtgagtcggattgagattccat

SEQ ID NO: 3470434 - DNA, 25 bp, Homo sapien
taatgtgacaagttaatgatggtac

SEQ ID NO: 3470435 - DNA, 25 bp, Homo sapien
aaatccagctcagggcgagtgacca

SEQ ID NO: 3470436 - DNA, 25 bp, Homo sapien
ccagctcagggcgagtgaccacttg

SEQ ID NO: 3470437 - DNA, 25 bp, Homo sapien
caaatccagctcagggcgagtgacc

SEQ ID NO: 3470438 - DNA, 25 bp, Homo sapien
tcagggcgagtgaccacttgcaagc

SEQ ID NO: 3470439 - DNA, 25 bp, Homo sapien
gaatggaccagtctgtttccctcat

SEQ ID NO: 3470440 - DNA, 25 bp, Homo sapien
gaatacttaatcactgaatggacca

SEQ ID NO: 3470441 - DNA, 25 bp, Homo sapien
tcattgacccattcggatgacgccg

SEQ ID NO: 3470442 - DNA, 25 bp, Homo sapien
tccaaacaatagtggttaacttgct

SEQ ID NO: 3470443 - DNA, 25 bp, Homo sapien
aagttatcttcggatgcgggcacct

SEQ ID NO: 3470444 - DNA, 25 bp, Homo sapien
gaaactttctactctagaggttatg

SEQ ID NO: 3470445 - DNA, 25 bp, Homo sapien
gatgcaagtcgcaaaaagacctcct

SEQ ID NO: 3470446 - DNA, 25 bp, Homo sapien
cacctgcacaagtggttggttctca

SEQ ID NO: 3470447 - DNA, 25 bp, Homo sapien
agttgggttatccaccttttctgca

SEQ ID NO: 3470448 - DNA, 25 bp, Homo sapien
caccagagttgggttatccaccttt

SEQ ID NO: 3470449 - DNA, 25 bp, Homo sapien
cagagttgggttatccaccttttct

SEQ ID NO: 3470450 - DNA, 25 bp, Homo sapien
cccaccagagttgggttatccacct

SEQ ID NO: 3470451 - DNA, 25 bp, Homo sapien
aacgggattagtaacagcctacata

SEQ ID NO: 3470452 - DNA, 25 bp, Homo sapien
aagtttatttcacaagaaatggcca

SEQ ID NO: 3470453 - DNA, 25 bp, Homo sapien
ggaacgggattagtaacagcctaca

SEQ ID NO: 3470454 - DNA, 25 bp, Homo sapien
tttatttcacaagaaatggccagca

SEQ ID NO: 3470455 - DNA, 25 bp, Homo sapien
tccacaaatcccagacaccattaac

SEQ ID NO: 3470456 - DNA, 25 bp, Homo sapien
gggatctccggaatgtgaaggctct

SEQ ID NO: 3470457 - DNA, 25 bp, Homo sapien
ccggaatgtgaaggctctgaatcca

SEQ ID NO: 3470458 - DNA, 25 bp, Homo sapien
tctccggaatgtgaaggctctgaat

SEQ ID NO: 3470459 - DNA, 25 bp, Homo sapien
tgtccaagtgtcaacaacctgctgc

SEQ ID NO: 3470460 - DNA, 25 bp, Homo sapien
gctgtggtgtactcctgaagtggca

SEQ ID NO: 3470461 - DNA, 25 bp, Homo sapien
gggaatagtcaccaccctaaggcag

SEQ ID NO: 3470462 - DNA, 25 bp, Homo sapien
gatcagaaatgcctctctcgaaccc

SEQ ID NO: 3470463 - DNA, 25 bp, Homo sapien
tgaagtcttgctcctaataagtagc

SEQ ID NO: 3470464 - DNA, 25 bp, Homo sapien
tgatcaacccgcacatttgcaatgt

SEQ ID NO: 3470465 - DNA, 25 bp, Homo sapien
gagtaaatgcttgggaacccgacac

SEQ ID NO: 3470466 - DNA, 25 bp, Homo sapien
tcaccgggcaagtggctttttgacc

SEQ ID NO: 3470467 - DNA, 25 bp, Homo sapien
cttttgaataatgcttcctgaaatg

SEQ ID NO: 3470468 - DNA, 25 bp, Homo sapien
tttgaataatgcttcctgaaatgtc

SEQ ID NO: 3470469 - DNA, 25 bp, Homo sapien
ggcttttgaataatgcttcctgaaa

SEQ ID NO: 3470470 - DNA, 25 bp, Homo sapien
cggcttttgaataatgcttcctgaa

SEQ ID NO: 3470471 - DNA, 25 bp, Homo sapien
taaatatggccacactaatccgctt

SEQ ID NO: 3470472 - DNA, 25 bp, Homo sapien
gggaaatggtactgatcccgcccac

SEQ ID NO: 3470473 - DNA, 25 bp, Homo sapien
caagattctaaactagccccggcaa

SEQ ID NO: 3470474 - DNA, 25 bp, Homo sapien
gatgctcggctgttgcagacagaga

SEQ ID NO: 3470475 - DNA, 25 bp, Homo sapien
tcaatcacatgccaggagggcgagt

SEQ ID NO: 3470476 - DNA, 25 bp, Homo sapien
ggtcgccaataacaccccaatgcgg

SEQ ID NO: 3470477 - DNA, 25 bp, Homo sapien
aaaataactctaggaggcgggcact

SEQ ID NO: 3470478 - DNA, 25 bp, Homo sapien
gaccgctgacaagtcctcaatggca

SEQ ID NO: 3470479 - DNA, 25 bp, Homo sapien
atctcccctactaactctttcccag

SEQ ID NO: 3470480 - DNA, 25 bp, Homo sapien
ggccctgagttaggtcccagagatg

SEQ ID NO: 3470481 - DNA, 25 bp, Homo sapien
ccagtaatctaatcagtacttattg

SEQ ID NO: 3470482 - DNA, 25 bp, Homo sapien
aggccctgagttaggtcccagagat

SEQ ID NO: 3470483 - DNA, 25 bp, Homo sapien
tcttcagcctaagtttactccaggg

SEQ ID NO: 3470484 - DNA, 25 bp, Homo sapien
cacgaggctaaagtatgagaatcgc

SEQ ID NO: 3470485 - DNA, 25 bp, Homo sapien
gatcataatagccatagggctgctg

SEQ ID NO: 3470486 - DNA, 25 bp, Homo sapien
gagtacctggccagtatgccataaa

SEQ ID NO: 3470487 - DNA, 25 bp, Homo sapien
gttggacttccaggaaggtccgtgc

SEQ ID NO: 3470488 - DNA, 25 bp, Homo sapien
agcctggaggactgcccatccaatc

SEQ ID NO: 3470489 - DNA, 25 bp, Homo sapien
gaaggtccgtgcagcacagcaggtc

SEQ ID NO: 3470490 - DNA, 25 bp, Homo sapien
caggtccttctctgagaaatttcca

SEQ ID NO: 3470491 - DNA, 25 bp, Homo sapien
tctgatcttgaccttgaaggcaaac

SEQ ID NO: 3470492 - DNA, 25 bp, Homo sapien
ttagaaaggtctgatcttgaccttg

SEQ ID NO: 3470493 - DNA, 25 bp, Homo sapien
aggtctgatcttgaccttgaaggca

SEQ ID NO: 3470494 - DNA, 25 bp, Homo sapien
gaaaggtctgatcttgaccttgaag

SEQ ID NO: 3470495 - DNA, 25 bp, Homo sapien
gaatcactttgctcactcctacact

SEQ ID NO: 3470496 - DNA, 25 bp, Homo sapien
ccggacaaaggatccctcgtccttg

SEQ ID NO: 3470497 - DNA, 25 bp, Homo sapien
tatccattcaggtttctgcccagaa

SEQ ID NO: 3470498 - DNA, 25 bp, Homo sapien
agctcccggacaaaggatccctcgt

SEQ ID NO: 3470499 - DNA, 25 bp, Homo sapien
tcccccagcacatggggcccaggag

SEQ ID NO: 3470500 - DNA, 25 bp, Homo sapien
caggaggtggatggtgggggtgtgc

SEQ ID NO: 3470501 - DNA, 25 bp, Homo sapien
cttcccccagcacatggggcccagg

SEQ ID NO: 3470502 - DNA, 25 bp, Homo sapien
gcccaggaggtggatggtgggggtg

SEQ ID NO: 3470503 - DNA, 25 bp, Homo sapien
ggacgcctgcccgtataaatcagca

SEQ ID NO: 3470504 - DNA, 25 bp, Homo sapien
aatgacagcaggactagggcaaagg

SEQ ID NO: 3470505 - DNA, 25 bp, Homo sapien
gtcacggggtccaaggccttaagca

SEQ ID NO: 3470506 - DNA, 25 bp, Homo sapien
aagcacctccgccagctgtggcaga

SEQ ID NO: 3470507 - DNA, 25 bp, Homo sapien
ttgtggccccgagcaagtcattctt

SEQ ID NO: 3470508 - DNA, 25 bp, Homo sapien
tctgccactgtggttatcaagaaca

SEQ ID NO: 3470509 - DNA, 25 bp, Homo sapien
gaacatcgaatgagatatccacacg

SEQ ID NO: 3470510 - DNA, 25 bp, Homo sapien
cacacgaaaaaactttataatgtgg

SEQ ID NO: 3470511 - DNA, 25 bp, Homo sapien
gggcacacatggggaccaacagcag

SEQ ID NO: 3470512 - DNA, 25 bp, Homo sapien
cagcaagcggttagaagcagcgaga

SEQ ID NO: 3470513 - DNA, 25 bp, Homo sapien
acagcagcagcaagcggttagaagc

SEQ ID NO: 3470514 - DNA, 25 bp, Homo sapien
aagccagtgactctgggcacacatg

SEQ ID NO: 3470515 - DNA, 25 bp, Homo sapien
aaacagccagcacaggattttgctc

SEQ ID NO: 3470516 - DNA, 25 bp, Homo sapien
gggaaggagaaaaacagccagcaca

SEQ ID NO: 3470517 - DNA, 25 bp, Homo sapien
gcagtcaggaaggctgagcagggaa

SEQ ID NO: 3470518 - DNA, 25 bp, Homo sapien
aggagaaaaacagccagcacaggat

SEQ ID NO: 3470519 - DNA, 25 bp, Homo sapien
agacactgaagtctaagcacctgga

SEQ ID NO: 3470520 - DNA, 25 bp, Homo sapien
acactgaagtctaagcacctggagc

SEQ ID NO: 3470521 - DNA, 25 bp, Homo sapien
ccttccctttgcagacactgaagtc

SEQ ID NO: 3470522 - DNA, 25 bp, Homo sapien
tcccttccctttgcagacactgaag

SEQ ID NO: 3470523 - DNA, 25 bp, Homo sapien
ctgtttgttaccaatccctttctga

SEQ ID NO: 3470524 - DNA, 25 bp, Homo sapien
aatacaaggtgcattctttacccat

SEQ ID NO: 3470525 - DNA, 25 bp, Homo sapien
gcctcagaaaggtgggaatacaagg

SEQ ID NO: 3470526 - DNA, 25 bp, Homo sapien
gggaatacaaggtgcattctttacc

SEQ ID NO: 3470527 - DNA, 25 bp, Homo sapien
gggtgcctcagaaaggtgggaatac

SEQ ID NO: 3470528 - DNA, 25 bp, Homo sapien
atgtagctgcgcacgcccgcgtgga

SEQ ID NO: 3470529 - DNA, 25 bp, Homo sapien
cagcagacagaagacggccatgtca

SEQ ID NO: 3470530 - DNA, 25 bp, Homo sapien
gaaggtgcggttgcactcactgcag

SEQ ID NO: 3470531 - DNA, 25 bp, Homo sapien
tgctgctgcagtgcgctctgcgcct

SEQ ID NO: 3470532 - DNA, 25 bp, Homo sapien
tgtgcacctggcgtgaaatcttcac

SEQ ID NO: 3470533 - DNA, 25 bp, Homo sapien
gacaaacgagactaattagagcccc

SEQ ID NO: 3470534 - DNA, 25 bp, Homo sapien
gaatcagggatccatcaatgccaag

SEQ ID NO: 3470535 - DNA, 25 bp, Homo sapien
gcaaatgggccaagaacaacggaat

SEQ ID NO: 3470536 - DNA, 25 bp, Homo sapien
gccacgtgagacttcagctggagcc

SEQ ID NO: 3470537 - DNA, 25 bp, Homo sapien
caaagattcagtatcctcattaagg

SEQ ID NO: 3470538 - DNA, 25 bp, Homo sapien
gaatcggcaacgattacgactttaa

SEQ ID NO: 3470539 - DNA, 25 bp, Homo sapien
taattaaaacgtacatcggcagcca

SEQ ID NO: 3470540 - DNA, 25 bp, Homo sapien
aagctcaaagagtggcatcgtgcct

SEQ ID NO: 3470541 - DNA, 25 bp, Homo sapien
aagaagcacccatgccatgagaggg

SEQ ID NO: 3470542 - DNA, 25 bp, Homo sapien
caaagttaggcccctgtacccacat

SEQ ID NO: 3470543 - DNA, 25 bp, Homo sapien
attctcatctgttctgatggctctg

SEQ ID NO: 3470544 - DNA, 25 bp, Homo sapien
aaccgtgtaatgtcctctgcatttc

SEQ ID NO: 3470545 - DNA, 25 bp, Homo sapien
ttcagctgctgaaggtttaagtcat

SEQ ID NO: 3470546 - DNA, 25 bp, Homo sapien
gggctgccaaccgtgtaatgtcctc

SEQ ID NO: 3470547 - DNA, 25 bp, Homo sapien
atgtgcggggctgccaaccgtgtaa

SEQ ID NO: 3470548 - DNA, 25 bp, Homo sapien
aagacaacttaaggatccacggcca

SEQ ID NO: 3470549 - DNA, 25 bp, Homo sapien
gaccatactttactgtggccccatg

SEQ ID NO: 3470550 - DNA, 25 bp, Homo sapien
gttaagggtgaaagtcactccagcc

SEQ ID NO: 3470551 - DNA, 25 bp, Homo sapien
catgagaaggatgcgacggcctgta

SEQ ID NO: 3470552 - DNA, 25 bp, Homo sapien
ccctcttcaggggacagtagggcac

SEQ ID NO: 3470553 - DNA, 25 bp, Homo sapien
ctgtggagacaaggggctggatcag

SEQ ID NO: 3470554 - DNA, 25 bp, Homo sapien
ggctggatcaggcctttgcctctcc

SEQ ID NO: 3470555 - DNA, 25 bp, Homo sapien
ctcttcaggggacagtagggcacat

SEQ ID NO: 3470556 - DNA, 25 bp, Homo sapien
ccgtgtggatgcgtttgtggctctt

SEQ ID NO: 3470557 - DNA, 25 bp, Homo sapien
tgtgcaccctatagtgcgtctccag

SEQ ID NO: 3470558 - DNA, 25 bp, Homo sapien
gatgcttgaggctgaacttcttgcc

SEQ ID NO: 3470559 - DNA, 25 bp, Homo sapien
tgagtgtgctctcatcccggaagca

SEQ ID NO: 3470560 - DNA, 25 bp, Homo sapien
tatagttgtcatcaacggacaccca

SEQ ID NO: 3470561 - DNA, 25 bp, Homo sapien
ctgggacacgaaaaacgagctctga

SEQ ID NO: 3470562 - DNA, 25 bp, Homo sapien
tgggaaatcctctgggccactatag

SEQ ID NO: 3470563 - DNA, 25 bp, Homo sapien
ccttgtgggctcaaactgggacacg

SEQ ID NO: 3470564 - DNA, 25 bp, Homo sapien
cacacatggctatgaatgaggctgg

SEQ ID NO: 3470565 - DNA, 25 bp, Homo sapien
actttctgggacaatgaaggcacca

SEQ ID NO: 3470566 - DNA, 25 bp, Homo sapien
ggtgcgactgcagctctacagtttt

SEQ ID NO: 3470567 - DNA, 25 bp, Homo sapien
agggcaccatgtcaccctcaggcgt

SEQ ID NO: 3470568 - DNA, 25 bp, Homo sapien
gctggtggcagagcttacactcaaa

SEQ ID NO: 3470569 - DNA, 25 bp, Homo sapien
tagcacaggtagaggtacgtcttct

SEQ ID NO: 3470570 - DNA, 25 bp, Homo sapien
tctatcctccagtcgggcgggatct

SEQ ID NO: 3470571 - DNA, 25 bp, Homo sapien
tcaggtgcttgatcatggccgagta

SEQ ID NO: 3470572 - DNA, 25 bp, Homo sapien
ctcactccaactcttctttcctggc

SEQ ID NO: 3470573 - DNA, 25 bp, Homo sapien
ttctttcctggctccccgctcggct

SEQ ID NO: 3470574 - DNA, 25 bp, Homo sapien
tatttgtcatagtccttccttcatc

SEQ ID NO: 3470575 - DNA, 25 bp, Homo sapien
ttttatttgtcatagtccttccttc

SEQ ID NO: 3470576 - DNA, 25 bp, Homo sapien
cccagagagaatccaaggccaaaaa

SEQ ID NO: 3470577 - DNA, 25 bp, Homo sapien
agaatccaaggccaaaaagctacca

SEQ ID NO: 3470578 - DNA, 25 bp, Homo sapien
ggcatccaggtcatctggagcccag

SEQ ID NO: 3470579 - DNA, 25 bp, Homo sapien
atccaaggccaaaaagctaccaggt

SEQ ID NO: 3470580 - DNA, 25 bp, Homo sapien
cagaggcagctatcccactagggaa

SEQ ID NO: 3470581 - DNA, 25 bp, Homo sapien
gctatcccactagggaaccggagaa

SEQ ID NO: 3470582 - DNA, 25 bp, Homo sapien
ttttgagcagctagtgacccagccc

SEQ ID NO: 3470583 - DNA, 25 bp, Homo sapien
agtcagccgccagcaaactagagct

SEQ ID NO: 3470584 - DNA, 25 bp, Homo sapien
caaacacgaatattgcaaatgtgct

SEQ ID NO: 3470585 - DNA, 25 bp, Homo sapien
catgagatgaaacggagggtccgtc

SEQ ID NO: 3470586 - DNA, 25 bp, Homo sapien
caactggacaaacataagaggtagc

SEQ ID NO: 3470587 - DNA, 25 bp, Homo sapien
aaagcaaacacgaatattgcaaatg

SEQ ID NO: 3470588 - DNA, 25 bp, Homo sapien
tctgcgaagttggatgccaagggcc

SEQ ID NO: 3470589 - DNA, 25 bp, Homo sapien
tcccctatagggaggtaagctcaat

SEQ ID NO: 3470590 - DNA, 25 bp, Homo sapien
tcatggacagagtcgaaaggctgcc

SEQ ID NO: 3470591 - DNA, 25 bp, Homo sapien
tacagtaagttcagaggtgtcccca

SEQ ID NO: 3470592 - DNA, 25 bp, Homo sapien
cagcgccgacaacagtaactggtac

SEQ ID NO: 3470593 - DNA, 25 bp, Homo sapien
gactaaagaagacgtgagacccctg

SEQ ID NO: 3470594 - DNA, 25 bp, Homo sapien
tattccgtccatgacaatgcagagc

SEQ ID NO: 3470595 - DNA, 25 bp, Homo sapien
taagtgaacaagtgcctacctagca

SEQ ID NO: 3470596 - DNA, 25 bp, Homo sapien
cgccgcgaccccagcacagcgccta

SEQ ID NO: 3470597 - DNA, 25 bp, Homo sapien
gcgccgccgcgaccccagcacagcg

SEQ ID NO: 3470598 - DNA, 25 bp, Homo sapien
gcgaccccagcacagcgcctaagcc

SEQ ID NO: 3470599 - DNA, 25 bp, Homo sapien
ccgcgaccccagcacagcgcctaag

SEQ ID NO: 3470600 - DNA, 25 bp, Homo sapien
cccactcagctttttagggatggga

SEQ ID NO: 3470601 - DNA, 25 bp, Homo sapien
tcccagtcacaaagcttccgagaag

SEQ ID NO: 3470602 - DNA, 25 bp, Homo sapien
aagatgaggcctcgcgtatccctgg

SEQ ID NO: 3470603 - DNA, 25 bp, Homo sapien
ggttgatcttccctcagtgcaagat

SEQ ID NO: 3470604 - DNA, 25 bp, Homo sapien
gaagctcactctatgctgaagacca

SEQ ID NO: 3470605 - DNA, 25 bp, Homo sapien
cttgtccattggacgagccgtcctg

SEQ ID NO: 3470606 - DNA, 25 bp, Homo sapien
gagccgtcctgatgcacttcctctt

SEQ ID NO: 3470607 - DNA, 25 bp, Homo sapien
tttccctccagctcgtgtcactaga

SEQ ID NO: 3470608 - DNA, 25 bp, Homo sapien
ggtcatcagaagcacggatcaaaca

SEQ ID NO: 3470609 - DNA, 25 bp, Homo sapien
tgggactttcaaccctaccctgcaa

SEQ ID NO: 3470610 - DNA, 25 bp, Homo sapien
gtagatgtttccctaagttcagtga

SEQ ID NO: 3470611 - DNA, 25 bp, Homo sapien
gggtatggaagtgccaagccccttc

SEQ ID NO: 3470612 - DNA, 25 bp, Homo sapien
cgcgcctggtctgttgtagtatatt

SEQ ID NO: 3470613 - DNA, 25 bp, Homo sapien
gttgcatggctggtttgggaaccat

SEQ ID NO: 3470614 - DNA, 25 bp, Homo sapien
ggaaccatggtaagtcccatgtatg

SEQ ID NO: 3470615 - DNA, 25 bp, Homo sapien
tttaagcaatcataagcttggttgc

SEQ ID NO: 3470616 - DNA, 25 bp, Homo sapien
aaagggcacaggtttcctctgttca

SEQ ID NO: 3470617 - DNA, 25 bp, Homo sapien
gatactctgggctgtgaaacaacca

SEQ ID NO: 3470618 - DNA, 25 bp, Homo sapien
acactttctaggctatgcccaggga

SEQ ID NO: 3470619 - DNA, 25 bp, Homo sapien
tctgggctgtgaaacaaccatcaaa

SEQ ID NO: 3470620 - DNA, 25 bp, Homo sapien
tcagacgggagtaagggaaatcact

SEQ ID NO: 3470621 - DNA, 25 bp, Homo sapien
agacgggagtaagggaaatcactct

SEQ ID NO: 3470622 - DNA, 25 bp, Homo sapien
actcagacgggagtaagggaaatca

SEQ ID NO: 3470623 - DNA, 25 bp, Homo sapien
ggagtaagggaaatcactctccctc

SEQ ID NO: 3470624 - DNA, 25 bp, Homo sapien
tacagtagtcaggtccataggcaat

SEQ ID NO: 3470625 - DNA, 25 bp, Homo sapien
gcaggaaacataccacactacagta

SEQ ID NO: 3470626 - DNA, 25 bp, Homo sapien
cacatacgtgcagatccaggaaaac

SEQ ID NO: 3470627 - DNA, 25 bp, Homo sapien
gaacttagcatgctcattcacgcct

SEQ ID NO: 3470628 - DNA, 25 bp, Homo sapien
ccatgtagttggaggcaatggtctc

SEQ ID NO: 3470629 - DNA, 25 bp, Homo sapien
gtccatgtagttggaggcaatggtc

SEQ ID NO: 3470630 - DNA, 25 bp, Homo sapien
tccaggacattcttgtccatgtagt

SEQ ID NO: 3470631 - DNA, 25 bp, Homo sapien
tccatgtagttggaggcaatggtct

SEQ ID NO: 3470632 - DNA, 25 bp, Homo sapien
ctgacatccttctttcttagtctcc

SEQ ID NO: 3470633 - DNA, 25 bp, Homo sapien
tccactgacatccttctttcttagt

SEQ ID NO: 3470634 - DNA, 25 bp, Homo sapien
ttcttcctgcagttccactgacatc

SEQ ID NO: 3470635 - DNA, 25 bp, Homo sapien
ttcttcttcctgcagttccactgac

SEQ ID NO: 3470636 - DNA, 25 bp, Homo sapien
ctgccatcaaaagccagctgactgt

SEQ ID NO: 3470637 - DNA, 25 bp, Homo sapien
cagtcagaacggttgcctgccatca

SEQ ID NO: 3470638 - DNA, 25 bp, Homo sapien
ggttgcctgccatcaaaagccagct

SEQ ID NO: 3470639 - DNA, 25 bp, Homo sapien
gaacggttgcctgccatcaaaagcc

SEQ ID NO: 3470640 - DNA, 25 bp, Homo sapien
catacggtccctgggttgaagcagg

SEQ ID NO: 3470641 - DNA, 25 bp, Homo sapien
ttgaagcagggtcccaagttggcac

SEQ ID NO: 3470642 - DNA, 25 bp, Homo sapien
gtgccttggcaggtacccagggtgg

SEQ ID NO: 3470643 - DNA, 25 bp, Homo sapien
agcctctgcttgcagcatacggtcc

SEQ ID NO: 3470644 - DNA, 25 bp, Homo sapien
cttcgccgggccacagagaacatct

SEQ ID NO: 3470645 - DNA, 25 bp, Homo sapien
gagaacatctctgggtcaactgggc

SEQ ID NO: 3470646 - DNA, 25 bp, Homo sapien
ctgggcagtcgtggaagtggctctc

SEQ ID NO: 3470647 - DNA, 25 bp, Homo sapien
tcaactgggcagtcgtggaagtggc

SEQ ID NO: 3470648 - DNA, 25 bp, Homo sapien
taatgcataggaccccaaagttcag

SEQ ID NO: 3470649 - DNA, 25 bp, Homo sapien
catgagctgtatgcaatgcttgccc

SEQ ID NO: 3470650 - DNA, 25 bp, Homo sapien
cacaaatgttctggctgttctagga

SEQ ID NO: 3470651 - DNA, 25 bp, Homo sapien
cagccgccagggattgtagaccaga

SEQ ID NO: 3470652 - DNA, 25 bp, Homo sapien
cctgagtctcaggctaacagcattc

SEQ ID NO: 3470653 - DNA, 25 bp, Homo sapien
cacttctgtaccactggagcactgc

SEQ ID NO: 3470654 - DNA, 25 bp, Homo sapien
acttctgtaccactggagcactgcc

SEQ ID NO: 3470655 - DNA, 25 bp, Homo sapien
ttctgtaccactggagcactgccct

SEQ ID NO: 3470656 - DNA, 25 bp, Homo sapien
gttaaaatggcttagataggtgtcc

SEQ ID NO: 3470657 - DNA, 25 bp, Homo sapien
ggtgcttaagaatctggctttctgc

SEQ ID NO: 3470658 - DNA, 25 bp, Homo sapien
aaagatttttcagaaggtgcttaag

SEQ ID NO: 3470659 - DNA, 25 bp, Homo sapien
gagtgcctagaaccaaacttgtaat

SEQ ID NO: 3470660 - DNA, 25 bp, Homo sapien
gtggccctttgaggctaaaagtctc

SEQ ID NO: 3470661 - DNA, 25 bp, Homo sapien
tcaggacagcactccggtcctctgg

SEQ ID NO: 3470662 - DNA, 25 bp, Homo sapien
tcacagcattcccttgagttaggat

SEQ ID NO: 3470663 - DNA, 25 bp, Homo sapien
caaatcaaggtagactcaggacagc

SEQ ID NO: 3470664 - DNA, 25 bp, Homo sapien
gacgatctccttaaaggattcacaa

SEQ ID NO: 3470665 - DNA, 25 bp, Homo sapien
ggtctgagtagtcagtgacgacgat

SEQ ID NO: 3470666 - DNA, 25 bp, Homo sapien
gggccagagccgatgtcaatcagca

SEQ ID NO: 3470667 - DNA, 25 bp, Homo sapien
gcagagaggagctgatagatagtgg

SEQ ID NO: 3470668 - DNA, 25 bp, Homo sapien
aaaagccaagaagtagacaccagtt

SEQ ID NO: 3470669 - DNA, 25 bp, Homo sapien
caaaagccaagaagtagacaccagt

SEQ ID NO: 3470670 - DNA, 25 bp, Homo sapien
ctgttgcttttgccaaccatcactc

SEQ ID NO: 3470671 - DNA, 25 bp, Homo sapien
ttctctttggtccctatctgtctgt

SEQ ID NO: 3470672 - DNA, 25 bp, Homo sapien
gttgcttttgccaaccatcactcag

SEQ ID NO: 3470673 - DNA, 25 bp, Homo sapien
tgttgcttttgccaaccatcactca

SEQ ID NO: 3470674 - DNA, 25 bp, Homo sapien
gctatcaatcatttaagaaggaaat

SEQ ID NO: 3470675 - DNA, 25 bp, Homo sapien
agattcacctggcttcgctggtaaa

SEQ ID NO: 3470676 - DNA, 25 bp, Homo sapien
cctggcttcgctggtaaatgctatc

SEQ ID NO: 3470677 - DNA, 25 bp, Homo sapien
ttaataaagtcttctctcgcacaaa

SEQ ID NO: 3470678 - DNA, 25 bp, Homo sapien
gctttttgggttacatactgaggag

SEQ ID NO: 3470679 - DNA, 25 bp, Homo sapien
tctgggttacataccaaggagtgca

SEQ ID NO: 3470680 - DNA, 25 bp, Homo sapien
gcagaaggcctacattggcatacca

SEQ ID NO: 3470681 - DNA, 25 bp, Homo sapien
tactgtacagagtagtctcactgct

SEQ ID NO: 3470682 - DNA, 25 bp, Homo sapien
gactaaacaatccagttagaggcag

SEQ ID NO: 3470683 - DNA, 25 bp, Homo sapien
tgacaagaacataagggccaggaaa

SEQ ID NO: 3470684 - DNA, 25 bp, Homo sapien
gatagaaatcatataccaagatggt

SEQ ID NO: 3470685 - DNA, 25 bp, Homo sapien
tattgcaattcctagaaaaaccaca

SEQ ID NO: 3470686 - DNA, 25 bp, Homo sapien
tcctacaattctaaaggctggaagt

SEQ ID NO: 3470687 - DNA, 25 bp, Homo sapien
tcattgtacctttatatggcagaag

SEQ ID NO: 3470688 - DNA, 25 bp, Homo sapien
ttcaacacagaaattgggagggagg

SEQ ID NO: 3470689 - DNA, 25 bp, Homo sapien
tgacctaatgacctttcaaagcccc

SEQ ID NO: 3470690 - DNA, 25 bp, Homo sapien
ctgctgtcaagagggccaaggaaaa

SEQ ID NO: 3470691 - DNA, 25 bp, Homo sapien
aagagggccaaggaaaacagcttgg

SEQ ID NO: 3470692 - DNA, 25 bp, Homo sapien
tcaagagggccaaggaaaacagctt

SEQ ID NO: 3470693 - DNA, 25 bp, Homo sapien
tgtcaagagggccaaggaaaacagc

SEQ ID NO: 3470694 - DNA, 25 bp, Homo sapien
ccgggaagaaccctttctgagaatg

SEQ ID NO: 3470695 - DNA, 25 bp, Homo sapien
atatgcatctataaaagcctgaggg

SEQ ID NO: 3470696 - DNA, 25 bp, Homo sapien
tttgcagaaagctaacagcggtgtg

SEQ ID NO: 3470697 - DNA, 25 bp, Homo sapien
tagccctgtcctctgtaaatatgca

SEQ ID NO: 3470698 - DNA, 25 bp, Homo sapien
tcagatgatgatgcaaattgttccc

SEQ ID NO: 3470699 - DNA, 25 bp, Homo sapien
gaaatttgctagaaacacccagtgt

SEQ ID NO: 3470700 - DNA, 25 bp, Homo sapien
cagtgtcatagatccctgcttgtcc

SEQ ID NO: 3470701 - DNA, 25 bp, Homo sapien
tgagccacactgtgaagtctccaaa

SEQ ID NO: 3470702 - DNA, 25 bp, Homo sapien
cattgagtgtgttaagggcccaggc

SEQ ID NO: 3470703 - DNA, 25 bp, Homo sapien
gcactaagagtaggagtgacccctg

SEQ ID NO: 3470704 - DNA, 25 bp, Homo sapien
gacccctgggtattgcactcttgga

SEQ ID NO: 3470705 - DNA, 25 bp, Homo sapien
aaacttgattcgagagagtggacac

SEQ ID NO: 3470706 - DNA, 25 bp, Homo sapien
ccacacctgacccagtggtgatttc

SEQ ID NO: 3470707 - DNA, 25 bp, Homo sapien
cacacctgacccagtggtgatttct

SEQ ID NO: 3470708 - DNA, 25 bp, Homo sapien
taaaaatggccgtattgtcccagat

SEQ ID NO: 3470709 - DNA, 25 bp, Homo sapien
catgtttttggtagccttgccagga

SEQ ID NO: 3470710 - DNA, 25 bp, Homo sapien
tagcagcctgcttctaccgtggact

SEQ ID NO: 3470711 - DNA, 25 bp, Homo sapien
gaatgagaccatattaccctgagct

SEQ ID NO: 3470712 - DNA, 25 bp, Homo sapien
cacctgcttgaccgcctgtctcaac

SEQ ID NO: 3470713 - DNA, 25 bp, Homo sapien
tgcttgaccgcctgtctcaacttct

SEQ ID NO: 3470714 - DNA, 25 bp, Homo sapien
ttgaccgcctgtctcaacttctcct

SEQ ID NO: 3470715 - DNA, 25 bp, Homo sapien
gaccgcctgtctcaacttctcctcc

SEQ ID NO: 3470716 - DNA, 25 bp, Homo sapien
cttcagtaggctgccgaggttcctg

SEQ ID NO: 3470717 - DNA, 25 bp, Homo sapien
tagtagctgctcttgagcgcatcca

SEQ ID NO: 3470718 - DNA, 25 bp, Homo sapien
tgagcgcatccatgatcaccaggaa

SEQ ID NO: 3470719 - DNA, 25 bp, Homo sapien
aggcggcatccagacacagtgtgct

SEQ ID NO: 3470720 - DNA, 25 bp, Homo sapien
gaagaataactttgcgagatcacct

SEQ ID NO: 3470721 - DNA, 25 bp, Homo sapien
gagatcacctcaaaccattcgattg

SEQ ID NO: 3470722 - DNA, 25 bp, Homo sapien
agcttcctcgccaccagggagaaaa

SEQ ID NO: 3470723 - DNA, 25 bp, Homo sapien
gaaaagtccttcgttgttggccatg

SEQ ID NO: 3470724 - DNA, 25 bp, Homo sapien
tctctgtaggcaggtacgggcttga

SEQ ID NO: 3470725 - DNA, 25 bp, Homo sapien
tcaatggattgcttgtagactgacc

SEQ ID NO: 3470726 - DNA, 25 bp, Homo sapien
tcctagatgaaccattgggccccaa

SEQ ID NO: 3470727 - DNA, 25 bp, Homo sapien
gccagagtggagtctagcaaacagc

SEQ ID NO: 3470728 - DNA, 25 bp, Homo sapien
gcaggagagcctcaacagggagatt

SEQ ID NO: 3470729 - DNA, 25 bp, Homo sapien
gttaggcatgggcagtatccttctc

SEQ ID NO: 3470730 - DNA, 25 bp, Homo sapien
tgctggtgcaggtacactactgccc

SEQ ID NO: 3470731 - DNA, 25 bp, Homo sapien
ttcttaccactctgggaggaaacca

SEQ ID NO: 3470732 - DNA, 25 bp, Homo sapien
ccaaacattgtaagtcaaacataag

SEQ ID NO: 3470733 - DNA, 25 bp, Homo sapien
ccttgccaacatggctaacatacaa

SEQ ID NO: 3470734 - DNA, 25 bp, Homo sapien
caacatggctaacatacaaaataca

SEQ ID NO: 3470735 - DNA, 25 bp, Homo sapien
caaacataagttggggttcgggcat

SEQ ID NO: 3470736 - DNA, 25 bp, Homo sapien
gaaactgaccagactgttcacaaga

SEQ ID NO: 3470737 - DNA, 25 bp, Homo sapien
ggacttgccttgagctcctataaga

SEQ ID NO: 3470738 - DNA, 25 bp, Homo sapien
caagaaagagagtgctacagcaggg

SEQ ID NO: 3470739 - DNA, 25 bp, Homo sapien
tgcctattttttgtccagccccttg

SEQ ID NO: 3470740 - DNA, 25 bp, Homo sapien
ctgcatgacaccaaatgggttaacg

SEQ ID NO: 3470741 - DNA, 25 bp, Homo sapien
catgacaccaaatgggttaacgacc

SEQ ID NO: 3470742 - DNA, 25 bp, Homo sapien
atgatgggaatcacgaagactgagc

SEQ ID NO: 3470743 - DNA, 25 bp, Homo sapien
cagccagatgatgggaatcacgaag

SEQ ID NO: 3470744 - DNA, 25 bp, Homo sapien
gttgggccaattgtcactctcagtg

SEQ ID NO: 3470745 - DNA, 25 bp, Homo sapien
gggccaattgtcactctcagtggtt

SEQ ID NO: 3470746 - DNA, 25 bp, Homo sapien
cagttgggccaattgtcactctcag

SEQ ID NO: 3470747 - DNA, 25 bp, Homo sapien
ttgggccaattgtcactctcagtgg

SEQ ID NO: 3470748 - DNA, 25 bp, Homo sapien
aaagatctgacaagttgctctgaag

SEQ ID NO: 3470749 - DNA, 25 bp, Homo sapien
tctgacaagttgctctgaagtatgg

SEQ ID NO: 3470750 - DNA, 25 bp, Homo sapien
ctggaaagatctgacaagttgctct

SEQ ID NO: 3470751 - DNA, 25 bp, Homo sapien
acaagttgctctgaagtatggaaat

SEQ ID NO: 3470752 - DNA, 25 bp, Homo sapien
gcatcttagccaggtagcaccattg

SEQ ID NO: 3470753 - DNA, 25 bp, Homo sapien
cactcacctatcagaaataccagca

SEQ ID NO: 3470754 - DNA, 25 bp, Homo sapien
ggacaaagcattttgcatacctctc

SEQ ID NO: 3470755 - DNA, 25 bp, Homo sapien
cagcacagctctaaggatccctgga

SEQ ID NO: 3470756 - DNA, 25 bp, Homo sapien
tgaaatggtatggaacagtgtaatg

SEQ ID NO: 3470757 - DNA, 25 bp, Homo sapien
tatggaacagtgtaatgagcaatag

SEQ ID NO: 3470758 - DNA, 25 bp, Homo sapien
taatgagcaatagaaatatggaacc

SEQ ID NO: 3470759 - DNA, 25 bp, Homo sapien
tagaaatatggaaccaagaagcaat

SEQ ID NO: 3470760 - DNA, 25 bp, Homo sapien
cctaattaaacccagatgcttccga

SEQ ID NO: 3470761 - DNA, 25 bp, Homo sapien
taattaaacccagatgcttccgata

SEQ ID NO: 3470762 - DNA, 25 bp, Homo sapien
aacccagatgcttccgataaaaaga

SEQ ID NO: 3470763 - DNA, 25 bp, Homo sapien
agatgcttccgataaaaagaatggc

SEQ ID NO: 3470764 - DNA, 25 bp, Homo sapien
tataccagtagtcaatcaattaccc

SEQ ID NO: 3470765 - DNA, 25 bp, Homo sapien
tctttggtgactctaaaattatacc

SEQ ID NO: 3470766 - DNA, 25 bp, Homo sapien
ttaaggttgatgtgctctttggtga

SEQ ID NO: 3470767 - DNA, 25 bp, Homo sapien
ttctttatgtatgttgctggcttca

SEQ ID NO: 3470768 - DNA, 25 bp, Homo sapien
cgattgcttgctgttagtatataga

SEQ ID NO: 3470769 - DNA, 25 bp, Homo sapien
tgcatgttgacctcatatcctgaga

SEQ ID NO: 3470770 - DNA, 25 bp, Homo sapien
gccttcttgcactggttaggacttt

SEQ ID NO: 3470771 - DNA, 25 bp, Homo sapien
gataaaaatgtttccgattgcttgc

SEQ ID NO: 3470772 - DNA, 25 bp, Homo sapien
ttgtgctgcaagtaaaggacccgtt

SEQ ID NO: 3470773 - DNA, 25 bp, Homo sapien
tgctgcaagtaaaggacccgtttcc

SEQ ID NO: 3470774 - DNA, 25 bp, Homo sapien
tgtgctgcaagtaaaggacccgttt

SEQ ID NO: 3470775 - DNA, 25 bp, Homo sapien
tgcagatgacgcagggagatggtct

SEQ ID NO: 3470776 - DNA, 25 bp, Homo sapien
ttgacccgcagactgtcagccacag

SEQ ID NO: 3470777 - DNA, 25 bp, Homo sapien
attgacccgcagactgtcagccaca

SEQ ID NO: 3470778 - DNA, 25 bp, Homo sapien
gatgcataacctttcagtcatggct

SEQ ID NO: 3470779 - DNA, 25 bp, Homo sapien
ttattagtgttgttgatgcataacc

SEQ ID NO: 3470780 - DNA, 25 bp, Homo sapien
tcagtcatggctattgctttcttcc

SEQ ID NO: 3470781 - DNA, 25 bp, Homo sapien
tattagtgttgttgatgcataacct

SEQ ID NO: 3470782 - DNA, 25 bp, Homo sapien
gtttttctatgactattccagttcc

SEQ ID NO: 3470783 - DNA, 25 bp, Homo sapien
tgactattccagttcccaccggctt

SEQ ID NO: 3470784 - DNA, 25 bp, Homo sapien
tattttagaattccttaggctcttg

SEQ ID NO: 3470785 - DNA, 25 bp, Homo sapien
tattattttagaattccttaggctc

SEQ ID NO: 3470786 - DNA, 25 bp, Homo sapien
tttactagccttctcaggtcatcta

SEQ ID NO: 3470787 - DNA, 25 bp, Homo sapien
ttactagccttctcaggtcatctac

SEQ ID NO: 3470788 - DNA, 25 bp, Homo sapien
catgttgccggagctgttaaggaag

SEQ ID NO: 3470789 - DNA, 25 bp, Homo sapien
gggtccagcctcctttggtccctca

SEQ ID NO: 3470790 - DNA, 25 bp, Homo sapien
cctttggtccctcagctgcctcatg

SEQ ID NO: 3470791 - DNA, 25 bp, Homo sapien
ttaaggaagatttcataatttgcac

SEQ ID NO: 3470792 - DNA, 25 bp, Homo sapien
caggagataaggatcatttgggcca

SEQ ID NO: 3470793 - DNA, 25 bp, Homo sapien
ggctaaaagtctctcacaaggttgc

SEQ ID NO: 3470794 - DNA, 25 bp, Homo sapien
tcttttagtcacacaggctagccac

SEQ ID NO: 3470795 - DNA, 25 bp, Homo sapien
ttaccaccactgtcaagccaatggc

SEQ ID NO: 3470796 - DNA, 25 bp, Homo sapien
tccatacgggtaaaagcatgaagct

SEQ ID NO: 3470797 - DNA, 25 bp, Homo sapien
taaagtaaaggtctagcccattgag

SEQ ID NO: 3470798 - DNA, 25 bp, Homo sapien
tctgatgctacagccattgagttca

SEQ ID NO: 3470799 - DNA, 25 bp, Homo sapien
gcccattgagcccagttgaatacag

SEQ ID NO: 3470800 - DNA, 25 bp, Homo sapien
taaacaagatagcttccataagagg

SEQ ID NO: 3470801 - DNA, 25 bp, Homo sapien
tatgtgcaagtcagtgtgctaggac

SEQ ID NO: 3470802 - DNA, 25 bp, Homo sapien
caggtagactagctttttcccagca

SEQ ID NO: 3470803 - DNA, 25 bp, Homo sapien
aagtgccagctctttatataagcag

SEQ ID NO: 3470804 - DNA, 25 bp, Homo sapien
cctggccaaaaggtcgtggccgacg

SEQ ID NO: 3470805 - DNA, 25 bp, Homo sapien
tggccaaaaggtcgtggccgacgca

SEQ ID NO: 3470806 - DNA, 25 bp, Homo sapien
aaggtcgtggccgacgcacccactg

SEQ ID NO: 3470807 - DNA, 25 bp, Homo sapien
gccaaaaggtcgtggccgacgcacc

SEQ ID NO: 3470808 - DNA, 25 bp, Homo sapien
ttcgtttcaaggttgcccacaaaga

SEQ ID NO: 3470809 - DNA, 25 bp, Homo sapien
ggaaaagctcgaaaaggagctcctc

SEQ ID NO: 3470810 - DNA, 25 bp, Homo sapien
cacaaagagagtgcgatccgcttcc

SEQ ID NO: 3470811 - DNA, 25 bp, Homo sapien
ctcggtcactttcgtttcaaggttg

SEQ ID NO: 3470812 - DNA, 25 bp, Homo sapien
gcttaacatagtgaccaatcgccat

SEQ ID NO: 3470813 - DNA, 25 bp, Homo sapien
tatggcttaacatagtgaccaatcg

SEQ ID NO: 3470814 - DNA, 25 bp, Homo sapien
agcactgtatggcttaacatagtga

SEQ ID NO: 3470815 - DNA, 25 bp, Homo sapien
ctgtatggcttaacatagtgaccaa

SEQ ID NO: 3470816 - DNA, 25 bp, Homo sapien
cacaaacgcaaactgctttggttta

SEQ ID NO: 3470817 - DNA, 25 bp, Homo sapien
gataggccttccataaagtttgatt

SEQ ID NO: 3470818 - DNA, 25 bp, Homo sapien
ccattaagtagattcattgcataag

SEQ ID NO: 3470819 - DNA, 25 bp, Homo sapien
taaattgaattttgataggccttcc

SEQ ID NO: 3470820 - DNA, 25 bp, Homo sapien
acaaactgacatcttgtggggcatg

SEQ ID NO: 3470821 - DNA, 25 bp, Homo sapien
ggaggtagggcttgaatttccaaca

SEQ ID NO: 3470822 - DNA, 25 bp, Homo sapien
gatatgacaaactgacatcttgtgg

SEQ ID NO: 3470823 - DNA, 25 bp, Homo sapien
caacatgatgttggggatatgacaa

SEQ ID NO: 3470824 - DNA, 25 bp, Homo sapien
gctgggactatacgaatgggtcact

SEQ ID NO: 3470825 - DNA, 25 bp, Homo sapien
tgcactattgctggctcactattcc

SEQ ID NO: 3470826 - DNA, 25 bp, Homo sapien
catccatcaatagcttccaacatca

SEQ ID NO: 3470827 - DNA, 25 bp, Homo sapien
gctcatggcaccaccttaatctaaa

SEQ ID NO: 3470828 - DNA, 25 bp, Homo sapien
caggaaaggtatctgctctcatgca

SEQ ID NO: 3470829 - DNA, 25 bp, Homo sapien
ccctatcttttagctggtgagcgac

SEQ ID NO: 3470830 - DNA, 25 bp, Homo sapien
tgtcagtccctgagctaatgcaaag

SEQ ID NO: 3470831 - DNA, 25 bp, Homo sapien
tgagcaagtatagccagtgggccaa

SEQ ID NO: 3470832 - DNA, 25 bp, Homo sapien
tctgtgctgatgaagtcatgttatc

SEQ ID NO: 3470833 - DNA, 25 bp, Homo sapien
atctgtgctgatgaagtcatgttat

SEQ ID NO: 3470834 - DNA, 25 bp, Homo sapien
ctgtgctgatgaagtcatgttatcc

SEQ ID NO: 3470835 - DNA, 25 bp, Homo sapien
actcttgcctagatggatccacaac

SEQ ID NO: 3470836 - DNA, 25 bp, Homo sapien
tccacaactaaagcagtacaatagc

SEQ ID NO: 3470837 - DNA, 25 bp, Homo sapien
taatacttctagatatcaaagctaa

SEQ ID NO: 3470838 - DNA, 25 bp, Homo sapien
tatgtatttggtcagttaacagaaa

SEQ ID NO: 3470839 - DNA, 25 bp, Homo sapien
gaattcattctgactttacgctgtg

SEQ ID NO: 3470840 - DNA, 25 bp, Homo sapien
aactatgactgtgtgattgaactga

SEQ ID NO: 3470841 - DNA, 25 bp, Homo sapien
tgatggtgtaccttggcgccactgg

SEQ ID NO: 3470842 - DNA, 25 bp, Homo sapien
gaaaatcctgattgatccagaggtg

SEQ ID NO: 3470843 - DNA, 25 bp, Homo sapien
cgctgttcccggctataatgtctat

SEQ ID NO: 3470844 - DNA, 25 bp, Homo sapien
tctgttatcatagtcatggctccag

SEQ ID NO: 3470845 - DNA, 25 bp, Homo sapien
ggtcagacccatgatcagtgtaacg

SEQ ID NO: 3470846 - DNA, 25 bp, Homo sapien
tagtgtcgagatgagcgccattttc

SEQ ID NO: 3470847 - DNA, 25 bp, Homo sapien
tgagtgacttatacctcaaatggga

SEQ ID NO: 3470848 - DNA, 25 bp, Homo sapien
caactagggtaaagctcaagagcat

SEQ ID NO: 3470849 - DNA, 25 bp, Homo sapien
tagagatattttaacttcctgagtg

SEQ ID NO: 3470850 - DNA, 25 bp, Homo sapien
tatataagaagttaagcaatgcctt

SEQ ID NO: 3470851 - DNA, 25 bp, Homo sapien
tttaactcctagagaccactgaggg

SEQ ID NO: 3470852 - DNA, 25 bp, Homo sapien
cactgagggtaactaaagtactcca

SEQ ID NO: 3470853 - DNA, 25 bp, Homo sapien
aagtactccaagctataatcgaggg

SEQ ID NO: 3470854 - DNA, 25 bp, Homo sapien
agttttcatatggataagataccca

SEQ ID NO: 3470855 - DNA, 25 bp, Homo sapien
ggatccgacccacagataacgttgt

SEQ ID NO: 3470856 - DNA, 25 bp, Homo sapien
tagaagactttatgagacactagca

SEQ ID NO: 3470857 - DNA, 25 bp, Homo sapien
cacaggaaacactatgggagaaact

SEQ ID NO: 3470858 - DNA, 25 bp, Homo sapien
gcactgtggatttccggacctggga

SEQ ID NO: 3470859 - DNA, 25 bp, Homo sapien
gccactgaagctttattcaggcgag

SEQ ID NO: 3470860 - DNA, 25 bp, Homo sapien
gagaaaattgcctactctaagatgg

SEQ ID NO: 3470861 - DNA, 25 bp, Homo sapien
gggaaagtgggcacacacaacataa

SEQ ID NO: 3470862 - DNA, 25 bp, Homo sapien
tcaggcgagtgacagatttacatct

SEQ ID NO: 3470863 - DNA, 25 bp, Homo sapien
taccacaggaagtctttcaagcaga

SEQ ID NO: 3470864 - DNA, 25 bp, Homo sapien
tgtaagatgtatgccaaaacagcac

SEQ ID NO: 3470865 - DNA, 25 bp, Homo sapien
tctgcctaacaaaaacaaggtagtg

SEQ ID NO: 3470866 - DNA, 25 bp, Homo sapien
tttcctgagaaagtagcaaacctga

SEQ ID NO: 3470867 - DNA, 25 bp, Homo sapien
cccgtattcatgagacagctgatca

SEQ ID NO: 3470868 - DNA, 25 bp, Homo sapien
tgagagtccagcgaaacaaaggcag

SEQ ID NO: 3470869 - DNA, 25 bp, Homo sapien
cagcactgaaaagcgataagttgca

SEQ ID NO: 3470870 - DNA, 25 bp, Homo sapien
gagaactctcggagacctgcaggtt

SEQ ID NO: 3470871 - DNA, 25 bp, Homo sapien
gtaaaacaagaccacggatatcagg

SEQ ID NO: 3470872 - DNA, 25 bp, Homo sapien
catgattaccttgcgtgctaccttg

SEQ ID NO: 3470873 - DNA, 25 bp, Homo sapien
aaatgaagtgagtcgcatgattacc

SEQ ID NO: 3470874 - DNA, 25 bp, Homo sapien
ggccaagatggagtaatagggatta

SEQ ID NO: 3470875 - DNA, 25 bp, Homo sapien
tagaagctcttttaatgccacatac

SEQ ID NO: 3470876 - DNA, 25 bp, Homo sapien
caatgcccttgacatgcgaaggcta

SEQ ID NO: 3470877 - DNA, 25 bp, Homo sapien
taagccactttcgtatattcaccca

SEQ ID NO: 3470878 - DNA, 25 bp, Homo sapien
catagcttggagttacacaaggcaa

SEQ ID NO: 3470879 - DNA, 25 bp, Homo sapien
taatgtccactgtagtccaaatgga

SEQ ID NO: 3470880 - DNA, 25 bp, Homo sapien
gatatttaatgctagtggaaaccaa

SEQ ID NO: 3470881 - DNA, 25 bp, Homo sapien
tatatatacacctaacactgagcac

SEQ ID NO: 3470882 - DNA, 25 bp, Homo sapien
caaatattattagggcaaaagaaag

SEQ ID NO: 3470883 - DNA, 25 bp, Homo sapien
ttttggcttggcaatgatgccccag

SEQ ID NO: 3470884 - DNA, 25 bp, Homo sapien
tgccccagtgtctatattgaaacat

SEQ ID NO: 3470885 - DNA, 25 bp, Homo sapien
ccttcctgatatctggaattttggc

SEQ ID NO: 3470886 - DNA, 25 bp, Homo sapien
gcaatgatgccccagtgtctatatt

SEQ ID NO: 3470887 - DNA, 25 bp, Homo sapien
gccaaattcagacaactctatcatt

SEQ ID NO: 3470888 - DNA, 25 bp, Homo sapien
tgcagccaaattcagacaactctat

SEQ ID NO: 3470889 - DNA, 25 bp, Homo sapien
aagagtccagttttaactccatgag

SEQ ID NO: 3470890 - DNA, 25 bp, Homo sapien
ccatgagaaattatgacatcaaact

SEQ ID NO: 3470891 - DNA, 25 bp, Homo sapien
gcttgaatcgattagtagttcgcat

SEQ ID NO: 3470892 - DNA, 25 bp, Homo sapien
caagcttgaatcgattagtagttcg

SEQ ID NO: 3470893 - DNA, 25 bp, Homo sapien
taggtgtcttgataacaagcttgaa

SEQ ID NO: 3470894 - DNA, 25 bp, Homo sapien
tgataacaagcttgaatcgattagt

SEQ ID NO: 3470895 - DNA, 25 bp, Homo sapien
tggtctgggaaggaataaaggatga

SEQ ID NO: 3470896 - DNA, 25 bp, Homo sapien
tgtttacatccctccagtggtctgg

SEQ ID NO: 3470897 - DNA, 25 bp, Homo sapien
aaatgttgatataagggtttattgc

SEQ ID NO: 3470898 - DNA, 25 bp, Homo sapien
gatgacagatcttttggctttaccg

SEQ ID NO: 3470899 - DNA, 25 bp, Homo sapien
cacggccccagtctcgcagccggcg

SEQ ID NO: 3470900 - DNA, 25 bp, Homo sapien
agccacggccccagtctcgcagccg

SEQ ID NO: 3470901 - DNA, 25 bp, Homo sapien
cccagtctcgcagccggcgctggcg

SEQ ID NO: 3470902 - DNA, 25 bp, Homo sapien
tcgcagccggcgctggcgcaggcgc

SEQ ID NO: 3470903 - DNA, 25 bp, Homo sapien
gaaccgtccgtgactcccacctaca

SEQ ID NO: 3470904 - DNA, 25 bp, Homo sapien
gtgactcccacctacaccccgcaac

SEQ ID NO: 3470905 - DNA, 25 bp, Homo sapien
gccaccttcgcggacacctcgggcc

SEQ ID NO: 3470906 - DNA, 25 bp, Homo sapien
ggctgcgccaccttcgcggacacct

SEQ ID NO: 3470907 - DNA, 25 bp, Homo sapien
ccacccagaccatccgctgagccat

SEQ ID NO: 3470908 - DNA, 25 bp, Homo sapien
tataaactgaggctcaacggtggga

SEQ ID NO: 3470909 - DNA, 25 bp, Homo sapien
gactctcactaacagcacgaccttg

SEQ ID NO: 3470910 - DNA, 25 bp, Homo sapien
cactgagattctactccgggacaga

SEQ ID NO: 3470911 - DNA, 25 bp, Homo sapien
taaggctgagtcatctccggagtcc

SEQ ID NO: 3470912 - DNA, 25 bp, Homo sapien
cattctggcctcttttacccaagtt

SEQ ID NO: 3470913 - DNA, 25 bp, Homo sapien
tgttgagatcagagtcagttatcag

SEQ ID NO: 3470914 - DNA, 25 bp, Homo sapien
aataatctggtccttctcaatgtcc

SEQ ID NO: 3470915 - DNA, 25 bp, Homo sapien
gagtcagttatcagacaggccatct

SEQ ID NO: 3470916 - DNA, 25 bp, Homo sapien
cagacaggccatctcaataatctgg

SEQ ID NO: 3470917 - DNA, 25 bp, Homo sapien
taccttaacccatatagacctcaac

SEQ ID NO: 3470918 - DNA, 25 bp, Homo sapien
aagtatgactgtattacatggcatc

SEQ ID NO: 3470919 - DNA, 25 bp, Homo sapien
catgacctagcacattaccttaacc

SEQ ID NO: 3470920 - DNA, 25 bp, Homo sapien
gactgtattacatggcatcacgtac

SEQ ID NO: 3470921 - DNA, 25 bp, Homo sapien
ttaggagcaccttactgagacagcc

SEQ ID NO: 3470922 - DNA, 25 bp, Homo sapien
cacgagtcaccaaatctgatgggag

SEQ ID NO: 3470923 - DNA, 25 bp, Homo sapien
taaagacgcaaacattggcacgagt

SEQ ID NO: 3470924 - DNA, 25 bp, Homo sapien
cactttacgggtgtgcactaacaga

SEQ ID NO: 3470925 - DNA, 25 bp, Homo sapien
taagcctggtactccacaaacgcag

SEQ ID NO: 3470926 - DNA, 25 bp, Homo sapien
tccacaaacgcagtcattaatctag

SEQ ID NO: 3470927 - DNA, 25 bp, Homo sapien
tagaaatacgtcctcacctctttta

SEQ ID NO: 3470928 - DNA, 25 bp, Homo sapien
gggaggataagcctggtactccaca

SEQ ID NO: 3470929 - DNA, 25 bp, Homo sapien
cttcggccaagggtaagttagactg

SEQ ID NO: 3470930 - DNA, 25 bp, Homo sapien
tgtgtgaatacatacccaaatttcc

SEQ ID NO: 3470931 - DNA, 25 bp, Homo sapien
cctacgggtccattaaactgtcagt

SEQ ID NO: 3470932 - DNA, 25 bp, Homo sapien
cagggtacatatcaacctacgggtc

SEQ ID NO: 3470933 - DNA, 25 bp, Homo sapien
tcctggcagttaacagtagctacgg

SEQ ID NO: 3470934 - DNA, 25 bp, Homo sapien
tctccctctgtaagatagtgataat

SEQ ID NO: 3470935 - DNA, 25 bp, Homo sapien
aagtatgagtctctcagataagtcc

SEQ ID NO: 3470936 - DNA, 25 bp, Homo sapien
tagctacggcattaaagcaagtcac

SEQ ID NO: 3470937 - DNA, 25 bp, Homo sapien
tagaacatacgaacatacacacacc

SEQ ID NO: 3470938 - DNA, 25 bp, Homo sapien
tagatgacacagatatctatcaagg

SEQ ID NO: 3470939 - DNA, 25 bp, Homo sapien
catcagtcaccaagaaacaacagga

SEQ ID NO: 3470940 - DNA, 25 bp, Homo sapien
tttcagagggaaagcttaagctgtt

SEQ ID NO: 3470941 - DNA, 25 bp, Homo sapien
aactcatctggttgttttataatca

SEQ ID NO: 3470942 - DNA, 25 bp, Homo sapien
catgctgtccagcaactcatctggt

SEQ ID NO: 3470943 - DNA, 25 bp, Homo sapien
tacaccaatctgacatgctgtccag

SEQ ID NO: 3470944 - DNA, 25 bp, Homo sapien
tgctccttacaccaatctgacatgc

SEQ ID NO: 3470945 - DNA, 25 bp, Homo sapien
gcagcaatcctgttatttggtaatg

SEQ ID NO: 3470946 - DNA, 25 bp, Homo sapien
aaagcttgctactgatccccaaagc

SEQ ID NO: 3470947 - DNA, 25 bp, Homo sapien
tcggattcaggtgtgggagcaaaaa

SEQ ID NO: 3470948 - DNA, 25 bp, Homo sapien
tccaacaatggtatcggattcaggt

SEQ ID NO: 3470949 - DNA, 25 bp, Homo sapien
gaagatgatctcgagaggtcccaaa

SEQ ID NO: 3470950 - DNA, 25 bp, Homo sapien
gcaatcttctctaagcctttttaaa

SEQ ID NO: 3470951 - DNA, 25 bp, Homo sapien
caggcttgccatgcaatcttctcta

SEQ ID NO: 3470952 - DNA, 25 bp, Homo sapien
cgagaggtcccaaagatgaaaagta

SEQ ID NO: 3470953 - DNA, 25 bp, Homo sapien
tacttgacaatccacaatgcgttcg

SEQ ID NO: 3470954 - DNA, 25 bp, Homo sapien
gacaatccacaatgcgttcgcgaca

SEQ ID NO: 3470955 - DNA, 25 bp, Homo sapien
gagtaatacttgacaatccacaatg

SEQ ID NO: 3470956 - DNA, 25 bp, Homo sapien
taatacttgacaatccacaatgcgt

SEQ ID NO: 3470957 - DNA, 25 bp, Homo sapien
tccacagtcaaaaaagacggtgttc

SEQ ID NO: 3470958 - DNA, 25 bp, Homo sapien
aagtccaaggatattaacctctggg

SEQ ID NO: 3470959 - DNA, 25 bp, Homo sapien
gctcaagttcaaattgcaactgcca

SEQ ID NO: 3470960 - DNA, 25 bp, Homo sapien
gccaacttagttatgatcctgactg

SEQ ID NO: 3470961 - DNA, 25 bp, Homo sapien
ctgcaatgtaattgtactctccttc

SEQ ID NO: 3470962 - DNA, 25 bp, Homo sapien
gcaatgtaattgtactctccttcac

SEQ ID NO: 3470963 - DNA, 25 bp, Homo sapien
atgtaattgtactctccttcactgc

SEQ ID NO: 3470964 - DNA, 25 bp, Homo sapien
aatgtaattgtactctccttcactg

SEQ ID NO: 3470965 - DNA, 25 bp, Homo sapien
ggagtctgctgtcgtacaaaggaca

SEQ ID NO: 3470966 - DNA, 25 bp, Homo sapien
gaggagtctgctgtcgtacaaagga

SEQ ID NO: 3470967 - DNA, 25 bp, Homo sapien
tctgctgtcgtacaaaggacagaaa

SEQ ID NO: 3470968 - DNA, 25 bp, Homo sapien
tggaggagtctgctgtcgtacaaag

SEQ ID NO: 3470969 - DNA, 25 bp, Homo sapien
gggcattttcccaatactcatgcta

SEQ ID NO: 3470970 - DNA, 25 bp, Homo sapien
cagaaaagttaagatgtgtaaccca

SEQ ID NO: 3470971 - DNA, 25 bp, Homo sapien
tctggaactgcagtctcttgaacca

SEQ ID NO: 3470972 - DNA, 25 bp, Homo sapien
tgggctcggctagtctttctggaac

SEQ ID NO: 3470973 - DNA, 25 bp, Homo sapien
aaatgcacgagccttgactgaatcc

SEQ ID NO: 3470974 - DNA, 25 bp, Homo sapien
tggctggcggaaacatttacacaat

SEQ ID NO: 3470975 - DNA, 25 bp, Homo sapien
taaaacagatatcagccacattggc

SEQ ID NO: 3470976 - DNA, 25 bp, Homo sapien
gaatgaagtgtcctgatgcctgcaa

SEQ ID NO: 3470977 - DNA, 25 bp, Homo sapien
acagttctttaacagtgctcacatc

SEQ ID NO: 3470978 - DNA, 25 bp, Homo sapien
tgctcacatcaattattctataatg

SEQ ID NO: 3470979 - DNA, 25 bp, Homo sapien
gcatgtatttgtcaagaaacttctt

SEQ ID NO: 3470980 - DNA, 25 bp, Homo sapien
gaactggggcatgtatttgtcaaga

SEQ ID NO: 3470981 - DNA, 25 bp, Homo sapien
caggcattggcttatttactgggaa

SEQ ID NO: 3470982 - DNA, 25 bp, Homo sapien
gttaaggtcctatacaagcaagaat

SEQ ID NO: 3470983 - DNA, 25 bp, Homo sapien
acatgtctgacgttgttgctcccaa

SEQ ID NO: 3470984 - DNA, 25 bp, Homo sapien
ggaagatatgaacccacttggtagc

SEQ ID NO: 3470985 - DNA, 25 bp, Homo sapien
cactgagtgtctgtcaactgaccct

SEQ ID NO: 3470986 - DNA, 25 bp, Homo sapien
tccaccaaagctgctcaaactacaa

SEQ ID NO: 3470987 - DNA, 25 bp, Homo sapien
tgtcatggatatgcaactgcccact

SEQ ID NO: 3470988 - DNA, 25 bp, Homo sapien
catcagtgtgtaagattgctaaatc

SEQ ID NO: 3470989 - DNA, 25 bp, Homo sapien
gcagaaatggaactctcaaaggaag

SEQ ID NO: 3470990 - DNA, 25 bp, Homo sapien
aatggaactctcaaaggaagctgtc

SEQ ID NO: 3470991 - DNA, 25 bp, Homo sapien
gaactctcaaaggaagctgtctcaa

SEQ ID NO: 3470992 - DNA, 25 bp, Homo sapien
acagcagaaatggaactctcaaagg

SEQ ID NO: 3470993 - DNA, 25 bp, Homo sapien
cttctttggtgcaaattcatattct

SEQ ID NO: 3470994 - DNA, 25 bp, Homo sapien
agagttaagggacattatttcaagc

SEQ ID NO: 3470995 - DNA, 25 bp, Homo sapien
tgtgtcagactggaaaacgcttggt

SEQ ID NO: 3470996 - DNA, 25 bp, Homo sapien
ggctatataaccctctcagaatgga

SEQ ID NO: 3470997 - DNA, 25 bp, Homo sapien
ctggaatcctgaccagaattcctaa

SEQ ID NO: 3470998 - DNA, 25 bp, Homo sapien
gatatatgtcagagccgaagctgcc

SEQ ID NO: 3470999 - DNA, 25 bp, Homo sapien
taaactctgaatcatgggccaaggg

SEQ ID NO: 3471000 - DNA, 25 bp, Homo sapien
tgtgctataatcagtggcagcctgc

SEQ ID NO: 3471001 - DNA, 25 bp, Homo sapien
ttgtgtggctaaggcaaccatctgc

SEQ ID NO: 3471002 - DNA, 25 bp, Homo sapien
gatgatgtccctcaacaaaacagac

SEQ ID NO: 3471003 - DNA, 25 bp, Homo sapien
gatggcgacatgttccacagggaga

SEQ ID NO: 3471004 - DNA, 25 bp, Homo sapien
gaatgaactgtccaaaaccaggaga

SEQ ID NO: 3471005 - DNA, 25 bp, Homo sapien
taagtgtcactgtctagcatcatca

SEQ ID NO: 3471006 - DNA, 25 bp, Homo sapien
tgaagatgttatttcggtaaaactg

SEQ ID NO: 3471007 - DNA, 25 bp, Homo sapien
tgttatttcggtaaaactgaagctc

SEQ ID NO: 3471008 - DNA, 25 bp, Homo sapien
gatgttatttcggtaaaactgaagc

SEQ ID NO: 3471009 - DNA, 25 bp, Homo sapien
gaagatgttatttcggtaaaactga

SEQ ID NO: 3471010 - DNA, 25 bp, Homo sapien
caagttaaccgaaggtgctctgcca

SEQ ID NO: 3471011 - DNA, 25 bp, Homo sapien
gctctgccaagccatcagcgtgaga

SEQ ID NO: 3471012 - DNA, 25 bp, Homo sapien
cagaagttgcctccagataacgatg

SEQ ID NO: 3471013 - DNA, 25 bp, Homo sapien
gcaaatgcatatatgtaccaaggga

SEQ ID NO: 3471014 - DNA, 25 bp, Homo sapien
ccactgaagttggtgcataagctaa

SEQ ID NO: 3471015 - DNA, 25 bp, Homo sapien
taagctaaaacccatgccattccag

SEQ ID NO: 3471016 - DNA, 25 bp, Homo sapien
gattctattgcacactctggctagg

SEQ ID NO: 3471017 - DNA, 25 bp, Homo sapien
tgtcagaatgaggtgcacaaagcaa

SEQ ID NO: 3471018 - DNA, 25 bp, Homo sapien
gccaaagtcactcagtatgtcaggg

SEQ ID NO: 3471019 - DNA, 25 bp, Homo sapien
tatcattacacgatgctcactgtgc

SEQ ID NO: 3471020 - DNA, 25 bp, Homo sapien
gagtttgattcaagagccctgttct

SEQ ID NO: 3471021 - DNA, 25 bp, Homo sapien
ctgtgctgagctcagaactgtatga

SEQ ID NO: 3471022 - DNA, 25 bp, Homo sapien
gttgttccattgcatgactctaata

SEQ ID NO: 3471023 - DNA, 25 bp, Homo sapien
ccaagagcttggatgaagttgttcc

SEQ ID NO: 3471024 - DNA, 25 bp, Homo sapien
gactctaataggtaggtagttactg

SEQ ID NO: 3471025 - DNA, 25 bp, Homo sapien
gttactggagtctgtcctcagatcc

SEQ ID NO: 3471026 - DNA, 25 bp, Homo sapien
ctagcgtgagaagcttcctttcttc

SEQ ID NO: 3471027 - DNA, 25 bp, Homo sapien
actctaggaactgtgcaatggccac

SEQ ID NO: 3471028 - DNA, 25 bp, Homo sapien
gtgcgtgcttttacatgggtgacac

SEQ ID NO: 3471029 - DNA, 25 bp, Homo sapien
ctccttgcactctaggaactgtgca

SEQ ID NO: 3471030 - DNA, 25 bp, Homo sapien
gacaccgatgcagaactgttggtct

SEQ ID NO: 3471031 - DNA, 25 bp, Homo sapien
accagcactcaggggattgtaggca

SEQ ID NO: 3471032 - DNA, 25 bp, Homo sapien
gagcatgcttagaataccagagggt

SEQ ID NO: 3471033 - DNA, 25 bp, Homo sapien
tcaggggattgtaggcactgttcag

SEQ ID NO: 3471034 - DNA, 25 bp, Homo sapien
agcatgcttagaataccagagggtg

SEQ ID NO: 3471035 - DNA, 25 bp, Homo sapien
tttggtgagcagatcaagagctgac

SEQ ID NO: 3471036 - DNA, 25 bp, Homo sapien
tggtgagcagatcaagagctgacct

SEQ ID NO: 3471037 - DNA, 25 bp, Homo sapien
ctttggtgagcagatcaagagctga

SEQ ID NO: 3471038 - DNA, 25 bp, Homo sapien
ttggtgagcagatcaagagctgacc

SEQ ID NO: 3471039 - DNA, 25 bp, Homo sapien
tcacacaccagataccagtggtctg

SEQ ID NO: 3471040 - DNA, 25 bp, Homo sapien
gctgaagtcacacaccagataccag

SEQ ID NO: 3471041 - DNA, 25 bp, Homo sapien
caccagataccagtggtctgaaaga

SEQ ID NO: 3471042 - DNA, 25 bp, Homo sapien
gaagtcacacaccagataccagtgg

SEQ ID NO: 3471043 - DNA, 25 bp, Homo sapien
caatgggagagaattcgacgttacc

SEQ ID NO: 3471044 - DNA, 25 bp, Homo sapien
ccaataatgatgacgctgagtgacc

SEQ ID NO: 3471045 - DNA, 25 bp, Homo sapien
gagtgacctcaagtgtataccaata

SEQ ID NO: 3471046 - DNA, 25 bp, Homo sapien
gatgttttgaaccacagtatctcgc

SEQ ID NO: 3471047 - DNA, 25 bp, Homo sapien
agttcaccatgcttcatccaagttg

SEQ ID NO: 3471048 - DNA, 25 bp, Homo sapien
taagcaaacacttactagggcccta

SEQ ID NO: 3471049 - DNA, 25 bp, Homo sapien
taagttatttgctaccacaaggcca

SEQ ID NO: 3471050 - DNA, 25 bp, Homo sapien
tattagagcctagtgtatccccttt

SEQ ID NO: 3471051 - DNA, 25 bp, Homo sapien
gatatctatccctgattcatcatta

SEQ ID NO: 3471052 - DNA, 25 bp, Homo sapien
gtctctgagttgaccagttggccca

SEQ ID NO: 3471053 - DNA, 25 bp, Homo sapien
agttggcccatcaccctcaatgata

SEQ ID NO: 3471054 - DNA, 25 bp, Homo sapien
taaaatttaggcaccaactgagatg

SEQ ID NO: 3471055 - DNA, 25 bp, Homo sapien
gacgtgcttggcagatgaacataca

SEQ ID NO: 3471056 - DNA, 25 bp, Homo sapien
tcctgaacctagaggtggacgtgct

SEQ ID NO: 3471057 - DNA, 25 bp, Homo sapien
actgtctcataaaatggcggcacca

SEQ ID NO: 3471058 - DNA, 25 bp, Homo sapien
ccaactaactgtctgatatggctga

SEQ ID NO: 3471059 - DNA, 25 bp, Homo sapien
acactgtgaacccaatataggaact

SEQ ID NO: 3471060 - DNA, 25 bp, Homo sapien
tgtgaacccaatataggaactagaa

SEQ ID NO: 3471061 - DNA, 25 bp, Homo sapien
tgaacccaatataggaactagaaaa

SEQ ID NO: 3471062 - DNA, 25 bp, Homo sapien
actgtgaacccaatataggaactag

SEQ ID NO: 3471063 - DNA, 25 bp, Homo sapien
tattgactatgtgggctaactccag

SEQ ID NO: 3471064 - DNA, 25 bp, Homo sapien
ggtagtagccatccttgacaagttc

SEQ ID NO: 3471065 - DNA, 25 bp, Homo sapien
gttgtctgtagataccccttgccag

SEQ ID NO: 3471066 - DNA, 25 bp, Homo sapien
cctcagtcttgggaatgctatgaac

SEQ ID NO: 3471067 - DNA, 25 bp, Homo sapien
caattctgcaatcggggccacatca

SEQ ID NO: 3471068 - DNA, 25 bp, Homo sapien
gcaaggatcagagctcacatgcttc

SEQ ID NO: 3471069 - DNA, 25 bp, Homo sapien
ggcaaggatcagagctcacatgctt

SEQ ID NO: 3471070 - DNA, 25 bp, Homo sapien
ccaactcaattctgcaatcggggcc

SEQ ID NO: 3471071 - DNA, 25 bp, Homo sapien
atagatgtgttatttgtggacttac

SEQ ID NO: 3471072 - DNA, 25 bp, Homo sapien
aaacaatgtacttaggaactcctgg

SEQ ID NO: 3471073 - DNA, 25 bp, Homo sapien
ggattgcctgataaagtatgcacag

SEQ ID NO: 3471074 - DNA, 25 bp, Homo sapien
tcaaaaatgtggaacgaactggatt

SEQ ID NO: 3471075 - DNA, 25 bp, Homo sapien
tggaggcttacatatttcctaggcc

SEQ ID NO: 3471076 - DNA, 25 bp, Homo sapien
taagaaacatcctaacaagaaatgc

SEQ ID NO: 3471077 - DNA, 25 bp, Homo sapien
tagatctcaacagtaatcacttaag

SEQ ID NO: 3471078 - DNA, 25 bp, Homo sapien
acctgtacagcatttatcgtattga

SEQ ID NO: 3471079 - DNA, 25 bp, Homo sapien
catcaagcaatgttgttgttgtaca

SEQ ID NO: 3471080 - DNA, 25 bp, Homo sapien
aaaacccaatcatcatgattctgaa

SEQ ID NO: 3471081 - DNA, 25 bp, Homo sapien
atcatgattctgaactacaaaagga

SEQ ID NO: 3471082 - DNA, 25 bp, Homo sapien
caatcatcatgattctgaactacaa

SEQ ID NO: 3471083 - DNA, 25 bp, Homo sapien
aacccaatcatcatgattctgaact

SEQ ID NO: 3471084 - DNA, 25 bp, Homo sapien
gaactggtatggtcttttgcaggag

SEQ ID NO: 3471085 - DNA, 25 bp, Homo sapien
cccataggatgtgacccatcttcag

SEQ ID NO: 3471086 - DNA, 25 bp, Homo sapien
tgagtctcgcaacccagtggagcta

SEQ ID NO: 3471087 - DNA, 25 bp, Homo sapien
gagtgtctgcaaagaatcccatagg

SEQ ID NO: 3471088 - DNA, 25 bp, Homo sapien
tatgagtcacgcagattcagtgagg

SEQ ID NO: 3471089 - DNA, 25 bp, Homo sapien
gcaaattatgagtcacgcagattca

SEQ ID NO: 3471090 - DNA, 25 bp, Homo sapien
aacacccctatcgtagtagtaacag

SEQ ID NO: 3471091 - DNA, 25 bp, Homo sapien
gattccttgggtgggcttgtccata

SEQ ID NO: 3471092 - DNA, 25 bp, Homo sapien
gctttgtgagggtgatgggtttcca

SEQ ID NO: 3471093 - DNA, 25 bp, Homo sapien
ctttgtgagggtgatgggtttccat

SEQ ID NO: 3471094 - DNA, 25 bp, Homo sapien
tgcatccgcttgctgtgctcagaca

SEQ ID NO: 3471095 - DNA, 25 bp, Homo sapien
aaatgctggacagtcctcactaacg

SEQ ID NO: 3471096 - DNA, 25 bp, Homo sapien
caaggtggcccagattgtatcatta

SEQ ID NO: 3471097 - DNA, 25 bp, Homo sapien
cagaagtcaaacaggccatcaaatg

SEQ ID NO: 3471098 - DNA, 25 bp, Homo sapien
tcatggtgaatatcaacgtcaacat

SEQ ID NO: 3471099 - DNA, 25 bp, Homo sapien
catcatcatggtgaatatcaacgtc

SEQ ID NO: 3471100 - DNA, 25 bp, Homo sapien
catggtgaatatcaacgtcaacata

SEQ ID NO: 3471101 - DNA, 25 bp, Homo sapien
catcatggtgaatatcaacgtcaac

SEQ ID NO: 3471102 - DNA, 25 bp, Homo sapien
tccatatttatgaaaggacacagtc

SEQ ID NO: 3471103 - DNA, 25 bp, Homo sapien
agtactctccatatttatgaaagga

SEQ ID NO: 3471104 - DNA, 25 bp, Homo sapien
ctgggaagtactctccatatttatg

SEQ ID NO: 3471105 - DNA, 25 bp, Homo sapien
gggaagtactctccatatttatgaa

SEQ ID NO: 3471106 - DNA, 25 bp, Homo sapien
cttggcatgccctttgatgatcaga

SEQ ID NO: 3471107 - DNA, 25 bp, Homo sapien
tctaagtgacccctagacaaggcat

SEQ ID NO: 3471108 - DNA, 25 bp, Homo sapien
taggcaggttgacactcttgacaga

SEQ ID NO: 3471109 - DNA, 25 bp, Homo sapien
tgtaagatcaccacactagacagga

SEQ ID NO: 3471110 - DNA, 25 bp, Homo sapien
tcagaatcacctgcatttggactgc

SEQ ID NO: 3471111 - DNA, 25 bp, Homo sapien
gatgggcctgcattactaggttctc

SEQ ID NO: 3471112 - DNA, 25 bp, Homo sapien
tgggagagatcttgcagccacgctc

SEQ ID NO: 3471113 - DNA, 25 bp, Homo sapien
tcagagaaacggatggagatgagct

SEQ ID NO: 3471114 - DNA, 25 bp, Homo sapien
accgggtaacagtagctacccatga

SEQ ID NO: 3471115 - DNA, 25 bp, Homo sapien
taatggtggctacccatgaggcaat

SEQ ID NO: 3471116 - DNA, 25 bp, Homo sapien
cacgaggcagtacttatccattggg

SEQ ID NO: 3471117 - DNA, 25 bp, Homo sapien
taacagtagctacccatgaggcaac

SEQ ID NO: 3471118 - DNA, 25 bp, Homo sapien
tgggtaacactggttacgcaggagg

SEQ ID NO: 3471119 - DNA, 25 bp, Homo sapien
taacatttagtatccactgggtaac

SEQ ID NO: 3471120 - DNA, 25 bp, Homo sapien
cagtagttacccacaaggtaacatt

SEQ ID NO: 3471121 - DNA, 25 bp, Homo sapien
gaggcaacacttatccagtgggtaa

SEQ ID NO: 3471122 - DNA, 25 bp, Homo sapien
ccacgaggcaaaacttagtatccgg

SEQ ID NO: 3471123 - DNA, 25 bp, Homo sapien
cgaggcatctcttattatccacagg

SEQ ID NO: 3471124 - DNA, 25 bp, Homo sapien
taacagcggttacccgtgaggcaat

SEQ ID NO: 3471125 - DNA, 25 bp, Homo sapien
acagtgcttttccacgagagaatac

SEQ ID NO: 3471126 - DNA, 25 bp, Homo sapien
cagtggttacccataagtcgataca

SEQ ID NO: 3471127 - DNA, 25 bp, Homo sapien
ggcaatatttatcatccaccaggta

SEQ ID NO: 3471128 - DNA, 25 bp, Homo sapien
gcaatatttatcatccaccaggtaa

SEQ ID NO: 3471129 - DNA, 25 bp, Homo sapien
aggcaatatttatcatccaccaggt

SEQ ID NO: 3471130 - DNA, 25 bp, Homo sapien
aatatttatcatccaccaggtaaca

SEQ ID NO: 3471131 - DNA, 25 bp, Homo sapien
tggtttcccacgaggcgacacttaa

SEQ ID NO: 3471132 - DNA, 25 bp, Homo sapien
cttattatccatcgggtaaccgtgc

SEQ ID NO: 3471133 - DNA, 25 bp, Homo sapien
gcagcagattacagtggttacccat

SEQ ID NO: 3471134 - DNA, 25 bp, Homo sapien
gacacttaatatccaccgggtcaca

SEQ ID NO: 3471135 - DNA, 25 bp, Homo sapien
acttattatccaccaggtaacagtg

SEQ ID NO: 3471136 - DNA, 25 bp, Homo sapien
aggcaacacttatcctccactgggt

SEQ ID NO: 3471137 - DNA, 25 bp, Homo sapien
gaggcaacacttatcctccactggg

SEQ ID NO: 3471138 - DNA, 25 bp, Homo sapien
ggcaacacttatcctccactgggta

SEQ ID NO: 3471139 - DNA, 25 bp, Homo sapien
ccacgaggcaattcttgttatccat

SEQ ID NO: 3471140 - DNA, 25 bp, Homo sapien
ataacagtggttaccccagaggtcg

SEQ ID NO: 3471141 - DNA, 25 bp, Homo sapien
tgaagcaacacttattatccaccgg

SEQ ID NO: 3471142 - DNA, 25 bp, Homo sapien
acagtggttacccatgaagcaacac

SEQ ID NO: 3471143 - DNA, 25 bp, Homo sapien
ccccagaggtcgttcttattatcca

SEQ ID NO: 3471144 - DNA, 25 bp, Homo sapien
tccacaaggtgacagtggttactca

SEQ ID NO: 3471145 - DNA, 25 bp, Homo sapien
tatccacaaggtgacagtggttact

SEQ ID NO: 3471146 - DNA, 25 bp, Homo sapien
atccacaaggtgacagtggttactc

SEQ ID NO: 3471147 - DNA, 25 bp, Homo sapien
ggtagaagtggttgcccatgaggca

SEQ ID NO: 3471148 - DNA, 25 bp, Homo sapien
atacttattatccatgtggtagaag

SEQ ID NO: 3471149 - DNA, 25 bp, Homo sapien
taactgtggttacgcatgaggcaac

SEQ ID NO: 3471150 - DNA, 25 bp, Homo sapien
gcaactcgtattacccactgggaaa

SEQ ID NO: 3471151 - DNA, 25 bp, Homo sapien
gctggtttacagcactgataatctc

SEQ ID NO: 3471152 - DNA, 25 bp, Homo sapien
caggacacttgtgctggtttacagc

SEQ ID NO: 3471153 - DNA, 25 bp, Homo sapien
cttctcctttcaggacacttgtgct

SEQ ID NO: 3471154 - DNA, 25 bp, Homo sapien
cagcactgataatctccaatctcat

SEQ ID NO: 3471155 - DNA, 25 bp, Homo sapien
cagacattggcaggctacaagagca

SEQ ID NO: 3471156 - DNA, 25 bp, Homo sapien
agacattggcaggctacaagagcag

SEQ ID NO: 3471157 - DNA, 25 bp, Homo sapien
ccagacattggcaggctacaagagc

SEQ ID NO: 3471158 - DNA, 25 bp, Homo sapien
gacattggcaggctacaagagcagc

SEQ ID NO: 3471159 - DNA, 25 bp, Homo sapien
tgtggcattgctgtgtggtaagtct

SEQ ID NO: 3471160 - DNA, 25 bp, Homo sapien
cattcagcagtatggatatatccca

SEQ ID NO: 3471161 - DNA, 25 bp, Homo sapien
cagcttgtttaattagtcgaaggac

SEQ ID NO: 3471162 - DNA, 25 bp, Homo sapien
tcagcaatgtgccaaagttgacctt

SEQ ID NO: 3471163 - DNA, 25 bp, Homo sapien
aaagctgacatcctatttgtggcca

SEQ ID NO: 3471164 - DNA, 25 bp, Homo sapien
gccacagcgtgccagctggaatcat

SEQ ID NO: 3471165 - DNA, 25 bp, Homo sapien
cagagactctccttgattaaagcag

SEQ ID NO: 3471166 - DNA, 25 bp, Homo sapien
ccctatgagcttcattgatcaaaag

SEQ ID NO: 3471167 - DNA, 25 bp, Homo sapien
ctatggatgagtattttctccacca

SEQ ID NO: 3471168 - DNA, 25 bp, Homo sapien
tatggatgagtattttctccaccat

SEQ ID NO: 3471169 - DNA, 25 bp, Homo sapien
tataagaaaggacaggagaaataat

SEQ ID NO: 3471170 - DNA, 25 bp, Homo sapien
ctataagaaaggacaggagaaataa

SEQ ID NO: 3471171 - DNA, 25 bp, Homo sapien
catcagcagtaattttcgagctatg

SEQ ID NO: 3471172 - DNA, 25 bp, Homo sapien
agccaagtaaatgatccagaaaatt

SEQ ID NO: 3471173 - DNA, 25 bp, Homo sapien
taattttcgagctatggcatttgga

SEQ ID NO: 3471174 - DNA, 25 bp, Homo sapien
ctttgtgtggtcttttgaagccaag

SEQ ID NO: 3471175 - DNA, 25 bp, Homo sapien
tatggttttccaagttgaacgagaa

SEQ ID NO: 3471176 - DNA, 25 bp, Homo sapien
ccataatgtcctttattctaagttc

SEQ ID NO: 3471177 - DNA, 25 bp, Homo sapien
tggtgtttcagagtgtgaatatttt

SEQ ID NO: 3471178 - DNA, 25 bp, Homo sapien
tattctaagttcagtctcttttggt

SEQ ID NO: 3471179 - DNA, 25 bp, Homo sapien
gaagcacctgccattagtgctgtgg

SEQ ID NO: 3471180 - DNA, 25 bp, Homo sapien
caggccagtgaagatgatcctatca

SEQ ID NO: 3471181 - DNA, 25 bp, Homo sapien
acattggagcttctgttggcaaaca

SEQ ID NO: 3471182 - DNA, 25 bp, Homo sapien
tggtcatgtgggtcaaggcctcaca

SEQ ID NO: 3471183 - DNA, 25 bp, Homo sapien
atggtatgacctcaatgggggtaaa

SEQ ID NO: 3471184 - DNA, 25 bp, Homo sapien
tcaatgggggtaaagttcttcatca

SEQ ID NO: 3471185 - DNA, 25 bp, Homo sapien
catcatttcaactcctatgttggac

SEQ ID NO: 3471186 - DNA, 25 bp, Homo sapien
tatgacctcaatgggggtaaagttc

SEQ ID NO: 3471187 - DNA, 25 bp, Homo sapien
agtagtaaatccactgatgcagtgt

SEQ ID NO: 3471188 - DNA, 25 bp, Homo sapien
tttttgtaagtagtaaatccactga

SEQ ID NO: 3471189 - DNA, 25 bp, Homo sapien
tttctttccaagcagtcatttatat

SEQ ID NO: 3471190 - DNA, 25 bp, Homo sapien
tgtaagtagtaaatccactgatgca

SEQ ID NO: 3471191 - DNA, 25 bp, Homo sapien
catgtgttttaaagatcccagctcc

SEQ ID NO: 3471192 - DNA, 25 bp, Homo sapien
gaacatgtgttttaaagatcccagc

SEQ ID NO: 3471193 - DNA, 25 bp, Homo sapien
tccactgaatcaaaatatgtctttc

SEQ ID NO: 3471194 - DNA, 25 bp, Homo sapien
aagaacatgtgttttaaagatccca

SEQ ID NO: 3471195 - DNA, 25 bp, Homo sapien
gaatcacataatccggtggatgggc

SEQ ID NO: 3471196 - DNA, 25 bp, Homo sapien
gctacctggtcaatttcccgtggga

SEQ ID NO: 3471197 - DNA, 25 bp, Homo sapien
tccgggcttcgcaagaatagacgtt

SEQ ID NO: 3471198 - DNA, 25 bp, Homo sapien
gatggccctacggatgaaaatgttg

SEQ ID NO: 3471199 - DNA, 25 bp, Homo sapien
cattaaactatcttcgctgtatatg

SEQ ID NO: 3471200 - DNA, 25 bp, Homo sapien
tcttcgctgtatatgtgagatcatc

SEQ ID NO: 3471201 - DNA, 25 bp, Homo sapien
gagatcatctatagaaagtggctag

SEQ ID NO: 3471202 - DNA, 25 bp, Homo sapien
cctcaaaacttggattgcattaaac

SEQ ID NO: 3471203 - DNA, 25 bp, Homo sapien
ggcgctgcacactggtgatcccagc

SEQ ID NO: 3471204 - DNA, 25 bp, Homo sapien
tcagcactggagacatgcctttaaa

SEQ ID NO: 3471205 - DNA, 25 bp, Homo sapien
gaagactgctattatgatcccacta

SEQ ID NO: 3471206 - DNA, 25 bp, Homo sapien
tactggaatctagagaacaactggt

SEQ ID NO: 3471207 - DNA, 25 bp, Homo sapien
tacaatggcggttgccatgggccaa

SEQ ID NO: 3471208 - DNA, 25 bp, Homo sapien
gtgttggttttgtgtgctgaaactt

SEQ ID NO: 3471209 - DNA, 25 bp, Homo sapien
gagtgttggttttgtgtgctgaaac

SEQ ID NO: 3471210 - DNA, 25 bp, Homo sapien
gttggttttgtgtgctgaaactttg

SEQ ID NO: 3471211 - DNA, 25 bp, Homo sapien
agtgttggttttgtgtgctgaaact

SEQ ID NO: 3471212 - DNA, 25 bp, Homo sapien
gccaagaaattactgtcctaaatcc

SEQ ID NO: 3471213 - DNA, 25 bp, Homo sapien
tcatagccaagaaattactgtccta

SEQ ID NO: 3471214 - DNA, 25 bp, Homo sapien
gttttctatggctatgcagaagttt

SEQ ID NO: 3471215 - DNA, 25 bp, Homo sapien
caattatttcttcccatactgttgg

SEQ ID NO: 3471216 - DNA, 25 bp, Homo sapien
tgaatacatcataggagtggaatcc

SEQ ID NO: 3471217 - DNA, 25 bp, Homo sapien
tattcacatggttgcaacagatctc

SEQ ID NO: 3471218 - DNA, 25 bp, Homo sapien
tggtaacaaaacaacattatcctct

SEQ ID NO: 3471219 - DNA, 25 bp, Homo sapien
tactaaggttgcatggtttttcact

SEQ ID NO: 3471220 - DNA, 25 bp, Homo sapien
gacctctgagtgggaccttctctaa

SEQ ID NO: 3471221 - DNA, 25 bp, Homo sapien
tctgagtgggaccttctctaacaca

SEQ ID NO: 3471222 - DNA, 25 bp, Homo sapien
ccaaaatgttggtttgcaaatagct

SEQ ID NO: 3471223 - DNA, 25 bp, Homo sapien
taataaaggccacaaaattgcctgc

SEQ ID NO: 3471224 - DNA, 25 bp, Homo sapien
ccacaaaattgcctgctttcccaaa

SEQ ID NO: 3471225 - DNA, 25 bp, Homo sapien
ttcatagctgaacgtactgctctcc

SEQ ID NO: 3471226 - DNA, 25 bp, Homo sapien
ctctgaataaggacctttggggact

SEQ ID NO: 3471227 - DNA, 25 bp, Homo sapien
ttatatttccctgcattcgttgcca

SEQ ID NO: 3471228 - DNA, 25 bp, Homo sapien
tgaataaggacctttggggactgaa

SEQ ID NO: 3471229 - DNA, 25 bp, Homo sapien
tgttatatttccctgcattcgttgc

SEQ ID NO: 3471230 - DNA, 25 bp, Homo sapien
aaagtacccaaacacactagtactg

SEQ ID NO: 3471231 - DNA, 25 bp, Homo sapien
acatcccctggatcgcccttaggct

SEQ ID NO: 3471232 - DNA, 25 bp, Homo sapien
acacactagtactgccactcctcag

SEQ ID NO: 3471233 - DNA, 25 bp, Homo sapien
taggctcaaacaataccttcctaaa

SEQ ID NO: 3471234 - DNA, 25 bp, Homo sapien
tatctcctatggctggcggctggaa

SEQ ID NO: 3471235 - DNA, 25 bp, Homo sapien
tatctgtccacaggctaagatcttt

SEQ ID NO: 3471236 - DNA, 25 bp, Homo sapien
cagtgctaaagacccagcccttagg

SEQ ID NO: 3471237 - DNA, 25 bp, Homo sapien
tggctggaacgcctgcaggtatctc

SEQ ID NO: 3471238 - DNA, 25 bp, Homo sapien
tatgaactctgctagcttgctccgt

SEQ ID NO: 3471239 - DNA, 25 bp, Homo sapien
tgagacgcgaaatccacacaaaggt

SEQ ID NO: 3471240 - DNA, 25 bp, Homo sapien
cctggatttccattgggcagcagct

SEQ ID NO: 3471241 - DNA, 25 bp, Homo sapien
tccgttgtctttgtgagtgagacgc

SEQ ID NO: 3471242 - DNA, 25 bp, Homo sapien
tgccttccccttggagatacgcctc

SEQ ID NO: 3471243 - DNA, 25 bp, Homo sapien
ggtgtcttcgctgtcactcaaattg

SEQ ID NO: 3471244 - DNA, 25 bp, Homo sapien
aattgtggaatagagctcttagcat

SEQ ID NO: 3471245 - DNA, 25 bp, Homo sapien
gaagcagtaatttgacaagaggtgt

SEQ ID NO: 3471246 - DNA, 25 bp, Homo sapien
caagcctggttctccagcttggatt

SEQ ID NO: 3471247 - DNA, 25 bp, Homo sapien
tcaagcctggttctccagcttggat

SEQ ID NO: 3471248 - DNA, 25 bp, Homo sapien
cagaccaggtttaagccctgaaact

SEQ ID NO: 3471249 - DNA, 25 bp, Homo sapien
tggaaatttcttaggtttttgctca

SEQ ID NO: 3471250 - DNA, 25 bp, Homo sapien
taggtttttgctcaaaagctggcat

SEQ ID NO: 3471251 - DNA, 25 bp, Homo sapien
aggtttaagccctgaaactttgctg

SEQ ID NO: 3471252 - DNA, 25 bp, Homo sapien
gccataagcaaacctgagcaagcct

SEQ ID NO: 3471253 - DNA, 25 bp, Homo sapien
ctgccataagcaaacctgagcaagc

SEQ ID NO: 3471254 - DNA, 25 bp, Homo sapien
taagcaaacctgagcaagcctcagc

SEQ ID NO: 3471255 - DNA, 25 bp, Homo sapien
cataagcaaacctgagcaagcctca

SEQ ID NO: 3471256 - DNA, 25 bp, Homo sapien
cttggagcttggagatgcgatggtt

SEQ ID NO: 3471257 - DNA, 25 bp, Homo sapien
gagcttggagatgcgatggttttca

SEQ ID NO: 3471258 - DNA, 25 bp, Homo sapien
tggagcttggagatgcgatggtttt

SEQ ID NO: 3471259 - DNA, 25 bp, Homo sapien
ggagcttggagatgcgatggttttc

SEQ ID NO: 3471260 - DNA, 25 bp, Homo sapien
ctgctactgattcccaaaatatttc

SEQ ID NO: 3471261 - DNA, 25 bp, Homo sapien
cattttgctgtttcacttggcagga

SEQ ID NO: 3471262 - DNA, 25 bp, Homo sapien
atatcctggatatattcatggaact

SEQ ID NO: 3471263 - DNA, 25 bp, Homo sapien
ctggccccggtttcaaactaatatg

SEQ ID NO: 3471264 - DNA, 25 bp, Homo sapien
cttgcaaatccaagttggcagatga

SEQ ID NO: 3471265 - DNA, 25 bp, Homo sapien
ttgcaaatccaagttggcagatgaa

SEQ ID NO: 3471266 - DNA, 25 bp, Homo sapien
tgcaaatccaagttggcagatgaat

SEQ ID NO: 3471267 - DNA, 25 bp, Homo sapien
tgtctatgctatttggcttttccat

SEQ ID NO: 3471268 - DNA, 25 bp, Homo sapien
ctgtctatgctatttggcttttcca

SEQ ID NO: 3471269 - DNA, 25 bp, Homo sapien
tttcctgctatcatgcttaagctcc

SEQ ID NO: 3471270 - DNA, 25 bp, Homo sapien
tttttcctgctatcatgcttaagct

SEQ ID NO: 3471271 - DNA, 25 bp, Homo sapien
tctttttcctgctatcatgcttaag

SEQ ID NO: 3471272 - DNA, 25 bp, Homo sapien
aaaatgaggcctgaagaaccaatta

SEQ ID NO: 3471273 - DNA, 25 bp, Homo sapien
ctgctttcaattgagctctgggagc

SEQ ID NO: 3471274 - DNA, 25 bp, Homo sapien
tgctgctttcaattgagctctggga

SEQ ID NO: 3471275 - DNA, 25 bp, Homo sapien
tttacaatagagtctcttgctgctt

SEQ ID NO: 3471276 - DNA, 25 bp, Homo sapien
gcctgctgctttcaattgagctctg

SEQ ID NO: 3471277 - DNA, 25 bp, Homo sapien
cagaaccgatttggatcccagtgtc

SEQ ID NO: 3471278 - DNA, 25 bp, Homo sapien
ctcttcagtatctgatctctgattg

SEQ ID NO: 3471279 - DNA, 25 bp, Homo sapien
atctctgattgaaaccagaaccgat

SEQ ID NO: 3471280 - DNA, 25 bp, Homo sapien
accagaaccgatttggatcccagtg

SEQ ID NO: 3471281 - DNA, 25 bp, Homo sapien
ccctgtgatacagagaattgtccca

SEQ ID NO: 3471282 - DNA, 25 bp, Homo sapien
tgtgatacagagaattgtcccagct

SEQ ID NO: 3471283 - DNA, 25 bp, Homo sapien
agcctggccctgtgatacagagaat

SEQ ID NO: 3471284 - DNA, 25 bp, Homo sapien
acagagaattgtcccagctgtgtca

SEQ ID NO: 3471285 - DNA, 25 bp, Homo sapien
caggccagttgaggagacaagggct

SEQ ID NO: 3471286 - DNA, 25 bp, Homo sapien
ggccagttgaggagacaagggctca

SEQ ID NO: 3471287 - DNA, 25 bp, Homo sapien
ccaggccagttgaggagacaagggc

SEQ ID NO: 3471288 - DNA, 25 bp, Homo sapien
ccagttgaggagacaagggctcagt

SEQ ID NO: 3471289 - DNA, 25 bp, Homo sapien
gcacttcttcccatttgatcgggtc

SEQ ID NO: 3471290 - DNA, 25 bp, Homo sapien
ctccaggtatctgccgaatgcttct

SEQ ID NO: 3471291 - DNA, 25 bp, Homo sapien
cgaatgcttcttacgtgctgtgcta

SEQ ID NO: 3471292 - DNA, 25 bp, Homo sapien
gatgatgtgctaacactttgcaagt

SEQ ID NO: 3471293 - DNA, 25 bp, Homo sapien
tccacctcctctagtgaagctgtgc

SEQ ID NO: 3471294 - DNA, 25 bp, Homo sapien
acctcctctagtgaagctgtgcctc

SEQ ID NO: 3471295 - DNA, 25 bp, Homo sapien
cacctcctctagtgaagctgtgcct

SEQ ID NO: 3471296 - DNA, 25 bp, Homo sapien
cttccacctcctctagtgaagctgt

SEQ ID NO: 3471297 - DNA, 25 bp, Homo sapien
gagaggatgaaggaactgggtggtg

SEQ ID NO: 3471298 - DNA, 25 bp, Homo sapien
ggtggtgtccggaagtgatccaggt

SEQ ID NO: 3471299 - DNA, 25 bp, Homo sapien
atgccctcattgtattcaggaaggg

SEQ ID NO: 3471300 - DNA, 25 bp, Homo sapien
gtctccttctggtggcatgccctca

SEQ ID NO: 3471301 - DNA, 25 bp, Homo sapien
tgttccgtgtctaattcaacaaatt

SEQ ID NO: 3471302 - DNA, 25 bp, Homo sapien
gcatctccttgttccgtgtctaatt

SEQ ID NO: 3471303 - DNA, 25 bp, Homo sapien
tccgtgtctaattcaacaaattcca

SEQ ID NO: 3471304 - DNA, 25 bp, Homo sapien
tccttgttccgtgtctaattcaaca

SEQ ID NO: 3471305 - DNA, 25 bp, Homo sapien
cccatgacagcgttcttcctgtggg

SEQ ID NO: 3471306 - DNA, 25 bp, Homo sapien
ccaggtactctaagtagagggccat

SEQ ID NO: 3471307 - DNA, 25 bp, Homo sapien
gccaggtactctaagtagagggcca

SEQ ID NO: 3471308 - DNA, 25 bp, Homo sapien
gggccaggtactctaagtagagggc

SEQ ID NO: 3471309 - DNA, 25 bp, Homo sapien
gagcaaatgagccttcctccacttg

SEQ ID NO: 3471310 - DNA, 25 bp, Homo sapien
tgctaaatgagcgagcaaatgagcc

SEQ ID NO: 3471311 - DNA, 25 bp, Homo sapien
tttaatatgctaaatgagcgagcaa

SEQ ID NO: 3471312 - DNA, 25 bp, Homo sapien
gtagcaataatacccttttaatatg

SEQ ID NO: 3471313 - DNA, 25 bp, Homo sapien
ttagtatttgccttcagctattttt

SEQ ID NO: 3471314 - DNA, 25 bp, Homo sapien
tggaagctgttgggtggttgataag

SEQ ID NO: 3471315 - DNA, 25 bp, Homo sapien
ggaagctgttgggtggttgataagt

SEQ ID NO: 3471316 - DNA, 25 bp, Homo sapien
ctttttgctctaccccttttctcag

SEQ ID NO: 3471317 - DNA, 25 bp, Homo sapien
ttttgctctaccccttttctcagat

SEQ ID NO: 3471318 - DNA, 25 bp, Homo sapien
ttttctcagatgtgtgcatgtctcc

SEQ ID NO: 3471319 - DNA, 25 bp, Homo sapien
ttgctctaccccttttctcagatgt

SEQ ID NO: 3471320 - DNA, 25 bp, Homo sapien
tctttcagtttctcagcactgtctc

SEQ ID NO: 3471321 - DNA, 25 bp, Homo sapien
ttctcagcactgtctctctttcctt

SEQ ID NO: 3471322 - DNA, 25 bp, Homo sapien
tcagtttctcagcactgtctctctt

SEQ ID NO: 3471323 - DNA, 25 bp, Homo sapien
gtttctcagcactgtctctctttcc

SEQ ID NO: 3471324 - DNA, 25 bp, Homo sapien
caggaagagcagttctacgtctctg

SEQ ID NO: 3471325 - DNA, 25 bp, Homo sapien
gaagagcagttctacgtctctgaca

SEQ ID NO: 3471326 - DNA, 25 bp, Homo sapien
caggcaggaagagcagttctacgtc

SEQ ID NO: 3471327 - DNA, 25 bp, Homo sapien
gagcagttctacgtctctgacatgt

SEQ ID NO: 3471328 - DNA, 25 bp, Homo sapien
aaagggcatcttattgagtgagaca

SEQ ID NO: 3471329 - DNA, 25 bp, Homo sapien
gacagagtcgtcaaggtctgaagac

SEQ ID NO: 3471330 - DNA, 25 bp, Homo sapien
actatatttgactcccatgatgggc

SEQ ID NO: 3471331 - DNA, 25 bp, Homo sapien
tgcattcccgagctttgagacagag

SEQ ID NO: 3471332 - DNA, 25 bp, Homo sapien
tcccgatgtctcgtgtcacattgca

SEQ ID NO: 3471333 - DNA, 25 bp, Homo sapien
cccgagccataaataactgtgtgtt

SEQ ID NO: 3471334 - DNA, 25 bp, Homo sapien
accccagtgagtcctaaagtcggct

SEQ ID NO: 3471335 - DNA, 25 bp, Homo sapien
aacagatgcccgagccataaataac

SEQ ID NO: 3471336 - DNA, 25 bp, Homo sapien
tgtcctcagtgtggctgcttctcgt

SEQ ID NO: 3471337 - DNA, 25 bp, Homo sapien
ttggcctccactgctgtcctcagtg

SEQ ID NO: 3471338 - DNA, 25 bp, Homo sapien
tgctgtcctcagtgtggctgcttct

SEQ ID NO: 3471339 - DNA, 25 bp, Homo sapien
cttggcctccactgctgtcctcagt

SEQ ID NO: 3471340 - DNA, 25 bp, Homo sapien
agggcagtctcctccccagggtcag

SEQ ID NO: 3471341 - DNA, 25 bp, Homo sapien
gtgaccagggcagtctcctccccag

SEQ ID NO: 3471342 - DNA, 25 bp, Homo sapien
cagggcagtctcctccccagggtca

SEQ ID NO: 3471343 - DNA, 25 bp, Homo sapien
gccgtgaccagggcagtctcctccc

SEQ ID NO: 3471344 - DNA, 25 bp, Homo sapien
cctggggtgatgagatctagctccc

SEQ ID NO: 3471345 - DNA, 25 bp, Homo sapien
agaagcttctgccttgtagcctggg

SEQ ID NO: 3471346 - DNA, 25 bp, Homo sapien
tgatgagatctagctcccctacttc

SEQ ID NO: 3471347 - DNA, 25 bp, Homo sapien
cagaagcttctgccttgtagcctgg

SEQ ID NO: 3471348 - DNA, 25 bp, Homo sapien
ctagtccaatttgatggagcagaag

SEQ ID NO: 3471349 - DNA, 25 bp, Homo sapien
atggagcagaagccaagggctctag

SEQ ID NO: 3471350 - DNA, 25 bp, Homo sapien
ggagcagaagccaagggctctagag

SEQ ID NO: 3471351 - DNA, 25 bp, Homo sapien
agtccaatttgatggagcagaagcc

SEQ ID NO: 3471352 - DNA, 25 bp, Homo sapien
tgcttagaggtgtgtcctcttcttg

SEQ ID NO: 3471353 - DNA, 25 bp, Homo sapien
tttgaatgaggatgccctgcttaga

SEQ ID NO: 3471354 - DNA, 25 bp, Homo sapien
aggatgccctgcttagaggtgtgtc

SEQ ID NO: 3471355 - DNA, 25 bp, Homo sapien
gccctgcttagaggtgtgtcctctt

SEQ ID NO: 3471356 - DNA, 25 bp, Homo sapien
taagattcctggtgtggatgccggc

SEQ ID NO: 3471357 - DNA, 25 bp, Homo sapien
ttcctggtgtggatgccggcttcct

SEQ ID NO: 3471358 - DNA, 25 bp, Homo sapien
caaacagtagacaatctaagattcc

SEQ ID NO: 3471359 - DNA, 25 bp, Homo sapien
gacaatctaagattcctggtgtgga

SEQ ID NO: 3471360 - DNA, 25 bp, Homo sapien
ccattaaaggattgtgcgtcgctga

SEQ ID NO: 3471361 - DNA, 25 bp, Homo sapien
tttcacagcacagcgacacatggta

SEQ ID NO: 3471362 - DNA, 25 bp, Homo sapien
catggtacataacccacagagcaga

SEQ ID NO: 3471363 - DNA, 25 bp, Homo sapien
gcccgagtgagctaaaccattaaag

SEQ ID NO: 3471364 - DNA, 25 bp, Homo sapien
tcacacagccagtgcgtagcacata

SEQ ID NO: 3471365 - DNA, 25 bp, Homo sapien
gcccacactggcatgaggacccact

SEQ ID NO: 3471366 - DNA, 25 bp, Homo sapien
gtagcacatactgtccccgatcaca

SEQ ID NO: 3471367 - DNA, 25 bp, Homo sapien
tgtggcccacgctgtccccggtcac

SEQ ID NO: 3471368 - DNA, 25 bp, Homo sapien
gcaaacttctgcaatgggtctacag

SEQ ID NO: 3471369 - DNA, 25 bp, Homo sapien
tttagggttgatgtatctcatggac

SEQ ID NO: 3471370 - DNA, 25 bp, Homo sapien
gggtctacagtctttgcctctaggc

SEQ ID NO: 3471371 - DNA, 25 bp, Homo sapien
gcctctaggcctgaattgttgagaa

SEQ ID NO: 3471372 - DNA, 25 bp, Homo sapien
catctgcttaggagattctgagact

SEQ ID NO: 3471373 - DNA, 25 bp, Homo sapien
gcttaggagattctgagactggcac

SEQ ID NO: 3471374 - DNA, 25 bp, Homo sapien
ctgcttaggagattctgagactggc

SEQ ID NO: 3471375 - DNA, 25 bp, Homo sapien
cttccttccatctgcttaggagatt

SEQ ID NO: 3471376 - DNA, 25 bp, Homo sapien
cagagtggtggcagggagcagcttg

SEQ ID NO: 3471377 - DNA, 25 bp, Homo sapien
tcagagtggtggcagggagcagctt

SEQ ID NO: 3471378 - DNA, 25 bp, Homo sapien
gcaagaatcagcactcggtcatctc

SEQ ID NO: 3471379 - DNA, 25 bp, Homo sapien
tgagcaagaatcagcactcggtcat

SEQ ID NO: 3471380 - DNA, 25 bp, Homo sapien
tcctgagcaagaatcagcactcggt

SEQ ID NO: 3471381 - DNA, 25 bp, Homo sapien
gagcaagaatcagcactcggtcatc

SEQ ID NO: 3471382 - DNA, 25 bp, Homo sapien
tagtgaattctgggggtgttggcca

SEQ ID NO: 3471383 - DNA, 25 bp, Homo sapien
agtgaattctgggggtgttggccac

SEQ ID NO: 3471384 - DNA, 25 bp, Homo sapien
gtgaattctgggggtgttggccaca

SEQ ID NO: 3471385 - DNA, 25 bp, Homo sapien
ctagtgaattctgggggtgttggcc

SEQ ID NO: 3471386 - DNA, 25 bp, Homo sapien
cttgcctggttttcttcgattttca

SEQ ID NO: 3471387 - DNA, 25 bp, Homo sapien
agtaggcttctttgtatatgctgtt

SEQ ID NO: 3471388 - DNA, 25 bp, Homo sapien
tcagtaggcttctttgtatatgctg

SEQ ID NO: 3471389 - DNA, 25 bp, Homo sapien
ttcttcgattttcatggaattctgt

SEQ ID NO: 3471390 - DNA, 25 bp, Homo sapien
gatttcttatatgtgggtgagtcac

SEQ ID NO: 3471391 - DNA, 25 bp, Homo sapien
catgttgatctaactgatggtgtcc

SEQ ID NO: 3471392 - DNA, 25 bp, Homo sapien
atggtgtcccacaagtcctcccagg

SEQ ID NO: 3471393 - DNA, 25 bp, Homo sapien
aacactttgaatatagcagcccatc

SEQ ID NO: 3471394 - DNA, 25 bp, Homo sapien
tgagaggcacacttgcagctaatgg

SEQ ID NO: 3471395 - DNA, 25 bp, Homo sapien
cacacttgcagctaatggatttgct

SEQ ID NO: 3471396 - DNA, 25 bp, Homo sapien
ggtgtgggctttaaaccaatgagag

SEQ ID NO: 3471397 - DNA, 25 bp, Homo sapien
tgaaggccagcttcttgtatgctct

SEQ ID NO: 3471398 - DNA, 25 bp, Homo sapien
ggccttaaatgcaggagggtcccca

SEQ ID NO: 3471399 - DNA, 25 bp, Homo sapien
cacagacatatctgtccaaaaggca

SEQ ID NO: 3471400 - DNA, 25 bp, Homo sapien
cattgcaaagggcttcagcctcggg

SEQ ID NO: 3471401 - DNA, 25 bp, Homo sapien
gagaagactatatcataaagcagga

SEQ ID NO: 3471402 - DNA, 25 bp, Homo sapien
ctataggaggggcttgtgtgactct

SEQ ID NO: 3471403 - DNA, 25 bp, Homo sapien
caaaagatattggaatccaattgtt

SEQ ID NO: 3471404 - DNA, 25 bp, Homo sapien
atattggaatccaattgttgatgga

SEQ ID NO: 3471405 - DNA, 25 bp, Homo sapien
tgactctattaacgaagcaaaagat

SEQ ID NO: 3471406 - DNA, 25 bp, Homo sapien
gttggtccatgcctactggtgaagg

SEQ ID NO: 3471407 - DNA, 25 bp, Homo sapien
ttggtccatgcctactggtgaaggg

SEQ ID NO: 3471408 - DNA, 25 bp, Homo sapien
aggtggttggtccatgcctactggt

SEQ ID NO: 3471409 - DNA, 25 bp, Homo sapien
tggttggtccatgcctactggtgaa

SEQ ID NO: 3471410 - DNA, 25 bp, Homo sapien
tccacattattctgccatcctggga

SEQ ID NO: 3471411 - DNA, 25 bp, Homo sapien
ttggctggaggaaaagttgtctgaa

SEQ ID NO: 3471412 - DNA, 25 bp, Homo sapien
ctattagctgcaatcccatccggcg

SEQ ID NO: 3471413 - DNA, 25 bp, Homo sapien
tggttggttttaatctatagtagaa

SEQ ID NO: 3471414 - DNA, 25 bp, Homo sapien
cacccccttgacctgttgctttctt

SEQ ID NO: 3471415 - DNA, 25 bp, Homo sapien
tcacccccttgacctgttgctttct

SEQ ID NO: 3471416 - DNA, 25 bp, Homo sapien
cacttataacttccaccaatgacca

SEQ ID NO: 3471417 - DNA, 25 bp, Homo sapien
gaccgctcaatcctggcagaataaa

SEQ ID NO: 3471418 - DNA, 25 bp, Homo sapien
ccttggcattggctaaagccccatg

SEQ ID NO: 3471419 - DNA, 25 bp, Homo sapien
ccttgaccgctcaatcctggcagaa

SEQ ID NO: 3471420 - DNA, 25 bp, Homo sapien
gaaatgtctgagaagccccgtcctg

SEQ ID NO: 3471421 - DNA, 25 bp, Homo sapien
aatgtctgagaagccccgtcctgct

SEQ ID NO: 3471422 - DNA, 25 bp, Homo sapien
tgtctgagaagccccgtcctgctgg

SEQ ID NO: 3471423 - DNA, 25 bp, Homo sapien
gcgtggggctggcatagtgcctcag

SEQ ID NO: 3471424 - DNA, 25 bp, Homo sapien
tccgatgactaatcagtcttttaca

SEQ ID NO: 3471425 - DNA, 25 bp, Homo sapien
caattatccgatgactaatcagtct

SEQ ID NO: 3471426 - DNA, 25 bp, Homo sapien
gaactcaattatccgatgactaatc

SEQ ID NO: 3471427 - DNA, 25 bp, Homo sapien
catttaagaactcaattatccgatg

SEQ ID NO: 3471428 - DNA, 25 bp, Homo sapien
tcctcacaatgaccactttcaatga

SEQ ID NO: 3471429 - DNA, 25 bp, Homo sapien
cactttcaatgacctcggtgccagg

SEQ ID NO: 3471430 - DNA, 25 bp, Homo sapien
caatgaccactttcaatgacctcgg

SEQ ID NO: 3471431 - DNA, 25 bp, Homo sapien
tgaccactttcaatgacctcggtgc

SEQ ID NO: 3471432 - DNA, 25 bp, Homo sapien
ctgcgatattatggccagccgtgtt

SEQ ID NO: 3471433 - DNA, 25 bp, Homo sapien
ttatggccagccgtgttatagcgat

SEQ ID NO: 3471434 - DNA, 25 bp, Homo sapien
gatattatggccagccgtgttatag

SEQ ID NO: 3471435 - DNA, 25 bp, Homo sapien
cagccgtgttatagcgatggaagtg

SEQ ID NO: 3471436 - DNA, 25 bp, Homo sapien
ttgttgtaaggtgttgcctccatca

SEQ ID NO: 3471437 - DNA, 25 bp, Homo sapien
catcttgtatagactgggcggtgca

SEQ ID NO: 3471438 - DNA, 25 bp, Homo sapien
cagggcctgtctcaatgctggtcct

SEQ ID NO: 3471439 - DNA, 25 bp, Homo sapien
gaaatcagcatcttgtatagactgg

SEQ ID NO: 3471440 - DNA, 25 bp, Homo sapien
ctgacccctcgaaaactctcttggt

SEQ ID NO: 3471441 - DNA, 25 bp, Homo sapien
cctgacccctcgaaaactctcttgg

SEQ ID NO: 3471442 - DNA, 25 bp, Homo sapien
ccctcgaaaactctcttggttctca

SEQ ID NO: 3471443 - DNA, 25 bp, Homo sapien
ccctgacccctcgaaaactctcttg

SEQ ID NO: 3471444 - DNA, 25 bp, Homo sapien
cctcctcaatcttcccaaacccact

SEQ ID NO: 3471445 - DNA, 25 bp, Homo sapien
ctcaatcttcccaaacccactcagt

SEQ ID NO: 3471446 - DNA, 25 bp, Homo sapien
tgaaactcttcagcccctcctcaat

SEQ ID NO: 3471447 - DNA, 25 bp, Homo sapien
tccttgaaactcttcagcccctcct

SEQ ID NO: 3471448 - DNA, 25 bp, Homo sapien
ttggttgtatttatctggagttgac

SEQ ID NO: 3471449 - DNA, 25 bp, Homo sapien
atctggagttgacagcatcagccgc

SEQ ID NO: 3471450 - DNA, 25 bp, Homo sapien
ttgacagcatcagccgctgcagccg

SEQ ID NO: 3471451 - DNA, 25 bp, Homo sapien
tcagggcctgataatttttccatta

SEQ ID NO: 3471452 - DNA, 25 bp, Homo sapien
aaagcccctgcataaagggccagaa

SEQ ID NO: 3471453 - DNA, 25 bp, Homo sapien
tggatggggcgggaaaaacagccaa

SEQ ID NO: 3471454 - DNA, 25 bp, Homo sapien
agccaaagcccctgcataaagggcc

SEQ ID NO: 3471455 - DNA, 25 bp, Homo sapien
cataaagggccagaacgtcagccat

SEQ ID NO: 3471456 - DNA, 25 bp, Homo sapien
ccagggcggcttttcagatctatca

SEQ ID NO: 3471457 - DNA, 25 bp, Homo sapien
gaagcagctgcgttttttgccatga

SEQ ID NO: 3471458 - DNA, 25 bp, Homo sapien
catccctggatgagacgaaagtgtt

SEQ ID NO: 3471459 - DNA, 25 bp, Homo sapien
cattgtactcaaggatcccagggcg

SEQ ID NO: 3471460 - DNA, 25 bp, Homo sapien
gacaacacactaataggtttttctg

SEQ ID NO: 3471461 - DNA, 25 bp, Homo sapien
aacacactaataggtttttctgaag

SEQ ID NO: 3471462 - DNA, 25 bp, Homo sapien
ggtcctgacaacacactaataggtt

SEQ ID NO: 3471463 - DNA, 25 bp, Homo sapien
ccagaaggtcctgacaacacactaa

SEQ ID NO: 3471464 - DNA, 25 bp, Homo sapien
cactaaaagtttgattgaacactca

SEQ ID NO: 3471465 - DNA, 25 bp, Homo sapien
cactcacagtgcgttaaggatccaa

SEQ ID NO: 3471466 - DNA, 25 bp, Homo sapien
gcgttaaggatccaactgtgaacat

SEQ ID NO: 3471467 - DNA, 25 bp, Homo sapien
agtttgattgaacactcacagtgcg

SEQ ID NO: 3471468 - DNA, 25 bp, Homo sapien
caaggaagggaaaatgccattactg

SEQ ID NO: 3471469 - DNA, 25 bp, Homo sapien
gaatcttttatcgtttggacaagga

SEQ ID NO: 3471470 - DNA, 25 bp, Homo sapien
agccagaaatgtagcccgggagatg

SEQ ID NO: 3471471 - DNA, 25 bp, Homo sapien
tgtcaactgaaatgtcctacttggg

SEQ ID NO: 3471472 - DNA, 25 bp, Homo sapien
tctcaggttcatgtgttgcgattgg

SEQ ID NO: 3471473 - DNA, 25 bp, Homo sapien
tacaatgttgacatgtctcaggttc

SEQ ID NO: 3471474 - DNA, 25 bp, Homo sapien
tagattgcaaagtgtaggccccaca

SEQ ID NO: 3471475 - DNA, 25 bp, Homo sapien
tgttttccgtctcaggtagattgca

SEQ ID NO: 3471476 - DNA, 25 bp, Homo sapien
taatctgcagctctattccgagccc

SEQ ID NO: 3471477 - DNA, 25 bp, Homo sapien
gaattggcatctcatttttgggacc

SEQ ID NO: 3471478 - DNA, 25 bp, Homo sapien
taggcacttaaccaagacaaaaagc

SEQ ID NO: 3471479 - DNA, 25 bp, Homo sapien
ttagcacccattccgaccatagtat

SEQ ID NO: 3471480 - DNA, 25 bp, Homo sapien
aaatctagaagtagtcctgaaggac

SEQ ID NO: 3471481 - DNA, 25 bp, Homo sapien
tgtttggtaagactccagactccag

SEQ ID NO: 3471482 - DNA, 25 bp, Homo sapien
ggattttcactgaaacgtctaggaa

SEQ ID NO: 3471483 - DNA, 25 bp, Homo sapien
tgcatagctactaaaatcagtgacc

SEQ ID NO: 3471484 - DNA, 25 bp, Homo sapien
gccaaaaattactgatcctcgcatg

SEQ ID NO: 3471485 - DNA, 25 bp, Homo sapien
attactgatcctcgcatgatggcag

SEQ ID NO: 3471486 - DNA, 25 bp, Homo sapien
ccatctgccaaaaattactgatcct

SEQ ID NO: 3471487 - DNA, 25 bp, Homo sapien
aaaaattactgatcctcgcatgatg

SEQ ID NO: 3471488 - DNA, 25 bp, Homo sapien
tcagttctcgataggtcagagcaga

SEQ ID NO: 3471489 - DNA, 25 bp, Homo sapien
gatatttgtcatgctgggatttcca

SEQ ID NO: 3471490 - DNA, 25 bp, Homo sapien
tacctttcatacactagccttggcc

SEQ ID NO: 3471491 - DNA, 25 bp, Homo sapien
cacactggtctgctgtcgctctcag

SEQ ID NO: 3471492 - DNA, 25 bp, Homo sapien
gaaagtacactctgctgtttgacac

SEQ ID NO: 3471493 - DNA, 25 bp, Homo sapien
ctctgttgtcgtaaagatttgggtg

SEQ ID NO: 3471494 - DNA, 25 bp, Homo sapien
gtcaaacttggatacttggatttag

SEQ ID NO: 3471495 - DNA, 25 bp, Homo sapien
tcataaaaggagaaccagcacagct

SEQ ID NO: 3471496 - DNA, 25 bp, Homo sapien
gcttaaattgtaaggtacagctagt

SEQ ID NO: 3471497 - DNA, 25 bp, Homo sapien
cacaaatcatgtaaagttaaaagat

SEQ ID NO: 3471498 - DNA, 25 bp, Homo sapien
aatccttcacatatgacttcacaaa

SEQ ID NO: 3471499 - DNA, 25 bp, Homo sapien
gatttttaccgtttctgttgctgct

SEQ ID NO: 3471500 - DNA, 25 bp, Homo sapien
catacagagttcatcgaaagacaca

SEQ ID NO: 3471501 - DNA, 25 bp, Homo sapien
cctattttgacagctccctaaggaa

SEQ ID NO: 3471502 - DNA, 25 bp, Homo sapien
catctccagtgtgtcaagcgctctc

SEQ ID NO: 3471503 - DNA, 25 bp, Homo sapien
ggtctgaagctcatggccattggag

SEQ ID NO: 3471504 - DNA, 25 bp, Homo sapien
ccacgacttccccacgatgtgtttg

SEQ ID NO: 3471505 - DNA, 25 bp, Homo sapien
gacttccccacgatgtgtttgaact

SEQ ID NO: 3471506 - DNA, 25 bp, Homo sapien
cccacgatgtgtttgaactgcatcc

SEQ ID NO: 3471507 - DNA, 25 bp, Homo sapien
cgatgtgtttgaactgcatcctgct

SEQ ID NO: 3471508 - DNA, 25 bp, Homo sapien
ttaggtgttactaatccagaataag

SEQ ID NO: 3471509 - DNA, 25 bp, Homo sapien
ttgttttgtcacacaccatgatgta

SEQ ID NO: 3471510 - DNA, 25 bp, Homo sapien
tagttatcttagaagtcaggggtgg

SEQ ID NO: 3471511 - DNA, 25 bp, Homo sapien
caattgttttgtcacacaccatgat

SEQ ID NO: 3471512 - DNA, 25 bp, Homo sapien
gttttgtcacacaccatgatgtaaa

SEQ ID NO: 3471513 - DNA, 25 bp, Homo sapien
ctccagccactgttttaaagagcat

SEQ ID NO: 3471514 - DNA, 25 bp, Homo sapien
ttcacaaagggctccagccactgtt

SEQ ID NO: 3471515 - DNA, 25 bp, Homo sapien
gggctccagccactgttttaaagag

SEQ ID NO: 3471516 - DNA, 25 bp, Homo sapien
cttcacaaagggctccagccactgt

SEQ ID NO: 3471517 - DNA, 25 bp, Homo sapien
gatagataatctaggctgatccctg

SEQ ID NO: 3471518 - DNA, 25 bp, Homo sapien
cctattagtttggagacgatgttca

SEQ ID NO: 3471519 - DNA, 25 bp, Homo sapien
tgaagaatacacctagagccaaggg

SEQ ID NO: 3471520 - DNA, 25 bp, Homo sapien
caagttggtgaaacctcagtaggat

SEQ ID NO: 3471521 - DNA, 25 bp, Homo sapien
tcctgattttagagtactagtttta

SEQ ID NO: 3471522 - DNA, 25 bp, Homo sapien
gatcctgattttagagtactagttt

SEQ ID NO: 3471523 - DNA, 25 bp, Homo sapien
atcctgattttagagtactagtttt

SEQ ID NO: 3471524 - DNA, 25 bp, Homo sapien
ctagtggatgtaggtctcagagttg

SEQ ID NO: 3471525 - DNA, 25 bp, Homo sapien
tggataggctattcgaagtaggaaa

SEQ ID NO: 3471526 - DNA, 25 bp, Homo sapien
gctattcgaagtaggaaatttgtcc

SEQ ID NO: 3471527 - DNA, 25 bp, Homo sapien
tctcagagttggataggctattcga

SEQ ID NO: 3471528 - DNA, 25 bp, Homo sapien
ttggacacccctgatataatgtaac

SEQ ID NO: 3471529 - DNA, 25 bp, Homo sapien
tggacacccctgatataatgtaacc

SEQ ID NO: 3471530 - DNA, 25 bp, Homo sapien
cctaaagctccagaattctattttc

SEQ ID NO: 3471531 - DNA, 25 bp, Homo sapien
aatattgaccatttgtctcctaaag

SEQ ID NO: 3471532 - DNA, 25 bp, Homo sapien
caggccttgatgcttggcaggtcac

SEQ ID NO: 3471533 - DNA, 25 bp, Homo sapien
cttgatgcttggcaggtcaccccat

SEQ ID NO: 3471534 - DNA, 25 bp, Homo sapien
gtcaggccttgatgcttggcaggtc

SEQ ID NO: 3471535 - DNA, 25 bp, Homo sapien
gcttggcaggtcaccccatcttttg

SEQ ID NO: 3471536 - DNA, 25 bp, Homo sapien
accaccatccttaccatcatcacag

SEQ ID NO: 3471537 - DNA, 25 bp, Homo sapien
caccaccatccttaccatcatcaca

SEQ ID NO: 3471538 - DNA, 25 bp, Homo sapien
accatcatcacaggtatggtatctt

SEQ ID NO: 3471539 - DNA, 25 bp, Homo sapien
attcacttcctttgcctcaaataaa

SEQ ID NO: 3471540 - DNA, 25 bp, Homo sapien
tacataccgtattttcatcactgtc

SEQ ID NO: 3471541 - DNA, 25 bp, Homo sapien
ttcacttcctttgcctcaaataaat

SEQ ID NO: 3471542 - DNA, 25 bp, Homo sapien
atacataccgtattttcatcactgt

SEQ ID NO: 3471543 - DNA, 25 bp, Homo sapien
tgaattgaaagataggattgagtct

SEQ ID NO: 3471544 - DNA, 25 bp, Homo sapien
tagaaatcaaatcttaatggctttg

SEQ ID NO: 3471545 - DNA, 25 bp, Homo sapien
gtagtgaacactgtgtttacgttga

SEQ ID NO: 3471546 - DNA, 25 bp, Homo sapien
tgttaatgatttgtagtgaacactg

SEQ ID NO: 3471547 - DNA, 25 bp, Homo sapien
gacagataagaactgtattgattcc

SEQ ID NO: 3471548 - DNA, 25 bp, Homo sapien
atctgctggcagtaacctttgaaag

SEQ ID NO: 3471549 - DNA, 25 bp, Homo sapien
gctggcagtaacctttgaaagggca

SEQ ID NO: 3471550 - DNA, 25 bp, Homo sapien
aagaactgtattgattcctagcatc

SEQ ID NO: 3471551 - DNA, 25 bp, Homo sapien
tttaaactcccaattcatcagggtc

SEQ ID NO: 3471552 - DNA, 25 bp, Homo sapien
aactcccaattcatcagggtctcct

SEQ ID NO: 3471553 - DNA, 25 bp, Homo sapien
gatcttctgtgagagtgtccttggt

SEQ ID NO: 3471554 - DNA, 25 bp, Homo sapien
cctcctttagatcttctgtgagagt

SEQ ID NO: 3471555 - DNA, 25 bp, Homo sapien
caccattatgaagattgacagtttc

SEQ ID NO: 3471556 - DNA, 25 bp, Homo sapien
cacatccctgtgattgctaacacca

SEQ ID NO: 3471557 - DNA, 25 bp, Homo sapien
tatcactggtaactgactctaaaga

SEQ ID NO: 3471558 - DNA, 25 bp, Homo sapien
tatcagatgcctttaaagccgcttc

SEQ ID NO: 3471559 - DNA, 25 bp, Homo sapien
ctctgtacaagtcagaatgcccaac

SEQ ID NO: 3471560 - DNA, 25 bp, Homo sapien
caaattccttgtactctgtacaagt

SEQ ID NO: 3471561 - DNA, 25 bp, Homo sapien
aaattccttgtactctgtacaagtc

SEQ ID NO: 3471562 - DNA, 25 bp, Homo sapien
tcaaattccttgtactctgtacaag

SEQ ID NO: 3471563 - DNA, 25 bp, Homo sapien
tactgcatatttgccctggatctga

SEQ ID NO: 3471564 - DNA, 25 bp, Homo sapien
cttgtactgcatatttgccctggat

SEQ ID NO: 3471565 - DNA, 25 bp, Homo sapien
tgcatatttgccctggatctgaaga

SEQ ID NO: 3471566 - DNA, 25 bp, Homo sapien
tatttgccctggatctgaagatcca

SEQ ID NO: 3471567 - DNA, 25 bp, Homo sapien
ggcattcttggatagagtccattta

SEQ ID NO: 3471568 - DNA, 25 bp, Homo sapien
ccatggcattcttggatagagtcca

SEQ ID NO: 3471569 - DNA, 25 bp, Homo sapien
tggcattcttggatagagtccattt

SEQ ID NO: 3471570 - DNA, 25 bp, Homo sapien
catggcattcttggatagagtccat

SEQ ID NO: 3471571 - DNA, 25 bp, Homo sapien
ggatgatcataatcagtgatgatca

SEQ ID NO: 3471572 - DNA, 25 bp, Homo sapien
cggatgatcataatcagtgatgatc

SEQ ID NO: 3471573 - DNA, 25 bp, Homo sapien
gatgatcataatcagtgatgatcat

SEQ ID NO: 3471574 - DNA, 25 bp, Homo sapien
ttcttctggcatcttgtaattgcaa

SEQ ID NO: 3471575 - DNA, 25 bp, Homo sapien
ggcatcttgtaattgcaactggtaa

SEQ ID NO: 3471576 - DNA, 25 bp, Homo sapien
tctggcatcttgtaattgcaactgg

SEQ ID NO: 3471577 - DNA, 25 bp, Homo sapien
tgctcatcaaagcacttttctcagt

SEQ ID NO: 3471578 - DNA, 25 bp, Homo sapien
ctcagtgattacatgcatactggaa

SEQ ID NO: 3471579 - DNA, 25 bp, Homo sapien
actggaatctggtattgaattgttt

SEQ ID NO: 3471580 - DNA, 25 bp, Homo sapien
tgaattgtttcccttatactttgcc

SEQ ID NO: 3471581 - DNA, 25 bp, Homo sapien
tgcaggcatagaaaatctcagtgat

SEQ ID NO: 3471582 - DNA, 25 bp, Homo sapien
acatttcatgaactttctcccctaa

SEQ ID NO: 3471583 - DNA, 25 bp, Homo sapien
gcttctgctgaaagtgaccatttgt

SEQ ID NO: 3471584 - DNA, 25 bp, Homo sapien
tcaaaattgacttagcttgagaagt

SEQ ID NO: 3471585 - DNA, 25 bp, Homo sapien
tgttctagatgccaatatgtcacag

SEQ ID NO: 3471586 - DNA, 25 bp, Homo sapien
tgcttaagcaatcttttgtggagta

SEQ ID NO: 3471587 - DNA, 25 bp, Homo sapien
cttaagcaatcttttgtggagtaat

SEQ ID NO: 3471588 - DNA, 25 bp, Homo sapien
gcttaagcaatcttttgtggagtaa

SEQ ID NO: 3471589 - DNA, 25 bp, Homo sapien
tatttaaatttttcgtgttcatctc

SEQ ID NO: 3471590 - DNA, 25 bp, Homo sapien
aatttttcgtgttcatctccaggtg

SEQ ID NO: 3471591 - DNA, 25 bp, Homo sapien
ctttaaagactgtccacggttggat

SEQ ID NO: 3471592 - DNA, 25 bp, Homo sapien
gactgtccacggttggatttttgca

SEQ ID NO: 3471593 - DNA, 25 bp, Homo sapien
cacgttgatgctctctcactacaag

SEQ ID NO: 3471594 - DNA, 25 bp, Homo sapien
tcacgttgatgctctctcactacaa

SEQ ID NO: 3471595 - DNA, 25 bp, Homo sapien
cgttgatgctctctcactacaaggc

SEQ ID NO: 3471596 - DNA, 25 bp, Homo sapien
acgttgatgctctctcactacaagg

SEQ ID NO: 3471597 - DNA, 25 bp, Homo sapien
ggactgtgtattcagctcttggtga

SEQ ID NO: 3471598 - DNA, 25 bp, Homo sapien
agtgtagagtcccatgagtggactg

SEQ ID NO: 3471599 - DNA, 25 bp, Homo sapien
gctcttggtgatttagactccagtg

SEQ ID NO: 3471600 - DNA, 25 bp, Homo sapien
catgagtggactgtgtattcagctc

SEQ ID NO: 3471601 - DNA, 25 bp, Homo sapien
ttattatacagaacagctccgttgg

SEQ ID NO: 3471602 - DNA, 25 bp, Homo sapien
tagcctaggcctgctagcaattgca

SEQ ID NO: 3471603 - DNA, 25 bp, Homo sapien
gcaattgcaggtgccaacggtttaa

SEQ ID NO: 3471604 - DNA, 25 bp, Homo sapien
gctccgttggttcatagaatacctg

SEQ ID NO: 3471605 - DNA, 25 bp, Homo sapien
tccagatgtcgtcagccagagttca

SEQ ID NO: 3471606 - DNA, 25 bp, Homo sapien
ttataacttggatgcctggtctggc

SEQ ID NO: 3471607 - DNA, 25 bp, Homo sapien
cacgggaacgcgagctttatggcag

SEQ ID NO: 3471608 - DNA, 25 bp, Homo sapien
ccagagttcaggattcacacgggaa

SEQ ID NO: 3471609 - DNA, 25 bp, Homo sapien
gaagaggccgtccaattccagagct

SEQ ID NO: 3471610 - DNA, 25 bp, Homo sapien
ggccgtccaattccagagctgcaga

SEQ ID NO: 3471611 - DNA, 25 bp, Homo sapien
caggaagaggccgtccaattccaga

SEQ ID NO: 3471612 - DNA, 25 bp, Homo sapien
gtgcaggaagaggccgtccaattcc

SEQ ID NO: 3471613 - DNA, 25 bp, Homo sapien
cattagtgaatgaaggcattcttca

SEQ ID NO: 3471614 - DNA, 25 bp, Homo sapien
tcccattagtgaatgaaggcattct

SEQ ID NO: 3471615 - DNA, 25 bp, Homo sapien
tttcccattagtgaatgaaggcatt

SEQ ID NO: 3471616 - DNA, 25 bp, Homo sapien
cttttcccattagtgaatgaaggca

SEQ ID NO: 3471617 - DNA, 25 bp, Homo sapien
gactacaccataagatcagactttg

SEQ ID NO: 3471618 - DNA, 25 bp, Homo sapien
tgatgcaaaatggaacttcaggtca

SEQ ID NO: 3471619 - DNA, 25 bp, Homo sapien
ttagatcacacatcttataagtggg

SEQ ID NO: 3471620 - DNA, 25 bp, Homo sapien
taattagcctggaaatgactacacc

SEQ ID NO: 3471621 - DNA, 25 bp, Homo sapien
aaatgttaattgacaatcaaaggag

SEQ ID NO: 3471622 - DNA, 25 bp, Homo sapien
ctgaattcacaagcctttggggccc

SEQ ID NO: 3471623 - DNA, 25 bp, Homo sapien
ttggggcccatcttgaatacttctg

SEQ ID NO: 3471624 - DNA, 25 bp, Homo sapien
tcaaaggagtaacaggtgcatacct

SEQ ID NO: 3471625 - DNA, 25 bp, Homo sapien
tctctataggtgattggaacacacc

SEQ ID NO: 3471626 - DNA, 25 bp, Homo sapien
ccttgccaatgttgtaggtgatgca

SEQ ID NO: 3471627 - DNA, 25 bp, Homo sapien
tttgaatgactactgagctttggcg

SEQ ID NO: 3471628 - DNA, 25 bp, Homo sapien
tcctcccagtaagcagattatttgc

SEQ ID NO: 3471629 - DNA, 25 bp, Homo sapien
ttgctccaagtgtcttgagtgattt

SEQ ID NO: 3471630 - DNA, 25 bp, Homo sapien
ccaagtgtcttgagtgatttggctg

SEQ ID NO: 3471631 - DNA, 25 bp, Homo sapien
agtgatttggctgttaaaccagcag

SEQ ID NO: 3471632 - DNA, 25 bp, Homo sapien
gagtgatttggctgttaaaccagca

SEQ ID NO: 3471633 - DNA, 25 bp, Homo sapien
ccagagcactgagtttgtggccttt

SEQ ID NO: 3471634 - DNA, 25 bp, Homo sapien
ggcctttgtatgtcagaatgtgcat

SEQ ID NO: 3471635 - DNA, 25 bp, Homo sapien
caccagagcactgagtttgtggcct

SEQ ID NO: 3471636 - DNA, 25 bp, Homo sapien
cagagcactgagtttgtggcctttg

SEQ ID NO: 3471637 - DNA, 25 bp, Homo sapien
tgtaagttgatcttcctgtctgcat

SEQ ID NO: 3471638 - DNA, 25 bp, Homo sapien
ttgaaggggtctgtaagttgatctt

SEQ ID NO: 3471639 - DNA, 25 bp, Homo sapien
tgctctgtgggtgatctccttttta

SEQ ID NO: 3471640 - DNA, 25 bp, Homo sapien
taatgagaatatgacatgtgaacag

SEQ ID NO: 3471641 - DNA, 25 bp, Homo sapien
atggttaggactggctgtaatgaga

SEQ ID NO: 3471642 - DNA, 25 bp, Homo sapien
taggagtactagggaaaggattaca

SEQ ID NO: 3471643 - DNA, 25 bp, Homo sapien
acgttagcattatggtccctcaggg

SEQ ID NO: 3471644 - DNA, 25 bp, Homo sapien
cagtctcccatttggatggcataaa

SEQ ID NO: 3471645 - DNA, 25 bp, Homo sapien
tcatagcacgttagcattatggtcc

SEQ ID NO: 3471646 - DNA, 25 bp, Homo sapien
tctgggacagtctcccatttggatg

SEQ ID NO: 3471647 - DNA, 25 bp, Homo sapien
cagaaagcaatttacttggccagta

SEQ ID NO: 3471648 - DNA, 25 bp, Homo sapien
gtaatgtttagtattcccatagcta

SEQ ID NO: 3471649 - DNA, 25 bp, Homo sapien
tcccatagctattatggcagagatt

SEQ ID NO: 3471650 - DNA, 25 bp, Homo sapien
agagaacgcttatacagaaagcaat

SEQ ID NO: 3471651 - DNA, 25 bp, Homo sapien
agagagactttcacactggggcaaa

SEQ ID NO: 3471652 - DNA, 25 bp, Homo sapien
tcctgcttgatagccataatcctgt

SEQ ID NO: 3471653 - DNA, 25 bp, Homo sapien
tgaacataacgaggcttattcataa

SEQ ID NO: 3471654 - DNA, 25 bp, Homo sapien
tgctgctgtcattcccatggtaaca

SEQ ID NO: 3471655 - DNA, 25 bp, Homo sapien
ctaatgtctgaagcataagattatt

SEQ ID NO: 3471656 - DNA, 25 bp, Homo sapien
gatatgttggctcaagataccagaa

SEQ ID NO: 3471657 - DNA, 25 bp, Homo sapien
tgatggaactctaggccagcgcttt

SEQ ID NO: 3471658 - DNA, 25 bp, Homo sapien
gagtagcagcaagtccttggaagtt

SEQ ID NO: 3471659 - DNA, 25 bp, Homo sapien
ggaggagccttgtgcttagctgtac

SEQ ID NO: 3471660 - DNA, 25 bp, Homo sapien
tgggtttggacatcagccacttcct

SEQ ID NO: 3471661 - DNA, 25 bp, Homo sapien
cagccacttcctgattttagcatct

SEQ ID NO: 3471662 - DNA, 25 bp, Homo sapien
gcatctgttcccaactctggatttt

SEQ ID NO: 3471663 - DNA, 25 bp, Homo sapien
tagcatctgttcccaactctggatt

SEQ ID NO: 3471664 - DNA, 25 bp, Homo sapien
tatcaatacacctgtgacaccccgg

SEQ ID NO: 3471665 - DNA, 25 bp, Homo sapien
gatcaggagcaagtcaattccaagt

SEQ ID NO: 3471666 - DNA, 25 bp, Homo sapien
ataacttgtccccttgcttgtgtgg

SEQ ID NO: 3471667 - DNA, 25 bp, Homo sapien
gaggaagttcacaatgatcaggagc

SEQ ID NO: 3471668 - DNA, 25 bp, Homo sapien
gacaccatcgtaaccaatggatgag

SEQ ID NO: 3471669 - DNA, 25 bp, Homo sapien
aatgaccttttctaatgctggtgaa

SEQ ID NO: 3471670 - DNA, 25 bp, Homo sapien
tgtccatctgggtacagatggttgt

SEQ ID NO: 3471671 - DNA, 25 bp, Homo sapien
ctcctgttttggctggagacctgtc

SEQ ID NO: 3471672 - DNA, 25 bp, Homo sapien
tacagcagcattgaatcaggagaac

SEQ ID NO: 3471673 - DNA, 25 bp, Homo sapien
tcaggagaacgaaacagccttggct

SEQ ID NO: 3471674 - DNA, 25 bp, Homo sapien
catgggtcattaagatttacagctc

SEQ ID NO: 3471675 - DNA, 25 bp, Homo sapien
ccaagaagatcacggcatgggtcat

SEQ ID NO: 3471676 - DNA, 25 bp, Homo sapien
cattaaataacacgaaataatcctt

SEQ ID NO: 3471677 - DNA, 25 bp, Homo sapien
cgacattaaataacacgaaataatc

SEQ ID NO: 3471678 - DNA, 25 bp, Homo sapien
acattaaataacacgaaataatcct

SEQ ID NO: 3471679 - DNA, 25 bp, Homo sapien
gacattaaataacacgaaataatcc

SEQ ID NO: 3471680 - DNA, 25 bp, Homo sapien
agggatcttgaacttgacaagttgg

SEQ ID NO: 3471681 - DNA, 25 bp, Homo sapien
cttgacaagttggatgttggtaacc

SEQ ID NO: 3471682 - DNA, 25 bp, Homo sapien
tgacaagttggatgttggtaaccat

SEQ ID NO: 3471683 - DNA, 25 bp, Homo sapien
acttgacaagttggatgttggtaac

SEQ ID NO: 3471684 - DNA, 25 bp, Homo sapien
atggtcacataactcaaaaaggttt

SEQ ID NO: 3471685 - DNA, 25 bp, Homo sapien
tgaaagaaatggtcacataactcaa

SEQ ID NO: 3471686 - DNA, 25 bp, Homo sapien
tatggcatgccgttttcggtaaaac

SEQ ID NO: 3471687 - DNA, 25 bp, Homo sapien
aattaaattggtttatggcatgccg

SEQ ID NO: 3471688 - DNA, 25 bp, Homo sapien
atagtaattttgttatgggccagat

SEQ ID NO: 3471689 - DNA, 25 bp, Homo sapien
tggaagctcacaacagatcaatagt

SEQ ID NO: 3471690 - DNA, 25 bp, Homo sapien
ctgacttgctgtgacaactagtatg

SEQ ID NO: 3471691 - DNA, 25 bp, Homo sapien
tgggccagatgtcaaaacagaaatg

SEQ ID NO: 3471692 - DNA, 25 bp, Homo sapien
atgtcagcattatactgctgctgcc

SEQ ID NO: 3471693 - DNA, 25 bp, Homo sapien
caaaccgaagtgtgcgcacaaggta

SEQ ID NO: 3471694 - DNA, 25 bp, Homo sapien
gtgtgcgcacaaggtagatgtcagc

SEQ ID NO: 3471695 - DNA, 25 bp, Homo sapien
aatcagcagcaaaccgaagtgtgcg

SEQ ID NO: 3471696 - DNA, 25 bp, Homo sapien
catagcagtttgtccgttcttctaa

SEQ ID NO: 3471697 - DNA, 25 bp, Homo sapien
taataggtcatgttgtaatttgccg

SEQ ID NO: 3471698 - DNA, 25 bp, Homo sapien
ccaaaagtcgtgctcccatagcagt

SEQ ID NO: 3471699 - DNA, 25 bp, Homo sapien
gtaatttgccggacttcatcttcat

SEQ ID NO: 3471700 - DNA, 25 bp, Homo sapien
caattatacagctccaggaccaatt

SEQ ID NO: 3471701 - DNA, 25 bp, Homo sapien
acagctccaggaccaatttttcagg

SEQ ID NO: 3471702 - DNA, 25 bp, Homo sapien
taagtaaactataccatattccatc

SEQ ID NO: 3471703 - DNA, 25 bp, Homo sapien
atccccaattatacagctccaggac

SEQ ID NO: 3471704 - DNA, 25 bp, Homo sapien
taagaaatgaaggtggcttattggt

SEQ ID NO: 3471705 - DNA, 25 bp, Homo sapien
taagtgcaaaatggatagtaattca

SEQ ID NO: 3471706 - DNA, 25 bp, Homo sapien
ttaagaaatgaaggtggcttattgg

SEQ ID NO: 3471707 - DNA, 25 bp, Homo sapien
aaatggatagtaattcaaagccctg

SEQ ID NO: 3471708 - DNA, 25 bp, Homo sapien
ctgctatttttagccaagtgccaaa

SEQ ID NO: 3471709 - DNA, 25 bp, Homo sapien
ttgcaggcactactgaagtttttct

SEQ ID NO: 3471710 - DNA, 25 bp, Homo sapien
gtatcttttgcaggcactactgaag

SEQ ID NO: 3471711 - DNA, 25 bp, Homo sapien
taaattcctctgctttgaattgtgt

SEQ ID NO: 3471712 - DNA, 25 bp, Homo sapien
gaattgtgtctctgggagctattca

SEQ ID NO: 3471713 - DNA, 25 bp, Homo sapien
tctggatcccgccagttattggcat

SEQ ID NO: 3471714 - DNA, 25 bp, Homo sapien
cactatgccagttgtaggatgttca

SEQ ID NO: 3471715 - DNA, 25 bp, Homo sapien
tgcagagcacgcaacacgctgctgt

SEQ ID NO: 3471716 - DNA, 25 bp, Homo sapien
tatttgaaccctggagttgcttctg

SEQ ID NO: 3471717 - DNA, 25 bp, Homo sapien
cgctgatgatgtcggtacaccttac

SEQ ID NO: 3471718 - DNA, 25 bp, Homo sapien
cttactgagcacaggtcacggtggc

SEQ ID NO: 3471719 - DNA, 25 bp, Homo sapien
tgatgtcggtacaccttactgagca

SEQ ID NO: 3471720 - DNA, 25 bp, Homo sapien
cagaggccgctgatgatgtcggtac

SEQ ID NO: 3471721 - DNA, 25 bp, Homo sapien
tggctatgtcttaggctactcaggg

SEQ ID NO: 3471722 - DNA, 25 bp, Homo sapien
gtccttttgacagacatgtgttccc

SEQ ID NO: 3471723 - DNA, 25 bp, Homo sapien
ttctgtaaggactttggttgactgc

SEQ ID NO: 3471724 - DNA, 25 bp, Homo sapien
tgtgctagggcagcttttggctatg

SEQ ID NO: 3471725 - DNA, 25 bp, Homo sapien
gaccactggtcttgctattcattcc

SEQ ID NO: 3471726 - DNA, 25 bp, Homo sapien
tctgtgcctggttggtttggaccta

SEQ ID NO: 3471727 - DNA, 25 bp, Homo sapien
cgttcacctttttaatgcctgctag

SEQ ID NO: 3471728 - DNA, 25 bp, Homo sapien
cctggtgtggtcaaatctgtagtca

SEQ ID NO: 3471729 - DNA, 25 bp, Homo sapien
tgtctatctttctgccaattgaggt

SEQ ID NO: 3471730 - DNA, 25 bp, Homo sapien
cacctgtgtcagaagtcaattgacc

SEQ ID NO: 3471731 - DNA, 25 bp, Homo sapien
gagtactgggtataagcctttcatg

SEQ ID NO: 3471732 - DNA, 25 bp, Homo sapien
tacgttttctcatagactgtaggtt

SEQ ID NO: 3471733 - DNA, 25 bp, Homo sapien
tatttcacatgaccaatggcagctt

SEQ ID NO: 3471734 - DNA, 25 bp, Homo sapien
ccaatggcagctttggcaggcttaa

SEQ ID NO: 3471735 - DNA, 25 bp, Homo sapien
tggcagctttggcaggcttaagcat

SEQ ID NO: 3471736 - DNA, 25 bp, Homo sapien
gactatccttgtatttcacatgacc

SEQ ID NO: 3471737 - DNA, 25 bp, Homo sapien
caaggtgcagaagaatcatcgaagg

SEQ ID NO: 3471738 - DNA, 25 bp, Homo sapien
ggtgaaagcctgttaaccaaggtgc

SEQ ID NO: 3471739 - DNA, 25 bp, Homo sapien
agcctgttaaccaaggtgcagaaga

SEQ ID NO: 3471740 - DNA, 25 bp, Homo sapien
gaatcatcgaaggtgagtgtattgt

SEQ ID NO: 3471741 - DNA, 25 bp, Homo sapien
ctggatgtaccgaatttttgcctta

SEQ ID NO: 3471742 - DNA, 25 bp, Homo sapien
gatgtaccgaatttttgccttagct

SEQ ID NO: 3471743 - DNA, 25 bp, Homo sapien
atgtaccgaatttttgccttagctt

SEQ ID NO: 3471744 - DNA, 25 bp, Homo sapien
ggatgtaccgaatttttgccttagc

SEQ ID NO: 3471745 - DNA, 25 bp, Homo sapien
tcaaccgtgcatgtcaaagctacat

SEQ ID NO: 3471746 - DNA, 25 bp, Homo sapien
caaagctacatgaaaattctgttgc

SEQ ID NO: 3471747 - DNA, 25 bp, Homo sapien
gcggtctggaactcaaccgtgcatg

SEQ ID NO: 3471748 - DNA, 25 bp, Homo sapien
tctgttgccagttaccatggaagca

SEQ ID NO: 3471749 - DNA, 25 bp, Homo sapien
cgggtagtagcaacggtactatatt

SEQ ID NO: 3471750 - DNA, 25 bp, Homo sapien
ttccctgcgagggatatatgctgac

SEQ ID NO: 3471751 - DNA, 25 bp, Homo sapien
tatctcgcggtgagaagttgccttc

SEQ ID NO: 3471752 - DNA, 25 bp, Homo sapien
actatatttgtaactatctcgcggt

SEQ ID NO: 3471753 - DNA, 25 bp, Homo sapien
cggtaactggcgcataatagaggca

SEQ ID NO: 3471754 - DNA, 25 bp, Homo sapien
taaacgtgagcgtgagtaaaggctc

SEQ ID NO: 3471755 - DNA, 25 bp, Homo sapien
aaagcgccagtgtcagttaaacgtg

SEQ ID NO: 3471756 - DNA, 25 bp, Homo sapien
tgaaagagatccctcgtgctgctgc

SEQ ID NO: 3471757 - DNA, 25 bp, Homo sapien
gcgccgggaccgagtggcacggggc

SEQ ID NO: 3471758 - DNA, 25 bp, Homo sapien
cgggcgccgggaccgagtggcacgg

SEQ ID NO: 3471759 - DNA, 25 bp, Homo sapien
ctcgccgcgcttggcagccgcgcgg

SEQ ID NO: 3471760 - DNA, 25 bp, Homo sapien
tcgccgcgcttggcagccgcgcggc

SEQ ID NO: 3471761 - DNA, 25 bp, Homo sapien
tgcacccagcctcccttcccgccac

SEQ ID NO: 3471762 - DNA, 25 bp, Homo sapien
ctgcacccagcctcccttcccgcca

SEQ ID NO: 3471763 - DNA, 25 bp, Homo sapien
cgttggcgcggtcgggaaagaagag

SEQ ID NO: 3471764 - DNA, 25 bp, Homo sapien
ccggagctcttcctcagcggagagg

SEQ ID NO: 3471765 - DNA, 25 bp, Homo sapien
tttgctaacaaaagggagccggagc

SEQ ID NO: 3471766 - DNA, 25 bp, Homo sapien
cgagcactcggctggagcccgatgt

SEQ ID NO: 3471767 - DNA, 25 bp, Homo sapien
ctgcgtgaagagcagtcttgggaat

SEQ ID NO: 3471768 - DNA, 25 bp, Homo sapien
agcagtcttgggaatttgcccaggg

SEQ ID NO: 3471769 - DNA, 25 bp, Homo sapien
ctgcacgcccggtgccttccctgaa

SEQ ID NO: 3471770 - DNA, 25 bp, Homo sapien
gcggctctgcacgcccggtgccttc

SEQ ID NO: 3471771 - DNA, 25 bp, Homo sapien
gtcctctgccacgagtggggacacg

SEQ ID NO: 3471772 - DNA, 25 bp, Homo sapien
tggggacacgggatttcccggctgc

SEQ ID NO: 3471773 - DNA, 25 bp, Homo sapien
gccacgagtggggacacgggatttc

SEQ ID NO: 3471774 - DNA, 25 bp, Homo sapien
ggcaccctgcgggcctccgcgcgct

SEQ ID NO: 3471775 - DNA, 25 bp, Homo sapien
gccgggagcccgcagcccgcccgcc

SEQ ID NO: 3471776 - DNA, 25 bp, Homo sapien
cgccgggagcccgcagcccgcccgc

SEQ ID NO: 3471777 - DNA, 25 bp, Homo sapien
aaggcgccgggagcccgcagcccgc

SEQ ID NO: 3471778 - DNA, 25 bp, Homo sapien
ggcgccgggagcccgcagcccgccc

SEQ ID NO: 3471779 - DNA, 25 bp, Homo sapien
agtcgctttagcaggagaggctctc

SEQ ID NO: 3471780 - DNA, 25 bp, Homo sapien
ggagatgcaagtcgctttagcagga

SEQ ID NO: 3471781 - DNA, 25 bp, Homo sapien
agtgagtccggagatgcaagtcgct

SEQ ID NO: 3471782 - DNA, 25 bp, Homo sapien
tcggagcacctgttggtccccagct

SEQ ID NO: 3471783 - DNA, 25 bp, Homo sapien
agcagacaaacaagagagccggctg

SEQ ID NO: 3471784 - DNA, 25 bp, Homo sapien
gcagacaaacaagagagccggctgc

SEQ ID NO: 3471785 - DNA, 25 bp, Homo sapien
ggctcgtccttcaatttgatgcttg

SEQ ID NO: 3471786 - DNA, 25 bp, Homo sapien
aatttgatgcttgagcaacagaggg

SEQ ID NO: 3471787 - DNA, 25 bp, Homo sapien
cttgagcaacagagggtcagagcgc

SEQ ID NO: 3471788 - DNA, 25 bp, Homo sapien
atggctcgtccttcaatttgatgct

SEQ ID NO: 3471789 - DNA, 25 bp, Homo sapien
ctgcattctatgaatacttaaatta

SEQ ID NO: 3471790 - DNA, 25 bp, Homo sapien
tctgcattctatgaatacttaaatt

SEQ ID NO: 3471791 - DNA, 25 bp, Homo sapien
cctgtctcctgtagtgctgttctcc

SEQ ID NO: 3471792 - DNA, 25 bp, Homo sapien
ctcctgtagtgctgttctcctgttg

SEQ ID NO: 3471793 - DNA, 25 bp, Homo sapien
tgtctcctgtagtgctgttctcctg

SEQ ID NO: 3471794 - DNA, 25 bp, Homo sapien
ctgaaggactgcctgcagttcatgc

SEQ ID NO: 3471795 - DNA, 25 bp, Homo sapien
agactgggcattatcctggcaccca

SEQ ID NO: 3471796 - DNA, 25 bp, Homo sapien
tagtaagaacgggtaggactttgca

SEQ ID NO: 3471797 - DNA, 25 bp, Homo sapien
agaacgggtaggactttgcagactg

SEQ ID NO: 3471798 - DNA, 25 bp, Homo sapien
tgcagactgggcattatcctggcac

SEQ ID NO: 3471799 - DNA, 25 bp, Homo sapien
tacatcttccaatgtccccatactg

SEQ ID NO: 3471800 - DNA, 25 bp, Homo sapien
ccatactgtgttccgagtgtgggag

SEQ ID NO: 3471801 - DNA, 25 bp, Homo sapien
ttttccttaggagtatactgcaatt

SEQ ID NO: 3471802 - DNA, 25 bp, Homo sapien
cctggctagattctcctggagattc

SEQ ID NO: 3471803 - DNA, 25 bp, Homo sapien
tttgatgcgttcttcacatgttcca

SEQ ID NO: 3471804 - DNA, 25 bp, Homo sapien
gagaaagccagagtagtcataactt

SEQ ID NO: 3471805 - DNA, 25 bp, Homo sapien
tcataacttgtacttagcggctgcg

SEQ ID NO: 3471806 - DNA, 25 bp, Homo sapien
tgcttggcgagatcttcagtgtgaa

SEQ ID NO: 3471807 - DNA, 25 bp, Homo sapien
tgaagcagaaaatgacgagctttac

SEQ ID NO: 3471808 - DNA, 25 bp, Homo sapien
taactatcttgatatgaatgggaaa

SEQ ID NO: 3471809 - DNA, 25 bp, Homo sapien
tactttaatatgagctggaggagga

SEQ ID NO: 3471810 - DNA, 25 bp, Homo sapien
aagatgtctttttgccaaccagtaa

SEQ ID NO: 3471811 - DNA, 25 bp, Homo sapien
taaggcctctggtacccaaagatgt

SEQ ID NO: 3471812 - DNA, 25 bp, Homo sapien
caatatgcacttaaatgtttggatc

SEQ ID NO: 3471813 - DNA, 25 bp, Homo sapien
cagtccagaacttgtgatgcaggtc

SEQ ID NO: 3471814 - DNA, 25 bp, Homo sapien
taaaaagctagtatcccagagaaat

SEQ ID NO: 3471815 - DNA, 25 bp, Homo sapien
gaggtggtggaaggttattacataa

SEQ ID NO: 3471816 - DNA, 25 bp, Homo sapien
ggctaaagccggagcctaattcatg

SEQ ID NO: 3471817 - DNA, 25 bp, Homo sapien
gccggagcctaattcatgatgcatg

SEQ ID NO: 3471818 - DNA, 25 bp, Homo sapien
gagagcagggaaggctaaagccgga

SEQ ID NO: 3471819 - DNA, 25 bp, Homo sapien
gatgcatgaacgcattgatcttctt

SEQ ID NO: 3471820 - DNA, 25 bp, Homo sapien
cctgaaacggtgatgtatggctggt

SEQ ID NO: 3471821 - DNA, 25 bp, Homo sapien
ctttctcgttaatgtgcaatcctga

SEQ ID NO: 3471822 - DNA, 25 bp, Homo sapien
gcttgacaggcggaaactgcagctt

SEQ ID NO: 3471823 - DNA, 25 bp, Homo sapien
agctggtcagcttgacaggcggaaa

SEQ ID NO: 3471824 - DNA, 25 bp, Homo sapien
ctgtaagtgacgaagaggcctgagt

SEQ ID NO: 3471825 - DNA, 25 bp, Homo sapien
gacaagggtggagcgaagccttaat

SEQ ID NO: 3471826 - DNA, 25 bp, Homo sapien
gaggagaagacaagggtggagcgaa

SEQ ID NO: 3471827 - DNA, 25 bp, Homo sapien
agtgagtggtagaggagaagacaag

SEQ ID NO: 3471828 - DNA, 25 bp, Homo sapien
tacctacaaacttctcttgcttatt

SEQ ID NO: 3471829 - DNA, 25 bp, Homo sapien
ttgctcagccaaaatttacctacaa

SEQ ID NO: 3471830 - DNA, 25 bp, Homo sapien
ctcagccaaaatttacctacaaact

SEQ ID NO: 3471831 - DNA, 25 bp, Homo sapien
tgctcagccaaaatttacctacaaa

SEQ ID NO: 3471832 - DNA, 25 bp, Homo sapien
gctctctttggaacagggctttaaa

SEQ ID NO: 3471833 - DNA, 25 bp, Homo sapien
accagggtggtatttgaaaacatag

SEQ ID NO: 3471834 - DNA, 25 bp, Homo sapien
caggataaacaggtttgatggcagc

SEQ ID NO: 3471835 - DNA, 25 bp, Homo sapien
agccaatgacagagctctctttgga

SEQ ID NO: 3471836 - DNA, 25 bp, Homo sapien
caaagggcccaacgtgaacaccagc

SEQ ID NO: 3471837 - DNA, 25 bp, Homo sapien
tcaaagggcccaacgtgaacaccag

SEQ ID NO: 3471838 - DNA, 25 bp, Homo sapien
tgaccaaccttgataggttgactgg

SEQ ID NO: 3471839 - DNA, 25 bp, Homo sapien
cttccaaaggctcaccctcaggcat

SEQ ID NO: 3471840 - DNA, 25 bp, Homo sapien
caaccttgataggttgactggcccc

SEQ ID NO: 3471841 - DNA, 25 bp, Homo sapien
cacctgaccaaccttgataggttga

SEQ ID NO: 3471842 - DNA, 25 bp, Homo sapien
gcatatcagaccaaactggctaggg

SEQ ID NO: 3471843 - DNA, 25 bp, Homo sapien
tactctagagtgaacagttggaggc

SEQ ID NO: 3471844 - DNA, 25 bp, Homo sapien
gcgggtctcctagatgcagcagtta

SEQ ID NO: 3471845 - DNA, 25 bp, Homo sapien
tctactgcaaggaagtgacgggtcc

SEQ ID NO: 3471846 - DNA, 25 bp, Homo sapien
gtgtgatagcaaatggccgaaatat

SEQ ID NO: 3471847 - DNA, 25 bp, Homo sapien
gaatatgtgtgatagcaaatggccg

SEQ ID NO: 3471848 - DNA, 25 bp, Homo sapien
ctcgtgaaattcctgcattcgcatg

SEQ ID NO: 3471849 - DNA, 25 bp, Homo sapien
tcctgcattcgcatgaatatgtgtg

SEQ ID NO: 3471850 - DNA, 25 bp, Homo sapien
ggtttacattggaagagaattgtac

SEQ ID NO: 3471851 - DNA, 25 bp, Homo sapien
gaaggcattcacagaacaggtttac

SEQ ID NO: 3471852 - DNA, 25 bp, Homo sapien
tcacagaacaggtttacattggaag

SEQ ID NO: 3471853 - DNA, 25 bp, Homo sapien
cagaaggcattcacagaacaggttt

SEQ ID NO: 3471854 - DNA, 25 bp, Homo sapien
gccaggaaagccgatttcagctgca

SEQ ID NO: 3471855 - DNA, 25 bp, Homo sapien
agccgatttcagctgcaaatgcctt

SEQ ID NO: 3471856 - DNA, 25 bp, Homo sapien
gcagccaggaaagccgatttcagct

SEQ ID NO: 3471857 - DNA, 25 bp, Homo sapien
ggaaagccgatttcagctgcaaatg

SEQ ID NO: 3471858 - DNA, 25 bp, Homo sapien
gaacgacttctagactgctttctga

SEQ ID NO: 3471859 - DNA, 25 bp, Homo sapien
gctttctgacgaagggcatgtgcac

SEQ ID NO: 3471860 - DNA, 25 bp, Homo sapien
tctgttctgacggaaattggcaact

SEQ ID NO: 3471861 - DNA, 25 bp, Homo sapien
gctagctgtcgtgctggtccatcca

SEQ ID NO: 3471862 - DNA, 25 bp, Homo sapien
aggcagcttgccaggtggcatggct

SEQ ID NO: 3471863 - DNA, 25 bp, Homo sapien
tgaggtcgccaaggtatgaatcaac

SEQ ID NO: 3471864 - DNA, 25 bp, Homo sapien
catggttgcatccataatatagatg

SEQ ID NO: 3471865 - DNA, 25 bp, Homo sapien
cataatatagatggttcatgtagca

SEQ ID NO: 3471866 - DNA, 25 bp, Homo sapien
tgatttataggccagagttgtccct

SEQ ID NO: 3471867 - DNA, 25 bp, Homo sapien
agatctgtatgcttctcaatggcta

SEQ ID NO: 3471868 - DNA, 25 bp, Homo sapien
ttataggccagagttgtcccttggg

SEQ ID NO: 3471869 - DNA, 25 bp, Homo sapien
ttttcccacttcatactgagctgat

SEQ ID NO: 3471870 - DNA, 25 bp, Homo sapien
ggcttccgaaggtcagataactgat

SEQ ID NO: 3471871 - DNA, 25 bp, Homo sapien
tgatctgggatcactcagctacaag

SEQ ID NO: 3471872 - DNA, 25 bp, Homo sapien
cactagtcagtgtgagtaccccaac

SEQ ID NO: 3471873 - DNA, 25 bp, Homo sapien
tatcaatcctatgagcacgacgcca

SEQ ID NO: 3471874 - DNA, 25 bp, Homo sapien
gaggaaactgacaacatgacgggtg

SEQ ID NO: 3471875 - DNA, 25 bp, Homo sapien
ctaaggacagcacatgagaggcgcc

SEQ ID NO: 3471876 - DNA, 25 bp, Homo sapien
ttaattagccatggcatcttgccca

SEQ ID NO: 3471877 - DNA, 25 bp, Homo sapien
aataacaggtgtcccctaaggacag

SEQ ID NO: 3471878 - DNA, 25 bp, Homo sapien
cctaacagccgacctttcaagaact

SEQ ID NO: 3471879 - DNA, 25 bp, Homo sapien
aagaggatagccagatactcaggaa

SEQ ID NO: 3471880 - DNA, 25 bp, Homo sapien
acagactggacagtccccagggtat

SEQ ID NO: 3471881 - DNA, 25 bp, Homo sapien
ccacagactggacagtccccagggt

SEQ ID NO: 3471882 - DNA, 25 bp, Homo sapien
gcccacagactggacagtccccagg

SEQ ID NO: 3471883 - DNA, 25 bp, Homo sapien
ctgcagcccacagactggacagtcc

SEQ ID NO: 3471884 - DNA, 25 bp, Homo sapien
gcgccgccatcgatgttgtctttga

SEQ ID NO: 3471885 - DNA, 25 bp, Homo sapien
tctgcgccgccatcgatgttgtctt

SEQ ID NO: 3471886 - DNA, 25 bp, Homo sapien
tgcgccgccatcgatgttgtctttg

SEQ ID NO: 3471887 - DNA, 25 bp, Homo sapien
ctctgcgccgccatcgatgttgtct

SEQ ID NO: 3471888 - DNA, 25 bp, Homo sapien
tcaaatggtcctttatcgaaatatt

SEQ ID NO: 3471889 - DNA, 25 bp, Homo sapien
ctagttgtcaaatggtcctttatcg

SEQ ID NO: 3471890 - DNA, 25 bp, Homo sapien
agttgtcaaatggtcctttatcgaa

SEQ ID NO: 3471891 - DNA, 25 bp, Homo sapien
tgtcaaatggtcctttatcgaaata

SEQ ID NO: 3471892 - DNA, 25 bp, Homo sapien
ctgatctgaactcctctaaaagtgg

SEQ ID NO: 3471893 - DNA, 25 bp, Homo sapien
ctgaccagtctgcctctccttgctg

SEQ ID NO: 3471894 - DNA, 25 bp, Homo sapien
ctgaactcctctaaaagtggggagg

SEQ ID NO: 3471895 - DNA, 25 bp, Homo sapien
atctgaactcctctaaaagtgggga

SEQ ID NO: 3471896 - DNA, 25 bp, Homo sapien
ctggaggccagaatcgtgcataagc

SEQ ID NO: 3471897 - DNA, 25 bp, Homo sapien
gctttatgctcacgttgttcagtgt

SEQ ID NO: 3471898 - DNA, 25 bp, Homo sapien
tcaatcacatcggagccaatctgcg

SEQ ID NO: 3471899 - DNA, 25 bp, Homo sapien
gcaaacgtgaagtctgctttatgct

SEQ ID NO: 3471900 - DNA, 25 bp, Homo sapien
gctctgaagcttgcccgggtctctc

SEQ ID NO: 3471901 - DNA, 25 bp, Homo sapien
ttgctctgaagcttgcccgggtctc

SEQ ID NO: 3471902 - DNA, 25 bp, Homo sapien
tcttgctctgaagcttgcccgggtc

SEQ ID NO: 3471903 - DNA, 25 bp, Homo sapien
cactcttgctctgaagcttgcccgg

SEQ ID NO: 3471904 - DNA, 25 bp, Homo sapien
tgttgcagttacgttaatgaggttt

SEQ ID NO: 3471905 - DNA, 25 bp, Homo sapien
ttgcagttacgttaatgaggtttta

SEQ ID NO: 3471906 - DNA, 25 bp, Homo sapien
tgcagttacgttaatgaggttttac

SEQ ID NO: 3471907 - DNA, 25 bp, Homo sapien
aaggcaaagaggaagccagcacgtc

SEQ ID NO: 3471908 - DNA, 25 bp, Homo sapien
ggaaacttacatcatggaggaaggc

SEQ ID NO: 3471909 - DNA, 25 bp, Homo sapien
aggaaacttacatcatggaggaagg

SEQ ID NO: 3471910 - DNA, 25 bp, Homo sapien
ggaggaaggcaaagaggaagccagc

SEQ ID NO: 3471911 - DNA, 25 bp, Homo sapien
tgggtgggaactccaactgcacaca

SEQ ID NO: 3471912 - DNA, 25 bp, Homo sapien
cgccaaaggcaaagagttgggtggg

SEQ ID NO: 3471913 - DNA, 25 bp, Homo sapien
gccaaaggcaaagagttgggtggga

SEQ ID NO: 3471914 - DNA, 25 bp, Homo sapien
tctgcagattgatgggatgcgtgct

SEQ ID NO: 3471915 - DNA, 25 bp, Homo sapien
ggaatgagacctgctgcggacgttt

SEQ ID NO: 3471916 - DNA, 25 bp, Homo sapien
gcggacgtttcccagccacttgtgt

SEQ ID NO: 3471917 - DNA, 25 bp, Homo sapien
tgcgtgctggagtcctttgaggtca

SEQ ID NO: 3471918 - DNA, 25 bp, Homo sapien
acaatcgagaggagtggaataagtg

SEQ ID NO: 3471919 - DNA, 25 bp, Homo sapien
ggtccctgtgattgggtggtttgcg

SEQ ID NO: 3471920 - DNA, 25 bp, Homo sapien
tttaattgacaatcgagaggagtgg

SEQ ID NO: 3471921 - DNA, 25 bp, Homo sapien
gagtggaataagtggaaggtggagg

SEQ ID NO: 3471922 - DNA, 25 bp, Homo sapien
ctttcttcacttctggcccaaggca

SEQ ID NO: 3471923 - DNA, 25 bp, Homo sapien
ctgcagcagaggtgaactgggacat

SEQ ID NO: 3471924 - DNA, 25 bp, Homo sapien
caggtcagagtcaggaggaccctgg

SEQ ID NO: 3471925 - DNA, 25 bp, Homo sapien
cttctggcccaaggcaggtcagagt

SEQ ID NO: 3471926 - DNA, 25 bp, Homo sapien
ggccacggttgaagatactgtcaca

SEQ ID NO: 3471927 - DNA, 25 bp, Homo sapien
aagatactgtcacaggacccgggtc

SEQ ID NO: 3471928 - DNA, 25 bp, Homo sapien
aggctgatggccacggttgaagata

SEQ ID NO: 3471929 - DNA, 25 bp, Homo sapien
gacccgggtctcagcccgctgatgt

SEQ ID NO: 3471930 - DNA, 25 bp, Homo sapien
aggattggatgattcagccaagggc

SEQ ID NO: 3471931 - DNA, 25 bp, Homo sapien
tgagcactcaaaccccaatactgtg

SEQ ID NO: 3471932 - DNA, 25 bp, Homo sapien
tcttctccatggaagttcaggattg

SEQ ID NO: 3471933 - DNA, 25 bp, Homo sapien
gatggcaaacagaacagtccttatt

SEQ ID NO: 3471934 - DNA, 25 bp, Homo sapien
ttctcaagaagtgggagcggtacag

SEQ ID NO: 3471935 - DNA, 25 bp, Homo sapien
gagaccagcagaggagtcctgccgt

SEQ ID NO: 3471936 - DNA, 25 bp, Homo sapien
gtacagggccgggccccagtctgat

SEQ ID NO: 3471937 - DNA, 25 bp, Homo sapien
ccccagtctgatggggagaccagca

SEQ ID NO: 3471938 - DNA, 25 bp, Homo sapien
tgcatagagggtgctaaacttcagt

SEQ ID NO: 3471939 - DNA, 25 bp, Homo sapien
tgacgatgtcacacatgaataatgc

SEQ ID NO: 3471940 - DNA, 25 bp, Homo sapien
ttctgctggaactgtatggctgccc

SEQ ID NO: 3471941 - DNA, 25 bp, Homo sapien
ttcagtttaagcaagatccaaatgc

SEQ ID NO: 3471942 - DNA, 25 bp, Homo sapien
gaagccacagattgccatggcctca

SEQ ID NO: 3471943 - DNA, 25 bp, Homo sapien
gccacagattgccatggcctcatct

SEQ ID NO: 3471944 - DNA, 25 bp, Homo sapien
ctcatctcccagaaccgtgtggcaa

SEQ ID NO: 3471945 - DNA, 25 bp, Homo sapien
accgtgtggcaacgtgaagcttgga

SEQ ID NO: 3471946 - DNA, 25 bp, Homo sapien
taccacttgtgcgagataactcagc

SEQ ID NO: 3471947 - DNA, 25 bp, Homo sapien
cagagaaattgcactacggacagga

SEQ ID NO: 3471948 - DNA, 25 bp, Homo sapien
gaagtcagtggcctgtaactcaaca

SEQ ID NO: 3471949 - DNA, 25 bp, Homo sapien
taaaacccctgctaagctgcgaggg

SEQ ID NO: 3471950 - DNA, 25 bp, Homo sapien
ctaccaaaccatacttgccctggag

SEQ ID NO: 3471951 - DNA, 25 bp, Homo sapien
tccacatcaaaccagttacacccat

SEQ ID NO: 3471952 - DNA, 25 bp, Homo sapien
taccaaaccatacttgccctggagc

SEQ ID NO: 3471953 - DNA, 25 bp, Homo sapien
ggctccacatcaaaccagttacacc

SEQ ID NO: 3471954 - DNA, 25 bp, Homo sapien
cagaatctggcttcagcatccgtga

SEQ ID NO: 3471955 - DNA, 25 bp, Homo sapien
ttggctgcaattagcaatgactttg

SEQ ID NO: 3471956 - DNA, 25 bp, Homo sapien
gcatccgtgaaacatgcagatcttt

SEQ ID NO: 3471957 - DNA, 25 bp, Homo sapien
cacccgatagagtaattggctgcaa

SEQ ID NO: 3471958 - DNA, 25 bp, Homo sapien
cagctagttagagagtggacagtat

SEQ ID NO: 3471959 - DNA, 25 bp, Homo sapien
tgatgcagaacagtcactctgggca

SEQ ID NO: 3471960 - DNA, 25 bp, Homo sapien
aaagggaattcggatcagacctcca

SEQ ID NO: 3471961 - DNA, 25 bp, Homo sapien
caagccgggtactgaatttgccaca

SEQ ID NO: 3471962 - DNA, 25 bp, Homo sapien
ttctttgatgttgctgttcctggca

SEQ ID NO: 3471963 - DNA, 25 bp, Homo sapien
tgttcctggcatcttcagcaaggag

SEQ ID NO: 3471964 - DNA, 25 bp, Homo sapien
tattccaacttcaggcactttctct

SEQ ID NO: 3471965 - DNA, 25 bp, Homo sapien
tggcatcttcagcaaggagactggg

SEQ ID NO: 3471966 - DNA, 25 bp, Homo sapien
taagggacgttgttctactcaagcc

SEQ ID NO: 3471967 - DNA, 25 bp, Homo sapien
gaaagatcccaaggaggtgacctgg

SEQ ID NO: 3471968 - DNA, 25 bp, Homo sapien
taaatgcagcttggacacatgacca

SEQ ID NO: 3471969 - DNA, 25 bp, Homo sapien
tcgccacctgggatcaaaaattgcc

SEQ ID NO: 3471970 - DNA, 25 bp, Homo sapien
gagccacagagtttctgccatcctc

SEQ ID NO: 3471971 - DNA, 25 bp, Homo sapien
tgcagagccacagagtttctgccat

SEQ ID NO: 3471972 - DNA, 25 bp, Homo sapien
ttccccagcccttgcggttgtctcc

SEQ ID NO: 3471973 - DNA, 25 bp, Homo sapien
cccagcccttgcggttgtctcccat

SEQ ID NO: 3471974 - DNA, 25 bp, Homo sapien
aaatgtttcaacgactctccaaggg

SEQ ID NO: 3471975 - DNA, 25 bp, Homo sapien
agatccttgcaaagccgagcagcgg

SEQ ID NO: 3471976 - DNA, 25 bp, Homo sapien
agggatctttggacagggctgcaca

SEQ ID NO: 3471977 - DNA, 25 bp, Homo sapien
tacagagtaccttgggcagagcaga

SEQ ID NO: 3471978 - DNA, 25 bp, Homo sapien
ttaccaggactgtctcacgggcatc

SEQ ID NO: 3471979 - DNA, 25 bp, Homo sapien
ccttgaatttttaccaggactgtct

SEQ ID NO: 3471980 - DNA, 25 bp, Homo sapien
aggactgtctcacgggcatcctctg

SEQ ID NO: 3471981 - DNA, 25 bp, Homo sapien
agcttccttggcccgaaccttgaat

SEQ ID NO: 3471982 - DNA, 25 bp, Homo sapien
gattctgtgtactgacagatgtgtg

SEQ ID NO: 3471983 - DNA, 25 bp, Homo sapien
cactggaaaacagcgaaaggcttgt

SEQ ID NO: 3471984 - DNA, 25 bp, Homo sapien
ccttgtctgttggagaaacacatcc

SEQ ID NO: 3471985 - DNA, 25 bp, Homo sapien
catcctaaaagagcacattgtgatt

SEQ ID NO: 3471986 - DNA, 25 bp, Homo sapien
gccgcgcgtgcttaccttgcaaact

SEQ ID NO: 3471987 - DNA, 25 bp, Homo sapien
actccagagcaattacgggtccccg

SEQ ID NO: 3471988 - DNA, 25 bp, Homo sapien
ttgcaaactcgcaggcaactccaga

SEQ ID NO: 3471989 - DNA, 25 bp, Homo sapien
tacctggagctgattgcacagccgg

SEQ ID NO: 3471990 - DNA, 25 bp, Homo sapien
tcttccagaagcatattgcagagga

SEQ ID NO: 3471991 - DNA, 25 bp, Homo sapien
tctcctccctagagtgaccagtctt

SEQ ID NO: 3471992 - DNA, 25 bp, Homo sapien
ctctcccgggatgccgcctgaacac

SEQ ID NO: 3471993 - DNA, 25 bp, Homo sapien
ctggagaggaatgcactccaattca

SEQ ID NO: 3471994 - DNA, 25 bp, Homo sapien
cacaagggtttgcttcggattctgg

SEQ ID NO: 3471995 - DNA, 25 bp, Homo sapien
caaccctagcatccattctaaaatg

SEQ ID NO: 3471996 - DNA, 25 bp, Homo sapien
cactggccagctctgaactttaaaa

SEQ ID NO: 3471997 - DNA, 25 bp, Homo sapien
gattcattctccttggcacaagggt

SEQ ID NO: 3471998 - DNA, 25 bp, Homo sapien
ctgtagcagcgctatagcactaccc

SEQ ID NO: 3471999 - DNA, 25 bp, Homo sapien
tggatctctgaatttgggctctgcc

SEQ ID NO: 3472000 - DNA, 25 bp, Homo sapien
agccccgcctgtagcagcgctatag

SEQ ID NO: 3472001 - DNA, 25 bp, Homo sapien
ccaccaagggcctggttggatctct

SEQ ID NO: 3472002 - DNA, 25 bp, Homo sapien
gtgaatatctaaactgtgctgacag

SEQ ID NO: 3472003 - DNA, 25 bp, Homo sapien
atccagagggggcttaagatttgtg

SEQ ID NO: 3472004 - DNA, 25 bp, Homo sapien
gatttgtgtgaatatctaaactgtg

SEQ ID NO: 3472005 - DNA, 25 bp, Homo sapien
tttcaataaatccagagggggctta

SEQ ID NO: 3472006 - DNA, 25 bp, Homo sapien
tggtggtgaccagatgaaaagagaa

SEQ ID NO: 3472007 - DNA, 25 bp, Homo sapien
gaagtcgcattgagcgaataccgaa

SEQ ID NO: 3472008 - DNA, 25 bp, Homo sapien
tctggtttgcaacataagacctctt

SEQ ID NO: 3472009 - DNA, 25 bp, Homo sapien
gtataatgagaaactctttttgccc

SEQ ID NO: 3472010 - DNA, 25 bp, Homo sapien
gagggcgttgtgcacagatttcaag

SEQ ID NO: 3472011 - DNA, 25 bp, Homo sapien
cagacagagggcgttgtgcacagat

SEQ ID NO: 3472012 - DNA, 25 bp, Homo sapien
gcagccttgacttggaccccaggga

SEQ ID NO: 3472013 - DNA, 25 bp, Homo sapien
gccccacacctgagatgcacccaga

SEQ ID NO: 3472014 - DNA, 25 bp, Homo sapien
ggcttactacgacccattgggtctg

SEQ ID NO: 3472015 - DNA, 25 bp, Homo sapien
actggggcttactacgacccattgg

SEQ ID NO: 3472016 - DNA, 25 bp, Homo sapien
ccaactggggcttactacgacccat

SEQ ID NO: 3472017 - DNA, 25 bp, Homo sapien
ctacgacccattgggtctgctggga

SEQ ID NO: 3472018 - DNA, 25 bp, Homo sapien
caaatgttacctcccaggagagacc

SEQ ID NO: 3472019 - DNA, 25 bp, Homo sapien
ggagagacctttcatgagaccccag

SEQ ID NO: 3472020 - DNA, 25 bp, Homo sapien
gtcctcctggtgtactatctcatca

SEQ ID NO: 3472021 - DNA, 25 bp, Homo sapien
catggaaccatagctccatggaagc

SEQ ID NO: 3472022 - DNA, 25 bp, Homo sapien
acaaatacgcttcttctgcttcgga

SEQ ID NO: 3472023 - DNA, 25 bp, Homo sapien
caaacctgagacactctgtgttatc

SEQ ID NO: 3472024 - DNA, 25 bp, Homo sapien
cagaggtgaagatttcagcctgaca

SEQ ID NO: 3472025 - DNA, 25 bp, Homo sapien
ttatcttaaactgcacacccacaca

SEQ ID NO: 3472026 - DNA, 25 bp, Homo sapien
tctacatagtctactggaggtgcct

SEQ ID NO: 3472027 - DNA, 25 bp, Homo sapien
gcagcttgcattgggtgaccttgag

SEQ ID NO: 3472028 - DNA, 25 bp, Homo sapien
tgtagaagcattggacagctttccc

SEQ ID NO: 3472029 - DNA, 25 bp, Homo sapien
ttgcctgacttggttttgtccccag

SEQ ID NO: 3472030 - DNA, 25 bp, Homo sapien
ggcagagcagatgcatgctaatgag

SEQ ID NO: 3472031 - DNA, 25 bp, Homo sapien
cttcagtggataatggaacacaagg

SEQ ID NO: 3472032 - DNA, 25 bp, Homo sapien
gaaatatgacaagaactaggctggg

SEQ ID NO: 3472033 - DNA, 25 bp, Homo sapien
taaacacccgatccagtaggaaata

SEQ ID NO: 3472034 - DNA, 25 bp, Homo sapien
cagggctggcctggggtctggctct

SEQ ID NO: 3472035 - DNA, 25 bp, Homo sapien
gcagggctggcctggggtctggctc

SEQ ID NO: 3472036 - DNA, 25 bp, Homo sapien
ggctggcctggggtctggctctcac

SEQ ID NO: 3472037 - DNA, 25 bp, Homo sapien
cagcagggctggcctggggtctggc

SEQ ID NO: 3472038 - DNA, 25 bp, Homo sapien
cctgtctggcgctaattgtttgttg

SEQ ID NO: 3472039 - DNA, 25 bp, Homo sapien
ttgtttgttgctcaactgcaaatgc

SEQ ID NO: 3472040 - DNA, 25 bp, Homo sapien
taattgtttgttgctcaactgcaaa

SEQ ID NO: 3472041 - DNA, 25 bp, Homo sapien
agagagcctgtctggcgctaattgt

SEQ ID NO: 3472042 - DNA, 25 bp, Homo sapien
tgacttcggagctcagggtagggct

SEQ ID NO: 3472043 - DNA, 25 bp, Homo sapien
cttcaccagccccaactgactgtga

SEQ ID NO: 3472044 - DNA, 25 bp, Homo sapien
ctgactgtgacttcggagctcaggg

SEQ ID NO: 3472045 - DNA, 25 bp, Homo sapien
ttcaccagccccaactgactgtgac

SEQ ID NO: 3472046 - DNA, 25 bp, Homo sapien
attcagcatgttctgcagacgtgct

SEQ ID NO: 3472047 - DNA, 25 bp, Homo sapien
tcagcatgttctgcagacgtgcttt

SEQ ID NO: 3472048 - DNA, 25 bp, Homo sapien
ttcagcatgttctgcagacgtgctt

SEQ ID NO: 3472049 - DNA, 25 bp, Homo sapien
cagcatgttctgcagacgtgctttc

SEQ ID NO: 3472050 - DNA, 25 bp, Homo sapien
tgctgggtcactaagcccacctgtg

SEQ ID NO: 3472051 - DNA, 25 bp, Homo sapien
tgcacgtgggtgactatattagaac

SEQ ID NO: 3472052 - DNA, 25 bp, Homo sapien
aagatctggagaagtgaggtacccc

SEQ ID NO: 3472053 - DNA, 25 bp, Homo sapien
atttacagcaaacagatccctggga

SEQ ID NO: 3472054 - DNA, 25 bp, Homo sapien
aattatcacgttatcgagtcggagc

SEQ ID NO: 3472055 - DNA, 25 bp, Homo sapien
gataatccatcacccaccgagtggg

SEQ ID NO: 3472056 - DNA, 25 bp, Homo sapien
gacattctctgcctgggcgtgtgca

SEQ ID NO: 3472057 - DNA, 25 bp, Homo sapien
gcgtgtgcatcaatctgcggctcaa

SEQ ID NO: 3472058 - DNA, 25 bp, Homo sapien
cctttggcctccactaggtcaaaga

SEQ ID NO: 3472059 - DNA, 25 bp, Homo sapien
ctcccccatggaagacagggctctc

SEQ ID NO: 3472060 - DNA, 25 bp, Homo sapien
cctctggccaccagccctttggcct

SEQ ID NO: 3472061 - DNA, 25 bp, Homo sapien
tggcctccactaggtcaaagaaagg

SEQ ID NO: 3472062 - DNA, 25 bp, Homo sapien
ctcaggctgaacagtgctctttttc

SEQ ID NO: 3472063 - DNA, 25 bp, Homo sapien
cccaccaatgttacccttgatgttc

SEQ ID NO: 3472064 - DNA, 25 bp, Homo sapien
tttcccaccaatgttacccttgatg

SEQ ID NO: 3472065 - DNA, 25 bp, Homo sapien
aggctgaacagtgctctttttccca

SEQ ID NO: 3472066 - DNA, 25 bp, Homo sapien
cagcccatggtgccgatctttgcac

SEQ ID NO: 3472067 - DNA, 25 bp, Homo sapien
ctagcagcccatggtgccgatcttt

SEQ ID NO: 3472068 - DNA, 25 bp, Homo sapien
gcagcccatggtgccgatctttgca

SEQ ID NO: 3472069 - DNA, 25 bp, Homo sapien
tagcagcccatggtgccgatctttg

SEQ ID NO: 3472070 - DNA, 25 bp, Homo sapien
ctctcagcctgtacgtgccccagca

SEQ ID NO: 3472071 - DNA, 25 bp, Homo sapien
tctcagcctgtacgtgccccagcag

SEQ ID NO: 3472072 - DNA, 25 bp, Homo sapien
ctcagcctgtacgtgccccagcagg

SEQ ID NO: 3472073 - DNA, 25 bp, Homo sapien
tatgtttacctctcagaatagcaat

SEQ ID NO: 3472074 - DNA, 25 bp, Homo sapien
agacctctggcttgactcattaatg

SEQ ID NO: 3472075 - DNA, 25 bp, Homo sapien
agtcccagtagcaacggattggtta

SEQ ID NO: 3472076 - DNA, 25 bp, Homo sapien
aagccgctcagcgttccagagggca

SEQ ID NO: 3472077 - DNA, 25 bp, Homo sapien
tccagcctctcgtagcacaggcctg

SEQ ID NO: 3472078 - DNA, 25 bp, Homo sapien
tcatccagcctctcgtagcacaggc

SEQ ID NO: 3472079 - DNA, 25 bp, Homo sapien
catccagcctctcgtagcacaggcc

SEQ ID NO: 3472080 - DNA, 25 bp, Homo sapien
atcatccagcctctcgtagcacagg

SEQ ID NO: 3472081 - DNA, 25 bp, Homo sapien
tccacctaaacttgaatttccgctg

SEQ ID NO: 3472082 - DNA, 25 bp, Homo sapien
tgcgagtcaccaaggtcctctctac

SEQ ID NO: 3472083 - DNA, 25 bp, Homo sapien
acctaaacttgaatttccgctgctg

SEQ ID NO: 3472084 - DNA, 25 bp, Homo sapien
aatttccgctgctgcgagtcaccaa

SEQ ID NO: 3472085 - DNA, 25 bp, Homo sapien
agcattgcgtccctcaccccagtga

SEQ ID NO: 3472086 - DNA, 25 bp, Homo sapien
ctcaccccagtgacgatgggcagtt

SEQ ID NO: 3472087 - DNA, 25 bp, Homo sapien
ttgcgtccctcaccccagtgacgat

SEQ ID NO: 3472088 - DNA, 25 bp, Homo sapien
ctctcagcagcattgcgtccctcac

SEQ ID NO: 3472089 - DNA, 25 bp, Homo sapien
ctaggcctccaaattgactttgact

SEQ ID NO: 3472090 - DNA, 25 bp, Homo sapien
gactttgacttcacaggagagctca

SEQ ID NO: 3472091 - DNA, 25 bp, Homo sapien
tcattatcccaatcaatatctgagt

SEQ ID NO: 3472092 - DNA, 25 bp, Homo sapien
ccttctctagagttttggcaaactc

SEQ ID NO: 3472093 - DNA, 25 bp, Homo sapien
tctcagcgtgtctgtgatatcacaa

SEQ ID NO: 3472094 - DNA, 25 bp, Homo sapien
catttgtggatctcagcgtgtctgt

SEQ ID NO: 3472095 - DNA, 25 bp, Homo sapien
taatgacacatttgtggatctcagc

SEQ ID NO: 3472096 - DNA, 25 bp, Homo sapien
acctggtgggctaatgacacatttg

SEQ ID NO: 3472097 - DNA, 25 bp, Homo sapien
acagtgattacctttggtggtatga

SEQ ID NO: 3472098 - DNA, 25 bp, Homo sapien
ggtggtatgattgtggataatatcc

SEQ ID NO: 3472099 - DNA, 25 bp, Homo sapien
tgattgtggataatatcctcctttc

SEQ ID NO: 3472100 - DNA, 25 bp, Homo sapien
taacagtgattacctttggtggtat

SEQ ID NO: 3472101 - DNA, 25 bp, Homo sapien
ccttgggcatgctcgcaagcttctg

SEQ ID NO: 3472102 - DNA, 25 bp, Homo sapien
aagccttgggcatgctcgcaagctt

SEQ ID NO: 3472103 - DNA, 25 bp, Homo sapien
gccttgggcatgctcgcaagcttct

SEQ ID NO: 3472104 - DNA, 25 bp, Homo sapien
gggcatgctcgcaagcttctgtctg

SEQ ID NO: 3472105 - DNA, 25 bp, Homo sapien
tgtctgggcatcagccttaagcaag

SEQ ID NO: 3472106 - DNA, 25 bp, Homo sapien
taagtgagtactagtgaggtgcccg

SEQ ID NO: 3472107 - DNA, 25 bp, Homo sapien
tcaaaattataaggtcagtaatggt

SEQ ID NO: 3472108 - DNA, 25 bp, Homo sapien
gagagaagcggcttcagctgtcagt

SEQ ID NO: 3472109 - DNA, 25 bp, Homo sapien
gcagaatatgctgatgtgagagtct

SEQ ID NO: 3472110 - DNA, 25 bp, Homo sapien
aacagcagcagaatatgctgatgtg

SEQ ID NO: 3472111 - DNA, 25 bp, Homo sapien
gctgatgtgagagtctggtgccctt

SEQ ID NO: 3472112 - DNA, 25 bp, Homo sapien
ccttgcctgaagctgaggggggcca

SEQ ID NO: 3472113 - DNA, 25 bp, Homo sapien
gagcaatctgccctgcgtctcgatg

SEQ ID NO: 3472114 - DNA, 25 bp, Homo sapien
gatgaaaatctgtccatgtggccga

SEQ ID NO: 3472115 - DNA, 25 bp, Homo sapien
atctgtccatgtggccgaaggcagg

SEQ ID NO: 3472116 - DNA, 25 bp, Homo sapien
cgtctcgatggcgatgaaaatctgt

SEQ ID NO: 3472117 - DNA, 25 bp, Homo sapien
gcagcagcgcagtgacatgtactca

SEQ ID NO: 3472118 - DNA, 25 bp, Homo sapien
tgctttttagacttctcgtatttct

SEQ ID NO: 3472119 - DNA, 25 bp, Homo sapien
gtgcctgctttcagcatgactgtaa

SEQ ID NO: 3472120 - DNA, 25 bp, Homo sapien
agtgtgcctgctttcagcatgactg

SEQ ID NO: 3472121 - DNA, 25 bp, Homo sapien
tgtgcctgctttcagcatgactgta

SEQ ID NO: 3472122 - DNA, 25 bp, Homo sapien
cagatggcgtgtttggactgttcgc

SEQ ID NO: 3472123 - DNA, 25 bp, Homo sapien
tgttcgcattcgctcctcataggtg

SEQ ID NO: 3472124 - DNA, 25 bp, Homo sapien
ggcttccctgcccaatcactaggat

SEQ ID NO: 3472125 - DNA, 25 bp, Homo sapien
caaaagacagcatgtggagtgaagc

SEQ ID NO: 3472126 - DNA, 25 bp, Homo sapien
gaactggcagcatgagcttgaattt

SEQ ID NO: 3472127 - DNA, 25 bp, Homo sapien
cagcatgagcttgaattttctcttg

SEQ ID NO: 3472128 - DNA, 25 bp, Homo sapien
tttgttttacagtgccgtggacact

SEQ ID NO: 3472129 - DNA, 25 bp, Homo sapien
ttgttttacagtgccgtggacactg

SEQ ID NO: 3472130 - DNA, 25 bp, Homo sapien
tggtccgcagctcagccgagcagct

SEQ ID NO: 3472131 - DNA, 25 bp, Homo sapien
caaacccgcccaaggtagaggcgtg

SEQ ID NO: 3472132 - DNA, 25 bp, Homo sapien
gctgctctcgcgctggtccgcagct

SEQ ID NO: 3472133 - DNA, 25 bp, Homo sapien
agaccctcactcagccgcgagagga

SEQ ID NO: 3472134 - DNA, 25 bp, Homo sapien
tcaacgctgacactgatgacccgcg

SEQ ID NO: 3472135 - DNA, 25 bp, Homo sapien
tgacactcggcggagcggccgccat

SEQ ID NO: 3472136 - DNA, 25 bp, Homo sapien
cttctgctgcttccgcggtaatgac

SEQ ID NO: 3472137 - DNA, 25 bp, Homo sapien
cgctgacactgatgacccgcggcgg

SEQ ID NO: 3472138 - DNA, 25 bp, Homo sapien
gccgccctgcaaccgctccccggga

SEQ ID NO: 3472139 - DNA, 25 bp, Homo sapien
cgccgccctgcaaccgctccccggg

SEQ ID NO: 3472140 - DNA, 25 bp, Homo sapien
ccgccgccgccctgcaaccgctccc

SEQ ID NO: 3472141 - DNA, 25 bp, Homo sapien
gccgccgccctgcaaccgctccccg

SEQ ID NO: 3472142 - DNA, 25 bp, Homo sapien
cccagtgcagcatatgttcatcctg

SEQ ID NO: 3472143 - DNA, 25 bp, Homo sapien
tatgttcatcctgctgaccaagcca

SEQ ID NO: 3472144 - DNA, 25 bp, Homo sapien
ccagtgcagcatatgttcatcctgc

SEQ ID NO: 3472145 - DNA, 25 bp, Homo sapien
aaatgctctatcactccgagaagca

SEQ ID NO: 3472146 - DNA, 25 bp, Homo sapien
caacaggcgagagctgaaatggtga

SEQ ID NO: 3472147 - DNA, 25 bp, Homo sapien
aaggcaacaggcgagagctgaaatg

SEQ ID NO: 3472148 - DNA, 25 bp, Homo sapien
cgcctttggtaataaatattgacgt

SEQ ID NO: 3472149 - DNA, 25 bp, Homo sapien
cagggatgtaccgatacccagtggg

SEQ ID NO: 3472150 - DNA, 25 bp, Homo sapien
gtgtgcacattccacccgtcataac

SEQ ID NO: 3472151 - DNA, 25 bp, Homo sapien
ggaatctccacttgccttatcagga

SEQ ID NO: 3472152 - DNA, 25 bp, Homo sapien
ggataagaatatgtcctcagggatg

SEQ ID NO: 3472153 - DNA, 25 bp, Homo sapien
tcaggaagcgcttgtttcagggcct

SEQ ID NO: 3472154 - DNA, 25 bp, Homo sapien
gttgccacatttgcctatgatctga

SEQ ID NO: 3472155 - DNA, 25 bp, Homo sapien
tatgatctgaccagtaggtaataca

SEQ ID NO: 3472156 - DNA, 25 bp, Homo sapien
tacaagtcgatttcatggtgtgtgc

SEQ ID NO: 3472157 - DNA, 25 bp, Homo sapien
gagagcttggccctgagatacaagt

SEQ ID NO: 3472158 - DNA, 25 bp, Homo sapien
tcctggtagccagatgctactgctt

SEQ ID NO: 3472159 - DNA, 25 bp, Homo sapien
cctggtagccagatgctactgcttc

SEQ ID NO: 3472160 - DNA, 25 bp, Homo sapien
ctcctggtagccagatgctactgct

SEQ ID NO: 3472161 - DNA, 25 bp, Homo sapien
ccatctgtgtggactggcccatgaa

SEQ ID NO: 3472162 - DNA, 25 bp, Homo sapien
tggtataagcaagacacagagtttg

SEQ ID NO: 3472163 - DNA, 25 bp, Homo sapien
caagagtgtctttcactccaagagg

SEQ ID NO: 3472164 - DNA, 25 bp, Homo sapien
aaagccttgatctgccagccgagtc

SEQ ID NO: 3472165 - DNA, 25 bp, Homo sapien
ggcttctcctgtggttagtagcatg

SEQ ID NO: 3472166 - DNA, 25 bp, Homo sapien
gcttctcctgtggttagtagcatga

SEQ ID NO: 3472167 - DNA, 25 bp, Homo sapien
atgaataaaacatgcatatcccaat

SEQ ID NO: 3472168 - DNA, 25 bp, Homo sapien
tggcttctcctgtggttagtagcat

SEQ ID NO: 3472169 - DNA, 25 bp, Homo sapien
gccagatgtgaatacctttacctta

SEQ ID NO: 3472170 - DNA, 25 bp, Homo sapien
aatttgtgaccaataccatcttaaa

SEQ ID NO: 3472171 - DNA, 25 bp, Homo sapien
aatataaggaccctagctccattaa

SEQ ID NO: 3472172 - DNA, 25 bp, Homo sapien
ctgaaatacgtcattaagaatttct

SEQ ID NO: 3472173 - DNA, 25 bp, Homo sapien
ccaataatttaattgccagctctcc

SEQ ID NO: 3472174 - DNA, 25 bp, Homo sapien
taaactctgatccacgtcttttctt

SEQ ID NO: 3472175 - DNA, 25 bp, Homo sapien
ctgatccacgtcttttcttcttgaa

SEQ ID NO: 3472176 - DNA, 25 bp, Homo sapien
tttaattgccagctctcctggcagt

SEQ ID NO: 3472177 - DNA, 25 bp, Homo sapien
ctctgccattctctggggctgccat

SEQ ID NO: 3472178 - DNA, 25 bp, Homo sapien
tcctctctgccattctctggggctg

SEQ ID NO: 3472179 - DNA, 25 bp, Homo sapien
tctctgccattctctggggctgcca

SEQ ID NO: 3472180 - DNA, 25 bp, Homo sapien
tgctctcctctctgccattctctgg

SEQ ID NO: 3472181 - DNA, 25 bp, Homo sapien
cctctggttccacttgcatcctgga

SEQ ID NO: 3472182 - DNA, 25 bp, Homo sapien
gggccctttttgctggagcagaggt

SEQ ID NO: 3472183 - DNA, 25 bp, Homo sapien
ggttccacttgcatcctggagttgg

SEQ ID NO: 3472184 - DNA, 25 bp, Homo sapien
caaaggggccctttttgctggagca

SEQ ID NO: 3472185 - DNA, 25 bp, Homo sapien
tcaggccaggctttatctggattgc

SEQ ID NO: 3472186 - DNA, 25 bp, Homo sapien
ggattgcttcttgccagaaccacaa

SEQ ID NO: 3472187 - DNA, 25 bp, Homo sapien
tcatcccgggagaagccattgtttc

SEQ ID NO: 3472188 - DNA, 25 bp, Homo sapien
caaaagaccaatttcctcagtgaga

SEQ ID NO: 3472189 - DNA, 25 bp, Homo sapien
caaggtgataggtttgacctttgtc

SEQ ID NO: 3472190 - DNA, 25 bp, Homo sapien
caataatcaaggtgataggtttgac

SEQ ID NO: 3472191 - DNA, 25 bp, Homo sapien
tcaaggtgataggtttgacctttgt

SEQ ID NO: 3472192 - DNA, 25 bp, Homo sapien
taatcaaggtgataggtttgacctt

SEQ ID NO: 3472193 - DNA, 25 bp, Homo sapien
ctagagagaagataacaatctttct

SEQ ID NO: 3472194 - DNA, 25 bp, Homo sapien
tctaatgatgagaaaccacagtctg

SEQ ID NO: 3472195 - DNA, 25 bp, Homo sapien
taatgatgagaaaccacagtctgtc

SEQ ID NO: 3472196 - DNA, 25 bp, Homo sapien
gagaagataacaatctttcttcctc

SEQ ID NO: 3472197 - DNA, 25 bp, Homo sapien
gcaacagagtgactgggccattcat

SEQ ID NO: 3472198 - DNA, 25 bp, Homo sapien
gggctggctgctctaaaatgcatca

SEQ ID NO: 3472199 - DNA, 25 bp, Homo sapien
tatcacccagtaggctagctcaggc

SEQ ID NO: 3472200 - DNA, 25 bp, Homo sapien
caggcatagctgatcttgactgggc

SEQ ID NO: 3472201 - DNA, 25 bp, Homo sapien
tcgctaacgggtctgtctgtgcctg

SEQ ID NO: 3472202 - DNA, 25 bp, Homo sapien
tcgcccgcagcaatgtcgctaacgg

SEQ ID NO: 3472203 - DNA, 25 bp, Homo sapien
tacattgtaagtaatagctcgcccg

SEQ ID NO: 3472204 - DNA, 25 bp, Homo sapien
gttatgaatgggctcgtcctcagct

SEQ ID NO: 3472205 - DNA, 25 bp, Homo sapien
gaaagcaggggaagccaatgctttt

SEQ ID NO: 3472206 - DNA, 25 bp, Homo sapien
agaaagcaggggaagccaatgcttt

SEQ ID NO: 3472207 - DNA, 25 bp, Homo sapien
gtgcaggcagctctattttatccat

SEQ ID NO: 3472208 - DNA, 25 bp, Homo sapien
cgtgcaggcagctctattttatcca

SEQ ID NO: 3472209 - DNA, 25 bp, Homo sapien
ggcagtgtgcaggtccgagatgagg

SEQ ID NO: 3472210 - DNA, 25 bp, Homo sapien
tgaacataatgaggggcagtgtgca

SEQ ID NO: 3472211 - DNA, 25 bp, Homo sapien
ccgatcatgaacataatgaggggca

SEQ ID NO: 3472212 - DNA, 25 bp, Homo sapien
ccgagatgaggcccggcatgcttca

SEQ ID NO: 3472213 - DNA, 25 bp, Homo sapien
aaataaatgtggatgtccctttcag

SEQ ID NO: 3472214 - DNA, 25 bp, Homo sapien
ttttcaccttctggccactctttat

SEQ ID NO: 3472215 - DNA, 25 bp, Homo sapien
tgtggatgtccctttcagggggcca

SEQ ID NO: 3472216 - DNA, 25 bp, Homo sapien
cttctggccactctttatccatttc

SEQ ID NO: 3472217 - DNA, 25 bp, Homo sapien
tctcatagttgtagccagggagtag

SEQ ID NO: 3472218 - DNA, 25 bp, Homo sapien
ttcagtacatgtctggagcttgggc

SEQ ID NO: 3472219 - DNA, 25 bp, Homo sapien
caaagacagctagggctcttgggca

SEQ ID NO: 3472220 - DNA, 25 bp, Homo sapien
tctgacttgggagggtctgtctcat

SEQ ID NO: 3472221 - DNA, 25 bp, Homo sapien
caagagctatgtgtgcaaggccagc

SEQ ID NO: 3472222 - DNA, 25 bp, Homo sapien
tcttccctcagataggcctgtggct

SEQ ID NO: 3472223 - DNA, 25 bp, Homo sapien
tacccgcacaaaaccacatctaagg

SEQ ID NO: 3472224 - DNA, 25 bp, Homo sapien
gacataaggtgctgataattccctg

SEQ ID NO: 3472225 - DNA, 25 bp, Homo sapien
cgttataaactcgaatgaaggacag

SEQ ID NO: 3472226 - DNA, 25 bp, Homo sapien
atacagaaagtggattgttctcttc

SEQ ID NO: 3472227 - DNA, 25 bp, Homo sapien
tacagaaagtggattgttctcttct

SEQ ID NO: 3472228 - DNA, 25 bp, Homo sapien
ggctggactcacccatcaatgacat

SEQ ID NO: 3472229 - DNA, 25 bp, Homo sapien
gatcaattgctatccgtaagtcttc

SEQ ID NO: 3472230 - DNA, 25 bp, Homo sapien
ccagcaccatagcaggatcaattgc

SEQ ID NO: 3472231 - DNA, 25 bp, Homo sapien
gctatccgtaagtcttcagatatcc

SEQ ID NO: 3472232 - DNA, 25 bp, Homo sapien
tgtttctgatgtctgggtaaagatt

SEQ ID NO: 3472233 - DNA, 25 bp, Homo sapien
ctgagcgcccacctggagtcaagcg

SEQ ID NO: 3472234 - DNA, 25 bp, Homo sapien
tgtctgggtaaagattgtgtagact

SEQ ID NO: 3472235 - DNA, 25 bp, Homo sapien
acctggagtcaagcgccttctgcct

SEQ ID NO: 3472236 - DNA, 25 bp, Homo sapien
tccttgaaaaggactttattgttgc

SEQ ID NO: 3472237 - DNA, 25 bp, Homo sapien
ttctaccttgttaatgatctctttg

SEQ ID NO: 3472238 - DNA, 25 bp, Homo sapien
tcagatctgcttcaacaggactggc

SEQ ID NO: 3472239 - DNA, 25 bp, Homo sapien
ttaagaatcgccatgtctggagaaa

SEQ ID NO: 3472240 - DNA, 25 bp, Homo sapien
cttctgggcatccaattctaccttg

SEQ ID NO: 3472241 - DNA, 25 bp, Homo sapien
acaatctgatgtccatgcccttcac

SEQ ID NO: 3472242 - DNA, 25 bp, Homo sapien
gtgtcgtcatgtcagaacttagctg

SEQ ID NO: 3472243 - DNA, 25 bp, Homo sapien
gactgaggggagaacaatctgatgt

SEQ ID NO: 3472244 - DNA, 25 bp, Homo sapien
gtcgtcatgtcagaacttagctgaa

SEQ ID NO: 3472245 - DNA, 25 bp, Homo sapien
tagaagactctcagtattgaggacc

SEQ ID NO: 3472246 - DNA, 25 bp, Homo sapien
tagtggcttcctctggtcaatgtga

SEQ ID NO: 3472247 - DNA, 25 bp, Homo sapien
tgtcctctacacatcttaacctggt

SEQ ID NO: 3472248 - DNA, 25 bp, Homo sapien
tcctcctccataaggcttccagagt

SEQ ID NO: 3472249 - DNA, 25 bp, Homo sapien
caccactgtggagctttaagagtct

SEQ ID NO: 3472250 - DNA, 25 bp, Homo sapien
cttggtggttctcgctgggcaactt

SEQ ID NO: 3472251 - DNA, 25 bp, Homo sapien
ctcttggtggttctcgctgggcaac

SEQ ID NO: 3472252 - DNA, 25 bp, Homo sapien
cagaggagtaagctggacaccactg

SEQ ID NO: 3472253 - DNA, 25 bp, Homo sapien
ccctcaatttgaattcgtgtagcca

SEQ ID NO: 3472254 - DNA, 25 bp, Homo sapien
ccgggaggttgtttggtctgtcgca

SEQ ID NO: 3472255 - DNA, 25 bp, Homo sapien
tctgtcgcagatgagaggatgtcca

SEQ ID NO: 3472256 - DNA, 25 bp, Homo sapien
tagccagtgctgaatgcccatacat

SEQ ID NO: 3472257 - DNA, 25 bp, Homo sapien
aggcacaatgcaaacaggagaacaa

SEQ ID NO: 3472258 - DNA, 25 bp, Homo sapien
caggagaacaatagggagtgtgtga

SEQ ID NO: 3472259 - DNA, 25 bp, Homo sapien
ggagaacaatagggagtgtgtgagg

SEQ ID NO: 3472260 - DNA, 25 bp, Homo sapien
cccagccggacagggtattgatcat

SEQ ID NO: 3472261 - DNA, 25 bp, Homo sapien
aggcactgtccacagctacggaaaa

SEQ ID NO: 3472262 - DNA, 25 bp, Homo sapien
cagctacggaaaatcactgcaagct

SEQ ID NO: 3472263 - DNA, 25 bp, Homo sapien
agccacatctgctgcgcggtgtctc

SEQ ID NO: 3472264 - DNA, 25 bp, Homo sapien
gccagccgcgggaaaagcgtgtctt

SEQ ID NO: 3472265 - DNA, 25 bp, Homo sapien
gtgcttccctccttgctacctgtgt

SEQ ID NO: 3472266 - DNA, 25 bp, Homo sapien
aatagcttacgttacatgtttggca

SEQ ID NO: 3472267 - DNA, 25 bp, Homo sapien
gaaacatggacttggccttgaggcc

SEQ ID NO: 3472268 - DNA, 25 bp, Homo sapien
tcattaccagatgcgatggatttct

SEQ ID NO: 3472269 - DNA, 25 bp, Homo sapien
gcaggtaccacggagccaatttcag

SEQ ID NO: 3472270 - DNA, 25 bp, Homo sapien
ctgcaggtaccacggagccaatttc

SEQ ID NO: 3472271 - DNA, 25 bp, Homo sapien
taccacggagccaatttcagtaaca

SEQ ID NO: 3472272 - DNA, 25 bp, Homo sapien
aggtaccacggagccaatttcagta

SEQ ID NO: 3472273 - DNA, 25 bp, Homo sapien
gggacttgctggatggcaagcaaac

SEQ ID NO: 3472274 - DNA, 25 bp, Homo sapien
gccaccccaggggacttgctggatg

SEQ ID NO: 3472275 - DNA, 25 bp, Homo sapien
aaagagagcaaatgtgattaatggg

SEQ ID NO: 3472276 - DNA, 25 bp, Homo sapien
aatgtgattaatggggccaccccag

SEQ ID NO: 3472277 - DNA, 25 bp, Homo sapien
actgagacaaagactgcctgattag

SEQ ID NO: 3472278 - DNA, 25 bp, Homo sapien
gcctgattaggacttgattctcgat

SEQ ID NO: 3472279 - DNA, 25 bp, Homo sapien
ttcataacctgctggagtagggtta

SEQ ID NO: 3472280 - DNA, 25 bp, Homo sapien
cttgattctcgatgatgagactgag

SEQ ID NO: 3472281 - DNA, 25 bp, Homo sapien
gcctgaggctgacatagccatcaag

SEQ ID NO: 3472282 - DNA, 25 bp, Homo sapien
caagaaacaagggatacgtcagtga

SEQ ID NO: 3472283 - DNA, 25 bp, Homo sapien
gggatgaatccaagaccgggatctt

SEQ ID NO: 3472284 - DNA, 25 bp, Homo sapien
agtcacagaaactggatgggaactg

SEQ ID NO: 3472285 - DNA, 25 bp, Homo sapien
gtgcactgcacacagacatatccag

SEQ ID NO: 3472286 - DNA, 25 bp, Homo sapien
tgcactgcacacagacatatccagt

SEQ ID NO: 3472287 - DNA, 25 bp, Homo sapien
gcactgcacacagacatatccagtt

SEQ ID NO: 3472288 - DNA, 25 bp, Homo sapien
cactgcacacagacatatccagttc

SEQ ID NO: 3472289 - DNA, 25 bp, Homo sapien
aaccttctcctttaaatcattgctc

SEQ ID NO: 3472290 - DNA, 25 bp, Homo sapien
cttaaccttctcctttaaatcattg

SEQ ID NO: 3472291 - DNA, 25 bp, Homo sapien
taaccttctcctttaaatcattgct

SEQ ID NO: 3472292 - DNA, 25 bp, Homo sapien
ccttctcctttaaatcattgctcat

SEQ ID NO: 3472293 - DNA, 25 bp, Homo sapien
ctgatgaattgcttccaggatggca

SEQ ID NO: 3472294 - DNA, 25 bp, Homo sapien
tggcagcgaagtcaatggtattcat

SEQ ID NO: 3472295 - DNA, 25 bp, Homo sapien
ctagggatttatgcccctctttgcc

SEQ ID NO: 3472296 - DNA, 25 bp, Homo sapien
tgccaagccgccctgatgaattgct

SEQ ID NO: 3472297 - DNA, 25 bp, Homo sapien
gtaagaggtacagagatttggctgc

SEQ ID NO: 3472298 - DNA, 25 bp, Homo sapien
tctgttgtactctccctcagaagtc

SEQ ID NO: 3472299 - DNA, 25 bp, Homo sapien
ccttggtgatggtagaagccagaga

SEQ ID NO: 3472300 - DNA, 25 bp, Homo sapien
agcaaacgctgagagttgccaggct

SEQ ID NO: 3472301 - DNA, 25 bp, Homo sapien
cagccagctgaattacaaacccatc

SEQ ID NO: 3472302 - DNA, 25 bp, Homo sapien
tgagaagggtcagcatgttccctgg

SEQ ID NO: 3472303 - DNA, 25 bp, Homo sapien
cacagccatgggatgcaagtaacat

SEQ ID NO: 3472304 - DNA, 25 bp, Homo sapien
gcacacgctcaagttcatcactaac

SEQ ID NO: 3472305 - DNA, 25 bp, Homo sapien
tgagcaatggcatggacacaagatg

SEQ ID NO: 3472306 - DNA, 25 bp, Homo sapien
catgtgtgctcttcaggcacaaaga

SEQ ID NO: 3472307 - DNA, 25 bp, Homo sapien
aatagtagtaggacccatgctgctc

SEQ ID NO: 3472308 - DNA, 25 bp, Homo sapien
gaaagagccaaccttgtgagagcag

SEQ ID NO: 3472309 - DNA, 25 bp, Homo sapien
cattatctagtctaaagcccttcaa

SEQ ID NO: 3472310 - DNA, 25 bp, Homo sapien
tatacacacgggcagtttgcacttg

SEQ ID NO: 3472311 - DNA, 25 bp, Homo sapien
caaagctggtcatgacattatctag

SEQ ID NO: 3472312 - DNA, 25 bp, Homo sapien
tgcacttgcttttgttaaggcaaag

SEQ ID NO: 3472313 - DNA, 25 bp, Homo sapien
ccttcaggatcaaattcattctctt

SEQ ID NO: 3472314 - DNA, 25 bp, Homo sapien
tacataaatatctgcaaggctttac

SEQ ID NO: 3472315 - DNA, 25 bp, Homo sapien
ctgcctttatccttttgatacataa

SEQ ID NO: 3472316 - DNA, 25 bp, Homo sapien
ccttctcttattccttcaggatcaa

SEQ ID NO: 3472317 - DNA, 25 bp, Homo sapien
tgcaggattgtcctcagaagcatca

SEQ ID NO: 3472318 - DNA, 25 bp, Homo sapien
ctgcaggattgtcctcagaagcatc

SEQ ID NO: 3472319 - DNA, 25 bp, Homo sapien
tccagattcaacagggaggcagccc

SEQ ID NO: 3472320 - DNA, 25 bp, Homo sapien
gctccagattcaacagggaggcagc

SEQ ID NO: 3472321 - DNA, 25 bp, Homo sapien
ctccagattcaacagggaggcagcc

SEQ ID NO: 3472322 - DNA, 25 bp, Homo sapien
ctgttcctaagatgatcaaagggat

SEQ ID NO: 3472323 - DNA, 25 bp, Homo sapien
ctaagatgatcaaagggattggaac

SEQ ID NO: 3472324 - DNA, 25 bp, Homo sapien
ctcgtaatcgaatgagttctgtgtc

SEQ ID NO: 3472325 - DNA, 25 bp, Homo sapien
ttggaacaaagactcgtaatcgaat

SEQ ID NO: 3472326 - DNA, 25 bp, Homo sapien
tctagcagcaagtttcagatggcgg

SEQ ID NO: 3472327 - DNA, 25 bp, Homo sapien
acacaaatccatctctagcagcaag

SEQ ID NO: 3472328 - DNA, 25 bp, Homo sapien
cctcggctgtatccaattttctgtg

SEQ ID NO: 3472329 - DNA, 25 bp, Homo sapien
caagtttcagatggcgggaggacaa

SEQ ID NO: 3472330 - DNA, 25 bp, Homo sapien
aaatgggaacataactaaaggctga

SEQ ID NO: 3472331 - DNA, 25 bp, Homo sapien
gggatatggacatgggccaaatcct

SEQ ID NO: 3472332 - DNA, 25 bp, Homo sapien
tacgtgacccctgcagggatatgga

SEQ ID NO: 3472333 - DNA, 25 bp, Homo sapien
gatgtgttcagctggtacgtgaccc

SEQ ID NO: 3472334 - DNA, 25 bp, Homo sapien
ccagtctaaggctgtgatgattttg

SEQ ID NO: 3472335 - DNA, 25 bp, Homo sapien
tgttgggctccattgaaagcttctt

SEQ ID NO: 3472336 - DNA, 25 bp, Homo sapien
ggctccattgaaagcttctttcagt

SEQ ID NO: 3472337 - DNA, 25 bp, Homo sapien
tagatccagtctaaggctgtgatga

SEQ ID NO: 3472338 - DNA, 25 bp, Homo sapien
ggagcattagcatacctgtcaagtc

SEQ ID NO: 3472339 - DNA, 25 bp, Homo sapien
cagggcctcctgaaacgctgagaga

SEQ ID NO: 3472340 - DNA, 25 bp, Homo sapien
cactgagccgtgtctttaaccaata

SEQ ID NO: 3472341 - DNA, 25 bp, Homo sapien
gcgagcttctccctctacaaggtca

SEQ ID NO: 3472342 - DNA, 25 bp, Homo sapien
agccagcagcggccatgtgctcctg

SEQ ID NO: 3472343 - DNA, 25 bp, Homo sapien
gaagccagcagcggccatgtgctcc

SEQ ID NO: 3472344 - DNA, 25 bp, Homo sapien
aagccagcagcggccatgtgctcct

SEQ ID NO: 3472345 - DNA, 25 bp, Homo sapien
gcctgattgcttgtgcatagctgct

SEQ ID NO: 3472346 - DNA, 25 bp, Homo sapien
ttttaagtgctcgtcagagtgagga

SEQ ID NO: 3472347 - DNA, 25 bp, Homo sapien
tgggaaactgcagtgaccgacgaga

SEQ ID NO: 3472348 - DNA, 25 bp, Homo sapien
caaacatagcgtggagagaagtcgt

SEQ ID NO: 3472349 - DNA, 25 bp, Homo sapien
ctctctctcaataattccagctttt

SEQ ID NO: 3472350 - DNA, 25 bp, Homo sapien
ttctctctctcaataattccagctt

SEQ ID NO: 3472351 - DNA, 25 bp, Homo sapien
tctctctctcaataattccagcttt

SEQ ID NO: 3472352 - DNA, 25 bp, Homo sapien
attgaggccaagggcttaagaaggc

SEQ ID NO: 3472353 - DNA, 25 bp, Homo sapien
ttatgaggccaatccttgaaatgag

SEQ ID NO: 3472354 - DNA, 25 bp, Homo sapien
ttgaggccaagggcttaagaaggcc

SEQ ID NO: 3472355 - DNA, 25 bp, Homo sapien
ccttgaaatgagaaggtgaccactt

SEQ ID NO: 3472356 - DNA, 25 bp, Homo sapien
gcagtcctattagggatgctgccat

SEQ ID NO: 3472357 - DNA, 25 bp, Homo sapien
tagtgccagcagtcctattagggat

SEQ ID NO: 3472358 - DNA, 25 bp, Homo sapien
ccatgccaatggctagtgccagcag

SEQ ID NO: 3472359 - DNA, 25 bp, Homo sapien
tggctagtgccagcagtcctattag

SEQ ID NO: 3472360 - DNA, 25 bp, Homo sapien
tgaccgattgatagacagctattcc

SEQ ID NO: 3472361 - DNA, 25 bp, Homo sapien
gctcctgacgggtgctgaccgattg

SEQ ID NO: 3472362 - DNA, 25 bp, Homo sapien
tattccatgtgattgtgaagggcct

SEQ ID NO: 3472363 - DNA, 25 bp, Homo sapien
cagcctagtataggtctgggctcct

SEQ ID NO: 3472364 - DNA, 25 bp, Homo sapien
tgttttatatcattggtgtctcttt

SEQ ID NO: 3472365 - DNA, 25 bp, Homo sapien
ctgttttatatcattggtgtctctt

SEQ ID NO: 3472366 - DNA, 25 bp, Homo sapien
attcccgttaggagcatgccaggcc

SEQ ID NO: 3472367 - DNA, 25 bp, Homo sapien
gagccaattcccgttaggagcatgc

SEQ ID NO: 3472368 - DNA, 25 bp, Homo sapien
cggaacttctagagccaattcccgt

SEQ ID NO: 3472369 - DNA, 25 bp, Homo sapien
tctagagccaattcccgttaggagc

SEQ ID NO: 3472370 - DNA, 25 bp, Homo sapien
cagattcaataataaggacagagca

SEQ ID NO: 3472371 - DNA, 25 bp, Homo sapien
gattcaataataaggacagagcaat

SEQ ID NO: 3472372 - DNA, 25 bp, Homo sapien
tcaataataaggacagagcaattac

SEQ ID NO: 3472373 - DNA, 25 bp, Homo sapien
ttcaataataaggacagagcaatta

SEQ ID NO: 3472374 - DNA, 25 bp, Homo sapien
cgtggctggggtatagagattcttc

SEQ ID NO: 3472375 - DNA, 25 bp, Homo sapien
ggagacttgactgtcctgggtgtga

SEQ ID NO: 3472376 - DNA, 25 bp, Homo sapien
ttcccagctttcaacaatgtccgtg

SEQ ID NO: 3472377 - DNA, 25 bp, Homo sapien
gctttcaacaatgtccgtggctggg

SEQ ID NO: 3472378 - DNA, 25 bp, Homo sapien
aatgccacggcccacatggaatggg

SEQ ID NO: 3472379 - DNA, 25 bp, Homo sapien
caagagtgcaccaagccactaggac

SEQ ID NO: 3472380 - DNA, 25 bp, Homo sapien
aaaatggaagtaccacccagtctgg

SEQ ID NO: 3472381 - DNA, 25 bp, Homo sapien
tccccatgtccggtgtttaaagtga

SEQ ID NO: 3472382 - DNA, 25 bp, Homo sapien
ttcttgacgtctctggaacaagcta

SEQ ID NO: 3472383 - DNA, 25 bp, Homo sapien
tcttgacgtctctggaacaagctat

SEQ ID NO: 3472384 - DNA, 25 bp, Homo sapien
tttcttgacgtctctggaacaagct

SEQ ID NO: 3472385 - DNA, 25 bp, Homo sapien
agccaaatgacaccaaatgatgtct

SEQ ID NO: 3472386 - DNA, 25 bp, Homo sapien
gctgaaccgcaaaaataaggcatag

SEQ ID NO: 3472387 - DNA, 25 bp, Homo sapien
ctgatggtaatgattgggctctggc

SEQ ID NO: 3472388 - DNA, 25 bp, Homo sapien
tgatgtctccagctgatggtaatga

SEQ ID NO: 3472389 - DNA, 25 bp, Homo sapien
ctttaaagtctcagattctgtaaca

SEQ ID NO: 3472390 - DNA, 25 bp, Homo sapien
tctgtaacatccctctgcatgcctt

SEQ ID NO: 3472391 - DNA, 25 bp, Homo sapien
gattctgtaacatccctctgcatgc

SEQ ID NO: 3472392 - DNA, 25 bp, Homo sapien
ctgtaacatccctctgcatgccttg

SEQ ID NO: 3472393 - DNA, 25 bp, Homo sapien
ttaaccgaaataggctctttcatca

SEQ ID NO: 3472394 - DNA, 25 bp, Homo sapien
tctgcgttgatttgccttaagacca

SEQ ID NO: 3472395 - DNA, 25 bp, Homo sapien
taagaccatgcactcagcatccttc

SEQ ID NO: 3472396 - DNA, 25 bp, Homo sapien
tctttcatcatctgcgttgatttgc

SEQ ID NO: 3472397 - DNA, 25 bp, Homo sapien
ccagaccatctctgatacacacata

SEQ ID NO: 3472398 - DNA, 25 bp, Homo sapien
agaccatctctgatacacacatata

SEQ ID NO: 3472399 - DNA, 25 bp, Homo sapien
tccagaccatctctgatacacacat

SEQ ID NO: 3472400 - DNA, 25 bp, Homo sapien
cagaccatctctgatacacacatat

SEQ ID NO: 3472401 - DNA, 25 bp, Homo sapien
ggccaaaggatcagcctgcttcttg

SEQ ID NO: 3472402 - DNA, 25 bp, Homo sapien
cttgctccaggtgagtgtgactggc

SEQ ID NO: 3472403 - DNA, 25 bp, Homo sapien
catgttgctcccgtggatgcagcag

SEQ ID NO: 3472404 - DNA, 25 bp, Homo sapien
ggaagcttccttcggctcagatgga

SEQ ID NO: 3472405 - DNA, 25 bp, Homo sapien
gcttatggcaatgacgaatgtccca

SEQ ID NO: 3472406 - DNA, 25 bp, Homo sapien
gcaatgacgaatgtcccacagctcc

SEQ ID NO: 3472407 - DNA, 25 bp, Homo sapien
tatggcaatgacgaatgtcccacag

SEQ ID NO: 3472408 - DNA, 25 bp, Homo sapien
tctggggacactgcgctggatgaca

SEQ ID NO: 3472409 - DNA, 25 bp, Homo sapien
tctccttgaagatatctgggcagag

SEQ ID NO: 3472410 - DNA, 25 bp, Homo sapien
ccttgaagatatctgggcagagcca

SEQ ID NO: 3472411 - DNA, 25 bp, Homo sapien
ggtctccttgaagatatctgggcag

SEQ ID NO: 3472412 - DNA, 25 bp, Homo sapien
tcaggtctccttgaagatatctggg

SEQ ID NO: 3472413 - DNA, 25 bp, Homo sapien
gagaatgatccggagctgagcagta

SEQ ID NO: 3472414 - DNA, 25 bp, Homo sapien
gatccggagctgagcagtagacacg

SEQ ID NO: 3472415 - DNA, 25 bp, Homo sapien
agagagaatgatccggagctgagca

SEQ ID NO: 3472416 - DNA, 25 bp, Homo sapien
gctgagcagtagacacgaagtcact

SEQ ID NO: 3472417 - DNA, 25 bp, Homo sapien
ggttaagtgggccgctttgtggagc

SEQ ID NO: 3472418 - DNA, 25 bp, Homo sapien
aggttaagtgggccgctttgtggag

SEQ ID NO: 3472419 - DNA, 25 bp, Homo sapien
caggttaagtgggccgctttgtgga

SEQ ID NO: 3472420 - DNA, 25 bp, Homo sapien
tcaggttaagtgggccgctttgtgg

SEQ ID NO: 3472421 - DNA, 25 bp, Homo sapien
aactggaacctttgtgatgtggccg

SEQ ID NO: 3472422 - DNA, 25 bp, Homo sapien
cctttgtgatgtggccgtcggttgc

SEQ ID NO: 3472423 - DNA, 25 bp, Homo sapien
tggaacctttgtgatgtggccgtcg

SEQ ID NO: 3472424 - DNA, 25 bp, Homo sapien
atgtggccgtcggttgcttctggtc

SEQ ID NO: 3472425 - DNA, 25 bp, Homo sapien
ccttggggactgtcttccatagccc

SEQ ID NO: 3472426 - DNA, 25 bp, Homo sapien
cctgtcttccttggggactgtcttc

SEQ ID NO: 3472427 - DNA, 25 bp, Homo sapien
tggggactgtcttccatagcccatc

SEQ ID NO: 3472428 - DNA, 25 bp, Homo sapien
ttccttggggactgtcttccatagc

SEQ ID NO: 3472429 - DNA, 25 bp, Homo sapien
agcgaggatgatggctgcatggagc

SEQ ID NO: 3472430 - DNA, 25 bp, Homo sapien
tcagtagccttgtctctctgaacgc

SEQ ID NO: 3472431 - DNA, 25 bp, Homo sapien
agggaaggctggagcgaggatgatg

SEQ ID NO: 3472432 - DNA, 25 bp, Homo sapien
ctgaacgcagatgctcagggaaggc

SEQ ID NO: 3472433 - DNA, 25 bp, Homo sapien
tcagcatctgcgttaaacaaggctg

SEQ ID NO: 3472434 - DNA, 25 bp, Homo sapien
taaacaaggctgatcggcttgtaca

SEQ ID NO: 3472435 - DNA, 25 bp, Homo sapien
gctgatcggcttgtacaatatttaa

SEQ ID NO: 3472436 - DNA, 25 bp, Homo sapien
tgcgttaaacaaggctgatcggctt

SEQ ID NO: 3472437 - DNA, 25 bp, Homo sapien
agagatagcccagatggatgtcaga

SEQ ID NO: 3472438 - DNA, 25 bp, Homo sapien
caagagatagcccagatggatgtca

SEQ ID NO: 3472439 - DNA, 25 bp, Homo sapien
aagagatagcccagatggatgtcag

SEQ ID NO: 3472440 - DNA, 25 bp, Homo sapien
gagatagcccagatggatgtcagaa

SEQ ID NO: 3472441 - DNA, 25 bp, Homo sapien
aactctcaagttaagtctagttggt

SEQ ID NO: 3472442 - DNA, 25 bp, Homo sapien
aatccatagcaaatgagtcgaccgc

SEQ ID NO: 3472443 - DNA, 25 bp, Homo sapien
gaaattgcaaatgccgcaaagaatg

SEQ ID NO: 3472444 - DNA, 25 bp, Homo sapien
taatttcacaattactcagggaggg

SEQ ID NO: 3472445 - DNA, 25 bp, Homo sapien
cctgaatgagctggacatgaaccag

SEQ ID NO: 3472446 - DNA, 25 bp, Homo sapien
tgaaccagaggtgtaatttaggcat

SEQ ID NO: 3472447 - DNA, 25 bp, Homo sapien
agctcccatggggtgtgcagacagc

SEQ ID NO: 3472448 - DNA, 25 bp, Homo sapien
tcatcctcattaatgaatagctccc

SEQ ID NO: 3472449 - DNA, 25 bp, Homo sapien
gaaatgtacagtccgatcagcaaac

SEQ ID NO: 3472450 - DNA, 25 bp, Homo sapien
gactatattactacgcactctggaa

SEQ ID NO: 3472451 - DNA, 25 bp, Homo sapien
tacattggatctggtaaacacacag

SEQ ID NO: 3472452 - DNA, 25 bp, Homo sapien
taagtgaaaagacactggcagacgc

SEQ ID NO: 3472453 - DNA, 25 bp, Homo sapien
cagagaagagggaaaacagagagcg

SEQ ID NO: 3472454 - DNA, 25 bp, Homo sapien
agacagagaagagggaaaacagaga

SEQ ID NO: 3472455 - DNA, 25 bp, Homo sapien
gaagagggaaaacagagagcgccat

SEQ ID NO: 3472456 - DNA, 25 bp, Homo sapien
gagaagagggaaaacagagagcgcc

SEQ ID NO: 3472457 - DNA, 25 bp, Homo sapien
cagatccaccaggacaggtctggac

SEQ ID NO: 3472458 - DNA, 25 bp, Homo sapien
tgcagatccaccaggacaggtctgg

SEQ ID NO: 3472459 - DNA, 25 bp, Homo sapien
cttgcagatccaccaggacaggtct

SEQ ID NO: 3472460 - DNA, 25 bp, Homo sapien
ccttgcagatccaccaggacaggtc

SEQ ID NO: 3472461 - DNA, 25 bp, Homo sapien
tgacgagcacggctgcggcactgtc

SEQ ID NO: 3472462 - DNA, 25 bp, Homo sapien
cacctagactatccctgctgtgggc

SEQ ID NO: 3472463 - DNA, 25 bp, Homo sapien
gctcaggccacagtcgagcccaggg

SEQ ID NO: 3472464 - DNA, 25 bp, Homo sapien
agggcagcctgagcgtcatcctctc

SEQ ID NO: 3472465 - DNA, 25 bp, Homo sapien
tccaggccgctgtcggtgtgggcca

SEQ ID NO: 3472466 - DNA, 25 bp, Homo sapien
ggattattgaggccagcgcctgcgg

SEQ ID NO: 3472467 - DNA, 25 bp, Homo sapien
tgatttcctagaagtgcctccaggc

SEQ ID NO: 3472468 - DNA, 25 bp, Homo sapien
ggcttcagaagcagggcggaggtct

SEQ ID NO: 3472469 - DNA, 25 bp, Homo sapien
caggggtcggaggatgccaaatcgg

SEQ ID NO: 3472470 - DNA, 25 bp, Homo sapien
gggtcggaggatgccaaatcggccc

SEQ ID NO: 3472471 - DNA, 25 bp, Homo sapien
tcggaggatgccaaatcggcccgcg

SEQ ID NO: 3472472 - DNA, 25 bp, Homo sapien
ggccgcaggggtcggaggatgccaa

SEQ ID NO: 3472473 - DNA, 25 bp, Homo sapien
tttgacctccttgaaggtcatgagc

SEQ ID NO: 3472474 - DNA, 25 bp, Homo sapien
ataaagccatctccccagcgcctgt

SEQ ID NO: 3472475 - DNA, 25 bp, Homo sapien
cttgaatttactggctagaaaagaa

SEQ ID NO: 3472476 - DNA, 25 bp, Homo sapien
cttccgaatccagggacagtgcatg

SEQ ID NO: 3472477 - DNA, 25 bp, Homo sapien
ctggtggcattgattgtactcaatc

SEQ ID NO: 3472478 - DNA, 25 bp, Homo sapien
ggcattgattgtactcaatcagcat

SEQ ID NO: 3472479 - DNA, 25 bp, Homo sapien
agaatatctctaatcgccccgcctg

SEQ ID NO: 3472480 - DNA, 25 bp, Homo sapien
cctgattgggtctcgttagcgggct

SEQ ID NO: 3472481 - DNA, 25 bp, Homo sapien
aaaaaggtacaagctttgccctcag

SEQ ID NO: 3472482 - DNA, 25 bp, Homo sapien
aaatgcaacggtggtagtggtgatc

SEQ ID NO: 3472483 - DNA, 25 bp, Homo sapien
aaaatgcaacggtggtagtggtgat

SEQ ID NO: 3472484 - DNA, 25 bp, Homo sapien
aatgcaacggtggtagtggtgatca

SEQ ID NO: 3472485 - DNA, 25 bp, Homo sapien
cttccatccactactggtaacttac

SEQ ID NO: 3472486 - DNA, 25 bp, Homo sapien
tcttccatccactactggtaactta

SEQ ID NO: 3472487 - DNA, 25 bp, Homo sapien
tttcttccatccactactggtaact

SEQ ID NO: 3472488 - DNA, 25 bp, Homo sapien
gtttcttccatccactactggtaac

SEQ ID NO: 3472489 - DNA, 25 bp, Homo sapien
gcattatagctattgatcttaggcc

SEQ ID NO: 3472490 - DNA, 25 bp, Homo sapien
tcttaggccattgatctcaggaagg

SEQ ID NO: 3472491 - DNA, 25 bp, Homo sapien
aagggagagttgcagctcataaatc

SEQ ID NO: 3472492 - DNA, 25 bp, Homo sapien
gagttgcagctcataaatccctctg

SEQ ID NO: 3472493 - DNA, 25 bp, Homo sapien
tcccaggcagacaatgcaagtacct

SEQ ID NO: 3472494 - DNA, 25 bp, Homo sapien
ggcagacaatgcaagtacctccaat

SEQ ID NO: 3472495 - DNA, 25 bp, Homo sapien
caggcagacaatgcaagtacctcca

SEQ ID NO: 3472496 - DNA, 25 bp, Homo sapien
cagacaatgcaagtacctccaatta

SEQ ID NO: 3472497 - DNA, 25 bp, Homo sapien
tctcatacgagtgtgaaaaggcaat

SEQ ID NO: 3472498 - DNA, 25 bp, Homo sapien
cgagtgtgaaaaggcaatcatcatg

SEQ ID NO: 3472499 - DNA, 25 bp, Homo sapien
catacgagtgtgaaaaggcaatcat

SEQ ID NO: 3472500 - DNA, 25 bp, Homo sapien
catctcatacgagtgtgaaaaggca

SEQ ID NO: 3472501 - DNA, 25 bp, Homo sapien
agtgatttctccagggcttgtgcat

SEQ ID NO: 3472502 - DNA, 25 bp, Homo sapien
cagtgatttctccagggcttgtgca

SEQ ID NO: 3472503 - DNA, 25 bp, Homo sapien
ctgcagctctccagaaattactggt

SEQ ID NO: 3472504 - DNA, 25 bp, Homo sapien
aaattactggttcatcatggtactg

SEQ ID NO: 3472505 - DNA, 25 bp, Homo sapien
gcttctgttgagatctgatgcagca

SEQ ID NO: 3472506 - DNA, 25 bp, Homo sapien
tgagacactgtttagctgcagctct

SEQ ID NO: 3472507 - DNA, 25 bp, Homo sapien
ttccggtgcttccagcctcgtgggc

SEQ ID NO: 3472508 - DNA, 25 bp, Homo sapien
ggctgcagaaggagtacagtttgct

SEQ ID NO: 3472509 - DNA, 25 bp, Homo sapien
gcagtcaggcaggctgattgtgtaa

SEQ ID NO: 3472510 - DNA, 25 bp, Homo sapien
gagtacagtttgctcttccggtgct

SEQ ID NO: 3472511 - DNA, 25 bp, Homo sapien
agctgttccagaggcccggaaagag

SEQ ID NO: 3472512 - DNA, 25 bp, Homo sapien
tagttaagcaagtcaattatatctc

SEQ ID NO: 3472513 - DNA, 25 bp, Homo sapien
cagaggcccggaaagagaagacgaa

SEQ ID NO: 3472514 - DNA, 25 bp, Homo sapien
gccgagagcaactgtatattaagta

SEQ ID NO: 3472515 - DNA, 25 bp, Homo sapien
ggaactgtggaggagcttgtggtgg

SEQ ID NO: 3472516 - DNA, 25 bp, Homo sapien
ggagggacctgagccattgtctgtc

SEQ ID NO: 3472517 - DNA, 25 bp, Homo sapien
agcagtttcccacccacagggggag

SEQ ID NO: 3472518 - DNA, 25 bp, Homo sapien
ctcagaggtgcagggagcagtttcc

SEQ ID NO: 3472519 - DNA, 25 bp, Homo sapien
taacagcaatgaagagatcttcaat

SEQ ID NO: 3472520 - DNA, 25 bp, Homo sapien
taatggtagaattgagattcgggga

SEQ ID NO: 3472521 - DNA, 25 bp, Homo sapien
gattcggggatgtagaccttgaaac

SEQ ID NO: 3472522 - DNA, 25 bp, Homo sapien
ccccttttggtaggtaacagcaatg

SEQ ID NO: 3472523 - DNA, 25 bp, Homo sapien
acatgagcactgtaccactgatgcc

SEQ ID NO: 3472524 - DNA, 25 bp, Homo sapien
taccactgatgccagccgtgcaggt

SEQ ID NO: 3472525 - DNA, 25 bp, Homo sapien
catgagcactgtaccactgatgcca

SEQ ID NO: 3472526 - DNA, 25 bp, Homo sapien
aggaggagagaacatgagcactgta

SEQ ID NO: 3472527 - DNA, 25 bp, Homo sapien
gcaaacaggagccttcaggcccact

SEQ ID NO: 3472528 - DNA, 25 bp, Homo sapien
aggcaaacaggagccttcaggccca

SEQ ID NO: 3472529 - DNA, 25 bp, Homo sapien
aaacaggagccttcaggcccactgt

SEQ ID NO: 3472530 - DNA, 25 bp, Homo sapien
caggcaaacaggagccttcaggccc

SEQ ID NO: 3472531 - DNA, 25 bp, Homo sapien
ccaggcttggccttgtactccggac

SEQ ID NO: 3472532 - DNA, 25 bp, Homo sapien
cacaaagggcaccttcactccttgg

SEQ ID NO: 3472533 - DNA, 25 bp, Homo sapien
tactccggacttgtggtccaggact

SEQ ID NO: 3472534 - DNA, 25 bp, Homo sapien
tctccctttacgtggagctgcctcg

SEQ ID NO: 3472535 - DNA, 25 bp, Homo sapien
ggtgaccaattaggattactgagat

SEQ ID NO: 3472536 - DNA, 25 bp, Homo sapien
tgccatggtgaccaattaggattac

SEQ ID NO: 3472537 - DNA, 25 bp, Homo sapien
gtatcgatttagctttgacagtggg

SEQ ID NO: 3472538 - DNA, 25 bp, Homo sapien
gtctcttcattgaggccacgaggag

SEQ ID NO: 3472539 - DNA, 25 bp, Homo sapien
cactaatgtttggtgctcttgccat

SEQ ID NO: 3472540 - DNA, 25 bp, Homo sapien
tgtgcatgggtgtgtcgcaggccgg

SEQ ID NO: 3472541 - DNA, 25 bp, Homo sapien
gcagtgagggagttacacacagcct

SEQ ID NO: 3472542 - DNA, 25 bp, Homo sapien
aatcctgggcctaaggtgtgtgcct

SEQ ID NO: 3472543 - DNA, 25 bp, Homo sapien
gatgtgaagccaacacggggaccca

SEQ ID NO: 3472544 - DNA, 25 bp, Homo sapien
gtgaagccaacacggggacccacat

SEQ ID NO: 3472545 - DNA, 25 bp, Homo sapien
ggatgtgaagccaacacggggaccc

SEQ ID NO: 3472546 - DNA, 25 bp, Homo sapien
agccaacacggggacccacatttgc

SEQ ID NO: 3472547 - DNA, 25 bp, Homo sapien
cctgtctcagcaggcgttccacagg

SEQ ID NO: 3472548 - DNA, 25 bp, Homo sapien
ctctgagatgggccccgttgtggct

SEQ ID NO: 3472549 - DNA, 25 bp, Homo sapien
tgacttgtgtccaatagcccctgtc

SEQ ID NO: 3472550 - DNA, 25 bp, Homo sapien
cccgttgtggcttgacttgtgtcca

SEQ ID NO: 3472551 - DNA, 25 bp, Homo sapien
cagggagcctaatggcctgcaggcc

SEQ ID NO: 3472552 - DNA, 25 bp, Homo sapien
tttcatgaaggtaagtgtgcacacc

SEQ ID NO: 3472553 - DNA, 25 bp, Homo sapien
gggaaaaatccaccatgtgtcatag

SEQ ID NO: 3472554 - DNA, 25 bp, Homo sapien
caggagctcaccagctctgagggaa

SEQ ID NO: 3472555 - DNA, 25 bp, Homo sapien
ggtttgtccagttaaaagttgcatg

SEQ ID NO: 3472556 - DNA, 25 bp, Homo sapien
taatgacacatagttggtttgtcca

SEQ ID NO: 3472557 - DNA, 25 bp, Homo sapien
tcccacgggaagaagaattcaggaa

SEQ ID NO: 3472558 - DNA, 25 bp, Homo sapien
aagttgcatgaggtagaatgtctgc

SEQ ID NO: 3472559 - DNA, 25 bp, Homo sapien
gaaacttcaggacaggctcacacaa

SEQ ID NO: 3472560 - DNA, 25 bp, Homo sapien
tatcactactgggttgagtgtcccc

SEQ ID NO: 3472561 - DNA, 25 bp, Homo sapien
tctgcctacgaaccagggccaatgg

SEQ ID NO: 3472562 - DNA, 25 bp, Homo sapien
catcctagggtttcatggtggacct

SEQ ID NO: 3472563 - DNA, 25 bp, Homo sapien
ttttgaaccccatcccttgtggatg

SEQ ID NO: 3472564 - DNA, 25 bp, Homo sapien
ggagttggcaaacactatataatta

SEQ ID NO: 3472565 - DNA, 25 bp, Homo sapien
tgaaccccatcccttgtggatggag

SEQ ID NO: 3472566 - DNA, 25 bp, Homo sapien
gatggagttggcaaacactatataa

SEQ ID NO: 3472567 - DNA, 25 bp, Homo sapien
tttgcaaggccataaataatcgaga

SEQ ID NO: 3472568 - DNA, 25 bp, Homo sapien
cgagatgtattactcagggattgcc

SEQ ID NO: 3472569 - DNA, 25 bp, Homo sapien
gaatggttccccaccctatttgcaa

SEQ ID NO: 3472570 - DNA, 25 bp, Homo sapien
cttcaggttaccagggatgcaagat

SEQ ID NO: 3472571 - DNA, 25 bp, Homo sapien
agtctctgggggccggtggtgccag

SEQ ID NO: 3472572 - DNA, 25 bp, Homo sapien
tgtgtagaacaaggaaagaggagtc

SEQ ID NO: 3472573 - DNA, 25 bp, Homo sapien
ggagtctctgggggccggtggtgcc

SEQ ID NO: 3472574 - DNA, 25 bp, Homo sapien
gtgtagaacaaggaaagaggagtct

SEQ ID NO: 3472575 - DNA, 25 bp, Homo sapien
tgtctggatgatcaagaaggtggca

SEQ ID NO: 3472576 - DNA, 25 bp, Homo sapien
tcagatgtctggatgatcaagaagg

SEQ ID NO: 3472577 - DNA, 25 bp, Homo sapien
catttgctgcccaagttctcagagc

SEQ ID NO: 3472578 - DNA, 25 bp, Homo sapien
aagaaggtggcatttgctgcccaag

SEQ ID NO: 3472579 - DNA, 25 bp, Homo sapien
taatcatcagttgtgaaatctcccc

SEQ ID NO: 3472580 - DNA, 25 bp, Homo sapien
caatcataaaagcacaggtgataaa

SEQ ID NO: 3472581 - DNA, 25 bp, Homo sapien
taaaccgcttcttcgtaatcatcag

SEQ ID NO: 3472582 - DNA, 25 bp, Homo sapien
gcacaggtgataaaccgcttcttcg

SEQ ID NO: 3472583 - DNA, 25 bp, Homo sapien
tagagggagttgagccgtgacagtg

SEQ ID NO: 3472584 - DNA, 25 bp, Homo sapien
caatgaagagcgacaacaggcaggt

SEQ ID NO: 3472585 - DNA, 25 bp, Homo sapien
ctggagagcagattggaagcccgga

SEQ ID NO: 3472586 - DNA, 25 bp, Homo sapien
agctcatgggttggcatgctgttgc

SEQ ID NO: 3472587 - DNA, 25 bp, Homo sapien
cttatccatatccgttccttcacct

SEQ ID NO: 3472588 - DNA, 25 bp, Homo sapien
ttatccatatccgttccttcacctc

SEQ ID NO: 3472589 - DNA, 25 bp, Homo sapien
gaccctggactcaacaccatcccat

SEQ ID NO: 3472590 - DNA, 25 bp, Homo sapien
gtactcatacaagcggtcaggaaga

SEQ ID NO: 3472591 - DNA, 25 bp, Homo sapien
aggcctcagaccctggactcaacac

SEQ ID NO: 3472592 - DNA, 25 bp, Homo sapien
ccaggttctcacattgtactcatac

SEQ ID NO: 3472593 - DNA, 25 bp, Homo sapien
agtatctctctccctaattggtcgt

SEQ ID NO: 3472594 - DNA, 25 bp, Homo sapien
tatctctctccctaattggtcgtca

SEQ ID NO: 3472595 - DNA, 25 bp, Homo sapien
tctctctccctaattggtcgtcaac

SEQ ID NO: 3472596 - DNA, 25 bp, Homo sapien
ctctctccctaattggtcgtcaact

SEQ ID NO: 3472597 - DNA, 25 bp, Homo sapien
tgccagcagcccagaggtagcagga

SEQ ID NO: 3472598 - DNA, 25 bp, Homo sapien
ctgaaacacaagaaagagagaagaa

SEQ ID NO: 3472599 - DNA, 25 bp, Homo sapien
gagagaagaactttgcccccttctc

SEQ ID NO: 3472600 - DNA, 25 bp, Homo sapien
ccagcagcccagaggtagcaggatc

SEQ ID NO: 3472601 - DNA, 25 bp, Homo sapien
tagaatccttataccctagtatggg

SEQ ID NO: 3472602 - DNA, 25 bp, Homo sapien
tagtatggggttcggaaagagccaa

SEQ ID NO: 3472603 - DNA, 25 bp, Homo sapien
tccttggcagcctcttagaatcctt

SEQ ID NO: 3472604 - DNA, 25 bp, Homo sapien
caaaaagagtctggcggtgttcatg

SEQ ID NO: 3472605 - DNA, 25 bp, Homo sapien
ggcatcttcagatgtagatcatggt

SEQ ID NO: 3472606 - DNA, 25 bp, Homo sapien
gcatcttcagatgtagatcatggta

SEQ ID NO: 3472607 - DNA, 25 bp, Homo sapien
ctggcatcttcagatgtagatcatg

SEQ ID NO: 3472608 - DNA, 25 bp, Homo sapien
tggcatcttcagatgtagatcatgg

SEQ ID NO: 3472609 - DNA, 25 bp, Homo sapien
tctccagcgacttctcaggttaatc

SEQ ID NO: 3472610 - DNA, 25 bp, Homo sapien
tccagcgacttctcaggttaatcac

SEQ ID NO: 3472611 - DNA, 25 bp, Homo sapien
ttctctccagcgacttctcaggtta

SEQ ID NO: 3472612 - DNA, 25 bp, Homo sapien
cagcgacttctcaggttaatcacat

SEQ ID NO: 3472613 - DNA, 25 bp, Homo sapien
tatcactggtgtgcatatcccaagg

SEQ ID NO: 3472614 - DNA, 25 bp, Homo sapien
cacttgaagacctaggtaacagggt

SEQ ID NO: 3472615 - DNA, 25 bp, Homo sapien
tggcacttggaattccctgctggaa

SEQ ID NO: 3472616 - DNA, 25 bp, Homo sapien
gctctttaggctgctaccacttgaa

SEQ ID NO: 3472617 - DNA, 25 bp, Homo sapien
ggaccaactgcttcagtcttggtca

SEQ ID NO: 3472618 - DNA, 25 bp, Homo sapien
catacagagatagctgtggcaggtg

SEQ ID NO: 3472619 - DNA, 25 bp, Homo sapien
aactgcttcagtcttggtcactgcc

SEQ ID NO: 3472620 - DNA, 25 bp, Homo sapien
tggtcactgcctcatacagagatag

SEQ ID NO: 3472621 - DNA, 25 bp, Homo sapien
cagatgtaatgagataaagcaaagt

SEQ ID NO: 3472622 - DNA, 25 bp, Homo sapien
taatagtctcaaggacaagaagcca

SEQ ID NO: 3472623 - DNA, 25 bp, Homo sapien
acagcaaatttgatcacaaatgggc

SEQ ID NO: 3472624 - DNA, 25 bp, Homo sapien
gggctccgagattgcttctttgata

SEQ ID NO: 3472625 - DNA, 25 bp, Homo sapien
tgaacctcatggcaggaagagatga

SEQ ID NO: 3472626 - DNA, 25 bp, Homo sapien
tgatatgcactcagaaagtcactga

SEQ ID NO: 3472627 - DNA, 25 bp, Homo sapien
actgaacctcatggcaggaagagat

SEQ ID NO: 3472628 - DNA, 25 bp, Homo sapien
tatgcactcagaaagtcactgaacc

SEQ ID NO: 3472629 - DNA, 25 bp, Homo sapien
taatcttctttacgtgtatagaacc

SEQ ID NO: 3472630 - DNA, 25 bp, Homo sapien
gcagtgcttggaccagatttcttcc

SEQ ID NO: 3472631 - DNA, 25 bp, Homo sapien
tttgccctcgtagaccctgggcagt

SEQ ID NO: 3472632 - DNA, 25 bp, Homo sapien
ctggtcaaatagctgtagatgaggg

SEQ ID NO: 3472633 - DNA, 25 bp, Homo sapien
tccaggactgagtgttgatttcaga

SEQ ID NO: 3472634 - DNA, 25 bp, Homo sapien
tggttatccactctgaacctccagg

SEQ ID NO: 3472635 - DNA, 25 bp, Homo sapien
atgtgtggccttgcttgcatccaac

SEQ ID NO: 3472636 - DNA, 25 bp, Homo sapien
tgtgtggccttgcttgcatccaact

SEQ ID NO: 3472637 - DNA, 25 bp, Homo sapien
aatttggctttcttgcagaatttgg

SEQ ID NO: 3472638 - DNA, 25 bp, Homo sapien
tttggctttcatgagagagtcacag

SEQ ID NO: 3472639 - DNA, 25 bp, Homo sapien
ccaggctgcggtgtcagggagaatt

SEQ ID NO: 3472640 - DNA, 25 bp, Homo sapien
tgagagagtcacagcccttgtcagg

SEQ ID NO: 3472641 - DNA, 25 bp, Homo sapien
tttctctatggcctgaatcccagtg

SEQ ID NO: 3472642 - DNA, 25 bp, Homo sapien
gggtctgcatgataaagcacggctt

SEQ ID NO: 3472643 - DNA, 25 bp, Homo sapien
ccagtggcaattggaaaattgagcc

SEQ ID NO: 3472644 - DNA, 25 bp, Homo sapien
taaagcacggcttttctctatggcc

SEQ ID NO: 3472645 - DNA, 25 bp, Homo sapien
tcacgacccgggataaacctgttgc

SEQ ID NO: 3472646 - DNA, 25 bp, Homo sapien
cagatactccagtgccgttaccagg

SEQ ID NO: 3472647 - DNA, 25 bp, Homo sapien
tgtgactgtgttacctgcgatggca

SEQ ID NO: 3472648 - DNA, 25 bp, Homo sapien
catttcggagctttggtcactgaga

SEQ ID NO: 3472649 - DNA, 25 bp, Homo sapien
cagcaactccttaatcggaactgtt

SEQ ID NO: 3472650 - DNA, 25 bp, Homo sapien
tgtgttccaatcctgaagtagtggg

SEQ ID NO: 3472651 - DNA, 25 bp, Homo sapien
cagcgagggcagaatggaccagcaa

SEQ ID NO: 3472652 - DNA, 25 bp, Homo sapien
caaatccagctcctgtgttccaatc

SEQ ID NO: 3472653 - DNA, 25 bp, Homo sapien
ggaaatcttcggccaggtcattgcc

SEQ ID NO: 3472654 - DNA, 25 bp, Homo sapien
cattgccatcacagtgctccttcat

SEQ ID NO: 3472655 - DNA, 25 bp, Homo sapien
tcattgccatcacagtgctccttca

SEQ ID NO: 3472656 - DNA, 25 bp, Homo sapien
aatcttcggccaggtcattgccatc

SEQ ID NO: 3472657 - DNA, 25 bp, Homo sapien
tcagtgtatgctcatggccctggtc

SEQ ID NO: 3472658 - DNA, 25 bp, Homo sapien
cctggtcaggtgctctgttggagct

SEQ ID NO: 3472659 - DNA, 25 bp, Homo sapien
atggccctggtcaggtgctctgttg

SEQ ID NO: 3472660 - DNA, 25 bp, Homo sapien
ttcagtgtatgctcatggccctggt

SEQ ID NO: 3472661 - DNA, 25 bp, Homo sapien
cttcacagcaggttagagctgagaa

SEQ ID NO: 3472662 - DNA, 25 bp, Homo sapien
gctcagcagggtcccatcatcttca

SEQ ID NO: 3472663 - DNA, 25 bp, Homo sapien
atcttcacagcaggttagagctgag

SEQ ID NO: 3472664 - DNA, 25 bp, Homo sapien
ctgctcagcagggtcccatcatctt

SEQ ID NO: 3472665 - DNA, 25 bp, Homo sapien
cggtaccacggtgccctgtgataac

SEQ ID NO: 3472666 - DNA, 25 bp, Homo sapien
agagctggacggtaccacggtgccc

SEQ ID NO: 3472667 - DNA, 25 bp, Homo sapien
ctcagagagagctggacggtaccac

SEQ ID NO: 3472668 - DNA, 25 bp, Homo sapien
agttctcagagagagctggacggta

SEQ ID NO: 3472669 - DNA, 25 bp, Homo sapien
agctgctgctgaccaaagctatgat

SEQ ID NO: 3472670 - DNA, 25 bp, Homo sapien
tttggtttcggcctctgggtgctct

SEQ ID NO: 3472671 - DNA, 25 bp, Homo sapien
ttctttggtttcggcctctgggtgc

SEQ ID NO: 3472672 - DNA, 25 bp, Homo sapien
tctttggtttcggcctctgggtgct

SEQ ID NO: 3472673 - DNA, 25 bp, Homo sapien
ctttggtttcggcctctgggtgctc

SEQ ID NO: 3472674 - DNA, 25 bp, Homo sapien
cacccgtcatgcagcgagctgcctg

SEQ ID NO: 3472675 - DNA, 25 bp, Homo sapien
aggcacccgtcatgcagcgagctgc

SEQ ID NO: 3472676 - DNA, 25 bp, Homo sapien
gaggcacccgtcatgcagcgagctg

SEQ ID NO: 3472677 - DNA, 25 bp, Homo sapien
gcacccgtcatgcagcgagctgcct

SEQ ID NO: 3472678 - DNA, 25 bp, Homo sapien
gctggcgtctggaccttgactggca

SEQ ID NO: 3472679 - DNA, 25 bp, Homo sapien
gcttgtttccatcccctggaagcgg

SEQ ID NO: 3472680 - DNA, 25 bp, Homo sapien
ccttgcacatgtgtgctggcgtctg

SEQ ID NO: 3472681 - DNA, 25 bp, Homo sapien
gctgtcagtgcggtcagattccaca

SEQ ID NO: 3472682 - DNA, 25 bp, Homo sapien
ggcacagtcttgtgagggttgggcc

SEQ ID NO: 3472683 - DNA, 25 bp, Homo sapien
tctggcagtgatgtacagggggaca

SEQ ID NO: 3472684 - DNA, 25 bp, Homo sapien
tggggtaattccagtgggcacagtc

SEQ ID NO: 3472685 - DNA, 25 bp, Homo sapien
tgctctggcagtggggtaattccag

SEQ ID NO: 3472686 - DNA, 25 bp, Homo sapien
cttgaggacaattattgagcagagt

SEQ ID NO: 3472687 - DNA, 25 bp, Homo sapien
ggatggactggagcagcatagcgtg

SEQ ID NO: 3472688 - DNA, 25 bp, Homo sapien
atggactggagcagcatagcgtgat

SEQ ID NO: 3472689 - DNA, 25 bp, Homo sapien
gctgcttgaggacaattattgagca

SEQ ID NO: 3472690 - DNA, 25 bp, Homo sapien
tgaattatcagtgaggagctgcgga

SEQ ID NO: 3472691 - DNA, 25 bp, Homo sapien
tttgctgaattatcagtgaggagct

SEQ ID NO: 3472692 - DNA, 25 bp, Homo sapien
aattatcagtgaggagctgcggatg

SEQ ID NO: 3472693 - DNA, 25 bp, Homo sapien
ctttgctgaattatcagtgaggagc

SEQ ID NO: 3472694 - DNA, 25 bp, Homo sapien
tggaagagggatgatagagaaacgt

SEQ ID NO: 3472695 - DNA, 25 bp, Homo sapien
agaaacgttgggcagagcttgcgcc

SEQ ID NO: 3472696 - DNA, 25 bp, Homo sapien
gagggatgatagagaaacgttgggc

SEQ ID NO: 3472697 - DNA, 25 bp, Homo sapien
tgggcagagcttgcgccatgtcatg

SEQ ID NO: 3472698 - DNA, 25 bp, Homo sapien
ggaccgactattgctggaataggct

SEQ ID NO: 3472699 - DNA, 25 bp, Homo sapien
aggaccgactattgctggaataggc

SEQ ID NO: 3472700 - DNA, 25 bp, Homo sapien
taggaccgactattgctggaatagg

SEQ ID NO: 3472701 - DNA, 25 bp, Homo sapien
ctaggaccgactattgctggaatag

SEQ ID NO: 3472702 - DNA, 25 bp, Homo sapien
ccaggggctgtggagagcttattct

SEQ ID NO: 3472703 - DNA, 25 bp, Homo sapien
aaccaggggctgtggagagcttatt

SEQ ID NO: 3472704 - DNA, 25 bp, Homo sapien
aggggctgtggagagcttattcttt

SEQ ID NO: 3472705 - DNA, 25 bp, Homo sapien
cagcactgccagtgaaccaggggct

SEQ ID NO: 3472706 - DNA, 25 bp, Homo sapien
ccctgggtgcttgtcggctgggagg

SEQ ID NO: 3472707 - DNA, 25 bp, Homo sapien
tggactcttggtcccgcagagccag

SEQ ID NO: 3472708 - DNA, 25 bp, Homo sapien
tcttggactcttggtcccgcagagc

SEQ ID NO: 3472709 - DNA, 25 bp, Homo sapien
tgactcttggactcttggtcccgca

SEQ ID NO: 3472710 - DNA, 25 bp, Homo sapien
cacttgagagcttgcccagaatggc

SEQ ID NO: 3472711 - DNA, 25 bp, Homo sapien
ccacttgagagcttgcccagaatgg

SEQ ID NO: 3472712 - DNA, 25 bp, Homo sapien
ttgagagcttgcccagaatggcagg

SEQ ID NO: 3472713 - DNA, 25 bp, Homo sapien
acttgagagcttgcccagaatggca

SEQ ID NO: 3472714 - DNA, 25 bp, Homo sapien
cttggatacagtccttggcacgagg

SEQ ID NO: 3472715 - DNA, 25 bp, Homo sapien
taactctgttcaccaggccaaggca

SEQ ID NO: 3472716 - DNA, 25 bp, Homo sapien
gctgctcagttaagctgctcccagg

SEQ ID NO: 3472717 - DNA, 25 bp, Homo sapien
gagagtgccccatcgatgtcagaga

SEQ ID NO: 3472718 - DNA, 25 bp, Homo sapien
ggcactgccagtgaggggcctggtt

SEQ ID NO: 3472719 - DNA, 25 bp, Homo sapien
ctgcccctttccattggaccctggg

SEQ ID NO: 3472720 - DNA, 25 bp, Homo sapien
gctctggttgccatgggaagtcata

SEQ ID NO: 3472721 - DNA, 25 bp, Homo sapien
ggttgccatgggaagtcatatctgc

SEQ ID NO: 3472722 - DNA, 25 bp, Homo sapien
ttctgccctgagtccgcggtagcac

SEQ ID NO: 3472723 - DNA, 25 bp, Homo sapien
cagttccctccctcttcgagaagtt

SEQ ID NO: 3472724 - DNA, 25 bp, Homo sapien
tatggctggcctgagttagagaaaa

SEQ ID NO: 3472725 - DNA, 25 bp, Homo sapien
tgtccttgctcccttcttggtatgg

SEQ ID NO: 3472726 - DNA, 25 bp, Homo sapien
tgtcctttaaccttgagatcccgca

SEQ ID NO: 3472727 - DNA, 25 bp, Homo sapien
ttgagatcccgcaggctcagcttgg

SEQ ID NO: 3472728 - DNA, 25 bp, Homo sapien
taaccttgagatcccgcaggctcag

SEQ ID NO: 3472729 - DNA, 25 bp, Homo sapien
gagcggaggcccgtttgtcctcctc

SEQ ID NO: 3472730 - DNA, 25 bp, Homo sapien
gactcagacgtcagaatttcttccc

SEQ ID NO: 3472731 - DNA, 25 bp, Homo sapien
tggtcaggagacctttcagtgccac

SEQ ID NO: 3472732 - DNA, 25 bp, Homo sapien
ccttctggtcaggagacctttcagt

SEQ ID NO: 3472733 - DNA, 25 bp, Homo sapien
ttcaaatgactcagacgtcagaatt

SEQ ID NO: 3472734 - DNA, 25 bp, Homo sapien
tgcccttcacaaagtattttgcttc

SEQ ID NO: 3472735 - DNA, 25 bp, Homo sapien
gcccttcacaaagtattttgcttcc

SEQ ID NO: 3472736 - DNA, 25 bp, Homo sapien
gatgcccttcacaaagtattttgct

SEQ ID NO: 3472737 - DNA, 25 bp, Homo sapien
ccttcacaaagtattttgcttccat

SEQ ID NO: 3472738 - DNA, 25 bp, Homo sapien
cccatgcaaattgggagggtcagag

SEQ ID NO: 3472739 - DNA, 25 bp, Homo sapien
ttagggccaaagaggaccatcagca

SEQ ID NO: 3472740 - DNA, 25 bp, Homo sapien
cttcccatgcaaattgggagggtca

SEQ ID NO: 3472741 - DNA, 25 bp, Homo sapien
ggtcagagggatcattggatagcat

SEQ ID NO: 3472742 - DNA, 25 bp, Homo sapien
acgttggaatccagggcgatgatca

SEQ ID NO: 3472743 - DNA, 25 bp, Homo sapien
ggagtggacaccattatttgtaaga

SEQ ID NO: 3472744 - DNA, 25 bp, Homo sapien
gcccctggagtggacaccattattt

SEQ ID NO: 3472745 - DNA, 25 bp, Homo sapien
agtctcaggtaagacgttggaatcc

SEQ ID NO: 3472746 - DNA, 25 bp, Homo sapien
taatccaaaggccactgagcatcag

SEQ ID NO: 3472747 - DNA, 25 bp, Homo sapien
tccaaaggccactgagcatcagggc

SEQ ID NO: 3472748 - DNA, 25 bp, Homo sapien
aaaggccactgagcatcagggccat

SEQ ID NO: 3472749 - DNA, 25 bp, Homo sapien
atccaaaggccactgagcatcaggg

SEQ ID NO: 3472750 - DNA, 25 bp, Homo sapien
gggtaggacctgggccggcagacag

SEQ ID NO: 3472751 - DNA, 25 bp, Homo sapien
ggggtaggacctgggccggcagaca

SEQ ID NO: 3472752 - DNA, 25 bp, Homo sapien
tacctctggcctccgtcatgggcaa

SEQ ID NO: 3472753 - DNA, 25 bp, Homo sapien
ctctggcctccgtcatgggcaactg

SEQ ID NO: 3472754 - DNA, 25 bp, Homo sapien
ccaaccccagctgccgctctcctct

SEQ ID NO: 3472755 - DNA, 25 bp, Homo sapien
tggcctccgtcatgggcaactgtgc

SEQ ID NO: 3472756 - DNA, 25 bp, Homo sapien
agcacagagccgtcaaagaagggca

SEQ ID NO: 3472757 - DNA, 25 bp, Homo sapien
cagagccgtcaaagaagggcatcac

SEQ ID NO: 3472758 - DNA, 25 bp, Homo sapien
gccgtcaaagaagggcatcacgggt

SEQ ID NO: 3472759 - DNA, 25 bp, Homo sapien
aaagaagggcatcacgggttctgac

SEQ ID NO: 3472760 - DNA, 25 bp, Homo sapien
tttctgccctttggtgatgatagca

SEQ ID NO: 3472761 - DNA, 25 bp, Homo sapien
tgagtagaggtctccttcccaaggt

SEQ ID NO: 3472762 - DNA, 25 bp, Homo sapien
ccaaggtgatgtgggtttctactgc

SEQ ID NO: 3472763 - DNA, 25 bp, Homo sapien
tactgcagccgtttctacccgttct

SEQ ID NO: 3472764 - DNA, 25 bp, Homo sapien
ggagccaactggaaatgctgcccgg

SEQ ID NO: 3472765 - DNA, 25 bp, Homo sapien
cctgggaaggtttgacagcggtcca

SEQ ID NO: 3472766 - DNA, 25 bp, Homo sapien
caactggaaatgctgcccggttggg

SEQ ID NO: 3472767 - DNA, 25 bp, Homo sapien
ccatagggagctgttggagccaact

SEQ ID NO: 3472768 - DNA, 25 bp, Homo sapien
ctctttacatcagaaattatgatga

SEQ ID NO: 3472769 - DNA, 25 bp, Homo sapien
gctctttacatcagaaattatgatg

SEQ ID NO: 3472770 - DNA, 25 bp, Homo sapien
tgcatcggatagtcactgagggccc

SEQ ID NO: 3472771 - DNA, 25 bp, Homo sapien
cctggccctgcatcggatagtcact

SEQ ID NO: 3472772 - DNA, 25 bp, Homo sapien
ggccctgcatcggatagtcactgag

SEQ ID NO: 3472773 - DNA, 25 bp, Homo sapien
agtgcctggccctgcatcggatagt

SEQ ID NO: 3472774 - DNA, 25 bp, Homo sapien
tgtagcaacggagaatgggcagctg

SEQ ID NO: 3472775 - DNA, 25 bp, Homo sapien
tagcaacggagaatgggcagctgga

SEQ ID NO: 3472776 - DNA, 25 bp, Homo sapien
gtagcaacggagaatgggcagctgg

SEQ ID NO: 3472777 - DNA, 25 bp, Homo sapien
ctgtagcaacggagaatgggcagct

SEQ ID NO: 3472778 - DNA, 25 bp, Homo sapien
tccttgcacacatcgcggcatggag

SEQ ID NO: 3472779 - DNA, 25 bp, Homo sapien
ggacagtccgccctgccagagcttg

SEQ ID NO: 3472780 - DNA, 25 bp, Homo sapien
ttcccaaaggcataaggcgtctctt

SEQ ID NO: 3472781 - DNA, 25 bp, Homo sapien
ttgggccacatttgatggacagtcc

SEQ ID NO: 3472782 - DNA, 25 bp, Homo sapien
catgagcccctcattgggcactagg

SEQ ID NO: 3472783 - DNA, 25 bp, Homo sapien
gtgaatgtggccatgagcccctcat

SEQ ID NO: 3472784 - DNA, 25 bp, Homo sapien
ggacttggtgcagggtgaatgtggc

SEQ ID NO: 3472785 - DNA, 25 bp, Homo sapien
tcattgggcactaggcagtggttct

SEQ ID NO: 3472786 - DNA, 25 bp, Homo sapien
gattgcattgattcctgggccgtgg

SEQ ID NO: 3472787 - DNA, 25 bp, Homo sapien
gtactcctggacatttgaaaggccc

SEQ ID NO: 3472788 - DNA, 25 bp, Homo sapien
cacagtttgctcatccagcccaggt

SEQ ID NO: 3472789 - DNA, 25 bp, Homo sapien
ccttgagggtgccaagactgtcttc

SEQ ID NO: 3472790 - DNA, 25 bp, Homo sapien
tggccggggtaactcactgaaatcc

SEQ ID NO: 3472791 - DNA, 25 bp, Homo sapien
gactggttacggctttgcagctgag

SEQ ID NO: 3472792 - DNA, 25 bp, Homo sapien
tcttgacatcgctgctcactggctg

SEQ ID NO: 3472793 - DNA, 25 bp, Homo sapien
ggcccaggattcaagacatcttgac

SEQ ID NO: 3472794 - DNA, 25 bp, Homo sapien
ccatttatctggttcgtgtgtctat

SEQ ID NO: 3472795 - DNA, 25 bp, Homo sapien
cttggctgggcctgattaggcaact

SEQ ID NO: 3472796 - DNA, 25 bp, Homo sapien
tctatgtattggttgagggtctgct

SEQ ID NO: 3472797 - DNA, 25 bp, Homo sapien
gcaactctgctccataagcctctta

SEQ ID NO: 3472798 - DNA, 25 bp, Homo sapien
aaacagtttgcttatttcacacttg

SEQ ID NO: 3472799 - DNA, 25 bp, Homo sapien
tagcagagtttgtggcagataaaac

SEQ ID NO: 3472800 - DNA, 25 bp, Homo sapien
ccttggaatcagcagactctcggag

SEQ ID NO: 3472801 - DNA, 25 bp, Homo sapien
tccaggagctgtaacaaaagcaaat

SEQ ID NO: 3472802 - DNA, 25 bp, Homo sapien
gatgtgacacttcaaggcttaagag

SEQ ID NO: 3472803 - DNA, 25 bp, Homo sapien
gtatcccggagaagtatgagcacca

SEQ ID NO: 3472804 - DNA, 25 bp, Homo sapien
ggcacctttcctgcgtatggccaga

SEQ ID NO: 3472805 - DNA, 25 bp, Homo sapien
tacagcaactagtgtcacctgaagg

SEQ ID NO: 3472806 - DNA, 25 bp, Homo sapien
cagttagcttcatggccactagagg

SEQ ID NO: 3472807 - DNA, 25 bp, Homo sapien
aggtgtctggtgcagttagcttcat

SEQ ID NO: 3472808 - DNA, 25 bp, Homo sapien
ggaggtgtctggtgcagttagcttc

SEQ ID NO: 3472809 - DNA, 25 bp, Homo sapien
gaggtgtctggtgcagttagcttca

SEQ ID NO: 3472810 - DNA, 25 bp, Homo sapien
taacaagtcctctacttaggaatat

SEQ ID NO: 3472811 - DNA, 25 bp, Homo sapien
gaggcaggctccatattaacaagtc

SEQ ID NO: 3472812 - DNA, 25 bp, Homo sapien
gagccggaagatgcgaatgcattca

SEQ ID NO: 3472813 - DNA, 25 bp, Homo sapien
ggcagttggaattgctcctgagagc

SEQ ID NO: 3472814 - DNA, 25 bp, Homo sapien
tcctcttgccccctgcctctagctt

SEQ ID NO: 3472815 - DNA, 25 bp, Homo sapien
tgcctctagcttcctgctgtgtctt

SEQ ID NO: 3472816 - DNA, 25 bp, Homo sapien
ctcagctaactcctggagctgcttc

SEQ ID NO: 3472817 - DNA, 25 bp, Homo sapien
cccctgcctctagcttcctgctgtg

SEQ ID NO: 3472818 - DNA, 25 bp, Homo sapien
tagtccctggtcactaggctctcgg

SEQ ID NO: 3472819 - DNA, 25 bp, Homo sapien
tcaccagttggcagccagattcttc

SEQ ID NO: 3472820 - DNA, 25 bp, Homo sapien
tctttttatgggagccgagttggca

SEQ ID NO: 3472821 - DNA, 25 bp, Homo sapien
ggctctcgggatcctgctcttttta

SEQ ID NO: 3472822 - DNA, 25 bp, Homo sapien
tgggttgtacatccgcctttctgcc

SEQ ID NO: 3472823 - DNA, 25 bp, Homo sapien
ggactctgaacagcgctgactcagc

SEQ ID NO: 3472824 - DNA, 25 bp, Homo sapien
gggactctgaacagcgctgactcag

SEQ ID NO: 3472825 - DNA, 25 bp, Homo sapien
ccaggtcctgggttgtacatccgcc

SEQ ID NO: 3472826 - DNA, 25 bp, Homo sapien
tgacgagtgataagtccgatggaga

SEQ ID NO: 3472827 - DNA, 25 bp, Homo sapien
tgtaaacatcctgtgacgagtgata

SEQ ID NO: 3472828 - DNA, 25 bp, Homo sapien
cgatggagaggcgagagcggtgggc

SEQ ID NO: 3472829 - DNA, 25 bp, Homo sapien
catcctgtgacgagtgataagtccg

SEQ ID NO: 3472830 - DNA, 25 bp, Homo sapien
gccaccacagctcattcgtggaggt

SEQ ID NO: 3472831 - DNA, 25 bp, Homo sapien
ggaggtgtctaatcagctatgctaa

SEQ ID NO: 3472832 - DNA, 25 bp, Homo sapien
tgggttcagggcattcaggagccac

SEQ ID NO: 3472833 - DNA, 25 bp, Homo sapien
taattagcacatgaactctcctgtc

SEQ ID NO: 3472834 - DNA, 25 bp, Homo sapien
cattcctgagcaactctagcttttt

SEQ ID NO: 3472835 - DNA, 25 bp, Homo sapien
aacatatgtattccattcctgagca

SEQ ID NO: 3472836 - DNA, 25 bp, Homo sapien
tccattcctgagcaactctagcttt

SEQ ID NO: 3472837 - DNA, 25 bp, Homo sapien
gaacatatgtattccattcctgagc

SEQ ID NO: 3472838 - DNA, 25 bp, Homo sapien
gcaggtagtgagaactctgtgggga

SEQ ID NO: 3472839 - DNA, 25 bp, Homo sapien
gaggctgtggtcataatggggagca

SEQ ID NO: 3472840 - DNA, 25 bp, Homo sapien
gggcaggaagcgtcctgtgttctct

SEQ ID NO: 3472841 - DNA, 25 bp, Homo sapien
gggagggctgtgtttgaaccactga

SEQ ID NO: 3472842 - DNA, 25 bp, Homo sapien
tgctgggtgggattgagggatgtac

SEQ ID NO: 3472843 - DNA, 25 bp, Homo sapien
tgtttggagagccagtgtctcttgc

SEQ ID NO: 3472844 - DNA, 25 bp, Homo sapien
caaacaggtggggatcttctgtccc

SEQ ID NO: 3472845 - DNA, 25 bp, Homo sapien
gaacaccagggtcacagttctctgg

SEQ ID NO: 3472846 - DNA, 25 bp, Homo sapien
gccgggggcagtttccttctgcaca

SEQ ID NO: 3472847 - DNA, 25 bp, Homo sapien
gggggcagtttccttctgcacatgc

SEQ ID NO: 3472848 - DNA, 25 bp, Homo sapien
gccagccgggggcagtttccttctg

SEQ ID NO: 3472849 - DNA, 25 bp, Homo sapien
catgcagattaagtagtgggctgcc

SEQ ID NO: 3472850 - DNA, 25 bp, Homo sapien
tgctaataattggagcccacacaga

SEQ ID NO: 3472851 - DNA, 25 bp, Homo sapien
tacttcttgggtgtgacagcaccgg

SEQ ID NO: 3472852 - DNA, 25 bp, Homo sapien
tattcgagacctgatgtttggactg

SEQ ID NO: 3472853 - DNA, 25 bp, Homo sapien
cataggcagcgagatatccagtggt

SEQ ID NO: 3472854 - DNA, 25 bp, Homo sapien
tcagaaatacaaatgcgtagccctc

SEQ ID NO: 3472855 - DNA, 25 bp, Homo sapien
cctgagatagtcttcatgtgtgcag

SEQ ID NO: 3472856 - DNA, 25 bp, Homo sapien
tactggtttctgatcagatgacctg

SEQ ID NO: 3472857 - DNA, 25 bp, Homo sapien
tcagtatgggtctctaatggaaggc

SEQ ID NO: 3472858 - DNA, 25 bp, Homo sapien
taaggtgggtgccaaatccaagatg

SEQ ID NO: 3472859 - DNA, 25 bp, Homo sapien
tagacttccgtcctctcccatagag

SEQ ID NO: 3472860 - DNA, 25 bp, Homo sapien
taatggagcggattcaaagcctctg

SEQ ID NO: 3472861 - DNA, 25 bp, Homo sapien
tattgtgcctcgagaataatggagc

SEQ ID NO: 3472862 - DNA, 25 bp, Homo sapien
ttttgtgataacttgcccgaggtcg

SEQ ID NO: 3472863 - DNA, 25 bp, Homo sapien
tccgagttaggtgccgggattctcc

SEQ ID NO: 3472864 - DNA, 25 bp, Homo sapien
agtattcaaactcggctacgctgca

SEQ ID NO: 3472865 - DNA, 25 bp, Homo sapien
ccgaggtcgtacagctagccagcta

SEQ ID NO: 3472866 - DNA, 25 bp, Homo sapien
tcttggacggtaggtacctggaagc

SEQ ID NO: 3472867 - DNA, 25 bp, Homo sapien
cactagaagagttacacaggtctta

SEQ ID NO: 3472868 - DNA, 25 bp, Homo sapien
ggaagcctagtggagcagattcccc

SEQ ID NO: 3472869 - DNA, 25 bp, Homo sapien
gggctacttgtaatagaacactaga

SEQ ID NO: 3472870 - DNA, 25 bp, Homo sapien
gaaacgatttgagaattgtgagggt

SEQ ID NO: 3472871 - DNA, 25 bp, Homo sapien
cccaaaacttgagtgttagaattca

SEQ ID NO: 3472872 - DNA, 25 bp, Homo sapien
gctctaaaccccctgcaaagaataa

SEQ ID NO: 3472873 - DNA, 25 bp, Homo sapien
aatatgataatgaaacgatttgaga

SEQ ID NO: 3472874 - DNA, 25 bp, Homo sapien
tctgactatgtgaagttgagcaact

SEQ ID NO: 3472875 - DNA, 25 bp, Homo sapien
gaaatttggatgacctcttgcaccc

SEQ ID NO: 3472876 - DNA, 25 bp, Homo sapien
tttttgtcaaataataaagctggga

SEQ ID NO: 3472877 - DNA, 25 bp, Homo sapien
gagcaacttccttaatcttgccacg

SEQ ID NO: 3472878 - DNA, 25 bp, Homo sapien
aaagtgatgacatacccctggttca

SEQ ID NO: 3472879 - DNA, 25 bp, Homo sapien
aataggctcacacttgcatcacaag

SEQ ID NO: 3472880 - DNA, 25 bp, Homo sapien
tgggtttcctcctaggccaattcaa

SEQ ID NO: 3472881 - DNA, 25 bp, Homo sapien
gagttccaaccttagaggatagagc

SEQ ID NO: 3472882 - DNA, 25 bp, Homo sapien
taaggtcaagtaacacaataggctc

SEQ ID NO: 3472883 - DNA, 25 bp, Homo sapien
gatctctgactcagaccagatgtcc

SEQ ID NO: 3472884 - DNA, 25 bp, Homo sapien
tgaattggcctaggaggaaacccag

SEQ ID NO: 3472885 - DNA, 25 bp, Homo sapien
cataatgctctatcctctaaggttg

SEQ ID NO: 3472886 - DNA, 25 bp, Homo sapien
ggacatctggtctgagtcagagatc

SEQ ID NO: 3472887 - DNA, 25 bp, Homo sapien
gagcctattgtgttacttgacctta

SEQ ID NO: 3472888 - DNA, 25 bp, Homo sapien
tctaaggttggaactctgaagttgg

SEQ ID NO: 3472889 - DNA, 25 bp, Homo sapien
cagcttgtgatgcaagtgtgagcct

SEQ ID NO: 3472890 - DNA, 25 bp, Homo sapien
gagccaggctgtccaaatggtgaga

SEQ ID NO: 3472891 - DNA, 25 bp, Homo sapien
tatttaagatccgaccgcctggacc

SEQ ID NO: 3472892 - DNA, 25 bp, Homo sapien
cgcgtcatgccctggtgaagtagaa

SEQ ID NO: 3472893 - DNA, 25 bp, Homo sapien
tccagagccctgacagacaaagtgt

SEQ ID NO: 3472894 - DNA, 25 bp, Homo sapien
tgctcgcaggaaaaggagctcacta

SEQ ID NO: 3472895 - DNA, 25 bp, Homo sapien
gaatccttgtggcagcagagtcagt

SEQ ID NO: 3472896 - DNA, 25 bp, Homo sapien
ttctacttcaccagggcatgacgcg

SEQ ID NO: 3472897 - DNA, 25 bp, Homo sapien
tattctcaccatttggacagcctgg

SEQ ID NO: 3472898 - DNA, 25 bp, Homo sapien
taatagtgagctccttttcctgcga

SEQ ID NO: 3472899 - DNA, 25 bp, Homo sapien
tacactttgtctgtcagggctctgg

SEQ ID NO: 3472900 - DNA, 25 bp, Homo sapien
gactgactctgctgccacaaggatt

SEQ ID NO: 3472901 - DNA, 25 bp, Homo sapien
ccaggcggtcggatcttaaataaat

SEQ ID NO: 3472902 - DNA, 25 bp, Homo sapien
attgatctctcttctgaacccgcca

SEQ ID NO: 3472903 - DNA, 25 bp, Homo sapien
ttgatctctcttctgaacccgccat

SEQ ID NO: 3472904 - DNA, 25 bp, Homo sapien
cattgatctctcttctgaacccgcc

SEQ ID NO: 3472905 - DNA, 25 bp, Homo sapien
ctctctgagtcccaaccaggttggc

SEQ ID NO: 3472906 - DNA, 25 bp, Homo sapien
agtgccaattgctgccttcatcagc

SEQ ID NO: 3472907 - DNA, 25 bp, Homo sapien
tctgagtcccaaccaggttggcctc

SEQ ID NO: 3472908 - DNA, 25 bp, Homo sapien
cctcagtgccaattgctgccttcat

SEQ ID NO: 3472909 - DNA, 25 bp, Homo sapien
taactatcgcctgagccctgatctg

SEQ ID NO: 3472910 - DNA, 25 bp, Homo sapien
acggaacagccaccacttctaacta

SEQ ID NO: 3472911 - DNA, 25 bp, Homo sapien
tcagggtcacaaaagtccaagaggc

SEQ ID NO: 3472912 - DNA, 25 bp, Homo sapien
caccttccagcgtggagtcacactg

SEQ ID NO: 3472913 - DNA, 25 bp, Homo sapien
aaaggtcacctgctgaccagtggag

SEQ ID NO: 3472914 - DNA, 25 bp, Homo sapien
tgggaaatccctaggagactgagtc

SEQ ID NO: 3472915 - DNA, 25 bp, Homo sapien
ggcagggtgtccagatgcagcaagc

SEQ ID NO: 3472916 - DNA, 25 bp, Homo sapien
agagttgggaaatccctaggagact

SEQ ID NO: 3472917 - DNA, 25 bp, Homo sapien
gcagctgcctctagggatgaactga

SEQ ID NO: 3472918 - DNA, 25 bp, Homo sapien
ggagcagctgcctctagggatgaac

SEQ ID NO: 3472919 - DNA, 25 bp, Homo sapien
gagcagctgcctctagggatgaact

SEQ ID NO: 3472920 - DNA, 25 bp, Homo sapien
gctgcctctagggatgaactgagca

SEQ ID NO: 3472921 - DNA, 25 bp, Homo sapien
ccccaggtccccatgcctctggacc

SEQ ID NO: 3472922 - DNA, 25 bp, Homo sapien
ggaagtgtcctgtgaggggcacccc

SEQ ID NO: 3472923 - DNA, 25 bp, Homo sapien
gtccccatgcctctggacccctccc

SEQ ID NO: 3472924 - DNA, 25 bp, Homo sapien
aagtgtcctgtgaggggcaccccag

SEQ ID NO: 3472925 - DNA, 25 bp, Homo sapien
gccaggagggcaacaacaaggagta

SEQ ID NO: 3472926 - DNA, 25 bp, Homo sapien
ccaggagggcaacaacaaggagtac

SEQ ID NO: 3472927 - DNA, 25 bp, Homo sapien
gcgccaggagggcaacaacaaggag

SEQ ID NO: 3472928 - DNA, 25 bp, Homo sapien
cgccaggagggcaacaacaaggagt

SEQ ID NO: 3472929 - DNA, 25 bp, Homo sapien
tgcacgctgctcagtgcatccttgg

SEQ ID NO: 3472930 - DNA, 25 bp, Homo sapien
tgagaagggaggcatcctcggcctc

SEQ ID NO: 3472931 - DNA, 25 bp, Homo sapien
cagtgcatccttggcggtcttggtg

SEQ ID NO: 3472932 - DNA, 25 bp, Homo sapien
gtggcgtgcttcatgtaaccctgca

SEQ ID NO: 3472933 - DNA, 25 bp, Homo sapien
gtcatctctcccgcagcagcctgac

SEQ ID NO: 3472934 - DNA, 25 bp, Homo sapien
aactctgtcatctctcccgcagcag

SEQ ID NO: 3472935 - DNA, 25 bp, Homo sapien
tctctcccgcagcagcctgacaaag

SEQ ID NO: 3472936 - DNA, 25 bp, Homo sapien
atctctcccgcagcagcctgacaaa

SEQ ID NO: 3472937 - DNA, 25 bp, Homo sapien
tccccgctggcccatggaaaaattg

SEQ ID NO: 3472938 - DNA, 25 bp, Homo sapien
catccccgctggcccatggaaaaat

SEQ ID NO: 3472939 - DNA, 25 bp, Homo sapien
gaccactgctctagccagaccttca

SEQ ID NO: 3472940 - DNA, 25 bp, Homo sapien
ctagccagaccttcagaaaaggaaa

SEQ ID NO: 3472941 - DNA, 25 bp, Homo sapien
gagttgcacaacctggtggctctga

SEQ ID NO: 3472942 - DNA, 25 bp, Homo sapien
aaacagcaccgcctggagttgcaca

SEQ ID NO: 3472943 - DNA, 25 bp, Homo sapien
gagatatccttgcaggaaccccagc

SEQ ID NO: 3472944 - DNA, 25 bp, Homo sapien
tcagatgtttatgcccctgggcctg

SEQ ID NO: 3472945 - DNA, 25 bp, Homo sapien
ttcagggaactgaagccatcggtca

SEQ ID NO: 3472946 - DNA, 25 bp, Homo sapien
gaacttgtccttaacggtgctccag

SEQ ID NO: 3472947 - DNA, 25 bp, Homo sapien
gaagttggtctgacctcagggtcca

SEQ ID NO: 3472948 - DNA, 25 bp, Homo sapien
acggtgctccagtagtctttcaggg

SEQ ID NO: 3472949 - DNA, 25 bp, Homo sapien
gacccaaggagctcgcaggatggat

SEQ ID NO: 3472950 - DNA, 25 bp, Homo sapien
ttttaagcaacctacaggggcagcc

SEQ ID NO: 3472951 - DNA, 25 bp, Homo sapien
ggtaggagagcactgagaatactgt

SEQ ID NO: 3472952 - DNA, 25 bp, Homo sapien
gagcactgagaatactgtccctttt

SEQ ID NO: 3472953 - DNA, 25 bp, Homo sapien
tccagctttattgggaggccagcat

SEQ ID NO: 3472954 - DNA, 25 bp, Homo sapien
gtccagctttattgggaggccagca

SEQ ID NO: 3472955 - DNA, 25 bp, Homo sapien
tgtgccaaacggttcgaacgctctc

SEQ ID NO: 3472956 - DNA, 25 bp, Homo sapien
tgatcaagcatctttacgtgcaggt

SEQ ID NO: 3472957 - DNA, 25 bp, Homo sapien
cttcacgtgcgcctaagagggctag

SEQ ID NO: 3472958 - DNA, 25 bp, Homo sapien
tctcacggcaaacctacggtggagg

SEQ ID NO: 3472959 - DNA, 25 bp, Homo sapien
gtacactaagaagctcaacacccag

SEQ ID NO: 3472960 - DNA, 25 bp, Homo sapien
ctgcccgtgctggagagcttcaagg

SEQ ID NO: 3472961 - DNA, 25 bp, Homo sapien
tgagcgctctcgaggagtacactaa

SEQ ID NO: 3472962 - DNA, 25 bp, Homo sapien
gaagctgcacgagctgcaagagaag

SEQ ID NO: 3472963 - DNA, 25 bp, Homo sapien
agcccctgggatcgagtgaaggacc

SEQ ID NO: 3472964 - DNA, 25 bp, Homo sapien
cagagactatgtgtcccagtttgaa

SEQ ID NO: 3472965 - DNA, 25 bp, Homo sapien
gatgtgctcaaagacagcggcagag

SEQ ID NO: 3472966 - DNA, 25 bp, Homo sapien
cactgtgtacgtggatgtgctcaaa

SEQ ID NO: 3472967 - DNA, 25 bp, Homo sapien
ggtgctgaccttggccgtgctcttc

SEQ ID NO: 3472968 - DNA, 25 bp, Homo sapien
gtgctgaccttggccgtgctcttcc

SEQ ID NO: 3472969 - DNA, 25 bp, Homo sapien
ctgaccttggccgtgctcttcctga

SEQ ID NO: 3472970 - DNA, 25 bp, Homo sapien
gaccttggccgtgctcttcctgacg

SEQ ID NO: 3472971 - DNA, 25 bp, Homo sapien
gggtcaccaactactcaccagaagg

SEQ ID NO: 3472972 - DNA, 25 bp, Homo sapien
catggtactgtatgtatgggagagc

SEQ ID NO: 3472973 - DNA, 25 bp, Homo sapien
gaaagccagtgagcctactaaccgt

SEQ ID NO: 3472974 - DNA, 25 bp, Homo sapien
tgcaccctccagcaacaacagatga

SEQ ID NO: 3472975 - DNA, 25 bp, Homo sapien
gatcccttgagtggaattctgcagt

SEQ ID NO: 3472976 - DNA, 25 bp, Homo sapien
catcctgatgttgctggcgggatcc

SEQ ID NO: 3472977 - DNA, 25 bp, Homo sapien
tttgcacagaggaaagcgggtgccc

SEQ ID NO: 3472978 - DNA, 25 bp, Homo sapien
tgcaagagcccttcgtgggagctgt

SEQ ID NO: 3472979 - DNA, 25 bp, Homo sapien
aacaagagagagaccttgaatacac

SEQ ID NO: 3472980 - DNA, 25 bp, Homo sapien
gaccttgaatacactgactcttcca

SEQ ID NO: 3472981 - DNA, 25 bp, Homo sapien
tgagagagggtctgggttatctcct

SEQ ID NO: 3472982 - DNA, 25 bp, Homo sapien
aaaggagagcaagaggtcccgagtc

SEQ ID NO: 3472983 - DNA, 25 bp, Homo sapien
ccaagcctggaacgcagagaggtct

SEQ ID NO: 3472984 - DNA, 25 bp, Homo sapien
gaaaacatgtctgtcctagccaaga

SEQ ID NO: 3472985 - DNA, 25 bp, Homo sapien
tactgctgggatccacggaaaacat

SEQ ID NO: 3472986 - DNA, 25 bp, Homo sapien
catatgaagagtttggcacggaggc

SEQ ID NO: 3472987 - DNA, 25 bp, Homo sapien
tcttcgagagaataagtgttccctg

SEQ ID NO: 3472988 - DNA, 25 bp, Homo sapien
caggagtcttacttggacttaggag

SEQ ID NO: 3472989 - DNA, 25 bp, Homo sapien
tcagctgagcaaggtggcatgcatc

SEQ ID NO: 3472990 - DNA, 25 bp, Homo sapien
agtcccagctagttgagatcaaggc

SEQ ID NO: 3472991 - DNA, 25 bp, Homo sapien
gtggtgatttacatttgatactgtt

SEQ ID NO: 3472992 - DNA, 25 bp, Homo sapien
cattttgtattaatgtggtgattta

SEQ ID NO: 3472993 - DNA, 25 bp, Homo sapien
ggtgatttacatttgatactgtttg

SEQ ID NO: 3472994 - DNA, 25 bp, Homo sapien
taatgtggtgatttacatttgatac

SEQ ID NO: 3472995 - DNA, 25 bp, Homo sapien
tcgtatatgttatagtaccaaaata

SEQ ID NO: 3472996 - DNA, 25 bp, Homo sapien
ctgtatgccattgtttaagtgattt

SEQ ID NO: 3472997 - DNA, 25 bp, Homo sapien
tctgtatgccattgtttaagtgatt

SEQ ID NO: 3472998 - DNA, 25 bp, Homo sapien
catctttaaaataatcgtatatgtt

SEQ ID NO: 3472999 - DNA, 25 bp, Homo sapien
tatgccatcgttactcagtttctca

SEQ ID NO: 3473000 - DNA, 25 bp, Homo sapien
tggactagtgggagaaatgcttcta

SEQ ID NO: 3473001 - DNA, 25 bp, Homo sapien
cacaatgagagtgtctacctgctga

SEQ ID NO: 3473002 - DNA, 25 bp, Homo sapien
tttgcggcctgctacaatacctaac

SEQ ID NO: 3473003 - DNA, 25 bp, Homo sapien
tatttctgctggattgaaggaggta

SEQ ID NO: 3473004 - DNA, 25 bp, Homo sapien
tgaaggaggtagatgttgtactcat

SEQ ID NO: 3473005 - DNA, 25 bp, Homo sapien
tactggcagtttgagtagtactctt

SEQ ID NO: 3473006 - DNA, 25 bp, Homo sapien
caaggatcttgtttactgatgtcag

SEQ ID NO: 3473007 - DNA, 25 bp, Homo sapien
agtgttctgcccgctttggcctccg

SEQ ID NO: 3473008 - DNA, 25 bp, Homo sapien
gtgttctgcccgctttggcctccga

SEQ ID NO: 3473009 - DNA, 25 bp, Homo sapien
ctggagtgcattggtaggatcttag

SEQ ID NO: 3473010 - DNA, 25 bp, Homo sapien
gagtgcattggtaggatcttagctc

SEQ ID NO: 3473011 - DNA, 25 bp, Homo sapien
tataaaagaactgctagtgacaagc

SEQ ID NO: 3473012 - DNA, 25 bp, Homo sapien
cttgtaatggactaagatgcaggct

SEQ ID NO: 3473013 - DNA, 25 bp, Homo sapien
tgcccagatggaccttagtgaaagt

SEQ ID NO: 3473014 - DNA, 25 bp, Homo sapien
gaaaatgatctaagacggatgctgg

SEQ ID NO: 3473015 - DNA, 25 bp, Homo sapien
tcattgctggcaaatccggacttca

SEQ ID NO: 3473016 - DNA, 25 bp, Homo sapien
tctgtgatgttgaccctacctaaag

SEQ ID NO: 3473017 - DNA, 25 bp, Homo sapien
ggttgctccgactttaaattctcag

SEQ ID NO: 3473018 - DNA, 25 bp, Homo sapien
cgctttgttgcctaccttgtgttga

SEQ ID NO: 3473019 - DNA, 25 bp, Homo sapien
tgtgtgtggaatttatgaccctctg

SEQ ID NO: 3473020 - DNA, 25 bp, Homo sapien
aacattaattgtgagtccctgaggg

SEQ ID NO: 3473021 - DNA, 25 bp, Homo sapien
tctatcatgagtacaggtgtgttgc

SEQ ID NO: 3473022 - DNA, 25 bp, Homo sapien
caaacgcttgtgattgagtgtgcat

SEQ ID NO: 3473023 - DNA, 25 bp, Homo sapien
ccttttggtgacaagaaagcaaact

SEQ ID NO: 3473024 - DNA, 25 bp, Homo sapien
aagggtgagctcatattctgaactc

SEQ ID NO: 3473025 - DNA, 25 bp, Homo sapien
agaagggtgagctcatattctgaac

SEQ ID NO: 3473026 - DNA, 25 bp, Homo sapien
gggtgagctcatattctgaactctt

SEQ ID NO: 3473027 - DNA, 25 bp, Homo sapien
tgagctcatattctgaactcttaca

SEQ ID NO: 3473028 - DNA, 25 bp, Homo sapien
cagcttgctacagcctcaacttcct

SEQ ID NO: 3473029 - DNA, 25 bp, Homo sapien
cacagcttgctacagcctcaacttc

SEQ ID NO: 3473030 - DNA, 25 bp, Homo sapien
gatcacagcttgctacagcctcaac

SEQ ID NO: 3473031 - DNA, 25 bp, Homo sapien
atcacagcttgctacagcctcaact

SEQ ID NO: 3473032 - DNA, 25 bp, Homo sapien
tttgtcttttattgacttgtggtag

SEQ ID NO: 3473033 - DNA, 25 bp, Homo sapien
tattgacttgtggtagttcttaaaa

SEQ ID NO: 3473034 - DNA, 25 bp, Homo sapien
tttctctggttaacaataggagcac

SEQ ID NO: 3473035 - DNA, 25 bp, Homo sapien
catgagtttattagctgtgatattc

SEQ ID NO: 3473036 - DNA, 25 bp, Homo sapien
cagtcaaatttagcaatggggggtt

SEQ ID NO: 3473037 - DNA, 25 bp, Homo sapien
taataagttctgataacccactacc

SEQ ID NO: 3473038 - DNA, 25 bp, Homo sapien
ataccaactttagtgacactaaagt

SEQ ID NO: 3473039 - DNA, 25 bp, Homo sapien
taacccactaccataggaccagcct

SEQ ID NO: 3473040 - DNA, 25 bp, Homo sapien
tacgatgcagtagactttcttctct

SEQ ID NO: 3473041 - DNA, 25 bp, Homo sapien
ctgctcgaatgactgtggatgactc

SEQ ID NO: 3473042 - DNA, 25 bp, Homo sapien
aatgtttattttttactacgatgca

SEQ ID NO: 3473043 - DNA, 25 bp, Homo sapien
tcttctctcgtgtagaaactgctcg

SEQ ID NO: 3473044 - DNA, 25 bp, Homo sapien
cacaggttacatattctttacgtta

SEQ ID NO: 3473045 - DNA, 25 bp, Homo sapien
ccaaacctttgtatgagcccattag

SEQ ID NO: 3473046 - DNA, 25 bp, Homo sapien
tctttacgttactatgagaaactac

SEQ ID NO: 3473047 - DNA, 25 bp, Homo sapien
aaacctttgtatgagcccattagct

SEQ ID NO: 3473048 - DNA, 25 bp, Homo sapien
ccaggatgattactaccttggattt

SEQ ID NO: 3473049 - DNA, 25 bp, Homo sapien
tcccaggatgattactaccttggat

SEQ ID NO: 3473050 - DNA, 25 bp, Homo sapien
aggatgattactaccttggatttta

SEQ ID NO: 3473051 - DNA, 25 bp, Homo sapien
cccaggatgattactaccttggatt

SEQ ID NO: 3473052 - DNA, 25 bp, Homo sapien
ctcctctgacttgctttgctatttt

SEQ ID NO: 3473053 - DNA, 25 bp, Homo sapien
ttcttccacatctcctctgacttgc

SEQ ID NO: 3473054 - DNA, 25 bp, Homo sapien
tccacatctcctctgacttgctttg

SEQ ID NO: 3473055 - DNA, 25 bp, Homo sapien
ctgtgaaacctggctttcttccaca

SEQ ID NO: 3473056 - DNA, 25 bp, Homo sapien
ggatgccataattggtcactttcaa

SEQ ID NO: 3473057 - DNA, 25 bp, Homo sapien
tttttctgtgttcccgctctagggc

SEQ ID NO: 3473058 - DNA, 25 bp, Homo sapien
ttcaatgagtcatcagtatccgcag

SEQ ID NO: 3473059 - DNA, 25 bp, Homo sapien
cagctgtggattaacagtactgccc

SEQ ID NO: 3473060 - DNA, 25 bp, Homo sapien
ggagcgtgcaatttgtacttattgg

SEQ ID NO: 3473061 - DNA, 25 bp, Homo sapien
taataaagttatcagtgtccctgaa

SEQ ID NO: 3473062 - DNA, 25 bp, Homo sapien
tacttattggtattaacattaccaa

SEQ ID NO: 3473063 - DNA, 25 bp, Homo sapien
tgaatatgagatatggagcgtgcaa

SEQ ID NO: 3473064 - DNA, 25 bp, Homo sapien
catttggcgaactttaaaaccatca

SEQ ID NO: 3473065 - DNA, 25 bp, Homo sapien
acaaacaaacacaactcttggctgg

SEQ ID NO: 3473066 - DNA, 25 bp, Homo sapien
catcagtgatttgagttaattctac

SEQ ID NO: 3473067 - DNA, 25 bp, Homo sapien
tgtgtgtttcctcactgcctcatta

SEQ ID NO: 3473068 - DNA, 25 bp, Homo sapien
catgtcagtacactttgtccttgtc

SEQ ID NO: 3473069 - DNA, 25 bp, Homo sapien
tactattcaaaacacgtagacttat

SEQ ID NO: 3473070 - DNA, 25 bp, Homo sapien
tgacctagagtcaacgtctcaaaag

SEQ ID NO: 3473071 - DNA, 25 bp, Homo sapien
agtagcctattgatagattttaggg

SEQ ID NO: 3473072 - DNA, 25 bp, Homo sapien
tgcagcagtcctatcatgtttaaat

SEQ ID NO: 3473073 - DNA, 25 bp, Homo sapien
ccagcgtgagaatttcagagattaa

SEQ ID NO: 3473074 - DNA, 25 bp, Homo sapien
gattttcaagggtaattgggccata

SEQ ID NO: 3473075 - DNA, 25 bp, Homo sapien
tgctcctccctcgttttaatggtga

SEQ ID NO: 3473076 - DNA, 25 bp, Homo sapien
gctccagcgcatgtttaccagcagt

SEQ ID NO: 3473077 - DNA, 25 bp, Homo sapien
aaatttctgtctagtttcagctcca

SEQ ID NO: 3473078 - DNA, 25 bp, Homo sapien
tgtgaaaatgtaggttagttgccca

SEQ ID NO: 3473079 - DNA, 25 bp, Homo sapien
cactcagttggatactttcggccag

SEQ ID NO: 3473080 - DNA, 25 bp, Homo sapien
tgcgtgcacaagcaaaggccttaga

SEQ ID NO: 3473081 - DNA, 25 bp, Homo sapien
gagaagacattttgccctatgaccc

SEQ ID NO: 3473082 - DNA, 25 bp, Homo sapien
ccttagacggccaaggtcagaattc

SEQ ID NO: 3473083 - DNA, 25 bp, Homo sapien
tctccagaggtccacttaaattagg

SEQ ID NO: 3473084 - DNA, 25 bp, Homo sapien
aaagctcttagagcagcatggtgcc

SEQ ID NO: 3473085 - DNA, 25 bp, Homo sapien
tgccctaatagcatgacgtaaatat

SEQ ID NO: 3473086 - DNA, 25 bp, Homo sapien
gggatgacagtagtacttacctcac

SEQ ID NO: 3473087 - DNA, 25 bp, Homo sapien
tgcttctcaccccttgggcacgatt

SEQ ID NO: 3473088 - DNA, 25 bp, Homo sapien
gccgggagactgtaagcccagaaga

SEQ ID NO: 3473089 - DNA, 25 bp, Homo sapien
gcatatgaaatgtggacccggagga

SEQ ID NO: 3473090 - DNA, 25 bp, Homo sapien
tggaaccagcagctagggaatcata

SEQ ID NO: 3473091 - DNA, 25 bp, Homo sapien
cggactgggaatgtgcacgtctgca

SEQ ID NO: 3473092 - DNA, 25 bp, Homo sapien
gaagaattcccctgcgttgttacca

SEQ ID NO: 3473093 - DNA, 25 bp, Homo sapien
tcaatgtcctcggagagtcactagg

SEQ ID NO: 3473094 - DNA, 25 bp, Homo sapien
aatgcgcaccactgcttcatcaggg

SEQ ID NO: 3473095 - DNA, 25 bp, Homo sapien
ggctgtcacccacccaatgactgga

SEQ ID NO: 3473096 - DNA, 25 bp, Homo sapien
gaggcggcgtttcactgagttgggc

SEQ ID NO: 3473097 - DNA, 25 bp, Homo sapien
cggcgtttcactgagttgggcaggc

SEQ ID NO: 3473098 - DNA, 25 bp, Homo sapien
aggcggcgtttcactgagttgggca

SEQ ID NO: 3473099 - DNA, 25 bp, Homo sapien
gcggcgtttcactgagttgggcagg

SEQ ID NO: 3473100 - DNA, 25 bp, Homo sapien
gaaattgggatgtgaccaggtggat

SEQ ID NO: 3473101 - DNA, 25 bp, Homo sapien
gatattttctagcaggagactaagt

SEQ ID NO: 3473102 - DNA, 25 bp, Homo sapien
gagactaagtagttatccttggctg

SEQ ID NO: 3473103 - DNA, 25 bp, Homo sapien
gtagttatccttggctgctcagacc

SEQ ID NO: 3473104 - DNA, 25 bp, Homo sapien
gaccacagacactagtatattctaa

SEQ ID NO: 3473105 - DNA, 25 bp, Homo sapien
gtaggagccaatcatcagatagata

SEQ ID NO: 3473106 - DNA, 25 bp, Homo sapien
aagtaagttgaccatctataaagtg

SEQ ID NO: 3473107 - DNA, 25 bp, Homo sapien
gacaactggctttggagatcagcag

SEQ ID NO: 3473108 - DNA, 25 bp, Homo sapien
tcacttcacccccacgtacacaaag

SEQ ID NO: 3473109 - DNA, 25 bp, Homo sapien
gcccacaaacacgccttcacttcac

SEQ ID NO: 3473110 - DNA, 25 bp, Homo sapien
ccacaaacacgccttcacttcaccc

SEQ ID NO: 3473111 - DNA, 25 bp, Homo sapien
acccccacgtacacaaagacacacg

SEQ ID NO: 3473112 - DNA, 25 bp, Homo sapien
ctccaagctgccgcgccgtgggtga

SEQ ID NO: 3473113 - DNA, 25 bp, Homo sapien
agctccaagctgccgcgccgtgggt

SEQ ID NO: 3473114 - DNA, 25 bp, Homo sapien
ctgccgcgccgtgggtgagtgatgg

SEQ ID NO: 3473115 - DNA, 25 bp, Homo sapien
agtgatggagactgtcactgccaca

SEQ ID NO: 3473116 - DNA, 25 bp, Homo sapien
gctgaaaaggttgctcaggcctcgg

SEQ ID NO: 3473117 - DNA, 25 bp, Homo sapien
ctgaaaaggttgctcaggcctcggg

SEQ ID NO: 3473118 - DNA, 25 bp, Homo sapien
gagtcccacggatctaggtttattc

SEQ ID NO: 3473119 - DNA, 25 bp, Homo sapien
cttgggcacttactagctccatgac

SEQ ID NO: 3473120 - DNA, 25 bp, Homo sapien
tggaaaaagcaagcatggagcgcgc

SEQ ID NO: 3473121 - DNA, 25 bp, Homo sapien
tggagcgcgcacaggcttggagtcc

SEQ ID NO: 3473122 - DNA, 25 bp, Homo sapien
caagcctgtaggtccctcgggctct

SEQ ID NO: 3473123 - DNA, 25 bp, Homo sapien
ccagcatcgcacagtggagaaggtc

SEQ ID NO: 3473124 - DNA, 25 bp, Homo sapien
gacatccctgatgacaagcctgtag

SEQ ID NO: 3473125 - DNA, 25 bp, Homo sapien
ccccagcatcgcacagtggagaagg

SEQ ID NO: 3473126 - DNA, 25 bp, Homo sapien
gccattgccggaggatgccgacctg

SEQ ID NO: 3473127 - DNA, 25 bp, Homo sapien
cagagccatatagggtcagctgcca

SEQ ID NO: 3473128 - DNA, 25 bp, Homo sapien
gatgccgacctggaatgactcatcc

SEQ ID NO: 3473129 - DNA, 25 bp, Homo sapien
tctgtccctgatgtctactgcactc

SEQ ID NO: 3473130 - DNA, 25 bp, Homo sapien
ctcaggaattttcagccccggtggg

SEQ ID NO: 3473131 - DNA, 25 bp, Homo sapien
ttccactcatggcactctctaacag

SEQ ID NO: 3473132 - DNA, 25 bp, Homo sapien
caggaattttcagccccggtgggca

SEQ ID NO: 3473133 - DNA, 25 bp, Homo sapien
gtgatggtgtaaccatcttcctcag

SEQ ID NO: 3473134 - DNA, 25 bp, Homo sapien
gcagcttgagtcttggccctagtac

SEQ ID NO: 3473135 - DNA, 25 bp, Homo sapien
ccgcagcttgagtcttggccctagt

SEQ ID NO: 3473136 - DNA, 25 bp, Homo sapien
cgcagcttgagtcttggccctagta

SEQ ID NO: 3473137 - DNA, 25 bp, Homo sapien
gaagacggtgaaacagcctaccagc

SEQ ID NO: 3473138 - DNA, 25 bp, Homo sapien
cagaagacggtgaaacagcctacca

SEQ ID NO: 3473139 - DNA, 25 bp, Homo sapien
ccagaagacggtgaaacagcctacc

SEQ ID NO: 3473140 - DNA, 25 bp, Homo sapien
gacggtgaaacagcctaccagcacc

SEQ ID NO: 3473141 - DNA, 25 bp, Homo sapien
ctccttggctttctggcttcgatag

SEQ ID NO: 3473142 - DNA, 25 bp, Homo sapien
gctttctggcttcgatagggccagt

SEQ ID NO: 3473143 - DNA, 25 bp, Homo sapien
ttggctttctggcttcgatagggcc

SEQ ID NO: 3473144 - DNA, 25 bp, Homo sapien
tctggcttcgatagggccagtggca

SEQ ID NO: 3473145 - DNA, 25 bp, Homo sapien
aggcgtcggcgggtggcgcgtcggt

SEQ ID NO: 3473146 - DNA, 25 bp, Homo sapien
cggtcgctcgctcggtcccgtcggt

SEQ ID NO: 3473147 - DNA, 25 bp, Homo sapien
ccgtgcgggccccaagcggctgagg

SEQ ID NO: 3473148 - DNA, 25 bp, Homo sapien
tgcgggccccaagcggctgaggcgt

SEQ ID NO: 3473149 - DNA, 25 bp, Homo sapien
aggtcgcgggcctctcacaataaca

SEQ ID NO: 3473150 - DNA, 25 bp, Homo sapien
tctaagccaccggttccctgcgacc

SEQ ID NO: 3473151 - DNA, 25 bp, Homo sapien
gggaggggaggtcgcgggcctctca

SEQ ID NO: 3473152 - DNA, 25 bp, Homo sapien
tcacaataacacctcgcagcccctt

SEQ ID NO: 3473153 - DNA, 25 bp, Homo sapien
aaataatcccttccgagtggtgacg

SEQ ID NO: 3473154 - DNA, 25 bp, Homo sapien
aattctgaaaagcaacgctggcctg

SEQ ID NO: 3473155 - DNA, 25 bp, Homo sapien
caaaatgaggtcctagggtggatcc

SEQ ID NO: 3473156 - DNA, 25 bp, Homo sapien
tacaaagaggcgaaagctccgagtg

SEQ ID NO: 3473157 - DNA, 25 bp, Homo sapien
gaaagcataccttcactcaagaaaa

SEQ ID NO: 3473158 - DNA, 25 bp, Homo sapien
taccaagccccaaacgtgaaagcat

SEQ ID NO: 3473159 - DNA, 25 bp, Homo sapien
tttagaatcaccaagtaccaagccc

SEQ ID NO: 3473160 - DNA, 25 bp, Homo sapien
aaaacaacatcatcggctgggtgca

SEQ ID NO: 3473161 - DNA, 25 bp, Homo sapien
ctgctgggtttgagtctccttggct

SEQ ID NO: 3473162 - DNA, 25 bp, Homo sapien
aatagctgctgggtttgagtctcct

SEQ ID NO: 3473163 - DNA, 25 bp, Homo sapien
agctgctgggtttgagtctccttgg

SEQ ID NO: 3473164 - DNA, 25 bp, Homo sapien
tagctgctgggtttgagtctccttg

SEQ ID NO: 3473165 - DNA, 25 bp, Homo sapien
ctgagacatccatcggtcatctcct

SEQ ID NO: 3473166 - DNA, 25 bp, Homo sapien
agacatccatcggtcatctccttga

SEQ ID NO: 3473167 - DNA, 25 bp, Homo sapien
catccatcggtcatctccttgaata

SEQ ID NO: 3473168 - DNA, 25 bp, Homo sapien
gacatccatcggtcatctccttgaa

SEQ ID NO: 3473169 - DNA, 25 bp, Homo sapien
agatacagacacaataattaggcag

SEQ ID NO: 3473170 - DNA, 25 bp, Homo sapien
tggtgagtctagatgaagatacttc

SEQ ID NO: 3473171 - DNA, 25 bp, Homo sapien
taagggaaatgagtgcaaatgcttc

SEQ ID NO: 3473172 - DNA, 25 bp, Homo sapien
taggcagatacggtaaaatgttaac

SEQ ID NO: 3473173 - DNA, 25 bp, Homo sapien
agcctcccaggtcacactcttcttc

SEQ ID NO: 3473174 - DNA, 25 bp, Homo sapien
gtgtttcctaggctgcacttctggc

SEQ ID NO: 3473175 - DNA, 25 bp, Homo sapien
cataatatactctactgaatgcact

SEQ ID NO: 3473176 - DNA, 25 bp, Homo sapien
gaatgcactcaacgacacatttttg

SEQ ID NO: 3473177 - DNA, 25 bp, Homo sapien
cttctgcttcaggggctcaagtcat

SEQ ID NO: 3473178 - DNA, 25 bp, Homo sapien
gtgagccacacatctagccaaaaaa

SEQ ID NO: 3473179 - DNA, 25 bp, Homo sapien
tctgcttcaggggctcaagtcatct

SEQ ID NO: 3473180 - DNA, 25 bp, Homo sapien
gtgtgagccacacatctagccaaaa

SEQ ID NO: 3473181 - DNA, 25 bp, Homo sapien
tctcccacgaacagtacatcaggct

SEQ ID NO: 3473182 - DNA, 25 bp, Homo sapien
catggagtctcccacgaacagtaca

SEQ ID NO: 3473183 - DNA, 25 bp, Homo sapien
gaacagtacatcaggctctttgtct

SEQ ID NO: 3473184 - DNA, 25 bp, Homo sapien
attgctgcattaactgcaccatgga

SEQ ID NO: 3473185 - DNA, 25 bp, Homo sapien
caaaacatgtcttgttgtatctccc

SEQ ID NO: 3473186 - DNA, 25 bp, Homo sapien
acaaaacatgtcttgttgtatctcc

SEQ ID NO: 3473187 - DNA, 25 bp, Homo sapien
aaaacatgtcttgttgtatctcccc

SEQ ID NO: 3473188 - DNA, 25 bp, Homo sapien
ttgttcctacccagacaacaatgac

SEQ ID NO: 3473189 - DNA, 25 bp, Homo sapien
gataagttgtacaatggcctcgatc

SEQ ID NO: 3473190 - DNA, 25 bp, Homo sapien
cttctgctgtattttcgtggttatt

SEQ ID NO: 3473191 - DNA, 25 bp, Homo sapien
ataagttgtacaatggcctcgatcc

SEQ ID NO: 3473192 - DNA, 25 bp, Homo sapien
ggatgcgtggataaaagatggcccc

SEQ ID NO: 3473193 - DNA, 25 bp, Homo sapien
gaaagtatgataaactgcttccacc

SEQ ID NO: 3473194 - DNA, 25 bp, Homo sapien
catacttctaaacaaggatgcgtgg

SEQ ID NO: 3473195 - DNA, 25 bp, Homo sapien
gattcctcagctgacctaaagataa

SEQ ID NO: 3473196 - DNA, 25 bp, Homo sapien
caggtttaagaaattctctgcttca

SEQ ID NO: 3473197 - DNA, 25 bp, Homo sapien
aattctctgcttcagccaggcgtga

SEQ ID NO: 3473198 - DNA, 25 bp, Homo sapien
agaaattctctgcttcagccaggcg

SEQ ID NO: 3473199 - DNA, 25 bp, Homo sapien
ttctctgcttcagccaggcgtgatg

SEQ ID NO: 3473200 - DNA, 25 bp, Homo sapien
atagccccctcctgtcagatgcaga

SEQ ID NO: 3473201 - DNA, 25 bp, Homo sapien
caggggtttgcagatctttgcatag

SEQ ID NO: 3473202 - DNA, 25 bp, Homo sapien
ggagatggcaccgtccgagtgcaca

SEQ ID NO: 3473203 - DNA, 25 bp, Homo sapien
cacgttggcaagcttcggcagcgaa

SEQ ID NO: 3473204 - DNA, 25 bp, Homo sapien
tgttcaacctgatgctacatgttaa

SEQ ID NO: 3473205 - DNA, 25 bp, Homo sapien
ggaaaggctgcatgcacgggtctat

SEQ ID NO: 3473206 - DNA, 25 bp, Homo sapien
tagtgccagtgatagaactgatctg

SEQ ID NO: 3473207 - DNA, 25 bp, Homo sapien
caaaccttctatgtacaggaccagt

SEQ ID NO: 3473208 - DNA, 25 bp, Homo sapien
catgagagtaactggctggagacta

SEQ ID NO: 3473209 - DNA, 25 bp, Homo sapien
cagcaacagggctcctaggtcaaaa

SEQ ID NO: 3473210 - DNA, 25 bp, Homo sapien
ccagaactccgaatatgaacagcaa

SEQ ID NO: 3473211 - DNA, 25 bp, Homo sapien
cagaatctatagcacagaacaccac

SEQ ID NO: 3473212 - DNA, 25 bp, Homo sapien
gatccagtttgtacatattccacag

SEQ ID NO: 3473213 - DNA, 25 bp, Homo sapien
tcttgtgaaaaactcaacctgggct

SEQ ID NO: 3473214 - DNA, 25 bp, Homo sapien
ggttcatccctcaatcagaaatcgg

SEQ ID NO: 3473215 - DNA, 25 bp, Homo sapien
gaaatcggtcttagcacgcatcagt

SEQ ID NO: 3473216 - DNA, 25 bp, Homo sapien
taaaaggctagtggttcaaatacta

SEQ ID NO: 3473217 - DNA, 25 bp, Homo sapien
taacatctgaggtttgtacacatga

SEQ ID NO: 3473218 - DNA, 25 bp, Homo sapien
tagctctggtagatataaaatgtag

SEQ ID NO: 3473219 - DNA, 25 bp, Homo sapien
tcaaatactattgcttgaatagctc

SEQ ID NO: 3473220 - DNA, 25 bp, Homo sapien
caaaattcctaagagccgggcatga

SEQ ID NO: 3473221 - DNA, 25 bp, Homo sapien
catgcacccacacggatttaggagc

SEQ ID NO: 3473222 - DNA, 25 bp, Homo sapien
tctacggcgaccgagaacacatgga

SEQ ID NO: 3473223 - DNA, 25 bp, Homo sapien
gacagttcaagtagcctcacggtgg

SEQ ID NO: 3473224 - DNA, 25 bp, Homo sapien
aaatgagtccgtgctcaaggttcat

SEQ ID NO: 3473225 - DNA, 25 bp, Homo sapien
cctggggacgtaagggtgataaatg

SEQ ID NO: 3473226 - DNA, 25 bp, Homo sapien
gtgataaatgagtccgtgctcaagg

SEQ ID NO: 3473227 - DNA, 25 bp, Homo sapien
gggacgtaagggtgataaatgagtc

SEQ ID NO: 3473228 - DNA, 25 bp, Homo sapien
tgctgtgtggcctgcaagcagctga

SEQ ID NO: 3473229 - DNA, 25 bp, Homo sapien
gctgacaaaggcctccaggagtgtg

SEQ ID NO: 3473230 - DNA, 25 bp, Homo sapien
tgcaagcagctgacaaaggcctcca

SEQ ID NO: 3473231 - DNA, 25 bp, Homo sapien
tgggtggagaggaacttggtgtgat

SEQ ID NO: 3473232 - DNA, 25 bp, Homo sapien
tagagtaggagctagaccagcaaag

SEQ ID NO: 3473233 - DNA, 25 bp, Homo sapien
gccaggtcatggagactgttagatg

SEQ ID NO: 3473234 - DNA, 25 bp, Homo sapien
gggctcccaactatgggcaaaaaca

SEQ ID NO: 3473235 - DNA, 25 bp, Homo sapien
cagtgctcttggcagaaaagttcaa

SEQ ID NO: 3473236 - DNA, 25 bp, Homo sapien
cgcccggccaaattagacatgttta

SEQ ID NO: 3473237 - DNA, 25 bp, Homo sapien
tgaagaccagaagcaagctgcaccc

SEQ ID NO: 3473238 - DNA, 25 bp, Homo sapien
ccagatcagtgccttgtcagagttc

SEQ ID NO: 3473239 - DNA, 25 bp, Homo sapien
tagaaagtcagctggaagataacct

SEQ ID NO: 3473240 - DNA, 25 bp, Homo sapien
gggctgagtacgacctgagaccctg

SEQ ID NO: 3473241 - DNA, 25 bp, Homo sapien
ctgggcgataaacagcagggctgct

SEQ ID NO: 3473242 - DNA, 25 bp, Homo sapien
aaccccggcctgagattaggaaatg

SEQ ID NO: 3473243 - DNA, 25 bp, Homo sapien
tcccgacgcacgaacactgaaaagt

SEQ ID NO: 3473244 - DNA, 25 bp, Homo sapien
cctccgggacgggttgcggctgcgg

SEQ ID NO: 3473245 - DNA, 25 bp, Homo sapien
caggagacaggacacctccgggacg

SEQ ID NO: 3473246 - DNA, 25 bp, Homo sapien
acacctccgggacgggttgcggctg

SEQ ID NO: 3473247 - DNA, 25 bp, Homo sapien
caggacacctccgggacgggttgcg

SEQ ID NO: 3473248 - DNA, 25 bp, Homo sapien
caaactcggcgtctttctgcgagac

SEQ ID NO: 3473249 - DNA, 25 bp, Homo sapien
agatggctctcgaccgaggccacca

SEQ ID NO: 3473250 - DNA, 25 bp, Homo sapien
tcgtccacgtaggtgcgctcaaact

SEQ ID NO: 3473251 - DNA, 25 bp, Homo sapien
tttctgcgagacgttcttgggcccc

SEQ ID NO: 3473252 - DNA, 25 bp, Homo sapien
gtagatgttgaccagctcgctgttg

SEQ ID NO: 3473253 - DNA, 25 bp, Homo sapien
cctgttgcgggtcacagtatggttg

SEQ ID NO: 3473254 - DNA, 25 bp, Homo sapien
cacagtatggttgaaggtgtagatg

SEQ ID NO: 3473255 - DNA, 25 bp, Homo sapien
aggtgtagatgttgaccagctcgct

SEQ ID NO: 3473256 - DNA, 25 bp, Homo sapien
aacgacatggaaatgcctctcaagc

SEQ ID NO: 3473257 - DNA, 25 bp, Homo sapien
cgacatggaaatgcctctcaagcct

SEQ ID NO: 3473258 - DNA, 25 bp, Homo sapien
gcagaacgacatggaaatgcctctc

SEQ ID NO: 3473259 - DNA, 25 bp, Homo sapien
ctgcagaacgacatggaaatgcctc

SEQ ID NO: 3473260 - DNA, 25 bp, Homo sapien
ttctgcttgttcaggacgttcacag

SEQ ID NO: 3473261 - DNA, 25 bp, Homo sapien
tgttcaggacgttcacagacacacg

SEQ ID NO: 3473262 - DNA, 25 bp, Homo sapien
cagcctccttctggcggaccacaaa

SEQ ID NO: 3473263 - DNA, 25 bp, Homo sapien
ctccttctggcggaccacaaacagc

SEQ ID NO: 3473264 - DNA, 25 bp, Homo sapien
ggctgacacagggttcgttccactt

SEQ ID NO: 3473265 - DNA, 25 bp, Homo sapien
tggtgacagggtggacacatccacg

SEQ ID NO: 3473266 - DNA, 25 bp, Homo sapien
tggacacatccacgtagaagaactg

SEQ ID NO: 3473267 - DNA, 25 bp, Homo sapien
ccggagctggtatgtggtgttgact

SEQ ID NO: 3473268 - DNA, 25 bp, Homo sapien
gcacaaaatcgtccatgcggctgac

SEQ ID NO: 3473269 - DNA, 25 bp, Homo sapien
ctgagcacaaaatcgtccatgcggc

SEQ ID NO: 3473270 - DNA, 25 bp, Homo sapien
gagcacaaaatcgtccatgcggctg

SEQ ID NO: 3473271 - DNA, 25 bp, Homo sapien
tgagcacaaaatcgtccatgcggct

SEQ ID NO: 3473272 - DNA, 25 bp, Homo sapien
ctgctgtggtattgaagctgaactg

SEQ ID NO: 3473273 - DNA, 25 bp, Homo sapien
tgctgctgtggtattgaagctgaac

SEQ ID NO: 3473274 - DNA, 25 bp, Homo sapien
tgtgctgctgtggtattgaagctga

SEQ ID NO: 3473275 - DNA, 25 bp, Homo sapien
gctgtgctgctgtggtattgaagct

SEQ ID NO: 3473276 - DNA, 25 bp, Homo sapien
cttcagggaactcatacttgaagta

SEQ ID NO: 3473277 - DNA, 25 bp, Homo sapien
tggaggtcaccttgacaattaccga

SEQ ID NO: 3473278 - DNA, 25 bp, Homo sapien
caccttgacaattaccgagtccacg

SEQ ID NO: 3473279 - DNA, 25 bp, Homo sapien
aattaccgagtccacgccttcaggg

SEQ ID NO: 3473280 - DNA, 25 bp, Homo sapien
cgtctggtacatgccgatgaaggct

SEQ ID NO: 3473281 - DNA, 25 bp, Homo sapien
tggccgccttcttggtcatcgtctg

SEQ ID NO: 3473282 - DNA, 25 bp, Homo sapien
ccgatgaaggctacgttgttgtcca

SEQ ID NO: 3473283 - DNA, 25 bp, Homo sapien
gttgttgtccaggtcatagacagga

SEQ ID NO: 3473284 - DNA, 25 bp, Homo sapien
tcccacgtggccacatgcatttcct

SEQ ID NO: 3473285 - DNA, 25 bp, Homo sapien
cacctcccacgtggccacatgcatt

SEQ ID NO: 3473286 - DNA, 25 bp, Homo sapien
cccagccacacctcccacgtggcca

SEQ ID NO: 3473287 - DNA, 25 bp, Homo sapien
agccacacctcccacgtggccacat

SEQ ID NO: 3473288 - DNA, 25 bp, Homo sapien
ctgcaggatgatgatgataaatatc

SEQ ID NO: 3473289 - DNA, 25 bp, Homo sapien
tgatgatgataaatatcttcttcat

SEQ ID NO: 3473290 - DNA, 25 bp, Homo sapien
caggatgatgatgataaatatcttc

SEQ ID NO: 3473291 - DNA, 25 bp, Homo sapien
gatgatgatgataaatatcttcttc

SEQ ID NO: 3473292 - DNA, 25 bp, Homo sapien
ccgcaggcttggtcttcggtcttca

SEQ ID NO: 3473293 - DNA, 25 bp, Homo sapien
aggcttggtcttcggtcttcaccac

SEQ ID NO: 3473294 - DNA, 25 bp, Homo sapien
gcaggcttggtcttcggtcttcacc

SEQ ID NO: 3473295 - DNA, 25 bp, Homo sapien
ttctgcgaaggggtagaaaggcagg

SEQ ID NO: 3473296 - DNA, 25 bp, Homo sapien
cggtgcccttgatcgaccggttcat

SEQ ID NO: 3473297 - DNA, 25 bp, Homo sapien
agcactgacagggttttctggcggt

SEQ ID NO: 3473298 - DNA, 25 bp, Homo sapien
acgtgactgcttgagacaccagcac

SEQ ID NO: 3473299 - DNA, 25 bp, Homo sapien
gtgactgcttgagacaccagcactg

SEQ ID NO: 3473300 - DNA, 25 bp, Homo sapien
cctgcctagccagtatgaacaactg

SEQ ID NO: 3473301 - DNA, 25 bp, Homo sapien
gttcctctaatacaccaaactctga

SEQ ID NO: 3473302 - DNA, 25 bp, Homo sapien
atggcacccaaaggccttcatgtcc

SEQ ID NO: 3473303 - DNA, 25 bp, Homo sapien
ttctcccctcaaatgtaaggccctg

SEQ ID NO: 3473304 - DNA, 25 bp, Homo sapien
gaggacggtcagcaggtaaaaggag

SEQ ID NO: 3473305 - DNA, 25 bp, Homo sapien
gagagaaatatacccaggcaaaaga

SEQ ID NO: 3473306 - DNA, 25 bp, Homo sapien
agcatcccactgacgtatgcctcag

SEQ ID NO: 3473307 - DNA, 25 bp, Homo sapien
ccaggcaaaagagcatcccactgac

SEQ ID NO: 3473308 - DNA, 25 bp, Homo sapien
tgtagattaccctaggctggctcag

SEQ ID NO: 3473309 - DNA, 25 bp, Homo sapien
accatcatctgctatggatggtgta

SEQ ID NO: 3473310 - DNA, 25 bp, Homo sapien
gatctccctgcttgggaagaaggtt

SEQ ID NO: 3473311 - DNA, 25 bp, Homo sapien
gggatggtttctagagaggctcatg

SEQ ID NO: 3473312 - DNA, 25 bp, Homo sapien
ctgggcaggctcggtcaatggccac

SEQ ID NO: 3473313 - DNA, 25 bp, Homo sapien
ttctgggcaggctcggtcaatggcc

SEQ ID NO: 3473314 - DNA, 25 bp, Homo sapien
tctgggcaggctcggtcaatggcca

SEQ ID NO: 3473315 - DNA, 25 bp, Homo sapien
ccccaaaacacaaagcacactgtgc

SEQ ID NO: 3473316 - DNA, 25 bp, Homo sapien
accccccaaaacacaaagcacactg

SEQ ID NO: 3473317 - DNA, 25 bp, Homo sapien
acaaagcacactgtgcccgccccac

SEQ ID NO: 3473318 - DNA, 25 bp, Homo sapien
aaacacaaagcacactgtgcccgcc

SEQ ID NO: 3473319 - DNA, 25 bp, Homo sapien
ccctcataaggggaactgccaggaa

SEQ ID NO: 3473320 - DNA, 25 bp, Homo sapien
aaaggagccatagttgtaaccctca

SEQ ID NO: 3473321 - DNA, 25 bp, Homo sapien
aaaagaatcagccaggactcgaggg

SEQ ID NO: 3473322 - DNA, 25 bp, Homo sapien
gaatcagccaggactcgagggtgac

SEQ ID NO: 3473323 - DNA, 25 bp, Homo sapien
tcaaccagaccatcggtagatccag

SEQ ID NO: 3473324 - DNA, 25 bp, Homo sapien
taaccgtaagagaggtccccagtgc

SEQ ID NO: 3473325 - DNA, 25 bp, Homo sapien
gaccatcggtagatccagaaacatt

SEQ ID NO: 3473326 - DNA, 25 bp, Homo sapien
agtgccagcgctgtcaaccagacca

SEQ ID NO: 3473327 - DNA, 25 bp, Homo sapien
gaggggaggcgccgcttgaactggt

SEQ ID NO: 3473328 - DNA, 25 bp, Homo sapien
ggggaggcgccgcttgaactggtcg

SEQ ID NO: 3473329 - DNA, 25 bp, Homo sapien
aggcgccgcttgaactggtcgtgcc

SEQ ID NO: 3473330 - DNA, 25 bp, Homo sapien
ggaggcgccgcttgaactggtcgtg

SEQ ID NO: 3473331 - DNA, 25 bp, Homo sapien
gataaactagattgtccagcctgga

SEQ ID NO: 3473332 - DNA, 25 bp, Homo sapien
agtcatgctgattcaagggtgccca

SEQ ID NO: 3473333 - DNA, 25 bp, Homo sapien
tatctcagaagacacaagagcgggc

SEQ ID NO: 3473334 - DNA, 25 bp, Homo sapien
caacaggattgaactcggcaagtca

SEQ ID NO: 3473335 - DNA, 25 bp, Homo sapien
tgcgaatgacattcttgtcggaatc

SEQ ID NO: 3473336 - DNA, 25 bp, Homo sapien
tcctccacagagctcatggagtcca

SEQ ID NO: 3473337 - DNA, 25 bp, Homo sapien
tcaatgtgtcgtagtcatcctcctc

SEQ ID NO: 3473338 - DNA, 25 bp, Homo sapien
tgtcggaatcgatgtcggtcaatgt

SEQ ID NO: 3473339 - DNA, 25 bp, Homo sapien
tgccacgtcagtgggaacatgctgg

SEQ ID NO: 3473340 - DNA, 25 bp, Homo sapien
tcaggttagtttccccggcatctgc

SEQ ID NO: 3473341 - DNA, 25 bp, Homo sapien
cctttctcaggaaacgcctgaccag

SEQ ID NO: 3473342 - DNA, 25 bp, Homo sapien
ctcaggaaacgcctgaccaggccag

SEQ ID NO: 3473343 - DNA, 25 bp, Homo sapien
ctgctgcggccgcttagaccaagag

SEQ ID NO: 3473344 - DNA, 25 bp, Homo sapien
ggtggacaagaggggcctccctcac

SEQ ID NO: 3473345 - DNA, 25 bp, Homo sapien
ccctcacacagggccgaattcaggg

SEQ ID NO: 3473346 - DNA, 25 bp, Homo sapien
ctcccccaggttagaggtggacaag

SEQ ID NO: 3473347 - DNA, 25 bp, Homo sapien
gtactttttccgcagaacacgcttg

SEQ ID NO: 3473348 - DNA, 25 bp, Homo sapien
gaacacgcttgtccttccgtgccag

SEQ ID NO: 3473349 - DNA, 25 bp, Homo sapien
cagaagtagatctggtactttttcc

SEQ ID NO: 3473350 - DNA, 25 bp, Homo sapien
ttgtccttccgtgccaggtcagcca

SEQ ID NO: 3473351 - DNA, 25 bp, Homo sapien
gaagggcatagaagacagcaatggt

SEQ ID NO: 3473352 - DNA, 25 bp, Homo sapien
aagggcatagaagacagcaatggtg

SEQ ID NO: 3473353 - DNA, 25 bp, Homo sapien
agggcatagaagacagcaatggtgg

SEQ ID NO: 3473354 - DNA, 25 bp, Homo sapien
tgggtgggcgcagaggaagttgtag

SEQ ID NO: 3473355 - DNA, 25 bp, Homo sapien
tgagattgcccagtgggtgggcgca

SEQ ID NO: 3473356 - DNA, 25 bp, Homo sapien
gtagtagcagatgtcctgattccct

SEQ ID NO: 3473357 - DNA, 25 bp, Homo sapien
agaggaagttgtagtagcagatgtc

SEQ ID NO: 3473358 - DNA, 25 bp, Homo sapien
cagggcacagaggtcattgcgcagc

SEQ ID NO: 3473359 - DNA, 25 bp, Homo sapien
aggatgtaccccaggttgctgagga

SEQ ID NO: 3473360 - DNA, 25 bp, Homo sapien
cagggcccggttgtggttgatctcc

SEQ ID NO: 3473361 - DNA, 25 bp, Homo sapien
gatctcccgttgcaggatgatgagc

SEQ ID NO: 3473362 - DNA, 25 bp, Homo sapien
ttggggcacacatgatagcaagcac

SEQ ID NO: 3473363 - DNA, 25 bp, Homo sapien
agggctgtgcccatggcgtagaaaa

SEQ ID NO: 3473364 - DNA, 25 bp, Homo sapien
gcccatggcgtagaaaagcccaaag

SEQ ID NO: 3473365 - DNA, 25 bp, Homo sapien
caaactggaaattggtatagttggg

SEQ ID NO: 3473366 - DNA, 25 bp, Homo sapien
gtggcagggtggcacttgaacttca

SEQ ID NO: 3473367 - DNA, 25 bp, Homo sapien
cagggacaacttggtctgtgtctta

SEQ ID NO: 3473368 - DNA, 25 bp, Homo sapien
cagttccttagttgtacctgccaca

SEQ ID NO: 3473369 - DNA, 25 bp, Homo sapien
tggccccaacaatcccagaggaaga

SEQ ID NO: 3473370 - DNA, 25 bp, Homo sapien
gcagagtccggcgatcatgtacatg

SEQ ID NO: 3473371 - DNA, 25 bp, Homo sapien
ggtgccgcttctggtagagcttcag

SEQ ID NO: 3473372 - DNA, 25 bp, Homo sapien
cgtaggcactgtaggcgctggcgtt

SEQ ID NO: 3473373 - DNA, 25 bp, Homo sapien
gctggcgttgatgtccgggtgccgc

SEQ ID NO: 3473374 - DNA, 25 bp, Homo sapien
gagaagaagatgacaatggccaggc

SEQ ID NO: 3473375 - DNA, 25 bp, Homo sapien
gggaggccaccaagggcagcggtga

SEQ ID NO: 3473376 - DNA, 25 bp, Homo sapien
ggaagtggctcggatggcccaccct

SEQ ID NO: 3473377 - DNA, 25 bp, Homo sapien
ggaggccaccaagggcagcggtgag

SEQ ID NO: 3473378 - DNA, 25 bp, Homo sapien
aagtggctcggatggcccacccttc

SEQ ID NO: 3473379 - DNA, 25 bp, Homo sapien
cagaacgccgtgttccctttgccaa

SEQ ID NO: 3473380 - DNA, 25 bp, Homo sapien
atgtgaatgatggagaagacgatcc

SEQ ID NO: 3473381 - DNA, 25 bp, Homo sapien
cccatgtaatagagctgcgtgctga

SEQ ID NO: 3473382 - DNA, 25 bp, Homo sapien
tttccaccggcccatgtaatagagc

SEQ ID NO: 3473383 - DNA, 25 bp, Homo sapien
tcctttgctggacccctgggatgtg

SEQ ID NO: 3473384 - DNA, 25 bp, Homo sapien
taattcctcacccagtgactccagg

SEQ ID NO: 3473385 - DNA, 25 bp, Homo sapien
caagacagaacctgagcgtctcccg

SEQ ID NO: 3473386 - DNA, 25 bp, Homo sapien
gggatgtgccagctgaggagcccag

SEQ ID NO: 3473387 - DNA, 25 bp, Homo sapien
aggatgcggcggaagatccccgagt

SEQ ID NO: 3473388 - DNA, 25 bp, Homo sapien
tctgtgtagagcacgtggaggatgc

SEQ ID NO: 3473389 - DNA, 25 bp, Homo sapien
cacgtggaggatgcggcggaagatc

SEQ ID NO: 3473390 - DNA, 25 bp, Homo sapien
actgccggatgcagtctgtgtagag

SEQ ID NO: 3473391 - DNA, 25 bp, Homo sapien
gaatggagcaggggaaccaggcagg

SEQ ID NO: 3473392 - DNA, 25 bp, Homo sapien
ccagctggtccccactctcccctgg

SEQ ID NO: 3473393 - DNA, 25 bp, Homo sapien
ggagaatggagcaggggaaccaggc

SEQ ID NO: 3473394 - DNA, 25 bp, Homo sapien
cagttgatgacgttgcccatgacca

SEQ ID NO: 3473395 - DNA, 25 bp, Homo sapien
gttgatgacgttgcccatgaccagc

SEQ ID NO: 3473396 - DNA, 25 bp, Homo sapien
agcgaccagttgatgacgttgccca

SEQ ID NO: 3473397 - DNA, 25 bp, Homo sapien
gaccagttgatgacgttgcccatga

SEQ ID NO: 3473398 - DNA, 25 bp, Homo sapien
tatgcccaacatttggaagttgtcc

SEQ ID NO: 3473399 - DNA, 25 bp, Homo sapien
ccacagaagattctagaagcccaga

SEQ ID NO: 3473400 - DNA, 25 bp, Homo sapien
ccctgcctaggcatgttttattatg

SEQ ID NO: 3473401 - DNA, 25 bp, Homo sapien
gggctgtgttcagaagcccacagaa

SEQ ID NO: 3473402 - DNA, 25 bp, Homo sapien
tggggcgcatgataagcccataggc

SEQ ID NO: 3473403 - DNA, 25 bp, Homo sapien
atgtagaaggcgaagtaaaggagca

SEQ ID NO: 3473404 - DNA, 25 bp, Homo sapien
aagtaggaagcgaaatcattggggc

SEQ ID NO: 3473405 - DNA, 25 bp, Homo sapien
aggttgcagatgccaatggccaaca

SEQ ID NO: 3473406 - DNA, 25 bp, Homo sapien
acggaggtgcaaacgatgcagagca

SEQ ID NO: 3473407 - DNA, 25 bp, Homo sapien
cagaccacggaggtgcaaacgatgc

SEQ ID NO: 3473408 - DNA, 25 bp, Homo sapien
aagaagaagagcgcgaagccccaga

SEQ ID NO: 3473409 - DNA, 25 bp, Homo sapien
aagccccagaccacggaggtgcaaa

SEQ ID NO: 3473410 - DNA, 25 bp, Homo sapien
gattacaggtaatcccaggctcagc

SEQ ID NO: 3473411 - DNA, 25 bp, Homo sapien
ggctcagccccaatgtttaaaaaga

SEQ ID NO: 3473412 - DNA, 25 bp, Homo sapien
ttgttggctcacaaggagcctgagg

SEQ ID NO: 3473413 - DNA, 25 bp, Homo sapien
taaaaagaggactggccacttgttg

SEQ ID NO: 3473414 - DNA, 25 bp, Homo sapien
tggactcctaactcggagagacccg

SEQ ID NO: 3473415 - DNA, 25 bp, Homo sapien
gagagacccgttagtcctctgtcct

SEQ ID NO: 3473416 - DNA, 25 bp, Homo sapien
gaacaaggcgcactttttccaggaa

SEQ ID NO: 3473417 - DNA, 25 bp, Homo sapien
cacccaagacttttatagcccagaa

SEQ ID NO: 3473418 - DNA, 25 bp, Homo sapien
cttggggagcaacaagaaaaactgc

SEQ ID NO: 3473419 - DNA, 25 bp, Homo sapien
gcaacaagaaaaactgccgaatgac

SEQ ID NO: 3473420 - DNA, 25 bp, Homo sapien
acaagaaaaactgccgaatgaccct

SEQ ID NO: 3473421 - DNA, 25 bp, Homo sapien
agaaaaactgccgaatgaccctgct

SEQ ID NO: 3473422 - DNA, 25 bp, Homo sapien
atgcagtcccggttgtgctccctcg

SEQ ID NO: 3473423 - DNA, 25 bp, Homo sapien
tcaaagaagtcgaggaggatgcagt

SEQ ID NO: 3473424 - DNA, 25 bp, Homo sapien
caggaaggacccgaacatggcgatg

SEQ ID NO: 3473425 - DNA, 25 bp, Homo sapien
gaagtgccagatgtcgtggtcgtca

SEQ ID NO: 3473426 - DNA, 25 bp, Homo sapien
ggtgtggacgccagatcagccacag

SEQ ID NO: 3473427 - DNA, 25 bp, Homo sapien
gtggacgccagatcagccacagaga

SEQ ID NO: 3473428 - DNA, 25 bp, Homo sapien
tggacgccagatcagccacagagaa

SEQ ID NO: 3473429 - DNA, 25 bp, Homo sapien
tgtggacgccagatcagccacagag

SEQ ID NO: 3473430 - DNA, 25 bp, Homo sapien
atccaggtcgtcatccagtgtcagc

SEQ ID NO: 3473431 - DNA, 25 bp, Homo sapien
acatagatcttgtcccgctgcacag

SEQ ID NO: 3473432 - DNA, 25 bp, Homo sapien
gacatagatcttgtcccgctgcaca

SEQ ID NO: 3473433 - DNA, 25 bp, Homo sapien
tgaccggtctatgacacaaaggagc

SEQ ID NO: 3473434 - DNA, 25 bp, Homo sapien
tcagaaggcggttctcaaattgggc

SEQ ID NO: 3473435 - DNA, 25 bp, Homo sapien
cacagcacgacagagtgaccggtct

SEQ ID NO: 3473436 - DNA, 25 bp, Homo sapien
gcattgctaaagagccagccctgag

SEQ ID NO: 3473437 - DNA, 25 bp, Homo sapien
ggcacgtagagggaaacagcacatc

SEQ ID NO: 3473438 - DNA, 25 bp, Homo sapien
gaagactggacggaaacttagaagc

SEQ ID NO: 3473439 - DNA, 25 bp, Homo sapien
tgcaaccatagcatggagacgctct

SEQ ID NO: 3473440 - DNA, 25 bp, Homo sapien
tgtgcatgactaacacagaacttgc

SEQ ID NO: 3473441 - DNA, 25 bp, Homo sapien
taagagggtctataaggcctggcag

SEQ ID NO: 3473442 - DNA, 25 bp, Homo sapien
aaggtgagactaacagtgggatccc

SEQ ID NO: 3473443 - DNA, 25 bp, Homo sapien
gaacagtccctaccagcctggaaaa

SEQ ID NO: 3473444 - DNA, 25 bp, Homo sapien
tctggtagggaagacctaacactct

SEQ ID NO: 3473445 - DNA, 25 bp, Homo sapien
ctctggccccgagtttgagaagagg

SEQ ID NO: 3473446 - DNA, 25 bp, Homo sapien
ctgctcctacttcactgttctctgg

SEQ ID NO: 3473447 - DNA, 25 bp, Homo sapien
ttcactgttctctggccccgagttt

SEQ ID NO: 3473448 - DNA, 25 bp, Homo sapien
gaagagggggagttcaatagagtct

SEQ ID NO: 3473449 - DNA, 25 bp, Homo sapien
acttgtgtctgggttcggacagaca

SEQ ID NO: 3473450 - DNA, 25 bp, Homo sapien
caggaaggagtgaagacttgtgtct

SEQ ID NO: 3473451 - DNA, 25 bp, Homo sapien
tctgggttcggacagacaggatggg

SEQ ID NO: 3473452 - DNA, 25 bp, Homo sapien
tgaagacttgtgtctgggttcggac

SEQ ID NO: 3473453 - DNA, 25 bp, Homo sapien
tcaccccggtggtttccatcaattc

SEQ ID NO: 3473454 - DNA, 25 bp, Homo sapien
catcaattcctctgcactagccaag

SEQ ID NO: 3473455 - DNA, 25 bp, Homo sapien
cttacacacaccttgtggatgtggc

SEQ ID NO: 3473456 - DNA, 25 bp, Homo sapien
gatccaggacgctagtgatccagcc

SEQ ID NO: 3473457 - DNA, 25 bp, Homo sapien
aaatgtcagttctttgctgcccgga

SEQ ID NO: 3473458 - DNA, 25 bp, Homo sapien
gcagctcacacggaacagagttcac

SEQ ID NO: 3473459 - DNA, 25 bp, Homo sapien
tcacacggactcatcgaagtgcccg

SEQ ID NO: 3473460 - DNA, 25 bp, Homo sapien
tagcagagctcctcgaaatgtcagt

SEQ ID NO: 3473461 - DNA, 25 bp, Homo sapien
tccactgatgtcaccctagggtgct

SEQ ID NO: 3473462 - DNA, 25 bp, Homo sapien
aggatggacgcaggagcgcactccc

SEQ ID NO: 3473463 - DNA, 25 bp, Homo sapien
gaggttgggagggacacgctggtct

SEQ ID NO: 3473464 - DNA, 25 bp, Homo sapien
tctcagggctgacaggctttctggg

SEQ ID NO: 3473465 - DNA, 25 bp, Homo sapien
tacggagtagcctgagtaaccaaga

SEQ ID NO: 3473466 - DNA, 25 bp, Homo sapien
tcaggagtcccactcatggagaggg

SEQ ID NO: 3473467 - DNA, 25 bp, Homo sapien
tgcctttgtccagctgcgggtgtga

SEQ ID NO: 3473468 - DNA, 25 bp, Homo sapien
tttaggctttgcaggacacatggtc

SEQ ID NO: 3473469 - DNA, 25 bp, Homo sapien
gcggctcatgccataggaaggaccc

SEQ ID NO: 3473470 - DNA, 25 bp, Homo sapien
tgcacttcgcggctcatgccatagg

SEQ ID NO: 3473471 - DNA, 25 bp, Homo sapien
ctcatgccataggaaggacccttgt

SEQ ID NO: 3473472 - DNA, 25 bp, Homo sapien
ttcgcggctcatgccataggaagga

SEQ ID NO: 3473473 - DNA, 25 bp, Homo sapien
actgcactatgatccactccaccag

SEQ ID NO: 3473474 - DNA, 25 bp, Homo sapien
gtctgggcggcccacatcagggcca

SEQ ID NO: 3473475 - DNA, 25 bp, Homo sapien
ctggaagcccaagcgcccacggtct

SEQ ID NO: 3473476 - DNA, 25 bp, Homo sapien
cgtcatacttcttctcgattttgga

SEQ ID NO: 3473477 - DNA, 25 bp, Homo sapien
aggcatagggcataggacgcagctt

SEQ ID NO: 3473478 - DNA, 25 bp, Homo sapien
gattggcccaggactcacagggtgg

SEQ ID NO: 3473479 - DNA, 25 bp, Homo sapien
gcataggacgcagcttagcagtcag

SEQ ID NO: 3473480 - DNA, 25 bp, Homo sapien
ctaccaggcatagggcataggacgc

SEQ ID NO: 3473481 - DNA, 25 bp, Homo sapien
ccggcttggagccatcagggtacag

SEQ ID NO: 3473482 - DNA, 25 bp, Homo sapien
tgggttctcgggcaccttcaccggc

SEQ ID NO: 3473483 - DNA, 25 bp, Homo sapien
tcgggcaccttcaccggcttggagc

SEQ ID NO: 3473484 - DNA, 25 bp, Homo sapien
ccatcagggtacaggctgttcacca

SEQ ID NO: 3473485 - DNA, 25 bp, Homo sapien
tcttgatgaccccatagtcctcagc

SEQ ID NO: 3473486 - DNA, 25 bp, Homo sapien
tcaacagtctggaacatgtcagtct

SEQ ID NO: 3473487 - DNA, 25 bp, Homo sapien
cttcaaagaggtcaacagtctggaa

SEQ ID NO: 3473488 - DNA, 25 bp, Homo sapien
gaacatgtcagtcttgatgacccca

SEQ ID NO: 3473489 - DNA, 25 bp, Homo sapien
taaaccagttgggatctccacggta

SEQ ID NO: 3473490 - DNA, 25 bp, Homo sapien
cattcttggtcactgccaagctgcc

SEQ ID NO: 3473491 - DNA, 25 bp, Homo sapien
caagctgcccaaagccatcagggtc

SEQ ID NO: 3473492 - DNA, 25 bp, Homo sapien
cacggtagtgcccatcattcttggt

SEQ ID NO: 3473493 - DNA, 25 bp, Homo sapien
taactgatgatctgccgaggtcgtc

SEQ ID NO: 3473494 - DNA, 25 bp, Homo sapien
gaggtcgtccgtagcctgtcatgcc

SEQ ID NO: 3473495 - DNA, 25 bp, Homo sapien
tgaaggccaatgacatgctttccct

SEQ ID NO: 3473496 - DNA, 25 bp, Homo sapien
gaattccctcttatgctcctgcgct

SEQ ID NO: 3473497 - DNA, 25 bp, Homo sapien
ggagggccgggctcagggctagccc

SEQ ID NO: 3473498 - DNA, 25 bp, Homo sapien
gggccgggctcagggctagccctct

SEQ ID NO: 3473499 - DNA, 25 bp, Homo sapien
ccgggctcagggctagccctctccg

SEQ ID NO: 3473500 - DNA, 25 bp, Homo sapien
gggctcagggctagccctctccgct

SEQ ID NO: 3473501 - DNA, 25 bp, Homo sapien
gccagggctgaaggtaccacacggg

SEQ ID NO: 3473502 - DNA, 25 bp, Homo sapien
gggtgaggcaggctaagcgggatgg

SEQ ID NO: 3473503 - DNA, 25 bp, Homo sapien
ggtgaggcaggctaagcgggatggc

SEQ ID NO: 3473504 - DNA, 25 bp, Homo sapien
gtaccacacgggtgtgggtgaggca

SEQ ID NO: 3473505 - DNA, 25 bp, Homo sapien
tgcccaggtgcagttaccattgctc

SEQ ID NO: 3473506 - DNA, 25 bp, Homo sapien
cccaggtgcagttaccattgctcag

SEQ ID NO: 3473507 - DNA, 25 bp, Homo sapien
tgcagttaccattgctcagtgacag

SEQ ID NO: 3473508 - DNA, 25 bp, Homo sapien
gttaccattgctcagtgacagagcc

SEQ ID NO: 3473509 - DNA, 25 bp, Homo sapien
tacaaatggtggaggattgctgcca

SEQ ID NO: 3473510 - DNA, 25 bp, Homo sapien
gaatcagtgccactttgcagcagca

SEQ ID NO: 3473511 - DNA, 25 bp, Homo sapien
tttgccgccaaggaggacagtggac

SEQ ID NO: 3473512 - DNA, 25 bp, Homo sapien
ggaaacagtgcctcacgtaggtgct

SEQ ID NO: 3473513 - DNA, 25 bp, Homo sapien
tgaaggccacaatatccatgaattg

SEQ ID NO: 3473514 - DNA, 25 bp, Homo sapien
atccatgaattgtgaatatctttag

SEQ ID NO: 3473515 - DNA, 25 bp, Homo sapien
tttgaggtgacttgtggaaggtcac

SEQ ID NO: 3473516 - DNA, 25 bp, Homo sapien
ggaaggtcaccatatcagtgaaggc

SEQ ID NO: 3473517 - DNA, 25 bp, Homo sapien
gagttgatgccaagagtgtgcccat

SEQ ID NO: 3473518 - DNA, 25 bp, Homo sapien
tgctgtgtgcctaaacccatctgac

SEQ ID NO: 3473519 - DNA, 25 bp, Homo sapien
catttactagtataggcgaggtccc

SEQ ID NO: 3473520 - DNA, 25 bp, Homo sapien
gaaatgtacaagagaagtcccgtgc

SEQ ID NO: 3473521 - DNA, 25 bp, Homo sapien
catgtggaagatgccccgaggactc

SEQ ID NO: 3473522 - DNA, 25 bp, Homo sapien
ccatggcggtcagaaggagaagagc

SEQ ID NO: 3473523 - DNA, 25 bp, Homo sapien
tgccctttacagaggacgccatgaa

SEQ ID NO: 3473524 - DNA, 25 bp, Homo sapien
gaagagcaacgagtggcttttaaag

SEQ ID NO: 3473525 - DNA, 25 bp, Homo sapien
ggcattggccacaacaccagcaacc

SEQ ID NO: 3473526 - DNA, 25 bp, Homo sapien
aaactagaagattccggaggactgg

SEQ ID NO: 3473527 - DNA, 25 bp, Homo sapien
ttggccacaacaccagcaacctcag

SEQ ID NO: 3473528 - DNA, 25 bp, Homo sapien
aactagaagattccggaggactggg

SEQ ID NO: 3473529 - DNA, 25 bp, Homo sapien
tcccagtcaggagtccacacattac

SEQ ID NO: 3473530 - DNA, 25 bp, Homo sapien
ttcccagtcaggagtccacacatta

SEQ ID NO: 3473531 - DNA, 25 bp, Homo sapien
caacagaggcgagttcttctgcttc

SEQ ID NO: 3473532 - DNA, 25 bp, Homo sapien
tcaacagaggcgagttcttctgctt

SEQ ID NO: 3473533 - DNA, 25 bp, Homo sapien
actcaacagaggcgagttcttctgc

SEQ ID NO: 3473534 - DNA, 25 bp, Homo sapien
ctcaacagaggcgagttcttctgct

SEQ ID NO: 3473535 - DNA, 25 bp, Homo sapien
tgttattctccttggttattgtttg

SEQ ID NO: 3473536 - DNA, 25 bp, Homo sapien
ttctccttggttattgtttggctac

SEQ ID NO: 3473537 - DNA, 25 bp, Homo sapien
tccttggttattgtttggctactta

SEQ ID NO: 3473538 - DNA, 25 bp, Homo sapien
ttctgttattctccttggttattgt

SEQ ID NO: 3473539 - DNA, 25 bp, Homo sapien
tgaaccaggattctgctctgagtgc

SEQ ID NO: 3473540 - DNA, 25 bp, Homo sapien
gatgaaccaggattctgctctgagt

SEQ ID NO: 3473541 - DNA, 25 bp, Homo sapien
ctgatgaaccaggattctgctctga

SEQ ID NO: 3473542 - DNA, 25 bp, Homo sapien
aaccaggattctgctctgagtgctc

SEQ ID NO: 3473543 - DNA, 25 bp, Homo sapien
aaagggctgtggctatcaagttttc

SEQ ID NO: 3473544 - DNA, 25 bp, Homo sapien
aaagacaaagggctgtggctatcaa

SEQ ID NO: 3473545 - DNA, 25 bp, Homo sapien
cctaaaaccacctggtgcgctgctg

SEQ ID NO: 3473546 - DNA, 25 bp, Homo sapien
aaaccacctggtgcgctgctgaggt

SEQ ID NO: 3473547 - DNA, 25 bp, Homo sapien
ccttaagagaccgagtgactggatg

SEQ ID NO: 3473548 - DNA, 25 bp, Homo sapien
aagctgcttagtatggcaccctgcc

SEQ ID NO: 3473549 - DNA, 25 bp, Homo sapien
caccctgccttaagagaccgagtga

SEQ ID NO: 3473550 - DNA, 25 bp, Homo sapien
tcagagcaattcctggaggcaagct

SEQ ID NO: 3473551 - DNA, 25 bp, Homo sapien
ggtcggaaatccaagcttgtgtccc

SEQ ID NO: 3473552 - DNA, 25 bp, Homo sapien
ctacaggtcggaaatccaagcttgt

SEQ ID NO: 3473553 - DNA, 25 bp, Homo sapien
tcggaaatccaagcttgtgtccctg

SEQ ID NO: 3473554 - DNA, 25 bp, Homo sapien
caggtcggaaatccaagcttgtgtc

SEQ ID NO: 3473555 - DNA, 25 bp, Homo sapien
agagctatcttgatcatcatcctga

SEQ ID NO: 3473556 - DNA, 25 bp, Homo sapien
agcttcagggaagagctatcttgat

SEQ ID NO: 3473557 - DNA, 25 bp, Homo sapien
tccttcaaccccatttgctggagac

SEQ ID NO: 3473558 - DNA, 25 bp, Homo sapien
gatccactcggactccttcaacccc

SEQ ID NO: 3473559 - DNA, 25 bp, Homo sapien
gctgcattaatcatcggtcccacaa

SEQ ID NO: 3473560 - DNA, 25 bp, Homo sapien
gagatgagacgtctgccctctacag

SEQ ID NO: 3473561 - DNA, 25 bp, Homo sapien
cacacccgtcactagaaggcaggat

SEQ ID NO: 3473562 - DNA, 25 bp, Homo sapien
tgtagttctggcaaacggacaccaa

SEQ ID NO: 3473563 - DNA, 25 bp, Homo sapien
ctgaatcagctgtcttaaagtcagt

SEQ ID NO: 3473564 - DNA, 25 bp, Homo sapien
cctctgaatcagctgtcttaaagtc

SEQ ID NO: 3473565 - DNA, 25 bp, Homo sapien
tacctctgaatcagctgtcttaaag

SEQ ID NO: 3473566 - DNA, 25 bp, Homo sapien
ctctgaatcagctgtcttaaagtca

SEQ ID NO: 3473567 - DNA, 25 bp, Homo sapien
aaaagtcacctgaccatctgtcagg

SEQ ID NO: 3473568 - DNA, 25 bp, Homo sapien
cttggctcaggtgaacaggtgatcc

SEQ ID NO: 3473569 - DNA, 25 bp, Homo sapien
tttgtgaggtagtaagcttcccatc

SEQ ID NO: 3473570 - DNA, 25 bp, Homo sapien
gataatggcttcatataacaaggac

SEQ ID NO: 3473571 - DNA, 25 bp, Homo sapien
tgctgaagctgctttaattgcactt

SEQ ID NO: 3473572 - DNA, 25 bp, Homo sapien
tcctggtaacgctctttcaacaggg

SEQ ID NO: 3473573 - DNA, 25 bp, Homo sapien
ccaggacctcctggtaacgctcttt

SEQ ID NO: 3473574 - DNA, 25 bp, Homo sapien
tgaagctgctttaattgcacttgga

SEQ ID NO: 3473575 - DNA, 25 bp, Homo sapien
tttattgtcacatcctgaatagcct

SEQ ID NO: 3473576 - DNA, 25 bp, Homo sapien
aatttcagctttcagatcctgctcc

SEQ ID NO: 3473577 - DNA, 25 bp, Homo sapien
gctccttctgcaaaaactccttctt

SEQ ID NO: 3473578 - DNA, 25 bp, Homo sapien
tctcacaaagcttctcaatttcagc

SEQ ID NO: 3473579 - DNA, 25 bp, Homo sapien
ggaatgctaagcagaacctacacca

SEQ ID NO: 3473580 - DNA, 25 bp, Homo sapien
tgcttccggaaaactgaaccccaca

SEQ ID NO: 3473581 - DNA, 25 bp, Homo sapien
caaagatacctacaagagacattcc

SEQ ID NO: 3473582 - DNA, 25 bp, Homo sapien
ccaaaatctatgtgtcccggttcct

SEQ ID NO: 3473583 - DNA, 25 bp, Homo sapien
tgaattgtgccccttaaaactcgta

SEQ ID NO: 3473584 - DNA, 25 bp, Homo sapien
tctggaatgatattccctgggaagc

SEQ ID NO: 3473585 - DNA, 25 bp, Homo sapien
tgtatttggatacagggccttgaag

SEQ ID NO: 3473586 - DNA, 25 bp, Homo sapien
tgaagactttttactctccaggccc

SEQ ID NO: 3473587 - DNA, 25 bp, Homo sapien
gacttatcttctaagagcaggaaca

SEQ ID NO: 3473588 - DNA, 25 bp, Homo sapien
caaggcaaagatatctactttacca

SEQ ID NO: 3473589 - DNA, 25 bp, Homo sapien
tattaaagacttatcttctaagagc

SEQ ID NO: 3473590 - DNA, 25 bp, Homo sapien
tagccagtgcaataatatttataag

SEQ ID NO: 3473591 - DNA, 25 bp, Homo sapien
tctaaagacagtcctcctaaactga

SEQ ID NO: 3473592 - DNA, 25 bp, Homo sapien
ggacagctctattctaaagacagtc

SEQ ID NO: 3473593 - DNA, 25 bp, Homo sapien
tgggacagctctattctaaagacag

SEQ ID NO: 3473594 - DNA, 25 bp, Homo sapien
tgccttgggacagctctattctaaa

SEQ ID NO: 3473595 - DNA, 25 bp, Homo sapien
gcaattcccctgtgcttactatgca

SEQ ID NO: 3473596 - DNA, 25 bp, Homo sapien
gcatctggactttattgggttatca

SEQ ID NO: 3473597 - DNA, 25 bp, Homo sapien
aaagaagggtaggtatataagcatc

SEQ ID NO: 3473598 - DNA, 25 bp, Homo sapien
tagtgaacttttagagggcaaagag

SEQ ID NO: 3473599 - DNA, 25 bp, Homo sapien
aataaacgaggcttgcagcacatgc

SEQ ID NO: 3473600 - DNA, 25 bp, Homo sapien
tctgttattttgaaactgtccctat

SEQ ID NO: 3473601 - DNA, 25 bp, Homo sapien
ttacccaccactgagttcttccatg

SEQ ID NO: 3473602 - DNA, 25 bp, Homo sapien
aattctaactaactactcctttgag

SEQ ID NO: 3473603 - DNA, 25 bp, Homo sapien
ttttgctagtactttgttgaggact

SEQ ID NO: 3473604 - DNA, 25 bp, Homo sapien
ttggtatcagggtgagactggcttt

SEQ ID NO: 3473605 - DNA, 25 bp, Homo sapien
atcagggtgagactggctttgtaga

SEQ ID NO: 3473606 - DNA, 25 bp, Homo sapien
ggtatcagggtgagactggctttgt

SEQ ID NO: 3473607 - DNA, 25 bp, Homo sapien
ttctctcttcagtatgatggtggct

SEQ ID NO: 3473608 - DNA, 25 bp, Homo sapien
tctctcttcagtatgatggtggctg

SEQ ID NO: 3473609 - DNA, 25 bp, Homo sapien
tcctgaactcccacctcaaattcct

SEQ ID NO: 3473610 - DNA, 25 bp, Homo sapien
gagtctatccagttccatttcccac

SEQ ID NO: 3473611 - DNA, 25 bp, Homo sapien
gttcctatttatttcgccatcctga

SEQ ID NO: 3473612 - DNA, 25 bp, Homo sapien
tttcgccatcctgattcttgagtct

SEQ ID NO: 3473613 - DNA, 25 bp, Homo sapien
gattcttgagtctatccagttccat

SEQ ID NO: 3473614 - DNA, 25 bp, Homo sapien
gactttcaagatatcagctcctctt

SEQ ID NO: 3473615 - DNA, 25 bp, Homo sapien
ctattacaatgccaaaagtagatac

SEQ ID NO: 3473616 - DNA, 25 bp, Homo sapien
aatgccaaaagtagataccatctgg

SEQ ID NO: 3473617 - DNA, 25 bp, Homo sapien
aaactaagactttcaagatatcagc

SEQ ID NO: 3473618 - DNA, 25 bp, Homo sapien
taccagtaactctttccggctctct

SEQ ID NO: 3473619 - DNA, 25 bp, Homo sapien
tcttctagtttcagtaccagtaact

SEQ ID NO: 3473620 - DNA, 25 bp, Homo sapien
ttcagtaccagtaactctttccggc

SEQ ID NO: 3473621 - DNA, 25 bp, Homo sapien
ctttccggctctctagtgataagat

SEQ ID NO: 3473622 - DNA, 25 bp, Homo sapien
cccactcctgtttggaacgaactgt

SEQ ID NO: 3473623 - DNA, 25 bp, Homo sapien
ttctttttcattatccgaactccat

SEQ ID NO: 3473624 - DNA, 25 bp, Homo sapien
ctgtttggaacgaactgtctccagt

SEQ ID NO: 3473625 - DNA, 25 bp, Homo sapien
tatccgaactccattcagtctcgtc

SEQ ID NO: 3473626 - DNA, 25 bp, Homo sapien
actggatatgactattaaattggtc

SEQ ID NO: 3473627 - DNA, 25 bp, Homo sapien
gcttggctccgttcctcactaactg

SEQ ID NO: 3473628 - DNA, 25 bp, Homo sapien
cctcactaactggatatgactatta

SEQ ID NO: 3473629 - DNA, 25 bp, Homo sapien
ggagtagggatttgaggaaggctgc

SEQ ID NO: 3473630 - DNA, 25 bp, Homo sapien
tgaaacacctgaagcatgaagtctg

SEQ ID NO: 3473631 - DNA, 25 bp, Homo sapien
aagggcatccgaggagccagagagg

SEQ ID NO: 3473632 - DNA, 25 bp, Homo sapien
agagggactgggttgaaacacctga

SEQ ID NO: 3473633 - DNA, 25 bp, Homo sapien
atggagaagggcatccgaggagcca

SEQ ID NO: 3473634 - DNA, 25 bp, Homo sapien
agggcagggttcaggattgggaaag

SEQ ID NO: 3473635 - DNA, 25 bp, Homo sapien
gccagggctatttctgccatgggag

SEQ ID NO: 3473636 - DNA, 25 bp, Homo sapien
gacaagggaacccaagccagggcta

SEQ ID NO: 3473637 - DNA, 25 bp, Homo sapien
cagggttcaggattgggaaagacaa

SEQ ID NO: 3473638 - DNA, 25 bp, Homo sapien
ttattgcactgtgggaaccgggtca

SEQ ID NO: 3473639 - DNA, 25 bp, Homo sapien
agcagaagccttaacaccgcccaag

SEQ ID NO: 3473640 - DNA, 25 bp, Homo sapien
tgtgggaaccgggtcagcagcttct

SEQ ID NO: 3473641 - DNA, 25 bp, Homo sapien
agtttcagcagaagccttaacaccg

SEQ ID NO: 3473642 - DNA, 25 bp, Homo sapien
ctgaagaatgttggtcatctgggcc

SEQ ID NO: 3473643 - DNA, 25 bp, Homo sapien
ctggataagttcctccatggtcagg

SEQ ID NO: 3473644 - DNA, 25 bp, Homo sapien
tcgtgcagcaaccaactggataagt

SEQ ID NO: 3473645 - DNA, 25 bp, Homo sapien
acccgctcatgttctgccagtcgtg

SEQ ID NO: 3473646 - DNA, 25 bp, Homo sapien
catgcctaagttctctcccaagtgg

SEQ ID NO: 3473647 - DNA, 25 bp, Homo sapien
agccctcaacatgcctaagttctct

SEQ ID NO: 3473648 - DNA, 25 bp, Homo sapien
gctacctctgactggaatgcttctt

SEQ ID NO: 3473649 - DNA, 25 bp, Homo sapien
aaaaagcagactagctacctctgac

SEQ ID NO: 3473650 - DNA, 25 bp, Homo sapien
tgagtaacagagcatatcacaaaaa

SEQ ID NO: 3473651 - DNA, 25 bp, Homo sapien
ctgagtaacagagcatatcacaaaa

SEQ ID NO: 3473652 - DNA, 25 bp, Homo sapien
gagtaacagagcatatcacaaaaat

SEQ ID NO: 3473653 - DNA, 25 bp, Homo sapien
aacattgtcagagtaagggaagaga

SEQ ID NO: 3473654 - DNA, 25 bp, Homo sapien
ctgtaggtagaaacattgtcagagt

SEQ ID NO: 3473655 - DNA, 25 bp, Homo sapien
taggtagaaacattgtcagagtaag

SEQ ID NO: 3473656 - DNA, 25 bp, Homo sapien
tagaaacattgtcagagtaagggaa

SEQ ID NO: 3473657 - DNA, 25 bp, Homo sapien
aacaaggcccggatgcgaccaagtg

SEQ ID NO: 3473658 - DNA, 25 bp, Homo sapien
cagaaggcaagaacattggggtact

SEQ ID NO: 3473659 - DNA, 25 bp, Homo sapien
gggtactgatttgggccagtggagc

SEQ ID NO: 3473660 - DNA, 25 bp, Homo sapien
aggatatgaaacttgggcagaaggc

SEQ ID NO: 3473661 - DNA, 25 bp, Homo sapien
cttctccatatcacagtgttcaaag

SEQ ID NO: 3473662 - DNA, 25 bp, Homo sapien
gcccataattccatgcagcaaaaag

SEQ ID NO: 3473663 - DNA, 25 bp, Homo sapien
cagaggcggcatgatcaaaaggtaa

SEQ ID NO: 3473664 - DNA, 25 bp, Homo sapien
ataacccaactgatggtttcttcct

SEQ ID NO: 3473665 - DNA, 25 bp, Homo sapien
tcccagtagggctgcaaataaccca

SEQ ID NO: 3473666 - DNA, 25 bp, Homo sapien
tccttgtgcaatacatgggtacacg

SEQ ID NO: 3473667 - DNA, 25 bp, Homo sapien
tagacatagcttacaggtggctgga

SEQ ID NO: 3473668 - DNA, 25 bp, Homo sapien
tacacgccattggatgcagctcact

SEQ ID NO: 3473669 - DNA, 25 bp, Homo sapien
tggacgagtttctggcacattagac

SEQ ID NO: 3473670 - DNA, 25 bp, Homo sapien
tggacaaaagggacaagtgtcattt

SEQ ID NO: 3473671 - DNA, 25 bp, Homo sapien
tggtctgggcccagaatttgataca

SEQ ID NO: 3473672 - DNA, 25 bp, Homo sapien
aagtgtcatttgtgttggtctgggc

SEQ ID NO: 3473673 - DNA, 25 bp, Homo sapien
tcatttaagagttggacaaaaggga

SEQ ID NO: 3473674 - DNA, 25 bp, Homo sapien
aaacaatactgaggcttctggaggc

SEQ ID NO: 3473675 - DNA, 25 bp, Homo sapien
cagcaaaggaagacttggcccagga

SEQ ID NO: 3473676 - DNA, 25 bp, Homo sapien
gctttcggtaagcaaggcatctggt

SEQ ID NO: 3473677 - DNA, 25 bp, Homo sapien
tagttcctgatagctacccacagag

SEQ ID NO: 3473678 - DNA, 25 bp, Homo sapien
tctttactgggaagcagttaagccc

SEQ ID NO: 3473679 - DNA, 25 bp, Homo sapien
tactgaaaaatacggcaggtggcct

SEQ ID NO: 3473680 - DNA, 25 bp, Homo sapien
caaaacacttatcctcctgcaagag

SEQ ID NO: 3473681 - DNA, 25 bp, Homo sapien
gaaaagaaacaatatgctttacact

SEQ ID NO: 3473682 - DNA, 25 bp, Homo sapien
gctgctttggctgactgggaacacc

SEQ ID NO: 3473683 - DNA, 25 bp, Homo sapien
tgggaacaccccataactacagagt

SEQ ID NO: 3473684 - DNA, 25 bp, Homo sapien
gagactgtccacttctagctcggaa

SEQ ID NO: 3473685 - DNA, 25 bp, Homo sapien
gacctgctaagtgtggaattacctg

SEQ ID NO: 3473686 - DNA, 25 bp, Homo sapien
tctggagctttgcagccaaggtgct

SEQ ID NO: 3473687 - DNA, 25 bp, Homo sapien
ccttcagtatcaaggctgcctggag

SEQ ID NO: 3473688 - DNA, 25 bp, Homo sapien
tctacatatgataggcagcactgaa

SEQ ID NO: 3473689 - DNA, 25 bp, Homo sapien
ggaagggcttatctagccaaagagc

SEQ ID NO: 3473690 - DNA, 25 bp, Homo sapien
gaagtactggcatcacacgcaggtt

SEQ ID NO: 3473691 - DNA, 25 bp, Homo sapien
tagttatcactcctaccagctgggt

SEQ ID NO: 3473692 - DNA, 25 bp, Homo sapien
tctgctggcgggaatactcttggtc

SEQ ID NO: 3473693 - DNA, 25 bp, Homo sapien
gaagatagagattcccctggaccac

SEQ ID NO: 3473694 - DNA, 25 bp, Homo sapien
ctcttgatgcaagggtagcagactg

SEQ ID NO: 3473695 - DNA, 25 bp, Homo sapien
ccactgcctggattggtaacctctg

SEQ ID NO: 3473696 - DNA, 25 bp, Homo sapien
agcaagagttacctgggtaccttgg

SEQ ID NO: 3473697 - DNA, 25 bp, Homo sapien
ggaaacccagagcagcaagagttac

SEQ ID NO: 3473698 - DNA, 25 bp, Homo sapien
tgccaacacagacggagaagttccc

SEQ ID NO: 3473699 - DNA, 25 bp, Homo sapien
tctacgttgtctttgatcgggcccg

SEQ ID NO: 3473700 - DNA, 25 bp, Homo sapien
ttgccatctcacagtcatccacggg

SEQ ID NO: 3473701 - DNA, 25 bp, Homo sapien
tcagaaaacccgttagagctcaggg

SEQ ID NO: 3473702 - DNA, 25 bp, Homo sapien
agcctcctccgtgagtggactaagg

SEQ ID NO: 3473703 - DNA, 25 bp, Homo sapien
tttcaagtttggagactacctgccc

SEQ ID NO: 3473704 - DNA, 25 bp, Homo sapien
aagctgcagtcaaatccatcaaggc

SEQ ID NO: 3473705 - DNA, 25 bp, Homo sapien
caagcaggtacacttaggaggtgcc

SEQ ID NO: 3473706 - DNA, 25 bp, Homo sapien
ggcaaaagaatggtttgaatccagg

SEQ ID NO: 3473707 - DNA, 25 bp, Homo sapien
ctgaggcaaaagaatggtttgaatc

SEQ ID NO: 3473708 - DNA, 25 bp, Homo sapien
gaggcaaaagaatggtttgaatcca

SEQ ID NO: 3473709 - DNA, 25 bp, Homo sapien
ggtgacagagctaatactccatctc

SEQ ID NO: 3473710 - DNA, 25 bp, Homo sapien
tcgctgtacacaggcagtctctggt

SEQ ID NO: 3473711 - DNA, 25 bp, Homo sapien
gatcattggaggtatcgaccactcg

SEQ ID NO: 3473712 - DNA, 25 bp, Homo sapien
gaagttgagcctagaacagtcaggg

SEQ ID NO: 3473713 - DNA, 25 bp, Homo sapien
tggtatacacccatccggcgggagt

SEQ ID NO: 3473714 - DNA, 25 bp, Homo sapien
gaacaatggtgaatggttctccaat

SEQ ID NO: 3473715 - DNA, 25 bp, Homo sapien
taattaattagaacaatggtgaatg

SEQ ID NO: 3473716 - DNA, 25 bp, Homo sapien
taattagaacaatggtgaatggttc

SEQ ID NO: 3473717 - DNA, 25 bp, Homo sapien
caatggtgaatggttctccaataag

SEQ ID NO: 3473718 - DNA, 25 bp, Homo sapien
cctgtggttctgtgtatgctggtgc

SEQ ID NO: 3473719 - DNA, 25 bp, Homo sapien
ctctgtggggcagtccgggcccggg

SEQ ID NO: 3473720 - DNA, 25 bp, Homo sapien
ctgtgtgcatctgccgcctctgtgg

SEQ ID NO: 3473721 - DNA, 25 bp, Homo sapien
ctggtggaggtggcaccctctgcac

SEQ ID NO: 3473722 - DNA, 25 bp, Homo sapien
gacaactgcactttccccttttgga

SEQ ID NO: 3473723 - DNA, 25 bp, Homo sapien
catcgtatagtgtgaaaccccaccg

SEQ ID NO: 3473724 - DNA, 25 bp, Homo sapien
ttaactgtcccgtgtagaatcaccg

SEQ ID NO: 3473725 - DNA, 25 bp, Homo sapien
ggattcaagtagagcctcaagggca

SEQ ID NO: 3473726 - DNA, 25 bp, Homo sapien
cattgaacaaatgtcttgttcccta

SEQ ID NO: 3473727 - DNA, 25 bp, Homo sapien
ggttacttaggatttcattgaacaa

SEQ ID NO: 3473728 - DNA, 25 bp, Homo sapien
ttaatggttacttaggatttcattg

SEQ ID NO: 3473729 - DNA, 25 bp, Homo sapien
atggttacttaggatttcattgaac

SEQ ID NO: 3473730 - DNA, 25 bp, Homo sapien
tatgcatatatgcacagcccattct

SEQ ID NO: 3473731 - DNA, 25 bp, Homo sapien
tatcctcagtgcctaaaatagtgct

SEQ ID NO: 3473732 - DNA, 25 bp, Homo sapien
gaatgaatgagcaaactaaggaaga

SEQ ID NO: 3473733 - DNA, 25 bp, Homo sapien
tgcttagcgtgtagtaggcactcag

SEQ ID NO: 3473734 - DNA, 25 bp, Homo sapien
tagtctcatctacagaggctgatgt

SEQ ID NO: 3473735 - DNA, 25 bp, Homo sapien
gtagtctcatctacagaggctgatg

SEQ ID NO: 3473736 - DNA, 25 bp, Homo sapien
ctgtagtctcatctacagaggctga

SEQ ID NO: 3473737 - DNA, 25 bp, Homo sapien
gtctcatctacagaggctgatgtgg

SEQ ID NO: 3473738 - DNA, 25 bp, Homo sapien
attagtatgttaaaaagatttcagc

SEQ ID NO: 3473739 - DNA, 25 bp, Homo sapien
tacacaatgatataacattcagcca

SEQ ID NO: 3473740 - DNA, 25 bp, Homo sapien
gcaatgaacccagctgtccaacaac

SEQ ID NO: 3473741 - DNA, 25 bp, Homo sapien
tttacattacccaagatatgcaatg

SEQ ID NO: 3473742 - DNA, 25 bp, Homo sapien
tataccagtaatatacccaatgagt

SEQ ID NO: 3473743 - DNA, 25 bp, Homo sapien
gagagagaggacttcactcataggt

SEQ ID NO: 3473744 - DNA, 25 bp, Homo sapien
gacacactaaatgatataccagtaa

SEQ ID NO: 3473745 - DNA, 25 bp, Homo sapien
tgtcttctacagtaaggatgaacat

SEQ ID NO: 3473746 - DNA, 25 bp, Homo sapien
gcttccagggacgccggggtgttgc

SEQ ID NO: 3473747 - DNA, 25 bp, Homo sapien
ccagcttccagggacgccggggtgt

SEQ ID NO: 3473748 - DNA, 25 bp, Homo sapien
cagcttccagggacgccggggtgtt

SEQ ID NO: 3473749 - DNA, 25 bp, Homo sapien
cccagcttccagggacgccggggtg

SEQ ID NO: 3473750 - DNA, 25 bp, Homo sapien
gcgcatcacgctcgttggctcgaga

SEQ ID NO: 3473751 - DNA, 25 bp, Homo sapien
gcccgctcaggagccggcgagattt

SEQ ID NO: 3473752 - DNA, 25 bp, Homo sapien
tgtcgcctggcagtccgattttcac

SEQ ID NO: 3473753 - DNA, 25 bp, Homo sapien
gatttcaaacggaggaactgtcgcc

SEQ ID NO: 3473754 - DNA, 25 bp, Homo sapien
gaagacccgcagtagttttggtcca

SEQ ID NO: 3473755 - DNA, 25 bp, Homo sapien
agtgacaggcggcatagtggtcaaa

SEQ ID NO: 3473756 - DNA, 25 bp, Homo sapien
tctgtgcttccagtgacaggcggca

SEQ ID NO: 3473757 - DNA, 25 bp, Homo sapien
gaagacagagttacataaagagtgt

SEQ ID NO: 3473758 - DNA, 25 bp, Homo sapien
taagcctatgtaagctgtcggagct

SEQ ID NO: 3473759 - DNA, 25 bp, Homo sapien
taaaccacaaacttctgagggccat

SEQ ID NO: 3473760 - DNA, 25 bp, Homo sapien
gtaactgctaatataaaaccaagga

SEQ ID NO: 3473761 - DNA, 25 bp, Homo sapien
attttcatgtgttcccagacagatt

SEQ ID NO: 3473762 - DNA, 25 bp, Homo sapien
aagatgtgggcaaggacaggtccaa

SEQ ID NO: 3473763 - DNA, 25 bp, Homo sapien
tatcaggctctagaaaagatgtggg

SEQ ID NO: 3473764 - DNA, 25 bp, Homo sapien
cgcacctggcgatatatttaactac

SEQ ID NO: 3473765 - DNA, 25 bp, Homo sapien
aaagatcatctactcactcgaggaa

SEQ ID NO: 3473766 - DNA, 25 bp, Homo sapien
catcagggattgtttactatggccc

SEQ ID NO: 3473767 - DNA, 25 bp, Homo sapien
ggaaatggctggatctggagactct

SEQ ID NO: 3473768 - DNA, 25 bp, Homo sapien
tagagacccctgacaagcaacaaag

SEQ ID NO: 3473769 - DNA, 25 bp, Homo sapien
gactctgaacctattccaaggttcc

SEQ ID NO: 3473770 - DNA, 25 bp, Homo sapien
tactctcaggtcctattctcattct

SEQ ID NO: 3473771 - DNA, 25 bp, Homo sapien
tctccagctctcagtccaaataaag

SEQ ID NO: 3473772 - DNA, 25 bp, Homo sapien
tccttagcccaatatactctcaggt

SEQ ID NO: 3473773 - DNA, 25 bp, Homo sapien
agcccaatatactctcaggtcctat

SEQ ID NO: 3473774 - DNA, 25 bp, Homo sapien
gtccagcttgaatccaaggtttcta

SEQ ID NO: 3473775 - DNA, 25 bp, Homo sapien
gacaggaaccagcaacagactttga

SEQ ID NO: 3473776 - DNA, 25 bp, Homo sapien
agcccaagcgaagacagaagtccag

SEQ ID NO: 3473777 - DNA, 25 bp, Homo sapien
cagactttgatatgggccttctagc

SEQ ID NO: 3473778 - DNA, 25 bp, Homo sapien
agctgatctcctatgcggaggggtc

SEQ ID NO: 3473779 - DNA, 25 bp, Homo sapien
ctatgcggaggggtcgtccagccat

SEQ ID NO: 3473780 - DNA, 25 bp, Homo sapien
ttgctcactaggaatgtaggtctca

SEQ ID NO: 3473781 - DNA, 25 bp, Homo sapien
taggaatgtaggtctcatcataatc

SEQ ID NO: 3473782 - DNA, 25 bp, Homo sapien
caatctcccgggcaaattcaagaat

SEQ ID NO: 3473783 - DNA, 25 bp, Homo sapien
acgatgccctctcgcgccagccaca

SEQ ID NO: 3473784 - DNA, 25 bp, Homo sapien
cagttctggttccttgatgggatca

SEQ ID NO: 3473785 - DNA, 25 bp, Homo sapien
gccctctcgcgccagccacatcagt

SEQ ID NO: 3473786 - DNA, 25 bp, Homo sapien
tctctagatgttgatgtataatcac

SEQ ID NO: 3473787 - DNA, 25 bp, Homo sapien
tctagatgttgatgtataatcactg

SEQ ID NO: 3473788 - DNA, 25 bp, Homo sapien
ctagatgttgatgtataatcactgg

SEQ ID NO: 3473789 - DNA, 25 bp, Homo sapien
atctctagatgttgatgtataatca

SEQ ID NO: 3473790 - DNA, 25 bp, Homo sapien
atgggcagagttcagaagttagtcc

SEQ ID NO: 3473791 - DNA, 25 bp, Homo sapien
gggatgggcagagttcagaagttag

SEQ ID NO: 3473792 - DNA, 25 bp, Homo sapien
gatgggcagagttcagaagttagtc

SEQ ID NO: 3473793 - DNA, 25 bp, Homo sapien
ctggggatgggcagagttcagaagt

SEQ ID NO: 3473794 - DNA, 25 bp, Homo sapien
cgtcacatggatggtcccacataga

SEQ ID NO: 3473795 - DNA, 25 bp, Homo sapien
gtcccacatagactgcccgttggcg

SEQ ID NO: 3473796 - DNA, 25 bp, Homo sapien
gcccgttggcgaagttgaaatagta

SEQ ID NO: 3473797 - DNA, 25 bp, Homo sapien
caagctccgatagtgttcgtcacat

SEQ ID NO: 3473798 - DNA, 25 bp, Homo sapien
agaagttgacagctttgcccgctct

SEQ ID NO: 3473799 - DNA, 25 bp, Homo sapien
gacagctttgcccgctcttggatca

SEQ ID NO: 3473800 - DNA, 25 bp, Homo sapien
gttgacagctttgcccgctcttgga

SEQ ID NO: 3473801 - DNA, 25 bp, Homo sapien
agttgacagctttgcccgctcttgg

SEQ ID NO: 3473802 - DNA, 25 bp, Homo sapien
tgcatctcttgatctaggtccagat

SEQ ID NO: 3473803 - DNA, 25 bp, Homo sapien
gggccctgcctaagattttctccat

SEQ ID NO: 3473804 - DNA, 25 bp, Homo sapien
gcacccatgaaacgccagggagtgt

SEQ ID NO: 3473805 - DNA, 25 bp, Homo sapien
agattttctctgtcgccttctggag

SEQ ID NO: 3473806 - DNA, 25 bp, Homo sapien
cttcctggcaggcaacatgtggccg

SEQ ID NO: 3473807 - DNA, 25 bp, Homo sapien
cagtagggctgctatctaacaacaa

SEQ ID NO: 3473808 - DNA, 25 bp, Homo sapien
gaaagctttgagtggacagaggcct

SEQ ID NO: 3473809 - DNA, 25 bp, Homo sapien
cagtggcaggcctttgatggcttca

SEQ ID NO: 3473810 - DNA, 25 bp, Homo sapien
tccacagtccaggaggttctctcct

SEQ ID NO: 3473811 - DNA, 25 bp, Homo sapien
ccatccacagtccaggaggttctct

SEQ ID NO: 3473812 - DNA, 25 bp, Homo sapien
ctgttccatccacagtccaggaggt

SEQ ID NO: 3473813 - DNA, 25 bp, Homo sapien
tcctcctcccgctgcctatgctccc

SEQ ID NO: 3473814 - DNA, 25 bp, Homo sapien
attagcaagagaccctgaggtagat

SEQ ID NO: 3473815 - DNA, 25 bp, Homo sapien
agggtttcaggtggtattagcaaga

SEQ ID NO: 3473816 - DNA, 25 bp, Homo sapien
cagggtttcaggtggtattagcaag

SEQ ID NO: 3473817 - DNA, 25 bp, Homo sapien
ggtattagcaagagaccctgaggta

SEQ ID NO: 3473818 - DNA, 25 bp, Homo sapien
gctgctgctgctgctctccaagtca

SEQ ID NO: 3473819 - DNA, 25 bp, Homo sapien
ctgctgctgctgctctccaagtcag

SEQ ID NO: 3473820 - DNA, 25 bp, Homo sapien
gaagttgttcacctcatccaggaca

SEQ ID NO: 3473821 - DNA, 25 bp, Homo sapien
ctgcaggttccaagggaagttgttc

SEQ ID NO: 3473822 - DNA, 25 bp, Homo sapien
caagggaagttgttcacctcatcca

SEQ ID NO: 3473823 - DNA, 25 bp, Homo sapien
tcacctcatccaggacaggagagcc

SEQ ID NO: 3473824 - DNA, 25 bp, Homo sapien
gaagtgttgatctctgagacccgag

SEQ ID NO: 3473825 - DNA, 25 bp, Homo sapien
tgatctctgagacccgagtctgact

SEQ ID NO: 3473826 - DNA, 25 bp, Homo sapien
gggctgaagtgttgatctctgagac

SEQ ID NO: 3473827 - DNA, 25 bp, Homo sapien
gagacccgagtctgactgagccata

SEQ ID NO: 3473828 - DNA, 25 bp, Homo sapien
gatgtgctggtagaacctctggtcc

SEQ ID NO: 3473829 - DNA, 25 bp, Homo sapien
tagacatcctagaagactcagctgc

SEQ ID NO: 3473830 - DNA, 25 bp, Homo sapien
ggctcccatgacagaaacctcgagt

SEQ ID NO: 3473831 - DNA, 25 bp, Homo sapien
gctctgtagtaagccctctgctgga

SEQ ID NO: 3473832 - DNA, 25 bp, Homo sapien
ctggggctaatgaggaacccaaggc

SEQ ID NO: 3473833 - DNA, 25 bp, Homo sapien
cagagggtggggtatccacaagacc

SEQ ID NO: 3473834 - DNA, 25 bp, Homo sapien
acaagacctcgtaaaggagccaggc

SEQ ID NO: 3473835 - DNA, 25 bp, Homo sapien
caggctcacgctttgagatccacga

SEQ ID NO: 3473836 - DNA, 25 bp, Homo sapien
ggtatccacaagacctcgtaaagga

SEQ ID NO: 3473837 - DNA, 25 bp, Homo sapien
ctttgtataagcagaggtcttgaga

SEQ ID NO: 3473838 - DNA, 25 bp, Homo sapien
tttgtataagcagaggtcttgagac

SEQ ID NO: 3473839 - DNA, 25 bp, Homo sapien
ttgtataagcagaggtcttgagacc

SEQ ID NO: 3473840 - DNA, 25 bp, Homo sapien
cagtcttgtcctcatatatggagcc

SEQ ID NO: 3473841 - DNA, 25 bp, Homo sapien
tcttgtcctcatatatggagcccaa

SEQ ID NO: 3473842 - DNA, 25 bp, Homo sapien
ttcttctcctaaacccaagaggctg

SEQ ID NO: 3473843 - DNA, 25 bp, Homo sapien
gtcttgtcctcatatatggagccca

SEQ ID NO: 3473844 - DNA, 25 bp, Homo sapien
ccaatgtccaggtgtaggttcctaa

SEQ ID NO: 3473845 - DNA, 25 bp, Homo sapien
tccaggtgtaggttcctaagaggct

SEQ ID NO: 3473846 - DNA, 25 bp, Homo sapien
gtaggttcctaagaggctcacttga

SEQ ID NO: 3473847 - DNA, 25 bp, Homo sapien
ccagtgccccaatgtccaggtgtag

SEQ ID NO: 3473848 - DNA, 25 bp, Homo sapien
aaggactgcttgagaccgggagttt

SEQ ID NO: 3473849 - DNA, 25 bp, Homo sapien
tgagaccgggagtttgaaaccagtc

SEQ ID NO: 3473850 - DNA, 25 bp, Homo sapien
ctttgggagaccaagatggaaggac

SEQ ID NO: 3473851 - DNA, 25 bp, Homo sapien
gggagaccaagatggaaggactgct

SEQ ID NO: 3473852 - DNA, 25 bp, Homo sapien
agtacccactctatccagaaactgg

SEQ ID NO: 3473853 - DNA, 25 bp, Homo sapien
aaaatatgacacaacctgcctggac

SEQ ID NO: 3473854 - DNA, 25 bp, Homo sapien
atcaggatcttccatccaccagctg

SEQ ID NO: 3473855 - DNA, 25 bp, Homo sapien
taaatcatgatcaatccacatcagg

SEQ ID NO: 3473856 - DNA, 25 bp, Homo sapien
tcctctggctggcttgttctcagag

SEQ ID NO: 3473857 - DNA, 25 bp, Homo sapien
agggggaccggcagcatctgaatcc

SEQ ID NO: 3473858 - DNA, 25 bp, Homo sapien
ctggctggcttgttctcagagactc

SEQ ID NO: 3473859 - DNA, 25 bp, Homo sapien
ggggaccggcagcatctgaatccag

SEQ ID NO: 3473860 - DNA, 25 bp, Homo sapien
agattcctgcaaatcttaggttcac

SEQ ID NO: 3473861 - DNA, 25 bp, Homo sapien
ttggctggcgtctgaactgccctct

SEQ ID NO: 3473862 - DNA, 25 bp, Homo sapien
ctgtcgccctttgccaacagcactg

SEQ ID NO: 3473863 - DNA, 25 bp, Homo sapien
ttgggggtcaccagattcctgcaaa

SEQ ID NO: 3473864 - DNA, 25 bp, Homo sapien
acttggggtcagaagctatggagtc

SEQ ID NO: 3473865 - DNA, 25 bp, Homo sapien
tcatgtgttcactaatttccagttc

SEQ ID NO: 3473866 - DNA, 25 bp, Homo sapien
ggttccttcatgtgttcactaattt

SEQ ID NO: 3473867 - DNA, 25 bp, Homo sapien
cagaagctatggagtctgagagctg

SEQ ID NO: 3473868 - DNA, 25 bp, Homo sapien
cgacaagctccacccaggactgggg

SEQ ID NO: 3473869 - DNA, 25 bp, Homo sapien
tccgagatccggctgcgaaaaccga

SEQ ID NO: 3473870 - DNA, 25 bp, Homo sapien
caggtgctccgagatccggctgcga

SEQ ID NO: 3473871 - DNA, 25 bp, Homo sapien
agatccggctgcgaaaaccgaagtc

SEQ ID NO: 3473872 - DNA, 25 bp, Homo sapien
gtcgaggtgacaggcccactccatt

SEQ ID NO: 3473873 - DNA, 25 bp, Homo sapien
tgtcgaggtgacaggcccactccat

SEQ ID NO: 3473874 - DNA, 25 bp, Homo sapien
ctgtcgaggtgacaggcccactcca

SEQ ID NO: 3473875 - DNA, 25 bp, Homo sapien
tcttctattcccagtggttgctggg

SEQ ID NO: 3473876 - DNA, 25 bp, Homo sapien
cctccaggcctttggactgcttgct

SEQ ID NO: 3473877 - DNA, 25 bp, Homo sapien
gctgcgagggggactctgggcccgc

SEQ ID NO: 3473878 - DNA, 25 bp, Homo sapien
cctccttccactcgggctgcccctc

SEQ ID NO: 3473879 - DNA, 25 bp, Homo sapien
tgggcccgctcctcgtgtggaagtg

SEQ ID NO: 3473880 - DNA, 25 bp, Homo sapien
gaggctcttcttcagtggccaggct

SEQ ID NO: 3473881 - DNA, 25 bp, Homo sapien
gaccgccaccttctcctcaggatcc

SEQ ID NO: 3473882 - DNA, 25 bp, Homo sapien
tgaccgccaccttctcctcaggatc

SEQ ID NO: 3473883 - DNA, 25 bp, Homo sapien
accgccaccttctcctcaggatcct

SEQ ID NO: 3473884 - DNA, 25 bp, Homo sapien
aatcttacggtggaaagtggcctca

SEQ ID NO: 3473885 - DNA, 25 bp, Homo sapien
tggccttggccagaaagcattcggt

SEQ ID NO: 3473886 - DNA, 25 bp, Homo sapien
gcagacttacgaggttatggcccaa

SEQ ID NO: 3473887 - DNA, 25 bp, Homo sapien
tcaacctaagcggaaagtgtgggca

SEQ ID NO: 3473888 - DNA, 25 bp, Homo sapien
ttgctcgagtacttgggccactgcc

SEQ ID NO: 3473889 - DNA, 25 bp, Homo sapien
tgaagccggaggatctcctcttcct

SEQ ID NO: 3473890 - DNA, 25 bp, Homo sapien
tcttccatggcctttagtgcagcct

SEQ ID NO: 3473891 - DNA, 25 bp, Homo sapien
cctctggtcttgctcgagtacttgg

SEQ ID NO: 3473892 - DNA, 25 bp, Homo sapien
tgagctcggagccaggatagcctct

SEQ ID NO: 3473893 - DNA, 25 bp, Homo sapien
ctgagctcggagccaggatagcctc

SEQ ID NO: 3473894 - DNA, 25 bp, Homo sapien
gcttgtgtgctggactggacctgag

SEQ ID NO: 3473895 - DNA, 25 bp, Homo sapien
gctggactggacctgagctcggagc

SEQ ID NO: 3473896 - DNA, 25 bp, Homo sapien
ctgcagggaagcctcttgctcagcc

SEQ ID NO: 3473897 - DNA, 25 bp, Homo sapien
tcgctcttctccgaagcctctatct

SEQ ID NO: 3473898 - DNA, 25 bp, Homo sapien
tctcctttgcagcattcagggcagc

SEQ ID NO: 3473899 - DNA, 25 bp, Homo sapien
ctcttctccgaagcctctatctctt

SEQ ID NO: 3473900 - DNA, 25 bp, Homo sapien
ctcctttgcagcattcagggcagcc

SEQ ID NO: 3473901 - DNA, 25 bp, Homo sapien
ctcccggtgcttggcctccaatgag

SEQ ID NO: 3473902 - DNA, 25 bp, Homo sapien
ccggtgcttggcctccaatgaggag

SEQ ID NO: 3473903 - DNA, 25 bp, Homo sapien
ggtgcttggcctccaatgaggagca

SEQ ID NO: 3473904 - DNA, 25 bp, Homo sapien
tcccggtgcttggcctccaatgagg

SEQ ID NO: 3473905 - DNA, 25 bp, Homo sapien
gataagacttctggtgaactctgtg

SEQ ID NO: 3473906 - DNA, 25 bp, Homo sapien
catacccagccacgtgataagactt

SEQ ID NO: 3473907 - DNA, 25 bp, Homo sapien
cagccacgtgataagacttctggtg

SEQ ID NO: 3473908 - DNA, 25 bp, Homo sapien
ccacgtgataagacttctggtgaac

SEQ ID NO: 3473909 - DNA, 25 bp, Homo sapien
tcctggcgcttctctcgcaggagac

SEQ ID NO: 3473910 - DNA, 25 bp, Homo sapien
cgcttctctcgcaggagactgctga

SEQ ID NO: 3473911 - DNA, 25 bp, Homo sapien
tcagcttcatactgctctctggcct

SEQ ID NO: 3473912 - DNA, 25 bp, Homo sapien
ttagccatcacttgctggtgctcct

SEQ ID NO: 3473913 - DNA, 25 bp, Homo sapien
aactcaagtcgctgaactttcctac

SEQ ID NO: 3473914 - DNA, 25 bp, Homo sapien
gccagcttgggtaaactcaagtcgc

SEQ ID NO: 3473915 - DNA, 25 bp, Homo sapien
tgttcaccctcaatgtgagcaaggc

SEQ ID NO: 3473916 - DNA, 25 bp, Homo sapien
cctcaatgtgagcaaggcaggccag

SEQ ID NO: 3473917 - DNA, 25 bp, Homo sapien
cagaagctcagcccgctgcttcctc

SEQ ID NO: 3473918 - DNA, 25 bp, Homo sapien
gtcctcaagacgcttgtgttgctcc

SEQ ID NO: 3473919 - DNA, 25 bp, Homo sapien
agacgcttgtgttgctcctgcctca

SEQ ID NO: 3473920 - DNA, 25 bp, Homo sapien
tcacagtctccagttctcgttcatg

SEQ ID NO: 3473921 - DNA, 25 bp, Homo sapien
ggcgccgcaagtcctcaagacgctt

SEQ ID NO: 3473922 - DNA, 25 bp, Homo sapien
agccaatctggccttgacatcttta

SEQ ID NO: 3473923 - DNA, 25 bp, Homo sapien
aaggtccaactctaaatcctggagc

SEQ ID NO: 3473924 - DNA, 25 bp, Homo sapien
ctggacctccagcagagccaatctg

SEQ ID NO: 3473925 - DNA, 25 bp, Homo sapien
tttcaaggtccaactctaaatcctg

SEQ ID NO: 3473926 - DNA, 25 bp, Homo sapien
gactctgaggtcaaggactcctgca

SEQ ID NO: 3473927 - DNA, 25 bp, Homo sapien
tagagaagctatgactctgaggtca

SEQ ID NO: 3473928 - DNA, 25 bp, Homo sapien
tctgctagagaagctatgactctga

SEQ ID NO: 3473929 - DNA, 25 bp, Homo sapien
agcctgccctctgctagagaagcta

SEQ ID NO: 3473930 - DNA, 25 bp, Homo sapien
gcctctgcacatcaagcagctgctg

SEQ ID NO: 3473931 - DNA, 25 bp, Homo sapien
ctcactcttcagagcaacctgcctc

SEQ ID NO: 3473932 - DNA, 25 bp, Homo sapien
aacctgcctctgcacatcaagcagc

SEQ ID NO: 3473933 - DNA, 25 bp, Homo sapien
ctgcttctccctccgggcggtctcc

SEQ ID NO: 3473934 - DNA, 25 bp, Homo sapien
gctggtttgactgcaacaggtgggt

SEQ ID NO: 3473935 - DNA, 25 bp, Homo sapien
ctgctggtttgactgcaacaggtgg

SEQ ID NO: 3473936 - DNA, 25 bp, Homo sapien
cagcttcagcttgcgggcctgcagc

SEQ ID NO: 3473937 - DNA, 25 bp, Homo sapien
gctgctggtttgactgcaacaggtg

SEQ ID NO: 3473938 - DNA, 25 bp, Homo sapien
tcctcaatatggagatctggctcaa

SEQ ID NO: 3473939 - DNA, 25 bp, Homo sapien
atggagatctggctcaaaatgtggg

SEQ ID NO: 3473940 - DNA, 25 bp, Homo sapien
gctgcttcttttgagcttcagcctc

SEQ ID NO: 3473941 - DNA, 25 bp, Homo sapien
cctcaggtcctcaatatggagatct

SEQ ID NO: 3473942 - DNA, 25 bp, Homo sapien
gagagagaagaagacacctctttgg

SEQ ID NO: 3473943 - DNA, 25 bp, Homo sapien
gagaagaagacacctctttggtctg

SEQ ID NO: 3473944 - DNA, 25 bp, Homo sapien
gagagaagaagacacctctttggtc

SEQ ID NO: 3473945 - DNA, 25 bp, Homo sapien
ggagagagaagaagacacctctttg

SEQ ID NO: 3473946 - DNA, 25 bp, Homo sapien
tgtccaagtataagtcctccttgct

SEQ ID NO: 3473947 - DNA, 25 bp, Homo sapien
ctgtccaagtataagtcctccttgc

SEQ ID NO: 3473948 - DNA, 25 bp, Homo sapien
aggtgccagacattgtgggaggaca

SEQ ID NO: 3473949 - DNA, 25 bp, Homo sapien
ggaggtgccagacattgtgggagga

SEQ ID NO: 3473950 - DNA, 25 bp, Homo sapien
gtgccagacattgtgggaggacagg

SEQ ID NO: 3473951 - DNA, 25 bp, Homo sapien
agaggaggtgccagacattgtggga

SEQ ID NO: 3473952 - DNA, 25 bp, Homo sapien
tcatggcgccaatgctgctgggcag

SEQ ID NO: 3473953 - DNA, 25 bp, Homo sapien
tgtctgccgcctccgcatggagcgt

SEQ ID NO: 3473954 - DNA, 25 bp, Homo sapien
tgtctgctgcacaaggaactccttg

SEQ ID NO: 3473955 - DNA, 25 bp, Homo sapien
tcttgcgcatatcttccagggcctt

SEQ ID NO: 3473956 - DNA, 25 bp, Homo sapien
gcaggttgtggcctttccgcatggc

SEQ ID NO: 3473957 - DNA, 25 bp, Homo sapien
aaagagaggactccaactgattcag

SEQ ID NO: 3473958 - DNA, 25 bp, Homo sapien
ggcctttccgcatggccgacttcat

SEQ ID NO: 3473959 - DNA, 25 bp, Homo sapien
gagaggactccaactgattcagctt

SEQ ID NO: 3473960 - DNA, 25 bp, Homo sapien
tggactatgtggacatggggctgca

SEQ ID NO: 3473961 - DNA, 25 bp, Homo sapien
ggactatgtggacatggggctgcac

SEQ ID NO: 3473962 - DNA, 25 bp, Homo sapien
ttgttgctacaaattcaaggtggta

SEQ ID NO: 3473963 - DNA, 25 bp, Homo sapien
gcaaggctcagcatatgtcccaaat

SEQ ID NO: 3473964 - DNA, 25 bp, Homo sapien
caaggtggtatgtaggctgtcgccc

SEQ ID NO: 3473965 - DNA, 25 bp, Homo sapien
gtaccctgggcgaagcaaatcacac

SEQ ID NO: 3473966 - DNA, 25 bp, Homo sapien
ctcaggctgtccatgtcactgaggt

SEQ ID NO: 3473967 - DNA, 25 bp, Homo sapien
ggctgtccatgtcactgaggtcgaa

SEQ ID NO: 3473968 - DNA, 25 bp, Homo sapien
actgaggtcgaaggttactgccttc

SEQ ID NO: 3473969 - DNA, 25 bp, Homo sapien
ctgtccatgtcactgaggtcgaagg

SEQ ID NO: 3473970 - DNA, 25 bp, Homo sapien
tgaggcggggaaaaagattcagaac

SEQ ID NO: 3473971 - DNA, 25 bp, Homo sapien
gtgaggcggggaaaaagattcagaa

SEQ ID NO: 3473972 - DNA, 25 bp, Homo sapien
ggtgaggcggggaaaaagattcaga

SEQ ID NO: 3473973 - DNA, 25 bp, Homo sapien
tccagacagtgcaagtgagaagctg

SEQ ID NO: 3473974 - DNA, 25 bp, Homo sapien
cacgtgctggcaaacctagatggtg

SEQ ID NO: 3473975 - DNA, 25 bp, Homo sapien
gagagggcccttctgtcacatacag

SEQ ID NO: 3473976 - DNA, 25 bp, Homo sapien
tggtcacaccgtagagtgctctgca

SEQ ID NO: 3473977 - DNA, 25 bp, Homo sapien
gccggagggagtggctaagcccgtg

SEQ ID NO: 3473978 - DNA, 25 bp, Homo sapien
gtggctaagcccgtggatcttgcgg

SEQ ID NO: 3473979 - DNA, 25 bp, Homo sapien
gagggagtggctaagcccgtggatc

SEQ ID NO: 3473980 - DNA, 25 bp, Homo sapien
gagtggctaagcccgtggatcttgc

SEQ ID NO: 3473981 - DNA, 25 bp, Homo sapien
tggccagggagccatagtaggtggg

SEQ ID NO: 3473982 - DNA, 25 bp, Homo sapien
gccagggagccatagtaggtggggg

SEQ ID NO: 3473983 - DNA, 25 bp, Homo sapien
cagggagccatagtaggtgggggtg

SEQ ID NO: 3473984 - DNA, 25 bp, Homo sapien
ctggccagggagccatagtaggtgg

SEQ ID NO: 3473985 - DNA, 25 bp, Homo sapien
acgtgggtgtagcagatgataaggc

SEQ ID NO: 3473986 - DNA, 25 bp, Homo sapien
aatacttgcgccacttctccaacag

SEQ ID NO: 3473987 - DNA, 25 bp, Homo sapien
cgtccaccgtttgagccacagagga

SEQ ID NO: 3473988 - DNA, 25 bp, Homo sapien
ccattgggtggacgtgggtgtagca

SEQ ID NO: 3473989 - DNA, 25 bp, Homo sapien
tgttactcactcactgggtaccctg

SEQ ID NO: 3473990 - DNA, 25 bp, Homo sapien
gggtaccctggagcatactacttaa

SEQ ID NO: 3473991 - DNA, 25 bp, Homo sapien
cagccaagaggttccaagcagaatc

SEQ ID NO: 3473992 - DNA, 25 bp, Homo sapien
ggcttttcataatcctcagcagggc

SEQ ID NO: 3473993 - DNA, 25 bp, Homo sapien
gggctgttgctgagcagcgggatgc

SEQ ID NO: 3473994 - DNA, 25 bp, Homo sapien
ctggcagacatgtaacccagcctgc

SEQ ID NO: 3473995 - DNA, 25 bp, Homo sapien
ctgttgctgagcagcgggatgccag

SEQ ID NO: 3473996 - DNA, 25 bp, Homo sapien
cagcctgctctccagcggggtgggg

SEQ ID NO: 3473997 - DNA, 25 bp, Homo sapien
aataattgcccgtctgtctcctcca

SEQ ID NO: 3473998 - DNA, 25 bp, Homo sapien
tttggcaaggaatgagatgaatgga

SEQ ID NO: 3473999 - DNA, 25 bp, Homo sapien
gggtgtccctctcactccagatgtt

SEQ ID NO: 3474000 - DNA, 25 bp, Homo sapien
caaacaagagctcaagggcaaagac

SEQ ID NO: 3474001 - DNA, 25 bp, Homo sapien
tctttctctcagctaccagagcagc

SEQ ID NO: 3474002 - DNA, 25 bp, Homo sapien
tgtcaactcaatccttggccagcat

SEQ ID NO: 3474003 - DNA, 25 bp, Homo sapien
tgctactgatacaaggctctgggct

SEQ ID NO: 3474004 - DNA, 25 bp, Homo sapien
tcagctctcaagttggccaaagggt

SEQ ID NO: 3474005 - DNA, 25 bp, Homo sapien
ctccggttggcctcaattatgccct

SEQ ID NO: 3474006 - DNA, 25 bp, Homo sapien
ctcaattatgccctgaaaggtggtg

SEQ ID NO: 3474007 - DNA, 25 bp, Homo sapien
gagtgctgtaggagccggagctgct

SEQ ID NO: 3474008 - DNA, 25 bp, Homo sapien
cctcagggacttgcgaatgggagtg

SEQ ID NO: 3474009 - DNA, 25 bp, Homo sapien
gggtcattcttgacacgttccagcc

SEQ ID NO: 3474010 - DNA, 25 bp, Homo sapien
tggggtcattcttgacacgttccag

SEQ ID NO: 3474011 - DNA, 25 bp, Homo sapien
ggtcattcttgacacgttccagcca

SEQ ID NO: 3474012 - DNA, 25 bp, Homo sapien
gtcattcttgacacgttccagccac

SEQ ID NO: 3474013 - DNA, 25 bp, Homo sapien
gatacaccttcactctgttgtgctc

SEQ ID NO: 3474014 - DNA, 25 bp, Homo sapien
tcagaagcgatacaccttcactctg

SEQ ID NO: 3474015 - DNA, 25 bp, Homo sapien
cttgggtgttgacgagaagagaggt

SEQ ID NO: 3474016 - DNA, 25 bp, Homo sapien
tcaaagtagcttttggcttgggtgt

SEQ ID NO: 3474017 - DNA, 25 bp, Homo sapien
cagagaaatcgggtcccagggtaca

SEQ ID NO: 3474018 - DNA, 25 bp, Homo sapien
aaaacacagtgcctgcagagggaca

SEQ ID NO: 3474019 - DNA, 25 bp, Homo sapien
tgtcaatgacaagagctcgtacgag

SEQ ID NO: 3474020 - DNA, 25 bp, Homo sapien
gaatatacccaaagtgtcccaggag

SEQ ID NO: 3474021 - DNA, 25 bp, Homo sapien
ccccaggccaggaagttaggacact

SEQ ID NO: 3474022 - DNA, 25 bp, Homo sapien
gtctcctctactgcaaaacctgaag

SEQ ID NO: 3474023 - DNA, 25 bp, Homo sapien
aattcggatgtgaaggcgcagccct

SEQ ID NO: 3474024 - DNA, 25 bp, Homo sapien
tgaagtaatccataaggccccacta

SEQ ID NO: 3474025 - DNA, 25 bp, Homo sapien
tgaacgcctgtacatagaactcttt

SEQ ID NO: 3474026 - DNA, 25 bp, Homo sapien
ccaccccacaaaatatgtgtggaga

SEQ ID NO: 3474027 - DNA, 25 bp, Homo sapien
tatagacagacaggaacgcgtccac

SEQ ID NO: 3474028 - DNA, 25 bp, Homo sapien
tatattcaactgacagacaaaaacc

SEQ ID NO: 3474029 - DNA, 25 bp, Homo sapien
gagacagaatgttgcccttggagct

SEQ ID NO: 3474030 - DNA, 25 bp, Homo sapien
gaatcatgcaccagccatgtggtag

SEQ ID NO: 3474031 - DNA, 25 bp, Homo sapien
gaaatatatgtgtctgtcagtcagc

SEQ ID NO: 3474032 - DNA, 25 bp, Homo sapien
gagaaagcatctatgatagcacggg

SEQ ID NO: 3474033 - DNA, 25 bp, Homo sapien
tttgaatttgataccataagcctgt

SEQ ID NO: 3474034 - DNA, 25 bp, Homo sapien
caactcctcttgtgggtccttactt

SEQ ID NO: 3474035 - DNA, 25 bp, Homo sapien
tagaatctagattactcaatcttcc

SEQ ID NO: 3474036 - DNA, 25 bp, Homo sapien
tgtctcactctggatccttcgtacc

SEQ ID NO: 3474037 - DNA, 25 bp, Homo sapien
ttcttcattataacttgcacctcgt

SEQ ID NO: 3474038 - DNA, 25 bp, Homo sapien
tcatactcggatgtctctgactgca

SEQ ID NO: 3474039 - DNA, 25 bp, Homo sapien
tatatcctagtgtaatgccgtgcat

SEQ ID NO: 3474040 - DNA, 25 bp, Homo sapien
gctgtcgtcagcatcaagtcctgca

SEQ ID NO: 3474041 - DNA, 25 bp, Homo sapien
tgagacatgcgcctttcacatccac

SEQ ID NO: 3474042 - DNA, 25 bp, Homo sapien
ccttcttgcctgagacatgcgcctt

SEQ ID NO: 3474043 - DNA, 25 bp, Homo sapien
tccgctactttcatatctgccactt

SEQ ID NO: 3474044 - DNA, 25 bp, Homo sapien
gccactttcacatccgccattatca

SEQ ID NO: 3474045 - DNA, 25 bp, Homo sapien
gcagtattcccatggaaggatatac

SEQ ID NO: 3474046 - DNA, 25 bp, Homo sapien
ggcagtattcccatggaaggatata

SEQ ID NO: 3474047 - DNA, 25 bp, Homo sapien
tggcagtattcccatggaaggatat

SEQ ID NO: 3474048 - DNA, 25 bp, Homo sapien
agtattcccatggaaggatatacat

SEQ ID NO: 3474049 - DNA, 25 bp, Homo sapien
ctttttggtgacagccaaattccat

SEQ ID NO: 3474050 - DNA, 25 bp, Homo sapien
tgtgtactggagcagtggacagcca

SEQ ID NO: 3474051 - DNA, 25 bp, Homo sapien
cccactggctcttggcgctgaagct

SEQ ID NO: 3474052 - DNA, 25 bp, Homo sapien
ttccatgcaatctgaattaatctca

SEQ ID NO: 3474053 - DNA, 25 bp, Homo sapien
attaatctcatgcttcaggtggagc

SEQ ID NO: 3474054 - DNA, 25 bp, Homo sapien
gcattcagaagctgtaggcttttgt

SEQ ID NO: 3474055 - DNA, 25 bp, Homo sapien
cgagggcatgtgtcgccagttccag

SEQ ID NO: 3474056 - DNA, 25 bp, Homo sapien
ctcaacaagtgggttgcgttctgtt

SEQ ID NO: 3474057 - DNA, 25 bp, Homo sapien
ccactaaggcatgactagagctcaa

SEQ ID NO: 3474058 - DNA, 25 bp, Homo sapien
tgtgagtccccctgattgggcgagt

SEQ ID NO: 3474059 - DNA, 25 bp, Homo sapien
tccccttgtgagtccccctgattgg

SEQ ID NO: 3474060 - DNA, 25 bp, Homo sapien
tgggggacgggatggactctctgct

SEQ ID NO: 3474061 - DNA, 25 bp, Homo sapien
ggtctggtccaatcccatccgggct

SEQ ID NO: 3474062 - DNA, 25 bp, Homo sapien
ggcgggacacccttatcaactgcag

SEQ ID NO: 3474063 - DNA, 25 bp, Homo sapien
tcaactgcagggtcatcggctatcc

SEQ ID NO: 3474064 - DNA, 25 bp, Homo sapien
tcaagtggtacaaggatgccctgct

SEQ ID NO: 3474065 - DNA, 25 bp, Homo sapien
ctttgaagctagtaacagtgagtcc

SEQ ID NO: 3474066 - DNA, 25 bp, Homo sapien
cctgggctgtgttcttgtctgtact

SEQ ID NO: 3474067 - DNA, 25 bp, Homo sapien
ctgggctgtgttcttgtctgtactt

SEQ ID NO: 3474068 - DNA, 25 bp, Homo sapien
ttcacaagccagtgcaggtacacaa

SEQ ID NO: 3474069 - DNA, 25 bp, Homo sapien
cacaacatgccagcgcatgcaccat

SEQ ID NO: 3474070 - DNA, 25 bp, Homo sapien
agccagtgcaggtacacaacatgcc

SEQ ID NO: 3474071 - DNA, 25 bp, Homo sapien
cacacacgagcacaggttcacaagc

SEQ ID NO: 3474072 - DNA, 25 bp, Homo sapien
gcagtgaagcggcacataaggcaga

SEQ ID NO: 3474073 - DNA, 25 bp, Homo sapien
agtagagacgagtatgcagtgaagc

SEQ ID NO: 3474074 - DNA, 25 bp, Homo sapien
cataaggcagaaagacccgtggtgg

SEQ ID NO: 3474075 - DNA, 25 bp, Homo sapien
cttgtcccagtagagacgagtatgc

SEQ ID NO: 3474076 - DNA, 25 bp, Homo sapien
gctgaggacagagaaaaggggcatc

SEQ ID NO: 3474077 - DNA, 25 bp, Homo sapien
ggacagagaaaaggggcatcctgag

SEQ ID NO: 3474078 - DNA, 25 bp, Homo sapien
aaaggggcatcctgagaaaggccat

SEQ ID NO: 3474079 - DNA, 25 bp, Homo sapien
gaaaaggggcatcctgagaaaggcc

SEQ ID NO: 3474080 - DNA, 25 bp, Homo sapien
ttagattaactggacaagatttaga

SEQ ID NO: 3474081 - DNA, 25 bp, Homo sapien
aactggacaagatttagattgacac

SEQ ID NO: 3474082 - DNA, 25 bp, Homo sapien
gattaactggacaagatttagattg

SEQ ID NO: 3474083 - DNA, 25 bp, Homo sapien
aagatttagattaactggacaagat

SEQ ID NO: 3474084 - DNA, 25 bp, Homo sapien
gggcatagctgtaccatcagaccga

SEQ ID NO: 3474085 - DNA, 25 bp, Homo sapien
ctcacgtagggtaggtccatgggat

SEQ ID NO: 3474086 - DNA, 25 bp, Homo sapien
gtcaggtggtatctcacgtagggta

SEQ ID NO: 3474087 - DNA, 25 bp, Homo sapien
tgcttccttcaggcccactagcagg

SEQ ID NO: 3474088 - DNA, 25 bp, Homo sapien
acggccagcgtactctgcgtatgat

SEQ ID NO: 3474089 - DNA, 25 bp, Homo sapien
ctgagcttgcagagagcgtacggcc

SEQ ID NO: 3474090 - DNA, 25 bp, Homo sapien
tgagcttgcagagagcgtacggcca

SEQ ID NO: 3474091 - DNA, 25 bp, Homo sapien
gagcgtacggccagcgtactctgcg

SEQ ID NO: 3474092 - DNA, 25 bp, Homo sapien
gcactgaagtggtcggcgacaggag

SEQ ID NO: 3474093 - DNA, 25 bp, Homo sapien
cactgaagtggtcggcgacaggagg

SEQ ID NO: 3474094 - DNA, 25 bp, Homo sapien
ggcactgaagtggtcggcgacagga

SEQ ID NO: 3474095 - DNA, 25 bp, Homo sapien
tccacggggggctgaagcatatttg

SEQ ID NO: 3474096 - DNA, 25 bp, Homo sapien
ttccacggggggctgaagcatattt

SEQ ID NO: 3474097 - DNA, 25 bp, Homo sapien
ccacggggggctgaagcatatttgc

SEQ ID NO: 3474098 - DNA, 25 bp, Homo sapien
tgttccacggggggctgaagcatat

SEQ ID NO: 3474099 - DNA, 25 bp, Homo sapien
ctccttcaatgctcttcttgagata

SEQ ID NO: 3474100 - DNA, 25 bp, Homo sapien
caccaggaaaaggtgcctgcatcct

SEQ ID NO: 3474101 - DNA, 25 bp, Homo sapien
cttcaccaggaaaaggtgcctgcat

SEQ ID NO: 3474102 - DNA, 25 bp, Homo sapien
ccttcaatgctcttcttgagatacc

SEQ ID NO: 3474103 - DNA, 25 bp, Homo sapien
ccctgggactgtagcttgtggccag

SEQ ID NO: 3474104 - DNA, 25 bp, Homo sapien
aagtactgctctttgcacatgctgc

SEQ ID NO: 3474105 - DNA, 25 bp, Homo sapien
gggactgtagcttgtggccaggcct

SEQ ID NO: 3474106 - DNA, 25 bp, Homo sapien
tctaagtactgctctttgcacatgc

SEQ ID NO: 3474107 - DNA, 25 bp, Homo sapien
ttgctccggcagcaacacatgctca

SEQ ID NO: 3474108 - DNA, 25 bp, Homo sapien
gactctctagctgattgttccctga

SEQ ID NO: 3474109 - DNA, 25 bp, Homo sapien
tgcagatcaatggtaataagccttc

SEQ ID NO: 3474110 - DNA, 25 bp, Homo sapien
cgaaggccaccaggtctgtgactcc

SEQ ID NO: 3474111 - DNA, 25 bp, Homo sapien
tgtaattttaggaccctgttcagca

SEQ ID NO: 3474112 - DNA, 25 bp, Homo sapien
aattttaggaccctgttcagcacct

SEQ ID NO: 3474113 - DNA, 25 bp, Homo sapien
atctgtgtaattttaggaccctgtt

SEQ ID NO: 3474114 - DNA, 25 bp, Homo sapien
tgtgtaattttaggaccctgttcag

SEQ ID NO: 3474115 - DNA, 25 bp, Homo sapien
cgcccatcagcatgcggaggggaaa

SEQ ID NO: 3474116 - DNA, 25 bp, Homo sapien
gccccgcccatcagcatgcggaggg

SEQ ID NO: 3474117 - DNA, 25 bp, Homo sapien
aggccccgcccatcagcatgcggag

SEQ ID NO: 3474118 - DNA, 25 bp, Homo sapien
tcagcatgcggaggggaaaggccat

SEQ ID NO: 3474119 - DNA, 25 bp, Homo sapien
gtcatgaacaacatcggcccgactc

SEQ ID NO: 3474120 - DNA, 25 bp, Homo sapien
cagtccccgcgtctggagtcttggg

SEQ ID NO: 3474121 - DNA, 25 bp, Homo sapien
ggcagtccccgcgtctggagtcttg

SEQ ID NO: 3474122 - DNA, 25 bp, Homo sapien
cagaggagtcatgaacaacatcggc

SEQ ID NO: 3474123 - DNA, 25 bp, Homo sapien
cagctgttgtgtggaaactaatttc

SEQ ID NO: 3474124 - DNA, 25 bp, Homo sapien
tatttgcaaacctacagaatgtaat

SEQ ID NO: 3474125 - DNA, 25 bp, Homo sapien
gactgggttatgtcattatttgcaa

SEQ ID NO: 3474126 - DNA, 25 bp, Homo sapien
tcatacccacagtaaggtgactggg

SEQ ID NO: 3474127 - DNA, 25 bp, Homo sapien
caccgctggggtcgaggatagccgc

SEQ ID NO: 3474128 - DNA, 25 bp, Homo sapien
ccgctggggtcgaggatagccgcat

SEQ ID NO: 3474129 - DNA, 25 bp, Homo sapien
accgctggggtcgaggatagccgca

SEQ ID NO: 3474130 - DNA, 25 bp, Homo sapien
tattactccaagagcacccttgtgt

SEQ ID NO: 3474131 - DNA, 25 bp, Homo sapien
cagaatgctcggtctgagttgacca

SEQ ID NO: 3474132 - DNA, 25 bp, Homo sapien
ggtgcctggtgtgcgtccccagcaa

SEQ ID NO: 3474133 - DNA, 25 bp, Homo sapien
cagcaacatcagcagtcctgcaaga

SEQ ID NO: 3474134 - DNA, 25 bp, Homo sapien
gccccgagctagaaccataaaggca

SEQ ID NO: 3474135 - DNA, 25 bp, Homo sapien
tgggcacaggcgccccgagctagaa

SEQ ID NO: 3474136 - DNA, 25 bp, Homo sapien
ggaagcatatgggactgaacagatg

SEQ ID NO: 3474137 - DNA, 25 bp, Homo sapien
agcatatgggactgaacagatgggc

SEQ ID NO: 3474138 - DNA, 25 bp, Homo sapien
ctagcgaccaggttggatagagaaa

SEQ ID NO: 3474139 - DNA, 25 bp, Homo sapien
gagcactgggccgacttggcagccc

SEQ ID NO: 3474140 - DNA, 25 bp, Homo sapien
gggctggagtagagtcactgagcac

SEQ ID NO: 3474141 - DNA, 25 bp, Homo sapien
cgaccaggttggatagagaaagcct

SEQ ID NO: 3474142 - DNA, 25 bp, Homo sapien
cagggtacagcacaaagccgcctca

SEQ ID NO: 3474143 - DNA, 25 bp, Homo sapien
agcttcttcatcttacaccacagca

SEQ ID NO: 3474144 - DNA, 25 bp, Homo sapien
ttcttcatcttacaccacagcaggt

SEQ ID NO: 3474145 - DNA, 25 bp, Homo sapien
ggtacagcacaaagccgcctcattc

SEQ ID NO: 3474146 - DNA, 25 bp, Homo sapien
tgtccgcatgccaggtgccttgagg

SEQ ID NO: 3474147 - DNA, 25 bp, Homo sapien
ccgtaggatcctttagaagtgcagc

SEQ ID NO: 3474148 - DNA, 25 bp, Homo sapien
catgggaaatgtccgcatgccaggt

SEQ ID NO: 3474149 - DNA, 25 bp, Homo sapien
ccaaaatgtaggtagttgagatgaa

SEQ ID NO: 3474150 - DNA, 25 bp, Homo sapien
tctccgtgggagtgaggaaggagct

SEQ ID NO: 3474151 - DNA, 25 bp, Homo sapien
gtctctccgtgggagtgaggaagga

SEQ ID NO: 3474152 - DNA, 25 bp, Homo sapien
ctccgtgggagtgaggaaggagctt

SEQ ID NO: 3474153 - DNA, 25 bp, Homo sapien
caggtctctccgtgggagtgaggaa

SEQ ID NO: 3474154 - DNA, 25 bp, Homo sapien
aaatgcctcctccaccgatgtccag

SEQ ID NO: 3474155 - DNA, 25 bp, Homo sapien
atgcctcctccaccgatgtccagac

SEQ ID NO: 3474156 - DNA, 25 bp, Homo sapien
agacaaatgcctcctccaccgatgt

SEQ ID NO: 3474157 - DNA, 25 bp, Homo sapien
ctggagacaaatgcctcctccaccg

SEQ ID NO: 3474158 - DNA, 25 bp, Homo sapien
gaggaaggagcttttgaaggagaat

SEQ ID NO: 3474159 - DNA, 25 bp, Homo sapien
gaaggagcttttgaaggagaataac

SEQ ID NO: 3474160 - DNA, 25 bp, Homo sapien
ggaaggagcttttgaaggagaataa

SEQ ID NO: 3474161 - DNA, 25 bp, Homo sapien
aggagcttttgaaggagaataacgt

SEQ ID NO: 3474162 - DNA, 25 bp, Homo sapien
ccagacagtgacatatcatagagag

SEQ ID NO: 3474163 - DNA, 25 bp, Homo sapien
catagagagcgtaaccaggtctcct

SEQ ID NO: 3474164 - DNA, 25 bp, Homo sapien
cagcctccagacagtgacatatcat

SEQ ID NO: 3474165 - DNA, 25 bp, Homo sapien
tctgttgagcagatttatgcttgaa

SEQ ID NO: 3474166 - DNA, 25 bp, Homo sapien
tggaatgggagatgtcattcctgtg

SEQ ID NO: 3474167 - DNA, 25 bp, Homo sapien
gggcactggaatgggagatgtcatt

SEQ ID NO: 3474168 - DNA, 25 bp, Homo sapien
gagggaactgtacgaaagaagaaga

SEQ ID NO: 3474169 - DNA, 25 bp, Homo sapien
aggtgagggaactgtacgaaagaag

SEQ ID NO: 3474170 - DNA, 25 bp, Homo sapien
caatcccttttatggcctgctgcac

SEQ ID NO: 3474171 - DNA, 25 bp, Homo sapien
tggctggtggcatatcggctcccag

SEQ ID NO: 3474172 - DNA, 25 bp, Homo sapien
aggagcaatcccttttatggcctgc

SEQ ID NO: 3474173 - DNA, 25 bp, Homo sapien
gtggcatatcggctcccaggagcaa

SEQ ID NO: 3474174 - DNA, 25 bp, Homo sapien
tgtcagtatcagagctaacaaaggg

SEQ ID NO: 3474175 - DNA, 25 bp, Homo sapien
ttcaaatcgcccagacgaggttggt

SEQ ID NO: 3474176 - DNA, 25 bp, Homo sapien
acctgccacgcgctgaaggctttca

SEQ ID NO: 3474177 - DNA, 25 bp, Homo sapien
cagataagataggtacagccaagcc

SEQ ID NO: 3474178 - DNA, 25 bp, Homo sapien
gctggggacctagagggacagttgt

SEQ ID NO: 3474179 - DNA, 25 bp, Homo sapien
gggacctagagggacagttgtgttg

SEQ ID NO: 3474180 - DNA, 25 bp, Homo sapien
agcctcgaggagtaggggaccacct

SEQ ID NO: 3474181 - DNA, 25 bp, Homo sapien
cctagagggacagttgtgttggcac

SEQ ID NO: 3474182 - DNA, 25 bp, Homo sapien
gatgtggcagctcaccttcgatgag

SEQ ID NO: 3474183 - DNA, 25 bp, Homo sapien
ccaagacggcacagccttaaattgg

SEQ ID NO: 3474184 - DNA, 25 bp, Homo sapien
gcacagccttaaattgggtaggatc

SEQ ID NO: 3474185 - DNA, 25 bp, Homo sapien
tcttttaaaaacgatgtggcagctc

SEQ ID NO: 3474186 - DNA, 25 bp, Homo sapien
gggtgatcacccgagcattgtttct

SEQ ID NO: 3474187 - DNA, 25 bp, Homo sapien
ctggtggcgagagggatggtgcctg

SEQ ID NO: 3474188 - DNA, 25 bp, Homo sapien
tgatcacccgagcattgtttctggg

SEQ ID NO: 3474189 - DNA, 25 bp, Homo sapien
ggtgcctgggtgatcacccgagcat

SEQ ID NO: 3474190 - DNA, 25 bp, Homo sapien
gtgacaggggtcatgtgagaggatg

SEQ ID NO: 3474191 - DNA, 25 bp, Homo sapien
gtcatgtgagaggatgtgtgaggac

SEQ ID NO: 3474192 - DNA, 25 bp, Homo sapien
gtgtgaggacactggagcctgatgg

SEQ ID NO: 3474193 - DNA, 25 bp, Homo sapien
cctgatggtgatgacggcggtataa

SEQ ID NO: 3474194 - DNA, 25 bp, Homo sapien
ccaccttctgtctgagaatggggca

SEQ ID NO: 3474195 - DNA, 25 bp, Homo sapien
gagaatggggcatggtcttttttca

SEQ ID NO: 3474196 - DNA, 25 bp, Homo sapien
cccctgtggaatgcaagtaatgctt

SEQ ID NO: 3474197 - DNA, 25 bp, Homo sapien
ctcaaatgggcttgggctgaacgtt

SEQ ID NO: 3474198 - DNA, 25 bp, Homo sapien
cgcctcgcctctgctggggaaagtg

SEQ ID NO: 3474199 - DNA, 25 bp, Homo sapien
ccgcctcgcctctgctggggaaagt

SEQ ID NO: 3474200 - DNA, 25 bp, Homo sapien
gcctcgcctctgctggggaaagtga

SEQ ID NO: 3474201 - DNA, 25 bp, Homo sapien
ccggcgggacgtgacatggccacaa

SEQ ID NO: 3474202 - DNA, 25 bp, Homo sapien
ggacactgctctgagtttgcttctt

SEQ ID NO: 3474203 - DNA, 25 bp, Homo sapien
gctgggtgtctgttgtgggacactg

SEQ ID NO: 3474204 - DNA, 25 bp, Homo sapien
cagaagccccatcgtgccggcggga

SEQ ID NO: 3474205 - DNA, 25 bp, Homo sapien
cagtgtggcccaagggtttgctgtc

SEQ ID NO: 3474206 - DNA, 25 bp, Homo sapien
tctcgataagtccagtgtggcccaa

SEQ ID NO: 3474207 - DNA, 25 bp, Homo sapien
tccaggacagctggatctcgataag

SEQ ID NO: 3474208 - DNA, 25 bp, Homo sapien
tgctgtcagccttgcgatctccgaa

SEQ ID NO: 3474209 - DNA, 25 bp, Homo sapien
agtctgagaagcaattttgaagttg

SEQ ID NO: 3474210 - DNA, 25 bp, Homo sapien
gagtctgagaagcaattttgaagtt

SEQ ID NO: 3474211 - DNA, 25 bp, Homo sapien
gtctgagaagcaattttgaagttgg

SEQ ID NO: 3474212 - DNA, 25 bp, Homo sapien
tgtggatgttgatggacagggcaga

SEQ ID NO: 3474213 - DNA, 25 bp, Homo sapien
atgtggatgttgatggacagggcag

SEQ ID NO: 3474214 - DNA, 25 bp, Homo sapien
ggtgtcaccttccaggactagctgc

SEQ ID NO: 3474215 - DNA, 25 bp, Homo sapien
tgtcaccttccaggactagctgctg

SEQ ID NO: 3474216 - DNA, 25 bp, Homo sapien
gtctgtgctcattgtgctgggccag

SEQ ID NO: 3474217 - DNA, 25 bp, Homo sapien
gacattccaggagcagaacatcctt

SEQ ID NO: 3474218 - DNA, 25 bp, Homo sapien
ccgtaaggtgatgctggcaagaagc

SEQ ID NO: 3474219 - DNA, 25 bp, Homo sapien
aagccccgctccagtgccgtaaggt

SEQ ID NO: 3474220 - DNA, 25 bp, Homo sapien
caggtacccgctgggctatagcata

SEQ ID NO: 3474221 - DNA, 25 bp, Homo sapien
aagttggctattgttcgcacctcgc

SEQ ID NO: 3474222 - DNA, 25 bp, Homo sapien
tttgcagtcagatggaagctagagc

SEQ ID NO: 3474223 - DNA, 25 bp, Homo sapien
tcctgcaattagagagggacctggc

SEQ ID NO: 3474224 - DNA, 25 bp, Homo sapien
agttagactggcagcaagggccaag

SEQ ID NO: 3474225 - DNA, 25 bp, Homo sapien
atcacagttagactggcagcaaggg

SEQ ID NO: 3474226 - DNA, 25 bp, Homo sapien
ctaattccacttggcttaagcaagt

SEQ ID NO: 3474227 - DNA, 25 bp, Homo sapien
tccacttggcttaagcaagtaataa

SEQ ID NO: 3474228 - DNA, 25 bp, Homo sapien
ttgcggggatactaccttgacaaat

SEQ ID NO: 3474229 - DNA, 25 bp, Homo sapien
tgcggggatactaccttgacaaata

SEQ ID NO: 3474230 - DNA, 25 bp, Homo sapien
agtgagagggcttggcacctggtat

SEQ ID NO: 3474231 - DNA, 25 bp, Homo sapien
cttgcggggatactaccttgacaaa

SEQ ID NO: 3474232 - DNA, 25 bp, Homo sapien
cgaggtgctccagttttggcctttg

SEQ ID NO: 3474233 - DNA, 25 bp, Homo sapien
acaagaaacgatgcccgaggtgctc

SEQ ID NO: 3474234 - DNA, 25 bp, Homo sapien
tttacgccaacaagaaacgatgccc

SEQ ID NO: 3474235 - DNA, 25 bp, Homo sapien
tcaatagccggcctttacgccaaca

SEQ ID NO: 3474236 - DNA, 25 bp, Homo sapien
ttggaggaggacaattccttgtcct

SEQ ID NO: 3474237 - DNA, 25 bp, Homo sapien
attggaggaggacaattccttgtcc

SEQ ID NO: 3474238 - DNA, 25 bp, Homo sapien
ctgaacagagcgctgctgccattgg

SEQ ID NO: 3474239 - DNA, 25 bp, Homo sapien
tgtggctgaacagagcgctgctgcc

SEQ ID NO: 3474240 - DNA, 25 bp, Homo sapien
tggaagaaggatgggcaggaactct

SEQ ID NO: 3474241 - DNA, 25 bp, Homo sapien
ctggaagaaggatgggcaggaactc

SEQ ID NO: 3474242 - DNA, 25 bp, Homo sapien
ggaagaaggatgggcaggaactctt

SEQ ID NO: 3474243 - DNA, 25 bp, Homo sapien
ctctctcctggatgggccatgggag

SEQ ID NO: 3474244 - DNA, 25 bp, Homo sapien
ctggatgggccatgggagaggtggc

SEQ ID NO: 3474245 - DNA, 25 bp, Homo sapien
tctctcctggatgggccatgggaga

SEQ ID NO: 3474246 - DNA, 25 bp, Homo sapien
ctcctggatgggccatgggagaggt

SEQ ID NO: 3474247 - DNA, 25 bp, Homo sapien
tgtcaagtcagggtgcaggatgtcc

SEQ ID NO: 3474248 - DNA, 25 bp, Homo sapien
gggtaagtttcacctaccagctgtc

SEQ ID NO: 3474249 - DNA, 25 bp, Homo sapien
ccaggtgtagcaggagccagcacct

SEQ ID NO: 3474250 - DNA, 25 bp, Homo sapien
gagagtcatgtacctgtctctgtca

SEQ ID NO: 3474251 - DNA, 25 bp, Homo sapien
gatgtcgagaaactcgcagatgact

SEQ ID NO: 3474252 - DNA, 25 bp, Homo sapien
taaggagactcgaatatggagctgc

SEQ ID NO: 3474253 - DNA, 25 bp, Homo sapien
catgtcgttgagctttgcaaacttt

SEQ ID NO: 3474254 - DNA, 25 bp, Homo sapien
gcagatgactgaactcggctctcct

SEQ ID NO: 3474255 - DNA, 25 bp, Homo sapien
tgagtcagtacatccatgggtcagg

SEQ ID NO: 3474256 - DNA, 25 bp, Homo sapien
gaaggctccaccctttgggaagtga

SEQ ID NO: 3474257 - DNA, 25 bp, Homo sapien
aacaagcgctgatgggtttcatacc

SEQ ID NO: 3474258 - DNA, 25 bp, Homo sapien
catacctttctgtgtaggaggaaga

SEQ ID NO: 3474259 - DNA, 25 bp, Homo sapien
tgtctctcctataaatcctcccaga

SEQ ID NO: 3474260 - DNA, 25 bp, Homo sapien
cttcctgtctctcctataaatcctc

SEQ ID NO: 3474261 - DNA, 25 bp, Homo sapien
tctctcctataaatcctcccagagt

SEQ ID NO: 3474262 - DNA, 25 bp, Homo sapien
acatctggggtacccctgtgtctgc

SEQ ID NO: 3474263 - DNA, 25 bp, Homo sapien
gcaggactccccatagacatccttg

SEQ ID NO: 3474264 - DNA, 25 bp, Homo sapien
ccgaccacggggaatggcttggcca

SEQ ID NO: 3474265 - DNA, 25 bp, Homo sapien
gctgcctgggttcctcgcaggactc

SEQ ID NO: 3474266 - DNA, 25 bp, Homo sapien
ttgttacttggaccacgtggcccat

SEQ ID NO: 3474267 - DNA, 25 bp, Homo sapien
tcctaccatgctcagcatgtcttga

SEQ ID NO: 3474268 - DNA, 25 bp, Homo sapien
cccggaacactggtgacccaacata

SEQ ID NO: 3474269 - DNA, 25 bp, Homo sapien
cactggtgacccaacatacacatct

SEQ ID NO: 3474270 - DNA, 25 bp, Homo sapien
agttcctaccatgctcagcatgtct

SEQ ID NO: 3474271 - DNA, 25 bp, Homo sapien
aaactcgaggcagctgtaccccgtg

SEQ ID NO: 3474272 - DNA, 25 bp, Homo sapien
tgtctctccgaagtagcctcctgtt

SEQ ID NO: 3474273 - DNA, 25 bp, Homo sapien
gtgcgaagcttcttgctcccgtctc

SEQ ID NO: 3474274 - DNA, 25 bp, Homo sapien
cattgaagagatcaagcccccaggg

SEQ ID NO: 3474275 - DNA, 25 bp, Homo sapien
atcccactcaggggtgagatgccct

SEQ ID NO: 3474276 - DNA, 25 bp, Homo sapien
tcccactcaggggtgagatgccctc

SEQ ID NO: 3474277 - DNA, 25 bp, Homo sapien
cccggggctgcagtggactcccgta

SEQ ID NO: 3474278 - DNA, 25 bp, Homo sapien
cagtggactcccgtagtagacttct

SEQ ID NO: 3474279 - DNA, 25 bp, Homo sapien
ggctgcagtggactcccgtagtaga

SEQ ID NO: 3474280 - DNA, 25 bp, Homo sapien
gactcccgtagtagacttctctgaa

SEQ ID NO: 3474281 - DNA, 25 bp, Homo sapien
aagggtaggcggtgaaccctgactg

SEQ ID NO: 3474282 - DNA, 25 bp, Homo sapien
cagcttctacccctggcactggtcc

SEQ ID NO: 3474283 - DNA, 25 bp, Homo sapien
gagaaagtaaagcaaagtctgtgct

SEQ ID NO: 3474284 - DNA, 25 bp, Homo sapien
gatagtggtcctgtggcttgcagca

SEQ ID NO: 3474285 - DNA, 25 bp, Homo sapien
taggatgagtacttagaaccaggca

SEQ ID NO: 3474286 - DNA, 25 bp, Homo sapien
gggtagtaggatgagtacttagaac

SEQ ID NO: 3474287 - DNA, 25 bp, Homo sapien
gatgagtacttagaaccaggcacca

SEQ ID NO: 3474288 - DNA, 25 bp, Homo sapien
tacttagaaccaggcaccatcagca

SEQ ID NO: 3474289 - DNA, 25 bp, Homo sapien
ccggcactgtgtgccccacgtacat

SEQ ID NO: 3474290 - DNA, 25 bp, Homo sapien
accggcactgtgtgccccacgtaca

SEQ ID NO: 3474291 - DNA, 25 bp, Homo sapien
ctggcaccggcactgtgtgccccac

SEQ ID NO: 3474292 - DNA, 25 bp, Homo sapien
gcaccggcactgtgtgccccacgta

SEQ ID NO: 3474293 - DNA, 25 bp, Homo sapien
gaagagttctctattagtcaccacc

SEQ ID NO: 3474294 - DNA, 25 bp, Homo sapien
gctatgaggtaccaaaataaatggc

SEQ ID NO: 3474295 - DNA, 25 bp, Homo sapien
cgagactcgcatacaattaaaacag

SEQ ID NO: 3474296 - DNA, 25 bp, Homo sapien
tgggcctctggtggatagtaccatc

SEQ ID NO: 3474297 - DNA, 25 bp, Homo sapien
tttgcacggctgtgtctccctctgc

SEQ ID NO: 3474298 - DNA, 25 bp, Homo sapien
aagggcttgcagagcaccaggaaaa

SEQ ID NO: 3474299 - DNA, 25 bp, Homo sapien
ctgtgtgcaggtgagggcgttggct

SEQ ID NO: 3474300 - DNA, 25 bp, Homo sapien
gcgttggctgcgacacacggcattt

SEQ ID NO: 3474301 - DNA, 25 bp, Homo sapien
tgggagatgttcagactgccaaagc

SEQ ID NO: 3474302 - DNA, 25 bp, Homo sapien
ctgggagatgttcagactgccaaag

SEQ ID NO: 3474303 - DNA, 25 bp, Homo sapien
ttctccaagaatctgcccatatggg

SEQ ID NO: 3474304 - DNA, 25 bp, Homo sapien
cttctccaagaatctgcccatatgg

SEQ ID NO: 3474305 - DNA, 25 bp, Homo sapien
tcaggaattggagacgcgtccctca

SEQ ID NO: 3474306 - DNA, 25 bp, Homo sapien
attggagacgcgtccctcacaccaa

SEQ ID NO: 3474307 - DNA, 25 bp, Homo sapien
aactgccagacatgtccccggtgcc

SEQ ID NO: 3474308 - DNA, 25 bp, Homo sapien
ccggtgccaactcctaagcctggtt

SEQ ID NO: 3474309 - DNA, 25 bp, Homo sapien
gggcagcgtaaatcaacaccctgag

SEQ ID NO: 3474310 - DNA, 25 bp, Homo sapien
taaaggcttgattgtttgggcagcg

SEQ ID NO: 3474311 - DNA, 25 bp, Homo sapien
ctgggtgactgagataaaggcttga

SEQ ID NO: 3474312 - DNA, 25 bp, Homo sapien
ctgctgggtgactgagataaaggct

SEQ ID NO: 3474313 - DNA, 25 bp, Homo sapien
tgtgcctacctgttactgcattttc

SEQ ID NO: 3474314 - DNA, 25 bp, Homo sapien
actgcttgtgcctacctgttactgc

SEQ ID NO: 3474315 - DNA, 25 bp, Homo sapien
tactgcttgtgcctacctgttactg

SEQ ID NO: 3474316 - DNA, 25 bp, Homo sapien
gcttgtgcctacctgttactgcatt

SEQ ID NO: 3474317 - DNA, 25 bp, Homo sapien
cagggcgtcattactgttcaccagc

SEQ ID NO: 3474318 - DNA, 25 bp, Homo sapien
agggcgtcattactgttcaccagcc

SEQ ID NO: 3474319 - DNA, 25 bp, Homo sapien
tttttcctgtagagccatgatcctt

SEQ ID NO: 3474320 - DNA, 25 bp, Homo sapien
ggagccctggacataagccttctgg

SEQ ID NO: 3474321 - DNA, 25 bp, Homo sapien
ccctcaagtttttcctgtagagcca

SEQ ID NO: 3474322 - DNA, 25 bp, Homo sapien
agctggagccctggacataagcctt

SEQ ID NO: 3474323 - DNA, 25 bp, Homo sapien
tatggacgaggacccaatcagacca

SEQ ID NO: 3474324 - DNA, 25 bp, Homo sapien
ttctttcccgctccagtccataatt

SEQ ID NO: 3474325 - DNA, 25 bp, Homo sapien
catcccttgtctcatgtggtgcctg

SEQ ID NO: 3474326 - DNA, 25 bp, Homo sapien
tcctggcgggtcttcctcattcttc

SEQ ID NO: 3474327 - DNA, 25 bp, Homo sapien
tagtggatgatggttgacatattcc

SEQ ID NO: 3474328 - DNA, 25 bp, Homo sapien
gttgacatattccaggctccttgtt

SEQ ID NO: 3474329 - DNA, 25 bp, Homo sapien
ccccatgcctcttgtggagtagtgg

SEQ ID NO: 3474330 - DNA, 25 bp, Homo sapien
tgcctcttgtggagtagtggatgat

SEQ ID NO: 3474331 - DNA, 25 bp, Homo sapien
tgactcctggaggacagtagggccc

SEQ ID NO: 3474332 - DNA, 25 bp, Homo sapien
tggaggacagtagggcccttgagcc

SEQ ID NO: 3474333 - DNA, 25 bp, Homo sapien
actcctggaggacagtagggccctt

SEQ ID NO: 3474334 - DNA, 25 bp, Homo sapien
tcctggaggacagtagggcccttga

SEQ ID NO: 3474335 - DNA, 25 bp, Homo sapien
aagccttttacagctgttcttcctt

SEQ ID NO: 3474336 - DNA, 25 bp, Homo sapien
ctgaaaagccttttacagctgttct

SEQ ID NO: 3474337 - DNA, 25 bp, Homo sapien
aaagccttttacagctgttcttcct

SEQ ID NO: 3474338 - DNA, 25 bp, Homo sapien
gaaaagccttttacagctgttcttc

SEQ ID NO: 3474339 - DNA, 25 bp, Homo sapien
gatctagcgactgcctgcctgaagt

SEQ ID NO: 3474340 - DNA, 25 bp, Homo sapien
gcttgctgatctagcgactgcctgc

SEQ ID NO: 3474341 - DNA, 25 bp, Homo sapien
tgtatgcttgctgatctagcgactg

SEQ ID NO: 3474342 - DNA, 25 bp, Homo sapien
tgctgatctagcgactgcctgcctg

SEQ ID NO: 3474343 - DNA, 25 bp, Homo sapien
tgtcccggtcttggacagcattatg

SEQ ID NO: 3474344 - DNA, 25 bp, Homo sapien
ttgggtgcactggtcgctgagctct

SEQ ID NO: 3474345 - DNA, 25 bp, Homo sapien
gcattatgccacgatcccctttggg

SEQ ID NO: 3474346 - DNA, 25 bp, Homo sapien
ggagcaggcggcacctggcattccc

SEQ ID NO: 3474347 - DNA, 25 bp, Homo sapien
tagcaatcataaacaccaccttaaa

SEQ ID NO: 3474348 - DNA, 25 bp, Homo sapien
ccaccttaaacatatacatcagcgg

SEQ ID NO: 3474349 - DNA, 25 bp, Homo sapien
cattttagcaatcataaacaccacc

SEQ ID NO: 3474350 - DNA, 25 bp, Homo sapien
ggtacggtgtgttccatattcagga

SEQ ID NO: 3474351 - DNA, 25 bp, Homo sapien
tgacattgacgttgtatgagtaatg

SEQ ID NO: 3474352 - DNA, 25 bp, Homo sapien
gaagcatggttgacattgacgttgt

SEQ ID NO: 3474353 - DNA, 25 bp, Homo sapien
gaggaagcatggttgacattgacgt

SEQ ID NO: 3474354 - DNA, 25 bp, Homo sapien
catggttgacattgacgttgtatga

SEQ ID NO: 3474355 - DNA, 25 bp, Homo sapien
cccaaggtgtcagacgctgctcagc

SEQ ID NO: 3474356 - DNA, 25 bp, Homo sapien
gtggccccaaggtgtcagacgctgc

SEQ ID NO: 3474357 - DNA, 25 bp, Homo sapien
gccccaaggtgtcagacgctgctca

SEQ ID NO: 3474358 - DNA, 25 bp, Homo sapien
tcagcatcctgtatgttggggaact

SEQ ID NO: 3474359 - DNA, 25 bp, Homo sapien
tcacccaggccatggaaataacaag

SEQ ID NO: 3474360 - DNA, 25 bp, Homo sapien
cttgcgttcagtattgtgctggtgg

SEQ ID NO: 3474361 - DNA, 25 bp, Homo sapien
ctggtggtgcgtgattgaggaggga

SEQ ID NO: 3474362 - DNA, 25 bp, Homo sapien
gagctcattgactgactggtcactg

SEQ ID NO: 3474363 - DNA, 25 bp, Homo sapien
tggtttccagcatgtttccaaaccc

SEQ ID NO: 3474364 - DNA, 25 bp, Homo sapien
gttctgggcctcatcctttcgtcct

SEQ ID NO: 3474365 - DNA, 25 bp, Homo sapien
ccccgtctggcctggttgggaccag

SEQ ID NO: 3474366 - DNA, 25 bp, Homo sapien
acagctccgccacagcatctggttt

SEQ ID NO: 3474367 - DNA, 25 bp, Homo sapien
tcaaacccattgcaatgaggactca

SEQ ID NO: 3474368 - DNA, 25 bp, Homo sapien
taagaagtggaacacagtttcctgc

SEQ ID NO: 3474369 - DNA, 25 bp, Homo sapien
ataatgcagagtcacgtccgtgcca

SEQ ID NO: 3474370 - DNA, 25 bp, Homo sapien
gaggactcattacgggcccggataa

SEQ ID NO: 3474371 - DNA, 25 bp, Homo sapien
agtccacagccaggtgctcctttgt

SEQ ID NO: 3474372 - DNA, 25 bp, Homo sapien
tgtcagccccaacactcagagatct

SEQ ID NO: 3474373 - DNA, 25 bp, Homo sapien
cctttgtttccatggtgtcagcccc

SEQ ID NO: 3474374 - DNA, 25 bp, Homo sapien
ccacagccaggtgctcctttgtttc

SEQ ID NO: 3474375 - DNA, 25 bp, Homo sapien
tctggggctcctggttcttggttcc

SEQ ID NO: 3474376 - DNA, 25 bp, Homo sapien
tggttcttggttccagggtcttcca

SEQ ID NO: 3474377 - DNA, 25 bp, Homo sapien
agggtcttccactggactgaactct

SEQ ID NO: 3474378 - DNA, 25 bp, Homo sapien
tccagggtcttccactggactgaac

SEQ ID NO: 3474379 - DNA, 25 bp, Homo sapien
caggcacaatgtagagtctttctgt

SEQ ID NO: 3474380 - DNA, 25 bp, Homo sapien
tcccatgaatcaattcctgaattcc

SEQ ID NO: 3474381 - DNA, 25 bp, Homo sapien
actgtgatggattttggctcccaaa

SEQ ID NO: 3474382 - DNA, 25 bp, Homo sapien
tcctgaattcctccttgtcggggat

SEQ ID NO: 3474383 - DNA, 25 bp, Homo sapien
gtggtgcagcgcgtggctggtgctt

SEQ ID NO: 3474384 - DNA, 25 bp, Homo sapien
ggatactgtggtgcagcgcgtggct

SEQ ID NO: 3474385 - DNA, 25 bp, Homo sapien
tactgtggtgcagcgcgtggctggt

SEQ ID NO: 3474386 - DNA, 25 bp, Homo sapien
ctgggatactgtggtgcagcgcgtg

SEQ ID NO: 3474387 - DNA, 25 bp, Homo sapien
ctagccaggccaaaagctgtgccct

SEQ ID NO: 3474388 - DNA, 25 bp, Homo sapien
aggccaaaagctgtgccctctgtga

SEQ ID NO: 3474389 - DNA, 25 bp, Homo sapien
aaagctgtgccctctgtgagtagca

SEQ ID NO: 3474390 - DNA, 25 bp, Homo sapien
aagctgtgccctctgtgagtagcat

SEQ ID NO: 3474391 - DNA, 25 bp, Homo sapien
ctgtgtaaaagaacaagcttccccg

SEQ ID NO: 3474392 - DNA, 25 bp, Homo sapien
agcttccccggcactaaaattcctg

SEQ ID NO: 3474393 - DNA, 25 bp, Homo sapien
gttgttccatccagcgtgccagcat

SEQ ID NO: 3474394 - DNA, 25 bp, Homo sapien
cggcgaggcgctctccgttgttcca

SEQ ID NO: 3474395 - DNA, 25 bp, Homo sapien
tttaggcagccggatgaaccccggc

SEQ ID NO: 3474396 - DNA, 25 bp, Homo sapien
aacaaatccaggtttaggcagccgg

SEQ ID NO: 3474397 - DNA, 25 bp, Homo sapien
tcttcctgcggcttggtggcactgg

SEQ ID NO: 3474398 - DNA, 25 bp, Homo sapien
tgattcctccgctatgtccgtgcgt

SEQ ID NO: 3474399 - DNA, 25 bp, Homo sapien
caggccgtgactcttgacctaggag

SEQ ID NO: 3474400 - DNA, 25 bp, Homo sapien
tccttgcttattcaggcctcggact

SEQ ID NO: 3474401 - DNA, 25 bp, Homo sapien
agcccccgaccgctccgccagccac

SEQ ID NO: 3474402 - DNA, 25 bp, Homo sapien
tcagcccccgaccgctccgccagcc

SEQ ID NO: 3474403 - DNA, 25 bp, Homo sapien
cagcccccgaccgctccgccagcca

SEQ ID NO: 3474404 - DNA, 25 bp, Homo sapien
ccccggagaatagggcctctttatg

SEQ ID NO: 3474405 - DNA, 25 bp, Homo sapien
agtgcgggcggctgggagcgcgctg

SEQ ID NO: 3474406 - DNA, 25 bp, Homo sapien
cagccgagcgctgggctgaggagca

SEQ ID NO: 3474407 - DNA, 25 bp, Homo sapien
ccagccccgcggatgacaggagccg

SEQ ID NO: 3474408 - DNA, 25 bp, Homo sapien
gaacttaggccgcacatttcgagga

SEQ ID NO: 3474409 - DNA, 25 bp, Homo sapien
tattgaccttttacagcagacctgg

SEQ ID NO: 3474410 - DNA, 25 bp, Homo sapien
tattttggcaaaacctgggagtgag

SEQ ID NO: 3474411 - DNA, 25 bp, Homo sapien
tgtcagggcatactcaaagcagctt

SEQ ID NO: 3474412 - DNA, 25 bp, Homo sapien
tacaaatcgaaagggtcggagccca

SEQ ID NO: 3474413 - DNA, 25 bp, Homo sapien
tgagtgtacccctagagccaggagg

SEQ ID NO: 3474414 - DNA, 25 bp, Homo sapien
aatcgaaagggtcggagcccagtgt

SEQ ID NO: 3474415 - DNA, 25 bp, Homo sapien
cctgcaggtacaaatcgaaagggtc

SEQ ID NO: 3474416 - DNA, 25 bp, Homo sapien
gacattctgagtcacccattgtgta

SEQ ID NO: 3474417 - DNA, 25 bp, Homo sapien
gggctaggaccttagatgacattct

SEQ ID NO: 3474418 - DNA, 25 bp, Homo sapien
tgtgtaagtaagtgccatttgaccc

SEQ ID NO: 3474419 - DNA, 25 bp, Homo sapien
ggtaaagatgctgggtttcaatgtc

SEQ ID NO: 3474420 - DNA, 25 bp, Homo sapien
gaagctccagactcaatgtgacccc

SEQ ID NO: 3474421 - DNA, 25 bp, Homo sapien
cagcgcttgggctgaaggaagctcc

SEQ ID NO: 3474422 - DNA, 25 bp, Homo sapien
ctttgtccccgtcactgccagcgct

SEQ ID NO: 3474423 - DNA, 25 bp, Homo sapien
tcggcggtgccacccactgcactgg

SEQ ID NO: 3474424 - DNA, 25 bp, Homo sapien
gggcctgatcttcgctggactggcc

SEQ ID NO: 3474425 - DNA, 25 bp, Homo sapien
gagactatgagaccgttcgcaatgg

SEQ ID NO: 3474426 - DNA, 25 bp, Homo sapien
tgccctctctttccggagactatga

SEQ ID NO: 3474427 - DNA, 25 bp, Homo sapien
ctgatcttcgctggactggccttca

SEQ ID NO: 3474428 - DNA, 25 bp, Homo sapien
ggaaatgactgggttgtcgatggac

SEQ ID NO: 3474429 - DNA, 25 bp, Homo sapien
tcacctggggaaatgactgggttgt

SEQ ID NO: 3474430 - DNA, 25 bp, Homo sapien
cacctggggaaatgactgggttgtc

SEQ ID NO: 3474431 - DNA, 25 bp, Homo sapien
aatgactgggttgtcgatggacggt

SEQ ID NO: 3474432 - DNA, 25 bp, Homo sapien
ggaatcatgggcttggcggggaggc

SEQ ID NO: 3474433 - DNA, 25 bp, Homo sapien
tgcttggaatcatgggcttggcggg

SEQ ID NO: 3474434 - DNA, 25 bp, Homo sapien
cttgcttggaatcatgggcttggcg

SEQ ID NO: 3474435 - DNA, 25 bp, Homo sapien
aatcatgggcttggcggggaggctg

SEQ ID NO: 3474436 - DNA, 25 bp, Homo sapien
tgctgtaggaataggtcagtctgcc

SEQ ID NO: 3474437 - DNA, 25 bp, Homo sapien
atgtagattagaacttgccaaattg

SEQ ID NO: 3474438 - DNA, 25 bp, Homo sapien
ccctgctgtaggaataggtcagtct

SEQ ID NO: 3474439 - DNA, 25 bp, Homo sapien
tgtaggaataggtcagtctgccttc

SEQ ID NO: 3474440 - DNA, 25 bp, Homo sapien
catggtgaaatcttagctgggcatg

SEQ ID NO: 3474441 - DNA, 25 bp, Homo sapien
gagtgggaactcaacccagatcccg

SEQ ID NO: 3474442 - DNA, 25 bp, Homo sapien
tgaaggtcataacgagagtgggaac

SEQ ID NO: 3474443 - DNA, 25 bp, Homo sapien
cggaaaccaaccaaaccgtgcgctg

SEQ ID NO: 3474444 - DNA, 25 bp, Homo sapien
tgatctatcctcaacaacaacagaa

SEQ ID NO: 3474445 - DNA, 25 bp, Homo sapien
aatgtcgatgcttaagaaaaccggc

SEQ ID NO: 3474446 - DNA, 25 bp, Homo sapien
agcaataactccatgggctctggga

SEQ ID NO: 3474447 - DNA, 25 bp, Homo sapien
ccagcgttgacgtcaggcaggctat

SEQ ID NO: 3474448 - DNA, 25 bp, Homo sapien
gcagtggtcttcagtcgtcttggga

SEQ ID NO: 3474449 - DNA, 25 bp, Homo sapien
tttatcctaaggctcaggactgtga

SEQ ID NO: 3474450 - DNA, 25 bp, Homo sapien
tgtgagcaaccactggggaggtcct

SEQ ID NO: 3474451 - DNA, 25 bp, Homo sapien
atcctaaggctcaggactgtgagca

SEQ ID NO: 3474452 - DNA, 25 bp, Homo sapien
cttttatcctaaggctcaggactgt

SEQ ID NO: 3474453 - DNA, 25 bp, Homo sapien
tcacctaagtgcgaatggacgaaga

SEQ ID NO: 3474454 - DNA, 25 bp, Homo sapien
gctctcgaaggcaagtgatcaccta

SEQ ID NO: 3474455 - DNA, 25 bp, Homo sapien
gattccgatctaggaggcaggtgcc

SEQ ID NO: 3474456 - DNA, 25 bp, Homo sapien
ttgcatcctcatagcggcccgtgat

SEQ ID NO: 3474457 - DNA, 25 bp, Homo sapien
cacaggagagtagtaactggcaaat

SEQ ID NO: 3474458 - DNA, 25 bp, Homo sapien
caagatgagagggaatagccccgtg

SEQ ID NO: 3474459 - DNA, 25 bp, Homo sapien
gactcactcgagtctgccagaaaaa

SEQ ID NO: 3474460 - DNA, 25 bp, Homo sapien
tgacagcccggactgtgaactcagg

SEQ ID NO: 3474461 - DNA, 25 bp, Homo sapien
taatggctttccgtggtgactcaga

SEQ ID NO: 3474462 - DNA, 25 bp, Homo sapien
gggcgtcatcccaagtgcaacatgg

SEQ ID NO: 3474463 - DNA, 25 bp, Homo sapien
ccaggactagaaacacccgaagtgt

SEQ ID NO: 3474464 - DNA, 25 bp, Homo sapien
cactggccgagtgcatagggcgtca

SEQ ID NO: 3474465 - DNA, 25 bp, Homo sapien
tacaggttagttccaccaaacactc

SEQ ID NO: 3474466 - DNA, 25 bp, Homo sapien
tataagcatcgttaaacctctggtg

SEQ ID NO: 3474467 - DNA, 25 bp, Homo sapien
gaaacccagagattgtttaagggca

SEQ ID NO: 3474468 - DNA, 25 bp, Homo sapien
cccaagcccggatgattttacaggt

SEQ ID NO: 3474469 - DNA, 25 bp, Homo sapien
gaaacagagtttctaacgaacagat

SEQ ID NO: 3474470 - DNA, 25 bp, Homo sapien
gatcgccgtagggtctcttgccata

SEQ ID NO: 3474471 - DNA, 25 bp, Homo sapien
aaagcattgaacactagaaggctgg

SEQ ID NO: 3474472 - DNA, 25 bp, Homo sapien
gatgactaacgttcaaaaacaatgg

SEQ ID NO: 3474473 - DNA, 25 bp, Homo sapien
agagcttgtcatccgtgggctgagc

SEQ ID NO: 3474474 - DNA, 25 bp, Homo sapien
cagagcttgtcatccgtgggctgag

SEQ ID NO: 3474475 - DNA, 25 bp, Homo sapien
tcagagcttgtcatccgtgggctga

SEQ ID NO: 3474476 - DNA, 25 bp, Homo sapien
tgaggaggacgactatgacatcgcc

SEQ ID NO: 3474477 - DNA, 25 bp, Homo sapien
ggtgtacgcgggcaccagcaacctg

SEQ ID NO: 3474478 - DNA, 25 bp, Homo sapien
aacagcaattacaccgatgaggagg

SEQ ID NO: 3474479 - DNA, 25 bp, Homo sapien
cattgccgagatcatcatcaacagc

SEQ ID NO: 3474480 - DNA, 25 bp, Homo sapien
cacgctcattgacgcccagtgggtg

SEQ ID NO: 3474481 - DNA, 25 bp, Homo sapien
cacatctgtggaggcacgctcattg

SEQ ID NO: 3474482 - DNA, 25 bp, Homo sapien
tggccttggcaagtgagtctgcact

SEQ ID NO: 3474483 - DNA, 25 bp, Homo sapien
cgctggcctcggatagcaagtggcc

SEQ ID NO: 3474484 - DNA, 25 bp, Homo sapien
cggacaaccgaggttgcccacaggg

SEQ ID NO: 3474485 - DNA, 25 bp, Homo sapien
accgaggttgcccacagggattttg

SEQ ID NO: 3474486 - DNA, 25 bp, Homo sapien
gcccacagggattttgccaacagct

SEQ ID NO: 3474487 - DNA, 25 bp, Homo sapien
gaggttgcccacagggattttgcca

SEQ ID NO: 3474488 - DNA, 25 bp, Homo sapien
gacgtgcttagacacggagaaggca

SEQ ID NO: 3474489 - DNA, 25 bp, Homo sapien
tatcaaattatcacacactgggtgg

SEQ ID NO: 3474490 - DNA, 25 bp, Homo sapien
gtatttgtttcccaaggctatatca

SEQ ID NO: 3474491 - DNA, 25 bp, Homo sapien
cactgggtggcttaagatgacggaa

SEQ ID NO: 3474492 - DNA, 25 bp, Homo sapien
gcgtgaacatctggcccctagggtt

SEQ ID NO: 3474493 - DNA, 25 bp, Homo sapien
acatctggcccctagggttaccctg

SEQ ID NO: 3474494 - DNA, 25 bp, Homo sapien
catctggcccctagggttaccctgg

SEQ ID NO: 3474495 - DNA, 25 bp, Homo sapien
ctgctgcgtgaacatctggccccta

SEQ ID NO: 3474496 - DNA, 25 bp, Homo sapien
ctccagctacccttgggctgggact

SEQ ID NO: 3474497 - DNA, 25 bp, Homo sapien
cgcctccagctacccttgggctggg

SEQ ID NO: 3474498 - DNA, 25 bp, Homo sapien
cctgcgcgcctccagctacccttgg

SEQ ID NO: 3474499 - DNA, 25 bp, Homo sapien
gcgcgcctccagctacccttgggct

SEQ ID NO: 3474500 - DNA, 25 bp, Homo sapien
catgagcgtctgagccaagacggag

SEQ ID NO: 3474501 - DNA, 25 bp, Homo sapien
gccgccagcagcactacgaggcacg

SEQ ID NO: 3474502 - DNA, 25 bp, Homo sapien
gcagcactacgaggcacggcagcat

SEQ ID NO: 3474503 - DNA, 25 bp, Homo sapien
gccagcagcactacgaggcacggca

SEQ ID NO: 3474504 - DNA, 25 bp, Homo sapien
tggatgatgaggtttgcgggttggg

SEQ ID NO: 3474505 - DNA, 25 bp, Homo sapien
ggccttgcgcatacttctctatcct

SEQ ID NO: 3474506 - DNA, 25 bp, Homo sapien
ttcccaatccgtcagttcctgtcaa

SEQ ID NO: 3474507 - DNA, 25 bp, Homo sapien
gggtttggccttgcgcatacttctc

SEQ ID NO: 3474508 - DNA, 25 bp, Homo sapien
aactgtctgggttaggagcctgaac

SEQ ID NO: 3474509 - DNA, 25 bp, Homo sapien
tcagctctcgatcacgtgaatggct

SEQ ID NO: 3474510 - DNA, 25 bp, Homo sapien
cacgtcagtgccttgatttcgaaac

SEQ ID NO: 3474511 - DNA, 25 bp, Homo sapien
gaaaccttgccggagaactgtctgg

SEQ ID NO: 3474512 - DNA, 25 bp, Homo sapien
gagcgccacttcatagcaggtactt

SEQ ID NO: 3474513 - DNA, 25 bp, Homo sapien
cagactgatttgggatgggtgtcca

SEQ ID NO: 3474514 - DNA, 25 bp, Homo sapien
acagacggagggctgggcagctctg

SEQ ID NO: 3474515 - DNA, 25 bp, Homo sapien
tcaaaccacacagacggagggctgg

SEQ ID NO: 3474516 - DNA, 25 bp, Homo sapien
gagatggagttccaggactctattc

SEQ ID NO: 3474517 - DNA, 25 bp, Homo sapien
tggctacagttggagatggagttcc

SEQ ID NO: 3474518 - DNA, 25 bp, Homo sapien
ggagttccaggactctattccatac

SEQ ID NO: 3474519 - DNA, 25 bp, Homo sapien
ggctacagttggagatggagttcca

SEQ ID NO: 3474520 - DNA, 25 bp, Homo sapien
tgtggtacaggtccaaggtcactgc

SEQ ID NO: 3474521 - DNA, 25 bp, Homo sapien
tctggcccggtagccattgctgtgg

SEQ ID NO: 3474522 - DNA, 25 bp, Homo sapien
catccacagagaagcgggtgttggt

SEQ ID NO: 3474523 - DNA, 25 bp, Homo sapien
tcactgcggtaaggtcataggacag

SEQ ID NO: 3474524 - DNA, 25 bp, Homo sapien
catgttctaagtcaagggaggaaaa

SEQ ID NO: 3474525 - DNA, 25 bp, Homo sapien
ccatgttctaagtcaagggaggaaa

SEQ ID NO: 3474526 - DNA, 25 bp, Homo sapien
ttctaagtcaagggaggaaaagcac

SEQ ID NO: 3474527 - DNA, 25 bp, Homo sapien
tgttctaagtcaagggaggaaaagc

SEQ ID NO: 3474528 - DNA, 25 bp, Homo sapien
tgtggatctctaggttcacactgcc

SEQ ID NO: 3474529 - DNA, 25 bp, Homo sapien
gaagtttcccggcaccttgcgaatg

SEQ ID NO: 3474530 - DNA, 25 bp, Homo sapien
tcatactctcggaagtgactgaaga

SEQ ID NO: 3474531 - DNA, 25 bp, Homo sapien
ggtagctgaatcttcccgaggatga

SEQ ID NO: 3474532 - DNA, 25 bp, Homo sapien
gcaaagttcccaatggcacacaagg

SEQ ID NO: 3474533 - DNA, 25 bp, Homo sapien
ttgcttcatctacaagggctctggg

SEQ ID NO: 3474534 - DNA, 25 bp, Homo sapien
gggtgcccaattgccctagtaggca

SEQ ID NO: 3474535 - DNA, 25 bp, Homo sapien
gggcgccctctggtaggttacacag

SEQ ID NO: 3474536 - DNA, 25 bp, Homo sapien
agaccacatccccttgttacttcgg

SEQ ID NO: 3474537 - DNA, 25 bp, Homo sapien
cagatggtttcacctggacacagaa

SEQ ID NO: 3474538 - DNA, 25 bp, Homo sapien
cccttgttacttcgggaagcgacag

SEQ ID NO: 3474539 - DNA, 25 bp, Homo sapien
gagatgcactcctctttagaccaca

SEQ ID NO: 3474540 - DNA, 25 bp, Homo sapien
gcagctctggcgaggagcagagcag

SEQ ID NO: 3474541 - DNA, 25 bp, Homo sapien
cagagtaggggaagtaaggagaagc

SEQ ID NO: 3474542 - DNA, 25 bp, Homo sapien
ttgctgactttagcagctctggcga

SEQ ID NO: 3474543 - DNA, 25 bp, Homo sapien
gagcagagcagagtaggggaagtaa

SEQ ID NO: 3474544 - DNA, 25 bp, Homo sapien
tgtggacaaattaattactctgtca

SEQ ID NO: 3474545 - DNA, 25 bp, Homo sapien
cagagccactgacctcataaggtag

SEQ ID NO: 3474546 - DNA, 25 bp, Homo sapien
catgtaccaataccatcagattctt

SEQ ID NO: 3474547 - DNA, 25 bp, Homo sapien
tacacagcactgaccatgtaccaat

SEQ ID NO: 3474548 - DNA, 25 bp, Homo sapien
ggtcccatgaaatccattgcccact

SEQ ID NO: 3474549 - DNA, 25 bp, Homo sapien
ggactctggtcccatgaaatccatt

SEQ ID NO: 3474550 - DNA, 25 bp, Homo sapien
ccattgcccactgtcaggaaccatt

SEQ ID NO: 3474551 - DNA, 25 bp, Homo sapien
catgaaatccattgcccactgtcag

SEQ ID NO: 3474552 - DNA, 25 bp, Homo sapien
aaagaagatgatgacgttggtcacg

SEQ ID NO: 3474553 - DNA, 25 bp, Homo sapien
ttcggcgccgcacatacagctggag

SEQ ID NO: 3474554 - DNA, 25 bp, Homo sapien
gggccaggcagtaggcgagggctcc

SEQ ID NO: 3474555 - DNA, 25 bp, Homo sapien
ctgggtagcttctttcggcgccgca

SEQ ID NO: 3474556 - DNA, 25 bp, Homo sapien
ccctcaaggacaagtcagttctgtg

SEQ ID NO: 3474557 - DNA, 25 bp, Homo sapien
catcatgcaatagtgccagctatgg

SEQ ID NO: 3474558 - DNA, 25 bp, Homo sapien
tgctgcccaatctttgcaagctgag

SEQ ID NO: 3474559 - DNA, 25 bp, Homo sapien
gagatcccaggatcgctctggagat

SEQ ID NO: 3474560 - DNA, 25 bp, Homo sapien
aacttgtattctcaggcccagatgg

SEQ ID NO: 3474561 - DNA, 25 bp, Homo sapien
gagctgtgccacgatatttctgcag

SEQ ID NO: 3474562 - DNA, 25 bp, Homo sapien
cccagatggagtaacaggcagaacc

SEQ ID NO: 3474563 - DNA, 25 bp, Homo sapien
gctcgatggaggagactacagtcta

SEQ ID NO: 3474564 - DNA, 25 bp, Homo sapien
gatcccgctgtctgtgctattgctg

SEQ ID NO: 3474565 - DNA, 25 bp, Homo sapien
tcatcaagcgggtggatggtgtctt

SEQ ID NO: 3474566 - DNA, 25 bp, Homo sapien
tgccgtgcaggtccaagttcttcag

SEQ ID NO: 3474567 - DNA, 25 bp, Homo sapien
tcaaaaaggcctcctcatcaagcgg

SEQ ID NO: 3474568 - DNA, 25 bp, Homo sapien
gccagagtcatttctagaggatcct

SEQ ID NO: 3474569 - DNA, 25 bp, Homo sapien
caaccaggcatctcccgaatttggg

SEQ ID NO: 3474570 - DNA, 25 bp, Homo sapien
tctgtcaagggcgattcttcctcca

SEQ ID NO: 3474571 - DNA, 25 bp, Homo sapien
ggctggtggatgcaagcctgcctca

SEQ ID NO: 3474572 - DNA, 25 bp, Homo sapien
caaagctccagtcagatattcccag

SEQ ID NO: 3474573 - DNA, 25 bp, Homo sapien
cagtcagatattcccaggtcactgc

SEQ ID NO: 3474574 - DNA, 25 bp, Homo sapien
gctccagtcagatattcccaggtca

SEQ ID NO: 3474575 - DNA, 25 bp, Homo sapien
acacagcctagaggggcaaggtcat

SEQ ID NO: 3474576 - DNA, 25 bp, Homo sapien
gaagctctgatgctcgagtggccta

SEQ ID NO: 3474577 - DNA, 25 bp, Homo sapien
caaagggctgagttatgaccaatac

SEQ ID NO: 3474578 - DNA, 25 bp, Homo sapien
catgcctgtggactgaactgccttt

SEQ ID NO: 3474579 - DNA, 25 bp, Homo sapien
cattctcccaggaccagcttggcta

SEQ ID NO: 3474580 - DNA, 25 bp, Homo sapien
tgtcgtatccaaccaaactggctgc

SEQ ID NO: 3474581 - DNA, 25 bp, Homo sapien
tcattccacagaaacggagcaggca

SEQ ID NO: 3474582 - DNA, 25 bp, Homo sapien
ggaagttccattagctcacacaaag

SEQ ID NO: 3474583 - DNA, 25 bp, Homo sapien
ggctgcttggaaggactcgctcagt

SEQ ID NO: 3474584 - DNA, 25 bp, Homo sapien
gtgtcagggtctcacagcttgcaaa

SEQ ID NO: 3474585 - DNA, 25 bp, Homo sapien
tctcctaagtgctctctacatgtgg

SEQ ID NO: 3474586 - DNA, 25 bp, Homo sapien
taaagtctgagttcaaccactgcac

SEQ ID NO: 3474587 - DNA, 25 bp, Homo sapien
gatgctagcctgcacctaaagtctg

SEQ ID NO: 3474588 - DNA, 25 bp, Homo sapien
tagtttataagcaggacgacactgc

SEQ ID NO: 3474589 - DNA, 25 bp, Homo sapien
tctaattgaatcactgagggctttt

SEQ ID NO: 3474590 - DNA, 25 bp, Homo sapien
gaaatggacatgaccatcaccctca

SEQ ID NO: 3474591 - DNA, 25 bp, Homo sapien
tcggtgtgccctaggtgtgctgtca

SEQ ID NO: 3474592 - DNA, 25 bp, Homo sapien
ttggaccagtctcccggccactctt

SEQ ID NO: 3474593 - DNA, 25 bp, Homo sapien
cccagccagtgtctcaaattcaatg

SEQ ID NO: 3474594 - DNA, 25 bp, Homo sapien
cagccagtgtctcaaattcaatgtt

SEQ ID NO: 3474595 - DNA, 25 bp, Homo sapien
caaattcaatgtttggaccagtctc

SEQ ID NO: 3474596 - DNA, 25 bp, Homo sapien
ggcccagaactcaagtgaggactca

SEQ ID NO: 3474597 - DNA, 25 bp, Homo sapien
atgagcatagcaaaccgaggcccag

SEQ ID NO: 3474598 - DNA, 25 bp, Homo sapien
tgagcatagcaaaccgaggcccaga

SEQ ID NO: 3474599 - DNA, 25 bp, Homo sapien
tgatgagcatagcaaaccgaggccc

SEQ ID NO: 3474600 - DNA, 25 bp, Homo sapien
ctcaggtgatgaaccaggaaagagg

SEQ ID NO: 3474601 - DNA, 25 bp, Homo sapien
tggtgctcaggtgatgaaccaggaa

SEQ ID NO: 3474602 - DNA, 25 bp, Homo sapien
ggtgctcaggtgatgaaccaggaaa

SEQ ID NO: 3474603 - DNA, 25 bp, Homo sapien
ctggtgctcaggtgatgaaccagga

SEQ ID NO: 3474604 - DNA, 25 bp, Homo sapien
tattccaggagtgattgggggactt

SEQ ID NO: 3474605 - DNA, 25 bp, Homo sapien
gggactttgggcagcttgattaaaa

SEQ ID NO: 3474606 - DNA, 25 bp, Homo sapien
ttgattaaaacagccctacaagtga

SEQ ID NO: 3474607 - DNA, 25 bp, Homo sapien
ccttgtccgctgagcaagctgctgc

SEQ ID NO: 3474608 - DNA, 25 bp, Homo sapien
ggctctgtgatcctcccggtctccc

SEQ ID NO: 3474609 - DNA, 25 bp, Homo sapien
gctctgtgatcctcccggtctccct

SEQ ID NO: 3474610 - DNA, 25 bp, Homo sapien
gagattgtcaccccaaggcagcagg

SEQ ID NO: 3474611 - DNA, 25 bp, Homo sapien
gctgttgtgggtcatatcgtttccg

SEQ ID NO: 3474612 - DNA, 25 bp, Homo sapien
tgggtcatatcgtttccgtgggcag

SEQ ID NO: 3474613 - DNA, 25 bp, Homo sapien
tagctgtgtaatctctgcgaacccg

SEQ ID NO: 3474614 - DNA, 25 bp, Homo sapien
tctgcgaacccggtgcatgtgcgtg

SEQ ID NO: 3474615 - DNA, 25 bp, Homo sapien
gtctgggctagggaggtggctgctg

SEQ ID NO: 3474616 - DNA, 25 bp, Homo sapien
tcagatctcttgggctttggcatgg

SEQ ID NO: 3474617 - DNA, 25 bp, Homo sapien
tgggctttggcatgggtctgggcta

SEQ ID NO: 3474618 - DNA, 25 bp, Homo sapien
ggttctcagctgcactgagggaaga

SEQ ID NO: 3474619 - DNA, 25 bp, Homo sapien
ttgggaagcttgtcggcagttcccc

SEQ ID NO: 3474620 - DNA, 25 bp, Homo sapien
gccgtggagattttcaggcctgaaa

SEQ ID NO: 3474621 - DNA, 25 bp, Homo sapien
tgaaagcatttgtctcctgctgccc

SEQ ID NO: 3474622 - DNA, 25 bp, Homo sapien
ctgaggccgtggagattttcaggcc

SEQ ID NO: 3474623 - DNA, 25 bp, Homo sapien
tggaacacgcagttcagagaagcaa

SEQ ID NO: 3474624 - DNA, 25 bp, Homo sapien
actctgtggactaagcgcatctggg

SEQ ID NO: 3474625 - DNA, 25 bp, Homo sapien
catgaaagcttcaagtgtgtgtggc

SEQ ID NO: 3474626 - DNA, 25 bp, Homo sapien
caaggaccagtggaagcatgaaagc

SEQ ID NO: 3474627 - DNA, 25 bp, Homo sapien
gcagccttgttggatataaccagca

SEQ ID NO: 3474628 - DNA, 25 bp, Homo sapien
tataatccatggaacaaccctgaga

SEQ ID NO: 3474629 - DNA, 25 bp, Homo sapien
tatggcttcggagcaagtaaggaac

SEQ ID NO: 3474630 - DNA, 25 bp, Homo sapien
caggaactcatttcggtaacagtca

SEQ ID NO: 3474631 - DNA, 25 bp, Homo sapien
cagagccctgactcatgggtccagc

SEQ ID NO: 3474632 - DNA, 25 bp, Homo sapien
tgccattgcctgatcaactcagaga

SEQ ID NO: 3474633 - DNA, 25 bp, Homo sapien
ctgttgattcagtctgccgcagagc

SEQ ID NO: 3474634 - DNA, 25 bp, Homo sapien
ggctcatccgggaatgaagctcctg

SEQ ID NO: 3474635 - DNA, 25 bp, Homo sapien
agggagcttgtagtacagtccctgc

SEQ ID NO: 3474636 - DNA, 25 bp, Homo sapien
tgggcagggagcttgtagtacagtc

SEQ ID NO: 3474637 - DNA, 25 bp, Homo sapien
ggcagggagcttgtagtacagtccc

SEQ ID NO: 3474638 - DNA, 25 bp, Homo sapien
gcagggagcttgtagtacagtccct

SEQ ID NO: 3474639 - DNA, 25 bp, Homo sapien
ataagagtggttggtggagcaggga

SEQ ID NO: 3474640 - DNA, 25 bp, Homo sapien
ctgtgggaggctataagagtggttg

SEQ ID NO: 3474641 - DNA, 25 bp, Homo sapien
ggaggctataagagtggttggtgga

SEQ ID NO: 3474642 - DNA, 25 bp, Homo sapien
tgagctgtgggaggctataagagtg

SEQ ID NO: 3474643 - DNA, 25 bp, Homo sapien
gaggctgttcagaggttgatcactg

SEQ ID NO: 3474644 - DNA, 25 bp, Homo sapien
gctgttcagaggttgatcactgtca

SEQ ID NO: 3474645 - DNA, 25 bp, Homo sapien
tgttcagaggttgatcactgtcagg

SEQ ID NO: 3474646 - DNA, 25 bp, Homo sapien
tcagaggttgatcactgtcaggatc

SEQ ID NO: 3474647 - DNA, 25 bp, Homo sapien
cctttcattcatggaatctgctgcc

SEQ ID NO: 3474648 - DNA, 25 bp, Homo sapien
tctccctttcattcatggaatctgc

SEQ ID NO: 3474649 - DNA, 25 bp, Homo sapien
tccctttcattcatggaatctgctg

SEQ ID NO: 3474650 - DNA, 25 bp, Homo sapien
tttcattcatggaatctgctgccca

SEQ ID NO: 3474651 - DNA, 25 bp, Homo sapien
ggacaaccacaatgatgatactcgc

SEQ ID NO: 3474652 - DNA, 25 bp, Homo sapien
gatgatactcgccaggctcagtagt

SEQ ID NO: 3474653 - DNA, 25 bp, Homo sapien
gccaggctcagtagtgctatgatga

SEQ ID NO: 3474654 - DNA, 25 bp, Homo sapien
tgctatgatgatggggatccccacc

SEQ ID NO: 3474655 - DNA, 25 bp, Homo sapien
ggccctgtcatttacttagagggtg

SEQ ID NO: 3474656 - DNA, 25 bp, Homo sapien
catttacttagagggtgaaagtcgg

SEQ ID NO: 3474657 - DNA, 25 bp, Homo sapien
cctgtcatttacttagagggtgaaa

SEQ ID NO: 3474658 - DNA, 25 bp, Homo sapien
tgaaagtcgggtacgggctgtcact

SEQ ID NO: 3474659 - DNA, 25 bp, Homo sapien
agcagaaactcgccctgttcttcca

SEQ ID NO: 3474660 - DNA, 25 bp, Homo sapien
tgttcttccagccgctgctcagagc

SEQ ID NO: 3474661 - DNA, 25 bp, Homo sapien
aagcagaaactcgccctgttcttcc

SEQ ID NO: 3474662 - DNA, 25 bp, Homo sapien
tgctcagagccactcagcttgcaat

SEQ ID NO: 3474663 - DNA, 25 bp, Homo sapien
gccaggtgccaactgcctggggggt

SEQ ID NO: 3474664 - DNA, 25 bp, Homo sapien
aagggggccaggtgccaactgcctg

SEQ ID NO: 3474665 - DNA, 25 bp, Homo sapien
gaagggggccaggtgccaactgcct

SEQ ID NO: 3474666 - DNA, 25 bp, Homo sapien
tgccaactgcctggggggtcttccc

SEQ ID NO: 3474667 - DNA, 25 bp, Homo sapien
agctgcttcctcgggatgaagtgga

SEQ ID NO: 3474668 - DNA, 25 bp, Homo sapien
aagggacagtccagctctccgtcac

SEQ ID NO: 3474669 - DNA, 25 bp, Homo sapien
ggaagtagtatttatccagaatcac

SEQ ID NO: 3474670 - DNA, 25 bp, Homo sapien
ttcggggaagctcttgacacagtgc

SEQ ID NO: 3474671 - DNA, 25 bp, Homo sapien
tggccgagtccagcacctgcagtgt

SEQ ID NO: 3474672 - DNA, 25 bp, Homo sapien
gaagttgtcgaaacaggcagagaac

SEQ ID NO: 3474673 - DNA, 25 bp, Homo sapien
cctgcagtgtggatcggtccttgga

SEQ ID NO: 3474674 - DNA, 25 bp, Homo sapien
tgcctacaggctgtctcagcgagag

SEQ ID NO: 3474675 - DNA, 25 bp, Homo sapien
tcacatcaagagggagagagagttg

SEQ ID NO: 3474676 - DNA, 25 bp, Homo sapien
cacatcaagagggagagagagttgt

SEQ ID NO: 3474677 - DNA, 25 bp, Homo sapien
atcaagagggagagagagttgtgag

SEQ ID NO: 3474678 - DNA, 25 bp, Homo sapien
ctgctcacatcaagagggagagaga

SEQ ID NO: 3474679 - DNA, 25 bp, Homo sapien
tgagttccgcatgcgaagctcctgg

SEQ ID NO: 3474680 - DNA, 25 bp, Homo sapien
ttccgcatgcgaagctcctggctgt

SEQ ID NO: 3474681 - DNA, 25 bp, Homo sapien
ttgagttccgcatgcgaagctcctg

SEQ ID NO: 3474682 - DNA, 25 bp, Homo sapien
agttccgcatgcgaagctcctggct

SEQ ID NO: 3474683 - DNA, 25 bp, Homo sapien
gcttacattcccctggctgcttggg

SEQ ID NO: 3474684 - DNA, 25 bp, Homo sapien
tgcaacctgaagagcagcgtccatg

SEQ ID NO: 3474685 - DNA, 25 bp, Homo sapien
gctctgagtaggacaacacactttg

SEQ ID NO: 3474686 - DNA, 25 bp, Homo sapien
cattgaatgatccatctggctagga

SEQ ID NO: 3474687 - DNA, 25 bp, Homo sapien
gggagaccagggagcctgagagaca

SEQ ID NO: 3474688 - DNA, 25 bp, Homo sapien
gaccagggagcctgagagacagggc

SEQ ID NO: 3474689 - DNA, 25 bp, Homo sapien
caagacagtgcagggagaccaggga

SEQ ID NO: 3474690 - DNA, 25 bp, Homo sapien
ggagaccagggagcctgagagacag

SEQ ID NO: 3474691 - DNA, 25 bp, Homo sapien
ccttcacaagtgatgcagaattacg

SEQ ID NO: 3474692 - DNA, 25 bp, Homo sapien
ttgtgctgggaatctgtgaccttca

SEQ ID NO: 3474693 - DNA, 25 bp, Homo sapien
tgtcttcctactgactgacctggct

SEQ ID NO: 3474694 - DNA, 25 bp, Homo sapien
agaattacgaaagccctgcccaggt

SEQ ID NO: 3474695 - DNA, 25 bp, Homo sapien
tgccaaggccaagaatccacagagg

SEQ ID NO: 3474696 - DNA, 25 bp, Homo sapien
gtttgtcgtactggatgctgacctg

SEQ ID NO: 3474697 - DNA, 25 bp, Homo sapien
aggatgctccctccacagacgtgct

SEQ ID NO: 3474698 - DNA, 25 bp, Homo sapien
acctgccaaggccaagaatccacag

SEQ ID NO: 3474699 - DNA, 25 bp, Homo sapien
cgcaccttccagttgaacacatcgg

SEQ ID NO: 3474700 - DNA, 25 bp, Homo sapien
ggaactgcagcttcatgagggcgat

SEQ ID NO: 3474701 - DNA, 25 bp, Homo sapien
ccagttgaacacatcggtatgtttc

SEQ ID NO: 3474702 - DNA, 25 bp, Homo sapien
cccagtttgtctgagcctgcccgca

SEQ ID NO: 3474703 - DNA, 25 bp, Homo sapien
attctgcttcgtaaagccccatcca

SEQ ID NO: 3474704 - DNA, 25 bp, Homo sapien
tgagctcctcatcaaagaagggcag

SEQ ID NO: 3474705 - DNA, 25 bp, Homo sapien
gccccatccaatgatccagagtggg

SEQ ID NO: 3474706 - DNA, 25 bp, Homo sapien
ctcctcatcaaagaagggcagacag

SEQ ID NO: 3474707 - DNA, 25 bp, Homo sapien
caagggcatctcctgccctgtggtc

SEQ ID NO: 3474708 - DNA, 25 bp, Homo sapien
tacaagggcatctcctgccctgtgg

SEQ ID NO: 3474709 - DNA, 25 bp, Homo sapien
catacaagggcatctcctgccctgt

SEQ ID NO: 3474710 - DNA, 25 bp, Homo sapien
tcatacaagggcatctcctgccctg

SEQ ID NO: 3474711 - DNA, 25 bp, Homo sapien
attgcaccgtgtgctgtcaatgacc

SEQ ID NO: 3474712 - DNA, 25 bp, Homo sapien
tcttctcggtgacttccccctggta

SEQ ID NO: 3474713 - DNA, 25 bp, Homo sapien
cccctggtacgcatcgtctgcattg

SEQ ID NO: 3474714 - DNA, 25 bp, Homo sapien
cctgcagcagtatgtcagacatctt

SEQ ID NO: 3474715 - DNA, 25 bp, Homo sapien
cctattcttagaactccccatgatt

SEQ ID NO: 3474716 - DNA, 25 bp, Homo sapien
gccagtaacatcatcttcgaatgtg

SEQ ID NO: 3474717 - DNA, 25 bp, Homo sapien
tggtacacttttatctgactatcct

SEQ ID NO: 3474718 - DNA, 25 bp, Homo sapien
ttgagtgcccatgatatgcaaggct

SEQ ID NO: 3474719 - DNA, 25 bp, Homo sapien
agccatagccccaactaacgatgcc

SEQ ID NO: 3474720 - DNA, 25 bp, Homo sapien
ctgagaccttggtgtatactcctgg

SEQ ID NO: 3474721 - DNA, 25 bp, Homo sapien
tatactcctggggtgctcgggcccc

SEQ ID NO: 3474722 - DNA, 25 bp, Homo sapien
gccactggtcagattggtacatcag

SEQ ID NO: 3474723 - DNA, 25 bp, Homo sapien
cttccagacattgtagatccagttg

SEQ ID NO: 3474724 - DNA, 25 bp, Homo sapien
ttccagacattgtagatccagttga

SEQ ID NO: 3474725 - DNA, 25 bp, Homo sapien
ccacagtgatctgggcttttacaag

SEQ ID NO: 3474726 - DNA, 25 bp, Homo sapien
tttgctgctccaagaaatgctgagg

SEQ ID NO: 3474727 - DNA, 25 bp, Homo sapien
tcttataggaattgaggccctttgc

SEQ ID NO: 3474728 - DNA, 25 bp, Homo sapien
tagtcataccaacagtagggcagtg

SEQ ID NO: 3474729 - DNA, 25 bp, Homo sapien
tatcaagcattccagctagcctatg

SEQ ID NO: 3474730 - DNA, 25 bp, Homo sapien
tcttatcaagcattccagctagcct

SEQ ID NO: 3474731 - DNA, 25 bp, Homo sapien
ttatcaagcattccagctagcctat

SEQ ID NO: 3474732 - DNA, 25 bp, Homo sapien
ttcttatcaagcattccagctagcc

SEQ ID NO: 3474733 - DNA, 25 bp, Homo sapien
cctgtgtgggactcaaacttgctca

SEQ ID NO: 3474734 - DNA, 25 bp, Homo sapien
taatctcaggcaaggagcttaacca

SEQ ID NO: 3474735 - DNA, 25 bp, Homo sapien
tattctgacatctgaagcctttggg

SEQ ID NO: 3474736 - DNA, 25 bp, Homo sapien
gaaaaagttaggacacaggaccagc

SEQ ID NO: 3474737 - DNA, 25 bp, Homo sapien
ttgatgggtactgagtttctgttct

SEQ ID NO: 3474738 - DNA, 25 bp, Homo sapien
tagtgtgaatgtacataacaccact

SEQ ID NO: 3474739 - DNA, 25 bp, Homo sapien
aaatggtgaagatggcaacttgtgt

SEQ ID NO: 3474740 - DNA, 25 bp, Homo sapien
agagttgtttgatgggtactgagtt

SEQ ID NO: 3474741 - DNA, 25 bp, Homo sapien
agtacaaaaagaccaatactgcatg

SEQ ID NO: 3474742 - DNA, 25 bp, Homo sapien
gcagtctctatggaaagcaatatat

SEQ ID NO: 3474743 - DNA, 25 bp, Homo sapien
gtaacctgaatgttcgtataaacaa

SEQ ID NO: 3474744 - DNA, 25 bp, Homo sapien
ggagaaatagtaactcctgcaaact

SEQ ID NO: 3474745 - DNA, 25 bp, Homo sapien
tgctgcatgctgtggttactccata

SEQ ID NO: 3474746 - DNA, 25 bp, Homo sapien
tccatatttcagttaggcctttaaa

SEQ ID NO: 3474747 - DNA, 25 bp, Homo sapien
gaatattttaactccagctatcccc

SEQ ID NO: 3474748 - DNA, 25 bp, Homo sapien
ttaactaaccatctagaacatagta

SEQ ID NO: 3474749 - DNA, 25 bp, Homo sapien
tctatggcaaagcagaatagtgcta

SEQ ID NO: 3474750 - DNA, 25 bp, Homo sapien
ccattcatgaacagggagctctcct

SEQ ID NO: 3474751 - DNA, 25 bp, Homo sapien
gattgccaactccagtggtgacaaa

SEQ ID NO: 3474752 - DNA, 25 bp, Homo sapien
agccaccctgttacctggaagtaga

SEQ ID NO: 3474753 - DNA, 25 bp, Homo sapien
gactagtatgtagtcaattttcaca

SEQ ID NO: 3474754 - DNA, 25 bp, Homo sapien
cacctgctcgacatatcaataattg

SEQ ID NO: 3474755 - DNA, 25 bp, Homo sapien
ggcctggtgctcacgttacttttga

SEQ ID NO: 3474756 - DNA, 25 bp, Homo sapien
ctgagcggaaattgaagggagcaaa

SEQ ID NO: 3474757 - DNA, 25 bp, Homo sapien
ttattcaacatttaccccacagaca

SEQ ID NO: 3474758 - DNA, 25 bp, Homo sapien
tgttactcagcctttcccggaagcc

SEQ ID NO: 3474759 - DNA, 25 bp, Homo sapien
tggtgcatgcaacgaaggccaccca

SEQ ID NO: 3474760 - DNA, 25 bp, Homo sapien
tgtcaccgtggtgcatgcaacgaag

SEQ ID NO: 3474761 - DNA, 25 bp, Homo sapien
gagctgaccgtagctccatcagcgg

SEQ ID NO: 3474762 - DNA, 25 bp, Homo sapien
tccatcagcggtacagctggttgct

SEQ ID NO: 3474763 - DNA, 25 bp, Homo sapien
atgtgtgtgccgagctgaccgtagc

SEQ ID NO: 3474764 - DNA, 25 bp, Homo sapien
ctgaatcacaagacctgtccctggg

SEQ ID NO: 3474765 - DNA, 25 bp, Homo sapien
catctgtttgatagtcttagcccag

SEQ ID NO: 3474766 - DNA, 25 bp, Homo sapien
tcaaagagctacatctgtttgatag

SEQ ID NO: 3474767 - DNA, 25 bp, Homo sapien
aaagagctacatctgtttgatagtc

SEQ ID NO: 3474768 - DNA, 25 bp, Homo sapien
ttgatagtcttagcccaggtttctc

SEQ ID NO: 3474769 - DNA, 25 bp, Homo sapien
ctggtggcaggtacgcagatcagat

SEQ ID NO: 3474770 - DNA, 25 bp, Homo sapien
cagattgactttaggaggtctgtac

SEQ ID NO: 3474771 - DNA, 25 bp, Homo sapien
ggcaggtacgcagatcagattgact

SEQ ID NO: 3474772 - DNA, 25 bp, Homo sapien
tacgcagatcagattgactttagga

SEQ ID NO: 3474773 - DNA, 25 bp, Homo sapien
aaagtcgatcttgagagacctggcc

SEQ ID NO: 3474774 - DNA, 25 bp, Homo sapien
tcagactacatatggcaggccgatc

SEQ ID NO: 3474775 - DNA, 25 bp, Homo sapien
gggcttctccccatgtcgtaattga

SEQ ID NO: 3474776 - DNA, 25 bp, Homo sapien
taaacccctgatgttagagaggcct

SEQ ID NO: 3474777 - DNA, 25 bp, Homo sapien
tgcagggatagttccaagtctgtcc

SEQ ID NO: 3474778 - DNA, 25 bp, Homo sapien
ggagaagaagggcaccatcctctct

SEQ ID NO: 3474779 - DNA, 25 bp, Homo sapien
cccagggtctactgctgatttctag

SEQ ID NO: 3474780 - DNA, 25 bp, Homo sapien
tctagatggatcatgcagcttctct

SEQ ID NO: 3474781 - DNA, 25 bp, Homo sapien
gaattcccctgcaaacagaagggag

SEQ ID NO: 3474782 - DNA, 25 bp, Homo sapien
aacaagggctactccctggtccaga

SEQ ID NO: 3474783 - DNA, 25 bp, Homo sapien
gacccctggtggtcatccagagcgc

SEQ ID NO: 3474784 - DNA, 25 bp, Homo sapien
gtcagtcctgaaaacctggcgagag

SEQ ID NO: 3474785 - DNA, 25 bp, Homo sapien
tgggccctcgtttccattgctagtg

SEQ ID NO: 3474786 - DNA, 25 bp, Homo sapien
ttccagggcactgacggaaagccag

SEQ ID NO: 3474787 - DNA, 25 bp, Homo sapien
tcccttaggactgtggatgaggcca

SEQ ID NO: 3474788 - DNA, 25 bp, Homo sapien
cagtgcttggcctggcagtggcttc

SEQ ID NO: 3474789 - DNA, 25 bp, Homo sapien
ttccctctagtcctcaagaacctgg

SEQ ID NO: 3474790 - DNA, 25 bp, Homo sapien
aacctgggaacatgtcccagagagt

SEQ ID NO: 3474791 - DNA, 25 bp, Homo sapien
cctctagtcctcaagaacctgggaa

SEQ ID NO: 3474792 - DNA, 25 bp, Homo sapien
ctctagtcctcaagaacctgggaac

SEQ ID NO: 3474793 - DNA, 25 bp, Homo sapien
cggcatttgctcagggcactttggg

SEQ ID NO: 3474794 - DNA, 25 bp, Homo sapien
tttcccacccacctactctctgcgg

SEQ ID NO: 3474795 - DNA, 25 bp, Homo sapien
cacccacctactctctgcggcattt

SEQ ID NO: 3474796 - DNA, 25 bp, Homo sapien
tctctgcggcatttgctcagggcac

SEQ ID NO: 3474797 - DNA, 25 bp, Homo sapien
gtctgagatctttcaaagctgtgtg

SEQ ID NO: 3474798 - DNA, 25 bp, Homo sapien
gctgtgtgaactctgtcttgtatgt

SEQ ID NO: 3474799 - DNA, 25 bp, Homo sapien
ctgagatctttcaaagctgtgtgaa

SEQ ID NO: 3474800 - DNA, 25 bp, Homo sapien
gatctttcaaagctgtgtgaactct

SEQ ID NO: 3474801 - DNA, 25 bp, Homo sapien
gggaaagagaccggcttctctctca

SEQ ID NO: 3474802 - DNA, 25 bp, Homo sapien
ggaaagagaccggcttctctctcag

SEQ ID NO: 3474803 - DNA, 25 bp, Homo sapien
gaaagagaccggcttctctctcagc

SEQ ID NO: 3474804 - DNA, 25 bp, Homo sapien
ccaaggttgagggtggaagtccaca

SEQ ID NO: 3474805 - DNA, 25 bp, Homo sapien
gacaggttagccacatgatcctcag

SEQ ID NO: 3474806 - DNA, 25 bp, Homo sapien
tacatctgttgctcagggtctaaga

SEQ ID NO: 3474807 - DNA, 25 bp, Homo sapien
gatggccttcaggatacagagttag

SEQ ID NO: 3474808 - DNA, 25 bp, Homo sapien
tctagtttagacatggataagcatc

SEQ ID NO: 3474809 - DNA, 25 bp, Homo sapien
ttcctatctgccagctcttgatgag

SEQ ID NO: 3474810 - DNA, 25 bp, Homo sapien
ttttccatatgggtattgaaggcag

SEQ ID NO: 3474811 - DNA, 25 bp, Homo sapien
ttgaaggcagtatcctgtcccagac

SEQ ID NO: 3474812 - DNA, 25 bp, Homo sapien
tgctccctgttctgatattgatcgt

SEQ ID NO: 3474813 - DNA, 25 bp, Homo sapien
ttggtgatcattgtgggaattgtct

SEQ ID NO: 3474814 - DNA, 25 bp, Homo sapien
ttctgatattgatcgtgaagaagac

SEQ ID NO: 3474815 - DNA, 25 bp, Homo sapien
gaattgtctgtgccacaatcctgct

SEQ ID NO: 3474816 - DNA, 25 bp, Homo sapien
ctcaaccatgatgtggtcgtatatt

SEQ ID NO: 3474817 - DNA, 25 bp, Homo sapien
tggtcgtatatttatgggtcaacat

SEQ ID NO: 3474818 - DNA, 25 bp, Homo sapien
tattctttagaccagtagctctcaa

SEQ ID NO: 3474819 - DNA, 25 bp, Homo sapien
ggatatcccaagtaacttgttatta

SEQ ID NO: 3474820 - DNA, 25 bp, Homo sapien
gaagacccacaaggagtggaccaag

SEQ ID NO: 3474821 - DNA, 25 bp, Homo sapien
caaaacaaaacgacacttctggagg

SEQ ID NO: 3474822 - DNA, 25 bp, Homo sapien
ttgggctgttaactgctgcacctca

SEQ ID NO: 3474823 - DNA, 25 bp, Homo sapien
cactcagttatggttctaaagggaa

SEQ ID NO: 3474824 - DNA, 25 bp, Homo sapien
atgaggaactaattttggctgggcc

SEQ ID NO: 3474825 - DNA, 25 bp, Homo sapien
tcttcgaaggatcacaaagcagtgt

SEQ ID NO: 3474826 - DNA, 25 bp, Homo sapien
tttgtggtcgcatcccagtcatcag

SEQ ID NO: 3474827 - DNA, 25 bp, Homo sapien
ggtgctctgtgaatactcagtcgtg

SEQ ID NO: 3474828 - DNA, 25 bp, Homo sapien
caaaggggatgcatctataagtata

SEQ ID NO: 3474829 - DNA, 25 bp, Homo sapien
cggatttcctgggttggaaatgtat

SEQ ID NO: 3474830 - DNA, 25 bp, Homo sapien
gatgcatctataagtataagcaacc

SEQ ID NO: 3474831 - DNA, 25 bp, Homo sapien
gaaatgtatacaaaggggatgcatc

SEQ ID NO: 3474832 - DNA, 25 bp, Homo sapien
gcccatgtccgaggttatgttggag

SEQ ID NO: 3474833 - DNA, 25 bp, Homo sapien
tatagactggacatatcgccctccc

SEQ ID NO: 3474834 - DNA, 25 bp, Homo sapien
gatgtcactgacaaacttactatag

SEQ ID NO: 3474835 - DNA, 25 bp, Homo sapien
ccttggagattcgtgcagatgccca

SEQ ID NO: 3474836 - DNA, 25 bp, Homo sapien
ctgttcttccagggtgagtgctccg

SEQ ID NO: 3474837 - DNA, 25 bp, Homo sapien
tgttcttccagggtgagtgctccgg

SEQ ID NO: 3474838 - DNA, 25 bp, Homo sapien
catctgaagagctgccgggatgcag

SEQ ID NO: 3474839 - DNA, 25 bp, Homo sapien
aaacaaggtgtgcaagcatctgaag

SEQ ID NO: 3474840 - DNA, 25 bp, Homo sapien
agcatctgaagagctgccgggatgc

SEQ ID NO: 3474841 - DNA, 25 bp, Homo sapien
tgtcgttaccgggagctgtaaacaa

SEQ ID NO: 3474842 - DNA, 25 bp, Homo sapien
gagagcatttagctcccgcctgaaa

SEQ ID NO: 3474843 - DNA, 25 bp, Homo sapien
taattattccaagtccgtagcctac

SEQ ID NO: 3474844 - DNA, 25 bp, Homo sapien
tctcgagacgtaaaaacgatgtctg

SEQ ID NO: 3474845 - DNA, 25 bp, Homo sapien
tactgtatgatctcccaggtgtttc

SEQ ID NO: 3474846 - DNA, 25 bp, Homo sapien
tcagtttttaatcgactggactgca

SEQ ID NO: 3474847 - DNA, 25 bp, Homo sapien
tcttcaaacagatgtcctggatgat

SEQ ID NO: 3474848 - DNA, 25 bp, Homo sapien
tatgtcttggctaaatagtcaaggg

SEQ ID NO: 3474849 - DNA, 25 bp, Homo sapien
aaatgtatggacagtttttccggca

SEQ ID NO: 3474850 - DNA, 25 bp, Homo sapien
taaatcaggtatgaactagtaactt

SEQ ID NO: 3474851 - DNA, 25 bp, Homo sapien
tccttatgggatttctttactatgt

SEQ ID NO: 3474852 - DNA, 25 bp, Homo sapien
acatttgcaggacagataaatcagg

SEQ ID NO: 3474853 - DNA, 25 bp, Homo sapien
ttccttatgggatttctttactatg

SEQ ID NO: 3474854 - DNA, 25 bp, Homo sapien
ttagcgtcctcactggtagaatggg

SEQ ID NO: 3474855 - DNA, 25 bp, Homo sapien
tccacagagggtcctaaggaattcc

SEQ ID NO: 3474856 - DNA, 25 bp, Homo sapien
actttgtagattgcactcggatggc

SEQ ID NO: 3474857 - DNA, 25 bp, Homo sapien
tgtatcgaatccagtcccaagtgaa

SEQ ID NO: 3474858 - DNA, 25 bp, Homo sapien
tgttgggcagctatgggttttatct

SEQ ID NO: 3474859 - DNA, 25 bp, Homo sapien
ttgggcagctatgggttttatctgc

SEQ ID NO: 3474860 - DNA, 25 bp, Homo sapien
cctgttgggcagctatgggttttat

SEQ ID NO: 3474861 - DNA, 25 bp, Homo sapien
gggcagctatgggttttatctgcat

SEQ ID NO: 3474862 - DNA, 25 bp, Homo sapien
ggcctggagcccaaacactcttgct

SEQ ID NO: 3474863 - DNA, 25 bp, Homo sapien
tctattgtaggaaggcaagggcaag

SEQ ID NO: 3474864 - DNA, 25 bp, Homo sapien
cgatggttacaaggacctgagttgt

SEQ ID NO: 3474865 - DNA, 25 bp, Homo sapien
tggatgagcaagaggactcagcaaa

SEQ ID NO: 3474866 - DNA, 25 bp, Homo sapien
tgcataaaggcctgacttataggct

SEQ ID NO: 3474867 - DNA, 25 bp, Homo sapien
ggcctccaaagtggctaacactgca

SEQ ID NO: 3474868 - DNA, 25 bp, Homo sapien
gacatagctctctgttattattgct

SEQ ID NO: 3474869 - DNA, 25 bp, Homo sapien
gtttcatgaaaaaccctgctgtgat

SEQ ID NO: 3474870 - DNA, 25 bp, Homo sapien
tacctcacttggaaacgttcaaggc

SEQ ID NO: 3474871 - DNA, 25 bp, Homo sapien
tggactggttgaagaaagctgggtc

SEQ ID NO: 3474872 - DNA, 25 bp, Homo sapien
tcctagaaggccaaacaagaggact

SEQ ID NO: 3474873 - DNA, 25 bp, Homo sapien
ctgggcctgcgggttttacctcact

SEQ ID NO: 3474874 - DNA, 25 bp, Homo sapien
aaaagcaaaacagatgactttttca

SEQ ID NO: 3474875 - DNA, 25 bp, Homo sapien
gcaaaacagatgactttttcaaaac

SEQ ID NO: 3474876 - DNA, 25 bp, Homo sapien
tggaaaaaaagcaaaacagatgact

SEQ ID NO: 3474877 - DNA, 25 bp, Homo sapien
aagcaaaacagatgactttttcaaa

SEQ ID NO: 3474878 - DNA, 25 bp, Homo sapien
ttactttactaagatggcggaggcc

SEQ ID NO: 3474879 - DNA, 25 bp, Homo sapien
tcatgggactgttactttactaaga

SEQ ID NO: 3474880 - DNA, 25 bp, Homo sapien
ctttactaagatggcggaggccagc

SEQ ID NO: 3474881 - DNA, 25 bp, Homo sapien
gactgttactttactaagatggcgg

SEQ ID NO: 3474882 - DNA, 25 bp, Homo sapien
ctctccagtgagtgcccgactgcat

SEQ ID NO: 3474883 - DNA, 25 bp, Homo sapien
ctagagaaccttttgagaggtggct

SEQ ID NO: 3474884 - DNA, 25 bp, Homo sapien
tgcaggaagtcatctgtcatctaga

SEQ ID NO: 3474885 - DNA, 25 bp, Homo sapien
aaaagaaccacccaaatgcaggaag

SEQ ID NO: 3474886 - DNA, 25 bp, Homo sapien
ctttagggtttacgcagggacatgg

SEQ ID NO: 3474887 - DNA, 25 bp, Homo sapien
tccaggatactgagggcatgtcaat

SEQ ID NO: 3474888 - DNA, 25 bp, Homo sapien
cctcaggtagagataaaagttcgca

SEQ ID NO: 3474889 - DNA, 25 bp, Homo sapien
gcatgtcaatattactgtggttcca

SEQ ID NO: 3474890 - DNA, 25 bp, Homo sapien
gccatagtatttcagatccaggata

SEQ ID NO: 3474891 - DNA, 25 bp, Homo sapien
taaagagccggtggtacctgttctg

SEQ ID NO: 3474892 - DNA, 25 bp, Homo sapien
aggaagcgcaaagacgcctgggcac

SEQ ID NO: 3474893 - DNA, 25 bp, Homo sapien
atgccgtgtggtaccagagagtccc

SEQ ID NO: 3474894 - DNA, 25 bp, Homo sapien
gctgggttagggaaaatcactgaga

SEQ ID NO: 3474895 - DNA, 25 bp, Homo sapien
ccttgataagtgttgggtacagaca

SEQ ID NO: 3474896 - DNA, 25 bp, Homo sapien
gaggcactggagtcaaacagccctg

SEQ ID NO: 3474897 - DNA, 25 bp, Homo sapien
ttactactcacacgcttgccacggt

SEQ ID NO: 3474898 - DNA, 25 bp, Homo sapien
cattgacaagcaaagagtggtggcc

SEQ ID NO: 3474899 - DNA, 25 bp, Homo sapien
tcttgctccagtagtaaaccagcag

SEQ ID NO: 3474900 - DNA, 25 bp, Homo sapien
gatgcagatgtccactatgacaatt

SEQ ID NO: 3474901 - DNA, 25 bp, Homo sapien
ggccttggcctttctattcttgctc

SEQ ID NO: 3474902 - DNA, 25 bp, Homo sapien
caattgtggccaccgacatcacatc

SEQ ID NO: 3474903 - DNA, 25 bp, Homo sapien
tgagggaaccaatcttgcagcactg

SEQ ID NO: 3474904 - DNA, 25 bp, Homo sapien
gacccagatagagaatggcaaaccc

SEQ ID NO: 3474905 - DNA, 25 bp, Homo sapien
gaaaccgtctgttgagatcttgtca

SEQ ID NO: 3474906 - DNA, 25 bp, Homo sapien
ttctgacctagctgtggacttgcca

SEQ ID NO: 3474907 - DNA, 25 bp, Homo sapien
ctcatagtctgggttgggaacaggt

SEQ ID NO: 3474908 - DNA, 25 bp, Homo sapien
gggaacaggtggtggcctctccttg

SEQ ID NO: 3474909 - DNA, 25 bp, Homo sapien
acaggtggtggcctctccttgtttt

SEQ ID NO: 3474910 - DNA, 25 bp, Homo sapien
ggtggtggcctctccttgttttgtc

SEQ ID NO: 3474911 - DNA, 25 bp, Homo sapien
cccagtcaatgaataagccagagaa

SEQ ID NO: 3474912 - DNA, 25 bp, Homo sapien
gttgtggaagccatgcagcctttga

SEQ ID NO: 3474913 - DNA, 25 bp, Homo sapien
tgttttaccatgaaggacgcagagg

SEQ ID NO: 3474914 - DNA, 25 bp, Homo sapien
gcatctggcagacaagatgggccat

SEQ ID NO: 3474915 - DNA, 25 bp, Homo sapien
ggccagaatacaggtcccgctggcc

SEQ ID NO: 3474916 - DNA, 25 bp, Homo sapien
aggccagaatacaggtcccgctggc

SEQ ID NO: 3474917 - DNA, 25 bp, Homo sapien
caggccagaatacaggtcccgctgg

SEQ ID NO: 3474918 - DNA, 25 bp, Homo sapien
ggtccaagactagcccaggaaacag

SEQ ID NO: 3474919 - DNA, 25 bp, Homo sapien
caatattttaggactgggtaccagc

SEQ ID NO: 3474920 - DNA, 25 bp, Homo sapien
gaggctgaggaacgattctctctcg

SEQ ID NO: 3474921 - DNA, 25 bp, Homo sapien
gaactgaacggagaagttacatcca

SEQ ID NO: 3474922 - DNA, 25 bp, Homo sapien
tctctcttatgtcttttatgcctgt

SEQ ID NO: 3474923 - DNA, 25 bp, Homo sapien
tagagacgcactctaggcagggtgt

SEQ ID NO: 3474924 - DNA, 25 bp, Homo sapien
tagagggagaatagaggccactttc

SEQ ID NO: 3474925 - DNA, 25 bp, Homo sapien
tccagttgattctgaaacagcccaa

SEQ ID NO: 3474926 - DNA, 25 bp, Homo sapien
cggcaaaagcgtggagcagccctta

SEQ ID NO: 3474927 - DNA, 25 bp, Homo sapien
cctccggcaaaagcgtggagcagcc

SEQ ID NO: 3474928 - DNA, 25 bp, Homo sapien
tcagtctctgtcctccggcaaaagc

SEQ ID NO: 3474929 - DNA, 25 bp, Homo sapien
aagcgtggagcagcccttagcagcc

SEQ ID NO: 3474930 - DNA, 25 bp, Homo sapien
agaagaatgatagccaggatgagga

SEQ ID NO: 3474931 - DNA, 25 bp, Homo sapien
cttgaagaagaatgatagccaggat

SEQ ID NO: 3474932 - DNA, 25 bp, Homo sapien
aggatgaggacagccaggcccttcc

SEQ ID NO: 3474933 - DNA, 25 bp, Homo sapien
cagccaggcccttcccctgttccat

SEQ ID NO: 3474934 - DNA, 25 bp, Homo sapien
cttggtttccaaggtagtgcataca

SEQ ID NO: 3474935 - DNA, 25 bp, Homo sapien
gatgcatattctgccacatcccgca

SEQ ID NO: 3474936 - DNA, 25 bp, Homo sapien
tcctggtcttagagggtaacgttgc

SEQ ID NO: 3474937 - DNA, 25 bp, Homo sapien
tataaacctatttgtggccagtgcc

SEQ ID NO: 3474938 - DNA, 25 bp, Homo sapien
ttcatgggtcacagtttgagatgtg

SEQ ID NO: 3474939 - DNA, 25 bp, Homo sapien
ggtcacagtttgagatgtgtcccta

SEQ ID NO: 3474940 - DNA, 25 bp, Homo sapien
gatgtgtccctagctactagggtcc

SEQ ID NO: 3474941 - DNA, 25 bp, Homo sapien
tcacagtttgagatgtgtccctagc

SEQ ID NO: 3474942 - DNA, 25 bp, Homo sapien
actgatacatccctcgagggtcctt

SEQ ID NO: 3474943 - DNA, 25 bp, Homo sapien
tttttggcttctgcatcacaagtca

SEQ ID NO: 3474944 - DNA, 25 bp, Homo sapien
tcttcagttaggaagccgatcatct

SEQ ID NO: 3474945 - DNA, 25 bp, Homo sapien
tcacaagtcagaagtaccgaaccat

SEQ ID NO: 3474946 - DNA, 25 bp, Homo sapien
tagtctaactaccaggaagtatctg

SEQ ID NO: 3474947 - DNA, 25 bp, Homo sapien
agggcaagggaagatccttgcgcca

SEQ ID NO: 3474948 - DNA, 25 bp, Homo sapien
tgcgccaaaactcaatgcatcttga

SEQ ID NO: 3474949 - DNA, 25 bp, Homo sapien
tgcatcttgatgctcttaagtcccc

SEQ ID NO: 3474950 - DNA, 25 bp, Homo sapien
ctggttcgttttctcctgcctgtct

SEQ ID NO: 3474951 - DNA, 25 bp, Homo sapien
tggttcgttttctcctgcctgtctg

SEQ ID NO: 3474952 - DNA, 25 bp, Homo sapien
tcctgcctgtctgcaataatgccgc

SEQ ID NO: 3474953 - DNA, 25 bp, Homo sapien
tctcgactggcgaactccatcctgt

SEQ ID NO: 3474954 - DNA, 25 bp, Homo sapien
atgctgacgatttcagcaaagagaa

SEQ ID NO: 3474955 - DNA, 25 bp, Homo sapien
cagatatggtggctgcatttagttc

SEQ ID NO: 3474956 - DNA, 25 bp, Homo sapien
aacagcaaggacgaaaatgctgacg

SEQ ID NO: 3474957 - DNA, 25 bp, Homo sapien
tatcttgagacaggtgaacatgctg

SEQ ID NO: 3474958 - DNA, 25 bp, Homo sapien
tctcctgtctcagagaaatacagcc

SEQ ID NO: 3474959 - DNA, 25 bp, Homo sapien
tcacccaactatgcacactagcaag

SEQ ID NO: 3474960 - DNA, 25 bp, Homo sapien
cattgggtacataatggtaggagga

SEQ ID NO: 3474961 - DNA, 25 bp, Homo sapien
gtagagctggtcattgggcaacaga

SEQ ID NO: 3474962 - DNA, 25 bp, Homo sapien
tggtagagctggtcattgggcaaca

SEQ ID NO: 3474963 - DNA, 25 bp, Homo sapien
ggtagagctggtcattgggcaacag

SEQ ID NO: 3474964 - DNA, 25 bp, Homo sapien
tcaactggtttccttgaaggtggct

SEQ ID NO: 3474965 - DNA, 25 bp, Homo sapien
tcctcaactggtttccttgaaggtg

SEQ ID NO: 3474966 - DNA, 25 bp, Homo sapien
tggtcatcttctcgatccttgaggg

SEQ ID NO: 3474967 - DNA, 25 bp, Homo sapien
actggtcatcttctcgatccttgag

SEQ ID NO: 3474968 - DNA, 25 bp, Homo sapien
tctgggaaccttgagtctagattta

SEQ ID NO: 3474969 - DNA, 25 bp, Homo sapien
tacaattttccccaataggtggcgc

SEQ ID NO: 3474970 - DNA, 25 bp, Homo sapien
gtctctctgctaggagctttccaaa

SEQ ID NO: 3474971 - DNA, 25 bp, Homo sapien
aaatttgctctgatggcctttcttc

SEQ ID NO: 3474972 - DNA, 25 bp, Homo sapien
tcagcatggttagtatctagggaaa

SEQ ID NO: 3474973 - DNA, 25 bp, Homo sapien
acatttattgttagagctaaaacca

SEQ ID NO: 3474974 - DNA, 25 bp, Homo sapien
aaacatatgcaacccaatagtaaga

SEQ ID NO: 3474975 - DNA, 25 bp, Homo sapien
ccaaaagcacaatatatagaagaaa

SEQ ID NO: 3474976 - DNA, 25 bp, Homo sapien
aagcgccggggcatgtggaagttca

SEQ ID NO: 3474977 - DNA, 25 bp, Homo sapien
caagcgccggggcatgtggaagttc

SEQ ID NO: 3474978 - DNA, 25 bp, Homo sapien
gtcatcaacaagcgccggggcatgt

SEQ ID NO: 3474979 - DNA, 25 bp, Homo sapien
tcaacaagcgccggggcatgtggaa

SEQ ID NO: 3474980 - DNA, 25 bp, Homo sapien
cgaagggttcccacttccgactcag

SEQ ID NO: 3474981 - DNA, 25 bp, Homo sapien
gcctgaagtgccagcagcgacgaca

SEQ ID NO: 3474982 - DNA, 25 bp, Homo sapien
ccgactcagcacagcaaccggaagt

SEQ ID NO: 3474983 - DNA, 25 bp, Homo sapien
gacagaatctcagcggccgaagggt

SEQ ID NO: 3474984 - DNA, 25 bp, Homo sapien
gaactggtttgcttacgactcacga

SEQ ID NO: 3474985 - DNA, 25 bp, Homo sapien
tatctgcagcctagaaggatctcaa

SEQ ID NO: 3474986 - DNA, 25 bp, Homo sapien
caccctgacgtatgcattgaactgg

SEQ ID NO: 3474987 - DNA, 25 bp, Homo sapien
cacatgcttgctgtcagggcataaa

SEQ ID NO: 3474988 - DNA, 25 bp, Homo sapien
aaaggaggactgatcacttgatgag

SEQ ID NO: 3474989 - DNA, 25 bp, Homo sapien
gccagtttagatttgttcaatggac

SEQ ID NO: 3474990 - DNA, 25 bp, Homo sapien
tgttcaatggacttaccaaagtaag

SEQ ID NO: 3474991 - DNA, 25 bp, Homo sapien
gaacctttgtggagatgccagttta

SEQ ID NO: 3474992 - DNA, 25 bp, Homo sapien
ggctaaaacgttcagctggaatgca

SEQ ID NO: 3474993 - DNA, 25 bp, Homo sapien
taccagctggactcggtggcttgat

SEQ ID NO: 3474994 - DNA, 25 bp, Homo sapien
gagggcagatgacacaatagctgta

SEQ ID NO: 3474995 - DNA, 25 bp, Homo sapien
gatttgtggatagctgaaactaaaa

SEQ ID NO: 3474996 - DNA, 25 bp, Homo sapien
ttaaggtatcctccatccagaccta

SEQ ID NO: 3474997 - DNA, 25 bp, Homo sapien
aaggtatcctccatccagacctagt

SEQ ID NO: 3474998 - DNA, 25 bp, Homo sapien
taaggtatcctccatccagacctag

SEQ ID NO: 3474999 - DNA, 25 bp, Homo sapien
tttaaggtatcctccatccagacct

SEQ ID NO: 3475000 - DNA, 25 bp, Homo sapien
agctgctctttttggattgccgcaa

SEQ ID NO: 3475001 - DNA, 25 bp, Homo sapien
gggttacttgagatgttgttgttat

SEQ ID NO: 3475002 - DNA, 25 bp, Homo sapien
tgccgcaaactgtttggcatcagcc

SEQ ID NO: 3475003 - DNA, 25 bp, Homo sapien
aaaagagcagcaaaggggttacttg

SEQ ID NO: 3475004 - DNA, 25 bp, Homo sapien
tctgtcctaacaggactaagctaca

SEQ ID NO: 3475005 - DNA, 25 bp, Homo sapien
catagtaaggctaaggatcagattt

SEQ ID NO: 3475006 - DNA, 25 bp, Homo sapien
aattcggtgcctgaaagaaaaccat

SEQ ID NO: 3475007 - DNA, 25 bp, Homo sapien
gctggacttgatcttaaattcggtg

SEQ ID NO: 3475008 - DNA, 25 bp, Homo sapien
cctcggtgacagagcaagacttcgt

SEQ ID NO: 3475009 - DNA, 25 bp, Homo sapien
aggcagaggttgcactgcactccag

SEQ ID NO: 3475010 - DNA, 25 bp, Homo sapien
cagcctcggtgacagagcaagactt

SEQ ID NO: 3475011 - DNA, 25 bp, Homo sapien
gaggcagaggttgcactgcactcca

SEQ ID NO: 3475012 - DNA, 25 bp, Homo sapien
tttaagagagaaccaagcatgctac

SEQ ID NO: 3475013 - DNA, 25 bp, Homo sapien
ctttaagagagaaccaagcatgcta

SEQ ID NO: 3475014 - DNA, 25 bp, Homo sapien
ctgccagaaaatgtatactgttaaa

SEQ ID NO: 3475015 - DNA, 25 bp, Homo sapien
aaatgtatactgttaaatgttacac

SEQ ID NO: 3475016 - DNA, 25 bp, Homo sapien
cagaaaatgtatactgttaaatgtt

SEQ ID NO: 3475017 - DNA, 25 bp, Homo sapien
atgtatactgttaaatgttacaccc

SEQ ID NO: 3475018 - DNA, 25 bp, Homo sapien
taatctcagccacagagtaatcgaa

SEQ ID NO: 3475019 - DNA, 25 bp, Homo sapien
tattatccgagtcatctgggctagc

SEQ ID NO: 3475020 - DNA, 25 bp, Homo sapien
ggctctctgacacgctattatccga

SEQ ID NO: 3475021 - DNA, 25 bp, Homo sapien
ctgtgatcggaatgagcggctaatc

SEQ ID NO: 3475022 - DNA, 25 bp, Homo sapien
tacacacaacggctagggatgccat

SEQ ID NO: 3475023 - DNA, 25 bp, Homo sapien
gctagggatgccattcccgcttttc

SEQ ID NO: 3475024 - DNA, 25 bp, Homo sapien
attgctcatatcaagccagtcttga

SEQ ID NO: 3475025 - DNA, 25 bp, Homo sapien
gatcttctagctctactgccatttc

SEQ ID NO: 3475026 - DNA, 25 bp, Homo sapien
aagtcatgttaattaagtggttgcc

SEQ ID NO: 3475027 - DNA, 25 bp, Homo sapien
gatttagcgttgtagaagaagtcat

SEQ ID NO: 3475028 - DNA, 25 bp, Homo sapien
tcagcagagagatttagcgttgtag

SEQ ID NO: 3475029 - DNA, 25 bp, Homo sapien
ttgaagtaataagcgagcgaagagg

SEQ ID NO: 3475030 - DNA, 25 bp, Homo sapien
ctaactctgtaatctggaacgaaag

SEQ ID NO: 3475031 - DNA, 25 bp, Homo sapien
aaagagggaatagtctaactctgta

SEQ ID NO: 3475032 - DNA, 25 bp, Homo sapien
tctggaacgaaagtagacatagtga

SEQ ID NO: 3475033 - DNA, 25 bp, Homo sapien
ggaatagtctaactctgtaatctgg

SEQ ID NO: 3475034 - DNA, 25 bp, Homo sapien
cgggtattggacacagtgaggtttc

SEQ ID NO: 3475035 - DNA, 25 bp, Homo sapien
tctgcactgcactgcaaagggtagc

SEQ ID NO: 3475036 - DNA, 25 bp, Homo sapien
ggcttctaacatcaaatctaccagt

SEQ ID NO: 3475037 - DNA, 25 bp, Homo sapien
tgcaaagggtagcaggttctctgga

SEQ ID NO: 3475038 - DNA, 25 bp, Homo sapien
tcaaagatcaagatgtgagccctcc

SEQ ID NO: 3475039 - DNA, 25 bp, Homo sapien
gaaccataatggctctgagactttc

SEQ ID NO: 3475040 - DNA, 25 bp, Homo sapien
catgcccagctttattctattggta

SEQ ID NO: 3475041 - DNA, 25 bp, Homo sapien
tctattggtactcaacctcaaagat

SEQ ID NO: 3475042 - DNA, 25 bp, Homo sapien
gttctaacttcctcatccaatatca

SEQ ID NO: 3475043 - DNA, 25 bp, Homo sapien
ccaatatcaaggcttcaatgacctc

SEQ ID NO: 3475044 - DNA, 25 bp, Homo sapien
atcaaacactggaatcatgacttct

SEQ ID NO: 3475045 - DNA, 25 bp, Homo sapien
tctagatcttttattcggcccaata

SEQ ID NO: 3475046 - DNA, 25 bp, Homo sapien
aatagagaagaatatccagatatgc

SEQ ID NO: 3475047 - DNA, 25 bp, Homo sapien
tccagatatgcatacaaaaggatct

SEQ ID NO: 3475048 - DNA, 25 bp, Homo sapien
gcctagtgaaatagagaagaatatc

SEQ ID NO: 3475049 - DNA, 25 bp, Homo sapien
tttgccatatctttttgcctagtga

SEQ ID NO: 3475050 - DNA, 25 bp, Homo sapien
tacatttgcccattggtagggtcct

SEQ ID NO: 3475051 - DNA, 25 bp, Homo sapien
tcagaattactcccagcaaggtctt

SEQ ID NO: 3475052 - DNA, 25 bp, Homo sapien
caacacccggagtctttaataagca

SEQ ID NO: 3475053 - DNA, 25 bp, Homo sapien
gggtccttgggctgaatgtattcta

SEQ ID NO: 3475054 - DNA, 25 bp, Homo sapien
ctgatggatgttggcctcctgtact

SEQ ID NO: 3475055 - DNA, 25 bp, Homo sapien
tgttggcctcctgtactttgatctc

SEQ ID NO: 3475056 - DNA, 25 bp, Homo sapien
tggcctcctgtactttgatctcctg

SEQ ID NO: 3475057 - DNA, 25 bp, Homo sapien
tggatgttggcctcctgtactttga

SEQ ID NO: 3475058 - DNA, 25 bp, Homo sapien
catctgaggcatacatttggaaaaa

SEQ ID NO: 3475059 - DNA, 25 bp, Homo sapien
tccaagccaggacaagatacagtgt

SEQ ID NO: 3475060 - DNA, 25 bp, Homo sapien
tgattggcccaaatcttggtgcggc

SEQ ID NO: 3475061 - DNA, 25 bp, Homo sapien
caaaatggctggcatagcttcagga

SEQ ID NO: 3475062 - DNA, 25 bp, Homo sapien
ctgggatcaaacaggtttctttgtc

SEQ ID NO: 3475063 - DNA, 25 bp, Homo sapien
tcccaagtacaaggtgtactctgtc

SEQ ID NO: 3475064 - DNA, 25 bp, Homo sapien
tctgtggaaacttcggctcctgcac

SEQ ID NO: 3475065 - DNA, 25 bp, Homo sapien
tgttacaaggttgtagttctgtgga

SEQ ID NO: 3475066 - DNA, 25 bp, Homo sapien
agcaaggttctctgttacaaggttg

SEQ ID NO: 3475067 - DNA, 25 bp, Homo sapien
ctcacgaagattgtcagcagcaggg

SEQ ID NO: 3475068 - DNA, 25 bp, Homo sapien
tatggccagttgaaccagtagaaca

SEQ ID NO: 3475069 - DNA, 25 bp, Homo sapien
taagccaaagagctgtagccatctg

SEQ ID NO: 3475070 - DNA, 25 bp, Homo sapien
catctggcaaaggaaaggttagctc

SEQ ID NO: 3475071 - DNA, 25 bp, Homo sapien
ccaaaatgtcatcggcaaagcggcg

SEQ ID NO: 3475072 - DNA, 25 bp, Homo sapien
gcaaagcggcggagaaaaatgagaa

SEQ ID NO: 3475073 - DNA, 25 bp, Homo sapien
cggcaaagcggcggagaaaaatgag

SEQ ID NO: 3475074 - DNA, 25 bp, Homo sapien
ctccaaaatgtcatcggcaaagcgg

SEQ ID NO: 3475075 - DNA, 25 bp, Homo sapien
cggtggaacacactggataccaagg

SEQ ID NO: 3475076 - DNA, 25 bp, Homo sapien
gttgcagaacacacgtttccggtgg

SEQ ID NO: 3475077 - DNA, 25 bp, Homo sapien
aaaaccttgattagagcctctgcaa

SEQ ID NO: 3475078 - DNA, 25 bp, Homo sapien
tgtaaattcgatgtccacaaaaacc

SEQ ID NO: 3475079 - DNA, 25 bp, Homo sapien
gataggtatctgtcccccacatgta

SEQ ID NO: 3475080 - DNA, 25 bp, Homo sapien
cttaatgctctcccgataggtatct

SEQ ID NO: 3475081 - DNA, 25 bp, Homo sapien
ggatacatgggacggcggtaattaa

SEQ ID NO: 3475082 - DNA, 25 bp, Homo sapien
ccccacatgtatcttaggataggat

SEQ ID NO: 3475083 - DNA, 25 bp, Homo sapien
tactgaattacaactcattagggct

SEQ ID NO: 3475084 - DNA, 25 bp, Homo sapien
tagtactgaattacaactcattagg

SEQ ID NO: 3475085 - DNA, 25 bp, Homo sapien
tttagtactgaattacaactcatta

SEQ ID NO: 3475086 - DNA, 25 bp, Homo sapien
gaattacaactcattagggcttata

SEQ ID NO: 3475087 - DNA, 25 bp, Homo sapien
tagcaggttaagaaagcggaggaaa

SEQ ID NO: 3475088 - DNA, 25 bp, Homo sapien
aagtgggggattcatggcttctaaa

SEQ ID NO: 3475089 - DNA, 25 bp, Homo sapien
tcattagcaggttaagaaagcggag

SEQ ID NO: 3475090 - DNA, 25 bp, Homo sapien
tctaaattcttagaggcatagtcag

SEQ ID NO: 3475091 - DNA, 25 bp, Homo sapien
cagctgtccaaacatctgtaggcca

SEQ ID NO: 3475092 - DNA, 25 bp, Homo sapien
acctcgatccttctcaatttgctga

SEQ ID NO: 3475093 - DNA, 25 bp, Homo sapien
gacatgatgttatggaaacgtgcca

SEQ ID NO: 3475094 - DNA, 25 bp, Homo sapien
aaggcaagggtaccgattgtttcat

SEQ ID NO: 3475095 - DNA, 25 bp, Homo sapien
cttctcaagtgattcgtttcccttc

SEQ ID NO: 3475096 - DNA, 25 bp, Homo sapien
tcaacaatgggcatcatcattcttt

SEQ ID NO: 3475097 - DNA, 25 bp, Homo sapien
tccagatgtggaggatactgtcacc

SEQ ID NO: 3475098 - DNA, 25 bp, Homo sapien
cttccatgtcaacaatgggcatcat

SEQ ID NO: 3475099 - DNA, 25 bp, Homo sapien
taaaaatttcaatatccaagggctc

SEQ ID NO: 3475100 - DNA, 25 bp, Homo sapien
tactgaattggacagtggagctata

SEQ ID NO: 3475101 - DNA, 25 bp, Homo sapien
gtttttcacattagaggatttcctc

SEQ ID NO: 3475102 - DNA, 25 bp, Homo sapien
cacacgttgcaagtggctactgaat

SEQ ID NO: 3475103 - DNA, 25 bp, Homo sapien
tcaacatggagatgatgcgctcagc

SEQ ID NO: 3475104 - DNA, 25 bp, Homo sapien
tgacttttaaggcacccatcttggg

SEQ ID NO: 3475105 - DNA, 25 bp, Homo sapien
tgaagtcaaattcgctgaagtcctt

SEQ ID NO: 3475106 - DNA, 25 bp, Homo sapien
cagccaggaagggatgcacaaagag

SEQ ID NO: 3475107 - DNA, 25 bp, Homo sapien
caagcaactaggaattaaccatttc

SEQ ID NO: 3475108 - DNA, 25 bp, Homo sapien
agattccttcatcaagcaactagga

SEQ ID NO: 3475109 - DNA, 25 bp, Homo sapien
ccaaccagtcattctactatcaaaa

SEQ ID NO: 3475110 - DNA, 25 bp, Homo sapien
tattttcacataattaccaaccagt

SEQ ID NO: 3475111 - DNA, 25 bp, Homo sapien
gcagaatactggaaatctcaatgtc

SEQ ID NO: 3475112 - DNA, 25 bp, Homo sapien
tcatgtgaccttaaaagaatgctac

SEQ ID NO: 3475113 - DNA, 25 bp, Homo sapien
catgggtcacacaaaatcttactag

SEQ ID NO: 3475114 - DNA, 25 bp, Homo sapien
gaagtctatcaagtatcatgtgacc

SEQ ID NO: 3475115 - DNA, 25 bp, Homo sapien
ctgcagaacaagcattctcaccact

SEQ ID NO: 3475116 - DNA, 25 bp, Homo sapien
acttaaaagccatgaacattctttt

SEQ ID NO: 3475117 - DNA, 25 bp, Homo sapien
aagccatgaacattcttttgatata

SEQ ID NO: 3475118 - DNA, 25 bp, Homo sapien
taaaagccatgaacattcttttgat

SEQ ID NO: 3475119 - DNA, 25 bp, Homo sapien
aagactcgaactgtctgtgcaaaga

SEQ ID NO: 3475120 - DNA, 25 bp, Homo sapien
ttttcttcaagactcgaactgtctg

SEQ ID NO: 3475121 - DNA, 25 bp, Homo sapien
tgctgaaagccataatcatattccc

SEQ ID NO: 3475122 - DNA, 25 bp, Homo sapien
ggaacgtccatccttgggcacagtg

SEQ ID NO: 3475123 - DNA, 25 bp, Homo sapien
gtggatctatccacagtgactctgg

SEQ ID NO: 3475124 - DNA, 25 bp, Homo sapien
tccaggaactcatcacaggcatctg

SEQ ID NO: 3475125 - DNA, 25 bp, Homo sapien
tgtgctcataatgggatccaggaac

SEQ ID NO: 3475126 - DNA, 25 bp, Homo sapien
cagcaccacagggtcacacatcagt

SEQ ID NO: 3475127 - DNA, 25 bp, Homo sapien
tatgtgttgggtgcaaagtactgtc

SEQ ID NO: 3475128 - DNA, 25 bp, Homo sapien
aagaggtgaggttagagttagcatt

SEQ ID NO: 3475129 - DNA, 25 bp, Homo sapien
aaatgtcttccaacatatcagtaaa

SEQ ID NO: 3475130 - DNA, 25 bp, Homo sapien
tatatcctagcaattgaaaccaaaa

SEQ ID NO: 3475131 - DNA, 25 bp, Homo sapien
gcacctggccaaaaattcatctttt

SEQ ID NO: 3475132 - DNA, 25 bp, Homo sapien
ctgcacctggccaaaaattcatctt

SEQ ID NO: 3475133 - DNA, 25 bp, Homo sapien
tgcacctggccaaaaattcatcttt

SEQ ID NO: 3475134 - DNA, 25 bp, Homo sapien
tgcaagccaccgttggattttttct

SEQ ID NO: 3475135 - DNA, 25 bp, Homo sapien
tgttgtttcctctctgcaagccacc

SEQ ID NO: 3475136 - DNA, 25 bp, Homo sapien
atctggtccatggtgaggggactac

SEQ ID NO: 3475137 - DNA, 25 bp, Homo sapien
tagttctgtgtttggccggatctgg

SEQ ID NO: 3475138 - DNA, 25 bp, Homo sapien
gatttgaggctttccagctgatgca

SEQ ID NO: 3475139 - DNA, 25 bp, Homo sapien
ggcatgtaaaggcacccagtagact

SEQ ID NO: 3475140 - DNA, 25 bp, Homo sapien
tcataagagaataagggcccaacag

SEQ ID NO: 3475141 - DNA, 25 bp, Homo sapien
catggatatgatacccgttgcctaa

SEQ ID NO: 3475142 - DNA, 25 bp, Homo sapien
gtagagagggtccaaggccaaacat

SEQ ID NO: 3475143 - DNA, 25 bp, Homo sapien
cgcgccggtcgaagatacttaaatg

SEQ ID NO: 3475144 - DNA, 25 bp, Homo sapien
aaccggcaaggagcggaaatgcgca

SEQ ID NO: 3475145 - DNA, 25 bp, Homo sapien
gaacagtaggattccgcagagaagc

SEQ ID NO: 3475146 - DNA, 25 bp, Homo sapien
ctccacaaggttacggacaaattgg

SEQ ID NO: 3475147 - DNA, 25 bp, Homo sapien
tcttctccacaaggttacggacaaa

SEQ ID NO: 3475148 - DNA, 25 bp, Homo sapien
cgttcaccagcgccggggtcttctc

SEQ ID NO: 3475149 - DNA, 25 bp, Homo sapien
caaggttacggacaaattgggccat

SEQ ID NO: 3475150 - DNA, 25 bp, Homo sapien
cgtgtgcccgcctcggcggtctcac

SEQ ID NO: 3475151 - DNA, 25 bp, Homo sapien
cgggtcttcgcagcccgcttcttcc

SEQ ID NO: 3475152 - DNA, 25 bp, Homo sapien
gcccgtgtgcccgcctcggcggtct

SEQ ID NO: 3475153 - DNA, 25 bp, Homo sapien
aggcccctcgggtcttcgcagcccg

SEQ ID NO: 3475154 - DNA, 25 bp, Homo sapien
tagaatccgtctaggacagaaagca

SEQ ID NO: 3475155 - DNA, 25 bp, Homo sapien
ttgtgtagagaacccaatctgcagg

SEQ ID NO: 3475156 - DNA, 25 bp, Homo sapien
caacaccacatgtaatgaggccgaa

SEQ ID NO: 3475157 - DNA, 25 bp, Homo sapien
tacagcggtctaccagtgaggctct

SEQ ID NO: 3475158 - DNA, 25 bp, Homo sapien
ttttagatcacaaaaattagtttgc

SEQ ID NO: 3475159 - DNA, 25 bp, Homo sapien
cacaaaaattagtttgcaattcctt

SEQ ID NO: 3475160 - DNA, 25 bp, Homo sapien
gatcacaaaaattagtttgcaattc

SEQ ID NO: 3475161 - DNA, 25 bp, Homo sapien
tttagatcacaaaaattagtttgca

SEQ ID NO: 3475162 - DNA, 25 bp, Homo sapien
tacagtagaggaacctataaccaag

SEQ ID NO: 3475163 - DNA, 25 bp, Homo sapien
ggaacataaacagcacccagacctt

SEQ ID NO: 3475164 - DNA, 25 bp, Homo sapien
tagaatagaacacggagagaaaaac

SEQ ID NO: 3475165 - DNA, 25 bp, Homo sapien
gaggtgctaacctgaaagagctccc

SEQ ID NO: 3475166 - DNA, 25 bp, Homo sapien
aagcagacacaaagctctaagagat

SEQ ID NO: 3475167 - DNA, 25 bp, Homo sapien
tgtaccaaatgtgcacccggtgtga

SEQ ID NO: 3475168 - DNA, 25 bp, Homo sapien
cccggtgtgaaaagtcaaagctgct

SEQ ID NO: 3475169 - DNA, 25 bp, Homo sapien
tcactagagaccgaaagaagcagat

SEQ ID NO: 3475170 - DNA, 25 bp, Homo sapien
aagctgctccctggtaacaagaggc

SEQ ID NO: 3475171 - DNA, 25 bp, Homo sapien
cgaggcttcgagtaagtcacagcag

SEQ ID NO: 3475172 - DNA, 25 bp, Homo sapien
atcgaggcttcgagtaagtcacagc

SEQ ID NO: 3475173 - DNA, 25 bp, Homo sapien
gccaatcgaggcttcgagtaagtca

SEQ ID NO: 3475174 - DNA, 25 bp, Homo sapien
aaaatgtggccaatcgaggcttcga

SEQ ID NO: 3475175 - DNA, 25 bp, Homo sapien
gctctgaatagctctagggatctca

SEQ ID NO: 3475176 - DNA, 25 bp, Homo sapien
tgggaggaaccagctcaaccttggc

SEQ ID NO: 3475177 - DNA, 25 bp, Homo sapien
cagtctgagcactattgactatttt

SEQ ID NO: 3475178 - DNA, 25 bp, Homo sapien
ctgtttgaagctaccagtctgagca

SEQ ID NO: 3475179 - DNA, 25 bp, Homo sapien
tctacccaggtgacaaaattagaaa

SEQ ID NO: 3475180 - DNA, 25 bp, Homo sapien
tttgctaggtttaagactcttagga

SEQ ID NO: 3475181 - DNA, 25 bp, Homo sapien
catccgttttcatttagcccgtggt

SEQ ID NO: 3475182 - DNA, 25 bp, Homo sapien
cataaaatgggctaattatttctac

SEQ ID NO: 3475183 - DNA, 25 bp, Homo sapien
gaattactaacattacttctcttca

SEQ ID NO: 3475184 - DNA, 25 bp, Homo sapien
ttctcttcaactgctgagaaccctt

SEQ ID NO: 3475185 - DNA, 25 bp, Homo sapien
tgctattcaaactagaaggcagttt

SEQ ID NO: 3475186 - DNA, 25 bp, Homo sapien
gaaggcagttttagtcaaagttgag

SEQ ID NO: 3475187 - DNA, 25 bp, Homo sapien
gcttgcctataatctctccgacata

SEQ ID NO: 3475188 - DNA, 25 bp, Homo sapien
gatgccccgcttgcctataatctct

SEQ ID NO: 3475189 - DNA, 25 bp, Homo sapien
tcatagccaatgatgccccgcttgc

SEQ ID NO: 3475190 - DNA, 25 bp, Homo sapien
taatctctccgacataaaaccacat

SEQ ID NO: 3475191 - DNA, 25 bp, Homo sapien
ataatcagatgttaaagattggtct

SEQ ID NO: 3475192 - DNA, 25 bp, Homo sapien
atagcagtctgatcacacatggtcc

SEQ ID NO: 3475193 - DNA, 25 bp, Homo sapien
ctgatcacacatggtccaacaacac

SEQ ID NO: 3475194 - DNA, 25 bp, Homo sapien
catggtccaacaacactcaaataat

SEQ ID NO: 3475195 - DNA, 25 bp, Homo sapien
catgtaccaggttaatattgccaca

SEQ ID NO: 3475196 - DNA, 25 bp, Homo sapien
tccaattgcgggctaaacagacgtg

SEQ ID NO: 3475197 - DNA, 25 bp, Homo sapien
gacaacccagcttaatatcaagaga

SEQ ID NO: 3475198 - DNA, 25 bp, Homo sapien
tactatttagatccagggaagatgc

SEQ ID NO: 3475199 - DNA, 25 bp, Homo sapien
caggtaacagtcttgttcatgaatg

SEQ ID NO: 3475200 - DNA, 25 bp, Homo sapien
aacaggtaacagtcttgttcatgaa

SEQ ID NO: 3475201 - DNA, 25 bp, Homo sapien
gaaacaggtaacagtcttgttcatg

SEQ ID NO: 3475202 - DNA, 25 bp, Homo sapien
gtgaaacaggtaacagtcttgttca

SEQ ID NO: 3475203 - DNA, 25 bp, Homo sapien
ggctaatgtactttccttgtttata

SEQ ID NO: 3475204 - DNA, 25 bp, Homo sapien
tctctgacaacctcccttgaacgtc

SEQ ID NO: 3475205 - DNA, 25 bp, Homo sapien
ggccagcataccttgctccattctt

SEQ ID NO: 3475206 - DNA, 25 bp, Homo sapien
acaggttgtttcacttggccagcat

SEQ ID NO: 3475207 - DNA, 25 bp, Homo sapien
acaagggtgatcacaatcttatgtc

SEQ ID NO: 3475208 - DNA, 25 bp, Homo sapien
gttactgaattcatcacaagggtga

SEQ ID NO: 3475209 - DNA, 25 bp, Homo sapien
actgttactgaattcatcacaaggg

SEQ ID NO: 3475210 - DNA, 25 bp, Homo sapien
gaattcatcacaagggtgatcacaa

SEQ ID NO: 3475211 - DNA, 25 bp, Homo sapien
tataaatcaggaaatgcgggcttgg

SEQ ID NO: 3475212 - DNA, 25 bp, Homo sapien
cactggaatgcattaaaacttggag

SEQ ID NO: 3475213 - DNA, 25 bp, Homo sapien
cttggagcctctgaagataaccttc

SEQ ID NO: 3475214 - DNA, 25 bp, Homo sapien
tataaaggatcttctgctgcctacc

SEQ ID NO: 3475215 - DNA, 25 bp, Homo sapien
gaactgttcagaatcctcaggtgct

SEQ ID NO: 3475216 - DNA, 25 bp, Homo sapien
agggatttccttaaccactggtgcg

SEQ ID NO: 3475217 - DNA, 25 bp, Homo sapien
agtggacacattgcatcagtagtcc

SEQ ID NO: 3475218 - DNA, 25 bp, Homo sapien
ttaagcttgtccaaaggaaggcttg

SEQ ID NO: 3475219 - DNA, 25 bp, Homo sapien
acagagacaccccattgtggacggt

SEQ ID NO: 3475220 - DNA, 25 bp, Homo sapien
gatcagttacagattggcgaccacg

SEQ ID NO: 3475221 - DNA, 25 bp, Homo sapien
taacggtctgcagaggtaataggca

SEQ ID NO: 3475222 - DNA, 25 bp, Homo sapien
agcaggagggtcttaaacggcagcc

SEQ ID NO: 3475223 - DNA, 25 bp, Homo sapien
cggtacagcgcactgcatgtaatat

SEQ ID NO: 3475224 - DNA, 25 bp, Homo sapien
gtacagcgcactgcatgtaatatta

SEQ ID NO: 3475225 - DNA, 25 bp, Homo sapien
tacagcgcactgcatgtaatattac

SEQ ID NO: 3475226 - DNA, 25 bp, Homo sapien
ggtacagcgcactgcatgtaatatt

SEQ ID NO: 3475227 - DNA, 25 bp, Homo sapien
tgtgtcgggagaacttgcgttggct

SEQ ID NO: 3475228 - DNA, 25 bp, Homo sapien
agggcgcctcgagcatagcgttaga

SEQ ID NO: 3475229 - DNA, 25 bp, Homo sapien
catagcgttagacgcctgcaaggct

SEQ ID NO: 3475230 - DNA, 25 bp, Homo sapien
tgggggatcgatacacagcctgcag

SEQ ID NO: 3475231 - DNA, 25 bp, Homo sapien
gcgtgctccgctaacgacgcggtgt

SEQ ID NO: 3475232 - DNA, 25 bp, Homo sapien
ggtgttacaacgaagctgaagctgg

SEQ ID NO: 3475233 - DNA, 25 bp, Homo sapien
tctggctttcgtgcccttctgcagg

SEQ ID NO: 3475234 - DNA, 25 bp, Homo sapien
tctactgtgcactcgtctggctttc

SEQ ID NO: 3475235 - DNA, 25 bp, Homo sapien
gcggggaagcgccaccgacagctgt

SEQ ID NO: 3475236 - DNA, 25 bp, Homo sapien
gcagggccgggacgcgttgccgcgg

SEQ ID NO: 3475237 - DNA, 25 bp, Homo sapien
cagcagggccgggacgcgttgccgc

SEQ ID NO: 3475238 - DNA, 25 bp, Homo sapien
ggaagcgccaccgacagctgtgcgc

SEQ ID NO: 3475239 - DNA, 25 bp, Homo sapien
ctgaggcggcggccgctccccctgg

SEQ ID NO: 3475240 - DNA, 25 bp, Homo sapien
tgctgaggcggcggccgctccccct

SEQ ID NO: 3475241 - DNA, 25 bp, Homo sapien
ctgctgaggcggcggccgctccccc

SEQ ID NO: 3475242 - DNA, 25 bp, Homo sapien
gaggcggcggccgctccccctggaa

SEQ ID NO: 3475243 - DNA, 25 bp, Homo sapien
tgacgaagacgaagacgaggcggac

SEQ ID NO: 3475244 - DNA, 25 bp, Homo sapien
acgatgacgaagacgaagacgaggc

SEQ ID NO: 3475245 - DNA, 25 bp, Homo sapien
gatgacgaagacgaagacgaggcgg

SEQ ID NO: 3475246 - DNA, 25 bp, Homo sapien
cgaagacgaagacgaggcggacgac

SEQ ID NO: 3475247 - DNA, 25 bp, Homo sapien
ccggaaccggcgcaggttggtgccg

SEQ ID NO: 3475248 - DNA, 25 bp, Homo sapien
cacggcccggaaccggcgcaggttg

SEQ ID NO: 3475249 - DNA, 25 bp, Homo sapien
agcgccgcgtcgaagcccgggccca

SEQ ID NO: 3475250 - DNA, 25 bp, Homo sapien
gcgcaggttggtgccgatggcggcc

SEQ ID NO: 3475251 - DNA, 25 bp, Homo sapien
agacgcccgagaggaaaactgccct

SEQ ID NO: 3475252 - DNA, 25 bp, Homo sapien
aaggtgctggaagggacacgatccc

SEQ ID NO: 3475253 - DNA, 25 bp, Homo sapien
tgccctaggagtaacacatctgccc

SEQ ID NO: 3475254 - DNA, 25 bp, Homo sapien
ctggatgaggccatcacccgagaga

SEQ ID NO: 3475255 - DNA, 25 bp, Homo sapien
gggatgggggaggatcggtctgctt

SEQ ID NO: 3475256 - DNA, 25 bp, Homo sapien
gggagtggctggcagtatagggacc

SEQ ID NO: 3475257 - DNA, 25 bp, Homo sapien
gatgggggaggatcggtctgcttgg

SEQ ID NO: 3475258 - DNA, 25 bp, Homo sapien
tggcccggggatggcgcgagggttc

SEQ ID NO: 3475259 - DNA, 25 bp, Homo sapien
gaaaggaggtgagaccaggcaaggt

SEQ ID NO: 3475260 - DNA, 25 bp, Homo sapien
aaggtgcagaggagagattttcccc

SEQ ID NO: 3475261 - DNA, 25 bp, Homo sapien
agagactgctgtatgaggaatcacc

SEQ ID NO: 3475262 - DNA, 25 bp, Homo sapien
tgtatgaggaatcaccgttatcttc

SEQ ID NO: 3475263 - DNA, 25 bp, Homo sapien
ctaatccttcattctaaaggaggga

SEQ ID NO: 3475264 - DNA, 25 bp, Homo sapien
tcgggttggagactgcgtgctctca

SEQ ID NO: 3475265 - DNA, 25 bp, Homo sapien
taattcccggctaccaataggctag

SEQ ID NO: 3475266 - DNA, 25 bp, Homo sapien
ttttcccctccaagatgccactaat

SEQ ID NO: 3475267 - DNA, 25 bp, Homo sapien
caagccccaggattggcctaggaaa

SEQ ID NO: 3475268 - DNA, 25 bp, Homo sapien
ccttgggtccccttacaagaatcag

SEQ ID NO: 3475269 - DNA, 25 bp, Homo sapien
tatagaagcaactccgttcttgccc

SEQ ID NO: 3475270 - DNA, 25 bp, Homo sapien
cgccaccacactaaagtataactgt

SEQ ID NO: 3475271 - DNA, 25 bp, Homo sapien
cagagcacgcaggaaacggctggtt

SEQ ID NO: 3475272 - DNA, 25 bp, Homo sapien
tgtttcaatcaagagcactccagag

SEQ ID NO: 3475273 - DNA, 25 bp, Homo sapien
tagctacatagcaaggaacacgccc

SEQ ID NO: 3475274 - DNA, 25 bp, Homo sapien
ttgtgtgcaccaacggcagagcacg

SEQ ID NO: 3475275 - DNA, 25 bp, Homo sapien
gcaccaactccatgcaagtaacctg

SEQ ID NO: 3475276 - DNA, 25 bp, Homo sapien
catgtatgtggcctttggttctcca

SEQ ID NO: 3475277 - DNA, 25 bp, Homo sapien
tgcaagtaacctgaacggttcagtc

SEQ ID NO: 3475278 - DNA, 25 bp, Homo sapien
tggttctccaactacatgggatctg

SEQ ID NO: 3475279 - DNA, 25 bp, Homo sapien
gaagctctgtgccaacactagtgga

SEQ ID NO: 3475280 - DNA, 25 bp, Homo sapien
tgtgaatgatgatttcctccaggag

SEQ ID NO: 3475281 - DNA, 25 bp, Homo sapien
caagagggcctctaaacaccagata

SEQ ID NO: 3475282 - DNA, 25 bp, Homo sapien
gaggcaattggtatagagtctgcac

SEQ ID NO: 3475283 - DNA, 25 bp, Homo sapien
taaatgctactggaccgatgctgcc

SEQ ID NO: 3475284 - DNA, 25 bp, Homo sapien
gaaagctaccattaccttgatgctg

SEQ ID NO: 3475285 - DNA, 25 bp, Homo sapien
tgctgcccactggtacttcacaggg

SEQ ID NO: 3475286 - DNA, 25 bp, Homo sapien
tctaaaaagtggtcaatcctcatgg

SEQ ID NO: 3475287 - DNA, 25 bp, Homo sapien
gaggttgaggctgaaatgaaatgtt

SEQ ID NO: 3475288 - DNA, 25 bp, Homo sapien
gactaatgggtctgaacctggagcc

SEQ ID NO: 3475289 - DNA, 25 bp, Homo sapien
tacaggctagcaagatcatgcagcg

SEQ ID NO: 3475290 - DNA, 25 bp, Homo sapien
ttataaggaacgaccaagtgcctcc

SEQ ID NO: 3475291 - DNA, 25 bp, Homo sapien
tatagagacaacaggtagcaacccc

SEQ ID NO: 3475292 - DNA, 25 bp, Homo sapien
gacttccaatcatataatcatcttt

SEQ ID NO: 3475293 - DNA, 25 bp, Homo sapien
ttcctcataggactgacttccaatc

SEQ ID NO: 3475294 - DNA, 25 bp, Homo sapien
cttttgagtctcctcagaaccgtct

SEQ ID NO: 3475295 - DNA, 25 bp, Homo sapien
gtctcctcagaaccgtctccaaggt

SEQ ID NO: 3475296 - DNA, 25 bp, Homo sapien
ctttacacaactactcctgatttcg

SEQ ID NO: 3475297 - DNA, 25 bp, Homo sapien
taccatgactgtaatgacaaccatc

SEQ ID NO: 3475298 - DNA, 25 bp, Homo sapien
aggaaaaggtagcttaagaggtcat

SEQ ID NO: 3475299 - DNA, 25 bp, Homo sapien
gctgggaaaccgctggttaccattc

SEQ ID NO: 3475300 - DNA, 25 bp, Homo sapien
ttctgagaagcccacattaggtggc

SEQ ID NO: 3475301 - DNA, 25 bp, Homo sapien
tgaaccccaggcattttatgagact

SEQ ID NO: 3475302 - DNA, 25 bp, Homo sapien
taacactgaagcctccaagttggcc

SEQ ID NO: 3475303 - DNA, 25 bp, Homo sapien
gagatcaggtcttaccaagttgccc

SEQ ID NO: 3475304 - DNA, 25 bp, Homo sapien
tgacaagtttaagtggttaacttca

SEQ ID NO: 3475305 - DNA, 25 bp, Homo sapien
gagctacatgctcattcaactacaa

SEQ ID NO: 3475306 - DNA, 25 bp, Homo sapien
taagaaattttggtcccccatatga

SEQ ID NO: 3475307 - DNA, 25 bp, Homo sapien
aagtcaggttacatctttccttctg

SEQ ID NO: 3475308 - DNA, 25 bp, Homo sapien
tatggtatggtcaaagcaaatgcaa

SEQ ID NO: 3475309 - DNA, 25 bp, Homo sapien
cagagtagggccaagatagaagaca

SEQ ID NO: 3475310 - DNA, 25 bp, Homo sapien
gcaaatgcaatgaatacagactgct

SEQ ID NO: 3475311 - DNA, 25 bp, Homo sapien
cagactgctaccattggttctcaaa

SEQ ID NO: 3475312 - DNA, 25 bp, Homo sapien
ccttgtgggacttcgcactctgact

SEQ ID NO: 3475313 - DNA, 25 bp, Homo sapien
tgtgggacttcgcactctgacttct

SEQ ID NO: 3475314 - DNA, 25 bp, Homo sapien
gggacttcgcactctgacttcttca

SEQ ID NO: 3475315 - DNA, 25 bp, Homo sapien
gagaccttgtgggacttcgcactct

SEQ ID NO: 3475316 - DNA, 25 bp, Homo sapien
taacccaagtatggtagagcatcct

SEQ ID NO: 3475317 - DNA, 25 bp, Homo sapien
caatgtggcctgatagataagagtc

SEQ ID NO: 3475318 - DNA, 25 bp, Homo sapien
ggcaccatgcacttaattggccgta

SEQ ID NO: 3475319 - DNA, 25 bp, Homo sapien
taagagtcccataaagaagtctagc

SEQ ID NO: 3475320 - DNA, 25 bp, Homo sapien
ctgaggatactcttactaggttacc

SEQ ID NO: 3475321 - DNA, 25 bp, Homo sapien
gacaatagtggaccaaatttcatcc

SEQ ID NO: 3475322 - DNA, 25 bp, Homo sapien
gacatatacactaccacataacaca

SEQ ID NO: 3475323 - DNA, 25 bp, Homo sapien
tcactttgcctaccagatttcccag

SEQ ID NO: 3475324 - DNA, 25 bp, Homo sapien
caatcgggctgaagcagcggtacca

SEQ ID NO: 3475325 - DNA, 25 bp, Homo sapien
tgcaaagccaacgtcctcgggagtt

SEQ ID NO: 3475326 - DNA, 25 bp, Homo sapien
gaaaagtattgtggctctgacctag

SEQ ID NO: 3475327 - DNA, 25 bp, Homo sapien
taactggcttaatccttcgagggct

SEQ ID NO: 3475328 - DNA, 25 bp, Homo sapien
ttggagtaaatcttggagctctcag

SEQ ID NO: 3475329 - DNA, 25 bp, Homo sapien
tggagtaaatcttggagctctcaga

SEQ ID NO: 3475330 - DNA, 25 bp, Homo sapien
tttaaggcactagtggcaagaggac

SEQ ID NO: 3475331 - DNA, 25 bp, Homo sapien
gaaaatggctctgccggagcactag

SEQ ID NO: 3475332 - DNA, 25 bp, Homo sapien
cagcagaagttcgattactaggcaa

SEQ ID NO: 3475333 - DNA, 25 bp, Homo sapien
tactaggcaaggttacagactcaaa

SEQ ID NO: 3475334 - DNA, 25 bp, Homo sapien
tttccttgactcccgcttattctcc

SEQ ID NO: 3475335 - DNA, 25 bp, Homo sapien
ctctttccttgactcccgcttattc

SEQ ID NO: 3475336 - DNA, 25 bp, Homo sapien
tctttccttgactcccgcttattct

SEQ ID NO: 3475337 - DNA, 25 bp, Homo sapien
ctttccttgactcccgcttattctc

SEQ ID NO: 3475338 - DNA, 25 bp, Homo sapien
tacccacaggatacaaagcagaact

SEQ ID NO: 3475339 - DNA, 25 bp, Homo sapien
ctacccacaggatacaaagcagaac

SEQ ID NO: 3475340 - DNA, 25 bp, Homo sapien
ccacaggatacaaagcagaactact

SEQ ID NO: 3475341 - DNA, 25 bp, Homo sapien
cccacaggatacaaagcagaactac

SEQ ID NO: 3475342 - DNA, 25 bp, Homo sapien
tgaagacttcttccgccctgttgct

SEQ ID NO: 3475343 - DNA, 25 bp, Homo sapien
cagttgggccgaggtccaagttggt

SEQ ID NO: 3475344 - DNA, 25 bp, Homo sapien
gtcccagaatcatgtgatgaagact

SEQ ID NO: 3475345 - DNA, 25 bp, Homo sapien
aagatgaagtggcaacatcttcacc

SEQ ID NO: 3475346 - DNA, 25 bp, Homo sapien
tcttgtcagtcattggaagcttgtc

SEQ ID NO: 3475347 - DNA, 25 bp, Homo sapien
tttggccttttttaggaggctggca

SEQ ID NO: 3475348 - DNA, 25 bp, Homo sapien
tggccttttttaggaggctggcaac

SEQ ID NO: 3475349 - DNA, 25 bp, Homo sapien
aggctggcaaccctcttgtcagtca

SEQ ID NO: 3475350 - DNA, 25 bp, Homo sapien
gggtcctcgcacagaggtctctgat

SEQ ID NO: 3475351 - DNA, 25 bp, Homo sapien
tcttcccatggtaaggcactcaggg

SEQ ID NO: 3475352 - DNA, 25 bp, Homo sapien
tcgttttcggccaagggcaacagct

SEQ ID NO: 3475353 - DNA, 25 bp, Homo sapien
cagggtgggcatgtcatcaggaaac

SEQ ID NO: 3475354 - DNA, 25 bp, Homo sapien
ttatattgcgaccaccaaacttggg

SEQ ID NO: 3475355 - DNA, 25 bp, Homo sapien
gggtgccttgtttctagtgacaggt

SEQ ID NO: 3475356 - DNA, 25 bp, Homo sapien
tctgagccagcaattgatgacttgt

SEQ ID NO: 3475357 - DNA, 25 bp, Homo sapien
cgcctcgatcgacgtcctttcttta

SEQ ID NO: 3475358 - DNA, 25 bp, Homo sapien
taaggtcagaccaaaccaaagcaca

SEQ ID NO: 3475359 - DNA, 25 bp, Homo sapien
ttaaataaagtatgccagatggcag

SEQ ID NO: 3475360 - DNA, 25 bp, Homo sapien
gatggcagaaagtacctccacaaac

SEQ ID NO: 3475361 - DNA, 25 bp, Homo sapien
ttgtgccagtagtttacaagatgct

SEQ ID NO: 3475362 - DNA, 25 bp, Homo sapien
ctgcaggtaggctttggaaggcatc

SEQ ID NO: 3475363 - DNA, 25 bp, Homo sapien
tttggaaggcatccattgtagattc

SEQ ID NO: 3475364 - DNA, 25 bp, Homo sapien
ctcactaggagtggttttgggaact

SEQ ID NO: 3475365 - DNA, 25 bp, Homo sapien
cactcttttcctcgacgggctttcg

SEQ ID NO: 3475366 - DNA, 25 bp, Homo sapien
ggtttctgactagagtccaccacgt

SEQ ID NO: 3475367 - DNA, 25 bp, Homo sapien
tggaggaggctcactactgcttttc

SEQ ID NO: 3475368 - DNA, 25 bp, Homo sapien
gttagtacttgtggttcagcaattc

SEQ ID NO: 3475369 - DNA, 25 bp, Homo sapien
ttttgttagtacttgtggttcagca

SEQ ID NO: 3475370 - DNA, 25 bp, Homo sapien
catttcctgctttcaaatgctgttt

SEQ ID NO: 3475371 - DNA, 25 bp, Homo sapien
taaacataatagttagaaagagagc

SEQ ID NO: 3475372 - DNA, 25 bp, Homo sapien
agggatacttgggcggggagccact

SEQ ID NO: 3475373 - DNA, 25 bp, Homo sapien
tacagggatacttgggcggggagcc

SEQ ID NO: 3475374 - DNA, 25 bp, Homo sapien
acagggatacttgggcggggagcca

SEQ ID NO: 3475375 - DNA, 25 bp, Homo sapien
ttacagggatacttgggcggggagc

SEQ ID NO: 3475376 - DNA, 25 bp, Homo sapien
cagattcctaggctagaacatgtgg

SEQ ID NO: 3475377 - DNA, 25 bp, Homo sapien
tcaaaaaataattacgccaaatggc

SEQ ID NO: 3475378 - DNA, 25 bp, Homo sapien
ggcctttagaataagcagattccta

SEQ ID NO: 3475379 - DNA, 25 bp, Homo sapien
cagacaaataattgctaaaggatgt

SEQ ID NO: 3475380 - DNA, 25 bp, Homo sapien
cctgcttattgaccggaggtggttt

SEQ ID NO: 3475381 - DNA, 25 bp, Homo sapien
gctgaggatgttcaaagtgcctgca

SEQ ID NO: 3475382 - DNA, 25 bp, Homo sapien
ttaaagtccactctgatcctgtgga

SEQ ID NO: 3475383 - DNA, 25 bp, Homo sapien
gcttagaactattgccattggagag

SEQ ID NO: 3475384 - DNA, 25 bp, Homo sapien
tcagacacggactattaaaaggctc

SEQ ID NO: 3475385 - DNA, 25 bp, Homo sapien
gatactgctcaggatggataggaat

SEQ ID NO: 3475386 - DNA, 25 bp, Homo sapien
tacagttttgctgactcaaggaatc

SEQ ID NO: 3475387 - DNA, 25 bp, Homo sapien
taaacccacctgctaatgggagttc

SEQ ID NO: 3475388 - DNA, 25 bp, Homo sapien
aagcaaaccaccctgggtgttatag

SEQ ID NO: 3475389 - DNA, 25 bp, Homo sapien
ccaccctgggtgttataggaacaga

SEQ ID NO: 3475390 - DNA, 25 bp, Homo sapien
aagtcaagattcctaagcctcccat

SEQ ID NO: 3475391 - DNA, 25 bp, Homo sapien
gtcaagattcctaagcctcccatct

SEQ ID NO: 3475392 - DNA, 25 bp, Homo sapien
tatatccataagtgtttgaagtgca

SEQ ID NO: 3475393 - DNA, 25 bp, Homo sapien
caattgctatgttagaggatatacc

SEQ ID NO: 3475394 - DNA, 25 bp, Homo sapien
cctatagatggactttcgggttgtt

SEQ ID NO: 3475395 - DNA, 25 bp, Homo sapien
tcaatagcatcccttttaatagacc

SEQ ID NO: 3475396 - DNA, 25 bp, Homo sapien
taagccaaagaggtatctgccagga

SEQ ID NO: 3475397 - DNA, 25 bp, Homo sapien
gtaaaggtggtacatactgcaaaaa

SEQ ID NO: 3475398 - DNA, 25 bp, Homo sapien
tgcacccgacgtggattttctttac

SEQ ID NO: 3475399 - DNA, 25 bp, Homo sapien
ctgtaaaggatgtaggatatgtccc

SEQ ID NO: 3475400 - DNA, 25 bp, Homo sapien
gacagaatttgcaacgacgacaaca

SEQ ID NO: 3475401 - DNA, 25 bp, Homo sapien
gccttccacaaacgtgacagaattt

SEQ ID NO: 3475402 - DNA, 25 bp, Homo sapien
gacgacaacaccaattttccagctg

SEQ ID NO: 3475403 - DNA, 25 bp, Homo sapien
caaaacttgtggaagggctcacaac

SEQ ID NO: 3475404 - DNA, 25 bp, Homo sapien
tttcccagatacattcaatccaagg

SEQ ID NO: 3475405 - DNA, 25 bp, Homo sapien
ttgagtccagggatacagaacccac

SEQ ID NO: 3475406 - DNA, 25 bp, Homo sapien
gcccagctgtagttctattaccaag

SEQ ID NO: 3475407 - DNA, 25 bp, Homo sapien
tcacatagagtacagaggcaactac

SEQ ID NO: 3475408 - DNA, 25 bp, Homo sapien
gcactcagggtgatagctgtttcgg

SEQ ID NO: 3475409 - DNA, 25 bp, Homo sapien
gggtagtttggtcccaggcactcag

SEQ ID NO: 3475410 - DNA, 25 bp, Homo sapien
tgatagctgtttcggcacttattac

SEQ ID NO: 3475411 - DNA, 25 bp, Homo sapien
tgtttcggcacttattacactccag

SEQ ID NO: 3475412 - DNA, 25 bp, Homo sapien
aagagcttggcgcaatcatgacaca

SEQ ID NO: 3475413 - DNA, 25 bp, Homo sapien
tacagcgaacacacttggtacagat

SEQ ID NO: 3475414 - DNA, 25 bp, Homo sapien
tgagaaatcatgagaccactgtgca

SEQ ID NO: 3475415 - DNA, 25 bp, Homo sapien
tttgcctggagttgtggatccacag

SEQ ID NO: 3475416 - DNA, 25 bp, Homo sapien
catttggaatggacccagcgatcac

SEQ ID NO: 3475417 - DNA, 25 bp, Homo sapien
cacatttggaatggacccagcgatc

SEQ ID NO: 3475418 - DNA, 25 bp, Homo sapien
ggaatggacccagcgatcacacttt

SEQ ID NO: 3475419 - DNA, 25 bp, Homo sapien
tctcacatttggaatggacccagcg

SEQ ID NO: 3475420 - DNA, 25 bp, Homo sapien
ttttcaagggccagtcgccactctg

SEQ ID NO: 3475421 - DNA, 25 bp, Homo sapien
tagtccgagaattcaacaaagctgt

SEQ ID NO: 3475422 - DNA, 25 bp, Homo sapien
cagggtgccgctcagtacagttcac

SEQ ID NO: 3475423 - DNA, 25 bp, Homo sapien
ctgccggtagcgtagcaaatggctg

SEQ ID NO: 3475424 - DNA, 25 bp, Homo sapien
tctaaaggctgctgatcatcctgtt

SEQ ID NO: 3475425 - DNA, 25 bp, Homo sapien
tgtttgctgacctcagtaagaactg

SEQ ID NO: 3475426 - DNA, 25 bp, Homo sapien
gagctgcgggaaggtatactctcct

SEQ ID NO: 3475427 - DNA, 25 bp, Homo sapien
gatttaagtctggaggcttggcagc

SEQ ID NO: 3475428 - DNA, 25 bp, Homo sapien
gctttattggcactagaaattctga

SEQ ID NO: 3475429 - DNA, 25 bp, Homo sapien
ttttcagaaaactgagatgaaagcc

SEQ ID NO: 3475430 - DNA, 25 bp, Homo sapien
taggtatctaaagccacgtgacatt

SEQ ID NO: 3475431 - DNA, 25 bp, Homo sapien
ggcatctatctacaaatgaagacct

SEQ ID NO: 3475432 - DNA, 25 bp, Homo sapien
tcttcacaatatcatcactgaactc

SEQ ID NO: 3475433 - DNA, 25 bp, Homo sapien
gaattaatggctgcttgaatgatct

SEQ ID NO: 3475434 - DNA, 25 bp, Homo sapien
gaccatgctgttggcttttttaatt

SEQ ID NO: 3475435 - DNA, 25 bp, Homo sapien
tgaagaaggacttgaccatgctgtt

SEQ ID NO: 3475436 - DNA, 25 bp, Homo sapien
ctggactttttgacactgaaccatg

SEQ ID NO: 3475437 - DNA, 25 bp, Homo sapien
ctgaaccatggaaaaacacgttcca

SEQ ID NO: 3475438 - DNA, 25 bp, Homo sapien
tggactttttgacactgaaccatgg

SEQ ID NO: 3475439 - DNA, 25 bp, Homo sapien
tgaaccatggaaaaacacgttccat

SEQ ID NO: 3475440 - DNA, 25 bp, Homo sapien
aggagttggtgagtctggttctcca

SEQ ID NO: 3475441 - DNA, 25 bp, Homo sapien
tctcgctcctgccactgagcataat

SEQ ID NO: 3475442 - DNA, 25 bp, Homo sapien
ttcttcattaaaggaggctgctcag

SEQ ID NO: 3475443 - DNA, 25 bp, Homo sapien
gaagcactgcgtttggtaacatccc

SEQ ID NO: 3475444 - DNA, 25 bp, Homo sapien
agcactgtcatcaccataagtcaaa

SEQ ID NO: 3475445 - DNA, 25 bp, Homo sapien
taagtcaaacataacgcacactgtc

SEQ ID NO: 3475446 - DNA, 25 bp, Homo sapien
ggactgtcttctcgactcctatcag

SEQ ID NO: 3475447 - DNA, 25 bp, Homo sapien
gcacactgtctattgtcttctatgc

SEQ ID NO: 3475448 - DNA, 25 bp, Homo sapien
attgtagcttactgtgtgtgccagg

SEQ ID NO: 3475449 - DNA, 25 bp, Homo sapien
ccactctgaggtaagcgttattatc

SEQ ID NO: 3475450 - DNA, 25 bp, Homo sapien
aaaaaattgtagcttactgtgtgtg

SEQ ID NO: 3475451 - DNA, 25 bp, Homo sapien
gcaccaaatagaggctttacataca

SEQ ID NO: 3475452 - DNA, 25 bp, Homo sapien
ttacatgtgtccactcattttggcc

SEQ ID NO: 3475453 - DNA, 25 bp, Homo sapien
tcttcaaacacttccgctgaccaca

SEQ ID NO: 3475454 - DNA, 25 bp, Homo sapien
gcacattctttagtgatccgtcatc

SEQ ID NO: 3475455 - DNA, 25 bp, Homo sapien
caatatatagtaaacgaccagcatc

SEQ ID NO: 3475456 - DNA, 25 bp, Homo sapien
ctcctggcttttggcagaattcaca

SEQ ID NO: 3475457 - DNA, 25 bp, Homo sapien
gacacagttcttggctcgggaacac

SEQ ID NO: 3475458 - DNA, 25 bp, Homo sapien
atgtgagacagcaacccacggtggc

SEQ ID NO: 3475459 - DNA, 25 bp, Homo sapien
gcctttgatcaaatcccgatgtcgt

SEQ ID NO: 3475460 - DNA, 25 bp, Homo sapien
tcaagctgattccttcaaagtccac

SEQ ID NO: 3475461 - DNA, 25 bp, Homo sapien
tttagaattcctaagcagtcgattg

SEQ ID NO: 3475462 - DNA, 25 bp, Homo sapien
atcatttagaattcctaagcagtcg

SEQ ID NO: 3475463 - DNA, 25 bp, Homo sapien
gaattcctaagcagtcgattgtcat

SEQ ID NO: 3475464 - DNA, 25 bp, Homo sapien
cctaagcagtcgattgtcatagacc

SEQ ID NO: 3475465 - DNA, 25 bp, Homo sapien
gatgttggactatgggcaatggtcc

SEQ ID NO: 3475466 - DNA, 25 bp, Homo sapien
tatccggctctacgactggaggacg

SEQ ID NO: 3475467 - DNA, 25 bp, Homo sapien
gaggacggcactccactatcttgca

SEQ ID NO: 3475468 - DNA, 25 bp, Homo sapien
tatacacagcgcttgcgagcatctg

SEQ ID NO: 3475469 - DNA, 25 bp, Homo sapien
gagaataactgggtgttcgaatcct

SEQ ID NO: 3475470 - DNA, 25 bp, Homo sapien
aatcctggggacctttgagatgaca

SEQ ID NO: 3475471 - DNA, 25 bp, Homo sapien
gagatgacatgataataacaggagc

SEQ ID NO: 3475472 - DNA, 25 bp, Homo sapien
tgcagaaggcaacggtcgacagcca

SEQ ID NO: 3475473 - DNA, 25 bp, Homo sapien
gacattatccggagtttggaccgct

SEQ ID NO: 3475474 - DNA, 25 bp, Homo sapien
tcagtggccctaagacatgatcaac

SEQ ID NO: 3475475 - DNA, 25 bp, Homo sapien
gattcaagatcagtagcggtcccgg

SEQ ID NO: 3475476 - DNA, 25 bp, Homo sapien
gagccaatgcttcgaagtccagagg

SEQ ID NO: 3475477 - DNA, 25 bp, Homo sapien
ccttctacttgcatgggtggagctt

SEQ ID NO: 3475478 - DNA, 25 bp, Homo sapien
cgttggcccatatactcaggagtca

SEQ ID NO: 3475479 - DNA, 25 bp, Homo sapien
acattgttacatggtcgttggccca

SEQ ID NO: 3475480 - DNA, 25 bp, Homo sapien
tgttagaacgtgcacgggcactgcg

SEQ ID NO: 3475481 - DNA, 25 bp, Homo sapien
tagtataagtcgtcttcatctgaag

SEQ ID NO: 3475482 - DNA, 25 bp, Homo sapien
cccagttgagctgctgtagaatgga

SEQ ID NO: 3475483 - DNA, 25 bp, Homo sapien
ctgttctagtgaagttgtaatagta

SEQ ID NO: 3475484 - DNA, 25 bp, Homo sapien
gaagtgcttaagtcatcggccccat

SEQ ID NO: 3475485 - DNA, 25 bp, Homo sapien
tttgtggccaacagaactcttagtg

SEQ ID NO: 3475486 - DNA, 25 bp, Homo sapien
tatgggatgccagtcgttcctctcc

SEQ ID NO: 3475487 - DNA, 25 bp, Homo sapien
caaagcctgcatggatggagtattc

SEQ ID NO: 3475488 - DNA, 25 bp, Homo sapien
tacttgtgtggactctgcggcttga

SEQ ID NO: 3475489 - DNA, 25 bp, Homo sapien
tgatgaagatgactctgggctctca

SEQ ID NO: 3475490 - DNA, 25 bp, Homo sapien
ctgatgaagatgactctgggctctc

SEQ ID NO: 3475491 - DNA, 25 bp, Homo sapien
gatgaagatgactctgggctctcac

SEQ ID NO: 3475492 - DNA, 25 bp, Homo sapien
tggaactgacgcactacttgtaggg

SEQ ID NO: 3475493 - DNA, 25 bp, Homo sapien
tgtctagaggcagctgaaaccgttt

SEQ ID NO: 3475494 - DNA, 25 bp, Homo sapien
tgaaccccaataagcaggcctgaag

SEQ ID NO: 3475495 - DNA, 25 bp, Homo sapien
ttgctctactgaaccacaaggaggg

SEQ ID NO: 3475496 - DNA, 25 bp, Homo sapien
gactgctccacgctagctgtatcct

SEQ ID NO: 3475497 - DNA, 25 bp, Homo sapien
cacgctagctgtatcctgctgctca

SEQ ID NO: 3475498 - DNA, 25 bp, Homo sapien
gggaggactgctccacgctagctgt

SEQ ID NO: 3475499 - DNA, 25 bp, Homo sapien
gcccacactccttctgggaggactg

SEQ ID NO: 3475500 - DNA, 25 bp, Homo sapien
taaatgaggtggacaaaactgagag

SEQ ID NO: 3475501 - DNA, 25 bp, Homo sapien
aatgaggtggacaaaactgagagct

SEQ ID NO: 3475502 - DNA, 25 bp, Homo sapien
gtcttaaaagacgaattcttcagct

SEQ ID NO: 3475503 - DNA, 25 bp, Homo sapien
tagtcttaaaagacgaattcttcag

SEQ ID NO: 3475504 - DNA, 25 bp, Homo sapien
cccgccttagcttggactgtggatg

SEQ ID NO: 3475505 - DNA, 25 bp, Homo sapien
gaagcacacctacatatattggcac

SEQ ID NO: 3475506 - DNA, 25 bp, Homo sapien
tattagcaatgaccacctctaggga

SEQ ID NO: 3475507 - DNA, 25 bp, Homo sapien
cacacaatagaattggcggcagcga

SEQ ID NO: 3475508 - DNA, 25 bp, Homo sapien
gctggattttgggtcacctgaactt

SEQ ID NO: 3475509 - DNA, 25 bp, Homo sapien
gaacttccggaagaacagcgacttg

SEQ ID NO: 3475510 - DNA, 25 bp, Homo sapien
tcacctgaacttccggaagaacagc

SEQ ID NO: 3475511 - DNA, 25 bp, Homo sapien
ttgggtcacctgaacttccggaaga

SEQ ID NO: 3475512 - DNA, 25 bp, Homo sapien
cttccgcttttgttcttgctgaagc

SEQ ID NO: 3475513 - DNA, 25 bp, Homo sapien
ctttccttccgcttttgttcttgct

SEQ ID NO: 3475514 - DNA, 25 bp, Homo sapien
cagtggggagctgaaattactttcc

SEQ ID NO: 3475515 - DNA, 25 bp, Homo sapien
ctgcacagatctgaaagccatcatc

SEQ ID NO: 3475516 - DNA, 25 bp, Homo sapien
aaatgagagctgctttaggcgggca

SEQ ID NO: 3475517 - DNA, 25 bp, Homo sapien
taggcgggcatttgatcgagcttcc

SEQ ID NO: 3475518 - DNA, 25 bp, Homo sapien
ggactttatctgtcaatgacttcca

SEQ ID NO: 3475519 - DNA, 25 bp, Homo sapien
ggcatttgatcgagcttcctggact

SEQ ID NO: 3475520 - DNA, 25 bp, Homo sapien
gagaatgttctagaattatagagta

SEQ ID NO: 3475521 - DNA, 25 bp, Homo sapien
gaagaacctggaaagtattctgttg

SEQ ID NO: 3475522 - DNA, 25 bp, Homo sapien
tctgagacaggagtggaataacacc

SEQ ID NO: 3475523 - DNA, 25 bp, Homo sapien
tgccttaggcgaacaatttaccata

SEQ ID NO: 3475524 - DNA, 25 bp, Homo sapien
ccacggtgccggctaatatatattt

SEQ ID NO: 3475525 - DNA, 25 bp, Homo sapien
taataagtttgtatgctgcctaaat

SEQ ID NO: 3475526 - DNA, 25 bp, Homo sapien
tagtgtttgctcaaaacaagtgtat

SEQ ID NO: 3475527 - DNA, 25 bp, Homo sapien
gcagtgctaagatcatagcttaata

SEQ ID NO: 3475528 - DNA, 25 bp, Homo sapien
gcactggcccctgataagtgacatt

SEQ ID NO: 3475529 - DNA, 25 bp, Homo sapien
gaaaaagcagacgatcatgccactg

SEQ ID NO: 3475530 - DNA, 25 bp, Homo sapien
ctgttggtcccttaagaatttggct

SEQ ID NO: 3475531 - DNA, 25 bp, Homo sapien
cttggtgtaatgtcctggtgcagag

SEQ ID NO: 3475532 - DNA, 25 bp, Homo sapien
gaatcagaagcaccagggaagtgag

SEQ ID NO: 3475533 - DNA, 25 bp, Homo sapien
aatcagaagcaccagggaagtgagg

SEQ ID NO: 3475534 - DNA, 25 bp, Homo sapien
ctagaagaatcagaagcaccaggga

SEQ ID NO: 3475535 - DNA, 25 bp, Homo sapien
gaagaatcagaagcaccagggaagt

SEQ ID NO: 3475536 - DNA, 25 bp, Homo sapien
tcaaggggggttcattggcctcctc

SEQ ID NO: 3475537 - DNA, 25 bp, Homo sapien
ccctggctgagccgtgagggttcaa

SEQ ID NO: 3475538 - DNA, 25 bp, Homo sapien
cggaatttgtaatttcgacagtgct

SEQ ID NO: 3475539 - DNA, 25 bp, Homo sapien
ctctggcttgtggaaacggaatttg

SEQ ID NO: 3475540 - DNA, 25 bp, Homo sapien
ccaaaactgctgacagaaaagaagg

SEQ ID NO: 3475541 - DNA, 25 bp, Homo sapien
aaaactgctgacagaaaagaaggga

SEQ ID NO: 3475542 - DNA, 25 bp, Homo sapien
aactgctgacagaaaagaagggaac

SEQ ID NO: 3475543 - DNA, 25 bp, Homo sapien
caaaactgctgacagaaaagaaggg

SEQ ID NO: 3475544 - DNA, 25 bp, Homo sapien
tgtcatgagataagaaaatcgagac

SEQ ID NO: 3475545 - DNA, 25 bp, Homo sapien
gtgtcatgagataagaaaatcgaga

SEQ ID NO: 3475546 - DNA, 25 bp, Homo sapien
agtgtcatgagataagaaaatcgag

SEQ ID NO: 3475547 - DNA, 25 bp, Homo sapien
tcattggggttgtattcaggaggct

SEQ ID NO: 3475548 - DNA, 25 bp, Homo sapien
aggaggctgacgatgtttagaagcc

SEQ ID NO: 3475549 - DNA, 25 bp, Homo sapien
gctgacgatgtttagaagccaggaa

SEQ ID NO: 3475550 - DNA, 25 bp, Homo sapien
agccaggaagttaaacatgtcaaat

SEQ ID NO: 3475551 - DNA, 25 bp, Homo sapien
caactgcctccttagaagtcttttt

SEQ ID NO: 3475552 - DNA, 25 bp, Homo sapien
gaagcgcatgggcattggcagatcc

SEQ ID NO: 3475553 - DNA, 25 bp, Homo sapien
tggcagatccatgctagttgccctc

SEQ ID NO: 3475554 - DNA, 25 bp, Homo sapien
gacaccaactgcctccttagaagtc

SEQ ID NO: 3475555 - DNA, 25 bp, Homo sapien
tcgtaatacttttcccgcttgtcag

SEQ ID NO: 3475556 - DNA, 25 bp, Homo sapien
gagcggatgacgttgccggcatact

SEQ ID NO: 3475557 - DNA, 25 bp, Homo sapien
cccgcttgtcagtctggatggagcg

SEQ ID NO: 3475558 - DNA, 25 bp, Homo sapien
tcttacagaaaagaccccggccatg

SEQ ID NO: 3475559 - DNA, 25 bp, Homo sapien
taagtgagttcctctcctcggtaga

SEQ ID NO: 3475560 - DNA, 25 bp, Homo sapien
gatgacccgagaatagcagttaggc

SEQ ID NO: 3475561 - DNA, 25 bp, Homo sapien
tcggtagatcttacgcatggcaaag

SEQ ID NO: 3475562 - DNA, 25 bp, Homo sapien
gaacttccggcatttcttggcgcca

SEQ ID NO: 3475563 - DNA, 25 bp, Homo sapien
gaaatgtaaagattgccgtctccca

SEQ ID NO: 3475564 - DNA, 25 bp, Homo sapien
tcttgcggcgagaaaagggtgcccc

SEQ ID NO: 3475565 - DNA, 25 bp, Homo sapien
catgacagccttttgacaccggagg

SEQ ID NO: 3475566 - DNA, 25 bp, Homo sapien
caacataaggtggtctagtccccaa

SEQ ID NO: 3475567 - DNA, 25 bp, Homo sapien
aaacgtatagctgccagggcttccc

SEQ ID NO: 3475568 - DNA, 25 bp, Homo sapien
tcccggcaaaggagtctggttgaaa

SEQ ID NO: 3475569 - DNA, 25 bp, Homo sapien
ggagccaagagaccaagttccggcc

SEQ ID NO: 3475570 - DNA, 25 bp, Homo sapien
cttgttattggtgtaaaaacagagg

SEQ ID NO: 3475571 - DNA, 25 bp, Homo sapien
gactagtattcatgattcggcacaa

SEQ ID NO: 3475572 - DNA, 25 bp, Homo sapien
gagtacctcggaacaagataccagg

SEQ ID NO: 3475573 - DNA, 25 bp, Homo sapien
ttaaaagccatggactgaactaggc

SEQ ID NO: 3475574 - DNA, 25 bp, Homo sapien
caaggaggacaggtactgactggca

SEQ ID NO: 3475575 - DNA, 25 bp, Homo sapien
tgaggaccaccccttcgtgaggagt

SEQ ID NO: 3475576 - DNA, 25 bp, Homo sapien
ggatgaggaccaccccttcgtgagg

SEQ ID NO: 3475577 - DNA, 25 bp, Homo sapien
aaggatgaggaccaccccttcgtga

SEQ ID NO: 3475578 - DNA, 25 bp, Homo sapien
aaaggatgaggaccaccccttcgtg

SEQ ID NO: 3475579 - DNA, 25 bp, Homo sapien
aaaatcccaaaaggtgactccagat

SEQ ID NO: 3475580 - DNA, 25 bp, Homo sapien
aaatcccaaaaggtgactccagatg

SEQ ID NO: 3475581 - DNA, 25 bp, Homo sapien
ttctgcttcctctccgaggtccaat

SEQ ID NO: 3475582 - DNA, 25 bp, Homo sapien
tccgaggtccaatccaacaatgtct

SEQ ID NO: 3475583 - DNA, 25 bp, Homo sapien
actgcctgatcatttggagtcccca

SEQ ID NO: 3475584 - DNA, 25 bp, Homo sapien
agcactgcctgatcatttggagtcc

SEQ ID NO: 3475585 - DNA, 25 bp, Homo sapien
cctgggcacggttgttgtaggctga

SEQ ID NO: 3475586 - DNA, 25 bp, Homo sapien
ctgggcacggttgttgtaggctgaa

SEQ ID NO: 3475587 - DNA, 25 bp, Homo sapien
ggcctgggcacggttgttgtaggct

SEQ ID NO: 3475588 - DNA, 25 bp, Homo sapien
tgggcacggttgttgtaggctgaag

SEQ ID NO: 3475589 - DNA, 25 bp, Homo sapien
tgctggttctgggagcacctgtgtc

SEQ ID NO: 3475590 - DNA, 25 bp, Homo sapien
gctcctaacagtcaagtagtactag

SEQ ID NO: 3475591 - DNA, 25 bp, Homo sapien
tggactcaaaactccctagcctggc

SEQ ID NO: 3475592 - DNA, 25 bp, Homo sapien
ggtttataccttcacattagcctca

SEQ ID NO: 3475593 - DNA, 25 bp, Homo sapien
cactatgtttatgagtctggcccac

SEQ ID NO: 3475594 - DNA, 25 bp, Homo sapien
gactgaagtccaggtctcgccttgt

SEQ ID NO: 3475595 - DNA, 25 bp, Homo sapien
tgcccgggcaagtagcagccaattt

SEQ ID NO: 3475596 - DNA, 25 bp, Homo sapien
gagttaagctctacagccaagccac

SEQ ID NO: 3475597 - DNA, 25 bp, Homo sapien
ttgcggctcccgggcgtggccattt

SEQ ID NO: 3475598 - DNA, 25 bp, Homo sapien
gctcccgggcgtggccatttacaac

SEQ ID NO: 3475599 - DNA, 25 bp, Homo sapien
cggctcccgggcgtggccatttaca

SEQ ID NO: 3475600 - DNA, 25 bp, Homo sapien
gtggccatttacaacccgcctcgca

SEQ ID NO: 3475601 - DNA, 25 bp, Homo sapien
gcgcgttccagatcctccagggcgc

SEQ ID NO: 3475602 - DNA, 25 bp, Homo sapien
cgcgcgttccagatcctccagggcg

SEQ ID NO: 3475603 - DNA, 25 bp, Homo sapien
tggcgggcggcgcggccccggccgc

SEQ ID NO: 3475604 - DNA, 25 bp, Homo sapien
ggccccggccgccgctcagctccac

SEQ ID NO: 3475605 - DNA, 25 bp, Homo sapien
cgcggccccggccgccgctcagctc

SEQ ID NO: 3475606 - DNA, 25 bp, Homo sapien
ctggcgggcggcgcggccccggccg

SEQ ID NO: 3475607 - DNA, 25 bp, Homo sapien
gtgccgccctctcgaagtccctgcg

SEQ ID NO: 3475608 - DNA, 25 bp, Homo sapien
ccagcatgcggttgcacagcgcggc

SEQ ID NO: 3475609 - DNA, 25 bp, Homo sapien
tcatgtcggccagcatgcggttgca

SEQ ID NO: 3475610 - DNA, 25 bp, Homo sapien
ctcgaagtccctgcgggcgtcgtcg

SEQ ID NO: 3475611 - DNA, 25 bp, Homo sapien
ggctttattggttcagggcccagtc

SEQ ID NO: 3475612 - DNA, 25 bp, Homo sapien
gaggcccgacggctttattggttca

SEQ ID NO: 3475613 - DNA, 25 bp, Homo sapien
cggagtcggtgaggcccgacggctt

SEQ ID NO: 3475614 - DNA, 25 bp, Homo sapien
caggacgcaggagcaggcggagtcg

SEQ ID NO: 3475615 - DNA, 25 bp, Homo sapien
gggccaatcgatgcccgaccacggg

SEQ ID NO: 3475616 - DNA, 25 bp, Homo sapien
agcgccgccggagcaactgctcagg

SEQ ID NO: 3475617 - DNA, 25 bp, Homo sapien
aggtctgatgagcaccgcagtccgc

SEQ ID NO: 3475618 - DNA, 25 bp, Homo sapien
atgagcaccgcagtccgctgcaggg

SEQ ID NO: 3475619 - DNA, 25 bp, Homo sapien
aaagaggcacacacccgcagatacg

SEQ ID NO: 3475620 - DNA, 25 bp, Homo sapien
tccaggctacaatacaaagaggcac

SEQ ID NO: 3475621 - DNA, 25 bp, Homo sapien
catggacatcctgcaggcgcagaag

SEQ ID NO: 3475622 - DNA, 25 bp, Homo sapien
cagatacgcagaagcaacgagcatc

SEQ ID NO: 3475623 - DNA, 25 bp, Homo sapien
ggcaggcctagcaattgctccagga

SEQ ID NO: 3475624 - DNA, 25 bp, Homo sapien
ggaaacgcaaatgtagaccagcccc

SEQ ID NO: 3475625 - DNA, 25 bp, Homo sapien
gaaccatgtacggaaacgcaaatgt

SEQ ID NO: 3475626 - DNA, 25 bp, Homo sapien
aggcacggacacgaacggcaaagcc

SEQ ID NO: 3475627 - DNA, 25 bp, Homo sapien
agcagcagtgtgtgccggagggcgg

SEQ ID NO: 3475628 - DNA, 25 bp, Homo sapien
agcagtgtgtgccggagggcggctg

SEQ ID NO: 3475629 - DNA, 25 bp, Homo sapien
gcagcagtgtgtgccggagggcggc

SEQ ID NO: 3475630 - DNA, 25 bp, Homo sapien
agtgtgtgccggagggcggctgggc

SEQ ID NO: 3475631 - DNA, 25 bp, Homo sapien
cacggttggtactgtgctgtgacca

SEQ ID NO: 3475632 - DNA, 25 bp, Homo sapien
caggaattggcccagtgagaagagc

SEQ ID NO: 3475633 - DNA, 25 bp, Homo sapien
gcctggagtgggtacccaaacagaa

SEQ ID NO: 3475634 - DNA, 25 bp, Homo sapien
cagaaggacttggtcaacgactgaa

SEQ ID NO: 3475635 - DNA, 25 bp, Homo sapien
ccaggtctgaccatctatttgtggc

SEQ ID NO: 3475636 - DNA, 25 bp, Homo sapien
ggcgttcattctcccgaagtgcccg

SEQ ID NO: 3475637 - DNA, 25 bp, Homo sapien
gaccatctatttgtggctccaactc

SEQ ID NO: 3475638 - DNA, 25 bp, Homo sapien
cctgccacccggcaggtgaaggcgt

SEQ ID NO: 3475639 - DNA, 25 bp, Homo sapien
acagtgaaggtgctggtgcctccag

SEQ ID NO: 3475640 - DNA, 25 bp, Homo sapien
gcgttggctgatcggccacttctgg

SEQ ID NO: 3475641 - DNA, 25 bp, Homo sapien
tcagcagtcttgaggtgctggcctc

SEQ ID NO: 3475642 - DNA, 25 bp, Homo sapien
tcccacgctcagcagtcttgaggtg

SEQ ID NO: 3475643 - DNA, 25 bp, Homo sapien
ctagagccaaatgcccagatgtgaa

SEQ ID NO: 3475644 - DNA, 25 bp, Homo sapien
tgctaaatgtcctgcggaccacctg

SEQ ID NO: 3475645 - DNA, 25 bp, Homo sapien
gaggccaatatgctctcaccacagc

SEQ ID NO: 3475646 - DNA, 25 bp, Homo sapien
tgcttcttaccagcgggatcatcac

SEQ ID NO: 3475647 - DNA, 25 bp, Homo sapien
accaccgagaggttgtgtgccaggc

SEQ ID NO: 3475648 - DNA, 25 bp, Homo sapien
gtagttctgcgcatccagcaccagg

SEQ ID NO: 3475649 - DNA, 25 bp, Homo sapien
ctggaagcgacgcactggtgacacc

SEQ ID NO: 3475650 - DNA, 25 bp, Homo sapien
tacttggcgccgacttgggcaatct

SEQ ID NO: 3475651 - DNA, 25 bp, Homo sapien
tttgcagggccgcttgctggccatg

SEQ ID NO: 3475652 - DNA, 25 bp, Homo sapien
aagctttgcagggccgcttgctggc

SEQ ID NO: 3475653 - DNA, 25 bp, Homo sapien
ctgaagctttgcagggccgcttgct

SEQ ID NO: 3475654 - DNA, 25 bp, Homo sapien
gctttgcagggccgcttgctggcca

SEQ ID NO: 3475655 - DNA, 25 bp, Homo sapien
ccaaccacagggcaacaagtattcc

SEQ ID NO: 3475656 - DNA, 25 bp, Homo sapien
gatgtcctctgtgtcaggtcccaag

SEQ ID NO: 3475657 - DNA, 25 bp, Homo sapien
cataggtactactctgccctccttg

SEQ ID NO: 3475658 - DNA, 25 bp, Homo sapien
gtcaggtcccaagtgggtagtgccc

SEQ ID NO: 3475659 - DNA, 25 bp, Homo sapien
gccacaacaatgcccagcagtggca

SEQ ID NO: 3475660 - DNA, 25 bp, Homo sapien
accccacgagggtgcccagtgcaag

SEQ ID NO: 3475661 - DNA, 25 bp, Homo sapien
ccaaggtgctgaaccccacgagggt

SEQ ID NO: 3475662 - DNA, 25 bp, Homo sapien
cacaacaatgcccagcagtggcact

SEQ ID NO: 3475663 - DNA, 25 bp, Homo sapien
gcttgaccctgctacctgggatgca

SEQ ID NO: 3475664 - DNA, 25 bp, Homo sapien
gggatgcatgtcaccgtacccatgg

SEQ ID NO: 3475665 - DNA, 25 bp, Homo sapien
tctgccaccgtcagagatgactggt

SEQ ID NO: 3475666 - DNA, 25 bp, Homo sapien
tgtggagaaagaaaccatgtcccta

SEQ ID NO: 3475667 - DNA, 25 bp, Homo sapien
gatatcagagatgggtgccgggagg

SEQ ID NO: 3475668 - DNA, 25 bp, Homo sapien
ttgatatcagagatgggtgccggga

SEQ ID NO: 3475669 - DNA, 25 bp, Homo sapien
atatcagagatgggtgccgggaggg

SEQ ID NO: 3475670 - DNA, 25 bp, Homo sapien
tgatatcagagatgggtgccgggag

SEQ ID NO: 3475671 - DNA, 25 bp, Homo sapien
caaagttcgggatggatatgagtcc

SEQ ID NO: 3475672 - DNA, 25 bp, Homo sapien
tccccatcctgcatttcggttaggc

SEQ ID NO: 3475673 - DNA, 25 bp, Homo sapien
ggttaggcttgtccacccagcccaa

SEQ ID NO: 3475674 - DNA, 25 bp, Homo sapien
gatggatatgagtcccggcacaggc

SEQ ID NO: 3475675 - DNA, 25 bp, Homo sapien
ttggacgggagggacatgttctccc

SEQ ID NO: 3475676 - DNA, 25 bp, Homo sapien
gaatctggagtgaggtcattgagct

SEQ ID NO: 3475677 - DNA, 25 bp, Homo sapien
gctgaaggttggacgggagggacat

SEQ ID NO: 3475678 - DNA, 25 bp, Homo sapien
caggcgcacgttgttgagttttagg

SEQ ID NO: 3475679 - DNA, 25 bp, Homo sapien
aggagtgtgcctgatgaggcctcgc

SEQ ID NO: 3475680 - DNA, 25 bp, Homo sapien
tctggagattaagcaggggcaaaga

SEQ ID NO: 3475681 - DNA, 25 bp, Homo sapien
gcaaagagcagggccctagatatac

SEQ ID NO: 3475682 - DNA, 25 bp, Homo sapien
gtgtgcctgatgaggcctcgcccct

SEQ ID NO: 3475683 - DNA, 25 bp, Homo sapien
ccggctgttgttctgagccatctgc

SEQ ID NO: 3475684 - DNA, 25 bp, Homo sapien
tctggccggctgttgttctgagcca

SEQ ID NO: 3475685 - DNA, 25 bp, Homo sapien
ggccggctgttgttctgagccatct

SEQ ID NO: 3475686 - DNA, 25 bp, Homo sapien
ctctggccggctgttgttctgagcc

SEQ ID NO: 3475687 - DNA, 25 bp, Homo sapien
cacgctggacactcgatagatatag

SEQ ID NO: 3475688 - DNA, 25 bp, Homo sapien
actgctcacgctggacactcgatag

SEQ ID NO: 3475689 - DNA, 25 bp, Homo sapien
ggacactcgatagatatagcccagc

SEQ ID NO: 3475690 - DNA, 25 bp, Homo sapien
cactcgatagatatagcccagcact

SEQ ID NO: 3475691 - DNA, 25 bp, Homo sapien
gatgcatagctacaagccgtcctgg

SEQ ID NO: 3475692 - DNA, 25 bp, Homo sapien
tgctaacgccgtaggaaaatgatgc

SEQ ID NO: 3475693 - DNA, 25 bp, Homo sapien
ctaatactgggcgatggcacaggcc

SEQ ID NO: 3475694 - DNA, 25 bp, Homo sapien
tagaaaagtctagtgcccagtgaag

SEQ ID NO: 3475695 - DNA, 25 bp, Homo sapien
taatttccaatcatttacatgttgc

SEQ ID NO: 3475696 - DNA, 25 bp, Homo sapien
aattatgtgcctgtggcgaccatcc

SEQ ID NO: 3475697 - DNA, 25 bp, Homo sapien
ctgctgatgaggcaaccatgggttg

SEQ ID NO: 3475698 - DNA, 25 bp, Homo sapien
agcaccgccctaggcagtaacatga

SEQ ID NO: 3475699 - DNA, 25 bp, Homo sapien
tctgtcacccgacaaaggaacaagg

SEQ ID NO: 3475700 - DNA, 25 bp, Homo sapien
gataattaagaccttgggtgcagct

SEQ ID NO: 3475701 - DNA, 25 bp, Homo sapien
ttttggagtggcaaggagctcacac

SEQ ID NO: 3475702 - DNA, 25 bp, Homo sapien
ggcacggccttagccattctatgga

SEQ ID NO: 3475703 - DNA, 25 bp, Homo sapien
tggtcttccctctgttatgcgtctt

SEQ ID NO: 3475704 - DNA, 25 bp, Homo sapien
gtcttccctctgttatgcgtctttg

SEQ ID NO: 3475705 - DNA, 25 bp, Homo sapien
ctgttatgcgtctttgtcctgattt

SEQ ID NO: 3475706 - DNA, 25 bp, Homo sapien
tccctctgttatgcgtctttgtcct

SEQ ID NO: 3475707 - DNA, 25 bp, Homo sapien
acttgtttagatccagagcctgtta

SEQ ID NO: 3475708 - DNA, 25 bp, Homo sapien
caatttgttggcatggttgattccc

SEQ ID NO: 3475709 - DNA, 25 bp, Homo sapien
gctagtagtccagtagtagtccaag

SEQ ID NO: 3475710 - DNA, 25 bp, Homo sapien
gaatagctaggttgcagtacatcca

SEQ ID NO: 3475711 - DNA, 25 bp, Homo sapien
ctgggcaacaataggagactcttct

SEQ ID NO: 3475712 - DNA, 25 bp, Homo sapien
gctcttatatatcaataaggaaagg

SEQ ID NO: 3475713 - DNA, 25 bp, Homo sapien
gagctcttatatatcaataaggaaa

SEQ ID NO: 3475714 - DNA, 25 bp, Homo sapien
agctcttatatatcaataaggaaag

SEQ ID NO: 3475715 - DNA, 25 bp, Homo sapien
cgcgtttgcggctcgacagagacct

SEQ ID NO: 3475716 - DNA, 25 bp, Homo sapien
caagcatttctgaggatagtaacca

SEQ ID NO: 3475717 - DNA, 25 bp, Homo sapien
acagagacccgcgtttgcggctcga

SEQ ID NO: 3475718 - DNA, 25 bp, Homo sapien
taataaaccccattctgcggaacag

SEQ ID NO: 3475719 - DNA, 25 bp, Homo sapien
tcttcttctgttaagtagtgcatgt

SEQ ID NO: 3475720 - DNA, 25 bp, Homo sapien
ttaagctacctgatgtttcttctga

SEQ ID NO: 3475721 - DNA, 25 bp, Homo sapien
gccttcttttaagctacctgatgtt

SEQ ID NO: 3475722 - DNA, 25 bp, Homo sapien
gagcttgccttcttttaagctacct

SEQ ID NO: 3475723 - DNA, 25 bp, Homo sapien
aagctacctgatgtttcttctgagc

SEQ ID NO: 3475724 - DNA, 25 bp, Homo sapien
tacctggccagaaacccacttttga

SEQ ID NO: 3475725 - DNA, 25 bp, Homo sapien
acctggccagaaacccacttttgat

SEQ ID NO: 3475726 - DNA, 25 bp, Homo sapien
tggccagaaacccacttttgatagg

SEQ ID NO: 3475727 - DNA, 25 bp, Homo sapien
cctggccagaaacccacttttgata

SEQ ID NO: 3475728 - DNA, 25 bp, Homo sapien
cgaaatttatcagccgcgttgccac

SEQ ID NO: 3475729 - DNA, 25 bp, Homo sapien
ttccagattgaagggctaactctac

SEQ ID NO: 3475730 - DNA, 25 bp, Homo sapien
tacaccagcccgaaatttatcagcc

SEQ ID NO: 3475731 - DNA, 25 bp, Homo sapien
ggctaactctacaccagcccgaaat

SEQ ID NO: 3475732 - DNA, 25 bp, Homo sapien
ttcgcctcttgccaagatggcggcc

SEQ ID NO: 3475733 - DNA, 25 bp, Homo sapien
tagggtctggggaacgggagcacca

SEQ ID NO: 3475734 - DNA, 25 bp, Homo sapien
tgccgcttcgcctcttgccaagatg

SEQ ID NO: 3475735 - DNA, 25 bp, Homo sapien
cgcgcccgcactccggctccactgg

SEQ ID NO: 3475736 - DNA, 25 bp, Homo sapien
ctggacgatgttttaaatcaagtta

SEQ ID NO: 3475737 - DNA, 25 bp, Homo sapien
cactggacgatgttttaaatcaagt

SEQ ID NO: 3475738 - DNA, 25 bp, Homo sapien
tgttcagtggcctaaagtccaagca

SEQ ID NO: 3475739 - DNA, 25 bp, Homo sapien
atccaagttcttatctaaagggttg

SEQ ID NO: 3475740 - DNA, 25 bp, Homo sapien
ctaaagggttgtcaatagaacttat

SEQ ID NO: 3475741 - DNA, 25 bp, Homo sapien
gattgccaccaaattacattctgcc

SEQ ID NO: 3475742 - DNA, 25 bp, Homo sapien
aaaagtcagaacatgttctcattaa

SEQ ID NO: 3475743 - DNA, 25 bp, Homo sapien
gctacttgggatatggaggcgggag

SEQ ID NO: 3475744 - DNA, 25 bp, Homo sapien
gttctaggccgcagtgcactatgat

SEQ ID NO: 3475745 - DNA, 25 bp, Homo sapien
gctaggagttctaggccgcagtgca

SEQ ID NO: 3475746 - DNA, 25 bp, Homo sapien
tatagcataaatctccgaacaccca

SEQ ID NO: 3475747 - DNA, 25 bp, Homo sapien
tctgttacagctactaatatggcta

SEQ ID NO: 3475748 - DNA, 25 bp, Homo sapien
ggcttccaaaataggaccatagttc

SEQ ID NO: 3475749 - DNA, 25 bp, Homo sapien
aatatggctagaaggtatggtcacc

SEQ ID NO: 3475750 - DNA, 25 bp, Homo sapien
tgggagccagggcaggcagatcacc

SEQ ID NO: 3475751 - DNA, 25 bp, Homo sapien
gcactttgggagccagggcaggcag

SEQ ID NO: 3475752 - DNA, 25 bp, Homo sapien
cggtggctcatgccttaatccagca

SEQ ID NO: 3475753 - DNA, 25 bp, Homo sapien
aaacagcatttaggccgggagcggt

SEQ ID NO: 3475754 - DNA, 25 bp, Homo sapien
tatacatataagtgaattattaact

SEQ ID NO: 3475755 - DNA, 25 bp, Homo sapien
taactattttaagaacatatttgac

SEQ ID NO: 3475756 - DNA, 25 bp, Homo sapien
catatacatataagtgaattattaa

SEQ ID NO: 3475757 - DNA, 25 bp, Homo sapien
catatttgactatttttgctacctt

SEQ ID NO: 3475758 - DNA, 25 bp, Homo sapien
atataaatgggtttttatgacttgg

SEQ ID NO: 3475759 - DNA, 25 bp, Homo sapien
taataagccctcaatccgagttcgg

SEQ ID NO: 3475760 - DNA, 25 bp, Homo sapien
cactcttgagaagagccttagggtc

SEQ ID NO: 3475761 - DNA, 25 bp, Homo sapien
cataggctggtagacatatcttaca

SEQ ID NO: 3475762 - DNA, 25 bp, Homo sapien
catatacagtttctccataggctgg

SEQ ID NO: 3475763 - DNA, 25 bp, Homo sapien
ggttctgatctgtgccaagttaaca

SEQ ID NO: 3475764 - DNA, 25 bp, Homo sapien
agatatttcattctcttctaaggct

SEQ ID NO: 3475765 - DNA, 25 bp, Homo sapien
aacattctcccggtatcccagtgcg

SEQ ID NO: 3475766 - DNA, 25 bp, Homo sapien
cccagtgcgacaatttcatcaaaag

SEQ ID NO: 3475767 - DNA, 25 bp, Homo sapien
attcctttgctttacgacgcatctc

SEQ ID NO: 3475768 - DNA, 25 bp, Homo sapien
tttgctttacgacgcatctcagcct

SEQ ID NO: 3475769 - DNA, 25 bp, Homo sapien
cagccttagcttcacgttcttgagt

SEQ ID NO: 3475770 - DNA, 25 bp, Homo sapien
tacgacgcatctcagccttagcttc

SEQ ID NO: 3475771 - DNA, 25 bp, Homo sapien
caaatccgccaaatcctggtgcttt

SEQ ID NO: 3475772 - DNA, 25 bp, Homo sapien
caatgatggtctctgtgatcatggc

SEQ ID NO: 3475773 - DNA, 25 bp, Homo sapien
ttatcagtttcaatgatggtctctg

SEQ ID NO: 3475774 - DNA, 25 bp, Homo sapien
ctccagatactgcagagctgccaaa

SEQ ID NO: 3475775 - DNA, 25 bp, Homo sapien
ccatattaatgggtggagcatgcat

SEQ ID NO: 3475776 - DNA, 25 bp, Homo sapien
gttgcttcagaagtacgcttgccca

SEQ ID NO: 3475777 - DNA, 25 bp, Homo sapien
tttgtccacaaagttatctacttcc

SEQ ID NO: 3475778 - DNA, 25 bp, Homo sapien
cccatactagaggacatgatggttt

SEQ ID NO: 3475779 - DNA, 25 bp, Homo sapien
tgttaatatgtagaatctgctctga

SEQ ID NO: 3475780 - DNA, 25 bp, Homo sapien
taaatcaggaacgattaaaagacag

SEQ ID NO: 3475781 - DNA, 25 bp, Homo sapien
tgaattcttactcaaagttcctact

SEQ ID NO: 3475782 - DNA, 25 bp, Homo sapien
ccaaaaacgatcttatgttaatatg

SEQ ID NO: 3475783 - DNA, 25 bp, Homo sapien
aattcggccatacttgtcatctgag

SEQ ID NO: 3475784 - DNA, 25 bp, Homo sapien
ctccgtctcgtccacaggttaatgt

SEQ ID NO: 3475785 - DNA, 25 bp, Homo sapien
tgatcatgccatgcaactccatatt

SEQ ID NO: 3475786 - DNA, 25 bp, Homo sapien
ttttccacatgaagacgaattcggc

SEQ ID NO: 3475787 - DNA, 25 bp, Homo sapien
tttagcacccctacgtcactgttga

SEQ ID NO: 3475788 - DNA, 25 bp, Homo sapien
cactgttgactggaaatgacttctc

SEQ ID NO: 3475789 - DNA, 25 bp, Homo sapien
gtttgtagtctccactttagcaccc

SEQ ID NO: 3475790 - DNA, 25 bp, Homo sapien
tctggattcttcaggccaattagag

SEQ ID NO: 3475791 - DNA, 25 bp, Homo sapien
tgaggagaaagcaaagcagtcatac

SEQ ID NO: 3475792 - DNA, 25 bp, Homo sapien
gaggagaaagcaaagcagtcatact

SEQ ID NO: 3475793 - DNA, 25 bp, Homo sapien
ctgaggagaaagcaaagcagtcata

SEQ ID NO: 3475794 - DNA, 25 bp, Homo sapien
tcatattctatgttgacatcacagc

SEQ ID NO: 3475795 - DNA, 25 bp, Homo sapien
gatggtgataaccacatcattcagt

SEQ ID NO: 3475796 - DNA, 25 bp, Homo sapien
attatcttcttgtagctcatattct

SEQ ID NO: 3475797 - DNA, 25 bp, Homo sapien
gggagtgggatggtgataaccacat

SEQ ID NO: 3475798 - DNA, 25 bp, Homo sapien
atctttgaatggacagtcaggtcag

SEQ ID NO: 3475799 - DNA, 25 bp, Homo sapien
tctaagtccaccgtagaggacacag

SEQ ID NO: 3475800 - DNA, 25 bp, Homo sapien
tccaccgtagaggacacagggacag

SEQ ID NO: 3475801 - DNA, 25 bp, Homo sapien
gacagtcaggtcaggtaggtgctga

SEQ ID NO: 3475802 - DNA, 25 bp, Homo sapien
taacttacatgtcagccttgcacag

SEQ ID NO: 3475803 - DNA, 25 bp, Homo sapien
ggcaggcaccactccagggtatttc

SEQ ID NO: 3475804 - DNA, 25 bp, Homo sapien
gactgtcatgtcgatactccccatc

SEQ ID NO: 3475805 - DNA, 25 bp, Homo sapien
tatttttggcatcaatcacaggcag

SEQ ID NO: 3475806 - DNA, 25 bp, Homo sapien
tcgatctcaccgataacaggcgcgc

SEQ ID NO: 3475807 - DNA, 25 bp, Homo sapien
tggagacaaaggaaacttgaacagg

SEQ ID NO: 3475808 - DNA, 25 bp, Homo sapien
ttggagacaaaggaaacttgaacag

SEQ ID NO: 3475809 - DNA, 25 bp, Homo sapien
gagacaaaggaaacttgaacaggga

SEQ ID NO: 3475810 - DNA, 25 bp, Homo sapien
ttcatacttatccactaggaaagtg

SEQ ID NO: 3475811 - DNA, 25 bp, Homo sapien
tacttatccactaggaaagtggtct

SEQ ID NO: 3475812 - DNA, 25 bp, Homo sapien
tatccactaggaaagtggtctctgt

SEQ ID NO: 3475813 - DNA, 25 bp, Homo sapien
cactaggaaagtggtctctgtggaa

SEQ ID NO: 3475814 - DNA, 25 bp, Homo sapien
tcgagggtccttgcgcgcagagaat

SEQ ID NO: 3475815 - DNA, 25 bp, Homo sapien
gagcaacttaggtaaaggtagagga

SEQ ID NO: 3475816 - DNA, 25 bp, Homo sapien
tttcctgctggccaatacaatctgc

SEQ ID NO: 3475817 - DNA, 25 bp, Homo sapien
gagaatcgtgcattgtatcagaaaa

SEQ ID NO: 3475818 - DNA, 25 bp, Homo sapien
gggattaaaataaaggagcagctgg

SEQ ID NO: 3475819 - DNA, 25 bp, Homo sapien
tagggattaaaataaaggagcagct

SEQ ID NO: 3475820 - DNA, 25 bp, Homo sapien
ttagggattaaaataaaggagcagc

SEQ ID NO: 3475821 - DNA, 25 bp, Homo sapien
gattaaaataaaggagcagctgggc

SEQ ID NO: 3475822 - DNA, 25 bp, Homo sapien
cacccctatggactggaatattgag

SEQ ID NO: 3475823 - DNA, 25 bp, Homo sapien
caagcacagtacactctttgcaggg

SEQ ID NO: 3475824 - DNA, 25 bp, Homo sapien
ggaaccgagaaaccaccagtacatg

SEQ ID NO: 3475825 - DNA, 25 bp, Homo sapien
gacgctgtagtctccattgaaaagg

SEQ ID NO: 3475826 - DNA, 25 bp, Homo sapien
gaattcttccctgatgcagttaggg

SEQ ID NO: 3475827 - DNA, 25 bp, Homo sapien
tttacagggttacaaaatgtctctc

SEQ ID NO: 3475828 - DNA, 25 bp, Homo sapien
aactggattagtaggatttcttgcc

SEQ ID NO: 3475829 - DNA, 25 bp, Homo sapien
aaacctcatgtggaaaccaagctag

SEQ ID NO: 3475830 - DNA, 25 bp, Homo sapien
ataatgcgctttatttgattaaaga

SEQ ID NO: 3475831 - DNA, 25 bp, Homo sapien
ttatttgattaaagaatttgccttc

SEQ ID NO: 3475832 - DNA, 25 bp, Homo sapien
gattaaagaatttgccttctttgta

SEQ ID NO: 3475833 - DNA, 25 bp, Homo sapien
taatgcgctttatttgattaaagaa

SEQ ID NO: 3475834 - DNA, 25 bp, Homo sapien
aagtgagtcaataatccaataaaca

SEQ ID NO: 3475835 - DNA, 25 bp, Homo sapien
atgttaggtcccattacagcatcct

SEQ ID NO: 3475836 - DNA, 25 bp, Homo sapien
caagcagacaccaaagtgagtcaat

SEQ ID NO: 3475837 - DNA, 25 bp, Homo sapien
ttttaatgttaggtcccattacagc

SEQ ID NO: 3475838 - DNA, 25 bp, Homo sapien
tgacctgcactagagggaccctgga

SEQ ID NO: 3475839 - DNA, 25 bp, Homo sapien
gaggccctagggagctgaactcagc

SEQ ID NO: 3475840 - DNA, 25 bp, Homo sapien
tggactggacttctttgacctgcac

SEQ ID NO: 3475841 - DNA, 25 bp, Homo sapien
tatcctctttgagatggacaagtgc

SEQ ID NO: 3475842 - DNA, 25 bp, Homo sapien
gctcggctcggtcgcggtggcctca

SEQ ID NO: 3475843 - DNA, 25 bp, Homo sapien
caggcttaggaggacaccgttgctt

SEQ ID NO: 3475844 - DNA, 25 bp, Homo sapien
ggtcccttagcctggctcggctcgg

SEQ ID NO: 3475845 - DNA, 25 bp, Homo sapien
gtggcctcaggcttaggaggacacc

SEQ ID NO: 3475846 - DNA, 25 bp, Homo sapien
cctagcctagagctgatctcagggc

SEQ ID NO: 3475847 - DNA, 25 bp, Homo sapien
gggtttctgccgagctccctagcct

SEQ ID NO: 3475848 - DNA, 25 bp, Homo sapien
tgatctcagggctctcgccaggccc

SEQ ID NO: 3475849 - DNA, 25 bp, Homo sapien
gacttccccttatccagtcctagca

SEQ ID NO: 3475850 - DNA, 25 bp, Homo sapien
cggcccaagcggtgcatggctgtgg

SEQ ID NO: 3475851 - DNA, 25 bp, Homo sapien
tcggcccaagcggtgcatggctgtg

SEQ ID NO: 3475852 - DNA, 25 bp, Homo sapien
gcccaagcggtgcatggctgtggcc

SEQ ID NO: 3475853 - DNA, 25 bp, Homo sapien
ctcggcccaagcggtgcatggctgt

SEQ ID NO: 3475854 - DNA, 25 bp, Homo sapien
ccaacacaatcagctaaaaaaattt

SEQ ID NO: 3475855 - DNA, 25 bp, Homo sapien
cccaacacaatcagctaaaaaaatt

SEQ ID NO: 3475856 - DNA, 25 bp, Homo sapien
acccaacacaatcagctaaaaaaat

SEQ ID NO: 3475857 - DNA, 25 bp, Homo sapien
aggtaggtggcagggctaaaacagg

SEQ ID NO: 3475858 - DNA, 25 bp, Homo sapien
aaggacactggtagccagagggccc

SEQ ID NO: 3475859 - DNA, 25 bp, Homo sapien
cttttcccagggctttagtaggatg

SEQ ID NO: 3475860 - DNA, 25 bp, Homo sapien
gggctaaaacaggagctccctcctg

SEQ ID NO: 3475861 - DNA, 25 bp, Homo sapien
ttgccctatgctactcagaacccgg

SEQ ID NO: 3475862 - DNA, 25 bp, Homo sapien
agaacccgggttttgacagctgaag

SEQ ID NO: 3475863 - DNA, 25 bp, Homo sapien
tagggcccaatctatacttctgtgc

SEQ ID NO: 3475864 - DNA, 25 bp, Homo sapien
tgtaagcacaaacagtcccataggg

SEQ ID NO: 3475865 - DNA, 25 bp, Homo sapien
catccagggcctatttggttcctat

SEQ ID NO: 3475866 - DNA, 25 bp, Homo sapien
atttggttcctattgagagcgtcca

SEQ ID NO: 3475867 - DNA, 25 bp, Homo sapien
tggcatccagggcctatttggttcc

SEQ ID NO: 3475868 - DNA, 25 bp, Homo sapien
tttggttcctattgagagcgtccat

SEQ ID NO: 3475869 - DNA, 25 bp, Homo sapien
caggtggggtttgtccgtttgcact

SEQ ID NO: 3475870 - DNA, 25 bp, Homo sapien
ctttgcctgtctcgatcaggtccaa

SEQ ID NO: 3475871 - DNA, 25 bp, Homo sapien
cctttgcctgtctcgatcaggtcca

SEQ ID NO: 3475872 - DNA, 25 bp, Homo sapien
gtccgtttgcactttcagccctttg

SEQ ID NO: 3475873 - DNA, 25 bp, Homo sapien
aagctgatctttaagcccagtcgtg

SEQ ID NO: 3475874 - DNA, 25 bp, Homo sapien
ccagtcgtggaaccagatcatctac

SEQ ID NO: 3475875 - DNA, 25 bp, Homo sapien
agcagacagtagaagggccccaaca

SEQ ID NO: 3475876 - DNA, 25 bp, Homo sapien
cagcagacagtagaagggccccaac

SEQ ID NO: 3475877 - DNA, 25 bp, Homo sapien
tctcgatgtagcagtgctctggagc

SEQ ID NO: 3475878 - DNA, 25 bp, Homo sapien
cgcaggttctcgatgtagcagtgct

SEQ ID NO: 3475879 - DNA, 25 bp, Homo sapien
gtgagccgggtaggctgccggacag

SEQ ID NO: 3475880 - DNA, 25 bp, Homo sapien
tgagggtgccccgcaggttctcgat

SEQ ID NO: 3475881 - DNA, 25 bp, Homo sapien
gtctgtcaaagtgctacctgggcca

SEQ ID NO: 3475882 - DNA, 25 bp, Homo sapien
tgacaactcactgtatgaactgatg

SEQ ID NO: 3475883 - DNA, 25 bp, Homo sapien
gaaaacaatgccagaccatcagagc

SEQ ID NO: 3475884 - DNA, 25 bp, Homo sapien
cctgcctgctaaccatagtaattat

SEQ ID NO: 3475885 - DNA, 25 bp, Homo sapien
cctggccaatgtggtgaagtcccgt

SEQ ID NO: 3475886 - DNA, 25 bp, Homo sapien
agcctggccaatgtggtgaagtccc

SEQ ID NO: 3475887 - DNA, 25 bp, Homo sapien
ggccaatgtggtgaagtcccgtctc

SEQ ID NO: 3475888 - DNA, 25 bp, Homo sapien
tggccaatgtggtgaagtcccgtct

SEQ ID NO: 3475889 - DNA, 25 bp, Homo sapien
ggaaggtggactgacccaggcacaa

SEQ ID NO: 3475890 - DNA, 25 bp, Homo sapien
tggactgacccaggcacaacatgca

SEQ ID NO: 3475891 - DNA, 25 bp, Homo sapien
ggtggactgacccaggcacaacatg

SEQ ID NO: 3475892 - DNA, 25 bp, Homo sapien
gactgacccaggcacaacatgcagc

SEQ ID NO: 3475893 - DNA, 25 bp, Homo sapien
tgttgtcaattcaccccaagactag

SEQ ID NO: 3475894 - DNA, 25 bp, Homo sapien
gacctgctatgcaaccttagccaag

SEQ ID NO: 3475895 - DNA, 25 bp, Homo sapien
aggtctttgactttagggagctgca

SEQ ID NO: 3475896 - DNA, 25 bp, Homo sapien
acagtgaggctaacaaggctctgga

SEQ ID NO: 3475897 - DNA, 25 bp, Homo sapien
cattagccatcggtgacagtggaga

SEQ ID NO: 3475898 - DNA, 25 bp, Homo sapien
tcaatagagctcaccagggaactgt

SEQ ID NO: 3475899 - DNA, 25 bp, Homo sapien
cagtgagtccatgatctcttgcagg

SEQ ID NO: 3475900 - DNA, 25 bp, Homo sapien
ggtgttctcatagctggagcccaca

SEQ ID NO: 3475901 - DNA, 25 bp, Homo sapien
gctcgccgggacagagatggactta

SEQ ID NO: 3475902 - DNA, 25 bp, Homo sapien
aatgttcggcccaccagttggcgtg

SEQ ID NO: 3475903 - DNA, 25 bp, Homo sapien
gagaagtcctctggtgaagccccat

SEQ ID NO: 3475904 - DNA, 25 bp, Homo sapien
ggtagttctcgcatactgtccaggc

SEQ ID NO: 3475905 - DNA, 25 bp, Homo sapien
tctgccatggacagtggcaagcctc

SEQ ID NO: 3475906 - DNA, 25 bp, Homo sapien
ggaatttcttcttcacggcaccaga

SEQ ID NO: 3475907 - DNA, 25 bp, Homo sapien
tgatcactaaagtgtatcctggagg

SEQ ID NO: 3475908 - DNA, 25 bp, Homo sapien
gaaccataagatattgatcactaaa

SEQ ID NO: 3475909 - DNA, 25 bp, Homo sapien
aaccggaacagagcctcggcacctg

SEQ ID NO: 3475910 - DNA, 25 bp, Homo sapien
accggaacagagcctcggcacctgg

SEQ ID NO: 3475911 - DNA, 25 bp, Homo sapien
cagaggcccctgcaaggcctcgtga

SEQ ID NO: 3475912 - DNA, 25 bp, Homo sapien
gctgcggtggcctccccaatgctgg

SEQ ID NO: 3475913 - DNA, 25 bp, Homo sapien
tcgtgagggcctccggcctgccagt

SEQ ID NO: 3475914 - DNA, 25 bp, Homo sapien
gtattcggcacacaggttcaggatg

SEQ ID NO: 3475915 - DNA, 25 bp, Homo sapien
tcccataggcgttgggtggcaacgc

SEQ ID NO: 3475916 - DNA, 25 bp, Homo sapien
tgagcgctccatactctcccatagg

SEQ ID NO: 3475917 - DNA, 25 bp, Homo sapien
ctgctgcactcctccttgagatttt

SEQ ID NO: 3475918 - DNA, 25 bp, Homo sapien
gattttcctcatctgagcgctccat

SEQ ID NO: 3475919 - DNA, 25 bp, Homo sapien
ccctggagcttggtgctaggtgcat

SEQ ID NO: 3475920 - DNA, 25 bp, Homo sapien
tccttcacacggaccttgagctgct

SEQ ID NO: 3475921 - DNA, 25 bp, Homo sapien
ttccagggctagcacctctccctgg

SEQ ID NO: 3475922 - DNA, 25 bp, Homo sapien
gcttggtgctaggtgcatcttcgtg

SEQ ID NO: 3475923 - DNA, 25 bp, Homo sapien
gcagcagtgcccgctccatttcggc

SEQ ID NO: 3475924 - DNA, 25 bp, Homo sapien
tgcagcagtgcccgctccatttcgg

SEQ ID NO: 3475925 - DNA, 25 bp, Homo sapien
cctgcagcagtgcccgctccatttc

SEQ ID NO: 3475926 - DNA, 25 bp, Homo sapien
ctgcagcagtgcccgctccatttcg

SEQ ID NO: 3475927 - DNA, 25 bp, Homo sapien
tgtccctctccttctggatgcctgt

SEQ ID NO: 3475928 - DNA, 25 bp, Homo sapien
ctccttctggatgcctgtctccaag

SEQ ID NO: 3475929 - DNA, 25 bp, Homo sapien
gtctccaaggccaccagcttctcct

SEQ ID NO: 3475930 - DNA, 25 bp, Homo sapien
cttgtccctctccttctggatgcct

SEQ ID NO: 3475931 - DNA, 25 bp, Homo sapien
gaggacctaatcaggccagttcctg

SEQ ID NO: 3475932 - DNA, 25 bp, Homo sapien
cagagaaagcgaagtctaggcctcc

SEQ ID NO: 3475933 - DNA, 25 bp, Homo sapien
tttatccctgggagtgaggccctat

SEQ ID NO: 3475934 - DNA, 25 bp, Homo sapien
tccaaaaaactccaggtcagtggga

SEQ ID NO: 3475935 - DNA, 25 bp, Homo sapien
tgcctccgtcccgcggccagctccg

SEQ ID NO: 3475936 - DNA, 25 bp, Homo sapien
caggtgcctccgtcccgcggccagc

SEQ ID NO: 3475937 - DNA, 25 bp, Homo sapien
tccgtcccgcggccagctccgccct

SEQ ID NO: 3475938 - DNA, 25 bp, Homo sapien
aggtgcctccgtcccgcggccagct

SEQ ID NO: 3475939 - DNA, 25 bp, Homo sapien
gcagttatcgagctgcgtctggagc

SEQ ID NO: 3475940 - DNA, 25 bp, Homo sapien
gcgtctggagctcggcgtagagcgc

SEQ ID NO: 3475941 - DNA, 25 bp, Homo sapien
tgactcggggcagttatcgagctgc

SEQ ID NO: 3475942 - DNA, 25 bp, Homo sapien
tcctgtaactgttcccgcactgact

SEQ ID NO: 3475943 - DNA, 25 bp, Homo sapien
gccaggtggtcccgtcccaccgctc

SEQ ID NO: 3475944 - DNA, 25 bp, Homo sapien
caggtggtcccgtcccaccgctctc

SEQ ID NO: 3475945 - DNA, 25 bp, Homo sapien
ccaggtggtcccgtcccaccgctct

SEQ ID NO: 3475946 - DNA, 25 bp, Homo sapien
gttgggtggtgcttgcaatgccact

SEQ ID NO: 3475947 - DNA, 25 bp, Homo sapien
tgggtggtgcttgcaatgccactct

SEQ ID NO: 3475948 - DNA, 25 bp, Homo sapien
gggttgggtggtgcttgcaatgcca

SEQ ID NO: 3475949 - DNA, 25 bp, Homo sapien
gtggtgcttgcaatgccactctggg

SEQ ID NO: 3475950 - DNA, 25 bp, Homo sapien
cttggcgatgctgcggagcagctca

SEQ ID NO: 3475951 - DNA, 25 bp, Homo sapien
cgctccaactgctggaactccaagt

SEQ ID NO: 3475952 - DNA, 25 bp, Homo sapien
ttcctcttggcgatgctgcggagca

SEQ ID NO: 3475953 - DNA, 25 bp, Homo sapien
tcctcaaagagctttgtctcagtct

SEQ ID NO: 3475954 - DNA, 25 bp, Homo sapien
ggaaatccaggcacaaaagacgaag

SEQ ID NO: 3475955 - DNA, 25 bp, Homo sapien
caacaacctgttgtaattctcattt

SEQ ID NO: 3475956 - DNA, 25 bp, Homo sapien
aacagcacgcagcagggaacgaggt

SEQ ID NO: 3475957 - DNA, 25 bp, Homo sapien
cttttgtgaggtcattgggattcaa

SEQ ID NO: 3475958 - DNA, 25 bp, Homo sapien
ggaggcattcttgtcccgggccagg

SEQ ID NO: 3475959 - DNA, 25 bp, Homo sapien
gggccaggcgttctgattcctgcac

SEQ ID NO: 3475960 - DNA, 25 bp, Homo sapien
cagcagctgtaaggaggcattcttg

SEQ ID NO: 3475961 - DNA, 25 bp, Homo sapien
cccggatctgcccagcctgactgtc

SEQ ID NO: 3475962 - DNA, 25 bp, Homo sapien
ctccaaatctcccggcccaacctca

SEQ ID NO: 3475963 - DNA, 25 bp, Homo sapien
aaggcctgccccctgtgagtgagtg

SEQ ID NO: 3475964 - DNA, 25 bp, Homo sapien
gcctgccccctgtgagtgagtggta

SEQ ID NO: 3475965 - DNA, 25 bp, Homo sapien
tcgatgtggtcttcgggaaaggcct

SEQ ID NO: 3475966 - DNA, 25 bp, Homo sapien
ctctttgagggtcgatgtggtcttc

SEQ ID NO: 3475967 - DNA, 25 bp, Homo sapien
catgtgttactcagagcctcccagg

SEQ ID NO: 3475968 - DNA, 25 bp, Homo sapien
gggtgaaagtgccatgtgttactca

SEQ ID NO: 3475969 - DNA, 25 bp, Homo sapien
gaagctggggctaatccaatcatga

SEQ ID NO: 3475970 - DNA, 25 bp, Homo sapien
gcctcccaggacacgccttgggcct

SEQ ID NO: 3475971 - DNA, 25 bp, Homo sapien
gccccatctctgaggactcggagat

SEQ ID NO: 3475972 - DNA, 25 bp, Homo sapien
ccccatctctgaggactcggagatg

SEQ ID NO: 3475973 - DNA, 25 bp, Homo sapien
agccccatctctgaggactcggaga

SEQ ID NO: 3475974 - DNA, 25 bp, Homo sapien
tggcagaagcataggggtccaagcg

SEQ ID NO: 3475975 - DNA, 25 bp, Homo sapien
aagcataggggtccaagcgggaaca

SEQ ID NO: 3475976 - DNA, 25 bp, Homo sapien
ggggctgggcgagcacactggggga

SEQ ID NO: 3475977 - DNA, 25 bp, Homo sapien
ataggggtccaagcgggaacacagc

SEQ ID NO: 3475978 - DNA, 25 bp, Homo sapien
ggagcaaggccagacgcaggaggga

SEQ ID NO: 3475979 - DNA, 25 bp, Homo sapien
tggagcaaggccagacgcaggaggg

SEQ ID NO: 3475980 - DNA, 25 bp, Homo sapien
ttggagcaaggccagacgcaggagg

SEQ ID NO: 3475981 - DNA, 25 bp, Homo sapien
cttggagcaaggccagacgcaggag

SEQ ID NO: 3475982 - DNA, 25 bp, Homo sapien
ttaggtgaaggcgtgatggaagcga

SEQ ID NO: 3475983 - DNA, 25 bp, Homo sapien
cgtgatggaagcgaacgaggaggag

SEQ ID NO: 3475984 - DNA, 25 bp, Homo sapien
gcatgggcgaggtgccccgcatcac

SEQ ID NO: 3475985 - DNA, 25 bp, Homo sapien
cctttagctgctcaagcatcacgta

SEQ ID NO: 3475986 - DNA, 25 bp, Homo sapien
ctgaatgtactaagggcaaagagaa

SEQ ID NO: 3475987 - DNA, 25 bp, Homo sapien
ggaaggccacatcagggaaatggac

SEQ ID NO: 3475988 - DNA, 25 bp, Homo sapien
acagtgagacaacagttgccctgaa

SEQ ID NO: 3475989 - DNA, 25 bp, Homo sapien
gaaacagtcagggtacaacttccag

SEQ ID NO: 3475990 - DNA, 25 bp, Homo sapien
cagctgacgggaagctttggcgggc

SEQ ID NO: 3475991 - DNA, 25 bp, Homo sapien
acgggaagctttggcgggcagaggc

SEQ ID NO: 3475992 - DNA, 25 bp, Homo sapien
agctgacgggaagctttggcgggca

SEQ ID NO: 3475993 - DNA, 25 bp, Homo sapien
tgacgggaagctttggcgggcagag

SEQ ID NO: 3475994 - DNA, 25 bp, Homo sapien
ggttgcccacatgccaggatggctg

SEQ ID NO: 3475995 - DNA, 25 bp, Homo sapien
ggctgacgcctccactcaaggtggt

SEQ ID NO: 3475996 - DNA, 25 bp, Homo sapien
ttggcaggaggtatcagagtggaca

SEQ ID NO: 3475997 - DNA, 25 bp, Homo sapien
tagttttagactatggaggctggcc

SEQ ID NO: 3475998 - DNA, 25 bp, Homo sapien
gctggtggcctcgccatccatcttg

SEQ ID NO: 3475999 - DNA, 25 bp, Homo sapien
ctggtggcctcgccatccatcttgg

SEQ ID NO: 3476000 - DNA, 25 bp, Homo sapien
ggctggtggcctcgccatccatctt

SEQ ID NO: 3476001 - DNA, 25 bp, Homo sapien
tggtggcctcgccatccatcttgga

SEQ ID NO: 3476002 - DNA, 25 bp, Homo sapien
ttgcgaggaaggctgcccgtgccat

SEQ ID NO: 3476003 - DNA, 25 bp, Homo sapien
ttctgctgcagagctagttggcgct

SEQ ID NO: 3476004 - DNA, 25 bp, Homo sapien
tagttggcgcttggtctcgatgtcc

SEQ ID NO: 3476005 - DNA, 25 bp, Homo sapien
gcccgtgccattctgggtgagtaga

SEQ ID NO: 3476006 - DNA, 25 bp, Homo sapien
tgctgggtcgtcggttgggaggggc

SEQ ID NO: 3476007 - DNA, 25 bp, Homo sapien
aggggctcggcgggaagcgactcga

SEQ ID NO: 3476008 - DNA, 25 bp, Homo sapien
gaggggctcggcgggaagcgactcg

SEQ ID NO: 3476009 - DNA, 25 bp, Homo sapien
ctgctgggtcgtcggttgggagggg

SEQ ID NO: 3476010 - DNA, 25 bp, Homo sapien
aagggcatcccactggcactgtgcc

SEQ ID NO: 3476011 - DNA, 25 bp, Homo sapien
caggtggtgtaggatagagtggtgc

SEQ ID NO: 3476012 - DNA, 25 bp, Homo sapien
gtatcataggcgtgctcaccctcct

SEQ ID NO: 3476013 - DNA, 25 bp, Homo sapien
tctccagactcagcgtatcataggc

SEQ ID NO: 3476014 - DNA, 25 bp, Homo sapien
catgagccggttcttctctgcatga

SEQ ID NO: 3476015 - DNA, 25 bp, Homo sapien
ctcgactccatgagccggttcttct

SEQ ID NO: 3476016 - DNA, 25 bp, Homo sapien
ggttcttctctgcatgagcctcttt

SEQ ID NO: 3476017 - DNA, 25 bp, Homo sapien
gagccggttcttctctgcatgagcc

SEQ ID NO: 3476018 - DNA, 25 bp, Homo sapien
ggagcacaggcccttgacatgcagt

SEQ ID NO: 3476019 - DNA, 25 bp, Homo sapien
gcagtaggtagctctgtgccccaac

SEQ ID NO: 3476020 - DNA, 25 bp, Homo sapien
aagggaatgtggcaaggctaatgtg

SEQ ID NO: 3476021 - DNA, 25 bp, Homo sapien
ctgcctccccgatccaggtcagact

SEQ ID NO: 3476022 - DNA, 25 bp, Homo sapien
gaatggcctgccatacgggtagaca

SEQ ID NO: 3476023 - DNA, 25 bp, Homo sapien
ccatgggtccctctttgctgaatcc

SEQ ID NO: 3476024 - DNA, 25 bp, Homo sapien
tctcaaatatgcagagtgcctccaa

SEQ ID NO: 3476025 - DNA, 25 bp, Homo sapien
tatctgaatcctcgcaacatgggtt

SEQ ID NO: 3476026 - DNA, 25 bp, Homo sapien
taagcatgactgtcctgacttcaaa

SEQ ID NO: 3476027 - DNA, 25 bp, Homo sapien
aagagccctggctggttaaagagaa

SEQ ID NO: 3476028 - DNA, 25 bp, Homo sapien
tatgggctctgtgatcctgataaaa

SEQ ID NO: 3476029 - DNA, 25 bp, Homo sapien
ggaatccacctcagggtagtctggc

SEQ ID NO: 3476030 - DNA, 25 bp, Homo sapien
ctgcagcctccgttctacctgctca

SEQ ID NO: 3476031 - DNA, 25 bp, Homo sapien
tccgttctacctgctcacgcctccg

SEQ ID NO: 3476032 - DNA, 25 bp, Homo sapien
gcagcctccgttctacctgctcacg

SEQ ID NO: 3476033 - DNA, 25 bp, Homo sapien
gcctccgttctacctgctcacgcct

SEQ ID NO: 3476034 - DNA, 25 bp, Homo sapien
ttgtttctcccgcatcttgacctcc

SEQ ID NO: 3476035 - DNA, 25 bp, Homo sapien
aaaattgtttctcccgcatcttgac

SEQ ID NO: 3476036 - DNA, 25 bp, Homo sapien
aattgtttctcccgcatcttgacct

SEQ ID NO: 3476037 - DNA, 25 bp, Homo sapien
gtttctcccgcatcttgacctcctt

SEQ ID NO: 3476038 - DNA, 25 bp, Homo sapien
aaaccaaccaccactgtgccccact

SEQ ID NO: 3476039 - DNA, 25 bp, Homo sapien
ccactgtgccccactgcccattcac

SEQ ID NO: 3476040 - DNA, 25 bp, Homo sapien
accactgtgccccactgcccattca

SEQ ID NO: 3476041 - DNA, 25 bp, Homo sapien
cgtcaaaccaaccaccactgtgccc

SEQ ID NO: 3476042 - DNA, 25 bp, Homo sapien
tagtattaagccaacagcaatcttt

SEQ ID NO: 3476043 - DNA, 25 bp, Homo sapien
caatgagtcccaggtagaattctgc

SEQ ID NO: 3476044 - DNA, 25 bp, Homo sapien
cacaacttgaatagtcctggtgggt

SEQ ID NO: 3476045 - DNA, 25 bp, Homo sapien
tggagtagaacaggttttacagccc

SEQ ID NO: 3476046 - DNA, 25 bp, Homo sapien
caaaagtcagagtgaggtcatccac

SEQ ID NO: 3476047 - DNA, 25 bp, Homo sapien
gaaatgagggaactgtgatcactgc

SEQ ID NO: 3476048 - DNA, 25 bp, Homo sapien
tctgtcccgaagagaaactagtaca

SEQ ID NO: 3476049 - DNA, 25 bp, Homo sapien
tactaatcagaagggacaggctatc

SEQ ID NO: 3476050 - DNA, 25 bp, Homo sapien
catggcccgatgactcaatatgtgt

SEQ ID NO: 3476051 - DNA, 25 bp, Homo sapien
ctccttccggattggcaggtagcgg

SEQ ID NO: 3476052 - DNA, 25 bp, Homo sapien
tgcaggcaggtatcaacaccatggc

SEQ ID NO: 3476053 - DNA, 25 bp, Homo sapien
caaagtcctccttccggattggcag

SEQ ID NO: 3476054 - DNA, 25 bp, Homo sapien
ttgagccggtcgaagacaaaccagc

SEQ ID NO: 3476055 - DNA, 25 bp, Homo sapien
tccatgatttaatcttgccgcccat

SEQ ID NO: 3476056 - DNA, 25 bp, Homo sapien
ccacataataggaaagggtgcgctt

SEQ ID NO: 3476057 - DNA, 25 bp, Homo sapien
taataggaaagggtgcgcttgagcc

SEQ ID NO: 3476058 - DNA, 25 bp, Homo sapien
aaatagatgactcccttcagcttcg

SEQ ID NO: 3476059 - DNA, 25 bp, Homo sapien
cccttcagcttcgtctcatgcttgt

SEQ ID NO: 3476060 - DNA, 25 bp, Homo sapien
gctgcactgcgcaggtggtcgtagt

SEQ ID NO: 3476061 - DNA, 25 bp, Homo sapien
tggtcgtagtacacttcctcaatgg

SEQ ID NO: 3476062 - DNA, 25 bp, Homo sapien
caccatagtgaagcggaaaaacctc

SEQ ID NO: 3476063 - DNA, 25 bp, Homo sapien
accatagtgaagcggaaaaacctct

SEQ ID NO: 3476064 - DNA, 25 bp, Homo sapien
tcaccatagtgaagcggaaaaacct

SEQ ID NO: 3476065 - DNA, 25 bp, Homo sapien
ccatagtgaagcggaaaaacctctt

SEQ ID NO: 3476066 - DNA, 25 bp, Homo sapien
gggccaccatgtagtacagccggtc

SEQ ID NO: 3476067 - DNA, 25 bp, Homo sapien
catccagatacgcatggcctctgca

SEQ ID NO: 3476068 - DNA, 25 bp, Homo sapien
tcatgaactgagtgtagccctcagc

SEQ ID NO: 3476069 - DNA, 25 bp, Homo sapien
tcagcccctgtgacaatgacatcca

SEQ ID NO: 3476070 - DNA, 25 bp, Homo sapien
aaagccccagttgtgctctgccagg

SEQ ID NO: 3476071 - DNA, 25 bp, Homo sapien
gacacttgagatctctggcccttga

SEQ ID NO: 3476072 - DNA, 25 bp, Homo sapien
taaagggttactgcaagttctgggc

SEQ ID NO: 3476073 - DNA, 25 bp, Homo sapien
gatgatggcacgtaccctcagatgg

SEQ ID NO: 3476074 - DNA, 25 bp, Homo sapien
aattaggggaatccaaccaatggag

SEQ ID NO: 3476075 - DNA, 25 bp, Homo sapien
cctctcaagctgaatgtgagcacac

SEQ ID NO: 3476076 - DNA, 25 bp, Homo sapien
caagctgaatgtgagcacacacttt

SEQ ID NO: 3476077 - DNA, 25 bp, Homo sapien
ttgctcctctcaagctgaatgtgag

SEQ ID NO: 3476078 - DNA, 25 bp, Homo sapien
tctgaccctggcgtggcggacaagg

SEQ ID NO: 3476079 - DNA, 25 bp, Homo sapien
tgaccctggcgtggcggacaaggct

SEQ ID NO: 3476080 - DNA, 25 bp, Homo sapien
ttctctgaccctggcgtggcggaca

SEQ ID NO: 3476081 - DNA, 25 bp, Homo sapien
gtttctctgaccctggcgtggcgga

SEQ ID NO: 3476082 - DNA, 25 bp, Homo sapien
ttagcatatgtgctgtgaaccaagc

SEQ ID NO: 3476083 - DNA, 25 bp, Homo sapien
agcatatgtgctgtgaaccaagcac

SEQ ID NO: 3476084 - DNA, 25 bp, Homo sapien
gcacatcatctttgtgctggggccg

SEQ ID NO: 3476085 - DNA, 25 bp, Homo sapien
catcatctttgtgctggggccgtgc

SEQ ID NO: 3476086 - DNA, 25 bp, Homo sapien
aatgggctatggactgttacacacc

SEQ ID NO: 3476087 - DNA, 25 bp, Homo sapien
taaattgtttgaagttggtcccagc

SEQ ID NO: 3476088 - DNA, 25 bp, Homo sapien
gaattccaatgtccctagccacaag

SEQ ID NO: 3476089 - DNA, 25 bp, Homo sapien
tacgcatatatggaccggagtctgc

SEQ ID NO: 3476090 - DNA, 25 bp, Homo sapien
tgtaaatgtgttgccctctgcccgc

SEQ ID NO: 3476091 - DNA, 25 bp, Homo sapien
gaatattagccagtaccagctttgg

SEQ ID NO: 3476092 - DNA, 25 bp, Homo sapien
caggaatgggcaacctgagagctgt

SEQ ID NO: 3476093 - DNA, 25 bp, Homo sapien
cagtgtactaggtcaatcaggaggc

SEQ ID NO: 3476094 - DNA, 25 bp, Homo sapien
cacaagcttgtcaatgatttcaaaa

SEQ ID NO: 3476095 - DNA, 25 bp, Homo sapien
gaatcttaatgaacacacaagcttg

SEQ ID NO: 3476096 - DNA, 25 bp, Homo sapien
cactgtgtgctgactgaacattagt

SEQ ID NO: 3476097 - DNA, 25 bp, Homo sapien
aattctccaacagctgactctcgtg

SEQ ID NO: 3476098 - DNA, 25 bp, Homo sapien
gaaaccttttgagccacgaacatga

SEQ ID NO: 3476099 - DNA, 25 bp, Homo sapien
gaagagagttgcgtcccttacagca

SEQ ID NO: 3476100 - DNA, 25 bp, Homo sapien
taatttatttctatcgggtcgggca

SEQ ID NO: 3476101 - DNA, 25 bp, Homo sapien
cagcaagagtttatcggacagaaac

SEQ ID NO: 3476102 - DNA, 25 bp, Homo sapien
attaaattctgttacagaaagcggg

SEQ ID NO: 3476103 - DNA, 25 bp, Homo sapien
ggaggttgtctgtgtagtgtagaat

SEQ ID NO: 3476104 - DNA, 25 bp, Homo sapien
cagaaagcgggggaggttgtctgtg

SEQ ID NO: 3476105 - DNA, 25 bp, Homo sapien
ggttgtctgtgtagtgtagaatttt

SEQ ID NO: 3476106 - DNA, 25 bp, Homo sapien
tatacttcagatgcaatagataggc

SEQ ID NO: 3476107 - DNA, 25 bp, Homo sapien
cagctttttgtcttatagatgccag

SEQ ID NO: 3476108 - DNA, 25 bp, Homo sapien
tttcaacctggcagtttagctccag

SEQ ID NO: 3476109 - DNA, 25 bp, Homo sapien
ggtaggtatcctgtcaagtagttac

SEQ ID NO: 3476110 - DNA, 25 bp, Homo sapien
gagaacttgctctacaggtcagtca

SEQ ID NO: 3476111 - DNA, 25 bp, Homo sapien
tgagccactgcatcataaggcgcag

SEQ ID NO: 3476112 - DNA, 25 bp, Homo sapien
gcaatggtgattgttcccactagag

SEQ ID NO: 3476113 - DNA, 25 bp, Homo sapien
gatgtatagcatgttctcccacctc

SEQ ID NO: 3476114 - DNA, 25 bp, Homo sapien
tctaaaaatagcctagatctggcca

SEQ ID NO: 3476115 - DNA, 25 bp, Homo sapien
atcagtatggacttatactcaccat

SEQ ID NO: 3476116 - DNA, 25 bp, Homo sapien
tcagtatggacttatactcaccatt

SEQ ID NO: 3476117 - DNA, 25 bp, Homo sapien
aagttactgctgcttaccgttcaga

SEQ ID NO: 3476118 - DNA, 25 bp, Homo sapien
aaagttgattccgtgcaagagagca

SEQ ID NO: 3476119 - DNA, 25 bp, Homo sapien
gcacggccagaacagagaaccctgt

SEQ ID NO: 3476120 - DNA, 25 bp, Homo sapien
ccgttcagagacttacaggtgcttg

SEQ ID NO: 3476121 - DNA, 25 bp, Homo sapien
tactagtgtgtttagtcttccgcgg

SEQ ID NO: 3476122 - DNA, 25 bp, Homo sapien
ccttgggatcattacttgctggatg

SEQ ID NO: 3476123 - DNA, 25 bp, Homo sapien
gcattatggcagaaatacactattc

SEQ ID NO: 3476124 - DNA, 25 bp, Homo sapien
tttgtgtatatcatccgtccttggg

SEQ ID NO: 3476125 - DNA, 25 bp, Homo sapien
gcgacttcggcggcgccacgagagc

SEQ ID NO: 3476126 - DNA, 25 bp, Homo sapien
ggcgccacgagagcgggcagcggag

SEQ ID NO: 3476127 - DNA, 25 bp, Homo sapien
ggcggcgccacgagagcgggcagcg

SEQ ID NO: 3476128 - DNA, 25 bp, Homo sapien
cttcggcggcgccacgagagcgggc

SEQ ID NO: 3476129 - DNA, 25 bp, Homo sapien
aaggcagtgacgccgcggcgaatat

SEQ ID NO: 3476130 - DNA, 25 bp, Homo sapien
gcggcgaatatagccgcggcggccg

SEQ ID NO: 3476131 - DNA, 25 bp, Homo sapien
cgcggcggccgaggtttcgccatct

SEQ ID NO: 3476132 - DNA, 25 bp, Homo sapien
gtttcgccatcttgagtggaggagg

SEQ ID NO: 3476133 - DNA, 25 bp, Homo sapien
tagttccgcgccttcctgcatggag

SEQ ID NO: 3476134 - DNA, 25 bp, Homo sapien
gaacttttctcgtcggtgtgagaga

SEQ ID NO: 3476135 - DNA, 25 bp, Homo sapien
gcgtctccgggtcgctagttccgcg

SEQ ID NO: 3476136 - DNA, 25 bp, Homo sapien
tcacgtcgcggctgtggaaaagcag

SEQ ID NO: 3476137 - DNA, 25 bp, Homo sapien
gaagcagggcttcttacgcgattgg

SEQ ID NO: 3476138 - DNA, 25 bp, Homo sapien
cctgacccttctggccgattactga

SEQ ID NO: 3476139 - DNA, 25 bp, Homo sapien
gatttaacagactcataggcaggca

SEQ ID NO: 3476140 - DNA, 25 bp, Homo sapien
caagaaatagggaagctgccggtta

SEQ ID NO: 3476141 - DNA, 25 bp, Homo sapien
tgcctgcctcactttggagggttgt

SEQ ID NO: 3476142 - DNA, 25 bp, Homo sapien
gattcttacgattaagcctgtttcc

SEQ ID NO: 3476143 - DNA, 25 bp, Homo sapien
tatggagtttcttgacagacagacc

SEQ ID NO: 3476144 - DNA, 25 bp, Homo sapien
cagacctgggtttataccccaactg

SEQ ID NO: 3476145 - DNA, 25 bp, Homo sapien
cttatcagtatgaacatgtggattc

SEQ ID NO: 3476146 - DNA, 25 bp, Homo sapien
ctgctattagagtatgaccatttcc

SEQ ID NO: 3476147 - DNA, 25 bp, Homo sapien
ttccaaactgtcttggtgcatagag

SEQ ID NO: 3476148 - DNA, 25 bp, Homo sapien
tgtactttccttgtctcagccctga

SEQ ID NO: 3476149 - DNA, 25 bp, Homo sapien
caggtacctgccaccgcacgcagct

SEQ ID NO: 3476150 - DNA, 25 bp, Homo sapien
tccacagcctgggtacaagcgattc

SEQ ID NO: 3476151 - DNA, 25 bp, Homo sapien
tacctgccaccgcacgcagctattt

SEQ ID NO: 3476152 - DNA, 25 bp, Homo sapien
aggtacctgccaccgcacgcagcta

SEQ ID NO: 3476153 - DNA, 25 bp, Homo sapien
agaaggaataaataaatctgtgact

SEQ ID NO: 3476154 - DNA, 25 bp, Homo sapien
aggaataaataaatctgtgactggt

SEQ ID NO: 3476155 - DNA, 25 bp, Homo sapien
tgtgataaattagttgtaacaccac

SEQ ID NO: 3476156 - DNA, 25 bp, Homo sapien
ttgtgataaattagttgtaacacca

SEQ ID NO: 3476157 - DNA, 25 bp, Homo sapien
ggctaccaattcaagtgactccaag

SEQ ID NO: 3476158 - DNA, 25 bp, Homo sapien
cagcatttattcctgtacctggcac

SEQ ID NO: 3476159 - DNA, 25 bp, Homo sapien
tcatcctcgttcagtcaagaacaga

SEQ ID NO: 3476160 - DNA, 25 bp, Homo sapien
tacctggcacaggattgggtgactc

SEQ ID NO: 3476161 - DNA, 25 bp, Homo sapien
ctcctgttactgctttaaagtctgt

SEQ ID NO: 3476162 - DNA, 25 bp, Homo sapien
ttactgctttaaagtctgtgctgtc

SEQ ID NO: 3476163 - DNA, 25 bp, Homo sapien
cctgttactgctttaaagtctgtgc

SEQ ID NO: 3476164 - DNA, 25 bp, Homo sapien
tgttactgctttaaagtctgtgctg

SEQ ID NO: 3476165 - DNA, 25 bp, Homo sapien
tctgcagatgtttcaacctttcagt

SEQ ID NO: 3476166 - DNA, 25 bp, Homo sapien
agactcctctcgattcttaccttct

SEQ ID NO: 3476167 - DNA, 25 bp, Homo sapien
aataaaagactcctctcgattctta

SEQ ID NO: 3476168 - DNA, 25 bp, Homo sapien
aacctttcagttatgtttgacattt

SEQ ID NO: 3476169 - DNA, 25 bp, Homo sapien
ctttacacaattgtagaagaagctg

SEQ ID NO: 3476170 - DNA, 25 bp, Homo sapien
agtcagggaggtagaaccttcatga

SEQ ID NO: 3476171 - DNA, 25 bp, Homo sapien
cacggccagtaccagtaagtgtatc

SEQ ID NO: 3476172 - DNA, 25 bp, Homo sapien
tattatgggaactatgctttacaca

SEQ ID NO: 3476173 - DNA, 25 bp, Homo sapien
agcttgtcggtgagggcagtcgctc

SEQ ID NO: 3476174 - DNA, 25 bp, Homo sapien
gcagtcgctctttgctgcaggctga

SEQ ID NO: 3476175 - DNA, 25 bp, Homo sapien
tgggtggtgatccagctccacgatc

SEQ ID NO: 3476176 - DNA, 25 bp, Homo sapien
ggaattcatgtcttctgggtggtga

SEQ ID NO: 3476177 - DNA, 25 bp, Homo sapien
gccaggcacctgagagtaattgatg

SEQ ID NO: 3476178 - DNA, 25 bp, Homo sapien
gccgcatctgcaccttgatcacgga

SEQ ID NO: 3476179 - DNA, 25 bp, Homo sapien
gtttccaaatgactcggccctgctg

SEQ ID NO: 3476180 - DNA, 25 bp, Homo sapien
cacggagctcctccgagagaggttt

SEQ ID NO: 3476181 - DNA, 25 bp, Homo sapien
acgcacagctcccctctcgttagga

SEQ ID NO: 3476182 - DNA, 25 bp, Homo sapien
gcacagctcccctctcgttaggaaa

SEQ ID NO: 3476183 - DNA, 25 bp, Homo sapien
agctcccctctcgttaggaaacagg

SEQ ID NO: 3476184 - DNA, 25 bp, Homo sapien
acagctcccctctcgttaggaaaca

SEQ ID NO: 3476185 - DNA, 25 bp, Homo sapien
cactgtcttatgttgagaggctccc

SEQ ID NO: 3476186 - DNA, 25 bp, Homo sapien
agactggtcactgtcttatgttgag

SEQ ID NO: 3476187 - DNA, 25 bp, Homo sapien
tccccgccaggtgcctctagagagg

SEQ ID NO: 3476188 - DNA, 25 bp, Homo sapien
cccgccaggtgcctctagagaggtg

SEQ ID NO: 3476189 - DNA, 25 bp, Homo sapien
tttccagcgttagcgggtagttcat

SEQ ID NO: 3476190 - DNA, 25 bp, Homo sapien
ggttctcgaggtccatttccagcgt

SEQ ID NO: 3476191 - DNA, 25 bp, Homo sapien
cctccaggttctcgaggtccatttc

SEQ ID NO: 3476192 - DNA, 25 bp, Homo sapien
ggtccatttccagcgttagcgggta

SEQ ID NO: 3476193 - DNA, 25 bp, Homo sapien
tagaaggacccagactaactccaga

SEQ ID NO: 3476194 - DNA, 25 bp, Homo sapien
aaaggccccagttcttagctcaaca

SEQ ID NO: 3476195 - DNA, 25 bp, Homo sapien
taaaacccagcgttcaaggaatgtg

SEQ ID NO: 3476196 - DNA, 25 bp, Homo sapien
caatacctggtatgggcaaggacaa

SEQ ID NO: 3476197 - DNA, 25 bp, Homo sapien
ccgttctgctagaggagtgggatca

SEQ ID NO: 3476198 - DNA, 25 bp, Homo sapien
tggatattcccagccgagagtcagg

SEQ ID NO: 3476199 - DNA, 25 bp, Homo sapien
gaaagcaagagttcctgacggagac

SEQ ID NO: 3476200 - DNA, 25 bp, Homo sapien
gattcttaggtccacatatgcggcc

SEQ ID NO: 3476201 - DNA, 25 bp, Homo sapien
aaaaccatggacctgtgggaagacg

SEQ ID NO: 3476202 - DNA, 25 bp, Homo sapien
cagtggctattaatacgtgtgacca

SEQ ID NO: 3476203 - DNA, 25 bp, Homo sapien
tgcagaacatcccatgcagtaggat

SEQ ID NO: 3476204 - DNA, 25 bp, Homo sapien
tgcaggtatgtgacaacagtgccca

SEQ ID NO: 3476205 - DNA, 25 bp, Homo sapien
taatgctgagcagacccattctcca

SEQ ID NO: 3476206 - DNA, 25 bp, Homo sapien
tcctaatgctgagcagacccattct

SEQ ID NO: 3476207 - DNA, 25 bp, Homo sapien
atgctgagcagacccattctccaac

SEQ ID NO: 3476208 - DNA, 25 bp, Homo sapien
ctaatgctgagcagacccattctcc

SEQ ID NO: 3476209 - DNA, 25 bp, Homo sapien
cctctctgagaggaaccctagctct

SEQ ID NO: 3476210 - DNA, 25 bp, Homo sapien
agggtgaggacctaaggacctgtct

SEQ ID NO: 3476211 - DNA, 25 bp, Homo sapien
ctcttggaggttttttcctacatag

SEQ ID NO: 3476212 - DNA, 25 bp, Homo sapien
ttttcgcctgtcaaagggaccgcat

SEQ ID NO: 3476213 - DNA, 25 bp, Homo sapien
gaggtgtcgttatagttgtccaatc

SEQ ID NO: 3476214 - DNA, 25 bp, Homo sapien
cgttatagttgtccaatctgtccag

SEQ ID NO: 3476215 - DNA, 25 bp, Homo sapien
ccaccagggaggtgtcgttatagtt

SEQ ID NO: 3476216 - DNA, 25 bp, Homo sapien
agttgtccaatctgtccagttccca

SEQ ID NO: 3476217 - DNA, 25 bp, Homo sapien
tgactttggcgaagagaatctctgg

SEQ ID NO: 3476218 - DNA, 25 bp, Homo sapien
tcccgccacatggtagaggaatcgg

SEQ ID NO: 3476219 - DNA, 25 bp, Homo sapien
tcacgccggcgaaagtgtagagcat

SEQ ID NO: 3476220 - DNA, 25 bp, Homo sapien
ccaggtggaacaggaaggtctccgt

SEQ ID NO: 3476221 - DNA, 25 bp, Homo sapien
gatggttgagatgactcccacgggc

SEQ ID NO: 3476222 - DNA, 25 bp, Homo sapien
taggacactcttagccacggtgagc

SEQ ID NO: 3476223 - DNA, 25 bp, Homo sapien
gaccgccgggtttgattgatccatc

SEQ ID NO: 3476224 - DNA, 25 bp, Homo sapien
catcgattacccagcttgcgaggag

SEQ ID NO: 3476225 - DNA, 25 bp, Homo sapien
taaatgacccactcctaaactgagg

SEQ ID NO: 3476226 - DNA, 25 bp, Homo sapien
cagaacttgaagtcttttgtcccag

SEQ ID NO: 3476227 - DNA, 25 bp, Homo sapien
tccccaaatggtaagatgacgtaaa

SEQ ID NO: 3476228 - DNA, 25 bp, Homo sapien
tgtgtttgcccacaccggtgacacg

SEQ ID NO: 3476229 - DNA, 25 bp, Homo sapien
ggaccccccaatccgcgtgaggtga

SEQ ID NO: 3476230 - DNA, 25 bp, Homo sapien
aacacagtctgattgtctcttgctc

SEQ ID NO: 3476231 - DNA, 25 bp, Homo sapien
cgaggagggagatccagtttgaatc

SEQ ID NO: 3476232 - DNA, 25 bp, Homo sapien
cagctccggcctggcgtgaggaccc

SEQ ID NO: 3476233 - DNA, 25 bp, Homo sapien
aggatcaaaagatcaccgcctgccc

SEQ ID NO: 3476234 - DNA, 25 bp, Homo sapien
gagatcaaggcgtccaggatcaaaa

SEQ ID NO: 3476235 - DNA, 25 bp, Homo sapien
ggctggtattgagatcaaggcgtcc

SEQ ID NO: 3476236 - DNA, 25 bp, Homo sapien
tgcatctccaactggcgagcaggag

SEQ ID NO: 3476237 - DNA, 25 bp, Homo sapien
agtggctggacatgccccggacccg

SEQ ID NO: 3476238 - DNA, 25 bp, Homo sapien
cgagtggaggggcaagcgaggctcc

SEQ ID NO: 3476239 - DNA, 25 bp, Homo sapien
cggagccagtggctggacatgcccc

SEQ ID NO: 3476240 - DNA, 25 bp, Homo sapien
tggagccgagtggaggggcaagcga

SEQ ID NO: 3476241 - DNA, 25 bp, Homo sapien
gttgggcgaggaggcaagcgagatg

SEQ ID NO: 3476242 - DNA, 25 bp, Homo sapien
gatgggggagctcttattttgacag

SEQ ID NO: 3476243 - DNA, 25 bp, Homo sapien
gccagagagccccgatgcttattca

SEQ ID NO: 3476244 - DNA, 25 bp, Homo sapien
cttattttgacaggggcctctccgg

SEQ ID NO: 3476245 - DNA, 25 bp, Homo sapien
ccaggacggtgtcgccaccaagatg

SEQ ID NO: 3476246 - DNA, 25 bp, Homo sapien
gccaggatgcccggatcggctcttc

SEQ ID NO: 3476247 - DNA, 25 bp, Homo sapien
accaagatgggggtgcgggcgcagc

SEQ ID NO: 3476248 - DNA, 25 bp, Homo sapien
aggatgcccggatcggctcttcctc

SEQ ID NO: 3476249 - DNA, 25 bp, Homo sapien
tcggctgtcggctgcaacttggaga

SEQ ID NO: 3476250 - DNA, 25 bp, Homo sapien
tctgcccgcaatctgcaagactgga

SEQ ID NO: 3476251 - DNA, 25 bp, Homo sapien
tgaggcagctacaaaacccagactt

SEQ ID NO: 3476252 - DNA, 25 bp, Homo sapien
cactcaaggagttaagtctgcccgc

SEQ ID NO: 3476253 - DNA, 25 bp, Homo sapien
agagacagggtgtcctggtgttgtc

SEQ ID NO: 3476254 - DNA, 25 bp, Homo sapien
aggcttgtgtgcccaatcccaccat

SEQ ID NO: 3476255 - DNA, 25 bp, Homo sapien
acacccatcagcataatgcattgca

SEQ ID NO: 3476256 - DNA, 25 bp, Homo sapien
catcagcataatgcattgcagccca

SEQ ID NO: 3476257 - DNA, 25 bp, Homo sapien
agtctgtccgctgagcagctcccga

SEQ ID NO: 3476258 - DNA, 25 bp, Homo sapien
gcccactgtgccctaagggtgcagg

SEQ ID NO: 3476259 - DNA, 25 bp, Homo sapien
agcagctcccgagatgcccactgtg

SEQ ID NO: 3476260 - DNA, 25 bp, Homo sapien
cgagatgcccactgtgccctaaggg

SEQ ID NO: 3476261 - DNA, 25 bp, Homo sapien
ttgatatgcacatcagatactggtg

SEQ ID NO: 3476262 - DNA, 25 bp, Homo sapien
tatgcacatcagatactggtgccct

SEQ ID NO: 3476263 - DNA, 25 bp, Homo sapien
ggccctgtttgatatgcacatcaga

SEQ ID NO: 3476264 - DNA, 25 bp, Homo sapien
ctccccaggccctgtttgatatgca

SEQ ID NO: 3476265 - DNA, 25 bp, Homo sapien
agtggtggcacctctatccttgaga

SEQ ID NO: 3476266 - DNA, 25 bp, Homo sapien
tctatccttgagacctgaggctgga

SEQ ID NO: 3476267 - DNA, 25 bp, Homo sapien
attgggaagtggtggcacctctatc

SEQ ID NO: 3476268 - DNA, 25 bp, Homo sapien
ggcacctctatccttgagacctgag

SEQ ID NO: 3476269 - DNA, 25 bp, Homo sapien
gctccacgaactattctatcttcct

SEQ ID NO: 3476270 - DNA, 25 bp, Homo sapien
aaagtggaatactttgtcgggagag

SEQ ID NO: 3476271 - DNA, 25 bp, Homo sapien
ctgtttgctccacgaactattctat

SEQ ID NO: 3476272 - DNA, 25 bp, Homo sapien
tgagagctgtacagagactgttgct

SEQ ID NO: 3476273 - DNA, 25 bp, Homo sapien
tgggaggtggaataggtgctggcag

SEQ ID NO: 3476274 - DNA, 25 bp, Homo sapien
ggaggtggaataggtgctggcaggc

SEQ ID NO: 3476275 - DNA, 25 bp, Homo sapien
gaggtggaataggtgctggcaggct

SEQ ID NO: 3476276 - DNA, 25 bp, Homo sapien
gctgggaggtggaataggtgctggc

SEQ ID NO: 3476277 - DNA, 25 bp, Homo sapien
ggcaaggtccggatgggcagcaggg

SEQ ID NO: 3476278 - DNA, 25 bp, Homo sapien
gaatcaggatcaagggcaaggtccg

SEQ ID NO: 3476279 - DNA, 25 bp, Homo sapien
atcaggatcaagggcaaggtccgga

SEQ ID NO: 3476280 - DNA, 25 bp, Homo sapien
gcagaatcaggatcaagggcaaggt

SEQ ID NO: 3476281 - DNA, 25 bp, Homo sapien
ggaccatcagtgtggcattgcctcc

SEQ ID NO: 3476282 - DNA, 25 bp, Homo sapien
cagcaggctctccgttagcgccggg

SEQ ID NO: 3476283 - DNA, 25 bp, Homo sapien
attggctctccggaccatcagtgtg

SEQ ID NO: 3476284 - DNA, 25 bp, Homo sapien
gaccagagaggcttgagatgttgaa

SEQ ID NO: 3476285 - DNA, 25 bp, Homo sapien
cactgagccgagtgactgtgaagcc

SEQ ID NO: 3476286 - DNA, 25 bp, Homo sapien
ctggtatgcactgagccgagtgact

SEQ ID NO: 3476287 - DNA, 25 bp, Homo sapien
gcccacggcacggaggcaccacaaa

SEQ ID NO: 3476288 - DNA, 25 bp, Homo sapien
ggcaccacaaagctggacgtcacca

SEQ ID NO: 3476289 - DNA, 25 bp, Homo sapien
tggttcctggcacgaggtttgtcac

SEQ ID NO: 3476290 - DNA, 25 bp, Homo sapien
ccccttcttcactaggtaggaaatg

SEQ ID NO: 3476291 - DNA, 25 bp, Homo sapien
gtgtggacattgggatctctctgct

SEQ ID NO: 3476292 - DNA, 25 bp, Homo sapien
gggagtgtggacattgggatctctc

SEQ ID NO: 3476293 - DNA, 25 bp, Homo sapien
gagtgtggacattgggatctctctg

SEQ ID NO: 3476294 - DNA, 25 bp, Homo sapien
aggaacatggcgacagagagcagca

SEQ ID NO: 3476295 - DNA, 25 bp, Homo sapien
cagcaggaacatggcgacagagagc

SEQ ID NO: 3476296 - DNA, 25 bp, Homo sapien
acagagagcagcaccgtgatgacca

SEQ ID NO: 3476297 - DNA, 25 bp, Homo sapien
agcagcaccgtgatgaccaccatgc

SEQ ID NO: 3476298 - DNA, 25 bp, Homo sapien
ccagggcaatgatgaagcccagcac

SEQ ID NO: 3476299 - DNA, 25 bp, Homo sapien
ttgcgggagcccagtgccagggcaa

SEQ ID NO: 3476300 - DNA, 25 bp, Homo sapien
gtgccagggcaatgatgaagcccag

SEQ ID NO: 3476301 - DNA, 25 bp, Homo sapien
tgcgggagcccagtgccagggcaat

SEQ ID NO: 3476302 - DNA, 25 bp, Homo sapien
gatgcagcctcagcctttattatag

SEQ ID NO: 3476303 - DNA, 25 bp, Homo sapien
gaggaaagtcaactctgacaggagt

SEQ ID NO: 3476304 - DNA, 25 bp, Homo sapien
atggagtgttggaaggtgaggcact

SEQ ID NO: 3476305 - DNA, 25 bp, Homo sapien
tatagggacttagttcactgaagga

SEQ ID NO: 3476306 - DNA, 25 bp, Homo sapien
cacagccccggtgtgtctctgagaa

SEQ ID NO: 3476307 - DNA, 25 bp, Homo sapien
tctgagaactctgactgctgggctc

SEQ ID NO: 3476308 - DNA, 25 bp, Homo sapien
ccctagttgagtggcccactgtgta

SEQ ID NO: 3476309 - DNA, 25 bp, Homo sapien
tgtgtactgtggatgctgccaaacc

SEQ ID NO: 3476310 - DNA, 25 bp, Homo sapien
agccaaatttagcaatagggggttg

SEQ ID NO: 3476311 - DNA, 25 bp, Homo sapien
tataccaactttagtgacactaatg

SEQ ID NO: 3476312 - DNA, 25 bp, Homo sapien
taacccactaccatcagacaagcca

SEQ ID NO: 3476313 - DNA, 25 bp, Homo sapien
tgacactaatgttattaataataag

SEQ ID NO: 3476314 - DNA, 25 bp, Homo sapien
gaagggaccccagatcatcttacgc

SEQ ID NO: 3476315 - DNA, 25 bp, Homo sapien
aagggaccccagatcatcttacgca

SEQ ID NO: 3476316 - DNA, 25 bp, Homo sapien
agggaccccagatcatcttacgcat

SEQ ID NO: 3476317 - DNA, 25 bp, Homo sapien
tggagcggtccatttgacgccttta

SEQ ID NO: 3476318 - DNA, 25 bp, Homo sapien
gaacgcttaagaagaccctccttga

SEQ ID NO: 3476319 - DNA, 25 bp, Homo sapien
gacgcctttaatctcttcaggaccg

SEQ ID NO: 3476320 - DNA, 25 bp, Homo sapien
gaccgcgccgaggaacgcttaagaa

SEQ ID NO: 3476321 - DNA, 25 bp, Homo sapien
ctcggattgagttagcttggcggca

SEQ ID NO: 3476322 - DNA, 25 bp, Homo sapien
cggctgaggagcgaccctcacaggc

SEQ ID NO: 3476323 - DNA, 25 bp, Homo sapien
tcgaggtgttggagcttcacgtcca

SEQ ID NO: 3476324 - DNA, 25 bp, Homo sapien
acaggcgccttctcaaatgcgccgg

SEQ ID NO: 3476325 - DNA, 25 bp, Homo sapien
aggccagaaagagctcgttccccat

SEQ ID NO: 3476326 - DNA, 25 bp, Homo sapien
tttctgctccgctaaggggaggtga

SEQ ID NO: 3476327 - DNA, 25 bp, Homo sapien
gtgaaggccagaaagagctcgttcc

SEQ ID NO: 3476328 - DNA, 25 bp, Homo sapien
gaggtgagatgtggtgaaggccaga

SEQ ID NO: 3476329 - DNA, 25 bp, Homo sapien
cttaacaattcggagtttatacctg

SEQ ID NO: 3476330 - DNA, 25 bp, Homo sapien
gtggcttaacaattcggagtttata

SEQ ID NO: 3476331 - DNA, 25 bp, Homo sapien
taacaattcggagtttatacctggc

SEQ ID NO: 3476332 - DNA, 25 bp, Homo sapien
acaattcggagtttatacctggcaa

SEQ ID NO: 3476333 - DNA, 25 bp, Homo sapien
cagaggttgggctcataatctggac

SEQ ID NO: 3476334 - DNA, 25 bp, Homo sapien
tccagctttccagggggatacacaa

SEQ ID NO: 3476335 - DNA, 25 bp, Homo sapien
aatgttgggatttacccacatccag

SEQ ID NO: 3476336 - DNA, 25 bp, Homo sapien
ccagaggttgggctcataatctgga

SEQ ID NO: 3476337 - DNA, 25 bp, Homo sapien
gcttgtcaggtcctccctcttccta

SEQ ID NO: 3476338 - DNA, 25 bp, Homo sapien
cctccctcttcctacgtcctgagac

SEQ ID NO: 3476339 - DNA, 25 bp, Homo sapien
gtgtgcttgtcaggtcctccctctt

SEQ ID NO: 3476340 - DNA, 25 bp, Homo sapien
ggagtgtgcttgtcaggtcctccct

SEQ ID NO: 3476341 - DNA, 25 bp, Homo sapien
gggagaccgcttgctggaggactgg

SEQ ID NO: 3476342 - DNA, 25 bp, Homo sapien
gagaccgcttgctggaggactggga

SEQ ID NO: 3476343 - DNA, 25 bp, Homo sapien
tgggacagtgattccacccctgcgg

SEQ ID NO: 3476344 - DNA, 25 bp, Homo sapien
ggactgggacagtgattccacccct

SEQ ID NO: 3476345 - DNA, 25 bp, Homo sapien
tgctggcttgccgaagcctccgact

SEQ ID NO: 3476346 - DNA, 25 bp, Homo sapien
ttgccgaagcctccgactctggagg

SEQ ID NO: 3476347 - DNA, 25 bp, Homo sapien
tggcttgccgaagcctccgactctg

SEQ ID NO: 3476348 - DNA, 25 bp, Homo sapien
tgggagagccatagaggagctgtct

SEQ ID NO: 3476349 - DNA, 25 bp, Homo sapien
gccagggcaattaggtggaagtaat

SEQ ID NO: 3476350 - DNA, 25 bp, Homo sapien
tgttgcacgttgaggccacaggggg

SEQ ID NO: 3476351 - DNA, 25 bp, Homo sapien
ggaactgtttcttaatgccagggca

SEQ ID NO: 3476352 - DNA, 25 bp, Homo sapien
gcacgttgaggccacagggggaact

SEQ ID NO: 3476353 - DNA, 25 bp, Homo sapien
caaagctgtctcgaaaacagagatt

SEQ ID NO: 3476354 - DNA, 25 bp, Homo sapien
aagctgtctcgaaaacagagattgt

SEQ ID NO: 3476355 - DNA, 25 bp, Homo sapien
gacagtattcttccagccttccggg

SEQ ID NO: 3476356 - DNA, 25 bp, Homo sapien
acagagattgtgacggacagtattc

SEQ ID NO: 3476357 - DNA, 25 bp, Homo sapien
tccagaggcaagatcgaggccgtgt

SEQ ID NO: 3476358 - DNA, 25 bp, Homo sapien
tgttggatactttctagccgagtgg

SEQ ID NO: 3476359 - DNA, 25 bp, Homo sapien
cctcctcggtcaacttccagaggca

SEQ ID NO: 3476360 - DNA, 25 bp, Homo sapien
cgagtggaagccaaggcgcgggcct

SEQ ID NO: 3476361 - DNA, 25 bp, Homo sapien
cttgggcccacgcacaacaagtctt

SEQ ID NO: 3476362 - DNA, 25 bp, Homo sapien
tcttccccttgggcccacgcacaac

SEQ ID NO: 3476363 - DNA, 25 bp, Homo sapien
tccccttgggcccacgcacaacaag

SEQ ID NO: 3476364 - DNA, 25 bp, Homo sapien
tgggcccacgcacaacaagtcttca

SEQ ID NO: 3476365 - DNA, 25 bp, Homo sapien
taaagatcaaagaggaagggcatca

SEQ ID NO: 3476366 - DNA, 25 bp, Homo sapien
ttaaagatcaaagaggaagggcatc

SEQ ID NO: 3476367 - DNA, 25 bp, Homo sapien
aaagatcaaagaggaagggcatcac

SEQ ID NO: 3476368 - DNA, 25 bp, Homo sapien
agatcaaagaggaagggcatcacat

SEQ ID NO: 3476369 - DNA, 25 bp, Homo sapien
taaagcattagctggctgttgcttc

SEQ ID NO: 3476370 - DNA, 25 bp, Homo sapien
aataaagcattagctggctgttgct

SEQ ID NO: 3476371 - DNA, 25 bp, Homo sapien
ttaataaagcattagctggctgttg

SEQ ID NO: 3476372 - DNA, 25 bp, Homo sapien
tagtgagggtaattttaataaagca

SEQ ID NO: 3476373 - DNA, 25 bp, Homo sapien
cccctccatagacaacctggatagt

SEQ ID NO: 3476374 - DNA, 25 bp, Homo sapien
cataatgcattacagtctagaactc

SEQ ID NO: 3476375 - DNA, 25 bp, Homo sapien
gtggacacccaaactgcataatgca

SEQ ID NO: 3476376 - DNA, 25 bp, Homo sapien
tggatagtcccctgtcctgggaggt

SEQ ID NO: 3476377 - DNA, 25 bp, Homo sapien
taaattctaataacccactaccatc

SEQ ID NO: 3476378 - DNA, 25 bp, Homo sapien
attctaataacccactaccatcaga

SEQ ID NO: 3476379 - DNA, 25 bp, Homo sapien
gtgacactaatgttattaaattcta

SEQ ID NO: 3476380 - DNA, 25 bp, Homo sapien
ataacccactaccatcagaccagcc

SEQ ID NO: 3476381 - DNA, 25 bp, Homo sapien
gtggttgttcacaggtgccaaccta

SEQ ID NO: 3476382 - DNA, 25 bp, Homo sapien
gttcacaggtgccaacctactattg

SEQ ID NO: 3476383 - DNA, 25 bp, Homo sapien
gttgttcacaggtgccaacctacta

SEQ ID NO: 3476384 - DNA, 25 bp, Homo sapien
ttcacaggtgccaacctactattga

SEQ ID NO: 3476385 - DNA, 25 bp, Homo sapien
caccagcggccgatcctacgccatc

SEQ ID NO: 3476386 - DNA, 25 bp, Homo sapien
caccaccagcggccgatcctacgcc

SEQ ID NO: 3476387 - DNA, 25 bp, Homo sapien
ccaccagcggccgatcctacgccat

SEQ ID NO: 3476388 - DNA, 25 bp, Homo sapien
accaccagcggccgatcctacgcca

SEQ ID NO: 3476389 - DNA, 25 bp, Homo sapien
ttgcggctgtaaacgtgcccgcgac

SEQ ID NO: 3476390 - DNA, 25 bp, Homo sapien
ggtgcttgcggctgtaaacgtgccc

SEQ ID NO: 3476391 - DNA, 25 bp, Homo sapien
aaacgtgcccgcgaccacagaagaa

SEQ ID NO: 3476392 - DNA, 25 bp, Homo sapien
cccgcgaccacagaagaaggtctgg

SEQ ID NO: 3476393 - DNA, 25 bp, Homo sapien
tacagcaccgtcaggtttccatggc

SEQ ID NO: 3476394 - DNA, 25 bp, Homo sapien
ctcgtgttcgggcacatagcgctcc

SEQ ID NO: 3476395 - DNA, 25 bp, Homo sapien
aggcaccagcagcatcgctcgtgtt

SEQ ID NO: 3476396 - DNA, 25 bp, Homo sapien
atagcgctccacctgagcggcgcgg

SEQ ID NO: 3476397 - DNA, 25 bp, Homo sapien
cgcgcataatcctggggagtgacca

SEQ ID NO: 3476398 - DNA, 25 bp, Homo sapien
tcctggggagtgaccagaaacttct

SEQ ID NO: 3476399 - DNA, 25 bp, Homo sapien
cataatcctggggagtgaccagaaa

SEQ ID NO: 3476400 - DNA, 25 bp, Homo sapien
taatcctggggagtgaccagaaact

SEQ ID NO: 3476401 - DNA, 25 bp, Homo sapien
atccagagaattcactctgctactt

SEQ ID NO: 3476402 - DNA, 25 bp, Homo sapien
gaattcactctgctacttcacgttc

SEQ ID NO: 3476403 - DNA, 25 bp, Homo sapien
gagaattcactctgctacttcacgt

SEQ ID NO: 3476404 - DNA, 25 bp, Homo sapien
tcactctgctacttcacgttccata

SEQ ID NO: 3476405 - DNA, 25 bp, Homo sapien
agattcttcgtaagtccctcctgaa

SEQ ID NO: 3476406 - DNA, 25 bp, Homo sapien
taaaagtaggtactggctgagcagc

SEQ ID NO: 3476407 - DNA, 25 bp, Homo sapien
tctcggtgcctcatatttaagtagt

SEQ ID NO: 3476408 - DNA, 25 bp, Homo sapien
taaacagcctcttctaacgttagta

SEQ ID NO: 3476409 - DNA, 25 bp, Homo sapien
taaatccagcctaaggaacactgta

SEQ ID NO: 3476410 - DNA, 25 bp, Homo sapien
cctatgccaggaggcatgaaaaccc

SEQ ID NO: 3476411 - DNA, 25 bp, Homo sapien
gaaagtcctacctacagcttctaat

SEQ ID NO: 3476412 - DNA, 25 bp, Homo sapien
gcagcagatgaattcccagatacca

SEQ ID NO: 3476413 - DNA, 25 bp, Homo sapien
actagtcttttatgatttactacca

SEQ ID NO: 3476414 - DNA, 25 bp, Homo sapien
aatccaggctgaaacgggagaatcg

SEQ ID NO: 3476415 - DNA, 25 bp, Homo sapien
acaaatccaggctgaaacgggagaa

SEQ ID NO: 3476416 - DNA, 25 bp, Homo sapien
gatactagtcttttatgatttacta

SEQ ID NO: 3476417 - DNA, 25 bp, Homo sapien
actgagcatggccatgtgatcaatt

SEQ ID NO: 3476418 - DNA, 25 bp, Homo sapien
tacagttgactcttgcacagcacaa

SEQ ID NO: 3476419 - DNA, 25 bp, Homo sapien
tagtttcttgattatcctttaggca

SEQ ID NO: 3476420 - DNA, 25 bp, Homo sapien
actgcacgagttcacttgaaaattt

SEQ ID NO: 3476421 - DNA, 25 bp, Homo sapien
cagagtaagtaggactataggctag

SEQ ID NO: 3476422 - DNA, 25 bp, Homo sapien
ggtaggactatatgcccagctaatc

SEQ ID NO: 3476423 - DNA, 25 bp, Homo sapien
taagtaggactataggctagcctcc

SEQ ID NO: 3476424 - DNA, 25 bp, Homo sapien
ccagctaatccagatacccttttta

SEQ ID NO: 3476425 - DNA, 25 bp, Homo sapien
aattacagtgtggttgaagtccaga

SEQ ID NO: 3476426 - DNA, 25 bp, Homo sapien
ctttctgtagactaacctggaaggc

SEQ ID NO: 3476427 - DNA, 25 bp, Homo sapien
gcaggtctctaatttccaaaccaga

SEQ ID NO: 3476428 - DNA, 25 bp, Homo sapien
ggaacacaactagactttctgtaga

SEQ ID NO: 3476429 - DNA, 25 bp, Homo sapien
accatatcacagaggttgatgaatg

SEQ ID NO: 3476430 - DNA, 25 bp, Homo sapien
tgggagctacagtcaaaaaaatttg

SEQ ID NO: 3476431 - DNA, 25 bp, Homo sapien
ttagaaataggtggactaagccagg

SEQ ID NO: 3476432 - DNA, 25 bp, Homo sapien
tcacagaggttgatgaatgacccag

SEQ ID NO: 3476433 - DNA, 25 bp, Homo sapien
ggtgtatgaaacaaggacctgagaa

SEQ ID NO: 3476434 - DNA, 25 bp, Homo sapien
ggtgcacacttatagccctagatac

SEQ ID NO: 3476435 - DNA, 25 bp, Homo sapien
caaaccttggaattgccttgtgtgt

SEQ ID NO: 3476436 - DNA, 25 bp, Homo sapien
tactacagtctagatttgattcccc

SEQ ID NO: 3476437 - DNA, 25 bp, Homo sapien
tacttacaagcagtacatctggtaa

SEQ ID NO: 3476438 - DNA, 25 bp, Homo sapien
tctggtaaaggtcattgccattctc

SEQ ID NO: 3476439 - DNA, 25 bp, Homo sapien
atacttacaagcagtacatctggta

SEQ ID NO: 3476440 - DNA, 25 bp, Homo sapien
acttacaagcagtacatctggtaaa

SEQ ID NO: 3476441 - DNA, 25 bp, Homo sapien
ggaggaacattctatacaaccatga

SEQ ID NO: 3476442 - DNA, 25 bp, Homo sapien
cagacttgagtgtaggcatacaggc

SEQ ID NO: 3476443 - DNA, 25 bp, Homo sapien
gaatccaggccaaatcttgcatact

SEQ ID NO: 3476444 - DNA, 25 bp, Homo sapien
acatggaatccagctattaggtctc

SEQ ID NO: 3476445 - DNA, 25 bp, Homo sapien
ttcttcataggaatccaaacctttc

SEQ ID NO: 3476446 - DNA, 25 bp, Homo sapien
aacctttcaccatggatttcttgaa

SEQ ID NO: 3476447 - DNA, 25 bp, Homo sapien
caaacctttcaccatggatttcttg

SEQ ID NO: 3476448 - DNA, 25 bp, Homo sapien
tccaaacctttcaccatggatttct

SEQ ID NO: 3476449 - DNA, 25 bp, Homo sapien
taagacagaccgaaccacctcctgt

SEQ ID NO: 3476450 - DNA, 25 bp, Homo sapien
accgaaccacctcctgtcggctctg

SEQ ID NO: 3476451 - DNA, 25 bp, Homo sapien
cgaaccacctcctgtcggctctgct

SEQ ID NO: 3476452 - DNA, 25 bp, Homo sapien
agaccgaaccacctcctgtcggctc

SEQ ID NO: 3476453 - DNA, 25 bp, Homo sapien
tctggatcctccgagggaaaccaac

SEQ ID NO: 3476454 - DNA, 25 bp, Homo sapien
ggtctggatcctccgagggaaacca

SEQ ID NO: 3476455 - DNA, 25 bp, Homo sapien
gtctggatcctccgagggaaaccaa

SEQ ID NO: 3476456 - DNA, 25 bp, Homo sapien
taagggaattcaagccaagcagatg

SEQ ID NO: 3476457 - DNA, 25 bp, Homo sapien
tagcatatggaaggtactgcccatc

SEQ ID NO: 3476458 - DNA, 25 bp, Homo sapien
acatattcactgactaggcctgccc

SEQ ID NO: 3476459 - DNA, 25 bp, Homo sapien
aatgtgtctgggatgcttaagagcc

SEQ ID NO: 3476460 - DNA, 25 bp, Homo sapien
tgttcatccctttccagcttctagg

SEQ ID NO: 3476461 - DNA, 25 bp, Homo sapien
ccctttccagcttctaggtgctgaa

SEQ ID NO: 3476462 - DNA, 25 bp, Homo sapien
aggtgctgaagagccctcttctggg

SEQ ID NO: 3476463 - DNA, 25 bp, Homo sapien
tgaagagccctcttctgggtctggc

SEQ ID NO: 3476464 - DNA, 25 bp, Homo sapien
catttcccaggcaaaaggttgcaga

SEQ ID NO: 3476465 - DNA, 25 bp, Homo sapien
agatgtcaaattcccaacaagagat

SEQ ID NO: 3476466 - DNA, 25 bp, Homo sapien
aaaacatgagccaggctgccagatg

SEQ ID NO: 3476467 - DNA, 25 bp, Homo sapien
ccatgagggtggtaaagattagatc

SEQ ID NO: 3476468 - DNA, 25 bp, Homo sapien
tggtggcaggtccaaatttgagggc

SEQ ID NO: 3476469 - DNA, 25 bp, Homo sapien
caaatttgagggctgctgtaagctg

SEQ ID NO: 3476470 - DNA, 25 bp, Homo sapien
gtccaaatttgagggctgctgtaag

SEQ ID NO: 3476471 - DNA, 25 bp, Homo sapien
caggtccaaatttgagggctgctgt

SEQ ID NO: 3476472 - DNA, 25 bp, Homo sapien
gcagcagtggcttgaataggtagaa

SEQ ID NO: 3476473 - DNA, 25 bp, Homo sapien
tgagaacactactagggaacagtga

SEQ ID NO: 3476474 - DNA, 25 bp, Homo sapien
tgagacctgagggaccattggccct

SEQ ID NO: 3476475 - DNA, 25 bp, Homo sapien
tacatgtgaataggatcgctttgga

SEQ ID NO: 3476476 - DNA, 25 bp, Homo sapien
tagaaacgatagacaaagcacactt

SEQ ID NO: 3476477 - DNA, 25 bp, Homo sapien
ggaagctcacagtcataacagtgga

SEQ ID NO: 3476478 - DNA, 25 bp, Homo sapien
tgctgccacaatgctaattctgcac

SEQ ID NO: 3476479 - DNA, 25 bp, Homo sapien
gagatgtctgtaagtagagtggcta

SEQ ID NO: 3476480 - DNA, 25 bp, Homo sapien
tgagtggatgttaccaactcctggt

SEQ ID NO: 3476481 - DNA, 25 bp, Homo sapien
gtggatgttaccaactcctggtata

SEQ ID NO: 3476482 - DNA, 25 bp, Homo sapien
gagtggatgttaccaactcctggta

SEQ ID NO: 3476483 - DNA, 25 bp, Homo sapien
ctgagtggatgttaccaactcctgg

SEQ ID NO: 3476484 - DNA, 25 bp, Homo sapien
gagctgctacaagtgaagctgttct

SEQ ID NO: 3476485 - DNA, 25 bp, Homo sapien
gaacggttggataatgtggtaggtg

SEQ ID NO: 3476486 - DNA, 25 bp, Homo sapien
tgtgtacaagtctatgtagacaggc

SEQ ID NO: 3476487 - DNA, 25 bp, Homo sapien
ccaatttggagctgctacaagtgaa

SEQ ID NO: 3476488 - DNA, 25 bp, Homo sapien
tgtgtcgtacgtatcaataattctg

SEQ ID NO: 3476489 - DNA, 25 bp, Homo sapien
gagattcatctgtgtcgtacgtatc

SEQ ID NO: 3476490 - DNA, 25 bp, Homo sapien
cgtacgtatcaataattctgtcttc

SEQ ID NO: 3476491 - DNA, 25 bp, Homo sapien
ccacgccggccaggtctggacttct

SEQ ID NO: 3476492 - DNA, 25 bp, Homo sapien
gccaaactggtcttgaactcctgac

SEQ ID NO: 3476493 - DNA, 25 bp, Homo sapien
gcgtgcgctgcgatgcccagctaat

SEQ ID NO: 3476494 - DNA, 25 bp, Homo sapien
ttggccaaactggtcttgaactcct

SEQ ID NO: 3476495 - DNA, 25 bp, Homo sapien
cgtgcgctgcgatgcccagctaatt

SEQ ID NO: 3476496 - DNA, 25 bp, Homo sapien
tgagcgaagccattacaatctagac

SEQ ID NO: 3476497 - DNA, 25 bp, Homo sapien
tattttcatgtccaggcaatcggtg

SEQ ID NO: 3476498 - DNA, 25 bp, Homo sapien
tctggagctttagaaggccctaggc

SEQ ID NO: 3476499 - DNA, 25 bp, Homo sapien
ttaaaatggctttgaggcacaactg

SEQ ID NO: 3476500 - DNA, 25 bp, Homo sapien
aattcttcataggatggtcctattt

SEQ ID NO: 3476501 - DNA, 25 bp, Homo sapien
tcttggttcccagcaatgtattctt

SEQ ID NO: 3476502 - DNA, 25 bp, Homo sapien
tcataggatggtcctatttcttggt

SEQ ID NO: 3476503 - DNA, 25 bp, Homo sapien
tggttcccagcaatgtattcttcat

SEQ ID NO: 3476504 - DNA, 25 bp, Homo sapien
ataaaagtttccctatcattgtaca

SEQ ID NO: 3476505 - DNA, 25 bp, Homo sapien
taaaagtttccctatcattgtacag

SEQ ID NO: 3476506 - DNA, 25 bp, Homo sapien
ctgtacaatgatagggaaactttta

SEQ ID NO: 3476507 - DNA, 25 bp, Homo sapien
tgtacaatgatagggaaacttttat

SEQ ID NO: 3476508 - DNA, 25 bp, Homo sapien
ccatctctatattcttcaataaaga

SEQ ID NO: 3476509 - DNA, 25 bp, Homo sapien
cccatctctatattcttcaataaag

SEQ ID NO: 3476510 - DNA, 25 bp, Homo sapien
accccatctctatattcttcaataa

SEQ ID NO: 3476511 - DNA, 25 bp, Homo sapien
tctctatattcttcaataaagaaaa

SEQ ID NO: 3476512 - DNA, 25 bp, Homo sapien
catctctatattcttcaataaagaa

SEQ ID NO: 3476513 - DNA, 25 bp, Homo sapien
taaaagtttccctatcattgtacag

SEQ ID NO: 3476514 - DNA, 25 bp, Homo sapien
ttctttattgaagaatatagagatg

SEQ ID NO: 3476515 - DNA, 25 bp, Homo sapien
ctgtacaatgatagggaaactttta

SEQ ID NO: 3476516 - DNA, 25 bp, Homo sapien
ttttctttattgaagaatatagaga

SEQ ID NO: 3476517 - DNA, 25 bp, Homo sapien
ctttattgaagaatatagagatggg

SEQ ID NO: 3476518 - DNA, 25 bp, Homo sapien
tctttattgaagaatatagagatgg

SEQ ID NO: 3476519 - DNA, 25 bp, Homo sapien
tgtacaatgatagggaaacttttat

SEQ ID NO: 3476520 - DNA, 25 bp, Homo sapien
gtctggaataatggacgccgctggc

SEQ ID NO: 3476521 - DNA, 25 bp, Homo sapien
gggccaactttgatcacagctccag

SEQ ID NO: 3476522 - DNA, 25 bp, Homo sapien
tttggccgcgtctggaataatggac

SEQ ID NO: 3476523 - DNA, 25 bp, Homo sapien
tggctgccctcttttggccgcgtct

SEQ ID NO: 3476524 - DNA, 25 bp, Homo sapien
tgatcacagctccaggaccagtgca

SEQ ID NO: 3476525 - DNA, 25 bp, Homo sapien
aactttgatcacagctccaggacca

SEQ ID NO: 3476526 - DNA, 25 bp, Homo sapien
gctgtgatcaaagttggccccaact

SEQ ID NO: 3476527 - DNA, 25 bp, Homo sapien
tgcactggtcctggagctgtgatca

SEQ ID NO: 3476528 - DNA, 25 bp, Homo sapien
agacgcggccaaaagagggcagcca

SEQ ID NO: 3476529 - DNA, 25 bp, Homo sapien
cctggagctgtgatcaaagttggcc

SEQ ID NO: 3476530 - DNA, 25 bp, Homo sapien
gccagcggcgtccattattccagac

SEQ ID NO: 3476531 - DNA, 25 bp, Homo sapien
gtccattattccagacgcggccaaa

SEQ ID NO: 3476532 - DNA, 25 bp, Homo sapien
tatgtgtgttcagtgccgggtctcc

SEQ ID NO: 3476533 - DNA, 25 bp, Homo sapien
tgtcacccttcatcatcgtgttaac

SEQ ID NO: 3476534 - DNA, 25 bp, Homo sapien
gttcagtgccgggtctccaacctac

SEQ ID NO: 3476535 - DNA, 25 bp, Homo sapien
tgtgtgttcagtgccgggtctccaa

SEQ ID NO: 3476536 - DNA, 25 bp, Homo sapien
ccttcatcatcgtgttaacccttta

SEQ ID NO: 3476537 - DNA, 25 bp, Homo sapien
catcatcgtgttaaccctttatttc

SEQ ID NO: 3476538 - DNA, 25 bp, Homo sapien
gaaataaagggttaacacgatgatg

SEQ ID NO: 3476539 - DNA, 25 bp, Homo sapien
gtaggttggagacccggcactgaac

SEQ ID NO: 3476540 - DNA, 25 bp, Homo sapien
gttaacacgatgatgaagggtgaca

SEQ ID NO: 3476541 - DNA, 25 bp, Homo sapien
taaagggttaacacgatgatgaagg

SEQ ID NO: 3476542 - DNA, 25 bp, Homo sapien
gagacccggcactgaacacacatac

SEQ ID NO: 3476543 - DNA, 25 bp, Homo sapien
tggatgggtaggttggagacccggc

SEQ ID NO: 3476544 - DNA, 25 bp, Homo sapien
tcaattcaaaactgaagctgcagca

SEQ ID NO: 3476545 - DNA, 25 bp, Homo sapien
atcaattcaaaactgaagctgcagc

SEQ ID NO: 3476546 - DNA, 25 bp, Homo sapien
acatcaattcaaaactgaagctgca

SEQ ID NO: 3476547 - DNA, 25 bp, Homo sapien
catcaattcaaaactgaagctgcag

SEQ ID NO: 3476548 - DNA, 25 bp, Homo sapien
caattcaaaactgaagctgcagcaa

SEQ ID NO: 3476549 - DNA, 25 bp, Homo sapien
ttcaaaactgaagctgcagcaatga

SEQ ID NO: 3476550 - DNA, 25 bp, Homo sapien
tcattgctgcagcttcagttttgaa

SEQ ID NO: 3476551 - DNA, 25 bp, Homo sapien
tgctgcagcttcagttttgaattga

SEQ ID NO: 3476552 - DNA, 25 bp, Homo sapien
ctgcagcttcagttttgaattgatg

SEQ ID NO: 3476553 - DNA, 25 bp, Homo sapien
tgcagcttcagttttgaattgatgt

SEQ ID NO: 3476554 - DNA, 25 bp, Homo sapien
gctgcagcttcagttttgaattgat

SEQ ID NO: 3476555 - DNA, 25 bp, Homo sapien
ttgctgcagcttcagttttgaattg

SEQ ID NO: 3476556 - DNA, 25 bp, Homo sapien
gaagcagtcacatacagaaaaaagc

SEQ ID NO: 3476557 - DNA, 25 bp, Homo sapien
gcagtcacatacagaaaaaagctaa

SEQ ID NO: 3476558 - DNA, 25 bp, Homo sapien
agaagcagtcacatacagaaaaaag

SEQ ID NO: 3476559 - DNA, 25 bp, Homo sapien
agcagtcacatacagaaaaaagcta

SEQ ID NO: 3476560 - DNA, 25 bp, Homo sapien
aagcagtcacatacagaaaaaagct

SEQ ID NO: 3476561 - DNA, 25 bp, Homo sapien
gcttttttctgtatgtgactgcttc

SEQ ID NO: 3476562 - DNA, 25 bp, Homo sapien
cttttttctgtatgtgactgcttct

SEQ ID NO: 3476563 - DNA, 25 bp, Homo sapien
tagcttttttctgtatgtgactgct

SEQ ID NO: 3476564 - DNA, 25 bp, Homo sapien
ttagcttttttctgtatgtgactgc

SEQ ID NO: 3476565 - DNA, 25 bp, Homo sapien
agcttttttctgtatgtgactgctt

SEQ ID NO: 3476566 - DNA, 25 bp, Homo sapien
ccatgaggctaaaagcaaagtcaac

SEQ ID NO: 3476567 - DNA, 25 bp, Homo sapien
tctaccaactaccatgaggctaaaa

SEQ ID NO: 3476568 - DNA, 25 bp, Homo sapien
taggaaacagacatactcattcatt

SEQ ID NO: 3476569 - DNA, 25 bp, Homo sapien
caccaaattctttatcattgtcttt

SEQ ID NO: 3476570 - DNA, 25 bp, Homo sapien
tctttcttaggaaacagacatactc

SEQ ID NO: 3476571 - DNA, 25 bp, Homo sapien
gaaacagacatactcattcatttga

SEQ ID NO: 3476572 - DNA, 25 bp, Homo sapien
ttttagcctcatggtagttggtaga

SEQ ID NO: 3476573 - DNA, 25 bp, Homo sapien
gttgactttgcttttagcctcatgg

SEQ ID NO: 3476574 - DNA, 25 bp, Homo sapien
aatcaaatgaatgagtatgtctgtt

SEQ ID NO: 3476575 - DNA, 25 bp, Homo sapien
caaatgaatgagtatgtctgtttcc

SEQ ID NO: 3476576 - DNA, 25 bp, Homo sapien
aaagacaatgataaagaatttggtg

SEQ ID NO: 3476577 - DNA, 25 bp, Homo sapien
gagtatgtctgtttcctaagaaaga

SEQ ID NO: 3476578 - DNA, 25 bp, Homo sapien
tatttctggtgtaaattacttgagc

SEQ ID NO: 3476579 - DNA, 25 bp, Homo sapien
tggtgtaaattacttgagctctgtg

SEQ ID NO: 3476580 - DNA, 25 bp, Homo sapien
tacttgagctctgtgctttgaaacc

SEQ ID NO: 3476581 - DNA, 25 bp, Homo sapien
cacccttggtatttctggtgtaaat

SEQ ID NO: 3476582 - DNA, 25 bp, Homo sapien
gagctctgtgctttgaaaccagttt

SEQ ID NO: 3476583 - DNA, 25 bp, Homo sapien
tgtaaattacttgagctctgtgctt

SEQ ID NO: 3476584 - DNA, 25 bp, Homo sapien
atttacaccagaaataccaagggtg

SEQ ID NO: 3476585 - DNA, 25 bp, Homo sapien
aaactggtttcaaagcacagagctc

SEQ ID NO: 3476586 - DNA, 25 bp, Homo sapien
tggtttcaaagcacagagctcaagt

SEQ ID NO: 3476587 - DNA, 25 bp, Homo sapien
cacagagctcaagtaatttacacca

SEQ ID NO: 3476588 - DNA, 25 bp, Homo sapien
aagcacagagctcaagtaatttaca

SEQ ID NO: 3476589 - DNA, 25 bp, Homo sapien
caagtaatttacaccagaaatacca

SEQ ID NO: 3476590 - DNA, 25 bp, Homo sapien
gaaatacaagggtaccactgcacct

SEQ ID NO: 3476591 - DNA, 25 bp, Homo sapien
cagtcttttgctgtcactaaggctg

SEQ ID NO: 3476592 - DNA, 25 bp, Homo sapien
aagacagagttctctcagaggtgcc

SEQ ID NO: 3476593 - DNA, 25 bp, Homo sapien
gaattgcttaatctgacgttcggta

SEQ ID NO: 3476594 - DNA, 25 bp, Homo sapien
tctgacgttcggtaaccgagaatcc

SEQ ID NO: 3476595 - DNA, 25 bp, Homo sapien
cgagaatcctagtttttaacgatca

SEQ ID NO: 3476596 - DNA, 25 bp, Homo sapien
cagccttagtgacagcaaaagactg

SEQ ID NO: 3476597 - DNA, 25 bp, Homo sapien
tgatcgttaaaaactaggattctcg

SEQ ID NO: 3476598 - DNA, 25 bp, Homo sapien
taccgaacgtcagattaagcaattc

SEQ ID NO: 3476599 - DNA, 25 bp, Homo sapien
taggattctcggttaccgaacgtca

SEQ ID NO: 3476600 - DNA, 25 bp, Homo sapien
ggcacctctgagagaactctgtctt

SEQ ID NO: 3476601 - DNA, 25 bp, Homo sapien
gcagtggtacccttgtatttctagc

SEQ ID NO: 3476602 - DNA, 25 bp, Homo sapien
ctaagttattgagcttgtcccgaac

SEQ ID NO: 3476603 - DNA, 25 bp, Homo sapien
caaacaagactaagttattgagctt

SEQ ID NO: 3476604 - DNA, 25 bp, Homo sapien
gggagcctcgaatcttcagtctctc

SEQ ID NO: 3476605 - DNA, 25 bp, Homo sapien
gactaagttattgagcttgtcccga

SEQ ID NO: 3476606 - DNA, 25 bp, Homo sapien
aagactaagttattgagcttgtccc

SEQ ID NO: 3476607 - DNA, 25 bp, Homo sapien
tcaaacaagactaagttattgagct

SEQ ID NO: 3476608 - DNA, 25 bp, Homo sapien
gttcgggacaagctcaataacttag

SEQ ID NO: 3476609 - DNA, 25 bp, Homo sapien
gggacaagctcaataacttagtctt

SEQ ID NO: 3476610 - DNA, 25 bp, Homo sapien
gagagactgaagattcgaggctccc

SEQ ID NO: 3476611 - DNA, 25 bp, Homo sapien
cgggacaagctcaataacttagtct

SEQ ID NO: 3476612 - DNA, 25 bp, Homo sapien
tcgggacaagctcaataacttagtc

SEQ ID NO: 3476613 - DNA, 25 bp, Homo sapien
agctcaataacttagtcttgtttga

SEQ ID NO: 3476614 - DNA, 25 bp, Homo sapien
tacttatgcccgagcgtgtcgctcc

SEQ ID NO: 3476615 - DNA, 25 bp, Homo sapien
tcccagtgcgcaagtgcagcaggtg

SEQ ID NO: 3476616 - DNA, 25 bp, Homo sapien
ggcagctaactttccggcactactt

SEQ ID NO: 3476617 - DNA, 25 bp, Homo sapien
taaacgaaaagcaatccaccaggtc

SEQ ID NO: 3476618 - DNA, 25 bp, Homo sapien
agtggattctagttcccaagccgca

SEQ ID NO: 3476619 - DNA, 25 bp, Homo sapien
taaatactgccggagtctgcgctag

SEQ ID NO: 3476620 - DNA, 25 bp, Homo sapien
cagactccggcagtatttaggcggt

SEQ ID NO: 3476621 - DNA, 25 bp, Homo sapien
tagtatgcgtcacaactagcgcaga

SEQ ID NO: 3476622 - DNA, 25 bp, Homo sapien
gagcgacacgctcgggcataagtag

SEQ ID NO: 3476623 - DNA, 25 bp, Homo sapien
agttagctgccgagacctggtggat

SEQ ID NO: 3476624 - DNA, 25 bp, Homo sapien
taagtagtgccggaaagttagctgc

SEQ ID NO: 3476625 - DNA, 25 bp, Homo sapien
tgcggcttgggaactagaatccact

SEQ ID NO: 3476626 - DNA, 25 bp, Homo sapien
tttaccagttggacagctacgcgcc

SEQ ID NO: 3476627 - DNA, 25 bp, Homo sapien
tgctcaagctacacgatgagcgtgt

SEQ ID NO: 3476628 - DNA, 25 bp, Homo sapien
caaagctggcggcttgatttaccag

SEQ ID NO: 3476629 - DNA, 25 bp, Homo sapien
ttgctttcggccagcgggacggcat

SEQ ID NO: 3476630 - DNA, 25 bp, Homo sapien
tccgctggatctgctgctcaagcta

SEQ ID NO: 3476631 - DNA, 25 bp, Homo sapien
agcgtgtgttggttgctttcggcca

SEQ ID NO: 3476632 - DNA, 25 bp, Homo sapien
tgtccaactggtaaatcaagccgcc

SEQ ID NO: 3476633 - DNA, 25 bp, Homo sapien
atgccgtcccgctggccgaaagcaa

SEQ ID NO: 3476634 - DNA, 25 bp, Homo sapien
gaaagcaaccaacacacgctcatcg

SEQ ID NO: 3476635 - DNA, 25 bp, Homo sapien
cacgctcatcgtgtagcttgagcag

SEQ ID NO: 3476636 - DNA, 25 bp, Homo sapien
tagcttgagcagcagatccagcgga

SEQ ID NO: 3476637 - DNA, 25 bp, Homo sapien
ggcgcgtagctgtccaactggtaaa

SEQ ID NO: 3476638 - DNA, 25 bp, Homo sapien
attcacgtccatgccattgatggcc

SEQ ID NO: 3476639 - DNA, 25 bp, Homo sapien
ctgccattcacgtccatgccattga

SEQ ID NO: 3476640 - DNA, 25 bp, Homo sapien
gccattcacgtccatgccattgatg

SEQ ID NO: 3476641 - DNA, 25 bp, Homo sapien
cattcacgtccatgccattgatggc

SEQ ID NO: 3476642 - DNA, 25 bp, Homo sapien
ccaaatcgaatggacaccgggtaat

SEQ ID NO: 3476643 - DNA, 25 bp, Homo sapien
agcttctcattagaagtgaggcggg

SEQ ID NO: 3476644 - DNA, 25 bp, Homo sapien
catggaggccagcataagcttctca

SEQ ID NO: 3476645 - DNA, 25 bp, Homo sapien
gcagggttacccagatactccagca

SEQ ID NO: 3476646 - DNA, 25 bp, Homo sapien
acaagcgctgccgttcaggagacgg

SEQ ID NO: 3476647 - DNA, 25 bp, Homo sapien
aaaaggtagacaaattacaagcgct

SEQ ID NO: 3476648 - DNA, 25 bp, Homo sapien
gatcggttgcgtttttcataacacc

SEQ ID NO: 3476649 - DNA, 25 bp, Homo sapien
taaaatctagatctggatcggttgc

SEQ ID NO: 3476650 - DNA, 25 bp, Homo sapien
aagttgactttaagtaagatgacac

SEQ ID NO: 3476651 - DNA, 25 bp, Homo sapien
agtaagatgacacctcggccgggcg

SEQ ID NO: 3476652 - DNA, 25 bp, Homo sapien
cagcctgggtaactccgcggcccct

SEQ ID NO: 3476653 - DNA, 25 bp, Homo sapien
taagatgacacctcggccgggcgcg

SEQ ID NO: 3476654 - DNA, 25 bp, Homo sapien
agcatctcaatgcctgagcttccct

SEQ ID NO: 3476655 - DNA, 25 bp, Homo sapien
ctccagcatctcaatgcctgagctt

SEQ ID NO: 3476656 - DNA, 25 bp, Homo sapien
agtgtctggtagcagtgcaatttga

SEQ ID NO: 3476657 - DNA, 25 bp, Homo sapien
gtgtctggtagcagtgcaatttgaa

SEQ ID NO: 3476658 - DNA, 25 bp, Homo sapien
caaagtacacgcaacaggaaatagc

SEQ ID NO: 3476659 - DNA, 25 bp, Homo sapien
gataacctctgctgaacatgctggg

SEQ ID NO: 3476660 - DNA, 25 bp, Homo sapien
taacagttttggagtccctcagcag

SEQ ID NO: 3476661 - DNA, 25 bp, Homo sapien
gaatctaccgatgagaccagagaag

SEQ ID NO: 3476662 - DNA, 25 bp, Homo sapien
taggatctgctagaaccacaaactt

SEQ ID NO: 3476663 - DNA, 25 bp, Homo sapien
gagggcaaagtctgagtaaatctca

SEQ ID NO: 3476664 - DNA, 25 bp, Homo sapien
gaatctattccagcttgcctaggat

SEQ ID NO: 3476665 - DNA, 25 bp, Homo sapien
aatagaatggattcttgagggcaaa

SEQ ID NO: 3476666 - DNA, 25 bp, Homo sapien
gggcaaggacgctttaaacagtatc

SEQ ID NO: 3476667 - DNA, 25 bp, Homo sapien
ggcaaggacgctttaaacagtatct

SEQ ID NO: 3476668 - DNA, 25 bp, Homo sapien
gcaaggacgctttaaacagtatctg

SEQ ID NO: 3476669 - DNA, 25 bp, Homo sapien
caaggaaagtctgttttctctaaat

SEQ ID NO: 3476670 - DNA, 25 bp, Homo sapien
acaccaaggaaagtctgttttctct

SEQ ID NO: 3476671 - DNA, 25 bp, Homo sapien
caccaaggaaagtctgttttctcta

SEQ ID NO: 3476672 - DNA, 25 bp, Homo sapien
gcttgaagaacaacatatatcatgg

SEQ ID NO: 3476673 - DNA, 25 bp, Homo sapien
cttaagccaggggaaactgcttgaa

SEQ ID NO: 3476674 - DNA, 25 bp, Homo sapien
agaacaacatatatcatggaaggct

SEQ ID NO: 3476675 - DNA, 25 bp, Homo sapien
gggaaactgcttgaagaacaacata

SEQ ID NO: 3476676 - DNA, 25 bp, Homo sapien
acctccagagctagcttcaggttct

SEQ ID NO: 3476677 - DNA, 25 bp, Homo sapien
cacctccagagctagcttcaggttc

SEQ ID NO: 3476678 - DNA, 25 bp, Homo sapien
gttgcaggaactctcagaatttggg

SEQ ID NO: 3476679 - DNA, 25 bp, Homo sapien
gctcaggaatcagtacaagtcatca

SEQ ID NO: 3476680 - DNA, 25 bp, Homo sapien
tttcaagtgcactaacaaggctgct

SEQ ID NO: 3476681 - DNA, 25 bp, Homo sapien
ggatttccactggagtgtcaacagc

SEQ ID NO: 3476682 - DNA, 25 bp, Homo sapien
accatttttgactcacttcctgtat

SEQ ID NO: 3476683 - DNA, 25 bp, Homo sapien
ccccaaaaccatcgattaagacaga

SEQ ID NO: 3476684 - DNA, 25 bp, Homo sapien
cagaattccctaaccatttttgact

SEQ ID NO: 3476685 - DNA, 25 bp, Homo sapien
gcacataatcatcttcccagaattc

SEQ ID NO: 3476686 - DNA, 25 bp, Homo sapien
cattctcactgtaccactaggcgca

SEQ ID NO: 3476687 - DNA, 25 bp, Homo sapien
tatcagtggctagtgaggtcccagc

SEQ ID NO: 3476688 - DNA, 25 bp, Homo sapien
tgttgccaatacctcagactccagg

SEQ ID NO: 3476689 - DNA, 25 bp, Homo sapien
caaacaggaaacttctgcagtcagg

SEQ ID NO: 3476690 - DNA, 25 bp, Homo sapien
agtcatagccaacgagagtgcccct

SEQ ID NO: 3476691 - DNA, 25 bp, Homo sapien
gaaacatccgcaccaagatgggccg

SEQ ID NO: 3476692 - DNA, 25 bp, Homo sapien
ggtttctcctcgtatggccccattg

SEQ ID NO: 3476693 - DNA, 25 bp, Homo sapien
gctggagctagcaccactggcttag

SEQ ID NO: 3476694 - DNA, 25 bp, Homo sapien
tgagtcaaattgtactttgctccat

SEQ ID NO: 3476695 - DNA, 25 bp, Homo sapien
gaattctttcagtagctgttgatgc

SEQ ID NO: 3476696 - DNA, 25 bp, Homo sapien
cagagatgggacctaagggtcccac

SEQ ID NO: 3476697 - DNA, 25 bp, Homo sapien
tgctccattgttaattgagaaactg

SEQ ID NO: 3476698 - DNA, 25 bp, Homo sapien
cctagggagcccgtcctccagtatt

SEQ ID NO: 3476699 - DNA, 25 bp, Homo sapien
gacccaccatacctacgcctaggga

SEQ ID NO: 3476700 - DNA, 25 bp, Homo sapien
tcctccagtattccgtctgtagcag

SEQ ID NO: 3476701 - DNA, 25 bp, Homo sapien
ccatacctacgcctagggagcccgt

SEQ ID NO: 3476702 - DNA, 25 bp, Homo sapien
tgcttctgcccaaccggtggctggt

SEQ ID NO: 3476703 - DNA, 25 bp, Homo sapien
ctccgccgccccattacaaggctgg

SEQ ID NO: 3476704 - DNA, 25 bp, Homo sapien
gtgacgtggtccaatcccaggccga

SEQ ID NO: 3476705 - DNA, 25 bp, Homo sapien
gagtggagcgcgctggccccgtgac

SEQ ID NO: 3476706 - DNA, 25 bp, Homo sapien
caacgtctatccaaagcctagggca

SEQ ID NO: 3476707 - DNA, 25 bp, Homo sapien
tagggcacctcaatactaaccggca

SEQ ID NO: 3476708 - DNA, 25 bp, Homo sapien
agcaaagcatccagcgccggaaaag

SEQ ID NO: 3476709 - DNA, 25 bp, Homo sapien
ggacgcctgttattccattcctcgg

SEQ ID NO: 3476710 - DNA, 25 bp, Homo sapien
gaatgcatcggttatctctgaccca

SEQ ID NO: 3476711 - DNA, 25 bp, Homo sapien
tgagtggggcttaacctaagaaatc

SEQ ID NO: 3476712 - DNA, 25 bp, Homo sapien
ctggccagattctgcgacgaatgca

SEQ ID NO: 3476713 - DNA, 25 bp, Homo sapien
tctgacccatcagcaaacatctttt

SEQ ID NO: 3476714 - DNA, 25 bp, Homo sapien
aaagctacatgtttctaggatatct

SEQ ID NO: 3476715 - DNA, 25 bp, Homo sapien
ggaaaatgctccacactttattatt

SEQ ID NO: 3476716 - DNA, 25 bp, Homo sapien
ggcatcaaggaaatttgcctttgtg

SEQ ID NO: 3476717 - DNA, 25 bp, Homo sapien
aaggcaaacaaggtgttggttgcaa

SEQ ID NO: 3476718 - DNA, 25 bp, Homo sapien
ccacctccgggagctttgtcacgtg

SEQ ID NO: 3476719 - DNA, 25 bp, Homo sapien
ctttgtcacgtgagctgagccagcg

SEQ ID NO: 3476720 - DNA, 25 bp, Homo sapien
ccgggagctttgtcacgtgagctga

SEQ ID NO: 3476721 - DNA, 25 bp, Homo sapien
gtcacgtgagctgagccagcgaatc

SEQ ID NO: 3476722 - DNA, 25 bp, Homo sapien
cttgtcgaagaaaacgaagcgccgc

SEQ ID NO: 3476723 - DNA, 25 bp, Homo sapien
cagctccttgtcgaagaaaacgaag

SEQ ID NO: 3476724 - DNA, 25 bp, Homo sapien
tgtcgaagaaaacgaagcgccgcca

SEQ ID NO: 3476725 - DNA, 25 bp, Homo sapien
tccttgtcgaagaaaacgaagcgcc

SEQ ID NO: 3476726 - DNA, 25 bp, Homo sapien
gagcggccccatcattgctcagcgg

SEQ ID NO: 3476727 - DNA, 25 bp, Homo sapien
cctcggcctgagtcgcagacagtga

SEQ ID NO: 3476728 - DNA, 25 bp, Homo sapien
caaaggaacttggaagcagcggatc

SEQ ID NO: 3476729 - DNA, 25 bp, Homo sapien
aagcagcggatccagaagcaggtgt

SEQ ID NO: 3476730 - DNA, 25 bp, Homo sapien
tcccgggagggaaaagacagctcca

SEQ ID NO: 3476731 - DNA, 25 bp, Homo sapien
gatcccgggagggaaaagacagctc

SEQ ID NO: 3476732 - DNA, 25 bp, Homo sapien
gatctcttcgggatcccgggaggga

SEQ ID NO: 3476733 - DNA, 25 bp, Homo sapien
tcgatctcttcgggatcccgggagg

SEQ ID NO: 3476734 - DNA, 25 bp, Homo sapien
tctggatgaccagctaaaccaaaga

SEQ ID NO: 3476735 - DNA, 25 bp, Homo sapien
tcttcccgtagaccacagaacaact

SEQ ID NO: 3476736 - DNA, 25 bp, Homo sapien
ccaggattgctcagttgataacaag

SEQ ID NO: 3476737 - DNA, 25 bp, Homo sapien
ggacccctccgacaaacagatttca

SEQ ID NO: 3476738 - DNA, 25 bp, Homo sapien
ctgtaggaacgtggcaagaaccaga

SEQ ID NO: 3476739 - DNA, 25 bp, Homo sapien
tgtaggaacgtggcaagaaccagat

SEQ ID NO: 3476740 - DNA, 25 bp, Homo sapien
gtaggaacgtggcaagaaccagatc

SEQ ID NO: 3476741 - DNA, 25 bp, Homo sapien
tgccagaatattgtgctgcttcagt

SEQ ID NO: 3476742 - DNA, 25 bp, Homo sapien
tgtgtcacccgtagtttgtaggctt

SEQ ID NO: 3476743 - DNA, 25 bp, Homo sapien
gccagaatattgtgctgcttcagtt

SEQ ID NO: 3476744 - DNA, 25 bp, Homo sapien
gtacaggtgtgtcacccgtagtttg

SEQ ID NO: 3476745 - DNA, 25 bp, Homo sapien
caatggccataaagttgagattttc

SEQ ID NO: 3476746 - DNA, 25 bp, Homo sapien
tcctggaatagcagggaagattcga

SEQ ID NO: 3476747 - DNA, 25 bp, Homo sapien
tgagattttcatggacagtcaaaca

SEQ ID NO: 3476748 - DNA, 25 bp, Homo sapien
gattcgagtgcagagtggattgcca

SEQ ID NO: 3476749 - DNA, 25 bp, Homo sapien
caaacaagtgagtggtctttcctgc

SEQ ID NO: 3476750 - DNA, 25 bp, Homo sapien
tggacgttctctgttgtcacaacaa

SEQ ID NO: 3476751 - DNA, 25 bp, Homo sapien
tggcgaaaggccaatccagttacag

SEQ ID NO: 3476752 - DNA, 25 bp, Homo sapien
cccgggtgatgtctcctttgttcaa

SEQ ID NO: 3476753 - DNA, 25 bp, Homo sapien
tatggccctcaaaggcgaagcaggg

SEQ ID NO: 3476754 - DNA, 25 bp, Homo sapien
taaggtagcctctaaaccagtgggc

SEQ ID NO: 3476755 - DNA, 25 bp, Homo sapien
cacgcgagggtagtcttttccagaa

SEQ ID NO: 3476756 - DNA, 25 bp, Homo sapien
cacgggagacaatgataaggtagcc

SEQ ID NO: 3476757 - DNA, 25 bp, Homo sapien
tgtaaccaactctagctataagtgt

SEQ ID NO: 3476758 - DNA, 25 bp, Homo sapien
ccctggagcattctagtatgctagg

SEQ ID NO: 3476759 - DNA, 25 bp, Homo sapien
tagctataagtgtcactggctgggt

SEQ ID NO: 3476760 - DNA, 25 bp, Homo sapien
tgtagcaaatacctgcagtaaaaac

SEQ ID NO: 3476761 - DNA, 25 bp, Homo sapien
tttagaatctgcttgtcggagctct

SEQ ID NO: 3476762 - DNA, 25 bp, Homo sapien
tgaatccctgctggtaaactctgac

SEQ ID NO: 3476763 - DNA, 25 bp, Homo sapien
tacatcctcaaagacggtgctatag

SEQ ID NO: 3476764 - DNA, 25 bp, Homo sapien
gctataggctatgaacttgttgcac

SEQ ID NO: 3476765 - DNA, 25 bp, Homo sapien
ccgcccatcccgcgtcagcacgtac

SEQ ID NO: 3476766 - DNA, 25 bp, Homo sapien
ctccagtttggtctgtgtgtccttc

SEQ ID NO: 3476767 - DNA, 25 bp, Homo sapien
tgtccttctcctgcagtgcgtggac

SEQ ID NO: 3476768 - DNA, 25 bp, Homo sapien
tgtgtccttctcctgcagtgcgtgg

SEQ ID NO: 3476769 - DNA, 25 bp, Homo sapien
tgtgtgtccttctcctgcagtgcgt

SEQ ID NO: 3476770 - DNA, 25 bp, Homo sapien
agctgagtaaggctgtgacccacaa

SEQ ID NO: 3476771 - DNA, 25 bp, Homo sapien
gctgagtaaggctgtgacccacaag

SEQ ID NO: 3476772 - DNA, 25 bp, Homo sapien
aagctgagtaaggctgtgacccaca

SEQ ID NO: 3476773 - DNA, 25 bp, Homo sapien
ggttaatcgccatctcaaataggtt

SEQ ID NO: 3476774 - DNA, 25 bp, Homo sapien
caaataggttcttcttaaacagcat

SEQ ID NO: 3476775 - DNA, 25 bp, Homo sapien
ggctcttggcaaggttaatcgccat

SEQ ID NO: 3476776 - DNA, 25 bp, Homo sapien
cggatatattgctggacagccccat

SEQ ID NO: 3476777 - DNA, 25 bp, Homo sapien
taggcagtcaggttgtgaatgcgct

SEQ ID NO: 3476778 - DNA, 25 bp, Homo sapien
cagaaacttgcggatcacgtaggat

SEQ ID NO: 3476779 - DNA, 25 bp, Homo sapien
gaatgcgctgggcatccagaaactt

SEQ ID NO: 3476780 - DNA, 25 bp, Homo sapien
ttgagcttggtatagcagttgagga

SEQ ID NO: 3476781 - DNA, 25 bp, Homo sapien
atggttctccgccagatacagggca

SEQ ID NO: 3476782 - DNA, 25 bp, Homo sapien
gctggatcttcaggtaccactcatg

SEQ ID NO: 3476783 - DNA, 25 bp, Homo sapien
cacatcaaagtggacttcactctca

SEQ ID NO: 3476784 - DNA, 25 bp, Homo sapien
cagcctgccggaggaccttgatggc

SEQ ID NO: 3476785 - DNA, 25 bp, Homo sapien
tgccgatgtatcgaagggcttcctg

SEQ ID NO: 3476786 - DNA, 25 bp, Homo sapien
aaaaggcagcttgccgatgtatcga

SEQ ID NO: 3476787 - DNA, 25 bp, Homo sapien
cagcttgccgatgtatcgaagggct

SEQ ID NO: 3476788 - DNA, 25 bp, Homo sapien
cgatgtatcgaagggcttcctgata

SEQ ID NO: 3476789 - DNA, 25 bp, Homo sapien
tcagcaactgagttgtctgctctgg

SEQ ID NO: 3476790 - DNA, 25 bp, Homo sapien
catgaggatcttgccgtagcgcttc

SEQ ID NO: 3476791 - DNA, 25 bp, Homo sapien
tctgctctggtatgtggtgcatgag

SEQ ID NO: 3476792 - DNA, 25 bp, Homo sapien
gataatcagtacaaagtcccttcag

SEQ ID NO: 3476793 - DNA, 25 bp, Homo sapien
cgggttattggcaaagatggggatg

SEQ ID NO: 3476794 - DNA, 25 bp, Homo sapien
tctcgcgggttattggcaaagatgg

SEQ ID NO: 3476795 - DNA, 25 bp, Homo sapien
gcgggttattggcaaagatggggat

SEQ ID NO: 3476796 - DNA, 25 bp, Homo sapien
agctctcgcgggttattggcaaaga

SEQ ID NO: 3476797 - DNA, 25 bp, Homo sapien
ggtgagtctggctgcacttcactca

SEQ ID NO: 3476798 - DNA, 25 bp, Homo sapien
tgggcccagttctgcagtcgcagct

SEQ ID NO: 3476799 - DNA, 25 bp, Homo sapien
ctgtggatccttctcgtgggcccag

SEQ ID NO: 3476800 - DNA, 25 bp, Homo sapien
cgcagctcaaggagtgtgtcgtaga

SEQ ID NO: 3476801 - DNA, 25 bp, Homo sapien
caagacggaagaatggagacggcac

SEQ ID NO: 3476802 - DNA, 25 bp, Homo sapien
gtgaaaggcagccaccaagacggaa

SEQ ID NO: 3476803 - DNA, 25 bp, Homo sapien
tgagccccgaggtaaggtgttactg

SEQ ID NO: 3476804 - DNA, 25 bp, Homo sapien
acaaggtctcttgggacaaagccag

SEQ ID NO: 3476805 - DNA, 25 bp, Homo sapien
gcctctgcgtgaagcttctctttga

SEQ ID NO: 3476806 - DNA, 25 bp, Homo sapien
gcttcccctgctcataaaggtaaag

SEQ ID NO: 3476807 - DNA, 25 bp, Homo sapien
ttgtcaaagacgtcgcagaagcgac

SEQ ID NO: 3476808 - DNA, 25 bp, Homo sapien
cctggaagtcgtgcatctggcacag

SEQ ID NO: 3476809 - DNA, 25 bp, Homo sapien
tctggaaaatgacttggattcttcc

SEQ ID NO: 3476810 - DNA, 25 bp, Homo sapien
tcctccttgcgagcgaagtagctga

SEQ ID NO: 3476811 - DNA, 25 bp, Homo sapien
ctgcatgtggtagtgcatgatctgc

SEQ ID NO: 3476812 - DNA, 25 bp, Homo sapien
gccggtactgctcgtgctgcatgtg

SEQ ID NO: 3476813 - DNA, 25 bp, Homo sapien
acacgctgatgacctgccggtactg

SEQ ID NO: 3476814 - DNA, 25 bp, Homo sapien
ccttgagctcttggatctcctggcg

SEQ ID NO: 3476815 - DNA, 25 bp, Homo sapien
caggtagtccctgatgacggagagt

SEQ ID NO: 3476816 - DNA, 25 bp, Homo sapien
gatacgggtggtctcctctcggtac

SEQ ID NO: 3476817 - DNA, 25 bp, Homo sapien
ttttggaccaggtagtccctgatga

SEQ ID NO: 3476818 - DNA, 25 bp, Homo sapien
aatttgcctatttggccgggtgcag

SEQ ID NO: 3476819 - DNA, 25 bp, Homo sapien
aaatttgcctatttggccgggtgca

SEQ ID NO: 3476820 - DNA, 25 bp, Homo sapien
atcacactccagcgtgggggacaag

SEQ ID NO: 3476821 - DNA, 25 bp, Homo sapien
tgcgccatcacactccagcgtgggg

SEQ ID NO: 3476822 - DNA, 25 bp, Homo sapien
ggcagtcagcatcactttccgagta

SEQ ID NO: 3476823 - DNA, 25 bp, Homo sapien
cgtttctgttcctgggcccggatca

SEQ ID NO: 3476824 - DNA, 25 bp, Homo sapien
tgagggcaactccaaggcactgtta

SEQ ID NO: 3476825 - DNA, 25 bp, Homo sapien
ttccgagtaactctcaaagcagtgt

SEQ ID NO: 3476826 - DNA, 25 bp, Homo sapien
gccaaagtagtcagcaatcacagaa

SEQ ID NO: 3476827 - DNA, 25 bp, Homo sapien
tgccaaagtagtcagcaatcacaga

SEQ ID NO: 3476828 - DNA, 25 bp, Homo sapien
ctgccaaagtagtcagcaatcacag

SEQ ID NO: 3476829 - DNA, 25 bp, Homo sapien
ctctgccaaagtagtcagcaatcac

SEQ ID NO: 3476830 - DNA, 25 bp, Homo sapien
ttaagtgcccctcctggagtgcatg

SEQ ID NO: 3476831 - DNA, 25 bp, Homo sapien
tcagcagagtcaatttgttgaaaac

SEQ ID NO: 3476832 - DNA, 25 bp, Homo sapien
tgagtaggtcgcgttgcagcccagc

SEQ ID NO: 3476833 - DNA, 25 bp, Homo sapien
gagggtcggtcagcagagtcaattt

SEQ ID NO: 3476834 - DNA, 25 bp, Homo sapien
gaaagtccgctttagttctgagggc

SEQ ID NO: 3476835 - DNA, 25 bp, Homo sapien
tagactctgagagcaaggacccaag

SEQ ID NO: 3476836 - DNA, 25 bp, Homo sapien
gaaagcagctattgtccacactcag

SEQ ID NO: 3476837 - DNA, 25 bp, Homo sapien
cacagcctggtgctcttggatagag

SEQ ID NO: 3476838 - DNA, 25 bp, Homo sapien
aaacaacgtagaagatgaaattagg

SEQ ID NO: 3476839 - DNA, 25 bp, Homo sapien
acgtagaagatgaaattaggtgagg

SEQ ID NO: 3476840 - DNA, 25 bp, Homo sapien
ttaaacaacgtagaagatgaaatta

SEQ ID NO: 3476841 - DNA, 25 bp, Homo sapien
caacgtagaagatgaaattaggtga

SEQ ID NO: 3476842 - DNA, 25 bp, Homo sapien
gctccgcttggaaagtaggctgtgt

SEQ ID NO: 3476843 - DNA, 25 bp, Homo sapien
ggtcgtcctacagtctgactcctgg

SEQ ID NO: 3476844 - DNA, 25 bp, Homo sapien
ctgtgtgtgggtgccgctaaggtcc

SEQ ID NO: 3476845 - DNA, 25 bp, Homo sapien
cgtgggacccgaggtcgtcctacag

SEQ ID NO: 3476846 - DNA, 25 bp, Homo sapien
cagccgcattgccgttaccagacat

SEQ ID NO: 3476847 - DNA, 25 bp, Homo sapien
atcgctgcacggctcgtccagaagc

SEQ ID NO: 3476848 - DNA, 25 bp, Homo sapien
caaagtgtgctggtcaccggctcag

SEQ ID NO: 3476849 - DNA, 25 bp, Homo sapien
tggggccaatcgctgcacggctcgt

SEQ ID NO: 3476850 - DNA, 25 bp, Homo sapien
gtgtgctggtcaccggctcagcact

SEQ ID NO: 3476851 - DNA, 25 bp, Homo sapien
ccacccacggtagtaattcagtagg

SEQ ID NO: 3476852 - DNA, 25 bp, Homo sapien
gcaagcaggctcgtaatggaaaggc

SEQ ID NO: 3476853 - DNA, 25 bp, Homo sapien
tctttcttatctcggcctggcagtg

SEQ ID NO: 3476854 - DNA, 25 bp, Homo sapien
gcctcgaatgaaaggaccccgtctg

SEQ ID NO: 3476855 - DNA, 25 bp, Homo sapien
cagagctaataaccgaaagagagtt

SEQ ID NO: 3476856 - DNA, 25 bp, Homo sapien
agctaataaccgaaagagagttggg

SEQ ID NO: 3476857 - DNA, 25 bp, Homo sapien
cacagagctaataaccgaaagagag

SEQ ID NO: 3476858 - DNA, 25 bp, Homo sapien
ggccacaattcagatcttcctactc

SEQ ID NO: 3476859 - DNA, 25 bp, Homo sapien
ggcatcaagggatgaggtgacttgc

SEQ ID NO: 3476860 - DNA, 25 bp, Homo sapien
atgttacagaagcaacgggtggcat

SEQ ID NO: 3476861 - DNA, 25 bp, Homo sapien
cacctttgggaccatgttacagaag

SEQ ID NO: 3476862 - DNA, 25 bp, Homo sapien
ttacagaagcaacgggtggcatcaa

SEQ ID NO: 3476863 - DNA, 25 bp, Homo sapien
aggtgggtaaagagataaggcccat

SEQ ID NO: 3476864 - DNA, 25 bp, Homo sapien
ttgctgccgctgcagtaaccaggac

SEQ ID NO: 3476865 - DNA, 25 bp, Homo sapien
gagggaggcgatagtaggacctgct

SEQ ID NO: 3476866 - DNA, 25 bp, Homo sapien
aggcgatagtaggacctgctgttgc

SEQ ID NO: 3476867 - DNA, 25 bp, Homo sapien
gagactagagggaggcgatagtagg

SEQ ID NO: 3476868 - DNA, 25 bp, Homo sapien
aaggaacttcagaacctggcctgtg

SEQ ID NO: 3476869 - DNA, 25 bp, Homo sapien
agaaaggaacttcagaacctggcct

SEQ ID NO: 3476870 - DNA, 25 bp, Homo sapien
aaaggaacttcagaacctggcctgt

SEQ ID NO: 3476871 - DNA, 25 bp, Homo sapien
gaaaggaacttcagaacctggcctg

SEQ ID NO: 3476872 - DNA, 25 bp, Homo sapien
caacaccttgtccaagaaccagaat

SEQ ID NO: 3476873 - DNA, 25 bp, Homo sapien
tgtttctagtgttcctcaacacctt

SEQ ID NO: 3476874 - DNA, 25 bp, Homo sapien
agtgttcctcaacaccttgtccaag

SEQ ID NO: 3476875 - DNA, 25 bp, Homo sapien
tgcagaaaaagtccccaggtcacag

SEQ ID NO: 3476876 - DNA, 25 bp, Homo sapien
ttgcgggtacccacgcgaatcactc

SEQ ID NO: 3476877 - DNA, 25 bp, Homo sapien
gggtacccacgcgaatcactctcat

SEQ ID NO: 3476878 - DNA, 25 bp, Homo sapien
ctcttgcgggtacccacgcgaatca

SEQ ID NO: 3476879 - DNA, 25 bp, Homo sapien
tggctcttgcgggtacccacgcgaa

SEQ ID NO: 3476880 - DNA, 25 bp, Homo sapien
tttcaaactgcaggccagggtacga

SEQ ID NO: 3476881 - DNA, 25 bp, Homo sapien
ggctttcaatgttgccaccacactg

SEQ ID NO: 3476882 - DNA, 25 bp, Homo sapien
cactgtccgtctgtatgcgagcaag

SEQ ID NO: 3476883 - DNA, 25 bp, Homo sapien
caggccagggtacgaggctttcaat

SEQ ID NO: 3476884 - DNA, 25 bp, Homo sapien
gggtactgggcttcccattagcttc

SEQ ID NO: 3476885 - DNA, 25 bp, Homo sapien
tctcctctcggggtactgggcttcc

SEQ ID NO: 3476886 - DNA, 25 bp, Homo sapien
ggctttagctataggcaaagccaga

SEQ ID NO: 3476887 - DNA, 25 bp, Homo sapien
aatctcggggcagcgggacgggctt

SEQ ID NO: 3476888 - DNA, 25 bp, Homo sapien
ggagagagtcaatcaatcaggtgct

SEQ ID NO: 3476889 - DNA, 25 bp, Homo sapien
tatatacaatcgagcaggaagacca

SEQ ID NO: 3476890 - DNA, 25 bp, Homo sapien
catttactgagcctagcgctgtgct

SEQ ID NO: 3476891 - DNA, 25 bp, Homo sapien
taaatgccaggctaatccaggtagt

SEQ ID NO: 3476892 - DNA, 25 bp, Homo sapien
gagtgcagtatcaagaatcttgtcc

SEQ ID NO: 3476893 - DNA, 25 bp, Homo sapien
cttagagagtgcagtatcaagaatc

SEQ ID NO: 3476894 - DNA, 25 bp, Homo sapien
gagagtgcagtatcaagaatcttgt

SEQ ID NO: 3476895 - DNA, 25 bp, Homo sapien
tagagagtgcagtatcaagaatctt

SEQ ID NO: 3476896 - DNA, 25 bp, Homo sapien
gaaggaaagaagagtggggacaaga

SEQ ID NO: 3476897 - DNA, 25 bp, Homo sapien
cttcagggaaggaaagaagagtggg

SEQ ID NO: 3476898 - DNA, 25 bp, Homo sapien
tcagggaaggaaagaagagtgggga

SEQ ID NO: 3476899 - DNA, 25 bp, Homo sapien
ccggacagaaagagcctgagtgaat

SEQ ID NO: 3476900 - DNA, 25 bp, Homo sapien
ggacagaaagagcctgagtgaatcc

SEQ ID NO: 3476901 - DNA, 25 bp, Homo sapien
ctgccggacagaaagagcctgagtg

SEQ ID NO: 3476902 - DNA, 25 bp, Homo sapien
tgccggacagaaagagcctgagtga

SEQ ID NO: 3476903 - DNA, 25 bp, Homo sapien
tccttggtaaacaggcttttctctc

SEQ ID NO: 3476904 - DNA, 25 bp, Homo sapien
tctccagggcatgttcaagctcctt

SEQ ID NO: 3476905 - DNA, 25 bp, Homo sapien
ggcatgttcaagctccttggtaaac

SEQ ID NO: 3476906 - DNA, 25 bp, Homo sapien
cagggcatgttcaagctccttggta

SEQ ID NO: 3476907 - DNA, 25 bp, Homo sapien
cagatggctccgatggtgaagccag

SEQ ID NO: 3476908 - DNA, 25 bp, Homo sapien
ttgcagatggctccgatggtgaagc

SEQ ID NO: 3476909 - DNA, 25 bp, Homo sapien
tgggcaggtccttcaaggagtgaac

SEQ ID NO: 3476910 - DNA, 25 bp, Homo sapien
aggtccttcaaggagtgaacaacca

SEQ ID NO: 3476911 - DNA, 25 bp, Homo sapien
tattctctctcgattgccaactcac

SEQ ID NO: 3476912 - DNA, 25 bp, Homo sapien
ttaagttcagatcacctctattctc

SEQ ID NO: 3476913 - DNA, 25 bp, Homo sapien
gttttctgccaccagtcaacactcc

SEQ ID NO: 3476914 - DNA, 25 bp, Homo sapien
gcagagggtcaggccccaaagggaa

SEQ ID NO: 3476915 - DNA, 25 bp, Homo sapien
ttgggtgaaagacaacagcatcatg

SEQ ID NO: 3476916 - DNA, 25 bp, Homo sapien
aaattttgggtgaaagacaacagca

SEQ ID NO: 3476917 - DNA, 25 bp, Homo sapien
tctggcagggtttctagggtcttcc

SEQ ID NO: 3476918 - DNA, 25 bp, Homo sapien
tggcagggtttctagggtcttccca

SEQ ID NO: 3476919 - DNA, 25 bp, Homo sapien
tgcccagagagaagttacaatgaga

SEQ ID NO: 3476920 - DNA, 25 bp, Homo sapien
agagagaagttacaatgagatttta

SEQ ID NO: 3476921 - DNA, 25 bp, Homo sapien
gcccagagagaagttacaatgagat

SEQ ID NO: 3476922 - DNA, 25 bp, Homo sapien
gagagaagttacaatgagattttaa

SEQ ID NO: 3476923 - DNA, 25 bp, Homo sapien
tcctgaactccagatgcgggaactt

SEQ ID NO: 3476924 - DNA, 25 bp, Homo sapien
cagatgcgggaactttctctgcagc

SEQ ID NO: 3476925 - DNA, 25 bp, Homo sapien
aatactcctgaactccagatgcggg

SEQ ID NO: 3476926 - DNA, 25 bp, Homo sapien
tgaactccagatgcgggaactttct

SEQ ID NO: 3476927 - DNA, 25 bp, Homo sapien
ttccactctccggactcccagagcc

SEQ ID NO: 3476928 - DNA, 25 bp, Homo sapien
gatccgtcactcttctaaaaggata

SEQ ID NO: 3476929 - DNA, 25 bp, Homo sapien
ccagagccctctagaccttgtcttt

SEQ ID NO: 3476930 - DNA, 25 bp, Homo sapien
gctgtctccgtcactcttccaaaag

SEQ ID NO: 3476931 - DNA, 25 bp, Homo sapien
acttgccaaggttacaagacctctg

SEQ ID NO: 3476932 - DNA, 25 bp, Homo sapien
ataacttgccaaggttacaagacct

SEQ ID NO: 3476933 - DNA, 25 bp, Homo sapien
aacttgccaaggttacaagacctct

SEQ ID NO: 3476934 - DNA, 25 bp, Homo sapien
taacttgccaaggttacaagacctc

SEQ ID NO: 3476935 - DNA, 25 bp, Homo sapien
gctcgtccagcttccgaagccgggt

SEQ ID NO: 3476936 - DNA, 25 bp, Homo sapien
tgctcgtccagcttccgaagccggg

SEQ ID NO: 3476937 - DNA, 25 bp, Homo sapien
ccagcttccgaagccgggtgttgag

SEQ ID NO: 3476938 - DNA, 25 bp, Homo sapien
cgtccagcttccgaagccgggtgtt

SEQ ID NO: 3476939 - DNA, 25 bp, Homo sapien
agaacacttaagattagcctattat

SEQ ID NO: 3476940 - DNA, 25 bp, Homo sapien
tacacctagcctaccttacatgtgc

SEQ ID NO: 3476941 - DNA, 25 bp, Homo sapien
cagtttctactgaacgtatatcgct

SEQ ID NO: 3476942 - DNA, 25 bp, Homo sapien
gcctattatagttggacaaaatcat

SEQ ID NO: 3476943 - DNA, 25 bp, Homo sapien
ctgggtaggcctaagtgtgagtctg

SEQ ID NO: 3476944 - DNA, 25 bp, Homo sapien
gaagtgaagacagatggtccttgac

SEQ ID NO: 3476945 - DNA, 25 bp, Homo sapien
taggcctaagtgtgagtctggcctc

SEQ ID NO: 3476946 - DNA, 25 bp, Homo sapien
tcttcccagcctacggtgttagagg

SEQ ID NO: 3476947 - DNA, 25 bp, Homo sapien
cgggggtgtctaaaagcacctggca

SEQ ID NO: 3476948 - DNA, 25 bp, Homo sapien
acacgggggtgtctaaaagcacctg

SEQ ID NO: 3476949 - DNA, 25 bp, Homo sapien
aagcacctggcagtgagatgggagt

SEQ ID NO: 3476950 - DNA, 25 bp, Homo sapien
ggggtgtctaaaagcacctggcagt

SEQ ID NO: 3476951 - DNA, 25 bp, Homo sapien
cagcatacatgcattcctcagggtg

SEQ ID NO: 3476952 - DNA, 25 bp, Homo sapien
ggcccacagcatacatgcattcctc

SEQ ID NO: 3476953 - DNA, 25 bp, Homo sapien
catacatgcattcctcagggtgcag

SEQ ID NO: 3476954 - DNA, 25 bp, Homo sapien
ccacagcatacatgcattcctcagg

SEQ ID NO: 3476955 - DNA, 25 bp, Homo sapien
aaccaatggcgcaaagcatgggacc

SEQ ID NO: 3476956 - DNA, 25 bp, Homo sapien
tgcagaaggttgtgagacaagcttc

SEQ ID NO: 3476957 - DNA, 25 bp, Homo sapien
ggaaaaacatcctaggacatcaggc

SEQ ID NO: 3476958 - DNA, 25 bp, Homo sapien
cccagcgccttttggaccggtagca

SEQ ID NO: 3476959 - DNA, 25 bp, Homo sapien
aggccctttcagcgatgcagcgaag

SEQ ID NO: 3476960 - DNA, 25 bp, Homo sapien
tgcagcgaagcagagtctcgggatc

SEQ ID NO: 3476961 - DNA, 25 bp, Homo sapien
gtcctggtccttggctcgcacttcc

SEQ ID NO: 3476962 - DNA, 25 bp, Homo sapien
ggatcgtgcagcacacccaccagat

SEQ ID NO: 3476963 - DNA, 25 bp, Homo sapien
cagacctggtcctatccatacacaa

SEQ ID NO: 3476964 - DNA, 25 bp, Homo sapien
caagaatgagttagcactgtataca

SEQ ID NO: 3476965 - DNA, 25 bp, Homo sapien
tacacaacattcaacaagaatgagt

SEQ ID NO: 3476966 - DNA, 25 bp, Homo sapien
gcactgtatacagagcattcatgta

SEQ ID NO: 3476967 - DNA, 25 bp, Homo sapien
acaagaagttcttgtgagctgcaag

SEQ ID NO: 3476968 - DNA, 25 bp, Homo sapien
agggctcttaacaccaccctgtgac

SEQ ID NO: 3476969 - DNA, 25 bp, Homo sapien
ctgtaacaagaagttcttgtgagct

SEQ ID NO: 3476970 - DNA, 25 bp, Homo sapien
gagctgcaagggctcttaacaccac

SEQ ID NO: 3476971 - DNA, 25 bp, Homo sapien
ccatccttcatagctgtatgcacgg

SEQ ID NO: 3476972 - DNA, 25 bp, Homo sapien
gtatgcacggctactggcacactgc

SEQ ID NO: 3476973 - DNA, 25 bp, Homo sapien
tagctgtatgcacggctactggcac

SEQ ID NO: 3476974 - DNA, 25 bp, Homo sapien
ccttcatagctgtatgcacggctac

SEQ ID NO: 3476975 - DNA, 25 bp, Homo sapien
cagcacagtctgagaggggactacc

SEQ ID NO: 3476976 - DNA, 25 bp, Homo sapien
ctgggatgcacaggaagaaatgcca

SEQ ID NO: 3476977 - DNA, 25 bp, Homo sapien
tgggatgcacaggaagaaatgccac

SEQ ID NO: 3476978 - DNA, 25 bp, Homo sapien
tgagaggggactacctagaaacctg

SEQ ID NO: 3476979 - DNA, 25 bp, Homo sapien
cagggacatggatggtagcctgcat

SEQ ID NO: 3476980 - DNA, 25 bp, Homo sapien
tccagactcctccagtcaggtacag

SEQ ID NO: 3476981 - DNA, 25 bp, Homo sapien
gcatggtctcttgtatgctatctga

SEQ ID NO: 3476982 - DNA, 25 bp, Homo sapien
tgagccgtctagactccagactcct

SEQ ID NO: 3476983 - DNA, 25 bp, Homo sapien
aggtgggatttggtgagaacaagag

SEQ ID NO: 3476984 - DNA, 25 bp, Homo sapien
tgtttttggctcctttgctcagcaa

SEQ ID NO: 3476985 - DNA, 25 bp, Homo sapien
gaatgttacgagcagtgatgcctac

SEQ ID NO: 3476986 - DNA, 25 bp, Homo sapien
taagctgccgtgcaacatccaggat

SEQ ID NO: 3476987 - DNA, 25 bp, Homo sapien
tgctcagcaacaagttggccaggct

SEQ ID NO: 3476988 - DNA, 25 bp, Homo sapien
ccccacatactgaggaggcaaggca

SEQ ID NO: 3476989 - DNA, 25 bp, Homo sapien
cagaactggtttattagtaggattg

SEQ ID NO: 3476990 - DNA, 25 bp, Homo sapien
gggtaatcactccccagatagcagt

SEQ ID NO: 3476991 - DNA, 25 bp, Homo sapien
ggcagtcatcaaggccccaaggtga

SEQ ID NO: 3476992 - DNA, 25 bp, Homo sapien
gtgtttgttcctatcttcccgccaa

SEQ ID NO: 3476993 - DNA, 25 bp, Homo sapien
aatgaaaactattgaggcagaagca

SEQ ID NO: 3476994 - DNA, 25 bp, Homo sapien
cagaaaggacgtaccaggagaactc

SEQ ID NO: 3476995 - DNA, 25 bp, Homo sapien
agaagcagaaaggacgtaccaggag

SEQ ID NO: 3476996 - DNA, 25 bp, Homo sapien
tcttcattcataggtctgcgctggg

SEQ ID NO: 3476997 - DNA, 25 bp, Homo sapien
gcacctagataccagcacaagtcgg

SEQ ID NO: 3476998 - DNA, 25 bp, Homo sapien
gacgaagcacttggtaacaggcaca

SEQ ID NO: 3476999 - DNA, 25 bp, Homo sapien
agcaagagtcgttttcgcggaagcc

SEQ ID NO: 3477000 - DNA, 25 bp, Homo sapien
gcttgggcgctcttcggggacctcc

SEQ ID NO: 3477001 - DNA, 25 bp, Homo sapien
gggccttccggatgcggcttgggcg

SEQ ID NO: 3477002 - DNA, 25 bp, Homo sapien
tccgtggcgcggaagacccgagcct

SEQ ID NO: 3477003 - DNA, 25 bp, Homo sapien
accgcctgccgcgtcggcctcgggc

SEQ ID NO: 3477004 - DNA, 25 bp, Homo sapien
gtcctgactctcaaggaaccactgg

SEQ ID NO: 3477005 - DNA, 25 bp, Homo sapien
tagaacttgggccagggctaggaac

SEQ ID NO: 3477006 - DNA, 25 bp, Homo sapien
catagggtgggatacagcagctttt

SEQ ID NO: 3477007 - DNA, 25 bp, Homo sapien
tgctgactactgattggattttacc

SEQ ID NO: 3477008 - DNA, 25 bp, Homo sapien
cataggttgccttagagaggttccc

SEQ ID NO: 3477009 - DNA, 25 bp, Homo sapien
caatttgatcgtctcgctgctggga

SEQ ID NO: 3477010 - DNA, 25 bp, Homo sapien
ggagcggccactccatactgctgag

SEQ ID NO: 3477011 - DNA, 25 bp, Homo sapien
gcttgcccgttacctgaagaggcgg

SEQ ID NO: 3477012 - DNA, 25 bp, Homo sapien
cagcctcattatgtgtgatgatgcc

SEQ ID NO: 3477013 - DNA, 25 bp, Homo sapien
gcctcagcctcattatgtgtgatga

SEQ ID NO: 3477014 - DNA, 25 bp, Homo sapien
cctcagcctcattatgtgtgatgat

SEQ ID NO: 3477015 - DNA, 25 bp, Homo sapien
ctgcctaggggtgggaaccatgtct

SEQ ID NO: 3477016 - DNA, 25 bp, Homo sapien
gcctaggggtgggaaccatgtctta

SEQ ID NO: 3477017 - DNA, 25 bp, Homo sapien
cctaggggtgggaaccatgtcttag

SEQ ID NO: 3477018 - DNA, 25 bp, Homo sapien
taggggtgggaaccatgtcttagtc

SEQ ID NO: 3477019 - DNA, 25 bp, Homo sapien
ccctatgcttgttagatttccacag

SEQ ID NO: 3477020 - DNA, 25 bp, Homo sapien
ctatgcttgttagatttccacaggt

SEQ ID NO: 3477021 - DNA, 25 bp, Homo sapien
gctttcccctatgcttgttagattt

SEQ ID NO: 3477022 - DNA, 25 bp, Homo sapien
tcccctatgcttgttagatttccac

SEQ ID NO: 3477023 - DNA, 25 bp, Homo sapien
gctgcgtgcgcagagctgacactga

SEQ ID NO: 3477024 - DNA, 25 bp, Homo sapien
tcctagcttggtcagcagtcggacc

SEQ ID NO: 3477025 - DNA, 25 bp, Homo sapien
ggacccgttagtcgccggccagtgc

SEQ ID NO: 3477026 - DNA, 25 bp, Homo sapien
gctctccgcggctgagtgcccagga

SEQ ID NO: 3477027 - DNA, 25 bp, Homo sapien
gaagaggatcagcaaggccgcccag

SEQ ID NO: 3477028 - DNA, 25 bp, Homo sapien
cgaggcggcgaagaggatcagcaag

SEQ ID NO: 3477029 - DNA, 25 bp, Homo sapien
cgtgagcagcgaggcggcgaagagg

SEQ ID NO: 3477030 - DNA, 25 bp, Homo sapien
cggcgaagaggatcagcaaggccgc

SEQ ID NO: 3477031 - DNA, 25 bp, Homo sapien
gccccgggcatattgcagcagccag

SEQ ID NO: 3477032 - DNA, 25 bp, Homo sapien
acaagccccgggcatattgcagcag

SEQ ID NO: 3477033 - DNA, 25 bp, Homo sapien
gccacaagccccgggcatattgcag

SEQ ID NO: 3477034 - DNA, 25 bp, Homo sapien
cagccacaagccccgggcatattgc

SEQ ID NO: 3477035 - DNA, 25 bp, Homo sapien
cagttctcccggaaagacttgaagg

SEQ ID NO: 3477036 - DNA, 25 bp, Homo sapien
gacttgaaggcgaagagtgacgcca

SEQ ID NO: 3477037 - DNA, 25 bp, Homo sapien
tcagcgctcgcacccaagcccgctg

SEQ ID NO: 3477038 - DNA, 25 bp, Homo sapien
ttctgcaggcctgctcgttcagcgc

SEQ ID NO: 3477039 - DNA, 25 bp, Homo sapien
gtcacatgactgatgctggctctgg

SEQ ID NO: 3477040 - DNA, 25 bp, Homo sapien
cctcaaaggcgatttggatggagct

SEQ ID NO: 3477041 - DNA, 25 bp, Homo sapien
cacctcctcaaaggcgatttggatg

SEQ ID NO: 3477042 - DNA, 25 bp, Homo sapien
gctcagattggtctacgcaggtcac

SEQ ID NO: 3477043 - DNA, 25 bp, Homo sapien
cagcagagagctggcaacgcagcac

SEQ ID NO: 3477044 - DNA, 25 bp, Homo sapien
acagagactgggaaccgcacctcct

SEQ ID NO: 3477045 - DNA, 25 bp, Homo sapien
ggtggcagtgtcagagtgacgtggt

SEQ ID NO: 3477046 - DNA, 25 bp, Homo sapien
cagagtgacgtggtaggtctccatg

SEQ ID NO: 3477047 - DNA, 25 bp, Homo sapien
gctgagccaatggaaccgcccctgc

SEQ ID NO: 3477048 - DNA, 25 bp, Homo sapien
taattcgaggactctcccttcctga

SEQ ID NO: 3477049 - DNA, 25 bp, Homo sapien
tacccaaggactcctaattcgagga

SEQ ID NO: 3477050 - DNA, 25 bp, Homo sapien
aaagtgactgggctgacttgcccca

SEQ ID NO: 3477051 - DNA, 25 bp, Homo sapien
ctcaccagggatttcctccaggttg

SEQ ID NO: 3477052 - DNA, 25 bp, Homo sapien
gatctgggcgatcagtgaaggccca

SEQ ID NO: 3477053 - DNA, 25 bp, Homo sapien
ttgggaagcaccgttaggctgagat

SEQ ID NO: 3477054 - DNA, 25 bp, Homo sapien
aggatatgagcagcccctcaccagg

SEQ ID NO: 3477055 - DNA, 25 bp, Homo sapien
ttgatcagttcctcaattgtggaga

SEQ ID NO: 3477056 - DNA, 25 bp, Homo sapien
ggctgggtgctgactatggcatcct

SEQ ID NO: 3477057 - DNA, 25 bp, Homo sapien
gcagagcaagccctgaggttgacca

SEQ ID NO: 3477058 - DNA, 25 bp, Homo sapien
agccctgaggttgaccatcatggct

SEQ ID NO: 3477059 - DNA, 25 bp, Homo sapien
agctgccgtaggaataaccggttag

SEQ ID NO: 3477060 - DNA, 25 bp, Homo sapien
catttcccaagtgagatgcccgaag

SEQ ID NO: 3477061 - DNA, 25 bp, Homo sapien
tttcccaagtgagatgcccgaagct

SEQ ID NO: 3477062 - DNA, 25 bp, Homo sapien
cgaagctgccgtaggaataaccggt

SEQ ID NO: 3477063 - DNA, 25 bp, Homo sapien
agccctcgcgggcttggtccacttc

SEQ ID NO: 3477064 - DNA, 25 bp, Homo sapien
tgtccactccacctcggatccagcc

SEQ ID NO: 3477065 - DNA, 25 bp, Homo sapien
ctgctgcatggggttgtcgagttca

SEQ ID NO: 3477066 - DNA, 25 bp, Homo sapien
agctacacagcacagttcctcggtg

SEQ ID NO: 3477067 - DNA, 25 bp, Homo sapien
gctatgcattcaaatcctccctggt

SEQ ID NO: 3477068 - DNA, 25 bp, Homo sapien
taggcactctgacggcacattacat

SEQ ID NO: 3477069 - DNA, 25 bp, Homo sapien
cacacttgagtggatcacaggccag

SEQ ID NO: 3477070 - DNA, 25 bp, Homo sapien
caataggagctcacgccaaaggcta

SEQ ID NO: 3477071 - DNA, 25 bp, Homo sapien
cagcactttgagggtcagctcccgg

SEQ ID NO: 3477072 - DNA, 25 bp, Homo sapien
actttgagggtcagctcccggctct

SEQ ID NO: 3477073 - DNA, 25 bp, Homo sapien
gcactttgagggtcagctcccggct

SEQ ID NO: 3477074 - DNA, 25 bp, Homo sapien
agcactttgagggtcagctcccggc

SEQ ID NO: 3477075 - DNA, 25 bp, Homo sapien
ccagaccccactctgtacccaccca

SEQ ID NO: 3477076 - DNA, 25 bp, Homo sapien
cacaactgtcttcgagacagtggtc

SEQ ID NO: 3477077 - DNA, 25 bp, Homo sapien
ctgtcttcgagacagtggtctggag

SEQ ID NO: 3477078 - DNA, 25 bp, Homo sapien
ggcacaactgtcttcgagacagtgg

SEQ ID NO: 3477079 - DNA, 25 bp, Homo sapien
gagtgggcacaactgtcttcgagac

SEQ ID NO: 3477080 - DNA, 25 bp, Homo sapien
ctgctggtcccagggctttccctgg

SEQ ID NO: 3477081 - DNA, 25 bp, Homo sapien
ggctgctggtcccagggctttccct

SEQ ID NO: 3477082 - DNA, 25 bp, Homo sapien
gtggctgctggtcccagggctttcc

SEQ ID NO: 3477083 - DNA, 25 bp, Homo sapien
ctccactgccatggtggctgctggt

SEQ ID NO: 3477084 - DNA, 25 bp, Homo sapien
ccggtcaagctcaatcttcttggta

SEQ ID NO: 3477085 - DNA, 25 bp, Homo sapien
gtccggtcaagctcaatcttcttgg

SEQ ID NO: 3477086 - DNA, 25 bp, Homo sapien
gtcaagctcaatcttcttggtaggt

SEQ ID NO: 3477087 - DNA, 25 bp, Homo sapien
ggtcaagctcaatcttcttggtagg

SEQ ID NO: 3477088 - DNA, 25 bp, Homo sapien
tggtgacaatggtgccatcgggcat

SEQ ID NO: 3477089 - DNA, 25 bp, Homo sapien
gtggtgacaatggtgccatcgggca

SEQ ID NO: 3477090 - DNA, 25 bp, Homo sapien
ctaatttgccgtctatacggggccg

SEQ ID NO: 3477091 - DNA, 25 bp, Homo sapien
ctgggagttgcttcagagtggcccc

SEQ ID NO: 3477092 - DNA, 25 bp, Homo sapien
ctggaaggtaggagtgcaacagtcc

SEQ ID NO: 3477093 - DNA, 25 bp, Homo sapien
ggagttggaattaaggctctctcct

SEQ ID NO: 3477094 - DNA, 25 bp, Homo sapien
cagactttgggtgactcagagggca

SEQ ID NO: 3477095 - DNA, 25 bp, Homo sapien
tggtgggtgggggagggtcagtgag

SEQ ID NO: 3477096 - DNA, 25 bp, Homo sapien
ctggtgggtgggggagggtcagtga

SEQ ID NO: 3477097 - DNA, 25 bp, Homo sapien
tctcactcagcacagttgtcgtctt

SEQ ID NO: 3477098 - DNA, 25 bp, Homo sapien
actcagcacagttgtcgtcttctcg

SEQ ID NO: 3477099 - DNA, 25 bp, Homo sapien
cacagttgtcgtcttctcggtcacc

SEQ ID NO: 3477100 - DNA, 25 bp, Homo sapien
agcacagttgtcgtcttctcggtca

SEQ ID NO: 3477101 - DNA, 25 bp, Homo sapien
cacactcatgcaccccattccccac

SEQ ID NO: 3477102 - DNA, 25 bp, Homo sapien
ctaggggtgcagagaatgaataacc

SEQ ID NO: 3477103 - DNA, 25 bp, Homo sapien
tatcccacccagagtactttttgat

SEQ ID NO: 3477104 - DNA, 25 bp, Homo sapien
agggccaacccacactcatgcaccc

SEQ ID NO: 3477105 - DNA, 25 bp, Homo sapien
gggctctgtcagctggcgaatcgct

SEQ ID NO: 3477106 - DNA, 25 bp, Homo sapien
gctggcgaatcgctgtctctgctac

SEQ ID NO: 3477107 - DNA, 25 bp, Homo sapien
ctctgctacagggtccaagccgttg

SEQ ID NO: 3477108 - DNA, 25 bp, Homo sapien
caagccgttggaaaggtggctgtcc

SEQ ID NO: 3477109 - DNA, 25 bp, Homo sapien
tttaatgggcaggagtgaccgaccc

SEQ ID NO: 3477110 - DNA, 25 bp, Homo sapien
gacgggttttaatgggcaggagtga

SEQ ID NO: 3477111 - DNA, 25 bp, Homo sapien
tgggcaggagtgaccgacccattag

SEQ ID NO: 3477112 - DNA, 25 bp, Homo sapien
gagtgaccgacccattagggctttc

SEQ ID NO: 3477113 - DNA, 25 bp, Homo sapien
tccgaacgggttgtctcgtctgctt

SEQ ID NO: 3477114 - DNA, 25 bp, Homo sapien
ggcctctcagaaatatccgaacggg

SEQ ID NO: 3477115 - DNA, 25 bp, Homo sapien
gatagcgccaactcgtcctgagcaa

SEQ ID NO: 3477116 - DNA, 25 bp, Homo sapien
cacttgtgggactagagagggcatc

SEQ ID NO: 3477117 - DNA, 25 bp, Homo sapien
ccttcctgaggcaaaaatcgtggta

SEQ ID NO: 3477118 - DNA, 25 bp, Homo sapien
caagcatgtcagatctaggccagga

SEQ ID NO: 3477119 - DNA, 25 bp, Homo sapien
tctgcccgcaaaagagatatcacgg

SEQ ID NO: 3477120 - DNA, 25 bp, Homo sapien
gacttgttaaccgaattccaggctg

SEQ ID NO: 3477121 - DNA, 25 bp, Homo sapien
aaagctgccggccttctttcggaca

SEQ ID NO: 3477122 - DNA, 25 bp, Homo sapien
gcctccggcggaagatgagcttagt

SEQ ID NO: 3477123 - DNA, 25 bp, Homo sapien
tgataaggcggcgagaaaagctgcc

SEQ ID NO: 3477124 - DNA, 25 bp, Homo sapien
gcttagtgccgctgcgcaggaaact

SEQ ID NO: 3477125 - DNA, 25 bp, Homo sapien
aatgggctgagagaactcgtgccct

SEQ ID NO: 3477126 - DNA, 25 bp, Homo sapien
gaactcgtgccctttcagagctggg

SEQ ID NO: 3477127 - DNA, 25 bp, Homo sapien
ggctgagagaactcgtgccctttca

SEQ ID NO: 3477128 - DNA, 25 bp, Homo sapien
gagagaactcgtgccctttcagagc

SEQ ID NO: 3477129 - DNA, 25 bp, Homo sapien
catgtgcttcccgttccaagtatcc

SEQ ID NO: 3477130 - DNA, 25 bp, Homo sapien
ctctcatgtgcttcccgttccaagt

SEQ ID NO: 3477131 - DNA, 25 bp, Homo sapien
gtgcttcccgttccaagtatccttc

SEQ ID NO: 3477132 - DNA, 25 bp, Homo sapien
caagtatccttccaaccggccccat

SEQ ID NO: 3477133 - DNA, 25 bp, Homo sapien
gaatacccacacatgccggacaggg

SEQ ID NO: 3477134 - DNA, 25 bp, Homo sapien
acggagggtcctaagccacacatat

SEQ ID NO: 3477135 - DNA, 25 bp, Homo sapien
ggactccgctcagggaccaggctca

SEQ ID NO: 3477136 - DNA, 25 bp, Homo sapien
gggagagatgccctctatcatctgt

SEQ ID NO: 3477137 - DNA, 25 bp, Homo sapien
gggggagggagggatgaggagcagg

SEQ ID NO: 3477138 - DNA, 25 bp, Homo sapien
ggatgaggagcaggaggggaggcag

SEQ ID NO: 3477139 - DNA, 25 bp, Homo sapien
atgaggagcaggaggggaggcagga

SEQ ID NO: 3477140 - DNA, 25 bp, Homo sapien
gggagggagggatgaggagcaggag

SEQ ID NO: 3477141 - DNA, 25 bp, Homo sapien
cacagaggtgcagccttgcgtggct

SEQ ID NO: 3477142 - DNA, 25 bp, Homo sapien
gcagccttgcgtggctccatcatca

SEQ ID NO: 3477143 - DNA, 25 bp, Homo sapien
caatggacatcatcatcgtctccca

SEQ ID NO: 3477144 - DNA, 25 bp, Homo sapien
tggacatcatcatcgtctcccaaca

SEQ ID NO: 3477145 - DNA, 25 bp, Homo sapien
caggcagtctagttacagggtccaa

SEQ ID NO: 3477146 - DNA, 25 bp, Homo sapien
cactatttgggcgatgcgcacacta

SEQ ID NO: 3477147 - DNA, 25 bp, Homo sapien
tataagatctcaagcacgggaacca

SEQ ID NO: 3477148 - DNA, 25 bp, Homo sapien
ggcatgtgccctaaacaccctgaga

SEQ ID NO: 3477149 - DNA, 25 bp, Homo sapien
tgttctcccatcaacaaaagtttct

SEQ ID NO: 3477150 - DNA, 25 bp, Homo sapien
tttggttgtcgtgtcatactggtag

SEQ ID NO: 3477151 - DNA, 25 bp, Homo sapien
aaaagtttcttgtgcaatcacaagt

SEQ ID NO: 3477152 - DNA, 25 bp, Homo sapien
gcaatcacaagttcactgtgtttgg

SEQ ID NO: 3477153 - DNA, 25 bp, Homo sapien
acctcagaccatctccggagaggcg

SEQ ID NO: 3477154 - DNA, 25 bp, Homo sapien
cccacctcagaccatctccggagag

SEQ ID NO: 3477155 - DNA, 25 bp, Homo sapien
tctgtcggctccaggtctcttcagc

SEQ ID NO: 3477156 - DNA, 25 bp, Homo sapien
cgtctgtcggctccaggtctcttca

SEQ ID NO: 3477157 - DNA, 25 bp, Homo sapien
gatctgaaacctaggcaaaactccc

SEQ ID NO: 3477158 - DNA, 25 bp, Homo sapien
gctccttagttctatggctggcaca

SEQ ID NO: 3477159 - DNA, 25 bp, Homo sapien
cctgctgttagactggtgggtaagt

SEQ ID NO: 3477160 - DNA, 25 bp, Homo sapien
caaggaggcaagctagctggcgata

SEQ ID NO: 3477161 - DNA, 25 bp, Homo sapien
ccatcctgggcggcagacccagacc

SEQ ID NO: 3477162 - DNA, 25 bp, Homo sapien
ctccatcctgggcggcagacccaga

SEQ ID NO: 3477163 - DNA, 25 bp, Homo sapien
actccatcctgggcggcagacccag

SEQ ID NO: 3477164 - DNA, 25 bp, Homo sapien
gtactccatcctgggcggcagaccc

SEQ ID NO: 3477165 - DNA, 25 bp, Homo sapien
aaatattgactgctgggccgagtgc

SEQ ID NO: 3477166 - DNA, 25 bp, Homo sapien
agtggctcacgatcttagcactttg

SEQ ID NO: 3477167 - DNA, 25 bp, Homo sapien
ttacaaatattgactgctgggccga

SEQ ID NO: 3477168 - DNA, 25 bp, Homo sapien
tacaaatattgactgctgggccgag

SEQ ID NO: 3477169 - DNA, 25 bp, Homo sapien
ctctgaaaaaaggcctttactgaat

SEQ ID NO: 3477170 - DNA, 25 bp, Homo sapien
ccttttacagtaaggatggagtaat

SEQ ID NO: 3477171 - DNA, 25 bp, Homo sapien
ccctgcccttttacagtaaggatgg

SEQ ID NO: 3477172 - DNA, 25 bp, Homo sapien
ttgttccagtgacccatgagaaacc

SEQ ID NO: 3477173 - DNA, 25 bp, Homo sapien
gcctgcctagaatcagcacgtgttg

SEQ ID NO: 3477174 - DNA, 25 bp, Homo sapien
tgtagccacagattctcctttcggg

SEQ ID NO: 3477175 - DNA, 25 bp, Homo sapien
tagccacagattctcctttcgggga

SEQ ID NO: 3477176 - DNA, 25 bp, Homo sapien
cacagattctcctttcggggaactt

SEQ ID NO: 3477177 - DNA, 25 bp, Homo sapien
gccacagattctcctttcggggaac

SEQ ID NO: 3477178 - DNA, 25 bp, Homo sapien
tccatggttgagcacacaaaggagc

SEQ ID NO: 3477179 - DNA, 25 bp, Homo sapien
cctccccagagccatgcaggtgctg

SEQ ID NO: 3477180 - DNA, 25 bp, Homo sapien
tccccagagccatgcaggtgctgct

SEQ ID NO: 3477181 - DNA, 25 bp, Homo sapien
ccagagccatgcaggtgctgctgca

SEQ ID NO: 3477182 - DNA, 25 bp, Homo sapien
ctcctccccagagccatgcaggtgc

SEQ ID NO: 3477183 - DNA, 25 bp, Homo sapien
tattccttatatccttgttgactga

SEQ ID NO: 3477184 - DNA, 25 bp, Homo sapien
gttcactaaagtactgtcagcaatt

SEQ ID NO: 3477185 - DNA, 25 bp, Homo sapien
gttttctataaatgagtttacaatg

SEQ ID NO: 3477186 - DNA, 25 bp, Homo sapien
tgtcagcaattacttcttgatggca

SEQ ID NO: 3477187 - DNA, 25 bp, Homo sapien
aaaaagtggctttggtcgggcgcag

SEQ ID NO: 3477188 - DNA, 25 bp, Homo sapien
tcctgccacacttattagtaccgtg

SEQ ID NO: 3477189 - DNA, 25 bp, Homo sapien
cacacttattagtaccgtgactttg

SEQ ID NO: 3477190 - DNA, 25 bp, Homo sapien
ttcttttaaatcctgccacacttat

SEQ ID NO: 3477191 - DNA, 25 bp, Homo sapien
agtctgacactttccaaggctcagg

SEQ ID NO: 3477192 - DNA, 25 bp, Homo sapien
ttaaaaggaagagtctgacactttc

SEQ ID NO: 3477193 - DNA, 25 bp, Homo sapien
tgacactttccaaggctcaggtcac

SEQ ID NO: 3477194 - DNA, 25 bp, Homo sapien
aaggaagagtctgacactttccaag

SEQ ID NO: 3477195 - DNA, 25 bp, Homo sapien
ggaagtagacatggcggatgaggtc

SEQ ID NO: 3477196 - DNA, 25 bp, Homo sapien
cgttccggctctggaagtccaggat

SEQ ID NO: 3477197 - DNA, 25 bp, Homo sapien
ggatatcagggatgacgttccggct

SEQ ID NO: 3477198 - DNA, 25 bp, Homo sapien
cagggatgacgttccggctctggaa

SEQ ID NO: 3477199 - DNA, 25 bp, Homo sapien
ggcatcagagttaagacccccagct

SEQ ID NO: 3477200 - DNA, 25 bp, Homo sapien
ggaaatataaggcatccctgaaagg

SEQ ID NO: 3477201 - DNA, 25 bp, Homo sapien
agcttccttccaccccaattactgg

SEQ ID NO: 3477202 - DNA, 25 bp, Homo sapien
gagagatactagcaggaatcttgga

SEQ ID NO: 3477203 - DNA, 25 bp, Homo sapien
gcccgaagaattcttggctctctcc

SEQ ID NO: 3477204 - DNA, 25 bp, Homo sapien
agggactcacccctatgtgcccgaa

SEQ ID NO: 3477205 - DNA, 25 bp, Homo sapien
tatgtgcccgaagaattcttggctc

SEQ ID NO: 3477206 - DNA, 25 bp, Homo sapien
tcacccctatgtgcccgaagaattc

SEQ ID NO: 3477207 - DNA, 25 bp, Homo sapien
ttgccgactgcttcgtattcacagc

SEQ ID NO: 3477208 - DNA, 25 bp, Homo sapien
accaccgggttgtccttgccgactg

SEQ ID NO: 3477209 - DNA, 25 bp, Homo sapien
accactcaggattgtcgaaggaatt

SEQ ID NO: 3477210 - DNA, 25 bp, Homo sapien
gtgcttccacatgccgataaaacca

SEQ ID NO: 3477211 - DNA, 25 bp, Homo sapien
tttgcctaggatctggtacccctga

SEQ ID NO: 3477212 - DNA, 25 bp, Homo sapien
ggcagtcaaccttgcccctgtagga

SEQ ID NO: 3477213 - DNA, 25 bp, Homo sapien
gccacaagttaagaagcagccctac

SEQ ID NO: 3477214 - DNA, 25 bp, Homo sapien
gggaaggaagccctatcagtctcct

SEQ ID NO: 3477215 - DNA, 25 bp, Homo sapien
gctgcggaggtgctctcgaagttta

SEQ ID NO: 3477216 - DNA, 25 bp, Homo sapien
gatgtgatctaagaacttggtattg

SEQ ID NO: 3477217 - DNA, 25 bp, Homo sapien
tccaatgaggtctggcgacggatgt

SEQ ID NO: 3477218 - DNA, 25 bp, Homo sapien
gtttactgcggtccttgaaggtgca

SEQ ID NO: 3477219 - DNA, 25 bp, Homo sapien
cagtaagtactgaataacaatgcct

SEQ ID NO: 3477220 - DNA, 25 bp, Homo sapien
ggtgcctgagcccaaaaagaagagg

SEQ ID NO: 3477221 - DNA, 25 bp, Homo sapien
acaatgcctacgaatctgaatcagc

SEQ ID NO: 3477222 - DNA, 25 bp, Homo sapien
gaggattccctaagtaactgatacg

SEQ ID NO: 3477223 - DNA, 25 bp, Homo sapien
gtgatctcaggtaagtgatttaacc

SEQ ID NO: 3477224 - DNA, 25 bp, Homo sapien
gatctcaggtaagtgatttaacctc

SEQ ID NO: 3477225 - DNA, 25 bp, Homo sapien
ctgtgtgatctcaggtaagtgattt

SEQ ID NO: 3477226 - DNA, 25 bp, Homo sapien
tgtgatctcaggtaagtgatttaac

SEQ ID NO: 3477227 - DNA, 25 bp, Homo sapien
gagcatgggacttagagaacctgag

SEQ ID NO: 3477228 - DNA, 25 bp, Homo sapien
agcttagggagctatgaatggacac

SEQ ID NO: 3477229 - DNA, 25 bp, Homo sapien
agaaaaggagagcttagggagctat

SEQ ID NO: 3477230 - DNA, 25 bp, Homo sapien
aaggagaggggaaccatcccaggca

SEQ ID NO: 3477231 - DNA, 25 bp, Homo sapien
ctggggtggggcaggcagaagaaag

SEQ ID NO: 3477232 - DNA, 25 bp, Homo sapien
tggggtggggcaggcagaagaaagg

SEQ ID NO: 3477233 - DNA, 25 bp, Homo sapien
gtggggcaggcagaagaaaggaggg

SEQ ID NO: 3477234 - DNA, 25 bp, Homo sapien
gggtggggcaggcagaagaaaggag

SEQ ID NO: 3477235 - DNA, 25 bp, Homo sapien
catggttgcgcatgtggtcccgcaa

SEQ ID NO: 3477236 - DNA, 25 bp, Homo sapien
gcaatagccgctctgtggcaaatct

SEQ ID NO: 3477237 - DNA, 25 bp, Homo sapien
caaatctcttggaacagtgagaaca

SEQ ID NO: 3477238 - DNA, 25 bp, Homo sapien
cagtgagaacactggaagtgctgct

SEQ ID NO: 3477239 - DNA, 25 bp, Homo sapien
aggctgtgatgtgagaacttgtgga

SEQ ID NO: 3477240 - DNA, 25 bp, Homo sapien
gcagagaggaggctgtgatgtgaga

SEQ ID NO: 3477241 - DNA, 25 bp, Homo sapien
gagaggaggctgtgatgtgagaact

SEQ ID NO: 3477242 - DNA, 25 bp, Homo sapien
gctgtgatgtgagaacttgtggaac

SEQ ID NO: 3477243 - DNA, 25 bp, Homo sapien
tttaaagggccggtcctcactgtga

SEQ ID NO: 3477244 - DNA, 25 bp, Homo sapien
tcctcactgtgacgaaagcgcatgt

SEQ ID NO: 3477245 - DNA, 25 bp, Homo sapien
actgtgacgaaagcgcatgtggttg

SEQ ID NO: 3477246 - DNA, 25 bp, Homo sapien
cagtcacatttaaagggccggtcct

SEQ ID NO: 3477247 - DNA, 25 bp, Homo sapien
cctgtaggctggctcctcgctgtgg

SEQ ID NO: 3477248 - DNA, 25 bp, Homo sapien
gaaggtgcagttctcaaaatcacac

SEQ ID NO: 3477249 - DNA, 25 bp, Homo sapien
tgatagagcagagggatcgggcact

SEQ ID NO: 3477250 - DNA, 25 bp, Homo sapien
ctttgcggtaatgggacttgataga

SEQ ID NO: 3477251 - DNA, 25 bp, Homo sapien
ggttgttgccccgtgtgaagcattt

SEQ ID NO: 3477252 - DNA, 25 bp, Homo sapien
gcacggtgaggttgttgccccgtgt

SEQ ID NO: 3477253 - DNA, 25 bp, Homo sapien
tgcttcttgcgaaggtgcacggtga

SEQ ID NO: 3477254 - DNA, 25 bp, Homo sapien
ttgccccgtgtgaagcatttgtcac

SEQ ID NO: 3477255 - DNA, 25 bp, Homo sapien
caagtgtgttaatctgggaaggagg

SEQ ID NO: 3477256 - DNA, 25 bp, Homo sapien
aacaagtgtgttaatctgggaagga

SEQ ID NO: 3477257 - DNA, 25 bp, Homo sapien
agtgtgttaatctgggaaggagggt

SEQ ID NO: 3477258 - DNA, 25 bp, Homo sapien
aaaacaagtgtgttaatctgggaag

SEQ ID NO: 3477259 - DNA, 25 bp, Homo sapien
ccttggagctaaggatcagaaccct

SEQ ID NO: 3477260 - DNA, 25 bp, Homo sapien
caaaggatttatgagaaggccttgg

SEQ ID NO: 3477261 - DNA, 25 bp, Homo sapien
gggaaagatcattactcaaaatgga

SEQ ID NO: 3477262 - DNA, 25 bp, Homo sapien
gcaccatttattgggtttggcacca

SEQ ID NO: 3477263 - DNA, 25 bp, Homo sapien
gtttctagaataatgccctgcaggc

SEQ ID NO: 3477264 - DNA, 25 bp, Homo sapien
ggccttgggcattggtctgattcac

SEQ ID NO: 3477265 - DNA, 25 bp, Homo sapien
tctacactctcgtagcgaaccagct

SEQ ID NO: 3477266 - DNA, 25 bp, Homo sapien
tagtagacgatctcttgctggcctt

SEQ ID NO: 3477267 - DNA, 25 bp, Homo sapien
ggctcctcagctattccttgaagct

SEQ ID NO: 3477268 - DNA, 25 bp, Homo sapien
ggctcccctggggcttcagacagca

SEQ ID NO: 3477269 - DNA, 25 bp, Homo sapien
catgatgccccctgaaggtggctca

SEQ ID NO: 3477270 - DNA, 25 bp, Homo sapien
ccttgaagcttttccatgatgcccc

SEQ ID NO: 3477271 - DNA, 25 bp, Homo sapien
tatggttaagcctgataacagcctc

SEQ ID NO: 3477272 - DNA, 25 bp, Homo sapien
aaagggaagtctttagagtctgcag

SEQ ID NO: 3477273 - DNA, 25 bp, Homo sapien
ggcatccattggcaacggctgccca

SEQ ID NO: 3477274 - DNA, 25 bp, Homo sapien
cccacaaaatgtagtctggcagaaa

SEQ ID NO: 3477275 - DNA, 25 bp, Homo sapien
ctggtgacaaagaaaggacccttgc

SEQ ID NO: 3477276 - DNA, 25 bp, Homo sapien
gggaccagtcacatgccatccttgg

SEQ ID NO: 3477277 - DNA, 25 bp, Homo sapien
tacttggttatcaatgccttggctg

SEQ ID NO: 3477278 - DNA, 25 bp, Homo sapien
cctgtccctgaggataatcatgaaa

SEQ ID NO: 3477279 - DNA, 25 bp, Homo sapien
gagaatagcgaagtttcaccaaggg

SEQ ID NO: 3477280 - DNA, 25 bp, Homo sapien
tctaatcagtattcagagtgaggcc

SEQ ID NO: 3477281 - DNA, 25 bp, Homo sapien
cagctgaaccagacgaaatgatgat

SEQ ID NO: 3477282 - DNA, 25 bp, Homo sapien
ccctagaggcactgggttctaatca

SEQ ID NO: 3477283 - DNA, 25 bp, Homo sapien
tttctgtttgtgttccaggggtgct

SEQ ID NO: 3477284 - DNA, 25 bp, Homo sapien
ttggccctgtgcaacccatgtcctg

SEQ ID NO: 3477285 - DNA, 25 bp, Homo sapien
ctgtgatacacccagtggtctgttt

SEQ ID NO: 3477286 - DNA, 25 bp, Homo sapien
atccatctctagctgctctaattgc

SEQ ID NO: 3477287 - DNA, 25 bp, Homo sapien
gtaactgctgtactacctccagctt

SEQ ID NO: 3477288 - DNA, 25 bp, Homo sapien
tgtaactgctgtactacctccagct

SEQ ID NO: 3477289 - DNA, 25 bp, Homo sapien
cctaattaccttgattacacattgt

SEQ ID NO: 3477290 - DNA, 25 bp, Homo sapien
gatatcctaattaccttgattacac

SEQ ID NO: 3477291 - DNA, 25 bp, Homo sapien
tccactgtgcctcccttgcccacca

SEQ ID NO: 3477292 - DNA, 25 bp, Homo sapien
accatcccaggtctctcttccactg

SEQ ID NO: 3477293 - DNA, 25 bp, Homo sapien
agttctgcttccaccatcccaggtc

SEQ ID NO: 3477294 - DNA, 25 bp, Homo sapien
tccaccatcccaggtctctcttcca

SEQ ID NO: 3477295 - DNA, 25 bp, Homo sapien
gggagaagcagttgttaagcagctt

SEQ ID NO: 3477296 - DNA, 25 bp, Homo sapien
ctaacagacacaggctgctgtgggc

SEQ ID NO: 3477297 - DNA, 25 bp, Homo sapien
agcagttgttaagcagctttgtggg

SEQ ID NO: 3477298 - DNA, 25 bp, Homo sapien
tgtgggcagggatttgtgggagaag

SEQ ID NO: 3477299 - DNA, 25 bp, Homo sapien
tcggctcggaggagacggcaaggat

SEQ ID NO: 3477300 - DNA, 25 bp, Homo sapien
ccgggatgctcagcgctgccacgga

SEQ ID NO: 3477301 - DNA, 25 bp, Homo sapien
cggccctcggctcggaggagacggc

SEQ ID NO: 3477302 - DNA, 25 bp, Homo sapien
agcctggtcccggacgctgtgtcct

SEQ ID NO: 3477303 - DNA, 25 bp, Homo sapien
cccgcaggccagcagcccctgggga

SEQ ID NO: 3477304 - DNA, 25 bp, Homo sapien
tttggggcagaccaccgagcccggc

SEQ ID NO: 3477305 - DNA, 25 bp, Homo sapien
cacgaactcgatgtccacggctgag

SEQ ID NO: 3477306 - DNA, 25 bp, Homo sapien
taggacagctccacgaactcgatgt

SEQ ID NO: 3477307 - DNA, 25 bp, Homo sapien
atgtccacggctgagcgcttgggta

SEQ ID NO: 3477308 - DNA, 25 bp, Homo sapien
tcccgcacggaataggacagctcca

SEQ ID NO: 3477309 - DNA, 25 bp, Homo sapien
gaggcacttgagaagggtcttataa

SEQ ID NO: 3477310 - DNA, 25 bp, Homo sapien
ctgtatcctgccaagatgttcatga

SEQ ID NO: 3477311 - DNA, 25 bp, Homo sapien
tgttcatgaatgtagacttgccagc

SEQ ID NO: 3477312 - DNA, 25 bp, Homo sapien
gctcccggcggcagaatttacctga

SEQ ID NO: 3477313 - DNA, 25 bp, Homo sapien
catcttgcggaaggtcctcagctcc

SEQ ID NO: 3477314 - DNA, 25 bp, Homo sapien
atggcttccaacaccgtgaggtgcg

SEQ ID NO: 3477315 - DNA, 25 bp, Homo sapien
cattaaccaggatctgccccttcat

SEQ ID NO: 3477316 - DNA, 25 bp, Homo sapien
atgtagcaggacatcttgcggaagg

SEQ ID NO: 3477317 - DNA, 25 bp, Homo sapien
tctcactcagcttcaggttagcaga

SEQ ID NO: 3477318 - DNA, 25 bp, Homo sapien
ggctgtcctcgtgtgggagcacgac

SEQ ID NO: 3477319 - DNA, 25 bp, Homo sapien
tgggagcacgacatcaggcccagtg

SEQ ID NO: 3477320 - DNA, 25 bp, Homo sapien
tgtgggagcacgacatcaggcccag

SEQ ID NO: 3477321 - DNA, 25 bp, Homo sapien
gggagcacgacatcaggcccagtgc

SEQ ID NO: 3477322 - DNA, 25 bp, Homo sapien
agaacatgacaggcgggttgttgac

SEQ ID NO: 3477323 - DNA, 25 bp, Homo sapien
aagaacatgacaggcgggttgttga

SEQ ID NO: 3477324 - DNA, 25 bp, Homo sapien
gaacatgacaggcgggttgttgacc

SEQ ID NO: 3477325 - DNA, 25 bp, Homo sapien
aaagaacatgacaggcgggttgttg

SEQ ID NO: 3477326 - DNA, 25 bp, Homo sapien
gagggcactctggccgcatctgtat

SEQ ID NO: 3477327 - DNA, 25 bp, Homo sapien
agagggcactctggccgcatctgta

SEQ ID NO: 3477328 - DNA, 25 bp, Homo sapien
agggcactctggccgcatctgtatc

SEQ ID NO: 3477329 - DNA, 25 bp, Homo sapien
gccacgtgaggtgggtgaggccaaa

SEQ ID NO: 3477330 - DNA, 25 bp, Homo sapien
tgaggccaaaagaagggagtgtctg

SEQ ID NO: 3477331 - DNA, 25 bp, Homo sapien
caccagggggccacgtgaggtgggt

SEQ ID NO: 3477332 - DNA, 25 bp, Homo sapien
tgggtgaggccaaaagaagggagtg

SEQ ID NO: 3477333 - DNA, 25 bp, Homo sapien
cttggaaacaagaggcgctatccag

SEQ ID NO: 3477334 - DNA, 25 bp, Homo sapien
gaaacaagaggcgctatccagacca

SEQ ID NO: 3477335 - DNA, 25 bp, Homo sapien
ggaaacaagaggcgctatccagacc

SEQ ID NO: 3477336 - DNA, 25 bp, Homo sapien
ttggaaacaagaggcgctatccaga

SEQ ID NO: 3477337 - DNA, 25 bp, Homo sapien
atgatggtacggcccccctgtgcca

SEQ ID NO: 3477338 - DNA, 25 bp, Homo sapien
cagatgatggtacggcccccctgtg

SEQ ID NO: 3477339 - DNA, 25 bp, Homo sapien
ggtgcagatgatggtacggcccccc

SEQ ID NO: 3477340 - DNA, 25 bp, Homo sapien
tgcagatgatggtacggcccccctg

SEQ ID NO: 3477341 - DNA, 25 bp, Homo sapien
gaagtcagccgggttgtggtaggtg

SEQ ID NO: 3477342 - DNA, 25 bp, Homo sapien
gcaatgcaagccgagtccctttaga

SEQ ID NO: 3477343 - DNA, 25 bp, Homo sapien
tgcaagccgagtccctttagatagg

SEQ ID NO: 3477344 - DNA, 25 bp, Homo sapien
gtggggcaatgcaagccgagtccct

SEQ ID NO: 3477345 - DNA, 25 bp, Homo sapien
gggttcaggtctccatactcgccag

SEQ ID NO: 3477346 - DNA, 25 bp, Homo sapien
aggtctccatactcgccagaggcca

SEQ ID NO: 3477347 - DNA, 25 bp, Homo sapien
gcccattctgcacagccctgaacaa

SEQ ID NO: 3477348 - DNA, 25 bp, Homo sapien
atactcgccagaggccacctcgatg

SEQ ID NO: 3477349 - DNA, 25 bp, Homo sapien
ggaagagaactagcactgggcagac

SEQ ID NO: 3477350 - DNA, 25 bp, Homo sapien
accagctacagtgctaagagcttta

SEQ ID NO: 3477351 - DNA, 25 bp, Homo sapien
ctgggcagacgcctgctgtaccagc

SEQ ID NO: 3477352 - DNA, 25 bp, Homo sapien
ggttttcaggggttacagtgtctca

SEQ ID NO: 3477353 - DNA, 25 bp, Homo sapien
agaaagtaatggacacccgtggtgg

SEQ ID NO: 3477354 - DNA, 25 bp, Homo sapien
ttggatcgggatcaggtgagcctac

SEQ ID NO: 3477355 - DNA, 25 bp, Homo sapien
gtgtacctgaaagctaggcttaggg

SEQ ID NO: 3477356 - DNA, 25 bp, Homo sapien
tccaggtctacagagaatcttgtac

SEQ ID NO: 3477357 - DNA, 25 bp, Homo sapien
tggcaaaggtgtggctttcaatggg

SEQ ID NO: 3477358 - DNA, 25 bp, Homo sapien
gatgcagaactgtgtgagggtgctg

SEQ ID NO: 3477359 - DNA, 25 bp, Homo sapien
tgagcacgccaataaccacgtggga

SEQ ID NO: 3477360 - DNA, 25 bp, Homo sapien
tcgtcgccaatatgcaggtagagga

SEQ ID NO: 3477361 - DNA, 25 bp, Homo sapien
tgaagaccttgctggcatcgtcgcc

SEQ ID NO: 3477362 - DNA, 25 bp, Homo sapien
ccacgtgggacatgaaccgtaggtg

SEQ ID NO: 3477363 - DNA, 25 bp, Homo sapien
aatacgctttgaggctgtaccagta

SEQ ID NO: 3477364 - DNA, 25 bp, Homo sapien
ggtcttggccaggtaatacgctttg

SEQ ID NO: 3477365 - DNA, 25 bp, Homo sapien
tgtaccagtagttgaggtgctccct

SEQ ID NO: 3477366 - DNA, 25 bp, Homo sapien
gtgctccctcatgaagaccgccatc

SEQ ID NO: 3477367 - DNA, 25 bp, Homo sapien
gttggaagcagctccgatcagcagc

SEQ ID NO: 3477368 - DNA, 25 bp, Homo sapien
ctgcagtagaccaccggacacacca

SEQ ID NO: 3477369 - DNA, 25 bp, Homo sapien
gagaagagcaggaagcggctggtct

SEQ ID NO: 3477370 - DNA, 25 bp, Homo sapien
agcagccccaaagattgggccacca

SEQ ID NO: 3477371 - DNA, 25 bp, Homo sapien
taggagctccattgcaggtaagtgg

SEQ ID NO: 3477372 - DNA, 25 bp, Homo sapien
gatggtcttgaagctgacaaagaag

SEQ ID NO: 3477373 - DNA, 25 bp, Homo sapien
aagaagccggagaacaagaggacag

SEQ ID NO: 3477374 - DNA, 25 bp, Homo sapien
atggcggtaactgggcccacaaaag

SEQ ID NO: 3477375 - DNA, 25 bp, Homo sapien
cggtaacgcagcacaaggtaggcca

SEQ ID NO: 3477376 - DNA, 25 bp, Homo sapien
gatcgtcaggatcacaccctcaaag

SEQ ID NO: 3477377 - DNA, 25 bp, Homo sapien
aagatgcccaagaccaggaagtcca

SEQ ID NO: 3477378 - DNA, 25 bp, Homo sapien
aacgggcagcgttcctctaaacatg

SEQ ID NO: 3477379 - DNA, 25 bp, Homo sapien
cagttcctgtagacaccctgggcag

SEQ ID NO: 3477380 - DNA, 25 bp, Homo sapien
gcagcaccagccttatccttagagt

SEQ ID NO: 3477381 - DNA, 25 bp, Homo sapien
tcccagtagtctttgcatgcaggtg

SEQ ID NO: 3477382 - DNA, 25 bp, Homo sapien
tcaacttgggaagactcctgggcat

SEQ ID NO: 3477383 - DNA, 25 bp, Homo sapien
gccagggcacgccttcgtatgcaag

SEQ ID NO: 3477384 - DNA, 25 bp, Homo sapien
agggcacgccttcgtatgcaagcat

SEQ ID NO: 3477385 - DNA, 25 bp, Homo sapien
cagccagggcacgccttcgtatgca

SEQ ID NO: 3477386 - DNA, 25 bp, Homo sapien
cagggcacgccttcgtatgcaagca

SEQ ID NO: 3477387 - DNA, 25 bp, Homo sapien
cttgggttctgccttatgtatccgg

SEQ ID NO: 3477388 - DNA, 25 bp, Homo sapien
tatgtatccggtcctcttcagagcc

SEQ ID NO: 3477389 - DNA, 25 bp, Homo sapien
tcaggcagagacctgagcctaaggc

SEQ ID NO: 3477390 - DNA, 25 bp, Homo sapien
tcagagcccagacctatgtgtgtgg

SEQ ID NO: 3477391 - DNA, 25 bp, Homo sapien
gaagggtgaaatgacttgtgcaggt

SEQ ID NO: 3477392 - DNA, 25 bp, Homo sapien
aagggtgaaatgacttgtgcaggtt

SEQ ID NO: 3477393 - DNA, 25 bp, Homo sapien
ggcgccacccgtcccgccatcgtcc

SEQ ID NO: 3477394 - DNA, 25 bp, Homo sapien
tgggacgagggggtcagcgagaggg

SEQ ID NO: 3477395 - DNA, 25 bp, Homo sapien
aggggcccggtgctccggagcaggc

SEQ ID NO: 3477396 - DNA, 25 bp, Homo sapien
aggcgcagggctggaaccccggcgc

SEQ ID NO: 3477397 - DNA, 25 bp, Homo sapien
aaagaggacgagcccaggcactcgg

SEQ ID NO: 3477398 - DNA, 25 bp, Homo sapien
gcgggcgcgaaagaggacgagccca

SEQ ID NO: 3477399 - DNA, 25 bp, Homo sapien
ggcagcgggcgcgaaagaggacgag

SEQ ID NO: 3477400 - DNA, 25 bp, Homo sapien
gggcgcgaaagaggacgagcccagg

SEQ ID NO: 3477401 - DNA, 25 bp, Homo sapien
ctccgcccgcctgcgcggccctggc

SEQ ID NO: 3477402 - DNA, 25 bp, Homo sapien
ccgcccgcctgcgcggccctggcac

SEQ ID NO: 3477403 - DNA, 25 bp, Homo sapien
tccgcccgcctgcgcggccctggca

SEQ ID NO: 3477404 - DNA, 25 bp, Homo sapien
cggcgtctcccgctagctcccagag

SEQ ID NO: 3477405 - DNA, 25 bp, Homo sapien
gtctcccgctagctcccagagtccc

SEQ ID NO: 3477406 - DNA, 25 bp, Homo sapien
ggagccgtcggccgcggcccagagg

SEQ ID NO: 3477407 - DNA, 25 bp, Homo sapien
gcggacgccggcgtctcccgctagc

SEQ ID NO: 3477408 - DNA, 25 bp, Homo sapien
ccagccagggcgcaggggttatcaa

SEQ ID NO: 3477409 - DNA, 25 bp, Homo sapien
cgtccctctcgttctcggccgggat

SEQ ID NO: 3477410 - DNA, 25 bp, Homo sapien
gagacttgccagaacgcccgccatt

SEQ ID NO: 3477411 - DNA, 25 bp, Homo sapien
caggggttatcaagcccgctaggcc

SEQ ID NO: 3477412 - DNA, 25 bp, Homo sapien
aactgggtcccaaacagctctccta

SEQ ID NO: 3477413 - DNA, 25 bp, Homo sapien
aacagctctcctactttcgggtggc

SEQ ID NO: 3477414 - DNA, 25 bp, Homo sapien
ctccaccaaactgggtcccaaacag

SEQ ID NO: 3477415 - DNA, 25 bp, Homo sapien
accaaactgggtcccaaacagctct

SEQ ID NO: 3477416 - DNA, 25 bp, Homo sapien
aggactaaagtggtgtgccaccaca

SEQ ID NO: 3477417 - DNA, 25 bp, Homo sapien
agtgcggggactgcaggcgcgagcc

SEQ ID NO: 3477418 - DNA, 25 bp, Homo sapien
aaagtgcggggactgcaggcgcgag

SEQ ID NO: 3477419 - DNA, 25 bp, Homo sapien
agctaggactaaagtggtgtgccac

SEQ ID NO: 3477420 - DNA, 25 bp, Homo sapien
ctggggggcctaggaccgacttctg

SEQ ID NO: 3477421 - DNA, 25 bp, Homo sapien
ttctaaaaccagagccccaagaggc

SEQ ID NO: 3477422 - DNA, 25 bp, Homo sapien
aggccctgggcaaatggtggcccca

SEQ ID NO: 3477423 - DNA, 25 bp, Homo sapien
tgggcaaatggtggccccacctcat

SEQ ID NO: 3477424 - DNA, 25 bp, Homo sapien
agagccccaagaggccctgggcaaa

SEQ ID NO: 3477425 - DNA, 25 bp, Homo sapien
gccaactccagtggatcaggaaggg

SEQ ID NO: 3477426 - DNA, 25 bp, Homo sapien
gctccccttgaaggggccaactcca

SEQ ID NO: 3477427 - DNA, 25 bp, Homo sapien
ggggccaactccagtggatcaggaa

SEQ ID NO: 3477428 - DNA, 25 bp, Homo sapien
ggccaactccagtggatcaggaagg

SEQ ID NO: 3477429 - DNA, 25 bp, Homo sapien
gggagcgctatctaccgagcttccg

SEQ ID NO: 3477430 - DNA, 25 bp, Homo sapien
tatctaccgagcttccgtggtggcg

SEQ ID NO: 3477431 - DNA, 25 bp, Homo sapien
agcttccgtggtggcgtataaaggc

SEQ ID NO: 3477432 - DNA, 25 bp, Homo sapien
acagccgtccatgcctcccgggtgg

SEQ ID NO: 3477433 - DNA, 25 bp, Homo sapien
ctgagaaaatatagactgtccagaa

SEQ ID NO: 3477434 - DNA, 25 bp, Homo sapien
ctggggcccacaatggtgggcacac

SEQ ID NO: 3477435 - DNA, 25 bp, Homo sapien
gatgctggggcccacaatggtgggc

SEQ ID NO: 3477436 - DNA, 25 bp, Homo sapien
atgctggggcccacaatggtgggca

SEQ ID NO: 3477437 - DNA, 25 bp, Homo sapien
gctggggcccacaatggtgggcaca

SEQ ID NO: 3477438 - DNA, 25 bp, Homo sapien
gcttagggccaatcagggcggtggt

SEQ ID NO: 3477439 - DNA, 25 bp, Homo sapien
gggcctggagatgtagcttagggcc

SEQ ID NO: 3477440 - DNA, 25 bp, Homo sapien
agatgtagcttagggccaatcaggg

SEQ ID NO: 3477441 - DNA, 25 bp, Homo sapien
tagggccaatcagggcggtggtgag

SEQ ID NO: 3477442 - DNA, 25 bp, Homo sapien
ggcatccgggttaaagagctgagac

SEQ ID NO: 3477443 - DNA, 25 bp, Homo sapien
caacgtggaccgtgtctagggcaaa

SEQ ID NO: 3477444 - DNA, 25 bp, Homo sapien
agtccagaaccatcttgcgcaccag

SEQ ID NO: 3477445 - DNA, 25 bp, Homo sapien
caggttccggcggtgccgctgtata

SEQ ID NO: 3477446 - DNA, 25 bp, Homo sapien
ctaagccatggagcacaaagaggag

SEQ ID NO: 3477447 - DNA, 25 bp, Homo sapien
caaagaggaggtgggacccagcagc

SEQ ID NO: 3477448 - DNA, 25 bp, Homo sapien
aagaggaggtgggacccagcagcag

SEQ ID NO: 3477449 - DNA, 25 bp, Homo sapien
ggaggtgggacccagcagcagccat

SEQ ID NO: 3477450 - DNA, 25 bp, Homo sapien
ctgaggcagcatgtatttgcgcagc

SEQ ID NO: 3477451 - DNA, 25 bp, Homo sapien
gttgacgatgatagcagctggttcc

SEQ ID NO: 3477452 - DNA, 25 bp, Homo sapien
gccagccggaagtcgaggttgagat

SEQ ID NO: 3477453 - DNA, 25 bp, Homo sapien
tccgggtcactacaaagtcccgtgc

SEQ ID NO: 3477454 - DNA, 25 bp, Homo sapien
cacaaacgagccagcaataggacgg

SEQ ID NO: 3477455 - DNA, 25 bp, Homo sapien
tgcataggccatcagggacaaattg

SEQ ID NO: 3477456 - DNA, 25 bp, Homo sapien
tatagatgcttgtaagggtctgccc

SEQ ID NO: 3477457 - DNA, 25 bp, Homo sapien
ccgacggaagatgtgcagcagctga

SEQ ID NO: 3477458 - DNA, 25 bp, Homo sapien
cttgcgcaaacccagcacaatgtag

SEQ ID NO: 3477459 - DNA, 25 bp, Homo sapien
gagggcagccaggtattcctgcatg

SEQ ID NO: 3477460 - DNA, 25 bp, Homo sapien
ccagcacaatgtagagggcagccag

SEQ ID NO: 3477461 - DNA, 25 bp, Homo sapien
cagccaggtattcctgcatggcggg

SEQ ID NO: 3477462 - DNA, 25 bp, Homo sapien
tgatgcccagtaccaggctgacgtc

SEQ ID NO: 3477463 - DNA, 25 bp, Homo sapien
atgcccagtaccaggctgacgtcct

SEQ ID NO: 3477464 - DNA, 25 bp, Homo sapien
tcctccccaacacggcccacgagct

SEQ ID NO: 3477465 - DNA, 25 bp, Homo sapien
ccttgcccaccttttgcagggtcgt

SEQ ID NO: 3477466 - DNA, 25 bp, Homo sapien
catgtgggggcgtgggcggcttggg

SEQ ID NO: 3477467 - DNA, 25 bp, Homo sapien
gtgaacagggaaccatgtgggggcg

SEQ ID NO: 3477468 - DNA, 25 bp, Homo sapien
gaacagggaaccatgtgggggcgtg

SEQ ID NO: 3477469 - DNA, 25 bp, Homo sapien
gaaccatgtgggggcgtgggcggct

SEQ ID NO: 3477470 - DNA, 25 bp, Homo sapien
tgcaactcaggtccggcaggcacat

SEQ ID NO: 3477471 - DNA, 25 bp, Homo sapien
acctcctgtcggaggtgatgtgtga

SEQ ID NO: 3477472 - DNA, 25 bp, Homo sapien
ggtgggctgcccgagcctgtttctt

SEQ ID NO: 3477473 - DNA, 25 bp, Homo sapien
tccggcaggcacatcctcaaggcgg

SEQ ID NO: 3477474 - DNA, 25 bp, Homo sapien
ccagggcaaccctccctccaagagg

SEQ ID NO: 3477475 - DNA, 25 bp, Homo sapien
ataaacagatgggctcagtgctctg

SEQ ID NO: 3477476 - DNA, 25 bp, Homo sapien
taaacagatgggctcagtgctctgc

SEQ ID NO: 3477477 - DNA, 25 bp, Homo sapien
cagggcaaccctccctccaagaggg

SEQ ID NO: 3477478 - DNA, 25 bp, Homo sapien
agctagcacagctcggttgtgggca

SEQ ID NO: 3477479 - DNA, 25 bp, Homo sapien
gcacttgactggtgtcatgcgcaca

SEQ ID NO: 3477480 - DNA, 25 bp, Homo sapien
cgttgtagtagtcctcctctcgaaa

SEQ ID NO: 3477481 - DNA, 25 bp, Homo sapien
gatactggcgcccatctggtccaga

SEQ ID NO: 3477482 - DNA, 25 bp, Homo sapien
gcagcaacaggtctcggaggtcctt

SEQ ID NO: 3477483 - DNA, 25 bp, Homo sapien
aggtctcggaggtccttgcaggcct

SEQ ID NO: 3477484 - DNA, 25 bp, Homo sapien
cagcaacaggtctcggaggtccttg

SEQ ID NO: 3477485 - DNA, 25 bp, Homo sapien
caacaggtctcggaggtccttgcag

SEQ ID NO: 3477486 - DNA, 25 bp, Homo sapien
agcaccgttgtacgccacgttcagc

SEQ ID NO: 3477487 - DNA, 25 bp, Homo sapien
cacctgccgccgtcagcgggttgtt

SEQ ID NO: 3477488 - DNA, 25 bp, Homo sapien
tgcgtcactgaggtgtttcctgcca

SEQ ID NO: 3477489 - DNA, 25 bp, Homo sapien
tgcagctgccggttgcggtccagct

SEQ ID NO: 3477490 - DNA, 25 bp, Homo sapien
ctggctgcagagtgcgatcaggtaa

SEQ ID NO: 3477491 - DNA, 25 bp, Homo sapien
gctgcagagtgcgatcaggtaactg

SEQ ID NO: 3477492 - DNA, 25 bp, Homo sapien
gagtgcgatcaggtaactgcaatga

SEQ ID NO: 3477493 - DNA, 25 bp, Homo sapien
gaggcagggactaatactaaaattc

SEQ ID NO: 3477494 - DNA, 25 bp, Homo sapien
gagagaaagtcgatgccattcagta

SEQ ID NO: 3477495 - DNA, 25 bp, Homo sapien
aaagtcgatgccattcagtagagct

SEQ ID NO: 3477496 - DNA, 25 bp, Homo sapien
aggagagagaaagtcgatgccattc

SEQ ID NO: 3477497 - DNA, 25 bp, Homo sapien
gagaaagtcgatgccattcagtaga

SEQ ID NO: 3477498 - DNA, 25 bp, Homo sapien
cagtattctgacaccgccgtcccct

SEQ ID NO: 3477499 - DNA, 25 bp, Homo sapien
caccacccgggcaccaccttcagca

SEQ ID NO: 3477500 - DNA, 25 bp, Homo sapien
acctggcggccctctgagctcagct

SEQ ID NO: 3477501 - DNA, 25 bp, Homo sapien
ccccaagtctcgcaagacctggcgg

SEQ ID NO: 3477502 - DNA, 25 bp, Homo sapien
ccttgcgccaaggattaagggtggc

SEQ ID NO: 3477503 - DNA, 25 bp, Homo sapien
ggagctcaaggtgtcgctgaacccg

SEQ ID NO: 3477504 - DNA, 25 bp, Homo sapien
gaggttccgctggacttcactgagg

SEQ ID NO: 3477505 - DNA, 25 bp, Homo sapien
tccagatcccgcagtaggagctcaa

SEQ ID NO: 3477506 - DNA, 25 bp, Homo sapien
cttcccagctgctccaggagggccc

SEQ ID NO: 3477507 - DNA, 25 bp, Homo sapien
tcagcttccagagcttcccagctgc

SEQ ID NO: 3477508 - DNA, 25 bp, Homo sapien
tcccagctgctccaggagggccctg

SEQ ID NO: 3477509 - DNA, 25 bp, Homo sapien
ccagctgctccaggagggccctgac

SEQ ID NO: 3477510 - DNA, 25 bp, Homo sapien
cataagatgtgagccccttggtgac

SEQ ID NO: 3477511 - DNA, 25 bp, Homo sapien
cctaggagggcaactggctcagcta

SEQ ID NO: 3477512 - DNA, 25 bp, Homo sapien
tctttctagagggagcagtgcaagc

SEQ ID NO: 3477513 - DNA, 25 bp, Homo sapien
ggtcacatagctaggtgcctgccgc

SEQ ID NO: 3477514 - DNA, 25 bp, Homo sapien
tgtgagggcatcctcggtgtccaca

SEQ ID NO: 3477515 - DNA, 25 bp, Homo sapien
tgtccacaggtgagcataaggcagg

SEQ ID NO: 3477516 - DNA, 25 bp, Homo sapien
gaaagcaccaatgtgagggcatcct

SEQ ID NO: 3477517 - DNA, 25 bp, Homo sapien
ggatgaggagaaagcaccaatgtga

SEQ ID NO: 3477518 - DNA, 25 bp, Homo sapien
tgcatctgcctcgaggggctaccaa

SEQ ID NO: 3477519 - DNA, 25 bp, Homo sapien
catctgcctcgaggggctaccaagc

SEQ ID NO: 3477520 - DNA, 25 bp, Homo sapien
gtgcatctgcctcgaggggctacca

SEQ ID NO: 3477521 - DNA, 25 bp, Homo sapien
aggtgcatctgcctcgaggggctac

SEQ ID NO: 3477522 - DNA, 25 bp, Homo sapien
aaggcacacggctttttaatagcag

SEQ ID NO: 3477523 - DNA, 25 bp, Homo sapien
ggcacacggctttttaatagcagca

SEQ ID NO: 3477524 - DNA, 25 bp, Homo sapien
gaaggcacacggctttttaatagca

SEQ ID NO: 3477525 - DNA, 25 bp, Homo sapien
tagaaggcacacggctttttaatag

SEQ ID NO: 3477526 - DNA, 25 bp, Homo sapien
caccgtgccccgctgagagtcttat

SEQ ID NO: 3477527 - DNA, 25 bp, Homo sapien
ggttcctcctgaatctatccctggg

SEQ ID NO: 3477528 - DNA, 25 bp, Homo sapien
cgctgagagtcttatcctctggaaa

SEQ ID NO: 3477529 - DNA, 25 bp, Homo sapien
tgggttcctcctgaatctatccctg

SEQ ID NO: 3477530 - DNA, 25 bp, Homo sapien
tagggacaaggttcatcacagccac

SEQ ID NO: 3477531 - DNA, 25 bp, Homo sapien
ctggatcagcaacccagtgcccggg

SEQ ID NO: 3477532 - DNA, 25 bp, Homo sapien
ggtagggacaaggttcatcacagcc

SEQ ID NO: 3477533 - DNA, 25 bp, Homo sapien
agctggatcagcaacccagtgcccg

SEQ ID NO: 3477534 - DNA, 25 bp, Homo sapien
acaggactattgtgcggtcccctcc

SEQ ID NO: 3477535 - DNA, 25 bp, Homo sapien
tggtcccaaagcttcagcctccaag

SEQ ID NO: 3477536 - DNA, 25 bp, Homo sapien
cctgcagaggatttctcctggcctc

SEQ ID NO: 3477537 - DNA, 25 bp, Homo sapien
gcatatcagtacagggtgtggacca

SEQ ID NO: 3477538 - DNA, 25 bp, Homo sapien
gaggaggagagtcacattcttctcc

SEQ ID NO: 3477539 - DNA, 25 bp, Homo sapien
ctgggcaaagaagtgggtgagagga

SEQ ID NO: 3477540 - DNA, 25 bp, Homo sapien
gatgtgcctcttccattggcataaa

SEQ ID NO: 3477541 - DNA, 25 bp, Homo sapien
ccagatgtgcctcttccattggcat

SEQ ID NO: 3477542 - DNA, 25 bp, Homo sapien
agttaacgaggctgtgtcctgcaga

SEQ ID NO: 3477543 - DNA, 25 bp, Homo sapien
agagttaacgaggctgtgtcctgca

SEQ ID NO: 3477544 - DNA, 25 bp, Homo sapien
gagttaacgaggctgtgtcctgcag

SEQ ID NO: 3477545 - DNA, 25 bp, Homo sapien
gttaacgaggctgtgtcctgcagat

SEQ ID NO: 3477546 - DNA, 25 bp, Homo sapien
caatgcccagctttgggttaaactt

SEQ ID NO: 3477547 - DNA, 25 bp, Homo sapien
atcaatgcccagctttgggttaaac

SEQ ID NO: 3477548 - DNA, 25 bp, Homo sapien
tcaatgcccagctttgggttaaact

SEQ ID NO: 3477549 - DNA, 25 bp, Homo sapien
ttaccaaggagatcggaggccgtgt

SEQ ID NO: 3477550 - DNA, 25 bp, Homo sapien
acaggttcgccgtgtgcctggcaga

SEQ ID NO: 3477551 - DNA, 25 bp, Homo sapien
agggcacagcccaagtacaggttcg

SEQ ID NO: 3477552 - DNA, 25 bp, Homo sapien
ccaaccaaggctgttatcagaggga

SEQ ID NO: 3477553 - DNA, 25 bp, Homo sapien
gtcttcgtgttccacaacatcattg

SEQ ID NO: 3477554 - DNA, 25 bp, Homo sapien
attgttcaccgccaggatcctgtct

SEQ ID NO: 3477555 - DNA, 25 bp, Homo sapien
caggtggaagccaaaactcttgccc

SEQ ID NO: 3477556 - DNA, 25 bp, Homo sapien
cctgaagaccctggcgctgggcaga

SEQ ID NO: 3477557 - DNA, 25 bp, Homo sapien
tactgtcagcaacacccgagggctg

SEQ ID NO: 3477558 - DNA, 25 bp, Homo sapien
tgtgcatgccgtgccaatactgtca

SEQ ID NO: 3477559 - DNA, 25 bp, Homo sapien
tctttcactatgtggcacagccggg

SEQ ID NO: 3477560 - DNA, 25 bp, Homo sapien
gagctcgggccacgtcatgtgcatg

SEQ ID NO: 3477561 - DNA, 25 bp, Homo sapien
ctccagtacttagcaccaaccagaa

SEQ ID NO: 3477562 - DNA, 25 bp, Homo sapien
gctcctccagtacttagcaccaacc

SEQ ID NO: 3477563 - DNA, 25 bp, Homo sapien
tcctccagtacttagcaccaaccag

SEQ ID NO: 3477564 - DNA, 25 bp, Homo sapien
tccagtacttagcaccaaccagaaa

SEQ ID NO: 3477565 - DNA, 25 bp, Homo sapien
ggtgagttggttgtgagtgaacttc

SEQ ID NO: 3477566 - DNA, 25 bp, Homo sapien
tgagttggttgtgagtgaacttctc

SEQ ID NO: 3477567 - DNA, 25 bp, Homo sapien
gagttggttgtgagtgaacttctcc

SEQ ID NO: 3477568 - DNA, 25 bp, Homo sapien
gtgagttggttgtgagtgaacttct

SEQ ID NO: 3477569 - DNA, 25 bp, Homo sapien
tgataaaggtaggagaccagataag

SEQ ID NO: 3477570 - DNA, 25 bp, Homo sapien
ggcatcagtataacacctgggcagg

SEQ ID NO: 3477571 - DNA, 25 bp, Homo sapien
gaccagataaggaggttaggcgcat

SEQ ID NO: 3477572 - DNA, 25 bp, Homo sapien
caggcactaagtggagcctggcaca

SEQ ID NO: 3477573 - DNA, 25 bp, Homo sapien
gggcaatcccagctggcgacactgt

SEQ ID NO: 3477574 - DNA, 25 bp, Homo sapien
gcaatcccagctggcgacactgttc

SEQ ID NO: 3477575 - DNA, 25 bp, Homo sapien
caggggcaatcccagctggcgacac

SEQ ID NO: 3477576 - DNA, 25 bp, Homo sapien
atcccagctggcgacactgttcttc

SEQ ID NO: 3477577 - DNA, 25 bp, Homo sapien
gtgtatatacgcttgtgtgcccacc

SEQ ID NO: 3477578 - DNA, 25 bp, Homo sapien
gctcagacagggacacctcttcggt

SEQ ID NO: 3477579 - DNA, 25 bp, Homo sapien
cctcttcggtgcactgaaaggtgta

SEQ ID NO: 3477580 - DNA, 25 bp, Homo sapien
ctaggccactgtgtacacaccaggg

SEQ ID NO: 3477581 - DNA, 25 bp, Homo sapien
cagccttcttggctggcagtcccgg

SEQ ID NO: 3477582 - DNA, 25 bp, Homo sapien
ttggctggcagtcccgggtccacct

SEQ ID NO: 3477583 - DNA, 25 bp, Homo sapien
cagggtcgacgacagtgagggagac

SEQ ID NO: 3477584 - DNA, 25 bp, Homo sapien
tgaagaagcggtccgcctcagggtc

SEQ ID NO: 3477585 - DNA, 25 bp, Homo sapien
cagggagagcaaatctttcggacct

SEQ ID NO: 3477586 - DNA, 25 bp, Homo sapien
gggagagcaaatctttcggacctca

SEQ ID NO: 3477587 - DNA, 25 bp, Homo sapien
agggagagcaaatctttcggacctc

SEQ ID NO: 3477588 - DNA, 25 bp, Homo sapien
gggtcctctgtctcaaccagtgagg

SEQ ID NO: 3477589 - DNA, 25 bp, Homo sapien
ttgtgtcttcaagtgaagggtcctc

SEQ ID NO: 3477590 - DNA, 25 bp, Homo sapien
agggacagaaggcacgcttgtgtct

SEQ ID NO: 3477591 - DNA, 25 bp, Homo sapien
gaaggcacgcttgtgtcttcaagtg

SEQ ID NO: 3477592 - DNA, 25 bp, Homo sapien
actgagtcggaagccatagctgcca

SEQ ID NO: 3477593 - DNA, 25 bp, Homo sapien
cacacaactgagtcggaagccatag

SEQ ID NO: 3477594 - DNA, 25 bp, Homo sapien
ggccacacaactgagtcggaagcca

SEQ ID NO: 3477595 - DNA, 25 bp, Homo sapien
caactgagtcggaagccatagctgc

SEQ ID NO: 3477596 - DNA, 25 bp, Homo sapien
aggaagaccgatcaggcagcaaagg

SEQ ID NO: 3477597 - DNA, 25 bp, Homo sapien
ggaaagtttgctggctttaggctct

SEQ ID NO: 3477598 - DNA, 25 bp, Homo sapien
ggattcaagatccatggggcatcag

SEQ ID NO: 3477599 - DNA, 25 bp, Homo sapien
gcaaaggatcgaagggattcaagat

SEQ ID NO: 3477600 - DNA, 25 bp, Homo sapien
tccagaatcacgtctcccacttgca

SEQ ID NO: 3477601 - DNA, 25 bp, Homo sapien
aacaggatacccgttcacttccaga

SEQ ID NO: 3477602 - DNA, 25 bp, Homo sapien
aggatacccgttcacttccagaatc

SEQ ID NO: 3477603 - DNA, 25 bp, Homo sapien
tgtcccccaacaggatacccgttca

SEQ ID NO: 3477604 - DNA, 25 bp, Homo sapien
gtcccatctgtttcttcttcctcac

SEQ ID NO: 3477605 - DNA, 25 bp, Homo sapien
agtcccatctgtttcttcttcctca

SEQ ID NO: 3477606 - DNA, 25 bp, Homo sapien
ctacagtagatccgaggccagagcc

SEQ ID NO: 3477607 - DNA, 25 bp, Homo sapien
tacagtagatccgaggccagagccc

SEQ ID NO: 3477608 - DNA, 25 bp, Homo sapien
cagtagatccgaggccagagcccag

SEQ ID NO: 3477609 - DNA, 25 bp, Homo sapien
gtagatccgaggccagagcccagtc

SEQ ID NO: 3477610 - DNA, 25 bp, Homo sapien
tttgcattacactcaagggtcctgg

SEQ ID NO: 3477611 - DNA, 25 bp, Homo sapien
tataacaaatgcaacggtgaccaag

SEQ ID NO: 3477612 - DNA, 25 bp, Homo sapien
tgaagacacggtagcccctgagtat

SEQ ID NO: 3477613 - DNA, 25 bp, Homo sapien
aatgctaaggcacccacagagggca

SEQ ID NO: 3477614 - DNA, 25 bp, Homo sapien
ttcatgtcctcacagccagatccag

SEQ ID NO: 3477615 - DNA, 25 bp, Homo sapien
tgtgggcgggaggttggcgcttctg

SEQ ID NO: 3477616 - DNA, 25 bp, Homo sapien
aggttggcgcttctggggtgggtca

SEQ ID NO: 3477617 - DNA, 25 bp, Homo sapien
ggttggcgcttctggggtgggtcat

SEQ ID NO: 3477618 - DNA, 25 bp, Homo sapien
ccttgtgggcgggaggttggcgctt

SEQ ID NO: 3477619 - DNA, 25 bp, Homo sapien
gtctgcgcagtagccagaaaccaag

SEQ ID NO: 3477620 - DNA, 25 bp, Homo sapien
tgcgcagtagccagaaaccaagact

SEQ ID NO: 3477621 - DNA, 25 bp, Homo sapien
tggagtctgcgcagtagccagaaac

SEQ ID NO: 3477622 - DNA, 25 bp, Homo sapien
ccaaggtggagtctgcgcagtagcc

SEQ ID NO: 3477623 - DNA, 25 bp, Homo sapien
cgggccaccggcttcgagcagctcg

SEQ ID NO: 3477624 - DNA, 25 bp, Homo sapien
cttcgagcagctcgcgtgcccacag

SEQ ID NO: 3477625 - DNA, 25 bp, Homo sapien
ccggaaagccgcggccaggtttctg

SEQ ID NO: 3477626 - DNA, 25 bp, Homo sapien
ggccggactgggcagcgacgatccc

SEQ ID NO: 3477627 - DNA, 25 bp, Homo sapien
ccgggagtgcgcgggacgcgcccct

SEQ ID NO: 3477628 - DNA, 25 bp, Homo sapien
agtgcgcgggacgcgccccttcaga

SEQ ID NO: 3477629 - DNA, 25 bp, Homo sapien
gagtgcgcgggacgcgccccttcag

SEQ ID NO: 3477630 - DNA, 25 bp, Homo sapien
gggagtgcgcgggacgcgccccttc

SEQ ID NO: 3477631 - DNA, 25 bp, Homo sapien
ctgcgagcgagggagagaagcaggg

SEQ ID NO: 3477632 - DNA, 25 bp, Homo sapien
agcgagggagagaagcagggcgtga

SEQ ID NO: 3477633 - DNA, 25 bp, Homo sapien
gggagagaagcagggcgtgaaggag

SEQ ID NO: 3477634 - DNA, 25 bp, Homo sapien
cgagcgagggagagaagcagggcgt

SEQ ID NO: 3477635 - DNA, 25 bp, Homo sapien
cagggtcggagcccaggcgggtccg

SEQ ID NO: 3477636 - DNA, 25 bp, Homo sapien
aggcgggtccgccggctcggctcga

SEQ ID NO: 3477637 - DNA, 25 bp, Homo sapien
tgggcagggtcggagcccaggcggg

SEQ ID NO: 3477638 - DNA, 25 bp, Homo sapien
cctgggcagggtcggagcccaggcg

SEQ ID NO: 3477639 - DNA, 25 bp, Homo sapien
agagctcttcttcacgttgccggcc

SEQ ID NO: 3477640 - DNA, 25 bp, Homo sapien
agctcttcttcacgttgccggccat

SEQ ID NO: 3477641 - DNA, 25 bp, Homo sapien
gagctcttcttcacgttgccggcca

SEQ ID NO: 3477642 - DNA, 25 bp, Homo sapien
tggtggtgcggctggaaggcgtcct

SEQ ID NO: 3477643 - DNA, 25 bp, Homo sapien
atcttcttgtccaccgtccccggcg

SEQ ID NO: 3477644 - DNA, 25 bp, Homo sapien
ggaaggcgtccttcatgagcccaat

SEQ ID NO: 3477645 - DNA, 25 bp, Homo sapien
gcgtccttcatgagcccaatcaggc

SEQ ID NO: 3477646 - DNA, 25 bp, Homo sapien
caacagcgggcgctcagccggcctt

SEQ ID NO: 3477647 - DNA, 25 bp, Homo sapien
aacagcgggcgctcagccggccttt

SEQ ID NO: 3477648 - DNA, 25 bp, Homo sapien
tgcaacagcgggcgctcagccggcc

SEQ ID NO: 3477649 - DNA, 25 bp, Homo sapien
cctgcaacagcgggcgctcagccgg

SEQ ID NO: 3477650 - DNA, 25 bp, Homo sapien
tcaacgaacaagtttaaagtcagga

SEQ ID NO: 3477651 - DNA, 25 bp, Homo sapien
tcttaaataagatgcccaacttcca

SEQ ID NO: 3477652 - DNA, 25 bp, Homo sapien
ccttcatagttgaagaacatcataa

SEQ ID NO: 3477653 - DNA, 25 bp, Homo sapien
tggcatacagccttcctatatcaag

SEQ ID NO: 3477654 - DNA, 25 bp, Homo sapien
aatccgccaagcttatccaaaataa

SEQ ID NO: 3477655 - DNA, 25 bp, Homo sapien
aaagaagggtttcaccacatgccca

SEQ ID NO: 3477656 - DNA, 25 bp, Homo sapien
aaataaagaagggtttcaccacatg

SEQ ID NO: 3477657 - DNA, 25 bp, Homo sapien
ataaagaagggtttcaccacatgcc

SEQ ID NO: 3477658 - DNA, 25 bp, Homo sapien
ctagtataaatttctttttgcttct

SEQ ID NO: 3477659 - DNA, 25 bp, Homo sapien
tattaaaaacaccatgccacttata

SEQ ID NO: 3477660 - DNA, 25 bp, Homo sapien
tcacccaacagcacttattaaaaac

SEQ ID NO: 3477661 - DNA, 25 bp, Homo sapien
tcaatacaatgtatgctctgaaaac

SEQ ID NO: 3477662 - DNA, 25 bp, Homo sapien
gtagttactacagtatacttctcaa

SEQ ID NO: 3477663 - DNA, 25 bp, Homo sapien
tccttgaagaggcttatggtttgct

SEQ ID NO: 3477664 - DNA, 25 bp, Homo sapien
taggtatctggtagcaggtctaaga

SEQ ID NO: 3477665 - DNA, 25 bp, Homo sapien
tcttgacaagatagtacggagatgc

SEQ ID NO: 3477666 - DNA, 25 bp, Homo sapien
taaggtgggctattctttagcgcca

SEQ ID NO: 3477667 - DNA, 25 bp, Homo sapien
tcagaggtaagcaaatcaatcagag

SEQ ID NO: 3477668 - DNA, 25 bp, Homo sapien
tactatcagtaaatgatttttcaga

SEQ ID NO: 3477669 - DNA, 25 bp, Homo sapien
aggttctccaaaggacctactgcct

SEQ ID NO: 3477670 - DNA, 25 bp, Homo sapien
gttagggatagtacaacgtcatcca

SEQ ID NO: 3477671 - DNA, 25 bp, Homo sapien
catgatctggtatctaggaaagcct

SEQ ID NO: 3477672 - DNA, 25 bp, Homo sapien
tgtggagtaccagatcaacatacag

SEQ ID NO: 3477673 - DNA, 25 bp, Homo sapien
gtaaaactacctctaattgcatgtg

SEQ ID NO: 3477674 - DNA, 25 bp, Homo sapien
actagagccaataagtaagttctgc

SEQ ID NO: 3477675 - DNA, 25 bp, Homo sapien
aaaaggtctctaacaactgtttatg

SEQ ID NO: 3477676 - DNA, 25 bp, Homo sapien
ctctaacaactgtttatgataaaac

SEQ ID NO: 3477677 - DNA, 25 bp, Homo sapien
ccacgaatgaaacataaaaggtctc

SEQ ID NO: 3477678 - DNA, 25 bp, Homo sapien
accacgaatgaaacataaaaggtct

SEQ ID NO: 3477679 - DNA, 25 bp, Homo sapien
actagcactcagctgtccacaactc

SEQ ID NO: 3477680 - DNA, 25 bp, Homo sapien
aactagcactcagctgtccacaact

SEQ ID NO: 3477681 - DNA, 25 bp, Homo sapien
tctactttggcttattcaaactagt

SEQ ID NO: 3477682 - DNA, 25 bp, Homo sapien
tcaagattctttctatgtactatat

SEQ ID NO: 3477683 - DNA, 25 bp, Homo sapien
tatgagtcaacaagtttctactttg

SEQ ID NO: 3477684 - DNA, 25 bp, Homo sapien
gcaaacctccaccaaccgagttcaa

SEQ ID NO: 3477685 - DNA, 25 bp, Homo sapien
ctgcactgagtatggaagtaatacc

SEQ ID NO: 3477686 - DNA, 25 bp, Homo sapien
gcaatttacgcattaatctgcactg

SEQ ID NO: 3477687 - DNA, 25 bp, Homo sapien
taaaacttgggtgtaatagagacca

SEQ ID NO: 3477688 - DNA, 25 bp, Homo sapien
cctggcaacatttcaatcctggttt

SEQ ID NO: 3477689 - DNA, 25 bp, Homo sapien
tcttatttgcccacctctcttcatt

SEQ ID NO: 3477690 - DNA, 25 bp, Homo sapien
ctccctagtctcatcaatctaacat

SEQ ID NO: 3477691 - DNA, 25 bp, Homo sapien
tcaatctaacatggcctagaatact

SEQ ID NO: 3477692 - DNA, 25 bp, Homo sapien
ggaattacaccatacctatccccaa

SEQ ID NO: 3477693 - DNA, 25 bp, Homo sapien
tgaggtcaggagtagtggctcatac

SEQ ID NO: 3477694 - DNA, 25 bp, Homo sapien
cagtgagacccgatgtccacaaaaa

SEQ ID NO: 3477695 - DNA, 25 bp, Homo sapien
aacacagtgagacccgatgtccaca

SEQ ID NO: 3477696 - DNA, 25 bp, Homo sapien
caaaaggatcacttaagcacaggag

SEQ ID NO: 3477697 - DNA, 25 bp, Homo sapien
gatttcaattctctataatgtgccc

SEQ ID NO: 3477698 - DNA, 25 bp, Homo sapien
cacctcactgcgaaccctgcttcct

SEQ ID NO: 3477699 - DNA, 25 bp, Homo sapien
tccacgcccagtcgaaaatttcatt

SEQ ID NO: 3477700 - DNA, 25 bp, Homo sapien
taatagcaatattagtcactttcct

SEQ ID NO: 3477701 - DNA, 25 bp, Homo sapien
cactagactggatgagtgttctgca

SEQ ID NO: 3477702 - DNA, 25 bp, Homo sapien
caggaaagacgttcttgtagccagt

SEQ ID NO: 3477703 - DNA, 25 bp, Homo sapien
ctttgtatactaaagcctggcagga

SEQ ID NO: 3477704 - DNA, 25 bp, Homo sapien
cacactactaggtatctctagcagg

SEQ ID NO: 3477705 - DNA, 25 bp, Homo sapien
tttttcatgacagttctgagcgctg

SEQ ID NO: 3477706 - DNA, 25 bp, Homo sapien
gactggagttacgagtttatggaaa

SEQ ID NO: 3477707 - DNA, 25 bp, Homo sapien
tagctatgttacttcacggtcctgt

SEQ ID NO: 3477708 - DNA, 25 bp, Homo sapien
gccatgattctgcaggtgaagctat

SEQ ID NO: 3477709 - DNA, 25 bp, Homo sapien
gggaaggcagcaacccacatgagag

SEQ ID NO: 3477710 - DNA, 25 bp, Homo sapien
aggcagcaacccacatgagagcctc

SEQ ID NO: 3477711 - DNA, 25 bp, Homo sapien
atgggaaggcagcaacccacatgag

SEQ ID NO: 3477712 - DNA, 25 bp, Homo sapien
tgagagcctccaacactcccctcat

SEQ ID NO: 3477713 - DNA, 25 bp, Homo sapien
gaagatgagggacagtttggttagg

SEQ ID NO: 3477714 - DNA, 25 bp, Homo sapien
agatgagggacagtttggttaggtt

SEQ ID NO: 3477715 - DNA, 25 bp, Homo sapien
aagatgagggacagtttggttaggt

SEQ ID NO: 3477716 - DNA, 25 bp, Homo sapien
taatccgaaatgtgtctccctgaaa

SEQ ID NO: 3477717 - DNA, 25 bp, Homo sapien
aaagagtccacttggaaagattcct

SEQ ID NO: 3477718 - DNA, 25 bp, Homo sapien
ctttagtaatccgaaatgtgtctcc

SEQ ID NO: 3477719 - DNA, 25 bp, Homo sapien
ttccgcagcatctgctttagtaatc

SEQ ID NO: 3477720 - DNA, 25 bp, Homo sapien
gcctgtcgaaagctcttccaaggga

SEQ ID NO: 3477721 - DNA, 25 bp, Homo sapien
gcacttcatgtagagcctgtcgaaa

SEQ ID NO: 3477722 - DNA, 25 bp, Homo sapien
ccagcccagaactgatgggatgcac

SEQ ID NO: 3477723 - DNA, 25 bp, Homo sapien
caggtcagatcaatagtggatttca

SEQ ID NO: 3477724 - DNA, 25 bp, Homo sapien
tgcaaattggcacagacaacaccag

SEQ ID NO: 3477725 - DNA, 25 bp, Homo sapien
caaactgaaaaccaggatagggcct

SEQ ID NO: 3477726 - DNA, 25 bp, Homo sapien
gcttatagggagaaacttgacacaa

SEQ ID NO: 3477727 - DNA, 25 bp, Homo sapien
gacacatgtgttcaggagattaaaa

SEQ ID NO: 3477728 - DNA, 25 bp, Homo sapien
gccgagctttcacttcgtcatacgt

SEQ ID NO: 3477729 - DNA, 25 bp, Homo sapien
tcacttcgtcatacgtcaaaaaagc

SEQ ID NO: 3477730 - DNA, 25 bp, Homo sapien
tgtagccaggatgagttacagcaag

SEQ ID NO: 3477731 - DNA, 25 bp, Homo sapien
catacgtcaaaaaagccatgtagcc

SEQ ID NO: 3477732 - DNA, 25 bp, Homo sapien
ttccctgaagccatcaatcagtgct

SEQ ID NO: 3477733 - DNA, 25 bp, Homo sapien
tgagggattgtctggagaatgttcc

SEQ ID NO: 3477734 - DNA, 25 bp, Homo sapien
cactgacccagacgagtacagctca

SEQ ID NO: 3477735 - DNA, 25 bp, Homo sapien
agtaacatacccaatagcccactga

SEQ ID NO: 3477736 - DNA, 25 bp, Homo sapien
cactttgatatggtcttggggagtt

SEQ ID NO: 3477737 - DNA, 25 bp, Homo sapien
ttcacataagccagtcagatcagga

SEQ ID NO: 3477738 - DNA, 25 bp, Homo sapien
taagccagtcagatcaggattctga

SEQ ID NO: 3477739 - DNA, 25 bp, Homo sapien
ggattctgatttcgtccatcaggaa

SEQ ID NO: 3477740 - DNA, 25 bp, Homo sapien
tgtggagcccatctcacagtataat

SEQ ID NO: 3477741 - DNA, 25 bp, Homo sapien
gaatgtggagcccatctcacagtat

SEQ ID NO: 3477742 - DNA, 25 bp, Homo sapien
tacatccttatcattttcagcacat

SEQ ID NO: 3477743 - DNA, 25 bp, Homo sapien
tctttacatccttatcattttcagc

SEQ ID NO: 3477744 - DNA, 25 bp, Homo sapien
gatcaaacggatctaccacgatggg

SEQ ID NO: 3477745 - DNA, 25 bp, Homo sapien
tgccactccctctaggatcaaacgg

SEQ ID NO: 3477746 - DNA, 25 bp, Homo sapien
gagagtatcatcagctcgttcatca

SEQ ID NO: 3477747 - DNA, 25 bp, Homo sapien
atttcacatcggcagaaaggacagc

SEQ ID NO: 3477748 - DNA, 25 bp, Homo sapien
atgggaacacttaaactacaaatgg

SEQ ID NO: 3477749 - DNA, 25 bp, Homo sapien
caaataccatgggaacacttaaact

SEQ ID NO: 3477750 - DNA, 25 bp, Homo sapien
actctcctaaagctgtggatggcaa

SEQ ID NO: 3477751 - DNA, 25 bp, Homo sapien
tctttcaactctcctaaagctgtgg

SEQ ID NO: 3477752 - DNA, 25 bp, Homo sapien
cagaagcacttgagggaacacatac

SEQ ID NO: 3477753 - DNA, 25 bp, Homo sapien
gagaatggagaaggcggccgttcca

SEQ ID NO: 3477754 - DNA, 25 bp, Homo sapien
cagaaggtcaagtcgtggtggcacc

SEQ ID NO: 3477755 - DNA, 25 bp, Homo sapien
tactcgctgcggcagaaggtcaagt

SEQ ID NO: 3477756 - DNA, 25 bp, Homo sapien
ccatgagtctccaaggcggctagag

SEQ ID NO: 3477757 - DNA, 25 bp, Homo sapien
tgcttccgagcctaggcacatctgg

SEQ ID NO: 3477758 - DNA, 25 bp, Homo sapien
tatccagactgaacgtgcttccgag

SEQ ID NO: 3477759 - DNA, 25 bp, Homo sapien
tgaggtcgggattctgctccaacag

SEQ ID NO: 3477760 - DNA, 25 bp, Homo sapien
actgaaagcttggcctcctgggccc

SEQ ID NO: 3477761 - DNA, 25 bp, Homo sapien
ctggcccacacatatttcttaacag

SEQ ID NO: 3477762 - DNA, 25 bp, Homo sapien
tcttaacaggttagatagtttcaaa

SEQ ID NO: 3477763 - DNA, 25 bp, Homo sapien
tttcttaacaggttagatagtttca

SEQ ID NO: 3477764 - DNA, 25 bp, Homo sapien
aacttatcacaaaatttcaacccat

SEQ ID NO: 3477765 - DNA, 25 bp, Homo sapien
taggaattatgttatagcatctctg

SEQ ID NO: 3477766 - DNA, 25 bp, Homo sapien
ccagccatatttcttgagggtagga

SEQ ID NO: 3477767 - DNA, 25 bp, Homo sapien
taaacttctatccacacatatttct

SEQ ID NO: 3477768 - DNA, 25 bp, Homo sapien
atcacatctgaccaaacgcttaggg

SEQ ID NO: 3477769 - DNA, 25 bp, Homo sapien
caataacagatacaaacctaactct

SEQ ID NO: 3477770 - DNA, 25 bp, Homo sapien
ctaactctcaatgccatgcccaggg

SEQ ID NO: 3477771 - DNA, 25 bp, Homo sapien
catgcccaggggttatcacatctga

SEQ ID NO: 3477772 - DNA, 25 bp, Homo sapien
attttggggtggtcacactctggac

SEQ ID NO: 3477773 - DNA, 25 bp, Homo sapien
acactctggacctactaatgggctg

SEQ ID NO: 3477774 - DNA, 25 bp, Homo sapien
cctactaatgggctgctattcatac

SEQ ID NO: 3477775 - DNA, 25 bp, Homo sapien
gggtggtcacactctggacctacta

SEQ ID NO: 3477776 - DNA, 25 bp, Homo sapien
aagtaacaactccactgtacaaaat

SEQ ID NO: 3477777 - DNA, 25 bp, Homo sapien
gtaacaactccactgtacaaaatat

SEQ ID NO: 3477778 - DNA, 25 bp, Homo sapien
tacaagtaacaactccactgtacaa

SEQ ID NO: 3477779 - DNA, 25 bp, Homo sapien
caagtaacaactccactgtacaaaa

SEQ ID NO: 3477780 - DNA, 25 bp, Homo sapien
ccaaaggccgtagaggcctggaaga

SEQ ID NO: 3477781 - DNA, 25 bp, Homo sapien
ctgggatgtatccaaaggccgtaga

SEQ ID NO: 3477782 - DNA, 25 bp, Homo sapien
gatgtatccaaaggccgtagaggcc

SEQ ID NO: 3477783 - DNA, 25 bp, Homo sapien
tatccaaaggccgtagaggcctgga

SEQ ID NO: 3477784 - DNA, 25 bp, Homo sapien
tatacattgcttcatacgtacagct

SEQ ID NO: 3477785 - DNA, 25 bp, Homo sapien
caatctgctggtcgcaatcacatgc

SEQ ID NO: 3477786 - DNA, 25 bp, Homo sapien
tgctctcggtgatagatggcgcctg

SEQ ID NO: 3477787 - DNA, 25 bp, Homo sapien
tggcgcctgggactgaatattatac

SEQ ID NO: 3477788 - DNA, 25 bp, Homo sapien
tgttgtaggatcaccatccagagac

SEQ ID NO: 3477789 - DNA, 25 bp, Homo sapien
gactcctcgggaccagtgttggcat

SEQ ID NO: 3477790 - DNA, 25 bp, Homo sapien
gaggagctggcattagagatatctg

SEQ ID NO: 3477791 - DNA, 25 bp, Homo sapien
cagcacggccggcacaggtggcttt

SEQ ID NO: 3477792 - DNA, 25 bp, Homo sapien
aacccaaagtagtctggagactcac

SEQ ID NO: 3477793 - DNA, 25 bp, Homo sapien
aaacccaaagtagtctggagactca

SEQ ID NO: 3477794 - DNA, 25 bp, Homo sapien
gggagctccacgcaggctgccgtgg

SEQ ID NO: 3477795 - DNA, 25 bp, Homo sapien
ccacggcagcctgcgtggagctccc

SEQ ID NO: 3477796 - DNA, 25 bp, Homo sapien
agctgccagctttccgttcagagtt

SEQ ID NO: 3477797 - DNA, 25 bp, Homo sapien
gattctccgcgggaatggttttgga

SEQ ID NO: 3477798 - DNA, 25 bp, Homo sapien
gggaacttgggaaccttcagtgaca

SEQ ID NO: 3477799 - DNA, 25 bp, Homo sapien
ctctcgggaacttgggaaccttcag

SEQ ID NO: 3477800 - DNA, 25 bp, Homo sapien
tcctggtaggagtacccctgactca

SEQ ID NO: 3477801 - DNA, 25 bp, Homo sapien
gatgtttttggccatctcgatgttg

SEQ ID NO: 3477802 - DNA, 25 bp, Homo sapien
ggttctcgatctcactggagagctg

SEQ ID NO: 3477803 - DNA, 25 bp, Homo sapien
aatggaaacaaattcccggaggatg

SEQ ID NO: 3477804 - DNA, 25 bp, Homo sapien
tgttccccaggtaggttatcatgta

SEQ ID NO: 3477805 - DNA, 25 bp, Homo sapien
tggtcctctaaacctgcagcaggga

SEQ ID NO: 3477806 - DNA, 25 bp, Homo sapien
gaagactttagctatgcacatggta

SEQ ID NO: 3477807 - DNA, 25 bp, Homo sapien
tgtgaagtcaccaaaggaactcctg

SEQ ID NO: 3477808 - DNA, 25 bp, Homo sapien
aaagctttccggtattctggccaga

SEQ ID NO: 3477809 - DNA, 25 bp, Homo sapien
taaatagcatgtgaacgaagcttcc

SEQ ID NO: 3477810 - DNA, 25 bp, Homo sapien
gaaagactcatgacctacatcagaa

SEQ ID NO: 3477811 - DNA, 25 bp, Homo sapien
tgaagacacccatataagctgaaat

SEQ ID NO: 3477812 - DNA, 25 bp, Homo sapien
taggagtagctgaatgccaagagac

SEQ ID NO: 3477813 - DNA, 25 bp, Homo sapien
gaatactaactgaactcgagggatc

SEQ ID NO: 3477814 - DNA, 25 bp, Homo sapien
gccgctttatgccatgtagagaaga

SEQ ID NO: 3477815 - DNA, 25 bp, Homo sapien
tcacctaatggtgggctttgccgct

SEQ ID NO: 3477816 - DNA, 25 bp, Homo sapien
gattcaaagagccacacaggactca

SEQ ID NO: 3477817 - DNA, 25 bp, Homo sapien
caaaaccttgaatgctggcagatac

SEQ ID NO: 3477818 - DNA, 25 bp, Homo sapien
tattagccactaggaagggacaagc

SEQ ID NO: 3477819 - DNA, 25 bp, Homo sapien
cacagcacccagtcaaaggaaagat

SEQ ID NO: 3477820 - DNA, 25 bp, Homo sapien
ggaaagcatgagactggctgaatac

SEQ ID NO: 3477821 - DNA, 25 bp, Homo sapien
tacaacagcccaatgaatatgagaa

SEQ ID NO: 3477822 - DNA, 25 bp, Homo sapien
acaacagcccaatgaatatgagaaa

SEQ ID NO: 3477823 - DNA, 25 bp, Homo sapien
aagcatgagactggctgaatacaac

SEQ ID NO: 3477824 - DNA, 25 bp, Homo sapien
tattttaaggtcaaacgcagaggct

SEQ ID NO: 3477825 - DNA, 25 bp, Homo sapien
ttccagagtcagaaaggccaacggc

SEQ ID NO: 3477826 - DNA, 25 bp, Homo sapien
agtaaactactatgtggcgccaagg

SEQ ID NO: 3477827 - DNA, 25 bp, Homo sapien
taagggtgatacgaaaatcctccca

SEQ ID NO: 3477828 - DNA, 25 bp, Homo sapien
gaaaggactaggtgcaaagctctgc

SEQ ID NO: 3477829 - DNA, 25 bp, Homo sapien
taagaatacgaagtatgggccgggc

SEQ ID NO: 3477830 - DNA, 25 bp, Homo sapien
ccagaaaacagacgtaggaggtgcc

SEQ ID NO: 3477831 - DNA, 25 bp, Homo sapien
tgagaacattactgcagagcggccc

SEQ ID NO: 3477832 - DNA, 25 bp, Homo sapien
tacaaattgggactcttcattctgg

SEQ ID NO: 3477833 - DNA, 25 bp, Homo sapien
gcactcccaggctaagaatttcaaa

SEQ ID NO: 3477834 - DNA, 25 bp, Homo sapien
taaaatagtccacgaaaatctcacc

SEQ ID NO: 3477835 - DNA, 25 bp, Homo sapien
taaagctctgctattctctgtaaga

SEQ ID NO: 3477836 - DNA, 25 bp, Homo sapien
ttacagacatgggtgcttgaaaaag

SEQ ID NO: 3477837 - DNA, 25 bp, Homo sapien
ttttttacagacatgggtgcttgaa

SEQ ID NO: 3477838 - DNA, 25 bp, Homo sapien
atttttttacagacatgggtgcttg

SEQ ID NO: 3477839 - DNA, 25 bp, Homo sapien
ttttacagacatgggtgcttgaaaa

SEQ ID NO: 3477840 - DNA, 25 bp, Homo sapien
gccactgggttaggacctgaggacc

SEQ ID NO: 3477841 - DNA, 25 bp, Homo sapien
tgttgaagtgcgctgttcacacccg

SEQ ID NO: 3477842 - DNA, 25 bp, Homo sapien
tgcaaggcccgcttttcagggacca

SEQ ID NO: 3477843 - DNA, 25 bp, Homo sapien
gccaggcgcctgctcatgttgaagt

SEQ ID NO: 3477844 - DNA, 25 bp, Homo sapien
tcgatgtaagctgggcgcaggctct

SEQ ID NO: 3477845 - DNA, 25 bp, Homo sapien
ggctctcagtccagctacgcaggtg

SEQ ID NO: 3477846 - DNA, 25 bp, Homo sapien
ctttggatgcctggtgtggcgaacc

SEQ ID NO: 3477847 - DNA, 25 bp, Homo sapien
catctctaaagcgaaggcgagccca

SEQ ID NO: 3477848 - DNA, 25 bp, Homo sapien
gaagagtgtcctgtctccgggtcct

SEQ ID NO: 3477849 - DNA, 25 bp, Homo sapien
gcatgacatcctctcgaagacggtg

SEQ ID NO: 3477850 - DNA, 25 bp, Homo sapien
agactagtcagtaccgtgtgcggca

SEQ ID NO: 3477851 - DNA, 25 bp, Homo sapien
cctcagggtgaagtccggatgcaac

SEQ ID NO: 3477852 - DNA, 25 bp, Homo sapien
ttaagatcatccgaaggcccctgag

SEQ ID NO: 3477853 - DNA, 25 bp, Homo sapien
agaaatccggttatccctcctgaga

SEQ ID NO: 3477854 - DNA, 25 bp, Homo sapien
ttaatgctgtcctagcgtgagtgcc

SEQ ID NO: 3477855 - DNA, 25 bp, Homo sapien
gagggagcctcatcagacgatcaca

SEQ ID NO: 3477856 - DNA, 25 bp, Homo sapien
gctgtgctggcaagtgtaagtcccc

SEQ ID NO: 3477857 - DNA, 25 bp, Homo sapien
tctgcgatcaggtctggcagcatgg

SEQ ID NO: 3477858 - DNA, 25 bp, Homo sapien
tggatttctgcccaagaccagagga

SEQ ID NO: 3477859 - DNA, 25 bp, Homo sapien
caaggaatgggaacagtggctgtct

SEQ ID NO: 3477860 - DNA, 25 bp, Homo sapien
tacgacgccgtcaccggcaagttca

SEQ ID NO: 3477861 - DNA, 25 bp, Homo sapien
tcgaccgcgtgctggtgaacgagca

SEQ ID NO: 3477862 - DNA, 25 bp, Homo sapien
ggtacggtgaccttagagtcgccgc

SEQ ID NO: 3477863 - DNA, 25 bp, Homo sapien
gaacgagcagggacattacgacgcc

SEQ ID NO: 3477864 - DNA, 25 bp, Homo sapien
tgtttgaaggatagcacaagcccct

SEQ ID NO: 3477865 - DNA, 25 bp, Homo sapien
tggaccgagtttctcagggatgccc

SEQ ID NO: 3477866 - DNA, 25 bp, Homo sapien
ttagccctggctcgttgtgcattgc

SEQ ID NO: 3477867 - DNA, 25 bp, Homo sapien
caggtagattccttccgacagggca

SEQ ID NO: 3477868 - DNA, 25 bp, Homo sapien
ggtgtataaagaagttctccatcca

SEQ ID NO: 3477869 - DNA, 25 bp, Homo sapien
tcagacatgctgtcgctgccgaggc

SEQ ID NO: 3477870 - DNA, 25 bp, Homo sapien
ctgccgaggcagaaaacggtgtata

SEQ ID NO: 3477871 - DNA, 25 bp, Homo sapien
cccaaagatcttggtgctccgtatc

SEQ ID NO: 3477872 - DNA, 25 bp, Homo sapien
ttcccagtgatgacgagaaaggccg

SEQ ID NO: 3477873 - DNA, 25 bp, Homo sapien
tgcctgagtggagcatgaaaagccc

SEQ ID NO: 3477874 - DNA, 25 bp, Homo sapien
tctagaacgggaagacagtaggatc

SEQ ID NO: 3477875 - DNA, 25 bp, Homo sapien
tgaaaagccctaagaatcactctcc

SEQ ID NO: 3477876 - DNA, 25 bp, Homo sapien
caagaatagtaatcgtgggtgacga

SEQ ID NO: 3477877 - DNA, 25 bp, Homo sapien
tacacagagcacctagaaactggca

SEQ ID NO: 3477878 - DNA, 25 bp, Homo sapien
taacaaccaagggtcctaaggatgc

SEQ ID NO: 3477879 - DNA, 25 bp, Homo sapien
ttaaaacaccacaggagtgcttctg

SEQ ID NO: 3477880 - DNA, 25 bp, Homo sapien
gagggagagctgtggggaggagcca

SEQ ID NO: 3477881 - DNA, 25 bp, Homo sapien
gagagggagagctgtggggaggagc

SEQ ID NO: 3477882 - DNA, 25 bp, Homo sapien
ctgtggggaggagccatgagctcat

SEQ ID NO: 3477883 - DNA, 25 bp, Homo sapien
gagctgtggggaggagccatgagct

SEQ ID NO: 3477884 - DNA, 25 bp, Homo sapien
gggcgctgcccgaagaataccaatt

SEQ ID NO: 3477885 - DNA, 25 bp, Homo sapien
catcagcagggtcaagggatgtcac

SEQ ID NO: 3477886 - DNA, 25 bp, Homo sapien
gaagaataccaattccctgagagcc

SEQ ID NO: 3477887 - DNA, 25 bp, Homo sapien
tggacctcgtttggccccagcactt

SEQ ID NO: 3477888 - DNA, 25 bp, Homo sapien
ggacacctggagaggcgctgcctgg

SEQ ID NO: 3477889 - DNA, 25 bp, Homo sapien
ccattgtccaaggtggcggacacct

SEQ ID NO: 3477890 - DNA, 25 bp, Homo sapien
tggcggacacctggagaggcgctgc

SEQ ID NO: 3477891 - DNA, 25 bp, Homo sapien
gggactgcccccattgtccaaggtg

SEQ ID NO: 3477892 - DNA, 25 bp, Homo sapien
gcttggctcagatgccctgacagga

SEQ ID NO: 3477893 - DNA, 25 bp, Homo sapien
tagaagaatgcgtcacatggcaagg

SEQ ID NO: 3477894 - DNA, 25 bp, Homo sapien
tgcagagaagatggactcagaagct

SEQ ID NO: 3477895 - DNA, 25 bp, Homo sapien
aggtgatcagcaccagccagctggg

SEQ ID NO: 3477896 - DNA, 25 bp, Homo sapien
ccagatggacccccgtaaagcagag

SEQ ID NO: 3477897 - DNA, 25 bp, Homo sapien
gcatgagaacatcccccagatggac

SEQ ID NO: 3477898 - DNA, 25 bp, Homo sapien
tgggcatgagaacatcccccagatg

SEQ ID NO: 3477899 - DNA, 25 bp, Homo sapien
ggaatgggcatgagaacatccccca

SEQ ID NO: 3477900 - DNA, 25 bp, Homo sapien
ctcagaaagtaaggtgtccacgaca

SEQ ID NO: 3477901 - DNA, 25 bp, Homo sapien
ggatcagtgccggtttggagctcag

SEQ ID NO: 3477902 - DNA, 25 bp, Homo sapien
cagtgccggtttggagctcagaaag

SEQ ID NO: 3477903 - DNA, 25 bp, Homo sapien
gctcagaaagtaaggtgtccacgac

SEQ ID NO: 3477904 - DNA, 25 bp, Homo sapien
ttgtgcccggttcgactcgtccata

SEQ ID NO: 3477905 - DNA, 25 bp, Homo sapien
agctccatgcttgtgcccggttcga

SEQ ID NO: 3477906 - DNA, 25 bp, Homo sapien
gactcgtccatactccaagaagagg

SEQ ID NO: 3477907 - DNA, 25 bp, Homo sapien
cgcagctccatgcttgtgcccggtt

SEQ ID NO: 3477908 - DNA, 25 bp, Homo sapien
ccgcgccagcgccagccgggactca

SEQ ID NO: 3477909 - DNA, 25 bp, Homo sapien
cgcgccagcgccagccgggactcac

SEQ ID NO: 3477910 - DNA, 25 bp, Homo sapien
tgcgccgcgccagcgccagccggga

SEQ ID NO: 3477911 - DNA, 25 bp, Homo sapien
cgccgcgccagcgccagccgggact

SEQ ID NO: 3477912 - DNA, 25 bp, Homo sapien
taggaacaagccaatagccgtgacg

SEQ ID NO: 3477913 - DNA, 25 bp, Homo sapien
tgtatatcggttgcctgggtggccc

SEQ ID NO: 3477914 - DNA, 25 bp, Homo sapien
tgacgcgactcagtgacgcgagacg

SEQ ID NO: 3477915 - DNA, 25 bp, Homo sapien
gctgccccgtcgtgtgacattccag

SEQ ID NO: 3477916 - DNA, 25 bp, Homo sapien
gccttctcccatgacgcctcttctt

SEQ ID NO: 3477917 - DNA, 25 bp, Homo sapien
aaaactgaaagttgatacgccccag

SEQ ID NO: 3477918 - DNA, 25 bp, Homo sapien
cagggctcaagttccgagccttctc

SEQ ID NO: 3477919 - DNA, 25 bp, Homo sapien
gttgatacgccccagggctcaagtt

SEQ ID NO: 3477920 - DNA, 25 bp, Homo sapien
tagagcacggcaattttgaagtact

SEQ ID NO: 3477921 - DNA, 25 bp, Homo sapien
ggtagagcacggcaattttgaagta

SEQ ID NO: 3477922 - DNA, 25 bp, Homo sapien
agagcacggcaattttgaagtactg

SEQ ID NO: 3477923 - DNA, 25 bp, Homo sapien
gaggtagagcacggcaattttgaag

SEQ ID NO: 3477924 - DNA, 25 bp, Homo sapien
cagcagcttggtgtggagagtgttt

SEQ ID NO: 3477925 - DNA, 25 bp, Homo sapien
catatcgctgaaagaagtgctgaac

SEQ ID NO: 3477926 - DNA, 25 bp, Homo sapien
aaacagtcttgaatcgctgacgcca

SEQ ID NO: 3477927 - DNA, 25 bp, Homo sapien
tgaaagaagtgctgaacaggtagga

SEQ ID NO: 3477928 - DNA, 25 bp, Homo sapien
ggcacaagaaccattggaacctgag

SEQ ID NO: 3477929 - DNA, 25 bp, Homo sapien
aggcacaagaaccattggaacctga

SEQ ID NO: 3477930 - DNA, 25 bp, Homo sapien
cacaagaaccattggaacctgagag

SEQ ID NO: 3477931 - DNA, 25 bp, Homo sapien
caagaaccattggaacctgagaggc

SEQ ID NO: 3477932 - DNA, 25 bp, Homo sapien
ttgacggtccagtggtaacaggagc

SEQ ID NO: 3477933 - DNA, 25 bp, Homo sapien
tgaggaggttattacacagcaatag

SEQ ID NO: 3477934 - DNA, 25 bp, Homo sapien
aagatgggcaatcctggagtatggc

SEQ ID NO: 3477935 - DNA, 25 bp, Homo sapien
ggtagccagaatagtgactttgaca

SEQ ID NO: 3477936 - DNA, 25 bp, Homo sapien
ttgaacaagtggatgatgacgacat

SEQ ID NO: 3477937 - DNA, 25 bp, Homo sapien
tttggctgtttcagggatggattga

SEQ ID NO: 3477938 - DNA, 25 bp, Homo sapien
tggtttggctgtttcagggatggat

SEQ ID NO: 3477939 - DNA, 25 bp, Homo sapien
tgtttgaacaagtggatgatgacga

SEQ ID NO: 3477940 - DNA, 25 bp, Homo sapien
cagggaagtgttgaaggatgtgatc

SEQ ID NO: 3477941 - DNA, 25 bp, Homo sapien
tctggtcatatttttataagatccc

SEQ ID NO: 3477942 - DNA, 25 bp, Homo sapien
gaaggatgtgatctggtcatatttt

SEQ ID NO: 3477943 - DNA, 25 bp, Homo sapien
tttttataagatccctcttgctgct

SEQ ID NO: 3477944 - DNA, 25 bp, Homo sapien
tatgtccctgaagagtttagcagcc

SEQ ID NO: 3477945 - DNA, 25 bp, Homo sapien
acttcctatggggtctttgtcacac

SEQ ID NO: 3477946 - DNA, 25 bp, Homo sapien
ccacactcttagaagggtgctggga

SEQ ID NO: 3477947 - DNA, 25 bp, Homo sapien
gtcacactctagtactatgtccctg

SEQ ID NO: 3477948 - DNA, 25 bp, Homo sapien
cttgggctgcaagcgccgtgccaag

SEQ ID NO: 3477949 - DNA, 25 bp, Homo sapien
gctgcaagcgccgtgccaaggaaag

SEQ ID NO: 3477950 - DNA, 25 bp, Homo sapien
tgggctgcaagcgccgtgccaagga

SEQ ID NO: 3477951 - DNA, 25 bp, Homo sapien
gcttgggctgcaagcgccgtgccaa

SEQ ID NO: 3477952 - DNA, 25 bp, Homo sapien
tctccccaaccacttagtagcaacg

SEQ ID NO: 3477953 - DNA, 25 bp, Homo sapien
gaccctaacgagacacatttgccca

SEQ ID NO: 3477954 - DNA, 25 bp, Homo sapien
cacttagtagcaacgctaccccagg

SEQ ID NO: 3477955 - DNA, 25 bp, Homo sapien
taccccaggggctaatgactgcaca

SEQ ID NO: 3477956 - DNA, 25 bp, Homo sapien
gaggacaagaccctctcaggctgtc

SEQ ID NO: 3477957 - DNA, 25 bp, Homo sapien
ggagagggctacaaaggaggacaag

SEQ ID NO: 3477958 - DNA, 25 bp, Homo sapien
caagccatggagtgagacccaggag

SEQ ID NO: 3477959 - DNA, 25 bp, Homo sapien
ccaggagccggacacttctcaggaa

SEQ ID NO: 3477960 - DNA, 25 bp, Homo sapien
aggaagctaaaagcatggccctgct

SEQ ID NO: 3477961 - DNA, 25 bp, Homo sapien
ggaagctaaaagcatggccctgctg

SEQ ID NO: 3477962 - DNA, 25 bp, Homo sapien
tgaagaccccagatgtgagggcacc

SEQ ID NO: 3477963 - DNA, 25 bp, Homo sapien
cctaccttgtgagggagagaactga

SEQ ID NO: 3477964 - DNA, 25 bp, Homo sapien
gggcctagcacggacatggtctgtc

SEQ ID NO: 3477965 - DNA, 25 bp, Homo sapien
catcaggagttccagtgctgcatgc

SEQ ID NO: 3477966 - DNA, 25 bp, Homo sapien
gataatgttctttgggctgccgcac

SEQ ID NO: 3477967 - DNA, 25 bp, Homo sapien
ctcaggaaagccagaagaaccttcc

SEQ ID NO: 3477968 - DNA, 25 bp, Homo sapien
tctgaagaccaaacaagcagactgt

SEQ ID NO: 3477969 - DNA, 25 bp, Homo sapien
gcatcctgcacctcttacactttgg

SEQ ID NO: 3477970 - DNA, 25 bp, Homo sapien
ggattgagatgggatgaacccagca

SEQ ID NO: 3477971 - DNA, 25 bp, Homo sapien
aggattgagatgggatgaacccagc

SEQ ID NO: 3477972 - DNA, 25 bp, Homo sapien
gaatggctcacccttgagagctggg

SEQ ID NO: 3477973 - DNA, 25 bp, Homo sapien
catagcccaggtcagttctccagct

SEQ ID NO: 3477974 - DNA, 25 bp, Homo sapien
gagctggggtccatagcccaggtca

SEQ ID NO: 3477975 - DNA, 25 bp, Homo sapien
tgagcaagaggaatggctcaccctt

SEQ ID NO: 3477976 - DNA, 25 bp, Homo sapien
aggaggtcaaagcttcagtgagtgg

SEQ ID NO: 3477977 - DNA, 25 bp, Homo sapien
gaggtcaaagcttcagtgagtggtg

SEQ ID NO: 3477978 - DNA, 25 bp, Homo sapien
tagtgtcaagtgcctattgtcccag

SEQ ID NO: 3477979 - DNA, 25 bp, Homo sapien
gtcaaagcttcagtgagtggtgatt

SEQ ID NO: 3477980 - DNA, 25 bp, Homo sapien
cacacgcccaatgtacaatggtgac

SEQ ID NO: 3477981 - DNA, 25 bp, Homo sapien
ccaatgtacaatggtgacacaggga

SEQ ID NO: 3477982 - DNA, 25 bp, Homo sapien
agaccacacgcccaatgtacaatgg

SEQ ID NO: 3477983 - DNA, 25 bp, Homo sapien
aaaaagacaagaccacacgcccaat

SEQ ID NO: 3477984 - DNA, 25 bp, Homo sapien
tgatctcaaaatgtgcagtaggtct

SEQ ID NO: 3477985 - DNA, 25 bp, Homo sapien
ccaatcacgacatcaggctccaaga

SEQ ID NO: 3477986 - DNA, 25 bp, Homo sapien
ccttgggtacaactcctcaggggtg

SEQ ID NO: 3477987 - DNA, 25 bp, Homo sapien
gctgtggctgagtctccttgggtac

SEQ ID NO: 3477988 - DNA, 25 bp, Homo sapien
tgaactcctgttggccaaaacatgt

SEQ ID NO: 3477989 - DNA, 25 bp, Homo sapien
taatgtggcactccaccacagtttg

SEQ ID NO: 3477990 - DNA, 25 bp, Homo sapien
tactcctaaagatgctctgtcctcc

SEQ ID NO: 3477991 - DNA, 25 bp, Homo sapien
aacatgtcttatggccaagccagag

SEQ ID NO: 3477992 - DNA, 25 bp, Homo sapien
agcagcggcttgcttacaaagcact

SEQ ID NO: 3477993 - DNA, 25 bp, Homo sapien
tgctacagctcgtatatcagggagc

SEQ ID NO: 3477994 - DNA, 25 bp, Homo sapien
gggatgctacagctcgtatatcagg

SEQ ID NO: 3477995 - DNA, 25 bp, Homo sapien
agccagctggcaagggacgtttggg

SEQ ID NO: 3477996 - DNA, 25 bp, Homo sapien
caggctactgcaatggtctaagcaa

SEQ ID NO: 3477997 - DNA, 25 bp, Homo sapien
gagagacaaagactagggctaaggc

SEQ ID NO: 3477998 - DNA, 25 bp, Homo sapien
aattactctagtagcagcagggagg

SEQ ID NO: 3477999 - DNA, 25 bp, Homo sapien
gagacaggataccagctagcaggct

SEQ ID NO: 3478000 - DNA, 25 bp, Homo sapien
ccagtagttccccagtggatgacca

SEQ ID NO: 3478001 - DNA, 25 bp, Homo sapien
agcctgtgattaccatgtcctgagc

SEQ ID NO: 3478002 - DNA, 25 bp, Homo sapien
gcttgagacctgaagagcccagcag

SEQ ID NO: 3478003 - DNA, 25 bp, Homo sapien
tcctgagcttgagacctgaagagcc

SEQ ID NO: 3478004 - DNA, 25 bp, Homo sapien
tgccatgacctttggagcctggtgc

SEQ ID NO: 3478005 - DNA, 25 bp, Homo sapien
tgacacaagcttcctgccgactgct

SEQ ID NO: 3478006 - DNA, 25 bp, Homo sapien
ttttccagccgcaccacaaagactg

SEQ ID NO: 3478007 - DNA, 25 bp, Homo sapien
tcttctcaacagtctgtccagtgcc

SEQ ID NO: 3478008 - DNA, 25 bp, Homo sapien
gtggtctctgtgatgggccagagcc

SEQ ID NO: 3478009 - DNA, 25 bp, Homo sapien
gaaggtggtctctgtgatgggccag

SEQ ID NO: 3478010 - DNA, 25 bp, Homo sapien
aagaaggtggtctctgtgatgggcc

SEQ ID NO: 3478011 - DNA, 25 bp, Homo sapien
ggtggaagaaggtggtctctgtgat

SEQ ID NO: 3478012 - DNA, 25 bp, Homo sapien
atccccacgaacctgcacagtgctt

SEQ ID NO: 3478013 - DNA, 25 bp, Homo sapien
gcagggctgcatccccacgaacctg

SEQ ID NO: 3478014 - DNA, 25 bp, Homo sapien
atgacagggctgaatcttcttgtgt

SEQ ID NO: 3478015 - DNA, 25 bp, Homo sapien
tcccgtgtgttgtgagttccatggg

SEQ ID NO: 3478016 - DNA, 25 bp, Homo sapien
tttataattgaattatgtggaactc

SEQ ID NO: 3478017 - DNA, 25 bp, Homo sapien
ttataattgaattatgtggaactca

SEQ ID NO: 3478018 - DNA, 25 bp, Homo sapien
tataattgaattatgtggaactcac

SEQ ID NO: 3478019 - DNA, 25 bp, Homo sapien
cctggatctcggatcctagcaccac

SEQ ID NO: 3478020 - DNA, 25 bp, Homo sapien
atcctagcaccactcagcgccatct

SEQ ID NO: 3478021 - DNA, 25 bp, Homo sapien
gatctcggatcctagcaccactcag

SEQ ID NO: 3478022 - DNA, 25 bp, Homo sapien
tggatctcggatcctagcaccactc

SEQ ID NO: 3478023 - DNA, 25 bp, Homo sapien
tctcactccaggagttcctgactca

SEQ ID NO: 3478024 - DNA, 25 bp, Homo sapien
cagacctaagaactgtggtagcaca

SEQ ID NO: 3478025 - DNA, 25 bp, Homo sapien
ttcaggacgccacagacctaagaac

SEQ ID NO: 3478026 - DNA, 25 bp, Homo sapien
agctggaggctcttctgaccttgca

SEQ ID NO: 3478027 - DNA, 25 bp, Homo sapien
gccggagcccgccatttctgcagtc

SEQ ID NO: 3478028 - DNA, 25 bp, Homo sapien
cagccggagcccgccatttctgcag

SEQ ID NO: 3478029 - DNA, 25 bp, Homo sapien
agccggagcccgccatttctgcagt

SEQ ID NO: 3478030 - DNA, 25 bp, Homo sapien
cagcgcgttgcctccgaagcgggaa

SEQ ID NO: 3478031 - DNA, 25 bp, Homo sapien
cacccgcagcgcgttgcctccgaag

SEQ ID NO: 3478032 - DNA, 25 bp, Homo sapien
gttgcctccgaagcgggaagtccca

SEQ ID NO: 3478033 - DNA, 25 bp, Homo sapien
cctccgaagcgggaagtcccaggtg

SEQ ID NO: 3478034 - DNA, 25 bp, Homo sapien
tgggatcagggtggtgttggtgacc

SEQ ID NO: 3478035 - DNA, 25 bp, Homo sapien
ctcaccagcccagaaataagcacag

SEQ ID NO: 3478036 - DNA, 25 bp, Homo sapien
agaaataagcacaggttccccggag

SEQ ID NO: 3478037 - DNA, 25 bp, Homo sapien
ggcccaggaaagactcgggcgtcca

SEQ ID NO: 3478038 - DNA, 25 bp, Homo sapien
cactgcactgatgttggcagggatg

SEQ ID NO: 3478039 - DNA, 25 bp, Homo sapien
aggacaggatctctggtgatgagaa

SEQ ID NO: 3478040 - DNA, 25 bp, Homo sapien
gcttccccggcagaaggagacccag

SEQ ID NO: 3478041 - DNA, 25 bp, Homo sapien
ctgacaggaccaaggtaaaagaggg

SEQ ID NO: 3478042 - DNA, 25 bp, Homo sapien
ctccacatgctcgtcatgaatttcc

SEQ ID NO: 3478043 - DNA, 25 bp, Homo sapien
acatgctcgtcatgaatttcccttt

SEQ ID NO: 3478044 - DNA, 25 bp, Homo sapien
tccacatgctcgtcatgaatttccc

SEQ ID NO: 3478045 - DNA, 25 bp, Homo sapien
cacatgctcgtcatgaatttccctt

SEQ ID NO: 3478046 - DNA, 25 bp, Homo sapien
ggcagcaccggctccattcctgcgg

SEQ ID NO: 3478047 - DNA, 25 bp, Homo sapien
ccagggctccataagcccagaggcc

SEQ ID NO: 3478048 - DNA, 25 bp, Homo sapien
caccggctccattcctgcggacagg

SEQ ID NO: 3478049 - DNA, 25 bp, Homo sapien
agggctccataagcccagaggccag

SEQ ID NO: 3478050 - DNA, 25 bp, Homo sapien
tgagaacagtagaaagcggaccccc

SEQ ID NO: 3478051 - DNA, 25 bp, Homo sapien
cagtagaaagcggaccccctcgttg

SEQ ID NO: 3478052 - DNA, 25 bp, Homo sapien
ccctcgttggtcagcctttctccct

SEQ ID NO: 3478053 - DNA, 25 bp, Homo sapien
tctgggctgcgcacgcccgtgattt

SEQ ID NO: 3478054 - DNA, 25 bp, Homo sapien
tgtaaatggaactcaacgaggaggg

SEQ ID NO: 3478055 - DNA, 25 bp, Homo sapien
cgcccgtgatttcattgctcagcag

SEQ ID NO: 3478056 - DNA, 25 bp, Homo sapien
actcaacgaggagggaaatatttga

SEQ ID NO: 3478057 - DNA, 25 bp, Homo sapien
atcgtcaatgctgacactgacatga

SEQ ID NO: 3478058 - DNA, 25 bp, Homo sapien
ctatgttttgccttgtaaatgatga

SEQ ID NO: 3478059 - DNA, 25 bp, Homo sapien
actttccctcttgggagaatatcgt

SEQ ID NO: 3478060 - DNA, 25 bp, Homo sapien
tttgtctgatggtgagggcggtagg

SEQ ID NO: 3478061 - DNA, 25 bp, Homo sapien
ggcagaggacccaaaggatggagaa

SEQ ID NO: 3478062 - DNA, 25 bp, Homo sapien
gaggacccaaaggatggagaaggga

SEQ ID NO: 3478063 - DNA, 25 bp, Homo sapien
agaggacccaaaggatggagaaggg

SEQ ID NO: 3478064 - DNA, 25 bp, Homo sapien
tcaaggccggttcttggttccacca

SEQ ID NO: 3478065 - DNA, 25 bp, Homo sapien
ggtcttgagcacctcaattcttcct

SEQ ID NO: 3478066 - DNA, 25 bp, Homo sapien
tgggtcttgagcacctcaattcttc

SEQ ID NO: 3478067 - DNA, 25 bp, Homo sapien
ggtgggtcttgagcacctcaattct

SEQ ID NO: 3478068 - DNA, 25 bp, Homo sapien
tggtgggtcttgagcacctcaattc

SEQ ID NO: 3478069 - DNA, 25 bp, Homo sapien
ggtgtaaactcttcatctcgctgag

SEQ ID NO: 3478070 - DNA, 25 bp, Homo sapien
tggtaaaatggcaagcgggtctccc

SEQ ID NO: 3478071 - DNA, 25 bp, Homo sapien
gcaagggccatttcctgtgccaagc

SEQ ID NO: 3478072 - DNA, 25 bp, Homo sapien
gaaccaaatccccagaccaatgaga

SEQ ID NO: 3478073 - DNA, 25 bp, Homo sapien
gggtcattaggcacccacactgtga

SEQ ID NO: 3478074 - DNA, 25 bp, Homo sapien
catgcctgcctagaatgtctctgaa

SEQ ID NO: 3478075 - DNA, 25 bp, Homo sapien
caccaattggtgttgaacctgaccc

SEQ ID NO: 3478076 - DNA, 25 bp, Homo sapien
tgaaatgattccctgcgtgcccagt

SEQ ID NO: 3478077 - DNA, 25 bp, Homo sapien
ggtgaagaccccttgctgcgcatag

SEQ ID NO: 3478078 - DNA, 25 bp, Homo sapien
agaccccttgctgcgcatagggaca

SEQ ID NO: 3478079 - DNA, 25 bp, Homo sapien
ccctcggcagtatcaggagaggtga

SEQ ID NO: 3478080 - DNA, 25 bp, Homo sapien
ccacccctcggcagtatcaggagag

SEQ ID NO: 3478081 - DNA, 25 bp, Homo sapien
gggctagaggcacacgacaccacat

SEQ ID NO: 3478082 - DNA, 25 bp, Homo sapien
tcgagcaatcctccatcattagcct

SEQ ID NO: 3478083 - DNA, 25 bp, Homo sapien
gctagaggcacacgacaccacatct

SEQ ID NO: 3478084 - DNA, 25 bp, Homo sapien
tgaactcgagcaatcctccatcatt

SEQ ID NO: 3478085 - DNA, 25 bp, Homo sapien
ggagtttccagtcttatgagtcaca

SEQ ID NO: 3478086 - DNA, 25 bp, Homo sapien
tgttccaggcatagctgagtgctgg

SEQ ID NO: 3478087 - DNA, 25 bp, Homo sapien
gccagcatccttgctacgttcagga

SEQ ID NO: 3478088 - DNA, 25 bp, Homo sapien
tgtttgtagtcattggcttggctgc

SEQ ID NO: 3478089 - DNA, 25 bp, Homo sapien
tggggtgtggcctgtatctcaggca

SEQ ID NO: 3478090 - DNA, 25 bp, Homo sapien
ctggggtgtggcctgtatctcaggc

SEQ ID NO: 3478091 - DNA, 25 bp, Homo sapien
ggggtgtggcctgtatctcaggcat

SEQ ID NO: 3478092 - DNA, 25 bp, Homo sapien
gcagtgtcttttacaccagacccag

SEQ ID NO: 3478093 - DNA, 25 bp, Homo sapien
aaactgcctccatcgggaagcttcc

SEQ ID NO: 3478094 - DNA, 25 bp, Homo sapien
ccatcttcacgtgtgcacagtgtgg

SEQ ID NO: 3478095 - DNA, 25 bp, Homo sapien
cacgcagatggcaatcagtgtcagc

SEQ ID NO: 3478096 - DNA, 25 bp, Homo sapien
ccatcaatcaccacagagcagagca

SEQ ID NO: 3478097 - DNA, 25 bp, Homo sapien
ggccaggtgatccatcgctccctct

SEQ ID NO: 3478098 - DNA, 25 bp, Homo sapien
tcttctcttgctgtggtaaaatatg

SEQ ID NO: 3478099 - DNA, 25 bp, Homo sapien
gtggtaaaatatggacagcgggaac

SEQ ID NO: 3478100 - DNA, 25 bp, Homo sapien
gcatgctgctccttaagtgatggta

SEQ ID NO: 3478101 - DNA, 25 bp, Homo sapien
ttgtcctcaggcaccgccacctcct

SEQ ID NO: 3478102 - DNA, 25 bp, Homo sapien
cttgatggctccagagtctgccccg

SEQ ID NO: 3478103 - DNA, 25 bp, Homo sapien
gagtctgccccgctccaggatgccc

SEQ ID NO: 3478104 - DNA, 25 bp, Homo sapien
caccctggtctgcagctgtgccctg

SEQ ID NO: 3478105 - DNA, 25 bp, Homo sapien
gctttctcctcgcccatggcttctg

SEQ ID NO: 3478106 - DNA, 25 bp, Homo sapien
gcttctgtccgcctctgtttcttgc

SEQ ID NO: 3478107 - DNA, 25 bp, Homo sapien
tgactctggtaaaggtcctctttct

SEQ ID NO: 3478108 - DNA, 25 bp, Homo sapien
ggtgtctttcatgcctctccgcccc

SEQ ID NO: 3478109 - DNA, 25 bp, Homo sapien
ttctacagcggttaacccttcatgg

SEQ ID NO: 3478110 - DNA, 25 bp, Homo sapien
cggttaacccttcatggtcagaagg

SEQ ID NO: 3478111 - DNA, 25 bp, Homo sapien
aagtgctgggtagatgggcaatttc

SEQ ID NO: 3478112 - DNA, 25 bp, Homo sapien
tagatgggcaatttctacagcggtt

SEQ ID NO: 3478113 - DNA, 25 bp, Homo sapien
caaattgtcaccaatgcatccccag

SEQ ID NO: 3478114 - DNA, 25 bp, Homo sapien
ggaggttcatagtggcagaaagagc

SEQ ID NO: 3478115 - DNA, 25 bp, Homo sapien
tgctccgtgccgtggcctttcctgg

SEQ ID NO: 3478116 - DNA, 25 bp, Homo sapien
ggccagatggcattgcctgggtggc

SEQ ID NO: 3478117 - DNA, 25 bp, Homo sapien
gaggccttcgcgtgcacctgaaagg

SEQ ID NO: 3478118 - DNA, 25 bp, Homo sapien
gaaaggtgagttattcagtgtgtca

SEQ ID NO: 3478119 - DNA, 25 bp, Homo sapien
ccagatggttgaggccttcgcgtgc

SEQ ID NO: 3478120 - DNA, 25 bp, Homo sapien
tgttctccagatggttgaggccttc

SEQ ID NO: 3478121 - DNA, 25 bp, Homo sapien
tttgaacacagccgtaatccacagg

SEQ ID NO: 3478122 - DNA, 25 bp, Homo sapien
attttccagcagagcttatctgtgt

SEQ ID NO: 3478123 - DNA, 25 bp, Homo sapien
tgaacacagccgtaatccacaggcc

SEQ ID NO: 3478124 - DNA, 25 bp, Homo sapien
tttccagcagagcttatctgtgtct

SEQ ID NO: 3478125 - DNA, 25 bp, Homo sapien
gtaagcaaggaagggagtgtgaacc

SEQ ID NO: 3478126 - DNA, 25 bp, Homo sapien
ctttgaagtaagcaaggaagggagt

SEQ ID NO: 3478127 - DNA, 25 bp, Homo sapien
gaagtaagcaaggaagggagtgtga

SEQ ID NO: 3478128 - DNA, 25 bp, Homo sapien
taagcaaggaagggagtgtgaaccc

SEQ ID NO: 3478129 - DNA, 25 bp, Homo sapien
gatctaccgtctgcagagagccttc

SEQ ID NO: 3478130 - DNA, 25 bp, Homo sapien
gcagcagatctaccgtctgcagaga

SEQ ID NO: 3478131 - DNA, 25 bp, Homo sapien
agggctgcagcagatctaccgtctg

SEQ ID NO: 3478132 - DNA, 25 bp, Homo sapien
gcagatctaccgtctgcagagagcc

SEQ ID NO: 3478133 - DNA, 25 bp, Homo sapien
aggttgtggggagctgagatcatgc

SEQ ID NO: 3478134 - DNA, 25 bp, Homo sapien
cttgaacatcggaggcagaggttgt

SEQ ID NO: 3478135 - DNA, 25 bp, Homo sapien
ccactgcactctagcctgtgtgact

SEQ ID NO: 3478136 - DNA, 25 bp, Homo sapien
tgccactgcactctagcctgtgtga

SEQ ID NO: 3478137 - DNA, 25 bp, Homo sapien
caagttacagcaaagcagactcctc

SEQ ID NO: 3478138 - DNA, 25 bp, Homo sapien
tgccaagttacagcaaagcagactc

SEQ ID NO: 3478139 - DNA, 25 bp, Homo sapien
gttacagcaaagcagactcctcacc

SEQ ID NO: 3478140 - DNA, 25 bp, Homo sapien
tcttactgccaagttacagcaaagc

SEQ ID NO: 3478141 - DNA, 25 bp, Homo sapien
aggtgcccaggcttatccttgggcc

SEQ ID NO: 3478142 - DNA, 25 bp, Homo sapien
caggtgcccaggcttatccttgggc

SEQ ID NO: 3478143 - DNA, 25 bp, Homo sapien
gctgtgttctcccatttgggctcac

SEQ ID NO: 3478144 - DNA, 25 bp, Homo sapien
cccttgtgtctagctgtgttctccc

SEQ ID NO: 3478145 - DNA, 25 bp, Homo sapien
tctagctgtgttctcccatttgggc

SEQ ID NO: 3478146 - DNA, 25 bp, Homo sapien
cttggtgctgcccttgtgtctagct

SEQ ID NO: 3478147 - DNA, 25 bp, Homo sapien
gctgatgccaccaccttattgtgga

SEQ ID NO: 3478148 - DNA, 25 bp, Homo sapien
tgccaccaccttattgtggagccct

SEQ ID NO: 3478149 - DNA, 25 bp, Homo sapien
agggaaattccccagcaaaatgctc

SEQ ID NO: 3478150 - DNA, 25 bp, Homo sapien
gcaaaatgctcagatcagcagaacc

SEQ ID NO: 3478151 - DNA, 25 bp, Homo sapien
acgctggcatttttctccgagccga

SEQ ID NO: 3478152 - DNA, 25 bp, Homo sapien
caaggcaatttgtgaggagcagggc

SEQ ID NO: 3478153 - DNA, 25 bp, Homo sapien
tctccgagccgacaaggcaatttgt

SEQ ID NO: 3478154 - DNA, 25 bp, Homo sapien
ctagcaatcagtcacgctggcattt

SEQ ID NO: 3478155 - DNA, 25 bp, Homo sapien
agcttcagggcctaaaagccactct

SEQ ID NO: 3478156 - DNA, 25 bp, Homo sapien
aagccactcttagctcttcccaaga

SEQ ID NO: 3478157 - DNA, 25 bp, Homo sapien
tcagggcctaaaagccactcttagc

SEQ ID NO: 3478158 - DNA, 25 bp, Homo sapien
gctcttcccaagatatctccagaat

SEQ ID NO: 3478159 - DNA, 25 bp, Homo sapien
taactttcacattgagtttaatatc

SEQ ID NO: 3478160 - DNA, 25 bp, Homo sapien
gtcctgcaggttgaatgctgcctgt

SEQ ID NO: 3478161 - DNA, 25 bp, Homo sapien
tcctgcaggttgaatgctgcctgtt

SEQ ID NO: 3478162 - DNA, 25 bp, Homo sapien
gctccccaatttacaattgcaatta

SEQ ID NO: 3478163 - DNA, 25 bp, Homo sapien
tggaaccgagctgctccccaattta

SEQ ID NO: 3478164 - DNA, 25 bp, Homo sapien
cactggtgtatttttgccgcacgat

SEQ ID NO: 3478165 - DNA, 25 bp, Homo sapien
tccacctctcggtaatggtattggg

SEQ ID NO: 3478166 - DNA, 25 bp, Homo sapien
tctccaaagagacaaggtgtcaatg

SEQ ID NO: 3478167 - DNA, 25 bp, Homo sapien
cgcacgcacaagaacctggatggag

SEQ ID NO: 3478168 - DNA, 25 bp, Homo sapien
cagcagagagaagcgcacgcacaag

SEQ ID NO: 3478169 - DNA, 25 bp, Homo sapien
tgtcaatggatcttcccagcagaga

SEQ ID NO: 3478170 - DNA, 25 bp, Homo sapien
caatgggtcattttccggaacaaag

SEQ ID NO: 3478171 - DNA, 25 bp, Homo sapien
tgtctccctggcagcaatgaacgcc

SEQ ID NO: 3478172 - DNA, 25 bp, Homo sapien
gggtagagagctttatctgacacaa

SEQ ID NO: 3478173 - DNA, 25 bp, Homo sapien
tccctggcagcaatgaacgcctttc

SEQ ID NO: 3478174 - DNA, 25 bp, Homo sapien
gggacaccaccaatgtacccctctg

SEQ ID NO: 3478175 - DNA, 25 bp, Homo sapien
ctctgcaggatggccttcacaccat

SEQ ID NO: 3478176 - DNA, 25 bp, Homo sapien
ttcctccagcgaagccaaagtctcg

SEQ ID NO: 3478177 - DNA, 25 bp, Homo sapien
gaggtaggatccatttagtcatggg

SEQ ID NO: 3478178 - DNA, 25 bp, Homo sapien
cccatggtggaaggccggcaggcga

SEQ ID NO: 3478179 - DNA, 25 bp, Homo sapien
tccaaggtcgaggggtctgcctctg

SEQ ID NO: 3478180 - DNA, 25 bp, Homo sapien
aggccggcaggcgagaaagcatgcc

SEQ ID NO: 3478181 - DNA, 25 bp, Homo sapien
aaggtcgaggggtctgcctctggca

SEQ ID NO: 3478182 - DNA, 25 bp, Homo sapien
cacatcccagtctgcacagcatggg

SEQ ID NO: 3478183 - DNA, 25 bp, Homo sapien
tgtggacacaacatccattcctcaa

SEQ ID NO: 3478184 - DNA, 25 bp, Homo sapien
catctgaggtgcacccccacatccc

SEQ ID NO: 3478185 - DNA, 25 bp, Homo sapien
cattcctcaaacagcagctgggtag

SEQ ID NO: 3478186 - DNA, 25 bp, Homo sapien
aaagggcccttatagagacagctgc

SEQ ID NO: 3478187 - DNA, 25 bp, Homo sapien
tgtgaaatacctcgacaagcccagc

SEQ ID NO: 3478188 - DNA, 25 bp, Homo sapien
tcctgagtggtgattgctacgtgcc

SEQ ID NO: 3478189 - DNA, 25 bp, Homo sapien
tgggagccccagacttaaagcacct

SEQ ID NO: 3478190 - DNA, 25 bp, Homo sapien
gcaatgttttatcttggtgatgagg

SEQ ID NO: 3478191 - DNA, 25 bp, Homo sapien
tcatgtgtgccacctctaagcaggt

SEQ ID NO: 3478192 - DNA, 25 bp, Homo sapien
gtaattttcatgcatccctgcaatg

SEQ ID NO: 3478193 - DNA, 25 bp, Homo sapien
agggtcagcatttcagccggtggca

SEQ ID NO: 3478194 - DNA, 25 bp, Homo sapien
tatcgttgcaattttagtacatgtg

SEQ ID NO: 3478195 - DNA, 25 bp, Homo sapien
cacagggccatgctaatcgtctctg

SEQ ID NO: 3478196 - DNA, 25 bp, Homo sapien
tacatgtgctgccgaagcaagcact

SEQ ID NO: 3478197 - DNA, 25 bp, Homo sapien
tagtacatgtgctgccgaagcaagc

SEQ ID NO: 3478198 - DNA, 25 bp, Homo sapien
tctggcactgcaatgctgtgacagc

SEQ ID NO: 3478199 - DNA, 25 bp, Homo sapien
caggctgtcgcagagctgtgtgtaa

SEQ ID NO: 3478200 - DNA, 25 bp, Homo sapien
gatctgaagcgacatttcacctggg

SEQ ID NO: 3478201 - DNA, 25 bp, Homo sapien
taaggaattccgaacgctgggtatc

SEQ ID NO: 3478202 - DNA, 25 bp, Homo sapien
gaaaatgtactgaggattaaaaatg

SEQ ID NO: 3478203 - DNA, 25 bp, Homo sapien
ctcctggttctgacctggggggtgt

SEQ ID NO: 3478204 - DNA, 25 bp, Homo sapien
aaaaatgatgggttgaaaatgtact

SEQ ID NO: 3478205 - DNA, 25 bp, Homo sapien
cgtcttgtcgccctttccgcctttg

SEQ ID NO: 3478206 - DNA, 25 bp, Homo sapien
gatcccctggcactctagacaggca

SEQ ID NO: 3478207 - DNA, 25 bp, Homo sapien
gggtcttcccatgtatataatggag

SEQ ID NO: 3478208 - DNA, 25 bp, Homo sapien
agaggcaggcttcgcggcccttcat

SEQ ID NO: 3478209 - DNA, 25 bp, Homo sapien
tcagccaccccagactgggtcttcc

SEQ ID NO: 3478210 - DNA, 25 bp, Homo sapien
gcgtcccctctttatccccaatgtg

SEQ ID NO: 3478211 - DNA, 25 bp, Homo sapien
caatgtgccccctccattaggggct

SEQ ID NO: 3478212 - DNA, 25 bp, Homo sapien
cacagagagtggagttggcctagct

SEQ ID NO: 3478213 - DNA, 25 bp, Homo sapien
agttggcctagctctgacgcgtccc

SEQ ID NO: 3478214 - DNA, 25 bp, Homo sapien
gtgggaacctgtggcactggcttgc

SEQ ID NO: 3478215 - DNA, 25 bp, Homo sapien
gggaacctgtggcactggcttgcgg

SEQ ID NO: 3478216 - DNA, 25 bp, Homo sapien
acctgtggcactggcttgcggatga

SEQ ID NO: 3478217 - DNA, 25 bp, Homo sapien
gaacctgtggcactggcttgcggat

SEQ ID NO: 3478218 - DNA, 25 bp, Homo sapien
aaggcgccgggcgccagctccacag

SEQ ID NO: 3478219 - DNA, 25 bp, Homo sapien
cgcccaaggcgccgggcgccagctc

SEQ ID NO: 3478220 - DNA, 25 bp, Homo sapien
acagcccatcattaaacagctccat

SEQ ID NO: 3478221 - DNA, 25 bp, Homo sapien
gctccacagcccatcattaaacagc

SEQ ID NO: 3478222 - DNA, 25 bp, Homo sapien
ccccccggccatccgagcaggcagc

SEQ ID NO: 3478223 - DNA, 25 bp, Homo sapien
cccatagctggacagggcatcggga

SEQ ID NO: 3478224 - DNA, 25 bp, Homo sapien
tgcccatagctggacagggcatcgg

SEQ ID NO: 3478225 - DNA, 25 bp, Homo sapien
catagctggacagggcatcgggagg

SEQ ID NO: 3478226 - DNA, 25 bp, Homo sapien
aagacaggccgcggcagaggaggga

SEQ ID NO: 3478227 - DNA, 25 bp, Homo sapien
cagaggagggatgtgctcccctcag

SEQ ID NO: 3478228 - DNA, 25 bp, Homo sapien
aggaagaagacaggccgcggcagag

SEQ ID NO: 3478229 - DNA, 25 bp, Homo sapien
gaggagggatgtgctcccctcagca

SEQ ID NO: 3478230 - DNA, 25 bp, Homo sapien
caagaactttcttgtccaagtccac

SEQ ID NO: 3478231 - DNA, 25 bp, Homo sapien
tcttgtccaagtccacttgggagcc

SEQ ID NO: 3478232 - DNA, 25 bp, Homo sapien
cttgccaaaagggtccagcatggga

SEQ ID NO: 3478233 - DNA, 25 bp, Homo sapien
ctgctgccaccttgccaaaagggtc

SEQ ID NO: 3478234 - DNA, 25 bp, Homo sapien
gcccccaactctggtggggtatgac

SEQ ID NO: 3478235 - DNA, 25 bp, Homo sapien
tcaggcccccaactctggtggggta

SEQ ID NO: 3478236 - DNA, 25 bp, Homo sapien
ggcccccaactctggtggggtatga

SEQ ID NO: 3478237 - DNA, 25 bp, Homo sapien
caggcccccaactctggtggggtat

SEQ ID NO: 3478238 - DNA, 25 bp, Homo sapien
cagccctttttctgcatctgctcac

SEQ ID NO: 3478239 - DNA, 25 bp, Homo sapien
tcagccctttttctgcatctgctca

SEQ ID NO: 3478240 - DNA, 25 bp, Homo sapien
gctccccccgcaagctaaggataac

SEQ ID NO: 3478241 - DNA, 25 bp, Homo sapien
tccatcctgctatccagtcacttgg

SEQ ID NO: 3478242 - DNA, 25 bp, Homo sapien
ccctgccaacaattactctccatcc

SEQ ID NO: 3478243 - DNA, 25 bp, Homo sapien
tgtgaagctttcatgacccgctccc

SEQ ID NO: 3478244 - DNA, 25 bp, Homo sapien
agaacgccgccatggcttgaaggag

SEQ ID NO: 3478245 - DNA, 25 bp, Homo sapien
taactggcttttagcacacacaggc

SEQ ID NO: 3478246 - DNA, 25 bp, Homo sapien
tctcgatgcctcaggcttgtgaagg

SEQ ID NO: 3478247 - DNA, 25 bp, Homo sapien
acaggagccaaggcaagcgtgtccc

SEQ ID NO: 3478248 - DNA, 25 bp, Homo sapien
gctttgcgtccctcccctgcaagcc

SEQ ID NO: 3478249 - DNA, 25 bp, Homo sapien
tgctttgcgtccctcccctgcaagc

SEQ ID NO: 3478250 - DNA, 25 bp, Homo sapien
ctgctttgcgtccctcccctgcaag

SEQ ID NO: 3478251 - DNA, 25 bp, Homo sapien
aacagccttggcctgaatcttggcc

SEQ ID NO: 3478252 - DNA, 25 bp, Homo sapien
atgtgctctgagatatacgccctag

SEQ ID NO: 3478253 - DNA, 25 bp, Homo sapien
ctctggagtcctcgcaacagccttg

SEQ ID NO: 3478254 - DNA, 25 bp, Homo sapien
ccctagcaccagagatggactctgg

SEQ ID NO: 3478255 - DNA, 25 bp, Homo sapien
tttaggaggcaaatccgaccgagtc

SEQ ID NO: 3478256 - DNA, 25 bp, Homo sapien
gactggacaccaagcgtgggtcaag

SEQ ID NO: 3478257 - DNA, 25 bp, Homo sapien
gacctgcagctctagcaagatggga

SEQ ID NO: 3478258 - DNA, 25 bp, Homo sapien
gatcttgactggagcacgtggtccc

SEQ ID NO: 3478259 - DNA, 25 bp, Homo sapien
gagctatgccacgttccgtcccggg

SEQ ID NO: 3478260 - DNA, 25 bp, Homo sapien
ccgtggaacgtccaagtggtgcaga

SEQ ID NO: 3478261 - DNA, 25 bp, Homo sapien
tgcctctccgtggaacgtccaagtg

SEQ ID NO: 3478262 - DNA, 25 bp, Homo sapien
ggatctccggagactgggttctgtt

SEQ ID NO: 3478263 - DNA, 25 bp, Homo sapien
ctccacccaaccaatccccaggcag

SEQ ID NO: 3478264 - DNA, 25 bp, Homo sapien
ccacgttgttgccagattcatctcc

SEQ ID NO: 3478265 - DNA, 25 bp, Homo sapien
tcctgaagcatagctctgacagttc

SEQ ID NO: 3478266 - DNA, 25 bp, Homo sapien
gacagttcccaataagtgcttctct

SEQ ID NO: 3478267 - DNA, 25 bp, Homo sapien
ctgacagttcccaataagtgcttct

SEQ ID NO: 3478268 - DNA, 25 bp, Homo sapien
ggctaaggcttcagccatactttct

SEQ ID NO: 3478269 - DNA, 25 bp, Homo sapien
tctcagcctcaactgacaccagggt

SEQ ID NO: 3478270 - DNA, 25 bp, Homo sapien
ttagggcaagagggtagccatgcca

SEQ ID NO: 3478271 - DNA, 25 bp, Homo sapien
actttcttcatgggattcctcctcc

SEQ ID NO: 3478272 - DNA, 25 bp, Homo sapien
agcgtgatgaccatagtaattaggt

SEQ ID NO: 3478273 - DNA, 25 bp, Homo sapien
gttgctaagcgctgtgggatacaga

SEQ ID NO: 3478274 - DNA, 25 bp, Homo sapien
ttaaatgttgctaagcgctgtggga

SEQ ID NO: 3478275 - DNA, 25 bp, Homo sapien
gaccatagtaattaggtgctgtggc

SEQ ID NO: 3478276 - DNA, 25 bp, Homo sapien
ggatgtacagggcattaatattaac

SEQ ID NO: 3478277 - DNA, 25 bp, Homo sapien
ctcctggatcacctctttctggaaa

SEQ ID NO: 3478278 - DNA, 25 bp, Homo sapien
aacatgtactcaggatgtacagggc

SEQ ID NO: 3478279 - DNA, 25 bp, Homo sapien
ttctggaaacatgtactcaggatgt

SEQ ID NO: 3478280 - DNA, 25 bp, Homo sapien
tcctcaaggggcttaaggacccaca

SEQ ID NO: 3478281 - DNA, 25 bp, Homo sapien
ctttctaagttgttggatctaaggc

SEQ ID NO: 3478282 - DNA, 25 bp, Homo sapien
tgttggatctaaggccccagcctgt

SEQ ID NO: 3478283 - DNA, 25 bp, Homo sapien
cagcctgtatggacttggcaagtca

SEQ ID NO: 3478284 - DNA, 25 bp, Homo sapien
ccccagcctgtatggacttggcaag

SEQ ID NO: 3478285 - DNA, 25 bp, Homo sapien
aagaggccactgcttacaccacagg

SEQ ID NO: 3478286 - DNA, 25 bp, Homo sapien
tctagtaggcccacggtagtaaggc

SEQ ID NO: 3478287 - DNA, 25 bp, Homo sapien
caaaagctcccttcgatggcaagtt

SEQ ID NO: 3478288 - DNA, 25 bp, Homo sapien
tggtcctagggtaagagccttcgcc

SEQ ID NO: 3478289 - DNA, 25 bp, Homo sapien
tcttctaaagaacaggagtgtgggc

SEQ ID NO: 3478290 - DNA, 25 bp, Homo sapien
tattatagcactgcagtcacacagg

SEQ ID NO: 3478291 - DNA, 25 bp, Homo sapien
taagcacttagagcggtgtctctgg

SEQ ID NO: 3478292 - DNA, 25 bp, Homo sapien
tgcttcgctgggtactggagaccga

SEQ ID NO: 3478293 - DNA, 25 bp, Homo sapien
ccctgatccctgagtatttacgcca

SEQ ID NO: 3478294 - DNA, 25 bp, Homo sapien
atccctgatccctgagtatttacgc

SEQ ID NO: 3478295 - DNA, 25 bp, Homo sapien
tccctgatccctgagtatttacgcc

SEQ ID NO: 3478296 - DNA, 25 bp, Homo sapien
cctgatccctgagtatttacgccag

SEQ ID NO: 3478297 - DNA, 25 bp, Homo sapien
gaccttcaagaataaaaccatcatt

SEQ ID NO: 3478298 - DNA, 25 bp, Homo sapien
tgttccattgtatccagtggaacca

SEQ ID NO: 3478299 - DNA, 25 bp, Homo sapien
cagctttagaatccactttgacctt

SEQ ID NO: 3478300 - DNA, 25 bp, Homo sapien
tcttaccagaaccacttgatatgtt

SEQ ID NO: 3478301 - DNA, 25 bp, Homo sapien
cagcggcagcacaagttcatgacca

SEQ ID NO: 3478302 - DNA, 25 bp, Homo sapien
caagggagcatggtacatcagcggc

SEQ ID NO: 3478303 - DNA, 25 bp, Homo sapien
caaggtctcaagaaccaagggagca

SEQ ID NO: 3478304 - DNA, 25 bp, Homo sapien
gggtacagccaatcccaacagaggg

SEQ ID NO: 3478305 - DNA, 25 bp, Homo sapien
aatcctgagatagcaggttagagcc

SEQ ID NO: 3478306 - DNA, 25 bp, Homo sapien
gggaatcctgagatagcaggttaga

SEQ ID NO: 3478307 - DNA, 25 bp, Homo sapien
gtgggaatcctgagatagcaggtta

SEQ ID NO: 3478308 - DNA, 25 bp, Homo sapien
tcctgagatagcaggttagagcctt

SEQ ID NO: 3478309 - DNA, 25 bp, Homo sapien
agcacctctgaaggcgggatgagaa

SEQ ID NO: 3478310 - DNA, 25 bp, Homo sapien
gatgagaatccgctgtctgacagcc

SEQ ID NO: 3478311 - DNA, 25 bp, Homo sapien
tggtgcatctcgtgtttcctcagca

SEQ ID NO: 3478312 - DNA, 25 bp, Homo sapien
gggtacaacgggcacgctcaatgct

SEQ ID NO: 3478313 - DNA, 25 bp, Homo sapien
tgaattcttcaaggagtggtcattc

SEQ ID NO: 3478314 - DNA, 25 bp, Homo sapien
ctctgaattcttcaaggagtggtca

SEQ ID NO: 3478315 - DNA, 25 bp, Homo sapien
atttctctgaattcttcaaggagtg

SEQ ID NO: 3478316 - DNA, 25 bp, Homo sapien
aattcttcaaggagtggtcattcat

SEQ ID NO: 3478317 - DNA, 25 bp, Homo sapien
aatgggagcccctgttattcaaaat

SEQ ID NO: 3478318 - DNA, 25 bp, Homo sapien
gctgtactcccaggaccaagcttga

SEQ ID NO: 3478319 - DNA, 25 bp, Homo sapien
tattcaaaatcctagggagctagca

SEQ ID NO: 3478320 - DNA, 25 bp, Homo sapien
ccaagcttgacagtaggtatttgta

SEQ ID NO: 3478321 - DNA, 25 bp, Homo sapien
ctttggcttccaaatttgttcttgt

SEQ ID NO: 3478322 - DNA, 25 bp, Homo sapien
ggcccagcaccaccgttgacaaata

SEQ ID NO: 3478323 - DNA, 25 bp, Homo sapien
tcattactgagcagctaggcccagc

SEQ ID NO: 3478324 - DNA, 25 bp, Homo sapien
caacatgtgatttaagggctgcagc

SEQ ID NO: 3478325 - DNA, 25 bp, Homo sapien
cagtttcatctgaccttaattccaa

SEQ ID NO: 3478326 - DNA, 25 bp, Homo sapien
taattccaattcagtaattttctct

SEQ ID NO: 3478327 - DNA, 25 bp, Homo sapien
cttaattttagctattgcattttag

SEQ ID NO: 3478328 - DNA, 25 bp, Homo sapien
aaaactcacccatcaatttcttaat

SEQ ID NO: 3478329 - DNA, 25 bp, Homo sapien
cagatgggccaacatcttcataggc

SEQ ID NO: 3478330 - DNA, 25 bp, Homo sapien
tatcttcacagatgggccaacatct

SEQ ID NO: 3478331 - DNA, 25 bp, Homo sapien
gtgactgctatcttcacagatgggc

SEQ ID NO: 3478332 - DNA, 25 bp, Homo sapien
tgctatcttcacagatgggccaaca

SEQ ID NO: 3478333 - DNA, 25 bp, Homo sapien
cctctctgctgctgaagatcccaat

SEQ ID NO: 3478334 - DNA, 25 bp, Homo sapien
agatcccaatggcttccgcacgaac

SEQ ID NO: 3478335 - DNA, 25 bp, Homo sapien
cccagagtgtagtcgatcagcggtg

SEQ ID NO: 3478336 - DNA, 25 bp, Homo sapien
ccttcccccagagtgtagtcgatca

SEQ ID NO: 3478337 - DNA, 25 bp, Homo sapien
ccccggtggaacctcaagtctctga

SEQ ID NO: 3478338 - DNA, 25 bp, Homo sapien
gcccacagagggcagcgactggccc

SEQ ID NO: 3478339 - DNA, 25 bp, Homo sapien
gcgactggcccacggtcaccctgtc

SEQ ID NO: 3478340 - DNA, 25 bp, Homo sapien
tgagggcagcaactggcccacagag

SEQ ID NO: 3478341 - DNA, 25 bp, Homo sapien
ctcaagttccacctgtaggttacca

SEQ ID NO: 3478342 - DNA, 25 bp, Homo sapien
gttaccataggccagagagcacttc

SEQ ID NO: 3478343 - DNA, 25 bp, Homo sapien
gagagcacttcccagggtagctgga

SEQ ID NO: 3478344 - DNA, 25 bp, Homo sapien
cacctgtaggttaccataggccaga

SEQ ID NO: 3478345 - DNA, 25 bp, Homo sapien
tctgagggcctcatcgctgaatcca

SEQ ID NO: 3478346 - DNA, 25 bp, Homo sapien
accagcagagtctgcagcccgaggc

SEQ ID NO: 3478347 - DNA, 25 bp, Homo sapien
tcatcgctgaatccaccagcagagt

SEQ ID NO: 3478348 - DNA, 25 bp, Homo sapien
tgaatccaccagcagagtctgcagc

SEQ ID NO: 3478349 - DNA, 25 bp, Homo sapien
ctcccaggtcatgtcttttgacaga

SEQ ID NO: 3478350 - DNA, 25 bp, Homo sapien
tcccaggtcatgtcttttgacagac

SEQ ID NO: 3478351 - DNA, 25 bp, Homo sapien
aggtcatgtcttttgacagaccctt

SEQ ID NO: 3478352 - DNA, 25 bp, Homo sapien
ccaggtcatgtcttttgacagaccc

SEQ ID NO: 3478353 - DNA, 25 bp, Homo sapien
ctttctcagtgagacgagcaagctc

SEQ ID NO: 3478354 - DNA, 25 bp, Homo sapien
ttctcagtgagacgagcaagctcag

SEQ ID NO: 3478355 - DNA, 25 bp, Homo sapien
tctcagtgagacgagcaagctcaga

SEQ ID NO: 3478356 - DNA, 25 bp, Homo sapien
gtgctttctcagtgagacgagcaag

SEQ ID NO: 3478357 - DNA, 25 bp, Homo sapien
tgacactacaaagccagtgattctc

SEQ ID NO: 3478358 - DNA, 25 bp, Homo sapien
ctgacactacaaagccagtgattct

SEQ ID NO: 3478359 - DNA, 25 bp, Homo sapien
gctgacactacaaagccagtgattc

SEQ ID NO: 3478360 - DNA, 25 bp, Homo sapien
gggtaccaccagcctcgactgtcca

SEQ ID NO: 3478361 - DNA, 25 bp, Homo sapien
agggtaccaccagcctcgactgtcc

SEQ ID NO: 3478362 - DNA, 25 bp, Homo sapien
tctctctcagtaatacattctcccg

SEQ ID NO: 3478363 - DNA, 25 bp, Homo sapien
tctgagcagagcttttcagtggacg

SEQ ID NO: 3478364 - DNA, 25 bp, Homo sapien
agtaatacattctcccgacatccag

SEQ ID NO: 3478365 - DNA, 25 bp, Homo sapien
cttttcagtggacggagcgcagacg

SEQ ID NO: 3478366 - DNA, 25 bp, Homo sapien
tttccccagatgtgagagagccctg

SEQ ID NO: 3478367 - DNA, 25 bp, Homo sapien
gacaacttggtccagcataggatgg

SEQ ID NO: 3478368 - DNA, 25 bp, Homo sapien
tagtgccacaagcacaagacgtagc

SEQ ID NO: 3478369 - DNA, 25 bp, Homo sapien
tggcatttcaaagggaacctggctg

SEQ ID NO: 3478370 - DNA, 25 bp, Homo sapien
tcagatggaaaggatgattcatcct

SEQ ID NO: 3478371 - DNA, 25 bp, Homo sapien
atcagatggaaaggatgattcatcc

SEQ ID NO: 3478372 - DNA, 25 bp, Homo sapien
catttgttgtcttaccccagggctg

SEQ ID NO: 3478373 - DNA, 25 bp, Homo sapien
ttactagagcaggtcaaatagcctc

SEQ ID NO: 3478374 - DNA, 25 bp, Homo sapien
ttgtcatagtgtagtccaaagggac

SEQ ID NO: 3478375 - DNA, 25 bp, Homo sapien
ccatcagtagggaggatcaaagtca

SEQ ID NO: 3478376 - DNA, 25 bp, Homo sapien
agctgcaggtagaaagtgaggcctt

SEQ ID NO: 3478377 - DNA, 25 bp, Homo sapien
tagtcctggcatgcaatgacatcag

SEQ ID NO: 3478378 - DNA, 25 bp, Homo sapien
aagaagaaccccatccctggcgata

SEQ ID NO: 3478379 - DNA, 25 bp, Homo sapien
ggttatccgagctatcacctgtaga

SEQ ID NO: 3478380 - DNA, 25 bp, Homo sapien
ttggaggccagcacgagtgacagtg

SEQ ID NO: 3478381 - DNA, 25 bp, Homo sapien
gcagctctccttaagaccctggctt

SEQ ID NO: 3478382 - DNA, 25 bp, Homo sapien
gcagaactgaggttggaggccagca

SEQ ID NO: 3478383 - DNA, 25 bp, Homo sapien
gctctccttaagaccctggctttgc

SEQ ID NO: 3478384 - DNA, 25 bp, Homo sapien
tatgccatctgccagagagggtgcc

SEQ ID NO: 3478385 - DNA, 25 bp, Homo sapien
cagaaacagctgtatgccatctgcc

SEQ ID NO: 3478386 - DNA, 25 bp, Homo sapien
tgtatgccatctgccagagagggtg

SEQ ID NO: 3478387 - DNA, 25 bp, Homo sapien
tgccatctgccagagagggtgccac

SEQ ID NO: 3478388 - DNA, 25 bp, Homo sapien
ggccgaatcctggaactgtgccttt

SEQ ID NO: 3478389 - DNA, 25 bp, Homo sapien
ctcggcagggccgaatcctggaact

SEQ ID NO: 3478390 - DNA, 25 bp, Homo sapien
ctgtgcctttgacagaaaccgccat

SEQ ID NO: 3478391 - DNA, 25 bp, Homo sapien
gtgcctttgacagaaaccgccatcg

SEQ ID NO: 3478392 - DNA, 25 bp, Homo sapien
tagagacaatttggcctccaggtga

SEQ ID NO: 3478393 - DNA, 25 bp, Homo sapien
caggtgaattttcttgtcagtgacc

SEQ ID NO: 3478394 - DNA, 25 bp, Homo sapien
tgttattagagacaatttggcctcc

SEQ ID NO: 3478395 - DNA, 25 bp, Homo sapien
gaggattccagctggaatgcatgtc

SEQ ID NO: 3478396 - DNA, 25 bp, Homo sapien
ttgagtcatgccctttatcctggta

SEQ ID NO: 3478397 - DNA, 25 bp, Homo sapien
tatcctggtagacgagacaggagcc

SEQ ID NO: 3478398 - DNA, 25 bp, Homo sapien
ctggtagacgagacaggagccatct

SEQ ID NO: 3478399 - DNA, 25 bp, Homo sapien
catgccctttatcctggtagacgag

SEQ ID NO: 3478400 - DNA, 25 bp, Homo sapien
agcatctagagatggcaggactcgg

SEQ ID NO: 3478401 - DNA, 25 bp, Homo sapien
aatgcagcatctagagatggcagga

SEQ ID NO: 3478402 - DNA, 25 bp, Homo sapien
tgcagcatctagagatggcaggact

SEQ ID NO: 3478403 - DNA, 25 bp, Homo sapien
tattgggccgaaagtattggaaatg

SEQ ID NO: 3478404 - DNA, 25 bp, Homo sapien
ctgcggcagggcgtgccacctccat

SEQ ID NO: 3478405 - DNA, 25 bp, Homo sapien
agcacatctgggaagttgatcagct

SEQ ID NO: 3478406 - DNA, 25 bp, Homo sapien
tgcaggctcgcagcacatctgggaa

SEQ ID NO: 3478407 - DNA, 25 bp, Homo sapien
tctgggaagttgatcagctgcggca

SEQ ID NO: 3478408 - DNA, 25 bp, Homo sapien
tttccttgatcacagtcctccactg

SEQ ID NO: 3478409 - DNA, 25 bp, Homo sapien
aaaaattccaattgttaggagattg

SEQ ID NO: 3478410 - DNA, 25 bp, Homo sapien
atttttccttgatcacagtcctcca

SEQ ID NO: 3478411 - DNA, 25 bp, Homo sapien
ttccaattgttaggagattggcagc

SEQ ID NO: 3478412 - DNA, 25 bp, Homo sapien
agaggccaccagtgggggcccatca

SEQ ID NO: 3478413 - DNA, 25 bp, Homo sapien
catcagccatcagcacacagaccct

SEQ ID NO: 3478414 - DNA, 25 bp, Homo sapien
ctccatgcttcttgactgtccaggg

SEQ ID NO: 3478415 - DNA, 25 bp, Homo sapien
tgccagccctaatggggcttgagag

SEQ ID NO: 3478416 - DNA, 25 bp, Homo sapien
gaaagtgaaattgacattagtcatt

SEQ ID NO: 3478417 - DNA, 25 bp, Homo sapien
tgaaagtgaaattgacattagtcat

SEQ ID NO: 3478418 - DNA, 25 bp, Homo sapien
gatgaaagtgaaattgacattagtc

SEQ ID NO: 3478419 - DNA, 25 bp, Homo sapien
ctgatgaaagtgaaattgacattag

SEQ ID NO: 3478420 - DNA, 25 bp, Homo sapien
cagatccgattgagttttctctcca

SEQ ID NO: 3478421 - DNA, 25 bp, Homo sapien
cattggaaaagacgtggccacgttc

SEQ ID NO: 3478422 - DNA, 25 bp, Homo sapien
gagaaatgtagggagtgcccagatc

SEQ ID NO: 3478423 - DNA, 25 bp, Homo sapien
agacgtggccacgttcacagtcctc

SEQ ID NO: 3478424 - DNA, 25 bp, Homo sapien
ggagcccctttcgagtgtcagagca

SEQ ID NO: 3478425 - DNA, 25 bp, Homo sapien
gttttaatggacttgctaaatcata

SEQ ID NO: 3478426 - DNA, 25 bp, Homo sapien
aatttccaatgtttatgctctgtgg

SEQ ID NO: 3478427 - DNA, 25 bp, Homo sapien
tattgtctctccctacaagtaattt

SEQ ID NO: 3478428 - DNA, 25 bp, Homo sapien
gctttgattcagtttcccactcaga

SEQ ID NO: 3478429 - DNA, 25 bp, Homo sapien
tcaccgaggggggagtcaccaatga

SEQ ID NO: 3478430 - DNA, 25 bp, Homo sapien
tcagggcttggctgatccccgctat

SEQ ID NO: 3478431 - DNA, 25 bp, Homo sapien
agatggaagcccgaccacaggtcac

SEQ ID NO: 3478432 - DNA, 25 bp, Homo sapien
gcgctaccagatatgattcgccgtc

SEQ ID NO: 3478433 - DNA, 25 bp, Homo sapien
ctcggagccagcgtgctctgcacgt

SEQ ID NO: 3478434 - DNA, 25 bp, Homo sapien
cgctcgaggaatgcaggagctgact

SEQ ID NO: 3478435 - DNA, 25 bp, Homo sapien
atatgattcgccgtcaggctcgcgc

SEQ ID NO: 3478436 - DNA, 25 bp, Homo sapien
tgctgatggggcatgtggccttctc

SEQ ID NO: 3478437 - DNA, 25 bp, Homo sapien
gatggggcatgtggccttctcccac

SEQ ID NO: 3478438 - DNA, 25 bp, Homo sapien
gggcatgtggccttctcccacagac

SEQ ID NO: 3478439 - DNA, 25 bp, Homo sapien
cttgtgctgatggggcatgtggcct

SEQ ID NO: 3478440 - DNA, 25 bp, Homo sapien
gatacagtgcgactttgctctcccc

SEQ ID NO: 3478441 - DNA, 25 bp, Homo sapien
gtgtttgtgatacagtgcgactttg

SEQ ID NO: 3478442 - DNA, 25 bp, Homo sapien
ccaaactagggccatcaaactccac

SEQ ID NO: 3478443 - DNA, 25 bp, Homo sapien
tttgtgatacagtgcgactttgctc

SEQ ID NO: 3478444 - DNA, 25 bp, Homo sapien
tgaggatacctatagactataaggg

SEQ ID NO: 3478445 - DNA, 25 bp, Homo sapien
acctatagactataagggtgctagc

SEQ ID NO: 3478446 - DNA, 25 bp, Homo sapien
ggatacctatagactataagggtgc

SEQ ID NO: 3478447 - DNA, 25 bp, Homo sapien
tacctatagactataagggtgctag

SEQ ID NO: 3478448 - DNA, 25 bp, Homo sapien
ggatttatatcacagccagatagca

SEQ ID NO: 3478449 - DNA, 25 bp, Homo sapien
atggcacccaggcaactggcttgag

SEQ ID NO: 3478450 - DNA, 25 bp, Homo sapien
tgtcaagtgacaagtgatggcaccc

SEQ ID NO: 3478451 - DNA, 25 bp, Homo sapien
tagcatcttcgaaagctcatctgag

SEQ ID NO: 3478452 - DNA, 25 bp, Homo sapien
tcaaagagctggtttggtggggagt

SEQ ID NO: 3478453 - DNA, 25 bp, Homo sapien
tcctggtttacccagaggatggtgg

SEQ ID NO: 3478454 - DNA, 25 bp, Homo sapien
ttctctcccctccaatgccttcttc

SEQ ID NO: 3478455 - DNA, 25 bp, Homo sapien
tcttctctcccctttccatgtttaa

SEQ ID NO: 3478456 - DNA, 25 bp, Homo sapien
tctcccctccaatgccttcttctct

SEQ ID NO: 3478457 - DNA, 25 bp, Homo sapien
tctcccctttccatgtttaaatctc

SEQ ID NO: 3478458 - DNA, 25 bp, Homo sapien
atagtaatggtcagattcttcaggg

SEQ ID NO: 3478459 - DNA, 25 bp, Homo sapien
tctttctatagtaatggtcagattc

SEQ ID NO: 3478460 - DNA, 25 bp, Homo sapien
gaaattccagctagctccagtggaa

SEQ ID NO: 3478461 - DNA, 25 bp, Homo sapien
ctccagacttccatcattaggacaa

SEQ ID NO: 3478462 - DNA, 25 bp, Homo sapien
ctgctccccggggtccatccgagca

SEQ ID NO: 3478463 - DNA, 25 bp, Homo sapien
ccagcctccggcaacaggcaaaaca

SEQ ID NO: 3478464 - DNA, 25 bp, Homo sapien
ggggtccatccgagcaccggcagca

SEQ ID NO: 3478465 - DNA, 25 bp, Homo sapien
ccccagcctccggcaacaggcaaaa

SEQ ID NO: 3478466 - DNA, 25 bp, Homo sapien
cgccactgatagtgccaagcccctc

SEQ ID NO: 3478467 - DNA, 25 bp, Homo sapien
tccgccactgatagtgccaagcccc

SEQ ID NO: 3478468 - DNA, 25 bp, Homo sapien
ccctccgccactgatagtgccaagc

SEQ ID NO: 3478469 - DNA, 25 bp, Homo sapien
cctccgccactgatagtgccaagcc

SEQ ID NO: 3478470 - DNA, 25 bp, Homo sapien
gtgtaggagtaaaggcaggagccgg

SEQ ID NO: 3478471 - DNA, 25 bp, Homo sapien
ggggtgtaggagtaaaggcaggagc

SEQ ID NO: 3478472 - DNA, 25 bp, Homo sapien
tgtaggagtaaaggcaggagccggg

SEQ ID NO: 3478473 - DNA, 25 bp, Homo sapien
ggtgtaggagtaaaggcaggagccg

SEQ ID NO: 3478474 - DNA, 25 bp, Homo sapien
ctgccgttgcctgtctggtgccgaa

SEQ ID NO: 3478475 - DNA, 25 bp, Homo sapien
tcctgccgttgcctgtctggtgccg

SEQ ID NO: 3478476 - DNA, 25 bp, Homo sapien
cgttgcctgtctggtgccgaagccg

SEQ ID NO: 3478477 - DNA, 25 bp, Homo sapien
tgcctgtctggtgccgaagccggct

SEQ ID NO: 3478478 - DNA, 25 bp, Homo sapien
ctgatgccaccgacggctctgctgc

SEQ ID NO: 3478479 - DNA, 25 bp, Homo sapien
agctggccgccctgatgccaccgac

SEQ ID NO: 3478480 - DNA, 25 bp, Homo sapien
gggtgtgcgaggcccactccggctg

SEQ ID NO: 3478481 - DNA, 25 bp, Homo sapien
ggccgccctgatgccaccgacggct

SEQ ID NO: 3478482 - DNA, 25 bp, Homo sapien
cagcagctggcagggtgcgggtaca

SEQ ID NO: 3478483 - DNA, 25 bp, Homo sapien
tggtctttggtaggcaggttgctcc

SEQ ID NO: 3478484 - DNA, 25 bp, Homo sapien
caggtaggcagattggctccaagcg

SEQ ID NO: 3478485 - DNA, 25 bp, Homo sapien
cagggtgcgggtacatcctctctgg

SEQ ID NO: 3478486 - DNA, 25 bp, Homo sapien
tgaggatgtggaaggagggtaatcg

SEQ ID NO: 3478487 - DNA, 25 bp, Homo sapien
gattgaggatgtggaaggagggtaa

SEQ ID NO: 3478488 - DNA, 25 bp, Homo sapien
ctgattgaggatgtggaaggagggt

SEQ ID NO: 3478489 - DNA, 25 bp, Homo sapien
aggatgtggaaggagggtaatcggg

SEQ ID NO: 3478490 - DNA, 25 bp, Homo sapien
caaagagtttagcactcctggtacc

SEQ ID NO: 3478491 - DNA, 25 bp, Homo sapien
aatgcaaagagtttagcactcctgg

SEQ ID NO: 3478492 - DNA, 25 bp, Homo sapien
gaagaaggaggctgccatagatccc

SEQ ID NO: 3478493 - DNA, 25 bp, Homo sapien
tagatcccaactgctgtaaatgcag

SEQ ID NO: 3478494 - DNA, 25 bp, Homo sapien
ctttcctcacgtaggacaccctctg

SEQ ID NO: 3478495 - DNA, 25 bp, Homo sapien
cctcacgtaggacaccctctggctt

SEQ ID NO: 3478496 - DNA, 25 bp, Homo sapien
tcacgtaggacaccctctggcttag

SEQ ID NO: 3478497 - DNA, 25 bp, Homo sapien
acgtaggacaccctctggcttaggg

SEQ ID NO: 3478498 - DNA, 25 bp, Homo sapien
ctagattctgctctaggaatccatc

SEQ ID NO: 3478499 - DNA, 25 bp, Homo sapien
ggaatccatccctgttgaccccatg

SEQ ID NO: 3478500 - DNA, 25 bp, Homo sapien
ctgctgccaggtcccctagattctg

SEQ ID NO: 3478501 - DNA, 25 bp, Homo sapien
cctgccaatgtgctgtgacaatgca

SEQ ID NO: 3478502 - DNA, 25 bp, Homo sapien
gttttgtctggtcagagctttcccc

SEQ ID NO: 3478503 - DNA, 25 bp, Homo sapien
tgttttgtctggtcagagctttccc

SEQ ID NO: 3478504 - DNA, 25 bp, Homo sapien
tttgtctggtcagagctttccccca

SEQ ID NO: 3478505 - DNA, 25 bp, Homo sapien
ttgtctggtcagagctttcccccag

SEQ ID NO: 3478506 - DNA, 25 bp, Homo sapien
ctgggcaaggtctaccacagctacc

SEQ ID NO: 3478507 - DNA, 25 bp, Homo sapien
ggcaaggtctaccacagctaccaag

SEQ ID NO: 3478508 - DNA, 25 bp, Homo sapien
caaggtctaccacagctaccaaggt

SEQ ID NO: 3478509 - DNA, 25 bp, Homo sapien
tgggcaaggtctaccacagctacca

SEQ ID NO: 3478510 - DNA, 25 bp, Homo sapien
ccaccactggccttctgaaattctt

SEQ ID NO: 3478511 - DNA, 25 bp, Homo sapien
gcaggagtggcacttcgtctgcttc

SEQ ID NO: 3478512 - DNA, 25 bp, Homo sapien
aggagtggcacttcgtctgcttctt

SEQ ID NO: 3478513 - DNA, 25 bp, Homo sapien
tcccagttattgcaagttcttccca

SEQ ID NO: 3478514 - DNA, 25 bp, Homo sapien
ggtggcaaaatctagggagcccttc

SEQ ID NO: 3478515 - DNA, 25 bp, Homo sapien
tggtggcaaaatctagggagccctt

SEQ ID NO: 3478516 - DNA, 25 bp, Homo sapien
ccttctgtccactaactttggactt

SEQ ID NO: 3478517 - DNA, 25 bp, Homo sapien
taactttggacttcactactgtggt

SEQ ID NO: 3478518 - DNA, 25 bp, Homo sapien
gatgaatcggcagagatccctgctg

SEQ ID NO: 3478519 - DNA, 25 bp, Homo sapien
tgagtgagaagaaacaccctccttg

SEQ ID NO: 3478520 - DNA, 25 bp, Homo sapien
aactcgcctgagtgggcaagccaga

SEQ ID NO: 3478521 - DNA, 25 bp, Homo sapien
tgcgtgacatccctgactgagtgag

SEQ ID NO: 3478522 - DNA, 25 bp, Homo sapien
gatcccatggagatgaacagcactt

SEQ ID NO: 3478523 - DNA, 25 bp, Homo sapien
catggagatgaacagcacttgacgc

SEQ ID NO: 3478524 - DNA, 25 bp, Homo sapien
gatgaacagcacttgacgcactcca

SEQ ID NO: 3478525 - DNA, 25 bp, Homo sapien
cacccacacgatcccatggagatga

SEQ ID NO: 3478526 - DNA, 25 bp, Homo sapien
gatggcagaatctaatccctggcat

SEQ ID NO: 3478527 - DNA, 25 bp, Homo sapien
agaatctaatccctggcatttcagg

SEQ ID NO: 3478528 - DNA, 25 bp, Homo sapien
ctgcttagctcctcgaggccacctg

SEQ ID NO: 3478529 - DNA, 25 bp, Homo sapien
tggcagaatctaatccctggcattt

SEQ ID NO: 3478530 - DNA, 25 bp, Homo sapien
catttgtgcaccttggcgatggcaa

SEQ ID NO: 3478531 - DNA, 25 bp, Homo sapien
gactgctagacgtgaataccccaaa

SEQ ID NO: 3478532 - DNA, 25 bp, Homo sapien
tatgcaactataggaagagacctcc

SEQ ID NO: 3478533 - DNA, 25 bp, Homo sapien
gatctacatctaattgccgggccca

SEQ ID NO: 3478534 - DNA, 25 bp, Homo sapien
ggagtcgtggagtcacacatctgaa

SEQ ID NO: 3478535 - DNA, 25 bp, Homo sapien
taaaccctatgaggtaaacagatgc

SEQ ID NO: 3478536 - DNA, 25 bp, Homo sapien
catctgaacgctagtgccatcaggg

SEQ ID NO: 3478537 - DNA, 25 bp, Homo sapien
ccctggcagagaagcgtcctcatag

SEQ ID NO: 3478538 - DNA, 25 bp, Homo sapien
ggctcagttccttaactccaattga

SEQ ID NO: 3478539 - DNA, 25 bp, Homo sapien
cagaggctcagttccttaactccaa

SEQ ID NO: 3478540 - DNA, 25 bp, Homo sapien
tccttaactccaattgaacagtaca

SEQ ID NO: 3478541 - DNA, 25 bp, Homo sapien
actccaattgaacagtacactttca

SEQ ID NO: 3478542 - DNA, 25 bp, Homo sapien
gcagagctgggtcatctccttccgg

SEQ ID NO: 3478543 - DNA, 25 bp, Homo sapien
agctgggtcatctccttccgggcca

SEQ ID NO: 3478544 - DNA, 25 bp, Homo sapien
ctaggcagagctgggtcatctcctt

SEQ ID NO: 3478545 - DNA, 25 bp, Homo sapien
agagctgggtcatctccttccgggc

SEQ ID NO: 3478546 - DNA, 25 bp, Homo sapien
tggggaactgtgtgaagctgtagcg

SEQ ID NO: 3478547 - DNA, 25 bp, Homo sapien
tagcggcacacggaggggtcactca

SEQ ID NO: 3478548 - DNA, 25 bp, Homo sapien
gaagtggtgtaaacagatgctttca

SEQ ID NO: 3478549 - DNA, 25 bp, Homo sapien
tcaggcagccattcttggaagaaat

SEQ ID NO: 3478550 - DNA, 25 bp, Homo sapien
agtcagcatcccacaaccttgcatc

SEQ ID NO: 3478551 - DNA, 25 bp, Homo sapien
accagacttggcctcactgccgcag

SEQ ID NO: 3478552 - DNA, 25 bp, Homo sapien
cagacttggcctcactgccgcagca

SEQ ID NO: 3478553 - DNA, 25 bp, Homo sapien
ccacaaccttgcatcctgatctgtt

SEQ ID NO: 3478554 - DNA, 25 bp, Homo sapien
actgagataccactgtacaaccact

SEQ ID NO: 3478555 - DNA, 25 bp, Homo sapien
ggaaaatagcatagccactatggaa

SEQ ID NO: 3478556 - DNA, 25 bp, Homo sapien
tatatgatgtcttggcaggatgaga

SEQ ID NO: 3478557 - DNA, 25 bp, Homo sapien
ttgttggtgggaacggaaaatagca

SEQ ID NO: 3478558 - DNA, 25 bp, Homo sapien
tcgtgcagcgcttcagcttgagcgg

SEQ ID NO: 3478559 - DNA, 25 bp, Homo sapien
gggctccctcgatgcgcttcctagg

SEQ ID NO: 3478560 - DNA, 25 bp, Homo sapien
ggaagacacagctcgtgcagcgctt

SEQ ID NO: 3478561 - DNA, 25 bp, Homo sapien
gggtcttttgctcgcatcctgcccg

SEQ ID NO: 3478562 - DNA, 25 bp, Homo sapien
gaggatggtggaaatagtaatgccc

SEQ ID NO: 3478563 - DNA, 25 bp, Homo sapien
ttacaagtgcgtggtcaagacagag

SEQ ID NO: 3478564 - DNA, 25 bp, Homo sapien
gctctgcgttcaccaagctcaggga

SEQ ID NO: 3478565 - DNA, 25 bp, Homo sapien
caaggtatcccggtgtgccaagaat

SEQ ID NO: 3478566 - DNA, 25 bp, Homo sapien
cagggaatccccgagaagctcattc

SEQ ID NO: 3478567 - DNA, 25 bp, Homo sapien
tagtcctcggctcttaaatgtctgg

SEQ ID NO: 3478568 - DNA, 25 bp, Homo sapien
tcctagggtgttcggatgaccagct

SEQ ID NO: 3478569 - DNA, 25 bp, Homo sapien
ggcactgatttaggctgagagctca

SEQ ID NO: 3478570 - DNA, 25 bp, Homo sapien
ctcattatgagggacaagctaggtg

SEQ ID NO: 3478571 - DNA, 25 bp, Homo sapien
acacggggacattcacggcagcatg

SEQ ID NO: 3478572 - DNA, 25 bp, Homo sapien
tcacacggggacattcacggcagca

SEQ ID NO: 3478573 - DNA, 25 bp, Homo sapien
cacggggacattcacggcagcatgg

SEQ ID NO: 3478574 - DNA, 25 bp, Homo sapien
acggggacattcacggcagcatggg

SEQ ID NO: 3478575 - DNA, 25 bp, Homo sapien
tgtggctcctgtctaggcagcagag

SEQ ID NO: 3478576 - DNA, 25 bp, Homo sapien
tgagtgctggagcatgctctcagat

SEQ ID NO: 3478577 - DNA, 25 bp, Homo sapien
ggcagtttctgtggagggtattgta

SEQ ID NO: 3478578 - DNA, 25 bp, Homo sapien
tgctggagcatgctctcagatgcct

SEQ ID NO: 3478579 - DNA, 25 bp, Homo sapien
gagatcctcgtataggagcccttga

SEQ ID NO: 3478580 - DNA, 25 bp, Homo sapien
ggcttgtacaaagggcatcacctgg

SEQ ID NO: 3478581 - DNA, 25 bp, Homo sapien
tgcagattccccaaaagcgattttt

SEQ ID NO: 3478582 - DNA, 25 bp, Homo sapien
gacacctccaataaaagctgcagat

SEQ ID NO: 3478583 - DNA, 25 bp, Homo sapien
cattcgggcggctccagaattccta

SEQ ID NO: 3478584 - DNA, 25 bp, Homo sapien
ttgccacgaaactgtttccagagga

SEQ ID NO: 3478585 - DNA, 25 bp, Homo sapien
ccagaattcctaattctttgccacg

SEQ ID NO: 3478586 - DNA, 25 bp, Homo sapien
atcccagctggcattcgggcggctc

SEQ ID NO: 3478587 - DNA, 25 bp, Homo sapien
tctggcccttggtggctaccaccat

SEQ ID NO: 3478588 - DNA, 25 bp, Homo sapien
ctcatctttcctgtgtcgtcctctt

SEQ ID NO: 3478589 - DNA, 25 bp, Homo sapien
tcctcctcatctttcctgtgtcgtc

SEQ ID NO: 3478590 - DNA, 25 bp, Homo sapien
cctcctcatctttcctgtgtcgtcc

SEQ ID NO: 3478591 - DNA, 25 bp, Homo sapien
tcctcatctttcctgtgtcgtcctc

SEQ ID NO: 3478592 - DNA, 25 bp, Homo sapien
ggcaaagagcagccggggcccatcc

SEQ ID NO: 3478593 - DNA, 25 bp, Homo sapien
gggtcacctgctgagaagaggccac

SEQ ID NO: 3478594 - DNA, 25 bp, Homo sapien
gggcaaagagcagccggggcccatc

SEQ ID NO: 3478595 - DNA, 25 bp, Homo sapien
ctgctgagaagaggccacttttctc

SEQ ID NO: 3478596 - DNA, 25 bp, Homo sapien
atgtctttcagctgcgggaggttat

SEQ ID NO: 3478597 - DNA, 25 bp, Homo sapien
tgtctttcagctgcgggaggttatt

SEQ ID NO: 3478598 - DNA, 25 bp, Homo sapien
tttcagctgcgggaggttatttgtg

SEQ ID NO: 3478599 - DNA, 25 bp, Homo sapien
tctttcagctgcgggaggttatttg

SEQ ID NO: 3478600 - DNA, 25 bp, Homo sapien
aggtggcgcggacgcacgtgggtag

SEQ ID NO: 3478601 - DNA, 25 bp, Homo sapien
cgtgggtagcgctcagcagggcgcc

SEQ ID NO: 3478602 - DNA, 25 bp, Homo sapien
gggtcgcccgcgaggtggcgcggac

SEQ ID NO: 3478603 - DNA, 25 bp, Homo sapien
caggacccgccttaaagagaccgcg

SEQ ID NO: 3478604 - DNA, 25 bp, Homo sapien
ggcgcacccgttcccagcagcggcg

SEQ ID NO: 3478605 - DNA, 25 bp, Homo sapien
gccggcgcacccgttcccagcagcg

SEQ ID NO: 3478606 - DNA, 25 bp, Homo sapien
acccgttcccagcagcggcgcgagc

SEQ ID NO: 3478607 - DNA, 25 bp, Homo sapien
gcacccgttcccagcagcggcgcga

SEQ ID NO: 3478608 - DNA, 25 bp, Homo sapien
cgtccggcagccgcacgcggacccg

SEQ ID NO: 3478609 - DNA, 25 bp, Homo sapien
ctggccgtccggcagccgcacgcgg

SEQ ID NO: 3478610 - DNA, 25 bp, Homo sapien
ggccgtccggcagccgcacgcggac

SEQ ID NO: 3478611 - DNA, 25 bp, Homo sapien
tccggcagccgcacgcggacccgca

SEQ ID NO: 3478612 - DNA, 25 bp, Homo sapien
ggctgatgctgtccgcgtcgctgtc

SEQ ID NO: 3478613 - DNA, 25 bp, Homo sapien
tcgggcttgcgcagctcgaggctga

SEQ ID NO: 3478614 - DNA, 25 bp, Homo sapien
ggagacgagggtgccgtcgggcttg

SEQ ID NO: 3478615 - DNA, 25 bp, Homo sapien
ttgaagtcggcggtgaaggagacga

SEQ ID NO: 3478616 - DNA, 25 bp, Homo sapien
cacaccagcgtgctccgctaatttt

SEQ ID NO: 3478617 - DNA, 25 bp, Homo sapien
ccacaccgagccgaagtctttttct

SEQ ID NO: 3478618 - DNA, 25 bp, Homo sapien
agacaggggtctcgtttggcctgaa

SEQ ID NO: 3478619 - DNA, 25 bp, Homo sapien
tctcgtttggcctgaagatttcata

SEQ ID NO: 3478620 - DNA, 25 bp, Homo sapien
ccctgggtggactgtcaggacaagg

SEQ ID NO: 3478621 - DNA, 25 bp, Homo sapien
ctgacgcgggtagaggcaaacaggt

SEQ ID NO: 3478622 - DNA, 25 bp, Homo sapien
caattttggcacttcaaggagaagg

SEQ ID NO: 3478623 - DNA, 25 bp, Homo sapien
atgaagagctcaaggatcctccagg

SEQ ID NO: 3478624 - DNA, 25 bp, Homo sapien
ctttgctgcgtcaaggtccagagca

SEQ ID NO: 3478625 - DNA, 25 bp, Homo sapien
ccagagcagtagtgtgggagagagt

SEQ ID NO: 3478626 - DNA, 25 bp, Homo sapien
gggttgacgactgtgactgctttgc

SEQ ID NO: 3478627 - DNA, 25 bp, Homo sapien
tatgtgtcctccagtgggttgacga

SEQ ID NO: 3478628 - DNA, 25 bp, Homo sapien
ccccaggtgattgtgaggtgcggca

SEQ ID NO: 3478629 - DNA, 25 bp, Homo sapien
tttcagagctgtggctcggtcagcc

SEQ ID NO: 3478630 - DNA, 25 bp, Homo sapien
tgagctgcggcattctttcagagct

SEQ ID NO: 3478631 - DNA, 25 bp, Homo sapien
aaaaccaaaacgactgctgcctgac

SEQ ID NO: 3478632 - DNA, 25 bp, Homo sapien
tccatccactggaggtaagagcgtg

SEQ ID NO: 3478633 - DNA, 25 bp, Homo sapien
ccaagtctgtacaaacgagggtctc

SEQ ID NO: 3478634 - DNA, 25 bp, Homo sapien
taccgggatcttttgctaggactcc

SEQ ID NO: 3478635 - DNA, 25 bp, Homo sapien
tcatggtaccatggcagacaggcag

SEQ ID NO: 3478636 - DNA, 25 bp, Homo sapien
gctgcagcaacatgcttaacggtgg

SEQ ID NO: 3478637 - DNA, 25 bp, Homo sapien
cactgttgtctctggtgtaccggca

SEQ ID NO: 3478638 - DNA, 25 bp, Homo sapien
ctctgttctgcgaagggcctcttag

SEQ ID NO: 3478639 - DNA, 25 bp, Homo sapien
gcctcttagtcactgcgcacactga

SEQ ID NO: 3478640 - DNA, 25 bp, Homo sapien
tgaatccctagtggcagccacttca

SEQ ID NO: 3478641 - DNA, 25 bp, Homo sapien
cacttgccaacttcaaggatgttag

SEQ ID NO: 3478642 - DNA, 25 bp, Homo sapien
ccaacttcaaggatgttagctcctc

SEQ ID NO: 3478643 - DNA, 25 bp, Homo sapien
ttcaacacttgccaacttcaaggat

SEQ ID NO: 3478644 - DNA, 25 bp, Homo sapien
gctttatgtggatcaactgcgcccc

SEQ ID NO: 3478645 - DNA, 25 bp, Homo sapien
tcaccactgtcctgactgctgcagg

SEQ ID NO: 3478646 - DNA, 25 bp, Homo sapien
tgtgctgctgactcagtgctcctga

SEQ ID NO: 3478647 - DNA, 25 bp, Homo sapien
tctgtcagccgaatcccaaaggtca

SEQ ID NO: 3478648 - DNA, 25 bp, Homo sapien
gaacgaatgaatgctctagggcctc

SEQ ID NO: 3478649 - DNA, 25 bp, Homo sapien
tagatgtacctatggcctagacagg

SEQ ID NO: 3478650 - DNA, 25 bp, Homo sapien
tactatcacccgagtggccgaatgc

SEQ ID NO: 3478651 - DNA, 25 bp, Homo sapien
gaatgagcgatgctgtgtcacccct

SEQ ID NO: 3478652 - DNA, 25 bp, Homo sapien
ggaagaactggagcatactacatcc

SEQ ID NO: 3478653 - DNA, 25 bp, Homo sapien
aaatagtgtttgctagggtcctcgt

SEQ ID NO: 3478654 - DNA, 25 bp, Homo sapien
ggagcatactacatccagggccagg

SEQ ID NO: 3478655 - DNA, 25 bp, Homo sapien
gtgtggcaagtaccctggggaaata

SEQ ID NO: 3478656 - DNA, 25 bp, Homo sapien
ggtgaaagtcccctcagatgctaag

SEQ ID NO: 3478657 - DNA, 25 bp, Homo sapien
gatgacgtacttcatgtggcctaac

SEQ ID NO: 3478658 - DNA, 25 bp, Homo sapien
gaagagcctacaacagggactgcag

SEQ ID NO: 3478659 - DNA, 25 bp, Homo sapien
gggtctatttggtaacaggactcca

SEQ ID NO: 3478660 - DNA, 25 bp, Homo sapien
gccaggatcttaatccagacagtct

SEQ ID NO: 3478661 - DNA, 25 bp, Homo sapien
tgattgttaccgagcttggattagg

SEQ ID NO: 3478662 - DNA, 25 bp, Homo sapien
ctaagaggaaacatagccaggatct

SEQ ID NO: 3478663 - DNA, 25 bp, Homo sapien
tgttcaacgtcatggactaagagga

SEQ ID NO: 3478664 - DNA, 25 bp, Homo sapien
taggtggtctgcaacaaacgagtgc

SEQ ID NO: 3478665 - DNA, 25 bp, Homo sapien
tgtaggtgaccagcaagcatcgtag

SEQ ID NO: 3478666 - DNA, 25 bp, Homo sapien
caatacatgcggcaagggactcaca

SEQ ID NO: 3478667 - DNA, 25 bp, Homo sapien
tagtgggtcccagtcagaagtggtc

SEQ ID NO: 3478668 - DNA, 25 bp, Homo sapien
ccaggatcagggcccggaagacctt

SEQ ID NO: 3478669 - DNA, 25 bp, Homo sapien
cccaggatcagggcccggaagacct

SEQ ID NO: 3478670 - DNA, 25 bp, Homo sapien
tcccccaggatcagggcccggaaga

SEQ ID NO: 3478671 - DNA, 25 bp, Homo sapien
ctgccggagcttggccatggcctca

SEQ ID NO: 3478672 - DNA, 25 bp, Homo sapien
tggggatgatctcattgtgctgcag

SEQ ID NO: 3478673 - DNA, 25 bp, Homo sapien
cggagcttggccatggcctcactgg

SEQ ID NO: 3478674 - DNA, 25 bp, Homo sapien
gcctcactggggatgatctcattgt

SEQ ID NO: 3478675 - DNA, 25 bp, Homo sapien
ctctggaatcacgtactttccaaca

SEQ ID NO: 3478676 - DNA, 25 bp, Homo sapien
tctggaatcacgtactttccaacat

SEQ ID NO: 3478677 - DNA, 25 bp, Homo sapien
accggacatcctcctggcgggtgta

SEQ ID NO: 3478678 - DNA, 25 bp, Homo sapien
gggtgtagatggcatccacggcctc

SEQ ID NO: 3478679 - DNA, 25 bp, Homo sapien
tggctgaagttgacagcgacatcca

SEQ ID NO: 3478680 - DNA, 25 bp, Homo sapien
acggcctcggcacacacgttgtgga

SEQ ID NO: 3478681 - DNA, 25 bp, Homo sapien
gacacttatgtcaagcttgcggcat

SEQ ID NO: 3478682 - DNA, 25 bp, Homo sapien
aagtgacatctgagtagggctaggc

SEQ ID NO: 3478683 - DNA, 25 bp, Homo sapien
ggtatttctaaatctgggcctgccc

SEQ ID NO: 3478684 - DNA, 25 bp, Homo sapien
gaaggtaccggcctgattaggctca

SEQ ID NO: 3478685 - DNA, 25 bp, Homo sapien
ggcacgtagaagtcgaagctgtagc

SEQ ID NO: 3478686 - DNA, 25 bp, Homo sapien
ggcagctgcggatgccacacttgta

SEQ ID NO: 3478687 - DNA, 25 bp, Homo sapien
gagcctcgaacacagaactgtccac

SEQ ID NO: 3478688 - DNA, 25 bp, Homo sapien
tcgcggctgtggcagtacttgagca

SEQ ID NO: 3478689 - DNA, 25 bp, Homo sapien
tccgggaaaggcactcgtggtctgt

SEQ ID NO: 3478690 - DNA, 25 bp, Homo sapien
tctaaacgttcaaggagttcaacag

SEQ ID NO: 3478691 - DNA, 25 bp, Homo sapien
gttcaacagaacaaccagaggccat

SEQ ID NO: 3478692 - DNA, 25 bp, Homo sapien
tgcctgctctggaggcaacgtccag

SEQ ID NO: 3478693 - DNA, 25 bp, Homo sapien
ttctgactggcttactacggttgca

SEQ ID NO: 3478694 - DNA, 25 bp, Homo sapien
cactttctgacatcaggtggcagca

SEQ ID NO: 3478695 - DNA, 25 bp, Homo sapien
ccaagataggccactgctagggtgt

SEQ ID NO: 3478696 - DNA, 25 bp, Homo sapien
gtaagtagccgagcccagatctgaa

SEQ ID NO: 3478697 - DNA, 25 bp, Homo sapien
ggaagaccttggagataacccagtg

SEQ ID NO: 3478698 - DNA, 25 bp, Homo sapien
tcagatacaatgctggcctcgagcc

SEQ ID NO: 3478699 - DNA, 25 bp, Homo sapien
tgaaggcctcccttggctaacaagc

SEQ ID NO: 3478700 - DNA, 25 bp, Homo sapien
taggcgattagacatggaatgcccg

SEQ ID NO: 3478701 - DNA, 25 bp, Homo sapien
cccgtgggatcagcgtatagacaag

SEQ ID NO: 3478702 - DNA, 25 bp, Homo sapien
gccacgagggtggtgatattcacat

SEQ ID NO: 3478703 - DNA, 25 bp, Homo sapien
caaagggcactgatccccgtgggat

SEQ ID NO: 3478704 - DNA, 25 bp, Homo sapien
atgggaaggacctggaatctgccct

SEQ ID NO: 3478705 - DNA, 25 bp, Homo sapien
cagtcaacgcagtgacaggtgctcc

SEQ ID NO: 3478706 - DNA, 25 bp, Homo sapien
tttgaggccggcattggacctgagc

SEQ ID NO: 3478707 - DNA, 25 bp, Homo sapien
gttgggctatccgtcctgttgctgg

SEQ ID NO: 3478708 - DNA, 25 bp, Homo sapien
gaaccctagttggagtcagccagct

SEQ ID NO: 3478709 - DNA, 25 bp, Homo sapien
cccagccggggcccctgcgaagcca

SEQ ID NO: 3478710 - DNA, 25 bp, Homo sapien
ccccaggcggggccaaagccagcgc

SEQ ID NO: 3478711 - DNA, 25 bp, Homo sapien
agccggggcccctgcgaagccaggg

SEQ ID NO: 3478712 - DNA, 25 bp, Homo sapien
caggcggggccaaagccagcgcccc

SEQ ID NO: 3478713 - DNA, 25 bp, Homo sapien
ctgtgtgcatggactccagattcac

SEQ ID NO: 3478714 - DNA, 25 bp, Homo sapien
tgtgtgcatggactccagattcacc

SEQ ID NO: 3478715 - DNA, 25 bp, Homo sapien
agagtgctgcgagcatccgtggaat

SEQ ID NO: 3478716 - DNA, 25 bp, Homo sapien
gagcatccgtggaatcggctacatc

SEQ ID NO: 3478717 - DNA, 25 bp, Homo sapien
cctggctgagagtgctgcgagcatc

SEQ ID NO: 3478718 - DNA, 25 bp, Homo sapien
tggaatcggctacatccccactcat

SEQ ID NO: 3478719 - DNA, 25 bp, Homo sapien
ttaattcatgcactgctgagaaggt

SEQ ID NO: 3478720 - DNA, 25 bp, Homo sapien
gagacaaaccaccccttaattcatg

SEQ ID NO: 3478721 - DNA, 25 bp, Homo sapien
cttaattcatgcactgctgagaagg

SEQ ID NO: 3478722 - DNA, 25 bp, Homo sapien
gacaaaccaccccttaattcatgca

SEQ ID NO: 3478723 - DNA, 25 bp, Homo sapien
gatttcacgcagcacagggggtgct

SEQ ID NO: 3478724 - DNA, 25 bp, Homo sapien
tcacgcagcacagggggtgctttca

SEQ ID NO: 3478725 - DNA, 25 bp, Homo sapien
ccttggggatttcacgcagcacagg

SEQ ID NO: 3478726 - DNA, 25 bp, Homo sapien
cttggggatttcacgcagcacaggg

SEQ ID NO: 3478727 - DNA, 25 bp, Homo sapien
tgttggcgtgggaatctatggatga

SEQ ID NO: 3478728 - DNA, 25 bp, Homo sapien
gctgctttatttgataaggttctct

SEQ ID NO: 3478729 - DNA, 25 bp, Homo sapien
agtcatggtacggatgtgagctgct

SEQ ID NO: 3478730 - DNA, 25 bp, Homo sapien
tagttgtaagtcatggtacggatgt

SEQ ID NO: 3478731 - DNA, 25 bp, Homo sapien
gactcatcgaagacccaacttaacc

SEQ ID NO: 3478732 - DNA, 25 bp, Homo sapien
atgtctgaggactcatcgaagaccc

SEQ ID NO: 3478733 - DNA, 25 bp, Homo sapien
caggactgtgcatctccaccaaaca

SEQ ID NO: 3478734 - DNA, 25 bp, Homo sapien
aggactgtgcatctccaccaaacag

SEQ ID NO: 3478735 - DNA, 25 bp, Homo sapien
tttccctcccagaatcttgtcactg

SEQ ID NO: 3478736 - DNA, 25 bp, Homo sapien
ttccctcccagaatcttgtcactgt

SEQ ID NO: 3478737 - DNA, 25 bp, Homo sapien
ttcattcttatctgctgtggtatct

SEQ ID NO: 3478738 - DNA, 25 bp, Homo sapien
tggagcctgatgatggagtttcccc

SEQ ID NO: 3478739 - DNA, 25 bp, Homo sapien
tcttatctgctgtggtatctctcat

SEQ ID NO: 3478740 - DNA, 25 bp, Homo sapien
ctgaggatgcatctgctccacttgg

SEQ ID NO: 3478741 - DNA, 25 bp, Homo sapien
ctgcctgttgaaatctaggccattt

SEQ ID NO: 3478742 - DNA, 25 bp, Homo sapien
tgttgaaatctaggccatttcgatc

SEQ ID NO: 3478743 - DNA, 25 bp, Homo sapien
gaaatctaggccatttcgatcattt

SEQ ID NO: 3478744 - DNA, 25 bp, Homo sapien
gcctgttgaaatctaggccatttcg

SEQ ID NO: 3478745 - DNA, 25 bp, Homo sapien
caccaggaagtacaggactggaggc

SEQ ID NO: 3478746 - DNA, 25 bp, Homo sapien
gtgtccaccaggaagtacaggactg

SEQ ID NO: 3478747 - DNA, 25 bp, Homo sapien
tccaccaggaagtacaggactggag

SEQ ID NO: 3478748 - DNA, 25 bp, Homo sapien
ccaggaagtacaggactggaggctg

SEQ ID NO: 3478749 - DNA, 25 bp, Homo sapien
cccttttatactcaatgcccggcat

SEQ ID NO: 3478750 - DNA, 25 bp, Homo sapien
aggaatgatgacaactacttcacag

SEQ ID NO: 3478751 - DNA, 25 bp, Homo sapien
tcttgactacaatggggacatcact

SEQ ID NO: 3478752 - DNA, 25 bp, Homo sapien
tttcccatctatggaataggaatga

SEQ ID NO: 3478753 - DNA, 25 bp, Homo sapien
ctctgctttcgggagcttccatcat

SEQ ID NO: 3478754 - DNA, 25 bp, Homo sapien
tgctttcgggagcttccatcattcc

SEQ ID NO: 3478755 - DNA, 25 bp, Homo sapien
cgttgcttcccaggtggtacttgga

SEQ ID NO: 3478756 - DNA, 25 bp, Homo sapien
agacaggattctcgttgcttcccag

SEQ ID NO: 3478757 - DNA, 25 bp, Homo sapien
ctggatggagcccactccacactct

SEQ ID NO: 3478758 - DNA, 25 bp, Homo sapien
tttgcataaagccaacaagttcacc

SEQ ID NO: 3478759 - DNA, 25 bp, Homo sapien
tgcataaagccaacaagttcacctt

SEQ ID NO: 3478760 - DNA, 25 bp, Homo sapien
gcataaagccaacaagttcaccttc

SEQ ID NO: 3478761 - DNA, 25 bp, Homo sapien
tactgtcagctgtctaaataggttg

SEQ ID NO: 3478762 - DNA, 25 bp, Homo sapien
taagctcagtagaccatccctaaaa

SEQ ID NO: 3478763 - DNA, 25 bp, Homo sapien
tactggctctctggataagtgaggc

SEQ ID NO: 3478764 - DNA, 25 bp, Homo sapien
gaaagggcctggcttgaggtctcat

SEQ ID NO: 3478765 - DNA, 25 bp, Homo sapien
ctacttggaattgatctctttgtcc

SEQ ID NO: 3478766 - DNA, 25 bp, Homo sapien
actgtctcgcagtaggcaacaccag

SEQ ID NO: 3478767 - DNA, 25 bp, Homo sapien
ctttgtccacattttgtgtcactgt

SEQ ID NO: 3478768 - DNA, 25 bp, Homo sapien
cagacctcacttgtacatctccatg

SEQ ID NO: 3478769 - DNA, 25 bp, Homo sapien
tgtcctaaatatggtgcctttcaca

SEQ ID NO: 3478770 - DNA, 25 bp, Homo sapien
tttggttggacaattaggaagatcc

SEQ ID NO: 3478771 - DNA, 25 bp, Homo sapien
gataatgtcctgtatgggaacatgg

SEQ ID NO: 3478772 - DNA, 25 bp, Homo sapien
tactaacatttgagactgaggaggg

SEQ ID NO: 3478773 - DNA, 25 bp, Homo sapien
gacagtctttgcctgtctccctaca

SEQ ID NO: 3478774 - DNA, 25 bp, Homo sapien
gtgacagtctttgcctgtctcccta

SEQ ID NO: 3478775 - DNA, 25 bp, Homo sapien
cagtctttgcctgtctccctacagg

SEQ ID NO: 3478776 - DNA, 25 bp, Homo sapien
ttagtgacagtctttgcctgtctcc

SEQ ID NO: 3478777 - DNA, 25 bp, Homo sapien
ggtttccggacatcatggcaggtcc

SEQ ID NO: 3478778 - DNA, 25 bp, Homo sapien
ccttgactcaggtggcatggccgat

SEQ ID NO: 3478779 - DNA, 25 bp, Homo sapien
gagtcactgagatcttcggttttaa

SEQ ID NO: 3478780 - DNA, 25 bp, Homo sapien
catggccgatgggagagggtctgct

SEQ ID NO: 3478781 - DNA, 25 bp, Homo sapien
gacatgggctggcatttagcccaga

SEQ ID NO: 3478782 - DNA, 25 bp, Homo sapien
acatgggctggcatttagcccagac

SEQ ID NO: 3478783 - DNA, 25 bp, Homo sapien
tgacatgggctggcatttagcccag

SEQ ID NO: 3478784 - DNA, 25 bp, Homo sapien
ctgacatgggctggcatttagccca

SEQ ID NO: 3478785 - DNA, 25 bp, Homo sapien
ctgggatacagactgtaagtggccg

SEQ ID NO: 3478786 - DNA, 25 bp, Homo sapien
tacagactgtaagtggccgggaacc

SEQ ID NO: 3478787 - DNA, 25 bp, Homo sapien
gaactgggatacagactgtaagtgg

SEQ ID NO: 3478788 - DNA, 25 bp, Homo sapien
aggctgggtctgagatagcaggaac

SEQ ID NO: 3478789 - DNA, 25 bp, Homo sapien
tactaatggcaattctgacatggcg

SEQ ID NO: 3478790 - DNA, 25 bp, Homo sapien
cctaggtggttataagcctgggcca

SEQ ID NO: 3478791 - DNA, 25 bp, Homo sapien
tgcatcatacactgacctaggtggt

SEQ ID NO: 3478792 - DNA, 25 bp, Homo sapien
tcaataatctcatgaggcagagcct

SEQ ID NO: 3478793 - DNA, 25 bp, Homo sapien
gccacatacaggtggaggcaaatca

SEQ ID NO: 3478794 - DNA, 25 bp, Homo sapien
tacaactttggcaccacgatcactg

SEQ ID NO: 3478795 - DNA, 25 bp, Homo sapien
taaggagggtcaagacgatctactc

SEQ ID NO: 3478796 - DNA, 25 bp, Homo sapien
ctgggatctgattaccagagctgaa

SEQ ID NO: 3478797 - DNA, 25 bp, Homo sapien
gaaaggggaggagatttggctgcag

SEQ ID NO: 3478798 - DNA, 25 bp, Homo sapien
tgtggaaaggggaggagatttggct

SEQ ID NO: 3478799 - DNA, 25 bp, Homo sapien
tggaaaggggaggagatttggctgc

SEQ ID NO: 3478800 - DNA, 25 bp, Homo sapien
ctgtggaaaggggaggagatttggc

SEQ ID NO: 3478801 - DNA, 25 bp, Homo sapien
ccagtcccggcccagtctgtgggag

SEQ ID NO: 3478802 - DNA, 25 bp, Homo sapien
tgtgggaggaggagaccgctttgtt

SEQ ID NO: 3478803 - DNA, 25 bp, Homo sapien
tctgtgggaggaggagaccgctttg

SEQ ID NO: 3478804 - DNA, 25 bp, Homo sapien
ctgggatgccagtcccggcccagtc

SEQ ID NO: 3478805 - DNA, 25 bp, Homo sapien
ccagtgagttaaactcagtgagagc

SEQ ID NO: 3478806 - DNA, 25 bp, Homo sapien
ggatttcccctgtgccaatggatag

SEQ ID NO: 3478807 - DNA, 25 bp, Homo sapien
gtccccccacttgctgtagcttgga

SEQ ID NO: 3478808 - DNA, 25 bp, Homo sapien
cagtgacacttggtaaattgtcccc

SEQ ID NO: 3478809 - DNA, 25 bp, Homo sapien
gcctatatacgtgcccactgcagga

SEQ ID NO: 3478810 - DNA, 25 bp, Homo sapien
tgtgtggaaccatggcagctctgca

SEQ ID NO: 3478811 - DNA, 25 bp, Homo sapien
tcaaccactagatggcgagcttccc

SEQ ID NO: 3478812 - DNA, 25 bp, Homo sapien
cacctaggtagggttcgtggccatc

SEQ ID NO: 3478813 - DNA, 25 bp, Homo sapien
taaggacatctatcattccacaagg

SEQ ID NO: 3478814 - DNA, 25 bp, Homo sapien
gggtcaggaatgaatccgatcttaa

SEQ ID NO: 3478815 - DNA, 25 bp, Homo sapien
cactgtggccagctagctcaaaggg

SEQ ID NO: 3478816 - DNA, 25 bp, Homo sapien
cagataggtatccttatgatgaaga

SEQ ID NO: 3478817 - DNA, 25 bp, Homo sapien
ctggcagcccagggtgcccaaatgc

SEQ ID NO: 3478818 - DNA, 25 bp, Homo sapien
agctgggtagatgcttgggcactgg

SEQ ID NO: 3478819 - DNA, 25 bp, Homo sapien
gggtagatgcttgggcactgggaga

SEQ ID NO: 3478820 - DNA, 25 bp, Homo sapien
aggtcactgggctcatcggcccctc

SEQ ID NO: 3478821 - DNA, 25 bp, Homo sapien
cttaatgcgcctctgcttgaaggtc

SEQ ID NO: 3478822 - DNA, 25 bp, Homo sapien
catcctgcatggtcctagcatcgat

SEQ ID NO: 3478823 - DNA, 25 bp, Homo sapien
tttgagtgctcacccatgctcggct

SEQ ID NO: 3478824 - DNA, 25 bp, Homo sapien
gtcctagcatcgatcacacagccag

SEQ ID NO: 3478825 - DNA, 25 bp, Homo sapien
ccagcctgaatctttgagtgctcac

SEQ ID NO: 3478826 - DNA, 25 bp, Homo sapien
ggttgagggcctcaaatcgtgagat

SEQ ID NO: 3478827 - DNA, 25 bp, Homo sapien
gtcgttgccatacagctttcccatc

SEQ ID NO: 3478828 - DNA, 25 bp, Homo sapien
gctgaagtcgttgccatacagcttt

SEQ ID NO: 3478829 - DNA, 25 bp, Homo sapien
ctcaaatcgtgagatggtggtctgg

SEQ ID NO: 3478830 - DNA, 25 bp, Homo sapien
ttctccagagtcaggcggatgttgg

SEQ ID NO: 3478831 - DNA, 25 bp, Homo sapien
tcaggcggatgttggtctcgatgct

SEQ ID NO: 3478832 - DNA, 25 bp, Homo sapien
tctcgatgctggtccgtttctttct

SEQ ID NO: 3478833 - DNA, 25 bp, Homo sapien
cactgaggggtctgacggagaggac

SEQ ID NO: 3478834 - DNA, 25 bp, Homo sapien
tgtgaggtagcccacccgtgcccac

SEQ ID NO: 3478835 - DNA, 25 bp, Homo sapien
tgtgtgaggtagcccacccgtgccc

SEQ ID NO: 3478836 - DNA, 25 bp, Homo sapien
ctgtgtgaggtagcccacccgtgcc

SEQ ID NO: 3478837 - DNA, 25 bp, Homo sapien
gtgtgaggtagcccacccgtgccca

SEQ ID NO: 3478838 - DNA, 25 bp, Homo sapien
cagccgggagttgtagacaggtggt

SEQ ID NO: 3478839 - DNA, 25 bp, Homo sapien
agatctcctccgagctgggttttgg

SEQ ID NO: 3478840 - DNA, 25 bp, Homo sapien
tggccacagggcagttgattcgctt

SEQ ID NO: 3478841 - DNA, 25 bp, Homo sapien
ctccatggacaactgctctgcaatc

SEQ ID NO: 3478842 - DNA, 25 bp, Homo sapien
tgataaggtttctttgacactgcca

SEQ ID NO: 3478843 - DNA, 25 bp, Homo sapien
actgccaagccgaaggctgccttgc

SEQ ID NO: 3478844 - DNA, 25 bp, Homo sapien
gaggtgagcaagacaagcctcttgg

SEQ ID NO: 3478845 - DNA, 25 bp, Homo sapien
tccagcccctgacaatgtgtattgc

SEQ ID NO: 3478846 - DNA, 25 bp, Homo sapien
agagagggggcccagagaccctgag

SEQ ID NO: 3478847 - DNA, 25 bp, Homo sapien
agggggcccagagaccctgagggag

SEQ ID NO: 3478848 - DNA, 25 bp, Homo sapien
ggcccagagaccctgagggagatac

SEQ ID NO: 3478849 - DNA, 25 bp, Homo sapien
gacagagagggggcccagagaccct

SEQ ID NO: 3478850 - DNA, 25 bp, Homo sapien
ttcccaggggaacaggatgacgtta

SEQ ID NO: 3478851 - DNA, 25 bp, Homo sapien
gctgctggcgtggagtcctgagcca

SEQ ID NO: 3478852 - DNA, 25 bp, Homo sapien
tcagtggaggtaggtggaatgattc

SEQ ID NO: 3478853 - DNA, 25 bp, Homo sapien
aggtggaatgattccatcggtacca

SEQ ID NO: 3478854 - DNA, 25 bp, Homo sapien
ggaatgattccatcggtaccaagat

SEQ ID NO: 3478855 - DNA, 25 bp, Homo sapien
tggaatgattccatcggtaccaaga

SEQ ID NO: 3478856 - DNA, 25 bp, Homo sapien
tcaaggctttggtggagatatcaga

SEQ ID NO: 3478857 - DNA, 25 bp, Homo sapien
tccccagaagcccacggatgagttg

SEQ ID NO: 3478858 - DNA, 25 bp, Homo sapien
tcacagtttggatctccggaggccc

SEQ ID NO: 3478859 - DNA, 25 bp, Homo sapien
cctggagggcgcaataatgaatgga

SEQ ID NO: 3478860 - DNA, 25 bp, Homo sapien
aagggcaccagcaggcgttgcaaca

SEQ ID NO: 3478861 - DNA, 25 bp, Homo sapien
ctaggcagacgtggacagacagaag

SEQ ID NO: 3478862 - DNA, 25 bp, Homo sapien
caggcgttgcaacatgcccagggca

SEQ ID NO: 3478863 - DNA, 25 bp, Homo sapien
caccaagggcagctcttttacacct

SEQ ID NO: 3478864 - DNA, 25 bp, Homo sapien
ttcatgttacatctctacaaactgg

SEQ ID NO: 3478865 - DNA, 25 bp, Homo sapien
gactctagagataatgttcccaaag

SEQ ID NO: 3478866 - DNA, 25 bp, Homo sapien
tgggaaagggctatatacaggtact

SEQ ID NO: 3478867 - DNA, 25 bp, Homo sapien
tccacattaaggagttaagaacata

SEQ ID NO: 3478868 - DNA, 25 bp, Homo sapien
cccacttcatgacgtgaaataggaa

SEQ ID NO: 3478869 - DNA, 25 bp, Homo sapien
tttaaagccccattcaaacatcagg

SEQ ID NO: 3478870 - DNA, 25 bp, Homo sapien
aacattaccattaggccttctccca

SEQ ID NO: 3478871 - DNA, 25 bp, Homo sapien
ccatgggcatacagggaggaatgca

SEQ ID NO: 3478872 - DNA, 25 bp, Homo sapien
ctgagtaggatgtcaaggtagccag

SEQ ID NO: 3478873 - DNA, 25 bp, Homo sapien
tgtagaaaagggtcagctctagcat

SEQ ID NO: 3478874 - DNA, 25 bp, Homo sapien
caaggtagccaggacttctgtagaa

SEQ ID NO: 3478875 - DNA, 25 bp, Homo sapien
gtagccaggacttctgtagaaaagg

SEQ ID NO: 3478876 - DNA, 25 bp, Homo sapien
taaaaaatcacgggcaaatggatga

SEQ ID NO: 3478877 - DNA, 25 bp, Homo sapien
ataaaaaatcacgggcaaatggatg

SEQ ID NO: 3478878 - DNA, 25 bp, Homo sapien
aaatccaagttttggacaatgcaga

SEQ ID NO: 3478879 - DNA, 25 bp, Homo sapien
aatccaagttttggacaatgcagag

SEQ ID NO: 3478880 - DNA, 25 bp, Homo sapien
caccgacgctccgaaagggcgcggg

SEQ ID NO: 3478881 - DNA, 25 bp, Homo sapien
ccgacgctccgaaagggcgcgggag

SEQ ID NO: 3478882 - DNA, 25 bp, Homo sapien
cgacgctccgaaagggcgcgggagg

SEQ ID NO: 3478883 - DNA, 25 bp, Homo sapien
ggccaccgacgctccgaaagggcgc

SEQ ID NO: 3478884 - DNA, 25 bp, Homo sapien
tgacggcggcggaggaggagccggg

SEQ ID NO: 3478885 - DNA, 25 bp, Homo sapien
ctgtgacggcggcggaggaggagcc

SEQ ID NO: 3478886 - DNA, 25 bp, Homo sapien
cggcggaggaggagccgggggtctg

SEQ ID NO: 3478887 - DNA, 25 bp, Homo sapien
gagccgggggtctgggggcacctgc

SEQ ID NO: 3478888 - DNA, 25 bp, Homo sapien
tcccggcccggatcgcggcaacagg

SEQ ID NO: 3478889 - DNA, 25 bp, Homo sapien
cagctcccggcccggatcgcggcaa

SEQ ID NO: 3478890 - DNA, 25 bp, Homo sapien
ccggcccggatcgcggcaacaggaa

SEQ ID NO: 3478891 - DNA, 25 bp, Homo sapien
cggcaacaggaagcggaggagccag

SEQ ID NO: 3478892 - DNA, 25 bp, Homo sapien
ggccgggcagttcgcgccgagcggt

SEQ ID NO: 3478893 - DNA, 25 bp, Homo sapien
ttccccaccaatgggccgcgcgggc

SEQ ID NO: 3478894 - DNA, 25 bp, Homo sapien
ccccggccgggcagttcgcgccgag

SEQ ID NO: 3478895 - DNA, 25 bp, Homo sapien
ccggccgggcagttcgcgccgagcg

SEQ ID NO: 3478896 - DNA, 25 bp, Homo sapien
ggcctcgcagggacggcgatcgcat

SEQ ID NO: 3478897 - DNA, 25 bp, Homo sapien
cagactggcgaggaggagccttgga

SEQ ID NO: 3478898 - DNA, 25 bp, Homo sapien
tttctcccgttccagggccagactg

SEQ ID NO: 3478899 - DNA, 25 bp, Homo sapien
ggctcagaggtccaaggctcctctc

SEQ ID NO: 3478900 - DNA, 25 bp, Homo sapien
cctgtgtgggtttcggctttttgct

SEQ ID NO: 3478901 - DNA, 25 bp, Homo sapien
ttgccaaagaacggaagggcatttg

SEQ ID NO: 3478902 - DNA, 25 bp, Homo sapien
tgtgggtttcggctttttgctcttg

SEQ ID NO: 3478903 - DNA, 25 bp, Homo sapien
gccaaagaacggaagggcatttgga

SEQ ID NO: 3478904 - DNA, 25 bp, Homo sapien
gatatgcctattagtatttttagag

SEQ ID NO: 3478905 - DNA, 25 bp, Homo sapien
tggatatgcctattagtatttttag

SEQ ID NO: 3478906 - DNA, 25 bp, Homo sapien
cagctcatttggatatgcctattag

SEQ ID NO: 3478907 - DNA, 25 bp, Homo sapien
gctcatttggatatgcctattagta

SEQ ID NO: 3478908 - DNA, 25 bp, Homo sapien
taataaccctctagcgatgactgac

SEQ ID NO: 3478909 - DNA, 25 bp, Homo sapien
tccgagctggtaggctgacatcaca

SEQ ID NO: 3478910 - DNA, 25 bp, Homo sapien
tggaaaccaggaactgcactccgag

SEQ ID NO: 3478911 - DNA, 25 bp, Homo sapien
tattttccttatctacacggccaag

SEQ ID NO: 3478912 - DNA, 25 bp, Homo sapien
ccctaagaaaacagcactgggtcat

SEQ ID NO: 3478913 - DNA, 25 bp, Homo sapien
ggatgcaccctaagaaaacagcact

SEQ ID NO: 3478914 - DNA, 25 bp, Homo sapien
agaaaaacaaaggatgcaccctaag

SEQ ID NO: 3478915 - DNA, 25 bp, Homo sapien
acaaaggatgcaccctaagaaaaca

SEQ ID NO: 3478916 - DNA, 25 bp, Homo sapien
gcttcggtgcttattcaggtggcag

SEQ ID NO: 3478917 - DNA, 25 bp, Homo sapien
cctatagagaggactccatgggtga

SEQ ID NO: 3478918 - DNA, 25 bp, Homo sapien
catcaatgaagccaatataagcgga

SEQ ID NO: 3478919 - DNA, 25 bp, Homo sapien
aaagaaatatagagcgagagccagc

SEQ ID NO: 3478920 - DNA, 25 bp, Homo sapien
aataatctcagtatcctctccgcgg

SEQ ID NO: 3478921 - DNA, 25 bp, Homo sapien
aactaaacgatgttcagaccccagg

SEQ ID NO: 3478922 - DNA, 25 bp, Homo sapien
tggtcttaacccatcctgaaagtag

SEQ ID NO: 3478923 - DNA, 25 bp, Homo sapien
tgtgtgctcatgtccaggaacatag

SEQ ID NO: 3478924 - DNA, 25 bp, Homo sapien
acttggagaggtgtattgggtgagc

SEQ ID NO: 3478925 - DNA, 25 bp, Homo sapien
cagcccaagtcgaagatgaagtagc

SEQ ID NO: 3478926 - DNA, 25 bp, Homo sapien
gcccaagtcgaagatgaagtagccc

SEQ ID NO: 3478927 - DNA, 25 bp, Homo sapien
caagtcgaagatgaagtagcccaag

SEQ ID NO: 3478928 - DNA, 25 bp, Homo sapien
tgatgagccagcatcaaggcaccct

SEQ ID NO: 3478929 - DNA, 25 bp, Homo sapien
gataatgcccaagatactcaatgtg

SEQ ID NO: 3478930 - DNA, 25 bp, Homo sapien
gagaaaccagcgcatctgtagcaag

SEQ ID NO: 3478931 - DNA, 25 bp, Homo sapien
gatagtgccctgtttcccggagaaa

SEQ ID NO: 3478932 - DNA, 25 bp, Homo sapien
tgcttctccaagcatggtacttctt

SEQ ID NO: 3478933 - DNA, 25 bp, Homo sapien
cttcctccatgcaaagcgccagatg

SEQ ID NO: 3478934 - DNA, 25 bp, Homo sapien
gttgtgtttcagctgccgttcctca

SEQ ID NO: 3478935 - DNA, 25 bp, Homo sapien
tattttgagatgtccgttgtgtttc

SEQ ID NO: 3478936 - DNA, 25 bp, Homo sapien
ccatggctgacttaacccaatccat

SEQ ID NO: 3478937 - DNA, 25 bp, Homo sapien
gtaattatgtaacagtcatatttcc

SEQ ID NO: 3478938 - DNA, 25 bp, Homo sapien
tcatatttccaacctggttcccatg

SEQ ID NO: 3478939 - DNA, 25 bp, Homo sapien
atccataatctggagcaagccttgg

SEQ ID NO: 3478940 - DNA, 25 bp, Homo sapien
cattacgttagattaccagtggcca

SEQ ID NO: 3478941 - DNA, 25 bp, Homo sapien
gaaagcctgcctagatgacctgtcc

SEQ ID NO: 3478942 - DNA, 25 bp, Homo sapien
tatatgctcggcttgaagactgacc

SEQ ID NO: 3478943 - DNA, 25 bp, Homo sapien
ttttcaagaccgctcatggctgggc

SEQ ID NO: 3478944 - DNA, 25 bp, Homo sapien
tgtcttctggctgcacgcgttctgc

SEQ ID NO: 3478945 - DNA, 25 bp, Homo sapien
taaagcatggtgctttccatggcga

SEQ ID NO: 3478946 - DNA, 25 bp, Homo sapien
taacaagcgtgttgtggaaagaact

SEQ ID NO: 3478947 - DNA, 25 bp, Homo sapien
aagggaatgtattatctctcctgtc

SEQ ID NO: 3478948 - DNA, 25 bp, Homo sapien
tttcaccagagaccgcccgagagcg

SEQ ID NO: 3478949 - DNA, 25 bp, Homo sapien
cgagtccagtttgtactaagtcgac

SEQ ID NO: 3478950 - DNA, 25 bp, Homo sapien
taagtcgactttcaccagagaccgc

SEQ ID NO: 3478951 - DNA, 25 bp, Homo sapien
gggcccctgagtgccgagacatgcc

SEQ ID NO: 3478952 - DNA, 25 bp, Homo sapien
gccggctcgccgggttctggaggcc

SEQ ID NO: 3478953 - DNA, 25 bp, Homo sapien
cagggccggctcgccgggttctgga

SEQ ID NO: 3478954 - DNA, 25 bp, Homo sapien
gttctggaggccctcgcgggcgcgc

SEQ ID NO: 3478955 - DNA, 25 bp, Homo sapien
ttctggaggccctcgcgggcgcgcg

SEQ ID NO: 3478956 - DNA, 25 bp, Homo sapien
gggtctctcagcgccgcggactgct

SEQ ID NO: 3478957 - DNA, 25 bp, Homo sapien
ctttgaggcccggactcttccgcaa

SEQ ID NO: 3478958 - DNA, 25 bp, Homo sapien
aggtgacagggacccgggtctctca

SEQ ID NO: 3478959 - DNA, 25 bp, Homo sapien
tcccggtgctgggacgagccgctgg

SEQ ID NO: 3478960 - DNA, 25 bp, Homo sapien
agaaagccagggagcgagtcagtcc

SEQ ID NO: 3478961 - DNA, 25 bp, Homo sapien
gagtcgagctagagagaaatcctcc

SEQ ID NO: 3478962 - DNA, 25 bp, Homo sapien
caacggatgcggcttggagcaaaac

SEQ ID NO: 3478963 - DNA, 25 bp, Homo sapien
acttcctcagagagggaaatccgcg

SEQ ID NO: 3478964 - DNA, 25 bp, Homo sapien
gtgatagtagactgtgtgccactca

SEQ ID NO: 3478965 - DNA, 25 bp, Homo sapien
ctgtcggtgatagtagactgtgtgc

SEQ ID NO: 3478966 - DNA, 25 bp, Homo sapien
tcggtgatagtagactgtgtgccac

SEQ ID NO: 3478967 - DNA, 25 bp, Homo sapien
cggtgatagtagactgtgtgccact

SEQ ID NO: 3478968 - DNA, 25 bp, Homo sapien
taacttaggataagcaaactgcact

SEQ ID NO: 3478969 - DNA, 25 bp, Homo sapien
gacaaatttgggactagcatgcagt

SEQ ID NO: 3478970 - DNA, 25 bp, Homo sapien
cacacatggtctagctcaattcgcc

SEQ ID NO: 3478971 - DNA, 25 bp, Homo sapien
caacaaattcagctgcgcgcttaca

SEQ ID NO: 3478972 - DNA, 25 bp, Homo sapien
ataaaacccttatcttgttcagcca

SEQ ID NO: 3478973 - DNA, 25 bp, Homo sapien
cagagcctaaacatagctgaattcc

SEQ ID NO: 3478974 - DNA, 25 bp, Homo sapien
tagctaccatgaacatagtttgagt

SEQ ID NO: 3478975 - DNA, 25 bp, Homo sapien
cagagttctgagtatccaaagtgac

SEQ ID NO: 3478976 - DNA, 25 bp, Homo sapien
tacaaataatttcaccttgccgaga

SEQ ID NO: 3478977 - DNA, 25 bp, Homo sapien
gccgagagatgactcatgcaacgtt

SEQ ID NO: 3478978 - DNA, 25 bp, Homo sapien
taaatgtaccattaatcaggaagac

SEQ ID NO: 3478979 - DNA, 25 bp, Homo sapien
tatcattaattactgggtacaggca

SEQ ID NO: 3478980 - DNA, 25 bp, Homo sapien
ctgggcaaaccacaacatatcggct

SEQ ID NO: 3478981 - DNA, 25 bp, Homo sapien
ctatggaagggtatgtctaagcacc

SEQ ID NO: 3478982 - DNA, 25 bp, Homo sapien
taggctgacagtgcatatgccacca

SEQ ID NO: 3478983 - DNA, 25 bp, Homo sapien
taagaaggtcttgctaaacagccaa

SEQ ID NO: 3478984 - DNA, 25 bp, Homo sapien
tacgcccggcctgttatatgcattt

SEQ ID NO: 3478985 - DNA, 25 bp, Homo sapien
gctcactttcaggtttcagcaaagc

SEQ ID NO: 3478986 - DNA, 25 bp, Homo sapien
tctagggtaaaatcataaaggagca

SEQ ID NO: 3478987 - DNA, 25 bp, Homo sapien
taaccagtactagagcaaggaatct

SEQ ID NO: 3478988 - DNA, 25 bp, Homo sapien
tgctcataaaatctacgacatcttg

SEQ ID NO: 3478989 - DNA, 25 bp, Homo sapien
tgaatcaaaatggaggctttcaggc

SEQ ID NO: 3478990 - DNA, 25 bp, Homo sapien
tctacgacatcttgaatcaaaatgg

SEQ ID NO: 3478991 - DNA, 25 bp, Homo sapien
tgaatgctcataaaatctacgacat

SEQ ID NO: 3478992 - DNA, 25 bp, Homo sapien
ccaccatgcctggcccccgcctaac

SEQ ID NO: 3478993 - DNA, 25 bp, Homo sapien
gaacctccacctccctggttcaagc

SEQ ID NO: 3478994 - DNA, 25 bp, Homo sapien
gcatgatcttggctcgcttgaacct

SEQ ID NO: 3478995 - DNA, 25 bp, Homo sapien
agccaccatgcctggcccccgccta

SEQ ID NO: 3478996 - DNA, 25 bp, Homo sapien
tgctcctctcttacaagggctaaaa

SEQ ID NO: 3478997 - DNA, 25 bp, Homo sapien
ggtctcccagctagtaacagaacaa

SEQ ID NO: 3478998 - DNA, 25 bp, Homo sapien
gtcggccagggagtcaaaattaata

SEQ ID NO: 3478999 - DNA, 25 bp, Homo sapien
gcagggcttcctggtaaatacagta

SEQ ID NO: 3479000 - DNA, 25 bp, Homo sapien
cttccaaaggcctgattatctacta

SEQ ID NO: 3479001 - DNA, 25 bp, Homo sapien
catatatgagataggccttaaactt

SEQ ID NO: 3479002 - DNA, 25 bp, Homo sapien
gatctataagcaacacagatgaggc

SEQ ID NO: 3479003 - DNA, 25 bp, Homo sapien
tgccacttaaacacacgcagattct

SEQ ID NO: 3479004 - DNA, 25 bp, Homo sapien
tggttgggttactacctcctagata

SEQ ID NO: 3479005 - DNA, 25 bp, Homo sapien
ggtaggaaacattacagtacctagc

SEQ ID NO: 3479006 - DNA, 25 bp, Homo sapien
caggttgggaagtcagacagattca

SEQ ID NO: 3479007 - DNA, 25 bp, Homo sapien
cactcactaggcatgctacttaaac

SEQ ID NO: 3479008 - DNA, 25 bp, Homo sapien
aaagtggtaagacatgaagctggag

SEQ ID NO: 3479009 - DNA, 25 bp, Homo sapien
taaggaacttgacattatcttgctg

SEQ ID NO: 3479010 - DNA, 25 bp, Homo sapien
aacaagtgaatatcacaggcaaagc

SEQ ID NO: 3479011 - DNA, 25 bp, Homo sapien
caaagcactgtcctaagttgcatga

SEQ ID NO: 3479012 - DNA, 25 bp, Homo sapien
ttacaatggctgtattagccctcat

SEQ ID NO: 3479013 - DNA, 25 bp, Homo sapien
taattacaatggctgtattagccct

SEQ ID NO: 3479014 - DNA, 25 bp, Homo sapien
agaggcttaattacaatggctgtat

SEQ ID NO: 3479015 - DNA, 25 bp, Homo sapien
cttaattacaatggctgtattagcc

SEQ ID NO: 3479016 - DNA, 25 bp, Homo sapien
tagcaatcctaagctttttctttat

SEQ ID NO: 3479017 - DNA, 25 bp, Homo sapien
cactcccttagcaatcctaagcttt

SEQ ID NO: 3479018 - DNA, 25 bp, Homo sapien
ttatatatacattcgacatccttgg

SEQ ID NO: 3479019 - DNA, 25 bp, Homo sapien
ttcgacatccttggaaaggcatttg

SEQ ID NO: 3479020 - DNA, 25 bp, Homo sapien
gacaaatcagcagacaagcaaaagc

SEQ ID NO: 3479021 - DNA, 25 bp, Homo sapien
ctggatcaccggacaaatcagcaga

SEQ ID NO: 3479022 - DNA, 25 bp, Homo sapien
tcaaaaggctcgtttccatggagta

SEQ ID NO: 3479023 - DNA, 25 bp, Homo sapien
aaaaggctcgtttccatggagtaga

SEQ ID NO: 3479024 - DNA, 25 bp, Homo sapien
aataaaagactacctgaaaatgtat

SEQ ID NO: 3479025 - DNA, 25 bp, Homo sapien
aacttttgctcaaggaaatgtgaat

SEQ ID NO: 3479026 - DNA, 25 bp, Homo sapien
taaaagactacctgaaaatgtatca

SEQ ID NO: 3479027 - DNA, 25 bp, Homo sapien
ataaaagactacctgaaaatgtatc

SEQ ID NO: 3479028 - DNA, 25 bp, Homo sapien
ggtgctgagcatacgcctgacaatt

SEQ ID NO: 3479029 - DNA, 25 bp, Homo sapien
taagagaactccgattttattcagt

SEQ ID NO: 3479030 - DNA, 25 bp, Homo sapien
tacagaggatataagttaccccaga

SEQ ID NO: 3479031 - DNA, 25 bp, Homo sapien
ccgttaatttggctctctcactaga

SEQ ID NO: 3479032 - DNA, 25 bp, Homo sapien
tcgcgccacaatgccggctgatgtt

SEQ ID NO: 3479033 - DNA, 25 bp, Homo sapien
tatgatattagtaatgtgtgtcttc

SEQ ID NO: 3479034 - DNA, 25 bp, Homo sapien
taatatctgaagaatctgtaatgat

SEQ ID NO: 3479035 - DNA, 25 bp, Homo sapien
acaggttcgcgccacaatgccggct

SEQ ID NO: 3479036 - DNA, 25 bp, Homo sapien
taagcccaatccacactagcatctg

SEQ ID NO: 3479037 - DNA, 25 bp, Homo sapien
tagcatctgagaggattaagctcca

SEQ ID NO: 3479038 - DNA, 25 bp, Homo sapien
ctgggaataggaatctacgtatact

SEQ ID NO: 3479039 - DNA, 25 bp, Homo sapien
aaattcttcccgtttatgccactga

SEQ ID NO: 3479040 - DNA, 25 bp, Homo sapien
tatttggaaattaggtcactgccca

SEQ ID NO: 3479041 - DNA, 25 bp, Homo sapien
gcaggttgaattgtgttatctccaa

SEQ ID NO: 3479042 - DNA, 25 bp, Homo sapien
gcccatgtttatggtatcataccta

SEQ ID NO: 3479043 - DNA, 25 bp, Homo sapien
agtcttaacttccatacctgtggga

SEQ ID NO: 3479044 - DNA, 25 bp, Homo sapien
tggaggatgagtgttttaggaattc

SEQ ID NO: 3479045 - DNA, 25 bp, Homo sapien
cacagcactgaatttgaaaggttgg

SEQ ID NO: 3479046 - DNA, 25 bp, Homo sapien
gatgagtgttttaggaattctgaca

SEQ ID NO: 3479047 - DNA, 25 bp, Homo sapien
ctgaatttgaaaggttggaggatga

SEQ ID NO: 3479048 - DNA, 25 bp, Homo sapien
caagtgctctggttctggtgtcaaa

SEQ ID NO: 3479049 - DNA, 25 bp, Homo sapien
ggtgtcaaacattacgaattcctca

SEQ ID NO: 3479050 - DNA, 25 bp, Homo sapien
gacactgtgcctgactatataggtc

SEQ ID NO: 3479051 - DNA, 25 bp, Homo sapien
ttcaaaccaccatcgataaaaggac

SEQ ID NO: 3479052 - DNA, 25 bp, Homo sapien
taagtaggtaggaccacaggagcat

SEQ ID NO: 3479053 - DNA, 25 bp, Homo sapien
cctaagtaggtaggaccacaggagc

SEQ ID NO: 3479054 - DNA, 25 bp, Homo sapien
ggagacaatgtctcactctctcact

SEQ ID NO: 3479055 - DNA, 25 bp, Homo sapien
ctcctaagtaggtaggaccacagga

SEQ ID NO: 3479056 - DNA, 25 bp, Homo sapien
gcctagcaagcagtaaccacttatg

SEQ ID NO: 3479057 - DNA, 25 bp, Homo sapien
tgtaaatatcagtgcagaaactata

SEQ ID NO: 3479058 - DNA, 25 bp, Homo sapien
tctacctatacctcacaaatttgtt

SEQ ID NO: 3479059 - DNA, 25 bp, Homo sapien
tctagtttcataatttaacaggtat

SEQ ID NO: 3479060 - DNA, 25 bp, Homo sapien
taaggatagatgtagttactttact

SEQ ID NO: 3479061 - DNA, 25 bp, Homo sapien
ttatggtaactttccaatagcaaga

SEQ ID NO: 3479062 - DNA, 25 bp, Homo sapien
gcaagaatcaataagctggaggaat

SEQ ID NO: 3479063 - DNA, 25 bp, Homo sapien
gaataagaagttgaacaccatgttt

SEQ ID NO: 3479064 - DNA, 25 bp, Homo sapien
tgactctcggttcaaaatacttcca

SEQ ID NO: 3479065 - DNA, 25 bp, Homo sapien
ctgcttcttatctgttggtgactct

SEQ ID NO: 3479066 - DNA, 25 bp, Homo sapien
gatgcaatgcgctcaactttctgct

SEQ ID NO: 3479067 - DNA, 25 bp, Homo sapien
aatcatgtgatgcaatgcgctcaac

SEQ ID NO: 3479068 - DNA, 25 bp, Homo sapien
caaccctaggaaagatcgacactgc

SEQ ID NO: 3479069 - DNA, 25 bp, Homo sapien
tgagccccatgactacaaaattagg

SEQ ID NO: 3479070 - DNA, 25 bp, Homo sapien
tttagatgactacgcaagtgtcgag

SEQ ID NO: 3479071 - DNA, 25 bp, Homo sapien
gaacatagggcagaaacttttgacc

SEQ ID NO: 3479072 - DNA, 25 bp, Homo sapien
atatatctcggatctactctcctct

SEQ ID NO: 3479073 - DNA, 25 bp, Homo sapien
catatatctcggatctactctcctc

SEQ ID NO: 3479074 - DNA, 25 bp, Homo sapien
tatatctcggatctactctcctctg

SEQ ID NO: 3479075 - DNA, 25 bp, Homo sapien
ttcccattccgattaagcttcagag

SEQ ID NO: 3479076 - DNA, 25 bp, Homo sapien
tgacttttccacatgacgaggcaat

SEQ ID NO: 3479077 - DNA, 25 bp, Homo sapien
tccaaagggcaaggctgaattagct

SEQ ID NO: 3479078 - DNA, 25 bp, Homo sapien
taggaaacatctatctgcacctggg

SEQ ID NO: 3479079 - DNA, 25 bp, Homo sapien
taaagacgtctattcacacaggtga

SEQ ID NO: 3479080 - DNA, 25 bp, Homo sapien
caaagagatttacgttagcatgcta

SEQ ID NO: 3479081 - DNA, 25 bp, Homo sapien
cagctaatgaattttaccccgagaa

SEQ ID NO: 3479082 - DNA, 25 bp, Homo sapien
cagtgagtcatgatcccgccattat

SEQ ID NO: 3479083 - DNA, 25 bp, Homo sapien
ggtgcttacagagtacctgaagtta

SEQ ID NO: 3479084 - DNA, 25 bp, Homo sapien
tacctgattcctaagggagaatttg

SEQ ID NO: 3479085 - DNA, 25 bp, Homo sapien
gataaagaatctgtgagctcaacca

SEQ ID NO: 3479086 - DNA, 25 bp, Homo sapien
aattctgcagaaatccagtctcact

SEQ ID NO: 3479087 - DNA, 25 bp, Homo sapien
gatgattacgcaacgctgaacaaga

SEQ ID NO: 3479088 - DNA, 25 bp, Homo sapien
atctttctggatgattacgcaacgc

SEQ ID NO: 3479089 - DNA, 25 bp, Homo sapien
tctggatgattacgcaacgctgaac

SEQ ID NO: 3479090 - DNA, 25 bp, Homo sapien
tttctggatgattacgcaacgctga

SEQ ID NO: 3479091 - DNA, 25 bp, Homo sapien
ttcgatcacctgtctgtactccagc

SEQ ID NO: 3479092 - DNA, 25 bp, Homo sapien
gattcgatcacctgtctgtactcca

SEQ ID NO: 3479093 - DNA, 25 bp, Homo sapien
cttgatgattcgatcacctgtctgt

SEQ ID NO: 3479094 - DNA, 25 bp, Homo sapien
gatgattcgatcacctgtctgtact

SEQ ID NO: 3479095 - DNA, 25 bp, Homo sapien
agtttgtatagtcaacagatctatc

SEQ ID NO: 3479096 - DNA, 25 bp, Homo sapien
aatcctaccgtaaattctataatag

SEQ ID NO: 3479097 - DNA, 25 bp, Homo sapien
tatcatacatagaagtatgatgctt

SEQ ID NO: 3479098 - DNA, 25 bp, Homo sapien
tcagaatatgaccaatatatgttgt

SEQ ID NO: 3479099 - DNA, 25 bp, Homo sapien
tcctcagataagttcctaaaagcaa

SEQ ID NO: 3479100 - DNA, 25 bp, Homo sapien
gttatcagtgaggttggccatatcc

SEQ ID NO: 3479101 - DNA, 25 bp, Homo sapien
aataaagccagtacaaatttccctg

SEQ ID NO: 3479102 - DNA, 25 bp, Homo sapien
cacaacgaactcatgagaatagtca

SEQ ID NO: 3479103 - DNA, 25 bp, Homo sapien
gaaaacgaaagtagtgtatgtcaga

SEQ ID NO: 3479104 - DNA, 25 bp, Homo sapien
taagaaaacgaaagtagtgtatgtc

SEQ ID NO: 3479105 - DNA, 25 bp, Homo sapien
aacgaaagtagtgtatgtcagatac

SEQ ID NO: 3479106 - DNA, 25 bp, Homo sapien
ctgtaagaaaacgaaagtagtgtat

SEQ ID NO: 3479107 - DNA, 25 bp, Homo sapien
tcaccacctccagatgatttgaatg

SEQ ID NO: 3479108 - DNA, 25 bp, Homo sapien
ccacctccagatgatttgaatgagt

SEQ ID NO: 3479109 - DNA, 25 bp, Homo sapien
cacctccagatgatttgaatgagtc

SEQ ID NO: 3479110 - DNA, 25 bp, Homo sapien
caccacctccagatgatttgaatga

SEQ ID NO: 3479111 - DNA, 25 bp, Homo sapien
catgatacaatgacagagtcggcag

SEQ ID NO: 3479112 - DNA, 25 bp, Homo sapien
gtaagctaagagttttcacctcaga

SEQ ID NO: 3479113 - DNA, 25 bp, Homo sapien
tccttcaatgcagggatcagcaaac

SEQ ID NO: 3479114 - DNA, 25 bp, Homo sapien
gagtcggcagtagactatatagtcc

SEQ ID NO: 3479115 - DNA, 25 bp, Homo sapien
tgctagcaaagctcacagggccact

SEQ ID NO: 3479116 - DNA, 25 bp, Homo sapien
atacatacggcccaaaccaggccag

SEQ ID NO: 3479117 - DNA, 25 bp, Homo sapien
tttaggtggtggactctcatgtgac

SEQ ID NO: 3479118 - DNA, 25 bp, Homo sapien
gggaagattccacctgactcagatt

SEQ ID NO: 3479119 - DNA, 25 bp, Homo sapien
tcagagtcagtaatagatatggcaa

SEQ ID NO: 3479120 - DNA, 25 bp, Homo sapien
caggaattcagtagacatattgcgg

SEQ ID NO: 3479121 - DNA, 25 bp, Homo sapien
gcaaaaatcaccataatcaggccag

SEQ ID NO: 3479122 - DNA, 25 bp, Homo sapien
ttaagatgacactaactaggcaggg

SEQ ID NO: 3479123 - DNA, 25 bp, Homo sapien
tgatgggagacatatgtccaatgac

SEQ ID NO: 3479124 - DNA, 25 bp, Homo sapien
tgggcgtccctgaacagtgagagct

SEQ ID NO: 3479125 - DNA, 25 bp, Homo sapien
aatgactgacggctctacttcagag

SEQ ID NO: 3479126 - DNA, 25 bp, Homo sapien
tctacttcagagtcggcaagtggaa

SEQ ID NO: 3479127 - DNA, 25 bp, Homo sapien
tactttctggttatgaaccacattg

SEQ ID NO: 3479128 - DNA, 25 bp, Homo sapien
ctttctggttatgaaccacattgtt

SEQ ID NO: 3479129 - DNA, 25 bp, Homo sapien
ctggttatgaaccacattgttttcc

SEQ ID NO: 3479130 - DNA, 25 bp, Homo sapien
tctactttctggttatgaaccacat

SEQ ID NO: 3479131 - DNA, 25 bp, Homo sapien
tattggcctgtaaacagccctactt

SEQ ID NO: 3479132 - DNA, 25 bp, Homo sapien
tgcttgattgtgactgataaacacc

SEQ ID NO: 3479133 - DNA, 25 bp, Homo sapien
taatggcattggttacaatgctgct

SEQ ID NO: 3479134 - DNA, 25 bp, Homo sapien
tcaataatataactaatggcattgg

SEQ ID NO: 3479135 - DNA, 25 bp, Homo sapien
tggctttggataactgctcttgcag

SEQ ID NO: 3479136 - DNA, 25 bp, Homo sapien
ggtgttcggttgtaatcttcctgca

SEQ ID NO: 3479137 - DNA, 25 bp, Homo sapien
gctgaggaatgtgtttcttggcctc

SEQ ID NO: 3479138 - DNA, 25 bp, Homo sapien
agagcctgtggctttggataactgc

SEQ ID NO: 3479139 - DNA, 25 bp, Homo sapien
aaaaggcaactgcaacattctctga

SEQ ID NO: 3479140 - DNA, 25 bp, Homo sapien
aatgtgatctcatgagcaagcaaac

SEQ ID NO: 3479141 - DNA, 25 bp, Homo sapien
gcaaacaatcagacgcccacattta

SEQ ID NO: 3479142 - DNA, 25 bp, Homo sapien
gacatcctgttgtcctacgctagaa

SEQ ID NO: 3479143 - DNA, 25 bp, Homo sapien
cattgtcactactgggccgagaagc

SEQ ID NO: 3479144 - DNA, 25 bp, Homo sapien
tcactgactgttagggtgtccccta

SEQ ID NO: 3479145 - DNA, 25 bp, Homo sapien
aaggtctggagggtgtaactacagc

SEQ ID NO: 3479146 - DNA, 25 bp, Homo sapien
ccaggatctgtttctgcctcactga

SEQ ID NO: 3479147 - DNA, 25 bp, Homo sapien
taaagccttctccaaggtaagcaaa

SEQ ID NO: 3479148 - DNA, 25 bp, Homo sapien
tgcttctcttgtgagaactgggtat

SEQ ID NO: 3479149 - DNA, 25 bp, Homo sapien
ttctcttgtgagaactgggtatcag

SEQ ID NO: 3479150 - DNA, 25 bp, Homo sapien
gtatcagggcattctttaaagcctt

SEQ ID NO: 3479151 - DNA, 25 bp, Homo sapien
ggttttcctctagataaattctctc

SEQ ID NO: 3479152 - DNA, 25 bp, Homo sapien
tgggttttcctctagataaattctc

SEQ ID NO: 3479153 - DNA, 25 bp, Homo sapien
ctgggttttcctctagataaattct

SEQ ID NO: 3479154 - DNA, 25 bp, Homo sapien
tacatattgagtctcctaaacacaa

SEQ ID NO: 3479155 - DNA, 25 bp, Homo sapien
cacaattctgccttttaacaactct

SEQ ID NO: 3479156 - DNA, 25 bp, Homo sapien
tttttcctcctagtgttgcaacact

SEQ ID NO: 3479157 - DNA, 25 bp, Homo sapien
gttttaaactgagtgaataatatgt

SEQ ID NO: 3479158 - DNA, 25 bp, Homo sapien
ctgttgacattttgcgccagagagt

SEQ ID NO: 3479159 - DNA, 25 bp, Homo sapien
ctgtagggtctagcccgtgcattct

SEQ ID NO: 3479160 - DNA, 25 bp, Homo sapien
attctaagacacttagcagcacccc

SEQ ID NO: 3479161 - DNA, 25 bp, Homo sapien
ccagagagttcttggctgtagggtc

SEQ ID NO: 3479162 - DNA, 25 bp, Homo sapien
ggttgagggacttccgacaagtgat

SEQ ID NO: 3479163 - DNA, 25 bp, Homo sapien
tatgaggtgctatacgggttgaggg

SEQ ID NO: 3479164 - DNA, 25 bp, Homo sapien
tatacgggttgagggacttccgaca

SEQ ID NO: 3479165 - DNA, 25 bp, Homo sapien
gacttccgacaagtgattgagtgtc

SEQ ID NO: 3479166 - DNA, 25 bp, Homo sapien
aactacatggtgtaagaaaacagcc

SEQ ID NO: 3479167 - DNA, 25 bp, Homo sapien
tgagccgggcgagattttagtaatt

SEQ ID NO: 3479168 - DNA, 25 bp, Homo sapien
taattcaatgctctggaaacagctg

SEQ ID NO: 3479169 - DNA, 25 bp, Homo sapien
caaagtcgcagggtcaaattgtgaa

SEQ ID NO: 3479170 - DNA, 25 bp, Homo sapien
gcgacgagtttctttggaattggta

SEQ ID NO: 3479171 - DNA, 25 bp, Homo sapien
gaattggtatgtttatacaggtctg

SEQ ID NO: 3479172 - DNA, 25 bp, Homo sapien
tacaggtctgaatagagataacaga

SEQ ID NO: 3479173 - DNA, 25 bp, Homo sapien
aagaactgatgaaactcaaggaaga

SEQ ID NO: 3479174 - DNA, 25 bp, Homo sapien
gatctgcagacatttcatcaggaac

SEQ ID NO: 3479175 - DNA, 25 bp, Homo sapien
catcaggaacagaaactttcaggtg

SEQ ID NO: 3479176 - DNA, 25 bp, Homo sapien
ctagatctgcagacatttcatcagg

SEQ ID NO: 3479177 - DNA, 25 bp, Homo sapien
atttcatcaggaacagaaactttca

SEQ ID NO: 3479178 - DNA, 25 bp, Homo sapien
tcataaatgaaaggaattatgttat

SEQ ID NO: 3479179 - DNA, 25 bp, Homo sapien
cttcataaatgaaaggaattatgtt

SEQ ID NO: 3479180 - DNA, 25 bp, Homo sapien
ttcataaatgaaaggaattatgtta

SEQ ID NO: 3479181 - DNA, 25 bp, Homo sapien
tgcctttgaacttctggatggactc

SEQ ID NO: 3479182 - DNA, 25 bp, Homo sapien
tagtttggatatagtggcgatgcag

SEQ ID NO: 3479183 - DNA, 25 bp, Homo sapien
gatgcagatcctcaggaatgagctc

SEQ ID NO: 3479184 - DNA, 25 bp, Homo sapien
gatggactctttcttgcatagtttg

SEQ ID NO: 3479185 - DNA, 25 bp, Homo sapien
tagtcagctcgctttcagccaaggt

SEQ ID NO: 3479186 - DNA, 25 bp, Homo sapien
tcggtccttgtctcgctctgcatca

SEQ ID NO: 3479187 - DNA, 25 bp, Homo sapien
atgtccgctccttctccaaagtcaa

SEQ ID NO: 3479188 - DNA, 25 bp, Homo sapien
ggtcagtcccatactacgtttctgc

SEQ ID NO: 3479189 - DNA, 25 bp, Homo sapien
gccttacgtaatccgcccgctcggc

SEQ ID NO: 3479190 - DNA, 25 bp, Homo sapien
ttatcttcctctacagcctgagcag

SEQ ID NO: 3479191 - DNA, 25 bp, Homo sapien
tcttcctctacagcctgagcagtca

SEQ ID NO: 3479192 - DNA, 25 bp, Homo sapien
ctcttatcttcctctacagcctgag

SEQ ID NO: 3479193 - DNA, 25 bp, Homo sapien
ttcctctacagcctgagcagtcatc

SEQ ID NO: 3479194 - DNA, 25 bp, Homo sapien
aataacatacaagccaccagagaga

SEQ ID NO: 3479195 - DNA, 25 bp, Homo sapien
gacatcaaatgatttccaaaacccc

SEQ ID NO: 3479196 - DNA, 25 bp, Homo sapien
caggacaacagtagaatattagtca

SEQ ID NO: 3479197 - DNA, 25 bp, Homo sapien
gaactaactagtcattgcacagaga

SEQ ID NO: 3479198 - DNA, 25 bp, Homo sapien
ttgtgctccaaatttcgaggctctt

SEQ ID NO: 3479199 - DNA, 25 bp, Homo sapien
gagaataacatactgcatggtggag

SEQ ID NO: 3479200 - DNA, 25 bp, Homo sapien
tccaaatttcgaggctctttcactt

SEQ ID NO: 3479201 - DNA, 25 bp, Homo sapien
caaatgcttcatatacatgagaata

SEQ ID NO: 3479202 - DNA, 25 bp, Homo sapien
gattttgggaagaaatccaatccga

SEQ ID NO: 3479203 - DNA, 25 bp, Homo sapien
tgtcatgacggcttggtctccgtgg

SEQ ID NO: 3479204 - DNA, 25 bp, Homo sapien
cactgttgtcatgacggcttggtct

SEQ ID NO: 3479205 - DNA, 25 bp, Homo sapien
ctgttgtcatgacggcttggtctcc

SEQ ID NO: 3479206 - DNA, 25 bp, Homo sapien
ttgcactgttgtcatgacggcttgg

SEQ ID NO: 3479207 - DNA, 25 bp, Homo sapien
agtactgaaaatgcagcacttcaaa

SEQ ID NO: 3479208 - DNA, 25 bp, Homo sapien
tgcagcacttcaaacttcaacatac

SEQ ID NO: 3479209 - DNA, 25 bp, Homo sapien
tctagctgaagaagcctctgatgtg

SEQ ID NO: 3479210 - DNA, 25 bp, Homo sapien
aagcctctgatgtgaagagggcctg

SEQ ID NO: 3479211 - DNA, 25 bp, Homo sapien
ttctgtagttccatggctctgccaa

SEQ ID NO: 3479212 - DNA, 25 bp, Homo sapien
gactcacagatgagggtgtggataa

SEQ ID NO: 3479213 - DNA, 25 bp, Homo sapien
tggcgcgccttctgtagttccatgg

SEQ ID NO: 3479214 - DNA, 25 bp, Homo sapien
tgtggataagtgcttagggtggcgc

SEQ ID NO: 3479215 - DNA, 25 bp, Homo sapien
cactctggcgcaacttggcagagtc

SEQ ID NO: 3479216 - DNA, 25 bp, Homo sapien
gcaggcaggtatccagcgtctgttc

SEQ ID NO: 3479217 - DNA, 25 bp, Homo sapien
caggtatccagcgtctgttccttca

SEQ ID NO: 3479218 - DNA, 25 bp, Homo sapien
tccttcatttgctaacccactctgg

SEQ ID NO: 3479219 - DNA, 25 bp, Homo sapien
tcattctctttccctccttcctggg

SEQ ID NO: 3479220 - DNA, 25 bp, Homo sapien
atcattctctttccctccttcctgg

SEQ ID NO: 3479221 - DNA, 25 bp, Homo sapien
cattctctttccctccttcctggga

SEQ ID NO: 3479222 - DNA, 25 bp, Homo sapien
gtatcattctctttccctccttcct

SEQ ID NO: 3479223 - DNA, 25 bp, Homo sapien
tgaaccgcctcccaaacaaggatga

SEQ ID NO: 3479224 - DNA, 25 bp, Homo sapien
ttgtgactatcgctctcaagagaga

SEQ ID NO: 3479225 - DNA, 25 bp, Homo sapien
tgctaaacctttggctggtggctca

SEQ ID NO: 3479226 - DNA, 25 bp, Homo sapien
gaaagctgcatgaggcaagcatctg

SEQ ID NO: 3479227 - DNA, 25 bp, Homo sapien
taatacttaataaagtcactggtca

SEQ ID NO: 3479228 - DNA, 25 bp, Homo sapien
catttgaagagtgttaatacttaat

SEQ ID NO: 3479229 - DNA, 25 bp, Homo sapien
cagacatttgaagagtgttaatact

SEQ ID NO: 3479230 - DNA, 25 bp, Homo sapien
ttaatacttaataaagtcactggtc

SEQ ID NO: 3479231 - DNA, 25 bp, Homo sapien
atcaaagacagtattgagagtacga

SEQ ID NO: 3479232 - DNA, 25 bp, Homo sapien
cagtattgagagtacgaggtgtgcc

SEQ ID NO: 3479233 - DNA, 25 bp, Homo sapien
tcctcctgcacttggtctaatggag

SEQ ID NO: 3479234 - DNA, 25 bp, Homo sapien
ctgcacttggtctaatggaggtggt

SEQ ID NO: 3479235 - DNA, 25 bp, Homo sapien
tataccaaagatactcaaagctagg

SEQ ID NO: 3479236 - DNA, 25 bp, Homo sapien
caatggaaagtaaagagtaacatga

SEQ ID NO: 3479237 - DNA, 25 bp, Homo sapien
ggcttcagtgctagaatgctactaa

SEQ ID NO: 3479238 - DNA, 25 bp, Homo sapien
gtaatgccctaagcttctctaagag

SEQ ID NO: 3479239 - DNA, 25 bp, Homo sapien
gctttggtgtcccatgttcagtcac

SEQ ID NO: 3479240 - DNA, 25 bp, Homo sapien
ggctttggtgtcccatgttcagtca

SEQ ID NO: 3479241 - DNA, 25 bp, Homo sapien
gattcctgaatctgacttagcactg

SEQ ID NO: 3479242 - DNA, 25 bp, Homo sapien
ctttaggtggacaatgagaaacagc

SEQ ID NO: 3479243 - DNA, 25 bp, Homo sapien
gaatgaccagtgtttcttaagagct

SEQ ID NO: 3479244 - DNA, 25 bp, Homo sapien
taaaatgcgcctttattgaaagctg

SEQ ID NO: 3479245 - DNA, 25 bp, Homo sapien
ttctcgactaacaagctgctgccag

SEQ ID NO: 3479246 - DNA, 25 bp, Homo sapien
tcacaaggttttagtcccagtaaca

SEQ ID NO: 3479247 - DNA, 25 bp, Homo sapien
ctttctccaaaagctacactgtcaa

SEQ ID NO: 3479248 - DNA, 25 bp, Homo sapien
gttgggtggatctgtctctaagtca

SEQ ID NO: 3479249 - DNA, 25 bp, Homo sapien
ggatactcgctgatagaacacttga

SEQ ID NO: 3479250 - DNA, 25 bp, Homo sapien
gaacacttgatcaagaaccttcagt

SEQ ID NO: 3479251 - DNA, 25 bp, Homo sapien
aaaattttccgtagctctgagggtg

SEQ ID NO: 3479252 - DNA, 25 bp, Homo sapien
ccttcagtgttcgaacatgagctct

SEQ ID NO: 3479253 - DNA, 25 bp, Homo sapien
aaatcttccccaatctgatcgataa

SEQ ID NO: 3479254 - DNA, 25 bp, Homo sapien
tctctttcgaacagccttcatttgt

SEQ ID NO: 3479255 - DNA, 25 bp, Homo sapien
tctcatttctctttcgaacagcctt

SEQ ID NO: 3479256 - DNA, 25 bp, Homo sapien
tgatcgataacagaggtctcatttc

SEQ ID NO: 3479257 - DNA, 25 bp, Homo sapien
ctatgtggaatatcaatggttctcc

SEQ ID NO: 3479258 - DNA, 25 bp, Homo sapien
acacagaactgcatatctatgtgga

SEQ ID NO: 3479259 - DNA, 25 bp, Homo sapien
gaaactgagcttatacaagccagac

SEQ ID NO: 3479260 - DNA, 25 bp, Homo sapien
agtgacagacaaccagaatcctttc

SEQ ID NO: 3479261 - DNA, 25 bp, Homo sapien
tccagggcgaaaggttggttactgc

SEQ ID NO: 3479262 - DNA, 25 bp, Homo sapien
gaaatcgagaatcctttttctgacg

SEQ ID NO: 3479263 - DNA, 25 bp, Homo sapien
tgacgagatttgatcatttccaggg

SEQ ID NO: 3479264 - DNA, 25 bp, Homo sapien
tgcacaaaagtctgaaatcgagaat

SEQ ID NO: 3479265 - DNA, 25 bp, Homo sapien
tgtatttggcaatattatccaacag

SEQ ID NO: 3479266 - DNA, 25 bp, Homo sapien
tgaagacgacgacacagtggattac

SEQ ID NO: 3479267 - DNA, 25 bp, Homo sapien
tagtaagcctttgcatttgagtggg

SEQ ID NO: 3479268 - DNA, 25 bp, Homo sapien
taatatccttcagttgaagacgacg

SEQ ID NO: 3479269 - DNA, 25 bp, Homo sapien
taagatctgacgacagtgatctgca

SEQ ID NO: 3479270 - DNA, 25 bp, Homo sapien
cataatttaagatctgacgacagtg

SEQ ID NO: 3479271 - DNA, 25 bp, Homo sapien
tctgacgacagtgatctgcagcttt

SEQ ID NO: 3479272 - DNA, 25 bp, Homo sapien
tttctgcctccttgacagcctgatt

SEQ ID NO: 3479273 - DNA, 25 bp, Homo sapien
aacttcaggctggaggtatcaaggc

SEQ ID NO: 3479274 - DNA, 25 bp, Homo sapien
ggcgacgctgataatcttctaggcg

SEQ ID NO: 3479275 - DNA, 25 bp, Homo sapien
ggtatcaaggcgacgctgataatct

SEQ ID NO: 3479276 - DNA, 25 bp, Homo sapien
ctggaggtatcaaggcgacgctgat

SEQ ID NO: 3479277 - DNA, 25 bp, Homo sapien
actatcgttcctgtaatggttccaa

SEQ ID NO: 3479278 - DNA, 25 bp, Homo sapien
cataagcccacatactagaagtggc

SEQ ID NO: 3479279 - DNA, 25 bp, Homo sapien
ggcttctgagttccaaggctctaat

SEQ ID NO: 3479280 - DNA, 25 bp, Homo sapien
taattagtgtcccttagtctcctgc

SEQ ID NO: 3479281 - DNA, 25 bp, Homo sapien
ggcccttcatgaatcatcttccttt

SEQ ID NO: 3479282 - DNA, 25 bp, Homo sapien
tgcaaactgctgagagaatggttct

SEQ ID NO: 3479283 - DNA, 25 bp, Homo sapien
ggagttcgaggcagcagtgcaccat

SEQ ID NO: 3479284 - DNA, 25 bp, Homo sapien
tacaaataacacgaggtagcactgc

SEQ ID NO: 3479285 - DNA, 25 bp, Homo sapien
taagatgtactggtctaaagaaagc

SEQ ID NO: 3479286 - DNA, 25 bp, Homo sapien
gaatgtcttccagcagcaacgtgta

SEQ ID NO: 3479287 - DNA, 25 bp, Homo sapien
ttgtcgaaccaacactgtactcaac

SEQ ID NO: 3479288 - DNA, 25 bp, Homo sapien
cagggctaaacgtgtgtttgctatc

SEQ ID NO: 3479289 - DNA, 25 bp, Homo sapien
tgtactcaacttaatgacagggcta

SEQ ID NO: 3479290 - DNA, 25 bp, Homo sapien
gacatggaaatgacgaataaagctt

SEQ ID NO: 3479291 - DNA, 25 bp, Homo sapien
cagttcataaatctgagcgccattg

SEQ ID NO: 3479292 - DNA, 25 bp, Homo sapien
tgtgccaccagttcataaatctgag

SEQ ID NO: 3479293 - DNA, 25 bp, Homo sapien
tctgagcgccattgtctgacatgga

SEQ ID NO: 3479294 - DNA, 25 bp, Homo sapien
gctatagcaaggtagccatatctga

SEQ ID NO: 3479295 - DNA, 25 bp, Homo sapien
ttacgcttgggataatgaaaatatt

SEQ ID NO: 3479296 - DNA, 25 bp, Homo sapien
gaaaatattagctatagcaaggtag

SEQ ID NO: 3479297 - DNA, 25 bp, Homo sapien
gtttatggaatattacgcttgggat

SEQ ID NO: 3479298 - DNA, 25 bp, Homo sapien
tcgccaggtgttgactgtggtaatg

SEQ ID NO: 3479299 - DNA, 25 bp, Homo sapien
tgatgcagccatccgacagattagg

SEQ ID NO: 3479300 - DNA, 25 bp, Homo sapien
atgcagccatccgacagattaggtc

SEQ ID NO: 3479301 - DNA, 25 bp, Homo sapien
tgactgtggtaatggaattggcttt

SEQ ID NO: 3479302 - DNA, 25 bp, Homo sapien
aaccagtgactgaaatgccatgctg

SEQ ID NO: 3479303 - DNA, 25 bp, Homo sapien
ccagtgactgaaatgccatgctgct

SEQ ID NO: 3479304 - DNA, 25 bp, Homo sapien
gcaaaccagtgactgaaatgccatg

SEQ ID NO: 3479305 - DNA, 25 bp, Homo sapien
cagtgactgaaatgccatgctgctc

SEQ ID NO: 3479306 - DNA, 25 bp, Homo sapien
tcagccacaaacagatcacgtacct

SEQ ID NO: 3479307 - DNA, 25 bp, Homo sapien
ttcccagaggtactcagtgaatgag

SEQ ID NO: 3479308 - DNA, 25 bp, Homo sapien
gaatgagactgaggttttgacgata

SEQ ID NO: 3479309 - DNA, 25 bp, Homo sapien
tcttagtgcatccaatgcccaccgt

SEQ ID NO: 3479310 - DNA, 25 bp, Homo sapien
ggcaacaggttccacttaggtctct

SEQ ID NO: 3479311 - DNA, 25 bp, Homo sapien
gctttttccagatccagacactata

SEQ ID NO: 3479312 - DNA, 25 bp, Homo sapien
gaaaggctgtgttaagctagacaga

SEQ ID NO: 3479313 - DNA, 25 bp, Homo sapien
caagtgtatgctatgaggtcaccca

SEQ ID NO: 3479314 - DNA, 25 bp, Homo sapien
tctggctccatggtaggcatctctg

SEQ ID NO: 3479315 - DNA, 25 bp, Homo sapien
gcttcacgggcatcaaaaaagtgct

SEQ ID NO: 3479316 - DNA, 25 bp, Homo sapien
agtccgtggactgtaacaagttgca

SEQ ID NO: 3479317 - DNA, 25 bp, Homo sapien
cactgaatcccgtggagcaaaagat

SEQ ID NO: 3479318 - DNA, 25 bp, Homo sapien
ctgagatgcgtaaattaacatcctt

SEQ ID NO: 3479319 - DNA, 25 bp, Homo sapien
gtgaaattgccccatcggagtgagt

SEQ ID NO: 3479320 - DNA, 25 bp, Homo sapien
tgaatctgcacaagaggagggactc

SEQ ID NO: 3479321 - DNA, 25 bp, Homo sapien
gggactctggatctcaaaacaggaa

SEQ ID NO: 3479322 - DNA, 25 bp, Homo sapien
cagggtaagtgaggaagcaacctcc

SEQ ID NO: 3479323 - DNA, 25 bp, Homo sapien
ccaagtcctatggatgtggaagtat

SEQ ID NO: 3479324 - DNA, 25 bp, Homo sapien
cctatggatgtggaagtatgaggta

SEQ ID NO: 3479325 - DNA, 25 bp, Homo sapien
tacaaccaagtcctatggatgtgga

SEQ ID NO: 3479326 - DNA, 25 bp, Homo sapien
tcatcaccctattcttcccctctgc

SEQ ID NO: 3479327 - DNA, 25 bp, Homo sapien
gcctttggcaaagaatggtgtaact

SEQ ID NO: 3479328 - DNA, 25 bp, Homo sapien
ttggcaaagaatggtgtaactttcc

SEQ ID NO: 3479329 - DNA, 25 bp, Homo sapien
cctttggcaaagaatggtgtaactt

SEQ ID NO: 3479330 - DNA, 25 bp, Homo sapien
caaagaatggtgtaactttcctcca

SEQ ID NO: 3479331 - DNA, 25 bp, Homo sapien
tgtgggcgtggttcaatctttgttt

SEQ ID NO: 3479332 - DNA, 25 bp, Homo sapien
caaagaatacccatgacatctgtgg

SEQ ID NO: 3479333 - DNA, 25 bp, Homo sapien
agatgagtataaactgctgcaggga

SEQ ID NO: 3479334 - DNA, 25 bp, Homo sapien
gtttctgaatcagtatgtaagcaga

SEQ ID NO: 3479335 - DNA, 25 bp, Homo sapien
gacttgactaatcccaggtggttca

SEQ ID NO: 3479336 - DNA, 25 bp, Homo sapien
acggccgatactccaaatccaacaa

SEQ ID NO: 3479337 - DNA, 25 bp, Homo sapien
gcagtcacctccaggacatgcggct

SEQ ID NO: 3479338 - DNA, 25 bp, Homo sapien
ggagccaggatgtggtgagacacgg

SEQ ID NO: 3479339 - DNA, 25 bp, Homo sapien
tgaagaactagtcccactctgggca

SEQ ID NO: 3479340 - DNA, 25 bp, Homo sapien
tgtgaagaactagtcccactctggg

SEQ ID NO: 3479341 - DNA, 25 bp, Homo sapien
cactgtgaagaactagtcccactct

SEQ ID NO: 3479342 - DNA, 25 bp, Homo sapien
cacactgtgaagaactagtcccact

SEQ ID NO: 3479343 - DNA, 25 bp, Homo sapien
aatcaaaatgaatttccgatagtga

SEQ ID NO: 3479344 - DNA, 25 bp, Homo sapien
gagtgagggaatggatattccctca

SEQ ID NO: 3479345 - DNA, 25 bp, Homo sapien
aatttccgatagtgaggagagtaga

SEQ ID NO: 3479346 - DNA, 25 bp, Homo sapien
aaatgaatttccgatagtgaggaga

SEQ ID NO: 3479347 - DNA, 25 bp, Homo sapien
cagggacagttttacacaagtgcca

SEQ ID NO: 3479348 - DNA, 25 bp, Homo sapien
tcctagagcaggcagttaccaacac

SEQ ID NO: 3479349 - DNA, 25 bp, Homo sapien
aaaaaatcatctttggactgcaggg

SEQ ID NO: 3479350 - DNA, 25 bp, Homo sapien
tcacggccccgtgtggaaagagctg

SEQ ID NO: 3479351 - DNA, 25 bp, Homo sapien
tcatagcaaaggaaccattaagccc

SEQ ID NO: 3479352 - DNA, 25 bp, Homo sapien
gtgtcacagcaggtcacttccatag

SEQ ID NO: 3479353 - DNA, 25 bp, Homo sapien
ggaaggtagctttctttgtacacca

SEQ ID NO: 3479354 - DNA, 25 bp, Homo sapien
taattcaagcagtccaagttaggtg

SEQ ID NO: 3479355 - DNA, 25 bp, Homo sapien
ttttgaggtcctatgcacgcagttc

SEQ ID NO: 3479356 - DNA, 25 bp, Homo sapien
taaccaacagtgtgcacatgacagt

SEQ ID NO: 3479357 - DNA, 25 bp, Homo sapien
tatctgcttagcagttggcacctgg

SEQ ID NO: 3479358 - DNA, 25 bp, Homo sapien
tatggaagccccacgtattacacca

SEQ ID NO: 3479359 - DNA, 25 bp, Homo sapien
ccattcctaggaggtggctatcaaa

SEQ ID NO: 3479360 - DNA, 25 bp, Homo sapien
gccaaatgtgcccttgaatgactga

SEQ ID NO: 3479361 - DNA, 25 bp, Homo sapien
ttcaggtgcgtcataaaagctggcc

SEQ ID NO: 3479362 - DNA, 25 bp, Homo sapien
caaagtaagcgagccttctgagcta

SEQ ID NO: 3479363 - DNA, 25 bp, Homo sapien
tttaaaaagtggtcgtgagatcaaa

SEQ ID NO: 3479364 - DNA, 25 bp, Homo sapien
ttaaaaagtggtcgtgagatcaaaa

SEQ ID NO: 3479365 - DNA, 25 bp, Homo sapien
acaacaacaagaacaacacacaaaa

SEQ ID NO: 3479366 - DNA, 25 bp, Homo sapien
caacaacaacaagaacaacacacaa

SEQ ID NO: 3479367 - DNA, 25 bp, Homo sapien
acaacaacaacaagaacaacacaca

SEQ ID NO: 3479368 - DNA, 25 bp, Homo sapien
caacaacaacaacaagaacaacaca

SEQ ID NO: 3479369 - DNA, 25 bp, Homo sapien
aaagaatgactggtaagcaatcgcc

SEQ ID NO: 3479370 - DNA, 25 bp, Homo sapien
aaccccatttcatgcgggaggcagg

SEQ ID NO: 3479371 - DNA, 25 bp, Homo sapien
aaaaatatgtatccgtgtgaacctg

SEQ ID NO: 3479372 - DNA, 25 bp, Homo sapien
gattccacactgcagctatctttga

SEQ ID NO: 3479373 - DNA, 25 bp, Homo sapien
tgttggccgtttttcctcttccgca

SEQ ID NO: 3479374 - DNA, 25 bp, Homo sapien
tggcggctccagcccgatccgcccg

SEQ ID NO: 3479375 - DNA, 25 bp, Homo sapien
ggctgctgttggccgtttttcctct

SEQ ID NO: 3479376 - DNA, 25 bp, Homo sapien
ctgagacagggtcccctgtgagaag

SEQ ID NO: 3479377 - DNA, 25 bp, Homo sapien
tgccactgacggctgctgagacagg

SEQ ID NO: 3479378 - DNA, 25 bp, Homo sapien
cagggtcccctgtgagaagcgttac

SEQ ID NO: 3479379 - DNA, 25 bp, Homo sapien
ggcactgccactgacggctgctgag

SEQ ID NO: 3479380 - DNA, 25 bp, Homo sapien
aaggagagttccaaaacgcatagag

SEQ ID NO: 3479381 - DNA, 25 bp, Homo sapien
ttctccgcgcctgctgatggctgga

SEQ ID NO: 3479382 - DNA, 25 bp, Homo sapien
gcatagaggcgccaccactcattct

SEQ ID NO: 3479383 - DNA, 25 bp, Homo sapien
cactcagggatcgaagaaatcaggc

SEQ ID NO: 3479384 - DNA, 25 bp, Homo sapien
tctggttcaccagccagtaatgaga

SEQ ID NO: 3479385 - DNA, 25 bp, Homo sapien
gctccagagccacgtttccacttct

SEQ ID NO: 3479386 - DNA, 25 bp, Homo sapien
tcaccagccagtaatgagagctccc

SEQ ID NO: 3479387 - DNA, 25 bp, Homo sapien
cagccagtaatgagagctcccagac

SEQ ID NO: 3479388 - DNA, 25 bp, Homo sapien
tgcattagtattcccgccgcgggcg

SEQ ID NO: 3479389 - DNA, 25 bp, Homo sapien
gggtgcattagtattcccgccgcgg

SEQ ID NO: 3479390 - DNA, 25 bp, Homo sapien
cacctccaggcccgaacgactgcgg

SEQ ID NO: 3479391 - DNA, 25 bp, Homo sapien
tgccctcgcggcgtcggcaccgatg

SEQ ID NO: 3479392 - DNA, 25 bp, Homo sapien
tcagcagccggtggcgacatggcag

SEQ ID NO: 3479393 - DNA, 25 bp, Homo sapien
aggcagtcccgcgtggcggcggccg

SEQ ID NO: 3479394 - DNA, 25 bp, Homo sapien
agccggtggcgacatggcaggcagt

SEQ ID NO: 3479395 - DNA, 25 bp, Homo sapien
catggcaggcagtcccgcgtggcgg

SEQ ID NO: 3479396 - DNA, 25 bp, Homo sapien
ggccttagttgggtcatttcattac

SEQ ID NO: 3479397 - DNA, 25 bp, Homo sapien
catcagtgctgttccctttagcagt

SEQ ID NO: 3479398 - DNA, 25 bp, Homo sapien
gaagaagggaacagcggaaatgaaa

SEQ ID NO: 3479399 - DNA, 25 bp, Homo sapien
ggctttccaatcttcttgcacaata

SEQ ID NO: 3479400 - DNA, 25 bp, Homo sapien
gcacgtgggaggaggtgtgtgactt

SEQ ID NO: 3479401 - DNA, 25 bp, Homo sapien
gaggaggtgtgtgacttgctattaa

SEQ ID NO: 3479402 - DNA, 25 bp, Homo sapien
tgtgtgacttgctattaaggagctc

SEQ ID NO: 3479403 - DNA, 25 bp, Homo sapien
gctattaaggagctcatggataagg

SEQ ID NO: 3479404 - DNA, 25 bp, Homo sapien
ctgcctcggtgtcccaaagcactgg

SEQ ID NO: 3479405 - DNA, 25 bp, Homo sapien
ttacaggcacatgctaccacgcctg

SEQ ID NO: 3479406 - DNA, 25 bp, Homo sapien
ggattacaggcacatgctaccacgc

SEQ ID NO: 3479407 - DNA, 25 bp, Homo sapien
tgcctcggtgtcccaaagcactggg

SEQ ID NO: 3479408 - DNA, 25 bp, Homo sapien
cacccctagccagcaaaaggtccca

SEQ ID NO: 3479409 - DNA, 25 bp, Homo sapien
ccctagccagcaaaaggtcccacca

SEQ ID NO: 3479410 - DNA, 25 bp, Homo sapien
caggtcatagaaagctaagcgcagg

SEQ ID NO: 3479411 - DNA, 25 bp, Homo sapien
catagaaagctaagcgcaggtgtgt

SEQ ID NO: 3479412 - DNA, 25 bp, Homo sapien
ggtgtgtggatccctctcttgcttc

SEQ ID NO: 3479413 - DNA, 25 bp, Homo sapien
tccatccgcccaggtcatagaaagc

SEQ ID NO: 3479414 - DNA, 25 bp, Homo sapien
tgtctagggtggctgcccatgacca

SEQ ID NO: 3479415 - DNA, 25 bp, Homo sapien
cctgtctagggtggctgcccatgac

SEQ ID NO: 3479416 - DNA, 25 bp, Homo sapien
cccctgtctagggtggctgcccatg

SEQ ID NO: 3479417 - DNA, 25 bp, Homo sapien
gtctagggtggctgcccatgaccat

SEQ ID NO: 3479418 - DNA, 25 bp, Homo sapien
ccagctaaagcgcaatatttctctt

SEQ ID NO: 3479419 - DNA, 25 bp, Homo sapien
tcttgctgaagccagctaaagcgca

SEQ ID NO: 3479420 - DNA, 25 bp, Homo sapien
cttttatatccagcggagaagatgc

SEQ ID NO: 3479421 - DNA, 25 bp, Homo sapien
ttctcttttatatccagcggagaag

SEQ ID NO: 3479422 - DNA, 25 bp, Homo sapien
ctggataaacagtttctcttatatt

SEQ ID NO: 3479423 - DNA, 25 bp, Homo sapien
agtttctcttatattctcattatca

SEQ ID NO: 3479424 - DNA, 25 bp, Homo sapien
tggataaacagtttctcttatattc

SEQ ID NO: 3479425 - DNA, 25 bp, Homo sapien
aacagtttctcttatattctcatta

SEQ ID NO: 3479426 - DNA, 25 bp, Homo sapien
agcagctgcccagtggtataattgg

SEQ ID NO: 3479427 - DNA, 25 bp, Homo sapien
ctgtccagcagatactctgggccag

SEQ ID NO: 3479428 - DNA, 25 bp, Homo sapien
ccagcagatactctgggccagctca

SEQ ID NO: 3479429 - DNA, 25 bp, Homo sapien
gcagctgcccagtggtataattggg

SEQ ID NO: 3479430 - DNA, 25 bp, Homo sapien
ggaaggacgcatgcaggcatctcct

SEQ ID NO: 3479431 - DNA, 25 bp, Homo sapien
agtcactctcgtatgagggcagccc

SEQ ID NO: 3479432 - DNA, 25 bp, Homo sapien
acgagtcactctcgtatgagggcag

SEQ ID NO: 3479433 - DNA, 25 bp, Homo sapien
ctccgacacccctaaagcaggaagg

SEQ ID NO: 3479434 - DNA, 25 bp, Homo sapien
ccaccttgattccagaagagtggaa

SEQ ID NO: 3479435 - DNA, 25 bp, Homo sapien
tcaaattcgatggtcaaggcatctt

SEQ ID NO: 3479436 - DNA, 25 bp, Homo sapien
tggaaagaacagaaggggcccagac

SEQ ID NO: 3479437 - DNA, 25 bp, Homo sapien
tcagtcaaattcgatggtcaaggca

SEQ ID NO: 3479438 - DNA, 25 bp, Homo sapien
acatgacctatctgccagtgggact

SEQ ID NO: 3479439 - DNA, 25 bp, Homo sapien
taccttcaggcctgtatcgtcagat

SEQ ID NO: 3479440 - DNA, 25 bp, Homo sapien
tgtatcgtcagatctagcactctaa

SEQ ID NO: 3479441 - DNA, 25 bp, Homo sapien
taataagacactggccgggtatggt

SEQ ID NO: 3479442 - DNA, 25 bp, Homo sapien
gtcaggagacacaggcgcttccaga

SEQ ID NO: 3479443 - DNA, 25 bp, Homo sapien
gaagaaggagcatccaaggtcagga

SEQ ID NO: 3479444 - DNA, 25 bp, Homo sapien
agccaggcctatccaccttgaagaa

SEQ ID NO: 3479445 - DNA, 25 bp, Homo sapien
gagacacaggcgcttccagaagggt

SEQ ID NO: 3479446 - DNA, 25 bp, Homo sapien
agccaagcccagtaggtagaatgca

SEQ ID NO: 3479447 - DNA, 25 bp, Homo sapien
gccaagcccagtaggtagaatgcat

SEQ ID NO: 3479448 - DNA, 25 bp, Homo sapien
tcagttggcacataaggaaccggtg

SEQ ID NO: 3479449 - DNA, 25 bp, Homo sapien
tgagtatgccatcctcctgacgagc

SEQ ID NO: 3479450 - DNA, 25 bp, Homo sapien
gtgtttaccatcactagggctggct

SEQ ID NO: 3479451 - DNA, 25 bp, Homo sapien
tctgtttgccctacaaagcccttga

SEQ ID NO: 3479452 - DNA, 25 bp, Homo sapien
cccatcctctgaagcccatctctgg

SEQ ID NO: 3479453 - DNA, 25 bp, Homo sapien
ccatctctgggccacctcctccaca

SEQ ID NO: 3479454 - DNA, 25 bp, Homo sapien
gggccacctcctccacaacaccctc

SEQ ID NO: 3479455 - DNA, 25 bp, Homo sapien
ttcccatcctctgaagcccatctct

SEQ ID NO: 3479456 - DNA, 25 bp, Homo sapien
cttaaaagaggaggccggcgtctgc

SEQ ID NO: 3479457 - DNA, 25 bp, Homo sapien
ggccggcgtctgcttttctttgcat

SEQ ID NO: 3479458 - DNA, 25 bp, Homo sapien
agccacccagagctcggcccaacac

SEQ ID NO: 3479459 - DNA, 25 bp, Homo sapien
catcagcagaactgttgatagtgca

SEQ ID NO: 3479460 - DNA, 25 bp, Homo sapien
cactgaacatataatgttcttggtt

SEQ ID NO: 3479461 - DNA, 25 bp, Homo sapien
tgtcactgaacatataatgttcttg

SEQ ID NO: 3479462 - DNA, 25 bp, Homo sapien
tcttggttgactctactcttctgca

SEQ ID NO: 3479463 - DNA, 25 bp, Homo sapien
gttcttggttgactctactcttctg

SEQ ID NO: 3479464 - DNA, 25 bp, Homo sapien
ccaaacttctatgtggcacaggtag

SEQ ID NO: 3479465 - DNA, 25 bp, Homo sapien
tccaaacttctatgtggcacaggta

SEQ ID NO: 3479466 - DNA, 25 bp, Homo sapien
caaacttctatgtggcacaggtaga

SEQ ID NO: 3479467 - DNA, 25 bp, Homo sapien
atctttatactaattcaggactttt

SEQ ID NO: 3479468 - DNA, 25 bp, Homo sapien
ggaaaactaatatgacacaagacat

SEQ ID NO: 3479469 - DNA, 25 bp, Homo sapien
aaggaaaactaatatgacacaagac

SEQ ID NO: 3479470 - DNA, 25 bp, Homo sapien
aggaaaactaatatgacacaagaca

SEQ ID NO: 3479471 - DNA, 25 bp, Homo sapien
caaggtcagtataggcagtggtggc

SEQ ID NO: 3479472 - DNA, 25 bp, Homo sapien
tcatttgttcacctacacactcaac

SEQ ID NO: 3479473 - DNA, 25 bp, Homo sapien
ggcatggaggccatccatttgttca

SEQ ID NO: 3479474 - DNA, 25 bp, Homo sapien
cagtggtggcatggaggccatccat

SEQ ID NO: 3479475 - DNA, 25 bp, Homo sapien
gccaccgggaccctccgatgtggtg

SEQ ID NO: 3479476 - DNA, 25 bp, Homo sapien
caggctgcgggaactcagcatgccc

SEQ ID NO: 3479477 - DNA, 25 bp, Homo sapien
cgaagccgctttcataagtcagggt

SEQ ID NO: 3479478 - DNA, 25 bp, Homo sapien
gggaccctccgatgtggtgccttcc

SEQ ID NO: 3479479 - DNA, 25 bp, Homo sapien
gcattgagggccgattttctccatg

SEQ ID NO: 3479480 - DNA, 25 bp, Homo sapien
tgagggccgattttctccatgaacc

SEQ ID NO: 3479481 - DNA, 25 bp, Homo sapien
gggccgattttctccatgaaccctg

SEQ ID NO: 3479482 - DNA, 25 bp, Homo sapien
gctctgcattgagggccgattttct

SEQ ID NO: 3479483 - DNA, 25 bp, Homo sapien
gcatctgggagtaccctttggccaa

SEQ ID NO: 3479484 - DNA, 25 bp, Homo sapien
tggccaaaagatcagcccaggtgtc

SEQ ID NO: 3479485 - DNA, 25 bp, Homo sapien
ggaattcccatgaggagatgctccc

SEQ ID NO: 3479486 - DNA, 25 bp, Homo sapien
tgtccctggcctttaggaattccca

SEQ ID NO: 3479487 - DNA, 25 bp, Homo sapien
ggatcagaggggcagtcagattaat

SEQ ID NO: 3479488 - DNA, 25 bp, Homo sapien
agatcttgattactcttcctgatgc

SEQ ID NO: 3479489 - DNA, 25 bp, Homo sapien
gaggggcagtcagattaatgacagc

SEQ ID NO: 3479490 - DNA, 25 bp, Homo sapien
tttccccgctgtgggcaacaagatc

SEQ ID NO: 3479491 - DNA, 25 bp, Homo sapien
cagagaggaggctgatagccaccag

SEQ ID NO: 3479492 - DNA, 25 bp, Homo sapien
taattgtgattttctgaggtgggtc

SEQ ID NO: 3479493 - DNA, 25 bp, Homo sapien
tcacagggctactacatcattaatt

SEQ ID NO: 3479494 - DNA, 25 bp, Homo sapien
gagaggaggctgatagccaccagtc

SEQ ID NO: 3479495 - DNA, 25 bp, Homo sapien
agagcagggagcaattcgggctttt

SEQ ID NO: 3479496 - DNA, 25 bp, Homo sapien
tccggggtgatgagcgccaggagag

SEQ ID NO: 3479497 - DNA, 25 bp, Homo sapien
tcgggcttttccacctgtgtcctca

SEQ ID NO: 3479498 - DNA, 25 bp, Homo sapien
gagcaattcgggcttttccacctgt

SEQ ID NO: 3479499 - DNA, 25 bp, Homo sapien
cttctatgaatcctcatggagcccc

SEQ ID NO: 3479500 - DNA, 25 bp, Homo sapien
tatgaatcctcatggagccccctgc

SEQ ID NO: 3479501 - DNA, 25 bp, Homo sapien
tgaatcctcatggagccccctgctg

SEQ ID NO: 3479502 - DNA, 25 bp, Homo sapien
tctatgaatcctcatggagccccct

SEQ ID NO: 3479503 - DNA, 25 bp, Homo sapien
ggaagcagcaccaaaggcgccgaga

SEQ ID NO: 3479504 - DNA, 25 bp, Homo sapien
tgcaggcgaccatcacgagccacgc

SEQ ID NO: 3479505 - DNA, 25 bp, Homo sapien
cgaccatcacgagccacgcaggaag

SEQ ID NO: 3479506 - DNA, 25 bp, Homo sapien
aagcagcaccaaaggcgccgagacg

SEQ ID NO: 3479507 - DNA, 25 bp, Homo sapien
tcctgtgcagcactctcatgtccct

SEQ ID NO: 3479508 - DNA, 25 bp, Homo sapien
ccaccacctgcatgttcaccccagc

SEQ ID NO: 3479509 - DNA, 25 bp, Homo sapien
agtcctgtgcagcactctcatgtcc

SEQ ID NO: 3479510 - DNA, 25 bp, Homo sapien
accacctgcatgttcaccccagcca

SEQ ID NO: 3479511 - DNA, 25 bp, Homo sapien
cagcctccctaaggtgcttaccagg

SEQ ID NO: 3479512 - DNA, 25 bp, Homo sapien
gagaagtttgcaaactgacgggtca

SEQ ID NO: 3479513 - DNA, 25 bp, Homo sapien
caagcacagtgctagactctggaaa

SEQ ID NO: 3479514 - DNA, 25 bp, Homo sapien
tgaataagaaagacacagcctccct

SEQ ID NO: 3479515 - DNA, 25 bp, Homo sapien
gaatccaatactgccagtcaggtcc

SEQ ID NO: 3479516 - DNA, 25 bp, Homo sapien
cacgctgctcgatccaactgaatag

SEQ ID NO: 3479517 - DNA, 25 bp, Homo sapien
gaaaacctggagatactcaggccat

SEQ ID NO: 3479518 - DNA, 25 bp, Homo sapien
tgaatagataccatcagcccataat

SEQ ID NO: 3479519 - DNA, 25 bp, Homo sapien
cagtcaaccccgttcaggttgattc

SEQ ID NO: 3479520 - DNA, 25 bp, Homo sapien
gaccagtcaaccccgttcaggttga

SEQ ID NO: 3479521 - DNA, 25 bp, Homo sapien
ctagaggaccagtcaaccccgttca

SEQ ID NO: 3479522 - DNA, 25 bp, Homo sapien
agaggaccagtcaaccccgttcagg

SEQ ID NO: 3479523 - DNA, 25 bp, Homo sapien
ctgggtgagtccaggtggaagagac

SEQ ID NO: 3479524 - DNA, 25 bp, Homo sapien
gagaggagagggagacatgggggac

SEQ ID NO: 3479525 - DNA, 25 bp, Homo sapien
tgggtgagtccaggtggaagagact

SEQ ID NO: 3479526 - DNA, 25 bp, Homo sapien
gagacatgggggacccccttgtgga

SEQ ID NO: 3479527 - DNA, 25 bp, Homo sapien
aagacttaggcactgcaggggaaac

SEQ ID NO: 3479528 - DNA, 25 bp, Homo sapien
gcgctggtggacttgtgtttgccaa

SEQ ID NO: 3479529 - DNA, 25 bp, Homo sapien
cttgtgtttgccaagtcctggtgtt

SEQ ID NO: 3479530 - DNA, 25 bp, Homo sapien
actgcaggggaaacacaagcgctgg

SEQ ID NO: 3479531 - DNA, 25 bp, Homo sapien
tcacacatagcagtactctcctaca

SEQ ID NO: 3479532 - DNA, 25 bp, Homo sapien
atagcagtactctcctacatcacat

SEQ ID NO: 3479533 - DNA, 25 bp, Homo sapien
aaagcacacatagatctgtgccctt

SEQ ID NO: 3479534 - DNA, 25 bp, Homo sapien
cacatagcagtactctcctacatca

SEQ ID NO: 3479535 - DNA, 25 bp, Homo sapien
cttctcttgcacctccagagccaca

SEQ ID NO: 3479536 - DNA, 25 bp, Homo sapien
gcactgcccagaggcctcggggtct

SEQ ID NO: 3479537 - DNA, 25 bp, Homo sapien
ggcactgcccagaggcctcggggtc

SEQ ID NO: 3479538 - DNA, 25 bp, Homo sapien
acaggcactgcccagaggcctcggg

SEQ ID NO: 3479539 - DNA, 25 bp, Homo sapien
aagttagttcctctctctcaagtgt

SEQ ID NO: 3479540 - DNA, 25 bp, Homo sapien
ttaagttagttcctctctctcaagt

SEQ ID NO: 3479541 - DNA, 25 bp, Homo sapien
taagttagttcctctctctcaagtg

SEQ ID NO: 3479542 - DNA, 25 bp, Homo sapien
caccagcttcctccaggtccccctt

SEQ ID NO: 3479543 - DNA, 25 bp, Homo sapien
ggcctgtggcaccagcttcctccag

SEQ ID NO: 3479544 - DNA, 25 bp, Homo sapien
tgtggcaccagcttcctccaggtcc

SEQ ID NO: 3479545 - DNA, 25 bp, Homo sapien
ctggcctgtggcaccagcttcctcc

SEQ ID NO: 3479546 - DNA, 25 bp, Homo sapien
ctaggcctcacaggggaccaacgaa

SEQ ID NO: 3479547 - DNA, 25 bp, Homo sapien
ctggagctaggcctcacaggggacc

SEQ ID NO: 3479548 - DNA, 25 bp, Homo sapien
tcacaggggaccaacgaaatccaaa

SEQ ID NO: 3479549 - DNA, 25 bp, Homo sapien
caacgaaatccaaaagcccacttct

SEQ ID NO: 3479550 - DNA, 25 bp, Homo sapien
acccctggaggagctagtttgatct

SEQ ID NO: 3479551 - DNA, 25 bp, Homo sapien
ccatgctcaagagcaggacccctgg

SEQ ID NO: 3479552 - DNA, 25 bp, Homo sapien
gctagtttgatctttccttaaagca

SEQ ID NO: 3479553 - DNA, 25 bp, Homo sapien
ctgtgcaggttacagtcatggctgt

SEQ ID NO: 3479554 - DNA, 25 bp, Homo sapien
cctgggctccatgcaaggactccag

SEQ ID NO: 3479555 - DNA, 25 bp, Homo sapien
tgggctccatgcaaggactccaggc

SEQ ID NO: 3479556 - DNA, 25 bp, Homo sapien
ccctgggctccatgcaaggactcca

SEQ ID NO: 3479557 - DNA, 25 bp, Homo sapien
ctgggctccatgcaaggactccagg

SEQ ID NO: 3479558 - DNA, 25 bp, Homo sapien
ccatcccattctctacatgactcac

SEQ ID NO: 3479559 - DNA, 25 bp, Homo sapien
tccatcccattctctacatgactca

SEQ ID NO: 3479560 - DNA, 25 bp, Homo sapien
tgactgggaaggtgttggtggggaa

SEQ ID NO: 3479561 - DNA, 25 bp, Homo sapien
ctgactgggaaggtgttggtgggga

SEQ ID NO: 3479562 - DNA, 25 bp, Homo sapien
tcggcaggaaaaatctcctggctgg

SEQ ID NO: 3479563 - DNA, 25 bp, Homo sapien
tccatttacaggcattccgtcggca

SEQ ID NO: 3479564 - DNA, 25 bp, Homo sapien
tgtcagagcgacgaggagccaccgc

SEQ ID NO: 3479565 - DNA, 25 bp, Homo sapien
aactgcctgtcagagcgacgaggag

SEQ ID NO: 3479566 - DNA, 25 bp, Homo sapien
ctttgctcttggtgaggagagggag

SEQ ID NO: 3479567 - DNA, 25 bp, Homo sapien
agacttgaggggacatattaggaac

SEQ ID NO: 3479568 - DNA, 25 bp, Homo sapien
cagggctgagtcctgtctttgctct

SEQ ID NO: 3479569 - DNA, 25 bp, Homo sapien
ttgaggggacatattaggaactcca

SEQ ID NO: 3479570 - DNA, 25 bp, Homo sapien
aacactgcttttaccctggcctggg

SEQ ID NO: 3479571 - DNA, 25 bp, Homo sapien
taatcatgtccataggctctggcca

SEQ ID NO: 3479572 - DNA, 25 bp, Homo sapien
tgctatgttaccagaggctctcctg

SEQ ID NO: 3479573 - DNA, 25 bp, Homo sapien
gacttctgcatgagcttcctgactg

SEQ ID NO: 3479574 - DNA, 25 bp, Homo sapien
tattaaagttggatccaatcatttc

SEQ ID NO: 3479575 - DNA, 25 bp, Homo sapien
cacagggatgcctattgttcacata

SEQ ID NO: 3479576 - DNA, 25 bp, Homo sapien
tatatatgtttaatttcatgaggct

SEQ ID NO: 3479577 - DNA, 25 bp, Homo sapien
gaaacagtgtgccataggtttttat

SEQ ID NO: 3479578 - DNA, 25 bp, Homo sapien
tgccctgcatgtagaacagcagctg

SEQ ID NO: 3479579 - DNA, 25 bp, Homo sapien
gccctgctgcaggtctatcttcagc

SEQ ID NO: 3479580 - DNA, 25 bp, Homo sapien
agttggctgctgttgcccgcaagca

SEQ ID NO: 3479581 - DNA, 25 bp, Homo sapien
tgttgcccgcaagcatggtgcctcc

SEQ ID NO: 3479582 - DNA, 25 bp, Homo sapien
aatggattccattaatattctacat

SEQ ID NO: 3479583 - DNA, 25 bp, Homo sapien
taatattctacatagaactgttgct

SEQ ID NO: 3479584 - DNA, 25 bp, Homo sapien
tattctacatagaactgttgctttt

SEQ ID NO: 3479585 - DNA, 25 bp, Homo sapien
aaaatggattccattaatattctac

SEQ ID NO: 3479586 - DNA, 25 bp, Homo sapien
tccctccaactgtgaccaggatgaa

SEQ ID NO: 3479587 - DNA, 25 bp, Homo sapien
ttccctccaactgtgaccaggatga

SEQ ID NO: 3479588 - DNA, 25 bp, Homo sapien
gagatccaggaaccttcaccgggag

SEQ ID NO: 3479589 - DNA, 25 bp, Homo sapien
gatccaggaaccttcaccgggagaa

SEQ ID NO: 3479590 - DNA, 25 bp, Homo sapien
caaggagatccaggaaccttcaccg

SEQ ID NO: 3479591 - DNA, 25 bp, Homo sapien
caggaaccttcaccgggagaagctt

SEQ ID NO: 3479592 - DNA, 25 bp, Homo sapien
tctattctgctctgaataaagttgg

SEQ ID NO: 3479593 - DNA, 25 bp, Homo sapien
ctattctgctctgaataaagttggg

SEQ ID NO: 3479594 - DNA, 25 bp, Homo sapien
gcatttctattctgctctgaataaa

SEQ ID NO: 3479595 - DNA, 25 bp, Homo sapien
tttctattctgctctgaataaagtt

SEQ ID NO: 3479596 - DNA, 25 bp, Homo sapien
ttttctggataaactcatgctgtct

SEQ ID NO: 3479597 - DNA, 25 bp, Homo sapien
ctgctttggtattcttttctggata

SEQ ID NO: 3479598 - DNA, 25 bp, Homo sapien
actcatgctgtctgcatgaatttcc

SEQ ID NO: 3479599 - DNA, 25 bp, Homo sapien
tgctgtctgcatgaatttcctcaag

SEQ ID NO: 3479600 - DNA, 25 bp, Homo sapien
gtggaggagcggccgagaagtgaat

SEQ ID NO: 3479601 - DNA, 25 bp, Homo sapien
aggagcggccgagaagtgaatggag

SEQ ID NO: 3479602 - DNA, 25 bp, Homo sapien
agtgaatggagagagccaagcagcc

SEQ ID NO: 3479603 - DNA, 25 bp, Homo sapien
caggtggaggagcggccgagaagtg

SEQ ID NO: 3479604 - DNA, 25 bp, Homo sapien
cgtggcgaccccgagagggcataca

SEQ ID NO: 3479605 - DNA, 25 bp, Homo sapien
cccgagagggcatacagccactgac

SEQ ID NO: 3479606 - DNA, 25 bp, Homo sapien
atacagccactgacccgctcaaggt

SEQ ID NO: 3479607 - DNA, 25 bp, Homo sapien
ccaatcagtgtggccgtggcgaccc

SEQ ID NO: 3479608 - DNA, 25 bp, Homo sapien
tagccacccgcagaagtgaccagag

SEQ ID NO: 3479609 - DNA, 25 bp, Homo sapien
ctggggtgattagccacccgcagaa

SEQ ID NO: 3479610 - DNA, 25 bp, Homo sapien
ggtgattagccacccgcagaagtga

SEQ ID NO: 3479611 - DNA, 25 bp, Homo sapien
attagccacccgcagaagtgaccag

SEQ ID NO: 3479612 - DNA, 25 bp, Homo sapien
gatacttggatacctgtctccatgc

SEQ ID NO: 3479613 - DNA, 25 bp, Homo sapien
attctgaacatatgagaaactctcc

SEQ ID NO: 3479614 - DNA, 25 bp, Homo sapien
gcgggtagtggctgtcctttgaaat

SEQ ID NO: 3479615 - DNA, 25 bp, Homo sapien
cattgtgcaaagtgaggcgggtagt

SEQ ID NO: 3479616 - DNA, 25 bp, Homo sapien
caggccactaggggtcctgtctgca

SEQ ID NO: 3479617 - DNA, 25 bp, Homo sapien
gtctgcacgaagtccccgggtccag

SEQ ID NO: 3479618 - DNA, 25 bp, Homo sapien
ctgtctgcacgaagtccccgggtcc

SEQ ID NO: 3479619 - DNA, 25 bp, Homo sapien
gggtcctgtctgcacgaagtccccg

SEQ ID NO: 3479620 - DNA, 25 bp, Homo sapien
gatgtccacttcgaccttggccttg

SEQ ID NO: 3479621 - DNA, 25 bp, Homo sapien
cagggtgatggagagccgctcccct

SEQ ID NO: 3479622 - DNA, 25 bp, Homo sapien
ctcaggagcgcggttgatgcggttc

SEQ ID NO: 3479623 - DNA, 25 bp, Homo sapien
ggtttctgcagtctcgtactcgctg

SEQ ID NO: 3479624 - DNA, 25 bp, Homo sapien
tttaaaaggctcagagctatcagat

SEQ ID NO: 3479625 - DNA, 25 bp, Homo sapien
attaggcaggccactcgagaacagc

SEQ ID NO: 3479626 - DNA, 25 bp, Homo sapien
gggaatatccaattacgatggatgc

SEQ ID NO: 3479627 - DNA, 25 bp, Homo sapien
cacaactttaaaaggctcagagcta

SEQ ID NO: 3479628 - DNA, 25 bp, Homo sapien
gctttccacagtcaaagatatcatc

SEQ ID NO: 3479629 - DNA, 25 bp, Homo sapien
tttccacagtcaaagatatcatcac

SEQ ID NO: 3479630 - DNA, 25 bp, Homo sapien
gatatcatcactagggtctctttca

SEQ ID NO: 3479631 - DNA, 25 bp, Homo sapien
tcatcactagggtctctttcatccc

SEQ ID NO: 3479632 - DNA, 25 bp, Homo sapien
acagggaaagaagcaaagcactcat

SEQ ID NO: 3479633 - DNA, 25 bp, Homo sapien
gggacagggaaagaagcaaagcact

SEQ ID NO: 3479634 - DNA, 25 bp, Homo sapien
tgcagccagcggcagggacagggaa

SEQ ID NO: 3479635 - DNA, 25 bp, Homo sapien
ctgcagccagcggcagggacaggga

SEQ ID NO: 3479636 - DNA, 25 bp, Homo sapien
gatggtccgaggacagcgaccaccc

SEQ ID NO: 3479637 - DNA, 25 bp, Homo sapien
acccccttggggaggatctgacaca

SEQ ID NO: 3479638 - DNA, 25 bp, Homo sapien
tctccacagatgttgctgatgatgg

SEQ ID NO: 3479639 - DNA, 25 bp, Homo sapien
ggctggacgatggtccgaggacagc

SEQ ID NO: 3479640 - DNA, 25 bp, Homo sapien
gcggtggtgcagttgaagaagttca

SEQ ID NO: 3479641 - DNA, 25 bp, Homo sapien
ccagctacagccacgctgatgtcag

SEQ ID NO: 3479642 - DNA, 25 bp, Homo sapien
acagccacgctgatgtcagtgttgc

SEQ ID NO: 3479643 - DNA, 25 bp, Homo sapien
ctggaacttgacgaactcctctggg

SEQ ID NO: 3479644 - DNA, 25 bp, Homo sapien
tgcctgcctgccaagtctaaggctg

SEQ ID NO: 3479645 - DNA, 25 bp, Homo sapien
cagcgggacggatcgatgagagagt

SEQ ID NO: 3479646 - DNA, 25 bp, Homo sapien
gagagagtcggcaggcaggctgttc

SEQ ID NO: 3479647 - DNA, 25 bp, Homo sapien
tattagccttgctcaggatgcagcg

SEQ ID NO: 3479648 - DNA, 25 bp, Homo sapien
tcgtcccggatctccttgaggagcg

SEQ ID NO: 3479649 - DNA, 25 bp, Homo sapien
tccttggagataaggaattgccgga

SEQ ID NO: 3479650 - DNA, 25 bp, Homo sapien
atgatggtggcggtcttgtcgtccc

SEQ ID NO: 3479651 - DNA, 25 bp, Homo sapien
gacggacagcgtgtccttggagata

SEQ ID NO: 3479652 - DNA, 25 bp, Homo sapien
gagaggtttgtaagagttcaggtcc

SEQ ID NO: 3479653 - DNA, 25 bp, Homo sapien
aggtttgtaagagttcaggtccagc

SEQ ID NO: 3479654 - DNA, 25 bp, Homo sapien
cgggaaccgctcattgaaaacagaa

SEQ ID NO: 3479655 - DNA, 25 bp, Homo sapien
tctttcatttttcgggaaccgctca

SEQ ID NO: 3479656 - DNA, 25 bp, Homo sapien
gtgctgaaaacgacatcaccctcac

SEQ ID NO: 3479657 - DNA, 25 bp, Homo sapien
gataatgtgagttgggtatacgcac

SEQ ID NO: 3479658 - DNA, 25 bp, Homo sapien
tgggtatacgcacacagacagacat

SEQ ID NO: 3479659 - DNA, 25 bp, Homo sapien
gagagataatgtgagttgggtatac

SEQ ID NO: 3479660 - DNA, 25 bp, Homo sapien
tgagttgggtatacgcacacagaca

SEQ ID NO: 3479661 - DNA, 25 bp, Homo sapien
ctgagctaccttccacaagggtggt

SEQ ID NO: 3479662 - DNA, 25 bp, Homo sapien
tgagctaccttccacaagggtggtg

SEQ ID NO: 3479663 - DNA, 25 bp, Homo sapien
tagacggatgcgacccacggagcga

SEQ ID NO: 3479664 - DNA, 25 bp, Homo sapien
acggatgcgacccacggagcgagcc

SEQ ID NO: 3479665 - DNA, 25 bp, Homo sapien
ctgcctagacggatgcgacccacgg

SEQ ID NO: 3479666 - DNA, 25 bp, Homo sapien
gtccaagtaagagtgctgctgcatc

SEQ ID NO: 3479667 - DNA, 25 bp, Homo sapien
gaagatgtatgtgtaataggctgac

SEQ ID NO: 3479668 - DNA, 25 bp, Homo sapien
tgaagatgtatgtgtaataggctga

SEQ ID NO: 3479669 - DNA, 25 bp, Homo sapien
ggctgacaccatcccaagttcggct

SEQ ID NO: 3479670 - DNA, 25 bp, Homo sapien
taataggctgacaccatcccaagtt

SEQ ID NO: 3479671 - DNA, 25 bp, Homo sapien
aaggactgttcatagacaccgacag

SEQ ID NO: 3479672 - DNA, 25 bp, Homo sapien
gaaacaggcagtcgaatgcagcttg

SEQ ID NO: 3479673 - DNA, 25 bp, Homo sapien
gaggtttgcctcacatcgcatctgt

SEQ ID NO: 3479674 - DNA, 25 bp, Homo sapien
taactgcaggcttgtgtggctaaga

SEQ ID NO: 3479675 - DNA, 25 bp, Homo sapien
tagtaaaatctctccacggtcatca

SEQ ID NO: 3479676 - DNA, 25 bp, Homo sapien
tgaggctctgggcaaactcttggaa

SEQ ID NO: 3479677 - DNA, 25 bp, Homo sapien
gcacatggtcacagttctcctgcca

SEQ ID NO: 3479678 - DNA, 25 bp, Homo sapien
aagaaagcatgggattggttgaaaa

SEQ ID NO: 3479679 - DNA, 25 bp, Homo sapien
ttgacacgatcatccacaaggctgt

SEQ ID NO: 3479680 - DNA, 25 bp, Homo sapien
ccatggaaaggtttgctcccgtcac

SEQ ID NO: 3479681 - DNA, 25 bp, Homo sapien
gtttgctcccgtcacacatgccgga

SEQ ID NO: 3479682 - DNA, 25 bp, Homo sapien
gctcccgtcacacatgccggaaggg

SEQ ID NO: 3479683 - DNA, 25 bp, Homo sapien
gaaaggtttgctcccgtcacacatg

SEQ ID NO: 3479684 - DNA, 25 bp, Homo sapien
gggctacatgaccactcttaactgt

SEQ ID NO: 3479685 - DNA, 25 bp, Homo sapien
ccacttgtccaaaagggctacatga

SEQ ID NO: 3479686 - DNA, 25 bp, Homo sapien
ccactcttaactgttacgaggatgc

SEQ ID NO: 3479687 - DNA, 25 bp, Homo sapien
tccaaaagggctacatgaccactct

SEQ ID NO: 3479688 - DNA, 25 bp, Homo sapien
tctttgcagcgtgattaatgggaac

SEQ ID NO: 3479689 - DNA, 25 bp, Homo sapien
tccacttagaatgccgaaggcccga

SEQ ID NO: 3479690 - DNA, 25 bp, Homo sapien
gaagctagcgggtgtgtgtctccat

SEQ ID NO: 3479691 - DNA, 25 bp, Homo sapien
ggcagacccttacccaagtcaggag

SEQ ID NO: 3479692 - DNA, 25 bp, Homo sapien
cactccggaatcttgctaagccacg

SEQ ID NO: 3479693 - DNA, 25 bp, Homo sapien
taagccacgcaataacacatttccg

SEQ ID NO: 3479694 - DNA, 25 bp, Homo sapien
tctcacaagacgttttgatacaggg

SEQ ID NO: 3479695 - DNA, 25 bp, Homo sapien
agggtttctgttgccgagagtactc

SEQ ID NO: 3479696 - DNA, 25 bp, Homo sapien
ggcaggtaccatagacctcaacacc

SEQ ID NO: 3479697 - DNA, 25 bp, Homo sapien
tgccctcggcctccgtcgagtctcc

SEQ ID NO: 3479698 - DNA, 25 bp, Homo sapien
tcggcctccgtcgagtctcctgcct

SEQ ID NO: 3479699 - DNA, 25 bp, Homo sapien
atctggcaggtaccatagacctcaa

SEQ ID NO: 3479700 - DNA, 25 bp, Homo sapien
accgcagtcaccacagcatagacag

SEQ ID NO: 3479701 - DNA, 25 bp, Homo sapien
tcaccacagcatagacagcatcaaa

SEQ ID NO: 3479702 - DNA, 25 bp, Homo sapien
tgcaccgcagtcaccacagcataga

SEQ ID NO: 3479703 - DNA, 25 bp, Homo sapien
agtcaccacagcatagacagcatca

SEQ ID NO: 3479704 - DNA, 25 bp, Homo sapien
caggacaagggcttcacgccgatct

SEQ ID NO: 3479705 - DNA, 25 bp, Homo sapien
ttcacgccgatctcttggctccggt

SEQ ID NO: 3479706 - DNA, 25 bp, Homo sapien
gccgagccgcaggacaagggcttca

SEQ ID NO: 3479707 - DNA, 25 bp, Homo sapien
cgccgatctcttggctccggttcag

SEQ ID NO: 3479708 - DNA, 25 bp, Homo sapien
aaaccattccttgtgaactgtaaga

SEQ ID NO: 3479709 - DNA, 25 bp, Homo sapien
gctgttgaattcaatgtggccggta

SEQ ID NO: 3479710 - DNA, 25 bp, Homo sapien
tggccggtaagaccttccaattcta

SEQ ID NO: 3479711 - DNA, 25 bp, Homo sapien
caaagcgtagttggacctctggcct

SEQ ID NO: 3479712 - DNA, 25 bp, Homo sapien
gatgcctcagggcacggtcccttgc

SEQ ID NO: 3479713 - DNA, 25 bp, Homo sapien
tcagggcacggtcccttgctggcct

SEQ ID NO: 3479714 - DNA, 25 bp, Homo sapien
cctctggcctcagggctagcacaag

SEQ ID NO: 3479715 - DNA, 25 bp, Homo sapien
cacaagctagcctgagcagcggctg

SEQ ID NO: 3479716 - DNA, 25 bp, Homo sapien
ccaagcctgcactgagcaccactct

SEQ ID NO: 3479717 - DNA, 25 bp, Homo sapien
cagtccctcgttcgctccgtattcg

SEQ ID NO: 3479718 - DNA, 25 bp, Homo sapien
gttcgctccgtattcgctctccaag

SEQ ID NO: 3479719 - DNA, 25 bp, Homo sapien
tctccaagcctgcactgagcaccac

SEQ ID NO: 3479720 - DNA, 25 bp, Homo sapien
tctgccccttgaccgttgtccctgg

SEQ ID NO: 3479721 - DNA, 25 bp, Homo sapien
aggttacatcctgccaaagccagct

SEQ ID NO: 3479722 - DNA, 25 bp, Homo sapien
cacaggagaaagtatttcagagcct

SEQ ID NO: 3479723 - DNA, 25 bp, Homo sapien
aggagagcctgattcactcacagga

SEQ ID NO: 3479724 - DNA, 25 bp, Homo sapien
acagctgttttgtaagccgcttcca

SEQ ID NO: 3479725 - DNA, 25 bp, Homo sapien
aacagctgttttgtaagccgcttcc

SEQ ID NO: 3479726 - DNA, 25 bp, Homo sapien
cagctgttttgtaagccgcttccac

SEQ ID NO: 3479727 - DNA, 25 bp, Homo sapien
gctgttttgtaagccgcttccacat

SEQ ID NO: 3479728 - DNA, 25 bp, Homo sapien
gggagatgaccaaatgctcccgtcc

SEQ ID NO: 3479729 - DNA, 25 bp, Homo sapien
ccaggcaggagccttatggtctcta

SEQ ID NO: 3479730 - DNA, 25 bp, Homo sapien
tatggtctctacagttgggcctttc

SEQ ID NO: 3479731 - DNA, 25 bp, Homo sapien
agatgaccaaatgctcccgtccacg

SEQ ID NO: 3479732 - DNA, 25 bp, Homo sapien
tgccatgtggttctattccgcagaa

SEQ ID NO: 3479733 - DNA, 25 bp, Homo sapien
ttctattccgcagaactgggctctg

SEQ ID NO: 3479734 - DNA, 25 bp, Homo sapien
acagatgccatgtggttctattccg

SEQ ID NO: 3479735 - DNA, 25 bp, Homo sapien
tgtggttctattccgcagaactggg

SEQ ID NO: 3479736 - DNA, 25 bp, Homo sapien
gaccaacggagaggactgggaagaa

SEQ ID NO: 3479737 - DNA, 25 bp, Homo sapien
gagaccaacggagaggactgggaag

SEQ ID NO: 3479738 - DNA, 25 bp, Homo sapien
aggagaccaacggagaggactggga

SEQ ID NO: 3479739 - DNA, 25 bp, Homo sapien
ctgaggagaccaacggagaggactg

SEQ ID NO: 3479740 - DNA, 25 bp, Homo sapien
tccgagatgttggaggcatagaggt

SEQ ID NO: 3479741 - DNA, 25 bp, Homo sapien
tgttgaagagagtgtccgagatgtt

SEQ ID NO: 3479742 - DNA, 25 bp, Homo sapien
atggtggtgacgaccagggtggtgt

SEQ ID NO: 3479743 - DNA, 25 bp, Homo sapien
aggccctctgccacgtgccactggc

SEQ ID NO: 3479744 - DNA, 25 bp, Homo sapien
catatgaaacagcaacttgagtgta

SEQ ID NO: 3479745 - DNA, 25 bp, Homo sapien
cttgagtgtaattacgctgtcataa

SEQ ID NO: 3479746 - DNA, 25 bp, Homo sapien
gtaattacgctgtcataaattgggc

SEQ ID NO: 3479747 - DNA, 25 bp, Homo sapien
ttccatatgaaacagcaacttgagt

SEQ ID NO: 3479748 - DNA, 25 bp, Homo sapien
tcatgcatcgcctctttgctctggg

SEQ ID NO: 3479749 - DNA, 25 bp, Homo sapien
gctgaggaggcgaactcatgcatcg

SEQ ID NO: 3479750 - DNA, 25 bp, Homo sapien
cttgcacagttagcaatgataaggc

SEQ ID NO: 3479751 - DNA, 25 bp, Homo sapien
gctctgggctgcaatgatatcattg

SEQ ID NO: 3479752 - DNA, 25 bp, Homo sapien
gagcggcagccaattccatgtttgc

SEQ ID NO: 3479753 - DNA, 25 bp, Homo sapien
tgttgagtgctagcctggagcaggg

SEQ ID NO: 3479754 - DNA, 25 bp, Homo sapien
gtttgctggcattaaccaataaacc

SEQ ID NO: 3479755 - DNA, 25 bp, Homo sapien
gaatgtggcaaaccgctgaacacgg

SEQ ID NO: 3479756 - DNA, 25 bp, Homo sapien
ccgatcatgtgagtaagaagcaaac

SEQ ID NO: 3479757 - DNA, 25 bp, Homo sapien
cattaagcacttgccgatcatgtga

SEQ ID NO: 3479758 - DNA, 25 bp, Homo sapien
acctggctcagcattaagcacttgc

SEQ ID NO: 3479759 - DNA, 25 bp, Homo sapien
tgcttggttcccctacctggctcag

SEQ ID NO: 3479760 - DNA, 25 bp, Homo sapien
aaggcgatggtgttttaggatggga

SEQ ID NO: 3479761 - DNA, 25 bp, Homo sapien
gtgaaggcgatggtgttttaggatg

SEQ ID NO: 3479762 - DNA, 25 bp, Homo sapien
ggcgatggtgttttaggatgggaca

SEQ ID NO: 3479763 - DNA, 25 bp, Homo sapien
gatggtgttttaggatgggacagtc

SEQ ID NO: 3479764 - DNA, 25 bp, Homo sapien
aggggcccacccaattctgtgattc

SEQ ID NO: 3479765 - DNA, 25 bp, Homo sapien
caggggcccacccaattctgtgatt

SEQ ID NO: 3479766 - DNA, 25 bp, Homo sapien
ggctgttcagcattttgacaggtta

SEQ ID NO: 3479767 - DNA, 25 bp, Homo sapien
cagcaggactccgtaggatgaggac

SEQ ID NO: 3479768 - DNA, 25 bp, Homo sapien
agcaggactccgtaggatgaggact

SEQ ID NO: 3479769 - DNA, 25 bp, Homo sapien
caggagtgagggctgttcagcattt

SEQ ID NO: 3479770 - DNA, 25 bp, Homo sapien
gggtgaggacagaccctctcctgag

SEQ ID NO: 3479771 - DNA, 25 bp, Homo sapien
ctgcaggttggattggagaaagcca

SEQ ID NO: 3479772 - DNA, 25 bp, Homo sapien
tggagcccggtggatgactaacaga

SEQ ID NO: 3479773 - DNA, 25 bp, Homo sapien
agccagaaggatgtaagaggcacag

SEQ ID NO: 3479774 - DNA, 25 bp, Homo sapien
gctccttaaagctgtccttcaaggt

SEQ ID NO: 3479775 - DNA, 25 bp, Homo sapien
tgttgtcaggaacacacagtggttc

SEQ ID NO: 3479776 - DNA, 25 bp, Homo sapien
aatgggctactttggggtgatgacc

SEQ ID NO: 3479777 - DNA, 25 bp, Homo sapien
aaactgacgtgggtaatgggctact

SEQ ID NO: 3479778 - DNA, 25 bp, Homo sapien
cctggtggttccccttcagcattaa

SEQ ID NO: 3479779 - DNA, 25 bp, Homo sapien
tcctggtggttccccttcagcatta

SEQ ID NO: 3479780 - DNA, 25 bp, Homo sapien
tgccgttggcctcgggaacgccgta

SEQ ID NO: 3479781 - DNA, 25 bp, Homo sapien
tcttgtagttgaatcggaggatctc

SEQ ID NO: 3479782 - DNA, 25 bp, Homo sapien
gaccattcccgtccaggtgccgttg

SEQ ID NO: 3479783 - DNA, 25 bp, Homo sapien
catccccaaccaggcggatcttgta

SEQ ID NO: 3479784 - DNA, 25 bp, Homo sapien
ggcccagatcacttgtcctctcctt

SEQ ID NO: 3479785 - DNA, 25 bp, Homo sapien
cccagatcacttgtcctctccttac

SEQ ID NO: 3479786 - DNA, 25 bp, Homo sapien
tcaggcccagatcacttgtcctctc

SEQ ID NO: 3479787 - DNA, 25 bp, Homo sapien
caggcccagatcacttgtcctctcc

SEQ ID NO: 3479788 - DNA, 25 bp, Homo sapien
cacattcaccctgaaaatctacagc

SEQ ID NO: 3479789 - DNA, 25 bp, Homo sapien
tgttaatcacgtctccacattcacc

SEQ ID NO: 3479790 - DNA, 25 bp, Homo sapien
ctgaatgttaatcacgtctccacat

SEQ ID NO: 3479791 - DNA, 25 bp, Homo sapien
gtccaagcacaccttggccctcggt

SEQ ID NO: 3479792 - DNA, 25 bp, Homo sapien
gatgtctgacattctccaatgctca

SEQ ID NO: 3479793 - DNA, 25 bp, Homo sapien
cagatgtctgacattctccaatgct

SEQ ID NO: 3479794 - DNA, 25 bp, Homo sapien
aacagatgtctgacattctccaatg

SEQ ID NO: 3479795 - DNA, 25 bp, Homo sapien
ctaacagatgtctgacattctccaa

SEQ ID NO: 3479796 - DNA, 25 bp, Homo sapien
caggcctgagggctaccacaatcct

SEQ ID NO: 3479797 - DNA, 25 bp, Homo sapien
caatcctaggggaacatcctggaaa

SEQ ID NO: 3479798 - DNA, 25 bp, Homo sapien
cctgagggctaccacaatcctaggg

SEQ ID NO: 3479799 - DNA, 25 bp, Homo sapien
ctctgcttgctgttacagcctctgg

SEQ ID NO: 3479800 - DNA, 25 bp, Homo sapien
aagaacactggtgcatccagctgca

SEQ ID NO: 3479801 - DNA, 25 bp, Homo sapien
gcgtctttgggctgctgtgatgcaa

SEQ ID NO: 3479802 - DNA, 25 bp, Homo sapien
tgggctgctgtgatgcaagaacact

SEQ ID NO: 3479803 - DNA, 25 bp, Homo sapien
cctccagccctgaggcgtctttggg

SEQ ID NO: 3479804 - DNA, 25 bp, Homo sapien
ctgcaagatggccaatgtctgggca

SEQ ID NO: 3479805 - DNA, 25 bp, Homo sapien
tgctgcataagtgagagcccctgga

SEQ ID NO: 3479806 - DNA, 25 bp, Homo sapien
gctgcataagtgagagcccctggag

SEQ ID NO: 3479807 - DNA, 25 bp, Homo sapien
gaaaagcattctcaattctgagcag

SEQ ID NO: 3479808 - DNA, 25 bp, Homo sapien
aagaaaagcattctcaattctgagc

SEQ ID NO: 3479809 - DNA, 25 bp, Homo sapien
agaaaagcattctcaattctgagca

SEQ ID NO: 3479810 - DNA, 25 bp, Homo sapien
gccaattccaatattgctccagcca

SEQ ID NO: 3479811 - DNA, 25 bp, Homo sapien
tccagccacatgaacgtccctgcat

SEQ ID NO: 3479812 - DNA, 25 bp, Homo sapien
actgacactgccaattccaatattg

SEQ ID NO: 3479813 - DNA, 25 bp, Homo sapien
attccaatattgctccagccacatg

SEQ ID NO: 3479814 - DNA, 25 bp, Homo sapien
cagaggcccagcggcaatcttctgg

SEQ ID NO: 3479815 - DNA, 25 bp, Homo sapien
attggctgggctcgcacggttggca

SEQ ID NO: 3479816 - DNA, 25 bp, Homo sapien
tccaccgagcgcaggtagggcattg

SEQ ID NO: 3479817 - DNA, 25 bp, Homo sapien
tcttctggggtgtgcgcacctcact

SEQ ID NO: 3479818 - DNA, 25 bp, Homo sapien
catcaacgctgggatggttaattct

SEQ ID NO: 3479819 - DNA, 25 bp, Homo sapien
aacgctgggatggttaattctcttc

SEQ ID NO: 3479820 - DNA, 25 bp, Homo sapien
ccaagtgctttggcatcaacgctgg

SEQ ID NO: 3479821 - DNA, 25 bp, Homo sapien
aggatcttccgaaaacctacaactg

SEQ ID NO: 3479822 - DNA, 25 bp, Homo sapien
cctaggacacggcaggtccgtgcag

SEQ ID NO: 3479823 - DNA, 25 bp, Homo sapien
tgtcccactgttctgtcgccaccta

SEQ ID NO: 3479824 - DNA, 25 bp, Homo sapien
acacctagcatctgttttgatctcc

SEQ ID NO: 3479825 - DNA, 25 bp, Homo sapien
ccacacctagcatctgttttgatct

SEQ ID NO: 3479826 - DNA, 25 bp, Homo sapien
gccactaaacgctctgctgactctg

SEQ ID NO: 3479827 - DNA, 25 bp, Homo sapien
acggtaccgactgctacagcggtga

SEQ ID NO: 3479828 - DNA, 25 bp, Homo sapien
catctgggtggcttctaattcaaga

SEQ ID NO: 3479829 - DNA, 25 bp, Homo sapien
gagtctagattcctcgtctggcaca

SEQ ID NO: 3479830 - DNA, 25 bp, Homo sapien
gctggttaagctctgggtcgctgac

SEQ ID NO: 3479831 - DNA, 25 bp, Homo sapien
aatacagtcaccaataggccatggg

SEQ ID NO: 3479832 - DNA, 25 bp, Homo sapien
tcaccagtgagtccaccctcttctg

SEQ ID NO: 3479833 - DNA, 25 bp, Homo sapien
ctctgggtcgctgacaacgggcaaa

SEQ ID NO: 3479834 - DNA, 25 bp, Homo sapien
ttattgataaaaatctctggcccac

SEQ ID NO: 3479835 - DNA, 25 bp, Homo sapien
ggtgtcatgtgggacgcccaaccag

SEQ ID NO: 3479836 - DNA, 25 bp, Homo sapien
tgtcatgtgggacgcccaaccagaa

SEQ ID NO: 3479837 - DNA, 25 bp, Homo sapien
cttggacggtgtcatgtgggacgcc

SEQ ID NO: 3479838 - DNA, 25 bp, Homo sapien
gacggtgtcatgtgggacgcccaac

SEQ ID NO: 3479839 - DNA, 25 bp, Homo sapien
gcaccacagcaactatacctgtcct

SEQ ID NO: 3479840 - DNA, 25 bp, Homo sapien
taagaaattattcacgactcccact

SEQ ID NO: 3479841 - DNA, 25 bp, Homo sapien
cacagcaactatacctgtcctccct

SEQ ID NO: 3479842 - DNA, 25 bp, Homo sapien
ctaagaaattattcacgactcccac

SEQ ID NO: 3479843 - DNA, 25 bp, Homo sapien
gattaataggggccgtgcagctgcc

SEQ ID NO: 3479844 - DNA, 25 bp, Homo sapien
cctcctggagattaataggggccgt

SEQ ID NO: 3479845 - DNA, 25 bp, Homo sapien
cctggagattaataggggccgtgca

SEQ ID NO: 3479846 - DNA, 25 bp, Homo sapien
ttggcctcctggagattaatagggg

SEQ ID NO: 3479847 - DNA, 25 bp, Homo sapien
gaaactgatgaccagactcgtcagt

SEQ ID NO: 3479848 - DNA, 25 bp, Homo sapien
tgatgaccagactcgtcagtgaaga

SEQ ID NO: 3479849 - DNA, 25 bp, Homo sapien
aactgatgaccagactcgtcagtga

SEQ ID NO: 3479850 - DNA, 25 bp, Homo sapien
ggaaactgatgaccagactcgtcag

SEQ ID NO: 3479851 - DNA, 25 bp, Homo sapien
gatgatggcggtcagcagtattgaa

SEQ ID NO: 3479852 - DNA, 25 bp, Homo sapien
cccactttgcttaagtggatgatgg

SEQ ID NO: 3479853 - DNA, 25 bp, Homo sapien
gatggcggtcagcagtattgaacgc

SEQ ID NO: 3479854 - DNA, 25 bp, Homo sapien
cactttgcttaagtggatgatggcg

SEQ ID NO: 3479855 - DNA, 25 bp, Homo sapien
tgtgcctgactagaagagacagcgc

SEQ ID NO: 3479856 - DNA, 25 bp, Homo sapien
gactcttgtcacttgtgggccacaa

SEQ ID NO: 3479857 - DNA, 25 bp, Homo sapien
aaatcccctgctttaatgtgcctga

SEQ ID NO: 3479858 - DNA, 25 bp, Homo sapien
taggcaaattattccaccgtctgga

SEQ ID NO: 3479859 - DNA, 25 bp, Homo sapien
tatggggttgtaagttggcacaaac

SEQ ID NO: 3479860 - DNA, 25 bp, Homo sapien
atgtaaggctacgtaggatttgttt

SEQ ID NO: 3479861 - DNA, 25 bp, Homo sapien
aaaatgtaaggctacgtaggatttg

SEQ ID NO: 3479862 - DNA, 25 bp, Homo sapien
agtatggggttgtaagttggcacaa

SEQ ID NO: 3479863 - DNA, 25 bp, Homo sapien
aagagaaatgaaacccgtatctctc

SEQ ID NO: 3479864 - DNA, 25 bp, Homo sapien
aaagagaaatgaaacccgtatctct

SEQ ID NO: 3479865 - DNA, 25 bp, Homo sapien
cagtcccagtctttctttcctttgt

SEQ ID NO: 3479866 - DNA, 25 bp, Homo sapien
aaacagggaaccggcttcatgcaca

SEQ ID NO: 3479867 - DNA, 25 bp, Homo sapien
aacagggaaccggcttcatgcacac

SEQ ID NO: 3479868 - DNA, 25 bp, Homo sapien
cagagacagcccgtcagtggggtgg

SEQ ID NO: 3479869 - DNA, 25 bp, Homo sapien
tgaaaagaacagagacagcccgtca

SEQ ID NO: 3479870 - DNA, 25 bp, Homo sapien
agaacagagacagcccgtcagtggg

SEQ ID NO: 3479871 - DNA, 25 bp, Homo sapien
gacagcccgtcagtggggtggccat

SEQ ID NO: 3479872 - DNA, 25 bp, Homo sapien
catatgaacgcggtaaagaatgcta

SEQ ID NO: 3479873 - DNA, 25 bp, Homo sapien
catgaatggcttagagaaatcaatc

SEQ ID NO: 3479874 - DNA, 25 bp, Homo sapien
agctgtaatggtgaggcctgccaca

SEQ ID NO: 3479875 - DNA, 25 bp, Homo sapien
aaatcaatcaccttctcccgttcag

SEQ ID NO: 3479876 - DNA, 25 bp, Homo sapien
catggcagctgaatcatgggcactg

SEQ ID NO: 3479877 - DNA, 25 bp, Homo sapien
tagagccagttcagctgacaagagg

SEQ ID NO: 3479878 - DNA, 25 bp, Homo sapien
tatgacgctctgcacttagagccag

SEQ ID NO: 3479879 - DNA, 25 bp, Homo sapien
aaatgactagtgtattgggcaaatc

SEQ ID NO: 3479880 - DNA, 25 bp, Homo sapien
cctgttgggcagcctcgaggtacag

SEQ ID NO: 3479881 - DNA, 25 bp, Homo sapien
ggcagcctcgaggtacaggctctgt

SEQ ID NO: 3479882 - DNA, 25 bp, Homo sapien
ttgggcagcctcgaggtacaggctc

SEQ ID NO: 3479883 - DNA, 25 bp, Homo sapien
gcctcgaggtacaggctctgttctg

SEQ ID NO: 3479884 - DNA, 25 bp, Homo sapien
gttcctgatgggccactgagtcacc

SEQ ID NO: 3479885 - DNA, 25 bp, Homo sapien
catctggttcctgatgggccactga

SEQ ID NO: 3479886 - DNA, 25 bp, Homo sapien
tctggttcctgatgggccactgagt

SEQ ID NO: 3479887 - DNA, 25 bp, Homo sapien
ctggttcctgatgggccactgagtc

SEQ ID NO: 3479888 - DNA, 25 bp, Homo sapien
aggaggcagctacagccagacctga

SEQ ID NO: 3479889 - DNA, 25 bp, Homo sapien
ggcagctacagccagacctgagcca

SEQ ID NO: 3479890 - DNA, 25 bp, Homo sapien
ctacagccagacctgagccagaggc

SEQ ID NO: 3479891 - DNA, 25 bp, Homo sapien
tcaggaggcagctacagccagacct

SEQ ID NO: 3479892 - DNA, 25 bp, Homo sapien
gaaatactcatcctctgccaaaaag

SEQ ID NO: 3479893 - DNA, 25 bp, Homo sapien
tatttccacggctgcatctgaggca

SEQ ID NO: 3479894 - DNA, 25 bp, Homo sapien
gctcctgttgtatttgcatagcccc

SEQ ID NO: 3479895 - DNA, 25 bp, Homo sapien
tgagaaactccaagtagcaatagct

SEQ ID NO: 3479896 - DNA, 25 bp, Homo sapien
gactcaggaagcacctttgagctgc

SEQ ID NO: 3479897 - DNA, 25 bp, Homo sapien
caccctgtgtcctccatcgggggtg

SEQ ID NO: 3479898 - DNA, 25 bp, Homo sapien
ctcaggaagcacctttgagctgctg

SEQ ID NO: 3479899 - DNA, 25 bp, Homo sapien
ccctgtgtcctccatcgggggtgga

SEQ ID NO: 3479900 - DNA, 25 bp, Homo sapien
gaacaaccctcagtgccccgaagta

SEQ ID NO: 3479901 - DNA, 25 bp, Homo sapien
gcaaagaggaacaaccctcagtgcc

SEQ ID NO: 3479902 - DNA, 25 bp, Homo sapien
tggcaaagaggaacaaccctcagtg

SEQ ID NO: 3479903 - DNA, 25 bp, Homo sapien
agaggaacaaccctcagtgccccga

SEQ ID NO: 3479904 - DNA, 25 bp, Homo sapien
ctgacggccagataggctagaagca

SEQ ID NO: 3479905 - DNA, 25 bp, Homo sapien
aagagccagacgcccggagaaaatg

SEQ ID NO: 3479906 - DNA, 25 bp, Homo sapien
acagctgacggccagataggctaga

SEQ ID NO: 3479907 - DNA, 25 bp, Homo sapien
ggccagataggctagaagcatgaag

SEQ ID NO: 3479908 - DNA, 25 bp, Homo sapien
cacccctcctctcttcccagggctc

SEQ ID NO: 3479909 - DNA, 25 bp, Homo sapien
tcctgccaaccccacccctcctctc

SEQ ID NO: 3479910 - DNA, 25 bp, Homo sapien
tgccaaccccacccctcctctcttc

SEQ ID NO: 3479911 - DNA, 25 bp, Homo sapien
ccacccctcctctcttcccagggct

SEQ ID NO: 3479912 - DNA, 25 bp, Homo sapien
tgtggcagatcctttgtggcaatga

SEQ ID NO: 3479913 - DNA, 25 bp, Homo sapien
gatttgcaggctctgttccttgtca

SEQ ID NO: 3479914 - DNA, 25 bp, Homo sapien
ttcccattcgacaaggcagctgtgt

SEQ ID NO: 3479915 - DNA, 25 bp, Homo sapien
tgtcattcggcactttgtggcagat

SEQ ID NO: 3479916 - DNA, 25 bp, Homo sapien
gcccccatcaatccagtgaatgaac

SEQ ID NO: 3479917 - DNA, 25 bp, Homo sapien
gtgcccccatcaatccagtgaatga

SEQ ID NO: 3479918 - DNA, 25 bp, Homo sapien
tgcccccatcaatccagtgaatgaa

SEQ ID NO: 3479919 - DNA, 25 bp, Homo sapien
gtgccccactttgttggctcccaag

SEQ ID NO: 3479920 - DNA, 25 bp, Homo sapien
tggctggcactctggtgccccactt

SEQ ID NO: 3479921 - DNA, 25 bp, Homo sapien
cattggtcctttgacctgtgagatg

SEQ ID NO: 3479922 - DNA, 25 bp, Homo sapien
tgagtacaacacaaacgtctcagca

SEQ ID NO: 3479923 - DNA, 25 bp, Homo sapien
catcttgtacgcaaagccttccagc

SEQ ID NO: 3479924 - DNA, 25 bp, Homo sapien
tgcactcggcctgatgtgcacttag

SEQ ID NO: 3479925 - DNA, 25 bp, Homo sapien
ggcgtctctctgaatggcccctctg

SEQ ID NO: 3479926 - DNA, 25 bp, Homo sapien
gcctgatgtgcacttagtgttccca

SEQ ID NO: 3479927 - DNA, 25 bp, Homo sapien
aggttgcaccggccctgggcacatg

SEQ ID NO: 3479928 - DNA, 25 bp, Homo sapien
cccagggagtactggttcaccagga

SEQ ID NO: 3479929 - DNA, 25 bp, Homo sapien
tgtgggctgtaccactcgtagggcg

SEQ ID NO: 3479930 - DNA, 25 bp, Homo sapien
gccactgacacagcgggtggataag

SEQ ID NO: 3479931 - DNA, 25 bp, Homo sapien
ggagcctccgtgaattgtgccatat

SEQ ID NO: 3479932 - DNA, 25 bp, Homo sapien
catccactgactcaatgggcacatc

SEQ ID NO: 3479933 - DNA, 25 bp, Homo sapien
tattcaatggcggtctggtcagcca

SEQ ID NO: 3479934 - DNA, 25 bp, Homo sapien
aatgggcacatccatgcgctgcacg

SEQ ID NO: 3479935 - DNA, 25 bp, Homo sapien
tgccgatagtactcgttcatggtgg

SEQ ID NO: 3479936 - DNA, 25 bp, Homo sapien
cacatgcgttggtaggtctggtagc

SEQ ID NO: 3479937 - DNA, 25 bp, Homo sapien
gaggttgcagtttcgctgccgatag

SEQ ID NO: 3479938 - DNA, 25 bp, Homo sapien
gttggaattcaacaccctggcgatt

SEQ ID NO: 3479939 - DNA, 25 bp, Homo sapien
taccatagatggatcagtgaaatcc

SEQ ID NO: 3479940 - DNA, 25 bp, Homo sapien
taatcatggccgtctcctttagaag

SEQ ID NO: 3479941 - DNA, 25 bp, Homo sapien
tcctattaatacaacaagacgggct

SEQ ID NO: 3479942 - DNA, 25 bp, Homo sapien
tttctggaagccaaacgtctctatc

SEQ ID NO: 3479943 - DNA, 25 bp, Homo sapien
tggccagatcaaactcgtcccggaa

SEQ ID NO: 3479944 - DNA, 25 bp, Homo sapien
ggccagatcaaactcgtcccggaaa

SEQ ID NO: 3479945 - DNA, 25 bp, Homo sapien
gccagatcaaactcgtcccggaaaa

SEQ ID NO: 3479946 - DNA, 25 bp, Homo sapien
atggccagatcaaactcgtcccgga

SEQ ID NO: 3479947 - DNA, 25 bp, Homo sapien
cgagaaacaagctactttggtcctc

SEQ ID NO: 3479948 - DNA, 25 bp, Homo sapien
tggaatttgaacacgagaaacaagc

SEQ ID NO: 3479949 - DNA, 25 bp, Homo sapien
aatttgaacacgagaaacaagctac

SEQ ID NO: 3479950 - DNA, 25 bp, Homo sapien
tactttggtcctctagggcaggagg

SEQ ID NO: 3479951 - DNA, 25 bp, Homo sapien
aatgggtcctacaagtcattatgtg

SEQ ID NO: 3479952 - DNA, 25 bp, Homo sapien
tcaatgggtcctacaagtcattatg

SEQ ID NO: 3479953 - DNA, 25 bp, Homo sapien
gggtcctacaagtcattatgtgtac

SEQ ID NO: 3479954 - DNA, 25 bp, Homo sapien
tgggtcctacaagtcattatgtgta

SEQ ID NO: 3479955 - DNA, 25 bp, Homo sapien
cgggcagagcgtggacaggtaaatc

SEQ ID NO: 3479956 - DNA, 25 bp, Homo sapien
cagagcgtggacaggtaaatctgtt

SEQ ID NO: 3479957 - DNA, 25 bp, Homo sapien
agcgtggacaggtaaatctgttgca

SEQ ID NO: 3479958 - DNA, 25 bp, Homo sapien
gcagagcgtggacaggtaaatctgt

SEQ ID NO: 3479959 - DNA, 25 bp, Homo sapien
gaatggctagctgagccttgaaagt

SEQ ID NO: 3479960 - DNA, 25 bp, Homo sapien
tcagcatatccctattgatggaatg

SEQ ID NO: 3479961 - DNA, 25 bp, Homo sapien
gccttgaaagtaactcctctgcagg

SEQ ID NO: 3479962 - DNA, 25 bp, Homo sapien
gatggaatcagactgccctgaagtt

SEQ ID NO: 3479963 - DNA, 25 bp, Homo sapien
caaggacattatctctgctgtgagc

SEQ ID NO: 3479964 - DNA, 25 bp, Homo sapien
ctatcccctgggaccatgaatgccg

SEQ ID NO: 3479965 - DNA, 25 bp, Homo sapien
aaatcaaaaacctcgctctccaagg

SEQ ID NO: 3479966 - DNA, 25 bp, Homo sapien
ttctcctgaggcaataactatcccc

SEQ ID NO: 3479967 - DNA, 25 bp, Homo sapien
aggaagcaagaatagattgctggca

SEQ ID NO: 3479968 - DNA, 25 bp, Homo sapien
gggagagttcggagagcgcagcagt

SEQ ID NO: 3479969 - DNA, 25 bp, Homo sapien
tgaaaaacagatggagcggggagtg

SEQ ID NO: 3479970 - DNA, 25 bp, Homo sapien
agtgggaagggagagttcggagagc

SEQ ID NO: 3479971 - DNA, 25 bp, Homo sapien
tcatggccagcatgttaatcatggg

SEQ ID NO: 3479972 - DNA, 25 bp, Homo sapien
agaagcaaggcttgtataccattcg

SEQ ID NO: 3479973 - DNA, 25 bp, Homo sapien
catggccagcatgttaatcatgggt

SEQ ID NO: 3479974 - DNA, 25 bp, Homo sapien
catagaagcaaggcttgtataccat

SEQ ID NO: 3479975 - DNA, 25 bp, Homo sapien
tctctccaactctgtctaatccaac

SEQ ID NO: 3479976 - DNA, 25 bp, Homo sapien
tagccataaaaatggccacgattaa

SEQ ID NO: 3479977 - DNA, 25 bp, Homo sapien
aatggccacgattaagccacaaata

SEQ ID NO: 3479978 - DNA, 25 bp, Homo sapien
tgagtgtctgagagtccataaaaac

SEQ ID NO: 3479979 - DNA, 25 bp, Homo sapien
taaaaatggccacgattaagccaca

SEQ ID NO: 3479980 - DNA, 25 bp, Homo sapien
gctctacgcatgcagaagcagaggg

SEQ ID NO: 3479981 - DNA, 25 bp, Homo sapien
gaagctctacgcatgcagaagcaga

SEQ ID NO: 3479982 - DNA, 25 bp, Homo sapien
aaaatgaagctctacgcatgcagaa

SEQ ID NO: 3479983 - DNA, 25 bp, Homo sapien
tgaggaatgggcaacggcgtggaag

SEQ ID NO: 3479984 - DNA, 25 bp, Homo sapien
ggttttaattcagggctagccactc

SEQ ID NO: 3479985 - DNA, 25 bp, Homo sapien
attcagggctagccactcctgattt

SEQ ID NO: 3479986 - DNA, 25 bp, Homo sapien
tttaattcagggctagccactcctg

SEQ ID NO: 3479987 - DNA, 25 bp, Homo sapien
ctgtggggagatgtttagtgggggt

SEQ ID NO: 3479988 - DNA, 25 bp, Homo sapien
caggaggactggggtatctgctgca

SEQ ID NO: 3479989 - DNA, 25 bp, Homo sapien
gaggactggggtatctgctgcagct

SEQ ID NO: 3479990 - DNA, 25 bp, Homo sapien
tcaaggaagggacagcaggaggact

SEQ ID NO: 3479991 - DNA, 25 bp, Homo sapien
caaggaagggacagcaggaggactg

SEQ ID NO: 3479992 - DNA, 25 bp, Homo sapien
caggataatgctgcgcagctcggtc

SEQ ID NO: 3479993 - DNA, 25 bp, Homo sapien
tgacacaggataatgctgcgcagct

SEQ ID NO: 3479994 - DNA, 25 bp, Homo sapien
actgtcctgacacaggataatgctg

SEQ ID NO: 3479995 - DNA, 25 bp, Homo sapien
ataatgctgcgcagctcggtcacca

SEQ ID NO: 3479996 - DNA, 25 bp, Homo sapien
tctctgcgcgagctggtcgggctcc

SEQ ID NO: 3479997 - DNA, 25 bp, Homo sapien
tgcgggcgggcgacggccgtgcccg

SEQ ID NO: 3479998 - DNA, 25 bp, Homo sapien
gcagacgcggatgtgcgtgcagccg

SEQ ID NO: 3479999 - DNA, 25 bp, Homo sapien
ctgccccgcacagcttcccgttgct

SEQ ID NO: 3480000 - DNA, 25 bp, Homo sapien
aaatctggagaggtgtcgacgctgt

SEQ ID NO: 3480001 - DNA, 25 bp, Homo sapien
tcgacgctgtacaagttccggctgg

SEQ ID NO: 3480002 - DNA, 25 bp, Homo sapien
aagtgactggatccgaaatctggag

SEQ ID NO: 3480003 - DNA, 25 bp, Homo sapien
gaactagacggagggtacattggcc

SEQ ID NO: 3480004 - DNA, 25 bp, Homo sapien
tcccaattagtgaagccaagcaaag

SEQ ID NO: 3480005 - DNA, 25 bp, Homo sapien
tggactctgcaaacttctcacatgg

SEQ ID NO: 3480006 - DNA, 25 bp, Homo sapien
catacaaggtgggagggctactgct

SEQ ID NO: 3480007 - DNA, 25 bp, Homo sapien
gactcaagagttcctggttcccagg

SEQ ID NO: 3480008 - DNA, 25 bp, Homo sapien
cgccccaaatgtgatctgacagtag

SEQ ID NO: 3480009 - DNA, 25 bp, Homo sapien
tattagctggttgcaaattcaccca

SEQ ID NO: 3480010 - DNA, 25 bp, Homo sapien
cagaaaccgtctagtgctggcagtc

SEQ ID NO: 3480011 - DNA, 25 bp, Homo sapien
aattcacccactagcttgagcaagg

SEQ ID NO: 3480012 - DNA, 25 bp, Homo sapien
caaagaaatcactctattgatggca

SEQ ID NO: 3480013 - DNA, 25 bp, Homo sapien
gcaatttcaggtatcacagcaggtg

SEQ ID NO: 3480014 - DNA, 25 bp, Homo sapien
tgatgaactcagtattatacctcct

SEQ ID NO: 3480015 - DNA, 25 bp, Homo sapien
cgtgccaggcctacgactgacttat

SEQ ID NO: 3480016 - DNA, 25 bp, Homo sapien
agcctcattcagttttaaggctgaa

SEQ ID NO: 3480017 - DNA, 25 bp, Homo sapien
gcctcattcagttttaaggctgaat

SEQ ID NO: 3480018 - DNA, 25 bp, Homo sapien
ggaagcagctttcccggcccaacaa

SEQ ID NO: 3480019 - DNA, 25 bp, Homo sapien
cagtgtcctgcattgacccggaagc

SEQ ID NO: 3480020 - DNA, 25 bp, Homo sapien
tctggccgccggagcccagtgtcct

SEQ ID NO: 3480021 - DNA, 25 bp, Homo sapien
tgtcacgtccgctgcgtgaatggga

SEQ ID NO: 3480022 - DNA, 25 bp, Homo sapien
ctgtcgccgccgctcagcctcgggc

SEQ ID NO: 3480023 - DNA, 25 bp, Homo sapien
gggagctactgcggcggctcctctg

SEQ ID NO: 3480024 - DNA, 25 bp, Homo sapien
gtcgccgccgctcagcctcgggcct

SEQ ID NO: 3480025 - DNA, 25 bp, Homo sapien
ggagctactgcggcggctcctctgg

SEQ ID NO: 3480026 - DNA, 25 bp, Homo sapien
ccagaatgtcttcctactagcggac

SEQ ID NO: 3480027 - DNA, 25 bp, Homo sapien
tagcctagcaaccttcacagtagag

SEQ ID NO: 3480028 - DNA, 25 bp, Homo sapien
aaagctaccaccctagagatctggg

SEQ ID NO: 3480029 - DNA, 25 bp, Homo sapien
gatctgggtctaatgcatctcagga

SEQ ID NO: 3480030 - DNA, 25 bp, Homo sapien
gagcagtttacaaaccaccctggct

SEQ ID NO: 3480031 - DNA, 25 bp, Homo sapien
gaagccatcatgttaaggaaaagcc

SEQ ID NO: 3480032 - DNA, 25 bp, Homo sapien
taaaggttgcaaaagtctgcaggtc

SEQ ID NO: 3480033 - DNA, 25 bp, Homo sapien
agttcatcactctacagccttccag

SEQ ID NO: 3480034 - DNA, 25 bp, Homo sapien
aaaactaagcaacagtactgagtgg

SEQ ID NO: 3480035 - DNA, 25 bp, Homo sapien
aacagtactgagtggtctaattatc

SEQ ID NO: 3480036 - DNA, 25 bp, Homo sapien
tcttgaatacattaggtttcatcag

SEQ ID NO: 3480037 - DNA, 25 bp, Homo sapien
aattcctcttgtaaccacatcaaag

SEQ ID NO: 3480038 - DNA, 25 bp, Homo sapien
caaatgtccccacactgagattaac

SEQ ID NO: 3480039 - DNA, 25 bp, Homo sapien
aaaattccaaggctttcaagttgca

SEQ ID NO: 3480040 - DNA, 25 bp, Homo sapien
catttactcctgaactgatgtcccc

SEQ ID NO: 3480041 - DNA, 25 bp, Homo sapien
ttctatttggcccagattcgatctg

SEQ ID NO: 3480042 - DNA, 25 bp, Homo sapien
catagcctctcctcgtccaaaaatg

SEQ ID NO: 3480043 - DNA, 25 bp, Homo sapien
tgtgtgatatttctaaacacttctt

SEQ ID NO: 3480044 - DNA, 25 bp, Homo sapien
aaccaactgtctatatccctattaa

SEQ ID NO: 3480045 - DNA, 25 bp, Homo sapien
tgttggtttaaaccaactgtctata

SEQ ID NO: 3480046 - DNA, 25 bp, Homo sapien
tatccactgtatccaaactttgcca

SEQ ID NO: 3480047 - DNA, 25 bp, Homo sapien
gcagcctaagagtatccccaaaaag

SEQ ID NO: 3480048 - DNA, 25 bp, Homo sapien
caacgaataaaggtctactaacgag

SEQ ID NO: 3480049 - DNA, 25 bp, Homo sapien
aaatataatgttcggccaggagcag

SEQ ID NO: 3480050 - DNA, 25 bp, Homo sapien
gtagtatcgacagttgactccagag

SEQ ID NO: 3480051 - DNA, 25 bp, Homo sapien
tatgcatagactatctccggaagga

SEQ ID NO: 3480052 - DNA, 25 bp, Homo sapien
cccttttgaacacttgaattcacca

SEQ ID NO: 3480053 - DNA, 25 bp, Homo sapien
tatctggaaatgacctaatagtttg

SEQ ID NO: 3480054 - DNA, 25 bp, Homo sapien
ggtgggagggtaatctatgacattt

SEQ ID NO: 3480055 - DNA, 25 bp, Homo sapien
aagatctttcactagggcctttaca

SEQ ID NO: 3480056 - DNA, 25 bp, Homo sapien
tgttctgaattggtgctgaaagcca

SEQ ID NO: 3480057 - DNA, 25 bp, Homo sapien
gcagatgggcacacattaatacata

SEQ ID NO: 3480058 - DNA, 25 bp, Homo sapien
ggctgggacatggactcccatcccc

SEQ ID NO: 3480059 - DNA, 25 bp, Homo sapien
ttccactaggttgatccatctttct

SEQ ID NO: 3480060 - DNA, 25 bp, Homo sapien
gaaacttcttccactaggttgatcc

SEQ ID NO: 3480061 - DNA, 25 bp, Homo sapien
tcacataatacttgcatgaaacttc

SEQ ID NO: 3480062 - DNA, 25 bp, Homo sapien
gacagccagttattgcccaggagga

SEQ ID NO: 3480063 - DNA, 25 bp, Homo sapien
gaggagttcagaagtactgcacccg

SEQ ID NO: 3480064 - DNA, 25 bp, Homo sapien
catgaaattcatgtgtggactacca

SEQ ID NO: 3480065 - DNA, 25 bp, Homo sapien
gaccaaagggtactgaatcctaaga

SEQ ID NO: 3480066 - DNA, 25 bp, Homo sapien
catgccagtcttcgagtttgttgtc

SEQ ID NO: 3480067 - DNA, 25 bp, Homo sapien
ttgttgtcagaaagatctagttccg

SEQ ID NO: 3480068 - DNA, 25 bp, Homo sapien
tcctgcacaggttattccacagctg

SEQ ID NO: 3480069 - DNA, 25 bp, Homo sapien
gacacatgagcgcagaaagcagcaa

SEQ ID NO: 3480070 - DNA, 25 bp, Homo sapien
agatatacagacaacaagaagtcat

SEQ ID NO: 3480071 - DNA, 25 bp, Homo sapien
caatgacacaatggttattgctgct

SEQ ID NO: 3480072 - DNA, 25 bp, Homo sapien
gggattataggccttatttatcttg

SEQ ID NO: 3480073 - DNA, 25 bp, Homo sapien
gacatacagacaataagatatacag

SEQ ID NO: 3480074 - DNA, 25 bp, Homo sapien
actgaggaacatttgacacaatttt

SEQ ID NO: 3480075 - DNA, 25 bp, Homo sapien
ccgacaaattcagagggttggaact

SEQ ID NO: 3480076 - DNA, 25 bp, Homo sapien
caggtttagaaactccaactgagga

SEQ ID NO: 3480077 - DNA, 25 bp, Homo sapien
cagagggttggaactcaggtttaga

SEQ ID NO: 3480078 - DNA, 25 bp, Homo sapien
tgaggacaagtttgcgaaccccaga

SEQ ID NO: 3480079 - DNA, 25 bp, Homo sapien
ggacaagtttgcgaaccccagagaa

SEQ ID NO: 3480080 - DNA, 25 bp, Homo sapien
ttgaggacaagtttgcgaaccccag

SEQ ID NO: 3480081 - DNA, 25 bp, Homo sapien
caagtttgcgaaccccagagaagga

SEQ ID NO: 3480082 - DNA, 25 bp, Homo sapien
tagctgggaagacaaaacctgaagt

SEQ ID NO: 3480083 - DNA, 25 bp, Homo sapien
cgaagaatgatataaggtagtgcga

SEQ ID NO: 3480084 - DNA, 25 bp, Homo sapien
gactctgctaggaattgtggagaaa

SEQ ID NO: 3480085 - DNA, 25 bp, Homo sapien
tacacactgaaatagcgaagaatga

SEQ ID NO: 3480086 - DNA, 25 bp, Homo sapien
caaatgattgttggccaggacgagg

SEQ ID NO: 3480087 - DNA, 25 bp, Homo sapien
tatccagtgaaggaaacataactcc

SEQ ID NO: 3480088 - DNA, 25 bp, Homo sapien
taggaaacaacctggccaatgaatc

SEQ ID NO: 3480089 - DNA, 25 bp, Homo sapien
gtttcatagtcattaaggcacagga

SEQ ID NO: 3480090 - DNA, 25 bp, Homo sapien
gaataagaacaagcctgaacctcac

SEQ ID NO: 3480091 - DNA, 25 bp, Homo sapien
tagaataagaacaagcctgaacctc

SEQ ID NO: 3480092 - DNA, 25 bp, Homo sapien
atgtagaataagaacaagcctgaac

SEQ ID NO: 3480093 - DNA, 25 bp, Homo sapien
tgtagaataagaacaagcctgaacc

SEQ ID NO: 3480094 - DNA, 25 bp, Homo sapien
tggagggttgactgtattatcaatt

SEQ ID NO: 3480095 - DNA, 25 bp, Homo sapien
aatatggagggttgactgtattatc

SEQ ID NO: 3480096 - DNA, 25 bp, Homo sapien
gtattatcaatttggtgacaggaga

SEQ ID NO: 3480097 - DNA, 25 bp, Homo sapien
catgaatatggagggttgactgtat

SEQ ID NO: 3480098 - DNA, 25 bp, Homo sapien
gctcctcggtggtatatggctgcag

SEQ ID NO: 3480099 - DNA, 25 bp, Homo sapien
gctgcagaagaggaattcctaacaa

SEQ ID NO: 3480100 - DNA, 25 bp, Homo sapien
ttagtttatcaatgtcttcccagga

SEQ ID NO: 3480101 - DNA, 25 bp, Homo sapien
ctggctattaccaatttccttcgct

SEQ ID NO: 3480102 - DNA, 25 bp, Homo sapien
aaagcaaagctctatggcccttgca

SEQ ID NO: 3480103 - DNA, 25 bp, Homo sapien
cccagtctagagagtagtcagtaaa

SEQ ID NO: 3480104 - DNA, 25 bp, Homo sapien
gaaattcccgagtatgtggaggcag

SEQ ID NO: 3480105 - DNA, 25 bp, Homo sapien
aataaatactcatgggaaattcccg

SEQ ID NO: 3480106 - DNA, 25 bp, Homo sapien
tcaccatcagtaacaacgctgccat

SEQ ID NO: 3480107 - DNA, 25 bp, Homo sapien
cacatagtaacgaataaaaaatctc

SEQ ID NO: 3480108 - DNA, 25 bp, Homo sapien
ttctcgttcaccatcagtaacaacg

SEQ ID NO: 3480109 - DNA, 25 bp, Homo sapien
tgtggaacatccacatagtaacgaa

SEQ ID NO: 3480110 - DNA, 25 bp, Homo sapien
ctgggccaaagggtgcttcatggtc

SEQ ID NO: 3480111 - DNA, 25 bp, Homo sapien
cacctgatcgttaaagtggacttct

SEQ ID NO: 3480112 - DNA, 25 bp, Homo sapien
gacttctacttttgcactgctctgg

SEQ ID NO: 3480113 - DNA, 25 bp, Homo sapien
tttggtccagacgaatgctcatttc

SEQ ID NO: 3480114 - DNA, 25 bp, Homo sapien
caaaggaatgcaatgcccgagagct

SEQ ID NO: 3480115 - DNA, 25 bp, Homo sapien
ggattccacgtaaattttatctcca

SEQ ID NO: 3480116 - DNA, 25 bp, Homo sapien
ttatctccatccctaatgccaaagg

SEQ ID NO: 3480117 - DNA, 25 bp, Homo sapien
taatgccaaaggaatgcaatgcccg

SEQ ID NO: 3480118 - DNA, 25 bp, Homo sapien
cacaggtgggaaagtcataagctct

SEQ ID NO: 3480119 - DNA, 25 bp, Homo sapien
tattcttgtctatacccagcctgga

SEQ ID NO: 3480120 - DNA, 25 bp, Homo sapien
gagaagctccctttacatgcaactg

SEQ ID NO: 3480121 - DNA, 25 bp, Homo sapien
tatgatatcacaaagtcccagggaa

SEQ ID NO: 3480122 - DNA, 25 bp, Homo sapien
cacccacatgtagaaaggatccctt

SEQ ID NO: 3480123 - DNA, 25 bp, Homo sapien
caagtaaagagcctgagagagtcca

SEQ ID NO: 3480124 - DNA, 25 bp, Homo sapien
gttaagccgcgtatctcaaatggtg

SEQ ID NO: 3480125 - DNA, 25 bp, Homo sapien
cattaactgcgggagacaactggca

SEQ ID NO: 3480126 - DNA, 25 bp, Homo sapien
gcattttccagtccaatagtaattg

SEQ ID NO: 3480127 - DNA, 25 bp, Homo sapien
ccttagactttaatccttggtgcaa

SEQ ID NO: 3480128 - DNA, 25 bp, Homo sapien
gaatagcaggcagaaataatcttaa

SEQ ID NO: 3480129 - DNA, 25 bp, Homo sapien
tcttgatacatgtctactttgcagg

SEQ ID NO: 3480130 - DNA, 25 bp, Homo sapien
tattgtgagtaacacccatcctgtg

SEQ ID NO: 3480131 - DNA, 25 bp, Homo sapien
tccagtctggatctagagctatcag

SEQ ID NO: 3480132 - DNA, 25 bp, Homo sapien
tttagcagtcagcactacagtacag

SEQ ID NO: 3480133 - DNA, 25 bp, Homo sapien
gggcaacaggtatgtcccaaccaca

SEQ ID NO: 3480134 - DNA, 25 bp, Homo sapien
attctccctgaaaatggtaatgttg

SEQ ID NO: 3480135 - DNA, 25 bp, Homo sapien
tccataacaggatcctcaaaatgca

SEQ ID NO: 3480136 - DNA, 25 bp, Homo sapien
ctccctgaaaatggtaatgttgtcc

SEQ ID NO: 3480137 - DNA, 25 bp, Homo sapien
tggtaatgttgtccataacaggatc

SEQ ID NO: 3480138 - DNA, 25 bp, Homo sapien
taagccaaatcttggtaagccagaa

SEQ ID NO: 3480139 - DNA, 25 bp, Homo sapien
gtcagttctcctcaacttgttgcca

SEQ ID NO: 3480140 - DNA, 25 bp, Homo sapien
gaaataatgtctgaatctcgtactc

SEQ ID NO: 3480141 - DNA, 25 bp, Homo sapien
taagttagtcctgcactagagacag

SEQ ID NO: 3480142 - DNA, 25 bp, Homo sapien
ggtgctgtacaagtgcgaagatgaa

SEQ ID NO: 3480143 - DNA, 25 bp, Homo sapien
gtacaagtgcgaagatgaaagagac

SEQ ID NO: 3480144 - DNA, 25 bp, Homo sapien
cttggtgctgtacaagtgcgaagat

SEQ ID NO: 3480145 - DNA, 25 bp, Homo sapien
tgctgtacaagtgcgaagatgaaag

SEQ ID NO: 3480146 - DNA, 25 bp, Homo sapien
gtatatgcatcgtccaaaccccaga

SEQ ID NO: 3480147 - DNA, 25 bp, Homo sapien
gcgctgtgtcgggtcataggcactc

SEQ ID NO: 3480148 - DNA, 25 bp, Homo sapien
taatctggtcattcgtgtatatgca

SEQ ID NO: 3480149 - DNA, 25 bp, Homo sapien
ggagagcagcaaaactaatctggtc

SEQ ID NO: 3480150 - DNA, 25 bp, Homo sapien
tagacagtgcggtaaggaacgccaa

SEQ ID NO: 3480151 - DNA, 25 bp, Homo sapien
gtgtcattctgccaaaatggataca

SEQ ID NO: 3480152 - DNA, 25 bp, Homo sapien
tgggatggccaacttaatctcagat

SEQ ID NO: 3480153 - DNA, 25 bp, Homo sapien
cttaatctcagatgagcttccatca

SEQ ID NO: 3480154 - DNA, 25 bp, Homo sapien
tggtctctctgtaatagatctcgcc

SEQ ID NO: 3480155 - DNA, 25 bp, Homo sapien
aaggattctggcgtgaactggctca

SEQ ID NO: 3480156 - DNA, 25 bp, Homo sapien
tttcaagatggcaggctccatggtc

SEQ ID NO: 3480157 - DNA, 25 bp, Homo sapien
ggctcactagcacattgaaggaaac

SEQ ID NO: 3480158 - DNA, 25 bp, Homo sapien
agtggcagagaaggttgccatgtct

SEQ ID NO: 3480159 - DNA, 25 bp, Homo sapien
tggcagagaaggttgccatgtcttt

SEQ ID NO: 3480160 - DNA, 25 bp, Homo sapien
gaaggttgccatgtctttgaagtac

SEQ ID NO: 3480161 - DNA, 25 bp, Homo sapien
agagaaggttgccatgtctttgaag

SEQ ID NO: 3480162 - DNA, 25 bp, Homo sapien
tgctgctgcctccataaaacgtgac

SEQ ID NO: 3480163 - DNA, 25 bp, Homo sapien
gaaagcagaaaatttgaattattac

SEQ ID NO: 3480164 - DNA, 25 bp, Homo sapien
gctctaataattagactccttcgtg

SEQ ID NO: 3480165 - DNA, 25 bp, Homo sapien
tcaggttatgaagtggaaagcagaa

SEQ ID NO: 3480166 - DNA, 25 bp, Homo sapien
cgtggtagcgaagatggacaagaat

SEQ ID NO: 3480167 - DNA, 25 bp, Homo sapien
tacagaacctcttagcgataaagtg

SEQ ID NO: 3480168 - DNA, 25 bp, Homo sapien
tcacccgaggagtcgttagcgatct

SEQ ID NO: 3480169 - DNA, 25 bp, Homo sapien
tagcgatctataacgtgacagaggg

SEQ ID NO: 3480170 - DNA, 25 bp, Homo sapien
gaggttatttctagccaatgcatcg

SEQ ID NO: 3480171 - DNA, 25 bp, Homo sapien
cccgtggtccagttgatttcgtaat

SEQ ID NO: 3480172 - DNA, 25 bp, Homo sapien
gagccatcggacactaggacggcct

SEQ ID NO: 3480173 - DNA, 25 bp, Homo sapien
aagagggtgaatgtataggagccat

SEQ ID NO: 3480174 - DNA, 25 bp, Homo sapien
tcgtaataattgaagagggtgaatg

SEQ ID NO: 3480175 - DNA, 25 bp, Homo sapien
gaaattggtgaggtttccaccatta

SEQ ID NO: 3480176 - DNA, 25 bp, Homo sapien
tcctggatattcacgatctcggggg

SEQ ID NO: 3480177 - DNA, 25 bp, Homo sapien
catcaactttaaatgcccagcggcc

SEQ ID NO: 3480178 - DNA, 25 bp, Homo sapien
gaacattgacgtttgtggtctcctg

SEQ ID NO: 3480179 - DNA, 25 bp, Homo sapien
gaagtctgcaaacactgtcgggcca

SEQ ID NO: 3480180 - DNA, 25 bp, Homo sapien
ctttgggttcgcacacctcgtaggg

SEQ ID NO: 3480181 - DNA, 25 bp, Homo sapien
cagcggcacttgacggtgcagttca

SEQ ID NO: 3480182 - DNA, 25 bp, Homo sapien
gagacggctgaacctctgcggtgtt

SEQ ID NO: 3480183 - DNA, 25 bp, Homo sapien
ggtggtacctctggagacatcaatc

SEQ ID NO: 3480184 - DNA, 25 bp, Homo sapien
ccaagcctcactaaggaagtcacca

SEQ ID NO: 3480185 - DNA, 25 bp, Homo sapien
gacatcaatccatttggaggtttct

SEQ ID NO: 3480186 - DNA, 25 bp, Homo sapien
accaaagccaatccaggtgcctgca

SEQ ID NO: 3480187 - DNA, 25 bp, Homo sapien
tctggcataagtgatcattgcaccc

SEQ ID NO: 3480188 - DNA, 25 bp, Homo sapien
cacagtgcttagagcaggagatccc

SEQ ID NO: 3480189 - DNA, 25 bp, Homo sapien
tctccctatagagtcattgtgcttg

SEQ ID NO: 3480190 - DNA, 25 bp, Homo sapien
gactgtgggtgtcagtaatgttcca

SEQ ID NO: 3480191 - DNA, 25 bp, Homo sapien
ctgttcttgtcgcactcaggctgac

SEQ ID NO: 3480192 - DNA, 25 bp, Homo sapien
tttccctgcctctgttcttgtcgca

SEQ ID NO: 3480193 - DNA, 25 bp, Homo sapien
atcacaaccctcaggacgccagttt

SEQ ID NO: 3480194 - DNA, 25 bp, Homo sapien
caaccctcaggacgccagtttccct

SEQ ID NO: 3480195 - DNA, 25 bp, Homo sapien
ccagctgtgttcacatatggtgaaa

SEQ ID NO: 3480196 - DNA, 25 bp, Homo sapien
gagccatattatagggaaggtcagc

SEQ ID NO: 3480197 - DNA, 25 bp, Homo sapien
cattgtctggcgagagcccactttc

SEQ ID NO: 3480198 - DNA, 25 bp, Homo sapien
tctcctaggtagagggttagccaac

SEQ ID NO: 3480199 - DNA, 25 bp, Homo sapien
gcaaagaagtcactaggtcattaac

SEQ ID NO: 3480200 - DNA, 25 bp, Homo sapien
ggcaaagaagtcactaggtcattaa

SEQ ID NO: 3480201 - DNA, 25 bp, Homo sapien
cactgggtgcagttgtcgacgcagc

SEQ ID NO: 3480202 - DNA, 25 bp, Homo sapien
tgctggccatcaaaagtcactaaga

SEQ ID NO: 3480203 - DNA, 25 bp, Homo sapien
ggcacacaagagcataggcctggat

SEQ ID NO: 3480204 - DNA, 25 bp, Homo sapien
tgaggaagccgcagtagtcagagcc

SEQ ID NO: 3480205 - DNA, 25 bp, Homo sapien
cacacggagtagtggctgaagctcg

SEQ ID NO: 3480206 - DNA, 25 bp, Homo sapien
tttccaagtactctgggcgctcagg

SEQ ID NO: 3480207 - DNA, 25 bp, Homo sapien
tgctgaggacgaagccctggttgca

SEQ ID NO: 3480208 - DNA, 25 bp, Homo sapien
cccatggtgtagtagtggccgtcga

SEQ ID NO: 3480209 - DNA, 25 bp, Homo sapien
cctccaaaggagcaaggagccttac

SEQ ID NO: 3480210 - DNA, 25 bp, Homo sapien
caattgaagtatgtggtggacagcc

SEQ ID NO: 3480211 - DNA, 25 bp, Homo sapien
taataggcagtgacgttcaccaccc

SEQ ID NO: 3480212 - DNA, 25 bp, Homo sapien
gcagatctcctcgaaagttgtccag

SEQ ID NO: 3480213 - DNA, 25 bp, Homo sapien
gagtcattgttgcaggccttcagca

SEQ ID NO: 3480214 - DNA, 25 bp, Homo sapien
tgctttctgccatgttacttctccc

SEQ ID NO: 3480215 - DNA, 25 bp, Homo sapien
gctttctgccatgttacttctccct

SEQ ID NO: 3480216 - DNA, 25 bp, Homo sapien
ttgctccacgagtgagtcctgcttt

SEQ ID NO: 3480217 - DNA, 25 bp, Homo sapien
gttcttgctccacgagtgagtcctg

SEQ ID NO: 3480218 - DNA, 25 bp, Homo sapien
tgcttgtaagctcggtggatcacga

SEQ ID NO: 3480219 - DNA, 25 bp, Homo sapien
tcagagcagctatccacgcagatgg

SEQ ID NO: 3480220 - DNA, 25 bp, Homo sapien
gcagtggaccctgttgtctgtgcca

SEQ ID NO: 3480221 - DNA, 25 bp, Homo sapien
tcttggctgtgacaacaaacttggg

SEQ ID NO: 3480222 - DNA, 25 bp, Homo sapien
catcatcagggttgccgttgtagcg

SEQ ID NO: 3480223 - DNA, 25 bp, Homo sapien
catgctccgagggactgtgatggac

SEQ ID NO: 3480224 - DNA, 25 bp, Homo sapien
cattgacactcgatgcaagcagacc

SEQ ID NO: 3480225 - DNA, 25 bp, Homo sapien
gtagcggccacacagaccataggtg

SEQ ID NO: 3480226 - DNA, 25 bp, Homo sapien
tgctctgacttctagggagttggaa

SEQ ID NO: 3480227 - DNA, 25 bp, Homo sapien
caaggagggacaacgagaaggactc

SEQ ID NO: 3480228 - DNA, 25 bp, Homo sapien
tccaaagtgcatatccttaaattgc

SEQ ID NO: 3480229 - DNA, 25 bp, Homo sapien
aattgctactcaatttgctctgact

SEQ ID NO: 3480230 - DNA, 25 bp, Homo sapien
gaagtcaagggataggacctgagac

SEQ ID NO: 3480231 - DNA, 25 bp, Homo sapien
ctggtagaagtcaagggataggacc

SEQ ID NO: 3480232 - DNA, 25 bp, Homo sapien
ccctggcgtattggcctggaacgtg

SEQ ID NO: 3480233 - DNA, 25 bp, Homo sapien
tctgggtgccatgagtagagctccc

SEQ ID NO: 3480234 - DNA, 25 bp, Homo sapien
gccctccacgcagtagtggctgcag

SEQ ID NO: 3480235 - DNA, 25 bp, Homo sapien
gacactcacgcagctctcgtaatgg

SEQ ID NO: 3480236 - DNA, 25 bp, Homo sapien
tagccagcgtcgcagtgacagccct

SEQ ID NO: 3480237 - DNA, 25 bp, Homo sapien
agtcactcttcaggcggatggcggc

SEQ ID NO: 3480238 - DNA, 25 bp, Homo sapien
taatatttgccatcggagtagcagc

SEQ ID NO: 3480239 - DNA, 25 bp, Homo sapien
tatttgccatcggagtagcagccgc

SEQ ID NO: 3480240 - DNA, 25 bp, Homo sapien
tttgccatcggagtagcagccgcag

SEQ ID NO: 3480241 - DNA, 25 bp, Homo sapien
ctcgtaatatttgccatcggagtag

SEQ ID NO: 3480242 - DNA, 25 bp, Homo sapien
tgatcattggcaaggaggaaaaggc

SEQ ID NO: 3480243 - DNA, 25 bp, Homo sapien
tctgatcattggcaaggaggaaaag

SEQ ID NO: 3480244 - DNA, 25 bp, Homo sapien
ctcttagagttggagaggaatctga

SEQ ID NO: 3480245 - DNA, 25 bp, Homo sapien
tagagttggagaggaatctgatcat

SEQ ID NO: 3480246 - DNA, 25 bp, Homo sapien
gcgccgtttgcattaaattcagact

SEQ ID NO: 3480247 - DNA, 25 bp, Homo sapien
aagagaggcgccgtttgcattaaat

SEQ ID NO: 3480248 - DNA, 25 bp, Homo sapien
gcttggctagcctatctttaatggg

SEQ ID NO: 3480249 - DNA, 25 bp, Homo sapien
agtccccctcgtcttttatcaggct

SEQ ID NO: 3480250 - DNA, 25 bp, Homo sapien
tcgtctgacttgcattggcgcgggt

SEQ ID NO: 3480251 - DNA, 25 bp, Homo sapien
gaatcacgttgcgacggaaacagcg

SEQ ID NO: 3480252 - DNA, 25 bp, Homo sapien
gtcttggtgctgaagcagccgcgca

SEQ ID NO: 3480253 - DNA, 25 bp, Homo sapien
tggcgcgggtcgcactgaatcacgt

SEQ ID NO: 3480254 - DNA, 25 bp, Homo sapien
ggcttccctcgcaaggtcacataat

SEQ ID NO: 3480255 - DNA, 25 bp, Homo sapien
taatcatctgttaggtccccgttga

SEQ ID NO: 3480256 - DNA, 25 bp, Homo sapien
ggtgtcaatcaccagaaacccctca

SEQ ID NO: 3480257 - DNA, 25 bp, Homo sapien
gagaccgcacactttgttctgcagc

SEQ ID NO: 3480258 - DNA, 25 bp, Homo sapien
ctggtcagactgagtgaagcaaaaa

SEQ ID NO: 3480259 - DNA, 25 bp, Homo sapien
ggagccgcacagctggaacttcttg

SEQ ID NO: 3480260 - DNA, 25 bp, Homo sapien
tgtagcagccgtccaggtagcagga

SEQ ID NO: 3480261 - DNA, 25 bp, Homo sapien
ggcagtagccatcaccctgcatctt

SEQ ID NO: 3480262 - DNA, 25 bp, Homo sapien
tcggtgctaaggatcccgaaggagc

SEQ ID NO: 3480263 - DNA, 25 bp, Homo sapien
tgccattgcccagctcgcaagttcg

SEQ ID NO: 3480264 - DNA, 25 bp, Homo sapien
tatttccataggggggtggctcgat

SEQ ID NO: 3480265 - DNA, 25 bp, Homo sapien
gcaagttcggttgggacagtccgcc

SEQ ID NO: 3480266 - DNA, 25 bp, Homo sapien
ccagctcgcaagttcggttgggaca

SEQ ID NO: 3480267 - DNA, 25 bp, Homo sapien
gagcttgcacttagatatggacact

SEQ ID NO: 3480268 - DNA, 25 bp, Homo sapien
tcgatgccggtgcactgtctgtcat

SEQ ID NO: 3480269 - DNA, 25 bp, Homo sapien
tcaaaaccgagctggaagagcttgc

SEQ ID NO: 3480270 - DNA, 25 bp, Homo sapien
ggtcacctctgcatcgataatgtca

SEQ ID NO: 3480271 - DNA, 25 bp, Homo sapien
tgttgttggcgctttcgatccagag

SEQ ID NO: 3480272 - DNA, 25 bp, Homo sapien
aaattccacattgatcgtgcggtcc

SEQ ID NO: 3480273 - DNA, 25 bp, Homo sapien
tatacatgatatgcgtgccattgga

SEQ ID NO: 3480274 - DNA, 25 bp, Homo sapien
taggcttcacaacagaatccaagga

SEQ ID NO: 3480275 - DNA, 25 bp, Homo sapien
gtcaacactacttcaccctggcggt

SEQ ID NO: 3480276 - DNA, 25 bp, Homo sapien
taggattaaatgtgtggcgtcagct

SEQ ID NO: 3480277 - DNA, 25 bp, Homo sapien
gcttatcattgctatctcgggtggg

SEQ ID NO: 3480278 - DNA, 25 bp, Homo sapien
tacatacagcacatctcgagtcgtc

SEQ ID NO: 3480279 - DNA, 25 bp, Homo sapien
gaacttcgtcgtaatcccctatgaa

SEQ ID NO: 3480280 - DNA, 25 bp, Homo sapien
taaagacggtgacgtgaaagcgaca

SEQ ID NO: 3480281 - DNA, 25 bp, Homo sapien
tacaggagtacttttctgagtcgca

SEQ ID NO: 3480282 - DNA, 25 bp, Homo sapien
tctcctcgatgccaatggtgttatc

SEQ ID NO: 3480283 - DNA, 25 bp, Homo sapien
cacgatcctcatgttgggaaaccaa

SEQ ID NO: 3480284 - DNA, 25 bp, Homo sapien
tctatggatgattccagtccggtca

SEQ ID NO: 3480285 - DNA, 25 bp, Homo sapien
agtccggtcacctggcattcacgat

SEQ ID NO: 3480286 - DNA, 25 bp, Homo sapien
gactgtccaccccaagcatctatgg

SEQ ID NO: 3480287 - DNA, 25 bp, Homo sapien
tctcctaataggtcccactgaaatg

SEQ ID NO: 3480288 - DNA, 25 bp, Homo sapien
aataggtcccactgaaatgatctgt

SEQ ID NO: 3480289 - DNA, 25 bp, Homo sapien
actgaaatgatctgttctttgggct

SEQ ID NO: 3480290 - DNA, 25 bp, Homo sapien
cctaataggtcccactgaaatgatc

SEQ ID NO: 3480291 - DNA, 25 bp, Homo sapien
ctcctgcagggttcctgttacacag

SEQ ID NO: 3480292 - DNA, 25 bp, Homo sapien
agagaggcccatccacccggctcgt

SEQ ID NO: 3480293 - DNA, 25 bp, Homo sapien
agggttcctgttacacagctgcaga

SEQ ID NO: 3480294 - DNA, 25 bp, Homo sapien
cccggctcgtgcaaatctgctcaca

SEQ ID NO: 3480295 - DNA, 25 bp, Homo sapien
tatattttagatgaaagagcaaggt

SEQ ID NO: 3480296 - DNA, 25 bp, Homo sapien
gaattccttgggcatgttccccatc

SEQ ID NO: 3480297 - DNA, 25 bp, Homo sapien
atttctggagttttcgagggagagt

SEQ ID NO: 3480298 - DNA, 25 bp, Homo sapien
tgtttgtttaatggccctagaattc

SEQ ID NO: 3480299 - DNA, 25 bp, Homo sapien
gatttatagacaaaatgccataatg

SEQ ID NO: 3480300 - DNA, 25 bp, Homo sapien
catgatgagaagaagcgtccagact

SEQ ID NO: 3480301 - DNA, 25 bp, Homo sapien
tgaagttccattgaagaattagagg

SEQ ID NO: 3480302 - DNA, 25 bp, Homo sapien
atgaggtcgtgcctgatttatagac

SEQ ID NO: 3480303 - DNA, 25 bp, Homo sapien
ggcacacactttttatcctacaggg

SEQ ID NO: 3480304 - DNA, 25 bp, Homo sapien
gagaagcgcctcatagacagaacac

SEQ ID NO: 3480305 - DNA, 25 bp, Homo sapien
ccataactggcttgtagaagccccg

SEQ ID NO: 3480306 - DNA, 25 bp, Homo sapien
cagcaagattccttagagggagtca

SEQ ID NO: 3480307 - DNA, 25 bp, Homo sapien
accagttgtccgctcagctgcacag

SEQ ID NO: 3480308 - DNA, 25 bp, Homo sapien
tccatcaataccagttgtccgctca

SEQ ID NO: 3480309 - DNA, 25 bp, Homo sapien
ataagctcgaatgtgttgactctcc

SEQ ID NO: 3480310 - DNA, 25 bp, Homo sapien
ttaagatgtccaagcagaagcagac

SEQ ID NO: 3480311 - DNA, 25 bp, Homo sapien
taaccatagtacaaggagcatgatg

SEQ ID NO: 3480312 - DNA, 25 bp, Homo sapien
ctaatgggcttgatttggatcaggt

SEQ ID NO: 3480313 - DNA, 25 bp, Homo sapien
tggatcaggtgcataagcctgcaaa

SEQ ID NO: 3480314 - DNA, 25 bp, Homo sapien
aaggcggaaagttggagcatgctct

SEQ ID NO: 3480315 - DNA, 25 bp, Homo sapien
gggtctttgtcaccccacattgagc

SEQ ID NO: 3480316 - DNA, 25 bp, Homo sapien
ctgaagagtgataaattctgagcac

SEQ ID NO: 3480317 - DNA, 25 bp, Homo sapien
tactgcactgaagagtgataaattc

SEQ ID NO: 3480318 - DNA, 25 bp, Homo sapien
tcaccccacattgagcagccaggaa

SEQ ID NO: 3480319 - DNA, 25 bp, Homo sapien
tgttgatcatggcagttaacatact

SEQ ID NO: 3480320 - DNA, 25 bp, Homo sapien
ggcagttaacatacttagcaaaaca

SEQ ID NO: 3480321 - DNA, 25 bp, Homo sapien
acattataggctccataaataacat

SEQ ID NO: 3480322 - DNA, 25 bp, Homo sapien
tataggctccataaataacataacc

SEQ ID NO: 3480323 - DNA, 25 bp, Homo sapien
tatgaccctgggtagagctgaaaaa

SEQ ID NO: 3480324 - DNA, 25 bp, Homo sapien
gagctgaaaaatccaccctttatgc

SEQ ID NO: 3480325 - DNA, 25 bp, Homo sapien
cctttatgcttcagcaagagacaaa

SEQ ID NO: 3480326 - DNA, 25 bp, Homo sapien
gaaaaatccaccctttatgcttcag

SEQ ID NO: 3480327 - DNA, 25 bp, Homo sapien
gttgtgtttgagtcatcagttggcc

SEQ ID NO: 3480328 - DNA, 25 bp, Homo sapien
ctttattttaagcaatggaagggca

SEQ ID NO: 3480329 - DNA, 25 bp, Homo sapien
cattgatttccgtaagtgacccccg

SEQ ID NO: 3480330 - DNA, 25 bp, Homo sapien
gttggccttactgggcgctgcagat

SEQ ID NO: 3480331 - DNA, 25 bp, Homo sapien
tggacatccactggccctatcaagc

SEQ ID NO: 3480332 - DNA, 25 bp, Homo sapien
gaccggtgtgtttgccctttggaca

SEQ ID NO: 3480333 - DNA, 25 bp, Homo sapien
gatgctgaaaactgaccggtgtgtt

SEQ ID NO: 3480334 - DNA, 25 bp, Homo sapien
actggccctatcaagcttctccctc

SEQ ID NO: 3480335 - DNA, 25 bp, Homo sapien
tgcggtggaggatgcggtttcgggt

SEQ ID NO: 3480336 - DNA, 25 bp, Homo sapien
ttgcggtggaggatgcggtttcggg

SEQ ID NO: 3480337 - DNA, 25 bp, Homo sapien
tgcaaactgtcctagcagctgggca

SEQ ID NO: 3480338 - DNA, 25 bp, Homo sapien
cgccgctccgcacgccactgctctg

SEQ ID NO: 3480339 - DNA, 25 bp, Homo sapien
tctgcaaactgtcctagcagctggg

SEQ ID NO: 3480340 - DNA, 25 bp, Homo sapien
tgctctgcaaactgtcctagcagct

SEQ ID NO: 3480341 - DNA, 25 bp, Homo sapien
ctagcacccagagggcactcgctaa

SEQ ID NO: 3480342 - DNA, 25 bp, Homo sapien
gatccgtatgctaccgcgatcctac

SEQ ID NO: 3480343 - DNA, 25 bp, Homo sapien
gagaaaagccgtgctgcgaggacac

SEQ ID NO: 3480344 - DNA, 25 bp, Homo sapien
tctcactcggcgcaggactcggatc

SEQ ID NO: 3480345 - DNA, 25 bp, Homo sapien
taattacgccgcagcaacagaggct

SEQ ID NO: 3480346 - DNA, 25 bp, Homo sapien
tctaaaagtaccgagctgccacaaa

SEQ ID NO: 3480347 - DNA, 25 bp, Homo sapien
taaagcattcgtgttcagcagccag

SEQ ID NO: 3480348 - DNA, 25 bp, Homo sapien
tcaggagttctgataccgaccagtt

SEQ ID NO: 3480349 - DNA, 25 bp, Homo sapien
gccaagacacaatgggcacctcggt

SEQ ID NO: 3480350 - DNA, 25 bp, Homo sapien
tggtaggtgtgccaagacacaatgg

SEQ ID NO: 3480351 - DNA, 25 bp, Homo sapien
gtgtgccaagacacaatgggcacct

SEQ ID NO: 3480352 - DNA, 25 bp, Homo sapien
gtaggtgtgccaagacacaatgggc

SEQ ID NO: 3480353 - DNA, 25 bp, Homo sapien
ctgcaacacggagtacaagatccat

SEQ ID NO: 3480354 - DNA, 25 bp, Homo sapien
tggatacacgtatggtgtaaaaaaa

SEQ ID NO: 3480355 - DNA, 25 bp, Homo sapien
atacacgtatggtgtaaaaaaatag

SEQ ID NO: 3480356 - DNA, 25 bp, Homo sapien
gatacacgtatggtgtaaaaaaata

SEQ ID NO: 3480357 - DNA, 25 bp, Homo sapien
ctggatacacgtatggtgtaaaaaa

SEQ ID NO: 3480358 - DNA, 25 bp, Homo sapien
gaagactaatagcttgtcggaagat

SEQ ID NO: 3480359 - DNA, 25 bp, Homo sapien
tagctcagtgttgcacagaagaaat

SEQ ID NO: 3480360 - DNA, 25 bp, Homo sapien
agacaaaataatagctcagtgttgc

SEQ ID NO: 3480361 - DNA, 25 bp, Homo sapien
cattaatgcatgatcgaagacaaaa

SEQ ID NO: 3480362 - DNA, 25 bp, Homo sapien
tccaatatgcatctagcaagatacg

SEQ ID NO: 3480363 - DNA, 25 bp, Homo sapien
cagtccttggagtcactgacaagta

SEQ ID NO: 3480364 - DNA, 25 bp, Homo sapien
ttgcttaaactaagggaaggagagc

SEQ ID NO: 3480365 - DNA, 25 bp, Homo sapien
aggagagcagggattaaccctcatg

SEQ ID NO: 3480366 - DNA, 25 bp, Homo sapien
tgtaacctcttatctccagcaagaa

SEQ ID NO: 3480367 - DNA, 25 bp, Homo sapien
taaacttaatctctcgacggacttg

SEQ ID NO: 3480368 - DNA, 25 bp, Homo sapien
caagaacagtgcaacagtaagaata

SEQ ID NO: 3480369 - DNA, 25 bp, Homo sapien
catatggaaactctcctaggtcatc

SEQ ID NO: 3480370 - DNA, 25 bp, Homo sapien
cgcgcccggcaataactaacttctt

SEQ ID NO: 3480371 - DNA, 25 bp, Homo sapien
gaatatccgcacagtactatgacta

SEQ ID NO: 3480372 - DNA, 25 bp, Homo sapien
caatggactgattcttgtgaagagc

SEQ ID NO: 3480373 - DNA, 25 bp, Homo sapien
taaagaaatgcacatgtggcaagac

SEQ ID NO: 3480374 - DNA, 25 bp, Homo sapien
aaccaggcaggtttactcaatgtcc

SEQ ID NO: 3480375 - DNA, 25 bp, Homo sapien
catttccctcgcataagtacttgaa

SEQ ID NO: 3480376 - DNA, 25 bp, Homo sapien
tgcaaaatgggatcctagactcaaa

SEQ ID NO: 3480377 - DNA, 25 bp, Homo sapien
taaatctctgggaatcatcacttcc

SEQ ID NO: 3480378 - DNA, 25 bp, Homo sapien
aatcaaaactcagctcctgggatta

SEQ ID NO: 3480379 - DNA, 25 bp, Homo sapien
agaagaatcaaaactcagctcctgg

SEQ ID NO: 3480380 - DNA, 25 bp, Homo sapien
acagaagaatcaaaactcagctcct

SEQ ID NO: 3480381 - DNA, 25 bp, Homo sapien
aagaatcaaaactcagctcctggga

SEQ ID NO: 3480382 - DNA, 25 bp, Homo sapien
ccagtagatgaacatgtcagtgaaa

SEQ ID NO: 3480383 - DNA, 25 bp, Homo sapien
attatactaacgacaagttcaaaca

SEQ ID NO: 3480384 - DNA, 25 bp, Homo sapien
tatactaacgacaagttcaaacaat

SEQ ID NO: 3480385 - DNA, 25 bp, Homo sapien
ctgtgaatccagtagatgaacatgt

SEQ ID NO: 3480386 - DNA, 25 bp, Homo sapien
atataccagtctatgatgaaggcct

SEQ ID NO: 3480387 - DNA, 25 bp, Homo sapien
tatataccagtctatgatgaaggcc

SEQ ID NO: 3480388 - DNA, 25 bp, Homo sapien
ttatataccagtctatgatgaaggc

SEQ ID NO: 3480389 - DNA, 25 bp, Homo sapien
cttatataccagtctatgatgaagg

SEQ ID NO: 3480390 - DNA, 25 bp, Homo sapien
tgttccatggatatactgcacagtg

SEQ ID NO: 3480391 - DNA, 25 bp, Homo sapien
tacccaatagggagcgtctcatccc

SEQ ID NO: 3480392 - DNA, 25 bp, Homo sapien
gaacagacgaattttaagacagccc

SEQ ID NO: 3480393 - DNA, 25 bp, Homo sapien
gacagccccttagacccataaagaa

SEQ ID NO: 3480394 - DNA, 25 bp, Homo sapien
aatcctgtagagatcagcaaaatta

SEQ ID NO: 3480395 - DNA, 25 bp, Homo sapien
ttaccccgtgcaacattcaacttag

SEQ ID NO: 3480396 - DNA, 25 bp, Homo sapien
ttagcactgcaaactttaccccgtg

SEQ ID NO: 3480397 - DNA, 25 bp, Homo sapien
aatgtccttcttcgccctaaaacag

SEQ ID NO: 3480398 - DNA, 25 bp, Homo sapien
caccgtcatgaatggaaattgtcca

SEQ ID NO: 3480399 - DNA, 25 bp, Homo sapien
tccagatattaaccaagatgtacag

SEQ ID NO: 3480400 - DNA, 25 bp, Homo sapien
tgcaaatggagtaggaatcttccaa

SEQ ID NO: 3480401 - DNA, 25 bp, Homo sapien
tatatggtaaggtagactctgaaga

SEQ ID NO: 3480402 - DNA, 25 bp, Homo sapien
cttcccctcaaaggatgaaggattt

SEQ ID NO: 3480403 - DNA, 25 bp, Homo sapien
tgaaggatttttgaatgagccgcca

SEQ ID NO: 3480404 - DNA, 25 bp, Homo sapien
gtctgtatgatgagctgagccatta

SEQ ID NO: 3480405 - DNA, 25 bp, Homo sapien
cccacaaagtgaaatattgtccata

SEQ ID NO: 3480406 - DNA, 25 bp, Homo sapien
gccatttcctgaatggctgctgcgc

SEQ ID NO: 3480407 - DNA, 25 bp, Homo sapien
agccatttcctgaatggctgctgcg

SEQ ID NO: 3480408 - DNA, 25 bp, Homo sapien
tttgtaaactctccattgaataatt

SEQ ID NO: 3480409 - DNA, 25 bp, Homo sapien
cagtctttgtaaactctccattgaa

SEQ ID NO: 3480410 - DNA, 25 bp, Homo sapien
gtctttgtaaactctccattgaata

SEQ ID NO: 3480411 - DNA, 25 bp, Homo sapien
tattcagtctttgtaaactctccat

SEQ ID NO: 3480412 - DNA, 25 bp, Homo sapien
cgaacaacatctggcattttaagca

SEQ ID NO: 3480413 - DNA, 25 bp, Homo sapien
gctgctagaaagatacaagttgtcc

SEQ ID NO: 3480414 - DNA, 25 bp, Homo sapien
actaggatcattcctcagcagtgcc

SEQ ID NO: 3480415 - DNA, 25 bp, Homo sapien
gcccacgatgctgatttccaaatga

SEQ ID NO: 3480416 - DNA, 25 bp, Homo sapien
tgagcctcctatgtgtaggaagacg

SEQ ID NO: 3480417 - DNA, 25 bp, Homo sapien
tagaactaatcgtcagcaatgggcc

SEQ ID NO: 3480418 - DNA, 25 bp, Homo sapien
gcaatgggcctaggtatttggcaat

SEQ ID NO: 3480419 - DNA, 25 bp, Homo sapien
tagtgtgtccagagaatgagcctcc

SEQ ID NO: 3480420 - DNA, 25 bp, Homo sapien
ttttcttaggcaaggcggagcaccg

SEQ ID NO: 3480421 - DNA, 25 bp, Homo sapien
catgggcggaagagatatgcaccac

SEQ ID NO: 3480422 - DNA, 25 bp, Homo sapien
tctttgggtcctagtctctgggcaa

SEQ ID NO: 3480423 - DNA, 25 bp, Homo sapien
aaatctctctaggtgggccatgtga

SEQ ID NO: 3480424 - DNA, 25 bp, Homo sapien
tctcaatttctaccacaaaagtaga

SEQ ID NO: 3480425 - DNA, 25 bp, Homo sapien
cagcatggaagacaaagactcagtc

SEQ ID NO: 3480426 - DNA, 25 bp, Homo sapien
gtaatttgggtcctcacttccataa

SEQ ID NO: 3480427 - DNA, 25 bp, Homo sapien
cctgtaactataaaagtcatctgta

SEQ ID NO: 3480428 - DNA, 25 bp, Homo sapien
tgctgggtcctcacgttagaaggga

SEQ ID NO: 3480429 - DNA, 25 bp, Homo sapien
tacaatgatgattcagacacggtct

SEQ ID NO: 3480430 - DNA, 25 bp, Homo sapien
gaagtcacggttaagcaccagttgg

SEQ ID NO: 3480431 - DNA, 25 bp, Homo sapien
caaggaatctggcatctcaaatagg

SEQ ID NO: 3480432 - DNA, 25 bp, Homo sapien
taacagaaggtggatcagtggtgac

SEQ ID NO: 3480433 - DNA, 25 bp, Homo sapien
tcccaatgaagcgacagacaaaagt

SEQ ID NO: 3480434 - DNA, 25 bp, Homo sapien
gagaatgactgcaaacggagaggaa

SEQ ID NO: 3480435 - DNA, 25 bp, Homo sapien
gggtgtacacgttcatcaaagatca

SEQ ID NO: 3480436 - DNA, 25 bp, Homo sapien
tcagaccggctgagtagtttgtaca

SEQ ID NO: 3480437 - DNA, 25 bp, Homo sapien
agaattttcacatcccttcaggagg

SEQ ID NO: 3480438 - DNA, 25 bp, Homo sapien
tccgattcaaacaactcctggctgt

SEQ ID NO: 3480439 - DNA, 25 bp, Homo sapien
aaaaggtgtctaacatccgattcaa

SEQ ID NO: 3480440 - DNA, 25 bp, Homo sapien
tcaccatggcaggaacgttgcctgg

SEQ ID NO: 3480441 - DNA, 25 bp, Homo sapien
aaagggcatagaactttcgggcagt

SEQ ID NO: 3480442 - DNA, 25 bp, Homo sapien
gtttctgtggtttgcgagtgtaccc

SEQ ID NO: 3480443 - DNA, 25 bp, Homo sapien
acccttcttcagaggtagaggtggg

SEQ ID NO: 3480444 - DNA, 25 bp, Homo sapien
taagtgtgcctgattccgctctcct

SEQ ID NO: 3480445 - DNA, 25 bp, Homo sapien
tgatctttcatgtgaggtcgccttg

SEQ ID NO: 3480446 - DNA, 25 bp, Homo sapien
gaagagaagtgcgatgtcatgaacc

SEQ ID NO: 3480447 - DNA, 25 bp, Homo sapien
cctcttgttgatgggaatgggctgc

SEQ ID NO: 3480448 - DNA, 25 bp, Homo sapien
cagcctattgtctagatgtagcaca

SEQ ID NO: 3480449 - DNA, 25 bp, Homo sapien
gccaaactgtcttgtaaagcagctg

SEQ ID NO: 3480450 - DNA, 25 bp, Homo sapien
taaccaaggaatgtgtttgctggat

SEQ ID NO: 3480451 - DNA, 25 bp, Homo sapien
ctcaccaaccaaaggacattttggt

SEQ ID NO: 3480452 - DNA, 25 bp, Homo sapien
tgctgacctcattgcctcctctcct

SEQ ID NO: 3480453 - DNA, 25 bp, Homo sapien
gcagagttgcaatgtacctgagaca

SEQ ID NO: 3480454 - DNA, 25 bp, Homo sapien
gggctggcagagttgcaatgtacct

SEQ ID NO: 3480455 - DNA, 25 bp, Homo sapien
ttataggcttcaactcttattctct

SEQ ID NO: 3480456 - DNA, 25 bp, Homo sapien
cagattgacctcaggagggtgtttg

SEQ ID NO: 3480457 - DNA, 25 bp, Homo sapien
tcgccgtgacttccagattgacctc

SEQ ID NO: 3480458 - DNA, 25 bp, Homo sapien
acctcaggagggtgtttgtggctta

SEQ ID NO: 3480459 - DNA, 25 bp, Homo sapien
acagagccagtcttcgccgtgactt

SEQ ID NO: 3480460 - DNA, 25 bp, Homo sapien
tcttggctggatttctgatagtttc

SEQ ID NO: 3480461 - DNA, 25 bp, Homo sapien
gtatgtatcaggacttcaccccaag

SEQ ID NO: 3480462 - DNA, 25 bp, Homo sapien
tcaaagggacgcgatggatttcttg

SEQ ID NO: 3480463 - DNA, 25 bp, Homo sapien
gatagtttctgaaaggccttcactt

SEQ ID NO: 3480464 - DNA, 25 bp, Homo sapien
ctttctggaagcgggaagttcaaag

SEQ ID NO: 3480465 - DNA, 25 bp, Homo sapien
ctggaagcgggaagttcaaagtcga

SEQ ID NO: 3480466 - DNA, 25 bp, Homo sapien
tctggaagcgggaagttcaaagtcg

SEQ ID NO: 3480467 - DNA, 25 bp, Homo sapien
tggaagcgggaagttcaaagtcgag

SEQ ID NO: 3480468 - DNA, 25 bp, Homo sapien
caagctttttgacatatgcgggcat

SEQ ID NO: 3480469 - DNA, 25 bp, Homo sapien
accaagctttttgacatatgcgggc

SEQ ID NO: 3480470 - DNA, 25 bp, Homo sapien
ccaagctttttgacatatgcgggca

SEQ ID NO: 3480471 - DNA, 25 bp, Homo sapien
tatgttacagtttctgtgcaaaggc

SEQ ID NO: 3480472 - DNA, 25 bp, Homo sapien
tagaggacttggtgtactgaagacc

SEQ ID NO: 3480473 - DNA, 25 bp, Homo sapien
caaaggctactgctggttgctagag

SEQ ID NO: 3480474 - DNA, 25 bp, Homo sapien
ggttgctagagctttagaggacttg

SEQ ID NO: 3480475 - DNA, 25 bp, Homo sapien
gtccaaaggatggttatgagttcac

SEQ ID NO: 3480476 - DNA, 25 bp, Homo sapien
gggtccaaaggatggttatgagttc

SEQ ID NO: 3480477 - DNA, 25 bp, Homo sapien
agcatctcttgagctggggtccaaa

SEQ ID NO: 3480478 - DNA, 25 bp, Homo sapien
cagcatctcttgagctggggtccaa

SEQ ID NO: 3480479 - DNA, 25 bp, Homo sapien
cagggtggcgtctggttacttcatc

SEQ ID NO: 3480480 - DNA, 25 bp, Homo sapien
cagattgtaaactgatgtagggcag

SEQ ID NO: 3480481 - DNA, 25 bp, Homo sapien
cataaagtgttatggcctacatccc

SEQ ID NO: 3480482 - DNA, 25 bp, Homo sapien
caaaatctgaactcaaagagaggcc

SEQ ID NO: 3480483 - DNA, 25 bp, Homo sapien
tgatcccagatagactcccttgtgt

SEQ ID NO: 3480484 - DNA, 25 bp, Homo sapien
gatttagactctgtgcaaatgccag

SEQ ID NO: 3480485 - DNA, 25 bp, Homo sapien
caggttttgactcatggccaaggca

SEQ ID NO: 3480486 - DNA, 25 bp, Homo sapien
cccaagtcaagaggcagcgaagtag

SEQ ID NO: 3480487 - DNA, 25 bp, Homo sapien
tctctgaagattgctacctgtgaag

SEQ ID NO: 3480488 - DNA, 25 bp, Homo sapien
cataacctgttttgggctgcactct

SEQ ID NO: 3480489 - DNA, 25 bp, Homo sapien
taagagtctgatacctgtaaaggcc

SEQ ID NO: 3480490 - DNA, 25 bp, Homo sapien
tatataggcttttgcaccccactga

SEQ ID NO: 3480491 - DNA, 25 bp, Homo sapien
gccgccgccaggagagaatgtgcag

SEQ ID NO: 3480492 - DNA, 25 bp, Homo sapien
gcgaacgctactgcaggtggcgccg

SEQ ID NO: 3480493 - DNA, 25 bp, Homo sapien
gagagaatgtgcagcgcgaggccag

SEQ ID NO: 3480494 - DNA, 25 bp, Homo sapien
ttcgggcgaacgctactgcaggtgg

SEQ ID NO: 3480495 - DNA, 25 bp, Homo sapien
cgtacaccttgatgggctcgggctg

SEQ ID NO: 3480496 - DNA, 25 bp, Homo sapien
acttcgcagagagctccgggcggca

SEQ ID NO: 3480497 - DNA, 25 bp, Homo sapien
gaataggaacgggagtcgcgactcc

SEQ ID NO: 3480498 - DNA, 25 bp, Homo sapien
agcctctgcgtccagacttcgcaga

SEQ ID NO: 3480499 - DNA, 25 bp, Homo sapien
tacttatgatctaataaacctattg

SEQ ID NO: 3480500 - DNA, 25 bp, Homo sapien
acttatgatctaataaacctattgc

SEQ ID NO: 3480501 - DNA, 25 bp, Homo sapien
ttacttatgatctaataaacctatt

SEQ ID NO: 3480502 - DNA, 25 bp, Homo sapien
tacaaactccatctgcaattcctcg

SEQ ID NO: 3480503 - DNA, 25 bp, Homo sapien
actccatctgcaattcctcgcagta

SEQ ID NO: 3480504 - DNA, 25 bp, Homo sapien
ccatctgcaattcctcgcagtaagt

SEQ ID NO: 3480505 - DNA, 25 bp, Homo sapien
ctacaaactccatctgcaattcctc

SEQ ID NO: 3480506 - DNA, 25 bp, Homo sapien
catcagccccatgctggtgtcgctg

SEQ ID NO: 3480507 - DNA, 25 bp, Homo sapien
gacaaggatctgggcccaagaggaa

SEQ ID NO: 3480508 - DNA, 25 bp, Homo sapien
agccccatgctggtgtcgctgttaa

SEQ ID NO: 3480509 - DNA, 25 bp, Homo sapien
tgctggtgtcgctgttaagagcaag

SEQ ID NO: 3480510 - DNA, 25 bp, Homo sapien
ccattgtagagttgtggctggtttc

SEQ ID NO: 3480511 - DNA, 25 bp, Homo sapien
cagcccgttatcacaccattgtaga

SEQ ID NO: 3480512 - DNA, 25 bp, Homo sapien
tgcgctgcatgtcacacagcccgtt

SEQ ID NO: 3480513 - DNA, 25 bp, Homo sapien
tgtttcctggttcccatcctggtac

SEQ ID NO: 3480514 - DNA, 25 bp, Homo sapien
gagggcaagaagctggacagtgtct

SEQ ID NO: 3480515 - DNA, 25 bp, Homo sapien
cagagggcaagaagctggacagtgt

SEQ ID NO: 3480516 - DNA, 25 bp, Homo sapien
tcaaaggtcagagggcaagaagctg

SEQ ID NO: 3480517 - DNA, 25 bp, Homo sapien
gtcagagggcaagaagctggacagt

SEQ ID NO: 3480518 - DNA, 25 bp, Homo sapien
gacactatgaagatggctgtcatct

SEQ ID NO: 3480519 - DNA, 25 bp, Homo sapien
cctgggattcaacaatgacactatg

SEQ ID NO: 3480520 - DNA, 25 bp, Homo sapien
tctccagattatgataagactgccc

SEQ ID NO: 3480521 - DNA, 25 bp, Homo sapien
cctccattacagtgggtggaacaaa

SEQ ID NO: 3480522 - DNA, 25 bp, Homo sapien
tgacactcaacttggcagtcagcag

SEQ ID NO: 3480523 - DNA, 25 bp, Homo sapien
cctacacgagcaggtctttgcagga

SEQ ID NO: 3480524 - DNA, 25 bp, Homo sapien
ctctcttgggtgaagcagaggttgc

SEQ ID NO: 3480525 - DNA, 25 bp, Homo sapien
gcagccaccaatacctagggtctag

SEQ ID NO: 3480526 - DNA, 25 bp, Homo sapien
gatccttgggcagatcagcactggc

SEQ ID NO: 3480527 - DNA, 25 bp, Homo sapien
agatccttgggcagatcagcactgg

SEQ ID NO: 3480528 - DNA, 25 bp, Homo sapien
gagatccttgggcagatcagcactg

SEQ ID NO: 3480529 - DNA, 25 bp, Homo sapien
cacaggctctggtctgctagctaaa

SEQ ID NO: 3480530 - DNA, 25 bp, Homo sapien
ccagctctgtttagatagctctttc

SEQ ID NO: 3480531 - DNA, 25 bp, Homo sapien
gagatgccctctgggctaccaggag

SEQ ID NO: 3480532 - DNA, 25 bp, Homo sapien
gagattgaaggccttgtttctgcag

SEQ ID NO: 3480533 - DNA, 25 bp, Homo sapien
tctattctgccaagtaaggacatca

SEQ ID NO: 3480534 - DNA, 25 bp, Homo sapien
gagaagtcatcagggccactatcgg

SEQ ID NO: 3480535 - DNA, 25 bp, Homo sapien
caccttacagggcaatatgaccact

SEQ ID NO: 3480536 - DNA, 25 bp, Homo sapien
tggaaaagacctccgctaaccagta

SEQ ID NO: 3480537 - DNA, 25 bp, Homo sapien
aagagatcaatgtaggaattaggac

SEQ ID NO: 3480538 - DNA, 25 bp, Homo sapien
caatgtaggaattaggacccacgat

SEQ ID NO: 3480539 - DNA, 25 bp, Homo sapien
attaggacccacgataagtgatggc

SEQ ID NO: 3480540 - DNA, 25 bp, Homo sapien
cacattctaaatcaagactctttcc

SEQ ID NO: 3480541 - DNA, 25 bp, Homo sapien
atgccaggctatctcgggccaaggc

SEQ ID NO: 3480542 - DNA, 25 bp, Homo sapien
ccatctgattgtgggaatcattcag

SEQ ID NO: 3480543 - DNA, 25 bp, Homo sapien
gggccaaggccacgatcacgttgct

SEQ ID NO: 3480544 - DNA, 25 bp, Homo sapien
atcactgctcttgggcctcgccaat

SEQ ID NO: 3480545 - DNA, 25 bp, Homo sapien
tgtggtagaactgggcgataacagc

SEQ ID NO: 3480546 - DNA, 25 bp, Homo sapien
ttgtccgcagggctgtggtagaact

SEQ ID NO: 3480547 - DNA, 25 bp, Homo sapien
aactgggcgataacagcttcactcc

SEQ ID NO: 3480548 - DNA, 25 bp, Homo sapien
gcttgttgtccgcagggctgtggta

SEQ ID NO: 3480549 - DNA, 25 bp, Homo sapien
aacccagtcccatgaagtcgggaca

SEQ ID NO: 3480550 - DNA, 25 bp, Homo sapien
ttaagtgcggcaatctttccaaaac

SEQ ID NO: 3480551 - DNA, 25 bp, Homo sapien
ccatgaagtcgggacaggagggatg

SEQ ID NO: 3480552 - DNA, 25 bp, Homo sapien
taagtgcggcaatctttccaaaacc

SEQ ID NO: 3480553 - DNA, 25 bp, Homo sapien
ctaagggtctttccgtagaagatct

SEQ ID NO: 3480554 - DNA, 25 bp, Homo sapien
aagggtctttccgtagaagatctgg

SEQ ID NO: 3480555 - DNA, 25 bp, Homo sapien
agggtctttccgtagaagatctggc

SEQ ID NO: 3480556 - DNA, 25 bp, Homo sapien
taagggtctttccgtagaagatctg

SEQ ID NO: 3480557 - DNA, 25 bp, Homo sapien
agacatccacgctgccctttcctga

SEQ ID NO: 3480558 - DNA, 25 bp, Homo sapien
ctcctagacatccacgctgcccttt

SEQ ID NO: 3480559 - DNA, 25 bp, Homo sapien
ctttcctgacatcttaacctttcca

SEQ ID NO: 3480560 - DNA, 25 bp, Homo sapien
ttcctgacatcttaacctttccaag

SEQ ID NO: 3480561 - DNA, 25 bp, Homo sapien
aaggcaaagccttcggactggaact

SEQ ID NO: 3480562 - DNA, 25 bp, Homo sapien
actggaactggatgccgcgctagca

SEQ ID NO: 3480563 - DNA, 25 bp, Homo sapien
ccatcacaaggcaaagccttcggac

SEQ ID NO: 3480564 - DNA, 25 bp, Homo sapien
ccttcggactggaactggatgccgc

SEQ ID NO: 3480565 - DNA, 25 bp, Homo sapien
ggtcacatgtccatccttgaagctc

SEQ ID NO: 3480566 - DNA, 25 bp, Homo sapien
gtcacatgtccatccttgaagctca

SEQ ID NO: 3480567 - DNA, 25 bp, Homo sapien
tgcacagcagctcaatacaagctct

SEQ ID NO: 3480568 - DNA, 25 bp, Homo sapien
cagacacgggcctgtttgacattgc

SEQ ID NO: 3480569 - DNA, 25 bp, Homo sapien
gaaaccacattttggcactttgcag

SEQ ID NO: 3480570 - DNA, 25 bp, Homo sapien
aaagtgaatctcctcgctgtcctgc

SEQ ID NO: 3480571 - DNA, 25 bp, Homo sapien
ggcaatgggtcttcttcatcctcat

SEQ ID NO: 3480572 - DNA, 25 bp, Homo sapien
ctggaggcaggcaatgggtcttctt

SEQ ID NO: 3480573 - DNA, 25 bp, Homo sapien
caggcaatgggtcttcttcatcctc

SEQ ID NO: 3480574 - DNA, 25 bp, Homo sapien
ggcaggcaatgggtcttcttcatcc

SEQ ID NO: 3480575 - DNA, 25 bp, Homo sapien
cacgtcttcactagagactaaacaa

SEQ ID NO: 3480576 - DNA, 25 bp, Homo sapien
ggcatggcccacgtcttcactagag

SEQ ID NO: 3480577 - DNA, 25 bp, Homo sapien
catggcccacgtcttcactagagac

SEQ ID NO: 3480578 - DNA, 25 bp, Homo sapien
ggcccacgtcttcactagagactaa

SEQ ID NO: 3480579 - DNA, 25 bp, Homo sapien
ctgacccagatcaatctccagctct

SEQ ID NO: 3480580 - DNA, 25 bp, Homo sapien
gaccagcactttgcacttgtctcat

SEQ ID NO: 3480581 - DNA, 25 bp, Homo sapien
ccagctctgaaacctttcagtgcca

SEQ ID NO: 3480582 - DNA, 25 bp, Homo sapien
acagcctcggtgtggaccagcactt

SEQ ID NO: 3480583 - DNA, 25 bp, Homo sapien
cacagatgggatggttgagtctccc

SEQ ID NO: 3480584 - DNA, 25 bp, Homo sapien
tatgccaggtgatcggcagctctgg

SEQ ID NO: 3480585 - DNA, 25 bp, Homo sapien
ctccaagcagctatgggacatggct

SEQ ID NO: 3480586 - DNA, 25 bp, Homo sapien
tttcagattggctaacacagatggg

SEQ ID NO: 3480587 - DNA, 25 bp, Homo sapien
caatgaaattagcaattcccactcc

SEQ ID NO: 3480588 - DNA, 25 bp, Homo sapien
tttcaatgaaattagcaattcccac

SEQ ID NO: 3480589 - DNA, 25 bp, Homo sapien
tcaatgaaattagcaattcccactc

SEQ ID NO: 3480590 - DNA, 25 bp, Homo sapien
ctttcaatgaaattagcaattccca

SEQ ID NO: 3480591 - DNA, 25 bp, Homo sapien
ctacaaggtgggcttgtttaaccag

SEQ ID NO: 3480592 - DNA, 25 bp, Homo sapien
tggagatggaccgggatgaagctac

SEQ ID NO: 3480593 - DNA, 25 bp, Homo sapien
gatgaagctacaaggtgggcttgtt

SEQ ID NO: 3480594 - DNA, 25 bp, Homo sapien
atggaccgggatgaagctacaaggt

SEQ ID NO: 3480595 - DNA, 25 bp, Homo sapien
tccaaacaaggctcagcgaaaggag

SEQ ID NO: 3480596 - DNA, 25 bp, Homo sapien
ctggcatactccaaacaaggctcag

SEQ ID NO: 3480597 - DNA, 25 bp, Homo sapien
ggcatactccaaacaaggctcagcg

SEQ ID NO: 3480598 - DNA, 25 bp, Homo sapien
tactccaaacaaggctcagcgaaag

SEQ ID NO: 3480599 - DNA, 25 bp, Homo sapien
aggagatcagctgcccgaaatggga

SEQ ID NO: 3480600 - DNA, 25 bp, Homo sapien
cgtgatccagaggtactgggcataa

SEQ ID NO: 3480601 - DNA, 25 bp, Homo sapien
tgggcataagcgtctgcaaagatgt

SEQ ID NO: 3480602 - DNA, 25 bp, Homo sapien
tgttgcagaagtcaaacgtgatcca

SEQ ID NO: 3480603 - DNA, 25 bp, Homo sapien
tgtcaaagcccaagagaaggttgga

SEQ ID NO: 3480604 - DNA, 25 bp, Homo sapien
gtcaaagcccaagagaaggttggag

SEQ ID NO: 3480605 - DNA, 25 bp, Homo sapien
ctgtcaaagcccaagagaaggttgg

SEQ ID NO: 3480606 - DNA, 25 bp, Homo sapien
gggctgccaactgagagtgccagga

SEQ ID NO: 3480607 - DNA, 25 bp, Homo sapien
ggctgccaactgagagtgccaggag

SEQ ID NO: 3480608 - DNA, 25 bp, Homo sapien
gctgccaactgagagtgccaggagg

SEQ ID NO: 3480609 - DNA, 25 bp, Homo sapien
gcacgcactcgaaggaagactatta

SEQ ID NO: 3480610 - DNA, 25 bp, Homo sapien
ggcaagcaaaggtaaacagatctgt

SEQ ID NO: 3480611 - DNA, 25 bp, Homo sapien
catacaggatctacaagtttcacag

SEQ ID NO: 3480612 - DNA, 25 bp, Homo sapien
caaaaggtccctgaagagctcagat

SEQ ID NO: 3480613 - DNA, 25 bp, Homo sapien
cgctgtctgtgaaggcaggcactga

SEQ ID NO: 3480614 - DNA, 25 bp, Homo sapien
tccatgacacgctgtctgtgaaggc

SEQ ID NO: 3480615 - DNA, 25 bp, Homo sapien
actgtgtacctatgtgttctctcaa

SEQ ID NO: 3480616 - DNA, 25 bp, Homo sapien
ccaaagccagctcagttgctccaaa

SEQ ID NO: 3480617 - DNA, 25 bp, Homo sapien
tgttcctgaatcatgatccaggtct

SEQ ID NO: 3480618 - DNA, 25 bp, Homo sapien
tggccaaagtcatctgacttccaca

SEQ ID NO: 3480619 - DNA, 25 bp, Homo sapien
caggtctggccaaagtcatctgact

SEQ ID NO: 3480620 - DNA, 25 bp, Homo sapien
gaaaaggacttgacatgttcctgaa

SEQ ID NO: 3480621 - DNA, 25 bp, Homo sapien
acttcggaagacagtggagtagcca

SEQ ID NO: 3480622 - DNA, 25 bp, Homo sapien
tcccgggactggaagaaatctgtac

SEQ ID NO: 3480623 - DNA, 25 bp, Homo sapien
caccacctttgtagcaaacatgtac

SEQ ID NO: 3480624 - DNA, 25 bp, Homo sapien
cttgtcccgaagctgaaaatctctc

SEQ ID NO: 3480625 - DNA, 25 bp, Homo sapien
ctgccaagccctttcggaatgttcg

SEQ ID NO: 3480626 - DNA, 25 bp, Homo sapien
tcggaatgttcgtcaatgttgtcaa

SEQ ID NO: 3480627 - DNA, 25 bp, Homo sapien
ttgagatcccttcagtcaatctgtc

SEQ ID NO: 3480628 - DNA, 25 bp, Homo sapien
tgttgtcaatgttgagatcccttca

SEQ ID NO: 3480629 - DNA, 25 bp, Homo sapien
tgggcttccggccaaaggagaccca

SEQ ID NO: 3480630 - DNA, 25 bp, Homo sapien
tgtcttgtgacaaactgggctgctc

SEQ ID NO: 3480631 - DNA, 25 bp, Homo sapien
ctctcatgggcttccggccaaagga

SEQ ID NO: 3480632 - DNA, 25 bp, Homo sapien
atgtcttgtgacaaactgggctgct

SEQ ID NO: 3480633 - DNA, 25 bp, Homo sapien
ctcctgggctgtaatagagcacgtt

SEQ ID NO: 3480634 - DNA, 25 bp, Homo sapien
aaattggtgcggttgttactgtggc

SEQ ID NO: 3480635 - DNA, 25 bp, Homo sapien
ggctgtaatagagcacgttctccaa

SEQ ID NO: 3480636 - DNA, 25 bp, Homo sapien
caaggtgtcactgccggcccctcct

SEQ ID NO: 3480637 - DNA, 25 bp, Homo sapien
tgacaacggaatgaattgcccagaa

SEQ ID NO: 3480638 - DNA, 25 bp, Homo sapien
gggcatgccctcagacctggttgtc

SEQ ID NO: 3480639 - DNA, 25 bp, Homo sapien
tcagacctggttgtcatggctggag

SEQ ID NO: 3480640 - DNA, 25 bp, Homo sapien
gaccagtcagcttcacacgggagac

SEQ ID NO: 3480641 - DNA, 25 bp, Homo sapien
gaagcccacagggttttctgtcagg

SEQ ID NO: 3480642 - DNA, 25 bp, Homo sapien
ttcttaagagaatatggacggcatg

SEQ ID NO: 3480643 - DNA, 25 bp, Homo sapien
tctgtcaggaagctcagcagaacct

SEQ ID NO: 3480644 - DNA, 25 bp, Homo sapien
gaacctgtcgattctttcctaaaga

SEQ ID NO: 3480645 - DNA, 25 bp, Homo sapien
tttgtcaaaggtgatgaccgatctc

SEQ ID NO: 3480646 - DNA, 25 bp, Homo sapien
gagtagcaatgtagactccttgcaa

SEQ ID NO: 3480647 - DNA, 25 bp, Homo sapien
tccttgcaatccttccactcggtgg

SEQ ID NO: 3480648 - DNA, 25 bp, Homo sapien
cactcggtggaagtcagcaaatggt

SEQ ID NO: 3480649 - DNA, 25 bp, Homo sapien
tccggagctggaggttgaggagctg

SEQ ID NO: 3480650 - DNA, 25 bp, Homo sapien
agccgactccttggacaggatgggc

SEQ ID NO: 3480651 - DNA, 25 bp, Homo sapien
caggatgggcattctccggagctgg

SEQ ID NO: 3480652 - DNA, 25 bp, Homo sapien
tgatgaggcctggagccgactcctt

SEQ ID NO: 3480653 - DNA, 25 bp, Homo sapien
gaatatgtcagataatcaccttgcc

SEQ ID NO: 3480654 - DNA, 25 bp, Homo sapien
tcaagaatatgtcagataatcacct

SEQ ID NO: 3480655 - DNA, 25 bp, Homo sapien
tgtcagataatcaccttgcccagcc

SEQ ID NO: 3480656 - DNA, 25 bp, Homo sapien
taatttcaagaatatgtcagataat

SEQ ID NO: 3480657 - DNA, 25 bp, Homo sapien
gtacacgtttgtcttgctagccaag

SEQ ID NO: 3480658 - DNA, 25 bp, Homo sapien
tgtcttgctagccaagttctttccc

SEQ ID NO: 3480659 - DNA, 25 bp, Homo sapien
actgctagagatgtacacgtttgtc

SEQ ID NO: 3480660 - DNA, 25 bp, Homo sapien
tggctccagcactgctagagatgta

SEQ ID NO: 3480661 - DNA, 25 bp, Homo sapien
ttatagtcatatctggcattactgg

SEQ ID NO: 3480662 - DNA, 25 bp, Homo sapien
accatttgtgtccctgaaatgccaa

SEQ ID NO: 3480663 - DNA, 25 bp, Homo sapien
ggcacagtctacattctcacacaaa

SEQ ID NO: 3480664 - DNA, 25 bp, Homo sapien
tatctggcattactggtctctgcca

SEQ ID NO: 3480665 - DNA, 25 bp, Homo sapien
tgccaggcactcttaggtcctaagg

SEQ ID NO: 3480666 - DNA, 25 bp, Homo sapien
gtctttgccctcatagaactcataa

SEQ ID NO: 3480667 - DNA, 25 bp, Homo sapien
tggatataaatcagtggcttcaggt

SEQ ID NO: 3480668 - DNA, 25 bp, Homo sapien
catttcagggctaataccactacgc

SEQ ID NO: 3480669 - DNA, 25 bp, Homo sapien
agctgccccggtaatcaccagacga

SEQ ID NO: 3480670 - DNA, 25 bp, Homo sapien
ctatgtcccaaaataaggtctctta

SEQ ID NO: 3480671 - DNA, 25 bp, Homo sapien
gtaatcaccagacgataccacttca

SEQ ID NO: 3480672 - DNA, 25 bp, Homo sapien
atgcactggttgcttcttggcaggg

SEQ ID NO: 3480673 - DNA, 25 bp, Homo sapien
cttatcattcgaagataaaaatcaa

SEQ ID NO: 3480674 - DNA, 25 bp, Homo sapien
aatactaaaaacatatgaactgtac

SEQ ID NO: 3480675 - DNA, 25 bp, Homo sapien
aataacaagatatctatgaaacccc

SEQ ID NO: 3480676 - DNA, 25 bp, Homo sapien
agagatatttatggattgatgaaaa

SEQ ID NO: 3480677 - DNA, 25 bp, Homo sapien
gataaaagggacaattcatgagaaa

SEQ ID NO: 3480678 - DNA, 25 bp, Homo sapien
cagaatcatagtaggagatcttacc

SEQ ID NO: 3480679 - DNA, 25 bp, Homo sapien
tcccagtgcacgtgatatattcaac

SEQ ID NO: 3480680 - DNA, 25 bp, Homo sapien
gatctgaacaacattatcaaccacc

SEQ ID NO: 3480681 - DNA, 25 bp, Homo sapien
ccatgccctgggcaatagccgtgat

SEQ ID NO: 3480682 - DNA, 25 bp, Homo sapien
attccgccgtggtctccccatgtgt

SEQ ID NO: 3480683 - DNA, 25 bp, Homo sapien
tagccgtgatgattccgccgtggtc

SEQ ID NO: 3480684 - DNA, 25 bp, Homo sapien
tccccatgtgtagtagtgaggtcca

SEQ ID NO: 3480685 - DNA, 25 bp, Homo sapien
aagtgtggtccagcatgaacttgac

SEQ ID NO: 3480686 - DNA, 25 bp, Homo sapien
gatccttcaccaatccatctaatgg

SEQ ID NO: 3480687 - DNA, 25 bp, Homo sapien
agaagtgtggtccagcatgaacttg

SEQ ID NO: 3480688 - DNA, 25 bp, Homo sapien
ggttcagctcaaaaacagggagaag

SEQ ID NO: 3480689 - DNA, 25 bp, Homo sapien
tgagcacatatgcaccgacagatgg

SEQ ID NO: 3480690 - DNA, 25 bp, Homo sapien
gaagccaaactatgtcccctacgtg

SEQ ID NO: 3480691 - DNA, 25 bp, Homo sapien
acctttcaactacagggtggcaggc

SEQ ID NO: 3480692 - DNA, 25 bp, Homo sapien
caaatgtgggaagtactgtgctctg

SEQ ID NO: 3480693 - DNA, 25 bp, Homo sapien
tccgtgatcaagctgacaaacgtgt

SEQ ID NO: 3480694 - DNA, 25 bp, Homo sapien
tttgaatcttcttcggtcagggtgc

SEQ ID NO: 3480695 - DNA, 25 bp, Homo sapien
tgctgacaagcaaaccgcagcgaag

SEQ ID NO: 3480696 - DNA, 25 bp, Homo sapien
gactacgaaaaatatcatcatgctg

SEQ ID NO: 3480697 - DNA, 25 bp, Homo sapien
tctgctgcgtggagtcttttcaggg

SEQ ID NO: 3480698 - DNA, 25 bp, Homo sapien
agctgctctgctgcgtggagtcttt

SEQ ID NO: 3480699 - DNA, 25 bp, Homo sapien
tgctctgctgcgtggagtcttttca

SEQ ID NO: 3480700 - DNA, 25 bp, Homo sapien
tgcgtggagtcttttcaggggcttt

SEQ ID NO: 3480701 - DNA, 25 bp, Homo sapien
ggctctcccgacaactgtaccattg

SEQ ID NO: 3480702 - DNA, 25 bp, Homo sapien
gaggcgctgcaagcaagtgaagaca

SEQ ID NO: 3480703 - DNA, 25 bp, Homo sapien
gataaagtaggggtggctctcccga

SEQ ID NO: 3480704 - DNA, 25 bp, Homo sapien
aaaacacagtgataagaacacctgc

SEQ ID NO: 3480705 - DNA, 25 bp, Homo sapien
cctcttacttttctgcccctggcac

SEQ ID NO: 3480706 - DNA, 25 bp, Homo sapien
cgttcatcaggaataagacctctta

SEQ ID NO: 3480707 - DNA, 25 bp, Homo sapien
gattttgcgagtgttttctactgga

SEQ ID NO: 3480708 - DNA, 25 bp, Homo sapien
ttctactggattgccgttcatcagg

SEQ ID NO: 3480709 - DNA, 25 bp, Homo sapien
ggacattctctttgttcgagccaaa

SEQ ID NO: 3480710 - DNA, 25 bp, Homo sapien
aggtctccccttcattggtactgta

SEQ ID NO: 3480711 - DNA, 25 bp, Homo sapien
aggcatccgtggcattgacctggag

SEQ ID NO: 3480712 - DNA, 25 bp, Homo sapien
tgaggaggccatacacaaacactgg

SEQ ID NO: 3480713 - DNA, 25 bp, Homo sapien
gcagctagaatcaggttagccaagg

SEQ ID NO: 3480714 - DNA, 25 bp, Homo sapien
gagacgtcttctggttgggatatca

SEQ ID NO: 3480715 - DNA, 25 bp, Homo sapien
gttgggatatcagccacaaatgtgt

SEQ ID NO: 3480716 - DNA, 25 bp, Homo sapien
tatgttctggacatagagaagaagg

SEQ ID NO: 3480717 - DNA, 25 bp, Homo sapien
gtgacagacacaaagttatgcatac

SEQ ID NO: 3480718 - DNA, 25 bp, Homo sapien
cgagtgacagacacaaagttatgca

SEQ ID NO: 3480719 - DNA, 25 bp, Homo sapien
agtgacagacacaaagttatgcata

SEQ ID NO: 3480720 - DNA, 25 bp, Homo sapien
gagtgacagacacaaagttatgcat

SEQ ID NO: 3480721 - DNA, 25 bp, Homo sapien
ctagtcaatggaaggtgaaacacac

SEQ ID NO: 3480722 - DNA, 25 bp, Homo sapien
cgctcatcagatggtgaccacagct

SEQ ID NO: 3480723 - DNA, 25 bp, Homo sapien
tggacacgaccaccggcctgtcaaa

SEQ ID NO: 3480724 - DNA, 25 bp, Homo sapien
aacagtcttgtgtcccagcaaacac

SEQ ID NO: 3480725 - DNA, 25 bp, Homo sapien
tgcaggagcagttggacacgaccac

SEQ ID NO: 3480726 - DNA, 25 bp, Homo sapien
tgggagcacacacctttctaaggaa

SEQ ID NO: 3480727 - DNA, 25 bp, Homo sapien
gagtctgtgtcgttaccttgggagc

SEQ ID NO: 3480728 - DNA, 25 bp, Homo sapien
gaggactacctggagccaacaaagc

SEQ ID NO: 3480729 - DNA, 25 bp, Homo sapien
gagggcactatgatcttttcaggga

SEQ ID NO: 3480730 - DNA, 25 bp, Homo sapien
gatctggaacacaaacctctaatga

SEQ ID NO: 3480731 - DNA, 25 bp, Homo sapien
tgactttccagaaaattccggatct

SEQ ID NO: 3480732 - DNA, 25 bp, Homo sapien
tcttcactcatcttgaaaccgaagt

SEQ ID NO: 3480733 - DNA, 25 bp, Homo sapien
taagtagaacccacagggcaaggca

SEQ ID NO: 3480734 - DNA, 25 bp, Homo sapien
ccaccccaagagcaagaggtcagaa

SEQ ID NO: 3480735 - DNA, 25 bp, Homo sapien
agaggtcagaaacatggaagaatag

SEQ ID NO: 3480736 - DNA, 25 bp, Homo sapien
aagaggtcagaaacatggaagaata

SEQ ID NO: 3480737 - DNA, 25 bp, Homo sapien
ttccagtcgcgcttcaacatctcct

SEQ ID NO: 3480738 - DNA, 25 bp, Homo sapien
ctccgctacaagtgtccccagaaat

SEQ ID NO: 3480739 - DNA, 25 bp, Homo sapien
gctctccttccagtcgcgcttcaac

SEQ ID NO: 3480740 - DNA, 25 bp, Homo sapien
ttcaacatctcctccgctacaagtg

SEQ ID NO: 3480741 - DNA, 25 bp, Homo sapien
cttcaccaagaggtaatgggcagga

SEQ ID NO: 3480742 - DNA, 25 bp, Homo sapien
agcatacagaatgaactcgttctct

SEQ ID NO: 3480743 - DNA, 25 bp, Homo sapien
acagcatacagaatgaactcgttct

SEQ ID NO: 3480744 - DNA, 25 bp, Homo sapien
gcatacagaatgaactcgttctctt

SEQ ID NO: 3480745 - DNA, 25 bp, Homo sapien
cagcatacagaatgaactcgttctc

SEQ ID NO: 3480746 - DNA, 25 bp, Homo sapien
ggccaggtcggaccaatacaaacag

SEQ ID NO: 3480747 - DNA, 25 bp, Homo sapien
ctggatgacgtccaaggccaggtcg

SEQ ID NO: 3480748 - DNA, 25 bp, Homo sapien
cgtagcccggtgagaggcaactgct

SEQ ID NO: 3480749 - DNA, 25 bp, Homo sapien
actgctcggtggctcccgaggccag

SEQ ID NO: 3480750 - DNA, 25 bp, Homo sapien
tgctaggaactgttcaaacgacccc

SEQ ID NO: 3480751 - DNA, 25 bp, Homo sapien
tggcaagggatgagatgttttacgt

SEQ ID NO: 3480752 - DNA, 25 bp, Homo sapien
cctgccaagtcagtcccatgaaggg

SEQ ID NO: 3480753 - DNA, 25 bp, Homo sapien
tattcaactggcaggactggcaagg

SEQ ID NO: 3480754 - DNA, 25 bp, Homo sapien
ccaggccagaattgatgatcacctc

SEQ ID NO: 3480755 - DNA, 25 bp, Homo sapien
aagccaaagcttctactgtctccag

SEQ ID NO: 3480756 - DNA, 25 bp, Homo sapien
tgcatctacccagtaaagcagctgg

SEQ ID NO: 3480757 - DNA, 25 bp, Homo sapien
ctgtgcttccattcaaacagaggcg

SEQ ID NO: 3480758 - DNA, 25 bp, Homo sapien
tctctggaaactcgcagtaaatttc

SEQ ID NO: 3480759 - DNA, 25 bp, Homo sapien
attctctggaaactcgcagtaaatt

SEQ ID NO: 3480760 - DNA, 25 bp, Homo sapien
cctgagtaatctgacacactggccc

SEQ ID NO: 3480761 - DNA, 25 bp, Homo sapien
agtaaatttcctgagtaatctgaca

SEQ ID NO: 3480762 - DNA, 25 bp, Homo sapien
tcaagcacagaggaattgacgattg

SEQ ID NO: 3480763 - DNA, 25 bp, Homo sapien
ggaagtcgccatctggattagctac

SEQ ID NO: 3480764 - DNA, 25 bp, Homo sapien
tcttggggcacgaggaccagagccc

SEQ ID NO: 3480765 - DNA, 25 bp, Homo sapien
tgacgattgtgagtcggaagtcgcc

SEQ ID NO: 3480766 - DNA, 25 bp, Homo sapien
taaatccactggtcgtccacagaga

SEQ ID NO: 3480767 - DNA, 25 bp, Homo sapien
gatccgctctatgcactccaggtag

SEQ ID NO: 3480768 - DNA, 25 bp, Homo sapien
tccaggtaggcatccgtccagtaaa

SEQ ID NO: 3480769 - DNA, 25 bp, Homo sapien
ttgtccagaatgacagagcgctgct

SEQ ID NO: 3480770 - DNA, 25 bp, Homo sapien
gagctggtttgccagaatctccatc

SEQ ID NO: 3480771 - DNA, 25 bp, Homo sapien
cactgtatttggaagctcggaatat

SEQ ID NO: 3480772 - DNA, 25 bp, Homo sapien
gccccgtgagctggtttgccagaat

SEQ ID NO: 3480773 - DNA, 25 bp, Homo sapien
gaagctcggaatatgctgagctgtg

SEQ ID NO: 3480774 - DNA, 25 bp, Homo sapien
atgaagtggacagtcaagactggga

SEQ ID NO: 3480775 - DNA, 25 bp, Homo sapien
tcacaggtgtgactgcatgtcagct

SEQ ID NO: 3480776 - DNA, 25 bp, Homo sapien
gaagtaagttgtgaccgggtagcca

SEQ ID NO: 3480777 - DNA, 25 bp, Homo sapien
gcccaagttcttgggatgaagtgga

SEQ ID NO: 3480778 - DNA, 25 bp, Homo sapien
tatcccctacatcgttccggggatg

SEQ ID NO: 3480779 - DNA, 25 bp, Homo sapien
ccggggatggcaggtaagaagatgc

SEQ ID NO: 3480780 - DNA, 25 bp, Homo sapien
ggtaagaagatgcataaaccatttt

SEQ ID NO: 3480781 - DNA, 25 bp, Homo sapien
ccctacatcgttccggggatggcag

SEQ ID NO: 3480782 - DNA, 25 bp, Homo sapien
aaggcagcaccggagagagttcgta

SEQ ID NO: 3480783 - DNA, 25 bp, Homo sapien
aggagcctttgtggatgaacgagga

SEQ ID NO: 3480784 - DNA, 25 bp, Homo sapien
gagttcgtaaaatccaccactgcac

SEQ ID NO: 3480785 - DNA, 25 bp, Homo sapien
ttgtggatgaacgaggatggcaaaa

SEQ ID NO: 3480786 - DNA, 25 bp, Homo sapien
cacctgcagcttctactgttgttgg

SEQ ID NO: 3480787 - DNA, 25 bp, Homo sapien
gctgatagccctgagggcagtcaca

SEQ ID NO: 3480788 - DNA, 25 bp, Homo sapien
cttctactgttgttggccttgggca

SEQ ID NO: 3480789 - DNA, 25 bp, Homo sapien
gacacaggtattgttcttgagctga

SEQ ID NO: 3480790 - DNA, 25 bp, Homo sapien
cacagtcgttgtcaaagtcacacca

SEQ ID NO: 3480791 - DNA, 25 bp, Homo sapien
cgttgctgcagcgatactggttgcg

SEQ ID NO: 3480792 - DNA, 25 bp, Homo sapien
ccaaatgctgttgatacagttcccg

SEQ ID NO: 3480793 - DNA, 25 bp, Homo sapien
tcatcgctcatgtctccacagtcgt

SEQ ID NO: 3480794 - DNA, 25 bp, Homo sapien
taagtgcttaacgtccaatccagaa

SEQ ID NO: 3480795 - DNA, 25 bp, Homo sapien
gatgggcatcaccaatcatgggtgg

SEQ ID NO: 3480796 - DNA, 25 bp, Homo sapien
tcttgtaacgagtggtacttctggg

SEQ ID NO: 3480797 - DNA, 25 bp, Homo sapien
cagtttcagccatgtgacgtttatt

SEQ ID NO: 3480798 - DNA, 25 bp, Homo sapien
gccacagccaagattagagcccaga

SEQ ID NO: 3480799 - DNA, 25 bp, Homo sapien
cacagccaagattagagcccagatt

SEQ ID NO: 3480800 - DNA, 25 bp, Homo sapien
cagccaagattagagcccagattgc

SEQ ID NO: 3480801 - DNA, 25 bp, Homo sapien
gccaagattagagcccagattgcca

SEQ ID NO: 3480802 - DNA, 25 bp, Homo sapien
tcccagactcctggcaacgaaactg

SEQ ID NO: 3480803 - DNA, 25 bp, Homo sapien
cagtgggatacaagtcccagactcc

SEQ ID NO: 3480804 - DNA, 25 bp, Homo sapien
ttataggacagtgggatacaagtcc

SEQ ID NO: 3480805 - DNA, 25 bp, Homo sapien
tcctggcaacgaaactgggtgtcca

SEQ ID NO: 3480806 - DNA, 25 bp, Homo sapien
taaccgggaccctgggatgaattca

SEQ ID NO: 3480807 - DNA, 25 bp, Homo sapien
aagaggacctgcatcagaggaaggg

SEQ ID NO: 3480808 - DNA, 25 bp, Homo sapien
ccgggaccctgggatgaattcagga

SEQ ID NO: 3480809 - DNA, 25 bp, Homo sapien
ggaccctgggatgaattcaggacaa

SEQ ID NO: 3480810 - DNA, 25 bp, Homo sapien
ccataaacagagaggtgaggacaaa

SEQ ID NO: 3480811 - DNA, 25 bp, Homo sapien
gaccataaacagagaggtgaggaca

SEQ ID NO: 3480812 - DNA, 25 bp, Homo sapien
ataaacagagaggtgaggacaaaag

SEQ ID NO: 3480813 - DNA, 25 bp, Homo sapien
ctgcaggtgagaccataaacagaga

SEQ ID NO: 3480814 - DNA, 25 bp, Homo sapien
catgccggaactgcagttgtactcg

SEQ ID NO: 3480815 - DNA, 25 bp, Homo sapien
ttgtactcgtcactccggcactggt

SEQ ID NO: 3480816 - DNA, 25 bp, Homo sapien
cccgtcacatacccaggaggagcgg

SEQ ID NO: 3480817 - DNA, 25 bp, Homo sapien
gttggcttcatcagaccagtccctg

SEQ ID NO: 3480818 - DNA, 25 bp, Homo sapien
aagctataatgttaaccactgcatg

SEQ ID NO: 3480819 - DNA, 25 bp, Homo sapien
aattctcagagcctagattttccga

SEQ ID NO: 3480820 - DNA, 25 bp, Homo sapien
ggatgagtgctgtcaactgagtcca

SEQ ID NO: 3480821 - DNA, 25 bp, Homo sapien
gattttccgatcgtttaaagctata

SEQ ID NO: 3480822 - DNA, 25 bp, Homo sapien
cagaccatgctttaatatacagaga

SEQ ID NO: 3480823 - DNA, 25 bp, Homo sapien
ttcctgtgccaacggcagctccttt

SEQ ID NO: 3480824 - DNA, 25 bp, Homo sapien
tgcagaccatgctttaatatacaga

SEQ ID NO: 3480825 - DNA, 25 bp, Homo sapien
gctcctttatgggcctcggttcttc

SEQ ID NO: 3480826 - DNA, 25 bp, Homo sapien
agacacagtcgcacacccctcatct

SEQ ID NO: 3480827 - DNA, 25 bp, Homo sapien
gagacacagtcgcacacccctcatc

SEQ ID NO: 3480828 - DNA, 25 bp, Homo sapien
cccgtttcggcactggaagttggag

SEQ ID NO: 3480829 - DNA, 25 bp, Homo sapien
cggaaccatcctggcagtccgtatc

SEQ ID NO: 3480830 - DNA, 25 bp, Homo sapien
acagttgactggatcctcatcggaa

SEQ ID NO: 3480831 - DNA, 25 bp, Homo sapien
gatgcagtgcccgtttcggcactgg

SEQ ID NO: 3480832 - DNA, 25 bp, Homo sapien
cgcagtgctgttcatcggagccatc

SEQ ID NO: 3480833 - DNA, 25 bp, Homo sapien
caagtgccgtttgggcagcggaatc

SEQ ID NO: 3480834 - DNA, 25 bp, Homo sapien
aatgtttgctggatgggatgcaagt

SEQ ID NO: 3480835 - DNA, 25 bp, Homo sapien
agagcaatcacgcagaccatcacaa

SEQ ID NO: 3480836 - DNA, 25 bp, Homo sapien
ggatgattccgtcacagaccatgga

SEQ ID NO: 3480837 - DNA, 25 bp, Homo sapien
tggaacaggcactgctggcggttct

SEQ ID NO: 3480838 - DNA, 25 bp, Homo sapien
tcatcggacccgtcgcggcactgga

SEQ ID NO: 3480839 - DNA, 25 bp, Homo sapien
gcggttcttacacacaaagtccatg

SEQ ID NO: 3480840 - DNA, 25 bp, Homo sapien
gaacaaacatccatgaagtccagga

SEQ ID NO: 3480841 - DNA, 25 bp, Homo sapien
gggaacaaacatccatgaagtccag

SEQ ID NO: 3480842 - DNA, 25 bp, Homo sapien
catccatgaagtccaggaacttcca

SEQ ID NO: 3480843 - DNA, 25 bp, Homo sapien
tacagagggaacaaacatccatgaa

SEQ ID NO: 3480844 - DNA, 25 bp, Homo sapien
cgaactcatcacataccttgtggaa

SEQ ID NO: 3480845 - DNA, 25 bp, Homo sapien
catcccgtcgcacttccaaatcaaa

SEQ ID NO: 3480846 - DNA, 25 bp, Homo sapien
tctgacactggaaaccgaactcatc

SEQ ID NO: 3480847 - DNA, 25 bp, Homo sapien
ttcatcagaataatcgccgcaatca

SEQ ID NO: 3480848 - DNA, 25 bp, Homo sapien
ggttgccggtgagtgtccctgtaac

SEQ ID NO: 3480849 - DNA, 25 bp, Homo sapien
tcgtatgagtattcaggaactggca

SEQ ID NO: 3480850 - DNA, 25 bp, Homo sapien
tgtccctgtaactgcaggcatcact

SEQ ID NO: 3480851 - DNA, 25 bp, Homo sapien
actgctgctgagttacgggaaggcc

SEQ ID NO: 3480852 - DNA, 25 bp, Homo sapien
tctcacaccgaaactggaagtagcg

SEQ ID NO: 3480853 - DNA, 25 bp, Homo sapien
aaactggaagtagcgggagcagttt

SEQ ID NO: 3480854 - DNA, 25 bp, Homo sapien
ggccattctcacaccgaaactggaa

SEQ ID NO: 3480855 - DNA, 25 bp, Homo sapien
caccgaaactggaagtagcgggagc

SEQ ID NO: 3480856 - DNA, 25 bp, Homo sapien
taattgggcagacacgtggagggcc

SEQ ID NO: 3480857 - DNA, 25 bp, Homo sapien
atctgcacaatctcggtacccgtcg

SEQ ID NO: 3480858 - DNA, 25 bp, Homo sapien
tgtccatcacgcaggtcccactgct

SEQ ID NO: 3480859 - DNA, 25 bp, Homo sapien
ggggcaggcttcctcgtcagagcca

SEQ ID NO: 3480860 - DNA, 25 bp, Homo sapien
ggtggcattcgaactcaaatcggtc

SEQ ID NO: 3480861 - DNA, 25 bp, Homo sapien
ttccagttgggaatacacgtcttcg

SEQ ID NO: 3480862 - DNA, 25 bp, Homo sapien
catcctggcaatcttggtggccgtc

SEQ ID NO: 3480863 - DNA, 25 bp, Homo sapien
aatcggtcacatcgcccaagttggg

SEQ ID NO: 3480864 - DNA, 25 bp, Homo sapien
ccccacatagctggtagcatcagct

SEQ ID NO: 3480865 - DNA, 25 bp, Homo sapien
tcagtaacccccacatagctggtag

SEQ ID NO: 3480866 - DNA, 25 bp, Homo sapien
catagctggtagcatcagctttcac

SEQ ID NO: 3480867 - DNA, 25 bp, Homo sapien
ctggtagcatcagctttcactgtca

SEQ ID NO: 3480868 - DNA, 25 bp, Homo sapien
actgcaggccttttcatcgctctcg

SEQ ID NO: 3480869 - DNA, 25 bp, Homo sapien
cagcgctccgagagcacaatgcagg

SEQ ID NO: 3480870 - DNA, 25 bp, Homo sapien
gctctcgtccgagcagtccaggaag

SEQ ID NO: 3480871 - DNA, 25 bp, Homo sapien
tgctcatgcaagtcaaggtgctgtg

SEQ ID NO: 3480872 - DNA, 25 bp, Homo sapien
gctgtccactgaagattctgtactt

SEQ ID NO: 3480873 - DNA, 25 bp, Homo sapien
gtagtagacattatatacacaagaa

SEQ ID NO: 3480874 - DNA, 25 bp, Homo sapien
gcagagggcatttttttgggcctca

SEQ ID NO: 3480875 - DNA, 25 bp, Homo sapien
caggtcaaagtcacatccccagaga

SEQ ID NO: 3480876 - DNA, 25 bp, Homo sapien
gagacactgaacctgtactttaacc

SEQ ID NO: 3480877 - DNA, 25 bp, Homo sapien
ctcagggtcacaaagtcattggtgt

SEQ ID NO: 3480878 - DNA, 25 bp, Homo sapien
gagtcttccatatgctctctccaac

SEQ ID NO: 3480879 - DNA, 25 bp, Homo sapien
gatacgtggtatctggtttcaagac

SEQ ID NO: 3480880 - DNA, 25 bp, Homo sapien
cagctggagatttcgaggggcatct

SEQ ID NO: 3480881 - DNA, 25 bp, Homo sapien
gctggagatttcgaggggcatctgg

SEQ ID NO: 3480882 - DNA, 25 bp, Homo sapien
acagctggagatttcgaggggcatc

SEQ ID NO: 3480883 - DNA, 25 bp, Homo sapien
agctggagatttcgaggggcatctg

SEQ ID NO: 3480884 - DNA, 25 bp, Homo sapien
atgtactcacggatgaggccatggg

SEQ ID NO: 3480885 - DNA, 25 bp, Homo sapien
tactcacggatgaggccatgggtgt

SEQ ID NO: 3480886 - DNA, 25 bp, Homo sapien
tgtactcacggatgaggccatgggt

SEQ ID NO: 3480887 - DNA, 25 bp, Homo sapien
aatgtactcacggatgaggccatgg

SEQ ID NO: 3480888 - DNA, 25 bp, Homo sapien
gggaggcccacatcttggaaccact

SEQ ID NO: 3480889 - DNA, 25 bp, Homo sapien
ccaataagttcttgatttctgtaaa

SEQ ID NO: 3480890 - DNA, 25 bp, Homo sapien
tctgacggtgtatagagtgttgacc

SEQ ID NO: 3480891 - DNA, 25 bp, Homo sapien
taaagttactagcagccctctggga

SEQ ID NO: 3480892 - DNA, 25 bp, Homo sapien
tatggtggtaatggatttagaatcg

SEQ ID NO: 3480893 - DNA, 25 bp, Homo sapien
ggtaatggatttagaatcgctccag

SEQ ID NO: 3480894 - DNA, 25 bp, Homo sapien
tttcctattccacgactagtcaccg

SEQ ID NO: 3480895 - DNA, 25 bp, Homo sapien
aatcgctccagtttcctattccacg

SEQ ID NO: 3480896 - DNA, 25 bp, Homo sapien
taatcatggcaaccagggacaagtc

SEQ ID NO: 3480897 - DNA, 25 bp, Homo sapien
gggacaagtcacaatccactccaaa

SEQ ID NO: 3480898 - DNA, 25 bp, Homo sapien
ttaataagggatccattcacgagca

SEQ ID NO: 3480899 - DNA, 25 bp, Homo sapien
ttcacgagcaacaatagcatggtgc

SEQ ID NO: 3480900 - DNA, 25 bp, Homo sapien
ttcccaccagatggctgacagtgct

SEQ ID NO: 3480901 - DNA, 25 bp, Homo sapien
tcagttcaaccaatgagcgccatgc

SEQ ID NO: 3480902 - DNA, 25 bp, Homo sapien
ggcaagttactgatcttcctggagc

SEQ ID NO: 3480903 - DNA, 25 bp, Homo sapien
acatatgccccttctatagactggg

SEQ ID NO: 3480904 - DNA, 25 bp, Homo sapien
cagggatcattcactgcgagtggca

SEQ ID NO: 3480905 - DNA, 25 bp, Homo sapien
tgattggcactaacaaagtcccacc

SEQ ID NO: 3480906 - DNA, 25 bp, Homo sapien
tcagtcggctatcctggcaattagg

SEQ ID NO: 3480907 - DNA, 25 bp, Homo sapien
ctttcggaaggctgacaatggagta

SEQ ID NO: 3480908 - DNA, 25 bp, Homo sapien
tccatggtcagggtgaagcttagat

SEQ ID NO: 3480909 - DNA, 25 bp, Homo sapien
caccatagctgtcaatgtggatatc

SEQ ID NO: 3480910 - DNA, 25 bp, Homo sapien
cagggtgaagcttagataattttca

SEQ ID NO: 3480911 - DNA, 25 bp, Homo sapien
tttcaccatagctgtcaatgtggat

SEQ ID NO: 3480912 - DNA, 25 bp, Homo sapien
ccatacaaaataaagccccatccag

SEQ ID NO: 3480913 - DNA, 25 bp, Homo sapien
acaaaataaagccccatccagctgc

SEQ ID NO: 3480914 - DNA, 25 bp, Homo sapien
tgctggcttgaaattcccacattac

SEQ ID NO: 3480915 - DNA, 25 bp, Homo sapien
tccagctgctggcttgaaattccca

SEQ ID NO: 3480916 - DNA, 25 bp, Homo sapien
tagcgcttagcaccaggaaatccaa

SEQ ID NO: 3480917 - DNA, 25 bp, Homo sapien
ggtatccaactctcccacaagaagg

SEQ ID NO: 3480918 - DNA, 25 bp, Homo sapien
cacaggtaacaatgatgaagtcggc

SEQ ID NO: 3480919 - DNA, 25 bp, Homo sapien
aagtcggctatgcagagggccagta

SEQ ID NO: 3480920 - DNA, 25 bp, Homo sapien
gtgacaatatgcttcctcggaagtt

SEQ ID NO: 3480921 - DNA, 25 bp, Homo sapien
cagaaaaggttcaccacatagccat

SEQ ID NO: 3480922 - DNA, 25 bp, Homo sapien
gtgtcaaatgcccagaaaaggttca

SEQ ID NO: 3480923 - DNA, 25 bp, Homo sapien
tgcttcctcggaagttcaaagttct

SEQ ID NO: 3480924 - DNA, 25 bp, Homo sapien
ctgcacacacactgaccagcaccaa

SEQ ID NO: 3480925 - DNA, 25 bp, Homo sapien
tgcacacacactgaccagcaccaaa

SEQ ID NO: 3480926 - DNA, 25 bp, Homo sapien
gtgggcgaacccctctggtcataac

SEQ ID NO: 3480927 - DNA, 25 bp, Homo sapien
gggctatcccccaagtcagtcttgg

SEQ ID NO: 3480928 - DNA, 25 bp, Homo sapien
ctcataggatgtatgagctgtcaga

SEQ ID NO: 3480929 - DNA, 25 bp, Homo sapien
ctaggtgcaggtgggcgaacccctc

SEQ ID NO: 3480930 - DNA, 25 bp, Homo sapien
gaaacaaatactgctcatccttact

SEQ ID NO: 3480931 - DNA, 25 bp, Homo sapien
aagtagtcaagctcttcgggttgcg

SEQ ID NO: 3480932 - DNA, 25 bp, Homo sapien
gaccgtcttgttgtggagtgaagta

SEQ ID NO: 3480933 - DNA, 25 bp, Homo sapien
ggacgtggcatagaaaataccataa

SEQ ID NO: 3480934 - DNA, 25 bp, Homo sapien
gatgaccacggaggttttgcccgta

SEQ ID NO: 3480935 - DNA, 25 bp, Homo sapien
tgcccgtatgaaccacatgcaggtg

SEQ ID NO: 3480936 - DNA, 25 bp, Homo sapien
tggaagcctgctgtccgggatcatc

SEQ ID NO: 3480937 - DNA, 25 bp, Homo sapien
tcctggtcaggagagtcatacggtg

SEQ ID NO: 3480938 - DNA, 25 bp, Homo sapien
gatgtggtatttcccgccaggctcc

SEQ ID NO: 3480939 - DNA, 25 bp, Homo sapien
gctccaacttgttaagggtgtattc

SEQ ID NO: 3480940 - DNA, 25 bp, Homo sapien
ccccagttggacaatgatgtggtat

SEQ ID NO: 3480941 - DNA, 25 bp, Homo sapien
tatgctggaatctttgctcatgttc

SEQ ID NO: 3480942 - DNA, 25 bp, Homo sapien
aacagaagaacatgatcattttctg

SEQ ID NO: 3480943 - DNA, 25 bp, Homo sapien
taggctcctggtttaacaccctgag

SEQ ID NO: 3480944 - DNA, 25 bp, Homo sapien
cgagtgtggaataggctcctggttt

SEQ ID NO: 3480945 - DNA, 25 bp, Homo sapien
tgtggaataggctcctggtttaaca

SEQ ID NO: 3480946 - DNA, 25 bp, Homo sapien
cctcagcgagtgtggaataggctcc

SEQ ID NO: 3480947 - DNA, 25 bp, Homo sapien
tggaattttccgctttgttacatgt

SEQ ID NO: 3480948 - DNA, 25 bp, Homo sapien
tccattttgaacttacttgaaagct

SEQ ID NO: 3480949 - DNA, 25 bp, Homo sapien
gttacatgtcccttcttcaaaatta

SEQ ID NO: 3480950 - DNA, 25 bp, Homo sapien
cttttgcttactgctgctggaattt

SEQ ID NO: 3480951 - DNA, 25 bp, Homo sapien
aggcatcttgcttggacggtgaacg

SEQ ID NO: 3480952 - DNA, 25 bp, Homo sapien
gatattcatggcactatcaaacatg

SEQ ID NO: 3480953 - DNA, 25 bp, Homo sapien
tgtcagtagtattcccaaggtaagc

SEQ ID NO: 3480954 - DNA, 25 bp, Homo sapien
agaccccagctcatcgtacagcagg

SEQ ID NO: 3480955 - DNA, 25 bp, Homo sapien
cagacttaacagctcatgaagtttt

SEQ ID NO: 3480956 - DNA, 25 bp, Homo sapien
tacaccacaatacagacttaacagc

SEQ ID NO: 3480957 - DNA, 25 bp, Homo sapien
aacgagattcctacaccacaataca

SEQ ID NO: 3480958 - DNA, 25 bp, Homo sapien
cattaagtgatacaaacgagattcc

SEQ ID NO: 3480959 - DNA, 25 bp, Homo sapien
atttagataatctcttggaagggag

SEQ ID NO: 3480960 - DNA, 25 bp, Homo sapien
ggagacctttgttggggtatcaaca

SEQ ID NO: 3480961 - DNA, 25 bp, Homo sapien
gcattattacttaagaccacttgct

SEQ ID NO: 3480962 - DNA, 25 bp, Homo sapien
gggtatcaacattgatttcattagc

SEQ ID NO: 3480963 - DNA, 25 bp, Homo sapien
ggcaaagttcccaccaataagccca

SEQ ID NO: 3480964 - DNA, 25 bp, Homo sapien
ctgccaaggcaaagttcccaccaat

SEQ ID NO: 3480965 - DNA, 25 bp, Homo sapien
gccaaggcaaagttcccaccaataa

SEQ ID NO: 3480966 - DNA, 25 bp, Homo sapien
caaggcaaagttcccaccaataagc

SEQ ID NO: 3480967 - DNA, 25 bp, Homo sapien
ttcgtgtacaggatggcaaacccca

SEQ ID NO: 3480968 - DNA, 25 bp, Homo sapien
gcagcaacatccgtagatctggcag

SEQ ID NO: 3480969 - DNA, 25 bp, Homo sapien
ccccagaggagaagattgcggaccc

SEQ ID NO: 3480970 - DNA, 25 bp, Homo sapien
caggaataagatgggcaccaccaca

SEQ ID NO: 3480971 - DNA, 25 bp, Homo sapien
gacaaaacagtcaggccttggtgag

SEQ ID NO: 3480972 - DNA, 25 bp, Homo sapien
gaaggtcaatgccatagccaggcag

SEQ ID NO: 3480973 - DNA, 25 bp, Homo sapien
taatcagctgtgaaacctagcccag

SEQ ID NO: 3480974 - DNA, 25 bp, Homo sapien
cacaaccctctagctgagaaggtca

SEQ ID NO: 3480975 - DNA, 25 bp, Homo sapien
aaatccagttatcataggggcatct

SEQ ID NO: 3480976 - DNA, 25 bp, Homo sapien
ccagttatcataggggcatcttcat

SEQ ID NO: 3480977 - DNA, 25 bp, Homo sapien
agttatcataggggcatcttcatca

SEQ ID NO: 3480978 - DNA, 25 bp, Homo sapien
atccagttatcataggggcatcttc

SEQ ID NO: 3480979 - DNA, 25 bp, Homo sapien
tttggtttctagtgaggaaagctct

SEQ ID NO: 3480980 - DNA, 25 bp, Homo sapien
ttggtttctagtgaggaaagctctt

SEQ ID NO: 3480981 - DNA, 25 bp, Homo sapien
catttggtttctagtgaggaaagct

SEQ ID NO: 3480982 - DNA, 25 bp, Homo sapien
ccatttggtttctagtgaggaaagc

SEQ ID NO: 3480983 - DNA, 25 bp, Homo sapien
ttttggcccatataaaaataacata

SEQ ID NO: 3480984 - DNA, 25 bp, Homo sapien
gcaactcaaagtgcatcttttaaaa

SEQ ID NO: 3480985 - DNA, 25 bp, Homo sapien
aaataaaccatcaactatctttatc

SEQ ID NO: 3480986 - DNA, 25 bp, Homo sapien
aaaccatcaactatctttatcaaat

SEQ ID NO: 3480987 - DNA, 25 bp, Homo sapien
tgtctaatgaccactaaagcctggc

SEQ ID NO: 3480988 - DNA, 25 bp, Homo sapien
ggaaatatctcaagctgccaactgg

SEQ ID NO: 3480989 - DNA, 25 bp, Homo sapien
cacttgtgagaaggtgatgcctcgc

SEQ ID NO: 3480990 - DNA, 25 bp, Homo sapien
caacgatgctcgacattggtgccca

SEQ ID NO: 3480991 - DNA, 25 bp, Homo sapien
tacagcttcatctagtgggccaaac

SEQ ID NO: 3480992 - DNA, 25 bp, Homo sapien
tgatgctaccaaagacagaacccca

SEQ ID NO: 3480993 - DNA, 25 bp, Homo sapien
ttttagaggcccatcgtggtccaca

SEQ ID NO: 3480994 - DNA, 25 bp, Homo sapien
tcttcacaagcaagcagggactccg

SEQ ID NO: 3480995 - DNA, 25 bp, Homo sapien
taaagaacagctcgagacacacaga

SEQ ID NO: 3480996 - DNA, 25 bp, Homo sapien
tttattgcgctctaaagaacagctc

SEQ ID NO: 3480997 - DNA, 25 bp, Homo sapien
gacacacagagacagtggattttca

SEQ ID NO: 3480998 - DNA, 25 bp, Homo sapien
gactgcgtcagccatctttattgcg

SEQ ID NO: 3480999 - DNA, 25 bp, Homo sapien
attccttcacacagcccaacttgag

SEQ ID NO: 3481000 - DNA, 25 bp, Homo sapien
cctgtgcatatatgccattccttca

SEQ ID NO: 3481001 - DNA, 25 bp, Homo sapien
caggccctgtgcatatatgccattc

SEQ ID NO: 3481002 - DNA, 25 bp, Homo sapien
atatatgccattccttcacacagcc

SEQ ID NO: 3481003 - DNA, 25 bp, Homo sapien
tggggtgacttgtgctcctgaagca

SEQ ID NO: 3481004 - DNA, 25 bp, Homo sapien
caccttttgtgctgtctccccctat

SEQ ID NO: 3481005 - DNA, 25 bp, Homo sapien
atggggtgacttgtgctcctgaagc

SEQ ID NO: 3481006 - DNA, 25 bp, Homo sapien
tctccccctatcagagccacttctg

SEQ ID NO: 3481007 - DNA, 25 bp, Homo sapien
gcaacactcatagtcttggtttcga

SEQ ID NO: 3481008 - DNA, 25 bp, Homo sapien
ctcacaggcaacactcatagtcttg

SEQ ID NO: 3481009 - DNA, 25 bp, Homo sapien
caggcaacactcatagtcttggttt

SEQ ID NO: 3481010 - DNA, 25 bp, Homo sapien
tcatagtcttggtttcgatatgcat

SEQ ID NO: 3481011 - DNA, 25 bp, Homo sapien
ctgcatagtgttccaaaacccgctt

SEQ ID NO: 3481012 - DNA, 25 bp, Homo sapien
gtctggtgtcgctgcatagtgttcc

SEQ ID NO: 3481013 - DNA, 25 bp, Homo sapien
ctagtctggtgtcgctgcatagtgt

SEQ ID NO: 3481014 - DNA, 25 bp, Homo sapien
tgcatagtgttccaaaacccgcttt

SEQ ID NO: 3481015 - DNA, 25 bp, Homo sapien
ccgaagttagtctcttccgtaggct

SEQ ID NO: 3481016 - DNA, 25 bp, Homo sapien
ctgctgatccggaccgaagttagtc

SEQ ID NO: 3481017 - DNA, 25 bp, Homo sapien
gatccggaccgaagttagtctcttc

SEQ ID NO: 3481018 - DNA, 25 bp, Homo sapien
gaagttagtctcttccgtaggctca

SEQ ID NO: 3481019 - DNA, 25 bp, Homo sapien
cagcacaatgcaggttgccactcgc

SEQ ID NO: 3481020 - DNA, 25 bp, Homo sapien
ccgggcgatcactctccatggagga

SEQ ID NO: 3481021 - DNA, 25 bp, Homo sapien
cccgtattgtctcggagtgttcaca

SEQ ID NO: 3481022 - DNA, 25 bp, Homo sapien
agcctgctgtggaaacgcgtgcgtc

SEQ ID NO: 3481023 - DNA, 25 bp, Homo sapien
gctgaactgcgagtcacatgccaga

SEQ ID NO: 3481024 - DNA, 25 bp, Homo sapien
gagtcacatgccagatccagaaatg

SEQ ID NO: 3481025 - DNA, 25 bp, Homo sapien
ttatgtcggcgcattgctgaactgc

SEQ ID NO: 3481026 - DNA, 25 bp, Homo sapien
tcggcgcattgctgaactgcgagtc

SEQ ID NO: 3481027 - DNA, 25 bp, Homo sapien
taggaggaaggctcgtttaagttca

SEQ ID NO: 3481028 - DNA, 25 bp, Homo sapien
atttttattttgcgggggatgatgg

SEQ ID NO: 3481029 - DNA, 25 bp, Homo sapien
ggggatgatggggacgtacaactct

SEQ ID NO: 3481030 - DNA, 25 bp, Homo sapien
aggaaggctcgtttaagttcaggat

SEQ ID NO: 3481031 - DNA, 25 bp, Homo sapien
ttaagtgtcctttgtgaagtcacca

SEQ ID NO: 3481032 - DNA, 25 bp, Homo sapien
cactgggtagggaaccaagtcgttg

SEQ ID NO: 3481033 - DNA, 25 bp, Homo sapien
attaagtgtcctttgtgaagtcacc

SEQ ID NO: 3481034 - DNA, 25 bp, Homo sapien
tggtgacatcgcgatgagtgtgaat

SEQ ID NO: 3481035 - DNA, 25 bp, Homo sapien
tgctcctggtgacatcgcgatgagt

SEQ ID NO: 3481036 - DNA, 25 bp, Homo sapien
tcctggtgacatcgcgatgagtgtg

SEQ ID NO: 3481037 - DNA, 25 bp, Homo sapien
tgacatcgcgatgagtgtgaatgga

SEQ ID NO: 3481038 - DNA, 25 bp, Homo sapien
gcataggagctcttatctgagcacc

SEQ ID NO: 3481039 - DNA, 25 bp, Homo sapien
tctgttgtccaaaggacctagcata

SEQ ID NO: 3481040 - DNA, 25 bp, Homo sapien
gcacctgatgagaagacgacactca

SEQ ID NO: 3481041 - DNA, 25 bp, Homo sapien
cagaaatctcggtatcatgctcacc

SEQ ID NO: 3481042 - DNA, 25 bp, Homo sapien
gaagagaaatatcgatctccacagg

SEQ ID NO: 3481043 - DNA, 25 bp, Homo sapien
tgtgtagacttgacaatcattgcgg

SEQ ID NO: 3481044 - DNA, 25 bp, Homo sapien
gggcctccgttgctatattccattg

SEQ ID NO: 3481045 - DNA, 25 bp, Homo sapien
tgggctccggctgtaacccacatct

SEQ ID NO: 3481046 - DNA, 25 bp, Homo sapien
cagttctttgtgtctgagtttctgc

SEQ ID NO: 3481047 - DNA, 25 bp, Homo sapien
tttgtgtctgagtttctgctccctg

SEQ ID NO: 3481048 - DNA, 25 bp, Homo sapien
cataggtgccggtgcctagcactga

SEQ ID NO: 3481049 - DNA, 25 bp, Homo sapien
aggaagccagtgtgcataggtgccg

SEQ ID NO: 3481050 - DNA, 25 bp, Homo sapien
tctgtaccatgggatgtgatactca

SEQ ID NO: 3481051 - DNA, 25 bp, Homo sapien
tgcccctcaggctaggtgacctaag

SEQ ID NO: 3481052 - DNA, 25 bp, Homo sapien
tatttgagacttcggacttcagggt

SEQ ID NO: 3481053 - DNA, 25 bp, Homo sapien
tggcccacgttgaagccagctgact

SEQ ID NO: 3481054 - DNA, 25 bp, Homo sapien
tggaaaaatgtaagagtggtaactg

SEQ ID NO: 3481055 - DNA, 25 bp, Homo sapien
catgagccctctctgagctgataac

SEQ ID NO: 3481056 - DNA, 25 bp, Homo sapien
gtaagagtggtaactggatcagctc

SEQ ID NO: 3481057 - DNA, 25 bp, Homo sapien
ctctctttcatgagccctctctgag

SEQ ID NO: 3481058 - DNA, 25 bp, Homo sapien
accctgcagttcccatgaagctgtt

SEQ ID NO: 3481059 - DNA, 25 bp, Homo sapien
tatgaattggtcttgcaggtgttca

SEQ ID NO: 3481060 - DNA, 25 bp, Homo sapien
tgttgccaaagtccatgaatgcttg

SEQ ID NO: 3481061 - DNA, 25 bp, Homo sapien
ctaatgaatagtcgaaaaacacaga

SEQ ID NO: 3481062 - DNA, 25 bp, Homo sapien
gtcacaatcaatgcagtgcccacca

SEQ ID NO: 3481063 - DNA, 25 bp, Homo sapien
tcctgttatcctgctgtaaatcagt

SEQ ID NO: 3481064 - DNA, 25 bp, Homo sapien
gagagcatgccacacgtacccacgg

SEQ ID NO: 3481065 - DNA, 25 bp, Homo sapien
cagtgtcactcgctggagagcatgc

SEQ ID NO: 3481066 - DNA, 25 bp, Homo sapien
gatgttccggcattgtctttccgag

SEQ ID NO: 3481067 - DNA, 25 bp, Homo sapien
tagtctgtgcaatggtcctcgcagg

SEQ ID NO: 3481068 - DNA, 25 bp, Homo sapien
agacttagctgccacgatgttccgg

SEQ ID NO: 3481069 - DNA, 25 bp, Homo sapien
gagtaaacctctcattctgcgcatt

SEQ ID NO: 3481070 - DNA, 25 bp, Homo sapien
cacgacctatacttaagcagttagt

SEQ ID NO: 3481071 - DNA, 25 bp, Homo sapien
gatcagcttgggcacgacctatact

SEQ ID NO: 3481072 - DNA, 25 bp, Homo sapien
gtttctacatgaccatcttcatgac

SEQ ID NO: 3481073 - DNA, 25 bp, Homo sapien
aagacctctagtttctacatgacca

SEQ ID NO: 3481074 - DNA, 25 bp, Homo sapien
taatagcctgggatccattaccagc

SEQ ID NO: 3481075 - DNA, 25 bp, Homo sapien
gccctgctgggtagacctggttgtt

SEQ ID NO: 3481076 - DNA, 25 bp, Homo sapien
ttttcatgctttcccaatttgaaca

SEQ ID NO: 3481077 - DNA, 25 bp, Homo sapien
ccattaccagctgaattttcatgct

SEQ ID NO: 3481078 - DNA, 25 bp, Homo sapien
ttcccaggtgcttaatgatcccctg

SEQ ID NO: 3481079 - DNA, 25 bp, Homo sapien
cttcccaggtgcttaatgatcccct

SEQ ID NO: 3481080 - DNA, 25 bp, Homo sapien
tcccaggtgcttaatgatcccctgg

SEQ ID NO: 3481081 - DNA, 25 bp, Homo sapien
tcttcccaggtgcttaatgatcccc

SEQ ID NO: 3481082 - DNA, 25 bp, Homo sapien
ttgttccacataaggtttccatcag

SEQ ID NO: 3481083 - DNA, 25 bp, Homo sapien
gagatgtttatccagcggatggaga

SEQ ID NO: 3481084 - DNA, 25 bp, Homo sapien
tccagcggatggagatactgagatg

SEQ ID NO: 3481085 - DNA, 25 bp, Homo sapien
cacataaggtttccatcagatacag

SEQ ID NO: 3481086 - DNA, 25 bp, Homo sapien
tgcgctggcgtcaccaaagtgctgc

SEQ ID NO: 3481087 - DNA, 25 bp, Homo sapien
gagggtgccagtttaaagcaggtct

SEQ ID NO: 3481088 - DNA, 25 bp, Homo sapien
caggacctgatagggtttcagctgc

SEQ ID NO: 3481089 - DNA, 25 bp, Homo sapien
tctgcacggccctgttcctaaatca

SEQ ID NO: 3481090 - DNA, 25 bp, Homo sapien
gagaactgtggttttgccggtgcta

SEQ ID NO: 3481091 - DNA, 25 bp, Homo sapien
tcctgtgacgtgactagagcttcgg

SEQ ID NO: 3481092 - DNA, 25 bp, Homo sapien
tgtcaaggcctgttataaaagcacc

SEQ ID NO: 3481093 - DNA, 25 bp, Homo sapien
gccggtgctaggctaagctgaaaat

SEQ ID NO: 3481094 - DNA, 25 bp, Homo sapien
agtctctggagcatggatttagctg

SEQ ID NO: 3481095 - DNA, 25 bp, Homo sapien
ggagcatggatttagctgggtttct

SEQ ID NO: 3481096 - DNA, 25 bp, Homo sapien
tcagctggcagtgattgggtgacct

SEQ ID NO: 3481097 - DNA, 25 bp, Homo sapien
tgtttgtcattgtcaggggggcttc

SEQ ID NO: 3481098 - DNA, 25 bp, Homo sapien
ggtacaaggctcttttgtacattct

SEQ ID NO: 3481099 - DNA, 25 bp, Homo sapien
aggtacaaggctcttttgtacattc

SEQ ID NO: 3481100 - DNA, 25 bp, Homo sapien
gcttgagtctgaagacacatttgga

SEQ ID NO: 3481101 - DNA, 25 bp, Homo sapien
cagcagaatgacaacccttgtaggt

SEQ ID NO: 3481102 - DNA, 25 bp, Homo sapien
aatcgtcccttatccaccaaaatga

SEQ ID NO: 3481103 - DNA, 25 bp, Homo sapien
gtctgtcgggaaacctgcaagaaac

SEQ ID NO: 3481104 - DNA, 25 bp, Homo sapien
ttcccccctactttcccatcagtca

SEQ ID NO: 3481105 - DNA, 25 bp, Homo sapien
gacaaacctagctccccattgcaaa

SEQ ID NO: 3481106 - DNA, 25 bp, Homo sapien
tctttgttcgcctgctacttggcac

SEQ ID NO: 3481107 - DNA, 25 bp, Homo sapien
caagagtccttaggcctgtaaccct

SEQ ID NO: 3481108 - DNA, 25 bp, Homo sapien
ttggcacctccttatactcaagagt

SEQ ID NO: 3481109 - DNA, 25 bp, Homo sapien
gaccagtgtgtttaggagccccaaa

SEQ ID NO: 3481110 - DNA, 25 bp, Homo sapien
gaaccaggccaacctgttctgggaa

SEQ ID NO: 3481111 - DNA, 25 bp, Homo sapien
caaaggcaagggtagcgccaggata

SEQ ID NO: 3481112 - DNA, 25 bp, Homo sapien
tgccctgggacctcggagtgaagat

SEQ ID NO: 3481113 - DNA, 25 bp, Homo sapien
gaataggtgcgatccttccttccaa

SEQ ID NO: 3481114 - DNA, 25 bp, Homo sapien
ttcttctgggactccgtgcttggga

SEQ ID NO: 3481115 - DNA, 25 bp, Homo sapien
ggaaagttgacatttggtatgcaaa

SEQ ID NO: 3481116 - DNA, 25 bp, Homo sapien
tgcaaagtgattcagacctacctga

SEQ ID NO: 3481117 - DNA, 25 bp, Homo sapien
ggtcttaacacgcaggaagcttcaa

SEQ ID NO: 3481118 - DNA, 25 bp, Homo sapien
gaggacacagaggaaagtagagata

SEQ ID NO: 3481119 - DNA, 25 bp, Homo sapien
caaacagtcgatacagatagggcct

SEQ ID NO: 3481120 - DNA, 25 bp, Homo sapien
agtgatgagaaccagaaagggcaga

SEQ ID NO: 3481121 - DNA, 25 bp, Homo sapien
tgtttcccgaacactggcttttgat

SEQ ID NO: 3481122 - DNA, 25 bp, Homo sapien
caagagtagtcggtctcagggtgac

SEQ ID NO: 3481123 - DNA, 25 bp, Homo sapien
gattcatgacgcaacctcccttttg

SEQ ID NO: 3481124 - DNA, 25 bp, Homo sapien
gccagatcacataaatcaggcagct

SEQ ID NO: 3481125 - DNA, 25 bp, Homo sapien
tttacttcatttccgctggagccca

SEQ ID NO: 3481126 - DNA, 25 bp, Homo sapien
acttcatttccgctggagcccacaa

SEQ ID NO: 3481127 - DNA, 25 bp, Homo sapien
tcatttccgctggagcccacaaaag

SEQ ID NO: 3481128 - DNA, 25 bp, Homo sapien
gggctttacttcatttccgctggag

SEQ ID NO: 3481129 - DNA, 25 bp, Homo sapien
agcacaagccgtaggtcccaaaaca

SEQ ID NO: 3481130 - DNA, 25 bp, Homo sapien
gggaaccactaaccattcaccagga

SEQ ID NO: 3481131 - DNA, 25 bp, Homo sapien
tcagcaattctaccccagtcatcaa

SEQ ID NO: 3481132 - DNA, 25 bp, Homo sapien
tctggagcatgaaaagaacaagcac

SEQ ID NO: 3481133 - DNA, 25 bp, Homo sapien
gatttaatttaacatctgggcttgc

SEQ ID NO: 3481134 - DNA, 25 bp, Homo sapien
atttaatttaacatctgggcttgca

SEQ ID NO: 3481135 - DNA, 25 bp, Homo sapien
gcacggaaaggctcctgtccgatcc

SEQ ID NO: 3481136 - DNA, 25 bp, Homo sapien
gctccacagagcacggaaaggctcc

SEQ ID NO: 3481137 - DNA, 25 bp, Homo sapien
agagcacggaaaggctcctgtccga

SEQ ID NO: 3481138 - DNA, 25 bp, Homo sapien
cctgtccgatcccagtgtctgggct

SEQ ID NO: 3481139 - DNA, 25 bp, Homo sapien
cagcatcaaactgccatccgacctc

SEQ ID NO: 3481140 - DNA, 25 bp, Homo sapien
tcagcatcaaactgccatccgacct

SEQ ID NO: 3481141 - DNA, 25 bp, Homo sapien
gcatcaaactgccatccgacctcat

SEQ ID NO: 3481142 - DNA, 25 bp, Homo sapien
ttcagcatcaaactgccatccgacc

SEQ ID NO: 3481143 - DNA, 25 bp, Homo sapien
tcccctgacggcctgcagagccaca

SEQ ID NO: 3481144 - DNA, 25 bp, Homo sapien
gacggcctgcagagccacaaacaga

SEQ ID NO: 3481145 - DNA, 25 bp, Homo sapien
ctgcagggagaaaggagtggggtcc

SEQ ID NO: 3481146 - DNA, 25 bp, Homo sapien
tggggtcccctgacggcctgcagag

SEQ ID NO: 3481147 - DNA, 25 bp, Homo sapien
tggaacgagtacaaaggagtagcaa

SEQ ID NO: 3481148 - DNA, 25 bp, Homo sapien
tcagactgccaggtggaacgagtac

SEQ ID NO: 3481149 - DNA, 25 bp, Homo sapien
agtacaaaggagtagcaagtggcag

SEQ ID NO: 3481150 - DNA, 25 bp, Homo sapien
ccaggtggaacgagtacaaaggagt

SEQ ID NO: 3481151 - DNA, 25 bp, Homo sapien
caccaagatacaacgtacatgccag

SEQ ID NO: 3481152 - DNA, 25 bp, Homo sapien
gatacaacgtacatgccagtccctg

SEQ ID NO: 3481153 - DNA, 25 bp, Homo sapien
tctggcaccaagatacaacgtacat

SEQ ID NO: 3481154 - DNA, 25 bp, Homo sapien
catgctctggcaccaagatacaacg

SEQ ID NO: 3481155 - DNA, 25 bp, Homo sapien
taaccatccacttccgacatcccct

SEQ ID NO: 3481156 - DNA, 25 bp, Homo sapien
caggtaaaaggcgtctgtagccaaa

SEQ ID NO: 3481157 - DNA, 25 bp, Homo sapien
tactctgctcgtcagattcagtctc

SEQ ID NO: 3481158 - DNA, 25 bp, Homo sapien
aaggcgtctgtagccaaaacactcc

SEQ ID NO: 3481159 - DNA, 25 bp, Homo sapien
gatccattttctaaagcccctgctt

SEQ ID NO: 3481160 - DNA, 25 bp, Homo sapien
gaagatccattttctaaagcccctg

SEQ ID NO: 3481161 - DNA, 25 bp, Homo sapien
ttctgaagatccattttctaaagcc

SEQ ID NO: 3481162 - DNA, 25 bp, Homo sapien
tttctaaagcccctgcttttctcat

SEQ ID NO: 3481163 - DNA, 25 bp, Homo sapien
aggaaaaagctgatttctcctctca

SEQ ID NO: 3481164 - DNA, 25 bp, Homo sapien
ctgatcagaaaagaataccaagaag

SEQ ID NO: 3481165 - DNA, 25 bp, Homo sapien
ttccaggaaaaagctgatttctcct

SEQ ID NO: 3481166 - DNA, 25 bp, Homo sapien
agaataccaagaagtccttttccag

SEQ ID NO: 3481167 - DNA, 25 bp, Homo sapien
gtgggctggaagattccattagcga

SEQ ID NO: 3481168 - DNA, 25 bp, Homo sapien
tagcgaaggaatttacaagataagg

SEQ ID NO: 3481169 - DNA, 25 bp, Homo sapien
ctggaagattccattagcgaaggaa

SEQ ID NO: 3481170 - DNA, 25 bp, Homo sapien
ttccattagcgaaggaatttacaag

SEQ ID NO: 3481171 - DNA, 25 bp, Homo sapien
gaagcttttacagagaaggtgccat

SEQ ID NO: 3481172 - DNA, 25 bp, Homo sapien
ccattgaagtctgcatctgaggatg

SEQ ID NO: 3481173 - DNA, 25 bp, Homo sapien
gccattgaagtctgcatctgaggat

SEQ ID NO: 3481174 - DNA, 25 bp, Homo sapien
gtcaagatgttttctgagaagtctc

SEQ ID NO: 3481175 - DNA, 25 bp, Homo sapien
atgttttctgagaagtctccaaagt

SEQ ID NO: 3481176 - DNA, 25 bp, Homo sapien
ctccaggacagaagtcaagatgttt

SEQ ID NO: 3481177 - DNA, 25 bp, Homo sapien
acagaagtcaagatgttttctgaga

SEQ ID NO: 3481178 - DNA, 25 bp, Homo sapien
caagggaaatcttggaactgcctga

SEQ ID NO: 3481179 - DNA, 25 bp, Homo sapien
aactgcctgaccgttgttcagggcc

SEQ ID NO: 3481180 - DNA, 25 bp, Homo sapien
tttgggcccatggacaacgcataca

SEQ ID NO: 3481181 - DNA, 25 bp, Homo sapien
gacagtgtcattgagtttgggccca

SEQ ID NO: 3481182 - DNA, 25 bp, Homo sapien
tgtgaaggccaggcaggtcatgtgg

SEQ ID NO: 3481183 - DNA, 25 bp, Homo sapien
gtgtgaaggccaggcaggtcatgtg

SEQ ID NO: 3481184 - DNA, 25 bp, Homo sapien
ggtgtgaaggccaggcaggtcatgt

SEQ ID NO: 3481185 - DNA, 25 bp, Homo sapien
tggctgatggctttcattggaacac

SEQ ID NO: 3481186 - DNA, 25 bp, Homo sapien
tgatggctttcattggaacactgac

SEQ ID NO: 3481187 - DNA, 25 bp, Homo sapien
gatgaaatgcattttggctgatggc

SEQ ID NO: 3481188 - DNA, 25 bp, Homo sapien
tttggctgatggctttcattggaac

SEQ ID NO: 3481189 - DNA, 25 bp, Homo sapien
tcatgggggagtcagcttgctcttc

SEQ ID NO: 3481190 - DNA, 25 bp, Homo sapien
ccaatgaaggcttttcctcctcatc

SEQ ID NO: 3481191 - DNA, 25 bp, Homo sapien
tcttccaatgaaggcttttcctcct

SEQ ID NO: 3481192 - DNA, 25 bp, Homo sapien
ggagtcagcttgctcttccaatgaa

SEQ ID NO: 3481193 - DNA, 25 bp, Homo sapien
gctttgattggctcttcagtcctac

SEQ ID NO: 3481194 - DNA, 25 bp, Homo sapien
tgctttgattggctcttcagtccta

SEQ ID NO: 3481195 - DNA, 25 bp, Homo sapien
tctgctttgattggctcttcagtcc

SEQ ID NO: 3481196 - DNA, 25 bp, Homo sapien
tttgattggctcttcagtcctacag

SEQ ID NO: 3481197 - DNA, 25 bp, Homo sapien
catggtctgggctcaaatcaaagag

SEQ ID NO: 3481198 - DNA, 25 bp, Homo sapien
tcaaatcaaagagaaccgagtgtgg

SEQ ID NO: 3481199 - DNA, 25 bp, Homo sapien
tgcattctggacatggtctgggctc

SEQ ID NO: 3481200 - DNA, 25 bp, Homo sapien
ccgagtgtggataacctttgtgaca

SEQ ID NO: 3481201 - DNA, 25 bp, Homo sapien
tgcagccatgattctttctcaacaa

SEQ ID NO: 3481202 - DNA, 25 bp, Homo sapien
aacaattctcgcaagcaccttcctg

SEQ ID NO: 3481203 - DNA, 25 bp, Homo sapien
ttgcagccatgattctttctcaaca

SEQ ID NO: 3481204 - DNA, 25 bp, Homo sapien
ttctcaacaattctcgcaagcacct

SEQ ID NO: 3481205 - DNA, 25 bp, Homo sapien
agtcatctgcatacaccggttgtgc

SEQ ID NO: 3481206 - DNA, 25 bp, Homo sapien
ccggttgtgcagttagagaaaagtc

SEQ ID NO: 3481207 - DNA, 25 bp, Homo sapien
caagcgtcaggagggttgtcagcca

SEQ ID NO: 3481208 - DNA, 25 bp, Homo sapien
ccacatggcctaggcagattgtcat

SEQ ID NO: 3481209 - DNA, 25 bp, Homo sapien
tttcacagaactcaagaagaacttg

SEQ ID NO: 3481210 - DNA, 25 bp, Homo sapien
gaactcaagaagaacttgtcctgta

SEQ ID NO: 3481211 - DNA, 25 bp, Homo sapien
cacagaactcaagaagaacttgtcc

SEQ ID NO: 3481212 - DNA, 25 bp, Homo sapien
actcaagaagaacttgtcctgtaag

SEQ ID NO: 3481213 - DNA, 25 bp, Homo sapien
ttactattgtttggcactatcaagg

SEQ ID NO: 3481214 - DNA, 25 bp, Homo sapien
tgtgtaagttactattgtttggcac

SEQ ID NO: 3481215 - DNA, 25 bp, Homo sapien
taagttactattgtttggcactatc

SEQ ID NO: 3481216 - DNA, 25 bp, Homo sapien
ctggaagccactgtgtaagttacta

SEQ ID NO: 3481217 - DNA, 25 bp, Homo sapien
gtttcatggacttaaggactttcag

SEQ ID NO: 3481218 - DNA, 25 bp, Homo sapien
catgggcatttgttccccaaacaca

SEQ ID NO: 3481219 - DNA, 25 bp, Homo sapien
atgataatcttctcctgagtgtagt

SEQ ID NO: 3481220 - DNA, 25 bp, Homo sapien
cacaatgcacctctcctttacatga

SEQ ID NO: 3481221 - DNA, 25 bp, Homo sapien
cgaagttcccggacggatgtagaag

SEQ ID NO: 3481222 - DNA, 25 bp, Homo sapien
agcatagtagcagtcgaagttcccg

SEQ ID NO: 3481223 - DNA, 25 bp, Homo sapien
tagcagtcgaagttcccggacggat

SEQ ID NO: 3481224 - DNA, 25 bp, Homo sapien
tgtagcatagtagcagtcgaagttc

SEQ ID NO: 3481225 - DNA, 25 bp, Homo sapien
tctctccctaacataaaaactacag

SEQ ID NO: 3481226 - DNA, 25 bp, Homo sapien
tgcagttctgttaatccgagataca

SEQ ID NO: 3481227 - DNA, 25 bp, Homo sapien
taatccgagatacaatgctcctttc

SEQ ID NO: 3481228 - DNA, 25 bp, Homo sapien
agctgggctgtcattaatgaaatcc

SEQ ID NO: 3481229 - DNA, 25 bp, Homo sapien
ttaactgccctgctggtgtggccaa

SEQ ID NO: 3481230 - DNA, 25 bp, Homo sapien
caaatctggggcgtcctgggtccag

SEQ ID NO: 3481231 - DNA, 25 bp, Homo sapien
cctgcaggcctctcagtatgtgtct

SEQ ID NO: 3481232 - DNA, 25 bp, Homo sapien
ccctgctggtgtggccaaatctggg

SEQ ID NO: 3481233 - DNA, 25 bp, Homo sapien
tgtggtccacgtgcaattacatgct

SEQ ID NO: 3481234 - DNA, 25 bp, Homo sapien
gtccacccaggtgccttcgagattc

SEQ ID NO: 3481235 - DNA, 25 bp, Homo sapien
aggtgccttcgagattctgctggaa

SEQ ID NO: 3481236 - DNA, 25 bp, Homo sapien
ggtccacgtgcaattacatgcttca

SEQ ID NO: 3481237 - DNA, 25 bp, Homo sapien
ctttgcaaatgctgtcctcactcac

SEQ ID NO: 3481238 - DNA, 25 bp, Homo sapien
tgtttcggttcctttgcaaatgctg

SEQ ID NO: 3481239 - DNA, 25 bp, Homo sapien
ctgtttcggttcctttgcaaatgct

SEQ ID NO: 3481240 - DNA, 25 bp, Homo sapien
ttcctttgcaaatgctgtcctcact

SEQ ID NO: 3481241 - DNA, 25 bp, Homo sapien
gaaagctgaatgtcatggccactgc

SEQ ID NO: 3481242 - DNA, 25 bp, Homo sapien
cctgtagtgcaatctgcccaggcag

SEQ ID NO: 3481243 - DNA, 25 bp, Homo sapien
ggcagcagccggacattgctctttg

SEQ ID NO: 3481244 - DNA, 25 bp, Homo sapien
tcagggtcctagtaaagtcaaagca

SEQ ID NO: 3481245 - DNA, 25 bp, Homo sapien
gccggcttggctatgttctctgctc

SEQ ID NO: 3481246 - DNA, 25 bp, Homo sapien
gtcaaccggcagctccaagaaacaa

SEQ ID NO: 3481247 - DNA, 25 bp, Homo sapien
actggcttccgttggcaaccttact

SEQ ID NO: 3481248 - DNA, 25 bp, Homo sapien
caaaagatgacaggttgtaagttcc

SEQ ID NO: 3481249 - DNA, 25 bp, Homo sapien
cacaatgacgctggctttggacgtt

SEQ ID NO: 3481250 - DNA, 25 bp, Homo sapien
tttgcaggatgctaaggatagaccc

SEQ ID NO: 3481251 - DNA, 25 bp, Homo sapien
ggatagaccctgtagcacaatgacg

SEQ ID NO: 3481252 - DNA, 25 bp, Homo sapien
gacgttgattaggtcagcctccgac

SEQ ID NO: 3481253 - DNA, 25 bp, Homo sapien
tcagctccaagactgtcgtcagcca

SEQ ID NO: 3481254 - DNA, 25 bp, Homo sapien
caagactgtcgtcagccattttttc

SEQ ID NO: 3481255 - DNA, 25 bp, Homo sapien
ttaattcagctccaagactgtcgtc

SEQ ID NO: 3481256 - DNA, 25 bp, Homo sapien
gctccaagactgtcgtcagccattt

SEQ ID NO: 3481257 - DNA, 25 bp, Homo sapien
ctgtcccaagatccccttgtgtaca

SEQ ID NO: 3481258 - DNA, 25 bp, Homo sapien
ccccttgtgtacacagagctagcca

SEQ ID NO: 3481259 - DNA, 25 bp, Homo sapien
ttgtgtacacagagctagccactcc

SEQ ID NO: 3481260 - DNA, 25 bp, Homo sapien
gtgtacacagagctagccactccat

SEQ ID NO: 3481261 - DNA, 25 bp, Homo sapien
tgaaaaaactgcctcctattgatgg

SEQ ID NO: 3481262 - DNA, 25 bp, Homo sapien
aacaatgctgcaatagatattcagg

SEQ ID NO: 3481263 - DNA, 25 bp, Homo sapien
tatatcattttgcatgcgtcctagg

SEQ ID NO: 3481264 - DNA, 25 bp, Homo sapien
cccagaagtgaaatagctgggtcaa

SEQ ID NO: 3481265 - DNA, 25 bp, Homo sapien
acaaatcagcaacacgacatttgac

SEQ ID NO: 3481266 - DNA, 25 bp, Homo sapien
acgcagacaaacaaccacaaccaca

SEQ ID NO: 3481267 - DNA, 25 bp, Homo sapien
ggcacgcagacaaacaaccacaacc

SEQ ID NO: 3481268 - DNA, 25 bp, Homo sapien
gcaacacgacatttgaccaaaatca

SEQ ID NO: 3481269 - DNA, 25 bp, Homo sapien
gctatgtacgaatcaggactcctct

SEQ ID NO: 3481270 - DNA, 25 bp, Homo sapien
tctgaatgtatgagactagatgcca

SEQ ID NO: 3481271 - DNA, 25 bp, Homo sapien
caatctagctgtactttctatggcc

SEQ ID NO: 3481272 - DNA, 25 bp, Homo sapien
agagcttcattttctaccaccgaaa

SEQ ID NO: 3481273 - DNA, 25 bp, Homo sapien
ttgaagacagcactatagcaagttg

SEQ ID NO: 3481274 - DNA, 25 bp, Homo sapien
gagctccaaagagaggcatttaact

SEQ ID NO: 3481275 - DNA, 25 bp, Homo sapien
tgccatcagctctactttgaagaca

SEQ ID NO: 3481276 - DNA, 25 bp, Homo sapien
catttaactcttcgtctgccatcag

SEQ ID NO: 3481277 - DNA, 25 bp, Homo sapien
gcgtgttatctttgcgcagggtctg

SEQ ID NO: 3481278 - DNA, 25 bp, Homo sapien
tgttatctttgcgcagggtctgtgc

SEQ ID NO: 3481279 - DNA, 25 bp, Homo sapien
tgcgtgttatctttgcgcagggtct

SEQ ID NO: 3481280 - DNA, 25 bp, Homo sapien
cgtgttatctttgcgcagggtctgt

SEQ ID NO: 3481281 - DNA, 25 bp, Homo sapien
tcttttggaggtctctgaatactca

SEQ ID NO: 3481282 - DNA, 25 bp, Homo sapien
ttttggaggtctctgaatactcagc

SEQ ID NO: 3481283 - DNA, 25 bp, Homo sapien
ttcttttggaggtctctgaatactc

SEQ ID NO: 3481284 - DNA, 25 bp, Homo sapien
cttttggaggtctctgaatactcag

SEQ ID NO: 3481285 - DNA, 25 bp, Homo sapien
ctagagaaacaggaagcattgcata

SEQ ID NO: 3481286 - DNA, 25 bp, Homo sapien
gagcttggctctcggtctggtcgca

SEQ ID NO: 3481287 - DNA, 25 bp, Homo sapien
gacaaataatctgttgcaactttgc

SEQ ID NO: 3481288 - DNA, 25 bp, Homo sapien
ttcccgtgcaccattttgttctagg

SEQ ID NO: 3481289 - DNA, 25 bp, Homo sapien
catagcttggctctgttcccgtgca

SEQ ID NO: 3481290 - DNA, 25 bp, Homo sapien
agcctccagtgcatctccacaggaa

SEQ ID NO: 3481291 - DNA, 25 bp, Homo sapien
cacaggaaggcgtagcatccaaatt

SEQ ID NO: 3481292 - DNA, 25 bp, Homo sapien
gggaaatcgacgctttcccatctca

SEQ ID NO: 3481293 - DNA, 25 bp, Homo sapien
ccaaattgatgctcataatgatttc

SEQ ID NO: 3481294 - DNA, 25 bp, Homo sapien
catgcagagtatccttgaattattt

SEQ ID NO: 3481295 - DNA, 25 bp, Homo sapien
tgcagagtatccttgaattatttga

SEQ ID NO: 3481296 - DNA, 25 bp, Homo sapien
atgcagagtatccttgaattatttg

SEQ ID NO: 3481297 - DNA, 25 bp, Homo sapien
gcagagtatccttgaattatttgac

SEQ ID NO: 3481298 - DNA, 25 bp, Homo sapien
aggattggcatgaaagaaggatcca

SEQ ID NO: 3481299 - DNA, 25 bp, Homo sapien
cttgaggattggcatgaaagaagga

SEQ ID NO: 3481300 - DNA, 25 bp, Homo sapien
aaacttgaggattggcatgaaagaa

SEQ ID NO: 3481301 - DNA, 25 bp, Homo sapien
tgaggattggcatgaaagaaggatc

SEQ ID NO: 3481302 - DNA, 25 bp, Homo sapien
cctaggttggatgagagttcggtca

SEQ ID NO: 3481303 - DNA, 25 bp, Homo sapien
gcctaaatcactgagtttgacacag

SEQ ID NO: 3481304 - DNA, 25 bp, Homo sapien
aatttggcaagcagctcacccacat

SEQ ID NO: 3481305 - DNA, 25 bp, Homo sapien
tctgtggtgaagtctccaaaatctt

SEQ ID NO: 3481306 - DNA, 25 bp, Homo sapien
tttggtataaaacaatgggcacatt

SEQ ID NO: 3481307 - DNA, 25 bp, Homo sapien
ctagtaatttggtataaaacaatgg

SEQ ID NO: 3481308 - DNA, 25 bp, Homo sapien
taatttggtataaaacaatgggcac

SEQ ID NO: 3481309 - DNA, 25 bp, Homo sapien
ggcacatttttcagtaattttagta

SEQ ID NO: 3481310 - DNA, 25 bp, Homo sapien
aggaggtggctctggattcctcaaa

SEQ ID NO: 3481311 - DNA, 25 bp, Homo sapien
atatttggatgagtgccttgatgac

SEQ ID NO: 3481312 - DNA, 25 bp, Homo sapien
tatttggatgagtgccttgatgaca

SEQ ID NO: 3481313 - DNA, 25 bp, Homo sapien
aatatttggatgagtgccttgatga

SEQ ID NO: 3481314 - DNA, 25 bp, Homo sapien
cttcattataagctccctctggatc

SEQ ID NO: 3481315 - DNA, 25 bp, Homo sapien
ttcattataagctccctctggatcc

SEQ ID NO: 3481316 - DNA, 25 bp, Homo sapien
tgcactagtgtttttattaggctcc

SEQ ID NO: 3481317 - DNA, 25 bp, Homo sapien
tacttctcggtgagtagcaaactac

SEQ ID NO: 3481318 - DNA, 25 bp, Homo sapien
taactgtatatttgcccatgattgc

SEQ ID NO: 3481319 - DNA, 25 bp, Homo sapien
gaacttcctaatcgcataacatgtg

SEQ ID NO: 3481320 - DNA, 25 bp, Homo sapien
aagatggacagcatcggtaagatta

SEQ ID NO: 3481321 - DNA, 25 bp, Homo sapien
cagcagtgaatcaggaagatggaca

SEQ ID NO: 3481322 - DNA, 25 bp, Homo sapien
ctcagcagtgaatcaggaagatgga

SEQ ID NO: 3481323 - DNA, 25 bp, Homo sapien
taagattatactgagcggaaggcat

SEQ ID NO: 3481324 - DNA, 25 bp, Homo sapien
aaactgttgcacgttaagcatttgg

SEQ ID NO: 3481325 - DNA, 25 bp, Homo sapien
tgcacgttaagcatttggtctctgg

SEQ ID NO: 3481326 - DNA, 25 bp, Homo sapien
gataaaactgttgcacgttaagcat

SEQ ID NO: 3481327 - DNA, 25 bp, Homo sapien
atttggtctctggatagttctggga

SEQ ID NO: 3481328 - DNA, 25 bp, Homo sapien
atcaccttcccggaagttgctctgt

SEQ ID NO: 3481329 - DNA, 25 bp, Homo sapien
atggccctagcctgctcggacgccc

SEQ ID NO: 3481330 - DNA, 25 bp, Homo sapien
gagggaggacgggagtgcatgctct

SEQ ID NO: 3481331 - DNA, 25 bp, Homo sapien
tctgtggcgaggctcgctggaccca

SEQ ID NO: 3481332 - DNA, 25 bp, Homo sapien
cagaggtttgagacacaattctttc

SEQ ID NO: 3481333 - DNA, 25 bp, Homo sapien
gaaagctaaaactgagcaaatctca

SEQ ID NO: 3481334 - DNA, 25 bp, Homo sapien
gactcaaaaatacttcagccacaga

SEQ ID NO: 3481335 - DNA, 25 bp, Homo sapien
aatgattaataatatggccagctga

SEQ ID NO: 3481336 - DNA, 25 bp, Homo sapien
aatagctagcaatgaagtccagaag

SEQ ID NO: 3481337 - DNA, 25 bp, Homo sapien
ggaaacagtctatctgggcagtaac

SEQ ID NO: 3481338 - DNA, 25 bp, Homo sapien
gaagttgtcaatggttcatccccag

SEQ ID NO: 3481339 - DNA, 25 bp, Homo sapien
gggccctccagttcactatcagtag

SEQ ID NO: 3481340 - DNA, 25 bp, Homo sapien
tcctaagcagttatgtacccacagc

SEQ ID NO: 3481341 - DNA, 25 bp, Homo sapien
ccagagccattagagtggtgtctca

SEQ ID NO: 3481342 - DNA, 25 bp, Homo sapien
tccctgttggataaacctgaagctt

SEQ ID NO: 3481343 - DNA, 25 bp, Homo sapien
tctagtgagacttagcatggtcccc

SEQ ID NO: 3481344 - DNA, 25 bp, Homo sapien
caaggtctactgatggccccactgg

SEQ ID NO: 3481345 - DNA, 25 bp, Homo sapien
tgtgcactaacatcaacttcccttt

SEQ ID NO: 3481346 - DNA, 25 bp, Homo sapien
acttcccttttaacgtcttgacatg

SEQ ID NO: 3481347 - DNA, 25 bp, Homo sapien
acatgatgtccaaggtctactgatg

SEQ ID NO: 3481348 - DNA, 25 bp, Homo sapien
ggaaacagctaactatagaggcatc

SEQ ID NO: 3481349 - DNA, 25 bp, Homo sapien
gcctcaaaatatagatgtagcctcg

SEQ ID NO: 3481350 - DNA, 25 bp, Homo sapien
taaccctgactaattagccgaaaga

SEQ ID NO: 3481351 - DNA, 25 bp, Homo sapien
aatatcatgggcacagaaggaagag

SEQ ID NO: 3481352 - DNA, 25 bp, Homo sapien
gagagtgcaaccgaaacaagcaggg

SEQ ID NO: 3481353 - DNA, 25 bp, Homo sapien
tcagtcaagggcaggtttctcaaca

SEQ ID NO: 3481354 - DNA, 25 bp, Homo sapien
tagcccagacgcatcaattagaggg

SEQ ID NO: 3481355 - DNA, 25 bp, Homo sapien
tttaaaagtgcaaatccagcttggc

SEQ ID NO: 3481356 - DNA, 25 bp, Homo sapien
gctgcgagtcgtgcttttgcatcct

SEQ ID NO: 3481357 - DNA, 25 bp, Homo sapien
ggagctgcgagtcgtgcttttgcat

SEQ ID NO: 3481358 - DNA, 25 bp, Homo sapien
ctcttgggagctgcgagtcgtgctt

SEQ ID NO: 3481359 - DNA, 25 bp, Homo sapien
gagtcgtgcttttgcatcctggaaa

SEQ ID NO: 3481360 - DNA, 25 bp, Homo sapien
cgaagcctccgtttgcaggactggc

SEQ ID NO: 3481361 - DNA, 25 bp, Homo sapien
gatgcagacgaagcctccgtttgca

SEQ ID NO: 3481362 - DNA, 25 bp, Homo sapien
tgctcgctcttggtgatttggcctt

SEQ ID NO: 3481363 - DNA, 25 bp, Homo sapien
cagacgaagcctccgtttgcaggac

SEQ ID NO: 3481364 - DNA, 25 bp, Homo sapien
catactgggcttcaggtcagaagcc

SEQ ID NO: 3481365 - DNA, 25 bp, Homo sapien
tcccaaactcttaaaaggtgctcat

SEQ ID NO: 3481366 - DNA, 25 bp, Homo sapien
cactggcctccaatcacagcataag

SEQ ID NO: 3481367 - DNA, 25 bp, Homo sapien
agcctttgtagttctgagctcagag

SEQ ID NO: 3481368 - DNA, 25 bp, Homo sapien
tagcagtgtttaagattccgatggg

SEQ ID NO: 3481369 - DNA, 25 bp, Homo sapien
gattgggcctttgaaaccatgccag

SEQ ID NO: 3481370 - DNA, 25 bp, Homo sapien
aatgagagtggccaaagaaacgagg

SEQ ID NO: 3481371 - DNA, 25 bp, Homo sapien
tggaaaagggagaactagcagtgtt

SEQ ID NO: 3481372 - DNA, 25 bp, Homo sapien
ttataagcaccagacaagagagctg

SEQ ID NO: 3481373 - DNA, 25 bp, Homo sapien
tgaaacgactccctcagacatcagc

SEQ ID NO: 3481374 - DNA, 25 bp, Homo sapien
ttctagtctctgttgaaacgactcc

SEQ ID NO: 3481375 - DNA, 25 bp, Homo sapien
ggatcaattttctctctcgatattc

SEQ ID NO: 3481376 - DNA, 25 bp, Homo sapien
ggccttgatgtacccttttctatat

SEQ ID NO: 3481377 - DNA, 25 bp, Homo sapien
cttgatgtacccttttctatattgt

SEQ ID NO: 3481378 - DNA, 25 bp, Homo sapien
ctgggccttgatgtacccttttcta

SEQ ID NO: 3481379 - DNA, 25 bp, Homo sapien
gggccttgatgtacccttttctata

SEQ ID NO: 3481380 - DNA, 25 bp, Homo sapien
aaacacgttcaacagccaatgacac

SEQ ID NO: 3481381 - DNA, 25 bp, Homo sapien
aatgacactaggctgcagttgaggc

SEQ ID NO: 3481382 - DNA, 25 bp, Homo sapien
agttccatagaggtttcttttagca

SEQ ID NO: 3481383 - DNA, 25 bp, Homo sapien
tgttgcttcagtgcacatgatccaa

SEQ ID NO: 3481384 - DNA, 25 bp, Homo sapien
gtagggaaaacacgtagggtgatca

SEQ ID NO: 3481385 - DNA, 25 bp, Homo sapien
tcagtagggaaaacacgtagggtga

SEQ ID NO: 3481386 - DNA, 25 bp, Homo sapien
ctcagtagggaaaacacgtagggtg

SEQ ID NO: 3481387 - DNA, 25 bp, Homo sapien
cataattaaaggatagtatatcccc

SEQ ID NO: 3481388 - DNA, 25 bp, Homo sapien
tactgatatactggaaccaatctgc

SEQ ID NO: 3481389 - DNA, 25 bp, Homo sapien
accaatctgcaaaacacatattgaa

SEQ ID NO: 3481390 - DNA, 25 bp, Homo sapien
ttattattgagtaacgaagtgctac

SEQ ID NO: 3481391 - DNA, 25 bp, Homo sapien
aattatgtgcttcgtgctccaccgc

SEQ ID NO: 3481392 - DNA, 25 bp, Homo sapien
caactgcagtatggagcacatgaga

SEQ ID NO: 3481393 - DNA, 25 bp, Homo sapien
cctggttcccgtttgtgctctttct

SEQ ID NO: 3481394 - DNA, 25 bp, Homo sapien
gggactgtgtcagattcaccacctc

SEQ ID NO: 3481395 - DNA, 25 bp, Homo sapien
ttaaaacctcggtgtttgatagcat

SEQ ID NO: 3481396 - DNA, 25 bp, Homo sapien
gcacttaaaacctcggtgtttgata

SEQ ID NO: 3481397 - DNA, 25 bp, Homo sapien
cttaaaacctcggtgtttgatagca

SEQ ID NO: 3481398 - DNA, 25 bp, Homo sapien
cagcacttaaaacctcggtgtttga

SEQ ID NO: 3481399 - DNA, 25 bp, Homo sapien
aaaacgtggcacgacaattggcacc

SEQ ID NO: 3481400 - DNA, 25 bp, Homo sapien
aaagcctctgcgtcatatccttgag

SEQ ID NO: 3481401 - DNA, 25 bp, Homo sapien
tgatatccttgtggcaatgtcccag

SEQ ID NO: 3481402 - DNA, 25 bp, Homo sapien
tggcaccaatgaattactcttggag

SEQ ID NO: 3481403 - DNA, 25 bp, Homo sapien
gtgttccatttgctcgaaagaaaca

SEQ ID NO: 3481404 - DNA, 25 bp, Homo sapien
ttgccattctcctcgctccctactg

SEQ ID NO: 3481405 - DNA, 25 bp, Homo sapien
tcagtgttccatttgctcgaaagaa

SEQ ID NO: 3481406 - DNA, 25 bp, Homo sapien
tccatttgctcgaaagaaacatgaa

SEQ ID NO: 3481407 - DNA, 25 bp, Homo sapien
gtgcatctcactaatcccactatca

SEQ ID NO: 3481408 - DNA, 25 bp, Homo sapien
tgtgcatctcactaatcccactatc

SEQ ID NO: 3481409 - DNA, 25 bp, Homo sapien
gtgtgcatctcactaatcccactat

SEQ ID NO: 3481410 - DNA, 25 bp, Homo sapien
tgcatctcactaatcccactatcat

SEQ ID NO: 3481411 - DNA, 25 bp, Homo sapien
tttgagaagggactgagcagatggc

SEQ ID NO: 3481412 - DNA, 25 bp, Homo sapien
aatttgagaagggactgagcagatg

SEQ ID NO: 3481413 - DNA, 25 bp, Homo sapien
agaagggactgagcagatggctcac

SEQ ID NO: 3481414 - DNA, 25 bp, Homo sapien
ctaatttgagaagggactgagcaga

SEQ ID NO: 3481415 - DNA, 25 bp, Homo sapien
taaatcagcaggctcgattgggtgc

SEQ ID NO: 3481416 - DNA, 25 bp, Homo sapien
gattgcaactaaatcagcaggctcg

SEQ ID NO: 3481417 - DNA, 25 bp, Homo sapien
tgggtgctcgtcactggagcttttc

SEQ ID NO: 3481418 - DNA, 25 bp, Homo sapien
atggccacccgtccaaggattgcaa

SEQ ID NO: 3481419 - DNA, 25 bp, Homo sapien
tttgcagaatgcaaagacttttccc

SEQ ID NO: 3481420 - DNA, 25 bp, Homo sapien
ccagccctttgcagaatgcaaagac

SEQ ID NO: 3481421 - DNA, 25 bp, Homo sapien
gccctttgcagaatgcaaagacttt

SEQ ID NO: 3481422 - DNA, 25 bp, Homo sapien
aatgcaaagacttttcccatccctt

SEQ ID NO: 3481423 - DNA, 25 bp, Homo sapien
ttattctttggggtcacccaagatg

SEQ ID NO: 3481424 - DNA, 25 bp, Homo sapien
tattctttggggtcacccaagatgg

SEQ ID NO: 3481425 - DNA, 25 bp, Homo sapien
gccacatggctggggttttctatac

SEQ ID NO: 3481426 - DNA, 25 bp, Homo sapien
attaagacgtagagccttttcttgg

SEQ ID NO: 3481427 - DNA, 25 bp, Homo sapien
ttttcttggtgactctaagaaacgc

SEQ ID NO: 3481428 - DNA, 25 bp, Homo sapien
ggtgactctaagaaacgcttctgta

SEQ ID NO: 3481429 - DNA, 25 bp, Homo sapien
aacattcttattaagacgtagagcc

SEQ ID NO: 3481430 - DNA, 25 bp, Homo sapien
tttctgtgcactcatcccggtcagg

SEQ ID NO: 3481431 - DNA, 25 bp, Homo sapien
gatctaggtccctttttagtggcaa

SEQ ID NO: 3481432 - DNA, 25 bp, Homo sapien
actagaggatttgcaccaactgggt

SEQ ID NO: 3481433 - DNA, 25 bp, Homo sapien
ttgggttggccaaggagacatttct

SEQ ID NO: 3481434 - DNA, 25 bp, Homo sapien
ttgtcatcgttcaatggccagctca

SEQ ID NO: 3481435 - DNA, 25 bp, Homo sapien
tcacaatttgtcatcgttcaatggc

SEQ ID NO: 3481436 - DNA, 25 bp, Homo sapien
aatttgtcatcgttcaatggccagc

SEQ ID NO: 3481437 - DNA, 25 bp, Homo sapien
caatttgtcatcgttcaatggccag

SEQ ID NO: 3481438 - DNA, 25 bp, Homo sapien
ttgctgtggttgatgaaaagcacaa

SEQ ID NO: 3481439 - DNA, 25 bp, Homo sapien
gctgtggttgatgaaaagcacaata

SEQ ID NO: 3481440 - DNA, 25 bp, Homo sapien
ccagaagaccatggtatagtttcct

SEQ ID NO: 3481441 - DNA, 25 bp, Homo sapien
atgactcttgctgtggttgatgaaa

SEQ ID NO: 3481442 - DNA, 25 bp, Homo sapien
gcacttgggtatccccaggacttgg

SEQ ID NO: 3481443 - DNA, 25 bp, Homo sapien
aaaagtcctgtctgcagttgtctta

SEQ ID NO: 3481444 - DNA, 25 bp, Homo sapien
ccaattcttcatggatgccacgtga

SEQ ID NO: 3481445 - DNA, 25 bp, Homo sapien
ggatgccacgtgatgacagtatatg

SEQ ID NO: 3481446 - DNA, 25 bp, Homo sapien
gctggtgggctcaaataaaccatag

SEQ ID NO: 3481447 - DNA, 25 bp, Homo sapien
tgggctcaaataaaccatagttctt

SEQ ID NO: 3481448 - DNA, 25 bp, Homo sapien
gatgctggtgggctcaaataaacca

SEQ ID NO: 3481449 - DNA, 25 bp, Homo sapien
tctcctactaattcccatctttaaa

SEQ ID NO: 3481450 - DNA, 25 bp, Homo sapien
catcagttctagacagcccttggcc

SEQ ID NO: 3481451 - DNA, 25 bp, Homo sapien
cactgataccaacactgagctgatc

SEQ ID NO: 3481452 - DNA, 25 bp, Homo sapien
gctgatcattatagaggagagtgac

SEQ ID NO: 3481453 - DNA, 25 bp, Homo sapien
ggagagtgacgccagtgcttttcca

SEQ ID NO: 3481454 - DNA, 25 bp, Homo sapien
tggctcggaagagcctgatggaaat

SEQ ID NO: 3481455 - DNA, 25 bp, Homo sapien
gctcggaagagcctgatggaaatgc

SEQ ID NO: 3481456 - DNA, 25 bp, Homo sapien
ctcggaagagcctgatggaaatgct

SEQ ID NO: 3481457 - DNA, 25 bp, Homo sapien
gctggctcggaagagcctgatggaa

SEQ ID NO: 3481458 - DNA, 25 bp, Homo sapien
ggaggtcattcaatcccagccatgg

SEQ ID NO: 3481459 - DNA, 25 bp, Homo sapien
tccactgggtatcctgcccattggg

SEQ ID NO: 3481460 - DNA, 25 bp, Homo sapien
aaagaggcactttcgaaatggcagg

SEQ ID NO: 3481461 - DNA, 25 bp, Homo sapien
aatggcaggcctgttagtaatggcc

SEQ ID NO: 3481462 - DNA, 25 bp, Homo sapien
tggcttttctttaccggagaattgc

SEQ ID NO: 3481463 - DNA, 25 bp, Homo sapien
agattggggcaacaagaaggtgcct

SEQ ID NO: 3481464 - DNA, 25 bp, Homo sapien
ccttcttcccccagtgatatgcttt

SEQ ID NO: 3481465 - DNA, 25 bp, Homo sapien
agaacttatgcagagattggggcaa

SEQ ID NO: 3481466 - DNA, 25 bp, Homo sapien
ttcttcccccagtgatatgctttgg

SEQ ID NO: 3481467 - DNA, 25 bp, Homo sapien
gaaagtgcacctgaagctttgaatg

SEQ ID NO: 3481468 - DNA, 25 bp, Homo sapien
gggagagaggctaatgctgagaaag

SEQ ID NO: 3481469 - DNA, 25 bp, Homo sapien
gcacctgaagctttgaatggttgcc

SEQ ID NO: 3481470 - DNA, 25 bp, Homo sapien
gtgtgcaaggagtgtcacctttctt

SEQ ID NO: 3481471 - DNA, 25 bp, Homo sapien
caagctctgaaaccatctgcgctag

SEQ ID NO: 3481472 - DNA, 25 bp, Homo sapien
gctggaactaaaggagacaggctct

SEQ ID NO: 3481473 - DNA, 25 bp, Homo sapien
aagtcatctgctcaaggaaaccctg

SEQ ID NO: 3481474 - DNA, 25 bp, Homo sapien
cattcgaggcatgtaggaatacagc

SEQ ID NO: 3481475 - DNA, 25 bp, Homo sapien
ctgacccaacatgcggactgaggag

SEQ ID NO: 3481476 - DNA, 25 bp, Homo sapien
gagcaggcttccgtgtcattgttat

SEQ ID NO: 3481477 - DNA, 25 bp, Homo sapien
tctgcaggtaaacggcacaggcttt

SEQ ID NO: 3481478 - DNA, 25 bp, Homo sapien
tagaatccctttcatggatctggcc

SEQ ID NO: 3481479 - DNA, 25 bp, Homo sapien
ctttcgattgggcgagaggccagtg

SEQ ID NO: 3481480 - DNA, 25 bp, Homo sapien
tcgattgggcgagaggccagtgaag

SEQ ID NO: 3481481 - DNA, 25 bp, Homo sapien
ttcgattgggcgagaggccagtgaa

SEQ ID NO: 3481482 - DNA, 25 bp, Homo sapien
tttcgattgggcgagaggccagtga

SEQ ID NO: 3481483 - DNA, 25 bp, Homo sapien
gaaggactacagaagtatttgggcc

SEQ ID NO: 3481484 - DNA, 25 bp, Homo sapien
ggcacacttggtactgctcggaaca

SEQ ID NO: 3481485 - DNA, 25 bp, Homo sapien
tcatgtagacacaatagaaggacta

SEQ ID NO: 3481486 - DNA, 25 bp, Homo sapien
tcattgttagatgcccactttagaa

SEQ ID NO: 3481487 - DNA, 25 bp, Homo sapien
cctgtgggctcaggccagaaacttg

SEQ ID NO: 3481488 - DNA, 25 bp, Homo sapien
ggtgagctcacctaacgcagtgacg

SEQ ID NO: 3481489 - DNA, 25 bp, Homo sapien
ttagatgccgcataagaatcccagt

SEQ ID NO: 3481490 - DNA, 25 bp, Homo sapien
gaatcccagtattgagatgtccaac

SEQ ID NO: 3481491 - DNA, 25 bp, Homo sapien
gatggcctaccttattgatgttccc

SEQ ID NO: 3481492 - DNA, 25 bp, Homo sapien
gaatggtctatcagaagccaacctg

SEQ ID NO: 3481493 - DNA, 25 bp, Homo sapien
tgttccctgccgagaaatatgctga

SEQ ID NO: 3481494 - DNA, 25 bp, Homo sapien
gattctgctgcatgctttcctcagg

SEQ ID NO: 3481495 - DNA, 25 bp, Homo sapien
ctgtgagatagagaaggactgtgga

SEQ ID NO: 3481496 - DNA, 25 bp, Homo sapien
agatagagaaggactgtggaatttc

SEQ ID NO: 3481497 - DNA, 25 bp, Homo sapien
agagaaggactgtggaatttctcat

SEQ ID NO: 3481498 - DNA, 25 bp, Homo sapien
gatagagaaggactgtggaatttct

SEQ ID NO: 3481499 - DNA, 25 bp, Homo sapien
atgtttgattatggcaggaaactct

SEQ ID NO: 3481500 - DNA, 25 bp, Homo sapien
gtttgattatggcaggaaactctac

SEQ ID NO: 3481501 - DNA, 25 bp, Homo sapien
tttgattatggcaggaaactctacc

SEQ ID NO: 3481502 - DNA, 25 bp, Homo sapien
ttgattatggcaggaaactctacca

SEQ ID NO: 3481503 - DNA, 25 bp, Homo sapien
tgctaagtttgcttagcaacacatt

SEQ ID NO: 3481504 - DNA, 25 bp, Homo sapien
taagtttgcttagcaacacattttc

SEQ ID NO: 3481505 - DNA, 25 bp, Homo sapien
gcaacacattttcttgatgacggtt

SEQ ID NO: 3481506 - DNA, 25 bp, Homo sapien
agcaacacattttcttgatgacggt

SEQ ID NO: 3481507 - DNA, 25 bp, Homo sapien
tctgggtctcatagaaagaggaaca

SEQ ID NO: 3481508 - DNA, 25 bp, Homo sapien
tctagggcacgtgggcttaactgtg

SEQ ID NO: 3481509 - DNA, 25 bp, Homo sapien
caggctagagctgtagtcttgatag

SEQ ID NO: 3481510 - DNA, 25 bp, Homo sapien
caaaggatttgaaggtagctgctct

SEQ ID NO: 3481511 - DNA, 25 bp, Homo sapien
ccagaagctggtagacttggtcttt

SEQ ID NO: 3481512 - DNA, 25 bp, Homo sapien
aacaggagcttggtttgtcaaacac

SEQ ID NO: 3481513 - DNA, 25 bp, Homo sapien
caaatatgatccaacaggagcttgg

SEQ ID NO: 3481514 - DNA, 25 bp, Homo sapien
cactcagatacagctgtctgttcaa

SEQ ID NO: 3481515 - DNA, 25 bp, Homo sapien
gaattctccaaccttggctctgtca

SEQ ID NO: 3481516 - DNA, 25 bp, Homo sapien
cagaaggtgaaagattgggcagctc

SEQ ID NO: 3481517 - DNA, 25 bp, Homo sapien
ggaaaagttacattactcttcttca

SEQ ID NO: 3481518 - DNA, 25 bp, Homo sapien
cttcttcaagagaaagattttgttg

SEQ ID NO: 3481519 - DNA, 25 bp, Homo sapien
tgctgagcagtctcgaccacttggg

SEQ ID NO: 3481520 - DNA, 25 bp, Homo sapien
caagtggccctggaagatcatccaa

SEQ ID NO: 3481521 - DNA, 25 bp, Homo sapien
tcttcccactgaatgcgccactggt

SEQ ID NO: 3481522 - DNA, 25 bp, Homo sapien
tataaatggagacaagtgctgagca

SEQ ID NO: 3481523 - DNA, 25 bp, Homo sapien
gctaacacttggtaaatggcagtga

SEQ ID NO: 3481524 - DNA, 25 bp, Homo sapien
caggaacagaagtgtatttccaaag

SEQ ID NO: 3481525 - DNA, 25 bp, Homo sapien
gataaatgatcatgtacttcccagg

SEQ ID NO: 3481526 - DNA, 25 bp, Homo sapien
cacatttgagtgatctgttgatgat

SEQ ID NO: 3481527 - DNA, 25 bp, Homo sapien
tctggcgttgtaccgaatttaattc

SEQ ID NO: 3481528 - DNA, 25 bp, Homo sapien
cctctttacgtttgcatatgccttc

SEQ ID NO: 3481529 - DNA, 25 bp, Homo sapien
tggctcctgctatcccagttaggga

SEQ ID NO: 3481530 - DNA, 25 bp, Homo sapien
aatgcttcatactattgcagtggag

SEQ ID NO: 3481531 - DNA, 25 bp, Homo sapien
attttatctatttgcaatgatttgt

SEQ ID NO: 3481532 - DNA, 25 bp, Homo sapien
actttcatcaggagccctgagcaca

SEQ ID NO: 3481533 - DNA, 25 bp, Homo sapien
cacgccactgcgctctagccgtgca

SEQ ID NO: 3481534 - DNA, 25 bp, Homo sapien
cactgcgctctagccgtgcaacaga

SEQ ID NO: 3481535 - DNA, 25 bp, Homo sapien
cgccactgcgctctagccgtgcaac

SEQ ID NO: 3481536 - DNA, 25 bp, Homo sapien
gaccacgccactgcgctctagccgt

SEQ ID NO: 3481537 - DNA, 25 bp, Homo sapien
catgttcccgctcccctgaatgctt

SEQ ID NO: 3481538 - DNA, 25 bp, Homo sapien
gcatgttcccgctcccctgaatgct

SEQ ID NO: 3481539 - DNA, 25 bp, Homo sapien
tgatgccagaggagcaccgaggtct

SEQ ID NO: 3481540 - DNA, 25 bp, Homo sapien
gatgccagaggagcaccgaggtctc

SEQ ID NO: 3481541 - DNA, 25 bp, Homo sapien
tctcagtgaagatcccggtgttaca

SEQ ID NO: 3481542 - DNA, 25 bp, Homo sapien
tcactctcagtgaagatcccggtgt

SEQ ID NO: 3481543 - DNA, 25 bp, Homo sapien
gtattcactctcagtgaagatcccg

SEQ ID NO: 3481544 - DNA, 25 bp, Homo sapien
cactctcagtgaagatcccggtgtt

SEQ ID NO: 3481545 - DNA, 25 bp, Homo sapien
catttggataatggtgctgatggat

SEQ ID NO: 3481546 - DNA, 25 bp, Homo sapien
gctgatggatttgccatttgcacta

SEQ ID NO: 3481547 - DNA, 25 bp, Homo sapien
tgatggatttgccatttgcactagc

SEQ ID NO: 3481548 - DNA, 25 bp, Homo sapien
ggtgctgatggatttgccatttgca

SEQ ID NO: 3481549 - DNA, 25 bp, Homo sapien
ctgctggccgatttgcaaagatggc

SEQ ID NO: 3481550 - DNA, 25 bp, Homo sapien
tattgcaccagtattgtagtaccct

SEQ ID NO: 3481551 - DNA, 25 bp, Homo sapien
ttgtagtaccctctgctggccgatt

SEQ ID NO: 3481552 - DNA, 25 bp, Homo sapien
ttattgcaccagtattgtagtaccc

SEQ ID NO: 3481553 - DNA, 25 bp, Homo sapien
aaccctgaagggcactcataagctg

SEQ ID NO: 3481554 - DNA, 25 bp, Homo sapien
agggccaacttacagaaccctgaag

SEQ ID NO: 3481555 - DNA, 25 bp, Homo sapien
agctgtgcaatttggagaactcaca

SEQ ID NO: 3481556 - DNA, 25 bp, Homo sapien
cctaaggcagatgagaagaaatacc

SEQ ID NO: 3481557 - DNA, 25 bp, Homo sapien
caggacttttttcgcataccattca

SEQ ID NO: 3481558 - DNA, 25 bp, Homo sapien
cagttatcagcaaatatggagcaaa

SEQ ID NO: 3481559 - DNA, 25 bp, Homo sapien
taaaatctcacatgcagttatcagc

SEQ ID NO: 3481560 - DNA, 25 bp, Homo sapien
gagcaaaacctgtgcctcaacttct

SEQ ID NO: 3481561 - DNA, 25 bp, Homo sapien
acttctcgaagaaatgcggagcggg

SEQ ID NO: 3481562 - DNA, 25 bp, Homo sapien
acattctgaaatgtctttagaaagc

SEQ ID NO: 3481563 - DNA, 25 bp, Homo sapien
gacattctgaaatgtctttagaaag

SEQ ID NO: 3481564 - DNA, 25 bp, Homo sapien
tctcgaagaaatgcggagcgggcca

SEQ ID NO: 3481565 - DNA, 25 bp, Homo sapien
tcagaggcgttgaagttctcagcta

SEQ ID NO: 3481566 - DNA, 25 bp, Homo sapien
tgaggactaaacacagataaaagcc

SEQ ID NO: 3481567 - DNA, 25 bp, Homo sapien
gccagcaagttgcatgatccagatg

SEQ ID NO: 3481568 - DNA, 25 bp, Homo sapien
gaaggtgccattatttgtagccagc

SEQ ID NO: 3481569 - DNA, 25 bp, Homo sapien
cttcttgtgtattcaagttagcaat

SEQ ID NO: 3481570 - DNA, 25 bp, Homo sapien
ttgaaaacgaaaggcagagcattgg

SEQ ID NO: 3481571 - DNA, 25 bp, Homo sapien
gatcagctgttacttataccaccct

SEQ ID NO: 3481572 - DNA, 25 bp, Homo sapien
ttaaaagggagtgagatcagctgtt

SEQ ID NO: 3481573 - DNA, 25 bp, Homo sapien
ctgttgtgttctatctgaggcatga

SEQ ID NO: 3481574 - DNA, 25 bp, Homo sapien
gatggcgcctgctcgttcctgttgt

SEQ ID NO: 3481575 - DNA, 25 bp, Homo sapien
tctatctgaggcatgattttctttc

SEQ ID NO: 3481576 - DNA, 25 bp, Homo sapien
tccgggacttgacgatggcgcctgc

SEQ ID NO: 3481577 - DNA, 25 bp, Homo sapien
gtcttggtgtgaaggagctctcgcc

SEQ ID NO: 3481578 - DNA, 25 bp, Homo sapien
gtgtttcttgctatacccatctaaa

SEQ ID NO: 3481579 - DNA, 25 bp, Homo sapien
gctctcgcctgtgtttcttgctata

SEQ ID NO: 3481580 - DNA, 25 bp, Homo sapien
cagagaggcaggcatatgctcgcgt

SEQ ID NO: 3481581 - DNA, 25 bp, Homo sapien
gtgtaacttccggtgggcagtattg

SEQ ID NO: 3481582 - DNA, 25 bp, Homo sapien
tttcttcaacctggtggcagctttc

SEQ ID NO: 3481583 - DNA, 25 bp, Homo sapien
cagtggccgtgtaacttccggtggg

SEQ ID NO: 3481584 - DNA, 25 bp, Homo sapien
cagtattggtaatttcttcaacctg

SEQ ID NO: 3481585 - DNA, 25 bp, Homo sapien
tatgcgtggaggctcagaccttcct

SEQ ID NO: 3481586 - DNA, 25 bp, Homo sapien
tgatggatgctttatgcgtggaggc

SEQ ID NO: 3481587 - DNA, 25 bp, Homo sapien
tgcctaatgggagaaaaccgagtcc

SEQ ID NO: 3481588 - DNA, 25 bp, Homo sapien
tgagatgcctggcttggcagagact

SEQ ID NO: 3481589 - DNA, 25 bp, Homo sapien
gggctgcacatttctcttactggca

SEQ ID NO: 3481590 - DNA, 25 bp, Homo sapien
ctgcgtatcttctgcgatgccattg

SEQ ID NO: 3481591 - DNA, 25 bp, Homo sapien
tggtaattgttgaataaagttcctc

SEQ ID NO: 3481592 - DNA, 25 bp, Homo sapien
gctgctggtaggtagttgagtttcc

SEQ ID NO: 3481593 - DNA, 25 bp, Homo sapien
ggctttcatagtcagaccattgtca

SEQ ID NO: 3481594 - DNA, 25 bp, Homo sapien
gagggctttcatagtcagaccattg

SEQ ID NO: 3481595 - DNA, 25 bp, Homo sapien
ggtagagggctttcatagtcagacc

SEQ ID NO: 3481596 - DNA, 25 bp, Homo sapien
catagtcagaccattgtcaatgtgg

SEQ ID NO: 3481597 - DNA, 25 bp, Homo sapien
cgttgaaatggatagaggacagtac

SEQ ID NO: 3481598 - DNA, 25 bp, Homo sapien
tgactccctgtaagaacctgtaatg

SEQ ID NO: 3481599 - DNA, 25 bp, Homo sapien
gagtggcatggctcattgtcctggc

SEQ ID NO: 3481600 - DNA, 25 bp, Homo sapien
tcaagtgagacgacaaaggaaatcg

SEQ ID NO: 3481601 - DNA, 25 bp, Homo sapien
ggtttgtcataaacattggcccaag

SEQ ID NO: 3481602 - DNA, 25 bp, Homo sapien
gagtgtgaggaaactgccctgcttc

SEQ ID NO: 3481603 - DNA, 25 bp, Homo sapien
tctgaccaggaaaatcgacccaatg

SEQ ID NO: 3481604 - DNA, 25 bp, Homo sapien
gaaagaggccgatgcagtcagtgca

SEQ ID NO: 3481605 - DNA, 25 bp, Homo sapien
cctcctgcaaatgtttaggtcttgg

SEQ ID NO: 3481606 - DNA, 25 bp, Homo sapien
tcaacacctcctgcaaatgtttagg

SEQ ID NO: 3481607 - DNA, 25 bp, Homo sapien
aatgtttaggtcttggtggcctgta

SEQ ID NO: 3481608 - DNA, 25 bp, Homo sapien
ggtcttggtggcctgtatttctgta

SEQ ID NO: 3481609 - DNA, 25 bp, Homo sapien
ctagcgcttgttaattctagttgag

SEQ ID NO: 3481610 - DNA, 25 bp, Homo sapien
tcttcagtgcaagaaagaatgacaa

SEQ ID NO: 3481611 - DNA, 25 bp, Homo sapien
tctagttgagagtgtggatgctaca

SEQ ID NO: 3481612 - DNA, 25 bp, Homo sapien
gagagtgtggatgctacatcttcag

SEQ ID NO: 3481613 - DNA, 25 bp, Homo sapien
catagattgaatgatctctgatgcg

SEQ ID NO: 3481614 - DNA, 25 bp, Homo sapien
ctcgagattcataacgacagatggg

SEQ ID NO: 3481615 - DNA, 25 bp, Homo sapien
caatatgtttccatagattgaatga

SEQ ID NO: 3481616 - DNA, 25 bp, Homo sapien
tgatgcgttactcgagattcataac

SEQ ID NO: 3481617 - DNA, 25 bp, Homo sapien
gaaagcagtgtgaatcgtagcataa

SEQ ID NO: 3481618 - DNA, 25 bp, Homo sapien
catctctagtagtattgccgaatag

SEQ ID NO: 3481619 - DNA, 25 bp, Homo sapien
cgtagcataagccatgttttacggg

SEQ ID NO: 3481620 - DNA, 25 bp, Homo sapien
tgcaggtcacatatacagtttaaaa

SEQ ID NO: 3481621 - DNA, 25 bp, Homo sapien
gaggactgcatacgctattttctag

SEQ ID NO: 3481622 - DNA, 25 bp, Homo sapien
tatccatccatagtagcagaaggag

SEQ ID NO: 3481623 - DNA, 25 bp, Homo sapien
tgaaaggaccaaagactaccatcct

SEQ ID NO: 3481624 - DNA, 25 bp, Homo sapien
tatgtgtctccagtagaggactgca

SEQ ID NO: 3481625 - DNA, 25 bp, Homo sapien
tcaccaacactcgcccagcaacatt

SEQ ID NO: 3481626 - DNA, 25 bp, Homo sapien
tttcaccaacactcgcccagcaaca

SEQ ID NO: 3481627 - DNA, 25 bp, Homo sapien
ccaacactcgcccagcaacattgag

SEQ ID NO: 3481628 - DNA, 25 bp, Homo sapien
actcgcccagcaacattgagccttc

SEQ ID NO: 3481629 - DNA, 25 bp, Homo sapien
aacatccacgatctgaacataattt

SEQ ID NO: 3481630 - DNA, 25 bp, Homo sapien
taacatccacgatctgaacataatt

SEQ ID NO: 3481631 - DNA, 25 bp, Homo sapien
ttaacatccacgatctgaacataat

SEQ ID NO: 3481632 - DNA, 25 bp, Homo sapien
tttaacatccacgatctgaacataa

SEQ ID NO: 3481633 - DNA, 25 bp, Homo sapien
acttctgtccatctgttcttaccgg

SEQ ID NO: 3481634 - DNA, 25 bp, Homo sapien
ttctgtccatctgttcttaccgggc

SEQ ID NO: 3481635 - DNA, 25 bp, Homo sapien
tgctcttttaacttctgtccatctg

SEQ ID NO: 3481636 - DNA, 25 bp, Homo sapien
ctgtccatctgttcttaccgggcag

SEQ ID NO: 3481637 - DNA, 25 bp, Homo sapien
aatgtccttcagtgtccatatgagc

SEQ ID NO: 3481638 - DNA, 25 bp, Homo sapien
gtccatatgagcatttcagtggaga

SEQ ID NO: 3481639 - DNA, 25 bp, Homo sapien
ttttccgatcagttcagtaatacaa

SEQ ID NO: 3481640 - DNA, 25 bp, Homo sapien
cagtaatacaatgtccttcagtgtc

SEQ ID NO: 3481641 - DNA, 25 bp, Homo sapien
ctatgttctatttgtcaaactgacc

SEQ ID NO: 3481642 - DNA, 25 bp, Homo sapien
gatcggtgaggccttgtctccgcat

SEQ ID NO: 3481643 - DNA, 25 bp, Homo sapien
tcacaacctgaaagtttatggatcg

SEQ ID NO: 3481644 - DNA, 25 bp, Homo sapien
aaactgaccggcaggtcacaacctg

SEQ ID NO: 3481645 - DNA, 25 bp, Homo sapien
ggaaaggtctttactgtggtgttga

SEQ ID NO: 3481646 - DNA, 25 bp, Homo sapien
tgtggtgttgaggacgtcatgttct

SEQ ID NO: 3481647 - DNA, 25 bp, Homo sapien
aaggtctttactgtggtgttgagga

SEQ ID NO: 3481648 - DNA, 25 bp, Homo sapien
gttgaggacgtcatgttcttcagaa

SEQ ID NO: 3481649 - DNA, 25 bp, Homo sapien
cagccagggtgagttgctcaacagc

SEQ ID NO: 3481650 - DNA, 25 bp, Homo sapien
cagcctcagccagggtgagttgctc

SEQ ID NO: 3481651 - DNA, 25 bp, Homo sapien
ctcaacagcccaaggatgaagattt

SEQ ID NO: 3481652 - DNA, 25 bp, Homo sapien
ctcagccagggtgagttgctcaaca

SEQ ID NO: 3481653 - DNA, 25 bp, Homo sapien
cagcatggttctggcaagactgctt

SEQ ID NO: 3481654 - DNA, 25 bp, Homo sapien
tcatcttacagcatggttctggcaa

SEQ ID NO: 3481655 - DNA, 25 bp, Homo sapien
cttacagcatggttctggcaagact

SEQ ID NO: 3481656 - DNA, 25 bp, Homo sapien
cagtctgcaaaattccagggggtgg

SEQ ID NO: 3481657 - DNA, 25 bp, Homo sapien
caaagctctaattgatgtgggtgtc

SEQ ID NO: 3481658 - DNA, 25 bp, Homo sapien
tcattggacagtagtaaaccttaag

SEQ ID NO: 3481659 - DNA, 25 bp, Homo sapien
cattggacagtagtaaaccttaagt

SEQ ID NO: 3481660 - DNA, 25 bp, Homo sapien
agctctaattgatgtgggtgtcttg

SEQ ID NO: 3481661 - DNA, 25 bp, Homo sapien
tgtgttgtgtacgtgttagcagtag

SEQ ID NO: 3481662 - DNA, 25 bp, Homo sapien
gttgtgtacgtgttagcagtagtgc

SEQ ID NO: 3481663 - DNA, 25 bp, Homo sapien
tgttgtgtacgtgttagcagtagtg

SEQ ID NO: 3481664 - DNA, 25 bp, Homo sapien
ccctcaccacgcactcattggacag

SEQ ID NO: 3481665 - DNA, 25 bp, Homo sapien
tagctgaagctaagtagacgggttt

SEQ ID NO: 3481666 - DNA, 25 bp, Homo sapien
actctgcatgttgacaactgggcag

SEQ ID NO: 3481667 - DNA, 25 bp, Homo sapien
agtagacgggtttcataggtttcag

SEQ ID NO: 3481668 - DNA, 25 bp, Homo sapien
gggcagtctaagacacatgcaccaa

SEQ ID NO: 3481669 - DNA, 25 bp, Homo sapien
ggagagaggagacttcctgagacat

SEQ ID NO: 3481670 - DNA, 25 bp, Homo sapien
ttggagagaggagacttcctgagac

SEQ ID NO: 3481671 - DNA, 25 bp, Homo sapien
ctgttggagagaggagacttcctga

SEQ ID NO: 3481672 - DNA, 25 bp, Homo sapien
tgttggagagaggagacttcctgag

SEQ ID NO: 3481673 - DNA, 25 bp, Homo sapien
tttaaacaacggcaccaggatccat

SEQ ID NO: 3481674 - DNA, 25 bp, Homo sapien
tcgtttcagtgagaagcgaggcagt

SEQ ID NO: 3481675 - DNA, 25 bp, Homo sapien
gctggactatgaaatgaagactctg

SEQ ID NO: 3481676 - DNA, 25 bp, Homo sapien
gccttggctgagaatatccgctggt

SEQ ID NO: 3481677 - DNA, 25 bp, Homo sapien
gttgtctctgtctccggcatctggt

SEQ ID NO: 3481678 - DNA, 25 bp, Homo sapien
ttgtctctgtctccggcatctggtt

SEQ ID NO: 3481679 - DNA, 25 bp, Homo sapien
tgtctctgtctccggcatctggttg

SEQ ID NO: 3481680 - DNA, 25 bp, Homo sapien
gtctctgtctccggcatctggttgc

SEQ ID NO: 3481681 - DNA, 25 bp, Homo sapien
catggtctaattgagatgtggattc

SEQ ID NO: 3481682 - DNA, 25 bp, Homo sapien
aaagggtacaaagtgccgatcatgt

SEQ ID NO: 3481683 - DNA, 25 bp, Homo sapien
ctcatagttgtagagagtagaacag

SEQ ID NO: 3481684 - DNA, 25 bp, Homo sapien
acatgataccgtgaaataagccaga

SEQ ID NO: 3481685 - DNA, 25 bp, Homo sapien
cacacaatgtggttgagggagagct

SEQ ID NO: 3481686 - DNA, 25 bp, Homo sapien
cacaatgtggttgagggagagctta

SEQ ID NO: 3481687 - DNA, 25 bp, Homo sapien
gtcacacaatgtggttgagggagag

SEQ ID NO: 3481688 - DNA, 25 bp, Homo sapien
ctggtcacacaatgtggttgaggga

SEQ ID NO: 3481689 - DNA, 25 bp, Homo sapien
cgtttccaagttggcttctgccagg

SEQ ID NO: 3481690 - DNA, 25 bp, Homo sapien
tagatatgttcacaaagcaccgtga

SEQ ID NO: 3481691 - DNA, 25 bp, Homo sapien
cagcttggaagttccctagtgcaga

SEQ ID NO: 3481692 - DNA, 25 bp, Homo sapien
ctggaggtcactgttgcaccataga

SEQ ID NO: 3481693 - DNA, 25 bp, Homo sapien
gcaccagaagtgcttgttggataaa

SEQ ID NO: 3481694 - DNA, 25 bp, Homo sapien
gaagtgcttgttggataaaattatc

SEQ ID NO: 3481695 - DNA, 25 bp, Homo sapien
tagttcctgaatcctgcaccagaag

SEQ ID NO: 3481696 - DNA, 25 bp, Homo sapien
tgaatcctgcaccagaagtgcttgt

SEQ ID NO: 3481697 - DNA, 25 bp, Homo sapien
attacttcatattcagcaaggcccc

SEQ ID NO: 3481698 - DNA, 25 bp, Homo sapien
ggtgcacaagcacccatctgtatgt

SEQ ID NO: 3481699 - DNA, 25 bp, Homo sapien
agcaaggcccctggaattgtccggc

SEQ ID NO: 3481700 - DNA, 25 bp, Homo sapien
tggacgcaaaacaccccagtcatac

SEQ ID NO: 3481701 - DNA, 25 bp, Homo sapien
actgaatatcggagactttgggtag

SEQ ID NO: 3481702 - DNA, 25 bp, Homo sapien
tatcggagactttgggtagtgaatc

SEQ ID NO: 3481703 - DNA, 25 bp, Homo sapien
ctagtactgaatatcggagactttg

SEQ ID NO: 3481704 - DNA, 25 bp, Homo sapien
ttgggtagtgaatcaattggatgtg

SEQ ID NO: 3481705 - DNA, 25 bp, Homo sapien
tctcaatcctagactctgggactgg

SEQ ID NO: 3481706 - DNA, 25 bp, Homo sapien
tcttataggtgtacctccctccagg

SEQ ID NO: 3481707 - DNA, 25 bp, Homo sapien
ctttacgatacatgtgatccaggcc

SEQ ID NO: 3481708 - DNA, 25 bp, Homo sapien
tgcaaatcagaccatgctgctcttg

SEQ ID NO: 3481709 - DNA, 25 bp, Homo sapien
ttccttgtctggtttactcttagaa

SEQ ID NO: 3481710 - DNA, 25 bp, Homo sapien
tggccttgaaagcaccgacaccggc

SEQ ID NO: 3481711 - DNA, 25 bp, Homo sapien
tttgaccatgttggctggcactttg

SEQ ID NO: 3481712 - DNA, 25 bp, Homo sapien
gaaagcaccgacaccggcttaagca

SEQ ID NO: 3481713 - DNA, 25 bp, Homo sapien
cttgatatgaggcagaggacttttg

SEQ ID NO: 3481714 - DNA, 25 bp, Homo sapien
tgagggagtagttgagattgcagtt

SEQ ID NO: 3481715 - DNA, 25 bp, Homo sapien
ggagtagttgagattgcagttggga

SEQ ID NO: 3481716 - DNA, 25 bp, Homo sapien
tagttgagattgcagttgggatgaa

SEQ ID NO: 3481717 - DNA, 25 bp, Homo sapien
aggtgagggagtagttgagattgca

SEQ ID NO: 3481718 - DNA, 25 bp, Homo sapien
tctggattccagagctatttccttg

SEQ ID NO: 3481719 - DNA, 25 bp, Homo sapien
tggtgattgggtctgaatagaagcc

SEQ ID NO: 3481720 - DNA, 25 bp, Homo sapien
ttagactgttgagacagccaaatgc

SEQ ID NO: 3481721 - DNA, 25 bp, Homo sapien
caaatggaagcatatggttgggctg

SEQ ID NO: 3481722 - DNA, 25 bp, Homo sapien
ggagaccagatatttctaagtagga

SEQ ID NO: 3481723 - DNA, 25 bp, Homo sapien
aattgagacccaagctggaagacag

SEQ ID NO: 3481724 - DNA, 25 bp, Homo sapien
tacggggcattgcagctgaatctgg

SEQ ID NO: 3481725 - DNA, 25 bp, Homo sapien
ccacttggtgtcatgggcaaattga

SEQ ID NO: 3481726 - DNA, 25 bp, Homo sapien
agtaagcagttgcaagtccagggct

SEQ ID NO: 3481727 - DNA, 25 bp, Homo sapien
ttagagctcggaaaagtaagcagtt

SEQ ID NO: 3481728 - DNA, 25 bp, Homo sapien
gagctcggaaaagtaagcagttgca

SEQ ID NO: 3481729 - DNA, 25 bp, Homo sapien
gtaagcagttgcaagtccagggctc

SEQ ID NO: 3481730 - DNA, 25 bp, Homo sapien
tgaaccctggaccctcagattaaaa

SEQ ID NO: 3481731 - DNA, 25 bp, Homo sapien
cgcctgaacagggacttgaaccctg

SEQ ID NO: 3481732 - DNA, 25 bp, Homo sapien
gcctgaacagggacttgaaccctgg

SEQ ID NO: 3481733 - DNA, 25 bp, Homo sapien
agattaaaagtctgatgctctacca

SEQ ID NO: 3481734 - DNA, 25 bp, Homo sapien
agcaggctcctttccagcactgtca

SEQ ID NO: 3481735 - DNA, 25 bp, Homo sapien
tgtgcggaagacattagcaggctcc

SEQ ID NO: 3481736 - DNA, 25 bp, Homo sapien
tatagtgctgaacacctgtgcggaa

SEQ ID NO: 3481737 - DNA, 25 bp, Homo sapien
cccactgccgggtcttgcaggtgtt

SEQ ID NO: 3481738 - DNA, 25 bp, Homo sapien
tgttggcaggccgtattggttcaca

SEQ ID NO: 3481739 - DNA, 25 bp, Homo sapien
tattggttcacatgacacagctgcc

SEQ ID NO: 3481740 - DNA, 25 bp, Homo sapien
cacggtcccccgagtagtcatgtct

SEQ ID NO: 3481741 - DNA, 25 bp, Homo sapien
ggtcccccgagtagtcatgtctgcc

SEQ ID NO: 3481742 - DNA, 25 bp, Homo sapien
ggcccggagtgaccggacatgcttc

SEQ ID NO: 3481743 - DNA, 25 bp, Homo sapien
tggccaggcccggagtgaccggaca

SEQ ID NO: 3481744 - DNA, 25 bp, Homo sapien
cggagtgaccggacatgcttctctc

SEQ ID NO: 3481745 - DNA, 25 bp, Homo sapien
ccaggcccggagtgaccggacatgc

SEQ ID NO: 3481746 - DNA, 25 bp, Homo sapien
cagaattccacgtgaattttttcac

SEQ ID NO: 3481747 - DNA, 25 bp, Homo sapien
ccactaaggacactcagcagaattc

SEQ ID NO: 3481748 - DNA, 25 bp, Homo sapien
tcactcccagttgacttcagaaaga

SEQ ID NO: 3481749 - DNA, 25 bp, Homo sapien
ggattgggttctcggacgtcttgcc

SEQ ID NO: 3481750 - DNA, 25 bp, Homo sapien
ggactgaggattgaggtcactgctc

SEQ ID NO: 3481751 - DNA, 25 bp, Homo sapien
gggtccacatgggtggaaaccatca

SEQ ID NO: 3481752 - DNA, 25 bp, Homo sapien
gggactgaggattgaggtcactgct

SEQ ID NO: 3481753 - DNA, 25 bp, Homo sapien
cacatgggtggaaaccatcatctca

SEQ ID NO: 3481754 - DNA, 25 bp, Homo sapien
cgctccggaaggctttgaaggtctt

SEQ ID NO: 3481755 - DNA, 25 bp, Homo sapien
tgcccagtagaggacccctttgctt

SEQ ID NO: 3481756 - DNA, 25 bp, Homo sapien
tggcttttcttcttgcggttgaagt

SEQ ID NO: 3481757 - DNA, 25 bp, Homo sapien
agtctggcaagtgcctgcttgctgc

SEQ ID NO: 3481758 - DNA, 25 bp, Homo sapien
atcagggttccgactggggatgttc

SEQ ID NO: 3481759 - DNA, 25 bp, Homo sapien
atgtcatcagggttccgactgggga

SEQ ID NO: 3481760 - DNA, 25 bp, Homo sapien
ggggatgttcgttgaggtgtctttc

SEQ ID NO: 3481761 - DNA, 25 bp, Homo sapien
ttgaaggaaaggatgtcatcagggt

SEQ ID NO: 3481762 - DNA, 25 bp, Homo sapien
gttttcacatcaccacacaggcgtc

SEQ ID NO: 3481763 - DNA, 25 bp, Homo sapien
cacaggcgtctcacaaatccacaga

SEQ ID NO: 3481764 - DNA, 25 bp, Homo sapien
caaggtgccagagccgtctaagctg

SEQ ID NO: 3481765 - DNA, 25 bp, Homo sapien
gctgcttggcttccggttcttggac

SEQ ID NO: 3481766 - DNA, 25 bp, Homo sapien
gttgtagagccttgcaggaaagatt

SEQ ID NO: 3481767 - DNA, 25 bp, Homo sapien
ctctctccagtggttgtagagcctt

SEQ ID NO: 3481768 - DNA, 25 bp, Homo sapien
ggttgtagagccttgcaggaaagat

SEQ ID NO: 3481769 - DNA, 25 bp, Homo sapien
tgtagagccttgcaggaaagattac

SEQ ID NO: 3481770 - DNA, 25 bp, Homo sapien
gaggaggggagcatcaagggaaaat

SEQ ID NO: 3481771 - DNA, 25 bp, Homo sapien
aatgaccctcctagaatgcgctggc

SEQ ID NO: 3481772 - DNA, 25 bp, Homo sapien
aagggaaaatgaccctcctagaatg

SEQ ID NO: 3481773 - DNA, 25 bp, Homo sapien
gaaaatgaccctcctagaatgcgct

SEQ ID NO: 3481774 - DNA, 25 bp, Homo sapien
gtgctgtgagtaacctcaaggggat

SEQ ID NO: 3481775 - DNA, 25 bp, Homo sapien
catccccagctcatgtctggtgcac

SEQ ID NO: 3481776 - DNA, 25 bp, Homo sapien
ctggtgcacagagtgctgtgagtaa

SEQ ID NO: 3481777 - DNA, 25 bp, Homo sapien
catgtctggtgcacagagtgctgtg

SEQ ID NO: 3481778 - DNA, 25 bp, Homo sapien
gccctggtcataatctttcttctcc

SEQ ID NO: 3481779 - DNA, 25 bp, Homo sapien
tcagagccctggtcataatctttct

SEQ ID NO: 3481780 - DNA, 25 bp, Homo sapien
gagccctggtcataatctttcttct

SEQ ID NO: 3481781 - DNA, 25 bp, Homo sapien
cagagccctggtcataatctttctt

SEQ ID NO: 3481782 - DNA, 25 bp, Homo sapien
tctgaagcatgtcctatatcttctc

SEQ ID NO: 3481783 - DNA, 25 bp, Homo sapien
gaagcatgtcctatatcttctcctt

SEQ ID NO: 3481784 - DNA, 25 bp, Homo sapien
tttctgaagcatgtcctatatcttc

SEQ ID NO: 3481785 - DNA, 25 bp, Homo sapien
tgaagcatgtcctatatcttctcct

SEQ ID NO: 3481786 - DNA, 25 bp, Homo sapien
ggctggcaattcagatgcattgtgc

SEQ ID NO: 3481787 - DNA, 25 bp, Homo sapien
agctcagtgcaaacccctgttttat

SEQ ID NO: 3481788 - DNA, 25 bp, Homo sapien
ttgacgttgaaaagctaggaaaagc

SEQ ID NO: 3481789 - DNA, 25 bp, Homo sapien
cctgttttatttaggactcctgcca

SEQ ID NO: 3481790 - DNA, 25 bp, Homo sapien
gatacagtgtaactccctgagcccg

SEQ ID NO: 3481791 - DNA, 25 bp, Homo sapien
ccaggggaaatgatacagtgtaact

SEQ ID NO: 3481792 - DNA, 25 bp, Homo sapien
tgtaactccctgagcccggaattgg

SEQ ID NO: 3481793 - DNA, 25 bp, Homo sapien
ggaaatgatacagtgtaactccctg

SEQ ID NO: 3481794 - DNA, 25 bp, Homo sapien
gctttttgaggttgctttataaggc

SEQ ID NO: 3481795 - DNA, 25 bp, Homo sapien
gtgaccagcacccatggagtggctt

SEQ ID NO: 3481796 - DNA, 25 bp, Homo sapien
atgtcagtccgggcctgtccctggt

SEQ ID NO: 3481797 - DNA, 25 bp, Homo sapien
tgcacacactgggttttccagaaat

SEQ ID NO: 3481798 - DNA, 25 bp, Homo sapien
gctgggggatgctaaccctctttcg

SEQ ID NO: 3481799 - DNA, 25 bp, Homo sapien
cagtcagggacaagggtcccacttg

SEQ ID NO: 3481800 - DNA, 25 bp, Homo sapien
gatgctaaccctctttcgtttggaa

SEQ ID NO: 3481801 - DNA, 25 bp, Homo sapien
tcttcagtcagggacaagggtccca

SEQ ID NO: 3481802 - DNA, 25 bp, Homo sapien
aagttgagttcccaatcagccggcc

SEQ ID NO: 3481803 - DNA, 25 bp, Homo sapien
gacggaggatcccaaccttatgggc

SEQ ID NO: 3481804 - DNA, 25 bp, Homo sapien
gctgggcctcaagacaggagatcaa

SEQ ID NO: 3481805 - DNA, 25 bp, Homo sapien
taaagacctactgcgctctacaagg

SEQ ID NO: 3481806 - DNA, 25 bp, Homo sapien
tgcgcctgcagtagccctgtctcct

SEQ ID NO: 3481807 - DNA, 25 bp, Homo sapien
tctcctcgcctagcagtccgggaat

SEQ ID NO: 3481808 - DNA, 25 bp, Homo sapien
ctctgcgcctgcagtagccctgtct

SEQ ID NO: 3481809 - DNA, 25 bp, Homo sapien
tcgcctagcagtccgggaatttgca

SEQ ID NO: 3481810 - DNA, 25 bp, Homo sapien
gagccagaacgccggcaagcggccg

SEQ ID NO: 3481811 - DNA, 25 bp, Homo sapien
caggagccagaacgccggcaagcgg

SEQ ID NO: 3481812 - DNA, 25 bp, Homo sapien
ccacaggagccagaacgccggcaag

SEQ ID NO: 3481813 - DNA, 25 bp, Homo sapien
acaggagccagaacgccggcaagcg

SEQ ID NO: 3481814 - DNA, 25 bp, Homo sapien
ccgagccggatggttcgggaaggag

SEQ ID NO: 3481815 - DNA, 25 bp, Homo sapien
gccagccatcgccagggaaggagcc

SEQ ID NO: 3481816 - DNA, 25 bp, Homo sapien
ggaaggagcccgagccggatggttc

SEQ ID NO: 3481817 - DNA, 25 bp, Homo sapien
cgctccgagcttccccagtgtcggg

SEQ ID NO: 3481818 - DNA, 25 bp, Homo sapien
ggactggggtggccgtactgagcca

SEQ ID NO: 3481819 - DNA, 25 bp, Homo sapien
gactggggtggccgtactgagccat

SEQ ID NO: 3481820 - DNA, 25 bp, Homo sapien
cggactggggtggccgtactgagcc

SEQ ID NO: 3481821 - DNA, 25 bp, Homo sapien
agaggagcacgtccagcgccgatcc

SEQ ID NO: 3481822 - DNA, 25 bp, Homo sapien
ttgctgtacagctcctctctcgcag

SEQ ID NO: 3481823 - DNA, 25 bp, Homo sapien
actttgctgtacagctcctctctcg

SEQ ID NO: 3481824 - DNA, 25 bp, Homo sapien
ccgatccatgcttgatggtgccggg

SEQ ID NO: 3481825 - DNA, 25 bp, Homo sapien
ccggagccgagtcccgggttgccag

SEQ ID NO: 3481826 - DNA, 25 bp, Homo sapien
agctttaggcatcccacggcgagcc

SEQ ID NO: 3481827 - DNA, 25 bp, Homo sapien
aggcgagccggagcgaagccgaggg

SEQ ID NO: 3481828 - DNA, 25 bp, Homo sapien
cggaggctgagcactatacccggga

SEQ ID NO: 3481829 - DNA, 25 bp, Homo sapien
agagggtgcccgagtcctccgcagg

SEQ ID NO: 3481830 - DNA, 25 bp, Homo sapien
cagtattccagacggagagggtgcc

SEQ ID NO: 3481831 - DNA, 25 bp, Homo sapien
tttcccagacaccggaggatcccag

SEQ ID NO: 3481832 - DNA, 25 bp, Homo sapien
tccctaggcgctcggcgctggagac

SEQ ID NO: 3481833 - DNA, 25 bp, Homo sapien
gctggaagccgctgcaacgggggcg

SEQ ID NO: 3481834 - DNA, 25 bp, Homo sapien
ctggaagccgctgcaacgggggcgc

SEQ ID NO: 3481835 - DNA, 25 bp, Homo sapien
gccgctgcaacgggggcgccggcct

SEQ ID NO: 3481836 - DNA, 25 bp, Homo sapien
atgaacacgcaggaacacccacgct

SEQ ID NO: 3481837 - DNA, 25 bp, Homo sapien
ggagggatcgcttctccttctgatt

SEQ ID NO: 3481838 - DNA, 25 bp, Homo sapien
ctccccatcaatgaacacgcaggaa

SEQ ID NO: 3481839 - DNA, 25 bp, Homo sapien
gagaccgaacccgagagcgacatcc

SEQ ID NO: 3481840 - DNA, 25 bp, Homo sapien
acaccgacgacttcacctgaagcgt

SEQ ID NO: 3481841 - DNA, 25 bp, Homo sapien
ttaaggagagctgtgcacattgatc

SEQ ID NO: 3481842 - DNA, 25 bp, Homo sapien
tgcacattgatcatccacaccgacg

SEQ ID NO: 3481843 - DNA, 25 bp, Homo sapien
gacgacttcacctgaagcgtccaca

SEQ ID NO: 3481844 - DNA, 25 bp, Homo sapien
gcctctctgaaaagcaacgccttta

SEQ ID NO: 3481845 - DNA, 25 bp, Homo sapien
ctttagctctgcgaatgactgtcca

SEQ ID NO: 3481846 - DNA, 25 bp, Homo sapien
ctgcgaatgactgtccactccctga

SEQ ID NO: 3481847 - DNA, 25 bp, Homo sapien
gctggagcaaagctggcgggagaca

SEQ ID NO: 3481848 - DNA, 25 bp, Homo sapien
agcagcttgggtggtgctctctctg

SEQ ID NO: 3481849 - DNA, 25 bp, Homo sapien
tttattatagtcagcagcttgggtg

SEQ ID NO: 3481850 - DNA, 25 bp, Homo sapien
catttattatagtcagcagcttggg

SEQ ID NO: 3481851 - DNA, 25 bp, Homo sapien
cagcccctgccatttattatagtca

SEQ ID NO: 3481852 - DNA, 25 bp, Homo sapien
aggactgcgatcactgccacatcta

SEQ ID NO: 3481853 - DNA, 25 bp, Homo sapien
agaggactgcgatcactgccacatc

SEQ ID NO: 3481854 - DNA, 25 bp, Homo sapien
ggactgcgatcactgccacatctac

SEQ ID NO: 3481855 - DNA, 25 bp, Homo sapien
ccagaggactgcgatcactgccaca

SEQ ID NO: 3481856 - DNA, 25 bp, Homo sapien
aagacagcccacttgtggcctccct

SEQ ID NO: 3481857 - DNA, 25 bp, Homo sapien
ctgccaaggcctgatggataaagtg

SEQ ID NO: 3481858 - DNA, 25 bp, Homo sapien
gataaagtgataccgggagatctgt

SEQ ID NO: 3481859 - DNA, 25 bp, Homo sapien
cctgctccactggtctgtaaggctg

SEQ ID NO: 3481860 - DNA, 25 bp, Homo sapien
accagtcacgcacaatgcaggccat

SEQ ID NO: 3481861 - DNA, 25 bp, Homo sapien
ccagtcacgcacaatgcaggccatc

SEQ ID NO: 3481862 - DNA, 25 bp, Homo sapien
tcaccagtcacgcacaatgcaggcc

SEQ ID NO: 3481863 - DNA, 25 bp, Homo sapien
caccagtcacgcacaatgcaggcca

SEQ ID NO: 3481864 - DNA, 25 bp, Homo sapien
taggcatccgtttttcagttgacag

SEQ ID NO: 3481865 - DNA, 25 bp, Homo sapien
gtcttcttcaagaggttgagggctc

SEQ ID NO: 3481866 - DNA, 25 bp, Homo sapien
tccatcataccacattatgttgaag

SEQ ID NO: 3481867 - DNA, 25 bp, Homo sapien
ttagaggagagataccctccatccc

SEQ ID NO: 3481868 - DNA, 25 bp, Homo sapien
ggcttgagtgataaaggcggctttc

SEQ ID NO: 3481869 - DNA, 25 bp, Homo sapien
aaacataagcaagacccagaggtgt

SEQ ID NO: 3481870 - DNA, 25 bp, Homo sapien
taagcaagacccagaggtgttgaaa

SEQ ID NO: 3481871 - DNA, 25 bp, Homo sapien
aaaatgcaagggcttgagtgataaa

SEQ ID NO: 3481872 - DNA, 25 bp, Homo sapien
cattggcctggtttttataactgca

SEQ ID NO: 3481873 - DNA, 25 bp, Homo sapien
cagcaccccggtgggagaaaacatt

SEQ ID NO: 3481874 - DNA, 25 bp, Homo sapien
tttcccgcaagtggtgggtggctac

SEQ ID NO: 3481875 - DNA, 25 bp, Homo sapien
agctaagtgagagtccagcagcacc

SEQ ID NO: 3481876 - DNA, 25 bp, Homo sapien
caagttagactgttcaactggcagg

SEQ ID NO: 3481877 - DNA, 25 bp, Homo sapien
cgcaggcaccctgagtaagttaggt

SEQ ID NO: 3481878 - DNA, 25 bp, Homo sapien
ctgacccgcgtagccttttgtaagg

SEQ ID NO: 3481879 - DNA, 25 bp, Homo sapien
tcagcccgtaaataaaaggtcactc

SEQ ID NO: 3481880 - DNA, 25 bp, Homo sapien
ggacaatatggccatctggtttctg

SEQ ID NO: 3481881 - DNA, 25 bp, Homo sapien
ttccagctcgttcaaaatgtacaca

SEQ ID NO: 3481882 - DNA, 25 bp, Homo sapien
taccgccctccagaggactttgagg

SEQ ID NO: 3481883 - DNA, 25 bp, Homo sapien
tgtacaatctgcatccgtatagtgc

SEQ ID NO: 3481884 - DNA, 25 bp, Homo sapien
catcatcagctgacattgcttcact

SEQ ID NO: 3481885 - DNA, 25 bp, Homo sapien
gtaaatactttgtacaaggttatgc

SEQ ID NO: 3481886 - DNA, 25 bp, Homo sapien
taatgagtgcatcccgggctcagac

SEQ ID NO: 3481887 - DNA, 25 bp, Homo sapien
tcagacacaggcttgccagacacct

SEQ ID NO: 3481888 - DNA, 25 bp, Homo sapien
aagaaatgctagaaggatacccaag

SEQ ID NO: 3481889 - DNA, 25 bp, Homo sapien
taatgactgggtgttcacgtgcgtg

SEQ ID NO: 3481890 - DNA, 25 bp, Homo sapien
cgaaccttgttacgatgtcggtata

SEQ ID NO: 3481891 - DNA, 25 bp, Homo sapien
cacgtgcgtgtttgagatgtgccac

SEQ ID NO: 3481892 - DNA, 25 bp, Homo sapien
aacaggaacaccataaagagtggtc

SEQ ID NO: 3481893 - DNA, 25 bp, Homo sapien
cagggccaatgaaggtcctgacttc

SEQ ID NO: 3481894 - DNA, 25 bp, Homo sapien
tgacttcagcaggatggaaagcccc

SEQ ID NO: 3481895 - DNA, 25 bp, Homo sapien
taaaacaacccagacattagcatgc

SEQ ID NO: 3481896 - DNA, 25 bp, Homo sapien
tgggacctcaggtacgaagctaact

SEQ ID NO: 3481897 - DNA, 25 bp, Homo sapien
cattgtgtgtcagggtatggcaacc

SEQ ID NO: 3481898 - DNA, 25 bp, Homo sapien
taaagagaggcccacatacaccaat

SEQ ID NO: 3481899 - DNA, 25 bp, Homo sapien
cagagacttacaacgtgcagggcct

SEQ ID NO: 3481900 - DNA, 25 bp, Homo sapien
aacactgcctgtccctttgaatgag

SEQ ID NO: 3481901 - DNA, 25 bp, Homo sapien
gctgagctaagccagattacagtgt

SEQ ID NO: 3481902 - DNA, 25 bp, Homo sapien
gataaggcccacagttgatcaccag

SEQ ID NO: 3481903 - DNA, 25 bp, Homo sapien
caccctagtggtatactggaagcca

SEQ ID NO: 3481904 - DNA, 25 bp, Homo sapien
tacagtgtgctcaccaagtgtccct

SEQ ID NO: 3481905 - DNA, 25 bp, Homo sapien
ccacatctgttgtcatgctgtgtaa

SEQ ID NO: 3481906 - DNA, 25 bp, Homo sapien
cacatctgttgtcatgctgtgtaac

SEQ ID NO: 3481907 - DNA, 25 bp, Homo sapien
cttcaggtacctcagaacggccaca

SEQ ID NO: 3481908 - DNA, 25 bp, Homo sapien
cggccacagcaaaaactgatggcaa

SEQ ID NO: 3481909 - DNA, 25 bp, Homo sapien
tgatggcaacaaggacgctgaaagg

SEQ ID NO: 3481910 - DNA, 25 bp, Homo sapien
tcaaggctgtcataactcctatctc

SEQ ID NO: 3481911 - DNA, 25 bp, Homo sapien
gctcattattatccctgttacacaa

SEQ ID NO: 3481912 - DNA, 25 bp, Homo sapien
ggatcttaggtcacaaaggcaggat

SEQ ID NO: 3481913 - DNA, 25 bp, Homo sapien
aaccctcacaacagtcagctcatta

SEQ ID NO: 3481914 - DNA, 25 bp, Homo sapien
tagctcactcaagggaatatatgga

SEQ ID NO: 3481915 - DNA, 25 bp, Homo sapien
tcttgtgtcttgttctgggttcaca

SEQ ID NO: 3481916 - DNA, 25 bp, Homo sapien
gatggacactcacagagctcttgtg

SEQ ID NO: 3481917 - DNA, 25 bp, Homo sapien
ccttggatggacactcacagagctc

SEQ ID NO: 3481918 - DNA, 25 bp, Homo sapien
gtcactgcgacccttggatggacac

SEQ ID NO: 3481919 - DNA, 25 bp, Homo sapien
cagaaggctataagccaaaaggcca

SEQ ID NO: 3481920 - DNA, 25 bp, Homo sapien
tctgcttgccaaagcgataacctga

SEQ ID NO: 3481921 - DNA, 25 bp, Homo sapien
caaaaggccaactgctatgtgggtt

SEQ ID NO: 3481922 - DNA, 25 bp, Homo sapien
tgtgggttaccggagccttctgcat

SEQ ID NO: 3481923 - DNA, 25 bp, Homo sapien
tggccaggcaaagctcctcggtgtc

SEQ ID NO: 3481924 - DNA, 25 bp, Homo sapien
gtcagaccagcactccatgtggcca

SEQ ID NO: 3481925 - DNA, 25 bp, Homo sapien
gccaggcaaagctcctcggtgtcag

SEQ ID NO: 3481926 - DNA, 25 bp, Homo sapien
ctcggtgtcagaccagcactccatg

SEQ ID NO: 3481927 - DNA, 25 bp, Homo sapien
aaatgctgcccctgaatacagtcag

SEQ ID NO: 3481928 - DNA, 25 bp, Homo sapien
ttgtcaaggccaaaagctcttgaga

SEQ ID NO: 3481929 - DNA, 25 bp, Homo sapien
ggtaactctccatggttgtcaaggc

SEQ ID NO: 3481930 - DNA, 25 bp, Homo sapien
agttcattcttattgccacactcaa

SEQ ID NO: 3481931 - DNA, 25 bp, Homo sapien
gaatagctaagagctgcgcaagcca

SEQ ID NO: 3481932 - DNA, 25 bp, Homo sapien
gaagcagtggtatttcagccaagcc

SEQ ID NO: 3481933 - DNA, 25 bp, Homo sapien
tgggcagaattagagccagcctgat

SEQ ID NO: 3481934 - DNA, 25 bp, Homo sapien
tctttggcaaaggttcagttccacc

SEQ ID NO: 3481935 - DNA, 25 bp, Homo sapien
gtttcaggccacacgacagtcatgc

SEQ ID NO: 3481936 - DNA, 25 bp, Homo sapien
caaatggagccaatcaggtctgaga

SEQ ID NO: 3481937 - DNA, 25 bp, Homo sapien
acagagcgccctcttgacaggagag

SEQ ID NO: 3481938 - DNA, 25 bp, Homo sapien
tctgtatctagtcaccaaatggagc

SEQ ID NO: 3481939 - DNA, 25 bp, Homo sapien
tgctctgaggctgctcaacagagtg

SEQ ID NO: 3481940 - DNA, 25 bp, Homo sapien
ctgaggctgctcaacagagtgcctg

SEQ ID NO: 3481941 - DNA, 25 bp, Homo sapien
ctgctcaacagagtgcctggggctg

SEQ ID NO: 3481942 - DNA, 25 bp, Homo sapien
ctctgaggctgctcaacagagtgcc

SEQ ID NO: 3481943 - DNA, 25 bp, Homo sapien
ttgcattgctggtggactcacatgc

SEQ ID NO: 3481944 - DNA, 25 bp, Homo sapien
gttctctgtgaccaaggacttgttc

SEQ ID NO: 3481945 - DNA, 25 bp, Homo sapien
gctccatgcattggttctctgtgac

SEQ ID NO: 3481946 - DNA, 25 bp, Homo sapien
catgcgtggcggtaggcactgtacc

SEQ ID NO: 3481947 - DNA, 25 bp, Homo sapien
tacagaagccgtgtatgcacaaaac

SEQ ID NO: 3481948 - DNA, 25 bp, Homo sapien
agtacagaagccgtgtatgcacaaa

SEQ ID NO: 3481949 - DNA, 25 bp, Homo sapien
ttcagtacagaagccgtgtatgcac

SEQ ID NO: 3481950 - DNA, 25 bp, Homo sapien
tcagtacagaagccgtgtatgcaca

SEQ ID NO: 3481951 - DNA, 25 bp, Homo sapien
tctgctccgcttggaacagctggtg

SEQ ID NO: 3481952 - DNA, 25 bp, Homo sapien
aggttgatgaagttacggagaagca

SEQ ID NO: 3481953 - DNA, 25 bp, Homo sapien
gatgaagttacggagaagcaagaca

SEQ ID NO: 3481954 - DNA, 25 bp, Homo sapien
caaggtgctcaactgctgctgggtt

SEQ ID NO: 3481955 - DNA, 25 bp, Homo sapien
ctcccgtggatgccaaggctttttg

SEQ ID NO: 3481956 - DNA, 25 bp, Homo sapien
tcctcccgtggatgccaaggctttt

SEQ ID NO: 3481957 - DNA, 25 bp, Homo sapien
cctcccgtggatgccaaggcttttt

SEQ ID NO: 3481958 - DNA, 25 bp, Homo sapien
tcccgtggatgccaaggctttttgt

SEQ ID NO: 3481959 - DNA, 25 bp, Homo sapien
cagcaacttctgtcttccttcttgt

SEQ ID NO: 3481960 - DNA, 25 bp, Homo sapien
caacttctgtcttccttcttgtcat

SEQ ID NO: 3481961 - DNA, 25 bp, Homo sapien
caattctcagatgcagcaacttctg

SEQ ID NO: 3481962 - DNA, 25 bp, Homo sapien
aattctcagatgcagcaacttctgt

SEQ ID NO: 3481963 - DNA, 25 bp, Homo sapien
ggggtcaccgacatgggagaataac

SEQ ID NO: 3481964 - DNA, 25 bp, Homo sapien
gccaaaagtcggaaagcttctgtgc

SEQ ID NO: 3481965 - DNA, 25 bp, Homo sapien
gggaagatgttgtgtgccttgttct

SEQ ID NO: 3481966 - DNA, 25 bp, Homo sapien
tgggacggaggtagaggacgtactc

SEQ ID NO: 3481967 - DNA, 25 bp, Homo sapien
gcagggaaaacaggcagtcttcact

SEQ ID NO: 3481968 - DNA, 25 bp, Homo sapien
ggaagtctgctgctacttaacattg

SEQ ID NO: 3481969 - DNA, 25 bp, Homo sapien
ctggcagggaaaacaggcagtcttc

SEQ ID NO: 3481970 - DNA, 25 bp, Homo sapien
tggcagggaaaacaggcagtcttca

SEQ ID NO: 3481971 - DNA, 25 bp, Homo sapien
ttggacgacgtatagagctccaggg

SEQ ID NO: 3481972 - DNA, 25 bp, Homo sapien
gtcttcctttacaaagaggccgatg

SEQ ID NO: 3481973 - DNA, 25 bp, Homo sapien
cgactgaccgtggtctgcagggctt

SEQ ID NO: 3481974 - DNA, 25 bp, Homo sapien
gggccgagaacttacatttccagcg

SEQ ID NO: 3481975 - DNA, 25 bp, Homo sapien
agttgcaactagaagaaattaggga

SEQ ID NO: 3481976 - DNA, 25 bp, Homo sapien
tgaagaagttgcaactagaagaaat

SEQ ID NO: 3481977 - DNA, 25 bp, Homo sapien
tacaatgagggagaatcatctactg

SEQ ID NO: 3481978 - DNA, 25 bp, Homo sapien
atctactgtacaaactagaataatg

SEQ ID NO: 3481979 - DNA, 25 bp, Homo sapien
tatcccgagaaaatatggtagccac

SEQ ID NO: 3481980 - DNA, 25 bp, Homo sapien
tggaagtggtaagccagggtcacat

SEQ ID NO: 3481981 - DNA, 25 bp, Homo sapien
gtcacaccctagcttgacgtcaatg

SEQ ID NO: 3481982 - DNA, 25 bp, Homo sapien
tcatggttagcaaatcggatatccc

SEQ ID NO: 3481983 - DNA, 25 bp, Homo sapien
tagatccaaccctcgctggtgctgg

SEQ ID NO: 3481984 - DNA, 25 bp, Homo sapien
tcagccttggtaatgtaattctcag

SEQ ID NO: 3481985 - DNA, 25 bp, Homo sapien
cagccggtggttaaggacgtgccat

SEQ ID NO: 3481986 - DNA, 25 bp, Homo sapien
gaaatatccaggtgctgcattcatc

SEQ ID NO: 3481987 - DNA, 25 bp, Homo sapien
cattagtaatctctcgaataaaaga

SEQ ID NO: 3481988 - DNA, 25 bp, Homo sapien
catcattagtaatctctcgaataaa

SEQ ID NO: 3481989 - DNA, 25 bp, Homo sapien
tgacatcattagtaatctctcgaat

SEQ ID NO: 3481990 - DNA, 25 bp, Homo sapien
gtaatctctcgaataaaagatgaca

SEQ ID NO: 3481991 - DNA, 25 bp, Homo sapien
ctggcagatgatagtaagaggagtc

SEQ ID NO: 3481992 - DNA, 25 bp, Homo sapien
tagtaagaggagtcgtctccccgag

SEQ ID NO: 3481993 - DNA, 25 bp, Homo sapien
tccatccccaaacgtgagagagttg

SEQ ID NO: 3481994 - DNA, 25 bp, Homo sapien
ggatgacgatgtatttaagattgaa

SEQ ID NO: 3481995 - DNA, 25 bp, Homo sapien
actgggacagccagtacttcccaaa

SEQ ID NO: 3481996 - DNA, 25 bp, Homo sapien
atcctctcaccatgccgacacacaa

SEQ ID NO: 3481997 - DNA, 25 bp, Homo sapien
ctttggcatcgaagcactgggacag

SEQ ID NO: 3481998 - DNA, 25 bp, Homo sapien
aaaaaggcatcgcttctgggggccg

SEQ ID NO: 3481999 - DNA, 25 bp, Homo sapien
caaacacagtgatgggagcatcttt

SEQ ID NO: 3482000 - DNA, 25 bp, Homo sapien
cactagtcttgcttgcatgcatcca

SEQ ID NO: 3482001 - DNA, 25 bp, Homo sapien
gagcatctttctcgtaatctcggaa

SEQ ID NO: 3482002 - DNA, 25 bp, Homo sapien
cactccgctgaggtaaactatgagg

SEQ ID NO: 3482003 - DNA, 25 bp, Homo sapien
tggttgtgtagtaagttccttttga

SEQ ID NO: 3482004 - DNA, 25 bp, Homo sapien
cattcactttggtcaaccaacccag

SEQ ID NO: 3482005 - DNA, 25 bp, Homo sapien
agtgcagtcactccaggatacttac

SEQ ID NO: 3482006 - DNA, 25 bp, Homo sapien
tagaaacccacaggaagtgtcttgc

SEQ ID NO: 3482007 - DNA, 25 bp, Homo sapien
ggtattgctctctaataaggcttca

SEQ ID NO: 3482008 - DNA, 25 bp, Homo sapien
tcaagatattgtgtgcagtctgaac

SEQ ID NO: 3482009 - DNA, 25 bp, Homo sapien
tgtgtgcagtctgaacgcagcgaag

SEQ ID NO: 3482010 - DNA, 25 bp, Homo sapien
gggagcaatagacatgatcgataat

SEQ ID NO: 3482011 - DNA, 25 bp, Homo sapien
taaatcccttctggtagtgaagagg

SEQ ID NO: 3482012 - DNA, 25 bp, Homo sapien
tactagtagcggtgtagaagtcctc

SEQ ID NO: 3482013 - DNA, 25 bp, Homo sapien
tactgtagtgtaactggcttcctag

SEQ ID NO: 3482014 - DNA, 25 bp, Homo sapien
ggcttcctagaaatagtccctgctt

SEQ ID NO: 3482015 - DNA, 25 bp, Homo sapien
tgtccactcaaataagccgggctct

SEQ ID NO: 3482016 - DNA, 25 bp, Homo sapien
tatccatgcaggtaatgtgctccca

SEQ ID NO: 3482017 - DNA, 25 bp, Homo sapien
gccgggctctacacggatcttcaag

SEQ ID NO: 3482018 - DNA, 25 bp, Homo sapien
gctgcagctaactctgatggaggta

SEQ ID NO: 3482019 - DNA, 25 bp, Homo sapien
tgatttgccggagaggaaaaggcaa

SEQ ID NO: 3482020 - DNA, 25 bp, Homo sapien
gaattctgatttgccggagaggaaa

SEQ ID NO: 3482021 - DNA, 25 bp, Homo sapien
ttctgatttgccggagaggaaaagg

SEQ ID NO: 3482022 - DNA, 25 bp, Homo sapien
tgaattctgatttgccggagaggaa

SEQ ID NO: 3482023 - DNA, 25 bp, Homo sapien
tatcataggattctgaaacaactaa

SEQ ID NO: 3482024 - DNA, 25 bp, Homo sapien
gatataagtatcataggattctgaa

SEQ ID NO: 3482025 - DNA, 25 bp, Homo sapien
tgttacttggaaacttctactgata

SEQ ID NO: 3482026 - DNA, 25 bp, Homo sapien
cttctactgatataagtatcatagg

SEQ ID NO: 3482027 - DNA, 25 bp, Homo sapien
gaagctaactaaatgctctgcaggg

SEQ ID NO: 3482028 - DNA, 25 bp, Homo sapien
gaaaatggcaaggtatgggaagact

SEQ ID NO: 3482029 - DNA, 25 bp, Homo sapien
aaacacactcaagaagacaatttgc

SEQ ID NO: 3482030 - DNA, 25 bp, Homo sapien
caagaagacaatttgcctaagcaat

SEQ ID NO: 3482031 - DNA, 25 bp, Homo sapien
cttcaagggaagatgcgtgggccac

SEQ ID NO: 3482032 - DNA, 25 bp, Homo sapien
tgcgtgggccacaatcaggatgtta

SEQ ID NO: 3482033 - DNA, 25 bp, Homo sapien
ccctgaagttggcaggtacacgctt

SEQ ID NO: 3482034 - DNA, 25 bp, Homo sapien
gaccatttgtacgaagtccttggag

SEQ ID NO: 3482035 - DNA, 25 bp, Homo sapien
gtctctgcaacattcaaagctgaag

SEQ ID NO: 3482036 - DNA, 25 bp, Homo sapien
ctctgcaacattcaaagctgaagct

SEQ ID NO: 3482037 - DNA, 25 bp, Homo sapien
tctctgcaacattcaaagctgaagc

SEQ ID NO: 3482038 - DNA, 25 bp, Homo sapien
agcccccagttggtccatgggtaag

SEQ ID NO: 3482039 - DNA, 25 bp, Homo sapien
ccagttggtccatgggtaagaggaa

SEQ ID NO: 3482040 - DNA, 25 bp, Homo sapien
ctctccagttgaagcccccagttgg

SEQ ID NO: 3482041 - DNA, 25 bp, Homo sapien
aggaaggattggtggatctgtcagc

SEQ ID NO: 3482042 - DNA, 25 bp, Homo sapien
ttagctgtgcatacccagagggaac

SEQ ID NO: 3482043 - DNA, 25 bp, Homo sapien
tccttaagcgggtatcttcagccag

SEQ ID NO: 3482044 - DNA, 25 bp, Homo sapien
tctgggagaaatgaggccccttagc

SEQ ID NO: 3482045 - DNA, 25 bp, Homo sapien
caggtgccccgatttaggaagacaa

SEQ ID NO: 3482046 - DNA, 25 bp, Homo sapien
ttgcgcaacgctagaagaaaccatg

SEQ ID NO: 3482047 - DNA, 25 bp, Homo sapien
ggttatttccatacccagaagctgg

SEQ ID NO: 3482048 - DNA, 25 bp, Homo sapien
tgtggccatcaacagtcagatagtc

SEQ ID NO: 3482049 - DNA, 25 bp, Homo sapien
aagctgggtcagtgtttgcgcaacg

SEQ ID NO: 3482050 - DNA, 25 bp, Homo sapien
gcattaccggattgatgtggcacac

SEQ ID NO: 3482051 - DNA, 25 bp, Homo sapien
gaacaatggattgtagcccagtcag

SEQ ID NO: 3482052 - DNA, 25 bp, Homo sapien
cagtttcaaggtgaggtgttcaagc

SEQ ID NO: 3482053 - DNA, 25 bp, Homo sapien
tccatggaggaacagacgcggtatt

SEQ ID NO: 3482054 - DNA, 25 bp, Homo sapien
ggccatttaatcagccattcagatt

SEQ ID NO: 3482055 - DNA, 25 bp, Homo sapien
cagagtgaaaaatacgcccctcttt

SEQ ID NO: 3482056 - DNA, 25 bp, Homo sapien
gggtgaagcaataagctcctagcta

SEQ ID NO: 3482057 - DNA, 25 bp, Homo sapien
actgtaatctgaactccatactggg

SEQ ID NO: 3482058 - DNA, 25 bp, Homo sapien
cgcaatgcagccttttagactagtg

SEQ ID NO: 3482059 - DNA, 25 bp, Homo sapien
taaacactggacttgcagagtgcct

SEQ ID NO: 3482060 - DNA, 25 bp, Homo sapien
caatggtgccatagctgtatcaaca

SEQ ID NO: 3482061 - DNA, 25 bp, Homo sapien
caagtgccacggagagtttacaaag

SEQ ID NO: 3482062 - DNA, 25 bp, Homo sapien
caattgtggtttcggagagtatacc

SEQ ID NO: 3482063 - DNA, 25 bp, Homo sapien
gagctctgcccagataagtgaccag

SEQ ID NO: 3482064 - DNA, 25 bp, Homo sapien
caaatatgagctgatttcagaaggc

SEQ ID NO: 3482065 - DNA, 25 bp, Homo sapien
cacaggatagcaagggccagcttca

SEQ ID NO: 3482066 - DNA, 25 bp, Homo sapien
tgaactggtggacgacatacatgtg

SEQ ID NO: 3482067 - DNA, 25 bp, Homo sapien
cacgggtgccatattcaactggttg

SEQ ID NO: 3482068 - DNA, 25 bp, Homo sapien
ctggacttggacattaagaacggtt

SEQ ID NO: 3482069 - DNA, 25 bp, Homo sapien
tgtatccttttcatccacgggtgcc

SEQ ID NO: 3482070 - DNA, 25 bp, Homo sapien
tgctgtggcacctttgtcaacttcc

SEQ ID NO: 3482071 - DNA, 25 bp, Homo sapien
tgcaaggggaaccatgccagcaagc

SEQ ID NO: 3482072 - DNA, 25 bp, Homo sapien
ctctgtaggctctagagacatgtac

SEQ ID NO: 3482073 - DNA, 25 bp, Homo sapien
gctctagagacatgtacatccccat

SEQ ID NO: 3482074 - DNA, 25 bp, Homo sapien
taggctctagagacatgtacatccc

SEQ ID NO: 3482075 - DNA, 25 bp, Homo sapien
tgtaggctctagagacatgtacatc

SEQ ID NO: 3482076 - DNA, 25 bp, Homo sapien
tggggtgtgagatatcttctttgct

SEQ ID NO: 3482077 - DNA, 25 bp, Homo sapien
ggatggggtgtgagatatcttcttt

SEQ ID NO: 3482078 - DNA, 25 bp, Homo sapien
cagagggatggggtgtgagatatct

SEQ ID NO: 3482079 - DNA, 25 bp, Homo sapien
ggtgtgagatatcttctttgcttac

SEQ ID NO: 3482080 - DNA, 25 bp, Homo sapien
tggtaaaatgatggtctaaacagaa

SEQ ID NO: 3482081 - DNA, 25 bp, Homo sapien
ttggtaaaatgatggtctaaacaga

SEQ ID NO: 3482082 - DNA, 25 bp, Homo sapien
tttggtaaaatgatggtctaaacag

SEQ ID NO: 3482083 - DNA, 25 bp, Homo sapien
tctgtgtggttagtcagagaggcct

SEQ ID NO: 3482084 - DNA, 25 bp, Homo sapien
ccttcctccacggtgatggtttctg

SEQ ID NO: 3482085 - DNA, 25 bp, Homo sapien
tcagagaagtgacacactttagagt

SEQ ID NO: 3482086 - DNA, 25 bp, Homo sapien
cacactttagagtgagcgtctggcc

SEQ ID NO: 3482087 - DNA, 25 bp, Homo sapien
ttgtacacgccttcatcttgcaggg

SEQ ID NO: 3482088 - DNA, 25 bp, Homo sapien
tacagagtcgctgtaatgtaagcac

SEQ ID NO: 3482089 - DNA, 25 bp, Homo sapien
tcttgcagggttacgttaggcacag

SEQ ID NO: 3482090 - DNA, 25 bp, Homo sapien
gatgaagaagctggtatttggaatt

SEQ ID NO: 3482091 - DNA, 25 bp, Homo sapien
gcttgcttctcatggtggagcacat

SEQ ID NO: 3482092 - DNA, 25 bp, Homo sapien
cggacacttccatgctattcccaag

SEQ ID NO: 3482093 - DNA, 25 bp, Homo sapien
caagtagccaggttatctgcggagg

SEQ ID NO: 3482094 - DNA, 25 bp, Homo sapien
tggagcacatgagtacaacatgttc

SEQ ID NO: 3482095 - DNA, 25 bp, Homo sapien
gtagtattacatttcttcccatcag

SEQ ID NO: 3482096 - DNA, 25 bp, Homo sapien
ttcccatcagtttcaaattcatgga

SEQ ID NO: 3482097 - DNA, 25 bp, Homo sapien
ctggtagtattacatttcttcccat

SEQ ID NO: 3482098 - DNA, 25 bp, Homo sapien
gtttcaaattcatggagcgttccac

SEQ ID NO: 3482099 - DNA, 25 bp, Homo sapien
tcttcaaaccggaagggtgctacta

SEQ ID NO: 3482100 - DNA, 25 bp, Homo sapien
tactagttttctcccttgcaggcct

SEQ ID NO: 3482101 - DNA, 25 bp, Homo sapien
tgtgtcggataatgcagtccaccgt

SEQ ID NO: 3482102 - DNA, 25 bp, Homo sapien
gccataagtgtggattatgagagtg

SEQ ID NO: 3482103 - DNA, 25 bp, Homo sapien
acactgacatgtcgggtgggcacag

SEQ ID NO: 3482104 - DNA, 25 bp, Homo sapien
gcttaggaatgtttccagagggtca

SEQ ID NO: 3482105 - DNA, 25 bp, Homo sapien
gaacaggttttaccagccacatcca

SEQ ID NO: 3482106 - DNA, 25 bp, Homo sapien
taggttttaccagtcattgaacagg

SEQ ID NO: 3482107 - DNA, 25 bp, Homo sapien
gagaatatatttagcggctacctgc

SEQ ID NO: 3482108 - DNA, 25 bp, Homo sapien
tatttagcggctacctgcttgtaga

SEQ ID NO: 3482109 - DNA, 25 bp, Homo sapien
aaagagattggagaatatatttagc

SEQ ID NO: 3482110 - DNA, 25 bp, Homo sapien
tagcggctacctgcttgtagaggtt

SEQ ID NO: 3482111 - DNA, 25 bp, Homo sapien
caaaattctgctactatagagagca

SEQ ID NO: 3482112 - DNA, 25 bp, Homo sapien
aacaaaattctgctactatagagag

SEQ ID NO: 3482113 - DNA, 25 bp, Homo sapien
tgctactatagagagcagttttacc

SEQ ID NO: 3482114 - DNA, 25 bp, Homo sapien
ctatagagagcagttttacccacat

SEQ ID NO: 3482115 - DNA, 25 bp, Homo sapien
tgctgtgggtcttgagaggatagag

SEQ ID NO: 3482116 - DNA, 25 bp, Homo sapien
tccttgtcaatctccgatgtactag

SEQ ID NO: 3482117 - DNA, 25 bp, Homo sapien
cggtggtcaagtcaggatcttgagt

SEQ ID NO: 3482118 - DNA, 25 bp, Homo sapien
gtactagaatcttccgttactgaga

SEQ ID NO: 3482119 - DNA, 25 bp, Homo sapien
aggatcttgagtggtttgttctttc

SEQ ID NO: 3482120 - DNA, 25 bp, Homo sapien
gctggactatgatgaagagtatgaa

SEQ ID NO: 3482121 - DNA, 25 bp, Homo sapien
ctttcttccatatcacatgtgcttt

SEQ ID NO: 3482122 - DNA, 25 bp, Homo sapien
tcttccatatcacatgtgctttcct

SEQ ID NO: 3482123 - DNA, 25 bp, Homo sapien
aggaaggacaccagcgtgagcagca

SEQ ID NO: 3482124 - DNA, 25 bp, Homo sapien
tttctagtgtgtgttctgaaacttc

SEQ ID NO: 3482125 - DNA, 25 bp, Homo sapien
tatttgaccttgatctgtaactttc

SEQ ID NO: 3482126 - DNA, 25 bp, Homo sapien
tctagtgtgtgttctgaaacttcgt

SEQ ID NO: 3482127 - DNA, 25 bp, Homo sapien
tgatctgtaactttctagtgtgtgt

SEQ ID NO: 3482128 - DNA, 25 bp, Homo sapien
ttcatgcaacgcatagggtgggaag

SEQ ID NO: 3482129 - DNA, 25 bp, Homo sapien
tacaactttgtgatgtagttcatgc

SEQ ID NO: 3482130 - DNA, 25 bp, Homo sapien
tactctctggtacttggatgtgctt

SEQ ID NO: 3482131 - DNA, 25 bp, Homo sapien
tttgcttctgagtacaactttgtga

SEQ ID NO: 3482132 - DNA, 25 bp, Homo sapien
tgcggcaaccctgaaatcacatgtt

SEQ ID NO: 3482133 - DNA, 25 bp, Homo sapien
ggcagatcattatccgaggacacca

SEQ ID NO: 3482134 - DNA, 25 bp, Homo sapien
gacaaggtccgctcatgtgatttag

SEQ ID NO: 3482135 - DNA, 25 bp, Homo sapien
tctaaggaattcgaatctttgggcc

SEQ ID NO: 3482136 - DNA, 25 bp, Homo sapien
ggcaagtgccaagattaattttcat

SEQ ID NO: 3482137 - DNA, 25 bp, Homo sapien
tagggtaagtcagcttcataaatat

SEQ ID NO: 3482138 - DNA, 25 bp, Homo sapien
cataatgattaacttcttgaaactc

SEQ ID NO: 3482139 - DNA, 25 bp, Homo sapien
gaatcacactattatggcaagtgcc

SEQ ID NO: 3482140 - DNA, 25 bp, Homo sapien
cggaggctgcaaacggccgtaataa

SEQ ID NO: 3482141 - DNA, 25 bp, Homo sapien
caccataagttgagtcgaaaagtcc

SEQ ID NO: 3482142 - DNA, 25 bp, Homo sapien
caaagttgaaacgtctggcagcgtc

SEQ ID NO: 3482143 - DNA, 25 bp, Homo sapien
taaaatacgcgaggaactgctacaa

SEQ ID NO: 3482144 - DNA, 25 bp, Homo sapien
ctaggatcccgcgtcccgaaccgca

SEQ ID NO: 3482145 - DNA, 25 bp, Homo sapien
aacacagacgccggcgccacatggg

SEQ ID NO: 3482146 - DNA, 25 bp, Homo sapien
ccctggagaccgcagacaacacaga

SEQ ID NO: 3482147 - DNA, 25 bp, Homo sapien
ggcaggacccgacctaggatcccgc

SEQ ID NO: 3482148 - DNA, 25 bp, Homo sapien
cacaaggggcgtttggaggtccagg

SEQ ID NO: 3482149 - DNA, 25 bp, Homo sapien
ctttgcttgttcctgaggaacaagg

SEQ ID NO: 3482150 - DNA, 25 bp, Homo sapien
ggcctgtcacaaggggcgtttggag

SEQ ID NO: 3482151 - DNA, 25 bp, Homo sapien
tttgcttgttcctgaggaacaaggc

SEQ ID NO: 3482152 - DNA, 25 bp, Homo sapien
aaattaacaggggatactcgtgttg

SEQ ID NO: 3482153 - DNA, 25 bp, Homo sapien
ttaacaggggatactcgtgttgata

SEQ ID NO: 3482154 - DNA, 25 bp, Homo sapien
gggatactcgtgttgataggagcag

SEQ ID NO: 3482155 - DNA, 25 bp, Homo sapien
acaggggatactcgtgttgatagga

SEQ ID NO: 3482156 - DNA, 25 bp, Homo sapien
gactggacatttaagttggtatgaa

SEQ ID NO: 3482157 - DNA, 25 bp, Homo sapien
tttaagttggtatgaaggacaggag

SEQ ID NO: 3482158 - DNA, 25 bp, Homo sapien
agagagcttgggaattagtttacgt

SEQ ID NO: 3482159 - DNA, 25 bp, Homo sapien
ggacatttaagttggtatgaaggac

SEQ ID NO: 3482160 - DNA, 25 bp, Homo sapien
tcttgcgtgaggctttctgaatcag

SEQ ID NO: 3482161 - DNA, 25 bp, Homo sapien
caaggagtcttttgaaatccgatgt

SEQ ID NO: 3482162 - DNA, 25 bp, Homo sapien
aatctcttgcgtgaggctttctgaa

SEQ ID NO: 3482163 - DNA, 25 bp, Homo sapien
tttgaaatccgatgtaagtcttctt

SEQ ID NO: 3482164 - DNA, 25 bp, Homo sapien
cgttgccccggattcgatcatcaaa

SEQ ID NO: 3482165 - DNA, 25 bp, Homo sapien
agctgtcgggctccataccgttgcc

SEQ ID NO: 3482166 - DNA, 25 bp, Homo sapien
tgcaggcttccccatcgagggcttt

SEQ ID NO: 3482167 - DNA, 25 bp, Homo sapien
gtatggtggttttgctcgcgagcca

SEQ ID NO: 3482168 - DNA, 25 bp, Homo sapien
ccccaggactgaagaggttgtttct

SEQ ID NO: 3482169 - DNA, 25 bp, Homo sapien
ttatcacgtgaagatcccctctcca

SEQ ID NO: 3482170 - DNA, 25 bp, Homo sapien
gatctctttcttcgtgagtgctgag

SEQ ID NO: 3482171 - DNA, 25 bp, Homo sapien
gctttgaggaggttctagtaacatc

SEQ ID NO: 3482172 - DNA, 25 bp, Homo sapien
cattttccaaggaaggctcgagtgt

SEQ ID NO: 3482173 - DNA, 25 bp, Homo sapien
taattcctctcattcagcgacagct

SEQ ID NO: 3482174 - DNA, 25 bp, Homo sapien
cacaagggaaatgctgtatgacaca

SEQ ID NO: 3482175 - DNA, 25 bp, Homo sapien
gacagcttacagtgctaatgccaga

SEQ ID NO: 3482176 - DNA, 25 bp, Homo sapien
aaagagctgtccgtggactccggca

SEQ ID NO: 3482177 - DNA, 25 bp, Homo sapien
tctgaaaacggcttgctgcgacggg

SEQ ID NO: 3482178 - DNA, 25 bp, Homo sapien
ccagttcgggtcatagcggaggtct

SEQ ID NO: 3482179 - DNA, 25 bp, Homo sapien
tcttcacgtacggagaaaggctgct

SEQ ID NO: 3482180 - DNA, 25 bp, Homo sapien
gacattttaaagtagccactacgta

SEQ ID NO: 3482181 - DNA, 25 bp, Homo sapien
cactgcaaacaaacgcaaattctgg

SEQ ID NO: 3482182 - DNA, 25 bp, Homo sapien
ttaaaggaagcgatatctagacact

SEQ ID NO: 3482183 - DNA, 25 bp, Homo sapien
gaagcgatatctagacactgcaaac

SEQ ID NO: 3482184 - DNA, 25 bp, Homo sapien
agcgtttgttttacccagctaggtg

SEQ ID NO: 3482185 - DNA, 25 bp, Homo sapien
tacaggatagcctatggaagcgttt

SEQ ID NO: 3482186 - DNA, 25 bp, Homo sapien
ctaggtggctgctatgacatcgtca

SEQ ID NO: 3482187 - DNA, 25 bp, Homo sapien
cactgtaaaccattggtggctttta

SEQ ID NO: 3482188 - DNA, 25 bp, Homo sapien
gacataacaatggacttataattac

SEQ ID NO: 3482189 - DNA, 25 bp, Homo sapien
taattacttatagcaattatagcaa

SEQ ID NO: 3482190 - DNA, 25 bp, Homo sapien
gagaatttcggatataataactgac

SEQ ID NO: 3482191 - DNA, 25 bp, Homo sapien
tatagcaataatcgacttgtagcaa

SEQ ID NO: 3482192 - DNA, 25 bp, Homo sapien
tttgaatccatcacgtgggagagaa

SEQ ID NO: 3482193 - DNA, 25 bp, Homo sapien
ttttgaatccatcacgtgggagaga

SEQ ID NO: 3482194 - DNA, 25 bp, Homo sapien
gagccaacgtgccaccagacgtaat

SEQ ID NO: 3482195 - DNA, 25 bp, Homo sapien
ttggaataggtctaagggcaaccac

SEQ ID NO: 3482196 - DNA, 25 bp, Homo sapien
tccagtaagagtggtggactctacc

SEQ ID NO: 3482197 - DNA, 25 bp, Homo sapien
gaaaatgacctcacattagcaggtg

SEQ ID NO: 3482198 - DNA, 25 bp, Homo sapien
caatgatagaaattgtctgccagtc

SEQ ID NO: 3482199 - DNA, 25 bp, Homo sapien
tagaaattgtctgccagtctgccat

SEQ ID NO: 3482200 - DNA, 25 bp, Homo sapien
cagccagcaaaagaggtggagacac

SEQ ID NO: 3482201 - DNA, 25 bp, Homo sapien
tgctgctgcctgtgtttagacacag

SEQ ID NO: 3482202 - DNA, 25 bp, Homo sapien
gctagattgggctgctacttcttgc

SEQ ID NO: 3482203 - DNA, 25 bp, Homo sapien
ggtttgtaggtaggaaagcaactca

SEQ ID NO: 3482204 - DNA, 25 bp, Homo sapien
gtacattatgttccttgctttgaag

SEQ ID NO: 3482205 - DNA, 25 bp, Homo sapien
gaaagcaactcagattgagtacagc

SEQ ID NO: 3482206 - DNA, 25 bp, Homo sapien
gcttgtggttctcgaattgcatttg

SEQ ID NO: 3482207 - DNA, 25 bp, Homo sapien
caggcaatcttgatgaggtgtttac

SEQ ID NO: 3482208 - DNA, 25 bp, Homo sapien
gtggttctcgaattgcatttggctg

SEQ ID NO: 3482209 - DNA, 25 bp, Homo sapien
catttggctgctattgttgaagcgc

SEQ ID NO: 3482210 - DNA, 25 bp, Homo sapien
catgaggatgctgattccctgactt

SEQ ID NO: 3482211 - DNA, 25 bp, Homo sapien
ccatgaggatgctgattccctgact

SEQ ID NO: 3482212 - DNA, 25 bp, Homo sapien
agtattagtatatgtttaaagatct

SEQ ID NO: 3482213 - DNA, 25 bp, Homo sapien
gtattagtatatgtttaaagatctt

SEQ ID NO: 3482214 - DNA, 25 bp, Homo sapien
tatcttcaggatcgatggcagcatt

SEQ ID NO: 3482215 - DNA, 25 bp, Homo sapien
ttggcattctgaatagacgtcttgt

SEQ ID NO: 3482216 - DNA, 25 bp, Homo sapien
tcttcaggatcgatggcagcatttt

SEQ ID NO: 3482217 - DNA, 25 bp, Homo sapien
tctgaatagacgtcttgtctgttac

SEQ ID NO: 3482218 - DNA, 25 bp, Homo sapien
aaaagagatgattcgggctgtccct

SEQ ID NO: 3482219 - DNA, 25 bp, Homo sapien
taggcagggataaagcctggtccaa

SEQ ID NO: 3482220 - DNA, 25 bp, Homo sapien
tcaacaggctctataggttcagtaa

SEQ ID NO: 3482221 - DNA, 25 bp, Homo sapien
tacacgggtcaagaaaaacctgagc

SEQ ID NO: 3482222 - DNA, 25 bp, Homo sapien
agcaataattgcaccctgtataaac

SEQ ID NO: 3482223 - DNA, 25 bp, Homo sapien
taattgcaccctgtataaacctcac

SEQ ID NO: 3482224 - DNA, 25 bp, Homo sapien
ataattgcaccctgtataaacctca

SEQ ID NO: 3482225 - DNA, 25 bp, Homo sapien
gcaataattgcaccctgtataaacc

SEQ ID NO: 3482226 - DNA, 25 bp, Homo sapien
tggtttctcgttctttctagcatgt

SEQ ID NO: 3482227 - DNA, 25 bp, Homo sapien
taaaaatacataggctgaaatggtc

SEQ ID NO: 3482228 - DNA, 25 bp, Homo sapien
ggtctcaggcatatcttctctcttt

SEQ ID NO: 3482229 - DNA, 25 bp, Homo sapien
ctctggtttctcgttctttctagca

SEQ ID NO: 3482230 - DNA, 25 bp, Homo sapien
tctgttccttaatatagcctgcgct

SEQ ID NO: 3482231 - DNA, 25 bp, Homo sapien
gcgcttaggcaatcaaacatctggg

SEQ ID NO: 3482232 - DNA, 25 bp, Homo sapien
tactcatgctggtcagaagctagaa

SEQ ID NO: 3482233 - DNA, 25 bp, Homo sapien
aagctttacttcgagagatacggag

SEQ ID NO: 3482234 - DNA, 25 bp, Homo sapien
ttcatattgagaccagtgttcctgg

SEQ ID NO: 3482235 - DNA, 25 bp, Homo sapien
catattgagaccagtgttcctggta

SEQ ID NO: 3482236 - DNA, 25 bp, Homo sapien
gccctcttggtacattgcttgattt

SEQ ID NO: 3482237 - DNA, 25 bp, Homo sapien
ggttgccctcttggtacattgcttg

SEQ ID NO: 3482238 - DNA, 25 bp, Homo sapien
taagtgcccttgaggcttgtacatc

SEQ ID NO: 3482239 - DNA, 25 bp, Homo sapien
gataaacaaactgagagcctttctg

SEQ ID NO: 3482240 - DNA, 25 bp, Homo sapien
tcaaatccatgtcagaaagggtgtg

SEQ ID NO: 3482241 - DNA, 25 bp, Homo sapien
gttattctggttcccctgactggca

SEQ ID NO: 3482242 - DNA, 25 bp, Homo sapien
cagttaaaaaggcacgaagtctaga

SEQ ID NO: 3482243 - DNA, 25 bp, Homo sapien
aactcagtggatacattaaagagca

SEQ ID NO: 3482244 - DNA, 25 bp, Homo sapien
tacctaagcatatcacaacgaaact

SEQ ID NO: 3482245 - DNA, 25 bp, Homo sapien
taaagagcatatgttggacacaggt

SEQ ID NO: 3482246 - DNA, 25 bp, Homo sapien
atctggagaagctctaaccgtctgg

SEQ ID NO: 3482247 - DNA, 25 bp, Homo sapien
caccaaggcttgctgatgctgctcc

SEQ ID NO: 3482248 - DNA, 25 bp, Homo sapien
tctgggtgagccatgaatctggaga

SEQ ID NO: 3482249 - DNA, 25 bp, Homo sapien
agcgtgacgctggataaggcccctt

SEQ ID NO: 3482250 - DNA, 25 bp, Homo sapien
tctctctgaactgagttgggattca

SEQ ID NO: 3482251 - DNA, 25 bp, Homo sapien
aactgagttgggattcactttctac

SEQ ID NO: 3482252 - DNA, 25 bp, Homo sapien
ttgctacggctaattttcacttggt

SEQ ID NO: 3482253 - DNA, 25 bp, Homo sapien
gaattgctacggctaattttcactt

SEQ ID NO: 3482254 - DNA, 25 bp, Homo sapien
ggaaaatgcaatggcaacaggcgct

SEQ ID NO: 3482255 - DNA, 25 bp, Homo sapien
gagacctctcgccaagatgacttga

SEQ ID NO: 3482256 - DNA, 25 bp, Homo sapien
catgtaggccctatgagaaaagact

SEQ ID NO: 3482257 - DNA, 25 bp, Homo sapien
gaaagttcaatcactggccagccca

SEQ ID NO: 3482258 - DNA, 25 bp, Homo sapien
cccacttgaggatccatggacttca

SEQ ID NO: 3482259 - DNA, 25 bp, Homo sapien
cctctttttcttctcgttagtatct

SEQ ID NO: 3482260 - DNA, 25 bp, Homo sapien
ctctaaaggccccacttgaggatcc

SEQ ID NO: 3482261 - DNA, 25 bp, Homo sapien
ctcgttagtatctcttgctgcctga

SEQ ID NO: 3482262 - DNA, 25 bp, Homo sapien
ggaggacatgagagcgtgaagttgg

SEQ ID NO: 3482263 - DNA, 25 bp, Homo sapien
acggatagggtcccgtccccagcag

SEQ ID NO: 3482264 - DNA, 25 bp, Homo sapien
tagttgcagattccacagcgtgggc

SEQ ID NO: 3482265 - DNA, 25 bp, Homo sapien
actctagggttgtgagctgaagacc

SEQ ID NO: 3482266 - DNA, 25 bp, Homo sapien
aatagtctctttggtaattcgtagc

SEQ ID NO: 3482267 - DNA, 25 bp, Homo sapien
gagaatggccgcatttcctgacaat

SEQ ID NO: 3482268 - DNA, 25 bp, Homo sapien
catggtagttattggtaatagtctc

SEQ ID NO: 3482269 - DNA, 25 bp, Homo sapien
gtaattcgtagctggttagctaaca

SEQ ID NO: 3482270 - DNA, 25 bp, Homo sapien
ggactcaaagtcaggtccgaggcct

SEQ ID NO: 3482271 - DNA, 25 bp, Homo sapien
aggcctccaagcttcacgtctcttt

SEQ ID NO: 3482272 - DNA, 25 bp, Homo sapien
gtctctgatggactcaaagtcaggt

SEQ ID NO: 3482273 - DNA, 25 bp, Homo sapien
tctgatggactcaaagtcaggtccg

SEQ ID NO: 3482274 - DNA, 25 bp, Homo sapien
gatctcctttcactagaggaaagag

SEQ ID NO: 3482275 - DNA, 25 bp, Homo sapien
tcttcccgtaagtgtcttctctgtg

SEQ ID NO: 3482276 - DNA, 25 bp, Homo sapien
ctgtggccactcttcacaattatca

SEQ ID NO: 3482277 - DNA, 25 bp, Homo sapien
tagtaggaaagaccaacaaccacat

SEQ ID NO: 3482278 - DNA, 25 bp, Homo sapien
gttgtactccttgacttgttttgca

SEQ ID NO: 3482279 - DNA, 25 bp, Homo sapien
cttctgccgagggatagcagatttc

SEQ ID NO: 3482280 - DNA, 25 bp, Homo sapien
tttgatagaatggatagtgtcttca

SEQ ID NO: 3482281 - DNA, 25 bp, Homo sapien
cgagggatagcagatttcttttgag

SEQ ID NO: 3482282 - DNA, 25 bp, Homo sapien
ggttttgatagaatggatagtgtct

SEQ ID NO: 3482283 - DNA, 25 bp, Homo sapien
gactggatagatcaattgaggcaga

SEQ ID NO: 3482284 - DNA, 25 bp, Homo sapien
gaggcagagacttgtactgcaaagc

SEQ ID NO: 3482285 - DNA, 25 bp, Homo sapien
atttcattcacatcacaactgatgg

SEQ ID NO: 3482286 - DNA, 25 bp, Homo sapien
cattcacatcacaactgatggttga

SEQ ID NO: 3482287 - DNA, 25 bp, Homo sapien
catgcaaagggtcccgtgtccttac

SEQ ID NO: 3482288 - DNA, 25 bp, Homo sapien
tcatgcaaagggtcccgtgtcctta

SEQ ID NO: 3482289 - DNA, 25 bp, Homo sapien
caagtggattgaggtcttcaaggtc

SEQ ID NO: 3482290 - DNA, 25 bp, Homo sapien
caaatggattgtatgctttcagtcc

SEQ ID NO: 3482291 - DNA, 25 bp, Homo sapien
ttgagaccaaagacatcactgtagt

SEQ ID NO: 3482292 - DNA, 25 bp, Homo sapien
gtagcaccatagaaactcaatcaag

SEQ ID NO: 3482293 - DNA, 25 bp, Homo sapien
ctttgatgcttgatgagtcagattt

SEQ ID NO: 3482294 - DNA, 25 bp, Homo sapien
gatgagtcagatttgatggtttggg

SEQ ID NO: 3482295 - DNA, 25 bp, Homo sapien
cttctttcccagcataggttggatt

SEQ ID NO: 3482296 - DNA, 25 bp, Homo sapien
gggatggtcttagcgtattccaaag

SEQ ID NO: 3482297 - DNA, 25 bp, Homo sapien
ttttccctttcgtgtctgttctgca

SEQ ID NO: 3482298 - DNA, 25 bp, Homo sapien
tgtctgttctgcagtatttccagca

SEQ ID NO: 3482299 - DNA, 25 bp, Homo sapien
tatggcaccataatccaattgggcc

SEQ ID NO: 3482300 - DNA, 25 bp, Homo sapien
tactctcaacgcagagaaggtggtt

SEQ ID NO: 3482301 - DNA, 25 bp, Homo sapien
gaaagcaaacatggacggcagatag

SEQ ID NO: 3482302 - DNA, 25 bp, Homo sapien
gctccaattctaactgatttgaaaa

SEQ ID NO: 3482303 - DNA, 25 bp, Homo sapien
ttccattatgctaaggaatggggta

SEQ ID NO: 3482304 - DNA, 25 bp, Homo sapien
tccattatgctaaggaatggggtag

SEQ ID NO: 3482305 - DNA, 25 bp, Homo sapien
aaggaatggggtagagatgaagaaa

SEQ ID NO: 3482306 - DNA, 25 bp, Homo sapien
gaatggggtagagatgaagaaatca

SEQ ID NO: 3482307 - DNA, 25 bp, Homo sapien
aaatttatggatgactgagttcatt

SEQ ID NO: 3482308 - DNA, 25 bp, Homo sapien
taatatatataagccctttgccaaa

SEQ ID NO: 3482309 - DNA, 25 bp, Homo sapien
cttaatatatataagccctttgcca

SEQ ID NO: 3482310 - DNA, 25 bp, Homo sapien
gatgactgagttcattttaggagaa

SEQ ID NO: 3482311 - DNA, 25 bp, Homo sapien
cctgttacactggtttcaggataaa

SEQ ID NO: 3482312 - DNA, 25 bp, Homo sapien
agggtcctgttacactggtttcagg

SEQ ID NO: 3482313 - DNA, 25 bp, Homo sapien
tacactggtttcaggataaagaaat

SEQ ID NO: 3482314 - DNA, 25 bp, Homo sapien
ctggtttcaggataaagaaattgga

SEQ ID NO: 3482315 - DNA, 25 bp, Homo sapien
gatttgtttgatggaagcctgcttc

SEQ ID NO: 3482316 - DNA, 25 bp, Homo sapien
ctggatttgtttgatggaagcctgc

SEQ ID NO: 3482317 - DNA, 25 bp, Homo sapien
tggatttgtttgatggaagcctgct

SEQ ID NO: 3482318 - DNA, 25 bp, Homo sapien
ttgtttgatggaagcctgcttcacc

SEQ ID NO: 3482319 - DNA, 25 bp, Homo sapien
gcttctgaaccagtgagcgctgcga

SEQ ID NO: 3482320 - DNA, 25 bp, Homo sapien
gaaccagtgagcgctgcgacttctc

SEQ ID NO: 3482321 - DNA, 25 bp, Homo sapien
ttctgaaccagtgagcgctgcgact

SEQ ID NO: 3482322 - DNA, 25 bp, Homo sapien
ctgaaccagtgagcgctgcgacttc

SEQ ID NO: 3482323 - DNA, 25 bp, Homo sapien
taatgtcttgatgctctgttagaac

SEQ ID NO: 3482324 - DNA, 25 bp, Homo sapien
taggatttgttctatctgagcaggc

SEQ ID NO: 3482325 - DNA, 25 bp, Homo sapien
cctgcattaggtgtttctggacttg

SEQ ID NO: 3482326 - DNA, 25 bp, Homo sapien
tgataaagtgtgtctctcagagttg

SEQ ID NO: 3482327 - DNA, 25 bp, Homo sapien
tctagtcaaatacaggtgctccatc

SEQ ID NO: 3482328 - DNA, 25 bp, Homo sapien
actattgtgagatgacgtggagcca

SEQ ID NO: 3482329 - DNA, 25 bp, Homo sapien
tggagccaaatgaagggccactttg

SEQ ID NO: 3482330 - DNA, 25 bp, Homo sapien
caacttgggcctataaaagatcact

SEQ ID NO: 3482331 - DNA, 25 bp, Homo sapien
cccaagagactccttactatacaaa

SEQ ID NO: 3482332 - DNA, 25 bp, Homo sapien
tattttgttcctcaatattgtcttt

SEQ ID NO: 3482333 - DNA, 25 bp, Homo sapien
agagactccttactatacaaaacaa

SEQ ID NO: 3482334 - DNA, 25 bp, Homo sapien
ctggataactcccaagagactcctt

SEQ ID NO: 3482335 - DNA, 25 bp, Homo sapien
tagaattaccgaaacttgtcttgat

SEQ ID NO: 3482336 - DNA, 25 bp, Homo sapien
cacatcttgggatagaattaccgaa

SEQ ID NO: 3482337 - DNA, 25 bp, Homo sapien
tcagatgctacttctaatataatgg

SEQ ID NO: 3482338 - DNA, 25 bp, Homo sapien
tttgaagcacatcttgggatagaat

SEQ ID NO: 3482339 - DNA, 25 bp, Homo sapien
tgtatattattaaagcctgattctt

SEQ ID NO: 3482340 - DNA, 25 bp, Homo sapien
gtatattattaaagcctgattctta

SEQ ID NO: 3482341 - DNA, 25 bp, Homo sapien
tatattattaaagcctgattcttac

SEQ ID NO: 3482342 - DNA, 25 bp, Homo sapien
gagaattcctatagtcgtcctatga

SEQ ID NO: 3482343 - DNA, 25 bp, Homo sapien
ttgtggaaacacagttagcgttagg

SEQ ID NO: 3482344 - DNA, 25 bp, Homo sapien
cagttagcgttagggaggagaattc

SEQ ID NO: 3482345 - DNA, 25 bp, Homo sapien
cattgggaatagcaattgtggaaac

SEQ ID NO: 3482346 - DNA, 25 bp, Homo sapien
gaacaagcacaacggataaacaaaa

SEQ ID NO: 3482347 - DNA, 25 bp, Homo sapien
tgtagggagaacaagcacaacggat

SEQ ID NO: 3482348 - DNA, 25 bp, Homo sapien
cactgatgtagggagaacaagcaca

SEQ ID NO: 3482349 - DNA, 25 bp, Homo sapien
catcactgatgtagggagaacaagc

SEQ ID NO: 3482350 - DNA, 25 bp, Homo sapien
cattgcacttagtctggaggcagta

SEQ ID NO: 3482351 - DNA, 25 bp, Homo sapien
gaatgaagtcttccatccgaagcct

SEQ ID NO: 3482352 - DNA, 25 bp, Homo sapien
tttagagagtctgatgaacgaatga

SEQ ID NO: 3482353 - DNA, 25 bp, Homo sapien
tttccattggccaggtgtttgctta

SEQ ID NO: 3482354 - DNA, 25 bp, Homo sapien
tttagacagcttcccaaaggacggc

SEQ ID NO: 3482355 - DNA, 25 bp, Homo sapien
atgaggcagggccaaccaggtttca

SEQ ID NO: 3482356 - DNA, 25 bp, Homo sapien
gaaccatagggatatctagcactaa

SEQ ID NO: 3482357 - DNA, 25 bp, Homo sapien
aggacggctgatcatattttctggg

SEQ ID NO: 3482358 - DNA, 25 bp, Homo sapien
tgatggcagtactgttttaaggcag

SEQ ID NO: 3482359 - DNA, 25 bp, Homo sapien
aaaatcgaattcttctaatcccacg

SEQ ID NO: 3482360 - DNA, 25 bp, Homo sapien
cctaaagattgtggctattaaaagc

SEQ ID NO: 3482361 - DNA, 25 bp, Homo sapien
ctattacacaagattatggagccaa

SEQ ID NO: 3482362 - DNA, 25 bp, Homo sapien
ctgcaataggcttgttggagaaaca

SEQ ID NO: 3482363 - DNA, 25 bp, Homo sapien
ggtaaagataagtgtcagagtgacg

SEQ ID NO: 3482364 - DNA, 25 bp, Homo sapien
gaatgtagcaggaggccttttcgtt

SEQ ID NO: 3482365 - DNA, 25 bp, Homo sapien
ggtctaagttctatccttatgtgaa

SEQ ID NO: 3482366 - DNA, 25 bp, Homo sapien
tgagagaagcccacacaaggagatt

SEQ ID NO: 3482367 - DNA, 25 bp, Homo sapien
tcacagcggccagtgttcacatgca

SEQ ID NO: 3482368 - DNA, 25 bp, Homo sapien
ggcgctattcacctgcaacctcaaa

SEQ ID NO: 3482369 - DNA, 25 bp, Homo sapien
aagagttcaggcgagttcttgtcct

SEQ ID NO: 3482370 - DNA, 25 bp, Homo sapien
tgcctataactgaggtaaagactgt

SEQ ID NO: 3482371 - DNA, 25 bp, Homo sapien
ccaaataacttgactaatgtagaca

SEQ ID NO: 3482372 - DNA, 25 bp, Homo sapien
cctgcccactgcctataactgaggt

SEQ ID NO: 3482373 - DNA, 25 bp, Homo sapien
taaagactgttgtgatgaccatcat

SEQ ID NO: 3482374 - DNA, 25 bp, Homo sapien
tctgcgacagaagttggtcccctcc

SEQ ID NO: 3482375 - DNA, 25 bp, Homo sapien
cactcggcctatagggtggagagac

SEQ ID NO: 3482376 - DNA, 25 bp, Homo sapien
ccccaaggctgggtgcaaatctgcg

SEQ ID NO: 3482377 - DNA, 25 bp, Homo sapien
gaacggcttgatttctactctgctg

SEQ ID NO: 3482378 - DNA, 25 bp, Homo sapien
ttatttttgaagacgcatttgtcag

SEQ ID NO: 3482379 - DNA, 25 bp, Homo sapien
tattatttttgaagacgcatttgtc

SEQ ID NO: 3482380 - DNA, 25 bp, Homo sapien
ttttgaagacgcatttgtcagaagc

SEQ ID NO: 3482381 - DNA, 25 bp, Homo sapien
acatattatttttgaagacgcattt

SEQ ID NO: 3482382 - DNA, 25 bp, Homo sapien
cctaatgcatagagactcagataaa

SEQ ID NO: 3482383 - DNA, 25 bp, Homo sapien
caattcctaatgcatagagactcag

SEQ ID NO: 3482384 - DNA, 25 bp, Homo sapien
cctccaattcctaatgcatagagac

SEQ ID NO: 3482385 - DNA, 25 bp, Homo sapien
tgcatagagactcagataaaatttc

SEQ ID NO: 3482386 - DNA, 25 bp, Homo sapien
tcctaatgaatgacgttggtgttgg

SEQ ID NO: 3482387 - DNA, 25 bp, Homo sapien
tgttggagtcgctgggctcctttca

SEQ ID NO: 3482388 - DNA, 25 bp, Homo sapien
gctgggctcctttcagcaggcagga

SEQ ID NO: 3482389 - DNA, 25 bp, Homo sapien
tgtacatatacgtgcatgcgagtct

SEQ ID NO: 3482390 - DNA, 25 bp, Homo sapien
aaaaccatcgttgtatttcagaaca

SEQ ID NO: 3482391 - DNA, 25 bp, Homo sapien
atcgttgtatttcagaacaacgaag

SEQ ID NO: 3482392 - DNA, 25 bp, Homo sapien
cgggctacaaccacgaccaatgata

SEQ ID NO: 3482393 - DNA, 25 bp, Homo sapien
tcgcacgggctacaaccacgaccaa

SEQ ID NO: 3482394 - DNA, 25 bp, Homo sapien
aaagggatcagaggtcaatgatgga

SEQ ID NO: 3482395 - DNA, 25 bp, Homo sapien
ccaaagggatcagaggtcaatgatg

SEQ ID NO: 3482396 - DNA, 25 bp, Homo sapien
agggatcagaggtcaatgatggagg

SEQ ID NO: 3482397 - DNA, 25 bp, Homo sapien
ggatcagaggtcaatgatggaggaa

SEQ ID NO: 3482398 - DNA, 25 bp, Homo sapien
gacctgccaggaatgaaatctttgc

SEQ ID NO: 3482399 - DNA, 25 bp, Homo sapien
caattagcatcctctacaagcaggt

SEQ ID NO: 3482400 - DNA, 25 bp, Homo sapien
tttgcctgcaatgaacctgcaaggc

SEQ ID NO: 3482401 - DNA, 25 bp, Homo sapien
ggacacagatactcatttgcctgca

SEQ ID NO: 3482402 - DNA, 25 bp, Homo sapien
gtaggattgctttaaaccagtcatc

SEQ ID NO: 3482403 - DNA, 25 bp, Homo sapien
gcttctgtggtaggattgctttaaa

SEQ ID NO: 3482404 - DNA, 25 bp, Homo sapien
tcttcttggcaaagcctctggtaag

SEQ ID NO: 3482405 - DNA, 25 bp, Homo sapien
cttggcaaagcctctggtaagtcat

SEQ ID NO: 3482406 - DNA, 25 bp, Homo sapien
ccatggtgccggctcttcctgcctc

SEQ ID NO: 3482407 - DNA, 25 bp, Homo sapien
ttctccaccatggtgccggctcttc

SEQ ID NO: 3482408 - DNA, 25 bp, Homo sapien
cctgcctcagcttcggtcccgctca

SEQ ID NO: 3482409 - DNA, 25 bp, Homo sapien
ctgcctcagcttcggtcccgctcat

SEQ ID NO: 3482410 - DNA, 25 bp, Homo sapien
gcctgcctcctcctggctgatgcca

SEQ ID NO: 3482411 - DNA, 25 bp, Homo sapien
gcgcctgcctcctcctggctgatgc

SEQ ID NO: 3482412 - DNA, 25 bp, Homo sapien
cctgcctcctcctggctgatgccac

SEQ ID NO: 3482413 - DNA, 25 bp, Homo sapien
ctgcgcctgcctcctcctggctgat

SEQ ID NO: 3482414 - DNA, 25 bp, Homo sapien
ggaggcccgcagccatttcggggcc

SEQ ID NO: 3482415 - DNA, 25 bp, Homo sapien
gcccgcagccatttcggggcctcca

SEQ ID NO: 3482416 - DNA, 25 bp, Homo sapien
cgcagccatttcggggcctccagtc

SEQ ID NO: 3482417 - DNA, 25 bp, Homo sapien
ccgcagccatttcggggcctccagt

SEQ ID NO: 3482418 - DNA, 25 bp, Homo sapien
cttctggagatatctgtttgtgatc

SEQ ID NO: 3482419 - DNA, 25 bp, Homo sapien
gagatatctgtttgtgatccagcat

SEQ ID NO: 3482420 - DNA, 25 bp, Homo sapien
gatatctgtttgtgatccagcatgg

SEQ ID NO: 3482421 - DNA, 25 bp, Homo sapien
tggagatatctgtttgtgatccagc

SEQ ID NO: 3482422 - DNA, 25 bp, Homo sapien
agcatcaaattgagtgaaaaatgac

SEQ ID NO: 3482423 - DNA, 25 bp, Homo sapien
ctcctagattggcaaatgtgtatcc

SEQ ID NO: 3482424 - DNA, 25 bp, Homo sapien
tctcctagattggcaaatgtgtatc

SEQ ID NO: 3482425 - DNA, 25 bp, Homo sapien
tcctagattggcaaatgtgtatcca

SEQ ID NO: 3482426 - DNA, 25 bp, Homo sapien
tttactctcttggtatcaggcccat

SEQ ID NO: 3482427 - DNA, 25 bp, Homo sapien
agttttactctcttggtatcaggcc

SEQ ID NO: 3482428 - DNA, 25 bp, Homo sapien
tcaagttttactctcttggtatcag

SEQ ID NO: 3482429 - DNA, 25 bp, Homo sapien
tactctcttggtatcaggcccatct

SEQ ID NO: 3482430 - DNA, 25 bp, Homo sapien
gagaagaagtacgtgataaagcgcg

SEQ ID NO: 3482431 - DNA, 25 bp, Homo sapien
cttccccgtgtgtatcagaactggg

SEQ ID NO: 3482432 - DNA, 25 bp, Homo sapien
tctgtgcggaactttaggagcactt

SEQ ID NO: 3482433 - DNA, 25 bp, Homo sapien
taaagcgcgggtcaggaataatacc

SEQ ID NO: 3482434 - DNA, 25 bp, Homo sapien
tactgggccgatgacttcagttttc

SEQ ID NO: 3482435 - DNA, 25 bp, Homo sapien
ggaaatgttttgtactgggccgatg

SEQ ID NO: 3482436 - DNA, 25 bp, Homo sapien
ttgtactgggccgatgacttcagtt

SEQ ID NO: 3482437 - DNA, 25 bp, Homo sapien
aaatgttttgtactgggccgatgac

SEQ ID NO: 3482438 - DNA, 25 bp, Homo sapien
gccgtgacagcataaggacagagaa

SEQ ID NO: 3482439 - DNA, 25 bp, Homo sapien
gggtgcttggaagtgcttatcactc

SEQ ID NO: 3482440 - DNA, 25 bp, Homo sapien
agtgcttatcactcaggggagctgg

SEQ ID NO: 3482441 - DNA, 25 bp, Homo sapien
gctggcgaggccgtgacagcataag

SEQ ID NO: 3482442 - DNA, 25 bp, Homo sapien
gggcacctgtctgaacttggagctg

SEQ ID NO: 3482443 - DNA, 25 bp, Homo sapien
ctctctaagggcacctgtctgaact

SEQ ID NO: 3482444 - DNA, 25 bp, Homo sapien
ggcctgggcctactctccacctgaa

SEQ ID NO: 3482445 - DNA, 25 bp, Homo sapien
ttcctctctaagggcacctgtctga

SEQ ID NO: 3482446 - DNA, 25 bp, Homo sapien
tggcctgggccgcatgggtgactgg

SEQ ID NO: 3482447 - DNA, 25 bp, Homo sapien
agctctcccactaatactcaacttg

SEQ ID NO: 3482448 - DNA, 25 bp, Homo sapien
gaaagacaagctctcccactaatac

SEQ ID NO: 3482449 - DNA, 25 bp, Homo sapien
gttgtgttaaaagggcaagctcctg

SEQ ID NO: 3482450 - DNA, 25 bp, Homo sapien
ctgaaagccagcaccaacttgctgg

SEQ ID NO: 3482451 - DNA, 25 bp, Homo sapien
tgctggctatgtgagtgagccacct

SEQ ID NO: 3482452 - DNA, 25 bp, Homo sapien
tgagtgagccaccttgaaaacatgg

SEQ ID NO: 3482453 - DNA, 25 bp, Homo sapien
ggtaattttctatgcaacaatttca

SEQ ID NO: 3482454 - DNA, 25 bp, Homo sapien
gccaccaggtggcactttagagtct

SEQ ID NO: 3482455 - DNA, 25 bp, Homo sapien
gcttggattcggttgactttagaaa

SEQ ID NO: 3482456 - DNA, 25 bp, Homo sapien
ttcggccccattttgaaagtcagct

SEQ ID NO: 3482457 - DNA, 25 bp, Homo sapien
cagctgcttggattcggttgacttt

SEQ ID NO: 3482458 - DNA, 25 bp, Homo sapien
ttacatctgtcaacattggatattt

SEQ ID NO: 3482459 - DNA, 25 bp, Homo sapien
gcttacatctgtcaacattggatat

SEQ ID NO: 3482460 - DNA, 25 bp, Homo sapien
agcttacatctgtcaacattggata

SEQ ID NO: 3482461 - DNA, 25 bp, Homo sapien
tagcttacatctgtcaacattggat

SEQ ID NO: 3482462 - DNA, 25 bp, Homo sapien
ccattaactggggttcgtgtctcca

SEQ ID NO: 3482463 - DNA, 25 bp, Homo sapien
tacttatacgactccaggagggcaa

SEQ ID NO: 3482464 - DNA, 25 bp, Homo sapien
agtgaggtgcttgatgaagccatta

SEQ ID NO: 3482465 - DNA, 25 bp, Homo sapien
gggttcgtgtctccattctacttat

SEQ ID NO: 3482466 - DNA, 25 bp, Homo sapien
tcaggaggtctgtcatgattgggcc

SEQ ID NO: 3482467 - DNA, 25 bp, Homo sapien
aggcggatggtaactcatgtgtcac

SEQ ID NO: 3482468 - DNA, 25 bp, Homo sapien
ctgtacttgtaatgaggcggatggt

SEQ ID NO: 3482469 - DNA, 25 bp, Homo sapien
cctgagggtggttagctgtacttgt

SEQ ID NO: 3482470 - DNA, 25 bp, Homo sapien
ttaccaggtattcgggacagcctag

SEQ ID NO: 3482471 - DNA, 25 bp, Homo sapien
ctattaccaggtattcgggacagcc

SEQ ID NO: 3482472 - DNA, 25 bp, Homo sapien
attctattaccaggtattcgggaca

SEQ ID NO: 3482473 - DNA, 25 bp, Homo sapien
gcctacggcagtatgtcaaatgctg

SEQ ID NO: 3482474 - DNA, 25 bp, Homo sapien
tttctgccgctcgataaggaaatca

SEQ ID NO: 3482475 - DNA, 25 bp, Homo sapien
tgccgctcgataaggaaatcactct

SEQ ID NO: 3482476 - DNA, 25 bp, Homo sapien
cgctcgataaggaaatcactcttga

SEQ ID NO: 3482477 - DNA, 25 bp, Homo sapien
caatggttttctgccgctcgataag

SEQ ID NO: 3482478 - DNA, 25 bp, Homo sapien
catcgatttgggctaatagtgcaca

SEQ ID NO: 3482479 - DNA, 25 bp, Homo sapien
gatatcgacggccagtcgccaggat

SEQ ID NO: 3482480 - DNA, 25 bp, Homo sapien
agtgataatctagggtcgggcttct

SEQ ID NO: 3482481 - DNA, 25 bp, Homo sapien
gcccgcggcctgcattatgttgtaa

SEQ ID NO: 3482482 - DNA, 25 bp, Homo sapien
ccgtgggtgctgccccatgaccccc

SEQ ID NO: 3482483 - DNA, 25 bp, Homo sapien
gctgccccatgacccccaccaaagc

SEQ ID NO: 3482484 - DNA, 25 bp, Homo sapien
tgccccatgacccccaccaaagccc

SEQ ID NO: 3482485 - DNA, 25 bp, Homo sapien
ccccatgacccccaccaaagcccat

SEQ ID NO: 3482486 - DNA, 25 bp, Homo sapien
cagaatggtccttctcaccgccctt

SEQ ID NO: 3482487 - DNA, 25 bp, Homo sapien
tcaccgcccttctctgcaagagcca

SEQ ID NO: 3482488 - DNA, 25 bp, Homo sapien
cttctcaccgcccttctctgcaaga

SEQ ID NO: 3482489 - DNA, 25 bp, Homo sapien
atggtccttctcaccgcccttctct

SEQ ID NO: 3482490 - DNA, 25 bp, Homo sapien
tcacgggtacgcatgtaaatgttga

SEQ ID NO: 3482491 - DNA, 25 bp, Homo sapien
cttcacgggtacgcatgtaaatgtt

SEQ ID NO: 3482492 - DNA, 25 bp, Homo sapien
ttcacgggtacgcatgtaaatgttg

SEQ ID NO: 3482493 - DNA, 25 bp, Homo sapien
tctccatggccaatttccggatctc

SEQ ID NO: 3482494 - DNA, 25 bp, Homo sapien
tcaatgtgtacatctggagtccgca

SEQ ID NO: 3482495 - DNA, 25 bp, Homo sapien
tctgtgcacatggatatggatatag

SEQ ID NO: 3482496 - DNA, 25 bp, Homo sapien
caggtacataggtacagcgctgttt

SEQ ID NO: 3482497 - DNA, 25 bp, Homo sapien
tcagggcccaccattgaagaggttg

SEQ ID NO: 3482498 - DNA, 25 bp, Homo sapien
tattttaatgttggtagtggccctc

SEQ ID NO: 3482499 - DNA, 25 bp, Homo sapien
ggtgttggcaactaccttccttgga

SEQ ID NO: 3482500 - DNA, 25 bp, Homo sapien
tagtatcagattgcgtcagggagaa

SEQ ID NO: 3482501 - DNA, 25 bp, Homo sapien
cctaggccgtttgagcaaggaagac

SEQ ID NO: 3482502 - DNA, 25 bp, Homo sapien
caattgagttactggtgcctaaggg

SEQ ID NO: 3482503 - DNA, 25 bp, Homo sapien
gcctaagggcgtctagctaagagaa

SEQ ID NO: 3482504 - DNA, 25 bp, Homo sapien
cattgaacgtatggtccaggaagct

SEQ ID NO: 3482505 - DNA, 25 bp, Homo sapien
ggaggtggcacttttgatgtgtcaa

SEQ ID NO: 3482506 - DNA, 25 bp, Homo sapien
tatacctccattacccgtgcccgat

SEQ ID NO: 3482507 - DNA, 25 bp, Homo sapien
aggtggcacttttgatgtgtcaatc

SEQ ID NO: 3482508 - DNA, 25 bp, Homo sapien
acccgtgcccgatttgaagaactga

SEQ ID NO: 3482509 - DNA, 25 bp, Homo sapien
cacgccgtctgggtagatgggtcct

SEQ ID NO: 3482510 - DNA, 25 bp, Homo sapien
taagaccacgtgttgagcaacgccc

SEQ ID NO: 3482511 - DNA, 25 bp, Homo sapien
ggacctcgcgcgtgcttagacagga

SEQ ID NO: 3482512 - DNA, 25 bp, Homo sapien
gatgggcactattacctcttggcag

SEQ ID NO: 3482513 - DNA, 25 bp, Homo sapien
agtggcaccctgaagccggaacctt

SEQ ID NO: 3482514 - DNA, 25 bp, Homo sapien
gggagcaacaaccttcgcagccatt

SEQ ID NO: 3482515 - DNA, 25 bp, Homo sapien
ttagaggcccgtctggaacacgaag

SEQ ID NO: 3482516 - DNA, 25 bp, Homo sapien
tgaaatacagattcgcgaaacccgg

SEQ ID NO: 3482517 - DNA, 25 bp, Homo sapien
cgtcctgaggcggttctgaaaagcc

SEQ ID NO: 3482518 - DNA, 25 bp, Homo sapien
tcttttccgcggagggatccagaca

SEQ ID NO: 3482519 - DNA, 25 bp, Homo sapien
gaaggactgagccaagaagccgaat

SEQ ID NO: 3482520 - DNA, 25 bp, Homo sapien
gaagccgaatctgttctagacggag

SEQ ID NO: 3482521 - DNA, 25 bp, Homo sapien
aaagtctaaatcaaggacgcacggc

SEQ ID NO: 3482522 - DNA, 25 bp, Homo sapien
gacgcacggctactggaacctatga

SEQ ID NO: 3482523 - DNA, 25 bp, Homo sapien
tgaaaatacaaacgttcagaaagtc

SEQ ID NO: 3482524 - DNA, 25 bp, Homo sapien
ggaaagatatcacctcatgttactg

SEQ ID NO: 3482525 - DNA, 25 bp, Homo sapien
aggctcttggaaccacaaggcccca

SEQ ID NO: 3482526 - DNA, 25 bp, Homo sapien
ttttgtgcaccagctcagtcacgtt

SEQ ID NO: 3482527 - DNA, 25 bp, Homo sapien
atatccgcggccatgcacaacattg

SEQ ID NO: 3482528 - DNA, 25 bp, Homo sapien
cagtcacgttttcaaagcgtcggta

SEQ ID NO: 3482529 - DNA, 25 bp, Homo sapien
aggatacagggagtgttcaaggtac

SEQ ID NO: 3482530 - DNA, 25 bp, Homo sapien
gacagcctttttcgcagtctagaga

SEQ ID NO: 3482531 - DNA, 25 bp, Homo sapien
ggacaagatgtcctcgctcttctga

SEQ ID NO: 3482532 - DNA, 25 bp, Homo sapien
taggaataacagctacctcgcctgc

SEQ ID NO: 3482533 - DNA, 25 bp, Homo sapien
taactctttctggagttgagttcaa

SEQ ID NO: 3482534 - DNA, 25 bp, Homo sapien
ggaaattacactgtagcgtaactaa

SEQ ID NO: 3482535 - DNA, 25 bp, Homo sapien
gaaaacagtggctcacagtacatat

SEQ ID NO: 3482536 - DNA, 25 bp, Homo sapien
agttgagttcaatttatttccagga

SEQ ID NO: 3482537 - DNA, 25 bp, Homo sapien
tttaataagacatagcccaagtccc

SEQ ID NO: 3482538 - DNA, 25 bp, Homo sapien
ctgctattggatgggatatcccaaa

SEQ ID NO: 3482539 - DNA, 25 bp, Homo sapien
ccagaacgcgttttgagagtaacca

SEQ ID NO: 3482540 - DNA, 25 bp, Homo sapien
tatcccaaacaagtggatgtgcgcc

SEQ ID NO: 3482541 - DNA, 25 bp, Homo sapien
ttctgggagactccattgggagact

SEQ ID NO: 3482542 - DNA, 25 bp, Homo sapien
tatccttttatccagtcagaagtcc

SEQ ID NO: 3482543 - DNA, 25 bp, Homo sapien
gacgatcataatagttgctaccgct

SEQ ID NO: 3482544 - DNA, 25 bp, Homo sapien
gctaccgcttagatttacggtgaga

SEQ ID NO: 3482545 - DNA, 25 bp, Homo sapien
gcagccagcggacactgtcaactga

SEQ ID NO: 3482546 - DNA, 25 bp, Homo sapien
caaaagcccgtcttgtgaaacccag

SEQ ID NO: 3482547 - DNA, 25 bp, Homo sapien
agcaaatagtgcctcacgcagccag

SEQ ID NO: 3482548 - DNA, 25 bp, Homo sapien
tcggagctcacgctctggttcttcc

SEQ ID NO: 3482549 - DNA, 25 bp, Homo sapien
ggttaagaattcagggcgctacgtg

SEQ ID NO: 3482550 - DNA, 25 bp, Homo sapien
aattcagggcgctacgtgtggagcc

SEQ ID NO: 3482551 - DNA, 25 bp, Homo sapien
ctgtaaggttaagaattcagggcgc

SEQ ID NO: 3482552 - DNA, 25 bp, Homo sapien
gcgctacgtgtggagccatgtcatc

SEQ ID NO: 3482553 - DNA, 25 bp, Homo sapien
tgcctcggtctatcccacaggtgat

SEQ ID NO: 3482554 - DNA, 25 bp, Homo sapien
ctttgtgccactgggagtactccct

SEQ ID NO: 3482555 - DNA, 25 bp, Homo sapien
agattgaacctctgaagcccagtga

SEQ ID NO: 3482556 - DNA, 25 bp, Homo sapien
cagccccaggcttgactactttgtg

SEQ ID NO: 3482557 - DNA, 25 bp, Homo sapien
gtttgctaatcactaaggctgccat

SEQ ID NO: 3482558 - DNA, 25 bp, Homo sapien
gccaaacgcagaagtcagcttggca

SEQ ID NO: 3482559 - DNA, 25 bp, Homo sapien
gaacctatcaggacgaagggtccac

SEQ ID NO: 3482560 - DNA, 25 bp, Homo sapien
gggtccacagtgatgttccgatctg

SEQ ID NO: 3482561 - DNA, 25 bp, Homo sapien
atttggaacgagacagcgactataa

SEQ ID NO: 3482562 - DNA, 25 bp, Homo sapien
taggttagcatgagatctggatctc

SEQ ID NO: 3482563 - DNA, 25 bp, Homo sapien
cagcgactataaatagacatgtcaa

SEQ ID NO: 3482564 - DNA, 25 bp, Homo sapien
gagtctcggaatcaaaagcatacat

SEQ ID NO: 3482565 - DNA, 25 bp, Homo sapien
ttcctgctaagatcaggatggtaca

SEQ ID NO: 3482566 - DNA, 25 bp, Homo sapien
ctgccatactctttgaagataattc

SEQ ID NO: 3482567 - DNA, 25 bp, Homo sapien
taagatcaggatggtacagcttttg

SEQ ID NO: 3482568 - DNA, 25 bp, Homo sapien
tgctaagatcaggatggtacagctt

SEQ ID NO: 3482569 - DNA, 25 bp, Homo sapien
tacttgggtgatttcttgttcttcg

SEQ ID NO: 3482570 - DNA, 25 bp, Homo sapien
ttgttcttcgttacccctgtaagca

SEQ ID NO: 3482571 - DNA, 25 bp, Homo sapien
ggcagtcagccagaactggtttgat

SEQ ID NO: 3482572 - DNA, 25 bp, Homo sapien
caggtctacaggaaaggcagtcagc

SEQ ID NO: 3482573 - DNA, 25 bp, Homo sapien
cagacacaaccctgccaatgatgac

SEQ ID NO: 3482574 - DNA, 25 bp, Homo sapien
tcagtatcgcagtcgacagacacaa

SEQ ID NO: 3482575 - DNA, 25 bp, Homo sapien
atcgcagtcgacagacacaaccctg

SEQ ID NO: 3482576 - DNA, 25 bp, Homo sapien
aatatcacagtcagtatcgcagtcg

SEQ ID NO: 3482577 - DNA, 25 bp, Homo sapien
cggacaagctgttctgtttcccgga

SEQ ID NO: 3482578 - DNA, 25 bp, Homo sapien
gtgtatcccacatgagcttcctgag

SEQ ID NO: 3482579 - DNA, 25 bp, Homo sapien
ccagataaggttctcgggataagag

SEQ ID NO: 3482580 - DNA, 25 bp, Homo sapien
taggagtgtggccaccgtgtatccc

SEQ ID NO: 3482581 - DNA, 25 bp, Homo sapien
cataatacatggtctcattgcgggt

SEQ ID NO: 3482582 - DNA, 25 bp, Homo sapien
tacactggatgctacatgaggacag

SEQ ID NO: 3482583 - DNA, 25 bp, Homo sapien
aatctgcctgtgtgtacgccgcact

SEQ ID NO: 3482584 - DNA, 25 bp, Homo sapien
tgcgggttccctgattgacacagga

SEQ ID NO: 3482585 - DNA, 25 bp, Homo sapien
tctaaaaagtgatgtaagcagatgg

SEQ ID NO: 3482586 - DNA, 25 bp, Homo sapien
ttagattattgcagaggcaaaatcc

SEQ ID NO: 3482587 - DNA, 25 bp, Homo sapien
gtctctgctgccagatagtcctgca

SEQ ID NO: 3482588 - DNA, 25 bp, Homo sapien
gatttggcccttctagtctctgctg

SEQ ID NO: 3482589 - DNA, 25 bp, Homo sapien
aaagggccagtttgaggcctctcgg

SEQ ID NO: 3482590 - DNA, 25 bp, Homo sapien
ggggcagttacatcccttggactcc

SEQ ID NO: 3482591 - DNA, 25 bp, Homo sapien
tgagtgacaatgatgggaagtgatc

SEQ ID NO: 3482592 - DNA, 25 bp, Homo sapien
ggaagtgatcttcatccacgaaagg

SEQ ID NO: 3482593 - DNA, 25 bp, Homo sapien
gcactgggtggacgataaataatct

SEQ ID NO: 3482594 - DNA, 25 bp, Homo sapien
gggccatcagcttgtgtcaaaggaa

SEQ ID NO: 3482595 - DNA, 25 bp, Homo sapien
gacttgcttaaaaaccatccagacc

SEQ ID NO: 3482596 - DNA, 25 bp, Homo sapien
cagcttgtgtcaaaggaagggtgtt

SEQ ID NO: 3482597 - DNA, 25 bp, Homo sapien
ttaacccaattcctagcctggactc

SEQ ID NO: 3482598 - DNA, 25 bp, Homo sapien
cagacacctcattcaggacttcgtt

SEQ ID NO: 3482599 - DNA, 25 bp, Homo sapien
tggactcctgaaatatctatgacag

SEQ ID NO: 3482600 - DNA, 25 bp, Homo sapien
cttcgtttttcactgttccctcttg

SEQ ID NO: 3482601 - DNA, 25 bp, Homo sapien
gaaaaatacgcagtagctacccaga

SEQ ID NO: 3482602 - DNA, 25 bp, Homo sapien
ttaactgagtatgcgcgaagacacc

SEQ ID NO: 3482603 - DNA, 25 bp, Homo sapien
tgcagcaactgcagtaggtggtgac

SEQ ID NO: 3482604 - DNA, 25 bp, Homo sapien
gtttggccacagttcgggatctatg

SEQ ID NO: 3482605 - DNA, 25 bp, Homo sapien
aattccggaaatatcagggcagccc

SEQ ID NO: 3482606 - DNA, 25 bp, Homo sapien
gcaaacagtgagcagatggtccaag

SEQ ID NO: 3482607 - DNA, 25 bp, Homo sapien
acgcgagtcctctgaatttgatgcc

SEQ ID NO: 3482608 - DNA, 25 bp, Homo sapien
gacttctttgtttgcgaggagctgg

SEQ ID NO: 3482609 - DNA, 25 bp, Homo sapien
tgaggacctcttttccctttgagaa

SEQ ID NO: 3482610 - DNA, 25 bp, Homo sapien
ccctttgagaacctctcttctccca

SEQ ID NO: 3482611 - DNA, 25 bp, Homo sapien
ctcttttccctttgagaacctctct

SEQ ID NO: 3482612 - DNA, 25 bp, Homo sapien
ttgaggacctcttttccctttgaga

SEQ ID NO: 3482613 - DNA, 25 bp, Homo sapien
tataggcaaattcatctgacagact

SEQ ID NO: 3482614 - DNA, 25 bp, Homo sapien
cagattcgagggctgcaatcagaac

SEQ ID NO: 3482615 - DNA, 25 bp, Homo sapien
caatcagaactgtgctataggcaaa

SEQ ID NO: 3482616 - DNA, 25 bp, Homo sapien
aattcatctgacagacttgtgaaga

SEQ ID NO: 3482617 - DNA, 25 bp, Homo sapien
tgactccgtcttgccatggagagca

SEQ ID NO: 3482618 - DNA, 25 bp, Homo sapien
gctgagaagtatgagggctccatac

SEQ ID NO: 3482619 - DNA, 25 bp, Homo sapien
gagagggcacggtttggcattgact

SEQ ID NO: 3482620 - DNA, 25 bp, Homo sapien
gagctgagaagtatgagggctccat

SEQ ID NO: 3482621 - DNA, 25 bp, Homo sapien
cagaccagtggccaatattagagcc

SEQ ID NO: 3482622 - DNA, 25 bp, Homo sapien
tccactgattgatgggatggcagac

SEQ ID NO: 3482623 - DNA, 25 bp, Homo sapien
agtacgtgacttgcctgagatccca

SEQ ID NO: 3482624 - DNA, 25 bp, Homo sapien
gcagactataattggaagggcactt

SEQ ID NO: 3482625 - DNA, 25 bp, Homo sapien
cagctccgtcttagtagcctgcaag

SEQ ID NO: 3482626 - DNA, 25 bp, Homo sapien
ttagtagcctgcaagctcccacgtg

SEQ ID NO: 3482627 - DNA, 25 bp, Homo sapien
aggcttgccccatcgccgggccaag

SEQ ID NO: 3482628 - DNA, 25 bp, Homo sapien
gctcccacgtggactaattccgtaa

SEQ ID NO: 3482629 - DNA, 25 bp, Homo sapien
tagggatgcccacagtaactactag

SEQ ID NO: 3482630 - DNA, 25 bp, Homo sapien
gcttggcgaaagagataaggctgga

SEQ ID NO: 3482631 - DNA, 25 bp, Homo sapien
catgaccatttatagtcaatctctc

SEQ ID NO: 3482632 - DNA, 25 bp, Homo sapien
gctcttggcattctgactgcttccc

SEQ ID NO: 3482633 - DNA, 25 bp, Homo sapien
caaagcaaacttgggtcagagcagt

SEQ ID NO: 3482634 - DNA, 25 bp, Homo sapien
cagagcagttgttcggtcttttaaa

SEQ ID NO: 3482635 - DNA, 25 bp, Homo sapien
tcttcgcaggatgcttcaccagctt

SEQ ID NO: 3482636 - DNA, 25 bp, Homo sapien
aagtggttggccagctcttcgcagg

SEQ ID NO: 3482637 - DNA, 25 bp, Homo sapien
tcgggctggagtgtcacagtggaca

SEQ ID NO: 3482638 - DNA, 25 bp, Homo sapien
ctgtgtgtgaggacagcagtagcct

SEQ ID NO: 3482639 - DNA, 25 bp, Homo sapien
tgtgtgaggacagcagtagcctgtg

SEQ ID NO: 3482640 - DNA, 25 bp, Homo sapien
cacccttttgccgaggtcgggctgg

SEQ ID NO: 3482641 - DNA, 25 bp, Homo sapien
aggaatgcaggtgaccgtccccaca

SEQ ID NO: 3482642 - DNA, 25 bp, Homo sapien
ctgaggaatgcaggtgaccgtcccc

SEQ ID NO: 3482643 - DNA, 25 bp, Homo sapien
tgaggaatgcaggtgaccgtcccca

SEQ ID NO: 3482644 - DNA, 25 bp, Homo sapien
ggaatgcaggtgaccgtccccacat

SEQ ID NO: 3482645 - DNA, 25 bp, Homo sapien
gctaaactggtgtcccagattcctg

SEQ ID NO: 3482646 - DNA, 25 bp, Homo sapien
tcctcattaaagagggctaaactgg

SEQ ID NO: 3482647 - DNA, 25 bp, Homo sapien
cagcaaagtgcgattttttctcctc

SEQ ID NO: 3482648 - DNA, 25 bp, Homo sapien
gcgagcctagaattcccactcagaa

SEQ ID NO: 3482649 - DNA, 25 bp, Homo sapien
tcaaggtgagaagaaaaatctgttt

SEQ ID NO: 3482650 - DNA, 25 bp, Homo sapien
caaggtgagaagaaaaatctgtttg

SEQ ID NO: 3482651 - DNA, 25 bp, Homo sapien
aaggtgagaagaaaaatctgtttgt

SEQ ID NO: 3482652 - DNA, 25 bp, Homo sapien
aggtgagaagaaaaatctgtttgtt

SEQ ID NO: 3482653 - DNA, 25 bp, Homo sapien
cttctgccagcacggggaaggagcc

SEQ ID NO: 3482654 - DNA, 25 bp, Homo sapien
tgaaacttctgccagcacggggaag

SEQ ID NO: 3482655 - DNA, 25 bp, Homo sapien
aaggagcctggtttcgcagaaagtg

SEQ ID NO: 3482656 - DNA, 25 bp, Homo sapien
gcctggtttcgcagaaagtgagttt

SEQ ID NO: 3482657 - DNA, 25 bp, Homo sapien
ccttgtctattaatgcaaataggac

SEQ ID NO: 3482658 - DNA, 25 bp, Homo sapien
gcttgctttgagcttccttgtctat

SEQ ID NO: 3482659 - DNA, 25 bp, Homo sapien
tgactgcgggataacccaatagtga

SEQ ID NO: 3482660 - DNA, 25 bp, Homo sapien
ctttgactgcgggataacccaatag

SEQ ID NO: 3482661 - DNA, 25 bp, Homo sapien
tatagtagctgccacgttcctgtcc

SEQ ID NO: 3482662 - DNA, 25 bp, Homo sapien
ttctctcctggatgactatagtagc

SEQ ID NO: 3482663 - DNA, 25 bp, Homo sapien
gaatgcacgaagctggaacttaaga

SEQ ID NO: 3482664 - DNA, 25 bp, Homo sapien
tgctacccgagtaaccctgtgaggc

SEQ ID NO: 3482665 - DNA, 25 bp, Homo sapien
ggtggagagtgttcatcgtctgaac

SEQ ID NO: 3482666 - DNA, 25 bp, Homo sapien
ggacagttgactccatgtttcctgg

SEQ ID NO: 3482667 - DNA, 25 bp, Homo sapien
aactgtgggacagttgactccatgt

SEQ ID NO: 3482668 - DNA, 25 bp, Homo sapien
gagtgttcatcgtctgaactgtggg

SEQ ID NO: 3482669 - DNA, 25 bp, Homo sapien
taaagattgcacagtatcaaacagg

SEQ ID NO: 3482670 - DNA, 25 bp, Homo sapien
aaagattgcacagtatcaaacaggg

SEQ ID NO: 3482671 - DNA, 25 bp, Homo sapien
ctaaagattgcacagtatcaaacag

SEQ ID NO: 3482672 - DNA, 25 bp, Homo sapien
aagattgcacagtatcaaacagggg

SEQ ID NO: 3482673 - DNA, 25 bp, Homo sapien
tcatactggtcctttaaaggggcag

SEQ ID NO: 3482674 - DNA, 25 bp, Homo sapien
ggagccatggaatgctcggacactg

SEQ ID NO: 3482675 - DNA, 25 bp, Homo sapien
aatgctcggacactgttcagcaaag

SEQ ID NO: 3482676 - DNA, 25 bp, Homo sapien
cctggctggcatggtttttggcttc

SEQ ID NO: 3482677 - DNA, 25 bp, Homo sapien
ggtctcctgatgtcgaacctcatgc

SEQ ID NO: 3482678 - DNA, 25 bp, Homo sapien
caagctgactcagtaggtgacagta

SEQ ID NO: 3482679 - DNA, 25 bp, Homo sapien
tgcaagaggctgcaagactgttctg

SEQ ID NO: 3482680 - DNA, 25 bp, Homo sapien
tccggaaaggtgcacatcaatgcaa

SEQ ID NO: 3482681 - DNA, 25 bp, Homo sapien
agatgactccaatctctctcccaag

SEQ ID NO: 3482682 - DNA, 25 bp, Homo sapien
cccaagacctttgtcagaggcttca

SEQ ID NO: 3482683 - DNA, 25 bp, Homo sapien
ccatagcgtctgtttagaatgagct

SEQ ID NO: 3482684 - DNA, 25 bp, Homo sapien
ggcttcacattccagaacgcatgag

SEQ ID NO: 3482685 - DNA, 25 bp, Homo sapien
aatccacgcacagtttcaggtgagt

SEQ ID NO: 3482686 - DNA, 25 bp, Homo sapien
tgccactcctaccacatgtcccatc

SEQ ID NO: 3482687 - DNA, 25 bp, Homo sapien
tctaagtccccattagactgcccta

SEQ ID NO: 3482688 - DNA, 25 bp, Homo sapien
tatccctgtgttttgtccacttttg

SEQ ID NO: 3482689 - DNA, 25 bp, Homo sapien
agcctctggaaaccctgtagttctt

SEQ ID NO: 3482690 - DNA, 25 bp, Homo sapien
gacccaaatagaagcctctggaaac

SEQ ID NO: 3482691 - DNA, 25 bp, Homo sapien
gaagcctctggaaaccctgtagttc

SEQ ID NO: 3482692 - DNA, 25 bp, Homo sapien
tagaagcctctggaaaccctgtagt

SEQ ID NO: 3482693 - DNA, 25 bp, Homo sapien
gtcctgtgcttgtgaaacctgagct

SEQ ID NO: 3482694 - DNA, 25 bp, Homo sapien
ctgtcctgtgcttgtgaaacctgag

SEQ ID NO: 3482695 - DNA, 25 bp, Homo sapien
tgtcctgtgcttgtgaaacctgagc

SEQ ID NO: 3482696 - DNA, 25 bp, Homo sapien
tttccctgaataaatctgtgtctag

SEQ ID NO: 3482697 - DNA, 25 bp, Homo sapien
aatctgtgtctagctggaggtttac

SEQ ID NO: 3482698 - DNA, 25 bp, Homo sapien
tgtctagctggaggtttacccacag

SEQ ID NO: 3482699 - DNA, 25 bp, Homo sapien
tgaataaatctgtgtctagctggag

SEQ ID NO: 3482700 - DNA, 25 bp, Homo sapien
tgagctaacgtgagctccggccttc

SEQ ID NO: 3482701 - DNA, 25 bp, Homo sapien
gcactagcactgagctaacgtgagc

SEQ ID NO: 3482702 - DNA, 25 bp, Homo sapien
cacccttccgcaggccaccgcgttt

SEQ ID NO: 3482703 - DNA, 25 bp, Homo sapien
gcagacgccgggacagccactaggt

SEQ ID NO: 3482704 - DNA, 25 bp, Homo sapien
tcggagaaacgtggaagaagagacc

SEQ ID NO: 3482705 - DNA, 25 bp, Homo sapien
gataggatcagttgagtgaatggtc

SEQ ID NO: 3482706 - DNA, 25 bp, Homo sapien
gttgagtgaatggtctgagacagtc

SEQ ID NO: 3482707 - DNA, 25 bp, Homo sapien
cctgggctgtggtgtcgatggagga

SEQ ID NO: 3482708 - DNA, 25 bp, Homo sapien
ctctccctggctccattaaggaaaa

SEQ ID NO: 3482709 - DNA, 25 bp, Homo sapien
tccctggctccattaaggaaaaggc

SEQ ID NO: 3482710 - DNA, 25 bp, Homo sapien
tctccctggctccattaaggaaaag

SEQ ID NO: 3482711 - DNA, 25 bp, Homo sapien
cctggctccattaaggaaaaggctg

SEQ ID NO: 3482712 - DNA, 25 bp, Homo sapien
gaaacgtggtctttacggtcagaca

SEQ ID NO: 3482713 - DNA, 25 bp, Homo sapien
gggcctaccacgcagaatctcaggt

SEQ ID NO: 3482714 - DNA, 25 bp, Homo sapien
acacggtatctctgctgggagggcc

SEQ ID NO: 3482715 - DNA, 25 bp, Homo sapien
tcaggaatggcacccaaactggcac

SEQ ID NO: 3482716 - DNA, 25 bp, Homo sapien
ccgaggggaccactcagaagtgact

SEQ ID NO: 3482717 - DNA, 25 bp, Homo sapien
tcccctgttcgcctggcagctgtct

SEQ ID NO: 3482718 - DNA, 25 bp, Homo sapien
cagctgtctgctgatccctgatgca

SEQ ID NO: 3482719 - DNA, 25 bp, Homo sapien
cagtcctcccgtggcgggcttacgg

SEQ ID NO: 3482720 - DNA, 25 bp, Homo sapien
cctggccctcttgcatcccatattt

SEQ ID NO: 3482721 - DNA, 25 bp, Homo sapien
agattatccagagtgcatccacctg

SEQ ID NO: 3482722 - DNA, 25 bp, Homo sapien
gagattatccagagtgcatccacct

SEQ ID NO: 3482723 - DNA, 25 bp, Homo sapien
ttctttatgcccctacattcttctc

SEQ ID NO: 3482724 - DNA, 25 bp, Homo sapien
tttatgcccctacattcttctctgt

SEQ ID NO: 3482725 - DNA, 25 bp, Homo sapien
taagtccgacatggatgaatgtctg

SEQ ID NO: 3482726 - DNA, 25 bp, Homo sapien
tggagtaagtccgacatggatgaat

SEQ ID NO: 3482727 - DNA, 25 bp, Homo sapien
ctgcctctcctaagagctgtgtctt

SEQ ID NO: 3482728 - DNA, 25 bp, Homo sapien
tgcctctcctaagagctgtgtcttt

SEQ ID NO: 3482729 - DNA, 25 bp, Homo sapien
tgccctccaaacggaggaacaggga

SEQ ID NO: 3482730 - DNA, 25 bp, Homo sapien
tcagataggagcaatcagggtgttg

SEQ ID NO: 3482731 - DNA, 25 bp, Homo sapien
tcctgattacacagagacattagtc

SEQ ID NO: 3482732 - DNA, 25 bp, Homo sapien
cagggaagggttatcccacctgaca

SEQ ID NO: 3482733 - DNA, 25 bp, Homo sapien
gtgggctcggagctcccactgtctc

SEQ ID NO: 3482734 - DNA, 25 bp, Homo sapien
gaggaagcggaactcccccgctctc

SEQ ID NO: 3482735 - DNA, 25 bp, Homo sapien
ctctccgtgggctcggagctcccac

SEQ ID NO: 3482736 - DNA, 25 bp, Homo sapien
tccgtgggctcggagctcccactgt

SEQ ID NO: 3482737 - DNA, 25 bp, Homo sapien
agcccggctccacgcactcgcgctg

SEQ ID NO: 3482738 - DNA, 25 bp, Homo sapien
tgaggacacccaaacccgagcggcg

SEQ ID NO: 3482739 - DNA, 25 bp, Homo sapien
cggcggggtcgtgctggagcccggc

SEQ ID NO: 3482740 - DNA, 25 bp, Homo sapien
ctgcaccctcggagccgggacggcc

SEQ ID NO: 3482741 - DNA, 25 bp, Homo sapien
gctcaccacgtctccccgcgagcct

SEQ ID NO: 3482742 - DNA, 25 bp, Homo sapien
gtctccccgcgagcctggctttgca

SEQ ID NO: 3482743 - DNA, 25 bp, Homo sapien
actgctcaccacgtctccccgcgag

SEQ ID NO: 3482744 - DNA, 25 bp, Homo sapien
gctggctactgctcaccacgtctcc

SEQ ID NO: 3482745 - DNA, 25 bp, Homo sapien
ggagaggcactcatgtggacacccg

SEQ ID NO: 3482746 - DNA, 25 bp, Homo sapien
ctcatgtggacacccggttcgggcg

SEQ ID NO: 3482747 - DNA, 25 bp, Homo sapien
gaggcactcatgtggacacccggtt

SEQ ID NO: 3482748 - DNA, 25 bp, Homo sapien
gcactcatgtggacacccggttcgg

SEQ ID NO: 3482749 - DNA, 25 bp, Homo sapien
taaaaagagccccagtcgaggtgct

SEQ ID NO: 3482750 - DNA, 25 bp, Homo sapien
tggtagacagaccatgagacagccc

SEQ ID NO: 3482751 - DNA, 25 bp, Homo sapien
cacaaatacggaagtggagaggccg

SEQ ID NO: 3482752 - DNA, 25 bp, Homo sapien
gcaagaatatgttaaagcctggcca

SEQ ID NO: 3482753 - DNA, 25 bp, Homo sapien
ttcaatttaagcaccctggaagcca

SEQ ID NO: 3482754 - DNA, 25 bp, Homo sapien
taaggctttcaatttaagcaccctg

SEQ ID NO: 3482755 - DNA, 25 bp, Homo sapien
caggttcctaatgccctctggtggc

SEQ ID NO: 3482756 - DNA, 25 bp, Homo sapien
gatccaaacaagagagtcctgggtc

SEQ ID NO: 3482757 - DNA, 25 bp, Homo sapien
tttgggcttcaagacagcgaagggc

SEQ ID NO: 3482758 - DNA, 25 bp, Homo sapien
ggactggatggtgggcacattttaa

SEQ ID NO: 3482759 - DNA, 25 bp, Homo sapien
aaaccaaagacgaataattgacaat

SEQ ID NO: 3482760 - DNA, 25 bp, Homo sapien
gcagtctcgttctcagaaacttctg

SEQ ID NO: 3482761 - DNA, 25 bp, Homo sapien
gcttctccaagacgccagtaggcca

SEQ ID NO: 3482762 - DNA, 25 bp, Homo sapien
tgcttctccaagacgccagtaggcc

SEQ ID NO: 3482763 - DNA, 25 bp, Homo sapien
ctgcttctccaagacgccagtaggc

SEQ ID NO: 3482764 - DNA, 25 bp, Homo sapien
cttctccaagacgccagtaggccat

SEQ ID NO: 3482765 - DNA, 25 bp, Homo sapien
ggtgcttcctggttccattatcgag

SEQ ID NO: 3482766 - DNA, 25 bp, Homo sapien
tcgaggactgcagactcaaggctcc

SEQ ID NO: 3482767 - DNA, 25 bp, Homo sapien
gagatgagtcatcagggatcggtaa

SEQ ID NO: 3482768 - DNA, 25 bp, Homo sapien
ctgttaagaagtctacctgtagatc

SEQ ID NO: 3482769 - DNA, 25 bp, Homo sapien
cacaatatttggctgcccttgtact

SEQ ID NO: 3482770 - DNA, 25 bp, Homo sapien
tggtttaatcgctcatcaaaaggct

SEQ ID NO: 3482771 - DNA, 25 bp, Homo sapien
tacttgacaccaaggataccaaggc

SEQ ID NO: 3482772 - DNA, 25 bp, Homo sapien
gcttaggcgtcaaagaagaatgttt

SEQ ID NO: 3482773 - DNA, 25 bp, Homo sapien
tatgaaatgccctacagctgtgagc

SEQ ID NO: 3482774 - DNA, 25 bp, Homo sapien
ttcccagcggcctttacaattgatg

SEQ ID NO: 3482775 - DNA, 25 bp, Homo sapien
ttgggaagcagataccctgagctct

SEQ ID NO: 3482776 - DNA, 25 bp, Homo sapien
caatatttggctctcagcgaccgca

SEQ ID NO: 3482777 - DNA, 25 bp, Homo sapien
cgtctttgccttagcgggactcggc

SEQ ID NO: 3482778 - DNA, 25 bp, Homo sapien
gagtctaacttttcggagcgcgcgt

SEQ ID NO: 3482779 - DNA, 25 bp, Homo sapien
tggttcgcgtctccctctggctgtt

SEQ ID NO: 3482780 - DNA, 25 bp, Homo sapien
aactctcagcggtttgcgttcagca

SEQ ID NO: 3482781 - DNA, 25 bp, Homo sapien
cacttgcggaggaggaagcgttttc

SEQ ID NO: 3482782 - DNA, 25 bp, Homo sapien
gagggcgtgatctcgatggacggca

SEQ ID NO: 3482783 - DNA, 25 bp, Homo sapien
cgggcagcggccggttctccatcat

SEQ ID NO: 3482784 - DNA, 25 bp, Homo sapien
tgtacgttcttcatgcggcgcatct

SEQ ID NO: 3482785 - DNA, 25 bp, Homo sapien
tcactgcactccttccgctccctca

SEQ ID NO: 3482786 - DNA, 25 bp, Homo sapien
cactgcactccttccgctccctcac

SEQ ID NO: 3482787 - DNA, 25 bp, Homo sapien
ttggggagcgggtggcacgcgtgga

SEQ ID NO: 3482788 - DNA, 25 bp, Homo sapien
catccctgggaccaggcgcagcgcc

SEQ ID NO: 3482789 - DNA, 25 bp, Homo sapien
agcgccctccagaagcgcctctggt

SEQ ID NO: 3482790 - DNA, 25 bp, Homo sapien
ggagcgggtggcacgcgtggaagct

SEQ ID NO: 3482791 - DNA, 25 bp, Homo sapien
tcctcaacatcaccactattagctg

SEQ ID NO: 3482792 - DNA, 25 bp, Homo sapien
caccactattagctgttactagact

SEQ ID NO: 3482793 - DNA, 25 bp, Homo sapien
ttctcagcctctacaaccccttact

SEQ ID NO: 3482794 - DNA, 25 bp, Homo sapien
ttcatttcttatacaagcctcccct

SEQ ID NO: 3482795 - DNA, 25 bp, Homo sapien
tagacaactctcgaaaccaggaata

SEQ ID NO: 3482796 - DNA, 25 bp, Homo sapien
cattggagggaaaagccgacaagcc

SEQ ID NO: 3482797 - DNA, 25 bp, Homo sapien
tgaaggttccactacacacatagac

SEQ ID NO: 3482798 - DNA, 25 bp, Homo sapien
taactgcctgaactacatctagatg

SEQ ID NO: 3482799 - DNA, 25 bp, Homo sapien
gggcctggtatgctaatcctcccta

SEQ ID NO: 3482800 - DNA, 25 bp, Homo sapien
aatgtggagacgtcatgctgggcct

SEQ ID NO: 3482801 - DNA, 25 bp, Homo sapien
acttaacttctaccacatcacgctg

SEQ ID NO: 3482802 - DNA, 25 bp, Homo sapien
ttaacttctaccacatcacgctgaa

SEQ ID NO: 3482803 - DNA, 25 bp, Homo sapien
gaaaagggtctcctaatcctcttca

SEQ ID NO: 3482804 - DNA, 25 bp, Homo sapien
agggtctcctaatcctcttcatatt

SEQ ID NO: 3482805 - DNA, 25 bp, Homo sapien
ttcaactttgtgcagtgaaaatccg

SEQ ID NO: 3482806 - DNA, 25 bp, Homo sapien
caactttgtgcagtgaaaatccgca

SEQ ID NO: 3482807 - DNA, 25 bp, Homo sapien
agttagtaagccatgctgtctttac

SEQ ID NO: 3482808 - DNA, 25 bp, Homo sapien
cagtgaacactggaaagttagtaag

SEQ ID NO: 3482809 - DNA, 25 bp, Homo sapien
aagatgaacatgattggtcttggag

SEQ ID NO: 3482810 - DNA, 25 bp, Homo sapien
catgattggtcttggagtattccag

SEQ ID NO: 3482811 - DNA, 25 bp, Homo sapien
tattaactcatcaacaaacatctat

SEQ ID NO: 3482812 - DNA, 25 bp, Homo sapien
tatagatctatagatcactgtaaga

SEQ ID NO: 3482813 - DNA, 25 bp, Homo sapien
tatagatcactgtaagaggtcaggt

SEQ ID NO: 3482814 - DNA, 25 bp, Homo sapien
tcattattaactcatcaacaaacat

SEQ ID NO: 3482815 - DNA, 25 bp, Homo sapien
agtatgagtttcagtcaggcacagt

SEQ ID NO: 3482816 - DNA, 25 bp, Homo sapien
catttgttaacccttcaaaactcag

SEQ ID NO: 3482817 - DNA, 25 bp, Homo sapien
aaaaagtatgagtttcagtcaggca

SEQ ID NO: 3482818 - DNA, 25 bp, Homo sapien
gaaggtgctagccaaaaagtatgag

SEQ ID NO: 3482819 - DNA, 25 bp, Homo sapien
ccacattcctcaacaagatcacatt

SEQ ID NO: 3482820 - DNA, 25 bp, Homo sapien
tccacattcctcaacaagatcacat

SEQ ID NO: 3482821 - DNA, 25 bp, Homo sapien
ttccacattcctcaacaagatcaca

SEQ ID NO: 3482822 - DNA, 25 bp, Homo sapien
tttggcataaatcaccttcggtctg

SEQ ID NO: 3482823 - DNA, 25 bp, Homo sapien
gcataaatcaccttcggtctgtcag

SEQ ID NO: 3482824 - DNA, 25 bp, Homo sapien
ataaatcaccttcggtctgtcagcc

SEQ ID NO: 3482825 - DNA, 25 bp, Homo sapien
aatcaccttcggtctgtcagcctca

SEQ ID NO: 3482826 - DNA, 25 bp, Homo sapien
tgtgcttctcatatgtagcagggca

SEQ ID NO: 3482827 - DNA, 25 bp, Homo sapien
gagaagctacaccaatagtgacggg

SEQ ID NO: 3482828 - DNA, 25 bp, Homo sapien
cataggtctcctttgcatttgttct

SEQ ID NO: 3482829 - DNA, 25 bp, Homo sapien
ggcacacacagagcggagaagctac

SEQ ID NO: 3482830 - DNA, 25 bp, Homo sapien
gattctcacggaggagtccacctag

SEQ ID NO: 3482831 - DNA, 25 bp, Homo sapien
gggagaaatgcaccaactaggacag

SEQ ID NO: 3482832 - DNA, 25 bp, Homo sapien
cagtatgaaatcagcccacagggtt

SEQ ID NO: 3482833 - DNA, 25 bp, Homo sapien
tacctgatgtgtaattggcaccctc

SEQ ID NO: 3482834 - DNA, 25 bp, Homo sapien
agcagtttgcccactggggtcagga

SEQ ID NO: 3482835 - DNA, 25 bp, Homo sapien
aaattccccactggcagcttagcca

SEQ ID NO: 3482836 - DNA, 25 bp, Homo sapien
cagactccttaacttctgcgttacc

SEQ ID NO: 3482837 - DNA, 25 bp, Homo sapien
aagaaaattccccactggcagctta

SEQ ID NO: 3482838 - DNA, 25 bp, Homo sapien
ttcatcaagctcttgtacacacagc

SEQ ID NO: 3482839 - DNA, 25 bp, Homo sapien
caggtttcatcaagctcttgtacac

SEQ ID NO: 3482840 - DNA, 25 bp, Homo sapien
agctcttgtacacacagcaacccag

SEQ ID NO: 3482841 - DNA, 25 bp, Homo sapien
tcaagctcttgtacacacagcaacc

SEQ ID NO: 3482842 - DNA, 25 bp, Homo sapien
cgaaacaagtctcctctgagaggac

SEQ ID NO: 3482843 - DNA, 25 bp, Homo sapien
aataagaagctatgtccctcctcac

SEQ ID NO: 3482844 - DNA, 25 bp, Homo sapien
gccccttggcaagtcacacactgat

SEQ ID NO: 3482845 - DNA, 25 bp, Homo sapien
tgagtccctgagagacccgaaacaa

SEQ ID NO: 3482846 - DNA, 25 bp, Homo sapien
aggttgctgcctatggtggcaggga

SEQ ID NO: 3482847 - DNA, 25 bp, Homo sapien
aacaggagtgtgtttaggaggttgc

SEQ ID NO: 3482848 - DNA, 25 bp, Homo sapien
agtgtgtttaggaggttgctgccta

SEQ ID NO: 3482849 - DNA, 25 bp, Homo sapien
tgtttaggaggttgctgcctatggt

SEQ ID NO: 3482850 - DNA, 25 bp, Homo sapien
tgaggatttcgagctatatgacaat

SEQ ID NO: 3482851 - DNA, 25 bp, Homo sapien
tgaatcgaaaatccagacatgtggt

SEQ ID NO: 3482852 - DNA, 25 bp, Homo sapien
ctagtgaggatttcgagctatatga

SEQ ID NO: 3482853 - DNA, 25 bp, Homo sapien
atctgaatcgaaaatccagacatgt

SEQ ID NO: 3482854 - DNA, 25 bp, Homo sapien
acaaagggaccaaaggcacagccac

SEQ ID NO: 3482855 - DNA, 25 bp, Homo sapien
cttccacaaagggaccaaaggcaca

SEQ ID NO: 3482856 - DNA, 25 bp, Homo sapien
tccacaaagggaccaaaggcacagc

SEQ ID NO: 3482857 - DNA, 25 bp, Homo sapien
agggaccaaaggcacagccacattt

SEQ ID NO: 3482858 - DNA, 25 bp, Homo sapien
ggctgctgcagagatgtaataggtc

SEQ ID NO: 3482859 - DNA, 25 bp, Homo sapien
gaaccggagtctcatcccagcttga

SEQ ID NO: 3482860 - DNA, 25 bp, Homo sapien
ccagcttgaggacatacagaggaca

SEQ ID NO: 3482861 - DNA, 25 bp, Homo sapien
cagatcagaattggagaaccggagt

SEQ ID NO: 3482862 - DNA, 25 bp, Homo sapien
tgttgtcacctaagttaagggcaaa

SEQ ID NO: 3482863 - DNA, 25 bp, Homo sapien
acatgttgtcacctaagttaagggc

SEQ ID NO: 3482864 - DNA, 25 bp, Homo sapien
gacctttacggttgccattccatcc

SEQ ID NO: 3482865 - DNA, 25 bp, Homo sapien
agaagctccaccctgtacagaatga

SEQ ID NO: 3482866 - DNA, 25 bp, Homo sapien
ttttaaagtgatattttctgatcag

SEQ ID NO: 3482867 - DNA, 25 bp, Homo sapien
aagtgatattttctgatcaggaaga

SEQ ID NO: 3482868 - DNA, 25 bp, Homo sapien
tattttctgatcaggaagatgtggt

SEQ ID NO: 3482869 - DNA, 25 bp, Homo sapien
tgcgccaggccccagagtctttttt

SEQ ID NO: 3482870 - DNA, 25 bp, Homo sapien
tgtcccttccgtgggagagcccatg

SEQ ID NO: 3482871 - DNA, 25 bp, Homo sapien
aagtgcccacacaaatccaatgaag

SEQ ID NO: 3482872 - DNA, 25 bp, Homo sapien
tgatgggacgctcccaacagcaggt

SEQ ID NO: 3482873 - DNA, 25 bp, Homo sapien
tggagcccagtttaaggtaccgcac

SEQ ID NO: 3482874 - DNA, 25 bp, Homo sapien
ctaattataacccactgtcactcat

SEQ ID NO: 3482875 - DNA, 25 bp, Homo sapien
gacactgctgccctctattcactta

SEQ ID NO: 3482876 - DNA, 25 bp, Homo sapien
tgtatcttctcagtagcatcaagag

SEQ ID NO: 3482877 - DNA, 25 bp, Homo sapien
ttctttacaacctcagacttttcta

SEQ ID NO: 3482878 - DNA, 25 bp, Homo sapien
taaaactcgagtttgctgactctcg

SEQ ID NO: 3482879 - DNA, 25 bp, Homo sapien
ccaatgctgcccttagagaacaaga

SEQ ID NO: 3482880 - DNA, 25 bp, Homo sapien
ctgctgacaagaaggataactgtta

SEQ ID NO: 3482881 - DNA, 25 bp, Homo sapien
cacagaggtatttagtagcactgca

SEQ ID NO: 3482882 - DNA, 25 bp, Homo sapien
tgggaaggcagatggattcttgggt

SEQ ID NO: 3482883 - DNA, 25 bp, Homo sapien
gggaaggcagatggattcttgggtc

SEQ ID NO: 3482884 - DNA, 25 bp, Homo sapien
ctgggaaggcagatggattcttggg

SEQ ID NO: 3482885 - DNA, 25 bp, Homo sapien
taggaaacagtcctggtagcagtgc

SEQ ID NO: 3482886 - DNA, 25 bp, Homo sapien
cagctgaagtcaacatagcttgatt

SEQ ID NO: 3482887 - DNA, 25 bp, Homo sapien
gctgattccccagaaagacgactga

SEQ ID NO: 3482888 - DNA, 25 bp, Homo sapien
taggagccaacctggagtcagtcgg

SEQ ID NO: 3482889 - DNA, 25 bp, Homo sapien
tccaccctggcctattgggcgctgt

SEQ ID NO: 3482890 - DNA, 25 bp, Homo sapien
aaagttttctgcctgccacacaagg

SEQ ID NO: 3482891 - DNA, 25 bp, Homo sapien
tcctgaggcctttacacagttttcc

SEQ ID NO: 3482892 - DNA, 25 bp, Homo sapien
caaggccttactacatgaaactgac

SEQ ID NO: 3482893 - DNA, 25 bp, Homo sapien
aacctgctagaatcatcatcgtggc

SEQ ID NO: 3482894 - DNA, 25 bp, Homo sapien
ggactcaggaacctgctagaatcat

SEQ ID NO: 3482895 - DNA, 25 bp, Homo sapien
tttcttcccgcgctcgaggactcag

SEQ ID NO: 3482896 - DNA, 25 bp, Homo sapien
ttcccgcgctcgaggactcaggaac

SEQ ID NO: 3482897 - DNA, 25 bp, Homo sapien
cccatccaccataaagagcttaggg

SEQ ID NO: 3482898 - DNA, 25 bp, Homo sapien
tgatgcaaaacaacatccccatcca

SEQ ID NO: 3482899 - DNA, 25 bp, Homo sapien
aagaaatcgagagagtttttctggg

SEQ ID NO: 3482900 - DNA, 25 bp, Homo sapien
tgttcctcatactctccaaagcgag

SEQ ID NO: 3482901 - DNA, 25 bp, Homo sapien
tgccgccattcacagcttggtgcac

SEQ ID NO: 3482902 - DNA, 25 bp, Homo sapien
tcaccagtgcaggaaatgccgccat

SEQ ID NO: 3482903 - DNA, 25 bp, Homo sapien
acagatcaacgtcctaaacacctgg

SEQ ID NO: 3482904 - DNA, 25 bp, Homo sapien
gaacatcacagatcaacgtcctaaa

SEQ ID NO: 3482905 - DNA, 25 bp, Homo sapien
ctgcatgtgatgtcagctgctggtg

SEQ ID NO: 3482906 - DNA, 25 bp, Homo sapien
cagtgctgcaagagacggtctctgg

SEQ ID NO: 3482907 - DNA, 25 bp, Homo sapien
ggagacgtggtagtgacaagcctgc

SEQ ID NO: 3482908 - DNA, 25 bp, Homo sapien
acagcagtgctgcaagagacggtct

SEQ ID NO: 3482909 - DNA, 25 bp, Homo sapien
gggaggagacgtggtagtgacaagc

SEQ ID NO: 3482910 - DNA, 25 bp, Homo sapien
gaaaagagaacccagcagtttatcc

SEQ ID NO: 3482911 - DNA, 25 bp, Homo sapien
agagaacccagcagtttatcccctg

SEQ ID NO: 3482912 - DNA, 25 bp, Homo sapien
ttgaaaagagaacccagcagtttat

SEQ ID NO: 3482913 - DNA, 25 bp, Homo sapien
aagagaacccagcagtttatcccct

SEQ ID NO: 3482914 - DNA, 25 bp, Homo sapien
taggtgtttgaatccaagccggagc

SEQ ID NO: 3482915 - DNA, 25 bp, Homo sapien
ggtacaatgacttcctcaataccta

SEQ ID NO: 3482916 - DNA, 25 bp, Homo sapien
gccggagcatcaacttctggtacaa

SEQ ID NO: 3482917 - DNA, 25 bp, Homo sapien
gagtagtaaagagctctcccgagct

SEQ ID NO: 3482918 - DNA, 25 bp, Homo sapien
cttgagtgaacttacatggtagcca

SEQ ID NO: 3482919 - DNA, 25 bp, Homo sapien
ttcaatccctggctctaagacagca

SEQ ID NO: 3482920 - DNA, 25 bp, Homo sapien
tttgtcaccagctgattgtagagcc

SEQ ID NO: 3482921 - DNA, 25 bp, Homo sapien
ccaggtcatggttacagcaggcttt

SEQ ID NO: 3482922 - DNA, 25 bp, Homo sapien
tcagtggaagagcttcaccttcaga

SEQ ID NO: 3482923 - DNA, 25 bp, Homo sapien
acatctcagtggaagagcttcacct

SEQ ID NO: 3482924 - DNA, 25 bp, Homo sapien
caccatttgaatcagggtcaaaatg

SEQ ID NO: 3482925 - DNA, 25 bp, Homo sapien
tctcagtggaagagcttcaccttca

SEQ ID NO: 3482926 - DNA, 25 bp, Homo sapien
tgctaccaacaagcttgacagtgga

SEQ ID NO: 3482927 - DNA, 25 bp, Homo sapien
gacagtggacaatctaagcctcatc

SEQ ID NO: 3482928 - DNA, 25 bp, Homo sapien
taagatagcacaggaaaagcacagt

SEQ ID NO: 3482929 - DNA, 25 bp, Homo sapien
cagtgttaagcacgcaatatgccct

SEQ ID NO: 3482930 - DNA, 25 bp, Homo sapien
tccccagtgccttgataatcatgtt

SEQ ID NO: 3482931 - DNA, 25 bp, Homo sapien
tttgaagcttgccaagggatggcca

SEQ ID NO: 3482932 - DNA, 25 bp, Homo sapien
aaaatcctatttggccgaaaggcat

SEQ ID NO: 3482933 - DNA, 25 bp, Homo sapien
ggatggccattaatagacttgctca

SEQ ID NO: 3482934 - DNA, 25 bp, Homo sapien
gtctgtgttccacagactcccagga

SEQ ID NO: 3482935 - DNA, 25 bp, Homo sapien
gaaaataagacacctatttccactc

SEQ ID NO: 3482936 - DNA, 25 bp, Homo sapien
gtcacaaacgtccacccacggagaa

SEQ ID NO: 3482937 - DNA, 25 bp, Homo sapien
ccaactggtacccacaggtcaggat

SEQ ID NO: 3482938 - DNA, 25 bp, Homo sapien
ttgctgtcgccatgtcagccggctc

SEQ ID NO: 3482939 - DNA, 25 bp, Homo sapien
gtcgccatgtcagccggctccatga

SEQ ID NO: 3482940 - DNA, 25 bp, Homo sapien
ctgtcgccatgtcagccggctccat

SEQ ID NO: 3482941 - DNA, 25 bp, Homo sapien
ctttgctgtcgccatgtcagccggc

SEQ ID NO: 3482942 - DNA, 25 bp, Homo sapien
gtgacccagtcagaaaccaacgatt

SEQ ID NO: 3482943 - DNA, 25 bp, Homo sapien
ccagtatgaataaagggaactcctc

SEQ ID NO: 3482944 - DNA, 25 bp, Homo sapien
gaacggcatgttggcactcaatacg

SEQ ID NO: 3482945 - DNA, 25 bp, Homo sapien
taactggtaattctgtgctggtcca

SEQ ID NO: 3482946 - DNA, 25 bp, Homo sapien
ttataaacaggcttgataaagaggg

SEQ ID NO: 3482947 - DNA, 25 bp, Homo sapien
tagctaactattcaatgcaaacaat

SEQ ID NO: 3482948 - DNA, 25 bp, Homo sapien
catcgcgcccccctatatattattt

SEQ ID NO: 3482949 - DNA, 25 bp, Homo sapien
tagacaagattttgtgttacctgca

SEQ ID NO: 3482950 - DNA, 25 bp, Homo sapien
agttgccgtcaacagccaggctggc

SEQ ID NO: 3482951 - DNA, 25 bp, Homo sapien
tgaggatgggtaatgctggcaaggc

SEQ ID NO: 3482952 - DNA, 25 bp, Homo sapien
gaaacaagccctggagttgccgtca

SEQ ID NO: 3482953 - DNA, 25 bp, Homo sapien
tgtggctgccgctgccagtttctga

SEQ ID NO: 3482954 - DNA, 25 bp, Homo sapien
tcctttcattagtacagtcacgata

SEQ ID NO: 3482955 - DNA, 25 bp, Homo sapien
catattggaaaagatgacgaagtcc

SEQ ID NO: 3482956 - DNA, 25 bp, Homo sapien
tccggaggtcccaggacatattgga

SEQ ID NO: 3482957 - DNA, 25 bp, Homo sapien
gcatccccgttacagctccggaggt

SEQ ID NO: 3482958 - DNA, 25 bp, Homo sapien
tagtccccacatcttaacccctcga

SEQ ID NO: 3482959 - DNA, 25 bp, Homo sapien
acatcttaacccctcgatgcctggt

SEQ ID NO: 3482960 - DNA, 25 bp, Homo sapien
atgaaggagacctcttgagggtgct

SEQ ID NO: 3482961 - DNA, 25 bp, Homo sapien
gcatcaatgaaggagacctcttgag

SEQ ID NO: 3482962 - DNA, 25 bp, Homo sapien
tacctctgaaatggagacaccagct

SEQ ID NO: 3482963 - DNA, 25 bp, Homo sapien
tcagttcagccgtaagagtgtatcc

SEQ ID NO: 3482964 - DNA, 25 bp, Homo sapien
ctagagaagaggagtaaccagggac

SEQ ID NO: 3482965 - DNA, 25 bp, Homo sapien
tagcacggcattacacagagcggaa

SEQ ID NO: 3482966 - DNA, 25 bp, Homo sapien
tttggagacggcattaccaagccca

SEQ ID NO: 3482967 - DNA, 25 bp, Homo sapien
gaattaggactatctttgcgtcacc

SEQ ID NO: 3482968 - DNA, 25 bp, Homo sapien
gctgcggaagattggtgagttactc

SEQ ID NO: 3482969 - DNA, 25 bp, Homo sapien
actacatgccccacagagtcttggg

SEQ ID NO: 3482970 - DNA, 25 bp, Homo sapien
agtgtcctggacttaccgaaccacg

SEQ ID NO: 3482971 - DNA, 25 bp, Homo sapien
cctgctggctacagaagaacgcaaa

SEQ ID NO: 3482972 - DNA, 25 bp, Homo sapien
taaatctcacactgttcgcaggagg

SEQ ID NO: 3482973 - DNA, 25 bp, Homo sapien
gatttaaatgcctagatgaccagcg

SEQ ID NO: 3482974 - DNA, 25 bp, Homo sapien
tgacaaccgccgctgtgggcaatgc

SEQ ID NO: 3482975 - DNA, 25 bp, Homo sapien
tgacagggcaggaatggctgatgtg

SEQ ID NO: 3482976 - DNA, 25 bp, Homo sapien
ctggatgacaaccgccgctgtgggc

SEQ ID NO: 3482977 - DNA, 25 bp, Homo sapien
gccgctgtgggcaatgctcagtgac

SEQ ID NO: 3482978 - DNA, 25 bp, Homo sapien
gggtatgtgaccaaagacagcccac

SEQ ID NO: 3482979 - DNA, 25 bp, Homo sapien
ggtatgtgaccaaagacagcccact

SEQ ID NO: 3482980 - DNA, 25 bp, Homo sapien
tatgtgaccaaagacagcccactgt

SEQ ID NO: 3482981 - DNA, 25 bp, Homo sapien
ggagggtatgtgaccaaagacagcc

SEQ ID NO: 3482982 - DNA, 25 bp, Homo sapien
caattctgtcccttagcctcggtga

SEQ ID NO: 3482983 - DNA, 25 bp, Homo sapien
cccttagcctcggtgacaaggctgc

SEQ ID NO: 3482984 - DNA, 25 bp, Homo sapien
ttctttctcgcaccggggcggctgc

SEQ ID NO: 3482985 - DNA, 25 bp, Homo sapien
ctggtggctgtgaggcaattctgtc

SEQ ID NO: 3482986 - DNA, 25 bp, Homo sapien
atccaaagaggtcagtgagccttgt

SEQ ID NO: 3482987 - DNA, 25 bp, Homo sapien
agacttgccgatgctgtccacattg

SEQ ID NO: 3482988 - DNA, 25 bp, Homo sapien
ccgatgctgtccacattgcctggtg

SEQ ID NO: 3482989 - DNA, 25 bp, Homo sapien
ttgtagatgtggcttctgggccctc

SEQ ID NO: 3482990 - DNA, 25 bp, Homo sapien
agctactccaaaggcagagtcggga

SEQ ID NO: 3482991 - DNA, 25 bp, Homo sapien
ggtgacacatgtttgaggttccagc

SEQ ID NO: 3482992 - DNA, 25 bp, Homo sapien
gggtgacaaagtgactcatatatat

SEQ ID NO: 3482993 - DNA, 25 bp, Homo sapien
tccaaaggcagagtcgggaggatca

SEQ ID NO: 3482994 - DNA, 25 bp, Homo sapien
tgcagaaaaattgggctctgtggcc

SEQ ID NO: 3482995 - DNA, 25 bp, Homo sapien
ctgtgcactgccgaaccctgccctg

SEQ ID NO: 3482996 - DNA, 25 bp, Homo sapien
tctcacagctctgcaagtgttaaga

SEQ ID NO: 3482997 - DNA, 25 bp, Homo sapien
aagatgcagaaaaattgggctctgt

SEQ ID NO: 3482998 - DNA, 25 bp, Homo sapien
tattcacatctatggacatcttttc

SEQ ID NO: 3482999 - DNA, 25 bp, Homo sapien
ctacgatgtggattattcacatcta

SEQ ID NO: 3483000 - DNA, 25 bp, Homo sapien
tgtggattattcacatctatggaca

SEQ ID NO: 3483001 - DNA, 25 bp, Homo sapien
ggattattcacatctatggacatct

SEQ ID NO: 3483002 - DNA, 25 bp, Homo sapien
taggatggcacggaggtacggactc

SEQ ID NO: 3483003 - DNA, 25 bp, Homo sapien
gatggcacggaggtacggactccag

SEQ ID NO: 3483004 - DNA, 25 bp, Homo sapien
ctttccataggatggcacggaggta

SEQ ID NO: 3483005 - DNA, 25 bp, Homo sapien
cacggaggtacggactccaggaagt

SEQ ID NO: 3483006 - DNA, 25 bp, Homo sapien
gatgtgagttacttagagaacttcc

SEQ ID NO: 3483007 - DNA, 25 bp, Homo sapien
caatcaggagcgctcacggatgtga

SEQ ID NO: 3483008 - DNA, 25 bp, Homo sapien
ctggactctccagagggcaatcagg

SEQ ID NO: 3483009 - DNA, 25 bp, Homo sapien
cctctttaattcagcctggactctc

SEQ ID NO: 3483010 - DNA, 25 bp, Homo sapien
gacagcacaaactctggggtgacca

SEQ ID NO: 3483011 - DNA, 25 bp, Homo sapien
gggtgaccagctgatccaagagcag

SEQ ID NO: 3483012 - DNA, 25 bp, Homo sapien
ccagctgatccaagagcaggtacat

SEQ ID NO: 3483013 - DNA, 25 bp, Homo sapien
tgaccagctgatccaagagcaggta

SEQ ID NO: 3483014 - DNA, 25 bp, Homo sapien
acaagaccatgttccccggagactc

SEQ ID NO: 3483015 - DNA, 25 bp, Homo sapien
ccctcaatccgacaaaatacaagac

SEQ ID NO: 3483016 - DNA, 25 bp, Homo sapien
tcttcaccctcaatccgacaaaata

SEQ ID NO: 3483017 - DNA, 25 bp, Homo sapien
tcgctgccaccaattatttcccagg

SEQ ID NO: 3483018 - DNA, 25 bp, Homo sapien
gggggcgcttctttgctctgctgtt

SEQ ID NO: 3483019 - DNA, 25 bp, Homo sapien
accgctgtagcattttaagcatgac

SEQ ID NO: 3483020 - DNA, 25 bp, Homo sapien
ctgctgctgttatttggtgtggtcg

SEQ ID NO: 3483021 - DNA, 25 bp, Homo sapien
tttggtgtggtcgtgccgccttaca

SEQ ID NO: 3483022 - DNA, 25 bp, Homo sapien
tctgccttgaaaggtttgtgttctt

SEQ ID NO: 3483023 - DNA, 25 bp, Homo sapien
ccttgaaaggtttgtgttcttggca

SEQ ID NO: 3483024 - DNA, 25 bp, Homo sapien
aaggtttgtgttcttggcagctctg

SEQ ID NO: 3483025 - DNA, 25 bp, Homo sapien
tgtgttcttggcagctctgagcagc

SEQ ID NO: 3483026 - DNA, 25 bp, Homo sapien
tccacctgcttggactgcagctgct

SEQ ID NO: 3483027 - DNA, 25 bp, Homo sapien
gcttccctctgcagtgcgcctggct

SEQ ID NO: 3483028 - DNA, 25 bp, Homo sapien
tgcttccctctgcagtgcgcctggc

SEQ ID NO: 3483029 - DNA, 25 bp, Homo sapien
ctctggcccccggtgcctccacctg

SEQ ID NO: 3483030 - DNA, 25 bp, Homo sapien
agttagttggtgttccggtgttcat

SEQ ID NO: 3483031 - DNA, 25 bp, Homo sapien
gagcagaatagttagttggtgttcc

SEQ ID NO: 3483032 - DNA, 25 bp, Homo sapien
cagaatagttagttggtgttccggt

SEQ ID NO: 3483033 - DNA, 25 bp, Homo sapien
agtagagcagaatagttagttggtg

SEQ ID NO: 3483034 - DNA, 25 bp, Homo sapien
tccctgatcagctacccgtgcattt

SEQ ID NO: 3483035 - DNA, 25 bp, Homo sapien
aggcagaccttgtcagcaagccagc

SEQ ID NO: 3483036 - DNA, 25 bp, Homo sapien
tcctcatccttatccccactgtggt

SEQ ID NO: 3483037 - DNA, 25 bp, Homo sapien
ggtggccgctacaccactttgcttg

SEQ ID NO: 3483038 - DNA, 25 bp, Homo sapien
ccagacaatgtctcatgagtgcccc

SEQ ID NO: 3483039 - DNA, 25 bp, Homo sapien
acgactgcccattctcaatggcagt

SEQ ID NO: 3483040 - DNA, 25 bp, Homo sapien
ggtcacagtcgctagcctgacccaa

SEQ ID NO: 3483041 - DNA, 25 bp, Homo sapien
caatgtctcatgagtgccccacact

SEQ ID NO: 3483042 - DNA, 25 bp, Homo sapien
ggcaggcagtgcggtaacttttgga

SEQ ID NO: 3483043 - DNA, 25 bp, Homo sapien
gcagtgcggtaacttttggaaggaa

SEQ ID NO: 3483044 - DNA, 25 bp, Homo sapien
ggggcaggcagtgcggtaacttttg

SEQ ID NO: 3483045 - DNA, 25 bp, Homo sapien
caggcagtgcggtaacttttggaag

SEQ ID NO: 3483046 - DNA, 25 bp, Homo sapien
aagagcctaaaccagcgagtgtggg

SEQ ID NO: 3483047 - DNA, 25 bp, Homo sapien
tcccattggccccatttgcaatgaa

SEQ ID NO: 3483048 - DNA, 25 bp, Homo sapien
aatcccaagagcctaaaccagcgag

SEQ ID NO: 3483049 - DNA, 25 bp, Homo sapien
ccattggccccatttgcaatgaaaa

SEQ ID NO: 3483050 - DNA, 25 bp, Homo sapien
catttgcatgaagatgcagctgtga

SEQ ID NO: 3483051 - DNA, 25 bp, Homo sapien
tcatttgcatgaagatgcagctgtg

SEQ ID NO: 3483052 - DNA, 25 bp, Homo sapien
atttgcatgaagatgcagctgtgac

SEQ ID NO: 3483053 - DNA, 25 bp, Homo sapien
caggaacaccctggacccccctgca

SEQ ID NO: 3483054 - DNA, 25 bp, Homo sapien
caggcttcaggaacaccctggaccc

SEQ ID NO: 3483055 - DNA, 25 bp, Homo sapien
tcaggaacaccctggacccccctgc

SEQ ID NO: 3483056 - DNA, 25 bp, Homo sapien
ggtcaggcttcaggaacaccctgga

SEQ ID NO: 3483057 - DNA, 25 bp, Homo sapien
aatccacttacatcaaggcttataa

SEQ ID NO: 3483058 - DNA, 25 bp, Homo sapien
caaatccacttacatcaaggcttat

SEQ ID NO: 3483059 - DNA, 25 bp, Homo sapien
tcccacaggaccaaatccacttaca

SEQ ID NO: 3483060 - DNA, 25 bp, Homo sapien
atccacttacatcaaggcttataag

SEQ ID NO: 3483061 - DNA, 25 bp, Homo sapien
gagccaacgggcaatcgacatctag

SEQ ID NO: 3483062 - DNA, 25 bp, Homo sapien
atgtggacacagacgcacgagccaa

SEQ ID NO: 3483063 - DNA, 25 bp, Homo sapien
gacatctagacatgcatccgtccat

SEQ ID NO: 3483064 - DNA, 25 bp, Homo sapien
cgtaatactgccgttggccacggga

SEQ ID NO: 3483065 - DNA, 25 bp, Homo sapien
gatgggcgagcaggccggcgtgctg

SEQ ID NO: 3483066 - DNA, 25 bp, Homo sapien
cgtgctgcggttggagttactggca

SEQ ID NO: 3483067 - DNA, 25 bp, Homo sapien
gggttggcgagcgagaccgcttccg

SEQ ID NO: 3483068 - DNA, 25 bp, Homo sapien
ggtgtctccgtcctggttctgcggg

SEQ ID NO: 3483069 - DNA, 25 bp, Homo sapien
ggacttgtccgaggagtgatctgag

SEQ ID NO: 3483070 - DNA, 25 bp, Homo sapien
cacgccctgctccggtgtggacggg

SEQ ID NO: 3483071 - DNA, 25 bp, Homo sapien
gctccggtgtggacggggacttgtc

SEQ ID NO: 3483072 - DNA, 25 bp, Homo sapien
gacggggacttgtccgaggagtgat

SEQ ID NO: 3483073 - DNA, 25 bp, Homo sapien
gaggaccctcgcagatgttctccgg

SEQ ID NO: 3483074 - DNA, 25 bp, Homo sapien
tgacaaggaggtaccgcctcaacgg

SEQ ID NO: 3483075 - DNA, 25 bp, Homo sapien
ccctgacaaggaggtaccgcctcaa

SEQ ID NO: 3483076 - DNA, 25 bp, Homo sapien
agggctgttcatcacgtgaggaccc

SEQ ID NO: 3483077 - DNA, 25 bp, Homo sapien
tgaaaatgggccttcaatgacttcc

SEQ ID NO: 3483078 - DNA, 25 bp, Homo sapien
tgttctccgacatcaggtgcagtga

SEQ ID NO: 3483079 - DNA, 25 bp, Homo sapien
catgtaaggagggaataaactccca

SEQ ID NO: 3483080 - DNA, 25 bp, Homo sapien
gcaggcagacatgggtgcagggtcg

SEQ ID NO: 3483081 - DNA, 25 bp, Homo sapien
ggcttcctcgctccaggtaaagttc

SEQ ID NO: 3483082 - DNA, 25 bp, Homo sapien
ttcctcgctccaggtaaagttcctc

SEQ ID NO: 3483083 - DNA, 25 bp, Homo sapien
tggcttcctcgctccaggtaaagtt

SEQ ID NO: 3483084 - DNA, 25 bp, Homo sapien
tcgctccaggtaaagttcctccttc

SEQ ID NO: 3483085 - DNA, 25 bp, Homo sapien
ttcctatgaaaaggcccagtttggc

SEQ ID NO: 3483086 - DNA, 25 bp, Homo sapien
tgaaaaggcccagtttggcccctga

SEQ ID NO: 3483087 - DNA, 25 bp, Homo sapien
cctcagttcctatgaaaaggcccag

SEQ ID NO: 3483088 - DNA, 25 bp, Homo sapien
tccctcctcagttcctatgaaaagg

SEQ ID NO: 3483089 - DNA, 25 bp, Homo sapien
gagaaggggcgtccctcatcctctg

SEQ ID NO: 3483090 - DNA, 25 bp, Homo sapien
tcatcctctggctttagtttgctgt

SEQ ID NO: 3483091 - DNA, 25 bp, Homo sapien
ctggctttagtttgctgtagcgccc

SEQ ID NO: 3483092 - DNA, 25 bp, Homo sapien
cctctggctttagtttgctgtagcg

SEQ ID NO: 3483093 - DNA, 25 bp, Homo sapien
caggggcagggaagtcagaggagct

SEQ ID NO: 3483094 - DNA, 25 bp, Homo sapien
gggaagtcagaggagctgccggcct

SEQ ID NO: 3483095 - DNA, 25 bp, Homo sapien
gacccagacccacaggggcagggaa

SEQ ID NO: 3483096 - DNA, 25 bp, Homo sapien
ctgccagacgggaaggacccagacc

SEQ ID NO: 3483097 - DNA, 25 bp, Homo sapien
tggttctgcattcccggaaatgagt

SEQ ID NO: 3483098 - DNA, 25 bp, Homo sapien
ttcaatccccgtggttctgcattcc

SEQ ID NO: 3483099 - DNA, 25 bp, Homo sapien
gaggcacattcaatccccgtggttc

SEQ ID NO: 3483100 - DNA, 25 bp, Homo sapien
tgaggggccacaggaaaaatgggtc

SEQ ID NO: 3483101 - DNA, 25 bp, Homo sapien
gatggtccctttgcatgggctggca

SEQ ID NO: 3483102 - DNA, 25 bp, Homo sapien
aaagggggcaacaggaacatgggct

SEQ ID NO: 3483103 - DNA, 25 bp, Homo sapien
cacatcggcgcttgtgccttccaaa

SEQ ID NO: 3483104 - DNA, 25 bp, Homo sapien
ggggaccccggatgcctgtgactcc

SEQ ID NO: 3483105 - DNA, 25 bp, Homo sapien
gtcctcacacatgccctcgatggcc

SEQ ID NO: 3483106 - DNA, 25 bp, Homo sapien
tctgtaaagacggtccaccttcacc

SEQ ID NO: 3483107 - DNA, 25 bp, Homo sapien
actctgtaaagacggtccaccttca

SEQ ID NO: 3483108 - DNA, 25 bp, Homo sapien
tgcttctgagcagcttcgtcctcac

SEQ ID NO: 3483109 - DNA, 25 bp, Homo sapien
tccacctggtgttaaagcgtcccaa

SEQ ID NO: 3483110 - DNA, 25 bp, Homo sapien
catggtcctcgaatgtctgctgtgt

SEQ ID NO: 3483111 - DNA, 25 bp, Homo sapien
agagtagccatggtcctcgaatgtc

SEQ ID NO: 3483112 - DNA, 25 bp, Homo sapien
cccaacccagaagggcagacaagag

SEQ ID NO: 3483113 - DNA, 25 bp, Homo sapien
ctgggcagcaggatgttggcagcca

SEQ ID NO: 3483114 - DNA, 25 bp, Homo sapien
cagcaggatgttggcagccacaggg

SEQ ID NO: 3483115 - DNA, 25 bp, Homo sapien
ggcagcaggatgttggcagccacag

SEQ ID NO: 3483116 - DNA, 25 bp, Homo sapien
tgggcagcaggatgttggcagccac

SEQ ID NO: 3483117 - DNA, 25 bp, Homo sapien
aacagcacccaggacgggctggtca

SEQ ID NO: 3483118 - DNA, 25 bp, Homo sapien
ccaaggcttgcaaatcaacagcacc

SEQ ID NO: 3483119 - DNA, 25 bp, Homo sapien
tcagcccataactctctccacaact

SEQ ID NO: 3483120 - DNA, 25 bp, Homo sapien
ttgcaaatcaacagcacccaggacg

SEQ ID NO: 3483121 - DNA, 25 bp, Homo sapien
tcccctcttctgacgccacaggcca

SEQ ID NO: 3483122 - DNA, 25 bp, Homo sapien
ggcctgagtttgtgcgatgctgctt

SEQ ID NO: 3483123 - DNA, 25 bp, Homo sapien
tgctgcttaaaaaggtgcaagggag

SEQ ID NO: 3483124 - DNA, 25 bp, Homo sapien
gtcctgttcccctatgggggcctga

SEQ ID NO: 3483125 - DNA, 25 bp, Homo sapien
ctgaagaggcgcagatgacagctgt

SEQ ID NO: 3483126 - DNA, 25 bp, Homo sapien
tgcacatgaaagcacggacatgagc

SEQ ID NO: 3483127 - DNA, 25 bp, Homo sapien
ggtgctgcggagaggagctcgttca

SEQ ID NO: 3483128 - DNA, 25 bp, Homo sapien
agctcctaaggaggcatctgcacat

SEQ ID NO: 3483129 - DNA, 25 bp, Homo sapien
cctgggatccggagagaggttatag

SEQ ID NO: 3483130 - DNA, 25 bp, Homo sapien
tatagagggacagtcagcaaagctg

SEQ ID NO: 3483131 - DNA, 25 bp, Homo sapien
gaagggcagattccaaccagcccag

SEQ ID NO: 3483132 - DNA, 25 bp, Homo sapien
tgcctgaagggcagattccaaccag

SEQ ID NO: 3483133 - DNA, 25 bp, Homo sapien
caaaggagggaaagggagactgagg

SEQ ID NO: 3483134 - DNA, 25 bp, Homo sapien
aaggagggaaagggagactgaggca

SEQ ID NO: 3483135 - DNA, 25 bp, Homo sapien
agcaaaggagggaaagggagactga

SEQ ID NO: 3483136 - DNA, 25 bp, Homo sapien
ctgagcaaaggagggaaagggagac

SEQ ID NO: 3483137 - DNA, 25 bp, Homo sapien
gagtgggacgggagacgaggacgta

SEQ ID NO: 3483138 - DNA, 25 bp, Homo sapien
ccaaatctggataggcagaaggcag

SEQ ID NO: 3483139 - DNA, 25 bp, Homo sapien
agaaggcagagtgggacgggagacg

SEQ ID NO: 3483140 - DNA, 25 bp, Homo sapien
ttacagccaaatctggataggcaga

SEQ ID NO: 3483141 - DNA, 25 bp, Homo sapien
aacgtagcaagtccattttccaagg

SEQ ID NO: 3483142 - DNA, 25 bp, Homo sapien
ttccaaggtgatcagaatgcctccc

SEQ ID NO: 3483143 - DNA, 25 bp, Homo sapien
tatgtaggctgtaggtagctccagg

SEQ ID NO: 3483144 - DNA, 25 bp, Homo sapien
ggtgacaccagaccccagtatgtag

SEQ ID NO: 3483145 - DNA, 25 bp, Homo sapien
tggttgctgccaacactctccccag

SEQ ID NO: 3483146 - DNA, 25 bp, Homo sapien
gctgccaacactctccccagcacac

SEQ ID NO: 3483147 - DNA, 25 bp, Homo sapien
gttgctgccaacactctccccagca

SEQ ID NO: 3483148 - DNA, 25 bp, Homo sapien
ctggttgctgccaacactctcccca

SEQ ID NO: 3483149 - DNA, 25 bp, Homo sapien
ccctatacaaccttcagcattagca

SEQ ID NO: 3483150 - DNA, 25 bp, Homo sapien
agcttcgggatctgtctgaggcacc

SEQ ID NO: 3483151 - DNA, 25 bp, Homo sapien
tggtggagacgctgagatcaacagc

SEQ ID NO: 3483152 - DNA, 25 bp, Homo sapien
tacaaccttcagcattagcaagagg

SEQ ID NO: 3483153 - DNA, 25 bp, Homo sapien
ggtcccggccaatgtcctccagtaa

SEQ ID NO: 3483154 - DNA, 25 bp, Homo sapien
atggtcccggccaatgtcctccagt

SEQ ID NO: 3483155 - DNA, 25 bp, Homo sapien
ctgggtgatggtcccggccaatgtc

SEQ ID NO: 3483156 - DNA, 25 bp, Homo sapien
tgatggtcccggccaatgtcctcca

SEQ ID NO: 3483157 - DNA, 25 bp, Homo sapien
gctgcagcaacagggcctgctctca

SEQ ID NO: 3483158 - DNA, 25 bp, Homo sapien
aacagggcctgctctcaaccccagc

SEQ ID NO: 3483159 - DNA, 25 bp, Homo sapien
gctctcaaccccagcccaacacaca

SEQ ID NO: 3483160 - DNA, 25 bp, Homo sapien
agcaacagggcctgctctcaacccc

SEQ ID NO: 3483161 - DNA, 25 bp, Homo sapien
ctgcaggacaaggatgatccacagc

SEQ ID NO: 3483162 - DNA, 25 bp, Homo sapien
gtcagtgcagacagtcaccccaagg

SEQ ID NO: 3483163 - DNA, 25 bp, Homo sapien
tgcagacagtcaccccaagggtcca

SEQ ID NO: 3483164 - DNA, 25 bp, Homo sapien
tggtcagtgcagacagtcaccccaa

SEQ ID NO: 3483165 - DNA, 25 bp, Homo sapien
agtgcagacagtcaccccaagggtc

SEQ ID NO: 3483166 - DNA, 25 bp, Homo sapien
ctgtggatgggtggcctctggtttc

SEQ ID NO: 3483167 - DNA, 25 bp, Homo sapien
cagagggcctgtgtgactctgacag

SEQ ID NO: 3483168 - DNA, 25 bp, Homo sapien
tggtttctcagcagagggcctgtgt

SEQ ID NO: 3483169 - DNA, 25 bp, Homo sapien
ctgtgtgactctgacaggtgtcctt

SEQ ID NO: 3483170 - DNA, 25 bp, Homo sapien
tcccaacgacgcctggctccctgag

SEQ ID NO: 3483171 - DNA, 25 bp, Homo sapien
ggctgcccctcccaacgacgcctgg

SEQ ID NO: 3483172 - DNA, 25 bp, Homo sapien
aaacaactggtctcccctggcttga

SEQ ID NO: 3483173 - DNA, 25 bp, Homo sapien
ctgagcactgactcccgactgtccc

SEQ ID NO: 3483174 - DNA, 25 bp, Homo sapien
ggtgcatggccaagctgcttcaggt

SEQ ID NO: 3483175 - DNA, 25 bp, Homo sapien
ccagcaacggtgttcagcggcagca

SEQ ID NO: 3483176 - DNA, 25 bp, Homo sapien
ggatttcctcagatccgtgccagca

SEQ ID NO: 3483177 - DNA, 25 bp, Homo sapien
aggacccccgactccgtcagtgatt

SEQ ID NO: 3483178 - DNA, 25 bp, Homo sapien
tagccaaggttagtaggatgtaccc

SEQ ID NO: 3483179 - DNA, 25 bp, Homo sapien
caatagccaaggttagtaggatgta

SEQ ID NO: 3483180 - DNA, 25 bp, Homo sapien
ctgcgtgacaatagccaaggttagt

SEQ ID NO: 3483181 - DNA, 25 bp, Homo sapien
cgtgacaatagccaaggttagtagg

SEQ ID NO: 3483182 - DNA, 25 bp, Homo sapien
caatgaggcgctccgtgtctggaag

SEQ ID NO: 3483183 - DNA, 25 bp, Homo sapien
aacaatgaggcgctccgtgtctgga

SEQ ID NO: 3483184 - DNA, 25 bp, Homo sapien
acaatgaggcgctccgtgtctggaa

SEQ ID NO: 3483185 - DNA, 25 bp, Homo sapien
caacaatgaggcgctccgtgtctgg

SEQ ID NO: 3483186 - DNA, 25 bp, Homo sapien
gggttggcttgaggcctctagagag

SEQ ID NO: 3483187 - DNA, 25 bp, Homo sapien
gagaagcaccctgagtgctatgccg

SEQ ID NO: 3483188 - DNA, 25 bp, Homo sapien
gaagcaccctgagtgctatgccggg

SEQ ID NO: 3483189 - DNA, 25 bp, Homo sapien
tgaggcctctagagagaagcaccct

SEQ ID NO: 3483190 - DNA, 25 bp, Homo sapien
gatccaattttcagagaggtagagt

SEQ ID NO: 3483191 - DNA, 25 bp, Homo sapien
gagaggtagagtcggccctgaagga

SEQ ID NO: 3483192 - DNA, 25 bp, Homo sapien
agaatgtctctttggagtgcacatg

SEQ ID NO: 3483193 - DNA, 25 bp, Homo sapien
tctctttggagtgcacatgagtaat

SEQ ID NO: 3483194 - DNA, 25 bp, Homo sapien
ttctttagtcatggaacagatgtct

SEQ ID NO: 3483195 - DNA, 25 bp, Homo sapien
cagatgtctttcaaacggactgtca

SEQ ID NO: 3483196 - DNA, 25 bp, Homo sapien
cattgggaatgaggcgagctgtttt

SEQ ID NO: 3483197 - DNA, 25 bp, Homo sapien
tctgaatcagtgcaaacttggatgg

SEQ ID NO: 3483198 - DNA, 25 bp, Homo sapien
catggtagagttgggtagagttgag

SEQ ID NO: 3483199 - DNA, 25 bp, Homo sapien
tggtagagttgggtagagttgagca

SEQ ID NO: 3483200 - DNA, 25 bp, Homo sapien
gccatggtagagttgggtagagttg

SEQ ID NO: 3483201 - DNA, 25 bp, Homo sapien
tagccatggtagagttgggtagagt

SEQ ID NO: 3483202 - DNA, 25 bp, Homo sapien
atgagagactttgatgggtctgtct

SEQ ID NO: 3483203 - DNA, 25 bp, Homo sapien
tatatgtcctatcccgggccccaaa

SEQ ID NO: 3483204 - DNA, 25 bp, Homo sapien
cagagccggaacatcatcatatatg

SEQ ID NO: 3483205 - DNA, 25 bp, Homo sapien
catcatcatatatgtcctatcccgg

SEQ ID NO: 3483206 - DNA, 25 bp, Homo sapien
gccagagccggaacatcatcatata

SEQ ID NO: 3483207 - DNA, 25 bp, Homo sapien
cagttttaggaaccttacaggtcat

SEQ ID NO: 3483208 - DNA, 25 bp, Homo sapien
ttatggaaaaggtccagcactgagt

SEQ ID NO: 3483209 - DNA, 25 bp, Homo sapien
ggaaaaggtccagcactgagtggca

SEQ ID NO: 3483210 - DNA, 25 bp, Homo sapien
tatggaaaaggtccagcactgagtg

SEQ ID NO: 3483211 - DNA, 25 bp, Homo sapien
tggaaaaggtccagcactgagtggc

SEQ ID NO: 3483212 - DNA, 25 bp, Homo sapien
gagaagaggagaaactcctctctcc

SEQ ID NO: 3483213 - DNA, 25 bp, Homo sapien
agaggagaaactcctctctccttag

SEQ ID NO: 3483214 - DNA, 25 bp, Homo sapien
gaagaggagaaactcctctctcctt

SEQ ID NO: 3483215 - DNA, 25 bp, Homo sapien
ctggagaagaggagaaactcctctc

SEQ ID NO: 3483216 - DNA, 25 bp, Homo sapien
cagaggcactgagccgggctggttc

SEQ ID NO: 3483217 - DNA, 25 bp, Homo sapien
cttcaggggagaaaaggaacgactg

SEQ ID NO: 3483218 - DNA, 25 bp, Homo sapien
ggagaaaaggaacgactgagccttg

SEQ ID NO: 3483219 - DNA, 25 bp, Homo sapien
gaaaaggaacgactgagccttgctc

SEQ ID NO: 3483220 - DNA, 25 bp, Homo sapien
ttcaggggagaaaaggaacgactga

SEQ ID NO: 3483221 - DNA, 25 bp, Homo sapien
aggcccaattcgttcccatagcact

SEQ ID NO: 3483222 - DNA, 25 bp, Homo sapien
ccattgtgttgaagtcgtcgtcagg

SEQ ID NO: 3483223 - DNA, 25 bp, Homo sapien
cattgtgttgaagtcgtcgtcaggg

SEQ ID NO: 3483224 - DNA, 25 bp, Homo sapien
tggtcaggcccaattcgttcccata

SEQ ID NO: 3483225 - DNA, 25 bp, Homo sapien
aaagaaaacctccttgagatgaagg

SEQ ID NO: 3483226 - DNA, 25 bp, Homo sapien
acctccttgagatgaaggtgggtgc

SEQ ID NO: 3483227 - DNA, 25 bp, Homo sapien
ggaacacttcagggatgccgctgta

SEQ ID NO: 3483228 - DNA, 25 bp, Homo sapien
gtgggtgctcgtcgaggaacacttc

SEQ ID NO: 3483229 - DNA, 25 bp, Homo sapien
cctgtggatgttagtgtgctgttgg

SEQ ID NO: 3483230 - DNA, 25 bp, Homo sapien
ctcttccacagggatctcttcacag

SEQ ID NO: 3483231 - DNA, 25 bp, Homo sapien
ttccacagggatctcttcacagtat

SEQ ID NO: 3483232 - DNA, 25 bp, Homo sapien
ggactggcatctggcttggtctcta

SEQ ID NO: 3483233 - DNA, 25 bp, Homo sapien
ctcagtggggatgtcctcattgtca

SEQ ID NO: 3483234 - DNA, 25 bp, Homo sapien
cacaggagcgatcatctcaatcttc

SEQ ID NO: 3483235 - DNA, 25 bp, Homo sapien
gaagtccagtgaaggggagttcaca

SEQ ID NO: 3483236 - DNA, 25 bp, Homo sapien
cttcatcgtgtgtgtcggaagagtc

SEQ ID NO: 3483237 - DNA, 25 bp, Homo sapien
catggcataggtctgttcgagggaa

SEQ ID NO: 3483238 - DNA, 25 bp, Homo sapien
gatacaggagagctgctaaagcctc

SEQ ID NO: 3483239 - DNA, 25 bp, Homo sapien
ttttccagctgctacaggaggatgc

SEQ ID NO: 3483240 - DNA, 25 bp, Homo sapien
taactacagttccataagacagcct

SEQ ID NO: 3483241 - DNA, 25 bp, Homo sapien
tatgagcacagtcaacaagggtatg

SEQ ID NO: 3483242 - DNA, 25 bp, Homo sapien
tcaggaagtagacagtgacagcgga

SEQ ID NO: 3483243 - DNA, 25 bp, Homo sapien
cctccaagagcacttaggtctctgg

SEQ ID NO: 3483244 - DNA, 25 bp, Homo sapien
agaggatcaggaagtagacagtgac

SEQ ID NO: 3483245 - DNA, 25 bp, Homo sapien
tgaaatcccgctggaagggcgagtt

SEQ ID NO: 3483246 - DNA, 25 bp, Homo sapien
gagaagcgccgctgctccatgaaat

SEQ ID NO: 3483247 - DNA, 25 bp, Homo sapien
aagacttcattcacgtactgccggc

SEQ ID NO: 3483248 - DNA, 25 bp, Homo sapien
gaagaggaggtcatagagcttgtcc

SEQ ID NO: 3483249 - DNA, 25 bp, Homo sapien
gtaaagaatcactcggctctggttt

SEQ ID NO: 3483250 - DNA, 25 bp, Homo sapien
cctttttccatggatggaagatgat

SEQ ID NO: 3483251 - DNA, 25 bp, Homo sapien
tcctttttccatggatggaagatga

SEQ ID NO: 3483252 - DNA, 25 bp, Homo sapien
agaatcactcggctctggtttccat

SEQ ID NO: 3483253 - DNA, 25 bp, Homo sapien
tgcgggcaggaaaggtccattggac

SEQ ID NO: 3483254 - DNA, 25 bp, Homo sapien
gcgggcaggaaaggtccattggaca

SEQ ID NO: 3483255 - DNA, 25 bp, Homo sapien
ctgcgggcaggaaaggtccattgga

SEQ ID NO: 3483256 - DNA, 25 bp, Homo sapien
gcgtgtagcgattgattgtgtagaa

SEQ ID NO: 3483257 - DNA, 25 bp, Homo sapien
gaggacttcggcatctatcacgtaa

SEQ ID NO: 3483258 - DNA, 25 bp, Homo sapien
tgttccgagccacacgggtgagcgt

SEQ ID NO: 3483259 - DNA, 25 bp, Homo sapien
tagaagtagtcatggtagggcacgt

SEQ ID NO: 3483260 - DNA, 25 bp, Homo sapien
agacacaagatcagtcatttcctgg

SEQ ID NO: 3483261 - DNA, 25 bp, Homo sapien
tgaggagcaagccagacacaagatc

SEQ ID NO: 3483262 - DNA, 25 bp, Homo sapien
gccagacacaagatcagtcatttcc

SEQ ID NO: 3483263 - DNA, 25 bp, Homo sapien
gcaagccagacacaagatcagtcat

SEQ ID NO: 3483264 - DNA, 25 bp, Homo sapien
cccagggctgttttcgatagcgcag

SEQ ID NO: 3483265 - DNA, 25 bp, Homo sapien
tccagaagttcttctcgatgaacgt

SEQ ID NO: 3483266 - DNA, 25 bp, Homo sapien
tcgatagcgcagctctgtggagacc

SEQ ID NO: 3483267 - DNA, 25 bp, Homo sapien
taaatggcggaagtagtcctccagc

SEQ ID NO: 3483268 - DNA, 25 bp, Homo sapien
tacaaatacttctcgtcacagagcc

SEQ ID NO: 3483269 - DNA, 25 bp, Homo sapien
tcaggaggtacttgtgggacccagc

SEQ ID NO: 3483270 - DNA, 25 bp, Homo sapien
ggcatacacgtcttaaatagatgca

SEQ ID NO: 3483271 - DNA, 25 bp, Homo sapien
tgcaccctcatgtatacaatttggg

SEQ ID NO: 3483272 - DNA, 25 bp, Homo sapien
aataagtgctctccgttttggccag

SEQ ID NO: 3483273 - DNA, 25 bp, Homo sapien
caccgttgtagtcttgctggccttc

SEQ ID NO: 3483274 - DNA, 25 bp, Homo sapien
tgtctgtgcatctcagccaaataag

SEQ ID NO: 3483275 - DNA, 25 bp, Homo sapien
tggtgaccgggctcatcacctcttc

SEQ ID NO: 3483276 - DNA, 25 bp, Homo sapien
cctccgggatatgccgcgtctgtgt

SEQ ID NO: 3483277 - DNA, 25 bp, Homo sapien
agcttggacacgctctgcaggtgga

SEQ ID NO: 3483278 - DNA, 25 bp, Homo sapien
ggtgtcctccgggatatgccgcgtc

SEQ ID NO: 3483279 - DNA, 25 bp, Homo sapien
tgtcctccgggatatgccgcgtctg

SEQ ID NO: 3483280 - DNA, 25 bp, Homo sapien
gcctgctcacgatcttggtgcctgc

SEQ ID NO: 3483281 - DNA, 25 bp, Homo sapien
tggtgcctgcatttgggtttatgtt

SEQ ID NO: 3483282 - DNA, 25 bp, Homo sapien
ctttggcacagcctgctcacgatct

SEQ ID NO: 3483283 - DNA, 25 bp, Homo sapien
ggtcatctgaacacccgcctctttg

SEQ ID NO: 3483284 - DNA, 25 bp, Homo sapien
gctgctgtccctgaccggtgggcca

SEQ ID NO: 3483285 - DNA, 25 bp, Homo sapien
gcagtgagatgtcacctgagcctag

SEQ ID NO: 3483286 - DNA, 25 bp, Homo sapien
tgaccggtgggccatccaaagcatt

SEQ ID NO: 3483287 - DNA, 25 bp, Homo sapien
cagtgagatgtcacctgagcctagg

SEQ ID NO: 3483288 - DNA, 25 bp, Homo sapien
catcatgttaaggatgaccagcagc

SEQ ID NO: 3483289 - DNA, 25 bp, Homo sapien
ccttagaccctgccaggcagtgagg

SEQ ID NO: 3483290 - DNA, 25 bp, Homo sapien
cagagtttgtagaagagcatcatgt

SEQ ID NO: 3483291 - DNA, 25 bp, Homo sapien
gcgtggtgtattccaacatccagag

SEQ ID NO: 3483292 - DNA, 25 bp, Homo sapien
tatcgtggtacttttgttgggactc

SEQ ID NO: 3483293 - DNA, 25 bp, Homo sapien
ctggtcaaggagcatcactgaggat

SEQ ID NO: 3483294 - DNA, 25 bp, Homo sapien
actctaagagctgggcccattctgt

SEQ ID NO: 3483295 - DNA, 25 bp, Homo sapien
catttttggagctcagtatcgtggt

SEQ ID NO: 3483296 - DNA, 25 bp, Homo sapien
gacctgatgccgttctgaaggttga

SEQ ID NO: 3483297 - DNA, 25 bp, Homo sapien
tcttcactttccgacgtgtagtcgc

SEQ ID NO: 3483298 - DNA, 25 bp, Homo sapien
ttctgaaggttgatgagcgagtcct

SEQ ID NO: 3483299 - DNA, 25 bp, Homo sapien
tagtcgcgggacctgatgccgttct

SEQ ID NO: 3483300 - DNA, 25 bp, Homo sapien
tatgtacatgtattgcacaggcctc

SEQ ID NO: 3483301 - DNA, 25 bp, Homo sapien
tccaccataagaaaacgctgctccg

SEQ ID NO: 3483302 - DNA, 25 bp, Homo sapien
tgaagcaccttaagcaatgccgtct

SEQ ID NO: 3483303 - DNA, 25 bp, Homo sapien
gaccttagggtcttcgcaggcataa

SEQ ID NO: 3483304 - DNA, 25 bp, Homo sapien
tgaggctggcaacccatcttggtgc

SEQ ID NO: 3483305 - DNA, 25 bp, Homo sapien
tacagatggccagacaactcgactg

SEQ ID NO: 3483306 - DNA, 25 bp, Homo sapien
ccagagggccccgtgaattcagata

SEQ ID NO: 3483307 - DNA, 25 bp, Homo sapien
aagaccccggagctgttgcacagaa

SEQ ID NO: 3483308 - DNA, 25 bp, Homo sapien
tgtcacctcggtcttgaatcagagc

SEQ ID NO: 3483309 - DNA, 25 bp, Homo sapien
cataatcctacgaaagacccagact

SEQ ID NO: 3483310 - DNA, 25 bp, Homo sapien
caattcactaaaggccaagcttggc

SEQ ID NO: 3483311 - DNA, 25 bp, Homo sapien
tgattgctcaatccagttggccctg

SEQ ID NO: 3483312 - DNA, 25 bp, Homo sapien
acccacccacctcagcctcccaaag

SEQ ID NO: 3483313 - DNA, 25 bp, Homo sapien
aattctcatgcctcggcctctccag

SEQ ID NO: 3483314 - DNA, 25 bp, Homo sapien
cactgcaacctctgcctcttgggtt

SEQ ID NO: 3483315 - DNA, 25 bp, Homo sapien
agagtgcagtggtgtgatctcggct

SEQ ID NO: 3483316 - DNA, 25 bp, Homo sapien
tcagagtgaagcacgcctgtctagg

SEQ ID NO: 3483317 - DNA, 25 bp, Homo sapien
caccacctgggcattaggactgaaa

SEQ ID NO: 3483318 - DNA, 25 bp, Homo sapien
cgataatgtatgtgtgccctccctg

SEQ ID NO: 3483319 - DNA, 25 bp, Homo sapien
tttgtcaggttcatggcccactttg

SEQ ID NO: 3483320 - DNA, 25 bp, Homo sapien
cagacatggagatggcaggggttcc

SEQ ID NO: 3483321 - DNA, 25 bp, Homo sapien
agacatggagatggcaggggttcca

SEQ ID NO: 3483322 - DNA, 25 bp, Homo sapien
gccagacatggagatggcaggggtt

SEQ ID NO: 3483323 - DNA, 25 bp, Homo sapien
ctgccagacatggagatggcagggg

SEQ ID NO: 3483324 - DNA, 25 bp, Homo sapien
catgccggatgcaggtaacagtaac

SEQ ID NO: 3483325 - DNA, 25 bp, Homo sapien
aaagaatctgagagggcgcagtcct

SEQ ID NO: 3483326 - DNA, 25 bp, Homo sapien
caaagggtttcctcgaaagaatctg

SEQ ID NO: 3483327 - DNA, 25 bp, Homo sapien
gcgcagtccttgaccgagggaatct

SEQ ID NO: 3483328 - DNA, 25 bp, Homo sapien
agttagggcggacgaagcaggagcc

SEQ ID NO: 3483329 - DNA, 25 bp, Homo sapien
acatcgccggccgaacgggagctgc

SEQ ID NO: 3483330 - DNA, 25 bp, Homo sapien
gattccagtcggaacgcaaccgatc

SEQ ID NO: 3483331 - DNA, 25 bp, Homo sapien
gacgtggaacgcattctgtagccca

SEQ ID NO: 3483332 - DNA, 25 bp, Homo sapien
cttcccggagctacacccggcaagt

SEQ ID NO: 3483333 - DNA, 25 bp, Homo sapien
agtccgtgcgggagcggagtgggtt

SEQ ID NO: 3483334 - DNA, 25 bp, Homo sapien
tacacccggcaagtccgtgcgggag

SEQ ID NO: 3483335 - DNA, 25 bp, Homo sapien
agctacacccggcaagtccgtgcgg

SEQ ID NO: 3483336 - DNA, 25 bp, Homo sapien
tccattttggaatatcagcgttaag

SEQ ID NO: 3483337 - DNA, 25 bp, Homo sapien
cattttggaatatcagcgttaagct

SEQ ID NO: 3483338 - DNA, 25 bp, Homo sapien
ttttggaatatcagcgttaagcttc

SEQ ID NO: 3483339 - DNA, 25 bp, Homo sapien
tttggaatatcagcgttaagcttcc

SEQ ID NO: 3483340 - DNA, 25 bp, Homo sapien
gagggagcatttcctgcttctggtc

SEQ ID NO: 3483341 - DNA, 25 bp, Homo sapien
gagcatttcctgcttctggtccact

SEQ ID NO: 3483342 - DNA, 25 bp, Homo sapien
tcaggagggagcatttcctgcttct

SEQ ID NO: 3483343 - DNA, 25 bp, Homo sapien
catttcctgcttctggtccactcac

SEQ ID NO: 3483344 - DNA, 25 bp, Homo sapien
ctggtggctccctgcccaggaagat

SEQ ID NO: 3483345 - DNA, 25 bp, Homo sapien
ccctgcccaggaagatccgactggg

SEQ ID NO: 3483346 - DNA, 25 bp, Homo sapien
gggacattctgttactctgtgagat

SEQ ID NO: 3483347 - DNA, 25 bp, Homo sapien
ccgactggggacattctgttactct

SEQ ID NO: 3483348 - DNA, 25 bp, Homo sapien
tccctcttactatggctactgcaaa

SEQ ID NO: 3483349 - DNA, 25 bp, Homo sapien
cttccctcttactatggctactgca

SEQ ID NO: 3483350 - DNA, 25 bp, Homo sapien
actatggctactgcaaacatttgtc

SEQ ID NO: 3483351 - DNA, 25 bp, Homo sapien
ctcttactatggctactgcaaacat

SEQ ID NO: 3483352 - DNA, 25 bp, Homo sapien
tgcacaaggccctgattctgttcag

SEQ ID NO: 3483353 - DNA, 25 bp, Homo sapien
tgattctgttcagctccccactcaa

SEQ ID NO: 3483354 - DNA, 25 bp, Homo sapien
ttcctgttttaatgagacatattct

SEQ ID NO: 3483355 - DNA, 25 bp, Homo sapien
cctgttttaatgagacatattcttt

SEQ ID NO: 3483356 - DNA, 25 bp, Homo sapien
tgttgggtttactgatgctcactgc

SEQ ID NO: 3483357 - DNA, 25 bp, Homo sapien
gcagccttcaagaatggttgcaaac

SEQ ID NO: 3483358 - DNA, 25 bp, Homo sapien
tttaactggatccaccctgaatctg

SEQ ID NO: 3483359 - DNA, 25 bp, Homo sapien
tacaataatggcagcagcaaggcac

SEQ ID NO: 3483360 - DNA, 25 bp, Homo sapien
cactgaggggttcaaatcagctgag

SEQ ID NO: 3483361 - DNA, 25 bp, Homo sapien
acttctaggaaagctgcggatgggc

SEQ ID NO: 3483362 - DNA, 25 bp, Homo sapien
tgggctgctgctattccactgaggg

SEQ ID NO: 3483363 - DNA, 25 bp, Homo sapien
tcagctgagtctaggagtcagaaag

SEQ ID NO: 3483364 - DNA, 25 bp, Homo sapien
cagcaattcccagatcaaggtcaaa

SEQ ID NO: 3483365 - DNA, 25 bp, Homo sapien
agcaattcccagatcaaggtcaaaa

SEQ ID NO: 3483366 - DNA, 25 bp, Homo sapien
caattcccagatcaaggtcaaaatg

SEQ ID NO: 3483367 - DNA, 25 bp, Homo sapien
gcaattcccagatcaaggtcaaaat

SEQ ID NO: 3483368 - DNA, 25 bp, Homo sapien
ccttccgagtgtagatatttgtcca

SEQ ID NO: 3483369 - DNA, 25 bp, Homo sapien
tctgccttccgagtgtagatatttg

SEQ ID NO: 3483370 - DNA, 25 bp, Homo sapien
tgtagatatttgtccacctttgtac

SEQ ID NO: 3483371 - DNA, 25 bp, Homo sapien
tccgagtgtagatatttgtccacct

SEQ ID NO: 3483372 - DNA, 25 bp, Homo sapien
tgacacagtgcagtttacagatgag

SEQ ID NO: 3483373 - DNA, 25 bp, Homo sapien
cacatttctttagcactaaccacag

SEQ ID NO: 3483374 - DNA, 25 bp, Homo sapien
taaccacagcgatgacacagtgcag

SEQ ID NO: 3483375 - DNA, 25 bp, Homo sapien
gtttacagatgaggtactgaataat

SEQ ID NO: 3483376 - DNA, 25 bp, Homo sapien
gaaaagatactagcaaaatccagcc

SEQ ID NO: 3483377 - DNA, 25 bp, Homo sapien
ctcttttgcaatatgaggtacccag

SEQ ID NO: 3483378 - DNA, 25 bp, Homo sapien
gcaaatttcaccctgactggcgtta

SEQ ID NO: 3483379 - DNA, 25 bp, Homo sapien
catttcaggtctcaaggctgtgaca

SEQ ID NO: 3483380 - DNA, 25 bp, Homo sapien
ccgtgctaacagagagctgcagccc

SEQ ID NO: 3483381 - DNA, 25 bp, Homo sapien
ctacagagtttaagcagaaggaggc

SEQ ID NO: 3483382 - DNA, 25 bp, Homo sapien
gatcgtctgagaatgcatccacccc

SEQ ID NO: 3483383 - DNA, 25 bp, Homo sapien
tgcagcctcatggacattgatcgtc

SEQ ID NO: 3483384 - DNA, 25 bp, Homo sapien
taacaacgctgcaaaaaggccattt

SEQ ID NO: 3483385 - DNA, 25 bp, Homo sapien
tggcaattcataaagatagggactc

SEQ ID NO: 3483386 - DNA, 25 bp, Homo sapien
tcaaccatctaaaacgccatgcagg

SEQ ID NO: 3483387 - DNA, 25 bp, Homo sapien
tgtagggttatgtaaagacttccag

SEQ ID NO: 3483388 - DNA, 25 bp, Homo sapien
aaagtgttgaacctgggaccctgag

SEQ ID NO: 3483389 - DNA, 25 bp, Homo sapien
gataactgcatagatccctcgctgt

SEQ ID NO: 3483390 - DNA, 25 bp, Homo sapien
ggcgaaaaatctcaaggctgcttca

SEQ ID NO: 3483391 - DNA, 25 bp, Homo sapien
aaacactgctagaaaggagggccta

SEQ ID NO: 3483392 - DNA, 25 bp, Homo sapien
tacccagtttggtgctgtgcacagc

SEQ ID NO: 3483393 - DNA, 25 bp, Homo sapien
gcaaagccctttgagagagcaggaa

SEQ ID NO: 3483394 - DNA, 25 bp, Homo sapien
tacttcactggacgtcggttctcaa

SEQ ID NO: 3483395 - DNA, 25 bp, Homo sapien
ggaatctcttgtacctagtgctgcg

SEQ ID NO: 3483396 - DNA, 25 bp, Homo sapien
tctttctttggaacctcttgtaaca

SEQ ID NO: 3483397 - DNA, 25 bp, Homo sapien
tattgtctttctttggaacctcttg

SEQ ID NO: 3483398 - DNA, 25 bp, Homo sapien
attgtctttctttggaacctcttgt

SEQ ID NO: 3483399 - DNA, 25 bp, Homo sapien
gcttcatgatggaggttaaccaaca

SEQ ID NO: 3483400 - DNA, 25 bp, Homo sapien
aaaaagcctagcttcatgatggagg

SEQ ID NO: 3483401 - DNA, 25 bp, Homo sapien
cctagcttcatgatggaggttaacc

SEQ ID NO: 3483402 - DNA, 25 bp, Homo sapien
ctgaaggttaaaaagcctagcttca

SEQ ID NO: 3483403 - DNA, 25 bp, Homo sapien
cctcctctcagattgcttaagatca

SEQ ID NO: 3483404 - DNA, 25 bp, Homo sapien
ctcctctcagattgcttaagatcat

SEQ ID NO: 3483405 - DNA, 25 bp, Homo sapien
ccctcctctcagattgcttaagatc

SEQ ID NO: 3483406 - DNA, 25 bp, Homo sapien
ctgcatagacaccagcattttggaa

SEQ ID NO: 3483407 - DNA, 25 bp, Homo sapien
gcatagacaccagcattttggaact

SEQ ID NO: 3483408 - DNA, 25 bp, Homo sapien
catagacaccagcattttggaactc

SEQ ID NO: 3483409 - DNA, 25 bp, Homo sapien
tgcatagacaccagcattttggaac

SEQ ID NO: 3483410 - DNA, 25 bp, Homo sapien
tactgtgatgttgggcccagtttga

SEQ ID NO: 3483411 - DNA, 25 bp, Homo sapien
tctactgtgatgttgggcccagttt

SEQ ID NO: 3483412 - DNA, 25 bp, Homo sapien
ttctactgtgatgttgggcccagtt

SEQ ID NO: 3483413 - DNA, 25 bp, Homo sapien
actgtgatgttgggcccagtttgaa

SEQ ID NO: 3483414 - DNA, 25 bp, Homo sapien
tatcatgtcttttgaccgctacctc

SEQ ID NO: 3483415 - DNA, 25 bp, Homo sapien
ggcttcaccattgtcttttgtcaga

SEQ ID NO: 3483416 - DNA, 25 bp, Homo sapien
tgggcaccaccgagttcttgatcct

SEQ ID NO: 3483417 - DNA, 25 bp, Homo sapien
ttttgtcagacgatgctgctcatcc

SEQ ID NO: 3483418 - DNA, 25 bp, Homo sapien
tgaatggatcagcctcgccctggga

SEQ ID NO: 3483419 - DNA, 25 bp, Homo sapien
gtgaatggatcagcctcgccctggg

SEQ ID NO: 3483420 - DNA, 25 bp, Homo sapien
agtgaatggatcagcctcgccctgg

SEQ ID NO: 3483421 - DNA, 25 bp, Homo sapien
tctttaacttctgctataggaaacg

SEQ ID NO: 3483422 - DNA, 25 bp, Homo sapien
tcatctttaacttctgctataggaa

SEQ ID NO: 3483423 - DNA, 25 bp, Homo sapien
acttctgctataggaaacgtctcta

SEQ ID NO: 3483424 - DNA, 25 bp, Homo sapien
tgctataggaaacgtctctatatct

SEQ ID NO: 3483425 - DNA, 25 bp, Homo sapien
gaagatccccgggtcaggagagtgg

SEQ ID NO: 3483426 - DNA, 25 bp, Homo sapien
aggagagtggacaagcacagcctca

SEQ ID NO: 3483427 - DNA, 25 bp, Homo sapien
tcacaggagaataggaggaagatcc

SEQ ID NO: 3483428 - DNA, 25 bp, Homo sapien
tcagtcccagaacatacaaatactt

SEQ ID NO: 3483429 - DNA, 25 bp, Homo sapien
aactccaaccgataagaacaggcca

SEQ ID NO: 3483430 - DNA, 25 bp, Homo sapien
actccaaccgataagaacaggccat

SEQ ID NO: 3483431 - DNA, 25 bp, Homo sapien
cagaaaactccaaccgataagaaca

SEQ ID NO: 3483432 - DNA, 25 bp, Homo sapien
agaaaactccaaccgataagaacag

SEQ ID NO: 3483433 - DNA, 25 bp, Homo sapien
gtttatttatctcagggtacaagga

SEQ ID NO: 3483434 - DNA, 25 bp, Homo sapien
ttttgaccatgaaaggcaatgtgca

SEQ ID NO: 3483435 - DNA, 25 bp, Homo sapien
tacaaggagatggtggtgttgtcct

SEQ ID NO: 3483436 - DNA, 25 bp, Homo sapien
cattcacccataatttaacaagaga

SEQ ID NO: 3483437 - DNA, 25 bp, Homo sapien
tgtccgtgcacacactgtgaattcc

SEQ ID NO: 3483438 - DNA, 25 bp, Homo sapien
tctgacaacgaatgtaaggaatctg

SEQ ID NO: 3483439 - DNA, 25 bp, Homo sapien
aagatatttcattaccagaatgcac

SEQ ID NO: 3483440 - DNA, 25 bp, Homo sapien
ggaatctgagaattctatcgaagat

SEQ ID NO: 3483441 - DNA, 25 bp, Homo sapien
ctgcctgaacatccataaatctgac

SEQ ID NO: 3483442 - DNA, 25 bp, Homo sapien
caagaagagtgggaggtcaggccta

SEQ ID NO: 3483443 - DNA, 25 bp, Homo sapien
gaagagtgggaggtcaggcctatgt

SEQ ID NO: 3483444 - DNA, 25 bp, Homo sapien
ccaagaagagtgggaggtcaggcct

SEQ ID NO: 3483445 - DNA, 25 bp, Homo sapien
agtgggaggtcaggcctatgtgaga

SEQ ID NO: 3483446 - DNA, 25 bp, Homo sapien
gattccatggcagttggcagtcctg

SEQ ID NO: 3483447 - DNA, 25 bp, Homo sapien
caaccctaaaaacaagctgaccctg

SEQ ID NO: 3483448 - DNA, 25 bp, Homo sapien
tagttaatttcatggcagctggcaa

SEQ ID NO: 3483449 - DNA, 25 bp, Homo sapien
tccccacagctaccagaagtgttag

SEQ ID NO: 3483450 - DNA, 25 bp, Homo sapien
aagggtgggagttcatccccacagc

SEQ ID NO: 3483451 - DNA, 25 bp, Homo sapien
tggagtcggtaagcatctacctacc

SEQ ID NO: 3483452 - DNA, 25 bp, Homo sapien
tctcttagcaaacgacagaaccttt

SEQ ID NO: 3483453 - DNA, 25 bp, Homo sapien
tagattttaggaaccagaaacacac

SEQ ID NO: 3483454 - DNA, 25 bp, Homo sapien
tgaacactcagatgaaatggagtcg

SEQ ID NO: 3483455 - DNA, 25 bp, Homo sapien
gggtatgaagttgacgattcagcct

SEQ ID NO: 3483456 - DNA, 25 bp, Homo sapien
cagtcactgtggaatggttttttac

SEQ ID NO: 3483457 - DNA, 25 bp, Homo sapien
ttgagatcatgctgaggtttcccac

SEQ ID NO: 3483458 - DNA, 25 bp, Homo sapien
aagctctgcttgttcagttaatcct

SEQ ID NO: 3483459 - DNA, 25 bp, Homo sapien
ctgaatcatgcatccagaataggag

SEQ ID NO: 3483460 - DNA, 25 bp, Homo sapien
tgaatcatgcatccagaataggaga

SEQ ID NO: 3483461 - DNA, 25 bp, Homo sapien
cagctgaatcatgcatccagaatag

SEQ ID NO: 3483462 - DNA, 25 bp, Homo sapien
gctgaatcatgcatccagaatagga

SEQ ID NO: 3483463 - DNA, 25 bp, Homo sapien
tgggagctacaggtgctaaacgctt

SEQ ID NO: 3483464 - DNA, 25 bp, Homo sapien
ccctttttagagtggatgcgcagga

SEQ ID NO: 3483465 - DNA, 25 bp, Homo sapien
tcatcaatataagtgctggagcagg

SEQ ID NO: 3483466 - DNA, 25 bp, Homo sapien
tctcctgggtgagtgaactgctaga

SEQ ID NO: 3483467 - DNA, 25 bp, Homo sapien
tatcctggagataaagatatttttc

SEQ ID NO: 3483468 - DNA, 25 bp, Homo sapien
ttatcctggagataaagatattttt

SEQ ID NO: 3483469 - DNA, 25 bp, Homo sapien
tgcaggtgtgggtcggaggtcacta

SEQ ID NO: 3483470 - DNA, 25 bp, Homo sapien
tgtgggtcggaggtcactatgacca

SEQ ID NO: 3483471 - DNA, 25 bp, Homo sapien
gagagccccagtagaacaaatcctg

SEQ ID NO: 3483472 - DNA, 25 bp, Homo sapien
accgaagctcccaaacctgagagag

SEQ ID NO: 3483473 - DNA, 25 bp, Homo sapien
cagtgctgtgtacgatcccagaagc

SEQ ID NO: 3483474 - DNA, 25 bp, Homo sapien
gtatagacgtagatgcaaggcacaa

SEQ ID NO: 3483475 - DNA, 25 bp, Homo sapien
tgtgtatagcacagagacggccttg

SEQ ID NO: 3483476 - DNA, 25 bp, Homo sapien
ccatgacagtcagcaggaagatctt

SEQ ID NO: 3483477 - DNA, 25 bp, Homo sapien
tgctccaggggaccaatagggtcct

SEQ ID NO: 3483478 - DNA, 25 bp, Homo sapien
gtctgtgctccaggggaccaatagg

SEQ ID NO: 3483479 - DNA, 25 bp, Homo sapien
tgtgctccaggggaccaatagggtc

SEQ ID NO: 3483480 - DNA, 25 bp, Homo sapien
tctgtgctccaggggaccaataggg

SEQ ID NO: 3483481 - DNA, 25 bp, Homo sapien
ctgttggcactctccagctcagcat

SEQ ID NO: 3483482 - DNA, 25 bp, Homo sapien
tcagcatcactctctcattcatcat

SEQ ID NO: 3483483 - DNA, 25 bp, Homo sapien
gttggcactctccagctcagcatca

SEQ ID NO: 3483484 - DNA, 25 bp, Homo sapien
ctccagctcagcatcactctctcat

SEQ ID NO: 3483485 - DNA, 25 bp, Homo sapien
cagcatgtagcagttaattgagaac

SEQ ID NO: 3483486 - DNA, 25 bp, Homo sapien
gcagttaattgagaactgataaccc

SEQ ID NO: 3483487 - DNA, 25 bp, Homo sapien
agttaattgagaactgataacccat

SEQ ID NO: 3483488 - DNA, 25 bp, Homo sapien
agagcatccagcatgtagcagttaa

SEQ ID NO: 3483489 - DNA, 25 bp, Homo sapien
cagccttgccacacagggacaacaa

SEQ ID NO: 3483490 - DNA, 25 bp, Homo sapien
aaggtcctcggcattttgggcacca

SEQ ID NO: 3483491 - DNA, 25 bp, Homo sapien
ggacaacaaggtcctcggcattttg

SEQ ID NO: 3483492 - DNA, 25 bp, Homo sapien
ccttgccacacagggacaacaaggt

SEQ ID NO: 3483493 - DNA, 25 bp, Homo sapien
gtatttcctctatagcgatcatagg

SEQ ID NO: 3483494 - DNA, 25 bp, Homo sapien
tatttcctctatagcgatcatagga

SEQ ID NO: 3483495 - DNA, 25 bp, Homo sapien
cacttcgtggggagtgttttcacta

SEQ ID NO: 3483496 - DNA, 25 bp, Homo sapien
gatgatgagtgggagcccgtgtgcc

SEQ ID NO: 3483497 - DNA, 25 bp, Homo sapien
ccccgggccactagcatttggctca

SEQ ID NO: 3483498 - DNA, 25 bp, Homo sapien
ccactagcatttggctcacttcgtg

SEQ ID NO: 3483499 - DNA, 25 bp, Homo sapien
tgaatgctgtcacgaggctggcgtt

SEQ ID NO: 3483500 - DNA, 25 bp, Homo sapien
gaatgctgtcacgaggctggcgttg

SEQ ID NO: 3483501 - DNA, 25 bp, Homo sapien
gatgaatgctgtcacgaggctggcg

SEQ ID NO: 3483502 - DNA, 25 bp, Homo sapien
atgctgtcacgaggctggcgttgga

SEQ ID NO: 3483503 - DNA, 25 bp, Homo sapien
tgtagaggaaacactcggtgctccc

SEQ ID NO: 3483504 - DNA, 25 bp, Homo sapien
ggcaccgtgacagtggagaaccaca

SEQ ID NO: 3483505 - DNA, 25 bp, Homo sapien
tacctgagcgggtaactgatggcca

SEQ ID NO: 3483506 - DNA, 25 bp, Homo sapien
tgagcacgtaaaccaccaggaagat

SEQ ID NO: 3483507 - DNA, 25 bp, Homo sapien
caggatggaacagacgatggacaca

SEQ ID NO: 3483508 - DNA, 25 bp, Homo sapien
gatccgcaggatggaacagacgatg

SEQ ID NO: 3483509 - DNA, 25 bp, Homo sapien
ggaacagacgatggacacataggac

SEQ ID NO: 3483510 - DNA, 25 bp, Homo sapien
tgcggatccgcaggatggaacagac

SEQ ID NO: 3483511 - DNA, 25 bp, Homo sapien
agcctggcctcagataaatgacaac

SEQ ID NO: 3483512 - DNA, 25 bp, Homo sapien
catggcatccatggagcctggcctc

SEQ ID NO: 3483513 - DNA, 25 bp, Homo sapien
cctggcctcagataaatgacaacac

SEQ ID NO: 3483514 - DNA, 25 bp, Homo sapien
atccatggcatccatggagcctggc

SEQ ID NO: 3483515 - DNA, 25 bp, Homo sapien
aaggggcgtcagcacagtgtagaaa

SEQ ID NO: 3483516 - DNA, 25 bp, Homo sapien
acaacagggttgagaaggggcgtca

SEQ ID NO: 3483517 - DNA, 25 bp, Homo sapien
cagggttgagaaggggcgtcagcac

SEQ ID NO: 3483518 - DNA, 25 bp, Homo sapien
tgagaaggggcgtcagcacagtgta

SEQ ID NO: 3483519 - DNA, 25 bp, Homo sapien
atgaacgctgtcacgaggctggtct

SEQ ID NO: 3483520 - DNA, 25 bp, Homo sapien
tgaacgctgtcacgaggctggtctt

SEQ ID NO: 3483521 - DNA, 25 bp, Homo sapien
gatgaacgctgtcacgaggctggtc

SEQ ID NO: 3483522 - DNA, 25 bp, Homo sapien
ggatccgcaggatggaacagacgat

SEQ ID NO: 3483523 - DNA, 25 bp, Homo sapien
ggatggaacagacgatggacacata

SEQ ID NO: 3483524 - DNA, 25 bp, Homo sapien
tccgcaggatggaacagacgatgga

SEQ ID NO: 3483525 - DNA, 25 bp, Homo sapien
tgtttctcagggtgtacacaacagg

SEQ ID NO: 3483526 - DNA, 25 bp, Homo sapien
gaggccactattccaacagtcacaa

SEQ ID NO: 3483527 - DNA, 25 bp, Homo sapien
agcccgaggccactattccaacagt

SEQ ID NO: 3483528 - DNA, 25 bp, Homo sapien
gtggccagaagagtacacgagcgcc

SEQ ID NO: 3483529 - DNA, 25 bp, Homo sapien
gggaacaccaaagtcatcagcaatt

SEQ ID NO: 3483530 - DNA, 25 bp, Homo sapien
gtgcggatccgcaggatggaacaga

SEQ ID NO: 3483531 - DNA, 25 bp, Homo sapien
tgcggatccgcaggatggaacagac

SEQ ID NO: 3483532 - DNA, 25 bp, Homo sapien
aatgaaaagaccagggccaaagaag

SEQ ID NO: 3483533 - DNA, 25 bp, Homo sapien
tgtctttcagcttcaacagagcttt

SEQ ID NO: 3483534 - DNA, 25 bp, Homo sapien
tttgtctttcagcttcaacagagct

SEQ ID NO: 3483535 - DNA, 25 bp, Homo sapien
tttcagcttcaacagagctttcttc

SEQ ID NO: 3483536 - DNA, 25 bp, Homo sapien
tcagcttcaacagagctttcttcac

SEQ ID NO: 3483537 - DNA, 25 bp, Homo sapien
agatcttaatagcattgaggggata

SEQ ID NO: 3483538 - DNA, 25 bp, Homo sapien
ttagatcttaatagcattgagggga

SEQ ID NO: 3483539 - DNA, 25 bp, Homo sapien
tagatcttaatagcattgaggggat

SEQ ID NO: 3483540 - DNA, 25 bp, Homo sapien
tgtttgggtcgagtgcctgtggaag

SEQ ID NO: 3483541 - DNA, 25 bp, Homo sapien
ggaatgtttgggtcgagtgcctgtg

SEQ ID NO: 3483542 - DNA, 25 bp, Homo sapien
ttgggaatgtttgggtcgagtgcct

SEQ ID NO: 3483543 - DNA, 25 bp, Homo sapien
tgactttgggaatgtttgggtcgag

SEQ ID NO: 3483544 - DNA, 25 bp, Homo sapien
accacgctgactcctcttttcaacc

SEQ ID NO: 3483545 - DNA, 25 bp, Homo sapien
ctgtgcctcccactgtatcgtggtc

SEQ ID NO: 3483546 - DNA, 25 bp, Homo sapien
cactgtatcgtggtcctttgcttct

SEQ ID NO: 3483547 - DNA, 25 bp, Homo sapien
ggccgttttctacaccacgctgact

SEQ ID NO: 3483548 - DNA, 25 bp, Homo sapien
aacatgatgactgggcgctcgtgtg

SEQ ID NO: 3483549 - DNA, 25 bp, Homo sapien
actgggcgctcgtgtgccctcctgg

SEQ ID NO: 3483550 - DNA, 25 bp, Homo sapien
ccaacatgatgactgggcgctcgtg

SEQ ID NO: 3483551 - DNA, 25 bp, Homo sapien
gatgactgggcgctcgtgtgccctc

SEQ ID NO: 3483552 - DNA, 25 bp, Homo sapien
cagggggacctcagttactggagtg

SEQ ID NO: 3483553 - DNA, 25 bp, Homo sapien
acctcagttactggagtgtgattct

SEQ ID NO: 3483554 - DNA, 25 bp, Homo sapien
tttgtatgagggattcccatcaggg

SEQ ID NO: 3483555 - DNA, 25 bp, Homo sapien
tggagaaagtgaggacggccagaag

SEQ ID NO: 3483556 - DNA, 25 bp, Homo sapien
aatatgtcaaacacagacaggtttc

SEQ ID NO: 3483557 - DNA, 25 bp, Homo sapien
gaaaaatatgtcaaacacagacagg

SEQ ID NO: 3483558 - DNA, 25 bp, Homo sapien
aaaatatgtcaaacacagacaggtt

SEQ ID NO: 3483559 - DNA, 25 bp, Homo sapien
atatgtcaaacacagacaggtttcc

SEQ ID NO: 3483560 - DNA, 25 bp, Homo sapien
atggtgcagctttgtcccactaagc

SEQ ID NO: 3483561 - DNA, 25 bp, Homo sapien
agatggtgcagctttgtcccactaa

SEQ ID NO: 3483562 - DNA, 25 bp, Homo sapien
gatggtgcagctttgtcccactaag

SEQ ID NO: 3483563 - DNA, 25 bp, Homo sapien
tgatgaccgtgtatggcaaagggtg

SEQ ID NO: 3483564 - DNA, 25 bp, Homo sapien
atgaccgtgtatggcaaagggtggc

SEQ ID NO: 3483565 - DNA, 25 bp, Homo sapien
accgtgtatggcaaagggtggcaga

SEQ ID NO: 3483566 - DNA, 25 bp, Homo sapien
atgatgaccgtgtatggcaaagggt

SEQ ID NO: 3483567 - DNA, 25 bp, Homo sapien
agtgtgaggacagatgcatgcagac

SEQ ID NO: 3483568 - DNA, 25 bp, Homo sapien
gagtgtgaggacagatgcatgcaga

SEQ ID NO: 3483569 - DNA, 25 bp, Homo sapien
gccacagtaggataacttaaagatg

SEQ ID NO: 3483570 - DNA, 25 bp, Homo sapien
ggcagcaccaccggaatatcacaga

SEQ ID NO: 3483571 - DNA, 25 bp, Homo sapien
aggggcagcaccaccggaatatcac

SEQ ID NO: 3483572 - DNA, 25 bp, Homo sapien
ggggcagcaccaccggaatatcaca

SEQ ID NO: 3483573 - DNA, 25 bp, Homo sapien
gggcagcaccaccggaatatcacag

SEQ ID NO: 3483574 - DNA, 25 bp, Homo sapien
ggctctgcgcctaccttctgaggaa

SEQ ID NO: 3483575 - DNA, 25 bp, Homo sapien
gaaactcactgtccgtgctagagag

SEQ ID NO: 3483576 - DNA, 25 bp, Homo sapien
gactattggtccatagaagagcagg

SEQ ID NO: 3483577 - DNA, 25 bp, Homo sapien
catgagcgcaacaacacctacgttg

SEQ ID NO: 3483578 - DNA, 25 bp, Homo sapien
atgtactccttgaatgagcaccttt

SEQ ID NO: 3483579 - DNA, 25 bp, Homo sapien
ccatcaagactttctccattcttac

SEQ ID NO: 3483580 - DNA, 25 bp, Homo sapien
tgctgaagccgatctgtcggccacg

SEQ ID NO: 3483581 - DNA, 25 bp, Homo sapien
cttttagcaccaagtggttcttgtg

SEQ ID NO: 3483582 - DNA, 25 bp, Homo sapien
tcggccacgtgcttttagcaccaag

SEQ ID NO: 3483583 - DNA, 25 bp, Homo sapien
gatctgtcggccacgtgcttttagc

SEQ ID NO: 3483584 - DNA, 25 bp, Homo sapien
gagtagctgcggctagtgttctaat

SEQ ID NO: 3483585 - DNA, 25 bp, Homo sapien
gctcccggttctcctgttcagtctc

SEQ ID NO: 3483586 - DNA, 25 bp, Homo sapien
tttgcaaaggtagttccaagaagag

SEQ ID NO: 3483587 - DNA, 25 bp, Homo sapien
gcggctagtgttctaatctttgcaa

SEQ ID NO: 3483588 - DNA, 25 bp, Homo sapien
gacggttagtcccttgccgtgatgg

SEQ ID NO: 3483589 - DNA, 25 bp, Homo sapien
ggaaatgtcccgatgtcccaatata

SEQ ID NO: 3483590 - DNA, 25 bp, Homo sapien
tggtgggtcccctatgtcctgtgtc

SEQ ID NO: 3483591 - DNA, 25 bp, Homo sapien
tggcagacagtagttacacgacggt

SEQ ID NO: 3483592 - DNA, 25 bp, Homo sapien
gacgtattttgggagctcatagagc

SEQ ID NO: 3483593 - DNA, 25 bp, Homo sapien
gctccatctagtaggcccagtagat

SEQ ID NO: 3483594 - DNA, 25 bp, Homo sapien
gaagatttattcaagaggattattt

SEQ ID NO: 3483595 - DNA, 25 bp, Homo sapien
cagtagattccaatcacattaggtg

SEQ ID NO: 3483596 - DNA, 25 bp, Homo sapien
cagctgttatattttccagtgctcc

SEQ ID NO: 3483597 - DNA, 25 bp, Homo sapien
tatattttccagtgctccgttcctg

SEQ ID NO: 3483598 - DNA, 25 bp, Homo sapien
ttttccagtgctccgttcctgaaga

SEQ ID NO: 3483599 - DNA, 25 bp, Homo sapien
gttatattttccagtgctccgttcc

SEQ ID NO: 3483600 - DNA, 25 bp, Homo sapien
caaggacacacagtactgaagggac

SEQ ID NO: 3483601 - DNA, 25 bp, Homo sapien
ttgaaacgatcagagagccagacag

SEQ ID NO: 3483602 - DNA, 25 bp, Homo sapien
agccagacagagctcagcagcacca

SEQ ID NO: 3483603 - DNA, 25 bp, Homo sapien
ggtgccaggtgttgaaacgatcaga

SEQ ID NO: 3483604 - DNA, 25 bp, Homo sapien
tcagagctccactggtggcagctca

SEQ ID NO: 3483605 - DNA, 25 bp, Homo sapien
cagagctccactggtggcagctcac

SEQ ID NO: 3483606 - DNA, 25 bp, Homo sapien
catatgatgtaactcatgtgatggg

SEQ ID NO: 3483607 - DNA, 25 bp, Homo sapien
tttgtggccatggacagaagctcag

SEQ ID NO: 3483608 - DNA, 25 bp, Homo sapien
tcagagaccgaacttgtgtgtgacc

SEQ ID NO: 3483609 - DNA, 25 bp, Homo sapien
cgagagctctctgcgattctgtgat

SEQ ID NO: 3483610 - DNA, 25 bp, Homo sapien
cctgcagtctgcaactctttgtggc

SEQ ID NO: 3483611 - DNA, 25 bp, Homo sapien
tcaatctggactgctctcaaatggt

SEQ ID NO: 3483612 - DNA, 25 bp, Homo sapien
ggtgtctcttccataatcccgatgg

SEQ ID NO: 3483613 - DNA, 25 bp, Homo sapien
gacggaattccttcagcagcatact

SEQ ID NO: 3483614 - DNA, 25 bp, Homo sapien
gcttgtgagttactgacggaattcc

SEQ ID NO: 3483615 - DNA, 25 bp, Homo sapien
ccttttgttgttactaatgaattca

SEQ ID NO: 3483616 - DNA, 25 bp, Homo sapien
gccccacagagttgcttagaattaa

SEQ ID NO: 3483617 - DNA, 25 bp, Homo sapien
aattcagcatccatcacattccaag

SEQ ID NO: 3483618 - DNA, 25 bp, Homo sapien
cttctcatacagcatttaggaatgt

SEQ ID NO: 3483619 - DNA, 25 bp, Homo sapien
gcgctctgagtcacagcggagtgaa

SEQ ID NO: 3483620 - DNA, 25 bp, Homo sapien
tgagtcacagcggagtgaaaacagc

SEQ ID NO: 3483621 - DNA, 25 bp, Homo sapien
cagcccggagcgctctgagtcacag

SEQ ID NO: 3483622 - DNA, 25 bp, Homo sapien
gtcacagcggagtgaaaacagctgc

SEQ ID NO: 3483623 - DNA, 25 bp, Homo sapien
ctgggagaatacaaggcttccggcc

SEQ ID NO: 3483624 - DNA, 25 bp, Homo sapien
tccggcctagccaggtagctgcttc

SEQ ID NO: 3483625 - DNA, 25 bp, Homo sapien
aaggcttccggcctagccaggtagc

SEQ ID NO: 3483626 - DNA, 25 bp, Homo sapien
aatacaaggcttccggcctagccag

SEQ ID NO: 3483627 - DNA, 25 bp, Homo sapien
gctgggcaatactcaccaaggtggc

SEQ ID NO: 3483628 - DNA, 25 bp, Homo sapien
ggcaatactcaccaaggtggctaga

SEQ ID NO: 3483629 - DNA, 25 bp, Homo sapien
caggctgggcaatactcaccaaggt

SEQ ID NO: 3483630 - DNA, 25 bp, Homo sapien
tgggcaatactcaccaaggtggcta

SEQ ID NO: 3483631 - DNA, 25 bp, Homo sapien
gggcttctacgcagacctctgacct

SEQ ID NO: 3483632 - DNA, 25 bp, Homo sapien
aaagggcttctacgcagacctctga

SEQ ID NO: 3483633 - DNA, 25 bp, Homo sapien
ctcagaaaagggcttctacgcagac

SEQ ID NO: 3483634 - DNA, 25 bp, Homo sapien
gaaaagggcttctacgcagacctct

SEQ ID NO: 3483635 - DNA, 25 bp, Homo sapien
gaagttatctgttcaaacaccagta

SEQ ID NO: 3483636 - DNA, 25 bp, Homo sapien
taatgttggagttaggaagttggaa

SEQ ID NO: 3483637 - DNA, 25 bp, Homo sapien
gaatacattcaaagggttaatgttg

SEQ ID NO: 3483638 - DNA, 25 bp, Homo sapien
gcctttctctggcataagaatacat

SEQ ID NO: 3483639 - DNA, 25 bp, Homo sapien
agaaaagacatatcacaaacagagg

SEQ ID NO: 3483640 - DNA, 25 bp, Homo sapien
tcccggtggagggtgagtaggccac

SEQ ID NO: 3483641 - DNA, 25 bp, Homo sapien
ctggctcccggtggagggtgagtag

SEQ ID NO: 3483642 - DNA, 25 bp, Homo sapien
gctcccggtggagggtgagtaggcc

SEQ ID NO: 3483643 - DNA, 25 bp, Homo sapien
ggctcccggtggagggtgagtaggc

SEQ ID NO: 3483644 - DNA, 25 bp, Homo sapien
gacacaccagccacaaactcgtaaa

SEQ ID NO: 3483645 - DNA, 25 bp, Homo sapien
ggcctccaaaggaactttctcctca

SEQ ID NO: 3483646 - DNA, 25 bp, Homo sapien
cattctcgtagttcaaagttgcaga

SEQ ID NO: 3483647 - DNA, 25 bp, Homo sapien
aactcgtaaatgttcacgctcacag

SEQ ID NO: 3483648 - DNA, 25 bp, Homo sapien
gaagggaggaggtaatctctactac

SEQ ID NO: 3483649 - DNA, 25 bp, Homo sapien
ctgagaagcacagggcgagggatgg

SEQ ID NO: 3483650 - DNA, 25 bp, Homo sapien
gaaaaagagacgagcagtgcagagc

SEQ ID NO: 3483651 - DNA, 25 bp, Homo sapien
gggaacatccaaggtgacatggctg

SEQ ID NO: 3483652 - DNA, 25 bp, Homo sapien
agcacagggcgagggatgggaaaga

SEQ ID NO: 3483653 - DNA, 25 bp, Homo sapien
tggctttctcatagttggtgcgggc

SEQ ID NO: 3483654 - DNA, 25 bp, Homo sapien
ccacattgcaagagaagacatccct

SEQ ID NO: 3483655 - DNA, 25 bp, Homo sapien
gaactggtatctaggattcaggaca

SEQ ID NO: 3483656 - DNA, 25 bp, Homo sapien
tgccgccttcgacccaggttggagg

SEQ ID NO: 3483657 - DNA, 25 bp, Homo sapien
catacttcagggtgactgccgcctt

SEQ ID NO: 3483658 - DNA, 25 bp, Homo sapien
gaattcaaaggggagaggtactcac

SEQ ID NO: 3483659 - DNA, 25 bp, Homo sapien
cactagaattcaaaggggagaggta

SEQ ID NO: 3483660 - DNA, 25 bp, Homo sapien
ctagaattcaaaggggagaggtact

SEQ ID NO: 3483661 - DNA, 25 bp, Homo sapien
tagaattcaaaggggagaggtactc

SEQ ID NO: 3483662 - DNA, 25 bp, Homo sapien
ttcacattaaggcaactgtccttag

SEQ ID NO: 3483663 - DNA, 25 bp, Homo sapien
catgctgggaatctatggtggcgac

SEQ ID NO: 3483664 - DNA, 25 bp, Homo sapien
ctaggtactcggtaggactcaaggg

SEQ ID NO: 3483665 - DNA, 25 bp, Homo sapien
tggattggaccttctcaatgccatg

SEQ ID NO: 3483666 - DNA, 25 bp, Homo sapien
agaagtcttgtcctctcctaggtac

SEQ ID NO: 3483667 - DNA, 25 bp, Homo sapien
aatagcagtattctctcattaacta

SEQ ID NO: 3483668 - DNA, 25 bp, Homo sapien
atagcagtattctctcattaactac

SEQ ID NO: 3483669 - DNA, 25 bp, Homo sapien
taaatgacgatatgcaaggagcatg

SEQ ID NO: 3483670 - DNA, 25 bp, Homo sapien
ctggagattaaatgacgatatgcaa

SEQ ID NO: 3483671 - DNA, 25 bp, Homo sapien
atgacgatatgcaaggagcatgtgg

SEQ ID NO: 3483672 - DNA, 25 bp, Homo sapien
gattaaatgacgatatgcaaggagc

SEQ ID NO: 3483673 - DNA, 25 bp, Homo sapien
cagaggtgaggctggagagaaggct

SEQ ID NO: 3483674 - DNA, 25 bp, Homo sapien
acagaggtgaggctggagagaaggc

SEQ ID NO: 3483675 - DNA, 25 bp, Homo sapien
ggaacagaggtgaggctggagagaa

SEQ ID NO: 3483676 - DNA, 25 bp, Homo sapien
ctaggaacagaggtgaggctggaga

SEQ ID NO: 3483677 - DNA, 25 bp, Homo sapien
ctgaggttagggcgcagtcctcctc

SEQ ID NO: 3483678 - DNA, 25 bp, Homo sapien
cattagaatcataacttcttgcttc

SEQ ID NO: 3483679 - DNA, 25 bp, Homo sapien
ggctgaggttagggcgcagtcctcc

SEQ ID NO: 3483680 - DNA, 25 bp, Homo sapien
gaggacaggtaaaggagccacatta

SEQ ID NO: 3483681 - DNA, 25 bp, Homo sapien
gggtatgcacctcattgtagtaaat

SEQ ID NO: 3483682 - DNA, 25 bp, Homo sapien
ggcttcatgttaggcatccccatct

SEQ ID NO: 3483683 - DNA, 25 bp, Homo sapien
cattgtagtaaatcaggagttccac

SEQ ID NO: 3483684 - DNA, 25 bp, Homo sapien
ccgatcaaacttgtgtccagcagcc

SEQ ID NO: 3483685 - DNA, 25 bp, Homo sapien
gagctggtgctatattgaggagtca

SEQ ID NO: 3483686 - DNA, 25 bp, Homo sapien
cctttccattctcagagacagctgg

SEQ ID NO: 3483687 - DNA, 25 bp, Homo sapien
gatatacgatggaggaggagctttt

SEQ ID NO: 3483688 - DNA, 25 bp, Homo sapien
catttacacaatccagatgtctgga

SEQ ID NO: 3483689 - DNA, 25 bp, Homo sapien
attatcatcatccaaacaatggtgt

SEQ ID NO: 3483690 - DNA, 25 bp, Homo sapien
caaggtaagtctgtctgctttgggt

SEQ ID NO: 3483691 - DNA, 25 bp, Homo sapien
gaataactcgctgatagtccccaga

SEQ ID NO: 3483692 - DNA, 25 bp, Homo sapien
gaaacactgagacacatgttggatt

SEQ ID NO: 3483693 - DNA, 25 bp, Homo sapien
gggctctgcatacttcccgagcggt

SEQ ID NO: 3483694 - DNA, 25 bp, Homo sapien
taaactctccacaggtatttgatgg

SEQ ID NO: 3483695 - DNA, 25 bp, Homo sapien
tattcgcagctgagatgtatcctgg

SEQ ID NO: 3483696 - DNA, 25 bp, Homo sapien
cccgagcggtccatgagaaagataa

SEQ ID NO: 3483697 - DNA, 25 bp, Homo sapien
taggtaaactcttcagcagcaaaat

SEQ ID NO: 3483698 - DNA, 25 bp, Homo sapien
ggaaagcatgcctcataggaagagc

SEQ ID NO: 3483699 - DNA, 25 bp, Homo sapien
catgcctcataggaagagccaaatc

SEQ ID NO: 3483700 - DNA, 25 bp, Homo sapien
gttgaaataacagcctataggtaaa

SEQ ID NO: 3483701 - DNA, 25 bp, Homo sapien
cacacccagttacatgagggttact

SEQ ID NO: 3483702 - DNA, 25 bp, Homo sapien
caatgccaaagtcaactccgcagta

SEQ ID NO: 3483703 - DNA, 25 bp, Homo sapien
agagtcttatccgaaacccccaatg

SEQ ID NO: 3483704 - DNA, 25 bp, Homo sapien
ttacttaaccttgcccagtatagag

SEQ ID NO: 3483705 - DNA, 25 bp, Homo sapien
tttgctgagtgtacttcacactctc

SEQ ID NO: 3483706 - DNA, 25 bp, Homo sapien
gtttgctgagtgtacttcacactct

SEQ ID NO: 3483707 - DNA, 25 bp, Homo sapien
ttgctgagtgtacttcacactctcc

SEQ ID NO: 3483708 - DNA, 25 bp, Homo sapien
taggtcggcctgcataagcttcact

SEQ ID NO: 3483709 - DNA, 25 bp, Homo sapien
aggtcggcctgcataagcttcactc

SEQ ID NO: 3483710 - DNA, 25 bp, Homo sapien
ggtcggcctgcataagcttcactct

SEQ ID NO: 3483711 - DNA, 25 bp, Homo sapien
ctaggtcggcctgcataagcttcac

SEQ ID NO: 3483712 - DNA, 25 bp, Homo sapien
taaatgttctggagtggtgccaaga

SEQ ID NO: 3483713 - DNA, 25 bp, Homo sapien
atggagggtcccctgtaaatgttct

SEQ ID NO: 3483714 - DNA, 25 bp, Homo sapien
tcccctgtaaatgttctggagtggt

SEQ ID NO: 3483715 - DNA, 25 bp, Homo sapien
gagtggtgccaagatttcagtgccc

SEQ ID NO: 3483716 - DNA, 25 bp, Homo sapien
tctgttagctctgttccacttctta

SEQ ID NO: 3483717 - DNA, 25 bp, Homo sapien
ttctgttagctctgttccacttctt

SEQ ID NO: 3483718 - DNA, 25 bp, Homo sapien
taaaaggccttccagtgtccatcgc

SEQ ID NO: 3483719 - DNA, 25 bp, Homo sapien
tattgtggcactccataaaaggcct

SEQ ID NO: 3483720 - DNA, 25 bp, Homo sapien
caaagaggcatgaaatccctaatgt

SEQ ID NO: 3483721 - DNA, 25 bp, Homo sapien
taatgtttcagtcgctggcaccaca

SEQ ID NO: 3483722 - DNA, 25 bp, Homo sapien
ctatacaaagaaagaaaatgttcat

SEQ ID NO: 3483723 - DNA, 25 bp, Homo sapien
acaaagaaagaaaatgttcatcagg

SEQ ID NO: 3483724 - DNA, 25 bp, Homo sapien
tacaaagaaagaaaatgttcatcag

SEQ ID NO: 3483725 - DNA, 25 bp, Homo sapien
tatacaaagaaagaaaatgttcatc

SEQ ID NO: 3483726 - DNA, 25 bp, Homo sapien
acactaaacgtgtctgtaacttctc

SEQ ID NO: 3483727 - DNA, 25 bp, Homo sapien
tctttaattacactaaacgtgtctg

SEQ ID NO: 3483728 - DNA, 25 bp, Homo sapien
ttctgtctgttgatcctaacttctt

SEQ ID NO: 3483729 - DNA, 25 bp, Homo sapien
taattacactaaacgtgtctgtaac

SEQ ID NO: 3483730 - DNA, 25 bp, Homo sapien
taacccatggtattgtaagtcagga

SEQ ID NO: 3483731 - DNA, 25 bp, Homo sapien
gaaggaaggtcaacaccggcatcat

SEQ ID NO: 3483732 - DNA, 25 bp, Homo sapien
ccggcatcatgtagcactagagtct

SEQ ID NO: 3483733 - DNA, 25 bp, Homo sapien
gagaggcctacgaccattccagttt

SEQ ID NO: 3483734 - DNA, 25 bp, Homo sapien
tgaggtgccccctgatgcccgggca

SEQ ID NO: 3483735 - DNA, 25 bp, Homo sapien
cttggactgcatcctgtctttgcct

SEQ ID NO: 3483736 - DNA, 25 bp, Homo sapien
gatgcccgggcaataccttttatta

SEQ ID NO: 3483737 - DNA, 25 bp, Homo sapien
ttggactgcatcctgtctttgcctg

SEQ ID NO: 3483738 - DNA, 25 bp, Homo sapien
ccctaaagatgacagtctgttctgg

SEQ ID NO: 3483739 - DNA, 25 bp, Homo sapien
aatctctgacccctaaagatgacag

SEQ ID NO: 3483740 - DNA, 25 bp, Homo sapien
tcctcccggtcagctgggcatagct

SEQ ID NO: 3483741 - DNA, 25 bp, Homo sapien
cagctcagagagacatcctctacca

SEQ ID NO: 3483742 - DNA, 25 bp, Homo sapien
cagctttagtggaatggtcatgtgg

SEQ ID NO: 3483743 - DNA, 25 bp, Homo sapien
tttagtggaatggtcatgtggtagc

SEQ ID NO: 3483744 - DNA, 25 bp, Homo sapien
gctttagtggaatggtcatgtggta

SEQ ID NO: 3483745 - DNA, 25 bp, Homo sapien
ttagtggaatggtcatgtggtagct

SEQ ID NO: 3483746 - DNA, 25 bp, Homo sapien
agtcttgccctggagtgtatatttg

SEQ ID NO: 3483747 - DNA, 25 bp, Homo sapien
cttgccctggagtgtatatttgagg

SEQ ID NO: 3483748 - DNA, 25 bp, Homo sapien
ttgtagaggaaatgtcaccttatcc

SEQ ID NO: 3483749 - DNA, 25 bp, Homo sapien
tagaggaaatgtcaccttatcctca

SEQ ID NO: 3483750 - DNA, 25 bp, Homo sapien
cctgaaccggcttgttgagctcctt

SEQ ID NO: 3483751 - DNA, 25 bp, Homo sapien
ttgggacgtccctatgagccagagg

SEQ ID NO: 3483752 - DNA, 25 bp, Homo sapien
caaggctaaggttcaatgcatcttt

SEQ ID NO: 3483753 - DNA, 25 bp, Homo sapien
tgtgaaggagcttatgacaccagac

SEQ ID NO: 3483754 - DNA, 25 bp, Homo sapien
ggttggcaacctcttcagtccctga

SEQ ID NO: 3483755 - DNA, 25 bp, Homo sapien
caaacattaagacagtggcactccc

SEQ ID NO: 3483756 - DNA, 25 bp, Homo sapien
cacacttcaagtagggaggtagggt

SEQ ID NO: 3483757 - DNA, 25 bp, Homo sapien
agttttactacaggaggcttctgcc

SEQ ID NO: 3483758 - DNA, 25 bp, Homo sapien
tgctggtccttgtgacttatcaacc

SEQ ID NO: 3483759 - DNA, 25 bp, Homo sapien
gagactgtaatcgtccatctggaat

SEQ ID NO: 3483760 - DNA, 25 bp, Homo sapien
ggacggtcagagtgtaaggcctttc

SEQ ID NO: 3483761 - DNA, 25 bp, Homo sapien
tataacacataagttcccctctggg

SEQ ID NO: 3483762 - DNA, 25 bp, Homo sapien
tgaacctagctaggctgaccctggg

SEQ ID NO: 3483763 - DNA, 25 bp, Homo sapien
gaactcctgggtaaagaaagccaca

SEQ ID NO: 3483764 - DNA, 25 bp, Homo sapien
cattgaaggctagtttgtcagtccc

SEQ ID NO: 3483765 - DNA, 25 bp, Homo sapien
gagacaggccatagcaagaatgcaa

SEQ ID NO: 3483766 - DNA, 25 bp, Homo sapien
ctgcacaaggtgattctctccaaag

SEQ ID NO: 3483767 - DNA, 25 bp, Homo sapien
tgcacaaggtgattctctccaaagc

SEQ ID NO: 3483768 - DNA, 25 bp, Homo sapien
gatcccaggaaccatttgcattttg

SEQ ID NO: 3483769 - DNA, 25 bp, Homo sapien
ggatcttggctagatcttcattcag

SEQ ID NO: 3483770 - DNA, 25 bp, Homo sapien
tcattcagatcccaggaaccatttg

SEQ ID NO: 3483771 - DNA, 25 bp, Homo sapien
gaaccatttgcattttggtggtaaa

SEQ ID NO: 3483772 - DNA, 25 bp, Homo sapien
tcggcaggctgtgcagccattattt

SEQ ID NO: 3483773 - DNA, 25 bp, Homo sapien
agccattatttcttccaaactcata

SEQ ID NO: 3483774 - DNA, 25 bp, Homo sapien
gcaggctgtgcagccattatttctt

SEQ ID NO: 3483775 - DNA, 25 bp, Homo sapien
ctcggcaggctgtgcagccattatt

SEQ ID NO: 3483776 - DNA, 25 bp, Homo sapien
tactcctttttccattgaatcttac

SEQ ID NO: 3483777 - DNA, 25 bp, Homo sapien
atactcctttttccattgaatctta

SEQ ID NO: 3483778 - DNA, 25 bp, Homo sapien
aatcttcattgaaactgtggacctc

SEQ ID NO: 3483779 - DNA, 25 bp, Homo sapien
cagagaattcagagcctggtgggtc

SEQ ID NO: 3483780 - DNA, 25 bp, Homo sapien
cacttgattcattggcctggttacc

SEQ ID NO: 3483781 - DNA, 25 bp, Homo sapien
tcattcagcgccataggttttcaac

SEQ ID NO: 3483782 - DNA, 25 bp, Homo sapien
gagtctcgaaatagaaaatcctaag

SEQ ID NO: 3483783 - DNA, 25 bp, Homo sapien
tactacttgcaaggcataatgccag

SEQ ID NO: 3483784 - DNA, 25 bp, Homo sapien
taaatccagtgtaaccaccaggacg

SEQ ID NO: 3483785 - DNA, 25 bp, Homo sapien
taaacctcagggcagcaatccattg

SEQ ID NO: 3483786 - DNA, 25 bp, Homo sapien
cattgctgtgcagccagatcacggc

SEQ ID NO: 3483787 - DNA, 25 bp, Homo sapien
gtgcagccagatcacggccaggatg

SEQ ID NO: 3483788 - DNA, 25 bp, Homo sapien
gctgtgcagccagatcacggccagg

SEQ ID NO: 3483789 - DNA, 25 bp, Homo sapien
gcagccagatcacggccaggatggt

SEQ ID NO: 3483790 - DNA, 25 bp, Homo sapien
aggccacggccttcctttccagaag

SEQ ID NO: 3483791 - DNA, 25 bp, Homo sapien
ccaggccacggccttcctttccaga

SEQ ID NO: 3483792 - DNA, 25 bp, Homo sapien
ctttccagaagctcccattcacact

SEQ ID NO: 3483793 - DNA, 25 bp, Homo sapien
ttcctttccagaagctcccattcac

SEQ ID NO: 3483794 - DNA, 25 bp, Homo sapien
ggagacaggccttaggattgtgctc

SEQ ID NO: 3483795 - DNA, 25 bp, Homo sapien
gggaaggagacaggccttaggattg

SEQ ID NO: 3483796 - DNA, 25 bp, Homo sapien
agacaggccttaggattgtgctcct

SEQ ID NO: 3483797 - DNA, 25 bp, Homo sapien
aaggagacaggccttaggattgtgc

SEQ ID NO: 3483798 - DNA, 25 bp, Homo sapien
ctgtggtgaggaaaaacaagaagca

SEQ ID NO: 3483799 - DNA, 25 bp, Homo sapien
gtggtgaggaaaaacaagaagcagg

SEQ ID NO: 3483800 - DNA, 25 bp, Homo sapien
tggtgaggaaaaacaagaagcaggg

SEQ ID NO: 3483801 - DNA, 25 bp, Homo sapien
tgtggtgaggaaaaacaagaagcag

SEQ ID NO: 3483802 - DNA, 25 bp, Homo sapien
agcagctttcacaaccgaaggcatg

SEQ ID NO: 3483803 - DNA, 25 bp, Homo sapien
tgacttcaggaaagtaatagcagct

SEQ ID NO: 3483804 - DNA, 25 bp, Homo sapien
tcaaaaggcaaagatagcaggatcc

SEQ ID NO: 3483805 - DNA, 25 bp, Homo sapien
ttcacaaccgaaggcatggtggagc

SEQ ID NO: 3483806 - DNA, 25 bp, Homo sapien
cacaagggtcaggaacgattacggg

SEQ ID NO: 3483807 - DNA, 25 bp, Homo sapien
tacgcaagcttaccagtatggccct

SEQ ID NO: 3483808 - DNA, 25 bp, Homo sapien
tcctaatgcggtaagtgctccaggt

SEQ ID NO: 3483809 - DNA, 25 bp, Homo sapien
gaagaatgaatcaggaaggtcccca

SEQ ID NO: 3483810 - DNA, 25 bp, Homo sapien
tcttgagggaatggtatctgccact

SEQ ID NO: 3483811 - DNA, 25 bp, Homo sapien
gagggaatggtatctgccacttttc

SEQ ID NO: 3483812 - DNA, 25 bp, Homo sapien
ggaagacggaggatggatttcatta

SEQ ID NO: 3483813 - DNA, 25 bp, Homo sapien
tcattagtaagtctgtgtagaacag

SEQ ID NO: 3483814 - DNA, 25 bp, Homo sapien
tctttaactctaataagagaggctg

SEQ ID NO: 3483815 - DNA, 25 bp, Homo sapien
caaggaaagcatccaattcatgtta

SEQ ID NO: 3483816 - DNA, 25 bp, Homo sapien
gcaaagaacagcactaatgaggtag

SEQ ID NO: 3483817 - DNA, 25 bp, Homo sapien
ctaagctgacttaagatgactgaaa

SEQ ID NO: 3483818 - DNA, 25 bp, Homo sapien
ctgtgaaaacatccaaccttgaaaa

SEQ ID NO: 3483819 - DNA, 25 bp, Homo sapien
tgtgaaaacatccaaccttgaaaag

SEQ ID NO: 3483820 - DNA, 25 bp, Homo sapien
gctaggatgatacatgctctgtggc

SEQ ID NO: 3483821 - DNA, 25 bp, Homo sapien
cataggagatggctcggctgttccc

SEQ ID NO: 3483822 - DNA, 25 bp, Homo sapien
tgttccctgaaagatagcacagcat

SEQ ID NO: 3483823 - DNA, 25 bp, Homo sapien
cagcaggatgaattcggacaccacc

SEQ ID NO: 3483824 - DNA, 25 bp, Homo sapien
gatgccactgtaggaggtgaggatg

SEQ ID NO: 3483825 - DNA, 25 bp, Homo sapien
ggaaacagctgaggggcatgaggcc

SEQ ID NO: 3483826 - DNA, 25 bp, Homo sapien
gaggtgaggatgagaaggaaacagc

SEQ ID NO: 3483827 - DNA, 25 bp, Homo sapien
ggcatgaggcccacactgatgaacc

SEQ ID NO: 3483828 - DNA, 25 bp, Homo sapien
ttcagaatttgaacagttgcatcca

SEQ ID NO: 3483829 - DNA, 25 bp, Homo sapien
agttgcatccaaccacaggctgtgg

SEQ ID NO: 3483830 - DNA, 25 bp, Homo sapien
gaccactggcatgtaaaaaagcagg

SEQ ID NO: 3483831 - DNA, 25 bp, Homo sapien
aggctgtgggtaggcctcaggtaaa

SEQ ID NO: 3483832 - DNA, 25 bp, Homo sapien
agaccttccttagtgataatttcac

SEQ ID NO: 3483833 - DNA, 25 bp, Homo sapien
gaagcccagctgatataagaccttc

SEQ ID NO: 3483834 - DNA, 25 bp, Homo sapien
gatataagaccttccttagtgataa

SEQ ID NO: 3483835 - DNA, 25 bp, Homo sapien
ccagctgatataagaccttccttag

SEQ ID NO: 3483836 - DNA, 25 bp, Homo sapien
atgtcagcggccatcaccttagctt

SEQ ID NO: 3483837 - DNA, 25 bp, Homo sapien
ccttagcttcacttttagtgtccac

SEQ ID NO: 3483838 - DNA, 25 bp, Homo sapien
tccacatcataagttttcactttgg

SEQ ID NO: 3483839 - DNA, 25 bp, Homo sapien
tcacttttagtgtccacatcataag

SEQ ID NO: 3483840 - DNA, 25 bp, Homo sapien
gagggcaggaaataaacagaacagg

SEQ ID NO: 3483841 - DNA, 25 bp, Homo sapien
gggcaggaaataaacagaacaggtc

SEQ ID NO: 3483842 - DNA, 25 bp, Homo sapien
caggaaataaacagaacaggtccca

SEQ ID NO: 3483843 - DNA, 25 bp, Homo sapien
gaaataaacagaacaggtcccaaca

SEQ ID NO: 3483844 - DNA, 25 bp, Homo sapien
actttggcggcacttaagaagccct

SEQ ID NO: 3483845 - DNA, 25 bp, Homo sapien
ccactttggcggcacttaagaagcc

SEQ ID NO: 3483846 - DNA, 25 bp, Homo sapien
ggcacttaagaagcccttcagcccg

SEQ ID NO: 3483847 - DNA, 25 bp, Homo sapien
tggcggcacttaagaagcccttcag

SEQ ID NO: 3483848 - DNA, 25 bp, Homo sapien
aaaatcagcctcacctcggaaatgc

SEQ ID NO: 3483849 - DNA, 25 bp, Homo sapien
gaataacaattgcagagtgaatcca

SEQ ID NO: 3483850 - DNA, 25 bp, Homo sapien
tatagctggatgtaagcgataacag

SEQ ID NO: 3483851 - DNA, 25 bp, Homo sapien
taatcctctttacctcatgacacag

SEQ ID NO: 3483852 - DNA, 25 bp, Homo sapien
cagccacttagagctttgacattta

SEQ ID NO: 3483853 - DNA, 25 bp, Homo sapien
agccacttagagctttgacatttaa

SEQ ID NO: 3483854 - DNA, 25 bp, Homo sapien
tgtggctccccaagaggtatgacag

SEQ ID NO: 3483855 - DNA, 25 bp, Homo sapien
atatatctgggtgtgaatcaagggc

SEQ ID NO: 3483856 - DNA, 25 bp, Homo sapien
gacatcaattctattatcacatata

SEQ ID NO: 3483857 - DNA, 25 bp, Homo sapien
atcctctccgtgtatctgaaacctg

SEQ ID NO: 3483858 - DNA, 25 bp, Homo sapien
cacctctggagatgaaagtaacgga

SEQ ID NO: 3483859 - DNA, 25 bp, Homo sapien
caaatgtaggaagacagcgtgacca

SEQ ID NO: 3483860 - DNA, 25 bp, Homo sapien
gatgtaaggcaacggcatcatcacc

SEQ ID NO: 3483861 - DNA, 25 bp, Homo sapien
taatgggctgattagcaaatgtagg

SEQ ID NO: 3483862 - DNA, 25 bp, Homo sapien
ttttgcccatttcctgtatatttgg

SEQ ID NO: 3483863 - DNA, 25 bp, Homo sapien
tgcccatttcctgtatatttggaat

SEQ ID NO: 3483864 - DNA, 25 bp, Homo sapien
ttggaatttctctgtttacaatcat

SEQ ID NO: 3483865 - DNA, 25 bp, Homo sapien
gcccatttcctgtatatttggaatt

SEQ ID NO: 3483866 - DNA, 25 bp, Homo sapien
ggaggctgaggacatggaagaatgc

SEQ ID NO: 3483867 - DNA, 25 bp, Homo sapien
aagaggaggctgaggacatggaaga

SEQ ID NO: 3483868 - DNA, 25 bp, Homo sapien
ggctgaggacatggaagaatgcctt

SEQ ID NO: 3483869 - DNA, 25 bp, Homo sapien
aaagaggaggctgaggacatggaag

SEQ ID NO: 3483870 - DNA, 25 bp, Homo sapien
gaagcactcaatgctcccgaggaaa

SEQ ID NO: 3483871 - DNA, 25 bp, Homo sapien
tgagtcggctcagccccataaggta

SEQ ID NO: 3483872 - DNA, 25 bp, Homo sapien
aagtcactgaggagaaacccatgtc

SEQ ID NO: 3483873 - DNA, 25 bp, Homo sapien
gatgaactctgtcaccatgcagcag

SEQ ID NO: 3483874 - DNA, 25 bp, Homo sapien
caagatactggaatgaatgcaccct

SEQ ID NO: 3483875 - DNA, 25 bp, Homo sapien
caagggcaacagtgctggaatgtca

SEQ ID NO: 3483876 - DNA, 25 bp, Homo sapien
tcattgggaccacagtatggcaagg

SEQ ID NO: 3483877 - DNA, 25 bp, Homo sapien
tgtatcgcagaggataacagatggc

SEQ ID NO: 3483878 - DNA, 25 bp, Homo sapien
gaattagcagaaagcagacaagaga

SEQ ID NO: 3483879 - DNA, 25 bp, Homo sapien
tctagtgtaggataaaagaattagc

SEQ ID NO: 3483880 - DNA, 25 bp, Homo sapien
ggccctcagttgtacgaatgcttaa

SEQ ID NO: 3483881 - DNA, 25 bp, Homo sapien
tatgaggccaacgttggtgaagctc

SEQ ID NO: 3483882 - DNA, 25 bp, Homo sapien
caggtagacagtgatgatgggccca

SEQ ID NO: 3483883 - DNA, 25 bp, Homo sapien
agggttcagcattggtcctaccaga

SEQ ID NO: 3483884 - DNA, 25 bp, Homo sapien
tttgtaccacggttcccagcatggg

SEQ ID NO: 3483885 - DNA, 25 bp, Homo sapien
gattcatgagaatttgtaccacggt

SEQ ID NO: 3483886 - DNA, 25 bp, Homo sapien
gaacatggcctgtcctgtgcaatat

SEQ ID NO: 3483887 - DNA, 25 bp, Homo sapien
tcctgtgcaatattgttttcagggc

SEQ ID NO: 3483888 - DNA, 25 bp, Homo sapien
gcaatattgttttcagggctgtttt

SEQ ID NO: 3483889 - DNA, 25 bp, Homo sapien
aactctcaggaacatggcctgtcct

SEQ ID NO: 3483890 - DNA, 25 bp, Homo sapien
gctggcatggatgaagtcaactgct

SEQ ID NO: 3483891 - DNA, 25 bp, Homo sapien
tacgttctggagttaagcccaccat

SEQ ID NO: 3483892 - DNA, 25 bp, Homo sapien
gcacaaatgagtgaagaggctacta

SEQ ID NO: 3483893 - DNA, 25 bp, Homo sapien
aaaagccttgcattcatatcctggg

SEQ ID NO: 3483894 - DNA, 25 bp, Homo sapien
tatgcctaatcgtttctcaccctgg

SEQ ID NO: 3483895 - DNA, 25 bp, Homo sapien
gaagacatgaagatgtggcacttct

SEQ ID NO: 3483896 - DNA, 25 bp, Homo sapien
gctgtgtccctcttcgtatgcctaa

SEQ ID NO: 3483897 - DNA, 25 bp, Homo sapien
ttttgagtctccgttgctgtgtccc

SEQ ID NO: 3483898 - DNA, 25 bp, Homo sapien
gccaaggagaactggtcgttctgtg

SEQ ID NO: 3483899 - DNA, 25 bp, Homo sapien
caaggagaactggtcgttctgtgct

SEQ ID NO: 3483900 - DNA, 25 bp, Homo sapien
ggagaactggtcgttctgtgctaag

SEQ ID NO: 3483901 - DNA, 25 bp, Homo sapien
aactggtcgttctgtgctaaggttg

SEQ ID NO: 3483902 - DNA, 25 bp, Homo sapien
gaagaaaatttgagttaggtattca

SEQ ID NO: 3483903 - DNA, 25 bp, Homo sapien
tttgagttaggtattcattatccca

SEQ ID NO: 3483904 - DNA, 25 bp, Homo sapien
aattttatgtagaaagagaagaaga

SEQ ID NO: 3483905 - DNA, 25 bp, Homo sapien
aaatttgagttaggtattcattatc

SEQ ID NO: 3483906 - DNA, 25 bp, Homo sapien
gcgagattaaattcagtcaccgtgg

SEQ ID NO: 3483907 - DNA, 25 bp, Homo sapien
tcagtcaccgtggaatgatttcctt

SEQ ID NO: 3483908 - DNA, 25 bp, Homo sapien
gttagcccagcgagattaaattcag

SEQ ID NO: 3483909 - DNA, 25 bp, Homo sapien
ctctggtttgtctgttagcccagcg

SEQ ID NO: 3483910 - DNA, 25 bp, Homo sapien
tgaaccctattagagtgatcatgct

SEQ ID NO: 3483911 - DNA, 25 bp, Homo sapien
tattagagtgatcatgctcaggttg

SEQ ID NO: 3483912 - DNA, 25 bp, Homo sapien
ccctattagagtgatcatgctcagg

SEQ ID NO: 3483913 - DNA, 25 bp, Homo sapien
gagaactgaaccctattagagtgat

SEQ ID NO: 3483914 - DNA, 25 bp, Homo sapien
aaagcagtgggttacatatggcaat

SEQ ID NO: 3483915 - DNA, 25 bp, Homo sapien
acatggcgacatggtaaagcagtgg

SEQ ID NO: 3483916 - DNA, 25 bp, Homo sapien
gagcagacctgataagacatggcga

SEQ ID NO: 3483917 - DNA, 25 bp, Homo sapien
catgcatgctgggtaggagataata

SEQ ID NO: 3483918 - DNA, 25 bp, Homo sapien
aaagcactcttagcatgcagactgt

SEQ ID NO: 3483919 - DNA, 25 bp, Homo sapien
gtagcaccaataaagcccataaaat

SEQ ID NO: 3483920 - DNA, 25 bp, Homo sapien
agaaaagcactcttagcatgcagac

SEQ ID NO: 3483921 - DNA, 25 bp, Homo sapien
gactgtgtgagcacgtagcaccaat

SEQ ID NO: 3483922 - DNA, 25 bp, Homo sapien
atactggagcgggagagctccagta

SEQ ID NO: 3483923 - DNA, 25 bp, Homo sapien
gagcgggagagctccagtagtggga

SEQ ID NO: 3483924 - DNA, 25 bp, Homo sapien
cgggagagctccagtagtgggaaaa

SEQ ID NO: 3483925 - DNA, 25 bp, Homo sapien
agaaatactggagcgggagagctcc

SEQ ID NO: 3483926 - DNA, 25 bp, Homo sapien
ctgcggaaaaggatattaaatgcac

SEQ ID NO: 3483927 - DNA, 25 bp, Homo sapien
tattaaatgcactgaagcacaaact

SEQ ID NO: 3483928 - DNA, 25 bp, Homo sapien
aaaggatattaaatgcactgaagca

SEQ ID NO: 3483929 - DNA, 25 bp, Homo sapien
gcggaaaaggatattaaatgcactg

SEQ ID NO: 3483930 - DNA, 25 bp, Homo sapien
ctggtccatggagctgacggatgat

SEQ ID NO: 3483931 - DNA, 25 bp, Homo sapien
tggtccatggagctgacggatgatg

SEQ ID NO: 3483932 - DNA, 25 bp, Homo sapien
gggttcagcatgggcacaacagtag

SEQ ID NO: 3483933 - DNA, 25 bp, Homo sapien
acttaattaaggcaactttgacatc

SEQ ID NO: 3483934 - DNA, 25 bp, Homo sapien
ggggttcagcatgggcacaacagta

SEQ ID NO: 3483935 - DNA, 25 bp, Homo sapien
gaacttaattaaggcaactttgaca

SEQ ID NO: 3483936 - DNA, 25 bp, Homo sapien
tttctgccagggtccagggttgtac

SEQ ID NO: 3483937 - DNA, 25 bp, Homo sapien
tctgccagggtccagggttgtacat

SEQ ID NO: 3483938 - DNA, 25 bp, Homo sapien
tccagggttgtacatttttcttctc

SEQ ID NO: 3483939 - DNA, 25 bp, Homo sapien
tgccagggtccagggttgtacattt

SEQ ID NO: 3483940 - DNA, 25 bp, Homo sapien
gggtccacgatcttgtcaacagtct

SEQ ID NO: 3483941 - DNA, 25 bp, Homo sapien
cagggtccacgatcttgtcaacagt

SEQ ID NO: 3483942 - DNA, 25 bp, Homo sapien
agggtccacgatcttgtcaacagtc

SEQ ID NO: 3483943 - DNA, 25 bp, Homo sapien
ctaagaacaggaggaagaggcgcag

SEQ ID NO: 3483944 - DNA, 25 bp, Homo sapien
gaagaggcgcagctggagctctggc

SEQ ID NO: 3483945 - DNA, 25 bp, Homo sapien
aacaggaggaagaggcgcagctgga

SEQ ID NO: 3483946 - DNA, 25 bp, Homo sapien
ggaggaagaggcgcagctggagctc

SEQ ID NO: 3483947 - DNA, 25 bp, Homo sapien
tgcagccaacatgtgacactctgca

SEQ ID NO: 3483948 - DNA, 25 bp, Homo sapien
agcaaggatggttaaggcaggcatc

SEQ ID NO: 3483949 - DNA, 25 bp, Homo sapien
aagcaaggatggttaaggcaggcat

SEQ ID NO: 3483950 - DNA, 25 bp, Homo sapien
gaagcaaggatggttaaggcaggca

SEQ ID NO: 3483951 - DNA, 25 bp, Homo sapien
aatagtagtataaaacacagacgac

SEQ ID NO: 3483952 - DNA, 25 bp, Homo sapien
caggtacatgaatgctgcagatcca

SEQ ID NO: 3483953 - DNA, 25 bp, Homo sapien
agatgtgggagctgcaagtgctaaa

SEQ ID NO: 3483954 - DNA, 25 bp, Homo sapien
gttcagcatgggcacaatagtagta

SEQ ID NO: 3483955 - DNA, 25 bp, Homo sapien
tctgatgcagaattttcttcacggc

SEQ ID NO: 3483956 - DNA, 25 bp, Homo sapien
tgcagaattttcttcacggcaagtt

SEQ ID NO: 3483957 - DNA, 25 bp, Homo sapien
tgctgtctgatgcagaattttcttc

SEQ ID NO: 3483958 - DNA, 25 bp, Homo sapien
gaattttcttcacggcaagtttgac

SEQ ID NO: 3483959 - DNA, 25 bp, Homo sapien
tcaaaccaaagacctatcttgacgt

SEQ ID NO: 3483960 - DNA, 25 bp, Homo sapien
tataagttcgatggaagcagaccgg

SEQ ID NO: 3483961 - DNA, 25 bp, Homo sapien
agcagaccggaggaatattttggag

SEQ ID NO: 3483962 - DNA, 25 bp, Homo sapien
gaggtgttacataaaagagcatcac

SEQ ID NO: 3483963 - DNA, 25 bp, Homo sapien
ttggtcagtttctacggaggaaaga

SEQ ID NO: 3483964 - DNA, 25 bp, Homo sapien
tcctttggtcagtttctacggagga

SEQ ID NO: 3483965 - DNA, 25 bp, Homo sapien
tggtcagtttctacggaggaaagaa

SEQ ID NO: 3483966 - DNA, 25 bp, Homo sapien
agtcatgcattcagggtaggagatg

SEQ ID NO: 3483967 - DNA, 25 bp, Homo sapien
gagtcatgcattcagggtaggagat

SEQ ID NO: 3483968 - DNA, 25 bp, Homo sapien
gcggtcatatgccgttacagccaac

SEQ ID NO: 3483969 - DNA, 25 bp, Homo sapien
agcggtcatatgccgttacagccaa

SEQ ID NO: 3483970 - DNA, 25 bp, Homo sapien
gtctcaacataaagccggtgtgaat

SEQ ID NO: 3483971 - DNA, 25 bp, Homo sapien
aaagccggtgtgaattgtagatcca

SEQ ID NO: 3483972 - DNA, 25 bp, Homo sapien
aacataaagccggtgtgaattgtag

SEQ ID NO: 3483973 - DNA, 25 bp, Homo sapien
tctcaacataaagccggtgtgaatt

SEQ ID NO: 3483974 - DNA, 25 bp, Homo sapien
agcgaatgcggaggatgctggcaat

SEQ ID NO: 3483975 - DNA, 25 bp, Homo sapien
caggtacatgaatgctgcagaccca

SEQ ID NO: 3483976 - DNA, 25 bp, Homo sapien
aatgcactcaagaccagaaccagta

SEQ ID NO: 3483977 - DNA, 25 bp, Homo sapien
taagaagcaaggatggttaaggcag

SEQ ID NO: 3483978 - DNA, 25 bp, Homo sapien
tatagattgggggttcagcatgggc

SEQ ID NO: 3483979 - DNA, 25 bp, Homo sapien
ttaggctatagattgggggttcagc

SEQ ID NO: 3483980 - DNA, 25 bp, Homo sapien
gctatagattgggggttcagcatgg

SEQ ID NO: 3483981 - DNA, 25 bp, Homo sapien
tagattgggggttcagcatgggcac

SEQ ID NO: 3483982 - DNA, 25 bp, Homo sapien
tttcttcagggcaaatttgacatcc

SEQ ID NO: 3483983 - DNA, 25 bp, Homo sapien
tcagggcaaatttgacatccttatt

SEQ ID NO: 3483984 - DNA, 25 bp, Homo sapien
agatttttcttcagggcaaatttga

SEQ ID NO: 3483985 - DNA, 25 bp, Homo sapien
acatgctttgctgtccagatttttc

SEQ ID NO: 3483986 - DNA, 25 bp, Homo sapien
actgaagaataatttactgcttcca

SEQ ID NO: 3483987 - DNA, 25 bp, Homo sapien
tcaggctcttctgttaggccaacca

SEQ ID NO: 3483988 - DNA, 25 bp, Homo sapien
tccccagtactgtgaccatatagat

SEQ ID NO: 3483989 - DNA, 25 bp, Homo sapien
ctgagtagtttgtaaagcggcaaaa

SEQ ID NO: 3483990 - DNA, 25 bp, Homo sapien
ggaaaacaggcctgatagggcatga

SEQ ID NO: 3483991 - DNA, 25 bp, Homo sapien
cctgatagggcatgacgacaatgta

SEQ ID NO: 3483992 - DNA, 25 bp, Homo sapien
gcatgacgacaatgtacagcacggg

SEQ ID NO: 3483993 - DNA, 25 bp, Homo sapien
acaggcctgatagggcatgacgaca

SEQ ID NO: 3483994 - DNA, 25 bp, Homo sapien
ttggcacaacagtagtgtaacacgc

SEQ ID NO: 3483995 - DNA, 25 bp, Homo sapien
tcagggtgttaagcattggcacaac

SEQ ID NO: 3483996 - DNA, 25 bp, Homo sapien
ttctccagggaaacattgacatctt

SEQ ID NO: 3483997 - DNA, 25 bp, Homo sapien
tgtaacacgcagaggactggatact

SEQ ID NO: 3483998 - DNA, 25 bp, Homo sapien
tgagagcccagccagaatgaactca

SEQ ID NO: 3483999 - DNA, 25 bp, Homo sapien
tcagtcactgaggaattattttctc

SEQ ID NO: 3484000 - DNA, 25 bp, Homo sapien
agagcccagccagaatgaactcagt

SEQ ID NO: 3484001 - DNA, 25 bp, Homo sapien
aactcagtcactgaggaattatttt

SEQ ID NO: 3484002 - DNA, 25 bp, Homo sapien
gattacaaccgccaacatgtgggag

SEQ ID NO: 3484003 - DNA, 25 bp, Homo sapien
aattgaaccctaaacatacagcctg

SEQ ID NO: 3484004 - DNA, 25 bp, Homo sapien
tatgaactgatgcacaaaccaggcc

SEQ ID NO: 3484005 - DNA, 25 bp, Homo sapien
ggacaaggatgttaaatgcaccaac

SEQ ID NO: 3484006 - DNA, 25 bp, Homo sapien
catggagctgattgaagatggctgc

SEQ ID NO: 3484007 - DNA, 25 bp, Homo sapien
gagctgattgaagatggctgcaact

SEQ ID NO: 3484008 - DNA, 25 bp, Homo sapien
gctgattgaagatggctgcaactac

SEQ ID NO: 3484009 - DNA, 25 bp, Homo sapien
tggagctgattgaagatggctgcaa

SEQ ID NO: 3484010 - DNA, 25 bp, Homo sapien
ggtatttaggtgaattgtattgtta

SEQ ID NO: 3484011 - DNA, 25 bp, Homo sapien
ccttttgtaggaaagtgatcccttg

SEQ ID NO: 3484012 - DNA, 25 bp, Homo sapien
gaaagtgatcccttgtttatatatg

SEQ ID NO: 3484013 - DNA, 25 bp, Homo sapien
ttattctccttttgtaggaaagtga

SEQ ID NO: 3484014 - DNA, 25 bp, Homo sapien
tctctgttagcccaaccagaataaa

SEQ ID NO: 3484015 - DNA, 25 bp, Homo sapien
cccaaccagaataaacttagtcaca

SEQ ID NO: 3484016 - DNA, 25 bp, Homo sapien
tgttagcccaaccagaataaactta

SEQ ID NO: 3484017 - DNA, 25 bp, Homo sapien
tagcccaaccagaataaacttagtc

SEQ ID NO: 3484018 - DNA, 25 bp, Homo sapien
ccccagcactgtgactacatagatt

SEQ ID NO: 3484019 - DNA, 25 bp, Homo sapien
tatgagctgacgcacaaatcaggcc

SEQ ID NO: 3484020 - DNA, 25 bp, Homo sapien
tcaggcctattacatacaccactaa

SEQ ID NO: 3484021 - DNA, 25 bp, Homo sapien
aattgaaccctaaacatacagccta

SEQ ID NO: 3484022 - DNA, 25 bp, Homo sapien
taagtactagaacaggagagcttca

SEQ ID NO: 3484023 - DNA, 25 bp, Homo sapien
tggggacaaggatgttaattccact

SEQ ID NO: 3484024 - DNA, 25 bp, Homo sapien
ggggacaaggatgttaattccacta

SEQ ID NO: 3484025 - DNA, 25 bp, Homo sapien
gttcagcatgggcacaacaatagta

SEQ ID NO: 3484026 - DNA, 25 bp, Homo sapien
catgggcacaacaatagtataaaac

SEQ ID NO: 3484027 - DNA, 25 bp, Homo sapien
cagaaacagccgagatgtgggagct

SEQ ID NO: 3484028 - DNA, 25 bp, Homo sapien
caggtacatgaatgctgcagaccca

SEQ ID NO: 3484029 - DNA, 25 bp, Homo sapien
ctttattcctcaggctgtagatcag

SEQ ID NO: 3484030 - DNA, 25 bp, Homo sapien
tctttattcctcaggctgtagatca

SEQ ID NO: 3484031 - DNA, 25 bp, Homo sapien
atctttattcctcaggctgtagatc

SEQ ID NO: 3484032 - DNA, 25 bp, Homo sapien
ttccctagcgttttcttcagggcaa

SEQ ID NO: 3484033 - DNA, 25 bp, Homo sapien
tttccctagcgttttcttcagggca

SEQ ID NO: 3484034 - DNA, 25 bp, Homo sapien
gacagtcactggaagataagcaact

SEQ ID NO: 3484035 - DNA, 25 bp, Homo sapien
actggaagataagcaactccctgtt

SEQ ID NO: 3484036 - DNA, 25 bp, Homo sapien
tctgcaatcatatccgtaaggccca

SEQ ID NO: 3484037 - DNA, 25 bp, Homo sapien
ctctgcaatcatatccgtaaggccc

SEQ ID NO: 3484038 - DNA, 25 bp, Homo sapien
ctccacaagggcctctcagatgaca

SEQ ID NO: 3484039 - DNA, 25 bp, Homo sapien
tcaggcaaaatagccataaacaaag

SEQ ID NO: 3484040 - DNA, 25 bp, Homo sapien
caagggcctctcagatgacagcttc

SEQ ID NO: 3484041 - DNA, 25 bp, Homo sapien
cagcttctttctcggggcttcctcc

SEQ ID NO: 3484042 - DNA, 25 bp, Homo sapien
ctctggggcccatgaccttcttgtg

SEQ ID NO: 3484043 - DNA, 25 bp, Homo sapien
gggctactccctcattagcccagat

SEQ ID NO: 3484044 - DNA, 25 bp, Homo sapien
cagctctgtactcctgagccatggg

SEQ ID NO: 3484045 - DNA, 25 bp, Homo sapien
ctcctctgttttccgagtgtgggct

SEQ ID NO: 3484046 - DNA, 25 bp, Homo sapien
ctggggaacatagtgcgatcttgtt

SEQ ID NO: 3484047 - DNA, 25 bp, Homo sapien
tggggaacatagtgcgatcttgttt

SEQ ID NO: 3484048 - DNA, 25 bp, Homo sapien
gctacgttaattgctacattaattg

SEQ ID NO: 3484049 - DNA, 25 bp, Homo sapien
gcttgctacgttaattgctacatta

SEQ ID NO: 3484050 - DNA, 25 bp, Homo sapien
ttagcttgctacgttaattgctaca

SEQ ID NO: 3484051 - DNA, 25 bp, Homo sapien
acgttaattgctacattaattgccc

SEQ ID NO: 3484052 - DNA, 25 bp, Homo sapien
agcagcttgtccttcgtcgatttct

SEQ ID NO: 3484053 - DNA, 25 bp, Homo sapien
gcttgtccttcgtcgatttctgcta

SEQ ID NO: 3484054 - DNA, 25 bp, Homo sapien
cagcttgtccttcgtcgatttctgc

SEQ ID NO: 3484055 - DNA, 25 bp, Homo sapien
gtccttcgtcgatttctgctattcc

SEQ ID NO: 3484056 - DNA, 25 bp, Homo sapien
tcctcatactggtgataaagagatg

SEQ ID NO: 3484057 - DNA, 25 bp, Homo sapien
agaagcctgagtcacgatcctcagc

SEQ ID NO: 3484058 - DNA, 25 bp, Homo sapien
ttttcattgcagcaggcatcatttt

SEQ ID NO: 3484059 - DNA, 25 bp, Homo sapien
ctacgtcagtgagttgatggttttc

SEQ ID NO: 3484060 - DNA, 25 bp, Homo sapien
cgtcagtgagttgatggttttcatt

SEQ ID NO: 3484061 - DNA, 25 bp, Homo sapien
tgagttgatggttttcattgcagca

SEQ ID NO: 3484062 - DNA, 25 bp, Homo sapien
gcatgctgaaactgacctcctgtga

SEQ ID NO: 3484063 - DNA, 25 bp, Homo sapien
cattgccatgtcccctaaagtgtgt

SEQ ID NO: 3484064 - DNA, 25 bp, Homo sapien
tcctgtgaggcaaacaccatcaacc

SEQ ID NO: 3484065 - DNA, 25 bp, Homo sapien
gttccagccatatgcttggttccta

SEQ ID NO: 3484066 - DNA, 25 bp, Homo sapien
acatcaatatagagacgtgtccagg

SEQ ID NO: 3484067 - DNA, 25 bp, Homo sapien
caggactcgggtgttggattctaaa

SEQ ID NO: 3484068 - DNA, 25 bp, Homo sapien
tcactcattgatagaagcgttccct

SEQ ID NO: 3484069 - DNA, 25 bp, Homo sapien
cagattcagtcccacggatggtagg

SEQ ID NO: 3484070 - DNA, 25 bp, Homo sapien
caatgagctggtggtttccattgca

SEQ ID NO: 3484071 - DNA, 25 bp, Homo sapien
caccatccatccctatttgtgtgac

SEQ ID NO: 3484072 - DNA, 25 bp, Homo sapien
catccatccctatttgtgtgacatc

SEQ ID NO: 3484073 - DNA, 25 bp, Homo sapien
tccattgcagcagtcattattttcc

SEQ ID NO: 3484074 - DNA, 25 bp, Homo sapien
tgtgccttcagagtttactccagga

SEQ ID NO: 3484075 - DNA, 25 bp, Homo sapien
ccttcagagtttactccaggagcaa

SEQ ID NO: 3484076 - DNA, 25 bp, Homo sapien
agagagagagatctgtgccttcaga

SEQ ID NO: 3484077 - DNA, 25 bp, Homo sapien
gagtttactccaggagcaatgttga

SEQ ID NO: 3484078 - DNA, 25 bp, Homo sapien
catagtttcgattgcccagtgggta

SEQ ID NO: 3484079 - DNA, 25 bp, Homo sapien
tacatagtttcgattgcccagtggg

SEQ ID NO: 3484080 - DNA, 25 bp, Homo sapien
tattacatagtttcgattgcccagt

SEQ ID NO: 3484081 - DNA, 25 bp, Homo sapien
tttattacatagtttcgattgccca

SEQ ID NO: 3484082 - DNA, 25 bp, Homo sapien
tttaggcaagaatccaaagagacac

SEQ ID NO: 3484083 - DNA, 25 bp, Homo sapien
tgaggtgctgaaactaagagatgct

SEQ ID NO: 3484084 - DNA, 25 bp, Homo sapien
cactgattgcatctatgaggtgctg

SEQ ID NO: 3484085 - DNA, 25 bp, Homo sapien
tagccaatatacaagaggtccctct

SEQ ID NO: 3484086 - DNA, 25 bp, Homo sapien
tcttatggtgacatcctctccagga

SEQ ID NO: 3484087 - DNA, 25 bp, Homo sapien
ttccaatgagggaaggtccaaagcc

SEQ ID NO: 3484088 - DNA, 25 bp, Homo sapien
tcaataccattgtgcccactgtcac

SEQ ID NO: 3484089 - DNA, 25 bp, Homo sapien
gatcctccacatcagttccaatgag

SEQ ID NO: 3484090 - DNA, 25 bp, Homo sapien
ccacactggatgcatgctgaggctg

SEQ ID NO: 3484091 - DNA, 25 bp, Homo sapien
ctatccttttctggggccatggccc

SEQ ID NO: 3484092 - DNA, 25 bp, Homo sapien
ggcccacactggatgcatgctgagg

SEQ ID NO: 3484093 - DNA, 25 bp, Homo sapien
ccatggcccacactggatgcatgct

SEQ ID NO: 3484094 - DNA, 25 bp, Homo sapien
aaagctttcagcacttgcagttccc

SEQ ID NO: 3484095 - DNA, 25 bp, Homo sapien
caaagctttcagcacttgcagttcc

SEQ ID NO: 3484096 - DNA, 25 bp, Homo sapien
atcagttccaaggagggcaggtcca

SEQ ID NO: 3484097 - DNA, 25 bp, Homo sapien
caaggagggcaggtccaaagctttc

SEQ ID NO: 3484098 - DNA, 25 bp, Homo sapien
gactgactttctgtgatgcgaacac

SEQ ID NO: 3484099 - DNA, 25 bp, Homo sapien
tgctgacgtcaatggcgtatgatcg

SEQ ID NO: 3484100 - DNA, 25 bp, Homo sapien
cattgccatgtctcctacagtgtgc

SEQ ID NO: 3484101 - DNA, 25 bp, Homo sapien
gttttcactgtggttggcatcaaca

SEQ ID NO: 3484102 - DNA, 25 bp, Homo sapien
tggttgttctcattgttgtgggtac

SEQ ID NO: 3484103 - DNA, 25 bp, Homo sapien
tctcattgttgtgggtactaatatc

SEQ ID NO: 3484104 - DNA, 25 bp, Homo sapien
gttgttctcattgttgtgggtacta

SEQ ID NO: 3484105 - DNA, 25 bp, Homo sapien
gttctcattgttgtgggtactaata

SEQ ID NO: 3484106 - DNA, 25 bp, Homo sapien
ggcccacaccgggtgcatgcttaga

SEQ ID NO: 3484107 - DNA, 25 bp, Homo sapien
cccacaccgggtgcatgcttagact

SEQ ID NO: 3484108 - DNA, 25 bp, Homo sapien
gagccacggcccacaccgggtgcat

SEQ ID NO: 3484109 - DNA, 25 bp, Homo sapien
acaccgggtgcatgcttagactcac

SEQ ID NO: 3484110 - DNA, 25 bp, Homo sapien
taaggtcaccatgtcccatcaggtc

SEQ ID NO: 3484111 - DNA, 25 bp, Homo sapien
gtggccatctgtaatccattgctgt

SEQ ID NO: 3484112 - DNA, 25 bp, Homo sapien
taatccattgctgtataaggtcacc

SEQ ID NO: 3484113 - DNA, 25 bp, Homo sapien
cccatcaggtctgttctatgctcac

SEQ ID NO: 3484114 - DNA, 25 bp, Homo sapien
gaaggtgagttaatcaagtttctat

SEQ ID NO: 3484115 - DNA, 25 bp, Homo sapien
aggaaggtgagttaatcaagtttct

SEQ ID NO: 3484116 - DNA, 25 bp, Homo sapien
ctgagtggaaggaaggtgagttaat

SEQ ID NO: 3484117 - DNA, 25 bp, Homo sapien
tggaaggaaggtgagttaatcaagt

SEQ ID NO: 3484118 - DNA, 25 bp, Homo sapien
tggaggtgaaacacatatcaatggt

SEQ ID NO: 3484119 - DNA, 25 bp, Homo sapien
ggtgaaacacatatcaatggtcagc

SEQ ID NO: 3484120 - DNA, 25 bp, Homo sapien
catatcaatggtcagcactgagttc

SEQ ID NO: 3484121 - DNA, 25 bp, Homo sapien
acacatatcaatggtcagcactgag

SEQ ID NO: 3484122 - DNA, 25 bp, Homo sapien
gattctttgactacatgtggtcaac

SEQ ID NO: 3484123 - DNA, 25 bp, Homo sapien
gactacatgtggtcaacgtagatac

SEQ ID NO: 3484124 - DNA, 25 bp, Homo sapien
tttgactacatgtggtcaacgtaga

SEQ ID NO: 3484125 - DNA, 25 bp, Homo sapien
agaagattctttgactacatgtggt

SEQ ID NO: 3484126 - DNA, 25 bp, Homo sapien
tcaactctgagcagaatacatctgg

SEQ ID NO: 3484127 - DNA, 25 bp, Homo sapien
ctggaggactctggttaaagatggc

SEQ ID NO: 3484128 - DNA, 25 bp, Homo sapien
tgtaagcttggtgtgctcctaggca

SEQ ID NO: 3484129 - DNA, 25 bp, Homo sapien
caatctccgggctcctgtaagcttg

SEQ ID NO: 3484130 - DNA, 25 bp, Homo sapien
tatagttgcacttccttggatccac

SEQ ID NO: 3484131 - DNA, 25 bp, Homo sapien
tatggtctgagattttcctacccga

SEQ ID NO: 3484132 - DNA, 25 bp, Homo sapien
tccccatgaagagacccatcggtgg

SEQ ID NO: 3484133 - DNA, 25 bp, Homo sapien
ctgagatgtcctgagccaatgactc

SEQ ID NO: 3484134 - DNA, 25 bp, Homo sapien
tggttgttctcattgttgtgggtat

SEQ ID NO: 3484135 - DNA, 25 bp, Homo sapien
gttctcattgttgtgggtattaata

SEQ ID NO: 3484136 - DNA, 25 bp, Homo sapien
gttgttctcattgttgtgggtatta

SEQ ID NO: 3484137 - DNA, 25 bp, Homo sapien
tctcattgttgtgggtattaatatc

SEQ ID NO: 3484138 - DNA, 25 bp, Homo sapien
ggcccacaccgggtgcatgcttaga

SEQ ID NO: 3484139 - DNA, 25 bp, Homo sapien
cccacaccgggtgcatgcttagact

SEQ ID NO: 3484140 - DNA, 25 bp, Homo sapien
acaccgggtgcatgcttagactcac

SEQ ID NO: 3484141 - DNA, 25 bp, Homo sapien
gagccacggcccacaccgggtgcat

SEQ ID NO: 3484142 - DNA, 25 bp, Homo sapien
taatccattgctgtataaggtcacc

SEQ ID NO: 3484143 - DNA, 25 bp, Homo sapien
taaggtcaccatgtcccatcaggtc

SEQ ID NO: 3484144 - DNA, 25 bp, Homo sapien
gtggccatctgtaatccattgctgt

SEQ ID NO: 3484145 - DNA, 25 bp, Homo sapien
cccatcaggtctgttctatgctcac

SEQ ID NO: 3484146 - DNA, 25 bp, Homo sapien
ggtgaaacacatatcaatggtcagc

SEQ ID NO: 3484147 - DNA, 25 bp, Homo sapien
tggaggtgaaacacatatcaatggt

SEQ ID NO: 3484148 - DNA, 25 bp, Homo sapien
catatcaatggtcagcactgagttc

SEQ ID NO: 3484149 - DNA, 25 bp, Homo sapien
acacatatcaatggtcagcactgag

SEQ ID NO: 3484150 - DNA, 25 bp, Homo sapien
agggagaagaagattctgtgactac

SEQ ID NO: 3484151 - DNA, 25 bp, Homo sapien
ccagtcaagggagaagaagattctg

SEQ ID NO: 3484152 - DNA, 25 bp, Homo sapien
gattctgtgactacatctgatcaac

SEQ ID NO: 3484153 - DNA, 25 bp, Homo sapien
caatgcttttgccagtcaagggaga

SEQ ID NO: 3484154 - DNA, 25 bp, Homo sapien
cacttgctgtaagtctttagacaac

SEQ ID NO: 3484155 - DNA, 25 bp, Homo sapien
aaccctgagctgacaatccagcaga

SEQ ID NO: 3484156 - DNA, 25 bp, Homo sapien
cttgctgtaagtctttagacaaccc

SEQ ID NO: 3484157 - DNA, 25 bp, Homo sapien
gatcacttgctgtaagtctttagac

SEQ ID NO: 3484158 - DNA, 25 bp, Homo sapien
ccccaaagtcagaggatgtagactg

SEQ ID NO: 3484159 - DNA, 25 bp, Homo sapien
tagtcttccaggcatccactgactt

SEQ ID NO: 3484160 - DNA, 25 bp, Homo sapien
ccaaagtcagaggatgtagactgct

SEQ ID NO: 3484161 - DNA, 25 bp, Homo sapien
cctccttcccccaaagtcagaggat

SEQ ID NO: 3484162 - DNA, 25 bp, Homo sapien
tccaaaaacatctgattgtgctcag

SEQ ID NO: 3484163 - DNA, 25 bp, Homo sapien
tcatctacctgtgctcccactaagt

SEQ ID NO: 3484164 - DNA, 25 bp, Homo sapien
ctaagtaatgcaggaatccaactcc

SEQ ID NO: 3484165 - DNA, 25 bp, Homo sapien
ctccaaaaacatctgattgtgctca

SEQ ID NO: 3484166 - DNA, 25 bp, Homo sapien
tagtaaagccccagttgagaggatt

SEQ ID NO: 3484167 - DNA, 25 bp, Homo sapien
caagactttagtaaagccccagttg

SEQ ID NO: 3484168 - DNA, 25 bp, Homo sapien
gactttagtaaagccccagttgaga

SEQ ID NO: 3484169 - DNA, 25 bp, Homo sapien
tttagtaaagccccagttgagagga

SEQ ID NO: 3484170 - DNA, 25 bp, Homo sapien
aaaagaagagccctgtgaaaggtca

SEQ ID NO: 3484171 - DNA, 25 bp, Homo sapien
gaatgacttttgacagtcattctcc

SEQ ID NO: 3484172 - DNA, 25 bp, Homo sapien
agtcattctcctctgggtgggatgt

SEQ ID NO: 3484173 - DNA, 25 bp, Homo sapien
gggtgggatgtttgtaggaatggaa

SEQ ID NO: 3484174 - DNA, 25 bp, Homo sapien
cattgtgaccatatggatatcaagg

SEQ ID NO: 3484175 - DNA, 25 bp, Homo sapien
aattagagtgatcatgcccaagttc

SEQ ID NO: 3484176 - DNA, 25 bp, Homo sapien
ctggagatctggctgcttcgttaat

SEQ ID NO: 3484177 - DNA, 25 bp, Homo sapien
gctgcttcgttaatcccctgagact

SEQ ID NO: 3484178 - DNA, 25 bp, Homo sapien
cctgcataagagataatgctcttct

SEQ ID NO: 3484179 - DNA, 25 bp, Homo sapien
catcttagggttagtaatggaggaa

SEQ ID NO: 3484180 - DNA, 25 bp, Homo sapien
accagcatcttagggttagtaatgg

SEQ ID NO: 3484181 - DNA, 25 bp, Homo sapien
tagggttagtaatggaggaatagca

SEQ ID NO: 3484182 - DNA, 25 bp, Homo sapien
gagacatgatgacgttgcaaagcaa

SEQ ID NO: 3484183 - DNA, 25 bp, Homo sapien
gcaacatagtggtcacaggccttca

SEQ ID NO: 3484184 - DNA, 25 bp, Homo sapien
aagcagcgactggtgaggagttcac

SEQ ID NO: 3484185 - DNA, 25 bp, Homo sapien
caacgagtcccatggtgtagaccac

SEQ ID NO: 3484186 - DNA, 25 bp, Homo sapien
aaaatagcccacatgaaccatgatg

SEQ ID NO: 3484187 - DNA, 25 bp, Homo sapien
ataagtctgaaattggtgttcctcc

SEQ ID NO: 3484188 - DNA, 25 bp, Homo sapien
gcccacatgaaccatgatgagtgac

SEQ ID NO: 3484189 - DNA, 25 bp, Homo sapien
aagtctgaaattggtgttcctccaa

SEQ ID NO: 3484190 - DNA, 25 bp, Homo sapien
gacaacactgtaaaccatatgggtt

SEQ ID NO: 3484191 - DNA, 25 bp, Homo sapien
tagattctgcaccagagagctgagc

SEQ ID NO: 3484192 - DNA, 25 bp, Homo sapien
gctgagctggtgaaccaaaagatcc

SEQ ID NO: 3484193 - DNA, 25 bp, Homo sapien
cagtgtgggtatactcgcctacttt

SEQ ID NO: 3484194 - DNA, 25 bp, Homo sapien
tccttgtcagtggtagtgggactag

SEQ ID NO: 3484195 - DNA, 25 bp, Homo sapien
tagtgggactagagtatttacgcct

SEQ ID NO: 3484196 - DNA, 25 bp, Homo sapien
aatcagtcattccttctgggttgcc

SEQ ID NO: 3484197 - DNA, 25 bp, Homo sapien
tttacgccttcacactaatcagtca

SEQ ID NO: 3484198 - DNA, 25 bp, Homo sapien
ttagggtgctaggaacttgctctca

SEQ ID NO: 3484199 - DNA, 25 bp, Homo sapien
caatcaatcgagctagatttttctt

SEQ ID NO: 3484200 - DNA, 25 bp, Homo sapien
gggatccaacttgatcatttatgga

SEQ ID NO: 3484201 - DNA, 25 bp, Homo sapien
tggaaagggatcctgcaatcaatca

SEQ ID NO: 3484202 - DNA, 25 bp, Homo sapien
tattaagaagtctacacctagccat

SEQ ID NO: 3484203 - DNA, 25 bp, Homo sapien
caccaacctagagttttgtatctgg

SEQ ID NO: 3484204 - DNA, 25 bp, Homo sapien
gcaagaagagagtgaagtaacagat

SEQ ID NO: 3484205 - DNA, 25 bp, Homo sapien
tccttcaaatgtaacggagagttag

SEQ ID NO: 3484206 - DNA, 25 bp, Homo sapien
cccacataattgtggtatcgctttt

SEQ ID NO: 3484207 - DNA, 25 bp, Homo sapien
ctgcagttcccacataattgtggta

SEQ ID NO: 3484208 - DNA, 25 bp, Homo sapien
cagttcccacataattgtggtatcg

SEQ ID NO: 3484209 - DNA, 25 bp, Homo sapien
ttcccacataattgtggtatcgctt

SEQ ID NO: 3484210 - DNA, 25 bp, Homo sapien
tggggtgccgattgtcaccattttt

SEQ ID NO: 3484211 - DNA, 25 bp, Homo sapien
tccacattagttccacagagggcag

SEQ ID NO: 3484212 - DNA, 25 bp, Homo sapien
tgtgaccgttggcattggggtgccg

SEQ ID NO: 3484213 - DNA, 25 bp, Homo sapien
ctccacattagttccacagagggca

SEQ ID NO: 3484214 - DNA, 25 bp, Homo sapien
tatatgtgtgacatccttcctctcc

SEQ ID NO: 3484215 - DNA, 25 bp, Homo sapien
ctatatgtgtgacatccttcctctc

SEQ ID NO: 3484216 - DNA, 25 bp, Homo sapien
tgtctgagccactgggtgccacagc

SEQ ID NO: 3484217 - DNA, 25 bp, Homo sapien
tttccgtgaaagagatgggcaacgg

SEQ ID NO: 3484218 - DNA, 25 bp, Homo sapien
ggccactgggtttccgtgaaagaga

SEQ ID NO: 3484219 - DNA, 25 bp, Homo sapien
aacgggcagtagagagcagcaccat

SEQ ID NO: 3484220 - DNA, 25 bp, Homo sapien
tcttaataatgagtcttggtggcaa

SEQ ID NO: 3484221 - DNA, 25 bp, Homo sapien
ggattgctacaccagcataatagtc

SEQ ID NO: 3484222 - DNA, 25 bp, Homo sapien
tgggattagagatccaagtcttgac

SEQ ID NO: 3484223 - DNA, 25 bp, Homo sapien
tcaccgtgacagatttagcgttcat

SEQ ID NO: 3484224 - DNA, 25 bp, Homo sapien
gaaattggtgtgcatcaaaatgaga

SEQ ID NO: 3484225 - DNA, 25 bp, Homo sapien
ctgacaagtatctggtacacctacg

SEQ ID NO: 3484226 - DNA, 25 bp, Homo sapien
cctacgactggcagaggtgtttctt

SEQ ID NO: 3484227 - DNA, 25 bp, Homo sapien
caaaatgagaacaggatctgagcgc

SEQ ID NO: 3484228 - DNA, 25 bp, Homo sapien
atctttattgttgtgaccgttggca

SEQ ID NO: 3484229 - DNA, 25 bp, Homo sapien
aaccttgtcaatcactacatgtgtg

SEQ ID NO: 3484230 - DNA, 25 bp, Homo sapien
aacggctcttacataaatgtcctgg

SEQ ID NO: 3484231 - DNA, 25 bp, Homo sapien
ggtgcccattgttgccgtttttatc

SEQ ID NO: 3484232 - DNA, 25 bp, Homo sapien
gatggtgtaggaccgctacgtgggc

SEQ ID NO: 3484233 - DNA, 25 bp, Homo sapien
atcctgtcggcgatggtgtaggacc

SEQ ID NO: 3484234 - DNA, 25 bp, Homo sapien
ttatttccttcacagggtgtatgag

SEQ ID NO: 3484235 - DNA, 25 bp, Homo sapien
acagggtgtatgagtcagttcttct

SEQ ID NO: 3484236 - DNA, 25 bp, Homo sapien
cgccggttttaccgacttgatcaag

SEQ ID NO: 3484237 - DNA, 25 bp, Homo sapien
gccgccggttttaccgacttgatca

SEQ ID NO: 3484238 - DNA, 25 bp, Homo sapien
tgctccgtttagtacagaccccaaa

SEQ ID NO: 3484239 - DNA, 25 bp, Homo sapien
actttctttacagcaaggccatttg

SEQ ID NO: 3484240 - DNA, 25 bp, Homo sapien
tgccactttctttacagcaaggcca

SEQ ID NO: 3484241 - DNA, 25 bp, Homo sapien
ttctttacagcaaggccatttggat

SEQ ID NO: 3484242 - DNA, 25 bp, Homo sapien
ctaagttgccactttctttacagca

SEQ ID NO: 3484243 - DNA, 25 bp, Homo sapien
ttaatcctcaaagtggagaagcaga

SEQ ID NO: 3484244 - DNA, 25 bp, Homo sapien
taatcctcaaagtggagaagcagaa

SEQ ID NO: 3484245 - DNA, 25 bp, Homo sapien
agcagaagcagagggtgtctgggct

SEQ ID NO: 3484246 - DNA, 25 bp, Homo sapien
agaagcagaagcagagggtgtctgg

SEQ ID NO: 3484247 - DNA, 25 bp, Homo sapien
catggcttgactgacatatgtgcac

SEQ ID NO: 3484248 - DNA, 25 bp, Homo sapien
tgaggcaacctcattgctgagactg

SEQ ID NO: 3484249 - DNA, 25 bp, Homo sapien
cacaggcttgtgtgcggtggtttca

SEQ ID NO: 3484250 - DNA, 25 bp, Homo sapien
tgggatccattagggtcactccggg

SEQ ID NO: 3484251 - DNA, 25 bp, Homo sapien
ggaggtcctgttaatatttcacatt

SEQ ID NO: 3484252 - DNA, 25 bp, Homo sapien
cgtaatatcataacatgtggcactg

SEQ ID NO: 3484253 - DNA, 25 bp, Homo sapien
caaacttgatgtatgtctcctcgtc

SEQ ID NO: 3484254 - DNA, 25 bp, Homo sapien
tccaagcacagagatgccaaacatt

SEQ ID NO: 3484255 - DNA, 25 bp, Homo sapien
gttgctttgttaatcccctgagaat

SEQ ID NO: 3484256 - DNA, 25 bp, Homo sapien
ttgctttgttaatcccctgagaatg

SEQ ID NO: 3484257 - DNA, 25 bp, Homo sapien
ccaaatcagggagatcatgcccagg

SEQ ID NO: 3484258 - DNA, 25 bp, Homo sapien
ttgctgaaaaagtagtacgtgggag

SEQ ID NO: 3484259 - DNA, 25 bp, Homo sapien
ctgaaaaagtagtacgtgggagtgt

SEQ ID NO: 3484260 - DNA, 25 bp, Homo sapien
agccaaatcagggagatcatgccca

SEQ ID NO: 3484261 - DNA, 25 bp, Homo sapien
ctgcgtaggagatgatgtttttctc

SEQ ID NO: 3484262 - DNA, 25 bp, Homo sapien
tgcgtaggagatgatgtttttctct

SEQ ID NO: 3484263 - DNA, 25 bp, Homo sapien
gcgtaggagatgatgtttttctctg

SEQ ID NO: 3484264 - DNA, 25 bp, Homo sapien
tgccccagttcagccaagtgttctg

SEQ ID NO: 3484265 - DNA, 25 bp, Homo sapien
gctgggccacagtagtgcagagtgt

SEQ ID NO: 3484266 - DNA, 25 bp, Homo sapien
gactcccaggcaagtcagcaacggg

SEQ ID NO: 3484267 - DNA, 25 bp, Homo sapien
tgtctcccaaagattcctcttgact

SEQ ID NO: 3484268 - DNA, 25 bp, Homo sapien
tatcagcctggctcatcctggttgc

SEQ ID NO: 3484269 - DNA, 25 bp, Homo sapien
aaggcgaacccacaggagctgtctg

SEQ ID NO: 3484270 - DNA, 25 bp, Homo sapien
cagagggtgccgtgttttatcagcc

SEQ ID NO: 3484271 - DNA, 25 bp, Homo sapien
gaatgtggctttgacgcaggcccga

SEQ ID NO: 3484272 - DNA, 25 bp, Homo sapien
cagtttattcttgtagggagttttg

SEQ ID NO: 3484273 - DNA, 25 bp, Homo sapien
tctattctgcttagtttgggtttta

SEQ ID NO: 3484274 - DNA, 25 bp, Homo sapien
aatgtttctattctgcttagtttgg

SEQ ID NO: 3484275 - DNA, 25 bp, Homo sapien
ttgtctctaatgtttctattctgct

SEQ ID NO: 3484276 - DNA, 25 bp, Homo sapien
gggatgcatgggagacaagaacccc

SEQ ID NO: 3484277 - DNA, 25 bp, Homo sapien
gcagggatgcatgggagacaagaac

SEQ ID NO: 3484278 - DNA, 25 bp, Homo sapien
agggatgcatgggagacaagaaccc

SEQ ID NO: 3484279 - DNA, 25 bp, Homo sapien
cagggatgcatgggagacaagaacc

SEQ ID NO: 3484280 - DNA, 25 bp, Homo sapien
gatggtgaccaagtagatcccgagg

SEQ ID NO: 3484281 - DNA, 25 bp, Homo sapien
ggagctggaggtctgctctcttcgt

SEQ ID NO: 3484282 - DNA, 25 bp, Homo sapien
ggaggtctgctctcttcgttaaacc

SEQ ID NO: 3484283 - DNA, 25 bp, Homo sapien
gctctcttcgttaaacccttgagaa

SEQ ID NO: 3484284 - DNA, 25 bp, Homo sapien
caggtgtgatgagacataatgatgt

SEQ ID NO: 3484285 - DNA, 25 bp, Homo sapien
cgtaggagatgatgtttttctctga

SEQ ID NO: 3484286 - DNA, 25 bp, Homo sapien
aggcaggtgtgatgagacataatga

SEQ ID NO: 3484287 - DNA, 25 bp, Homo sapien
gcatgtaacactcagcaatgacaaa

SEQ ID NO: 3484288 - DNA, 25 bp, Homo sapien
ctattgtggagccaatgagtccgat

SEQ ID NO: 3484289 - DNA, 25 bp, Homo sapien
aatgagtccgatggcgtagaccaca

SEQ ID NO: 3484290 - DNA, 25 bp, Homo sapien
ttgtggagccaatgagtccgatggc

SEQ ID NO: 3484291 - DNA, 25 bp, Homo sapien
gagccaatgagtccgatggcgtaga

SEQ ID NO: 3484292 - DNA, 25 bp, Homo sapien
tcataggtgctagagcaggacagct

SEQ ID NO: 3484293 - DNA, 25 bp, Homo sapien
gatgttgaatccagccgaaaagaag

SEQ ID NO: 3484294 - DNA, 25 bp, Homo sapien
gatgaggtgctcacaatagggcagt

SEQ ID NO: 3484295 - DNA, 25 bp, Homo sapien
agaactgttaagctcgtgactatga

SEQ ID NO: 3484296 - DNA, 25 bp, Homo sapien
catgaatgcagttgatccatagaac

SEQ ID NO: 3484297 - DNA, 25 bp, Homo sapien
tcaaggaactgattgtggagggttt

SEQ ID NO: 3484298 - DNA, 25 bp, Homo sapien
tcagcgttttctgcacggcagcctt

SEQ ID NO: 3484299 - DNA, 25 bp, Homo sapien
tcctgggtcaaggaactgattgtgg

SEQ ID NO: 3484300 - DNA, 25 bp, Homo sapien
attcacccagccatgtggagaagtg

SEQ ID NO: 3484301 - DNA, 25 bp, Homo sapien
gtagagggatggatctcaagtgaaa

SEQ ID NO: 3484302 - DNA, 25 bp, Homo sapien
tgcccattcacccagccatgtggag

SEQ ID NO: 3484303 - DNA, 25 bp, Homo sapien
gcattcagaagctgtcactctggta

SEQ ID NO: 3484304 - DNA, 25 bp, Homo sapien
aaaaggacacgacagcttcaggaag

SEQ ID NO: 3484305 - DNA, 25 bp, Homo sapien
aaaaaggacacgacagcttcaggaa

SEQ ID NO: 3484306 - DNA, 25 bp, Homo sapien
gaaaaaggacacgacagcttcagga

SEQ ID NO: 3484307 - DNA, 25 bp, Homo sapien
caacaagattctgatgagcatggca

SEQ ID NO: 3484308 - DNA, 25 bp, Homo sapien
ccatgtgcacaagcaacaagattct

SEQ ID NO: 3484309 - DNA, 25 bp, Homo sapien
gggcttctgagatcatagggtctgc

SEQ ID NO: 3484310 - DNA, 25 bp, Homo sapien
gagatcatagggtctgcagccatgt

SEQ ID NO: 3484311 - DNA, 25 bp, Homo sapien
accgggtagtggcagcaacacactg

SEQ ID NO: 3484312 - DNA, 25 bp, Homo sapien
ctgcaccgggtagtggcagcaacac

SEQ ID NO: 3484313 - DNA, 25 bp, Homo sapien
ctgctgcaccgggtagtggcagcaa

SEQ ID NO: 3484314 - DNA, 25 bp, Homo sapien
tagtggcagcaacacactggaaaac

SEQ ID NO: 3484315 - DNA, 25 bp, Homo sapien
tactccagatcccatgcaatgagag

SEQ ID NO: 3484316 - DNA, 25 bp, Homo sapien
cttactccagatcccatgcaatgag

SEQ ID NO: 3484317 - DNA, 25 bp, Homo sapien
tcttactccagatcccatgcaatga

SEQ ID NO: 3484318 - DNA, 25 bp, Homo sapien
ctccagatcccatgcaatgagagga

SEQ ID NO: 3484319 - DNA, 25 bp, Homo sapien
tgtttttgcagtcgatgagtgtcag

SEQ ID NO: 3484320 - DNA, 25 bp, Homo sapien
aagcccatatggtttgcacagaatg

SEQ ID NO: 3484321 - DNA, 25 bp, Homo sapien
taagtcatcctgattgcaaagccca

SEQ ID NO: 3484322 - DNA, 25 bp, Homo sapien
tgctgggtttgcctctcacgtggag

SEQ ID NO: 3484323 - DNA, 25 bp, Homo sapien
tcttattcagtgctgtgtacttggg

SEQ ID NO: 3484324 - DNA, 25 bp, Homo sapien
gggagggatgattgcaccaagcatc

SEQ ID NO: 3484325 - DNA, 25 bp, Homo sapien
caagcatcctaggttctgttctgga

SEQ ID NO: 3484326 - DNA, 25 bp, Homo sapien
tggaactgaagctgattctgggtgg

SEQ ID NO: 3484327 - DNA, 25 bp, Homo sapien
cagtgagactaccaagccctttttc

SEQ ID NO: 3484328 - DNA, 25 bp, Homo sapien
gtagacctctgtgcagatttgtggg

SEQ ID NO: 3484329 - DNA, 25 bp, Homo sapien
gctctgaccttcctgaacacgtctg

SEQ ID NO: 3484330 - DNA, 25 bp, Homo sapien
aagccaaagtctccggtagacctct

SEQ ID NO: 3484331 - DNA, 25 bp, Homo sapien
tataaacacgaagcactacaaagct

SEQ ID NO: 3484332 - DNA, 25 bp, Homo sapien
tacaaagctgtgacatgccgtcctc

SEQ ID NO: 3484333 - DNA, 25 bp, Homo sapien
ctagagtgatcaagatgagggcccc

SEQ ID NO: 3484334 - DNA, 25 bp, Homo sapien
ttctgatgacgtagtacatgggagg

SEQ ID NO: 3484335 - DNA, 25 bp, Homo sapien
cccgcgtgggctaactggcgtgtat

SEQ ID NO: 3484336 - DNA, 25 bp, Homo sapien
ctaactggcgtgtatgggtcatggg

SEQ ID NO: 3484337 - DNA, 25 bp, Homo sapien
cagcagaagggaccctttatttcta

SEQ ID NO: 3484338 - DNA, 25 bp, Homo sapien
gggctaactggcgtgtatgggtcat

SEQ ID NO: 3484339 - DNA, 25 bp, Homo sapien
agcagatggaggtctgtggctttat

SEQ ID NO: 3484340 - DNA, 25 bp, Homo sapien
atggaggtctgtggctttatgctgc

SEQ ID NO: 3484341 - DNA, 25 bp, Homo sapien
ctagagcagatggaggtctgtggct

SEQ ID NO: 3484342 - DNA, 25 bp, Homo sapien
gatggaggtctgtggctttatgctg

SEQ ID NO: 3484343 - DNA, 25 bp, Homo sapien
gtgccacgctgctgtctggattgtc

SEQ ID NO: 3484344 - DNA, 25 bp, Homo sapien
ctgggcctggtgccacgctgctgtc

SEQ ID NO: 3484345 - DNA, 25 bp, Homo sapien
tgggcctggtgccacgctgctgtct

SEQ ID NO: 3484346 - DNA, 25 bp, Homo sapien
ctggtgccacgctgctgtctggatt

SEQ ID NO: 3484347 - DNA, 25 bp, Homo sapien
tagccttagcgggtccttgctggag

SEQ ID NO: 3484348 - DNA, 25 bp, Homo sapien
ggttctctaaataactgcccaggcc

SEQ ID NO: 3484349 - DNA, 25 bp, Homo sapien
gagccaggccctgctaattagaggg

SEQ ID NO: 3484350 - DNA, 25 bp, Homo sapien
ctgggagcaggcgatggttctctaa

SEQ ID NO: 3484351 - DNA, 25 bp, Homo sapien
gggtgcagaggtggcagcaggggtc

SEQ ID NO: 3484352 - DNA, 25 bp, Homo sapien
cttgggggtgcagaggtggcagcag

SEQ ID NO: 3484353 - DNA, 25 bp, Homo sapien
tgggggtgcagaggtggcagcaggg

SEQ ID NO: 3484354 - DNA, 25 bp, Homo sapien
ggggtgcagaggtggcagcaggggt

SEQ ID NO: 3484355 - DNA, 25 bp, Homo sapien
tccagacgcagtcctttgaggcggg

SEQ ID NO: 3484356 - DNA, 25 bp, Homo sapien
catctgagagcatgtactctgcagc

SEQ ID NO: 3484357 - DNA, 25 bp, Homo sapien
agaggagaactcctgggcgaatgcc

SEQ ID NO: 3484358 - DNA, 25 bp, Homo sapien
tacgaacttgactatccggtccagg

SEQ ID NO: 3484359 - DNA, 25 bp, Homo sapien
tatggtgaagcagtgagtcccagca

SEQ ID NO: 3484360 - DNA, 25 bp, Homo sapien
ccaggcccgtcctgcttatggtgaa

SEQ ID NO: 3484361 - DNA, 25 bp, Homo sapien
tgtccacgtaggctgcctgccggat

SEQ ID NO: 3484362 - DNA, 25 bp, Homo sapien
tgcttatggtgaagcagtgagtccc

SEQ ID NO: 3484363 - DNA, 25 bp, Homo sapien
tgatgatgaacagcagatcggagct

SEQ ID NO: 3484364 - DNA, 25 bp, Homo sapien
tcttcagcatgtgctgcacgaggcg

SEQ ID NO: 3484365 - DNA, 25 bp, Homo sapien
cacgaggcggatggagcgattataa

SEQ ID NO: 3484366 - DNA, 25 bp, Homo sapien
cagcaccggcaggtacatgagcaag

SEQ ID NO: 3484367 - DNA, 25 bp, Homo sapien
tagtagtgtacacctatggttccag

SEQ ID NO: 3484368 - DNA, 25 bp, Homo sapien
gatttctgccaagcaaggcggacta

SEQ ID NO: 3484369 - DNA, 25 bp, Homo sapien
gataaacccagtgaatgatcagtga

SEQ ID NO: 3484370 - DNA, 25 bp, Homo sapien
tttagctaagtgcattctgggccgg

SEQ ID NO: 3484371 - DNA, 25 bp, Homo sapien
ttagcagccctgtcttgatggagca

SEQ ID NO: 3484372 - DNA, 25 bp, Homo sapien
gccaggtaccgctctagcaaaggga

SEQ ID NO: 3484373 - DNA, 25 bp, Homo sapien
taggtagccactagcgaatgtgaac

SEQ ID NO: 3484374 - DNA, 25 bp, Homo sapien
tattgctacactggagaggctaaca

SEQ ID NO: 3484375 - DNA, 25 bp, Homo sapien
tagctctttgactcttcggctccag

SEQ ID NO: 3484376 - DNA, 25 bp, Homo sapien
tggaattgcctccataaacggactt

SEQ ID NO: 3484377 - DNA, 25 bp, Homo sapien
taagctgaatgtgcgttcaagaaag

SEQ ID NO: 3484378 - DNA, 25 bp, Homo sapien
tcagttaaatccaagcttagcagtt

SEQ ID NO: 3484379 - DNA, 25 bp, Homo sapien
gaaaagtgtatctgggcacctgaag

SEQ ID NO: 3484380 - DNA, 25 bp, Homo sapien
tgaaggctccactcacggctgagac

SEQ ID NO: 3484381 - DNA, 25 bp, Homo sapien
tattaaaagcatacctggctccgtt

SEQ ID NO: 3484382 - DNA, 25 bp, Homo sapien
acagttgtgaagaagtccatagccc

SEQ ID NO: 3484383 - DNA, 25 bp, Homo sapien
aaaccatctatcagctctttgcttg

SEQ ID NO: 3484384 - DNA, 25 bp, Homo sapien
aagaagggtctaaatggcctatgca

SEQ ID NO: 3484385 - DNA, 25 bp, Homo sapien
tgtctgagtgtggtctttgaagtca

SEQ ID NO: 3484386 - DNA, 25 bp, Homo sapien
ggcagacagcatgatattgtgtctg

SEQ ID NO: 3484387 - DNA, 25 bp, Homo sapien
catgccactgagcaactcattcagt

SEQ ID NO: 3484388 - DNA, 25 bp, Homo sapien
ggagatacatctgggcagactctga

SEQ ID NO: 3484389 - DNA, 25 bp, Homo sapien
tatgtgtgctccacaaaggtcatgc

SEQ ID NO: 3484390 - DNA, 25 bp, Homo sapien
tacctagtgcctattatgataccac

SEQ ID NO: 3484391 - DNA, 25 bp, Homo sapien
tacgtcccggtgtcggcagtgtgta

SEQ ID NO: 3484392 - DNA, 25 bp, Homo sapien
gcggaatcgggcctctaggaatcta

SEQ ID NO: 3484393 - DNA, 25 bp, Homo sapien
taggaatctagctctccgggacgtt

SEQ ID NO: 3484394 - DNA, 25 bp, Homo sapien
tgccggcatcggatcctaagtcggg

SEQ ID NO: 3484395 - DNA, 25 bp, Homo sapien
gccttgctggactgcagcggagccc

SEQ ID NO: 3484396 - DNA, 25 bp, Homo sapien
tcattctggctcttcttcgggagct

SEQ ID NO: 3484397 - DNA, 25 bp, Homo sapien
tggccttggccgctttgcgcagccg

SEQ ID NO: 3484398 - DNA, 25 bp, Homo sapien
ttcagccggtacttctcattctggc

SEQ ID NO: 3484399 - DNA, 25 bp, Homo sapien
accggctgaacgtgggtcagactca

SEQ ID NO: 3484400 - DNA, 25 bp, Homo sapien
aaagattttgtgagggagtctccag

SEQ ID NO: 3484401 - DNA, 25 bp, Homo sapien
cgtatacggaaaagccaacactgta

SEQ ID NO: 3484402 - DNA, 25 bp, Homo sapien
gtccaaggacacaaggctaacaagt

SEQ ID NO: 3484403 - DNA, 25 bp, Homo sapien
gctctgacacagtacccttgggcaa

SEQ ID NO: 3484404 - DNA, 25 bp, Homo sapien
tcagggctgtatctcgagaatcaaa

SEQ ID NO: 3484405 - DNA, 25 bp, Homo sapien
tagagtcctgcagtaacaacgatga

SEQ ID NO: 3484406 - DNA, 25 bp, Homo sapien
gaaagggaacagtcaatcagatgct

SEQ ID NO: 3484407 - DNA, 25 bp, Homo sapien
gaaaactgtctattcccaagtgcct

SEQ ID NO: 3484408 - DNA, 25 bp, Homo sapien
gaaggagctattcgaccgtgtgaca

SEQ ID NO: 3484409 - DNA, 25 bp, Homo sapien
gcaagccaagattaatggtcaccct

SEQ ID NO: 3484410 - DNA, 25 bp, Homo sapien
tatgccagaacaatacggtgaacca

SEQ ID NO: 3484411 - DNA, 25 bp, Homo sapien
tttttcctcaagacgagcaatttca

SEQ ID NO: 3484412 - DNA, 25 bp, Homo sapien
tcctcaagacgagcaatttcatcac

SEQ ID NO: 3484413 - DNA, 25 bp, Homo sapien
tttcctcaagacgagcaatttcatc

SEQ ID NO: 3484414 - DNA, 25 bp, Homo sapien
ttcctcaagacgagcaatttcatca

SEQ ID NO: 3484415 - DNA, 25 bp, Homo sapien
tatttgtagaacgagaggcagttgc

SEQ ID NO: 3484416 - DNA, 25 bp, Homo sapien
tgcgatacgcatcaatcccactggg

SEQ ID NO: 3484417 - DNA, 25 bp, Homo sapien
tttactcaagtactgggaaaagcca

SEQ ID NO: 3484418 - DNA, 25 bp, Homo sapien
tagaggagctgtctcatcgccatgg

SEQ ID NO: 3484419 - DNA, 25 bp, Homo sapien
tgtacttccccttcagttagagcct

SEQ ID NO: 3484420 - DNA, 25 bp, Homo sapien
gtcaggggcaaactggaactgtggg

SEQ ID NO: 3484421 - DNA, 25 bp, Homo sapien
gcctgtacttccccttcagttagag

SEQ ID NO: 3484422 - DNA, 25 bp, Homo sapien
aagtcaggggcaaactggaactgtg

SEQ ID NO: 3484423 - DNA, 25 bp, Homo sapien
ggcccagctccctgtatagttccca

SEQ ID NO: 3484424 - DNA, 25 bp, Homo sapien
tttcttcccaaatggttcctcagcc

SEQ ID NO: 3484425 - DNA, 25 bp, Homo sapien
gctccctgtatagttcccacagagc

SEQ ID NO: 3484426 - DNA, 25 bp, Homo sapien
cagctccctgtatagttcccacaga

SEQ ID NO: 3484427 - DNA, 25 bp, Homo sapien
tgagggcaataagccaatcctggtt

SEQ ID NO: 3484428 - DNA, 25 bp, Homo sapien
ttgttttctcaagggctcctagggc

SEQ ID NO: 3484429 - DNA, 25 bp, Homo sapien
tagggctccttaagaaccagatgag

SEQ ID NO: 3484430 - DNA, 25 bp, Homo sapien
gagtagctttctaacctgcccagat

SEQ ID NO: 3484431 - DNA, 25 bp, Homo sapien
gggctgaaccagcttgcgagcacct

SEQ ID NO: 3484432 - DNA, 25 bp, Homo sapien
acacaggccgtcctgagggatccag

SEQ ID NO: 3484433 - DNA, 25 bp, Homo sapien
tagtccgatggggaacacaggccgt

SEQ ID NO: 3484434 - DNA, 25 bp, Homo sapien
tatactgttagaccccctagtccga

SEQ ID NO: 3484435 - DNA, 25 bp, Homo sapien
ctgattctcctctctatatatcgct

SEQ ID NO: 3484436 - DNA, 25 bp, Homo sapien
ctcctctctatatatcgctggtctc

SEQ ID NO: 3484437 - DNA, 25 bp, Homo sapien
ttctcctctctatatatcgctggtc

SEQ ID NO: 3484438 - DNA, 25 bp, Homo sapien
gattctcctctctatatatcgctgg

SEQ ID NO: 3484439 - DNA, 25 bp, Homo sapien
tggtatggatcagcaagaggctgct

SEQ ID NO: 3484440 - DNA, 25 bp, Homo sapien
tggttttgcagggactggagatacg

SEQ ID NO: 3484441 - DNA, 25 bp, Homo sapien
agatacgctggggttggtatggatc

SEQ ID NO: 3484442 - DNA, 25 bp, Homo sapien
ttttgcagggactggagatacgctg

SEQ ID NO: 3484443 - DNA, 25 bp, Homo sapien
aggctgtgtagcagacaacactgac

SEQ ID NO: 3484444 - DNA, 25 bp, Homo sapien
gagagtaggctgtgtagcagacaac

SEQ ID NO: 3484445 - DNA, 25 bp, Homo sapien
cagagagtaggctgtgtagcagaca

SEQ ID NO: 3484446 - DNA, 25 bp, Homo sapien
gagtaggctgtgtagcagacaacac

SEQ ID NO: 3484447 - DNA, 25 bp, Homo sapien
ttcccccaacctgggattgaggtca

SEQ ID NO: 3484448 - DNA, 25 bp, Homo sapien
cactgaagaatttagaagtccagtt

SEQ ID NO: 3484449 - DNA, 25 bp, Homo sapien
cattcccccaacctgggattgaggt

SEQ ID NO: 3484450 - DNA, 25 bp, Homo sapien
tgtggtagcctttagaaccactttg

SEQ ID NO: 3484451 - DNA, 25 bp, Homo sapien
catgaaagccaggtcggtcggtgat

SEQ ID NO: 3484452 - DNA, 25 bp, Homo sapien
gacacttctggtctgggcacttcat

SEQ ID NO: 3484453 - DNA, 25 bp, Homo sapien
ttcgagtactgcaatagcccacggg

SEQ ID NO: 3484454 - DNA, 25 bp, Homo sapien
tcatgctggcatatattcgagtact

SEQ ID NO: 3484455 - DNA, 25 bp, Homo sapien
ctttatctggtattaatcctttgtc

SEQ ID NO: 3484456 - DNA, 25 bp, Homo sapien
agaaagccttttcatctcaccctaa

SEQ ID NO: 3484457 - DNA, 25 bp, Homo sapien
catattgacatgtatagacaaaaag

SEQ ID NO: 3484458 - DNA, 25 bp, Homo sapien
tccattatggcttctaagtttcatg

SEQ ID NO: 3484459 - DNA, 25 bp, Homo sapien
caagatctaggagaaacaggctgac

SEQ ID NO: 3484460 - DNA, 25 bp, Homo sapien
tgttgatactgccaagttgccctcc

SEQ ID NO: 3484461 - DNA, 25 bp, Homo sapien
gcaaatgtgtacctagtgcagtcta

SEQ ID NO: 3484462 - DNA, 25 bp, Homo sapien
tttactctggaacgtgaagctgacg

SEQ ID NO: 3484463 - DNA, 25 bp, Homo sapien
agctgacaatggcattctgggggtc

SEQ ID NO: 3484464 - DNA, 25 bp, Homo sapien
atagtagtgcttatagtcctgagca

SEQ ID NO: 3484465 - DNA, 25 bp, Homo sapien
agtagtgcttatagtcctgagcagt

SEQ ID NO: 3484466 - DNA, 25 bp, Homo sapien
acaatggcattctgggggtcatctt

SEQ ID NO: 3484467 - DNA, 25 bp, Homo sapien
tgtggatggctggatgagaaaatcc

SEQ ID NO: 3484468 - DNA, 25 bp, Homo sapien
caggttgtggatggctggatgagaa

SEQ ID NO: 3484469 - DNA, 25 bp, Homo sapien
tggatggctggatgagaaaatccaa

SEQ ID NO: 3484470 - DNA, 25 bp, Homo sapien
ggttgtggatggctggatgagaaaa

SEQ ID NO: 3484471 - DNA, 25 bp, Homo sapien
gggggccaatactgagccctactgg

SEQ ID NO: 3484472 - DNA, 25 bp, Homo sapien
gccctactggtcgagaagcaggcag

SEQ ID NO: 3484473 - DNA, 25 bp, Homo sapien
tccagagggctaagggggccaatac

SEQ ID NO: 3484474 - DNA, 25 bp, Homo sapien
tgagccctactggtcgagaagcagg

SEQ ID NO: 3484475 - DNA, 25 bp, Homo sapien
gcagaatcaagggaaatcacccttg

SEQ ID NO: 3484476 - DNA, 25 bp, Homo sapien
tgcagaatcaagggaaatcaccctt

SEQ ID NO: 3484477 - DNA, 25 bp, Homo sapien
gaatcaagggaaatcacccttgaga

SEQ ID NO: 3484478 - DNA, 25 bp, Homo sapien
cagaatcaagggaaatcacccttga

SEQ ID NO: 3484479 - DNA, 25 bp, Homo sapien
ggtttgcacacatcaaatttcaccc

SEQ ID NO: 3484480 - DNA, 25 bp, Homo sapien
ctggcagaaggggatcattctgatc

SEQ ID NO: 3484481 - DNA, 25 bp, Homo sapien
ccatctccaggtttgcacacatcaa

SEQ ID NO: 3484482 - DNA, 25 bp, Homo sapien
gctgcatcattctccggcagcccct

SEQ ID NO: 3484483 - DNA, 25 bp, Homo sapien
agttccactgctgctcgggagtctg

SEQ ID NO: 3484484 - DNA, 25 bp, Homo sapien
tccttaagttccactgctgctcggg

SEQ ID NO: 3484485 - DNA, 25 bp, Homo sapien
aaacaattccttaagttccactgct

SEQ ID NO: 3484486 - DNA, 25 bp, Homo sapien
caattccttaagttccactgctgct

SEQ ID NO: 3484487 - DNA, 25 bp, Homo sapien
actgaattgggctaccctgtgatgg

SEQ ID NO: 3484488 - DNA, 25 bp, Homo sapien
tcaatctgaagactgaattgggcta

SEQ ID NO: 3484489 - DNA, 25 bp, Homo sapien
tacatgggctggtaagaagacacaa

SEQ ID NO: 3484490 - DNA, 25 bp, Homo sapien
gcaggtgagtatctaccaagggttc

SEQ ID NO: 3484491 - DNA, 25 bp, Homo sapien
tgctgccttctttcatatacccaaa

SEQ ID NO: 3484492 - DNA, 25 bp, Homo sapien
aaccatcaccacaggaccttccatg

SEQ ID NO: 3484493 - DNA, 25 bp, Homo sapien
cgacaaaaacgatgtggcatctgat

SEQ ID NO: 3484494 - DNA, 25 bp, Homo sapien
tccatgatgaaatacgttagtatct

SEQ ID NO: 3484495 - DNA, 25 bp, Homo sapien
aaaattaagcagcagcctgggttgc

SEQ ID NO: 3484496 - DNA, 25 bp, Homo sapien
tattagagaccgacttagccaggat

SEQ ID NO: 3484497 - DNA, 25 bp, Homo sapien
tgctgctgggtaactaaggcatccc

SEQ ID NO: 3484498 - DNA, 25 bp, Homo sapien
tagcttctcagtttacagtggccag

SEQ ID NO: 3484499 - DNA, 25 bp, Homo sapien
ggtagccaagaactctaagtccaga

SEQ ID NO: 3484500 - DNA, 25 bp, Homo sapien
tgaggacttcctagcattcaactcg

SEQ ID NO: 3484501 - DNA, 25 bp, Homo sapien
ttacaaggaacgttggctcccctga

SEQ ID NO: 3484502 - DNA, 25 bp, Homo sapien
gattatgttaatgacgccatgcaca

SEQ ID NO: 3484503 - DNA, 25 bp, Homo sapien
tactatctatgggtagctttcctcc

SEQ ID NO: 3484504 - DNA, 25 bp, Homo sapien
gaatcttaatgcagtttactgatgg

SEQ ID NO: 3484505 - DNA, 25 bp, Homo sapien
tatatccacttgcaaactgtccttg

SEQ ID NO: 3484506 - DNA, 25 bp, Homo sapien
tagttctacccctctgtagagttcc

SEQ ID NO: 3484507 - DNA, 25 bp, Homo sapien
tccttatgtggaaccgaaatctttc

SEQ ID NO: 3484508 - DNA, 25 bp, Homo sapien
tcctgacaggtggttactgaatctc

SEQ ID NO: 3484509 - DNA, 25 bp, Homo sapien
tctcttcaagcccaaaccaattctg

SEQ ID NO: 3484510 - DNA, 25 bp, Homo sapien
tgggagtagcccagcgaaggcactt

SEQ ID NO: 3484511 - DNA, 25 bp, Homo sapien
gatgagatcaggcgcgttcagggtg

SEQ ID NO: 3484512 - DNA, 25 bp, Homo sapien
cagatgagatcaggcgcgttcaggg

SEQ ID NO: 3484513 - DNA, 25 bp, Homo sapien
tcagatgagatcaggcgcgttcagg

SEQ ID NO: 3484514 - DNA, 25 bp, Homo sapien
tgagatcaggcgcgttcagggtgat

SEQ ID NO: 3484515 - DNA, 25 bp, Homo sapien
gactagccactgatcacagagttca

SEQ ID NO: 3484516 - DNA, 25 bp, Homo sapien
aacagactgtggcttatcggctgca

SEQ ID NO: 3484517 - DNA, 25 bp, Homo sapien
caccatttcccttgagctgactagc

SEQ ID NO: 3484518 - DNA, 25 bp, Homo sapien
tccaccctcgagataaacagactgt

SEQ ID NO: 3484519 - DNA, 25 bp, Homo sapien
tcaagtgatccatgatctgcctgcc

SEQ ID NO: 3484520 - DNA, 25 bp, Homo sapien
ctgcctcacactcccaaagtgctgg

SEQ ID NO: 3484521 - DNA, 25 bp, Homo sapien
agctggtgccgccggttccggttgt

SEQ ID NO: 3484522 - DNA, 25 bp, Homo sapien
tctctccgagctggtgccgccggtt

SEQ ID NO: 3484523 - DNA, 25 bp, Homo sapien
ttctctccgagctggtgccgccggt

SEQ ID NO: 3484524 - DNA, 25 bp, Homo sapien
ccgagctggtgccgccggttccggt

SEQ ID NO: 3484525 - DNA, 25 bp, Homo sapien
aagaagattcccaaatccttgtgga

SEQ ID NO: 3484526 - DNA, 25 bp, Homo sapien
gaaggctctcaaaataggctgctgc

SEQ ID NO: 3484527 - DNA, 25 bp, Homo sapien
tctcgcgtgtcagcccttcaagaag

SEQ ID NO: 3484528 - DNA, 25 bp, Homo sapien
tgcaaaagctggtatattgtccggt

SEQ ID NO: 3484529 - DNA, 25 bp, Homo sapien
catgattgttatagaagcggtcttc

SEQ ID NO: 3484530 - DNA, 25 bp, Homo sapien
tatagaagcggtcttctaccttact

SEQ ID NO: 3484531 - DNA, 25 bp, Homo sapien
ctcgaatgcatgattgttatagaag

SEQ ID NO: 3484532 - DNA, 25 bp, Homo sapien
tagaagcggtcttctaccttactcc

SEQ ID NO: 3484533 - DNA, 25 bp, Homo sapien
taggagagagccacaattagcaatg

SEQ ID NO: 3484534 - DNA, 25 bp, Homo sapien
caattagcaatgtttccaaaatggc

SEQ ID NO: 3484535 - DNA, 25 bp, Homo sapien
cagataggagagagccacaattagc

SEQ ID NO: 3484536 - DNA, 25 bp, Homo sapien
ggacagataggagagagccacaatt

SEQ ID NO: 3484537 - DNA, 25 bp, Homo sapien
ttgtttaggatcacttttctcaggt

SEQ ID NO: 3484538 - DNA, 25 bp, Homo sapien
tctgagactcttcttgtttaggatc

SEQ ID NO: 3484539 - DNA, 25 bp, Homo sapien
cccagatatctgagactcttcttgt

SEQ ID NO: 3484540 - DNA, 25 bp, Homo sapien
tcttgtttaggatcacttttctcag

SEQ ID NO: 3484541 - DNA, 25 bp, Homo sapien
tctggctatgtgtccccggaaggca

SEQ ID NO: 3484542 - DNA, 25 bp, Homo sapien
ttgcctcctctctggctatgtgtcc

SEQ ID NO: 3484543 - DNA, 25 bp, Homo sapien
tcctcattttgaagactatttgttt

SEQ ID NO: 3484544 - DNA, 25 bp, Homo sapien
ggcagcttggattttgacagcagca

SEQ ID NO: 3484545 - DNA, 25 bp, Homo sapien
cataacctctgagatctctgtaatc

SEQ ID NO: 3484546 - DNA, 25 bp, Homo sapien
caagtgtaaacaaactcatgatctc

SEQ ID NO: 3484547 - DNA, 25 bp, Homo sapien
aatccaagggtctctatagataggc

SEQ ID NO: 3484548 - DNA, 25 bp, Homo sapien
caaatgctcatgacagattttcaca

SEQ ID NO: 3484549 - DNA, 25 bp, Homo sapien
gtattcactactaattcccagcaca

SEQ ID NO: 3484550 - DNA, 25 bp, Homo sapien
tgaaattctttaccactaggagtga

SEQ ID NO: 3484551 - DNA, 25 bp, Homo sapien
gaagaaggcagcatgatatgatagc

SEQ ID NO: 3484552 - DNA, 25 bp, Homo sapien
tgggttaaacttacaaggaggcaga

SEQ ID NO: 3484553 - DNA, 25 bp, Homo sapien
caatccgctaagcaggatggctctg

SEQ ID NO: 3484554 - DNA, 25 bp, Homo sapien
tcagtggaatgggagggacgaacag

SEQ ID NO: 3484555 - DNA, 25 bp, Homo sapien
cagggaatctaagtctttgcataaa

SEQ ID NO: 3484556 - DNA, 25 bp, Homo sapien
ccccttgacaatccgctaagcagga

SEQ ID NO: 3484557 - DNA, 25 bp, Homo sapien
tatagaagttcgcaggcagaggaga

SEQ ID NO: 3484558 - DNA, 25 bp, Homo sapien
tcgaaagactgagcctaagggcact

SEQ ID NO: 3484559 - DNA, 25 bp, Homo sapien
tatcatgggaactaggaccaaggcg

SEQ ID NO: 3484560 - DNA, 25 bp, Homo sapien
tattttataggtacagcccacaggt

SEQ ID NO: 3484561 - DNA, 25 bp, Homo sapien
cttgggcccacagcctgaagcagac

SEQ ID NO: 3484562 - DNA, 25 bp, Homo sapien
tgagaagagcttgtcctggataacg

SEQ ID NO: 3484563 - DNA, 25 bp, Homo sapien
gaaatattcttgcatgctgggtttt

SEQ ID NO: 3484564 - DNA, 25 bp, Homo sapien
aggacacgtgaagcagaggcactgt

SEQ ID NO: 3484565 - DNA, 25 bp, Homo sapien
gaacagtgtatttcctcatcctcct

SEQ ID NO: 3484566 - DNA, 25 bp, Homo sapien
tattggtgaacagtgtatttcctca

SEQ ID NO: 3484567 - DNA, 25 bp, Homo sapien
cagtgtatttcctcatcctcctcac

SEQ ID NO: 3484568 - DNA, 25 bp, Homo sapien
ctattggtgaacagtgtatttcctc

SEQ ID NO: 3484569 - DNA, 25 bp, Homo sapien
tcctaattgttatggaccagtggct

SEQ ID NO: 3484570 - DNA, 25 bp, Homo sapien
gtaccggtaccagctaaaatagaca

SEQ ID NO: 3484571 - DNA, 25 bp, Homo sapien
caggcagaaagcaggttgaagaacc

SEQ ID NO: 3484572 - DNA, 25 bp, Homo sapien
gattccctagagtgtagaacaaaga

SEQ ID NO: 3484573 - DNA, 25 bp, Homo sapien
tgctgagatcgaagctccctgtgtc

SEQ ID NO: 3484574 - DNA, 25 bp, Homo sapien
gaaatcaggtcatcctctgcaaagg

SEQ ID NO: 3484575 - DNA, 25 bp, Homo sapien
gcttatttgcaatctcctggagtcc

SEQ ID NO: 3484576 - DNA, 25 bp, Homo sapien
tgtgggctcagcatatgaggtcccc

SEQ ID NO: 3484577 - DNA, 25 bp, Homo sapien
aaggaggacccatgctaggttctcc

SEQ ID NO: 3484578 - DNA, 25 bp, Homo sapien
gaggacccatgctaggttctcccct

SEQ ID NO: 3484579 - DNA, 25 bp, Homo sapien
ggaggacccatgctaggttctcccc

SEQ ID NO: 3484580 - DNA, 25 bp, Homo sapien
ggaaggaggacccatgctaggttct

SEQ ID NO: 3484581 - DNA, 25 bp, Homo sapien
attgtttaaaacaatcgacttgcct

SEQ ID NO: 3484582 - DNA, 25 bp, Homo sapien
cacagcgctaaaagctccctcatgg

SEQ ID NO: 3484583 - DNA, 25 bp, Homo sapien
gcgctaaaagctccctcatggtaga

SEQ ID NO: 3484584 - DNA, 25 bp, Homo sapien
tgccttcctccacagcgctaaaagc

SEQ ID NO: 3484585 - DNA, 25 bp, Homo sapien
gtgttctgtgatctttacaaccaca

SEQ ID NO: 3484586 - DNA, 25 bp, Homo sapien
tgttctgtgatctttacaaccacac

SEQ ID NO: 3484587 - DNA, 25 bp, Homo sapien
gacgcttgttccattaaggaccatg

SEQ ID NO: 3484588 - DNA, 25 bp, Homo sapien
gcagggttattctctgaccagggct

SEQ ID NO: 3484589 - DNA, 25 bp, Homo sapien
ttggcaatactttgctccgcacagc

SEQ ID NO: 3484590 - DNA, 25 bp, Homo sapien
gctttgcagcgtatgcgtgggaaca

SEQ ID NO: 3484591 - DNA, 25 bp, Homo sapien
cagaagggctctctagacaagaggg

SEQ ID NO: 3484592 - DNA, 25 bp, Homo sapien
cactgggaatcaggttccgggcact

SEQ ID NO: 3484593 - DNA, 25 bp, Homo sapien
caagagggccgaggtcaaggatccc

SEQ ID NO: 3484594 - DNA, 25 bp, Homo sapien
ctggctgctctcattttgttgcaga

SEQ ID NO: 3484595 - DNA, 25 bp, Homo sapien
gccccgagggattgaaggcaactaa

SEQ ID NO: 3484596 - DNA, 25 bp, Homo sapien
ggctgggtaataatgcctgtcattt

SEQ ID NO: 3484597 - DNA, 25 bp, Homo sapien
cccaaattgtggagctggcaaggca

SEQ ID NO: 3484598 - DNA, 25 bp, Homo sapien
caccagtgttcctgggctgggtaat

SEQ ID NO: 3484599 - DNA, 25 bp, Homo sapien
tgttgtagtatttttagcaacctgg

SEQ ID NO: 3484600 - DNA, 25 bp, Homo sapien
ttttagcaacctggttggcagagga

SEQ ID NO: 3484601 - DNA, 25 bp, Homo sapien
tagtatttttagcaacctggttggc

SEQ ID NO: 3484602 - DNA, 25 bp, Homo sapien
tgctgttgtagtatttttagcaacc

SEQ ID NO: 3484603 - DNA, 25 bp, Homo sapien
tgtctctgaacactggagggcccat

SEQ ID NO: 3484604 - DNA, 25 bp, Homo sapien
tgtcagttccatccgcaaagcaacc

SEQ ID NO: 3484605 - DNA, 25 bp, Homo sapien
gagggcccataggagaacagatacg

SEQ ID NO: 3484606 - DNA, 25 bp, Homo sapien
actcaaggcgcctacgcagaactgg

SEQ ID NO: 3484607 - DNA, 25 bp, Homo sapien
cgggtccggtctcccgcgctcggct

SEQ ID NO: 3484608 - DNA, 25 bp, Homo sapien
ctctgctctcgggtccggtctcccg

SEQ ID NO: 3484609 - DNA, 25 bp, Homo sapien
cccgcggccgggaagccaatcagga

SEQ ID NO: 3484610 - DNA, 25 bp, Homo sapien
ggctccgctcgcgaatgtaacctga

SEQ ID NO: 3484611 - DNA, 25 bp, Homo sapien
gcaggcactcctggagtggccgcct

SEQ ID NO: 3484612 - DNA, 25 bp, Homo sapien
gctctcagagggtacctccagctca

SEQ ID NO: 3484613 - DNA, 25 bp, Homo sapien
tcactgggtcttgatccgcgggagt

SEQ ID NO: 3484614 - DNA, 25 bp, Homo sapien
cgacaggcgaagaaggttcagggcc

SEQ ID NO: 3484615 - DNA, 25 bp, Homo sapien
gatgtctagaatgtcgtcgtccggc

SEQ ID NO: 3484616 - DNA, 25 bp, Homo sapien
ccagcgggatgtctagaatgtcgtc

SEQ ID NO: 3484617 - DNA, 25 bp, Homo sapien
cgcctggattttggcggcggccgcg

SEQ ID NO: 3484618 - DNA, 25 bp, Homo sapien
tcgtccagcgggatgtctagaatgt

SEQ ID NO: 3484619 - DNA, 25 bp, Homo sapien
ttcttccgcgccatgtggccccgaa

SEQ ID NO: 3484620 - DNA, 25 bp, Homo sapien
cttccgcgccatgtggccccgaaaa

SEQ ID NO: 3484621 - DNA, 25 bp, Homo sapien
ttccgcgccatgtggccccgaaaac

SEQ ID NO: 3484622 - DNA, 25 bp, Homo sapien
tcttccgcgccatgtggccccgaaa

SEQ ID NO: 3484623 - DNA, 25 bp, Homo sapien
gggaccatactagactgcagaacta

SEQ ID NO: 3484624 - DNA, 25 bp, Homo sapien
gcagaactaactaaaagggcacgga

SEQ ID NO: 3484625 - DNA, 25 bp, Homo sapien
gctgcgcacagaacgaaagaactcg

SEQ ID NO: 3484626 - DNA, 25 bp, Homo sapien
tcttccggtcagagcaagggtcgtc

SEQ ID NO: 3484627 - DNA, 25 bp, Homo sapien
gtggaagactcctcctaccgagcct

SEQ ID NO: 3484628 - DNA, 25 bp, Homo sapien
caggcgctcggcgtttgcataaaca

SEQ ID NO: 3484629 - DNA, 25 bp, Homo sapien
tgttcacattccaacccagcacagt

SEQ ID NO: 3484630 - DNA, 25 bp, Homo sapien
gatcagaaacctttcggccacagcc

SEQ ID NO: 3484631 - DNA, 25 bp, Homo sapien
cttgttcaagttgcaagcggaggcc

SEQ ID NO: 3484632 - DNA, 25 bp, Homo sapien
gattgttggtttctggtttggccca

SEQ ID NO: 3484633 - DNA, 25 bp, Homo sapien
gcggaggccttgtgcacccaaactc

SEQ ID NO: 3484634 - DNA, 25 bp, Homo sapien
ccaaggaggcttgttcaagttgcaa

SEQ ID NO: 3484635 - DNA, 25 bp, Homo sapien
cacacttgtatgagggctgattcta

SEQ ID NO: 3484636 - DNA, 25 bp, Homo sapien
ggtatggcgaattcctctaggcggc

SEQ ID NO: 3484637 - DNA, 25 bp, Homo sapien
tatggtcgtgtgacttctcccgatc

SEQ ID NO: 3484638 - DNA, 25 bp, Homo sapien
tctaggcggctcagagtattaacag

SEQ ID NO: 3484639 - DNA, 25 bp, Homo sapien
ggtggagtcctcagattacctggac

SEQ ID NO: 3484640 - DNA, 25 bp, Homo sapien
gaaatcaccgggaactagttataca

SEQ ID NO: 3484641 - DNA, 25 bp, Homo sapien
tctaggatagggatcagagcaacat

SEQ ID NO: 3484642 - DNA, 25 bp, Homo sapien
gaaactgcctctgtcatccacttta

SEQ ID NO: 3484643 - DNA, 25 bp, Homo sapien
aaatgtgctgtcctcgtagagctgc

SEQ ID NO: 3484644 - DNA, 25 bp, Homo sapien
aaaaattagttgctccctgacagga

SEQ ID NO: 3484645 - DNA, 25 bp, Homo sapien
cctctagatgaggtgtctggccagc

SEQ ID NO: 3484646 - DNA, 25 bp, Homo sapien
tgaatgagtcgtggaacacttcctc

SEQ ID NO: 3484647 - DNA, 25 bp, Homo sapien
cagtaatcccttatgcagtcagagt

SEQ ID NO: 3484648 - DNA, 25 bp, Homo sapien
gcagcatggttcaaggtaagggccc

SEQ ID NO: 3484649 - DNA, 25 bp, Homo sapien
tggacaaacctctgtgggaggctct

SEQ ID NO: 3484650 - DNA, 25 bp, Homo sapien
cgtattatccgttccatgactaggg

SEQ ID NO: 3484651 - DNA, 25 bp, Homo sapien
tattgatataacctgtcaggctggc

SEQ ID NO: 3484652 - DNA, 25 bp, Homo sapien
cagtaagacctaagtgtccaggaga

SEQ ID NO: 3484653 - DNA, 25 bp, Homo sapien
gtatgatgaccccaccactcattgg

SEQ ID NO: 3484654 - DNA, 25 bp, Homo sapien
ggcctgagtcatgggaaagagtcac

SEQ ID NO: 3484655 - DNA, 25 bp, Homo sapien
tagggaggatgccattgctccccgg

SEQ ID NO: 3484656 - DNA, 25 bp, Homo sapien
tgaaacatcattcctatgggcaggt

SEQ ID NO: 3484657 - DNA, 25 bp, Homo sapien
gcaggcagaggtggtatataagacc

SEQ ID NO: 3484658 - DNA, 25 bp, Homo sapien
aaaggagtactgaagtgtgcaggca

SEQ ID NO: 3484659 - DNA, 25 bp, Homo sapien
gatgtcatccgtgggtctttaagcc

SEQ ID NO: 3484660 - DNA, 25 bp, Homo sapien
tgcccaatgtaatgtgacgctggaa

SEQ ID NO: 3484661 - DNA, 25 bp, Homo sapien
gagtctatgtctgcaaggcccacaa

SEQ ID NO: 3484662 - DNA, 25 bp, Homo sapien
ggagcttcccctgatcaaatgtttg

SEQ ID NO: 3484663 - DNA, 25 bp, Homo sapien
ccccgaagggcaaaggatgagtatt

SEQ ID NO: 3484664 - DNA, 25 bp, Homo sapien
tgtctagagaccgtcgttcgcgctg

SEQ ID NO: 3484665 - DNA, 25 bp, Homo sapien
tccgaggagctttctgggtttcaac

SEQ ID NO: 3484666 - DNA, 25 bp, Homo sapien
gagtatttctggacgccgtggtgca

SEQ ID NO: 3484667 - DNA, 25 bp, Homo sapien
caagttgactgcctgagtgtcccag

SEQ ID NO: 3484668 - DNA, 25 bp, Homo sapien
cctagtttctgacagggcgaagggc

SEQ ID NO: 3484669 - DNA, 25 bp, Homo sapien
gaccagttggtgacttccgagccag

SEQ ID NO: 3484670 - DNA, 25 bp, Homo sapien
cagagatgaggatcaccagtgtccc

SEQ ID NO: 3484671 - DNA, 25 bp, Homo sapien
ctcacccctccctgcgtccagacct

SEQ ID NO: 3484672 - DNA, 25 bp, Homo sapien
tcacagcgaccaagatctagtctcg

SEQ ID NO: 3484673 - DNA, 25 bp, Homo sapien
ctaagctgggagcagcacgcacgtt

SEQ ID NO: 3484674 - DNA, 25 bp, Homo sapien
cctgctcggagtatgaggcacaggc

SEQ ID NO: 3484675 - DNA, 25 bp, Homo sapien
ttaaaggatcagagcgcgcctgagc

SEQ ID NO: 3484676 - DNA, 25 bp, Homo sapien
tactttaagtgagccgcaaatccag

SEQ ID NO: 3484677 - DNA, 25 bp, Homo sapien
cagagatttctaatgggccaaccac

SEQ ID NO: 3484678 - DNA, 25 bp, Homo sapien
gatcactttggtctcatggcaggaa

SEQ ID NO: 3484679 - DNA, 25 bp, Homo sapien
taaaacgttgccactgacgagtccc

SEQ ID NO: 3484680 - DNA, 25 bp, Homo sapien
tttacaaccctgaataaataagcaa

SEQ ID NO: 3484681 - DNA, 25 bp, Homo sapien
cacccttagctactattgtatataa

SEQ ID NO: 3484682 - DNA, 25 bp, Homo sapien
cttgattcacagttaaaaagacttt

SEQ ID NO: 3484683 - DNA, 25 bp, Homo sapien
gcaatagataatggcaagttaaatc

SEQ ID NO: 3484684 - DNA, 25 bp, Homo sapien
tgaggtcaggactctacagcagtgc

SEQ ID NO: 3484685 - DNA, 25 bp, Homo sapien
tcagcacaagcctcattacaggtgg

SEQ ID NO: 3484686 - DNA, 25 bp, Homo sapien
gatgccgccgtcagactcttcatgg

SEQ ID NO: 3484687 - DNA, 25 bp, Homo sapien
cagaactgtattgtggatcccggag

SEQ ID NO: 3484688 - DNA, 25 bp, Homo sapien
gctcactgtgagcacctgtaattcc

SEQ ID NO: 3484689 - DNA, 25 bp, Homo sapien
ctgtaattccagcccgagtaggtgg

SEQ ID NO: 3484690 - DNA, 25 bp, Homo sapien
gtaattccagcccgagtaggtggga

SEQ ID NO: 3484691 - DNA, 25 bp, Homo sapien
cttggctcactgtgagcacctgtaa

SEQ ID NO: 3484692 - DNA, 25 bp, Homo sapien
gcggtggcacgatcacctcaacctc

SEQ ID NO: 3484693 - DNA, 25 bp, Homo sapien
tggcagtatagccagatgtttgtga

SEQ ID NO: 3484694 - DNA, 25 bp, Homo sapien
aaagtcaaagaagctatggcagtat

SEQ ID NO: 3484695 - DNA, 25 bp, Homo sapien
tggcttttatctataaaggaagaac

SEQ ID NO: 3484696 - DNA, 25 bp, Homo sapien
cacttagtaggatgtgttgttacgc

SEQ ID NO: 3484697 - DNA, 25 bp, Homo sapien
ggtattttagaaacaacagccatca

SEQ ID NO: 3484698 - DNA, 25 bp, Homo sapien
gaaagatgtctgctgtggaaaaagg

SEQ ID NO: 3484699 - DNA, 25 bp, Homo sapien
tcctaatcaatgcagagttcccctc

SEQ ID NO: 3484700 - DNA, 25 bp, Homo sapien
atgctggtgcaaagaaagtctggaa

SEQ ID NO: 3484701 - DNA, 25 bp, Homo sapien
aatgctggtgcaaagaaagtctgga

SEQ ID NO: 3484702 - DNA, 25 bp, Homo sapien
aagtctggaaggatggaagctgccg

SEQ ID NO: 3484703 - DNA, 25 bp, Homo sapien
cagacactccagctgtagagcctct

SEQ ID NO: 3484704 - DNA, 25 bp, Homo sapien
tccagctgtagagcctctttcataa

SEQ ID NO: 3484705 - DNA, 25 bp, Homo sapien
cataacagtatacacagtgaatgca

SEQ ID NO: 3484706 - DNA, 25 bp, Homo sapien
cacagtgaatgcacctaacacaata

SEQ ID NO: 3484707 - DNA, 25 bp, Homo sapien
catcaacagatagtgcctactgcag

SEQ ID NO: 3484708 - DNA, 25 bp, Homo sapien
cctaggctttcaaaaggtggatcct

SEQ ID NO: 3484709 - DNA, 25 bp, Homo sapien
ggtagtataccatcaccttcaagat

SEQ ID NO: 3484710 - DNA, 25 bp, Homo sapien
aaatgctaaggtctgaaataaggtc

SEQ ID NO: 3484711 - DNA, 25 bp, Homo sapien
taaaacggatgtgtttgacactgcc

SEQ ID NO: 3484712 - DNA, 25 bp, Homo sapien
tgtctactaacaattccagcccaat

SEQ ID NO: 3484713 - DNA, 25 bp, Homo sapien
agaaagctgagccttattgcaccct

SEQ ID NO: 3484714 - DNA, 25 bp, Homo sapien
tgcaaaccttcctttagtcagataa

SEQ ID NO: 3484715 - DNA, 25 bp, Homo sapien
gaatgataagctctctaaggacagg

SEQ ID NO: 3484716 - DNA, 25 bp, Homo sapien
tcccaatcacgcagaaaaagtgtgt

SEQ ID NO: 3484717 - DNA, 25 bp, Homo sapien
tcaaccagggagtatctaattgggt

SEQ ID NO: 3484718 - DNA, 25 bp, Homo sapien
tactgtcttggctagcgtctatcca

SEQ ID NO: 3484719 - DNA, 25 bp, Homo sapien
tgaaaagctacagcgtacgaactct

SEQ ID NO: 3484720 - DNA, 25 bp, Homo sapien
tagacaactgtaccaacgcaataga

SEQ ID NO: 3484721 - DNA, 25 bp, Homo sapien
tgcaacttccaaagcacggaggatg

SEQ ID NO: 3484722 - DNA, 25 bp, Homo sapien
tctgcacctagaggccggcttagag

SEQ ID NO: 3484723 - DNA, 25 bp, Homo sapien
cagtgtacattgctcggacgcacca

SEQ ID NO: 3484724 - DNA, 25 bp, Homo sapien
gcattcattggtcagcatcctcagt

SEQ ID NO: 3484725 - DNA, 25 bp, Homo sapien
cagcactttaaggaacgtttcagga

SEQ ID NO: 3484726 - DNA, 25 bp, Homo sapien
ggctaatgagggacaaaagactaca

SEQ ID NO: 3484727 - DNA, 25 bp, Homo sapien
gcactgagagcttggttaagtaact

SEQ ID NO: 3484728 - DNA, 25 bp, Homo sapien
catattcttaactgaggtgctagac

SEQ ID NO: 3484729 - DNA, 25 bp, Homo sapien
taagtaactttgctgaggtcgcaga

SEQ ID NO: 3484730 - DNA, 25 bp, Homo sapien
caacaatgctgtgacgtcatcctca

SEQ ID NO: 3484731 - DNA, 25 bp, Homo sapien
caactgctccatcaggattactaga

SEQ ID NO: 3484732 - DNA, 25 bp, Homo sapien
tgacgtgcaatgatatacaatttta

SEQ ID NO: 3484733 - DNA, 25 bp, Homo sapien
tcaggattactagatacaaaataag

SEQ ID NO: 3484734 - DNA, 25 bp, Homo sapien
aaaaagagaatgacgtgcaatgata

SEQ ID NO: 3484735 - DNA, 25 bp, Homo sapien
tggggtcacctcaacacttctccat

SEQ ID NO: 3484736 - DNA, 25 bp, Homo sapien
tccggtatggttgtcgtcagctggt

SEQ ID NO: 3484737 - DNA, 25 bp, Homo sapien
cagctctcaggatctccggtatggt

SEQ ID NO: 3484738 - DNA, 25 bp, Homo sapien
cacttctccattcacaagtctggag

SEQ ID NO: 3484739 - DNA, 25 bp, Homo sapien
ttccaattattgaagatagaagggt

SEQ ID NO: 3484740 - DNA, 25 bp, Homo sapien
cagcgtttcataaactttgtctggg

SEQ ID NO: 3484741 - DNA, 25 bp, Homo sapien
gtccttgattgtctgatgtcctatg

SEQ ID NO: 3484742 - DNA, 25 bp, Homo sapien
gtcctatgtcttgaaaaccagcgtt

SEQ ID NO: 3484743 - DNA, 25 bp, Homo sapien
taaaacttgccaccagatagagctg

SEQ ID NO: 3484744 - DNA, 25 bp, Homo sapien
gttttgatatgagtccccagcaaca

SEQ ID NO: 3484745 - DNA, 25 bp, Homo sapien
gacaagtgttcagtgcagcaaagag

SEQ ID NO: 3484746 - DNA, 25 bp, Homo sapien
ccaatttggctggtgagaactgaaa

SEQ ID NO: 3484747 - DNA, 25 bp, Homo sapien
aggagctgcccgctgttaacgacac

SEQ ID NO: 3484748 - DNA, 25 bp, Homo sapien
aagcgctggctctctacaaggtcct

SEQ ID NO: 3484749 - DNA, 25 bp, Homo sapien
ctcttagggagcatggtctgacttc

SEQ ID NO: 3484750 - DNA, 25 bp, Homo sapien
taacgacacttgtgaggagcacaga

SEQ ID NO: 3484751 - DNA, 25 bp, Homo sapien
tattgagtgtctagtattgcctgga

SEQ ID NO: 3484752 - DNA, 25 bp, Homo sapien
taatcaatccctaactgctaacaag

SEQ ID NO: 3484753 - DNA, 25 bp, Homo sapien
gccaggtattacataaacatgtaca

SEQ ID NO: 3484754 - DNA, 25 bp, Homo sapien
tactccagcatggtattttgccagg

SEQ ID NO: 3484755 - DNA, 25 bp, Homo sapien
actgctaacaagtcacagtccaaga

SEQ ID NO: 3484756 - DNA, 25 bp, Homo sapien
atcgcttaagccctgcagattgagg

SEQ ID NO: 3484757 - DNA, 25 bp, Homo sapien
tagacccaaggtcagatagtcctgg

SEQ ID NO: 3484758 - DNA, 25 bp, Homo sapien
gatagaactctgactgacttaacga

SEQ ID NO: 3484759 - DNA, 25 bp, Homo sapien
caaatatgctggtcatggtagtgca

SEQ ID NO: 3484760 - DNA, 25 bp, Homo sapien
tgtggcagagaggagcattaaacaa

SEQ ID NO: 3484761 - DNA, 25 bp, Homo sapien
cagagaggagcattaaacaaagcca

SEQ ID NO: 3484762 - DNA, 25 bp, Homo sapien
acagggaacgcggtagtgtggcaga

SEQ ID NO: 3484763 - DNA, 25 bp, Homo sapien
gaacgcggtagtgtggcagagagga

SEQ ID NO: 3484764 - DNA, 25 bp, Homo sapien
tgtcaggtcctttcccagaggttcc

SEQ ID NO: 3484765 - DNA, 25 bp, Homo sapien
caggtcctttcccagaggttcccat

SEQ ID NO: 3484766 - DNA, 25 bp, Homo sapien
ttctggtcccttgtcaggtcctttc

SEQ ID NO: 3484767 - DNA, 25 bp, Homo sapien
tggtcccttgtcaggtcctttccca

SEQ ID NO: 3484768 - DNA, 25 bp, Homo sapien
caaaccatcagtggtaggacccctt

SEQ ID NO: 3484769 - DNA, 25 bp, Homo sapien
tcagtggtaggaccccttactacta

SEQ ID NO: 3484770 - DNA, 25 bp, Homo sapien
tgtaaattgcccgtgagtccaaacc

SEQ ID NO: 3484771 - DNA, 25 bp, Homo sapien
ttactactagactttgattccccaa

SEQ ID NO: 3484772 - DNA, 25 bp, Homo sapien
actgccatgcggtcgtttgcatcaa

SEQ ID NO: 3484773 - DNA, 25 bp, Homo sapien
cagcgagcctactgccatgcggtcg

SEQ ID NO: 3484774 - DNA, 25 bp, Homo sapien
gtttgcatcaagtcccttccctgca

SEQ ID NO: 3484775 - DNA, 25 bp, Homo sapien
agcagccctaatatctcctgggcat

SEQ ID NO: 3484776 - DNA, 25 bp, Homo sapien
gagctgattggcttccggtctcaaa

SEQ ID NO: 3484777 - DNA, 25 bp, Homo sapien
gagcgatatggagttgtagatccca

SEQ ID NO: 3484778 - DNA, 25 bp, Homo sapien
actcatccagaggaaattggctcat

SEQ ID NO: 3484779 - DNA, 25 bp, Homo sapien
caaatcattctcgactggagagcga

SEQ ID NO: 3484780 - DNA, 25 bp, Homo sapien
gcatctctgatgctctcccagtggg

SEQ ID NO: 3484781 - DNA, 25 bp, Homo sapien
tctctgatgctctcccagtgggagt

SEQ ID NO: 3484782 - DNA, 25 bp, Homo sapien
tgatgctctcccagtgggagtgccc

SEQ ID NO: 3484783 - DNA, 25 bp, Homo sapien
tgctctcccagtgggagtgccccaa

SEQ ID NO: 3484784 - DNA, 25 bp, Homo sapien
tgctcgtctgcattatggattaacc

SEQ ID NO: 3484785 - DNA, 25 bp, Homo sapien
ctgggcttcattagggcagtggcac

SEQ ID NO: 3484786 - DNA, 25 bp, Homo sapien
tgcattatggattaacccatctggg

SEQ ID NO: 3484787 - DNA, 25 bp, Homo sapien
gccagttacttgctcgtctgcatta

SEQ ID NO: 3484788 - DNA, 25 bp, Homo sapien
tgtgtgccgggctgggttggggccg

SEQ ID NO: 3484789 - DNA, 25 bp, Homo sapien
tgtgccgggctgggttggggccggc

SEQ ID NO: 3484790 - DNA, 25 bp, Homo sapien
tgccgggctgggttggggccggcac

SEQ ID NO: 3484791 - DNA, 25 bp, Homo sapien
atgtgtgccgggctgggttggggcc

SEQ ID NO: 3484792 - DNA, 25 bp, Homo sapien
ggaatcagagagcaaagagcaggca

SEQ ID NO: 3484793 - DNA, 25 bp, Homo sapien
gaaccaaacaggagggggaatcaga

SEQ ID NO: 3484794 - DNA, 25 bp, Homo sapien
ccccactagggtatgcctgtgaatg

SEQ ID NO: 3484795 - DNA, 25 bp, Homo sapien
tgctggcttcagagtgatgatgcca

SEQ ID NO: 3484796 - DNA, 25 bp, Homo sapien
tttcttggcctagtgccagcatatc

SEQ ID NO: 3484797 - DNA, 25 bp, Homo sapien
tagtgccagcatatcggccagagaa

SEQ ID NO: 3484798 - DNA, 25 bp, Homo sapien
ggcttcttggtggtctaaagcctgc

SEQ ID NO: 3484799 - DNA, 25 bp, Homo sapien
gcctagtgccagcatatcggccaga

SEQ ID NO: 3484800 - DNA, 25 bp, Homo sapien
gaggctccggggccctttgctccgc

SEQ ID NO: 3484801 - DNA, 25 bp, Homo sapien
cgaggctccggggccctttgctccg

SEQ ID NO: 3484802 - DNA, 25 bp, Homo sapien
cagtcgcggtctgcttctgactttt

SEQ ID NO: 3484803 - DNA, 25 bp, Homo sapien
tctttctacctgaagacccacctcg

SEQ ID NO: 3484804 - DNA, 25 bp, Homo sapien
cacttccagtcgcggtctgcttctg

SEQ ID NO: 3484805 - DNA, 25 bp, Homo sapien
agacccacctcgacaaactcacttt

SEQ ID NO: 3484806 - DNA, 25 bp, Homo sapien
tgaggcaaagcgcaagcaatgctcc

SEQ ID NO: 3484807 - DNA, 25 bp, Homo sapien
aaagcgcaagcaatgctccttgctg

SEQ ID NO: 3484808 - DNA, 25 bp, Homo sapien
actgaggcaaagcgcaagcaatgct

SEQ ID NO: 3484809 - DNA, 25 bp, Homo sapien
ggcaaagcgcaagcaatgctccttg

SEQ ID NO: 3484810 - DNA, 25 bp, Homo sapien
caagcccagcgttccgttctggacg

SEQ ID NO: 3484811 - DNA, 25 bp, Homo sapien
ccttctgcccaactttagaacagga

SEQ ID NO: 3484812 - DNA, 25 bp, Homo sapien
tggacgcggcgagagattttccctg

SEQ ID NO: 3484813 - DNA, 25 bp, Homo sapien
ggacgaggctctgtcggactctgcc

SEQ ID NO: 3484814 - DNA, 25 bp, Homo sapien
tagcgcgcgagttggagtccccgcc

SEQ ID NO: 3484815 - DNA, 25 bp, Homo sapien
acacgagtagcgtagcgcgcgagtt

SEQ ID NO: 3484816 - DNA, 25 bp, Homo sapien
ctctacagtcactatccgagcagga

SEQ ID NO: 3484817 - DNA, 25 bp, Homo sapien
ccgagcaggagacacgagtagcgta

SEQ ID NO: 3484818 - DNA, 25 bp, Homo sapien
tgggtacggtcggtgcctcttcgtg

SEQ ID NO: 3484819 - DNA, 25 bp, Homo sapien
tacggtcggtgcctcttcgtgccct

SEQ ID NO: 3484820 - DNA, 25 bp, Homo sapien
ggtacggtcggtgcctcttcgtgcc

SEQ ID NO: 3484821 - DNA, 25 bp, Homo sapien
ctgggtacggtcggtgcctcttcgt

SEQ ID NO: 3484822 - DNA, 25 bp, Homo sapien
gggctgggagccgtaagcccctcca

SEQ ID NO: 3484823 - DNA, 25 bp, Homo sapien
cgtgggctgggagccgtaagcccct

SEQ ID NO: 3484824 - DNA, 25 bp, Homo sapien
cccctgggtctgagacccgtgggct

SEQ ID NO: 3484825 - DNA, 25 bp, Homo sapien
gctcgacccagctgggatcgggact

SEQ ID NO: 3484826 - DNA, 25 bp, Homo sapien
gatgtccccggccagagagtccgcg

SEQ ID NO: 3484827 - DNA, 25 bp, Homo sapien
ttgagagagggatcgccgggaggca

SEQ ID NO: 3484828 - DNA, 25 bp, Homo sapien
agcagggtgtggttgagcgccgcca

SEQ ID NO: 3484829 - DNA, 25 bp, Homo sapien
gagagtccgcgaacaagttcatctg

SEQ ID NO: 3484830 - DNA, 25 bp, Homo sapien
atcccaggatcccatatccccaaga

SEQ ID NO: 3484831 - DNA, 25 bp, Homo sapien
ccatcccaggatcccatatccccaa

SEQ ID NO: 3484832 - DNA, 25 bp, Homo sapien
tccccatcccaggatcccatatccc

SEQ ID NO: 3484833 - DNA, 25 bp, Homo sapien
catccccatcccaggatcccatatc

SEQ ID NO: 3484834 - DNA, 25 bp, Homo sapien
ccagcacagtgctcgtcactagact

SEQ ID NO: 3484835 - DNA, 25 bp, Homo sapien
ctggagggaaccacacgcgaaagcg

SEQ ID NO: 3484836 - DNA, 25 bp, Homo sapien
ccacacgcgaaagcgcccggtaaag

SEQ ID NO: 3484837 - DNA, 25 bp, Homo sapien
cactagactcgagtgggtcgaggca

SEQ ID NO: 3484838 - DNA, 25 bp, Homo sapien
ttgccagggtctcctttctctccac

SEQ ID NO: 3484839 - DNA, 25 bp, Homo sapien
atattgccagggtctcctttctctc

SEQ ID NO: 3484840 - DNA, 25 bp, Homo sapien
attgccagggtctcctttctctcca

SEQ ID NO: 3484841 - DNA, 25 bp, Homo sapien
tattgccagggtctcctttctctcc

SEQ ID NO: 3484842 - DNA, 25 bp, Homo sapien
ttctgcagcacggttaggatcccgg

SEQ ID NO: 3484843 - DNA, 25 bp, Homo sapien
tgcagcacggttaggatcccggagc

SEQ ID NO: 3484844 - DNA, 25 bp, Homo sapien
gcctgttatactccggcactctcag

SEQ ID NO: 3484845 - DNA, 25 bp, Homo sapien
taggatcccggagcctgttatactc

SEQ ID NO: 3484846 - DNA, 25 bp, Homo sapien
cctgcactggttcacggatcgtcct

SEQ ID NO: 3484847 - DNA, 25 bp, Homo sapien
gcactggagccaacagtttgttctt

SEQ ID NO: 3484848 - DNA, 25 bp, Homo sapien
taaaccgtgcactggagccaacagt

SEQ ID NO: 3484849 - DNA, 25 bp, Homo sapien
tgctcagtgaaagaccataaaccgt

SEQ ID NO: 3484850 - DNA, 25 bp, Homo sapien
cacaaacttctaggccggctttctg

SEQ ID NO: 3484851 - DNA, 25 bp, Homo sapien
cctgccaagtttaagcgggagtggc

SEQ ID NO: 3484852 - DNA, 25 bp, Homo sapien
ttagtagagggatcgggacacaaac

SEQ ID NO: 3484853 - DNA, 25 bp, Homo sapien
ggaagatgcctacagacaggccggt

SEQ ID NO: 3484854 - DNA, 25 bp, Homo sapien
tctggtcgttccatctcctatgctt

SEQ ID NO: 3484855 - DNA, 25 bp, Homo sapien
tctccctctgcaggatccaatatgt

SEQ ID NO: 3484856 - DNA, 25 bp, Homo sapien
agagggaaagagaatcctctggtcg

SEQ ID NO: 3484857 - DNA, 25 bp, Homo sapien
gggtggcgcagagcgttcagacagg

SEQ ID NO: 3484858 - DNA, 25 bp, Homo sapien
gcctcgggagaccagcagatctggc

SEQ ID NO: 3484859 - DNA, 25 bp, Homo sapien
ttgtaccactcaatgttgggtcggg

SEQ ID NO: 3484860 - DNA, 25 bp, Homo sapien
aagtgtagacaccttcgtccggccg

SEQ ID NO: 3484861 - DNA, 25 bp, Homo sapien
ccaggtagttgcgagccacgcaagt

SEQ ID NO: 3484862 - DNA, 25 bp, Homo sapien
ggggggcacgcattccagtactgct

SEQ ID NO: 3484863 - DNA, 25 bp, Homo sapien
gactgccggaaatcatcacggagga

SEQ ID NO: 3484864 - DNA, 25 bp, Homo sapien
caccacgtttccaggagactgccgg

SEQ ID NO: 3484865 - DNA, 25 bp, Homo sapien
aggagactgccggaaatcatcacgg

SEQ ID NO: 3484866 - DNA, 25 bp, Homo sapien
tacatgcctgcatcgctcttgagtg

SEQ ID NO: 3484867 - DNA, 25 bp, Homo sapien
tgttggaggctacgcacacatacat

SEQ ID NO: 3484868 - DNA, 25 bp, Homo sapien
cttgagtgtatgtgacatcatcagc

SEQ ID NO: 3484869 - DNA, 25 bp, Homo sapien
tcccgttctcccgccatgttggagg

SEQ ID NO: 3484870 - DNA, 25 bp, Homo sapien
cacctcacataggaaagtcacaggg

SEQ ID NO: 3484871 - DNA, 25 bp, Homo sapien
tgattcactggtctgcgcaggaatg

SEQ ID NO: 3484872 - DNA, 25 bp, Homo sapien
cccttcacctcacataggaaagtca

SEQ ID NO: 3484873 - DNA, 25 bp, Homo sapien
ctccttgcgccagcgtagacgaggt

SEQ ID NO: 3484874 - DNA, 25 bp, Homo sapien
ttggccacagctacagaccctttct

SEQ ID NO: 3484875 - DNA, 25 bp, Homo sapien
ggctgggttggccacagctacagac

SEQ ID NO: 3484876 - DNA, 25 bp, Homo sapien
tgggttggccacagctacagaccct

SEQ ID NO: 3484877 - DNA, 25 bp, Homo sapien
ggttggccacagctacagacccttt

SEQ ID NO: 3484878 - DNA, 25 bp, Homo sapien
ggctgtggtcactccggatctcata

SEQ ID NO: 3484879 - DNA, 25 bp, Homo sapien
tgttctccgccacacaggtgtacgt

SEQ ID NO: 3484880 - DNA, 25 bp, Homo sapien
ggcactcacatgcccaatccaaagg

SEQ ID NO: 3484881 - DNA, 25 bp, Homo sapien
ggagccagatgcttcagcgcggccc

SEQ ID NO: 3484882 - DNA, 25 bp, Homo sapien
gggtttcctttggtctcgcactgga

SEQ ID NO: 3484883 - DNA, 25 bp, Homo sapien
tggaaagccacgctctctccaggag

SEQ ID NO: 3484884 - DNA, 25 bp, Homo sapien
gtctcgcactggaaagccacgctct

SEQ ID NO: 3484885 - DNA, 25 bp, Homo sapien
tttggtctcgcactggaaagccacg

SEQ ID NO: 3484886 - DNA, 25 bp, Homo sapien
gcctggcacacgtagtacccagcat

SEQ ID NO: 3484887 - DNA, 25 bp, Homo sapien
tgcaccgcggtgatgttaagttggc

SEQ ID NO: 3484888 - DNA, 25 bp, Homo sapien
ccccgtcggctgaagtgactgactg

SEQ ID NO: 3484889 - DNA, 25 bp, Homo sapien
cccacgctgcaccgcggtgatgtta

SEQ ID NO: 3484890 - DNA, 25 bp, Homo sapien
cattgtcttgaactggaggtcatcc

SEQ ID NO: 3484891 - DNA, 25 bp, Homo sapien
tcttccatcggacactgggttgagg

SEQ ID NO: 3484892 - DNA, 25 bp, Homo sapien
ggagccaagcaccagcgtctgattg

SEQ ID NO: 3484893 - DNA, 25 bp, Homo sapien
cacattggcgatgtacagggtaccg

SEQ ID NO: 3484894 - DNA, 25 bp, Homo sapien
acgcagctgtagaagcccatgtcca

SEQ ID NO: 3484895 - DNA, 25 bp, Homo sapien
gccgctccatgtggcttcccctgtg

SEQ ID NO: 3484896 - DNA, 25 bp, Homo sapien
aagccagccgctccatgtggcttcc

SEQ ID NO: 3484897 - DNA, 25 bp, Homo sapien
tgtggaactcttggccacgcagctg

SEQ ID NO: 3484898 - DNA, 25 bp, Homo sapien
gggtctggtgatactccccagtctt

SEQ ID NO: 3484899 - DNA, 25 bp, Homo sapien
gggggtctggtgatactccccagtc

SEQ ID NO: 3484900 - DNA, 25 bp, Homo sapien
taggggggtctggtgatactcccca

SEQ ID NO: 3484901 - DNA, 25 bp, Homo sapien
ctgtaggggggtctggtgatactcc

SEQ ID NO: 3484902 - DNA, 25 bp, Homo sapien
ttcttggtgatctcagtgaccactg

SEQ ID NO: 3484903 - DNA, 25 bp, Homo sapien
tcttggtgatctcagtgaccactgg

SEQ ID NO: 3484904 - DNA, 25 bp, Homo sapien
cccagtttgtgggttgggcttccag

SEQ ID NO: 3484905 - DNA, 25 bp, Homo sapien
aggcctctatcacataagacgtgac

SEQ ID NO: 3484906 - DNA, 25 bp, Homo sapien
ctaagggcataggatcccctccttt

SEQ ID NO: 3484907 - DNA, 25 bp, Homo sapien
caaagaccctaagggcataggatcc

SEQ ID NO: 3484908 - DNA, 25 bp, Homo sapien
atagcaaagaccctaagggcatagg

SEQ ID NO: 3484909 - DNA, 25 bp, Homo sapien
gaccctaagggcataggatcccctc

SEQ ID NO: 3484910 - DNA, 25 bp, Homo sapien
aacaggtagatggtattgggctgca

SEQ ID NO: 3484911 - DNA, 25 bp, Homo sapien
ccactgctcgaaccagaaacaggta

SEQ ID NO: 3484912 - DNA, 25 bp, Homo sapien
tacgccatgtgttgccagctgctgg

SEQ ID NO: 3484913 - DNA, 25 bp, Homo sapien
gccatctgccacagtacgccatgtg

SEQ ID NO: 3484914 - DNA, 25 bp, Homo sapien
ctgtgtacggacaggctcagagacg

SEQ ID NO: 3484915 - DNA, 25 bp, Homo sapien
cctgtgtacggacaggctcagagac

SEQ ID NO: 3484916 - DNA, 25 bp, Homo sapien
ggactatgggctcctgcaggcgcac

SEQ ID NO: 3484917 - DNA, 25 bp, Homo sapien
ctatgggctcctgcaggcgcacagc

SEQ ID NO: 3484918 - DNA, 25 bp, Homo sapien
gccacttccgccagtccctgctggc

SEQ ID NO: 3484919 - DNA, 25 bp, Homo sapien
caggactatgggctcctgcaggcgc

SEQ ID NO: 3484920 - DNA, 25 bp, Homo sapien
gtaggtccaacattgtccagcttcc

SEQ ID NO: 3484921 - DNA, 25 bp, Homo sapien
ccggaaaccttgcaccagctggact

SEQ ID NO: 3484922 - DNA, 25 bp, Homo sapien
cctggtcacagagaggctttcagcc

SEQ ID NO: 3484923 - DNA, 25 bp, Homo sapien
ggaatgctcctggtcacagagaggc

SEQ ID NO: 3484924 - DNA, 25 bp, Homo sapien
tccatctgttcggtggccctcctta

SEQ ID NO: 3484925 - DNA, 25 bp, Homo sapien
cctcttgtccatccatctgttcggt

SEQ ID NO: 3484926 - DNA, 25 bp, Homo sapien
tgtccatccatctgttcggtggccc

SEQ ID NO: 3484927 - DNA, 25 bp, Homo sapien
tcttgtccatccatctgttcggtgg

SEQ ID NO: 3484928 - DNA, 25 bp, Homo sapien
ttctaacatcttagggaactgagag

SEQ ID NO: 3484929 - DNA, 25 bp, Homo sapien
ccctccctgttctaacatcttaggg

SEQ ID NO: 3484930 - DNA, 25 bp, Homo sapien
ctccctgttctaacatcttagggaa

SEQ ID NO: 3484931 - DNA, 25 bp, Homo sapien
cctgttctaacatcttagggaactg

SEQ ID NO: 3484932 - DNA, 25 bp, Homo sapien
gggccagggtggagcatggtgagaa

SEQ ID NO: 3484933 - DNA, 25 bp, Homo sapien
tgggccagggtggagcatggtgaga

SEQ ID NO: 3484934 - DNA, 25 bp, Homo sapien
gccagggtggagcatggtgagaagg

SEQ ID NO: 3484935 - DNA, 25 bp, Homo sapien
ggccagggtggagcatggtgagaag

SEQ ID NO: 3484936 - DNA, 25 bp, Homo sapien
ctggtattccgtgatgaccccattt

SEQ ID NO: 3484937 - DNA, 25 bp, Homo sapien
cccaggacacagtgatactgctgtt

SEQ ID NO: 3484938 - DNA, 25 bp, Homo sapien
gacacagtgatactgctgttgccat

SEQ ID NO: 3484939 - DNA, 25 bp, Homo sapien
ccgtgatgaccccattttgctggga

SEQ ID NO: 3484940 - DNA, 25 bp, Homo sapien
cccagcctgctgcagatcgattgag

SEQ ID NO: 3484941 - DNA, 25 bp, Homo sapien
ggtgaaagcggctctcattgcccag

SEQ ID NO: 3484942 - DNA, 25 bp, Homo sapien
cgaccagggttcgatagaggagacc

SEQ ID NO: 3484943 - DNA, 25 bp, Homo sapien
cagtcctcggagcattgcggagcgt

SEQ ID NO: 3484944 - DNA, 25 bp, Homo sapien
agggtcattcccgacccggcaggca

SEQ ID NO: 3484945 - DNA, 25 bp, Homo sapien
gggtcattcccgacccggcaggcac

SEQ ID NO: 3484946 - DNA, 25 bp, Homo sapien
gtcattcccgacccggcaggcacag

SEQ ID NO: 3484947 - DNA, 25 bp, Homo sapien
cattcccgacccggcaggcacagct

SEQ ID NO: 3484948 - DNA, 25 bp, Homo sapien
gctctttgcgctgtttccggcgcca

SEQ ID NO: 3484949 - DNA, 25 bp, Homo sapien
tttgcgctgtttccggcgccagtag

SEQ ID NO: 3484950 - DNA, 25 bp, Homo sapien
ggcgccagtagagggcggcgcagag

SEQ ID NO: 3484951 - DNA, 25 bp, Homo sapien
ggctgagctctttgcgctgtttccg

SEQ ID NO: 3484952 - DNA, 25 bp, Homo sapien
tcgtggcgtcttagaggcaaacgtc

SEQ ID NO: 3484953 - DNA, 25 bp, Homo sapien
tgagtgggctttccgtcctcgaact

SEQ ID NO: 3484954 - DNA, 25 bp, Homo sapien
gttgcaaagcctggcctcctcgtgg

SEQ ID NO: 3484955 - DNA, 25 bp, Homo sapien
ggaagtagcagaactcggatcgcct

SEQ ID NO: 3484956 - DNA, 25 bp, Homo sapien
tgggactcaggtgtcggtatttttc

SEQ ID NO: 3484957 - DNA, 25 bp, Homo sapien
tcaagcccctcaagtgattcctatg

SEQ ID NO: 3484958 - DNA, 25 bp, Homo sapien
gattcctatgtgtagccaaccaaga

SEQ ID NO: 3484959 - DNA, 25 bp, Homo sapien
gaaatacccctatacttgtccacgc

SEQ ID NO: 3484960 - DNA, 25 bp, Homo sapien
atgagggggcgaatgagtgagagaa

SEQ ID NO: 3484961 - DNA, 25 bp, Homo sapien
tgagggggcgaatgagtgagagaag

SEQ ID NO: 3484962 - DNA, 25 bp, Homo sapien
aatgagggggcgaatgagtgagaga

SEQ ID NO: 3484963 - DNA, 25 bp, Homo sapien
aaatgagggggcgaatgagtgagag

SEQ ID NO: 3484964 - DNA, 25 bp, Homo sapien
ctggaactggctccagagaggccct

SEQ ID NO: 3484965 - DNA, 25 bp, Homo sapien
tattcgggagtttcaggacagtggc

SEQ ID NO: 3484966 - DNA, 25 bp, Homo sapien
gggcggaagaagagtggcctgtcgg

SEQ ID NO: 3484967 - DNA, 25 bp, Homo sapien
tcagcggggcggaagaagagtggcc

SEQ ID NO: 3484968 - DNA, 25 bp, Homo sapien
aagggaggtggcgatattcgggagt

SEQ ID NO: 3484969 - DNA, 25 bp, Homo sapien
gggagagcaggtgagcgttggggac

SEQ ID NO: 3484970 - DNA, 25 bp, Homo sapien
caggtgagcgttggggacggagagc

SEQ ID NO: 3484971 - DNA, 25 bp, Homo sapien
agcaggtgagcgttggggacggaga

SEQ ID NO: 3484972 - DNA, 25 bp, Homo sapien
gagagcaggtgagcgttggggacgg

SEQ ID NO: 3484973 - DNA, 25 bp, Homo sapien
ccacgaatctgccagccatgagtag

SEQ ID NO: 3484974 - DNA, 25 bp, Homo sapien
gggccacgaatctgccagccatgag

SEQ ID NO: 3484975 - DNA, 25 bp, Homo sapien
gtcaggattgctagggcagcagctt

SEQ ID NO: 3484976 - DNA, 25 bp, Homo sapien
cgttgtaatatctgtcgtccgggtc

SEQ ID NO: 3484977 - DNA, 25 bp, Homo sapien
ttgccccagtaggtcgggagaagtg

SEQ ID NO: 3484978 - DNA, 25 bp, Homo sapien
gtcgggagaagtgcgctgaagccag

SEQ ID NO: 3484979 - DNA, 25 bp, Homo sapien
gagaagtgcgctgaagccaggtgag

SEQ ID NO: 3484980 - DNA, 25 bp, Homo sapien
ccagtaggtcgggagaagtgcgctg

SEQ ID NO: 3484981 - DNA, 25 bp, Homo sapien
cccagctcacatcctccccagggac

SEQ ID NO: 3484982 - DNA, 25 bp, Homo sapien
ctaaaccagggtggaggtaggtctg

SEQ ID NO: 3484983 - DNA, 25 bp, Homo sapien
gaggtaggtctgagaggcttcccca

SEQ ID NO: 3484984 - DNA, 25 bp, Homo sapien
gtaggtctgagaggcttccccagct

SEQ ID NO: 3484985 - DNA, 25 bp, Homo sapien
gaaatcccacgggatcaacttcttc

SEQ ID NO: 3484986 - DNA, 25 bp, Homo sapien
tgctatagacaggaccctcgccagg

SEQ ID NO: 3484987 - DNA, 25 bp, Homo sapien
ccgtctgagctagatacagggagat

SEQ ID NO: 3484988 - DNA, 25 bp, Homo sapien
cccctggccgtctgagctagataca

SEQ ID NO: 3484989 - DNA, 25 bp, Homo sapien
ccccgctgggtcaatggtgctatag

SEQ ID NO: 3484990 - DNA, 25 bp, Homo sapien
cggggtttcaggagttggagtcata

SEQ ID NO: 3484991 - DNA, 25 bp, Homo sapien
acggggtttcaggagttggagtcat

SEQ ID NO: 3484992 - DNA, 25 bp, Homo sapien
ggggtttcaggagttggagtcatac

SEQ ID NO: 3484993 - DNA, 25 bp, Homo sapien
tgaggagaataggatggggacaccc

SEQ ID NO: 3484994 - DNA, 25 bp, Homo sapien
aagtgccgggctaggtgccagaggg

SEQ ID NO: 3484995 - DNA, 25 bp, Homo sapien
ggacacccggagaacaggcaggaaa

SEQ ID NO: 3484996 - DNA, 25 bp, Homo sapien
tgagacaggtcagaaggaagtgccg

SEQ ID NO: 3484997 - DNA, 25 bp, Homo sapien
ctggccagttcagagagggcatctg

SEQ ID NO: 3484998 - DNA, 25 bp, Homo sapien
ttctggccagttcagagagggcatc

SEQ ID NO: 3484999 - DNA, 25 bp, Homo sapien
tctggccagttcagagagggcatct

SEQ ID NO: 3485000 - DNA, 25 bp, Homo sapien
tggccagttcagagagggcatctgc

SEQ ID NO: 3485001 - DNA, 25 bp, Homo sapien
gctgggctccgtcaggtgacttctc

SEQ ID NO: 3485002 - DNA, 25 bp, Homo sapien
gagctgggctccgtcaggtgacttc

SEQ ID NO: 3485003 - DNA, 25 bp, Homo sapien
gacttctctcaggcattggcgggca

SEQ ID NO: 3485004 - DNA, 25 bp, Homo sapien
ggagctgggctccgtcaggtgactt

SEQ ID NO: 3485005 - DNA, 25 bp, Homo sapien
tgctgtccataggaaggtgtgggag

SEQ ID NO: 3485006 - DNA, 25 bp, Homo sapien
gaggtgagggtgtaagagtggctgt

SEQ ID NO: 3485007 - DNA, 25 bp, Homo sapien
atggagatggggcatgtcagttggg

SEQ ID NO: 3485008 - DNA, 25 bp, Homo sapien
gtcaggaggtgagggtgtaagagtg

SEQ ID NO: 3485009 - DNA, 25 bp, Homo sapien
gcaatgacaggaggccgcagcctct

SEQ ID NO: 3485010 - DNA, 25 bp, Homo sapien
agataaacgagacacaacccgtccg

SEQ ID NO: 3485011 - DNA, 25 bp, Homo sapien
tgtgctagacaatcaacctaacaga

SEQ ID NO: 3485012 - DNA, 25 bp, Homo sapien
ctgcaatgacaggaggccgcagcct

SEQ ID NO: 3485013 - DNA, 25 bp, Homo sapien
ctgagaggggaactcggcccaaggg

SEQ ID NO: 3485014 - DNA, 25 bp, Homo sapien
tgctggctgtgctaggggcaggact

SEQ ID NO: 3485015 - DNA, 25 bp, Homo sapien
cactgctggctgtgctaggggcagg

SEQ ID NO: 3485016 - DNA, 25 bp, Homo sapien
aagccagcaggcctcgcttcacgga

SEQ ID NO: 3485017 - DNA, 25 bp, Homo sapien
aggcctcgcttcacggatgcccagc

SEQ ID NO: 3485018 - DNA, 25 bp, Homo sapien
gaatgggtaagggcaaaaatcagga

SEQ ID NO: 3485019 - DNA, 25 bp, Homo sapien
tgcagtgttaggagacgggaagagg

SEQ ID NO: 3485020 - DNA, 25 bp, Homo sapien
ctgcagtgttaggagacgggaagag

SEQ ID NO: 3485021 - DNA, 25 bp, Homo sapien
gaggaatgggtaagggcaaaaatca

SEQ ID NO: 3485022 - DNA, 25 bp, Homo sapien
ctccccattcccctgccaggttctg

SEQ ID NO: 3485023 - DNA, 25 bp, Homo sapien
tccccattcccctgccaggttctgc

SEQ ID NO: 3485024 - DNA, 25 bp, Homo sapien
ctccctcctgtagggaagagccttg

SEQ ID NO: 3485025 - DNA, 25 bp, Homo sapien
cggaatcgagcacggggtccttgaa

SEQ ID NO: 3485026 - DNA, 25 bp, Homo sapien
tcttccggaatcgagcacggggtcc

SEQ ID NO: 3485027 - DNA, 25 bp, Homo sapien
cttgggtttcttccggaatcgagca

SEQ ID NO: 3485028 - DNA, 25 bp, Homo sapien
ctgggtggagcacccgctgggctgc

SEQ ID NO: 3485029 - DNA, 25 bp, Homo sapien
ggcacggcctggaccgctttcctct

SEQ ID NO: 3485030 - DNA, 25 bp, Homo sapien
catctgggtggagcacccgctgggc

SEQ ID NO: 3485031 - DNA, 25 bp, Homo sapien
caggggcacggcctggaccgctttc

SEQ ID NO: 3485032 - DNA, 25 bp, Homo sapien
ctcctgcctgccctggccctgctta

SEQ ID NO: 3485033 - DNA, 25 bp, Homo sapien
tcctgcctgccctggccctgcttac

SEQ ID NO: 3485034 - DNA, 25 bp, Homo sapien
tgaacctaactaaagggagggctga

SEQ ID NO: 3485035 - DNA, 25 bp, Homo sapien
ttgacatcatgggtgctcagaacgc

SEQ ID NO: 3485036 - DNA, 25 bp, Homo sapien
tgtggatcaaatgcatgaacctaac

SEQ ID NO: 3485037 - DNA, 25 bp, Homo sapien
gagtgaccggcacatggccttgaca

SEQ ID NO: 3485038 - DNA, 25 bp, Homo sapien
ggcaggaagcagaacttccctgtca

SEQ ID NO: 3485039 - DNA, 25 bp, Homo sapien
gaagcagaacttccctgtcacccac

SEQ ID NO: 3485040 - DNA, 25 bp, Homo sapien
tgcagcacaagagggaagggtagcc

SEQ ID NO: 3485041 - DNA, 25 bp, Homo sapien
caggcaggaagcagaacttccctgt

SEQ ID NO: 3485042 - DNA, 25 bp, Homo sapien
gaagcttggtctgctgtatgggagc

SEQ ID NO: 3485043 - DNA, 25 bp, Homo sapien
tctcggcgtttctgtcctggccttt

SEQ ID NO: 3485044 - DNA, 25 bp, Homo sapien
ctggctccggctctgactccgactc

SEQ ID NO: 3485045 - DNA, 25 bp, Homo sapien
tgctgccggccgtggaacatgtgct

SEQ ID NO: 3485046 - DNA, 25 bp, Homo sapien
tgccttctcagccaattgaaatcgt

SEQ ID NO: 3485047 - DNA, 25 bp, Homo sapien
tataaacaagtctcaggtggaaaaa

SEQ ID NO: 3485048 - DNA, 25 bp, Homo sapien
ttgaaatcgtggaaaccaatgggct

SEQ ID NO: 3485049 - DNA, 25 bp, Homo sapien
aatgggcttcagctagccccactca

SEQ ID NO: 3485050 - DNA, 25 bp, Homo sapien
gcgttgatatacaggaccctgcagt

SEQ ID NO: 3485051 - DNA, 25 bp, Homo sapien
agtgtgcgttgatatacaggaccct

SEQ ID NO: 3485052 - DNA, 25 bp, Homo sapien
tgtgcgttgatatacaggaccctgc

SEQ ID NO: 3485053 - DNA, 25 bp, Homo sapien
tgcgttgatatacaggaccctgcag

SEQ ID NO: 3485054 - DNA, 25 bp, Homo sapien
aggggcagacgaggtcagggcctgg

SEQ ID NO: 3485055 - DNA, 25 bp, Homo sapien
aaggggcagacgaggtcagggcctg

SEQ ID NO: 3485056 - DNA, 25 bp, Homo sapien
cagctgccaatcccagagagtccag

SEQ ID NO: 3485057 - DNA, 25 bp, Homo sapien
attttgtggcagttgcggggaggag

SEQ ID NO: 3485058 - DNA, 25 bp, Homo sapien
cttttccttatctggattttgtggc

SEQ ID NO: 3485059 - DNA, 25 bp, Homo sapien
ggattttgtggcagttgcggggagg

SEQ ID NO: 3485060 - DNA, 25 bp, Homo sapien
tttccttatctggattttgtggcag

SEQ ID NO: 3485061 - DNA, 25 bp, Homo sapien
aagcaccatcctcgtactgttgtca

SEQ ID NO: 3485062 - DNA, 25 bp, Homo sapien
tcatgccaaacaaagggttcaaggc

SEQ ID NO: 3485063 - DNA, 25 bp, Homo sapien
ctatgagcttaagaaatttgatacc

SEQ ID NO: 3485064 - DNA, 25 bp, Homo sapien
gagaccgtaggtcaaaagcaccatc

SEQ ID NO: 3485065 - DNA, 25 bp, Homo sapien
caccatttggatcacaggaagtgga

SEQ ID NO: 3485066 - DNA, 25 bp, Homo sapien
tctagagaagagctcaactctctcc

SEQ ID NO: 3485067 - DNA, 25 bp, Homo sapien
caccaccaggttgttttggcctgag

SEQ ID NO: 3485068 - DNA, 25 bp, Homo sapien
ggaggaaggagcttctcggagcccc

SEQ ID NO: 3485069 - DNA, 25 bp, Homo sapien
ctttcccaaagcccaggtgagaggg

SEQ ID NO: 3485070 - DNA, 25 bp, Homo sapien
acctttcccaaagcccaggtgagag

SEQ ID NO: 3485071 - DNA, 25 bp, Homo sapien
cctttcccaaagcccaggtgagagg

SEQ ID NO: 3485072 - DNA, 25 bp, Homo sapien
tcatagcaggtcactgggattaagc

SEQ ID NO: 3485073 - DNA, 25 bp, Homo sapien
acaagcagaagacccaagaatagcc

SEQ ID NO: 3485074 - DNA, 25 bp, Homo sapien
ggagaaacaccctaccagatagcaa

SEQ ID NO: 3485075 - DNA, 25 bp, Homo sapien
gggataataggctaccatctgaaaa

SEQ ID NO: 3485076 - DNA, 25 bp, Homo sapien
caggtcaagttttgtctcagcccca

SEQ ID NO: 3485077 - DNA, 25 bp, Homo sapien
ggccagcttgccaggcttaagccaa

SEQ ID NO: 3485078 - DNA, 25 bp, Homo sapien
gataaggagtacctgctggtcagcc

SEQ ID NO: 3485079 - DNA, 25 bp, Homo sapien
ggtcagccttgagatgcacaggtga

SEQ ID NO: 3485080 - DNA, 25 bp, Homo sapien
tctgattcgccatcaacccatggag

SEQ ID NO: 3485081 - DNA, 25 bp, Homo sapien
tcataggagtggcagtaatctactg

SEQ ID NO: 3485082 - DNA, 25 bp, Homo sapien
catgccaccgcctattgaacagttc

SEQ ID NO: 3485083 - DNA, 25 bp, Homo sapien
tggagcaattccaaggccccagtta

SEQ ID NO: 3485084 - DNA, 25 bp, Homo sapien
tcagattagagaggccactttccca

SEQ ID NO: 3485085 - DNA, 25 bp, Homo sapien
cctgggcgctagcaagggcaaagaa

SEQ ID NO: 3485086 - DNA, 25 bp, Homo sapien
tggcccgaaaactagaccaaatgag

SEQ ID NO: 3485087 - DNA, 25 bp, Homo sapien
ccagctgtgagaataagtcctaatc

SEQ ID NO: 3485088 - DNA, 25 bp, Homo sapien
cagtcaaatgcagagtagcactttc

SEQ ID NO: 3485089 - DNA, 25 bp, Homo sapien
tattctttactaccacctagggctc

SEQ ID NO: 3485090 - DNA, 25 bp, Homo sapien
cagccccttagctcatatctgatgg

SEQ ID NO: 3485091 - DNA, 25 bp, Homo sapien
tatatgacttcaacaagctgctgac

SEQ ID NO: 3485092 - DNA, 25 bp, Homo sapien
gatgctggccagctgattcccattt

SEQ ID NO: 3485093 - DNA, 25 bp, Homo sapien
cagtaggcaattatcagatgctggc

SEQ ID NO: 3485094 - DNA, 25 bp, Homo sapien
catagagtgttcttcacacagtagg

SEQ ID NO: 3485095 - DNA, 25 bp, Homo sapien
gacaccatctgaggatctaggagaa

SEQ ID NO: 3485096 - DNA, 25 bp, Homo sapien
ttacttttgaatgtgccgccttcct

SEQ ID NO: 3485097 - DNA, 25 bp, Homo sapien
tacttttgaatgtgccgccttcctc

SEQ ID NO: 3485098 - DNA, 25 bp, Homo sapien
cttttgaatgtgccgccttcctcct

SEQ ID NO: 3485099 - DNA, 25 bp, Homo sapien
acttttgaatgtgccgccttcctcc

SEQ ID NO: 3485100 - DNA, 25 bp, Homo sapien
tcagtctactcggagtactaaggta

SEQ ID NO: 3485101 - DNA, 25 bp, Homo sapien
ggtaaccgcctcaagtagaccgcca

SEQ ID NO: 3485102 - DNA, 25 bp, Homo sapien
ccactttgcggtgggctgctccgtc

SEQ ID NO: 3485103 - DNA, 25 bp, Homo sapien
aagtagaccgccactttgcggtggg

SEQ ID NO: 3485104 - DNA, 25 bp, Homo sapien
gcctcgggccagataaaagcctgct

SEQ ID NO: 3485105 - DNA, 25 bp, Homo sapien
gttatgggaagacgcgctgaacggc

SEQ ID NO: 3485106 - DNA, 25 bp, Homo sapien
gccgagagtcccaataatcggtata

SEQ ID NO: 3485107 - DNA, 25 bp, Homo sapien
atggcactggccaggaatcggcccg

SEQ ID NO: 3485108 - DNA, 25 bp, Homo sapien
ggaagggaggaatgacagctgcaac

SEQ ID NO: 3485109 - DNA, 25 bp, Homo sapien
gagaacgaagactgtcctcagctgt

SEQ ID NO: 3485110 - DNA, 25 bp, Homo sapien
tgacagctgcaacccggagaaagag

SEQ ID NO: 3485111 - DNA, 25 bp, Homo sapien
gctgtgggcgcagcgaggcgggaag

SEQ ID NO: 3485112 - DNA, 25 bp, Homo sapien
agaaaaagcttaaaatcttcaaatg

SEQ ID NO: 3485113 - DNA, 25 bp, Homo sapien
aaagcttaaaatcttcaaatgactg

SEQ ID NO: 3485114 - DNA, 25 bp, Homo sapien
ctgattaggagaaagaaaaagctta

SEQ ID NO: 3485115 - DNA, 25 bp, Homo sapien
gcttaaaatcttcaaatgactgcat

SEQ ID NO: 3485116 - DNA, 25 bp, Homo sapien
caggggcaaccttgaggtatttcga

SEQ ID NO: 3485117 - DNA, 25 bp, Homo sapien
cagcactgccaacacgtccttgctc

SEQ ID NO: 3485118 - DNA, 25 bp, Homo sapien
catgccccaactggtactatagcct

SEQ ID NO: 3485119 - DNA, 25 bp, Homo sapien
ggtactatagcctcgttcctctcag

SEQ ID NO: 3485120 - DNA, 25 bp, Homo sapien
gcaggtgccacattactgggagaac

SEQ ID NO: 3485121 - DNA, 25 bp, Homo sapien
cctaggccaagcgtcagatatgtga

SEQ ID NO: 3485122 - DNA, 25 bp, Homo sapien
gccggaaaatagtcaaggtgtctca

SEQ ID NO: 3485123 - DNA, 25 bp, Homo sapien
gaggaagcccaagttagtcaaacag

SEQ ID NO: 3485124 - DNA, 25 bp, Homo sapien
ctaatttgttgatttactcggtatt

SEQ ID NO: 3485125 - DNA, 25 bp, Homo sapien
agttcttcttcaattaaatatgctg

SEQ ID NO: 3485126 - DNA, 25 bp, Homo sapien
gttcttcttcaattaaatatgctga

SEQ ID NO: 3485127 - DNA, 25 bp, Homo sapien
cctaatttgttgatttactcggtat

SEQ ID NO: 3485128 - DNA, 25 bp, Homo sapien
ccttttggaagttaagtgtgttgct

SEQ ID NO: 3485129 - DNA, 25 bp, Homo sapien
caatagcaacattcaaattgtttgg

SEQ ID NO: 3485130 - DNA, 25 bp, Homo sapien
gcatcagggaaggaggtaacctaga

SEQ ID NO: 3485131 - DNA, 25 bp, Homo sapien
tggctatggagccttctttttgtgc

SEQ ID NO: 3485132 - DNA, 25 bp, Homo sapien
ttaatcacggttttaaaggatgcta

SEQ ID NO: 3485133 - DNA, 25 bp, Homo sapien
tttaaaggatgctagccggtgacgt

SEQ ID NO: 3485134 - DNA, 25 bp, Homo sapien
gatgctagccggtgacgtgcctgtt

SEQ ID NO: 3485135 - DNA, 25 bp, Homo sapien
ggtgacgtgcctgtttcatagtttc

SEQ ID NO: 3485136 - DNA, 25 bp, Homo sapien
aggtacagcagctaaaagaccttga

SEQ ID NO: 3485137 - DNA, 25 bp, Homo sapien
gatggaccttaatgggcaactctcc

SEQ ID NO: 3485138 - DNA, 25 bp, Homo sapien
tccatataattctggtaaggtacag

SEQ ID NO: 3485139 - DNA, 25 bp, Homo sapien
tcctcttattcctgtatttatccca

SEQ ID NO: 3485140 - DNA, 25 bp, Homo sapien
atcagttacaagagatgaagattcc

SEQ ID NO: 3485141 - DNA, 25 bp, Homo sapien
atgaagattcctcatagtcaggttc

SEQ ID NO: 3485142 - DNA, 25 bp, Homo sapien
gagatgaagattcctcatagtcagg

SEQ ID NO: 3485143 - DNA, 25 bp, Homo sapien
ctcatcagttacaagagatgaagat

SEQ ID NO: 3485144 - DNA, 25 bp, Homo sapien
tgggtttccagcaaatcaccttggg

SEQ ID NO: 3485145 - DNA, 25 bp, Homo sapien
gagtttctgtcttaataggctggcc

SEQ ID NO: 3485146 - DNA, 25 bp, Homo sapien
tgggtatctggcttaacactctgga

SEQ ID NO: 3485147 - DNA, 25 bp, Homo sapien
tctggcagaatatcctgaaggccct

SEQ ID NO: 3485148 - DNA, 25 bp, Homo sapien
gtctctagataaaaagtcctggtct

SEQ ID NO: 3485149 - DNA, 25 bp, Homo sapien
gaacatgctggtctctagacaaaaa

SEQ ID NO: 3485150 - DNA, 25 bp, Homo sapien
aacatgctggtctctagataaaaaa

SEQ ID NO: 3485151 - DNA, 25 bp, Homo sapien
tctggtcgttggagagaacatgcag

SEQ ID NO: 3485152 - DNA, 25 bp, Homo sapien
cctctcctacctatcaaaatggatg

SEQ ID NO: 3485153 - DNA, 25 bp, Homo sapien
gatgcctgcatagaagatcctgatg

SEQ ID NO: 3485154 - DNA, 25 bp, Homo sapien
gatggacatccagaggaagtgcctc

SEQ ID NO: 3485155 - DNA, 25 bp, Homo sapien
tctgatggaggcctgatgatgcctg

SEQ ID NO: 3485156 - DNA, 25 bp, Homo sapien
ttttgatgtcatcctggtcctggga

SEQ ID NO: 3485157 - DNA, 25 bp, Homo sapien
tagtctgccagagaaaagtcttctc

SEQ ID NO: 3485158 - DNA, 25 bp, Homo sapien
cagagtatggctccttaaagtgtac

SEQ ID NO: 3485159 - DNA, 25 bp, Homo sapien
gatttgggaggcaaacactgatagt

SEQ ID NO: 3485160 - DNA, 25 bp, Homo sapien
tgttctctaggggagtcttggtcct

SEQ ID NO: 3485161 - DNA, 25 bp, Homo sapien
tcctggattttaggtacaacatatt

SEQ ID NO: 3485162 - DNA, 25 bp, Homo sapien
gattttaggtacaacatattgatga

SEQ ID NO: 3485163 - DNA, 25 bp, Homo sapien
attgatgatagtccagaggcaattc

SEQ ID NO: 3485164 - DNA, 25 bp, Homo sapien
cactccaggagtatttcctcttgca

SEQ ID NO: 3485165 - DNA, 25 bp, Homo sapien
actccaggagtatttcctcttgcaa

SEQ ID NO: 3485166 - DNA, 25 bp, Homo sapien
ggcactccaggagtatttcctcttg

SEQ ID NO: 3485167 - DNA, 25 bp, Homo sapien
ctccaggagtatttcctcttgcaat

SEQ ID NO: 3485168 - DNA, 25 bp, Homo sapien
agcaaatcctgtggccgtctttcag

SEQ ID NO: 3485169 - DNA, 25 bp, Homo sapien
gaagtatctctctggtgcatgggtg

SEQ ID NO: 3485170 - DNA, 25 bp, Homo sapien
tgaccaaacagatagctgctgccta

SEQ ID NO: 3485171 - DNA, 25 bp, Homo sapien
gaaaggtgctaatggccacccagaa

SEQ ID NO: 3485172 - DNA, 25 bp, Homo sapien
tgatggagatctagtactggccatg

SEQ ID NO: 3485173 - DNA, 25 bp, Homo sapien
gtggaagatcctcataacccctgcc

SEQ ID NO: 3485174 - DNA, 25 bp, Homo sapien
atctagtactggccatggggtggaa

SEQ ID NO: 3485175 - DNA, 25 bp, Homo sapien
ggtggaagatcctcataacccctgc

SEQ ID NO: 3485176 - DNA, 25 bp, Homo sapien
tattactaagcacaaaaaggcagtg

SEQ ID NO: 3485177 - DNA, 25 bp, Homo sapien
ttacatagactacccagaataggca

SEQ ID NO: 3485178 - DNA, 25 bp, Homo sapien
gctgaccaaggtgatactctgcctt

SEQ ID NO: 3485179 - DNA, 25 bp, Homo sapien
ctcagattgattgtggttaatgcca

SEQ ID NO: 3485180 - DNA, 25 bp, Homo sapien
ggagcttggaattcagtgctcaatc

SEQ ID NO: 3485181 - DNA, 25 bp, Homo sapien
gccagtggagcttggaattcagtgc

SEQ ID NO: 3485182 - DNA, 25 bp, Homo sapien
atcctgattgatacctatcataagc

SEQ ID NO: 3485183 - DNA, 25 bp, Homo sapien
gaattcagtgctcaatcctgattga

SEQ ID NO: 3485184 - DNA, 25 bp, Homo sapien
tatcttcttctttatccacgtcaga

SEQ ID NO: 3485185 - DNA, 25 bp, Homo sapien
aaatattgggatccaaaagcagtat

SEQ ID NO: 3485186 - DNA, 25 bp, Homo sapien
aatactatcatagtagaaatattgg

SEQ ID NO: 3485187 - DNA, 25 bp, Homo sapien
aatattgggatccaaaagcagtatc

SEQ ID NO: 3485188 - DNA, 25 bp, Homo sapien
gaaatattgggatccaaaagcagta

SEQ ID NO: 3485189 - DNA, 25 bp, Homo sapien
caatatccatgaaaagtcgtctatg

SEQ ID NO: 3485190 - DNA, 25 bp, Homo sapien
atatccatgaaaagtcgtctatgtc

SEQ ID NO: 3485191 - DNA, 25 bp, Homo sapien
aatatccatgaaaagtcgtctatgt

SEQ ID NO: 3485192 - DNA, 25 bp, Homo sapien
gaggccagttcatactcatacttct

SEQ ID NO: 3485193 - DNA, 25 bp, Homo sapien
ttgtggcaggctattgactccaggg

SEQ ID NO: 3485194 - DNA, 25 bp, Homo sapien
tctgggcttctatccatttgtggca

SEQ ID NO: 3485195 - DNA, 25 bp, Homo sapien
ttttctgaacagtagtatgaggcca

SEQ ID NO: 3485196 - DNA, 25 bp, Homo sapien
aagaaagctgcccagagacagcacc

SEQ ID NO: 3485197 - DNA, 25 bp, Homo sapien
agaaagctgcccagagacagcaccc

SEQ ID NO: 3485198 - DNA, 25 bp, Homo sapien
gagaagaaagctgcccagagacagc

SEQ ID NO: 3485199 - DNA, 25 bp, Homo sapien
agagagaagaaagctgcccagagac

SEQ ID NO: 3485200 - DNA, 25 bp, Homo sapien
gcagcataacattcttgctctctct

SEQ ID NO: 3485201 - DNA, 25 bp, Homo sapien
tgctctgcagcataacattcttgct

SEQ ID NO: 3485202 - DNA, 25 bp, Homo sapien
tctgctctgcagcataacattcttg

SEQ ID NO: 3485203 - DNA, 25 bp, Homo sapien
ctctgcagcataacattcttgctct

SEQ ID NO: 3485204 - DNA, 25 bp, Homo sapien
cctgaatatggatcttcatgaaagt

SEQ ID NO: 3485205 - DNA, 25 bp, Homo sapien
aactgggctaatatctcactcaact

SEQ ID NO: 3485206 - DNA, 25 bp, Homo sapien
ttcttgaagttgtaactgggctaat

SEQ ID NO: 3485207 - DNA, 25 bp, Homo sapien
ttctctcctgaatatggatcttcat

SEQ ID NO: 3485208 - DNA, 25 bp, Homo sapien
tactgggaaaaacgcagggctacac

SEQ ID NO: 3485209 - DNA, 25 bp, Homo sapien
tgaatcctgattttacagccagatt

SEQ ID NO: 3485210 - DNA, 25 bp, Homo sapien
gggctacacccaagaagtattaggc

SEQ ID NO: 3485211 - DNA, 25 bp, Homo sapien
tattccgtatctctgggccttgaca

SEQ ID NO: 3485212 - DNA, 25 bp, Homo sapien
aaataaagtataatcaggcaaagtg

SEQ ID NO: 3485213 - DNA, 25 bp, Homo sapien
ataaagtataatcaggcaaagtgaa

SEQ ID NO: 3485214 - DNA, 25 bp, Homo sapien
aataaagtataatcaggcaaagtga

SEQ ID NO: 3485215 - DNA, 25 bp, Homo sapien
caacagcatagtggaggtaaagtaa

SEQ ID NO: 3485216 - DNA, 25 bp, Homo sapien
cctggatttgggctcgtaaagcttc

SEQ ID NO: 3485217 - DNA, 25 bp, Homo sapien
gatgagcatcccaaaaatcaggacc

SEQ ID NO: 3485218 - DNA, 25 bp, Homo sapien
tacagttgttggcacaggtatcagg

SEQ ID NO: 3485219 - DNA, 25 bp, Homo sapien
gaaactcaagacctcctacagtaga

SEQ ID NO: 3485220 - DNA, 25 bp, Homo sapien
tagggaattcaactggatagagtcc

SEQ ID NO: 3485221 - DNA, 25 bp, Homo sapien
tggcagaactagcaatctaatgtgg

SEQ ID NO: 3485222 - DNA, 25 bp, Homo sapien
tatttccccagcataaatggagaca

SEQ ID NO: 3485223 - DNA, 25 bp, Homo sapien
acatgccatgcatcttatactgcag

SEQ ID NO: 3485224 - DNA, 25 bp, Homo sapien
ctgggaatagcaactttgataaggc

SEQ ID NO: 3485225 - DNA, 25 bp, Homo sapien
gggaatgaatgcacaactacctagg

SEQ ID NO: 3485226 - DNA, 25 bp, Homo sapien
tactgcagtgggtagccctagaggt

SEQ ID NO: 3485227 - DNA, 25 bp, Homo sapien
ctgtgtgcagaagcaaaattatgaa

SEQ ID NO: 3485228 - DNA, 25 bp, Homo sapien
gcgactcgaagagttgaattacccc

SEQ ID NO: 3485229 - DNA, 25 bp, Homo sapien
gcaaaattatgaattgcgactcgaa

SEQ ID NO: 3485230 - DNA, 25 bp, Homo sapien
tgaattacccccagggacatcacag

SEQ ID NO: 3485231 - DNA, 25 bp, Homo sapien
ggtaatggcaatatagatggtctct

SEQ ID NO: 3485232 - DNA, 25 bp, Homo sapien
tcttctgatcagagcagagcaaagt

SEQ ID NO: 3485233 - DNA, 25 bp, Homo sapien
gtcagctttcaatcttggttcccag

SEQ ID NO: 3485234 - DNA, 25 bp, Homo sapien
taataggctccgtatggttcacaag

SEQ ID NO: 3485235 - DNA, 25 bp, Homo sapien
tactcactttgacttcagattcact

SEQ ID NO: 3485236 - DNA, 25 bp, Homo sapien
ggaatttactcactttgacttcaga

SEQ ID NO: 3485237 - DNA, 25 bp, Homo sapien
gccctgtagccatgtcatataccag

SEQ ID NO: 3485238 - DNA, 25 bp, Homo sapien
tcatttgccctgtagccatgtcata

SEQ ID NO: 3485239 - DNA, 25 bp, Homo sapien
aaccttttcatattttgtatcagga

SEQ ID NO: 3485240 - DNA, 25 bp, Homo sapien
aaaccttttcatattttgtatcagg

SEQ ID NO: 3485241 - DNA, 25 bp, Homo sapien
ccttttcatattttgtatcaggaaa

SEQ ID NO: 3485242 - DNA, 25 bp, Homo sapien
ttaaaccttttcatattttgtatca

SEQ ID NO: 3485243 - DNA, 25 bp, Homo sapien
gaactatagggtagatggaggccac

SEQ ID NO: 3485244 - DNA, 25 bp, Homo sapien
acagtgaggtcaaaagtacaaaaca

SEQ ID NO: 3485245 - DNA, 25 bp, Homo sapien
aaagaggaaagtgctgcccagagaa

SEQ ID NO: 3485246 - DNA, 25 bp, Homo sapien
aatcacaatggcaatgaaaacctgg

SEQ ID NO: 3485247 - DNA, 25 bp, Homo sapien
aaacctaccattactccacacctcg

SEQ ID NO: 3485248 - DNA, 25 bp, Homo sapien
tccacacctcggcatgaacagcgaa

SEQ ID NO: 3485249 - DNA, 25 bp, Homo sapien
attactccacacctcggcatgaaca

SEQ ID NO: 3485250 - DNA, 25 bp, Homo sapien
cacctcggcatgaacagcgaatgaa

SEQ ID NO: 3485251 - DNA, 25 bp, Homo sapien
cccttctaggtaagagctaaagcta

SEQ ID NO: 3485252 - DNA, 25 bp, Homo sapien
cctaggaaaacacgtcatacatgct

SEQ ID NO: 3485253 - DNA, 25 bp, Homo sapien
gctgtttcacgttgcatgcctagga

SEQ ID NO: 3485254 - DNA, 25 bp, Homo sapien
tagaggagaataaacttgttccacc

SEQ ID NO: 3485255 - DNA, 25 bp, Homo sapien
agcctctaggttctagtcaccacct

SEQ ID NO: 3485256 - DNA, 25 bp, Homo sapien
ggaagacagttatactgtcaacaaa

SEQ ID NO: 3485257 - DNA, 25 bp, Homo sapien
tctcctaatatttgggagagtgaaa

SEQ ID NO: 3485258 - DNA, 25 bp, Homo sapien
actttctcatccaaatctcctaata

SEQ ID NO: 3485259 - DNA, 25 bp, Homo sapien
accatttcgttctttctgtcattaa

SEQ ID NO: 3485260 - DNA, 25 bp, Homo sapien
ttgaaccacatattctctcttaccc

SEQ ID NO: 3485261 - DNA, 25 bp, Homo sapien
tgtgagctatgctagggagcttctg

SEQ ID NO: 3485262 - DNA, 25 bp, Homo sapien
gctaggtgcctatctaattacttag

SEQ ID NO: 3485263 - DNA, 25 bp, Homo sapien
ccaactattcaactgaagaaaggct

SEQ ID NO: 3485264 - DNA, 25 bp, Homo sapien
gtcccaactattcaactgaagaaag

SEQ ID NO: 3485265 - DNA, 25 bp, Homo sapien
ctggcaaggcttacagtcccaacta

SEQ ID NO: 3485266 - DNA, 25 bp, Homo sapien
caactattcaactgaagaaaggctc

SEQ ID NO: 3485267 - DNA, 25 bp, Homo sapien
gactcagtcccgtgtgattcatgca

SEQ ID NO: 3485268 - DNA, 25 bp, Homo sapien
ggtaatggacctagccagcttttag

SEQ ID NO: 3485269 - DNA, 25 bp, Homo sapien
ctaagggactctcatggtaatggac

SEQ ID NO: 3485270 - DNA, 25 bp, Homo sapien
taattgcttccgagtgagagaaatc

SEQ ID NO: 3485271 - DNA, 25 bp, Homo sapien
gaacagcttcatcggcacctctaga

SEQ ID NO: 3485272 - DNA, 25 bp, Homo sapien
gatgagacagaagctctccccaagg

SEQ ID NO: 3485273 - DNA, 25 bp, Homo sapien
taaagactgaagatatccctgctgc

SEQ ID NO: 3485274 - DNA, 25 bp, Homo sapien
caaggaagttgtgggaatgcctccc

SEQ ID NO: 3485275 - DNA, 25 bp, Homo sapien
tgctcatattccacaggaccccact

SEQ ID NO: 3485276 - DNA, 25 bp, Homo sapien
gcgctcccgccatgacaatgtggca

SEQ ID NO: 3485277 - DNA, 25 bp, Homo sapien
gggacaatattcggccccaaacaca

SEQ ID NO: 3485278 - DNA, 25 bp, Homo sapien
tcttccccggcttcacagacaccgg

SEQ ID NO: 3485279 - DNA, 25 bp, Homo sapien
gggaaccgaaagcagcaatctcgac

SEQ ID NO: 3485280 - DNA, 25 bp, Homo sapien
actgcccgacagctctgaggtgctg

SEQ ID NO: 3485281 - DNA, 25 bp, Homo sapien
ggcaccacagcgctcctgtgctttg

SEQ ID NO: 3485282 - DNA, 25 bp, Homo sapien
tttgcctgaccggtacctaaggctg

SEQ ID NO: 3485283 - DNA, 25 bp, Homo sapien
gagaaggcccggaagaaccagactc

SEQ ID NO: 3485284 - DNA, 25 bp, Homo sapien
agctgcccaacgacagaaaggcgct

SEQ ID NO: 3485285 - DNA, 25 bp, Homo sapien
cagtgtcaccgagccagcgtcgcgg

SEQ ID NO: 3485286 - DNA, 25 bp, Homo sapien
cgggaaacgatggagaccctccctg

SEQ ID NO: 3485287 - DNA, 25 bp, Homo sapien
aaggcgctctgaaggcgccccggat

SEQ ID NO: 3485288 - DNA, 25 bp, Homo sapien
tgcagcccaacatgtggtccctgcg

SEQ ID NO: 3485289 - DNA, 25 bp, Homo sapien
tccctgcggtcaggaagagaacctc

SEQ ID NO: 3485290 - DNA, 25 bp, Homo sapien
cactgagttctggccttggtgttcg

SEQ ID NO: 3485291 - DNA, 25 bp, Homo sapien
tccaggtgctgaaaggcctcgagac

SEQ ID NO: 3485292 - DNA, 25 bp, Homo sapien
gaggaggagagcaacatcttcctgg

SEQ ID NO: 3485293 - DNA, 25 bp, Homo sapien
ctgacgaggaaggcctaacaggagg

SEQ ID NO: 3485294 - DNA, 25 bp, Homo sapien
agaaactccgccatctctgactctt

SEQ ID NO: 3485295 - DNA, 25 bp, Homo sapien
ctctgactcttgcctggatgtctgc

SEQ ID NO: 3485296 - DNA, 25 bp, Homo sapien
gaaacgccatggacaagccattcat

SEQ ID NO: 3485297 - DNA, 25 bp, Homo sapien
agccccataagcaccagccacagtc

SEQ ID NO: 3485298 - DNA, 25 bp, Homo sapien
tctgtggctctgaaacgccatggac

SEQ ID NO: 3485299 - DNA, 25 bp, Homo sapien
gacactggtacaaaaggcaggaacc

SEQ ID NO: 3485300 - DNA, 25 bp, Homo sapien
cgaggtcaatgaggtgcacgccagt

SEQ ID NO: 3485301 - DNA, 25 bp, Homo sapien
aggtcaatgaggtgcacgccagtcc

SEQ ID NO: 3485302 - DNA, 25 bp, Homo sapien
ggtcaatgaggtgcacgccagtcca

SEQ ID NO: 3485303 - DNA, 25 bp, Homo sapien
ccgaggtcaatgaggtgcacgccag

SEQ ID NO: 3485304 - DNA, 25 bp, Homo sapien
acagggcctgagtcagacagcccca

SEQ ID NO: 3485305 - DNA, 25 bp, Homo sapien
tctagaccagcccacagggcctgag

SEQ ID NO: 3485306 - DNA, 25 bp, Homo sapien
cttctagaccagcccacagggcctg

SEQ ID NO: 3485307 - DNA, 25 bp, Homo sapien
ccacagggcctgagtcagacagccc

SEQ ID NO: 3485308 - DNA, 25 bp, Homo sapien
ccctcctccaggtggtagcctgatg

SEQ ID NO: 3485309 - DNA, 25 bp, Homo sapien
aggtggtagcctgatgtccccgcca

SEQ ID NO: 3485310 - DNA, 25 bp, Homo sapien
tgcatcctgacctggtaggttccaa

SEQ ID NO: 3485311 - DNA, 25 bp, Homo sapien
ggtaggttccaagattccagccctg

SEQ ID NO: 3485312 - DNA, 25 bp, Homo sapien
tactgataggcttcctggacatgtg

SEQ ID NO: 3485313 - DNA, 25 bp, Homo sapien
ttgacgatactgataggcttcctgg

SEQ ID NO: 3485314 - DNA, 25 bp, Homo sapien
ctggacatgtgatagcaggcgtaaa

SEQ ID NO: 3485315 - DNA, 25 bp, Homo sapien
taaattaggaaggtcagcagcagga

SEQ ID NO: 3485316 - DNA, 25 bp, Homo sapien
acggttacgacagtgtgcttctgca

SEQ ID NO: 3485317 - DNA, 25 bp, Homo sapien
gtaaggacggttacgacagtgtgct

SEQ ID NO: 3485318 - DNA, 25 bp, Homo sapien
agtgtgcttctgcactcttccttgc

SEQ ID NO: 3485319 - DNA, 25 bp, Homo sapien
tgtgcttctgcactcttccttgctg

SEQ ID NO: 3485320 - DNA, 25 bp, Homo sapien
gaagacagccactgagagtgggagc

SEQ ID NO: 3485321 - DNA, 25 bp, Homo sapien
ggaagacagccactgagagtgggag

SEQ ID NO: 3485322 - DNA, 25 bp, Homo sapien
ctggggaagacagccactgagagtg

SEQ ID NO: 3485323 - DNA, 25 bp, Homo sapien
ggggaagacagccactgagagtggg

SEQ ID NO: 3485324 - DNA, 25 bp, Homo sapien
ggccctgcacgcttattccatccac

SEQ ID NO: 3485325 - DNA, 25 bp, Homo sapien
ggggccctgcacgcttattccatcc

SEQ ID NO: 3485326 - DNA, 25 bp, Homo sapien
ccaggggccctgcacgcttattcca

SEQ ID NO: 3485327 - DNA, 25 bp, Homo sapien
gggccctgcacgcttattccatcca

SEQ ID NO: 3485328 - DNA, 25 bp, Homo sapien
gatgggtttgatctgctccgagcag

SEQ ID NO: 3485329 - DNA, 25 bp, Homo sapien
cattgatgggtttgatctgctccga

SEQ ID NO: 3485330 - DNA, 25 bp, Homo sapien
gtgtcattgagactgtgagtatcat

SEQ ID NO: 3485331 - DNA, 25 bp, Homo sapien
gagactgtgagtatcattgatgggt

SEQ ID NO: 3485332 - DNA, 25 bp, Homo sapien
gaagagcaacttgccctgttcttac

SEQ ID NO: 3485333 - DNA, 25 bp, Homo sapien
gggaatgggaagagcaacttgccct

SEQ ID NO: 3485334 - DNA, 25 bp, Homo sapien
gaatgggaagagcaacttgccctgt

SEQ ID NO: 3485335 - DNA, 25 bp, Homo sapien
tgggaagagcaacttgccctgttct

SEQ ID NO: 3485336 - DNA, 25 bp, Homo sapien
aacagaaagctgactgcgtggatgc

SEQ ID NO: 3485337 - DNA, 25 bp, Homo sapien
agaaagctgactgcgtggatgcccc

SEQ ID NO: 3485338 - DNA, 25 bp, Homo sapien
gaaacagaaagctgactgcgtggat

SEQ ID NO: 3485339 - DNA, 25 bp, Homo sapien
aagctgactgcgtggatgcccctgc

SEQ ID NO: 3485340 - DNA, 25 bp, Homo sapien
acatgccgatggcataggcgatgag

SEQ ID NO: 3485341 - DNA, 25 bp, Homo sapien
tagtaactccttatagttgtccttg

SEQ ID NO: 3485342 - DNA, 25 bp, Homo sapien
cgatgaggaaggcgttgtccacgcc

SEQ ID NO: 3485343 - DNA, 25 bp, Homo sapien
gatgaacatgccgatggcataggcg

SEQ ID NO: 3485344 - DNA, 25 bp, Homo sapien
ctaccaggcgaaggagcagtctctg

SEQ ID NO: 3485345 - DNA, 25 bp, Homo sapien
gtgaatagactcaaaagcagcatcc

SEQ ID NO: 3485346 - DNA, 25 bp, Homo sapien
aaagagctgctaccagtgggagtct

SEQ ID NO: 3485347 - DNA, 25 bp, Homo sapien
caactgtggtatctgagtgaataga

SEQ ID NO: 3485348 - DNA, 25 bp, Homo sapien
tccagctgagaggtagtaacggagc

SEQ ID NO: 3485349 - DNA, 25 bp, Homo sapien
cattccagctgagaggtagtaacgg

SEQ ID NO: 3485350 - DNA, 25 bp, Homo sapien
ccaggccaaagagcgaggtgaaaag

SEQ ID NO: 3485351 - DNA, 25 bp, Homo sapien
cagcattccagctgagaggtagtaa

SEQ ID NO: 3485352 - DNA, 25 bp, Homo sapien
caagattgttcaagcagagaccaag

SEQ ID NO: 3485353 - DNA, 25 bp, Homo sapien
tggaagtgaccacagcgttgtgctc

SEQ ID NO: 3485354 - DNA, 25 bp, Homo sapien
gagctggcttctctcgctcaagatt

SEQ ID NO: 3485355 - DNA, 25 bp, Homo sapien
aagcctctcgtgcattggaagtgac

SEQ ID NO: 3485356 - DNA, 25 bp, Homo sapien
cagttgccaacacaggtcaccacag

SEQ ID NO: 3485357 - DNA, 25 bp, Homo sapien
tggtctggacgagtccattacagac

SEQ ID NO: 3485358 - DNA, 25 bp, Homo sapien
agttgccaacacaggtcaccacaga

SEQ ID NO: 3485359 - DNA, 25 bp, Homo sapien
gagggccagcctgtggtctggacga

SEQ ID NO: 3485360 - DNA, 25 bp, Homo sapien
catgacggcagtaatgatgccaggc

SEQ ID NO: 3485361 - DNA, 25 bp, Homo sapien
tgccaggcacgatgaacgacaggcc

SEQ ID NO: 3485362 - DNA, 25 bp, Homo sapien
cagatgtgtgggaattccagatgcc

SEQ ID NO: 3485363 - DNA, 25 bp, Homo sapien
cagatgccggcgatcagggagccca

SEQ ID NO: 3485364 - DNA, 25 bp, Homo sapien
gaggggcgcagtccacatcttctgg

SEQ ID NO: 3485365 - DNA, 25 bp, Homo sapien
gtggtgctgaggaggggcgcagtcc

SEQ ID NO: 3485366 - DNA, 25 bp, Homo sapien
tgaggaggggcgcagtccacatctt

SEQ ID NO: 3485367 - DNA, 25 bp, Homo sapien
ggaggggcgcagtccacatcttctg

SEQ ID NO: 3485368 - DNA, 25 bp, Homo sapien
tgtgggtgcgtccatgtgctgcctc

SEQ ID NO: 3485369 - DNA, 25 bp, Homo sapien
gctgtgggtgcgtccatgtgctgcc

SEQ ID NO: 3485370 - DNA, 25 bp, Homo sapien
ctgtgggtgcgtccatgtgctgcct

SEQ ID NO: 3485371 - DNA, 25 bp, Homo sapien
tgctgtgggtgcgtccatgtgctgc

SEQ ID NO: 3485372 - DNA, 25 bp, Homo sapien
gagcagggactgttcccagggtcct

SEQ ID NO: 3485373 - DNA, 25 bp, Homo sapien
ttcgcatggccccttggagcatttg

SEQ ID NO: 3485374 - DNA, 25 bp, Homo sapien
tgggatccggagcgccccaaagaag

SEQ ID NO: 3485375 - DNA, 25 bp, Homo sapien
gcaggctcttcgcatggccccttgg

SEQ ID NO: 3485376 - DNA, 25 bp, Homo sapien
gccccttggagcatttggccacagt

SEQ ID NO: 3485377 - DNA, 25 bp, Homo sapien
gtagaggggcagccagtagaggaag

SEQ ID NO: 3485378 - DNA, 25 bp, Homo sapien
gaaggtgtaactgaccagcttggca

SEQ ID NO: 3485379 - DNA, 25 bp, Homo sapien
cacattggcgatgtagaggggcagc

SEQ ID NO: 3485380 - DNA, 25 bp, Homo sapien
gaggaaggtgtaactgaccagcttg

SEQ ID NO: 3485381 - DNA, 25 bp, Homo sapien
gatgccaccaacatcgaagagtgta

SEQ ID NO: 3485382 - DNA, 25 bp, Homo sapien
tgatgccaccaacatcgaagagtgt

SEQ ID NO: 3485383 - DNA, 25 bp, Homo sapien
ctatgatgccaccaacatcgaagag

SEQ ID NO: 3485384 - DNA, 25 bp, Homo sapien
gccaccaacatcgaagagtgtagac

SEQ ID NO: 3485385 - DNA, 25 bp, Homo sapien
tggccctgccattggtgtagtcaga

SEQ ID NO: 3485386 - DNA, 25 bp, Homo sapien
agtcagagacgagccctgccacgat

SEQ ID NO: 3485387 - DNA, 25 bp, Homo sapien
cagccaagatgagcatgacacagca

SEQ ID NO: 3485388 - DNA, 25 bp, Homo sapien
acagcaagtggtggccctgccattg

SEQ ID NO: 3485389 - DNA, 25 bp, Homo sapien
ccgtcctggccaatgtagttgtaca

SEQ ID NO: 3485390 - DNA, 25 bp, Homo sapien
ctggccaatgtagttgtacaggaac

SEQ ID NO: 3485391 - DNA, 25 bp, Homo sapien
tggcaatcccgtcctggccaatgta

SEQ ID NO: 3485392 - DNA, 25 bp, Homo sapien
ctatggagctggcaatcccgtcctg

SEQ ID NO: 3485393 - DNA, 25 bp, Homo sapien
cgcgtatgggccattgaccaggccc

SEQ ID NO: 3485394 - DNA, 25 bp, Homo sapien
cagtggtgatgagcgcgtatgggcc

SEQ ID NO: 3485395 - DNA, 25 bp, Homo sapien
tgatgagcgcgtatgggccattgac

SEQ ID NO: 3485396 - DNA, 25 bp, Homo sapien
cagcagtggtgatgagcgcgtatgg

SEQ ID NO: 3485397 - DNA, 25 bp, Homo sapien
tcaatgatggccgtgaccgtggaca

SEQ ID NO: 3485398 - DNA, 25 bp, Homo sapien
cagggctttggcgttgcccttcagg

SEQ ID NO: 3485399 - DNA, 25 bp, Homo sapien
tatggagccggtgccgtcaatgatg

SEQ ID NO: 3485400 - DNA, 25 bp, Homo sapien
tggcgttgcccttcaggctcttgtg

SEQ ID NO: 3485401 - DNA, 25 bp, Homo sapien
agaagacattgttccagcccgtggg

SEQ ID NO: 3485402 - DNA, 25 bp, Homo sapien
agcaggctaggacgtcggcagagat

SEQ ID NO: 3485403 - DNA, 25 bp, Homo sapien
cgtcggcagagatgagcatgtagaa

SEQ ID NO: 3485404 - DNA, 25 bp, Homo sapien
tgagcatgtagaagacattgttcca

SEQ ID NO: 3485405 - DNA, 25 bp, Homo sapien
aagggggagagacacgctgccactt

SEQ ID NO: 3485406 - DNA, 25 bp, Homo sapien
aatggccaacgctttggacctccag

SEQ ID NO: 3485407 - DNA, 25 bp, Homo sapien
cccaaatggccaacgctttggacct

SEQ ID NO: 3485408 - DNA, 25 bp, Homo sapien
gagacacgctgccacttggcaaggg

SEQ ID NO: 3485409 - DNA, 25 bp, Homo sapien
gcccagcaccagggtgacccgtgga

SEQ ID NO: 3485410 - DNA, 25 bp, Homo sapien
tgcccagcaccagggtgacccgtgg

SEQ ID NO: 3485411 - DNA, 25 bp, Homo sapien
ctttgtatactaaccggcaaaggag

SEQ ID NO: 3485412 - DNA, 25 bp, Homo sapien
acaccttccaggccaagatctcttt

SEQ ID NO: 3485413 - DNA, 25 bp, Homo sapien
accttccaggccaagatctctttgt

SEQ ID NO: 3485414 - DNA, 25 bp, Homo sapien
cttccaggccaagatctctttgtat

SEQ ID NO: 3485415 - DNA, 25 bp, Homo sapien
acaacagaggacaggttagcagggt

SEQ ID NO: 3485416 - DNA, 25 bp, Homo sapien
actgagcgctgggctgattcccacg

SEQ ID NO: 3485417 - DNA, 25 bp, Homo sapien
cctgcgtttggagaaactgagcgct

SEQ ID NO: 3485418 - DNA, 25 bp, Homo sapien
tggtcgagcctcagcctgcgtttgg

SEQ ID NO: 3485419 - DNA, 25 bp, Homo sapien
tcactggtgggttaggaccatacta

SEQ ID NO: 3485420 - DNA, 25 bp, Homo sapien
aaaagtcatgggacttgaggaaaat

SEQ ID NO: 3485421 - DNA, 25 bp, Homo sapien
gtcatgggacttgaggaaaatacta

SEQ ID NO: 3485422 - DNA, 25 bp, Homo sapien
aagtcatgggacttgaggaaaatac

SEQ ID NO: 3485423 - DNA, 25 bp, Homo sapien
agtcatgggacttgaggaaaatact

SEQ ID NO: 3485424 - DNA, 25 bp, Homo sapien
aacttcaggaggcacttgcagctca

SEQ ID NO: 3485425 - DNA, 25 bp, Homo sapien
tgaaagtctttacaactggcccaca

SEQ ID NO: 3485426 - DNA, 25 bp, Homo sapien
tttgttctgcataccccaggcagag

SEQ ID NO: 3485427 - DNA, 25 bp, Homo sapien
ggacagaggatttgcatgcagcccc

SEQ ID NO: 3485428 - DNA, 25 bp, Homo sapien
gccagctcattagcggcctccttgt

SEQ ID NO: 3485429 - DNA, 25 bp, Homo sapien
cggcctccttgttagcacgaggctc

SEQ ID NO: 3485430 - DNA, 25 bp, Homo sapien
catgtcccgggggttcctcctcaca

SEQ ID NO: 3485431 - DNA, 25 bp, Homo sapien
cacagctccggccagctcattagcg

SEQ ID NO: 3485432 - DNA, 25 bp, Homo sapien
tgtgtccccagatgcgtgctggtta

SEQ ID NO: 3485433 - DNA, 25 bp, Homo sapien
ccttaagtggaagtgtgtccccaga

SEQ ID NO: 3485434 - DNA, 25 bp, Homo sapien
gtgtccccagatgcgtgctggttac

SEQ ID NO: 3485435 - DNA, 25 bp, Homo sapien
aggtgctctgcgtgcttcctgtgtt

SEQ ID NO: 3485436 - DNA, 25 bp, Homo sapien
actaaatcctcctcgctttctgctg

SEQ ID NO: 3485437 - DNA, 25 bp, Homo sapien
tgctcactaaatcctcctcgctttc

SEQ ID NO: 3485438 - DNA, 25 bp, Homo sapien
gtgctctgcgtgcttcctgtgttgt

SEQ ID NO: 3485439 - DNA, 25 bp, Homo sapien
gctgctgcgaggcaagctcacacgt

SEQ ID NO: 3485440 - DNA, 25 bp, Homo sapien
aggctgctgcgaggcaagctcacac

SEQ ID NO: 3485441 - DNA, 25 bp, Homo sapien
gaggctgctgcgaggcaagctcaca

SEQ ID NO: 3485442 - DNA, 25 bp, Homo sapien
agaggctgctgcgaggcaagctcac

SEQ ID NO: 3485443 - DNA, 25 bp, Homo sapien
tctgccaggtattcagggataagca

SEQ ID NO: 3485444 - DNA, 25 bp, Homo sapien
tctgatggagtgctatgcccaaggt

SEQ ID NO: 3485445 - DNA, 25 bp, Homo sapien
cagccttgggtcaattctgccaggt

SEQ ID NO: 3485446 - DNA, 25 bp, Homo sapien
gatgacttcataagctcctgctgag

SEQ ID NO: 3485447 - DNA, 25 bp, Homo sapien
tcaaaatggagacacaactcagccc

SEQ ID NO: 3485448 - DNA, 25 bp, Homo sapien
gagatgcccattttccaggcgttgg

SEQ ID NO: 3485449 - DNA, 25 bp, Homo sapien
cccatggagaatctctgtgtcctta

SEQ ID NO: 3485450 - DNA, 25 bp, Homo sapien
caggcgttggccttgtgaagccttc

SEQ ID NO: 3485451 - DNA, 25 bp, Homo sapien
gggagtgccccttcaaattatgtac

SEQ ID NO: 3485452 - DNA, 25 bp, Homo sapien
cagaatctattggtgccagtgggca

SEQ ID NO: 3485453 - DNA, 25 bp, Homo sapien
caagccccgacaaagatgagcatgg

SEQ ID NO: 3485454 - DNA, 25 bp, Homo sapien
tgagatgcccacctatagatacagg

SEQ ID NO: 3485455 - DNA, 25 bp, Homo sapien
gagcaggacataaggactctccacg

SEQ ID NO: 3485456 - DNA, 25 bp, Homo sapien
aggacataaggactctccacgtccc

SEQ ID NO: 3485457 - DNA, 25 bp, Homo sapien
tccctgagcaggacataaggactct

SEQ ID NO: 3485458 - DNA, 25 bp, Homo sapien
cctgagcaggacataaggactctcc

SEQ ID NO: 3485459 - DNA, 25 bp, Homo sapien
ggcttttatcttgcgtggcgctcta

SEQ ID NO: 3485460 - DNA, 25 bp, Homo sapien
gagtgcccactgtcatgagctttaa

SEQ ID NO: 3485461 - DNA, 25 bp, Homo sapien
tgagctttaacctacccacttggtg

SEQ ID NO: 3485462 - DNA, 25 bp, Homo sapien
gaagggtgtgtatctggctaatgca

SEQ ID NO: 3485463 - DNA, 25 bp, Homo sapien
tgcgctcagagctgaagtgactgca

SEQ ID NO: 3485464 - DNA, 25 bp, Homo sapien
ctgaatgctgaacataaggccagag

SEQ ID NO: 3485465 - DNA, 25 bp, Homo sapien
tgcccctgtgggctgaggacttgga

SEQ ID NO: 3485466 - DNA, 25 bp, Homo sapien
ggccagagtatagctcttgcccctg

SEQ ID NO: 3485467 - DNA, 25 bp, Homo sapien
tacattagccccgtgtgagtgagtg

SEQ ID NO: 3485468 - DNA, 25 bp, Homo sapien
tctgaaaagtcaagaggcctcggct

SEQ ID NO: 3485469 - DNA, 25 bp, Homo sapien
ggaattgcccttctgccagccgtgt

SEQ ID NO: 3485470 - DNA, 25 bp, Homo sapien
tccaggaagcaggatggaaccacag

SEQ ID NO: 3485471 - DNA, 25 bp, Homo sapien
ctaggaccgaccaagagcttctttc

SEQ ID NO: 3485472 - DNA, 25 bp, Homo sapien
cctgacatctcatttctcaaatagt

SEQ ID NO: 3485473 - DNA, 25 bp, Homo sapien
tcacagttaattagaagtggggctc

SEQ ID NO: 3485474 - DNA, 25 bp, Homo sapien
tagttgaaagatcacttttgacttt

SEQ ID NO: 3485475 - DNA, 25 bp, Homo sapien
tccaacttgacatcaggattcctga

SEQ ID NO: 3485476 - DNA, 25 bp, Homo sapien
tatggtaccctgtatgctcatggcc

SEQ ID NO: 3485477 - DNA, 25 bp, Homo sapien
gggataaccctatagtcaatgtctg

SEQ ID NO: 3485478 - DNA, 25 bp, Homo sapien
cagaaccattctgtgatcagtggcc

SEQ ID NO: 3485479 - DNA, 25 bp, Homo sapien
cactgagagtttggcatgggataac

SEQ ID NO: 3485480 - DNA, 25 bp, Homo sapien
tcatgctattgtgagtctccctgca

SEQ ID NO: 3485481 - DNA, 25 bp, Homo sapien
caagtggaagcttggctcctaacaa

SEQ ID NO: 3485482 - DNA, 25 bp, Homo sapien
gccaattgttaccttcttctgagag

SEQ ID NO: 3485483 - DNA, 25 bp, Homo sapien
tcttgagggaattgagacaagctgg

SEQ ID NO: 3485484 - DNA, 25 bp, Homo sapien
tattcagagccttgttttgacagcc

SEQ ID NO: 3485485 - DNA, 25 bp, Homo sapien
ttatgttctggagccgatctatgcc

SEQ ID NO: 3485486 - DNA, 25 bp, Homo sapien
tgaaggcaatgagtgtcacttccct

SEQ ID NO: 3485487 - DNA, 25 bp, Homo sapien
gaggagtatctgtccatcactaaga

SEQ ID NO: 3485488 - DNA, 25 bp, Homo sapien
gatatgtttgtacggcacttagcac

SEQ ID NO: 3485489 - DNA, 25 bp, Homo sapien
tcagaagcttcgctccgggattcaa

SEQ ID NO: 3485490 - DNA, 25 bp, Homo sapien
cagtttccattaagggactctggga

SEQ ID NO: 3485491 - DNA, 25 bp, Homo sapien
gaaactaatagataccccatcgcgc

SEQ ID NO: 3485492 - DNA, 25 bp, Homo sapien
gctgttgtatgaggcacttcccttg

SEQ ID NO: 3485493 - DNA, 25 bp, Homo sapien
gatatcaggtctctgccttcgtgga

SEQ ID NO: 3485494 - DNA, 25 bp, Homo sapien
catccagcatattgaccagaggtta

SEQ ID NO: 3485495 - DNA, 25 bp, Homo sapien
cataatctctgtgctaagaactggg

SEQ ID NO: 3485496 - DNA, 25 bp, Homo sapien
taagggtccatatactacacatggc

SEQ ID NO: 3485497 - DNA, 25 bp, Homo sapien
gcttcgttcgaatcaggaccaaata

SEQ ID NO: 3485498 - DNA, 25 bp, Homo sapien
acatcaccgtatgaacaaacccagg

SEQ ID NO: 3485499 - DNA, 25 bp, Homo sapien
gcatggttagatacaacatcaccgt

SEQ ID NO: 3485500 - DNA, 25 bp, Homo sapien
cttgaaatcgggttggccaagccat

SEQ ID NO: 3485501 - DNA, 25 bp, Homo sapien
ccttgaaatcgggttggccaagcca

SEQ ID NO: 3485502 - DNA, 25 bp, Homo sapien
ggtctcagagccagttctgaccagc

SEQ ID NO: 3485503 - DNA, 25 bp, Homo sapien
cctactcatatgctaggacccagca

SEQ ID NO: 3485504 - DNA, 25 bp, Homo sapien
gaagccagtatgatcattagaagtg

SEQ ID NO: 3485505 - DNA, 25 bp, Homo sapien
caagttctgttgagccatgcccatt

SEQ ID NO: 3485506 - DNA, 25 bp, Homo sapien
gaggtggtaaagcaaatggtgaagc

SEQ ID NO: 3485507 - DNA, 25 bp, Homo sapien
tggaggtggtaaagcaaatggtgaa

SEQ ID NO: 3485508 - DNA, 25 bp, Homo sapien
ctgaggactgcatagactttggctg

SEQ ID NO: 3485509 - DNA, 25 bp, Homo sapien
ggactgcatagactttggctgtgct

SEQ ID NO: 3485510 - DNA, 25 bp, Homo sapien
cattctggatgtaccccattccttc

SEQ ID NO: 3485511 - DNA, 25 bp, Homo sapien
attctggatgtaccccattccttcc

SEQ ID NO: 3485512 - DNA, 25 bp, Homo sapien
cagcctctgactcttggtcaccaga

SEQ ID NO: 3485513 - DNA, 25 bp, Homo sapien
tctggatgtaccccattccttccag

SEQ ID NO: 3485514 - DNA, 25 bp, Homo sapien
tgtcaatctgtagaacaacacaagc

SEQ ID NO: 3485515 - DNA, 25 bp, Homo sapien
gtcaatctgtagaacaacacaagca

SEQ ID NO: 3485516 - DNA, 25 bp, Homo sapien
tcaatctgtagaacaacacaagcat

SEQ ID NO: 3485517 - DNA, 25 bp, Homo sapien
attgtcaatctgtagaacaacacaa

SEQ ID NO: 3485518 - DNA, 25 bp, Homo sapien
tggagcccacggacgttgctctcca

SEQ ID NO: 3485519 - DNA, 25 bp, Homo sapien
tgggccgggaggtctgccatgatgt

SEQ ID NO: 3485520 - DNA, 25 bp, Homo sapien
gggaggtctgccatgatgttgctga

SEQ ID NO: 3485521 - DNA, 25 bp, Homo sapien
ccttgtggagcccacggacgttgct

SEQ ID NO: 3485522 - DNA, 25 bp, Homo sapien
agttcttctgggccagctcatcata

SEQ ID NO: 3485523 - DNA, 25 bp, Homo sapien
gttcttctgggccagctcatcatac

SEQ ID NO: 3485524 - DNA, 25 bp, Homo sapien
tcagttcttctgggccagctcatca

SEQ ID NO: 3485525 - DNA, 25 bp, Homo sapien
cagttcttctgggccagctcatcat

SEQ ID NO: 3485526 - DNA, 25 bp, Homo sapien
ttaggactgaactatacatctcagc

SEQ ID NO: 3485527 - DNA, 25 bp, Homo sapien
tggtgtgttcctcagtcttctggga

SEQ ID NO: 3485528 - DNA, 25 bp, Homo sapien
tctcttaggactgaactatacatct

SEQ ID NO: 3485529 - DNA, 25 bp, Homo sapien
gctcctattttggtggactgcgtgg

SEQ ID NO: 3485530 - DNA, 25 bp, Homo sapien
ccaggctggccttcagatttctcat

SEQ ID NO: 3485531 - DNA, 25 bp, Homo sapien
tccaggctggccttcagatttctca

SEQ ID NO: 3485532 - DNA, 25 bp, Homo sapien
ctccaggctggccttcagatttctc

SEQ ID NO: 3485533 - DNA, 25 bp, Homo sapien
cgggcctccacccacctcaggctgt

SEQ ID NO: 3485534 - DNA, 25 bp, Homo sapien
tagcgggcctccacccacctcaggc

SEQ ID NO: 3485535 - DNA, 25 bp, Homo sapien
ggcatagcgggcctccacccacctc

SEQ ID NO: 3485536 - DNA, 25 bp, Homo sapien
gggcctccacccacctcaggctgtt

SEQ ID NO: 3485537 - DNA, 25 bp, Homo sapien
gctctgaatctaggtgcagcacggc

SEQ ID NO: 3485538 - DNA, 25 bp, Homo sapien
ctctgaatctaggtgcagcacggcc

SEQ ID NO: 3485539 - DNA, 25 bp, Homo sapien
cagtagtagtagtagcggcaatctc

SEQ ID NO: 3485540 - DNA, 25 bp, Homo sapien
ccgctatcctggacagtcttttgga

SEQ ID NO: 3485541 - DNA, 25 bp, Homo sapien
cagggcatcgccacaattgaagtcc

SEQ ID NO: 3485542 - DNA, 25 bp, Homo sapien
ctttgtcatccgctatcctggacag

SEQ ID NO: 3485543 - DNA, 25 bp, Homo sapien
tttatttttgacatccaatgacttc

SEQ ID NO: 3485544 - DNA, 25 bp, Homo sapien
tatttttgacatccaatgacttctg

SEQ ID NO: 3485545 - DNA, 25 bp, Homo sapien
ttttgacatccaatgacttctgaac

SEQ ID NO: 3485546 - DNA, 25 bp, Homo sapien
aatttatttttgacatccaatgact

SEQ ID NO: 3485547 - DNA, 25 bp, Homo sapien
cagtcttttttagagtgagggacac

SEQ ID NO: 3485548 - DNA, 25 bp, Homo sapien
ctgagacagcaaagatgaagcacta

SEQ ID NO: 3485549 - DNA, 25 bp, Homo sapien
gacacagttttgattctgagacagc

SEQ ID NO: 3485550 - DNA, 25 bp, Homo sapien
aattagatgatcaaataatcagtct

SEQ ID NO: 3485551 - DNA, 25 bp, Homo sapien
ggcaaccattggtctataacatcag

SEQ ID NO: 3485552 - DNA, 25 bp, Homo sapien
tacaagctaagattaagcccacagg

SEQ ID NO: 3485553 - DNA, 25 bp, Homo sapien
tgctaacctagtggcctcttcgtac

SEQ ID NO: 3485554 - DNA, 25 bp, Homo sapien
tctactaggcagcataacgagtgat

SEQ ID NO: 3485555 - DNA, 25 bp, Homo sapien
tacttaaatgtaccatcctcctggg

SEQ ID NO: 3485556 - DNA, 25 bp, Homo sapien
cagggcacgtgatccaatttactgg

SEQ ID NO: 3485557 - DNA, 25 bp, Homo sapien
gctagagcactatgagggaattaca

SEQ ID NO: 3485558 - DNA, 25 bp, Homo sapien
gaattacatatcatccagggcacgt

SEQ ID NO: 3485559 - DNA, 25 bp, Homo sapien
tgagaagcaactgggagactgccaa

SEQ ID NO: 3485560 - DNA, 25 bp, Homo sapien
cctaaaggacgttaagatgagaagc

SEQ ID NO: 3485561 - DNA, 25 bp, Homo sapien
ggctgccctgcagaaagagcttgca

SEQ ID NO: 3485562 - DNA, 25 bp, Homo sapien
tggcacccgacagcaagagggctgt

SEQ ID NO: 3485563 - DNA, 25 bp, Homo sapien
gaacaagctgctccacttttcgaca

SEQ ID NO: 3485564 - DNA, 25 bp, Homo sapien
taagcaaacacgctgaagatcccag

SEQ ID NO: 3485565 - DNA, 25 bp, Homo sapien
tctgcaggttccaagaagtcgtgag

SEQ ID NO: 3485566 - DNA, 25 bp, Homo sapien
aaaatgccaacttgggctctgcagg

SEQ ID NO: 3485567 - DNA, 25 bp, Homo sapien
tcatctggccctgatcccctttcag

SEQ ID NO: 3485568 - DNA, 25 bp, Homo sapien
gatcccctttcaggctaatctgctc

SEQ ID NO: 3485569 - DNA, 25 bp, Homo sapien
cctcatctggccctgatcccctttc

SEQ ID NO: 3485570 - DNA, 25 bp, Homo sapien
tcttcatgttagtcctcatctggcc

SEQ ID NO: 3485571 - DNA, 25 bp, Homo sapien
tgacaacacagcctatacttcccag

SEQ ID NO: 3485572 - DNA, 25 bp, Homo sapien
catcagactgacaccggcgtgacaa

SEQ ID NO: 3485573 - DNA, 25 bp, Homo sapien
ggcgtgacaacacagcctatacttc

SEQ ID NO: 3485574 - DNA, 25 bp, Homo sapien
tgacaccggcgtgacaacacagcct

SEQ ID NO: 3485575 - DNA, 25 bp, Homo sapien
tcctgttactgaatcctaaaaacgc

SEQ ID NO: 3485576 - DNA, 25 bp, Homo sapien
ctgttactgaatcctaaaaacgcca

SEQ ID NO: 3485577 - DNA, 25 bp, Homo sapien
gatcctgttactgaatcctaaaaac

SEQ ID NO: 3485578 - DNA, 25 bp, Homo sapien
tgatcctgttactgaatcctaaaaa

SEQ ID NO: 3485579 - DNA, 25 bp, Homo sapien
aatgcgaagcttttggctgccaccg

SEQ ID NO: 3485580 - DNA, 25 bp, Homo sapien
gattatgagaccagaaacgggaccc

SEQ ID NO: 3485581 - DNA, 25 bp, Homo sapien
gaatcgctctcttaggaccgggtcc

SEQ ID NO: 3485582 - DNA, 25 bp, Homo sapien
taaacgctttttcacacgcggagct

SEQ ID NO: 3485583 - DNA, 25 bp, Homo sapien
tcacggaaggtaaagaagtcaggtc

SEQ ID NO: 3485584 - DNA, 25 bp, Homo sapien
tacgttgcacgttggattcacggaa

SEQ ID NO: 3485585 - DNA, 25 bp, Homo sapien
tctgccatgtgggatccagcaagct

SEQ ID NO: 3485586 - DNA, 25 bp, Homo sapien
tggtgcacccataaacttcaaggcc

SEQ ID NO: 3485587 - DNA, 25 bp, Homo sapien
cctctccatgctcggatctgcgttt

SEQ ID NO: 3485588 - DNA, 25 bp, Homo sapien
tttgtttgatccagacacttggctt

SEQ ID NO: 3485589 - DNA, 25 bp, Homo sapien
catgccgtcacctccagcaattgca

SEQ ID NO: 3485590 - DNA, 25 bp, Homo sapien
gacacttggcttcacatgccgtcac

SEQ ID NO: 3485591 - DNA, 25 bp, Homo sapien
tgcattcgtctgatacaggacagct

SEQ ID NO: 3485592 - DNA, 25 bp, Homo sapien
catttggaagaagcgggctggatcc

SEQ ID NO: 3485593 - DNA, 25 bp, Homo sapien
caggccttgccttcccagtggaata

SEQ ID NO: 3485594 - DNA, 25 bp, Homo sapien
gcccctcttggtaaagtgtagatgg

SEQ ID NO: 3485595 - DNA, 25 bp, Homo sapien
ctggctatttgtgcaacgctggttg

SEQ ID NO: 3485596 - DNA, 25 bp, Homo sapien
ggttgaagacgccagtgacctggaa

SEQ ID NO: 3485597 - DNA, 25 bp, Homo sapien
tgtgcaacgctggttgaagacgcca

SEQ ID NO: 3485598 - DNA, 25 bp, Homo sapien
tgacctggaaaagggcccaagccag

SEQ ID NO: 3485599 - DNA, 25 bp, Homo sapien
tgccagcagccaatggtgctccgtg

SEQ ID NO: 3485600 - DNA, 25 bp, Homo sapien
gccagcagccaatggtgctccgtgg

SEQ ID NO: 3485601 - DNA, 25 bp, Homo sapien
ccagcagccaatggtgctccgtgga

SEQ ID NO: 3485602 - DNA, 25 bp, Homo sapien
tgtgggaattgcatcctgctctgtg

SEQ ID NO: 3485603 - DNA, 25 bp, Homo sapien
ctcggatgagagcacaatccctggc

SEQ ID NO: 3485604 - DNA, 25 bp, Homo sapien
aagaatgcggaagggatgcctgcat

SEQ ID NO: 3485605 - DNA, 25 bp, Homo sapien
tgaacatcgcaaggttatcaccagg

SEQ ID NO: 3485606 - DNA, 25 bp, Homo sapien
gatgaaaaagatgcggctcctgtcc

SEQ ID NO: 3485607 - DNA, 25 bp, Homo sapien
tggtgccataaggaatgaaaagatg

SEQ ID NO: 3485608 - DNA, 25 bp, Homo sapien
taggcacttggtgccataaggaatg

SEQ ID NO: 3485609 - DNA, 25 bp, Homo sapien
ggcacttggtgccataaggaatgaa

SEQ ID NO: 3485610 - DNA, 25 bp, Homo sapien
gaaaatgaatgcaacccactcacaa

SEQ ID NO: 3485611 - DNA, 25 bp, Homo sapien
tgctttctaaattcctacacaccct

SEQ ID NO: 3485612 - DNA, 25 bp, Homo sapien
tgactggagagtgtcctggacttag

SEQ ID NO: 3485613 - DNA, 25 bp, Homo sapien
acacaggcagtagcctgtggtgact

SEQ ID NO: 3485614 - DNA, 25 bp, Homo sapien
agcatagtcagaaggcctagcacca

SEQ ID NO: 3485615 - DNA, 25 bp, Homo sapien
gcatagtcagaaggcctagcaccat

SEQ ID NO: 3485616 - DNA, 25 bp, Homo sapien
atggataaaaccaggagagtcccag

SEQ ID NO: 3485617 - DNA, 25 bp, Homo sapien
ggcaaactgggatgtgtcgttcaac

SEQ ID NO: 3485618 - DNA, 25 bp, Homo sapien
caggcaaactgggatgtgtcgttca

SEQ ID NO: 3485619 - DNA, 25 bp, Homo sapien
tcccaggcaaactgggatgtgtcgt

SEQ ID NO: 3485620 - DNA, 25 bp, Homo sapien
gatggtcagcatgcatcctgggcca

SEQ ID NO: 3485621 - DNA, 25 bp, Homo sapien
gcatgtgctgatctggtctttcttc

SEQ ID NO: 3485622 - DNA, 25 bp, Homo sapien
tgggccacctctgacctcgagcatg

SEQ ID NO: 3485623 - DNA, 25 bp, Homo sapien
ctggaaccagtgataaaacaagagc

SEQ ID NO: 3485624 - DNA, 25 bp, Homo sapien
ccatgggatggactcttcaggactc

SEQ ID NO: 3485625 - DNA, 25 bp, Homo sapien
tctttctgcacaagaagctgtcctt

SEQ ID NO: 3485626 - DNA, 25 bp, Homo sapien
ggactcccagatcaaaggattcaga

SEQ ID NO: 3485627 - DNA, 25 bp, Homo sapien
ttggttttagccagactccctccga

SEQ ID NO: 3485628 - DNA, 25 bp, Homo sapien
cttcctgtgccctgaatgcaggctt

SEQ ID NO: 3485629 - DNA, 25 bp, Homo sapien
tcctgtgccctgaatgcaggctttg

SEQ ID NO: 3485630 - DNA, 25 bp, Homo sapien
aagcttcaaggcatcattgccttcc

SEQ ID NO: 3485631 - DNA, 25 bp, Homo sapien
cctgtgccctgaatgcaggctttgg

SEQ ID NO: 3485632 - DNA, 25 bp, Homo sapien
catgcacactcatccaacactgcac

SEQ ID NO: 3485633 - DNA, 25 bp, Homo sapien
gcaggcaccagctctctcccgagca

SEQ ID NO: 3485634 - DNA, 25 bp, Homo sapien
gcaccagctctctcccgagcagccg

SEQ ID NO: 3485635 - DNA, 25 bp, Homo sapien
tctctcccgagcagccggctccacc

SEQ ID NO: 3485636 - DNA, 25 bp, Homo sapien
agctctctcccgagcagccggctcc

SEQ ID NO: 3485637 - DNA, 25 bp, Homo sapien
ccacatcagatacaatgtcaggtat

SEQ ID NO: 3485638 - DNA, 25 bp, Homo sapien
tgtcggggccacatcagatacaatg

SEQ ID NO: 3485639 - DNA, 25 bp, Homo sapien
gggccacatcagatacaatgtcagg

SEQ ID NO: 3485640 - DNA, 25 bp, Homo sapien
cctgtcggggccacatcagatacaa

SEQ ID NO: 3485641 - DNA, 25 bp, Homo sapien
taatccatgcgcactgctgctcagg

SEQ ID NO: 3485642 - DNA, 25 bp, Homo sapien
tgctcttcttacaaaggtctggtcc

SEQ ID NO: 3485643 - DNA, 25 bp, Homo sapien
tctcctgcaagataccatccaagtg

SEQ ID NO: 3485644 - DNA, 25 bp, Homo sapien
gctcaggccagtgctctaaaatata

SEQ ID NO: 3485645 - DNA, 25 bp, Homo sapien
aattgttcttagccactaatttggc

SEQ ID NO: 3485646 - DNA, 25 bp, Homo sapien
ctggatctgggatcacagcaggatg

SEQ ID NO: 3485647 - DNA, 25 bp, Homo sapien
agcaggatgctgaaagagcatttgt

SEQ ID NO: 3485648 - DNA, 25 bp, Homo sapien
cttttctagtgagcagcatggagga

SEQ ID NO: 3485649 - DNA, 25 bp, Homo sapien
gccccttttctagtgagcagcatgg

SEQ ID NO: 3485650 - DNA, 25 bp, Homo sapien
tagtgagcagcatggaggatagaaa

SEQ ID NO: 3485651 - DNA, 25 bp, Homo sapien
agcatggaggatagaaagcctcaga

SEQ ID NO: 3485652 - DNA, 25 bp, Homo sapien
atgttagccgatcgcagggcggcca

SEQ ID NO: 3485653 - DNA, 25 bp, Homo sapien
aggatgttagccgatcgcagggcgg

SEQ ID NO: 3485654 - DNA, 25 bp, Homo sapien
tcggcaggatgttagccgatcgcag

SEQ ID NO: 3485655 - DNA, 25 bp, Homo sapien
ggcaggatgttagccgatcgcaggg

SEQ ID NO: 3485656 - DNA, 25 bp, Homo sapien
gcataggttcccatcaagatctggt

SEQ ID NO: 3485657 - DNA, 25 bp, Homo sapien
ccttcgagcataggttcccatcaag

SEQ ID NO: 3485658 - DNA, 25 bp, Homo sapien
gcctgatttcttgcgggcactctga

SEQ ID NO: 3485659 - DNA, 25 bp, Homo sapien
gttgtttttacgctcattgcctgat

SEQ ID NO: 3485660 - DNA, 25 bp, Homo sapien
caagagacagatctggaagggttgg

SEQ ID NO: 3485661 - DNA, 25 bp, Homo sapien
atccccaggtggagaactgctcacc

SEQ ID NO: 3485662 - DNA, 25 bp, Homo sapien
caggtggagaactgctcacctctag

SEQ ID NO: 3485663 - DNA, 25 bp, Homo sapien
tcacctctagaggtcggcaacaggc

SEQ ID NO: 3485664 - DNA, 25 bp, Homo sapien
ctgggagggtttatagcagattctt

SEQ ID NO: 3485665 - DNA, 25 bp, Homo sapien
cctgggagggtttatagcagattct

SEQ ID NO: 3485666 - DNA, 25 bp, Homo sapien
ttaaaatccaggcaacgcacacaca

SEQ ID NO: 3485667 - DNA, 25 bp, Homo sapien
cacagacatctttgtcgctgaaaag

SEQ ID NO: 3485668 - DNA, 25 bp, Homo sapien
catataccccacagacatctttgtc

SEQ ID NO: 3485669 - DNA, 25 bp, Homo sapien
taaaatccaggcaacgcacacacat

SEQ ID NO: 3485670 - DNA, 25 bp, Homo sapien
aatgcggttgtgatcccctacacaa

SEQ ID NO: 3485671 - DNA, 25 bp, Homo sapien
gacaggtagtgtcacaatgcggttg

SEQ ID NO: 3485672 - DNA, 25 bp, Homo sapien
gggctcagctttgacccagctcgga

SEQ ID NO: 3485673 - DNA, 25 bp, Homo sapien
cccagctcggatgacaggtagtgtc

SEQ ID NO: 3485674 - DNA, 25 bp, Homo sapien
ctggacaccgtcatcaatgttacag

SEQ ID NO: 3485675 - DNA, 25 bp, Homo sapien
gacaccgtcatcaatgttacagaag

SEQ ID NO: 3485676 - DNA, 25 bp, Homo sapien
gtcatcaatgttacagaaggtgagg

SEQ ID NO: 3485677 - DNA, 25 bp, Homo sapien
ccgtcatcaatgttacagaaggtga

SEQ ID NO: 3485678 - DNA, 25 bp, Homo sapien
cccttgggacctcagacttagaatt

SEQ ID NO: 3485679 - DNA, 25 bp, Homo sapien
gtaactgaagcataatgaagaatgt

SEQ ID NO: 3485680 - DNA, 25 bp, Homo sapien
atgaagaatgtggtacaaacaagca

SEQ ID NO: 3485681 - DNA, 25 bp, Homo sapien
aactgaagcataatgaagaatgtgg

SEQ ID NO: 3485682 - DNA, 25 bp, Homo sapien
agctcagaggcacagaataatacag

SEQ ID NO: 3485683 - DNA, 25 bp, Homo sapien
gatctgacaccaaaggcgtcttgtg

SEQ ID NO: 3485684 - DNA, 25 bp, Homo sapien
tgtctggcccctactcttcagccct

SEQ ID NO: 3485685 - DNA, 25 bp, Homo sapien
atctgacaccaaaggcgtcttgtga

SEQ ID NO: 3485686 - DNA, 25 bp, Homo sapien
gtcatcactccttccggcccaaggg

SEQ ID NO: 3485687 - DNA, 25 bp, Homo sapien
gcccaaggggagacgcagctgcata

SEQ ID NO: 3485688 - DNA, 25 bp, Homo sapien
cccaaggggagacgcagctgcataa

SEQ ID NO: 3485689 - DNA, 25 bp, Homo sapien
tctccagagtcatcactccttccgg

SEQ ID NO: 3485690 - DNA, 25 bp, Homo sapien
ctggactgcagctgttaccgcggga

SEQ ID NO: 3485691 - DNA, 25 bp, Homo sapien
tgaccccggagaggtttagcacgct

SEQ ID NO: 3485692 - DNA, 25 bp, Homo sapien
ggctggagccgtcgccagcagtccc

SEQ ID NO: 3485693 - DNA, 25 bp, Homo sapien
tgctgtttgcctaaactaggcccgc

SEQ ID NO: 3485694 - DNA, 25 bp, Homo sapien
catagcctgagctgcattccaaggg

SEQ ID NO: 3485695 - DNA, 25 bp, Homo sapien
gaaggagctctagcatcatccagtt

SEQ ID NO: 3485696 - DNA, 25 bp, Homo sapien
tggggaaggagctctagcatcatcc

SEQ ID NO: 3485697 - DNA, 25 bp, Homo sapien
tgagctgcattccaagggatctggg

SEQ ID NO: 3485698 - DNA, 25 bp, Homo sapien
cagaaaagccacagatgacccgcaa

SEQ ID NO: 3485699 - DNA, 25 bp, Homo sapien
ctcagaaacccgggtgacagccccg

SEQ ID NO: 3485700 - DNA, 25 bp, Homo sapien
acagatgacccgcaaccctctgggg

SEQ ID NO: 3485701 - DNA, 25 bp, Homo sapien
gaaaagccacagatgacccgcaacc

SEQ ID NO: 3485702 - DNA, 25 bp, Homo sapien
atcctgtggctgcacacgcagagtg

SEQ ID NO: 3485703 - DNA, 25 bp, Homo sapien
ctgtggctgcacacgcagagtgaga

SEQ ID NO: 3485704 - DNA, 25 bp, Homo sapien
gctgctgtaaggaaagggctcaagg

SEQ ID NO: 3485705 - DNA, 25 bp, Homo sapien
tgctgctgtaaggaaagggctcaag

SEQ ID NO: 3485706 - DNA, 25 bp, Homo sapien
ggaagaagccgtgagtcccgtcctg

SEQ ID NO: 3485707 - DNA, 25 bp, Homo sapien
tagggaagaagccgtgagtcccgtc

SEQ ID NO: 3485708 - DNA, 25 bp, Homo sapien
aagaagccgtgagtcccgtcctgac

SEQ ID NO: 3485709 - DNA, 25 bp, Homo sapien
ggaagtagggaagaagccgtgagtc

SEQ ID NO: 3485710 - DNA, 25 bp, Homo sapien
tcaaaagggagatatagtgcttgcc

SEQ ID NO: 3485711 - DNA, 25 bp, Homo sapien
tcctaaggccctagcacaacgtgga

SEQ ID NO: 3485712 - DNA, 25 bp, Homo sapien
ttgccgaaggcacattcctaaggcc

SEQ ID NO: 3485713 - DNA, 25 bp, Homo sapien
catgataggcatgcttgttctttct

SEQ ID NO: 3485714 - DNA, 25 bp, Homo sapien
cacacccgttttggtctgtttgctg

SEQ ID NO: 3485715 - DNA, 25 bp, Homo sapien
ctctgtgtcacacccgttttggtct

SEQ ID NO: 3485716 - DNA, 25 bp, Homo sapien
cttctctgtgtcacacccgttttgg

SEQ ID NO: 3485717 - DNA, 25 bp, Homo sapien
tgtgtcacacccgttttggtctgtt

SEQ ID NO: 3485718 - DNA, 25 bp, Homo sapien
aaaaccagacgagccagggcacttg

SEQ ID NO: 3485719 - DNA, 25 bp, Homo sapien
ggaatctaagctctctggtttccaa

SEQ ID NO: 3485720 - DNA, 25 bp, Homo sapien
tgttgccacacaggcatgcccacaa

SEQ ID NO: 3485721 - DNA, 25 bp, Homo sapien
cagaggagatgtgaaaaccagacga

SEQ ID NO: 3485722 - DNA, 25 bp, Homo sapien
caagttgaatggcaaggtgaggcat

SEQ ID NO: 3485723 - DNA, 25 bp, Homo sapien
ggtgaggcataccagccacagcttc

SEQ ID NO: 3485724 - DNA, 25 bp, Homo sapien
ggccacgggacagacactgcaagtt

SEQ ID NO: 3485725 - DNA, 25 bp, Homo sapien
cagccggggtaaagctctcactctg

SEQ ID NO: 3485726 - DNA, 25 bp, Homo sapien
taaagccctgctcagtgacagacac

SEQ ID NO: 3485727 - DNA, 25 bp, Homo sapien
tatctgacaagctgagcagtggcac

SEQ ID NO: 3485728 - DNA, 25 bp, Homo sapien
atggctaaagccctgctcagtgaca

SEQ ID NO: 3485729 - DNA, 25 bp, Homo sapien
caccacaacagcactggcgtggcag

SEQ ID NO: 3485730 - DNA, 25 bp, Homo sapien
gtgcatccacaagtacctccgtcat

SEQ ID NO: 3485731 - DNA, 25 bp, Homo sapien
cgtgcatccacaagtacctccgtca

SEQ ID NO: 3485732 - DNA, 25 bp, Homo sapien
tcccgtgcatccacaagtacctccg

SEQ ID NO: 3485733 - DNA, 25 bp, Homo sapien
tttcttcccgtgcatccacaagtac

SEQ ID NO: 3485734 - DNA, 25 bp, Homo sapien
tctgagcatttctccggtggaggcc

SEQ ID NO: 3485735 - DNA, 25 bp, Homo sapien
gaaaagcttcagcacaatgccagaa

SEQ ID NO: 3485736 - DNA, 25 bp, Homo sapien
cagagcatgtttcacatccctggca

SEQ ID NO: 3485737 - DNA, 25 bp, Homo sapien
tgtcacaaagcgtgaagggcttcca

SEQ ID NO: 3485738 - DNA, 25 bp, Homo sapien
aggtccaggactcccggcttctgtt

SEQ ID NO: 3485739 - DNA, 25 bp, Homo sapien
acggtgcaagatctaaggcccctcc

SEQ ID NO: 3485740 - DNA, 25 bp, Homo sapien
ggtgcaagatctaaggcccctccta

SEQ ID NO: 3485741 - DNA, 25 bp, Homo sapien
tgcaagatctaaggcccctcctaat

SEQ ID NO: 3485742 - DNA, 25 bp, Homo sapien
tctaaggcccctcctaatttcctca

SEQ ID NO: 3485743 - DNA, 25 bp, Homo sapien
tcccacctgggagctaagagatttc

SEQ ID NO: 3485744 - DNA, 25 bp, Homo sapien
tgcttcctacgggagacgtgcctct

SEQ ID NO: 3485745 - DNA, 25 bp, Homo sapien
tagtgatctcgggtaaggctcaggc

SEQ ID NO: 3485746 - DNA, 25 bp, Homo sapien
tgcacaacgtgagaagccagagtcg

SEQ ID NO: 3485747 - DNA, 25 bp, Homo sapien
gtttggtcaaatctggcccagagcc

SEQ ID NO: 3485748 - DNA, 25 bp, Homo sapien
ttgtttttaggagtgatctcttcct

SEQ ID NO: 3485749 - DNA, 25 bp, Homo sapien
tgctctggcccgggtaacatttggt

SEQ ID NO: 3485750 - DNA, 25 bp, Homo sapien
tggctggacgatacccctgctctgg

SEQ ID NO: 3485751 - DNA, 25 bp, Homo sapien
tagcatgctgcaacacctgtctgcg

SEQ ID NO: 3485752 - DNA, 25 bp, Homo sapien
cacagctaatgagcaccgagtgaca

SEQ ID NO: 3485753 - DNA, 25 bp, Homo sapien
tgacacgccagtggtgagcagcaat

SEQ ID NO: 3485754 - DNA, 25 bp, Homo sapien
tattgggcaacggatgaagcctcca

SEQ ID NO: 3485755 - DNA, 25 bp, Homo sapien
tgtccccgactttctgatttacatg

SEQ ID NO: 3485756 - DNA, 25 bp, Homo sapien
ctccagaaagactgtcattaaagct

SEQ ID NO: 3485757 - DNA, 25 bp, Homo sapien
tccagaaagactgtcattaaagctt

SEQ ID NO: 3485758 - DNA, 25 bp, Homo sapien
tctgatttacatgtacaaataatcg

SEQ ID NO: 3485759 - DNA, 25 bp, Homo sapien
gacaggagagccaatctctgcttct

SEQ ID NO: 3485760 - DNA, 25 bp, Homo sapien
gtaacatctaacactgtggtgagct

SEQ ID NO: 3485761 - DNA, 25 bp, Homo sapien
acaggagagccaatctctgcttctc

SEQ ID NO: 3485762 - DNA, 25 bp, Homo sapien
taacatctaacactgtggtgagctc

SEQ ID NO: 3485763 - DNA, 25 bp, Homo sapien
gaatagatacacgtggcttgtggct

SEQ ID NO: 3485764 - DNA, 25 bp, Homo sapien
ggaggccctgcgatgtgctgaatat

SEQ ID NO: 3485765 - DNA, 25 bp, Homo sapien
gctaccagctgccacgttagacagt

SEQ ID NO: 3485766 - DNA, 25 bp, Homo sapien
aaagggcatggacaggactcaagcc

SEQ ID NO: 3485767 - DNA, 25 bp, Homo sapien
caaaaaagggtagagcagctctcag

SEQ ID NO: 3485768 - DNA, 25 bp, Homo sapien
aatttcccttgcagccatttctcct

SEQ ID NO: 3485769 - DNA, 25 bp, Homo sapien
cattcaactctctctcaatgtggtc

SEQ ID NO: 3485770 - DNA, 25 bp, Homo sapien
ccaggatgtcctctattctgtaatt

SEQ ID NO: 3485771 - DNA, 25 bp, Homo sapien
ttcttcctgtctgctagagccaaag

SEQ ID NO: 3485772 - DNA, 25 bp, Homo sapien
cagctgggccagaatttcttcctgt

SEQ ID NO: 3485773 - DNA, 25 bp, Homo sapien
cctctttctacttccagctgggcca

SEQ ID NO: 3485774 - DNA, 25 bp, Homo sapien
ttcctgtctgctagagccaaagcac

SEQ ID NO: 3485775 - DNA, 25 bp, Homo sapien
cccggggcctctgagatggtcctca

SEQ ID NO: 3485776 - DNA, 25 bp, Homo sapien
cctctgagatggtcctcaggagact

SEQ ID NO: 3485777 - DNA, 25 bp, Homo sapien
tgatcccggggcctctgagatggtc

SEQ ID NO: 3485778 - DNA, 25 bp, Homo sapien
tgttcgggtgatcccggggcctctg

SEQ ID NO: 3485779 - DNA, 25 bp, Homo sapien
gagctaaggaggtgacatgaagaca

SEQ ID NO: 3485780 - DNA, 25 bp, Homo sapien
agagacaggaataaggcccagccct

SEQ ID NO: 3485781 - DNA, 25 bp, Homo sapien
caaggtcgttcatgttaagtgtcag

SEQ ID NO: 3485782 - DNA, 25 bp, Homo sapien
tcatgttctgagctcgttctagagg

SEQ ID NO: 3485783 - DNA, 25 bp, Homo sapien
gaatttggcgatgatttctgctgcc

SEQ ID NO: 3485784 - DNA, 25 bp, Homo sapien
ttaactctccctcgttccctctctg

SEQ ID NO: 3485785 - DNA, 25 bp, Homo sapien
cagctttgtgaggaatttggcgatg

SEQ ID NO: 3485786 - DNA, 25 bp, Homo sapien
cattcatctttgtgattaactctcc

SEQ ID NO: 3485787 - DNA, 25 bp, Homo sapien
agcacacttcacacggattcaccag

SEQ ID NO: 3485788 - DNA, 25 bp, Homo sapien
gtgacatcactctgctacacagact

SEQ ID NO: 3485789 - DNA, 25 bp, Homo sapien
atgttgaaaaggctcaacttgcccc

SEQ ID NO: 3485790 - DNA, 25 bp, Homo sapien
caccaggtgtagaacccttgtccct

SEQ ID NO: 3485791 - DNA, 25 bp, Homo sapien
gccattcacactgcttagttctgtg

SEQ ID NO: 3485792 - DNA, 25 bp, Homo sapien
taacgacccttccacaggccattca

SEQ ID NO: 3485793 - DNA, 25 bp, Homo sapien
cagccacgttgtaacgacccttcca

SEQ ID NO: 3485794 - DNA, 25 bp, Homo sapien
ttagttctgtggttgaatatattgc

SEQ ID NO: 3485795 - DNA, 25 bp, Homo sapien
ctggggaagggaagatgacagccat

SEQ ID NO: 3485796 - DNA, 25 bp, Homo sapien
ggagggcgggtacactggctctgtg

SEQ ID NO: 3485797 - DNA, 25 bp, Homo sapien
aaggagggcgggtacactggctctg

SEQ ID NO: 3485798 - DNA, 25 bp, Homo sapien
ttggaaggagggcgggtacactggc

SEQ ID NO: 3485799 - DNA, 25 bp, Homo sapien
ggaaggagggcgggtacactggctc

SEQ ID NO: 3485800 - DNA, 25 bp, Homo sapien
tagagcccatggcaatgggatcggc

SEQ ID NO: 3485801 - DNA, 25 bp, Homo sapien
gaaaagccactagttcctgagacgc

SEQ ID NO: 3485802 - DNA, 25 bp, Homo sapien
ccagcggagctaaaagggtcagcca

SEQ ID NO: 3485803 - DNA, 25 bp, Homo sapien
gactgtactgtgtcctctggctaga

SEQ ID NO: 3485804 - DNA, 25 bp, Homo sapien
ggcagtcaggagggccctgacgctc

SEQ ID NO: 3485805 - DNA, 25 bp, Homo sapien
cagtcaggagggccctgacgctcac

SEQ ID NO: 3485806 - DNA, 25 bp, Homo sapien
gtcaggagggccctgacgctcactg

SEQ ID NO: 3485807 - DNA, 25 bp, Homo sapien
caggagggccctgacgctcactggg

SEQ ID NO: 3485808 - DNA, 25 bp, Homo sapien
atcccaggtggaaaagcgcagagcc

SEQ ID NO: 3485809 - DNA, 25 bp, Homo sapien
ctgggatcccaggtggaaaagcgca

SEQ ID NO: 3485810 - DNA, 25 bp, Homo sapien
gggatcccaggtggaaaagcgcaga

SEQ ID NO: 3485811 - DNA, 25 bp, Homo sapien
agctccagcgctgggatcccaggtg

SEQ ID NO: 3485812 - DNA, 25 bp, Homo sapien
tgattcccaggtttattattatttg

SEQ ID NO: 3485813 - DNA, 25 bp, Homo sapien
caaacctgattcccaggtttattat

SEQ ID NO: 3485814 - DNA, 25 bp, Homo sapien
tgaagtccccctcgacaaacctgat

SEQ ID NO: 3485815 - DNA, 25 bp, Homo sapien
ctgggactgaagtccccctcgacaa

SEQ ID NO: 3485816 - DNA, 25 bp, Homo sapien
gtgctctctcgtctgcacacactca

SEQ ID NO: 3485817 - DNA, 25 bp, Homo sapien
atgtgctctctcgtctgcacacact

SEQ ID NO: 3485818 - DNA, 25 bp, Homo sapien
catgtgctctctcgtctgcacacac

SEQ ID NO: 3485819 - DNA, 25 bp, Homo sapien
tcatgtgctctctcgtctgcacaca

SEQ ID NO: 3485820 - DNA, 25 bp, Homo sapien
gtccccaaaactcacactcaccaca

SEQ ID NO: 3485821 - DNA, 25 bp, Homo sapien
gactattgtgtccccaaaactcaca

SEQ ID NO: 3485822 - DNA, 25 bp, Homo sapien
tgtccccaaaactcacactcaccac

SEQ ID NO: 3485823 - DNA, 25 bp, Homo sapien
attgtgtccccaaaactcacactca

SEQ ID NO: 3485824 - DNA, 25 bp, Homo sapien
aaagtgggtgctgctctgccccaga

SEQ ID NO: 3485825 - DNA, 25 bp, Homo sapien
cagtgacctgcggtgggtcctgtct

SEQ ID NO: 3485826 - DNA, 25 bp, Homo sapien
gctgcagtgacctgcggtgggtcct

SEQ ID NO: 3485827 - DNA, 25 bp, Homo sapien
cctgtctgctggaaagtgggtgctg

SEQ ID NO: 3485828 - DNA, 25 bp, Homo sapien
ttttgatgaagattctcatctcctc

SEQ ID NO: 3485829 - DNA, 25 bp, Homo sapien
attttgatgaagattctcatctcct

SEQ ID NO: 3485830 - DNA, 25 bp, Homo sapien
cattttgatgaagattctcatctcc

SEQ ID NO: 3485831 - DNA, 25 bp, Homo sapien
gcagcatgataaagcagtgtctggg

SEQ ID NO: 3485832 - DNA, 25 bp, Homo sapien
ccatggttcactatggggaggatta

SEQ ID NO: 3485833 - DNA, 25 bp, Homo sapien
aggattagtgggcacacaagcagca

SEQ ID NO: 3485834 - DNA, 25 bp, Homo sapien
tcctccatggacaggacttgccttc

SEQ ID NO: 3485835 - DNA, 25 bp, Homo sapien
tctccatactaattgtcatttgctg

SEQ ID NO: 3485836 - DNA, 25 bp, Homo sapien
gggtcctccttggaatactcagtgg

SEQ ID NO: 3485837 - DNA, 25 bp, Homo sapien
acaagcagacgctttggccacccat

SEQ ID NO: 3485838 - DNA, 25 bp, Homo sapien
cacccatagctctccatactaattg

SEQ ID NO: 3485839 - DNA, 25 bp, Homo sapien
cagcaaacaccctcgcctgcctctt

SEQ ID NO: 3485840 - DNA, 25 bp, Homo sapien
ctgtgggtgctgaaaggaagctggg

SEQ ID NO: 3485841 - DNA, 25 bp, Homo sapien
ctcttcaccccagggactgtgggtg

SEQ ID NO: 3485842 - DNA, 25 bp, Homo sapien
aaacaccctcgcctgcctcttcacc

SEQ ID NO: 3485843 - DNA, 25 bp, Homo sapien
cagtaagggctagaagtgacaagct

SEQ ID NO: 3485844 - DNA, 25 bp, Homo sapien
acccagtaagggctagaagtgacaa

SEQ ID NO: 3485845 - DNA, 25 bp, Homo sapien
ggtgtctgccagagcttggtggtcc

SEQ ID NO: 3485846 - DNA, 25 bp, Homo sapien
tgcaaaacccagtaagggctagaag

SEQ ID NO: 3485847 - DNA, 25 bp, Homo sapien
cgccttaggatttgcagcttgggat

SEQ ID NO: 3485848 - DNA, 25 bp, Homo sapien
ggcagctgttgctgatagtgtgata

SEQ ID NO: 3485849 - DNA, 25 bp, Homo sapien
gatgtgtatggagaattggactttg

SEQ ID NO: 3485850 - DNA, 25 bp, Homo sapien
taaatcatgtaatcagtcgccttag

SEQ ID NO: 3485851 - DNA, 25 bp, Homo sapien
tggcgcaatccgtctctttttccct

SEQ ID NO: 3485852 - DNA, 25 bp, Homo sapien
cctcctcaaccctggcgcaatccgt

SEQ ID NO: 3485853 - DNA, 25 bp, Homo sapien
caacgccgcgtccaaaatgatcttc

SEQ ID NO: 3485854 - DNA, 25 bp, Homo sapien
ccaacgccgcgtccaaaatgatctt

SEQ ID NO: 3485855 - DNA, 25 bp, Homo sapien
tgacgtctagacagatttgcaggag

SEQ ID NO: 3485856 - DNA, 25 bp, Homo sapien
ggcctgggttctgacgtctagacag

SEQ ID NO: 3485857 - DNA, 25 bp, Homo sapien
taacacagtgaactcagcaggaggg

SEQ ID NO: 3485858 - DNA, 25 bp, Homo sapien
caggagggaccgaaaagctgcatta

SEQ ID NO: 3485859 - DNA, 25 bp, Homo sapien
aatccagtgtgctgacaaacaggct

SEQ ID NO: 3485860 - DNA, 25 bp, Homo sapien
tgttgacatgaaacccattagacca

SEQ ID NO: 3485861 - DNA, 25 bp, Homo sapien
tcattaggaaggagctcattaggac

SEQ ID NO: 3485862 - DNA, 25 bp, Homo sapien
gcaccaccaggtcggcagtctggag

SEQ ID NO: 3485863 - DNA, 25 bp, Homo sapien
gatctgactcgccttatctgtgact

SEQ ID NO: 3485864 - DNA, 25 bp, Homo sapien
tgacactccgggagctcagctgctg

SEQ ID NO: 3485865 - DNA, 25 bp, Homo sapien
gcacagaagcctccggcaacttgac

SEQ ID NO: 3485866 - DNA, 25 bp, Homo sapien
acccgtgtccggaagctggctcttt

SEQ ID NO: 3485867 - DNA, 25 bp, Homo sapien
tttccccatcaccaataagcaggcg

SEQ ID NO: 3485868 - DNA, 25 bp, Homo sapien
tccccatcaccaataagcaggcgag

SEQ ID NO: 3485869 - DNA, 25 bp, Homo sapien
ccatcaccaataagcaggcgagctg

SEQ ID NO: 3485870 - DNA, 25 bp, Homo sapien
tcaccaataagcaggcgagctgccc

SEQ ID NO: 3485871 - DNA, 25 bp, Homo sapien
gcctggacccgtcctcagactgtag

SEQ ID NO: 3485872 - DNA, 25 bp, Homo sapien
ctcagactgtgagacggaggacggc

SEQ ID NO: 3485873 - DNA, 25 bp, Homo sapien
ggaggacggcctggacccgtcctca

SEQ ID NO: 3485874 - DNA, 25 bp, Homo sapien
cgtcctcagactgtagccccagggt

SEQ ID NO: 3485875 - DNA, 25 bp, Homo sapien
agcgggggctggggaggcatgttgc

SEQ ID NO: 3485876 - DNA, 25 bp, Homo sapien
agagcgggggctggggaggcatgtt

SEQ ID NO: 3485877 - DNA, 25 bp, Homo sapien
tcagagcgggggctggggaggcatg

SEQ ID NO: 3485878 - DNA, 25 bp, Homo sapien
cgggggctggggaggcatgttgcat

SEQ ID NO: 3485879 - DNA, 25 bp, Homo sapien
ggcgggacattctgcgtggccatca

SEQ ID NO: 3485880 - DNA, 25 bp, Homo sapien
tgggggcgggacattctgcgtggcc

SEQ ID NO: 3485881 - DNA, 25 bp, Homo sapien
ggggcgggacattctgcgtggccat

SEQ ID NO: 3485882 - DNA, 25 bp, Homo sapien
gcgggacattctgcgtggccatcat

SEQ ID NO: 3485883 - DNA, 25 bp, Homo sapien
ccacagctgcctcagcagggactgt

SEQ ID NO: 3485884 - DNA, 25 bp, Homo sapien
cctgcctttgctcccacagctgcct

SEQ ID NO: 3485885 - DNA, 25 bp, Homo sapien
ttcctgcctttgctcccacagctgc

SEQ ID NO: 3485886 - DNA, 25 bp, Homo sapien
gctgcctcagcagggactgtcctca

SEQ ID NO: 3485887 - DNA, 25 bp, Homo sapien
catgcacgtccctctcgtagatgct

SEQ ID NO: 3485888 - DNA, 25 bp, Homo sapien
ctctcgtagatgctatagccactgg

SEQ ID NO: 3485889 - DNA, 25 bp, Homo sapien
gtagatgctatagccactggacttc

SEQ ID NO: 3485890 - DNA, 25 bp, Homo sapien
gtccctctcgtagatgctatagcca

SEQ ID NO: 3485891 - DNA, 25 bp, Homo sapien
tcagagcactctggagaccctgcct

SEQ ID NO: 3485892 - DNA, 25 bp, Homo sapien
gcactctggagaccctgccttggca

SEQ ID NO: 3485893 - DNA, 25 bp, Homo sapien
gagcactctggagaccctgccttgg

SEQ ID NO: 3485894 - DNA, 25 bp, Homo sapien
agagcactctggagaccctgccttg

SEQ ID NO: 3485895 - DNA, 25 bp, Homo sapien
caggtttgacgaatgagtgtttatc

SEQ ID NO: 3485896 - DNA, 25 bp, Homo sapien
gtttgacgaatgagtgtttatcccc

SEQ ID NO: 3485897 - DNA, 25 bp, Homo sapien
ggtttgacgaatgagtgtttatccc

SEQ ID NO: 3485898 - DNA, 25 bp, Homo sapien
ctgcaggtttgacgaatgagtgttt

SEQ ID NO: 3485899 - DNA, 25 bp, Homo sapien
ctggtctgaggaggacgatgactca

SEQ ID NO: 3485900 - DNA, 25 bp, Homo sapien
tatatagctcatgggggccaagtca

SEQ ID NO: 3485901 - DNA, 25 bp, Homo sapien
ggctgtgactggcagaagtatgtaa

SEQ ID NO: 3485902 - DNA, 25 bp, Homo sapien
ggggccaagtcagcaaactctgcat

SEQ ID NO: 3485903 - DNA, 25 bp, Homo sapien
tagattgtatcgtttattaggcaga

SEQ ID NO: 3485904 - DNA, 25 bp, Homo sapien
tctcagtgggtaagaggctagacat

SEQ ID NO: 3485905 - DNA, 25 bp, Homo sapien
ggagcctttccaatctcagtgggta

SEQ ID NO: 3485906 - DNA, 25 bp, Homo sapien
cagaaatacccttgccactgttggc

SEQ ID NO: 3485907 - DNA, 25 bp, Homo sapien
gaggccttggtcactccttcatcac

SEQ ID NO: 3485908 - DNA, 25 bp, Homo sapien
ctctgaggccttggtcactccttca

SEQ ID NO: 3485909 - DNA, 25 bp, Homo sapien
catagcacgatggtagctctcccca

SEQ ID NO: 3485910 - DNA, 25 bp, Homo sapien
cctgtccatagcacgatggtagctc

SEQ ID NO: 3485911 - DNA, 25 bp, Homo sapien
tatacagctcgcttgtcagcctcca

SEQ ID NO: 3485912 - DNA, 25 bp, Homo sapien
ggagggtggctgggcggttgccgtc

SEQ ID NO: 3485913 - DNA, 25 bp, Homo sapien
ggcagagatgtggacagcctgggcc

SEQ ID NO: 3485914 - DNA, 25 bp, Homo sapien
ggcactgggcacaggtgtgctggca

SEQ ID NO: 3485915 - DNA, 25 bp, Homo sapien
gataggaagtgctgtctaggcctcc

SEQ ID NO: 3485916 - DNA, 25 bp, Homo sapien
cctggttgagataggaagtgctgtc

SEQ ID NO: 3485917 - DNA, 25 bp, Homo sapien
gggtcatctccctggttgagatagg

SEQ ID NO: 3485918 - DNA, 25 bp, Homo sapien
tgctgtctaggcctccatatccttc

SEQ ID NO: 3485919 - DNA, 25 bp, Homo sapien
cataaaatgccgactccctgatgtg

SEQ ID NO: 3485920 - DNA, 25 bp, Homo sapien
caaaagccagtgtggggcactcatc

SEQ ID NO: 3485921 - DNA, 25 bp, Homo sapien
cactcatctgaatggaaagggtctg

SEQ ID NO: 3485922 - DNA, 25 bp, Homo sapien
aagggtctggttacacttattgaca

SEQ ID NO: 3485923 - DNA, 25 bp, Homo sapien
ctcttccgctcctcaggacaccatg

SEQ ID NO: 3485924 - DNA, 25 bp, Homo sapien
tcttccgctcctcaggacaccatgg

SEQ ID NO: 3485925 - DNA, 25 bp, Homo sapien
atgggaacccactcacttcaaaggg

SEQ ID NO: 3485926 - DNA, 25 bp, Homo sapien
tttccatgggaacccactcacttca

SEQ ID NO: 3485927 - DNA, 25 bp, Homo sapien
tccttatcagtaatgggcaacaact

SEQ ID NO: 3485928 - DNA, 25 bp, Homo sapien
ccagcccagcttttccttatcagta

SEQ ID NO: 3485929 - DNA, 25 bp, Homo sapien
tggttctcggagagaatctttcagc

SEQ ID NO: 3485930 - DNA, 25 bp, Homo sapien
ggcaacaactttagcacctccgcgt

SEQ ID NO: 3485931 - DNA, 25 bp, Homo sapien
ctacgaaaggacctgccttctttgg

SEQ ID NO: 3485932 - DNA, 25 bp, Homo sapien
ctagggggacttggaacagattttg

SEQ ID NO: 3485933 - DNA, 25 bp, Homo sapien
ggcagcttctagtcacagttgctac

SEQ ID NO: 3485934 - DNA, 25 bp, Homo sapien
tcagaatccatccatactaggggga

SEQ ID NO: 3485935 - DNA, 25 bp, Homo sapien
cacagcaaatgctaggggtttcttc

SEQ ID NO: 3485936 - DNA, 25 bp, Homo sapien
gccaacatgccttctgtgcaggctc

SEQ ID NO: 3485937 - DNA, 25 bp, Homo sapien
ggtccctggaatggtcactactgtc

SEQ ID NO: 3485938 - DNA, 25 bp, Homo sapien
gccctttgctctcgtgtgcccatga

SEQ ID NO: 3485939 - DNA, 25 bp, Homo sapien
tgtgcccatgactttcttcctgctg

SEQ ID NO: 3485940 - DNA, 25 bp, Homo sapien
ttccttacagccattctcaccctct

SEQ ID NO: 3485941 - DNA, 25 bp, Homo sapien
gcaccttccttacagccattctcac

SEQ ID NO: 3485942 - DNA, 25 bp, Homo sapien
cttacagccattctcaccctcttgg

SEQ ID NO: 3485943 - DNA, 25 bp, Homo sapien
tccttccgcaccttccttacagcca

SEQ ID NO: 3485944 - DNA, 25 bp, Homo sapien
cttgtgctagcttaagaaggtgatt

SEQ ID NO: 3485945 - DNA, 25 bp, Homo sapien
gcagttcttgttaacgatccaaaga

SEQ ID NO: 3485946 - DNA, 25 bp, Homo sapien
gacatttctgccttcgtgtttttta

SEQ ID NO: 3485947 - DNA, 25 bp, Homo sapien
gccttcgtgttttttacatcaccca

SEQ ID NO: 3485948 - DNA, 25 bp, Homo sapien
cagtttgtcccactacaaaatggtt

SEQ ID NO: 3485949 - DNA, 25 bp, Homo sapien
cctgctgtccagatatcttccactg

SEQ ID NO: 3485950 - DNA, 25 bp, Homo sapien
actgtgggtccacatcctccatggg

SEQ ID NO: 3485951 - DNA, 25 bp, Homo sapien
cactgtgggtccacatcctccatgg

SEQ ID NO: 3485952 - DNA, 25 bp, Homo sapien
agcttttcctgtgatccatggtcat

SEQ ID NO: 3485953 - DNA, 25 bp, Homo sapien
ttttggaagccgatgcctaaactgc

SEQ ID NO: 3485954 - DNA, 25 bp, Homo sapien
gacaaagttctcgatgtccacatca

SEQ ID NO: 3485955 - DNA, 25 bp, Homo sapien
cacatcaaagctggcggaggtgatg

SEQ ID NO: 3485956 - DNA, 25 bp, Homo sapien
ccagttctgggtcatcgctgaagaa

SEQ ID NO: 3485957 - DNA, 25 bp, Homo sapien
aaacagcagcgtcaggagcgggaaa

SEQ ID NO: 3485958 - DNA, 25 bp, Homo sapien
taggaagactctagccagggtagag

SEQ ID NO: 3485959 - DNA, 25 bp, Homo sapien
gtaggaagactctagccagggtaga

SEQ ID NO: 3485960 - DNA, 25 bp, Homo sapien
gggtaggaagactctagccagggta

SEQ ID NO: 3485961 - DNA, 25 bp, Homo sapien
gagggtaggaagactctagccaggg

SEQ ID NO: 3485962 - DNA, 25 bp, Homo sapien
gcattgcagcttgaccaccatgagg

SEQ ID NO: 3485963 - DNA, 25 bp, Homo sapien
gtgaaggatgaagccggcctttccc

SEQ ID NO: 3485964 - DNA, 25 bp, Homo sapien
ccatgagggtggaaagccacccgcg

SEQ ID NO: 3485965 - DNA, 25 bp, Homo sapien
tgagggtggaaagccacccgcgtcc

SEQ ID NO: 3485966 - DNA, 25 bp, Homo sapien
ccaactgccagtcagaggctggtgg

SEQ ID NO: 3485967 - DNA, 25 bp, Homo sapien
tgggcccagcttaggaatcgtcctg

SEQ ID NO: 3485968 - DNA, 25 bp, Homo sapien
gatctgtgggcccagcttaggaatc

SEQ ID NO: 3485969 - DNA, 25 bp, Homo sapien
taggaatcgtcctggtgagcccctg

SEQ ID NO: 3485970 - DNA, 25 bp, Homo sapien
cttttcgtggcaagaagctattttg

SEQ ID NO: 3485971 - DNA, 25 bp, Homo sapien
aagaagctattttgcaattgaagct

SEQ ID NO: 3485972 - DNA, 25 bp, Homo sapien
gcagagttcattgactttctccagc

SEQ ID NO: 3485973 - DNA, 25 bp, Homo sapien
gtagggcccccctagatcattcctg

SEQ ID NO: 3485974 - DNA, 25 bp, Homo sapien
taacggttacaaaagtccttgcaga

SEQ ID NO: 3485975 - DNA, 25 bp, Homo sapien
gcatcttggttttgaggcaggtgat

SEQ ID NO: 3485976 - DNA, 25 bp, Homo sapien
aagccgcagcctcttaagaagcctg

SEQ ID NO: 3485977 - DNA, 25 bp, Homo sapien
gaacccagtgggtctaacccagtga

SEQ ID NO: 3485978 - DNA, 25 bp, Homo sapien
ggaagctggcttcacccattaggtg

SEQ ID NO: 3485979 - DNA, 25 bp, Homo sapien
ccgatctggtcattttcaagggaat

SEQ ID NO: 3485980 - DNA, 25 bp, Homo sapien
gcgggaaggtattgccaggcagctt

SEQ ID NO: 3485981 - DNA, 25 bp, Homo sapien
cccatcttgcccaaagcgtgtagtc

SEQ ID NO: 3485982 - DNA, 25 bp, Homo sapien
caagcctgtggcttatgcagatgtc

SEQ ID NO: 3485983 - DNA, 25 bp, Homo sapien
ggtctagggacaaaaacggcacagc

SEQ ID NO: 3485984 - DNA, 25 bp, Homo sapien
tgtcccctcccctgactccaccaat

SEQ ID NO: 3485985 - DNA, 25 bp, Homo sapien
cccctcccctgactccaccaatctg

SEQ ID NO: 3485986 - DNA, 25 bp, Homo sapien
gtcccctcccctgactccaccaatc

SEQ ID NO: 3485987 - DNA, 25 bp, Homo sapien
cctcccctgactccaccaatctggg

SEQ ID NO: 3485988 - DNA, 25 bp, Homo sapien
ggagtctcacaaagagcccactggg

SEQ ID NO: 3485989 - DNA, 25 bp, Homo sapien
tgggcagtactcactacggagtctc

SEQ ID NO: 3485990 - DNA, 25 bp, Homo sapien
gcttgttgtcaaaatgtgcaaagca

SEQ ID NO: 3485991 - DNA, 25 bp, Homo sapien
gacttggtgatttcaagcgagagga

SEQ ID NO: 3485992 - DNA, 25 bp, Homo sapien
agagtccgcgttatccttttctgca

SEQ ID NO: 3485993 - DNA, 25 bp, Homo sapien
tccagggggactgatttttgcaggt

SEQ ID NO: 3485994 - DNA, 25 bp, Homo sapien
tctccagtgaccgactggtttctgc

SEQ ID NO: 3485995 - DNA, 25 bp, Homo sapien
tctctgagaacttaaccatccagag

SEQ ID NO: 3485996 - DNA, 25 bp, Homo sapien
tcacacagagaaatcgaaggccgag

SEQ ID NO: 3485997 - DNA, 25 bp, Homo sapien
tccactttgcccagcagagaagact

SEQ ID NO: 3485998 - DNA, 25 bp, Homo sapien
ggaaaacgctcaacccatcgatctg

SEQ ID NO: 3485999 - DNA, 25 bp, Homo sapien
catcgatctggatggaggacacggc

SEQ ID NO: 3486000 - DNA, 25 bp, Homo sapien
gctctgaggagtaggaagcctgggt

SEQ ID NO: 3486001 - DNA, 25 bp, Homo sapien
ggtgtcattgggtgcctgcagcaca

SEQ ID NO: 3486002 - DNA, 25 bp, Homo sapien
gcctgggtgtcattgggtgcctgca

SEQ ID NO: 3486003 - DNA, 25 bp, Homo sapien
gaagcctgggtgtcattgggtgcct

SEQ ID NO: 3486004 - DNA, 25 bp, Homo sapien
agctgttttgaaataggtggaattt

SEQ ID NO: 3486005 - DNA, 25 bp, Homo sapien
aaaccagaatgggacaaagacatga

SEQ ID NO: 3486006 - DNA, 25 bp, Homo sapien
ttttatcttacttggatgcctgtga

SEQ ID NO: 3486007 - DNA, 25 bp, Homo sapien
tggcaaagatccttccagctgagga

SEQ ID NO: 3486008 - DNA, 25 bp, Homo sapien
gctgcaacaccctggaactgcgact

SEQ ID NO: 3486009 - DNA, 25 bp, Homo sapien
ttgttccactaggaagacagccgtg

SEQ ID NO: 3486010 - DNA, 25 bp, Homo sapien
aatggcagagaactggtgcctcccg

SEQ ID NO: 3486011 - DNA, 25 bp, Homo sapien
catgaatgcacagcggtctcacgtc

SEQ ID NO: 3486012 - DNA, 25 bp, Homo sapien
ttcagagatagagtccaagggcagg

SEQ ID NO: 3486013 - DNA, 25 bp, Homo sapien
cagggctgggactggcaacgtttta

SEQ ID NO: 3486014 - DNA, 25 bp, Homo sapien
tctagagccgtggaatggagacaag

SEQ ID NO: 3486015 - DNA, 25 bp, Homo sapien
tagacatagattctcagggccactg

SEQ ID NO: 3486016 - DNA, 25 bp, Homo sapien
caccttgtggcttggataccctcca

SEQ ID NO: 3486017 - DNA, 25 bp, Homo sapien
caatttatgcattggatcagagcct

SEQ ID NO: 3486018 - DNA, 25 bp, Homo sapien
cattgtttcctagccaaaggcagag

SEQ ID NO: 3486019 - DNA, 25 bp, Homo sapien
ccacctggatgcttcgtctgcttac

SEQ ID NO: 3486020 - DNA, 25 bp, Homo sapien
cctgtcaggaagtggaagtcggcac

SEQ ID NO: 3486021 - DNA, 25 bp, Homo sapien
tgggttgtctctggcccaagagctg

SEQ ID NO: 3486022 - DNA, 25 bp, Homo sapien
gatttatacatctcactcgattcag

SEQ ID NO: 3486023 - DNA, 25 bp, Homo sapien
actcgattcagctgattaaatcccc

SEQ ID NO: 3486024 - DNA, 25 bp, Homo sapien
gaggcgtggtttgtgacaatgacac

SEQ ID NO: 3486025 - DNA, 25 bp, Homo sapien
agcttagaccctacagccccagagt

SEQ ID NO: 3486026 - DNA, 25 bp, Homo sapien
agtgagggaggcgtggtttgtgaca

SEQ ID NO: 3486027 - DNA, 25 bp, Homo sapien
cactgagagcttagaccctacagcc

SEQ ID NO: 3486028 - DNA, 25 bp, Homo sapien
ctgaggctgggaccacaatcccctg

SEQ ID NO: 3486029 - DNA, 25 bp, Homo sapien
ttgtcatggcgatgttgccctgctg

SEQ ID NO: 3486030 - DNA, 25 bp, Homo sapien
agttgacggttgtcatggcgatgtt

SEQ ID NO: 3486031 - DNA, 25 bp, Homo sapien
tgaggctgggaccacaatcccctgg

SEQ ID NO: 3486032 - DNA, 25 bp, Homo sapien
acagccttacttggtcctctcaggg

SEQ ID NO: 3486033 - DNA, 25 bp, Homo sapien
catcacaattgggtcttggcgctaa

SEQ ID NO: 3486034 - DNA, 25 bp, Homo sapien
ccttgggtagcgagctatggctttc

SEQ ID NO: 3486035 - DNA, 25 bp, Homo sapien
tgtgtaaagaccctctacttggagc

SEQ ID NO: 3486036 - DNA, 25 bp, Homo sapien
tgaggagacaaccagttttggggtc

SEQ ID NO: 3486037 - DNA, 25 bp, Homo sapien
tgttctggatctggatggctccctg

SEQ ID NO: 3486038 - DNA, 25 bp, Homo sapien
catggtaaccggttggtataaggct

SEQ ID NO: 3486039 - DNA, 25 bp, Homo sapien
cctgggggattgcttgggtgaccac

SEQ ID NO: 3486040 - DNA, 25 bp, Homo sapien
tgaccctgggaggttaccatggtaa

SEQ ID NO: 3486041 - DNA, 25 bp, Homo sapien
tgagtcacccgtgtaaagtgcctgg

SEQ ID NO: 3486042 - DNA, 25 bp, Homo sapien
tctctaccactgagggacacagcgg

SEQ ID NO: 3486043 - DNA, 25 bp, Homo sapien
cctttgatgtaaccccaggagggag

SEQ ID NO: 3486044 - DNA, 25 bp, Homo sapien
tgcctggcagataagaagcgattac

SEQ ID NO: 3486045 - DNA, 25 bp, Homo sapien
agggcacgtggagagaaaatcagca

SEQ ID NO: 3486046 - DNA, 25 bp, Homo sapien
gcagcctgtgagggcagcggctggg

SEQ ID NO: 3486047 - DNA, 25 bp, Homo sapien
tcagggcacgtggagagaaaatcag

SEQ ID NO: 3486048 - DNA, 25 bp, Homo sapien
cttcagggcacgtggagagaaaatc

SEQ ID NO: 3486049 - DNA, 25 bp, Homo sapien
agccaagaacgcattatattggtgg

SEQ ID NO: 3486050 - DNA, 25 bp, Homo sapien
ttgggcaagactcctcgtttgttct

SEQ ID NO: 3486051 - DNA, 25 bp, Homo sapien
aagactcctcgtttgttcttggact

SEQ ID NO: 3486052 - DNA, 25 bp, Homo sapien
tattggtggcatgcttgggcaagac

SEQ ID NO: 3486053 - DNA, 25 bp, Homo sapien
gaatttgtcttgtatctgtgtctgt

SEQ ID NO: 3486054 - DNA, 25 bp, Homo sapien
ttagtttccatggcccattcgattt

SEQ ID NO: 3486055 - DNA, 25 bp, Homo sapien
tcccttggaatttgtcttgtatctg

SEQ ID NO: 3486056 - DNA, 25 bp, Homo sapien
agtttccatggcccattcgattttt

SEQ ID NO: 3486057 - DNA, 25 bp, Homo sapien
aagtccctgatataacatgatgtag

SEQ ID NO: 3486058 - DNA, 25 bp, Homo sapien
ccagattacttacagtaatgaatac

SEQ ID NO: 3486059 - DNA, 25 bp, Homo sapien
aaaaaaggcgatacatgttcaggac

SEQ ID NO: 3486060 - DNA, 25 bp, Homo sapien
taggtgggcctttgacagagataca

SEQ ID NO: 3486061 - DNA, 25 bp, Homo sapien
gaatgaggatagaaagcccctaacc

SEQ ID NO: 3486062 - DNA, 25 bp, Homo sapien
gtctgtgctaagtacccctctggtg

SEQ ID NO: 3486063 - DNA, 25 bp, Homo sapien
agtatctcaggacgcacgctgtggg

SEQ ID NO: 3486064 - DNA, 25 bp, Homo sapien
gattaacatgctccagtccagtggg

SEQ ID NO: 3486065 - DNA, 25 bp, Homo sapien
ttgatcctcactgccgcccccagca

SEQ ID NO: 3486066 - DNA, 25 bp, Homo sapien
cgcccccagcaggcagggcaggcat

SEQ ID NO: 3486067 - DNA, 25 bp, Homo sapien
ctgccgcccccagcaggcagggcag

SEQ ID NO: 3486068 - DNA, 25 bp, Homo sapien
ccgcccccagcaggcagggcaggca

SEQ ID NO: 3486069 - DNA, 25 bp, Homo sapien
gccaggcagcccgagtggtttggga

SEQ ID NO: 3486070 - DNA, 25 bp, Homo sapien
acgccatgggcactatcctgagcca

SEQ ID NO: 3486071 - DNA, 25 bp, Homo sapien
tgaaacgagaggtggagactagtga

SEQ ID NO: 3486072 - DNA, 25 bp, Homo sapien
ccaagggactgtgcccacgccatgg

SEQ ID NO: 3486073 - DNA, 25 bp, Homo sapien
gtgaggttggtctgggctgcgatct

SEQ ID NO: 3486074 - DNA, 25 bp, Homo sapien
ggtaaagtggagacctggttagtca

SEQ ID NO: 3486075 - DNA, 25 bp, Homo sapien
aagtggagacctggttagtcatcac

SEQ ID NO: 3486076 - DNA, 25 bp, Homo sapien
gacctggttagtcatcacctgcatg

SEQ ID NO: 3486077 - DNA, 25 bp, Homo sapien
cagaggtaaagtggagacctggtta

SEQ ID NO: 3486078 - DNA, 25 bp, Homo sapien
tggcatcaagcatgggctgcaggat

SEQ ID NO: 3486079 - DNA, 25 bp, Homo sapien
caggatgcgcctccgggcattgatg

SEQ ID NO: 3486080 - DNA, 25 bp, Homo sapien
tgggccggtgctgagacttgatctt

SEQ ID NO: 3486081 - DNA, 25 bp, Homo sapien
agcacccccgcagcgatggagttgg

SEQ ID NO: 3486082 - DNA, 25 bp, Homo sapien
agaaagcaagggtcaggacgaggca

SEQ ID NO: 3486083 - DNA, 25 bp, Homo sapien
gaaagcaagggtcaggacgaggcag

SEQ ID NO: 3486084 - DNA, 25 bp, Homo sapien
aagcaagggtcaggacgaggcaggg

SEQ ID NO: 3486085 - DNA, 25 bp, Homo sapien
agagaaagcaagggtcaggacgagg

SEQ ID NO: 3486086 - DNA, 25 bp, Homo sapien
ccatcatagcctgctgcatggccat

SEQ ID NO: 3486087 - DNA, 25 bp, Homo sapien
acatttgtcgtctgcagctcgtcga

SEQ ID NO: 3486088 - DNA, 25 bp, Homo sapien
ctgtcccatccaatgagtcatcgtg

SEQ ID NO: 3486089 - DNA, 25 bp, Homo sapien
aagcccaggtcgctgacatttgtcg

SEQ ID NO: 3486090 - DNA, 25 bp, Homo sapien
gcaaaggcctactctgcgaacagca

SEQ ID NO: 3486091 - DNA, 25 bp, Homo sapien
tcagtgcagggcttgtaaacaactc

SEQ ID NO: 3486092 - DNA, 25 bp, Homo sapien
catgggtgccatctatcctcaggga

SEQ ID NO: 3486093 - DNA, 25 bp, Homo sapien
aaacagagtcctcggcagttccagg

SEQ ID NO: 3486094 - DNA, 25 bp, Homo sapien
tcccatgtccatggttgctgtgcgc

SEQ ID NO: 3486095 - DNA, 25 bp, Homo sapien
catgtccatggttgctgtgcgcaga

SEQ ID NO: 3486096 - DNA, 25 bp, Homo sapien
gtccatggttgctgtgcgcagagac

SEQ ID NO: 3486097 - DNA, 25 bp, Homo sapien
ccatgtccatggttgctgtgcgcag

SEQ ID NO: 3486098 - DNA, 25 bp, Homo sapien
catatggttcctagcccagggtctg

SEQ ID NO: 3486099 - DNA, 25 bp, Homo sapien
aaaggagctaagttctgtgatcacc

SEQ ID NO: 3486100 - DNA, 25 bp, Homo sapien
tgatcacctagggacagctgtggcc

SEQ ID NO: 3486101 - DNA, 25 bp, Homo sapien
gacctgcgggctggaaagattccca

SEQ ID NO: 3486102 - DNA, 25 bp, Homo sapien
tgggatgggcatccccgcaggctct

SEQ ID NO: 3486103 - DNA, 25 bp, Homo sapien
cctggcttcccactggactagatgc

SEQ ID NO: 3486104 - DNA, 25 bp, Homo sapien
tgggccctcccccacatttaggata

SEQ ID NO: 3486105 - DNA, 25 bp, Homo sapien
atttaggatattgatgggaagaggg

SEQ ID NO: 3486106 - DNA, 25 bp, Homo sapien
agagggtgccaaccaagggggtctg

SEQ ID NO: 3486107 - DNA, 25 bp, Homo sapien
gtggacagtggagagcctcctcctc

SEQ ID NO: 3486108 - DNA, 25 bp, Homo sapien
catggggtgagagggaaccggagga

SEQ ID NO: 3486109 - DNA, 25 bp, Homo sapien
gatttactgaaaacgtctcggccac

SEQ ID NO: 3486110 - DNA, 25 bp, Homo sapien
tcagggagacctcggaagagtgacc

SEQ ID NO: 3486111 - DNA, 25 bp, Homo sapien
aaacccaatggaaaacacacgtgtg

SEQ ID NO: 3486112 - DNA, 25 bp, Homo sapien
tctgtgtgcgcgtgttaacaagaaa

SEQ ID NO: 3486113 - DNA, 25 bp, Homo sapien
gtagggtttgcagaactctctccag

SEQ ID NO: 3486114 - DNA, 25 bp, Homo sapien
tctcgtctggagctgacaagaaggc

SEQ ID NO: 3486115 - DNA, 25 bp, Homo sapien
cagacctctcagcaagtgtggctaa

SEQ ID NO: 3486116 - DNA, 25 bp, Homo sapien
cagggaactccaccagagctggtca

SEQ ID NO: 3486117 - DNA, 25 bp, Homo sapien
tgggcacccgggaatttgtactgaa

SEQ ID NO: 3486118 - DNA, 25 bp, Homo sapien
aataaaacctgcctcatctgtggga

SEQ ID NO: 3486119 - DNA, 25 bp, Homo sapien
aaatggagcgtgtgaggtgaccacc

SEQ ID NO: 3486120 - DNA, 25 bp, Homo sapien
cattctgtcagtcctcggtgctcgg

SEQ ID NO: 3486121 - DNA, 25 bp, Homo sapien
gaagattccatcataacagagcagt

SEQ ID NO: 3486122 - DNA, 25 bp, Homo sapien
catcaggtgttttccgctcagagcg

SEQ ID NO: 3486123 - DNA, 25 bp, Homo sapien
tagaacttgggtgcctgtaactgaa

SEQ ID NO: 3486124 - DNA, 25 bp, Homo sapien
gactcactgcaggtccttttgtgga

SEQ ID NO: 3486125 - DNA, 25 bp, Homo sapien
gagtaggtgctctgctatgggagaa

SEQ ID NO: 3486126 - DNA, 25 bp, Homo sapien
tcaagtcaggagctggtgggtgaca

SEQ ID NO: 3486127 - DNA, 25 bp, Homo sapien
gggcttgaagcccacatccttagat

SEQ ID NO: 3486128 - DNA, 25 bp, Homo sapien
tctccccgaaatgcagatggtcaag

SEQ ID NO: 3486129 - DNA, 25 bp, Homo sapien
tgtctgaagcggcagagacaagcta

SEQ ID NO: 3486130 - DNA, 25 bp, Homo sapien
gcagttcactggtgctaaggctgaa

SEQ ID NO: 3486131 - DNA, 25 bp, Homo sapien
gatttgtcagatctgggtcagccac

SEQ ID NO: 3486132 - DNA, 25 bp, Homo sapien
catgtttagcactctgccggcgacg

SEQ ID NO: 3486133 - DNA, 25 bp, Homo sapien
gaaggtctcctcgtatcccggatgc

SEQ ID NO: 3486134 - DNA, 25 bp, Homo sapien
gatgctggctcgatctcaccacagt

SEQ ID NO: 3486135 - DNA, 25 bp, Homo sapien
agccacatgcaagggagctgcacca

SEQ ID NO: 3486136 - DNA, 25 bp, Homo sapien
caattagcagatagaaagtgggcct

SEQ ID NO: 3486137 - DNA, 25 bp, Homo sapien
tgccgttggcttctagtgctagtaa

SEQ ID NO: 3486138 - DNA, 25 bp, Homo sapien
tcacagggactgcatgagaccatgt

SEQ ID NO: 3486139 - DNA, 25 bp, Homo sapien
ctggattaaacacgagcaagcgcgc

SEQ ID NO: 3486140 - DNA, 25 bp, Homo sapien
aacctccgacatgtatttaaacgtg

SEQ ID NO: 3486141 - DNA, 25 bp, Homo sapien
cacctgcaactgtgttctgaccgct

SEQ ID NO: 3486142 - DNA, 25 bp, Homo sapien
tcgttgcagtgctctgccctaccta

SEQ ID NO: 3486143 - DNA, 25 bp, Homo sapien
tcagctagggctatccagggctcgg

SEQ ID NO: 3486144 - DNA, 25 bp, Homo sapien
tcttctcgttgcagtgctctgccct

SEQ ID NO: 3486145 - DNA, 25 bp, Homo sapien
tagtgttctaggacatgggcaagac

SEQ ID NO: 3486146 - DNA, 25 bp, Homo sapien
gtgactcaccagaattatcccagca

SEQ ID NO: 3486147 - DNA, 25 bp, Homo sapien
gggcaagacttaaaactcaacactg

SEQ ID NO: 3486148 - DNA, 25 bp, Homo sapien
gatgaaatgcattaagagggagtcc

SEQ ID NO: 3486149 - DNA, 25 bp, Homo sapien
ggaattatagtcaggcaccaccatg

SEQ ID NO: 3486150 - DNA, 25 bp, Homo sapien
cctcactctgccgaatagctggaat

SEQ ID NO: 3486151 - DNA, 25 bp, Homo sapien
ttaatcagaaaatgcttaaagggta

SEQ ID NO: 3486152 - DNA, 25 bp, Homo sapien
cagaaaatgcttaaagggtataaag

SEQ ID NO: 3486153 - DNA, 25 bp, Homo sapien
gaatctcaggtgtcatggcagcata

SEQ ID NO: 3486154 - DNA, 25 bp, Homo sapien
cctgctctctgtggcgaaagatact

SEQ ID NO: 3486155 - DNA, 25 bp, Homo sapien
cataatgataggaactgaggcaacc

SEQ ID NO: 3486156 - DNA, 25 bp, Homo sapien
agttctttgtacacgtgtcctggca

SEQ ID NO: 3486157 - DNA, 25 bp, Homo sapien
tggtggcacacgcagctacttggga

SEQ ID NO: 3486158 - DNA, 25 bp, Homo sapien
caaggcatgaggattggtggaaccc

SEQ ID NO: 3486159 - DNA, 25 bp, Homo sapien
gaagcagtgcatgaagatggcccga

SEQ ID NO: 3486160 - DNA, 25 bp, Homo sapien
tagtctattcctctgctcctaggca

SEQ ID NO: 3486161 - DNA, 25 bp, Homo sapien
cgcagccccgagatgcagcgagtgc

SEQ ID NO: 3486162 - DNA, 25 bp, Homo sapien
cagccccgagatgcagcgagtgcat

SEQ ID NO: 3486163 - DNA, 25 bp, Homo sapien
agccccgagatgcagcgagtgcatc

SEQ ID NO: 3486164 - DNA, 25 bp, Homo sapien
gcagccccgagatgcagcgagtgca

SEQ ID NO: 3486165 - DNA, 25 bp, Homo sapien
tggagtgtgtatgcggcctgcacgg

SEQ ID NO: 3486166 - DNA, 25 bp, Homo sapien
tctcatccctctcccgtgtccgggc

SEQ ID NO: 3486167 - DNA, 25 bp, Homo sapien
tatgcggcctgcacgggatgagtcc

SEQ ID NO: 3486168 - DNA, 25 bp, Homo sapien
cacgggatgagtccggcttcctcag

SEQ ID NO: 3486169 - DNA, 25 bp, Homo sapien
gggagcagtgtttgacggcgtcgag

SEQ ID NO: 3486170 - DNA, 25 bp, Homo sapien
ggaggtatcacagcccgctcttctt

SEQ ID NO: 3486171 - DNA, 25 bp, Homo sapien
ttcccttttgcctatcccttctctc

SEQ ID NO: 3486172 - DNA, 25 bp, Homo sapien
tttgacggcgtcgaggaggtatcac

SEQ ID NO: 3486173 - DNA, 25 bp, Homo sapien
agccttccccagaccgcgcattcct

SEQ ID NO: 3486174 - DNA, 25 bp, Homo sapien
agtgtcagaaccgctggcagcggcc

SEQ ID NO: 3486175 - DNA, 25 bp, Homo sapien
gcgcattcctgcagtgtcagaaccg

SEQ ID NO: 3486176 - DNA, 25 bp, Homo sapien
cagacgccgggagagcgattgtttt

SEQ ID NO: 3486177 - DNA, 25 bp, Homo sapien
cccgggattctctgacaggacggtc

SEQ ID NO: 3486178 - DNA, 25 bp, Homo sapien
ggtctggggtcgccgcagctcccct

SEQ ID NO: 3486179 - DNA, 25 bp, Homo sapien
cgggattctctgacaggacggtctg

SEQ ID NO: 3486180 - DNA, 25 bp, Homo sapien
ggggtcgccgcagctcccctcacct

SEQ ID NO: 3486181 - DNA, 25 bp, Homo sapien
catctttgggcgagaaaagctctcc

SEQ ID NO: 3486182 - DNA, 25 bp, Homo sapien
tcatttttggcttgaggtccgaacc

SEQ ID NO: 3486183 - DNA, 25 bp, Homo sapien
agtgtcaggctttgcgaggtatcca

SEQ ID NO: 3486184 - DNA, 25 bp, Homo sapien
tcagcctccagtagaggagaatggg

SEQ ID NO: 3486185 - DNA, 25 bp, Homo sapien
agcccagaggtactttgccatcaga

SEQ ID NO: 3486186 - DNA, 25 bp, Homo sapien
taagcacaggcctatgcacagtaga

SEQ ID NO: 3486187 - DNA, 25 bp, Homo sapien
tgcataaacgagcaaaagagacgct

SEQ ID NO: 3486188 - DNA, 25 bp, Homo sapien
ggctaccaggatgggctaccaggat

SEQ ID NO: 3486189 - DNA, 25 bp, Homo sapien
tctgaagatctagacaaaagatggc

SEQ ID NO: 3486190 - DNA, 25 bp, Homo sapien
gaggataactaacaaggtcaccagc

SEQ ID NO: 3486191 - DNA, 25 bp, Homo sapien
tattggcatccaacagcagatattg

SEQ ID NO: 3486192 - DNA, 25 bp, Homo sapien
ggatttctcatcctaggtacctagc

SEQ ID NO: 3486193 - DNA, 25 bp, Homo sapien
ccattttttattggcagctaataaa

SEQ ID NO: 3486194 - DNA, 25 bp, Homo sapien
tttattggcagctaataaaagtaga

SEQ ID NO: 3486195 - DNA, 25 bp, Homo sapien
tatgtgagacaaaccagtaacaaca

SEQ ID NO: 3486196 - DNA, 25 bp, Homo sapien
aaatgatgttctacaactatgtgag

SEQ ID NO: 3486197 - DNA, 25 bp, Homo sapien
tcgccgatcccgttctcacagatct

SEQ ID NO: 3486198 - DNA, 25 bp, Homo sapien
ccgtcgcctcctcgccgatcccgtt

SEQ ID NO: 3486199 - DNA, 25 bp, Homo sapien
cgcctcctcgccgatcccgttctca

SEQ ID NO: 3486200 - DNA, 25 bp, Homo sapien
ctcctcgccgatcccgttctcacag

SEQ ID NO: 3486201 - DNA, 25 bp, Homo sapien
ggaagtcgggcgagcgcgaagaacc

SEQ ID NO: 3486202 - DNA, 25 bp, Homo sapien
gcgagcgcgaagaaccagccggcac

SEQ ID NO: 3486203 - DNA, 25 bp, Homo sapien
tcgggcgagcgcgaagaaccagccg

SEQ ID NO: 3486204 - DNA, 25 bp, Homo sapien
gagcgcgaagaaccagccggcacca

SEQ ID NO: 3486205 - DNA, 25 bp, Homo sapien
tgggcatgcccgggccgcacggggc

SEQ ID NO: 3486206 - DNA, 25 bp, Homo sapien
cactgggcatgcccgggccgcacgg

SEQ ID NO: 3486207 - DNA, 25 bp, Homo sapien
cagctccgccggggcgcttccaggg

SEQ ID NO: 3486208 - DNA, 25 bp, Homo sapien
agctccgccggggcgcttccagggc

SEQ ID NO: 3486209 - DNA, 25 bp, Homo sapien
gcggctccggccctgcccctagccc

SEQ ID NO: 3486210 - DNA, 25 bp, Homo sapien
ccgcggctccggccctgcccctagc

SEQ ID NO: 3486211 - DNA, 25 bp, Homo sapien
cgccgcggctccggccctgccccta

SEQ ID NO: 3486212 - DNA, 25 bp, Homo sapien
ggctccggccctgcccctagcccac

SEQ ID NO: 3486213 - DNA, 25 bp, Homo sapien
agcctcgcccggggatgtgcccggc

SEQ ID NO: 3486214 - DNA, 25 bp, Homo sapien
gcctcgcccggggatgtgcccggcc

SEQ ID NO: 3486215 - DNA, 25 bp, Homo sapien
gcaattcggcagaaaactggtctcc

SEQ ID NO: 3486216 - DNA, 25 bp, Homo sapien
ctaggcaattcggcagaaaactggt

SEQ ID NO: 3486217 - DNA, 25 bp, Homo sapien
ggcaattcggcagaaaactggtctc

SEQ ID NO: 3486218 - DNA, 25 bp, Homo sapien
taggcaattcggcagaaaactggtc

SEQ ID NO: 3486219 - DNA, 25 bp, Homo sapien
tctgagtccacgggtccattcaggc

SEQ ID NO: 3486220 - DNA, 25 bp, Homo sapien
ctctgagtccacgggtccattcagg

SEQ ID NO: 3486221 - DNA, 25 bp, Homo sapien
gcaaacaggaagctgtcgtagccca

SEQ ID NO: 3486222 - DNA, 25 bp, Homo sapien
ggaagctgtcgtagcccactccagg

SEQ ID NO: 3486223 - DNA, 25 bp, Homo sapien
ctaaacccaagtctcggcaaacagg

SEQ ID NO: 3486224 - DNA, 25 bp, Homo sapien
cccaagtctcggcaaacaggaagct

SEQ ID NO: 3486225 - DNA, 25 bp, Homo sapien
tcccatggacaaataacctctcaaa

SEQ ID NO: 3486226 - DNA, 25 bp, Homo sapien
tttttgttttaacacgagcatccca

SEQ ID NO: 3486227 - DNA, 25 bp, Homo sapien
cacgagcatcccatggacaaataac

SEQ ID NO: 3486228 - DNA, 25 bp, Homo sapien
ttttgttttaacacgagcatcccat

SEQ ID NO: 3486229 - DNA, 25 bp, Homo sapien
caccaaactatcaactacacacagg

SEQ ID NO: 3486230 - DNA, 25 bp, Homo sapien
cacacaggagagagaagtgtcccca

SEQ ID NO: 3486231 - DNA, 25 bp, Homo sapien
aactatcaactacacacaggagaga

SEQ ID NO: 3486232 - DNA, 25 bp, Homo sapien
ctcttcaccaccaaactatcaacta

SEQ ID NO: 3486233 - DNA, 25 bp, Homo sapien
cctggagaaaggttttgacactgtc

SEQ ID NO: 3486234 - DNA, 25 bp, Homo sapien
tctggcaaggtcctggagaaaggtt

SEQ ID NO: 3486235 - DNA, 25 bp, Homo sapien
gtcctggagaaaggttttgacactg

SEQ ID NO: 3486236 - DNA, 25 bp, Homo sapien
gagaaaggttttgacactgtcagcc

SEQ ID NO: 3486237 - DNA, 25 bp, Homo sapien
tgtcatgcacaggagccatggtaat

SEQ ID NO: 3486238 - DNA, 25 bp, Homo sapien
tgtgtcatgcacaggagccatggta

SEQ ID NO: 3486239 - DNA, 25 bp, Homo sapien
tgtgtgtcatgcacaggagccatgg

SEQ ID NO: 3486240 - DNA, 25 bp, Homo sapien
tttgtgtgtcatgcacaggagccat

SEQ ID NO: 3486241 - DNA, 25 bp, Homo sapien
tgagatggtacaaataccccagatg

SEQ ID NO: 3486242 - DNA, 25 bp, Homo sapien
gagatggtacaaataccccagatgg

SEQ ID NO: 3486243 - DNA, 25 bp, Homo sapien
ctttgagatggtacaaataccccag

SEQ ID NO: 3486244 - DNA, 25 bp, Homo sapien
gatggtacaaataccccagatggag

SEQ ID NO: 3486245 - DNA, 25 bp, Homo sapien
tccgctctatactctgggctcttct

SEQ ID NO: 3486246 - DNA, 25 bp, Homo sapien
cttgcttccgctctatactctgggc

SEQ ID NO: 3486247 - DNA, 25 bp, Homo sapien
ccttcttcgacgctgctcctctctc

SEQ ID NO: 3486248 - DNA, 25 bp, Homo sapien
gcttccgctctatactctgggctct

SEQ ID NO: 3486249 - DNA, 25 bp, Homo sapien
attgcaccacggcaatctcaggtga

SEQ ID NO: 3486250 - DNA, 25 bp, Homo sapien
tccagccagccggttcgctgaggca

SEQ ID NO: 3486251 - DNA, 25 bp, Homo sapien
ccacggcaatctcaggtgacagctt

SEQ ID NO: 3486252 - DNA, 25 bp, Homo sapien
cagccagccggttcgctgaggcaga

SEQ ID NO: 3486253 - DNA, 25 bp, Homo sapien
aaaattctactaacaatacgtggct

SEQ ID NO: 3486254 - DNA, 25 bp, Homo sapien
ccattccaagcacaacactggaaaa

SEQ ID NO: 3486255 - DNA, 25 bp, Homo sapien
caccattccaagcacaacactggaa

SEQ ID NO: 3486256 - DNA, 25 bp, Homo sapien
aattctactaacaatacgtggctca

SEQ ID NO: 3486257 - DNA, 25 bp, Homo sapien
cgataattcgggctgttaccgactg

SEQ ID NO: 3486258 - DNA, 25 bp, Homo sapien
gataattcgggctgttaccgactga

SEQ ID NO: 3486259 - DNA, 25 bp, Homo sapien
taaacagtgaaagctcctggtacac

SEQ ID NO: 3486260 - DNA, 25 bp, Homo sapien
taaagggcctctaggagaataacga

SEQ ID NO: 3486261 - DNA, 25 bp, Homo sapien
acagacaaggagcagggtatacact

SEQ ID NO: 3486262 - DNA, 25 bp, Homo sapien
ctatctgcaggataccatctgggtt

SEQ ID NO: 3486263 - DNA, 25 bp, Homo sapien
cactgaaaattgacgtgaggaagaa

SEQ ID NO: 3486264 - DNA, 25 bp, Homo sapien
aaatggcattcaccactttgctaag

SEQ ID NO: 3486265 - DNA, 25 bp, Homo sapien
tgaggaagaattccagccacgacca

SEQ ID NO: 3486266 - DNA, 25 bp, Homo sapien
acatctccatgtagtgatgggtcac

SEQ ID NO: 3486267 - DNA, 25 bp, Homo sapien
cactagggaatgggtgaggcttcct

SEQ ID NO: 3486268 - DNA, 25 bp, Homo sapien
acactagggaatgggtgaggcttcc

SEQ ID NO: 3486269 - DNA, 25 bp, Homo sapien
gacactagggaatgggtgaggcttc

SEQ ID NO: 3486270 - DNA, 25 bp, Homo sapien
actagggaatgggtgaggcttcctc

SEQ ID NO: 3486271 - DNA, 25 bp, Homo sapien
tgaaccaacgatattcaaagcagta

SEQ ID NO: 3486272 - DNA, 25 bp, Homo sapien
taactatggtagacaaaccatgagt

SEQ ID NO: 3486273 - DNA, 25 bp, Homo sapien
aaacaagaaagccaatacaattaga

SEQ ID NO: 3486274 - DNA, 25 bp, Homo sapien
caagaaagccaatacaattagatat

SEQ ID NO: 3486275 - DNA, 25 bp, Homo sapien
tagtcaagtgactaagtaactatgg

SEQ ID NO: 3486276 - DNA, 25 bp, Homo sapien
tatgttagacaaccgctggtgcatt

SEQ ID NO: 3486277 - DNA, 25 bp, Homo sapien
ttctatgttagacaaccgctggtgc

SEQ ID NO: 3486278 - DNA, 25 bp, Homo sapien
gacaaccgctggtgcatttcaattc

SEQ ID NO: 3486279 - DNA, 25 bp, Homo sapien
ctgataatatatgaggactgcattg

SEQ ID NO: 3486280 - DNA, 25 bp, Homo sapien
tgcttcattggcgctgataatgaat

SEQ ID NO: 3486281 - DNA, 25 bp, Homo sapien
gcttcattggcgctgataatgaata

SEQ ID NO: 3486282 - DNA, 25 bp, Homo sapien
cttcattggcgctgataatgaataa

SEQ ID NO: 3486283 - DNA, 25 bp, Homo sapien
catatgctatctgtggttgcaggaa

SEQ ID NO: 3486284 - DNA, 25 bp, Homo sapien
tgtggccaggtcatacagccctcta

SEQ ID NO: 3486285 - DNA, 25 bp, Homo sapien
taatgcagtcaccagcgttgaagta

SEQ ID NO: 3486286 - DNA, 25 bp, Homo sapien
taaagaatacattggagccgggcgt

SEQ ID NO: 3486287 - DNA, 25 bp, Homo sapien
tgcaggtagactgtcttgtggaaga

SEQ ID NO: 3486288 - DNA, 25 bp, Homo sapien
aagtagagctgctcagggccgactg

SEQ ID NO: 3486289 - DNA, 25 bp, Homo sapien
ccaaggagaagaggcgcaactggaa

SEQ ID NO: 3486290 - DNA, 25 bp, Homo sapien
caggcgacggatgcggtgaagggaa

SEQ ID NO: 3486291 - DNA, 25 bp, Homo sapien
aatccattcatccaagggtggtaga

SEQ ID NO: 3486292 - DNA, 25 bp, Homo sapien
gtcctttcagactcacggtgatgtt

SEQ ID NO: 3486293 - DNA, 25 bp, Homo sapien
gcaagagagaccaaaacctaacctg

SEQ ID NO: 3486294 - DNA, 25 bp, Homo sapien
taatggctataaagggagtgaccag

SEQ ID NO: 3486295 - DNA, 25 bp, Homo sapien
gtacaggtattttgacatctgcccc

SEQ ID NO: 3486296 - DNA, 25 bp, Homo sapien
gtccagaattggtacctccccatag

SEQ ID NO: 3486297 - DNA, 25 bp, Homo sapien
tatgaaatagacctggcagtggcca

SEQ ID NO: 3486298 - DNA, 25 bp, Homo sapien
tcacaggtttaatacattgacccct

SEQ ID NO: 3486299 - DNA, 25 bp, Homo sapien
ttatgagatgcttctaaatggtaca

SEQ ID NO: 3486300 - DNA, 25 bp, Homo sapien
gagatgcttctaaatggtacaaata

SEQ ID NO: 3486301 - DNA, 25 bp, Homo sapien
tatgagatgcttctaaatggtacaa

SEQ ID NO: 3486302 - DNA, 25 bp, Homo sapien
taaaccaaactgagatgtttctatt

SEQ ID NO: 3486303 - DNA, 25 bp, Homo sapien
gggctaagctggaagcatttctact

SEQ ID NO: 3486304 - DNA, 25 bp, Homo sapien
ggttgtcggggctaagctggaagca

SEQ ID NO: 3486305 - DNA, 25 bp, Homo sapien
tgtcggggctaagctggaagcattt

SEQ ID NO: 3486306 - DNA, 25 bp, Homo sapien
taagctggaagcatttctactgcca

SEQ ID NO: 3486307 - DNA, 25 bp, Homo sapien
gatgtgcctgatagttgactcgagc

SEQ ID NO: 3486308 - DNA, 25 bp, Homo sapien
tcaaacgcggactggtccagacagt

SEQ ID NO: 3486309 - DNA, 25 bp, Homo sapien
cagcccctggttttgtgaaagagcg

SEQ ID NO: 3486310 - DNA, 25 bp, Homo sapien
taactgcgatggacctgggaacctt

SEQ ID NO: 3486311 - DNA, 25 bp, Homo sapien
cggaaagaacgtgccccaagcagtt

SEQ ID NO: 3486312 - DNA, 25 bp, Homo sapien
aggtctgtatgctcccgccgagctg

SEQ ID NO: 3486313 - DNA, 25 bp, Homo sapien
agtgacgtgtcggtttgcggaccca

SEQ ID NO: 3486314 - DNA, 25 bp, Homo sapien
ttagcagtctagaggcaggtctgta

SEQ ID NO: 3486315 - DNA, 25 bp, Homo sapien
gcacccaaccctggcaggagccggg

SEQ ID NO: 3486316 - DNA, 25 bp, Homo sapien
ctcagccatccgttcagcggcgcac

SEQ ID NO: 3486317 - DNA, 25 bp, Homo sapien
tggccggctttcctaaacgatccgc

SEQ ID NO: 3486318 - DNA, 25 bp, Homo sapien
ggctccctcagccatccgttcagcg

SEQ ID NO: 3486319 - DNA, 25 bp, Homo sapien
caactgtgccctgcaagctgtggca

SEQ ID NO: 3486320 - DNA, 25 bp, Homo sapien
aatccagccatatctctcagggttt

SEQ ID NO: 3486321 - DNA, 25 bp, Homo sapien
tactccaggaggtcaacaatccagc

SEQ ID NO: 3486322 - DNA, 25 bp, Homo sapien
ggaggtcaacaatccagccatatct

SEQ ID NO: 3486323 - DNA, 25 bp, Homo sapien
aataaaggcctaactactccaggag

SEQ ID NO: 3486324 - DNA, 25 bp, Homo sapien
atgaatgggtggcaacacacgacga

SEQ ID NO: 3486325 - DNA, 25 bp, Homo sapien
gaatgggtggcaacacacgacgatc

SEQ ID NO: 3486326 - DNA, 25 bp, Homo sapien
aatgggtggcaacacacgacgatca

SEQ ID NO: 3486327 - DNA, 25 bp, Homo sapien
atgggtggcaacacacgacgatcag

SEQ ID NO: 3486328 - DNA, 25 bp, Homo sapien
tgacagaatgagaagcttcaaaagt

SEQ ID NO: 3486329 - DNA, 25 bp, Homo sapien
cagaatgagaagcttcaaaagtgtg

SEQ ID NO: 3486330 - DNA, 25 bp, Homo sapien
ctgcttctcataggacaatcgcaaa

SEQ ID NO: 3486331 - DNA, 25 bp, Homo sapien
caatcgcaaaaatccaaacttagtc

SEQ ID NO: 3486332 - DNA, 25 bp, Homo sapien
tcaggacagcaaacagacgagtgga

SEQ ID NO: 3486333 - DNA, 25 bp, Homo sapien
actttcaaatctcaggacagcaaac

SEQ ID NO: 3486334 - DNA, 25 bp, Homo sapien
acagcaaacagacgagtggagaagg

SEQ ID NO: 3486335 - DNA, 25 bp, Homo sapien
aactcatggataacactttcaaatc

SEQ ID NO: 3486336 - DNA, 25 bp, Homo sapien
caggaacctggtagtccgataatta

SEQ ID NO: 3486337 - DNA, 25 bp, Homo sapien
tgattcgtcccaaagggtaccaggc

SEQ ID NO: 3486338 - DNA, 25 bp, Homo sapien
aattgttcctccaatgattcgtccc

SEQ ID NO: 3486339 - DNA, 25 bp, Homo sapien
ccaggctcggtcatcaaaccagtta

SEQ ID NO: 3486340 - DNA, 25 bp, Homo sapien
ggaacacacagacattccgaatgtc

SEQ ID NO: 3486341 - DNA, 25 bp, Homo sapien
cattccgaatgtcgatggtgatgtg

SEQ ID NO: 3486342 - DNA, 25 bp, Homo sapien
cttgagctctttggtaaggtggtac

SEQ ID NO: 3486343 - DNA, 25 bp, Homo sapien
aaatggagtacatggtagattgcag

SEQ ID NO: 3486344 - DNA, 25 bp, Homo sapien
tatatccaggaactacagcaatcat

SEQ ID NO: 3486345 - DNA, 25 bp, Homo sapien
ggagccagccacagatcgggagata

SEQ ID NO: 3486346 - DNA, 25 bp, Homo sapien
ccagccacagatcgggagatatatc

SEQ ID NO: 3486347 - DNA, 25 bp, Homo sapien
ccacagatcgggagatatatccagg

SEQ ID NO: 3486348 - DNA, 25 bp, Homo sapien
tgccttgatccacatgtagtaggtg

SEQ ID NO: 3486349 - DNA, 25 bp, Homo sapien
tgcccaacagatggaaccagtcttt

SEQ ID NO: 3486350 - DNA, 25 bp, Homo sapien
aagggcacacttagctgcccaacag

SEQ ID NO: 3486351 - DNA, 25 bp, Homo sapien
ggtgagtagcatgcaaaagatggca

SEQ ID NO: 3486352 - DNA, 25 bp, Homo sapien
aacacataacctccccatgacgaga

SEQ ID NO: 3486353 - DNA, 25 bp, Homo sapien
gatcaggaacacataacctccccat

SEQ ID NO: 3486354 - DNA, 25 bp, Homo sapien
ggacgtggagaggaattaagttgat

SEQ ID NO: 3486355 - DNA, 25 bp, Homo sapien
taagttgatcaggaacacataacct

SEQ ID NO: 3486356 - DNA, 25 bp, Homo sapien
acatagatccggtgagagaaacggc

SEQ ID NO: 3486357 - DNA, 25 bp, Homo sapien
tagtgcccaggcagtaaacagtaca

SEQ ID NO: 3486358 - DNA, 25 bp, Homo sapien
tctgcatagaaagtatagtgcccag

SEQ ID NO: 3486359 - DNA, 25 bp, Homo sapien
cccacaaaggagatctgcatagaaa

SEQ ID NO: 3486360 - DNA, 25 bp, Homo sapien
tgagaaggacaaagcctaccagaga

SEQ ID NO: 3486361 - DNA, 25 bp, Homo sapien
tgctgcgcaggtaatccacaaaggc

SEQ ID NO: 3486362 - DNA, 25 bp, Homo sapien
tgtcagcatgaggagagctcccacg

SEQ ID NO: 3486363 - DNA, 25 bp, Homo sapien
ccagagagatgacgctccggaaaag

SEQ ID NO: 3486364 - DNA, 25 bp, Homo sapien
aattgtgggattgtacatgcttccg

SEQ ID NO: 3486365 - DNA, 25 bp, Homo sapien
gatatagtcctttcaccaggtgtga

SEQ ID NO: 3486366 - DNA, 25 bp, Homo sapien
agattcgcaaggtaagatatagtcc

SEQ ID NO: 3486367 - DNA, 25 bp, Homo sapien
ggagtttattctatgtctgtaccca

SEQ ID NO: 3486368 - DNA, 25 bp, Homo sapien
agcagcgagtagaaacgccccgtcc

SEQ ID NO: 3486369 - DNA, 25 bp, Homo sapien
agcgagtagaaacgccccgtccagg

SEQ ID NO: 3486370 - DNA, 25 bp, Homo sapien
agagggatccagcagcgagtagaaa

SEQ ID NO: 3486371 - DNA, 25 bp, Homo sapien
gatccagcagcgagtagaaacgccc

SEQ ID NO: 3486372 - DNA, 25 bp, Homo sapien
gaaacatgaagacgaggagctgcag

SEQ ID NO: 3486373 - DNA, 25 bp, Homo sapien
ccaggttgtgggctgatgctcagac

SEQ ID NO: 3486374 - DNA, 25 bp, Homo sapien
ggagctgcaggtcaaaatagtatga

SEQ ID NO: 3486375 - DNA, 25 bp, Homo sapien
caaaatagtatgaggaccaggttgt

SEQ ID NO: 3486376 - DNA, 25 bp, Homo sapien
agtatcttcattatatgactggatg

SEQ ID NO: 3486377 - DNA, 25 bp, Homo sapien
cttcattatatgactggatgattcc

SEQ ID NO: 3486378 - DNA, 25 bp, Homo sapien
tatcttcattatatgactggatgat

SEQ ID NO: 3486379 - DNA, 25 bp, Homo sapien
aaagtatcttcattatatgactgga

SEQ ID NO: 3486380 - DNA, 25 bp, Homo sapien
tgaaaagtacatgctggtcacacca

SEQ ID NO: 3486381 - DNA, 25 bp, Homo sapien
gttgctaaagcagtaatagaggcca

SEQ ID NO: 3486382 - DNA, 25 bp, Homo sapien
tccgggcatcagacaggttgctaaa

SEQ ID NO: 3486383 - DNA, 25 bp, Homo sapien
tacatgatgataaaaatccgggcat

SEQ ID NO: 3486384 - DNA, 25 bp, Homo sapien
ggagactccaatgccagagagaatg

SEQ ID NO: 3486385 - DNA, 25 bp, Homo sapien
ttcatgtatgtggacagcacctggg

SEQ ID NO: 3486386 - DNA, 25 bp, Homo sapien
gagagaatgcacataacaggtgcca

SEQ ID NO: 3486387 - DNA, 25 bp, Homo sapien
ggtgccaacactagcattagacgca

SEQ ID NO: 3486388 - DNA, 25 bp, Homo sapien
caatggacggagaagagtaggcctc

SEQ ID NO: 3486389 - DNA, 25 bp, Homo sapien
cactggtcacccaggttgaatgaaa

SEQ ID NO: 3486390 - DNA, 25 bp, Homo sapien
ctctggagtattatgacgaagccaa

SEQ ID NO: 3486391 - DNA, 25 bp, Homo sapien
cccaccacgggcagatagtacaatg

SEQ ID NO: 3486392 - DNA, 25 bp, Homo sapien
caaagtaatgcatgtcaaaccagaa

SEQ ID NO: 3486393 - DNA, 25 bp, Homo sapien
tggtctgacagaagtgacacctggc

SEQ ID NO: 3486394 - DNA, 25 bp, Homo sapien
aataaatcctggcacctggtcttcc

SEQ ID NO: 3486395 - DNA, 25 bp, Homo sapien
caatgtagccacatcaatagcctag

SEQ ID NO: 3486396 - DNA, 25 bp, Homo sapien
cgagaaatatgggtattattccatg

SEQ ID NO: 3486397 - DNA, 25 bp, Homo sapien
tgttcggtttgccatagctgtaatc

SEQ ID NO: 3486398 - DNA, 25 bp, Homo sapien
taatcccaccaggacatgaccttcg

SEQ ID NO: 3486399 - DNA, 25 bp, Homo sapien
ctgccctactcgagaaatatgggta

SEQ ID NO: 3486400 - DNA, 25 bp, Homo sapien
tagctgacatcgagctccctcatga

SEQ ID NO: 3486401 - DNA, 25 bp, Homo sapien
acatagctgacatcgagctccctca

SEQ ID NO: 3486402 - DNA, 25 bp, Homo sapien
tgacatcgagctccctcatgatctc

SEQ ID NO: 3486403 - DNA, 25 bp, Homo sapien
gctgacatcgagctccctcatgatc

SEQ ID NO: 3486404 - DNA, 25 bp, Homo sapien
aatggttatcgtattatcttcttta

SEQ ID NO: 3486405 - DNA, 25 bp, Homo sapien
tggttatcgtattatcttctttaaa

SEQ ID NO: 3486406 - DNA, 25 bp, Homo sapien
agtctaacttatatatcccctccca

SEQ ID NO: 3486407 - DNA, 25 bp, Homo sapien
ttttaatggttatcgtattatcttc

SEQ ID NO: 3486408 - DNA, 25 bp, Homo sapien
ggtatgtctgaagcaaaaacctcat

SEQ ID NO: 3486409 - DNA, 25 bp, Homo sapien
aagagtatctacaacaatagggctg

SEQ ID NO: 3486410 - DNA, 25 bp, Homo sapien
gatcatagcgccagaaacaggaaca

SEQ ID NO: 3486411 - DNA, 25 bp, Homo sapien
tatcacggtggttaagaacagactc

SEQ ID NO: 3486412 - DNA, 25 bp, Homo sapien
gtgtaaacctgtccaaagcgatagt

SEQ ID NO: 3486413 - DNA, 25 bp, Homo sapien
catcttgtacatgaggcagttgagc

SEQ ID NO: 3486414 - DNA, 25 bp, Homo sapien
tggagaaccttcacggtccacacgg

SEQ ID NO: 3486415 - DNA, 25 bp, Homo sapien
cacggaactccccagttggagtata

SEQ ID NO: 3486416 - DNA, 25 bp, Homo sapien
tctgtggtatatgcttcctccagga

SEQ ID NO: 3486417 - DNA, 25 bp, Homo sapien
atctcagcatttcggacacggtcaa

SEQ ID NO: 3486418 - DNA, 25 bp, Homo sapien
gacacggtcaaagcctggaggacgc

SEQ ID NO: 3486419 - DNA, 25 bp, Homo sapien
cttgtatatcctgaccagccaatgt

SEQ ID NO: 3486420 - DNA, 25 bp, Homo sapien
ttatgtccttgacaagcctcgatta

SEQ ID NO: 3486421 - DNA, 25 bp, Homo sapien
tgtccttgacaagcctcgattatcc

SEQ ID NO: 3486422 - DNA, 25 bp, Homo sapien
aagcctcgattatccaggtccttta

SEQ ID NO: 3486423 - DNA, 25 bp, Homo sapien
cttgacaagcctcgattatccaggt

SEQ ID NO: 3486424 - DNA, 25 bp, Homo sapien
taattgaccaaagtaaagccatgac

SEQ ID NO: 3486425 - DNA, 25 bp, Homo sapien
cctaaatgtgatgtgctcagtgcga

SEQ ID NO: 3486426 - DNA, 25 bp, Homo sapien
tttcatttggcccagcccatactgc

SEQ ID NO: 3486427 - DNA, 25 bp, Homo sapien
tgcgaagcatatcagagctggacgt

SEQ ID NO: 3486428 - DNA, 25 bp, Homo sapien
tttattgagccacgctgtttccaag

SEQ ID NO: 3486429 - DNA, 25 bp, Homo sapien
tactaggtgctgcaatgcaaagggt

SEQ ID NO: 3486430 - DNA, 25 bp, Homo sapien
gcagcctagcatagcttttgcctcc

SEQ ID NO: 3486431 - DNA, 25 bp, Homo sapien
gctaagagaatggacaaggtctgct

SEQ ID NO: 3486432 - DNA, 25 bp, Homo sapien
ggcactcttctagcactcttctggt

SEQ ID NO: 3486433 - DNA, 25 bp, Homo sapien
taagctgattcaaaaacacctactg

SEQ ID NO: 3486434 - DNA, 25 bp, Homo sapien
tctagggacctgttactggcaatgc

SEQ ID NO: 3486435 - DNA, 25 bp, Homo sapien
gcaacacataggctaagactaaggg

SEQ ID NO: 3486436 - DNA, 25 bp, Homo sapien
tatacaacagcatatcccttaggag

SEQ ID NO: 3486437 - DNA, 25 bp, Homo sapien
tttggaaggctaagtgccctggcta

SEQ ID NO: 3486438 - DNA, 25 bp, Homo sapien
gatcctcagagcaacaactgtagcg

SEQ ID NO: 3486439 - DNA, 25 bp, Homo sapien
tgaggctaaatctcacccacagttg

SEQ ID NO: 3486440 - DNA, 25 bp, Homo sapien
gaagacctgcaaatttcctgtgtgt

SEQ ID NO: 3486441 - DNA, 25 bp, Homo sapien
acaaagaatacgaagaggaagacct

SEQ ID NO: 3486442 - DNA, 25 bp, Homo sapien
aggaagacctgcaaatttcctgtgt

SEQ ID NO: 3486443 - DNA, 25 bp, Homo sapien
agaatacgaagaggaagacctgcaa

SEQ ID NO: 3486444 - DNA, 25 bp, Homo sapien
gatcacagtcggtgaagcagagtgc

SEQ ID NO: 3486445 - DNA, 25 bp, Homo sapien
ggtgaagcagagtgctttgtaaacc

SEQ ID NO: 3486446 - DNA, 25 bp, Homo sapien
ctgtgaggatcacagtcggtgaagc

SEQ ID NO: 3486447 - DNA, 25 bp, Homo sapien
cacagtcggtgaagcagagtgcttt

SEQ ID NO: 3486448 - DNA, 25 bp, Homo sapien
catcggcgcgaattgagctctgggc

SEQ ID NO: 3486449 - DNA, 25 bp, Homo sapien
aagtggcatccggtgtgaggctcga

SEQ ID NO: 3486450 - DNA, 25 bp, Homo sapien
tctgggcccaaatatgaagtggcat

SEQ ID NO: 3486451 - DNA, 25 bp, Homo sapien
tgaggctcgactgggcggtgctcga

SEQ ID NO: 3486452 - DNA, 25 bp, Homo sapien
ctgaagagatttaaggacggcggac

SEQ ID NO: 3486453 - DNA, 25 bp, Homo sapien
tccaaaagggtgacgtggagatgtt

SEQ ID NO: 3486454 - DNA, 25 bp, Homo sapien
ttcccgtgtcctgcccctctgaatg

SEQ ID NO: 3486455 - DNA, 25 bp, Homo sapien
ccgcgccgtaaagcaagacagcgcg

SEQ ID NO: 3486456 - DNA, 25 bp, Homo sapien
tgacgtggagatgttgccgctcccg

SEQ ID NO: 3486457 - DNA, 25 bp, Homo sapien
cggactgtcctttgcccaccactgc

SEQ ID NO: 3486458 - DNA, 25 bp, Homo sapien
ttcccgccaaaacttgagggcgtca

SEQ ID NO: 3486459 - DNA, 25 bp, Homo sapien
ggactgtcctttgcccaccactgca

SEQ ID NO: 3486460 - DNA, 25 bp, Homo sapien
cccgccaaaacttgagggcgtcacg

SEQ ID NO: 3486461 - DNA, 25 bp, Homo sapien
tcttagctagcagcgggttagtccc

SEQ ID NO: 3486462 - DNA, 25 bp, Homo sapien
caggccccagaggaaattaattgtt

SEQ ID NO: 3486463 - DNA, 25 bp, Homo sapien
cacaccgaaggttgaaattctgccc

SEQ ID NO: 3486464 - DNA, 25 bp, Homo sapien
gagacaaatgctttccggcgaacga

SEQ ID NO: 3486465 - DNA, 25 bp, Homo sapien
cacatttatccaagtctttcaacca

SEQ ID NO: 3486466 - DNA, 25 bp, Homo sapien
tctttcaaccacgaacaactattct

SEQ ID NO: 3486467 - DNA, 25 bp, Homo sapien
caagtctttcaaccacgaacaacta

SEQ ID NO: 3486468 - DNA, 25 bp, Homo sapien
tatccaagtctttcaaccacgaaca

SEQ ID NO: 3486469 - DNA, 25 bp, Homo sapien
aggattgcccacgaaaattaacagc

SEQ ID NO: 3486470 - DNA, 25 bp, Homo sapien
tctccccaggattgcccacgaaaat

SEQ ID NO: 3486471 - DNA, 25 bp, Homo sapien
ctccccaggattgcccacgaaaatt

SEQ ID NO: 3486472 - DNA, 25 bp, Homo sapien
gcccacgaaaattaacagctcttgc

SEQ ID NO: 3486473 - DNA, 25 bp, Homo sapien
agagtgtaagatcaccagtgaagcc

SEQ ID NO: 3486474 - DNA, 25 bp, Homo sapien
tagagtgtaagatcaccagtgaagc

SEQ ID NO: 3486475 - DNA, 25 bp, Homo sapien
gatgtagagtgtaagatcaccagtg

SEQ ID NO: 3486476 - DNA, 25 bp, Homo sapien
tgtagagtgtaagatcaccagtgaa

SEQ ID NO: 3486477 - DNA, 25 bp, Homo sapien
caagtcccagtcttccacaaagggc

SEQ ID NO: 3486478 - DNA, 25 bp, Homo sapien
agtcttccacaaagggcactgccat

SEQ ID NO: 3486479 - DNA, 25 bp, Homo sapien
aagtcccagtcttccacaaagggca

SEQ ID NO: 3486480 - DNA, 25 bp, Homo sapien
tcccagtcttccacaaagggcactg

SEQ ID NO: 3486481 - DNA, 25 bp, Homo sapien
cagttactctattcacagcaagttg

SEQ ID NO: 3486482 - DNA, 25 bp, Homo sapien
tacggcacgcttcatatctacaatc

SEQ ID NO: 3486483 - DNA, 25 bp, Homo sapien
tattttctggacagtctacggcacg

SEQ ID NO: 3486484 - DNA, 25 bp, Homo sapien
atcttcactgcgactgcttcttcag

SEQ ID NO: 3486485 - DNA, 25 bp, Homo sapien
ccagaaataaatattggatattgcc

SEQ ID NO: 3486486 - DNA, 25 bp, Homo sapien
aaatattggatattgccttctctcc

SEQ ID NO: 3486487 - DNA, 25 bp, Homo sapien
tcctccactacagtactccagaaat

SEQ ID NO: 3486488 - DNA, 25 bp, Homo sapien
tattctgtcaaaaagctctcctcca

SEQ ID NO: 3486489 - DNA, 25 bp, Homo sapien
cccctgccatgagttgatggaagaa

SEQ ID NO: 3486490 - DNA, 25 bp, Homo sapien
tggttcaggcatgcctatgtctggc

SEQ ID NO: 3486491 - DNA, 25 bp, Homo sapien
cacccctgccatgagttgatggaag

SEQ ID NO: 3486492 - DNA, 25 bp, Homo sapien
tgccatgagttgatggaagaatctc

SEQ ID NO: 3486493 - DNA, 25 bp, Homo sapien
tatccctgtgagttattccaatacc

SEQ ID NO: 3486494 - DNA, 25 bp, Homo sapien
tttcatccaacagaagattttctgg

SEQ ID NO: 3486495 - DNA, 25 bp, Homo sapien
ccctttcatccaacagaagattttc

SEQ ID NO: 3486496 - DNA, 25 bp, Homo sapien
gattttctggtttaatatccctgtg

SEQ ID NO: 3486497 - DNA, 25 bp, Homo sapien
caaacgctcacgattattataccga

SEQ ID NO: 3486498 - DNA, 25 bp, Homo sapien
tccagcgagcattgcagtaagtact

SEQ ID NO: 3486499 - DNA, 25 bp, Homo sapien
tataccgaaatactgttgccaagcc

SEQ ID NO: 3486500 - DNA, 25 bp, Homo sapien
gtaagtactattccacaggaccaaa

SEQ ID NO: 3486501 - DNA, 25 bp, Homo sapien
agtcagaatactcctgacagctgtc

SEQ ID NO: 3486502 - DNA, 25 bp, Homo sapien
gaatactcctgacagctgtcactgg

SEQ ID NO: 3486503 - DNA, 25 bp, Homo sapien
gacagctgtcactgggttggtccca

SEQ ID NO: 3486504 - DNA, 25 bp, Homo sapien
agaggagcagaatcgatttttttcc

SEQ ID NO: 3486505 - DNA, 25 bp, Homo sapien
catatccaagaaatcggtactcttt

SEQ ID NO: 3486506 - DNA, 25 bp, Homo sapien
ctacaacgaacatgaattatttgta

SEQ ID NO: 3486507 - DNA, 25 bp, Homo sapien
gaaatcggtactctttcactcaaga

SEQ ID NO: 3486508 - DNA, 25 bp, Homo sapien
tccaagaaatcggtactctttcact

SEQ ID NO: 3486509 - DNA, 25 bp, Homo sapien
tgctgtatcttggagtagtcttccc

SEQ ID NO: 3486510 - DNA, 25 bp, Homo sapien
gaatcatgttagagaagcctatggc

SEQ ID NO: 3486511 - DNA, 25 bp, Homo sapien
caaacattacgacaacattcacgaa

SEQ ID NO: 3486512 - DNA, 25 bp, Homo sapien
gaattaaagctactaaattactgct

SEQ ID NO: 3486513 - DNA, 25 bp, Homo sapien
gaatggtaattcttgctgatggatt

SEQ ID NO: 3486514 - DNA, 25 bp, Homo sapien
gctgatggattctcaactaagattt

SEQ ID NO: 3486515 - DNA, 25 bp, Homo sapien
ttctcaactaagattttatgcagca

SEQ ID NO: 3486516 - DNA, 25 bp, Homo sapien
tgatgtctggaatggtaattcttgc

SEQ ID NO: 3486517 - DNA, 25 bp, Homo sapien
cacagaaaaacaaacaaacttgtag

SEQ ID NO: 3486518 - DNA, 25 bp, Homo sapien
catgtgttgttgacttgtgataata

SEQ ID NO: 3486519 - DNA, 25 bp, Homo sapien
gctatcatgtgttgttgacttgtga

SEQ ID NO: 3486520 - DNA, 25 bp, Homo sapien
ggacagagatcatagctatcatgtg

SEQ ID NO: 3486521 - DNA, 25 bp, Homo sapien
catgaggacagagatcatagctatc

SEQ ID NO: 3486522 - DNA, 25 bp, Homo sapien
tacctaagtatgatctgtagacatg

SEQ ID NO: 3486523 - DNA, 25 bp, Homo sapien
cccaactggcaacttgaagaagtaa

SEQ ID NO: 3486524 - DNA, 25 bp, Homo sapien
tcaagtcttctatgcaagtatgttt

SEQ ID NO: 3486525 - DNA, 25 bp, Homo sapien
caaagtgtggagtatgctcagacca

SEQ ID NO: 3486526 - DNA, 25 bp, Homo sapien
ctgggagactctgacacaccacctg

SEQ ID NO: 3486527 - DNA, 25 bp, Homo sapien
ctagaagcactgtttactggagaga

SEQ ID NO: 3486528 - DNA, 25 bp, Homo sapien
tagaagcactgtttactggagagaa

SEQ ID NO: 3486529 - DNA, 25 bp, Homo sapien
gacacaccacctgaagtgactcggg

SEQ ID NO: 3486530 - DNA, 25 bp, Homo sapien
gggtgccaagtaactgactattcaa

SEQ ID NO: 3486531 - DNA, 25 bp, Homo sapien
tggctgagaactggagtacttcaca

SEQ ID NO: 3486532 - DNA, 25 bp, Homo sapien
aaagcatatgatcaggacatgtggg

SEQ ID NO: 3486533 - DNA, 25 bp, Homo sapien
gaggggctggtatcccataaggaaa

SEQ ID NO: 3486534 - DNA, 25 bp, Homo sapien
caggcattgataagatttgtctgca

SEQ ID NO: 3486535 - DNA, 25 bp, Homo sapien
tccaatttggtaaagaatcgtgtca

SEQ ID NO: 3486536 - DNA, 25 bp, Homo sapien
tctcacaagtctctttcaggcattg

SEQ ID NO: 3486537 - DNA, 25 bp, Homo sapien
cattgatagcccaacttctcacaag

SEQ ID NO: 3486538 - DNA, 25 bp, Homo sapien
atcttagccaaaaggctaagaagcg

SEQ ID NO: 3486539 - DNA, 25 bp, Homo sapien
ttaaactgataggaatagatactac

SEQ ID NO: 3486540 - DNA, 25 bp, Homo sapien
acttgatcttagccaaaaggctaag

SEQ ID NO: 3486541 - DNA, 25 bp, Homo sapien
ttagccaaaaggctaagaagcgatt

SEQ ID NO: 3486542 - DNA, 25 bp, Homo sapien
gaagtcaaccaatattttatcatcc

SEQ ID NO: 3486543 - DNA, 25 bp, Homo sapien
cttagaaagccggaagtcaaccaat

SEQ ID NO: 3486544 - DNA, 25 bp, Homo sapien
tattgtttctcctatcagttgttga

SEQ ID NO: 3486545 - DNA, 25 bp, Homo sapien
ttgaaaatgagtttattgtttctcc

SEQ ID NO: 3486546 - DNA, 25 bp, Homo sapien
ttaggtatgtctagctaccattttc

SEQ ID NO: 3486547 - DNA, 25 bp, Homo sapien
aggtatgtctagctaccattttctt

SEQ ID NO: 3486548 - DNA, 25 bp, Homo sapien
taggtatgtctagctaccattttct

SEQ ID NO: 3486549 - DNA, 25 bp, Homo sapien
tgctcacaatatcaatcagcttccc

SEQ ID NO: 3486550 - DNA, 25 bp, Homo sapien
tatcaatcagcttccctttaatctt

SEQ ID NO: 3486551 - DNA, 25 bp, Homo sapien
tctggctgctcacaatatcaatcag

SEQ ID NO: 3486552 - DNA, 25 bp, Homo sapien
cacaatatcaatcagcttcccttta

SEQ ID NO: 3486553 - DNA, 25 bp, Homo sapien
aggattccccagagccgatggtccg

SEQ ID NO: 3486554 - DNA, 25 bp, Homo sapien
caggattccccagagccgatggtcc

SEQ ID NO: 3486555 - DNA, 25 bp, Homo sapien
ggattccccagagccgatggtccga

SEQ ID NO: 3486556 - DNA, 25 bp, Homo sapien
gagatacgtgtgtataaaagctgga

SEQ ID NO: 3486557 - DNA, 25 bp, Homo sapien
ttgcagtttgcaggacaggataatc

SEQ ID NO: 3486558 - DNA, 25 bp, Homo sapien
gaataatgtcaacatagcagcacta

SEQ ID NO: 3486559 - DNA, 25 bp, Homo sapien
tggtttccaccagatgagtttcaaa

SEQ ID NO: 3486560 - DNA, 25 bp, Homo sapien
agaattatgtctttattggttcatc

SEQ ID NO: 3486561 - DNA, 25 bp, Homo sapien
attatgtctttattggttcatctta

SEQ ID NO: 3486562 - DNA, 25 bp, Homo sapien
caagaattatgtctttattggttca

SEQ ID NO: 3486563 - DNA, 25 bp, Homo sapien
gaattatgtctttattggttcatct

SEQ ID NO: 3486564 - DNA, 25 bp, Homo sapien
gggatatgttttgaagctggcttcg

SEQ ID NO: 3486565 - DNA, 25 bp, Homo sapien
gctggcttcgcttcacagactgata

SEQ ID NO: 3486566 - DNA, 25 bp, Homo sapien
gcactagagtttatgcaacactgta

SEQ ID NO: 3486567 - DNA, 25 bp, Homo sapien
tatcacctaaaagcttggtcaccag

SEQ ID NO: 3486568 - DNA, 25 bp, Homo sapien
gactacaggcaggagccaaggcctc

SEQ ID NO: 3486569 - DNA, 25 bp, Homo sapien
tcaaacttccaggttcacgcgatcc

SEQ ID NO: 3486570 - DNA, 25 bp, Homo sapien
gcctcaaacttccaggttcacgcga

SEQ ID NO: 3486571 - DNA, 25 bp, Homo sapien
tacaggcaggagccaaggcctcaac

SEQ ID NO: 3486572 - DNA, 25 bp, Homo sapien
ttactgaggcaattaccagtgttca

SEQ ID NO: 3486573 - DNA, 25 bp, Homo sapien
tattcctcctatgggtatactccag

SEQ ID NO: 3486574 - DNA, 25 bp, Homo sapien
tatactccagtaacacaatttgcca

SEQ ID NO: 3486575 - DNA, 25 bp, Homo sapien
gattcaattcttaagcataccgtaa

SEQ ID NO: 3486576 - DNA, 25 bp, Homo sapien
atctctacctcacattctacacaaa

SEQ ID NO: 3486577 - DNA, 25 bp, Homo sapien
aatctctacctcacattctacacaa

SEQ ID NO: 3486578 - DNA, 25 bp, Homo sapien
ttatagacctaaatcagccaaaaaa

SEQ ID NO: 3486579 - DNA, 25 bp, Homo sapien
attatagacctaaatcagccaaaaa

SEQ ID NO: 3486580 - DNA, 25 bp, Homo sapien
tattcagccataaggagtcctgata

SEQ ID NO: 3486581 - DNA, 25 bp, Homo sapien
caaaattaacagaacctagccaggc

SEQ ID NO: 3486582 - DNA, 25 bp, Homo sapien
cagaagcctgtacccaacaattgta

SEQ ID NO: 3486583 - DNA, 25 bp, Homo sapien
tccacagagacaaaatgtaggttag

SEQ ID NO: 3486584 - DNA, 25 bp, Homo sapien
aattggaacacgaacaaaagacatg

SEQ ID NO: 3486585 - DNA, 25 bp, Homo sapien
gaaactgcattactcatatattggt

SEQ ID NO: 3486586 - DNA, 25 bp, Homo sapien
caaatctaattggaacacgaacaaa

SEQ ID NO: 3486587 - DNA, 25 bp, Homo sapien
tagtatctcgactacataagtagct

SEQ ID NO: 3486588 - DNA, 25 bp, Homo sapien
tcagagaacataggttgggactagc

SEQ ID NO: 3486589 - DNA, 25 bp, Homo sapien
tgaggataacctctgaccaaattat

SEQ ID NO: 3486590 - DNA, 25 bp, Homo sapien
aaattattgtctggtcactgactcc

SEQ ID NO: 3486591 - DNA, 25 bp, Homo sapien
cagagaagcccctaaatttgaggat

SEQ ID NO: 3486592 - DNA, 25 bp, Homo sapien
tttttcaaggactaagaacagaatc

SEQ ID NO: 3486593 - DNA, 25 bp, Homo sapien
acagaatcccttgccaggcgaggtg

SEQ ID NO: 3486594 - DNA, 25 bp, Homo sapien
ggactaagaacagaatcccttgcca

SEQ ID NO: 3486595 - DNA, 25 bp, Homo sapien
gaacagaatcccttgccaggcgagg

SEQ ID NO: 3486596 - DNA, 25 bp, Homo sapien
tagctttacagtcagagggtcccac

SEQ ID NO: 3486597 - DNA, 25 bp, Homo sapien
taaacaagtccaactcggagagctc

SEQ ID NO: 3486598 - DNA, 25 bp, Homo sapien
gaagcccaatgaaggtttgtcccac

SEQ ID NO: 3486599 - DNA, 25 bp, Homo sapien
aagcagtgggttgctaagggccaac

SEQ ID NO: 3486600 - DNA, 25 bp, Homo sapien
gactgaatttcctcatttaggctga

SEQ ID NO: 3486601 - DNA, 25 bp, Homo sapien
gagaattaaccagatcctgacctag

SEQ ID NO: 3486602 - DNA, 25 bp, Homo sapien
tggtttaatgcacctgtcaatgcat

SEQ ID NO: 3486603 - DNA, 25 bp, Homo sapien
tctctcttgattaggaccagactga

SEQ ID NO: 3486604 - DNA, 25 bp, Homo sapien
caggatgctcagcatatgcctctca

SEQ ID NO: 3486605 - DNA, 25 bp, Homo sapien
ctgtgttacccccatcaccaggatg

SEQ ID NO: 3486606 - DNA, 25 bp, Homo sapien
tcacacagtggctgaggaatgccag

SEQ ID NO: 3486607 - DNA, 25 bp, Homo sapien
tttgctgtgttacccccatcaccag

SEQ ID NO: 3486608 - DNA, 25 bp, Homo sapien
gagcatgagcgggaacttgtccatc

SEQ ID NO: 3486609 - DNA, 25 bp, Homo sapien
gaatcttggtgttgacctcctcccg

SEQ ID NO: 3486610 - DNA, 25 bp, Homo sapien
taagtgctccggaaaggctaagaca

SEQ ID NO: 3486611 - DNA, 25 bp, Homo sapien
tacacactcgccagtgggtgtttca

SEQ ID NO: 3486612 - DNA, 25 bp, Homo sapien
tttagaggggacaaacatcgcaaca

SEQ ID NO: 3486613 - DNA, 25 bp, Homo sapien
ggctcatggctatactggctgcaca

SEQ ID NO: 3486614 - DNA, 25 bp, Homo sapien
aaaccacagctctcatgtcaactaa

SEQ ID NO: 3486615 - DNA, 25 bp, Homo sapien
tatttggcgtcagaaggatggagcc

SEQ ID NO: 3486616 - DNA, 25 bp, Homo sapien
gagttccagcaagagggacttgtcc

SEQ ID NO: 3486617 - DNA, 25 bp, Homo sapien
agttccagcaagagggacttgtcca

SEQ ID NO: 3486618 - DNA, 25 bp, Homo sapien
ggagttccagcaagagggacttgtc

SEQ ID NO: 3486619 - DNA, 25 bp, Homo sapien
gttccagcaagagggacttgtccat

SEQ ID NO: 3486620 - DNA, 25 bp, Homo sapien
ctgttcctaaattcaggactcttac

SEQ ID NO: 3486621 - DNA, 25 bp, Homo sapien
tacccctggtagaaggcataacatt

SEQ ID NO: 3486622 - DNA, 25 bp, Homo sapien
atgagaaggcctctgtcatgggtgc

SEQ ID NO: 3486623 - DNA, 25 bp, Homo sapien
tgccataggactcccatgagaaggc

SEQ ID NO: 3486624 - DNA, 25 bp, Homo sapien
tcatcatgcttcagttgccatagga

SEQ ID NO: 3486625 - DNA, 25 bp, Homo sapien
ttctcattgaaagtgatccagataa

SEQ ID NO: 3486626 - DNA, 25 bp, Homo sapien
ctcattgaaagtgatccagataatg

SEQ ID NO: 3486627 - DNA, 25 bp, Homo sapien
atcatttctcattgaaagtgatcca

SEQ ID NO: 3486628 - DNA, 25 bp, Homo sapien
catttctcattgaaagtgatccaga

SEQ ID NO: 3486629 - DNA, 25 bp, Homo sapien
cttctcataccacttatctattcct

SEQ ID NO: 3486630 - DNA, 25 bp, Homo sapien
cataccacttatctattcctactca

SEQ ID NO: 3486631 - DNA, 25 bp, Homo sapien
ccttccccttctcataccacttatc

SEQ ID NO: 3486632 - DNA, 25 bp, Homo sapien
tccccttctcataccacttatctat

SEQ ID NO: 3486633 - DNA, 25 bp, Homo sapien
tctgtgtggcactcttacctgtggg

SEQ ID NO: 3486634 - DNA, 25 bp, Homo sapien
gggtccatcctgcactcttaaactg

SEQ ID NO: 3486635 - DNA, 25 bp, Homo sapien
tagatttggccaagcgacacctgaa

SEQ ID NO: 3486636 - DNA, 25 bp, Homo sapien
ttaaactggagccattccaggccca

SEQ ID NO: 3486637 - DNA, 25 bp, Homo sapien
tttttcacagcaactatttcattga

SEQ ID NO: 3486638 - DNA, 25 bp, Homo sapien
ggttagaagtctgcctagagccaca

SEQ ID NO: 3486639 - DNA, 25 bp, Homo sapien
catcaagcgtgaacctcttcctctg

SEQ ID NO: 3486640 - DNA, 25 bp, Homo sapien
gatggcactaccaggaaagaacccc

SEQ ID NO: 3486641 - DNA, 25 bp, Homo sapien
cactaagccaagagagtgattgagg

SEQ ID NO: 3486642 - DNA, 25 bp, Homo sapien
tctgttgttgctgtgcatattcctc

SEQ ID NO: 3486643 - DNA, 25 bp, Homo sapien
ctggaggtggcacatcctacactga

SEQ ID NO: 3486644 - DNA, 25 bp, Homo sapien
catcctacactgaacaatttctatc

SEQ ID NO: 3486645 - DNA, 25 bp, Homo sapien
catgcaggcctcttctgttgttgct

SEQ ID NO: 3486646 - DNA, 25 bp, Homo sapien
tagaaccatccgtaaggaagcccag

SEQ ID NO: 3486647 - DNA, 25 bp, Homo sapien
taattcagggattgccaaagctggg

SEQ ID NO: 3486648 - DNA, 25 bp, Homo sapien
tacccattgggcatagattacacct

SEQ ID NO: 3486649 - DNA, 25 bp, Homo sapien
gccatcccaggtatgagactgccta

SEQ ID NO: 3486650 - DNA, 25 bp, Homo sapien
taggcagcccatgaaggttaaccag

SEQ ID NO: 3486651 - DNA, 25 bp, Homo sapien
gaagttcaccaaatagacactccac

SEQ ID NO: 3486652 - DNA, 25 bp, Homo sapien
tcacatcagcacagttctttaggca

SEQ ID NO: 3486653 - DNA, 25 bp, Homo sapien
accttatgcctttcacatcagcaca

SEQ ID NO: 3486654 - DNA, 25 bp, Homo sapien
ggcaacaacctcacccagaaattgg

SEQ ID NO: 3486655 - DNA, 25 bp, Homo sapien
tggagccatgtgtttgcaatcctct

SEQ ID NO: 3486656 - DNA, 25 bp, Homo sapien
cctttcgtgtgcagaagatggagcc

SEQ ID NO: 3486657 - DNA, 25 bp, Homo sapien
ttttaaggggcgtgacagagactgt

SEQ ID NO: 3486658 - DNA, 25 bp, Homo sapien
tcagcctctacccttgtgaacaggt

SEQ ID NO: 3486659 - DNA, 25 bp, Homo sapien
tagtggccagactcaaatggcttcc

SEQ ID NO: 3486660 - DNA, 25 bp, Homo sapien
gctatacagtgaaagcacaagggtt

SEQ ID NO: 3486661 - DNA, 25 bp, Homo sapien
caagggtttgtagcaacctgcagga

SEQ ID NO: 3486662 - DNA, 25 bp, Homo sapien
aagaggaacaagaagtgtttgttca

SEQ ID NO: 3486663 - DNA, 25 bp, Homo sapien
gaggaagaggaacaagaagtgtttg

SEQ ID NO: 3486664 - DNA, 25 bp, Homo sapien
aaggaggaagaggaacaagaagtgt

SEQ ID NO: 3486665 - DNA, 25 bp, Homo sapien
ccacaatgaggcagtaaaggaggaa

SEQ ID NO: 3486666 - DNA, 25 bp, Homo sapien
ctttaagcaaaaagttagcctccat

SEQ ID NO: 3486667 - DNA, 25 bp, Homo sapien
tccgtgtgcgaaggtggcatgttat

SEQ ID NO: 3486668 - DNA, 25 bp, Homo sapien
gcatgcctcgcccttctgagcagta

SEQ ID NO: 3486669 - DNA, 25 bp, Homo sapien
ccttctgagcagtacagacaccaaa

SEQ ID NO: 3486670 - DNA, 25 bp, Homo sapien
caaagcctcttctacagcggtctgt

SEQ ID NO: 3486671 - DNA, 25 bp, Homo sapien
catgtatgatatctggagagtattg

SEQ ID NO: 3486672 - DNA, 25 bp, Homo sapien
atgtatgatatctggagagtattgc

SEQ ID NO: 3486673 - DNA, 25 bp, Homo sapien
tgtatgaacataagtccgattcctg

SEQ ID NO: 3486674 - DNA, 25 bp, Homo sapien
tgtagttgcagcatgtatgaacata

SEQ ID NO: 3486675 - DNA, 25 bp, Homo sapien
aagttacagtaattgtagttgcagc

SEQ ID NO: 3486676 - DNA, 25 bp, Homo sapien
taagtccgattcctgagatcaaatg

SEQ ID NO: 3486677 - DNA, 25 bp, Homo sapien
taggttatatgcctcaggtgccatc

SEQ ID NO: 3486678 - DNA, 25 bp, Homo sapien
tgatgacggatcctgaaaggcagcc

SEQ ID NO: 3486679 - DNA, 25 bp, Homo sapien
caagaaagctgtacagggtagatgg

SEQ ID NO: 3486680 - DNA, 25 bp, Homo sapien
gacagacaaatctctttgacccagg

SEQ ID NO: 3486681 - DNA, 25 bp, Homo sapien
ccatcattaagatcttcccagtttc

SEQ ID NO: 3486682 - DNA, 25 bp, Homo sapien
aataaccatcattaagatcttccca

SEQ ID NO: 3486683 - DNA, 25 bp, Homo sapien
catcattaagatcttcccagtttcc

SEQ ID NO: 3486684 - DNA, 25 bp, Homo sapien
taaccatcattaagatcttcccagt

SEQ ID NO: 3486685 - DNA, 25 bp, Homo sapien
agctggatgaagcctttgacatcta

SEQ ID NO: 3486686 - DNA, 25 bp, Homo sapien
gctggatgaagcctttgacatctac

SEQ ID NO: 3486687 - DNA, 25 bp, Homo sapien
gctcacaaggagcagtgtgttcatt

SEQ ID NO: 3486688 - DNA, 25 bp, Homo sapien
gtttgggtgacagacggtgtgctga

SEQ ID NO: 3486689 - DNA, 25 bp, Homo sapien
gagaaaagataagctcacaaggagc

SEQ ID NO: 3486690 - DNA, 25 bp, Homo sapien
tcattttcctcattggatgcttgtt

SEQ ID NO: 3486691 - DNA, 25 bp, Homo sapien
gtgcctcggcctgccatacacttcc

SEQ ID NO: 3486692 - DNA, 25 bp, Homo sapien
gcaggtattacacttcagacccata

SEQ ID NO: 3486693 - DNA, 25 bp, Homo sapien
tgccatacacttccatccttctgtg

SEQ ID NO: 3486694 - DNA, 25 bp, Homo sapien
ggctgttgttgaacataactcattt

SEQ ID NO: 3486695 - DNA, 25 bp, Homo sapien
tcaacaggcctcttttggaggactc

SEQ ID NO: 3486696 - DNA, 25 bp, Homo sapien
cacccgcttagagttctggaggcca

SEQ ID NO: 3486697 - DNA, 25 bp, Homo sapien
gatgatcctctgcaagttcctaagc

SEQ ID NO: 3486698 - DNA, 25 bp, Homo sapien
tagcaaggcaccatttaccacagat

SEQ ID NO: 3486699 - DNA, 25 bp, Homo sapien
ctgccatgaatatggtgctattgtg

SEQ ID NO: 3486700 - DNA, 25 bp, Homo sapien
ggaagccaggagcctatatttttgc

SEQ ID NO: 3486701 - DNA, 25 bp, Homo sapien
aatatggtgctattgtgttagctgg

SEQ ID NO: 3486702 - DNA, 25 bp, Homo sapien
ccatgaatatggtgctattgtgtta

SEQ ID NO: 3486703 - DNA, 25 bp, Homo sapien
gaacttaagatggaggccgagagcc

SEQ ID NO: 3486704 - DNA, 25 bp, Homo sapien
gaggttcgttgtctcgcgctaagga

SEQ ID NO: 3486705 - DNA, 25 bp, Homo sapien
gattctgatcctgggcgagtcccca

SEQ ID NO: 3486706 - DNA, 25 bp, Homo sapien
gaaagttaagttctgcgcctgtact

SEQ ID NO: 3486707 - DNA, 25 bp, Homo sapien
taggtgttgttggtttatcaactca

SEQ ID NO: 3486708 - DNA, 25 bp, Homo sapien
caactggttgtatcatcatgcttgt

SEQ ID NO: 3486709 - DNA, 25 bp, Homo sapien
gaactcaaatattgctttcaactgg

SEQ ID NO: 3486710 - DNA, 25 bp, Homo sapien
tatgctttccccaattaggtgttgt

SEQ ID NO: 3486711 - DNA, 25 bp, Homo sapien
gacgcctctggtgtactaaatctgg

SEQ ID NO: 3486712 - DNA, 25 bp, Homo sapien
caaaccttggctaacggcgacatag

SEQ ID NO: 3486713 - DNA, 25 bp, Homo sapien
ttaaaaatatccgagcccgcctagc

SEQ ID NO: 3486714 - DNA, 25 bp, Homo sapien
gagagagcggctgtatgaaaccctg

SEQ ID NO: 3486715 - DNA, 25 bp, Homo sapien
ctttcaacggcaaagctcgcagtcg

SEQ ID NO: 3486716 - DNA, 25 bp, Homo sapien
gacggttccatgctgcagtccacaa

SEQ ID NO: 3486717 - DNA, 25 bp, Homo sapien
tccacaaaaggtgcagctagaaggc

SEQ ID NO: 3486718 - DNA, 25 bp, Homo sapien
gacctggaatccacggagggaagct

SEQ ID NO: 3486719 - DNA, 25 bp, Homo sapien
gcccggcctgaattctgatttataa

SEQ ID NO: 3486720 - DNA, 25 bp, Homo sapien
tctctggcccatggtaaggactaaa

SEQ ID NO: 3486721 - DNA, 25 bp, Homo sapien
gattttttcagtacccggtgctggc

SEQ ID NO: 3486722 - DNA, 25 bp, Homo sapien
gaaaagacagatgccgtaccaaacg

SEQ ID NO: 3486723 - DNA, 25 bp, Homo sapien
tagtgactcagcatcctagggttag

SEQ ID NO: 3486724 - DNA, 25 bp, Homo sapien
gattggtatttacattcaagtaaaa

SEQ ID NO: 3486725 - DNA, 25 bp, Homo sapien
tgattggtatttacattcaagtaaa

SEQ ID NO: 3486726 - DNA, 25 bp, Homo sapien
cttgattggtatttacattcaagta

SEQ ID NO: 3486727 - DNA, 25 bp, Homo sapien
atcttgattggtatttacattcaag

SEQ ID NO: 3486728 - DNA, 25 bp, Homo sapien
tcagtttgaagtgactggccaggca

SEQ ID NO: 3486729 - DNA, 25 bp, Homo sapien
caagtccgatgtatgatggctatcc

SEQ ID NO: 3486730 - DNA, 25 bp, Homo sapien
tctgctcaagtacagctagtgggcc

SEQ ID NO: 3486731 - DNA, 25 bp, Homo sapien
cagctcagaagtatgttggcaccca

SEQ ID NO: 3486732 - DNA, 25 bp, Homo sapien
gcttaaagtgagaaaatcttgtctc

SEQ ID NO: 3486733 - DNA, 25 bp, Homo sapien
tcttgtctctagcttctacttccaa

SEQ ID NO: 3486734 - DNA, 25 bp, Homo sapien
tacaaccatcggtaagcttcttcag

SEQ ID NO: 3486735 - DNA, 25 bp, Homo sapien
cagttaggctagcttctattgcacc

SEQ ID NO: 3486736 - DNA, 25 bp, Homo sapien
tctactgtcttgccaccttcaggtc

SEQ ID NO: 3486737 - DNA, 25 bp, Homo sapien
attagcccatatttgtccatcaggt

SEQ ID NO: 3486738 - DNA, 25 bp, Homo sapien
gcccatatttgtccatcaggtagaa

SEQ ID NO: 3486739 - DNA, 25 bp, Homo sapien
tagcccatatttgtccatcaggtag

SEQ ID NO: 3486740 - DNA, 25 bp, Homo sapien
tatttgtccatcaggtagaagttct

SEQ ID NO: 3486741 - DNA, 25 bp, Homo sapien
caccaggtaaacgtattgagtccca

SEQ ID NO: 3486742 - DNA, 25 bp, Homo sapien
cggtttcggcttaactggtccagct

SEQ ID NO: 3486743 - DNA, 25 bp, Homo sapien
tcttgttcgtaagctggagagccca

SEQ ID NO: 3486744 - DNA, 25 bp, Homo sapien
ggaactgtacattcatcagcctttg

SEQ ID NO: 3486745 - DNA, 25 bp, Homo sapien
tttgcaaggtcacaacgaacacccc

SEQ ID NO: 3486746 - DNA, 25 bp, Homo sapien
caacgaacaccccaacggagtgcag

SEQ ID NO: 3486747 - DNA, 25 bp, Homo sapien
acgaacaccccaacggagtgcagac

SEQ ID NO: 3486748 - DNA, 25 bp, Homo sapien
catttgcaaggtcacaacgaacacc

SEQ ID NO: 3486749 - DNA, 25 bp, Homo sapien
ggaagggaagcttcctgggtatgac

SEQ ID NO: 3486750 - DNA, 25 bp, Homo sapien
aagggaagcttcctgggtatgacac

SEQ ID NO: 3486751 - DNA, 25 bp, Homo sapien
gaagggaagcttcctgggtatgaca

SEQ ID NO: 3486752 - DNA, 25 bp, Homo sapien
gggaagggaagcttcctgggtatga

SEQ ID NO: 3486753 - DNA, 25 bp, Homo sapien
ggaagatataaagagctaggttatc

SEQ ID NO: 3486754 - DNA, 25 bp, Homo sapien
agggaagatataaagagctaggtta

SEQ ID NO: 3486755 - DNA, 25 bp, Homo sapien
gggaagatataaagagctaggttat

SEQ ID NO: 3486756 - DNA, 25 bp, Homo sapien
aaatgtttcgaagagcttctcaaga

SEQ ID NO: 3486757 - DNA, 25 bp, Homo sapien
cataaaatgtttcgaagagcttctc

SEQ ID NO: 3486758 - DNA, 25 bp, Homo sapien
gaagagcttctcaagacagttgttt

SEQ ID NO: 3486759 - DNA, 25 bp, Homo sapien
taaaatgtttcgaagagcttctcaa

SEQ ID NO: 3486760 - DNA, 25 bp, Homo sapien
tttaattggtaagtgtaatgcccag

SEQ ID NO: 3486761 - DNA, 25 bp, Homo sapien
tctttaattggtaagtgtaatgccc

SEQ ID NO: 3486762 - DNA, 25 bp, Homo sapien
cacagcaactcatattgataggtaa

SEQ ID NO: 3486763 - DNA, 25 bp, Homo sapien
gatatatagctaggaaagaccaatg

SEQ ID NO: 3486764 - DNA, 25 bp, Homo sapien
tctattattttagcgtagcactaca

SEQ ID NO: 3486765 - DNA, 25 bp, Homo sapien
ctattattttagcgtagcactacaa

SEQ ID NO: 3486766 - DNA, 25 bp, Homo sapien
ttctattattttagcgtagcactac

SEQ ID NO: 3486767 - DNA, 25 bp, Homo sapien
tgctggccccatccgctggccaatg

SEQ ID NO: 3486768 - DNA, 25 bp, Homo sapien
tccgctggccaatgggcttccttag

SEQ ID NO: 3486769 - DNA, 25 bp, Homo sapien
accaccggcgcgaggcggtgctggc

SEQ ID NO: 3486770 - DNA, 25 bp, Homo sapien
tccttagggggcaggcgtccgcgtc

SEQ ID NO: 3486771 - DNA, 25 bp, Homo sapien
gcgtcgcctccccacagtaacgacg

SEQ ID NO: 3486772 - DNA, 25 bp, Homo sapien
cgcctccccacagtaacgacgccat

SEQ ID NO: 3486773 - DNA, 25 bp, Homo sapien
gtcgcctccccacagtaacgacgcc

SEQ ID NO: 3486774 - DNA, 25 bp, Homo sapien
ctgcgtcgcctccccacagtaacga

SEQ ID NO: 3486775 - DNA, 25 bp, Homo sapien
ggctgtggccccccggctcggtggc

SEQ ID NO: 3486776 - DNA, 25 bp, Homo sapien
cggctgtggccccccggctcggtgg

SEQ ID NO: 3486777 - DNA, 25 bp, Homo sapien
ctatgtttcggactgcagtactctt

SEQ ID NO: 3486778 - DNA, 25 bp, Homo sapien
tgcagtactcttaataccccaaagg

SEQ ID NO: 3486779 - DNA, 25 bp, Homo sapien
tatgtttcggactgcagtactctta

SEQ ID NO: 3486780 - DNA, 25 bp, Homo sapien
tcttccggggttggctgaggtttga

SEQ ID NO: 3486781 - DNA, 25 bp, Homo sapien
tcatcttcattgatgttattaatag

SEQ ID NO: 3486782 - DNA, 25 bp, Homo sapien
tcttcattgatgttattaatagaac

SEQ ID NO: 3486783 - DNA, 25 bp, Homo sapien
cttcattgatgttattaatagaacc

SEQ ID NO: 3486784 - DNA, 25 bp, Homo sapien
tcatcatcttcattgatgttattaa

SEQ ID NO: 3486785 - DNA, 25 bp, Homo sapien
cacacggtgactggattctactaag

SEQ ID NO: 3486786 - DNA, 25 bp, Homo sapien
tttactgagtaaagtggagagctgg

SEQ ID NO: 3486787 - DNA, 25 bp, Homo sapien
cttcaaatgtctttactgagtaaag

SEQ ID NO: 3486788 - DNA, 25 bp, Homo sapien
gatccttctgtaaaacttccacacg

SEQ ID NO: 3486789 - DNA, 25 bp, Homo sapien
catagattccttttagtaactcttc

SEQ ID NO: 3486790 - DNA, 25 bp, Homo sapien
tgcatagattccttttagtaactct

SEQ ID NO: 3486791 - DNA, 25 bp, Homo sapien
gcatagattccttttagtaactctt

SEQ ID NO: 3486792 - DNA, 25 bp, Homo sapien
agcatcatagggagagccatctctt

SEQ ID NO: 3486793 - DNA, 25 bp, Homo sapien
gcatcatagggagagccatctcttg

SEQ ID NO: 3486794 - DNA, 25 bp, Homo sapien
ttttagatggcctattaaatcccat

SEQ ID NO: 3486795 - DNA, 25 bp, Homo sapien
tctcttggattttagatggcctatt

SEQ ID NO: 3486796 - DNA, 25 bp, Homo sapien
gaacaattccaaggcattaactctg

SEQ ID NO: 3486797 - DNA, 25 bp, Homo sapien
tccagactggctctgtgctatgagg

SEQ ID NO: 3486798 - DNA, 25 bp, Homo sapien
ctgtgggaacaattccaaggcatta

SEQ ID NO: 3486799 - DNA, 25 bp, Homo sapien
aactctgcttaacattgccaacaca

SEQ ID NO: 3486800 - DNA, 25 bp, Homo sapien
tcataagtaggagctaggcagaggc

SEQ ID NO: 3486801 - DNA, 25 bp, Homo sapien
tttgcagagccaattcataagtagg

SEQ ID NO: 3486802 - DNA, 25 bp, Homo sapien
gattccctcgaatggcatacatcac

SEQ ID NO: 3486803 - DNA, 25 bp, Homo sapien
tctgctcaaccacacggccagtttg

SEQ ID NO: 3486804 - DNA, 25 bp, Homo sapien
ttagtgatgtcggtgcctctgggaa

SEQ ID NO: 3486805 - DNA, 25 bp, Homo sapien
aaacaccaatctaggacagtcccag

SEQ ID NO: 3486806 - DNA, 25 bp, Homo sapien
cagtcccaggagtgccaattataat

SEQ ID NO: 3486807 - DNA, 25 bp, Homo sapien
ccaggacaaacacacgaatcttagt

SEQ ID NO: 3486808 - DNA, 25 bp, Homo sapien
tttactatttggagatatcacagac

SEQ ID NO: 3486809 - DNA, 25 bp, Homo sapien
ttactatttggagatatcacagaca

SEQ ID NO: 3486810 - DNA, 25 bp, Homo sapien
tactatttggagatatcacagacat

SEQ ID NO: 3486811 - DNA, 25 bp, Homo sapien
tgaccaatggtgatgctgccataaa

SEQ ID NO: 3486812 - DNA, 25 bp, Homo sapien
gcagaagatgatggcctgaccaatg

SEQ ID NO: 3486813 - DNA, 25 bp, Homo sapien
tcagggatgattcgctcagcaaagt

SEQ ID NO: 3486814 - DNA, 25 bp, Homo sapien
cacagagtcctcaaaggttgctgaa

SEQ ID NO: 3486815 - DNA, 25 bp, Homo sapien
tcccgaaacctctgaatgatggaag

SEQ ID NO: 3486816 - DNA, 25 bp, Homo sapien
aatgatggaagctcgctgctccacg

SEQ ID NO: 3486817 - DNA, 25 bp, Homo sapien
cattagttgttatgagaaccttctc

SEQ ID NO: 3486818 - DNA, 25 bp, Homo sapien
gtcaaccacttagcgtttcgacgag

SEQ ID NO: 3486819 - DNA, 25 bp, Homo sapien
tcaaagttcacaacaattgtgacct

SEQ ID NO: 3486820 - DNA, 25 bp, Homo sapien
aaagttcacaacaattgtgacctgc

SEQ ID NO: 3486821 - DNA, 25 bp, Homo sapien
cccgtccgccctatgcggtggaggt

SEQ ID NO: 3486822 - DNA, 25 bp, Homo sapien
ctatgcggtggaggtaggtctcata

SEQ ID NO: 3486823 - DNA, 25 bp, Homo sapien
aacatgtaaatctgagctcaaattt

SEQ ID NO: 3486824 - DNA, 25 bp, Homo sapien
acatgtaaatctgagctcaaatttt

SEQ ID NO: 3486825 - DNA, 25 bp, Homo sapien
gaaattctgactccagaatgagtta

SEQ ID NO: 3486826 - DNA, 25 bp, Homo sapien
tccagaatgagttataacatgtaaa

SEQ ID NO: 3486827 - DNA, 25 bp, Homo sapien
gaacagaactagtctcatgtcaggg

SEQ ID NO: 3486828 - DNA, 25 bp, Homo sapien
tcaaatgcaccagaccatggaatgt

SEQ ID NO: 3486829 - DNA, 25 bp, Homo sapien
catgtcagggtctaaatggaacttc

SEQ ID NO: 3486830 - DNA, 25 bp, Homo sapien
tgatacctcgtataaaaagccttgg

SEQ ID NO: 3486831 - DNA, 25 bp, Homo sapien
tcatccatgtcttcagcgttgagtt

SEQ ID NO: 3486832 - DNA, 25 bp, Homo sapien
catgtcttcagcgttgagttgctta

SEQ ID NO: 3486833 - DNA, 25 bp, Homo sapien
tcagcgttgagttgcttaatactgc

SEQ ID NO: 3486834 - DNA, 25 bp, Homo sapien
tcttcagcgttgagttgcttaatac

SEQ ID NO: 3486835 - DNA, 25 bp, Homo sapien
cataaactaggatactgcacaaaca

SEQ ID NO: 3486836 - DNA, 25 bp, Homo sapien
gcttcacatcaatttggcttcaaaa

SEQ ID NO: 3486837 - DNA, 25 bp, Homo sapien
catctgtgacagtttcacgtcgaaa

SEQ ID NO: 3486838 - DNA, 25 bp, Homo sapien
ggatcacaagcttcacatcaatttg

SEQ ID NO: 3486839 - DNA, 25 bp, Homo sapien
tagcccacattgagacattacctgt

SEQ ID NO: 3486840 - DNA, 25 bp, Homo sapien
tccaaaatcagcgaagctctaccgc

SEQ ID NO: 3486841 - DNA, 25 bp, Homo sapien
gatctgctcagattgtatcaaccaa

SEQ ID NO: 3486842 - DNA, 25 bp, Homo sapien
cacagtaagatgctcccaagaggca

SEQ ID NO: 3486843 - DNA, 25 bp, Homo sapien
tgaaaatatcccttgctggtaaggt

SEQ ID NO: 3486844 - DNA, 25 bp, Homo sapien
tgggcaaagaacactacagatgctt

SEQ ID NO: 3486845 - DNA, 25 bp, Homo sapien
aaagtgcttctagttttcgacctgg

SEQ ID NO: 3486846 - DNA, 25 bp, Homo sapien
tcgacctggtactcgcacttaatgt

SEQ ID NO: 3486847 - DNA, 25 bp, Homo sapien
cttggataaaactttctgcttgttc

SEQ ID NO: 3486848 - DNA, 25 bp, Homo sapien
ggataaaactttctgcttgttcaag

SEQ ID NO: 3486849 - DNA, 25 bp, Homo sapien
aaactttctgcttgttcaagatggt

SEQ ID NO: 3486850 - DNA, 25 bp, Homo sapien
tctgcttgttcaagatggtttttcc

SEQ ID NO: 3486851 - DNA, 25 bp, Homo sapien
taatgtctctgtagagctccagggt

SEQ ID NO: 3486852 - DNA, 25 bp, Homo sapien
gagtggggagtttccataatgtctc

SEQ ID NO: 3486853 - DNA, 25 bp, Homo sapien
aaattgtcagtcgtctccttggcga

SEQ ID NO: 3486854 - DNA, 25 bp, Homo sapien
tccttggcgaccagcagccaaataa

SEQ ID NO: 3486855 - DNA, 25 bp, Homo sapien
gtccaagaccggggctccagcaggt

SEQ ID NO: 3486856 - DNA, 25 bp, Homo sapien
tccaagaccggggctccagcaggtc

SEQ ID NO: 3486857 - DNA, 25 bp, Homo sapien
gaagtccaagaccggggctccagca

SEQ ID NO: 3486858 - DNA, 25 bp, Homo sapien
agtccaagaccggggctccagcagg

SEQ ID NO: 3486859 - DNA, 25 bp, Homo sapien
tcactatttgaaactgcgtgtgctg

SEQ ID NO: 3486860 - DNA, 25 bp, Homo sapien
ttgaaactgcgtgtgctgctcttct

SEQ ID NO: 3486861 - DNA, 25 bp, Homo sapien
ctatttgaaactgcgtgtgctgctc

SEQ ID NO: 3486862 - DNA, 25 bp, Homo sapien
atttgaaactgcgtgtgctgctctt

SEQ ID NO: 3486863 - DNA, 25 bp, Homo sapien
tcagatgggcgctgcatgaacttgg

SEQ ID NO: 3486864 - DNA, 25 bp, Homo sapien
ctagactccagtagtttgaggtgaa

SEQ ID NO: 3486865 - DNA, 25 bp, Homo sapien
tgaaattctggaggaccaggctgag

SEQ ID NO: 3486866 - DNA, 25 bp, Homo sapien
ttgggtgagcaacccgctccgtctc

SEQ ID NO: 3486867 - DNA, 25 bp, Homo sapien
gtgacctcagcatcttacagaactt

SEQ ID NO: 3486868 - DNA, 25 bp, Homo sapien
gtgtgacctcagcatcttacagaac

SEQ ID NO: 3486869 - DNA, 25 bp, Homo sapien
tgtgacctcagcatcttacagaact

SEQ ID NO: 3486870 - DNA, 25 bp, Homo sapien
tgtgtgacctcagcatcttacagaa

SEQ ID NO: 3486871 - DNA, 25 bp, Homo sapien
gccctcaggtgcagaaggcagaggt

SEQ ID NO: 3486872 - DNA, 25 bp, Homo sapien
ctgtgctgggccctctgacccacca

SEQ ID NO: 3486873 - DNA, 25 bp, Homo sapien
gcaggaggctgactgggctgtgctg

SEQ ID NO: 3486874 - DNA, 25 bp, Homo sapien
agaggtgtatcagcagcaggaggct

SEQ ID NO: 3486875 - DNA, 25 bp, Homo sapien
agtggccacgggcaccctcgtgaag

SEQ ID NO: 3486876 - DNA, 25 bp, Homo sapien
agccgaggcgatggcctccaccttg

SEQ ID NO: 3486877 - DNA, 25 bp, Homo sapien
cacgtgcagaacctggcataggaag

SEQ ID NO: 3486878 - DNA, 25 bp, Homo sapien
tggacatggctccatcggtgacggc

SEQ ID NO: 3486879 - DNA, 25 bp, Homo sapien
agttgctggcgctgcacatgtacca

SEQ ID NO: 3486880 - DNA, 25 bp, Homo sapien
tgctcagcctgttcacggagttgct

SEQ ID NO: 3486881 - DNA, 25 bp, Homo sapien
ccaccctaggtgtgtccggttgaca

SEQ ID NO: 3486882 - DNA, 25 bp, Homo sapien
ggacgggttactcagtcgcacttga

SEQ ID NO: 3486883 - DNA, 25 bp, Homo sapien
taaataggacgccattcgtcctcgc

SEQ ID NO: 3486884 - DNA, 25 bp, Homo sapien
caaaccgccacggtgaagaccgata

SEQ ID NO: 3486885 - DNA, 25 bp, Homo sapien
tccaataggcggatgccagacacag

SEQ ID NO: 3486886 - DNA, 25 bp, Homo sapien
gctccttaaaacgtctaagaccagc

SEQ ID NO: 3486887 - DNA, 25 bp, Homo sapien
tggacacggccagctctggcgatga

SEQ ID NO: 3486888 - DNA, 25 bp, Homo sapien
catggtgatcacaggcttgtcagga

SEQ ID NO: 3486889 - DNA, 25 bp, Homo sapien
gcgatgacataggtaggccccgtgt

SEQ ID NO: 3486890 - DNA, 25 bp, Homo sapien
gacttgcgtgtggtcacggagccac

SEQ ID NO: 3486891 - DNA, 25 bp, Homo sapien
agagcagggtcacagcctcagggct

SEQ ID NO: 3486892 - DNA, 25 bp, Homo sapien
ctgggatgcactgcacaggagggct

SEQ ID NO: 3486893 - DNA, 25 bp, Homo sapien
cagttgggcaggcggaagcccccca

SEQ ID NO: 3486894 - DNA, 25 bp, Homo sapien
caggagggctgtccctcagggggat

SEQ ID NO: 3486895 - DNA, 25 bp, Homo sapien
ttgctgggggcagtagggccaggtc

SEQ ID NO: 3486896 - DNA, 25 bp, Homo sapien
tgcgtgactccaggtgacgttgctg

SEQ ID NO: 3486897 - DNA, 25 bp, Homo sapien
ggagctgggcggctgcgtgactcca

SEQ ID NO: 3486898 - DNA, 25 bp, Homo sapien
tgggcggctgcgtgactccaggtga

SEQ ID NO: 3486899 - DNA, 25 bp, Homo sapien
ggaaggaatgatggctcagtatggc

SEQ ID NO: 3486900 - DNA, 25 bp, Homo sapien
gaaggaatgatggctcagtatggcc

SEQ ID NO: 3486901 - DNA, 25 bp, Homo sapien
ctggaaggaatgatggctcagtatg

SEQ ID NO: 3486902 - DNA, 25 bp, Homo sapien
tggaaggaatgatggctcagtatgg

SEQ ID NO: 3486903 - DNA, 25 bp, Homo sapien
cagcaggtaggcctcccgagaggct

SEQ ID NO: 3486904 - DNA, 25 bp, Homo sapien
ccagcaggtaggcctcccgagaggc

SEQ ID NO: 3486905 - DNA, 25 bp, Homo sapien
ctccagcaggtaggcctcccgagag

SEQ ID NO: 3486906 - DNA, 25 bp, Homo sapien
tccagcaggtaggcctcccgagagg

SEQ ID NO: 3486907 - DNA, 25 bp, Homo sapien
tgctgttcgtcaagccagcccagcg

SEQ ID NO: 3486908 - DNA, 25 bp, Homo sapien
tcagcatgatgaactggtcccccat

SEQ ID NO: 3486909 - DNA, 25 bp, Homo sapien
cctgcaggaggtgaacggccatcga

SEQ ID NO: 3486910 - DNA, 25 bp, Homo sapien
ggtgaacggccatcgaggagctgct

SEQ ID NO: 3486911 - DNA, 25 bp, Homo sapien
tcagcatcgtagatgcccaggcgca

SEQ ID NO: 3486912 - DNA, 25 bp, Homo sapien
tgcagcatgaatcctgaagtgccgg

SEQ ID NO: 3486913 - DNA, 25 bp, Homo sapien
acactctgactgctattgcccacgg

SEQ ID NO: 3486914 - DNA, 25 bp, Homo sapien
gccacgcattggtaggtgcccctgt

SEQ ID NO: 3486915 - DNA, 25 bp, Homo sapien
tcaggttcccgggtcctaagatggc

SEQ ID NO: 3486916 - DNA, 25 bp, Homo sapien
taagatggcccattgaagctgcacc

SEQ ID NO: 3486917 - DNA, 25 bp, Homo sapien
tcccgggtcctaagatggcccattg

SEQ ID NO: 3486918 - DNA, 25 bp, Homo sapien
gggtcctaagatggcccattgaagc

SEQ ID NO: 3486919 - DNA, 25 bp, Homo sapien
tctctggctcgatgtcactagctgc

SEQ ID NO: 3486920 - DNA, 25 bp, Homo sapien
cgtcctcggctctctggctcgatgt

SEQ ID NO: 3486921 - DNA, 25 bp, Homo sapien
atgcggaaggcataaaggaccccgg

SEQ ID NO: 3486922 - DNA, 25 bp, Homo sapien
tcacctcagagggatgtcctgcagt

SEQ ID NO: 3486923 - DNA, 25 bp, Homo sapien
agaggccaccgttgctaccaccatt

SEQ ID NO: 3486924 - DNA, 25 bp, Homo sapien
ggaacaccagtagagaggccaccgt

SEQ ID NO: 3486925 - DNA, 25 bp, Homo sapien
tgggtgccgggcagcatactggaac

SEQ ID NO: 3486926 - DNA, 25 bp, Homo sapien
caacaccgctgggtaggcgctgaag

SEQ ID NO: 3486927 - DNA, 25 bp, Homo sapien
gggtcaagcagcccgtcccttccga

SEQ ID NO: 3486928 - DNA, 25 bp, Homo sapien
caagcagcccgtcccttccgattcc

SEQ ID NO: 3486929 - DNA, 25 bp, Homo sapien
agcagcccgtcccttccgattccca

SEQ ID NO: 3486930 - DNA, 25 bp, Homo sapien
gtcaagcagcccgtcccttccgatt

SEQ ID NO: 3486931 - DNA, 25 bp, Homo sapien
gtgggaacaagcaattgaccaaggc

SEQ ID NO: 3486932 - DNA, 25 bp, Homo sapien
catcttctctggaacccctctgttg

SEQ ID NO: 3486933 - DNA, 25 bp, Homo sapien
ggaacccctctgttggtgcctttgc

SEQ ID NO: 3486934 - DNA, 25 bp, Homo sapien
tctctggaacccctctgttggtgcc

SEQ ID NO: 3486935 - DNA, 25 bp, Homo sapien
tcttctctggaacccctctgttggt

SEQ ID NO: 3486936 - DNA, 25 bp, Homo sapien
cagggcttctcttgtaaccatgtca

SEQ ID NO: 3486937 - DNA, 25 bp, Homo sapien
ggtgacattcactggagaatccgtg

SEQ ID NO: 3486938 - DNA, 25 bp, Homo sapien
aaagtctgacagaagggctcttccc

SEQ ID NO: 3486939 - DNA, 25 bp, Homo sapien
tgggccttgtaccagttgtgaagac

SEQ ID NO: 3486940 - DNA, 25 bp, Homo sapien
tgcagtacctctgctccgtatcttg

SEQ ID NO: 3486941 - DNA, 25 bp, Homo sapien
gtatcttgtgggctgcgactcctgg

SEQ ID NO: 3486942 - DNA, 25 bp, Homo sapien
cgactcctggagtcggaccactgca

SEQ ID NO: 3486943 - DNA, 25 bp, Homo sapien
ctgcagcgtcagtgatgttcgtaag

SEQ ID NO: 3486944 - DNA, 25 bp, Homo sapien
gcagaggcggctcggagtcccgagt

SEQ ID NO: 3486945 - DNA, 25 bp, Homo sapien
gaggcggctcggagtcccgagtctt

SEQ ID NO: 3486946 - DNA, 25 bp, Homo sapien
ctgcagaggcggctcggagtcccga

SEQ ID NO: 3486947 - DNA, 25 bp, Homo sapien
agaggcggctcggagtcccgagtct

SEQ ID NO: 3486948 - DNA, 25 bp, Homo sapien
tctgtctcctttcaggcgccacgtc

SEQ ID NO: 3486949 - DNA, 25 bp, Homo sapien
tcttaagcttctcaattttctgtct

SEQ ID NO: 3486950 - DNA, 25 bp, Homo sapien
ttcttaagcttctcaattttctgtc

SEQ ID NO: 3486951 - DNA, 25 bp, Homo sapien
gccacgtcccttgtgctggcgggtc

SEQ ID NO: 3486952 - DNA, 25 bp, Homo sapien
catctctaggcttgtctgaccagaa

SEQ ID NO: 3486953 - DNA, 25 bp, Homo sapien
cctgagagctttgagggtagccgaa

SEQ ID NO: 3486954 - DNA, 25 bp, Homo sapien
acgctgagaacatacctgaccctgg

SEQ ID NO: 3486955 - DNA, 25 bp, Homo sapien
taaccgagcgccacatgtttatgaa

SEQ ID NO: 3486956 - DNA, 25 bp, Homo sapien
gatctttactgtgctcagtgatcac

SEQ ID NO: 3486957 - DNA, 25 bp, Homo sapien
ggtcaagcctattcatgttccttct

SEQ ID NO: 3486958 - DNA, 25 bp, Homo sapien
ttctgtgtgattgttttagcataaa

SEQ ID NO: 3486959 - DNA, 25 bp, Homo sapien
tcacgaaattggtcaagcctattca

SEQ ID NO: 3486960 - DNA, 25 bp, Homo sapien
tgagccatgggacctgaatccgaac

SEQ ID NO: 3486961 - DNA, 25 bp, Homo sapien
cactctttggatggaaccagtcccg

SEQ ID NO: 3486962 - DNA, 25 bp, Homo sapien
tatgacttcgtcttccagaggtcca

SEQ ID NO: 3486963 - DNA, 25 bp, Homo sapien
tccgaacctagtttatctggagcca

SEQ ID NO: 3486964 - DNA, 25 bp, Homo sapien
gttggcattaaaatccccaagtcac

SEQ ID NO: 3486965 - DNA, 25 bp, Homo sapien
tatatttaggcggtatgagttctcc

SEQ ID NO: 3486966 - DNA, 25 bp, Homo sapien
tgtgggagacagcactaacacgtgc

SEQ ID NO: 3486967 - DNA, 25 bp, Homo sapien
tccctaagcgtgagttggctctgcc

SEQ ID NO: 3486968 - DNA, 25 bp, Homo sapien
gctgggtcactatgcaagagttact

SEQ ID NO: 3486969 - DNA, 25 bp, Homo sapien
gatgtccgtgcctatagtatactgg

SEQ ID NO: 3486970 - DNA, 25 bp, Homo sapien
taaagccaagttggtcagcagagct

SEQ ID NO: 3486971 - DNA, 25 bp, Homo sapien
gttagtttcccagaaatcgcagtgg

SEQ ID NO: 3486972 - DNA, 25 bp, Homo sapien
ttgggatgctttgattgattgccat

SEQ ID NO: 3486973 - DNA, 25 bp, Homo sapien
aagttcagattgtcagtgtctgcca

SEQ ID NO: 3486974 - DNA, 25 bp, Homo sapien
cgatcaagttcagattgtcagtgtc

SEQ ID NO: 3486975 - DNA, 25 bp, Homo sapien
aaatctcgatcaagttcagattgtc

SEQ ID NO: 3486976 - DNA, 25 bp, Homo sapien
tctcgatcaagttcagattgtcagt

SEQ ID NO: 3486977 - DNA, 25 bp, Homo sapien
tttcaagatcgtgaacttcctcata

SEQ ID NO: 3486978 - DNA, 25 bp, Homo sapien
ttcaagatcgtgaacttcctcatag

SEQ ID NO: 3486979 - DNA, 25 bp, Homo sapien
ttcattaataatctcaaatcgctta

SEQ ID NO: 3486980 - DNA, 25 bp, Homo sapien
tctgtgggttcataaatttcattaa

SEQ ID NO: 3486981 - DNA, 25 bp, Homo sapien
attgttcttctgtgggttcataaat

SEQ ID NO: 3486982 - DNA, 25 bp, Homo sapien
taataatctcaaatcgcttatcaaa

SEQ ID NO: 3486983 - DNA, 25 bp, Homo sapien
caacattcttagaaacagttaacca

SEQ ID NO: 3486984 - DNA, 25 bp, Homo sapien
ggccttttctttcaactcctctgaa

SEQ ID NO: 3486985 - DNA, 25 bp, Homo sapien
tgaacaagtcaacattcttagaaac

SEQ ID NO: 3486986 - DNA, 25 bp, Homo sapien
cctttttctcatcttcgatcttggc

SEQ ID NO: 3486987 - DNA, 25 bp, Homo sapien
aattcataggctggtcagcatctga

SEQ ID NO: 3486988 - DNA, 25 bp, Homo sapien
attcataggctggtcagcatctgag

SEQ ID NO: 3486989 - DNA, 25 bp, Homo sapien
tttccaatctatctggcaccctgtg

SEQ ID NO: 3486990 - DNA, 25 bp, Homo sapien
caccctgtgcaacccataatttctg

SEQ ID NO: 3486991 - DNA, 25 bp, Homo sapien
ggtccatcaaaagaaaagggatcag

SEQ ID NO: 3486992 - DNA, 25 bp, Homo sapien
tctggtccatcaaaagaaaagggat

SEQ ID NO: 3486993 - DNA, 25 bp, Homo sapien
tgtgttagtcacagtatgaactgtc

SEQ ID NO: 3486994 - DNA, 25 bp, Homo sapien
aggggcaaacaaattaaagagtcat

SEQ ID NO: 3486995 - DNA, 25 bp, Homo sapien
ggaaactgtgttagtcacagtatga

SEQ ID NO: 3486996 - DNA, 25 bp, Homo sapien
gaggggcaaacaaattaaagagtca

SEQ ID NO: 3486997 - DNA, 25 bp, Homo sapien
tgtgcaaggatttcagcatcatcat

SEQ ID NO: 3486998 - DNA, 25 bp, Homo sapien
atcatccagatctccactctcagga

SEQ ID NO: 3486999 - DNA, 25 bp, Homo sapien
ctgtgcaaggatttcagcatcatca

SEQ ID NO: 3487000 - DNA, 25 bp, Homo sapien
gcatcatcatccagatctccactct

SEQ ID NO: 3487001 - DNA, 25 bp, Homo sapien
aaacatcatcatcaacttcaatagc

SEQ ID NO: 3487002 - DNA, 25 bp, Homo sapien
tcaatagcttctccagtaaagtatg

SEQ ID NO: 3487003 - DNA, 25 bp, Homo sapien
ttctccagtaaagtatgacactgct

SEQ ID NO: 3487004 - DNA, 25 bp, Homo sapien
tcatcataaacatcatcatcaactt

SEQ ID NO: 3487005 - DNA, 25 bp, Homo sapien
gaattatttgctcatttggtaaaca

SEQ ID NO: 3487006 - DNA, 25 bp, Homo sapien
ggaatacataagtcattcaatttgc

SEQ ID NO: 3487007 - DNA, 25 bp, Homo sapien
cacagagaattatttgctcatttgg

SEQ ID NO: 3487008 - DNA, 25 bp, Homo sapien
taagtcattcaatttgcttctcaat

SEQ ID NO: 3487009 - DNA, 25 bp, Homo sapien
atttattgaaactttacacatacac

SEQ ID NO: 3487010 - DNA, 25 bp, Homo sapien
ttattgaaactttacacatacactg

SEQ ID NO: 3487011 - DNA, 25 bp, Homo sapien
tttattgaaactttacacatacact

SEQ ID NO: 3487012 - DNA, 25 bp, Homo sapien
tgctttctttcacatcgcagacagg

SEQ ID NO: 3487013 - DNA, 25 bp, Homo sapien
gctttctttcacatcgcagacaggg

SEQ ID NO: 3487014 - DNA, 25 bp, Homo sapien
atcctttgcaaatatctccaactcc

SEQ ID NO: 3487015 - DNA, 25 bp, Homo sapien
aaatatctccaactccttgccattc

SEQ ID NO: 3487016 - DNA, 25 bp, Homo sapien
cttctgagcatcttgtagggaagcc

SEQ ID NO: 3487017 - DNA, 25 bp, Homo sapien
tctaaactgtggctgctaatgctga

SEQ ID NO: 3487018 - DNA, 25 bp, Homo sapien
tgagcatcttgtagggaagcctgag

SEQ ID NO: 3487019 - DNA, 25 bp, Homo sapien
tagagaagacgggaatggctgcctt

SEQ ID NO: 3487020 - DNA, 25 bp, Homo sapien
ttccacgtaagaagaggaccaaaga

SEQ ID NO: 3487021 - DNA, 25 bp, Homo sapien
cacagcgaggcagttgagagcaggt

SEQ ID NO: 3487022 - DNA, 25 bp, Homo sapien
caaagaacacgctggcaaggtccaa

SEQ ID NO: 3487023 - DNA, 25 bp, Homo sapien
caccagggctgagcgttgagggcac

SEQ ID NO: 3487024 - DNA, 25 bp, Homo sapien
gaatgccccattgagctgggtgata

SEQ ID NO: 3487025 - DNA, 25 bp, Homo sapien
ccccaaggagggcattatcatgcaa

SEQ ID NO: 3487026 - DNA, 25 bp, Homo sapien
gtctgttaataaggcccctgggcat

SEQ ID NO: 3487027 - DNA, 25 bp, Homo sapien
tgaggtaagggctttgggcaacagc

SEQ ID NO: 3487028 - DNA, 25 bp, Homo sapien
gagcgcagcgaatgcagtttgtaga

SEQ ID NO: 3487029 - DNA, 25 bp, Homo sapien
caggccgtgaccaatggggaatgca

SEQ ID NO: 3487030 - DNA, 25 bp, Homo sapien
tgagccctgatttgggaagaacaaa

SEQ ID NO: 3487031 - DNA, 25 bp, Homo sapien
agagcaaggctttcatgcactgatg

SEQ ID NO: 3487032 - DNA, 25 bp, Homo sapien
catgtcctgtgcgatatttgagaca

SEQ ID NO: 3487033 - DNA, 25 bp, Homo sapien
aacacaaattccatagctggaagtt

SEQ ID NO: 3487034 - DNA, 25 bp, Homo sapien
gacaaaatgacagaagacccagtta

SEQ ID NO: 3487035 - DNA, 25 bp, Homo sapien
aatgaccacaaaccgaacagcctaa

SEQ ID NO: 3487036 - DNA, 25 bp, Homo sapien
gcctctagcccggttcttcatcttt

SEQ ID NO: 3487037 - DNA, 25 bp, Homo sapien
ggatgcagtccgaagtccatgggcc

SEQ ID NO: 3487038 - DNA, 25 bp, Homo sapien
cctcaggagatttacttgtcttggc

SEQ ID NO: 3487039 - DNA, 25 bp, Homo sapien
tctttttgtgccatggatgcagtcc

SEQ ID NO: 3487040 - DNA, 25 bp, Homo sapien
tgatggatcttgaactcccttggga

SEQ ID NO: 3487041 - DNA, 25 bp, Homo sapien
cagagcagaaggatatgggtgccca

SEQ ID NO: 3487042 - DNA, 25 bp, Homo sapien
tcaggcgccctcacgttagctttgg

SEQ ID NO: 3487043 - DNA, 25 bp, Homo sapien
ttggccttcgcgttccagagcagaa

SEQ ID NO: 3487044 - DNA, 25 bp, Homo sapien
aatagggggtgctttctaggaggct

SEQ ID NO: 3487045 - DNA, 25 bp, Homo sapien
ttttctcagagtcacctgccccaaa

SEQ ID NO: 3487046 - DNA, 25 bp, Homo sapien
tgtgtgaataccaggccaaacttgt

SEQ ID NO: 3487047 - DNA, 25 bp, Homo sapien
accttgcccttgcttcgggagtgga

SEQ ID NO: 3487048 - DNA, 25 bp, Homo sapien
tctggtgggcaccaactgtcttggc

SEQ ID NO: 3487049 - DNA, 25 bp, Homo sapien
ggaatgctccaagccaagtaagggc

SEQ ID NO: 3487050 - DNA, 25 bp, Homo sapien
taggtggcaggacttgaaatctcgc

SEQ ID NO: 3487051 - DNA, 25 bp, Homo sapien
ctttagtggtgactttggcacgccc

SEQ ID NO: 3487052 - DNA, 25 bp, Homo sapien
taagggccgcttccagacctggctc

SEQ ID NO: 3487053 - DNA, 25 bp, Homo sapien
aaggtcatttaagggccgcttccag

SEQ ID NO: 3487054 - DNA, 25 bp, Homo sapien
catttaagggccgcttccagacctg

SEQ ID NO: 3487055 - DNA, 25 bp, Homo sapien
tttaagggccgcttccagacctggc

SEQ ID NO: 3487056 - DNA, 25 bp, Homo sapien
atgttcatcatgcaattccttgctc

SEQ ID NO: 3487057 - DNA, 25 bp, Homo sapien
catcatgcaattccttgctcaggaa

SEQ ID NO: 3487058 - DNA, 25 bp, Homo sapien
ttcatcatgcaattccttgctcagg

SEQ ID NO: 3487059 - DNA, 25 bp, Homo sapien
tcatgcaattccttgctcaggaagc

SEQ ID NO: 3487060 - DNA, 25 bp, Homo sapien
tgtgaccggccttgagttacgttcc

SEQ ID NO: 3487061 - DNA, 25 bp, Homo sapien
tgcccttccacaagtctctggtgtg

SEQ ID NO: 3487062 - DNA, 25 bp, Homo sapien
gtcttactagaactgccgtctggca

SEQ ID NO: 3487063 - DNA, 25 bp, Homo sapien
gttacgttcctcattacatagtacg

SEQ ID NO: 3487064 - DNA, 25 bp, Homo sapien
acgtactcgctgtctggatgcacca

SEQ ID NO: 3487065 - DNA, 25 bp, Homo sapien
cctgagatcccttctgtccgaactt

SEQ ID NO: 3487066 - DNA, 25 bp, Homo sapien
ccattccatctaagagctttgtgca

SEQ ID NO: 3487067 - DNA, 25 bp, Homo sapien
cttctgtccgaactttctcttccat

SEQ ID NO: 3487068 - DNA, 25 bp, Homo sapien
cgagcttcaactcactgctgaggcc

SEQ ID NO: 3487069 - DNA, 25 bp, Homo sapien
caggctggccaagccgagcttcaac

SEQ ID NO: 3487070 - DNA, 25 bp, Homo sapien
caagccgagcttcaactcactgctg

SEQ ID NO: 3487071 - DNA, 25 bp, Homo sapien
aggatgctgcgctggctcccttgca

SEQ ID NO: 3487072 - DNA, 25 bp, Homo sapien
gcaatttctgaccacgggagccagg

SEQ ID NO: 3487073 - DNA, 25 bp, Homo sapien
tcatggttgactgcgcagctgggct

SEQ ID NO: 3487074 - DNA, 25 bp, Homo sapien
tatggcaatttctgaccacggcagc

SEQ ID NO: 3487075 - DNA, 25 bp, Homo sapien
gaaatgcttagtaggccagacacgg

SEQ ID NO: 3487076 - DNA, 25 bp, Homo sapien
tatcgaatgtcattctcaccacact

SEQ ID NO: 3487077 - DNA, 25 bp, Homo sapien
gagatatctgtacataacatacaca

SEQ ID NO: 3487078 - DNA, 25 bp, Homo sapien
actgggtggtgccttggcctgaggt

SEQ ID NO: 3487079 - DNA, 25 bp, Homo sapien
tgaacatggctatttatacagagag

SEQ ID NO: 3487080 - DNA, 25 bp, Homo sapien
caattttattggtggtgacaaacag

SEQ ID NO: 3487081 - DNA, 25 bp, Homo sapien
attggtggtgacaaacagggataca

SEQ ID NO: 3487082 - DNA, 25 bp, Homo sapien
cacaattttattggtggtgacaaac

SEQ ID NO: 3487083 - DNA, 25 bp, Homo sapien
tttattggtggtgacaaacagggat

SEQ ID NO: 3487084 - DNA, 25 bp, Homo sapien
tgccctcggccccatgcaacgtgat

SEQ ID NO: 3487085 - DNA, 25 bp, Homo sapien
tgcaacgtgatagcagcctcagctt

SEQ ID NO: 3487086 - DNA, 25 bp, Homo sapien
tcggccccatgcaacgtgatagcag

SEQ ID NO: 3487087 - DNA, 25 bp, Homo sapien
cccatgcaacgtgatagcagcctca

SEQ ID NO: 3487088 - DNA, 25 bp, Homo sapien
tccggagagggtgctctcaggagct

SEQ ID NO: 3487089 - DNA, 25 bp, Homo sapien
tctcagtcctactcttccggagagg

SEQ ID NO: 3487090 - DNA, 25 bp, Homo sapien
catccacgggcgtgcatttcagtgg

SEQ ID NO: 3487091 - DNA, 25 bp, Homo sapien
tcttgctgcatccacgggcgtgcat

SEQ ID NO: 3487092 - DNA, 25 bp, Homo sapien
aggcggccccttcttcattgtacac

SEQ ID NO: 3487093 - DNA, 25 bp, Homo sapien
tttctcttgtgagcagaggaagtgg

SEQ ID NO: 3487094 - DNA, 25 bp, Homo sapien
tctgcatccagcagaagagttttcc

SEQ ID NO: 3487095 - DNA, 25 bp, Homo sapien
gcttggctggaaggagtacagttct

SEQ ID NO: 3487096 - DNA, 25 bp, Homo sapien
cgggtttaatgaggtgactgccact

SEQ ID NO: 3487097 - DNA, 25 bp, Homo sapien
tgtccagcgtgcctttcatcgggag

SEQ ID NO: 3487098 - DNA, 25 bp, Homo sapien
cggagctgcttgtgtgaaccttgac

SEQ ID NO: 3487099 - DNA, 25 bp, Homo sapien
tcatcgggagctttatgagcagccg

SEQ ID NO: 3487100 - DNA, 25 bp, Homo sapien
gaggcctggtgagcggcttctctct

SEQ ID NO: 3487101 - DNA, 25 bp, Homo sapien
caggtccaggcttacaggttcccat

SEQ ID NO: 3487102 - DNA, 25 bp, Homo sapien
gcctggctggctaaagcccctgctt

SEQ ID NO: 3487103 - DNA, 25 bp, Homo sapien
aggcttcagatgtgcaggcgcgccc

SEQ ID NO: 3487104 - DNA, 25 bp, Homo sapien
ggcctgtcctgggagtctttgcagc

SEQ ID NO: 3487105 - DNA, 25 bp, Homo sapien
aaagcttggagctgcatgtagggtt

SEQ ID NO: 3487106 - DNA, 25 bp, Homo sapien
tctttgcagccggaacctcagaaag

SEQ ID NO: 3487107 - DNA, 25 bp, Homo sapien
gcttggagctgcatgtagggttcca

SEQ ID NO: 3487108 - DNA, 25 bp, Homo sapien
tcttgtacttgttgggggctccttg

SEQ ID NO: 3487109 - DNA, 25 bp, Homo sapien
tgtacttgttgggggctccttgttc

SEQ ID NO: 3487110 - DNA, 25 bp, Homo sapien
cagcccttagggtccttcttgtact

SEQ ID NO: 3487111 - DNA, 25 bp, Homo sapien
cttcttgtacttgttgggggctcct

SEQ ID NO: 3487112 - DNA, 25 bp, Homo sapien
ctttaggcaactctgggcctagggc

SEQ ID NO: 3487113 - DNA, 25 bp, Homo sapien
aggctccgagcttcccctgaaagct

SEQ ID NO: 3487114 - DNA, 25 bp, Homo sapien
gcctagggccacatccaaccacact

SEQ ID NO: 3487115 - DNA, 25 bp, Homo sapien
gcttcctgtcggaggggctttgtcc

SEQ ID NO: 3487116 - DNA, 25 bp, Homo sapien
tcagaatactggggctaagggaacc

SEQ ID NO: 3487117 - DNA, 25 bp, Homo sapien
agctcagaatactggggctaaggga

SEQ ID NO: 3487118 - DNA, 25 bp, Homo sapien
ctcagaatactggggctaagggaac

SEQ ID NO: 3487119 - DNA, 25 bp, Homo sapien
gctcagaatactggggctaagggaa

SEQ ID NO: 3487120 - DNA, 25 bp, Homo sapien
tcatggcagatacccccagccaagg

SEQ ID NO: 3487121 - DNA, 25 bp, Homo sapien
tcagggagtgaaggtcatggcagat

SEQ ID NO: 3487122 - DNA, 25 bp, Homo sapien
ggtgttggcatgaagccagtgctcc

SEQ ID NO: 3487123 - DNA, 25 bp, Homo sapien
gtgttggcatgaagccagtgctcct

SEQ ID NO: 3487124 - DNA, 25 bp, Homo sapien
tgcccaacctaataagcccacagag

SEQ ID NO: 3487125 - DNA, 25 bp, Homo sapien
tgataaccgaattgcccactctgag

SEQ ID NO: 3487126 - DNA, 25 bp, Homo sapien
gcccacgtagggattttgtttgctg

SEQ ID NO: 3487127 - DNA, 25 bp, Homo sapien
gagctcctcactcgctttgattcca

SEQ ID NO: 3487128 - DNA, 25 bp, Homo sapien
gctctgtgaaataccgctgtatgga

SEQ ID NO: 3487129 - DNA, 25 bp, Homo sapien
tctaaaaattgaatcgctgggctga

SEQ ID NO: 3487130 - DNA, 25 bp, Homo sapien
tcacacagagttttgtaccctacag

SEQ ID NO: 3487131 - DNA, 25 bp, Homo sapien
gtactcacattgctctccacaaagg

SEQ ID NO: 3487132 - DNA, 25 bp, Homo sapien
tccggcatacgcagaatatgcgtgt

SEQ ID NO: 3487133 - DNA, 25 bp, Homo sapien
tgtatacagtatacgcgtgtgcggc

SEQ ID NO: 3487134 - DNA, 25 bp, Homo sapien
tatgcgtgtctggtgtacgcagtat

SEQ ID NO: 3487135 - DNA, 25 bp, Homo sapien
cgcagtatacgcgtgtccggcatac

SEQ ID NO: 3487136 - DNA, 25 bp, Homo sapien
tgattttattcccatgctaaaaata

SEQ ID NO: 3487137 - DNA, 25 bp, Homo sapien
ttattcccatgctaaaaatagtcaa

SEQ ID NO: 3487138 - DNA, 25 bp, Homo sapien
attcccatgctaaaaatagtcaaac

SEQ ID NO: 3487139 - DNA, 25 bp, Homo sapien
tattcccatgctaaaaatagtcaaa

SEQ ID NO: 3487140 - DNA, 25 bp, Homo sapien
ctgagcgcgcaccgtccccacgtga

SEQ ID NO: 3487141 - DNA, 25 bp, Homo sapien
gagcgcgcaccgtccccacgtgact

SEQ ID NO: 3487142 - DNA, 25 bp, Homo sapien
gcgcaccgtccccacgtgactcgcc

SEQ ID NO: 3487143 - DNA, 25 bp, Homo sapien
agcgcgcaccgtccccacgtgactc

SEQ ID NO: 3487144 - DNA, 25 bp, Homo sapien
gctgcagctaccggccggcgcagcc

SEQ ID NO: 3487145 - DNA, 25 bp, Homo sapien
ctgcagctaccggccggcgcagccg

SEQ ID NO: 3487146 - DNA, 25 bp, Homo sapien
agctgcagctaccggccggcgcagc

SEQ ID NO: 3487147 - DNA, 25 bp, Homo sapien
gcagctaccggccggcgcagccgca

SEQ ID NO: 3487148 - DNA, 25 bp, Homo sapien
cccaaacagatgtttatcttcccag

SEQ ID NO: 3487149 - DNA, 25 bp, Homo sapien
atcagagggagtcgcctgcagttcg

SEQ ID NO: 3487150 - DNA, 25 bp, Homo sapien
cccagccacccctgagtgaaatcag

SEQ ID NO: 3487151 - DNA, 25 bp, Homo sapien
caaacagatgtttatcttcccagcc

SEQ ID NO: 3487152 - DNA, 25 bp, Homo sapien
gtgcaaagaatgacaacttctttct

SEQ ID NO: 3487153 - DNA, 25 bp, Homo sapien
tgcaaagaatgacaacttctttctt

SEQ ID NO: 3487154 - DNA, 25 bp, Homo sapien
cgtgcaaagaatgacaacttctttc

SEQ ID NO: 3487155 - DNA, 25 bp, Homo sapien
ttagaagttggtgactggaggtgat

SEQ ID NO: 3487156 - DNA, 25 bp, Homo sapien
aagttggtgactggaggtgatgatt

SEQ ID NO: 3487157 - DNA, 25 bp, Homo sapien
tggtgactggaggtgatgattttac

SEQ ID NO: 3487158 - DNA, 25 bp, Homo sapien
ttggtgactggaggtgatgatttta

SEQ ID NO: 3487159 - DNA, 25 bp, Homo sapien
tcagataagatctgtatcacactca

SEQ ID NO: 3487160 - DNA, 25 bp, Homo sapien
cagataagatctgtatcacactcat

SEQ ID NO: 3487161 - DNA, 25 bp, Homo sapien
tctaggctctactccaaaattacag

SEQ ID NO: 3487162 - DNA, 25 bp, Homo sapien
cctggcagttgctcccttcaagcaa

SEQ ID NO: 3487163 - DNA, 25 bp, Homo sapien
tctccagaatcttccttcaaatagg

SEQ ID NO: 3487164 - DNA, 25 bp, Homo sapien
gaaacacctaaataagatgcaaact

SEQ ID NO: 3487165 - DNA, 25 bp, Homo sapien
tgttggacgatggtgaccttgtagc

SEQ ID NO: 3487166 - DNA, 25 bp, Homo sapien
acgatggtgaccttgtagccagtgg

SEQ ID NO: 3487167 - DNA, 25 bp, Homo sapien
tgacattctctgttgttggacgatg

SEQ ID NO: 3487168 - DNA, 25 bp, Homo sapien
tctctgttgttggacgatggtgacc

SEQ ID NO: 3487169 - DNA, 25 bp, Homo sapien
tcgccatcgttgaagaatccaaaaa

SEQ ID NO: 3487170 - DNA, 25 bp, Homo sapien
aatccaaaaatctcgtctatatcag

SEQ ID NO: 3487171 - DNA, 25 bp, Homo sapien
tctcgtctatatcagaggcctggct

SEQ ID NO: 3487172 - DNA, 25 bp, Homo sapien
gctttttggtgggaggttcgccatc

SEQ ID NO: 3487173 - DNA, 25 bp, Homo sapien
ggaagcttttcagactctaggaatc

SEQ ID NO: 3487174 - DNA, 25 bp, Homo sapien
aggaagcttttcagactctaggaat

SEQ ID NO: 3487175 - DNA, 25 bp, Homo sapien
gaggaagcttttcagactctaggaa

SEQ ID NO: 3487176 - DNA, 25 bp, Homo sapien
tctgcagaggttgaccagaggacta

SEQ ID NO: 3487177 - DNA, 25 bp, Homo sapien
cagttacaactttcagcaggctaga

SEQ ID NO: 3487178 - DNA, 25 bp, Homo sapien
taccaattgtaatgcaaaggccgat

SEQ ID NO: 3487179 - DNA, 25 bp, Homo sapien
ggagaatcagttacaagcctttaac

SEQ ID NO: 3487180 - DNA, 25 bp, Homo sapien
gcacaagttctcgaggcttcttagt

SEQ ID NO: 3487181 - DNA, 25 bp, Homo sapien
tctggataaggtcatgggcaacatg

SEQ ID NO: 3487182 - DNA, 25 bp, Homo sapien
ggcgcaactgcagcactaatgcctg

SEQ ID NO: 3487183 - DNA, 25 bp, Homo sapien
atggcagcatccagtaaggcctgaa

SEQ ID NO: 3487184 - DNA, 25 bp, Homo sapien
gggctcaagccctccagcaatcctc

SEQ ID NO: 3487185 - DNA, 25 bp, Homo sapien
ccatttccaatctgtgtttgttcac

SEQ ID NO: 3487186 - DNA, 25 bp, Homo sapien
ttccaatctgtgtttgttcacccct

SEQ ID NO: 3487187 - DNA, 25 bp, Homo sapien
tgggctcaagccctccagcaatcct

SEQ ID NO: 3487188 - DNA, 25 bp, Homo sapien
tcacataatcatgggtgtggaacat

SEQ ID NO: 3487189 - DNA, 25 bp, Homo sapien
tacacacaccgataaaaaggcctgg

SEQ ID NO: 3487190 - DNA, 25 bp, Homo sapien
agccaccgcgctggcaaatacgtac

SEQ ID NO: 3487191 - DNA, 25 bp, Homo sapien
aatacgtactacattttaacaccag

SEQ ID NO: 3487192 - DNA, 25 bp, Homo sapien
tttgtagttaatacgagggctccat

SEQ ID NO: 3487193 - DNA, 25 bp, Homo sapien
tttccatcaggtggagaactgactg

SEQ ID NO: 3487194 - DNA, 25 bp, Homo sapien
tctcatcagtaaggtcaagggattc

SEQ ID NO: 3487195 - DNA, 25 bp, Homo sapien
gaactgactgaagtagctgttttcc

SEQ ID NO: 3487196 - DNA, 25 bp, Homo sapien
acacatatagcccaaccagcttggc

SEQ ID NO: 3487197 - DNA, 25 bp, Homo sapien
aacacacatatagcccaaccagctt

SEQ ID NO: 3487198 - DNA, 25 bp, Homo sapien
tatagcccaaccagcttggcagggc

SEQ ID NO: 3487199 - DNA, 25 bp, Homo sapien
ctgcacaacacacatatagcccaac

SEQ ID NO: 3487200 - DNA, 25 bp, Homo sapien
cagccggatgaaggacaatgccact

SEQ ID NO: 3487201 - DNA, 25 bp, Homo sapien
gccactagggttggtgtagactccg

SEQ ID NO: 3487202 - DNA, 25 bp, Homo sapien
tgtagactccgtgaatatgcaacac

SEQ ID NO: 3487203 - DNA, 25 bp, Homo sapien
acgctcagcttacgcttctcctgag

SEQ ID NO: 3487204 - DNA, 25 bp, Homo sapien
tcctctccgaaccagcatgaaatgt

SEQ ID NO: 3487205 - DNA, 25 bp, Homo sapien
gaaagtggtgtcatccacagtccag

SEQ ID NO: 3487206 - DNA, 25 bp, Homo sapien
gatgtaccccttgtggagatctcac

SEQ ID NO: 3487207 - DNA, 25 bp, Homo sapien
gagatctcacatgtcagtcgcttga

SEQ ID NO: 3487208 - DNA, 25 bp, Homo sapien
tagacttgcattacctaacagggaa

SEQ ID NO: 3487209 - DNA, 25 bp, Homo sapien
gaagcagtgagtttccacagtgcac

SEQ ID NO: 3487210 - DNA, 25 bp, Homo sapien
ttcaatctcaccagggatgggcaaa

SEQ ID NO: 3487211 - DNA, 25 bp, Homo sapien
cctaaacagtctagagggccaagtt

SEQ ID NO: 3487212 - DNA, 25 bp, Homo sapien
ctcttatttcactgtgtgctgcaga

SEQ ID NO: 3487213 - DNA, 25 bp, Homo sapien
gtgtgctgcagatgagccatttagc

SEQ ID NO: 3487214 - DNA, 25 bp, Homo sapien
agccatttagctgaccttctctcac

SEQ ID NO: 3487215 - DNA, 25 bp, Homo sapien
atttagctgaccttctctcaccatc

SEQ ID NO: 3487216 - DNA, 25 bp, Homo sapien
tgatcactgcactagattgtaatag

SEQ ID NO: 3487217 - DNA, 25 bp, Homo sapien
taaaatttggcaatgtgaggtccaa

SEQ ID NO: 3487218 - DNA, 25 bp, Homo sapien
ctgctacagagtgataaatagtaga

SEQ ID NO: 3487219 - DNA, 25 bp, Homo sapien
tagaatccttaatgggtaggagagg

SEQ ID NO: 3487220 - DNA, 25 bp, Homo sapien
gcaccagacctagcaatttaaaaaa

SEQ ID NO: 3487221 - DNA, 25 bp, Homo sapien
agtcaatcctaacccttcagaaggc

SEQ ID NO: 3487222 - DNA, 25 bp, Homo sapien
gaaggcaagacaggagattctagga

SEQ ID NO: 3487223 - DNA, 25 bp, Homo sapien
tatacattggaagctgcagatactt

SEQ ID NO: 3487224 - DNA, 25 bp, Homo sapien
gaacaggcggcagaatatcaagaac

SEQ ID NO: 3487225 - DNA, 25 bp, Homo sapien
taaacactgtctgtagtagggcctt

SEQ ID NO: 3487226 - DNA, 25 bp, Homo sapien
cagccggtcagtggaagtatcacat

SEQ ID NO: 3487227 - DNA, 25 bp, Homo sapien
tacagcttggtctaaacggtggtga

SEQ ID NO: 3487228 - DNA, 25 bp, Homo sapien
catatgtatggtcaggacaacagag

SEQ ID NO: 3487229 - DNA, 25 bp, Homo sapien
aatgagatcactccaccccaaggag

SEQ ID NO: 3487230 - DNA, 25 bp, Homo sapien
cagaagttgataatgctccgaggaa

SEQ ID NO: 3487231 - DNA, 25 bp, Homo sapien
ctccgaggaatcaggtaagtaaacg

SEQ ID NO: 3487232 - DNA, 25 bp, Homo sapien
tgtcagaaggatgtatgatgacccc

SEQ ID NO: 3487233 - DNA, 25 bp, Homo sapien
gacaagtgctacattgaagaacaca

SEQ ID NO: 3487234 - DNA, 25 bp, Homo sapien
cacaaacctcttgttaagacttgtc

SEQ ID NO: 3487235 - DNA, 25 bp, Homo sapien
tgtagcttgatattacagatgtgct

SEQ ID NO: 3487236 - DNA, 25 bp, Homo sapien
caaggaaggcctaatcatgttacaa

SEQ ID NO: 3487237 - DNA, 25 bp, Homo sapien
agagccgtctgagcctaatgagtcc

SEQ ID NO: 3487238 - DNA, 25 bp, Homo sapien
gagtatgtgagcaacctgtcttcag

SEQ ID NO: 3487239 - DNA, 25 bp, Homo sapien
taattagtgtggtcaagagccgtct

SEQ ID NO: 3487240 - DNA, 25 bp, Homo sapien
tatcttccagattcgagggactggg

SEQ ID NO: 3487241 - DNA, 25 bp, Homo sapien
cgaccaagggaacactgggtggcat

SEQ ID NO: 3487242 - DNA, 25 bp, Homo sapien
taagatacaactcctgcctactggt

SEQ ID NO: 3487243 - DNA, 25 bp, Homo sapien
tgtatgtgtaatctcctgtccctgc

SEQ ID NO: 3487244 - DNA, 25 bp, Homo sapien
cagaggagagcagtaagatccgtgc

SEQ ID NO: 3487245 - DNA, 25 bp, Homo sapien
aaaatgacttcctgcggctccttcg

SEQ ID NO: 3487246 - DNA, 25 bp, Homo sapien
aagacattcctaatttgctacccag

SEQ ID NO: 3487247 - DNA, 25 bp, Homo sapien
tgtgaggtccatgattgagacacgg

SEQ ID NO: 3487248 - DNA, 25 bp, Homo sapien
agcaggaagcggcggcgaacgcggc

SEQ ID NO: 3487249 - DNA, 25 bp, Homo sapien
gcgaacgcggcctgaattcccggcg

SEQ ID NO: 3487250 - DNA, 25 bp, Homo sapien
tgtcccgcgcttggcgcagcaggaa

SEQ ID NO: 3487251 - DNA, 25 bp, Homo sapien
caggaagcggcggcgaacgcggcct

SEQ ID NO: 3487252 - DNA, 25 bp, Homo sapien
gcactgctgcctcgctattatcgca

SEQ ID NO: 3487253 - DNA, 25 bp, Homo sapien
ctgaaagctgcactgctgcctcgct

SEQ ID NO: 3487254 - DNA, 25 bp, Homo sapien
ctctgagcccggaccctctgaaagc

SEQ ID NO: 3487255 - DNA, 25 bp, Homo sapien
gctattatcgcagccgtcactgctc

SEQ ID NO: 3487256 - DNA, 25 bp, Homo sapien
aaaagcctcctctgcgcgtgcctgg

SEQ ID NO: 3487257 - DNA, 25 bp, Homo sapien
ggcccatgccgtgcggcagaaccct

SEQ ID NO: 3487258 - DNA, 25 bp, Homo sapien
cgcgtgcctggcctccgggtcaaga

SEQ ID NO: 3487259 - DNA, 25 bp, Homo sapien
gagaaaagcctcctctgcgcgtgcc

SEQ ID NO: 3487260 - DNA, 25 bp, Homo sapien
ccagaaccacaataccctctgtcgt

SEQ ID NO: 3487261 - DNA, 25 bp, Homo sapien
ggtttcgggtcctgaaggacacaca

SEQ ID NO: 3487262 - DNA, 25 bp, Homo sapien
cagtgtgggccatggtttcgggtcc

SEQ ID NO: 3487263 - DNA, 25 bp, Homo sapien
caataccctctgtcgtcctcaactt

SEQ ID NO: 3487264 - DNA, 25 bp, Homo sapien
tttaccgcaacagcactaagtacag

SEQ ID NO: 3487265 - DNA, 25 bp, Homo sapien
taagtacagcatcctgaacacgggc

SEQ ID NO: 3487266 - DNA, 25 bp, Homo sapien
gaacacgggcaggacttaatgcaca

SEQ ID NO: 3487267 - DNA, 25 bp, Homo sapien
gaatgatgtgagacctgccacctga

SEQ ID NO: 3487268 - DNA, 25 bp, Homo sapien
gctaagcggtgccatgcttatcctg

SEQ ID NO: 3487269 - DNA, 25 bp, Homo sapien
ataatcaagttctgcgggctccggc

SEQ ID NO: 3487270 - DNA, 25 bp, Homo sapien
atccataatcaagttctgcgggctc

SEQ ID NO: 3487271 - DNA, 25 bp, Homo sapien
gcttatcctggatatccatcaccac

SEQ ID NO: 3487272 - DNA, 25 bp, Homo sapien
tctacattacctcctgcatagacct

SEQ ID NO: 3487273 - DNA, 25 bp, Homo sapien
tgatcccaactcacatattcaactg

SEQ ID NO: 3487274 - DNA, 25 bp, Homo sapien
gtcatccccacttgggtcttccagg

SEQ ID NO: 3487275 - DNA, 25 bp, Homo sapien
ggccttggaccaagaggccctggca

SEQ ID NO: 3487276 - DNA, 25 bp, Homo sapien
ttctgaatagtccacatgccatcag

SEQ ID NO: 3487277 - DNA, 25 bp, Homo sapien
gaatagtccacatgccatcagtctc

SEQ ID NO: 3487278 - DNA, 25 bp, Homo sapien
tgaatagtccacatgccatcagtct

SEQ ID NO: 3487279 - DNA, 25 bp, Homo sapien
agtctcttcatgcattgtgccaagc

SEQ ID NO: 3487280 - DNA, 25 bp, Homo sapien
gggatgtagttagggtcagagggcc

SEQ ID NO: 3487281 - DNA, 25 bp, Homo sapien
agacacatgagttggcagtccccac

SEQ ID NO: 3487282 - DNA, 25 bp, Homo sapien
gcccatctcataaggtcaccttgca

SEQ ID NO: 3487283 - DNA, 25 bp, Homo sapien
ccactgtcagcccatctcataaggt

SEQ ID NO: 3487284 - DNA, 25 bp, Homo sapien
ccttccaggcaggatcgacttgatc

SEQ ID NO: 3487285 - DNA, 25 bp, Homo sapien
tagcactcgaatagcacctcgtctg

SEQ ID NO: 3487286 - DNA, 25 bp, Homo sapien
aataggccacagacaagccaagcac

SEQ ID NO: 3487287 - DNA, 25 bp, Homo sapien
tgcagtagatcacaggaccttccag

SEQ ID NO: 3487288 - DNA, 25 bp, Homo sapien
ccgtagaaagctggctgaaaagagg

SEQ ID NO: 3487289 - DNA, 25 bp, Homo sapien
aaaagagggagagctggatgttctc

SEQ ID NO: 3487290 - DNA, 25 bp, Homo sapien
attgatgttccgtagaaagctggct

SEQ ID NO: 3487291 - DNA, 25 bp, Homo sapien
tgttctcaggcaatgagaactgctg

SEQ ID NO: 3487292 - DNA, 25 bp, Homo sapien
agaaactgacttaaggatgccagaa

SEQ ID NO: 3487293 - DNA, 25 bp, Homo sapien
tgccagaaagagttttcctgccttc

SEQ ID NO: 3487294 - DNA, 25 bp, Homo sapien
ctgaaagaaactgacttaaggatgc

SEQ ID NO: 3487295 - DNA, 25 bp, Homo sapien
aggatgccagaaagagttttcctgc

SEQ ID NO: 3487296 - DNA, 25 bp, Homo sapien
caggggaggagcatcgactacggcc

SEQ ID NO: 3487297 - DNA, 25 bp, Homo sapien
gaggagcatcgactacggccaggta

SEQ ID NO: 3487298 - DNA, 25 bp, Homo sapien
ccagcaagaggtagcccgaggggtt

SEQ ID NO: 3487299 - DNA, 25 bp, Homo sapien
gccagcaagaggtagcccgaggggt

SEQ ID NO: 3487300 - DNA, 25 bp, Homo sapien
gaagcacctcgcagtgttttgtcca

SEQ ID NO: 3487301 - DNA, 25 bp, Homo sapien
gggctccttccctagagattctggt

SEQ ID NO: 3487302 - DNA, 25 bp, Homo sapien
tatctgtggtacagcactcccaggg

SEQ ID NO: 3487303 - DNA, 25 bp, Homo sapien
tgagcacaggtatctcctctgggac

SEQ ID NO: 3487304 - DNA, 25 bp, Homo sapien
tatccagggaaacttgttccgaagc

SEQ ID NO: 3487305 - DNA, 25 bp, Homo sapien
aacttgttccgaagctgatcaggag

SEQ ID NO: 3487306 - DNA, 25 bp, Homo sapien
ctctgtgtttatccagggaaacttg

SEQ ID NO: 3487307 - DNA, 25 bp, Homo sapien
ccgaagctgatcaggagacatcaga

SEQ ID NO: 3487308 - DNA, 25 bp, Homo sapien
tcttaaccaactgaaccacagagac

SEQ ID NO: 3487309 - DNA, 25 bp, Homo sapien
cagagacaaagcctgatgaaggaca

SEQ ID NO: 3487310 - DNA, 25 bp, Homo sapien
gagtaccgagactcccaacgtgtag

SEQ ID NO: 3487311 - DNA, 25 bp, Homo sapien
atgaaggacagagaactaccacggc

SEQ ID NO: 3487312 - DNA, 25 bp, Homo sapien
tcccaaggactggacctttcgccga

SEQ ID NO: 3487313 - DNA, 25 bp, Homo sapien
cagacaccaggggtcaaaccaacct

SEQ ID NO: 3487314 - DNA, 25 bp, Homo sapien
ggagcagacaccaggggtcaaacca

SEQ ID NO: 3487315 - DNA, 25 bp, Homo sapien
acctttcgccgaagcccctggagca

SEQ ID NO: 3487316 - DNA, 25 bp, Homo sapien
tatgccccggttgctagaggaaaca

SEQ ID NO: 3487317 - DNA, 25 bp, Homo sapien
gaaaaataggccgtagaggtgctga

SEQ ID NO: 3487318 - DNA, 25 bp, Homo sapien
ggacagtgctcaggtgcaatcatca

SEQ ID NO: 3487319 - DNA, 25 bp, Homo sapien
acaacgcagatcagtgaggagccca

SEQ ID NO: 3487320 - DNA, 25 bp, Homo sapien
ttttcaagaccaccgctttgtcatc

SEQ ID NO: 3487321 - DNA, 25 bp, Homo sapien
atggacttcatggatccttttcaag

SEQ ID NO: 3487322 - DNA, 25 bp, Homo sapien
caacatgcgttgagatgaagagaca

SEQ ID NO: 3487323 - DNA, 25 bp, Homo sapien
tgtcatctgtggtcaacatgcgttg

SEQ ID NO: 3487324 - DNA, 25 bp, Homo sapien
ccatactggaaagtgggtcaaagaa

SEQ ID NO: 3487325 - DNA, 25 bp, Homo sapien
aacaaggagagtcactaccttccct

SEQ ID NO: 3487326 - DNA, 25 bp, Homo sapien
gagccttagtttacccatactggaa

SEQ ID NO: 3487327 - DNA, 25 bp, Homo sapien
caaggagagtcactaccttccctgt

SEQ ID NO: 3487328 - DNA, 25 bp, Homo sapien
gctccggctgcgttgatcacaatgg

SEQ ID NO: 3487329 - DNA, 25 bp, Homo sapien
accagccagtgctgcgatttgcgca

SEQ ID NO: 3487330 - DNA, 25 bp, Homo sapien
gcattccacaggctggtactccagg

SEQ ID NO: 3487331 - DNA, 25 bp, Homo sapien
tttcctcggctccacaggtagcttg

SEQ ID NO: 3487332 - DNA, 25 bp, Homo sapien
tgcaacaagcggagtctctaggcct

SEQ ID NO: 3487333 - DNA, 25 bp, Homo sapien
aaaataggctccactggtgtctgca

SEQ ID NO: 3487334 - DNA, 25 bp, Homo sapien
agttgctacctaatccttcccggcg

SEQ ID NO: 3487335 - DNA, 25 bp, Homo sapien
gctacgaccacctaggtagttgcta

SEQ ID NO: 3487336 - DNA, 25 bp, Homo sapien
ccagttcaaatctggagggggctct

SEQ ID NO: 3487337 - DNA, 25 bp, Homo sapien
gggagaaatggtcccagttcaaatc

SEQ ID NO: 3487338 - DNA, 25 bp, Homo sapien
atccctgtgcaggtaggggatgggg

SEQ ID NO: 3487339 - DNA, 25 bp, Homo sapien
ggacacaaggacaggcccagacttg

SEQ ID NO: 3487340 - DNA, 25 bp, Homo sapien
tgagaggtggggacaacgcttacat

SEQ ID NO: 3487341 - DNA, 25 bp, Homo sapien
gagaggtggggacaacgcttacatt

SEQ ID NO: 3487342 - DNA, 25 bp, Homo sapien
gaggtggggacaacgcttacattgc

SEQ ID NO: 3487343 - DNA, 25 bp, Homo sapien
gtgagaggtggggacaacgcttaca

SEQ ID NO: 3487344 - DNA, 25 bp, Homo sapien
gaagaaatcatggtccacttccagg

SEQ ID NO: 3487345 - DNA, 25 bp, Homo sapien
tgtcctggaagaaatcatggtccac

SEQ ID NO: 3487346 - DNA, 25 bp, Homo sapien
catggtccacttccaggttcgccgg

SEQ ID NO: 3487347 - DNA, 25 bp, Homo sapien
atggtccacttccaggttcgccggg

SEQ ID NO: 3487348 - DNA, 25 bp, Homo sapien
aaagctgggaccctcagggccaaat

SEQ ID NO: 3487349 - DNA, 25 bp, Homo sapien
agtctcaaaagctgggaccctcagg

SEQ ID NO: 3487350 - DNA, 25 bp, Homo sapien
cttcagagtctcaaaagctgggacc

SEQ ID NO: 3487351 - DNA, 25 bp, Homo sapien
tcaaaagctgggaccctcagggcca

SEQ ID NO: 3487352 - DNA, 25 bp, Homo sapien
gatgggatgtgtccaagaaattcct

SEQ ID NO: 3487353 - DNA, 25 bp, Homo sapien
gaccaatgtgctccactgtcatctg

SEQ ID NO: 3487354 - DNA, 25 bp, Homo sapien
acatggagggactacggcagtcacg

SEQ ID NO: 3487355 - DNA, 25 bp, Homo sapien
gaaattccttagcagttgtgacatg

SEQ ID NO: 3487356 - DNA, 25 bp, Homo sapien
gatcttctctcccaagtaaaagcgg

SEQ ID NO: 3487357 - DNA, 25 bp, Homo sapien
cgccattctggtcaaaggtgttgta

SEQ ID NO: 3487358 - DNA, 25 bp, Homo sapien
ttgtagtcgtaatagccggcccagg

SEQ ID NO: 3487359 - DNA, 25 bp, Homo sapien
cccgtgaccactgaagccagtagca

SEQ ID NO: 3487360 - DNA, 25 bp, Homo sapien
tctgtctgctaagagggtcagaggc

SEQ ID NO: 3487361 - DNA, 25 bp, Homo sapien
gctcatcactcgctattggcctcgg

SEQ ID NO: 3487362 - DNA, 25 bp, Homo sapien
agccatatgggtgcaatggcctgcc

SEQ ID NO: 3487363 - DNA, 25 bp, Homo sapien
catgggctacagatcagtcctagga

SEQ ID NO: 3487364 - DNA, 25 bp, Homo sapien
cggcgccaagtatgggccaagtgtt

SEQ ID NO: 3487365 - DNA, 25 bp, Homo sapien
ataaacaggccttgacggcgccaag

SEQ ID NO: 3487366 - DNA, 25 bp, Homo sapien
tccccgaggccagggatggttcttc

SEQ ID NO: 3487367 - DNA, 25 bp, Homo sapien
aggcgatggtaagggcttgcccaca

SEQ ID NO: 3487368 - DNA, 25 bp, Homo sapien
catcttgcttatgagctacaaaggg

SEQ ID NO: 3487369 - DNA, 25 bp, Homo sapien
acccagtcatcttgcttatgagcta

SEQ ID NO: 3487370 - DNA, 25 bp, Homo sapien
acacctcacacatgtgcgtgaacac

SEQ ID NO: 3487371 - DNA, 25 bp, Homo sapien
cacacctcacacatgtgcgtgaaca

SEQ ID NO: 3487372 - DNA, 25 bp, Homo sapien
cccacatgggcgttatgaacagcgc

SEQ ID NO: 3487373 - DNA, 25 bp, Homo sapien
tctctaagcggtgatcccacatggg

SEQ ID NO: 3487374 - DNA, 25 bp, Homo sapien
caaacagcgtggtgtaggcaagatg

SEQ ID NO: 3487375 - DNA, 25 bp, Homo sapien
tgttcgtgagcgctgtgaagcacct

SEQ ID NO: 3487376 - DNA, 25 bp, Homo sapien
cagttgcgatgagggctgcgcggac

SEQ ID NO: 3487377 - DNA, 25 bp, Homo sapien
cgcgcgggcccagttgcgatgaggg

SEQ ID NO: 3487378 - DNA, 25 bp, Homo sapien
tctcgggcacaatccggctgcggga

SEQ ID NO: 3487379 - DNA, 25 bp, Homo sapien
aggcccagtccagacccgggagact

SEQ ID NO: 3487380 - DNA, 25 bp, Homo sapien
gtagcacaatacctttagtgctttc

SEQ ID NO: 3487381 - DNA, 25 bp, Homo sapien
agaatgcttttccaatattatgtgc

SEQ ID NO: 3487382 - DNA, 25 bp, Homo sapien
agtgctttctagaatgcttttccaa

SEQ ID NO: 3487383 - DNA, 25 bp, Homo sapien
tacctttagtgctttctagaatgct

SEQ ID NO: 3487384 - DNA, 25 bp, Homo sapien
agaactcatggaagcaagtattatt

SEQ ID NO: 3487385 - DNA, 25 bp, Homo sapien
gagaactcatggaagcaagtattat

SEQ ID NO: 3487386 - DNA, 25 bp, Homo sapien
aaaacaaacctgagaactcatggaa

SEQ ID NO: 3487387 - DNA, 25 bp, Homo sapien
cgtagtgacagaggatgtccctgat

SEQ ID NO: 3487388 - DNA, 25 bp, Homo sapien
tctagtgacacttctcctgtgaaag

SEQ ID NO: 3487389 - DNA, 25 bp, Homo sapien
cctgatggcggacactctttcagcc

SEQ ID NO: 3487390 - DNA, 25 bp, Homo sapien
gcaactggcacagggctgctttctc

SEQ ID NO: 3487391 - DNA, 25 bp, Homo sapien
ccgtgaaatggaagtactagagcct

SEQ ID NO: 3487392 - DNA, 25 bp, Homo sapien
gctaaactcgtttctccatccgtga

SEQ ID NO: 3487393 - DNA, 25 bp, Homo sapien
aaagtggtacagactgcagactgca

SEQ ID NO: 3487394 - DNA, 25 bp, Homo sapien
tggaaatacaaaggcccaagaatcc

SEQ ID NO: 3487395 - DNA, 25 bp, Homo sapien
ctttagaaggacttcctatgtaagg

SEQ ID NO: 3487396 - DNA, 25 bp, Homo sapien
ctggccaggaggatattcgggatct

SEQ ID NO: 3487397 - DNA, 25 bp, Homo sapien
cacctggccaggaggatattcggga

SEQ ID NO: 3487398 - DNA, 25 bp, Homo sapien
tttagaaggacttcctatgtaaggc

SEQ ID NO: 3487399 - DNA, 25 bp, Homo sapien
agggaggagacccagtcttgacctc

SEQ ID NO: 3487400 - DNA, 25 bp, Homo sapien
gccccgtgagaccaggcattggtga

SEQ ID NO: 3487401 - DNA, 25 bp, Homo sapien
gaggagacccagtcttgacctcatg

SEQ ID NO: 3487402 - DNA, 25 bp, Homo sapien
gtcaaaactagccccgtgagaccag

SEQ ID NO: 3487403 - DNA, 25 bp, Homo sapien
ctagaggcttcttaggccgagagcc

SEQ ID NO: 3487404 - DNA, 25 bp, Homo sapien
gagctgggagggaggtcgatgatgc

SEQ ID NO: 3487405 - DNA, 25 bp, Homo sapien
ctgggagggaggtcgatgatgccat

SEQ ID NO: 3487406 - DNA, 25 bp, Homo sapien
cttgcctagaggcttcttaggccga

SEQ ID NO: 3487407 - DNA, 25 bp, Homo sapien
ctgtgaggtaggctgtgaagcatcg

SEQ ID NO: 3487408 - DNA, 25 bp, Homo sapien
ctgccactgtcactcgcatgtgtgg

SEQ ID NO: 3487409 - DNA, 25 bp, Homo sapien
gccactgtcactcgcatgtgtgggt

SEQ ID NO: 3487410 - DNA, 25 bp, Homo sapien
gaagcatcgctggaggtgctttctg

SEQ ID NO: 3487411 - DNA, 25 bp, Homo sapien
tgtggcacacgcagacgtcatagtc

SEQ ID NO: 3487412 - DNA, 25 bp, Homo sapien
ggcccctgccatcgacgtagtacat

SEQ ID NO: 3487413 - DNA, 25 bp, Homo sapien
tagtacatgaatcggagctcaggtg

SEQ ID NO: 3487414 - DNA, 25 bp, Homo sapien
tgacttgacgaaagccaccatcagg

SEQ ID NO: 3487415 - DNA, 25 bp, Homo sapien
actgtagctgaatcccgttcccctt

SEQ ID NO: 3487416 - DNA, 25 bp, Homo sapien
gatactgtagctgaatcccgttccc

SEQ ID NO: 3487417 - DNA, 25 bp, Homo sapien
agatactgtagctgaatcccgttcc

SEQ ID NO: 3487418 - DNA, 25 bp, Homo sapien
tcaaagtagatcagatactgtagct

SEQ ID NO: 3487419 - DNA, 25 bp, Homo sapien
gaagctgcgctttgaactactaggc

SEQ ID NO: 3487420 - DNA, 25 bp, Homo sapien
actactaggctacagggctgtctcc

SEQ ID NO: 3487421 - DNA, 25 bp, Homo sapien
ggttaataagtgcaggagccaggat

SEQ ID NO: 3487422 - DNA, 25 bp, Homo sapien
ggagccaggatacaaaccccgacag

SEQ ID NO: 3487423 - DNA, 25 bp, Homo sapien
gtttctagcttcactccaatttccg

SEQ ID NO: 3487424 - DNA, 25 bp, Homo sapien
ctagcttcactccaatttccggggt

SEQ ID NO: 3487425 - DNA, 25 bp, Homo sapien
ctgtttctagcttcactccaatttc

SEQ ID NO: 3487426 - DNA, 25 bp, Homo sapien
ttctagcttcactccaatttccggg

SEQ ID NO: 3487427 - DNA, 25 bp, Homo sapien
cctcttgtcacatttgtgggaatcc

SEQ ID NO: 3487428 - DNA, 25 bp, Homo sapien
tcactccctatacctcttgtcacat

SEQ ID NO: 3487429 - DNA, 25 bp, Homo sapien
tccctatacctcttgtcacatttgt

SEQ ID NO: 3487430 - DNA, 25 bp, Homo sapien
actccctatacctcttgtcacattt

SEQ ID NO: 3487431 - DNA, 25 bp, Homo sapien
ccacagtaatggaagcctgatgggt

SEQ ID NO: 3487432 - DNA, 25 bp, Homo sapien
ctccatggtcttcttagggagccca

SEQ ID NO: 3487433 - DNA, 25 bp, Homo sapien
cagggtcacgagcaaagcgctgtga

SEQ ID NO: 3487434 - DNA, 25 bp, Homo sapien
ttagggagcccacagtaatggaagc

SEQ ID NO: 3487435 - DNA, 25 bp, Homo sapien
agtgtacgccagtgcccagttccag

SEQ ID NO: 3487436 - DNA, 25 bp, Homo sapien
tcttgctgatcagtcaggtgagtca

SEQ ID NO: 3487437 - DNA, 25 bp, Homo sapien
ggcaactaggaagaccatccatggt

SEQ ID NO: 3487438 - DNA, 25 bp, Homo sapien
tttaggagggataccagtgtacgcc

SEQ ID NO: 3487439 - DNA, 25 bp, Homo sapien
ggtgattcttcccagtccaaaggtg

SEQ ID NO: 3487440 - DNA, 25 bp, Homo sapien
gcttcttaaactgggtggtaggcac

SEQ ID NO: 3487441 - DNA, 25 bp, Homo sapien
gcaattcagggcacaaagggaccac

SEQ ID NO: 3487442 - DNA, 25 bp, Homo sapien
gatctcaggtgaaggcattgaaccc

SEQ ID NO: 3487443 - DNA, 25 bp, Homo sapien
gacaatatgtgacagcagtgacatc

SEQ ID NO: 3487444 - DNA, 25 bp, Homo sapien
catcagtgaacgaggcagtgtggca

SEQ ID NO: 3487445 - DNA, 25 bp, Homo sapien
cacaaacagataaagtaaagggagg

SEQ ID NO: 3487446 - DNA, 25 bp, Homo sapien
cctggaacctgatggttgaataaac

SEQ ID NO: 3487447 - DNA, 25 bp, Homo sapien
tagaaaattcaacaagacaggtgtg

SEQ ID NO: 3487448 - DNA, 25 bp, Homo sapien
gagataggagaatcattgcttgggc

SEQ ID NO: 3487449 - DNA, 25 bp, Homo sapien
aaaattcaacaagacaggtgtggtg

SEQ ID NO: 3487450 - DNA, 25 bp, Homo sapien
ataggagaatcattgcttgggccca

SEQ ID NO: 3487451 - DNA, 25 bp, Homo sapien
ctaggctcaaatggtattacagatg

SEQ ID NO: 3487452 - DNA, 25 bp, Homo sapien
caaggagcaattaattccaatctta

SEQ ID NO: 3487453 - DNA, 25 bp, Homo sapien
ctggtcttgtagtctttattgactg

SEQ ID NO: 3487454 - DNA, 25 bp, Homo sapien
tgtaccaaattgactccaggagaaa

SEQ ID NO: 3487455 - DNA, 25 bp, Homo sapien
gttaataggacaaaactggacagtg

SEQ ID NO: 3487456 - DNA, 25 bp, Homo sapien
taataggacaaaactggacagtgtg

SEQ ID NO: 3487457 - DNA, 25 bp, Homo sapien
ataggacaaaactggacagtgtgaa

SEQ ID NO: 3487458 - DNA, 25 bp, Homo sapien
aggacaaaactggacagtgtgaaag

SEQ ID NO: 3487459 - DNA, 25 bp, Homo sapien
agttactgcctttggccccgttgtg

SEQ ID NO: 3487460 - DNA, 25 bp, Homo sapien
ctcctgcgggatgcgtgccgcgcat

SEQ ID NO: 3487461 - DNA, 25 bp, Homo sapien
ggcgcgcctttcaaccgagttactg

SEQ ID NO: 3487462 - DNA, 25 bp, Homo sapien
tgagagtcccgaaagcggcgggcta

SEQ ID NO: 3487463 - DNA, 25 bp, Homo sapien
gggcctcctccacgtccaattcgcg

SEQ ID NO: 3487464 - DNA, 25 bp, Homo sapien
tctgaagccggagaacggtaagcgg

SEQ ID NO: 3487465 - DNA, 25 bp, Homo sapien
caattcgcgcttcctcttgcctagt

SEQ ID NO: 3487466 - DNA, 25 bp, Homo sapien
cggacaggagcacaggtaccatttc

SEQ ID NO: 3487467 - DNA, 25 bp, Homo sapien
gaaaatgattttgtcccgcgcagac

SEQ ID NO: 3487468 - DNA, 25 bp, Homo sapien
aaatgattttgtcccgcgcagactc

SEQ ID NO: 3487469 - DNA, 25 bp, Homo sapien
tcccgtgtaggaaaatgattttgtc

SEQ ID NO: 3487470 - DNA, 25 bp, Homo sapien
tgtaggaaaatgattttgtcccgcg

SEQ ID NO: 3487471 - DNA, 25 bp, Homo sapien
gaacaagtgataggtgctgtagata

SEQ ID NO: 3487472 - DNA, 25 bp, Homo sapien
cattcagttgtcttggagggaacaa

SEQ ID NO: 3487473 - DNA, 25 bp, Homo sapien
ttctccaggatcacaacggcatcct

SEQ ID NO: 3487474 - DNA, 25 bp, Homo sapien
cattggagaactgcaactggagctc

SEQ ID NO: 3487475 - DNA, 25 bp, Homo sapien
tgacaggccgcagggtgacagctat

SEQ ID NO: 3487476 - DNA, 25 bp, Homo sapien
caggtaaaggagaacagaccgcaat

SEQ ID NO: 3487477 - DNA, 25 bp, Homo sapien
aataaagggctccattgacaggccg

SEQ ID NO: 3487478 - DNA, 25 bp, Homo sapien
gaagaggcagcctggatttctgagc

SEQ ID NO: 3487479 - DNA, 25 bp, Homo sapien
caccctttcctctaagtcccatgta

SEQ ID NO: 3487480 - DNA, 25 bp, Homo sapien
tttcctctaagtcccatgtatcatt

SEQ ID NO: 3487481 - DNA, 25 bp, Homo sapien
ccctttcctctaagtcccatgtatc

SEQ ID NO: 3487482 - DNA, 25 bp, Homo sapien
accctttcctctaagtcccatgtat

SEQ ID NO: 3487483 - DNA, 25 bp, Homo sapien
gattgagacctgaacaacttgctta

SEQ ID NO: 3487484 - DNA, 25 bp, Homo sapien
tatacatttgtgtcgggccgcattc

SEQ ID NO: 3487485 - DNA, 25 bp, Homo sapien
taaagaatcacctgtccagattgga

SEQ ID NO: 3487486 - DNA, 25 bp, Homo sapien
aacaatgttaccagcaaggaaggaa

SEQ ID NO: 3487487 - DNA, 25 bp, Homo sapien
aggggatactgtggccaaatgctgc

SEQ ID NO: 3487488 - DNA, 25 bp, Homo sapien
tactgtggccaaatgctgcgggaca

SEQ ID NO: 3487489 - DNA, 25 bp, Homo sapien
gatactgtggccaaatgctgcggga

SEQ ID NO: 3487490 - DNA, 25 bp, Homo sapien
tgtggccaaatgctgcgggacagca

SEQ ID NO: 3487491 - DNA, 25 bp, Homo sapien
ctaatctccaactcttgactcaagg

SEQ ID NO: 3487492 - DNA, 25 bp, Homo sapien
tccccttgcctgagcctactgagta

SEQ ID NO: 3487493 - DNA, 25 bp, Homo sapien
tgatccccttgcctgagcctactga

SEQ ID NO: 3487494 - DNA, 25 bp, Homo sapien
caacctctgccaaacagactcaagt

SEQ ID NO: 3487495 - DNA, 25 bp, Homo sapien
aacttcaggaggagtttggtcagga

SEQ ID NO: 3487496 - DNA, 25 bp, Homo sapien
gatgttgacctgcagctgaacttca

SEQ ID NO: 3487497 - DNA, 25 bp, Homo sapien
tgggaaacacgatacacaggcacag

SEQ ID NO: 3487498 - DNA, 25 bp, Homo sapien
ctcaatgcccgtcaagatgttgacc

SEQ ID NO: 3487499 - DNA, 25 bp, Homo sapien
aatctgggttcggataggctctccc

SEQ ID NO: 3487500 - DNA, 25 bp, Homo sapien
ccagggaaacccgagagagctgaaa

SEQ ID NO: 3487501 - DNA, 25 bp, Homo sapien
gcaaaacccggctaagaactatcaa

SEQ ID NO: 3487502 - DNA, 25 bp, Homo sapien
tctaggctagcttcctggtccaaaa

SEQ ID NO: 3487503 - DNA, 25 bp, Homo sapien
cctctgttgggatgttagtagcacc

SEQ ID NO: 3487504 - DNA, 25 bp, Homo sapien
cataagtgctgtgatgtttaatcca

SEQ ID NO: 3487505 - DNA, 25 bp, Homo sapien
ttttggcctggataattctgttgca

SEQ ID NO: 3487506 - DNA, 25 bp, Homo sapien
tcagctgcatccctgtggcctctgt

SEQ ID NO: 3487507 - DNA, 25 bp, Homo sapien
caccacggtgaggagagaactccca

SEQ ID NO: 3487508 - DNA, 25 bp, Homo sapien
aaatatggcttaaaggccgggcgca

SEQ ID NO: 3487509 - DNA, 25 bp, Homo sapien
aatccaagaggatcatgcacccaag

SEQ ID NO: 3487510 - DNA, 25 bp, Homo sapien
tgcaatgatacagcacagcccgtga

SEQ ID NO: 3487511 - DNA, 25 bp, Homo sapien
ctgtggcagggtaaaccacggtcgt

SEQ ID NO: 3487512 - DNA, 25 bp, Homo sapien
tgtggcagggtaaaccacggtcgtc

SEQ ID NO: 3487513 - DNA, 25 bp, Homo sapien
ccgtctctcggatcaggcggaggtc

SEQ ID NO: 3487514 - DNA, 25 bp, Homo sapien
tcctgtagtcatctcccgtctctcg

SEQ ID NO: 3487515 - DNA, 25 bp, Homo sapien
tctctcggatcaggcggaggtcctg

SEQ ID NO: 3487516 - DNA, 25 bp, Homo sapien
tcccgtctctcggatcaggcggagg

SEQ ID NO: 3487517 - DNA, 25 bp, Homo sapien
gcagttcccaagaaaccgaatgagg

SEQ ID NO: 3487518 - DNA, 25 bp, Homo sapien
tctgacctgaaatctcctgggaatg

SEQ ID NO: 3487519 - DNA, 25 bp, Homo sapien
gaagcatttcagctcagagggcccc

SEQ ID NO: 3487520 - DNA, 25 bp, Homo sapien
tgtcactgggtgagcgactgatgcc

SEQ ID NO: 3487521 - DNA, 25 bp, Homo sapien
cctggagggctgaacacactgcatt

SEQ ID NO: 3487522 - DNA, 25 bp, Homo sapien
ctggagggctgaacacactgcattg

SEQ ID NO: 3487523 - DNA, 25 bp, Homo sapien
tggagggctgaacacactgcattgc

SEQ ID NO: 3487524 - DNA, 25 bp, Homo sapien
agcctggagggctgaacacactgca

SEQ ID NO: 3487525 - DNA, 25 bp, Homo sapien
gagataccccaaactgagctcaggg

SEQ ID NO: 3487526 - DNA, 25 bp, Homo sapien
tggacaggtagcatcaccgaaggct

SEQ ID NO: 3487527 - DNA, 25 bp, Homo sapien
tcacagtcagaatggtctccgagct

SEQ ID NO: 3487528 - DNA, 25 bp, Homo sapien
catgcgtcatcacaagggtctctgc

SEQ ID NO: 3487529 - DNA, 25 bp, Homo sapien
tcttgtcgagaatgttatacaccca

SEQ ID NO: 3487530 - DNA, 25 bp, Homo sapien
aatccggtccgcttcagccttcttg

SEQ ID NO: 3487531 - DNA, 25 bp, Homo sapien
aggacaaaaccatcagagggatctg

SEQ ID NO: 3487532 - DNA, 25 bp, Homo sapien
atctgggttctcgaaaacaatccgg

SEQ ID NO: 3487533 - DNA, 25 bp, Homo sapien
gcagggtggccagagatcaggacat

SEQ ID NO: 3487534 - DNA, 25 bp, Homo sapien
tggccagagatcaggacattccagc

SEQ ID NO: 3487535 - DNA, 25 bp, Homo sapien
ggccagagatcaggacattccagcc

SEQ ID NO: 3487536 - DNA, 25 bp, Homo sapien
agctggccctttcatgacccttgag

SEQ ID NO: 3487537 - DNA, 25 bp, Homo sapien
cttgaggacaagtaattccagccct

SEQ ID NO: 3487538 - DNA, 25 bp, Homo sapien
gccagagtgcagctcctaaagtctt

SEQ ID NO: 3487539 - DNA, 25 bp, Homo sapien
caaagtgtgacgtttaagctggccc

SEQ ID NO: 3487540 - DNA, 25 bp, Homo sapien
tggtggaggatgttcctgagcagcg

SEQ ID NO: 3487541 - DNA, 25 bp, Homo sapien
cccggcgatggcagatggcgatcaa

SEQ ID NO: 3487542 - DNA, 25 bp, Homo sapien
caagtgctccggagtaaggtcgcgt

SEQ ID NO: 3487543 - DNA, 25 bp, Homo sapien
tggcgatcaagtacaagtcatcgag

SEQ ID NO: 3487544 - DNA, 25 bp, Homo sapien
caggtatactcgcagatggtctccc

SEQ ID NO: 3487545 - DNA, 25 bp, Homo sapien
aagttctcgatcacctcagccagca

SEQ ID NO: 3487546 - DNA, 25 bp, Homo sapien
aagcccagggcggtgaagtgcacat

SEQ ID NO: 3487547 - DNA, 25 bp, Homo sapien
ccttcatccggtagcgctgcaggat

SEQ ID NO: 3487548 - DNA, 25 bp, Homo sapien
aagagcttgagcagggggtcgtcag

SEQ ID NO: 3487549 - DNA, 25 bp, Homo sapien
agccctgagggcgaaggtgagcgtg

SEQ ID NO: 3487550 - DNA, 25 bp, Homo sapien
tcagctttgctgagcctcctgcaag

SEQ ID NO: 3487551 - DNA, 25 bp, Homo sapien
tgagcgtgcgctgctggtagtgcct

SEQ ID NO: 3487552 - DNA, 25 bp, Homo sapien
taggaataagccggtataaaataca

SEQ ID NO: 3487553 - DNA, 25 bp, Homo sapien
aggaataagccggtataaaatacat

SEQ ID NO: 3487554 - DNA, 25 bp, Homo sapien
caatactaggaataagccggtataa

SEQ ID NO: 3487555 - DNA, 25 bp, Homo sapien
ttcaatactaggaataagccggtat

SEQ ID NO: 3487556 - DNA, 25 bp, Homo sapien
tggctgcaactccatgttgcctgaa

SEQ ID NO: 3487557 - DNA, 25 bp, Homo sapien
ggccatgaaatggatcctgctgatt

SEQ ID NO: 3487558 - DNA, 25 bp, Homo sapien
aagtatttgcttagcccaagaagga

SEQ ID NO: 3487559 - DNA, 25 bp, Homo sapien
tctagggactgttgacgtattgcag

SEQ ID NO: 3487560 - DNA, 25 bp, Homo sapien
acaactgagacgcagggagcattcc

SEQ ID NO: 3487561 - DNA, 25 bp, Homo sapien
cctcgtctgtcctgttgggtgaact

SEQ ID NO: 3487562 - DNA, 25 bp, Homo sapien
agaccgtgtttgcttgttgggacca

SEQ ID NO: 3487563 - DNA, 25 bp, Homo sapien
tcgagaaaccttccagagtgtgggt

SEQ ID NO: 3487564 - DNA, 25 bp, Homo sapien
gggtccctggagattacagcagcag

SEQ ID NO: 3487565 - DNA, 25 bp, Homo sapien
cagcttgtggcttgctcaggacaga

SEQ ID NO: 3487566 - DNA, 25 bp, Homo sapien
tagaccttgagggtgataagcccaa

SEQ ID NO: 3487567 - DNA, 25 bp, Homo sapien
accaaggtgtcatgctgccagaggg

SEQ ID NO: 3487568 - DNA, 25 bp, Homo sapien
ctaaaagccagtcgtggagccgtcc

SEQ ID NO: 3487569 - DNA, 25 bp, Homo sapien
tccaaccaagccagaaagaatgtag

SEQ ID NO: 3487570 - DNA, 25 bp, Homo sapien
caggatttatctaggaagggtgaca

SEQ ID NO: 3487571 - DNA, 25 bp, Homo sapien
gccaaggaacaatagcagtcatgcc

SEQ ID NO: 3487572 - DNA, 25 bp, Homo sapien
ctcagtttcctttccgttattgaag

SEQ ID NO: 3487573 - DNA, 25 bp, Homo sapien
ctttccgttattgaaggcgccaggc

SEQ ID NO: 3487574 - DNA, 25 bp, Homo sapien
ttcctttccgttattgaaggcgcca

SEQ ID NO: 3487575 - DNA, 25 bp, Homo sapien
ttccgttattgaaggcgccaggcat

SEQ ID NO: 3487576 - DNA, 25 bp, Homo sapien
gcgcgacggctcgactcggccgggt

SEQ ID NO: 3487577 - DNA, 25 bp, Homo sapien
gggcagcacggttccgcgcgcagct

SEQ ID NO: 3487578 - DNA, 25 bp, Homo sapien
gcgcagctccgatccgctaggcgca

SEQ ID NO: 3487579 - DNA, 25 bp, Homo sapien
atccgctaggcgcaccgaccggcgg

SEQ ID NO: 3487580 - DNA, 25 bp, Homo sapien
agaggatccggcttcccgcgaaaat

SEQ ID NO: 3487581 - DNA, 25 bp, Homo sapien
cactccaagggaacggagaggatcc

SEQ ID NO: 3487582 - DNA, 25 bp, Homo sapien
gaaactttccgcagaactgtcccgc

SEQ ID NO: 3487583 - DNA, 25 bp, Homo sapien
tagttgtgggagaaaccatcgctcg

SEQ ID NO: 3487584 - DNA, 25 bp, Homo sapien
cgaccttgcgactcctgcacacagg

SEQ ID NO: 3487585 - DNA, 25 bp, Homo sapien
ctttgggtcctgctcagcgaccttg

SEQ ID NO: 3487586 - DNA, 25 bp, Homo sapien
gggtcctgctcagcgaccttgcgac

SEQ ID NO: 3487587 - DNA, 25 bp, Homo sapien
ttgggtcctgctcagcgaccttgcg

SEQ ID NO: 3487588 - DNA, 25 bp, Homo sapien
cctccccgaaatgtggcaggggttg

SEQ ID NO: 3487589 - DNA, 25 bp, Homo sapien
ggacagccagtagtccatccagggc

SEQ ID NO: 3487590 - DNA, 25 bp, Homo sapien
cagggccactcaggacactcataca

SEQ ID NO: 3487591 - DNA, 25 bp, Homo sapien
gccactcaggacactcatacagaag

SEQ ID NO: 3487592 - DNA, 25 bp, Homo sapien
gctgcaggtgggacaaaggaactct

SEQ ID NO: 3487593 - DNA, 25 bp, Homo sapien
gcacccagggcttcagtataggcaa

SEQ ID NO: 3487594 - DNA, 25 bp, Homo sapien
gaaagcaagatcctgaggaccccaa

SEQ ID NO: 3487595 - DNA, 25 bp, Homo sapien
gcacaagtagggtcgctgcagacca

SEQ ID NO: 3487596 - DNA, 25 bp, Homo sapien
ggcaaacagctcaactggcaaaagg

SEQ ID NO: 3487597 - DNA, 25 bp, Homo sapien
tctctgaggtctgaacagagacccc

SEQ ID NO: 3487598 - DNA, 25 bp, Homo sapien
tggggtcaccccagcacagggttcc

SEQ ID NO: 3487599 - DNA, 25 bp, Homo sapien
gagccccactgaggtccatgctggg

SEQ ID NO: 3487600 - DNA, 25 bp, Homo sapien
ggttccctccctgtcacaggcatag

SEQ ID NO: 3487601 - DNA, 25 bp, Homo sapien
ctttggttcagcctgagccccactg

SEQ ID NO: 3487602 - DNA, 25 bp, Homo sapien
gcatccctggatgagtgggctgaga

SEQ ID NO: 3487603 - DNA, 25 bp, Homo sapien
gctgcagttattctgccctcctgag

SEQ ID NO: 3487604 - DNA, 25 bp, Homo sapien
agtggtcagagggattctggaacca

SEQ ID NO: 3487605 - DNA, 25 bp, Homo sapien
gagagaacgtctggtcacagagtgg

SEQ ID NO: 3487606 - DNA, 25 bp, Homo sapien
caagccctgaggctttagcaatttc

SEQ ID NO: 3487607 - DNA, 25 bp, Homo sapien
ttctgggctcaagccctgaggcttt

SEQ ID NO: 3487608 - DNA, 25 bp, Homo sapien
ggctcaagccctgaggctttagcaa

SEQ ID NO: 3487609 - DNA, 25 bp, Homo sapien
tgggctcaagccctgaggctttagc

SEQ ID NO: 3487610 - DNA, 25 bp, Homo sapien
ccagtgacagggactgtcctctcag

SEQ ID NO: 3487611 - DNA, 25 bp, Homo sapien
ctgtgcccagtcccagtgacaggga

SEQ ID NO: 3487612 - DNA, 25 bp, Homo sapien
agtgacagggactgtcctctcagcc

SEQ ID NO: 3487613 - DNA, 25 bp, Homo sapien
gtgcccagtcccagtgacagggact

SEQ ID NO: 3487614 - DNA, 25 bp, Homo sapien
cctcaggaacctcgttcctccaaag

SEQ ID NO: 3487615 - DNA, 25 bp, Homo sapien
caggaacctcgttcctccaaagtca

SEQ ID NO: 3487616 - DNA, 25 bp, Homo sapien
cagccctcaggaacctcgttcctcc

SEQ ID NO: 3487617 - DNA, 25 bp, Homo sapien
gccctcaggaacctcgttcctccaa

SEQ ID NO: 3487618 - DNA, 25 bp, Homo sapien
cagctctggctcgtatagactttgt

SEQ ID NO: 3487619 - DNA, 25 bp, Homo sapien
tgtttgtcagcttgcaggtccctgg

SEQ ID NO: 3487620 - DNA, 25 bp, Homo sapien
ggtccctgggagctatcaccaggca

SEQ ID NO: 3487621 - DNA, 25 bp, Homo sapien
ggagctatcaccaggcagcccggag

SEQ ID NO: 3487622 - DNA, 25 bp, Homo sapien
gcttccagggcttgaggggctcccc

SEQ ID NO: 3487623 - DNA, 25 bp, Homo sapien
ccagccagggcactctcttcctcca

SEQ ID NO: 3487624 - DNA, 25 bp, Homo sapien
tcccccagccagggcactctcttcc

SEQ ID NO: 3487625 - DNA, 25 bp, Homo sapien
agcttccagggcttgaggggctccc

SEQ ID NO: 3487626 - DNA, 25 bp, Homo sapien
ctgagcgagtgagaggcagactcgc

SEQ ID NO: 3487627 - DNA, 25 bp, Homo sapien
gagcgagtgagaggcagactcgcca

SEQ ID NO: 3487628 - DNA, 25 bp, Homo sapien
agtgagaggcagactcgccagaggg

SEQ ID NO: 3487629 - DNA, 25 bp, Homo sapien
gcgagtgagaggcagactcgccaga

SEQ ID NO: 3487630 - DNA, 25 bp, Homo sapien
gctgagggttcgagggtccacacct

SEQ ID NO: 3487631 - DNA, 25 bp, Homo sapien
cacacctgaagtctcattaggagcc

SEQ ID NO: 3487632 - DNA, 25 bp, Homo sapien
cctgaagtctcattaggagccagca

SEQ ID NO: 3487633 - DNA, 25 bp, Homo sapien
gatgtttccagacctgtgcagctga

SEQ ID NO: 3487634 - DNA, 25 bp, Homo sapien
aaaggcaacgttcagccctgcaggt

SEQ ID NO: 3487635 - DNA, 25 bp, Homo sapien
gcctcctgtcatgagcggtgctcca

SEQ ID NO: 3487636 - DNA, 25 bp, Homo sapien
ttcccagaagggctggcacacggat

SEQ ID NO: 3487637 - DNA, 25 bp, Homo sapien
tgcaggtgccacaaattccagccct

SEQ ID NO: 3487638 - DNA, 25 bp, Homo sapien
ctctcctggtccatacgtgacaaag

SEQ ID NO: 3487639 - DNA, 25 bp, Homo sapien
tctcctggtccatacgtgacaaagg

SEQ ID NO: 3487640 - DNA, 25 bp, Homo sapien
tcctggtccatacgtgacaaaggac

SEQ ID NO: 3487641 - DNA, 25 bp, Homo sapien
ctcctggtccatacgtgacaaagga

SEQ ID NO: 3487642 - DNA, 25 bp, Homo sapien
ctacttgccctccttgtgtcctacc

SEQ ID NO: 3487643 - DNA, 25 bp, Homo sapien
ctggcttccctgccgaacttcagcg

SEQ ID NO: 3487644 - DNA, 25 bp, Homo sapien
tctcggcacactgcaacctctacct

SEQ ID NO: 3487645 - DNA, 25 bp, Homo sapien
acctctacctcatgggtttaagcga

SEQ ID NO: 3487646 - DNA, 25 bp, Homo sapien
cccaggctggagtgcggtggcacaa

SEQ ID NO: 3487647 - DNA, 25 bp, Homo sapien
tttttgatacagtctcgctgtgtca

SEQ ID NO: 3487648 - DNA, 25 bp, Homo sapien
cctgcagattcctctgggtcaaaga

SEQ ID NO: 3487649 - DNA, 25 bp, Homo sapien
tgcagattcctctgggtcaaagagc

SEQ ID NO: 3487650 - DNA, 25 bp, Homo sapien
tcctgcagattcctctgggtcaaag

SEQ ID NO: 3487651 - DNA, 25 bp, Homo sapien
gcagattcctctgggtcaaagagct

SEQ ID NO: 3487652 - DNA, 25 bp, Homo sapien
tatggtctgagtaaaaatctcccta

SEQ ID NO: 3487653 - DNA, 25 bp, Homo sapien
ctggatatggtctgagtaaaaatct

SEQ ID NO: 3487654 - DNA, 25 bp, Homo sapien
gatatggtctgagtaaaaatctccc

SEQ ID NO: 3487655 - DNA, 25 bp, Homo sapien
atctccctactttggccaactccct

SEQ ID NO: 3487656 - DNA, 25 bp, Homo sapien
cagctgcagggtcagcgatgctcag

SEQ ID NO: 3487657 - DNA, 25 bp, Homo sapien
agctgtgccccaaagagaacattcg

SEQ ID NO: 3487658 - DNA, 25 bp, Homo sapien
ttgctctatttggacagctgcaggg

SEQ ID NO: 3487659 - DNA, 25 bp, Homo sapien
gagaacattcgcttcttgctctatt

SEQ ID NO: 3487660 - DNA, 25 bp, Homo sapien
ccggggagtatcaaggcaggctcgc

SEQ ID NO: 3487661 - DNA, 25 bp, Homo sapien
tgcagcggagggtccaagggtccac

SEQ ID NO: 3487662 - DNA, 25 bp, Homo sapien
agtttctggaactgtgcagcggagg

SEQ ID NO: 3487663 - DNA, 25 bp, Homo sapien
acacctgaaatcccattagtcccat

SEQ ID NO: 3487664 - DNA, 25 bp, Homo sapien
ctcctggcccatatgtgacaaagga

SEQ ID NO: 3487665 - DNA, 25 bp, Homo sapien
tcctggcccatatgtgacaaaggac

SEQ ID NO: 3487666 - DNA, 25 bp, Homo sapien
ctctcctggcccatatgtgacaaag

SEQ ID NO: 3487667 - DNA, 25 bp, Homo sapien
tctcctggcccatatgtgacaaagg

SEQ ID NO: 3487668 - DNA, 25 bp, Homo sapien
ctacttgccctccttgtgtcctacc

SEQ ID NO: 3487669 - DNA, 25 bp, Homo sapien
tgcaccatatcagaactgatgtccg

SEQ ID NO: 3487670 - DNA, 25 bp, Homo sapien
ggcttgaggacaccctaatacccag

SEQ ID NO: 3487671 - DNA, 25 bp, Homo sapien
agtaaactctgtgcagtcccaggag

SEQ ID NO: 3487672 - DNA, 25 bp, Homo sapien
gcaggcttgaggacaccctaatacc

SEQ ID NO: 3487673 - DNA, 25 bp, Homo sapien
ttgagttagcaagcaggtcagatga

SEQ ID NO: 3487674 - DNA, 25 bp, Homo sapien
gtttgagttagcaagcaggtcagat

SEQ ID NO: 3487675 - DNA, 25 bp, Homo sapien
tttgagttagcaagcaggtcagatg

SEQ ID NO: 3487676 - DNA, 25 bp, Homo sapien
tgccagcccacgcagttgggcagcc

SEQ ID NO: 3487677 - DNA, 25 bp, Homo sapien
ccagcccacgcagttgggcagccat

SEQ ID NO: 3487678 - DNA, 25 bp, Homo sapien
ttgccagcccacgcagttgggcagc

SEQ ID NO: 3487679 - DNA, 25 bp, Homo sapien
cttgccagcccacgcagttgggcag

SEQ ID NO: 3487680 - DNA, 25 bp, Homo sapien
atggactgactctctccgctgtagg

SEQ ID NO: 3487681 - DNA, 25 bp, Homo sapien
gaccactaatgcctgccagctggac

SEQ ID NO: 3487682 - DNA, 25 bp, Homo sapien
tgaatccgaccattttttgcagcca

SEQ ID NO: 3487683 - DNA, 25 bp, Homo sapien
cacacagctgtattcatgggaccac

SEQ ID NO: 3487684 - DNA, 25 bp, Homo sapien
tcggattttacaaaactcagcccca

SEQ ID NO: 3487685 - DNA, 25 bp, Homo sapien
ctcagccccagtgtgaaggtcacat

SEQ ID NO: 3487686 - DNA, 25 bp, Homo sapien
gggatgtcggattttacaaaactca

SEQ ID NO: 3487687 - DNA, 25 bp, Homo sapien
catcataggtgaaactggggatgtc

SEQ ID NO: 3487688 - DNA, 25 bp, Homo sapien
tgccacagaacttacccaagggcag

SEQ ID NO: 3487689 - DNA, 25 bp, Homo sapien
tctgccaggaaccaagatgtccctg

SEQ ID NO: 3487690 - DNA, 25 bp, Homo sapien
gttctgccacagaacttacccaagg

SEQ ID NO: 3487691 - DNA, 25 bp, Homo sapien
caagatgtccctggccgaagggagc

SEQ ID NO: 3487692 - DNA, 25 bp, Homo sapien
cctgggcgggaaacactacaaagag

SEQ ID NO: 3487693 - DNA, 25 bp, Homo sapien
tgggcgggaaacactacaaagagct

SEQ ID NO: 3487694 - DNA, 25 bp, Homo sapien
cagcctgggcgggaaacactacaaa

SEQ ID NO: 3487695 - DNA, 25 bp, Homo sapien
gcgggaaacactacaaagagctcat

SEQ ID NO: 3487696 - DNA, 25 bp, Homo sapien
tgccaagtgccagtttcttccatcc

SEQ ID NO: 3487697 - DNA, 25 bp, Homo sapien
atgccaagtgccagtttcttccatc

SEQ ID NO: 3487698 - DNA, 25 bp, Homo sapien
gatgccaagtgccagtttcttccat

SEQ ID NO: 3487699 - DNA, 25 bp, Homo sapien
gccaagtgccagtttcttccatcca

SEQ ID NO: 3487700 - DNA, 25 bp, Homo sapien
gcagtcactgcagaagacatttctg

SEQ ID NO: 3487701 - DNA, 25 bp, Homo sapien
tcagccagggccacgctgcagtcac

SEQ ID NO: 3487702 - DNA, 25 bp, Homo sapien
agggccacgctgcagtcactgcaga

SEQ ID NO: 3487703 - DNA, 25 bp, Homo sapien
ctgcagtcactgcagaagacatttc

SEQ ID NO: 3487704 - DNA, 25 bp, Homo sapien
gagggcttgagtcctcttttaccca

SEQ ID NO: 3487705 - DNA, 25 bp, Homo sapien
ttacccaacagagggtcacctattc

SEQ ID NO: 3487706 - DNA, 25 bp, Homo sapien
aggcgtctcttggtctggtcactgc

SEQ ID NO: 3487707 - DNA, 25 bp, Homo sapien
tccaccatccaaggcgtctcttggt

SEQ ID NO: 3487708 - DNA, 25 bp, Homo sapien
actcgggactcggtcccaagccagg

SEQ ID NO: 3487709 - DNA, 25 bp, Homo sapien
tcgggactcggtcccaagccaggct

SEQ ID NO: 3487710 - DNA, 25 bp, Homo sapien
ggactcggtcccaagccaggctggc

SEQ ID NO: 3487711 - DNA, 25 bp, Homo sapien
gactcgggactcggtcccaagccag

SEQ ID NO: 3487712 - DNA, 25 bp, Homo sapien
ccaagggcggcattaaggatccagg

SEQ ID NO: 3487713 - DNA, 25 bp, Homo sapien
ggatcctcctaactcctccaagggc

SEQ ID NO: 3487714 - DNA, 25 bp, Homo sapien
ctcccttccaccagaaagcaggaag

SEQ ID NO: 3487715 - DNA, 25 bp, Homo sapien
gggcaatcatcctgagggtgagttt

SEQ ID NO: 3487716 - DNA, 25 bp, Homo sapien
gtgtccggtcagcttcacaaactct

SEQ ID NO: 3487717 - DNA, 25 bp, Homo sapien
aataagagccacaggtgtccggtca

SEQ ID NO: 3487718 - DNA, 25 bp, Homo sapien
tagacactggagcaggacacaccca

SEQ ID NO: 3487719 - DNA, 25 bp, Homo sapien
aaactctcctgcctagacactggag

SEQ ID NO: 3487720 - DNA, 25 bp, Homo sapien
aggattcctggggagagctgtcatc

SEQ ID NO: 3487721 - DNA, 25 bp, Homo sapien
gattcctggggagagctgtcatccc

SEQ ID NO: 3487722 - DNA, 25 bp, Homo sapien
ggattcctggggagagctgtcatcc

SEQ ID NO: 3487723 - DNA, 25 bp, Homo sapien
aagatgaagagaagggcccctggct

SEQ ID NO: 3487724 - DNA, 25 bp, Homo sapien
ccactgtccttcaagatgaagagaa

SEQ ID NO: 3487725 - DNA, 25 bp, Homo sapien
cccagaggtcccaggatcctgctga

SEQ ID NO: 3487726 - DNA, 25 bp, Homo sapien
tcctgctgaagacggcttctgaggc

SEQ ID NO: 3487727 - DNA, 25 bp, Homo sapien
taactcaacagaagcagtctctggc

SEQ ID NO: 3487728 - DNA, 25 bp, Homo sapien
gctgagggcttgaccctgattgtac

SEQ ID NO: 3487729 - DNA, 25 bp, Homo sapien
cgacccctaactcaacagaagcagt

SEQ ID NO: 3487730 - DNA, 25 bp, Homo sapien
aacagaagcagtctctggccctctc

SEQ ID NO: 3487731 - DNA, 25 bp, Homo sapien
cccgggagatggaataccacaccat

SEQ ID NO: 3487732 - DNA, 25 bp, Homo sapien
ctgtcttcccgggagatggaatacc

SEQ ID NO: 3487733 - DNA, 25 bp, Homo sapien
ttcccgggagatggaataccacacc

SEQ ID NO: 3487734 - DNA, 25 bp, Homo sapien
tcttcccgggagatggaataccaca

SEQ ID NO: 3487735 - DNA, 25 bp, Homo sapien
ggaatcatctcaagttaagttccac

SEQ ID NO: 3487736 - DNA, 25 bp, Homo sapien
taagccttctcccacggcatgaagg

SEQ ID NO: 3487737 - DNA, 25 bp, Homo sapien
cacggcatgaaggtcccaaggtgcc

SEQ ID NO: 3487738 - DNA, 25 bp, Homo sapien
catctcaagttaagttccacttgga

SEQ ID NO: 3487739 - DNA, 25 bp, Homo sapien
ttgccaaagagcttagaggccttgc

SEQ ID NO: 3487740 - DNA, 25 bp, Homo sapien
gagcttagaggccttgctctctgcc

SEQ ID NO: 3487741 - DNA, 25 bp, Homo sapien
tctgcctcaccctggaggcacggct

SEQ ID NO: 3487742 - DNA, 25 bp, Homo sapien
accctggaggcacggctccttcttc

SEQ ID NO: 3487743 - DNA, 25 bp, Homo sapien
aggaagatgggctgatcccgggagt

SEQ ID NO: 3487744 - DNA, 25 bp, Homo sapien
ccttggtcccatagggcagctcgta

SEQ ID NO: 3487745 - DNA, 25 bp, Homo sapien
cagatggcgtcttgacccagaaata

SEQ ID NO: 3487746 - DNA, 25 bp, Homo sapien
ccagaaataatcctcaagccgcagg

SEQ ID NO: 3487747 - DNA, 25 bp, Homo sapien
catggttcccacgagccgggtagga

SEQ ID NO: 3487748 - DNA, 25 bp, Homo sapien
cagggtgagcccatggttcccacga

SEQ ID NO: 3487749 - DNA, 25 bp, Homo sapien
tcaggctcagaacttgggcactggg

SEQ ID NO: 3487750 - DNA, 25 bp, Homo sapien
ggccgtggacggcagagaataggaa

SEQ ID NO: 3487751 - DNA, 25 bp, Homo sapien
ctgatgtgacagatagcattctgaa

SEQ ID NO: 3487752 - DNA, 25 bp, Homo sapien
acagatagcattctgaaggctgcct

SEQ ID NO: 3487753 - DNA, 25 bp, Homo sapien
agatagcattctgaaggctgcctgc

SEQ ID NO: 3487754 - DNA, 25 bp, Homo sapien
ggactgatgtgacagatagcattct

SEQ ID NO: 3487755 - DNA, 25 bp, Homo sapien
ggtgatggctagcacccggaggagc

SEQ ID NO: 3487756 - DNA, 25 bp, Homo sapien
ctggtgatggctagcacccggagga

SEQ ID NO: 3487757 - DNA, 25 bp, Homo sapien
agctggtgatggctagcacccggag

SEQ ID NO: 3487758 - DNA, 25 bp, Homo sapien
tggtgatggctagcacccggaggag

SEQ ID NO: 3487759 - DNA, 25 bp, Homo sapien
tgaccacatcgtacttgttgatggc

SEQ ID NO: 3487760 - DNA, 25 bp, Homo sapien
ccagtgagctgttccgcagccggtg

SEQ ID NO: 3487761 - DNA, 25 bp, Homo sapien
cttgttgatggcatctcccagtgag

SEQ ID NO: 3487762 - DNA, 25 bp, Homo sapien
agctgttccgcagccggtgcccgtt

SEQ ID NO: 3487763 - DNA, 25 bp, Homo sapien
cttgaaagctaccaggacgaggagt

SEQ ID NO: 3487764 - DNA, 25 bp, Homo sapien
cagattcagggtagaagagacgcat

SEQ ID NO: 3487765 - DNA, 25 bp, Homo sapien
gtctcaatccagtggaagtccattg

SEQ ID NO: 3487766 - DNA, 25 bp, Homo sapien
agacgcatggtggtcttggagccca

SEQ ID NO: 3487767 - DNA, 25 bp, Homo sapien
atcagagcaccacccttggagggca

SEQ ID NO: 3487768 - DNA, 25 bp, Homo sapien
cagcctctttaggactgccaggcgg

SEQ ID NO: 3487769 - DNA, 25 bp, Homo sapien
agcctaaggcgctgacttccgggag

SEQ ID NO: 3487770 - DNA, 25 bp, Homo sapien
acatcaaggagcgtgaggtcctgac

SEQ ID NO: 3487771 - DNA, 25 bp, Homo sapien
ggctcagcagtttgtcagctgcaat

SEQ ID NO: 3487772 - DNA, 25 bp, Homo sapien
aatcttccgtggctgttgcattggc

SEQ ID NO: 3487773 - DNA, 25 bp, Homo sapien
ttggcaggctcagcagtttgtcagc

SEQ ID NO: 3487774 - DNA, 25 bp, Homo sapien
ccgaatctgtttaggattgacatcc

SEQ ID NO: 3487775 - DNA, 25 bp, Homo sapien
taattcatccacagtgacgggcagc

SEQ ID NO: 3487776 - DNA, 25 bp, Homo sapien
gaaaggatctattgtgccgtcgctg

SEQ ID NO: 3487777 - DNA, 25 bp, Homo sapien
tgtgttatctcatccagctgggctg

SEQ ID NO: 3487778 - DNA, 25 bp, Homo sapien
gctgtacggtcaagaaatgtgggcc

SEQ ID NO: 3487779 - DNA, 25 bp, Homo sapien
acttcctgcagtcacggaaacgttc

SEQ ID NO: 3487780 - DNA, 25 bp, Homo sapien
cctgcagtcacggaaacgttctcca

SEQ ID NO: 3487781 - DNA, 25 bp, Homo sapien
ttcctgcagtcacggaaacgttctc

SEQ ID NO: 3487782 - DNA, 25 bp, Homo sapien
ggaacttcctgcagtcacggaaacg

SEQ ID NO: 3487783 - DNA, 25 bp, Homo sapien
tgggtagccaaagccggcaatgtgc

SEQ ID NO: 3487784 - DNA, 25 bp, Homo sapien
cttgttgtaggcgtctgggtagcca

SEQ ID NO: 3487785 - DNA, 25 bp, Homo sapien
tgctcatagtagtgaatggtctgct

SEQ ID NO: 3487786 - DNA, 25 bp, Homo sapien
gccatggacttgagcgtgatctgct

SEQ ID NO: 3487787 - DNA, 25 bp, Homo sapien
accatgctcacaagccaggcactta

SEQ ID NO: 3487788 - DNA, 25 bp, Homo sapien
cagggagtccaggtgcctcggttcc

SEQ ID NO: 3487789 - DNA, 25 bp, Homo sapien
ttccagttctgactgcgggagccac

SEQ ID NO: 3487790 - DNA, 25 bp, Homo sapien
cacacttcttgggagctcccttccc

SEQ ID NO: 3487791 - DNA, 25 bp, Homo sapien
tcagaaggacgtgaggttcttgata

SEQ ID NO: 3487792 - DNA, 25 bp, Homo sapien
catccgcttaatggccagggcctct

SEQ ID NO: 3487793 - DNA, 25 bp, Homo sapien
ggttcttgatagctcccatctccag

SEQ ID NO: 3487794 - DNA, 25 bp, Homo sapien
tccagcatccgcttaatggccaggg

SEQ ID NO: 3487795 - DNA, 25 bp, Homo sapien
tggatctcggctccataagagcagc

SEQ ID NO: 3487796 - DNA, 25 bp, Homo sapien
tctagatgaggtccccttctcggtg

SEQ ID NO: 3487797 - DNA, 25 bp, Homo sapien
gagtccaagtgggtcatactggcac

SEQ ID NO: 3487798 - DNA, 25 bp, Homo sapien
cagagtaggcaaccgacaggctaca

SEQ ID NO: 3487799 - DNA, 25 bp, Homo sapien
ggtagcctgccctgttgcctatcaa

SEQ ID NO: 3487800 - DNA, 25 bp, Homo sapien
caaagaacttatccctgcaatgcag

SEQ ID NO: 3487801 - DNA, 25 bp, Homo sapien
tcttagagcgcaggtaatagttggc

SEQ ID NO: 3487802 - DNA, 25 bp, Homo sapien
tgcagctaaggcaactgaggagtcc

SEQ ID NO: 3487803 - DNA, 25 bp, Homo sapien
gaaaattatacctgccttggctgtc

SEQ ID NO: 3487804 - DNA, 25 bp, Homo sapien
cagatcaagtgcttcatccggagca

SEQ ID NO: 3487805 - DNA, 25 bp, Homo sapien
tgacatgaacggctctgaccaaatt

SEQ ID NO: 3487806 - DNA, 25 bp, Homo sapien
cctaatgggacgctgtttctcaaca

SEQ ID NO: 3487807 - DNA, 25 bp, Homo sapien
ttaccttgcacatacaggccttcgg

SEQ ID NO: 3487808 - DNA, 25 bp, Homo sapien
tagcactttatctgcaccgctcctg

SEQ ID NO: 3487809 - DNA, 25 bp, Homo sapien
cttgagaggtttatgactgaatgcc

SEQ ID NO: 3487810 - DNA, 25 bp, Homo sapien
cattcgctcatgatcccttgagagg

SEQ ID NO: 3487811 - DNA, 25 bp, Homo sapien
cctaaggagagggacagcaaccatt

SEQ ID NO: 3487812 - DNA, 25 bp, Homo sapien
aaagggagcatgacagtttccgtcc

SEQ ID NO: 3487813 - DNA, 25 bp, Homo sapien
caactgtgaccccagggattggaaa

SEQ ID NO: 3487814 - DNA, 25 bp, Homo sapien
gtgttctccagatgcgttgctcccg

SEQ ID NO: 3487815 - DNA, 25 bp, Homo sapien
gactaagtgaccttggaggcactca

SEQ ID NO: 3487816 - DNA, 25 bp, Homo sapien
tgtcactgcacaagactctaggaga

SEQ ID NO: 3487817 - DNA, 25 bp, Homo sapien
ccttttgggtgccacgtggaacttg

SEQ ID NO: 3487818 - DNA, 25 bp, Homo sapien
ggaacttgccatggccctgactcag

SEQ ID NO: 3487819 - DNA, 25 bp, Homo sapien
cattgtcgggccctatgtgccgggt

SEQ ID NO: 3487820 - DNA, 25 bp, Homo sapien
ccgggtctccgtggccttttctgct

SEQ ID NO: 3487821 - DNA, 25 bp, Homo sapien
tcctcgttgtttgacttggtctttc

SEQ ID NO: 3487822 - DNA, 25 bp, Homo sapien
ctttctctctaacaccctgtcattg

SEQ ID NO: 3487823 - DNA, 25 bp, Homo sapien
agggccagctcgcagagccgctggg

SEQ ID NO: 3487824 - DNA, 25 bp, Homo sapien
taaaatatgcatctgccggcagcgt

SEQ ID NO: 3487825 - DNA, 25 bp, Homo sapien
ccggcagcgtgctcagatgaagcca

SEQ ID NO: 3487826 - DNA, 25 bp, Homo sapien
gtgctcagatgaagccagagggcca

SEQ ID NO: 3487827 - DNA, 25 bp, Homo sapien
gccacctaaccaagcgaatgtggga

SEQ ID NO: 3487828 - DNA, 25 bp, Homo sapien
accaagcgaatgtgggagagagacc

SEQ ID NO: 3487829 - DNA, 25 bp, Homo sapien
ttctgcagccacctaaccaagcgaa

SEQ ID NO: 3487830 - DNA, 25 bp, Homo sapien
ggagagagaccgctgtgtttcccag

SEQ ID NO: 3487831 - DNA, 25 bp, Homo sapien
gcagctgccttacccagtggtctaa

SEQ ID NO: 3487832 - DNA, 25 bp, Homo sapien
ggacagatggcgcagtgctctctcg

SEQ ID NO: 3487833 - DNA, 25 bp, Homo sapien
tcaggtagggcagagaacttggcac

SEQ ID NO: 3487834 - DNA, 25 bp, Homo sapien
catcaggacagggttcatccaagcc

SEQ ID NO: 3487835 - DNA, 25 bp, Homo sapien
tgagtaactctcttattagaggagc

SEQ ID NO: 3487836 - DNA, 25 bp, Homo sapien
aaatatcgttgcgtttaggagaggg

SEQ ID NO: 3487837 - DNA, 25 bp, Homo sapien
agacatgaatgctctccccaagatg

SEQ ID NO: 3487838 - DNA, 25 bp, Homo sapien
ccagtgaagccatgagtaactctct

SEQ ID NO: 3487839 - DNA, 25 bp, Homo sapien
ggcaatgttgcacgttgagtttttc

SEQ ID NO: 3487840 - DNA, 25 bp, Homo sapien
tggcagccgggtaccaagtaattta

SEQ ID NO: 3487841 - DNA, 25 bp, Homo sapien
ttactgcaggcaatattgggcttag

SEQ ID NO: 3487842 - DNA, 25 bp, Homo sapien
cacagaagcacaaatatgaagcaga

SEQ ID NO: 3487843 - DNA, 25 bp, Homo sapien
cagatgcagccttcgtgattagaca

SEQ ID NO: 3487844 - DNA, 25 bp, Homo sapien
gttaataggttttccgtcagatgca

SEQ ID NO: 3487845 - DNA, 25 bp, Homo sapien
agggatcacgcgtacacacaggcag

SEQ ID NO: 3487846 - DNA, 25 bp, Homo sapien
gggagaagctacatgagacctaaca

SEQ ID NO: 3487847 - DNA, 25 bp, Homo sapien
caggcgtgcgactaatattcttaac

SEQ ID NO: 3487848 - DNA, 25 bp, Homo sapien
taaccctgtggcttaggagtaggag

SEQ ID NO: 3487849 - DNA, 25 bp, Homo sapien
tatcattacagattctccaggccag

SEQ ID NO: 3487850 - DNA, 25 bp, Homo sapien
tcaaatcccgggtgtagtcagggca

SEQ ID NO: 3487851 - DNA, 25 bp, Homo sapien
gataggaaacgcggctaagacaaac

SEQ ID NO: 3487852 - DNA, 25 bp, Homo sapien
gtcgataggaaacgcggctaagaca

SEQ ID NO: 3487853 - DNA, 25 bp, Homo sapien
cgggtcgataggaaacgcggctaag

SEQ ID NO: 3487854 - DNA, 25 bp, Homo sapien
taggaaacgcggctaagacaaacat

SEQ ID NO: 3487855 - DNA, 25 bp, Homo sapien
ctcgggcctgccgtcagctgtcact

SEQ ID NO: 3487856 - DNA, 25 bp, Homo sapien
tgcctcgggcctgccgtcagctgtc

SEQ ID NO: 3487857 - DNA, 25 bp, Homo sapien
cgggcctgccgtcagctgtcacttt

SEQ ID NO: 3487858 - DNA, 25 bp, Homo sapien
gcctcgggcctgccgtcagctgtca

SEQ ID NO: 3487859 - DNA, 25 bp, Homo sapien
taacgtttgattgagcacgggaagt

SEQ ID NO: 3487860 - DNA, 25 bp, Homo sapien
catctttagagtatgagagcaaaca

SEQ ID NO: 3487861 - DNA, 25 bp, Homo sapien
tacagccatctatctcccataatta

SEQ ID NO: 3487862 - DNA, 25 bp, Homo sapien
cttacattgggataataacgtttga

SEQ ID NO: 3487863 - DNA, 25 bp, Homo sapien
gcgaacctgcagatgctaatgctga

SEQ ID NO: 3487864 - DNA, 25 bp, Homo sapien
cagtgctgactcgaaggtacaaggg

SEQ ID NO: 3487865 - DNA, 25 bp, Homo sapien
gacccactgggcgatcatatcgcga

SEQ ID NO: 3487866 - DNA, 25 bp, Homo sapien
agagcacaaacccagaccgattcag

SEQ ID NO: 3487867 - DNA, 25 bp, Homo sapien
aacagaggaccagtgaggtggctgg

SEQ ID NO: 3487868 - DNA, 25 bp, Homo sapien
cttcttgcattaatccttgtagggc

SEQ ID NO: 3487869 - DNA, 25 bp, Homo sapien
tgaggtggctggtccttttgttgtt

SEQ ID NO: 3487870 - DNA, 25 bp, Homo sapien
tgttgttggttcacggaggaagatc

SEQ ID NO: 3487871 - DNA, 25 bp, Homo sapien
aagctgaatgcagataccgaaacac

SEQ ID NO: 3487872 - DNA, 25 bp, Homo sapien
gaaaggccaatcctatctccctcca

SEQ ID NO: 3487873 - DNA, 25 bp, Homo sapien
cttagaggtcttcccagaaaggcca

SEQ ID NO: 3487874 - DNA, 25 bp, Homo sapien
ctttcttagaggtcttcccagaaag

SEQ ID NO: 3487875 - DNA, 25 bp, Homo sapien
cagaaaggccaatcctatctccctc

SEQ ID NO: 3487876 - DNA, 25 bp, Homo sapien
aacattgctcctgggaacatctgtg

SEQ ID NO: 3487877 - DNA, 25 bp, Homo sapien
aaacattgctcctgggaacatctgt

SEQ ID NO: 3487878 - DNA, 25 bp, Homo sapien
cgagacagcactagtttcttattcc

SEQ ID NO: 3487879 - DNA, 25 bp, Homo sapien
ggttcccgagacagcactagtttct

SEQ ID NO: 3487880 - DNA, 25 bp, Homo sapien
ccctgtgggtaagacaatcagtgca

SEQ ID NO: 3487881 - DNA, 25 bp, Homo sapien
caacccctgtattcctagtagagac

SEQ ID NO: 3487882 - DNA, 25 bp, Homo sapien
tgaagatttaaactgcccctgtggg

SEQ ID NO: 3487883 - DNA, 25 bp, Homo sapien
tatgttgagattccacgtgaagtct

SEQ ID NO: 3487884 - DNA, 25 bp, Homo sapien
gtgccctgccacatatggaggtttc

SEQ ID NO: 3487885 - DNA, 25 bp, Homo sapien
tgtgccctgccacatatggaggttt

SEQ ID NO: 3487886 - DNA, 25 bp, Homo sapien
cttcttgtctcttccggtagatagc

SEQ ID NO: 3487887 - DNA, 25 bp, Homo sapien
ctcttccggtagatagcagtaaagc

SEQ ID NO: 3487888 - DNA, 25 bp, Homo sapien
tgtctcttccggtagatagcagtaa

SEQ ID NO: 3487889 - DNA, 25 bp, Homo sapien
ttcttgtctcttccggtagatagca

SEQ ID NO: 3487890 - DNA, 25 bp, Homo sapien
ctaactcgactcctccagaaatggg

SEQ ID NO: 3487891 - DNA, 25 bp, Homo sapien
aactcgactcctccagaaatgggag

SEQ ID NO: 3487892 - DNA, 25 bp, Homo sapien
ctcgactcctccagaaatgggagag

SEQ ID NO: 3487893 - DNA, 25 bp, Homo sapien
taactcgactcctccagaaatggga

SEQ ID NO: 3487894 - DNA, 25 bp, Homo sapien
ggaggaacatccatcccggtgttta

SEQ ID NO: 3487895 - DNA, 25 bp, Homo sapien
tcccggtgtttagagcttctttcat

SEQ ID NO: 3487896 - DNA, 25 bp, Homo sapien
catccatcccggtgtttagagcttc

SEQ ID NO: 3487897 - DNA, 25 bp, Homo sapien
gaggaacatccatcccggtgtttag

SEQ ID NO: 3487898 - DNA, 25 bp, Homo sapien
tgctcccctgatgactgtaggcaat

SEQ ID NO: 3487899 - DNA, 25 bp, Homo sapien
catcacttttcctggacaggtaggc

SEQ ID NO: 3487900 - DNA, 25 bp, Homo sapien
gatgactgtaggcaataacataaat

SEQ ID NO: 3487901 - DNA, 25 bp, Homo sapien
tcatcacttttcctggacaggtagg

SEQ ID NO: 3487902 - DNA, 25 bp, Homo sapien
ctgggattctgaaacgcagattcct

SEQ ID NO: 3487903 - DNA, 25 bp, Homo sapien
gggattctgaaacgcagattcctca

SEQ ID NO: 3487904 - DNA, 25 bp, Homo sapien
tgggattctgaaacgcagattcctc

SEQ ID NO: 3487905 - DNA, 25 bp, Homo sapien
attcctcaggaatactgatccaata

SEQ ID NO: 3487906 - DNA, 25 bp, Homo sapien
gcaaagtacttcttgtccttccgga

SEQ ID NO: 3487907 - DNA, 25 bp, Homo sapien
tgcaaagtacttcttgtccttccgg

SEQ ID NO: 3487908 - DNA, 25 bp, Homo sapien
ttgcaaagtacttcttgtccttccg

SEQ ID NO: 3487909 - DNA, 25 bp, Homo sapien
tccttctgaattgtgtgtaaaatct

SEQ ID NO: 3487910 - DNA, 25 bp, Homo sapien
tattgctttgcatcaaataaaatac

SEQ ID NO: 3487911 - DNA, 25 bp, Homo sapien
tagtccagtcttgacatctggtctc

SEQ ID NO: 3487912 - DNA, 25 bp, Homo sapien
aatgaatataaagatgtagtccagt

SEQ ID NO: 3487913 - DNA, 25 bp, Homo sapien
agtagacaatcctttcaatcctttc

SEQ ID NO: 3487914 - DNA, 25 bp, Homo sapien
acaatcctttcaatcctttcctcag

SEQ ID NO: 3487915 - DNA, 25 bp, Homo sapien
ccacagagccagagtagacaatcct

SEQ ID NO: 3487916 - DNA, 25 bp, Homo sapien
cccacagagccagagtagacaatcc

SEQ ID NO: 3487917 - DNA, 25 bp, Homo sapien
ataaatgcaatattgacgtttagct

SEQ ID NO: 3487918 - DNA, 25 bp, Homo sapien
taaatgcaatattgacgtttagctc

SEQ ID NO: 3487919 - DNA, 25 bp, Homo sapien
aataaatgcaatattgacgtttagc

SEQ ID NO: 3487920 - DNA, 25 bp, Homo sapien
cacatagttctacatagctgctcta

SEQ ID NO: 3487921 - DNA, 25 bp, Homo sapien
tgctctatggtcagccaaacaaaga

SEQ ID NO: 3487922 - DNA, 25 bp, Homo sapien
tattccaagcaagtaacaattcctc

SEQ ID NO: 3487923 - DNA, 25 bp, Homo sapien
gcctaaagagctctgagtgttcatt

SEQ ID NO: 3487924 - DNA, 25 bp, Homo sapien
gagtgtcggctctttggtgtcccta

SEQ ID NO: 3487925 - DNA, 25 bp, Homo sapien
ttcatgtcggaagaggaccactggg

SEQ ID NO: 3487926 - DNA, 25 bp, Homo sapien
tactagagtaggaaagtcgctgcgc

SEQ ID NO: 3487927 - DNA, 25 bp, Homo sapien
tgagaaacagtagttcagcgccact

SEQ ID NO: 3487928 - DNA, 25 bp, Homo sapien
tcacaaggtgaaagtgtcacaggct

SEQ ID NO: 3487929 - DNA, 25 bp, Homo sapien
ttcaccctgtggcttgacgcctcgg

SEQ ID NO: 3487930 - DNA, 25 bp, Homo sapien
acaggcttgcacaagaacctgatca

SEQ ID NO: 3487931 - DNA, 25 bp, Homo sapien
tcattaggaggatggagtccccagc

SEQ ID NO: 3487932 - DNA, 25 bp, Homo sapien
tgctccatacatattagctgctttg

SEQ ID NO: 3487933 - DNA, 25 bp, Homo sapien
tcaatgcgtgacacctagcaggtgc

SEQ ID NO: 3487934 - DNA, 25 bp, Homo sapien
gaaatgacacctagctcaatgcgtg

SEQ ID NO: 3487935 - DNA, 25 bp, Homo sapien
aatgagggagataacaccaaggtgg

SEQ ID NO: 3487936 - DNA, 25 bp, Homo sapien
aggaatcttctgtgctccatcagta

SEQ ID NO: 3487937 - DNA, 25 bp, Homo sapien
cccaggttttcacaggccacagtga

SEQ ID NO: 3487938 - DNA, 25 bp, Homo sapien
gtttcttccagggtgatagctcccc

SEQ ID NO: 3487939 - DNA, 25 bp, Homo sapien
gatagctccccctggtgtttggagg

SEQ ID NO: 3487940 - DNA, 25 bp, Homo sapien
tatccagcacgggtattactgccat

SEQ ID NO: 3487941 - DNA, 25 bp, Homo sapien
ttatccagcacgggtattactgcca

SEQ ID NO: 3487942 - DNA, 25 bp, Homo sapien
tttatccagcacgggtattactgcc

SEQ ID NO: 3487943 - DNA, 25 bp, Homo sapien
tggatctcatcattccttaagaccc

SEQ ID NO: 3487944 - DNA, 25 bp, Homo sapien
tccttaagacccaggtagggcacat

SEQ ID NO: 3487945 - DNA, 25 bp, Homo sapien
agagtatgaacaggccactgtcagc

SEQ ID NO: 3487946 - DNA, 25 bp, Homo sapien
cttcaggaagagtatgaacaggcca

SEQ ID NO: 3487947 - DNA, 25 bp, Homo sapien
cccacgggagccaacagactatgaa

SEQ ID NO: 3487948 - DNA, 25 bp, Homo sapien
cagtgtctggctccgtatgaattac

SEQ ID NO: 3487949 - DNA, 25 bp, Homo sapien
tggcccttgttgtggactctcaggt

SEQ ID NO: 3487950 - DNA, 25 bp, Homo sapien
tatgaattacagagacctgcaagag

SEQ ID NO: 3487951 - DNA, 25 bp, Homo sapien
tggtgctgcttccatcaagatacat

SEQ ID NO: 3487952 - DNA, 25 bp, Homo sapien
cttcctgatcagtctccagaacttg

SEQ ID NO: 3487953 - DNA, 25 bp, Homo sapien
ctgcttcctgatcagtctccagaac

SEQ ID NO: 3487954 - DNA, 25 bp, Homo sapien
ctccagaacttggtgctgcttccat

SEQ ID NO: 3487955 - DNA, 25 bp, Homo sapien
tcagatggagactgagaaagagtag

SEQ ID NO: 3487956 - DNA, 25 bp, Homo sapien
gagaaagagtagagcagaaagtcac

SEQ ID NO: 3487957 - DNA, 25 bp, Homo sapien
agactgagaaagagtagagcagaaa

SEQ ID NO: 3487958 - DNA, 25 bp, Homo sapien
ctgagaaagagtagagcagaaagtc

SEQ ID NO: 3487959 - DNA, 25 bp, Homo sapien
cttggagcgggagatggaaagcaca

SEQ ID NO: 3487960 - DNA, 25 bp, Homo sapien
gaaatgaacggagggaattcatcac

SEQ ID NO: 3487961 - DNA, 25 bp, Homo sapien
ggaggacaaggtgccatagccgtca

SEQ ID NO: 3487962 - DNA, 25 bp, Homo sapien
tccacgaaaacagtcgaaatgaacg

SEQ ID NO: 3487963 - DNA, 25 bp, Homo sapien
caacaatctctagggtcttccgtgg

SEQ ID NO: 3487964 - DNA, 25 bp, Homo sapien
gatgagcagacctgaaaacccagaa

SEQ ID NO: 3487965 - DNA, 25 bp, Homo sapien
tgagtggcatcaaaacgcgcactgg

SEQ ID NO: 3487966 - DNA, 25 bp, Homo sapien
cctgattcggtctccacacgtagaa

SEQ ID NO: 3487967 - DNA, 25 bp, Homo sapien
gtttgtgtcaagcaaacagcttttc

SEQ ID NO: 3487968 - DNA, 25 bp, Homo sapien
tccgcctctcttgctgtgtatttgc

SEQ ID NO: 3487969 - DNA, 25 bp, Homo sapien
aggcagctgctcagtacaattttca

SEQ ID NO: 3487970 - DNA, 25 bp, Homo sapien
attattcccactgcatcaactttca

SEQ ID NO: 3487971 - DNA, 25 bp, Homo sapien
tttagatgttcgtaagtgattagca

SEQ ID NO: 3487972 - DNA, 25 bp, Homo sapien
atttagatgttcgtaagtgattagc

SEQ ID NO: 3487973 - DNA, 25 bp, Homo sapien
ttagatgttcgtaagtgattagcat

SEQ ID NO: 3487974 - DNA, 25 bp, Homo sapien
taatttagatgttcgtaagtgatta

SEQ ID NO: 3487975 - DNA, 25 bp, Homo sapien
tgaaaagaccaactaggtgaaacat

SEQ ID NO: 3487976 - DNA, 25 bp, Homo sapien
ctgaaaagaccaactaggtgaaaca

SEQ ID NO: 3487977 - DNA, 25 bp, Homo sapien
atgaatggggtatttgttgatgttc

SEQ ID NO: 3487978 - DNA, 25 bp, Homo sapien
gaatggggtatttgttgatgttccc

SEQ ID NO: 3487979 - DNA, 25 bp, Homo sapien
tggggtatttgttgatgttcccaga

SEQ ID NO: 3487980 - DNA, 25 bp, Homo sapien
ggtatttgttgatgttcccagaaat

SEQ ID NO: 3487981 - DNA, 25 bp, Homo sapien
gtgatggtgcttctgtatagtctta

SEQ ID NO: 3487982 - DNA, 25 bp, Homo sapien
agggactgactcttcttcggtgttt

SEQ ID NO: 3487983 - DNA, 25 bp, Homo sapien
aacagggactgactcttcttcggtg

SEQ ID NO: 3487984 - DNA, 25 bp, Homo sapien
ctctgtgatggtgcttctgtatagt

SEQ ID NO: 3487985 - DNA, 25 bp, Homo sapien
agaaagaaaagggacaatgccatac

SEQ ID NO: 3487986 - DNA, 25 bp, Homo sapien
agagaaagaaaagggacaatgccat

SEQ ID NO: 3487987 - DNA, 25 bp, Homo sapien
gagaaagaaaagggacaatgccata

SEQ ID NO: 3487988 - DNA, 25 bp, Homo sapien
aagagaaagaaaagggacaatgcca

SEQ ID NO: 3487989 - DNA, 25 bp, Homo sapien
tagcccagagcgtggatgaccaaag

SEQ ID NO: 3487990 - DNA, 25 bp, Homo sapien
gtcaaaccagatctcacccatagct

SEQ ID NO: 3487991 - DNA, 25 bp, Homo sapien
gatctcacccatagctctttgtttg

SEQ ID NO: 3487992 - DNA, 25 bp, Homo sapien
cgtttgcatactgcacgctcaagct

SEQ ID NO: 3487993 - DNA, 25 bp, Homo sapien
tctcctccgcaaaatttgctttatt

SEQ ID NO: 3487994 - DNA, 25 bp, Homo sapien
tgcatctcctccgcaaaatttgctt

SEQ ID NO: 3487995 - DNA, 25 bp, Homo sapien
gcctgcatctcctccgcaaaatttg

SEQ ID NO: 3487996 - DNA, 25 bp, Homo sapien
catctcctccgcaaaatttgcttta

SEQ ID NO: 3487997 - DNA, 25 bp, Homo sapien
tgaacctgaatttctccccgcttgt

SEQ ID NO: 3487998 - DNA, 25 bp, Homo sapien
ttccatgtccatctcccctatccta

SEQ ID NO: 3487999 - DNA, 25 bp, Homo sapien
tatcctactccctttctgtgtcttc

SEQ ID NO: 3488000 - DNA, 25 bp, Homo sapien
gttcagtcctcccttccagatacag

SEQ ID NO: 3488001 - DNA, 25 bp, Homo sapien
caggtggataccctgagaagtggct

SEQ ID NO: 3488002 - DNA, 25 bp, Homo sapien
ttaacccaagacatagcaactgcag

SEQ ID NO: 3488003 - DNA, 25 bp, Homo sapien
ccagattgaactctgacggcttcca

SEQ ID NO: 3488004 - DNA, 25 bp, Homo sapien
tgatgcggataatacaacatgcagc

SEQ ID NO: 3488005 - DNA, 25 bp, Homo sapien
ccagcaagcaataagggagggtcct

SEQ ID NO: 3488006 - DNA, 25 bp, Homo sapien
atcacaggaggcaccctgaacatca

SEQ ID NO: 3488007 - DNA, 25 bp, Homo sapien
cagcaggttaggaaccccagcaagc

SEQ ID NO: 3488008 - DNA, 25 bp, Homo sapien
actggatactcaatgccctggacaa

SEQ ID NO: 3488009 - DNA, 25 bp, Homo sapien
atttctgaatgtctactgtcctggc

SEQ ID NO: 3488010 - DNA, 25 bp, Homo sapien
tttctgaatgtctactgtcctggcc

SEQ ID NO: 3488011 - DNA, 25 bp, Homo sapien
tctgaatgtctactgtcctggccat

SEQ ID NO: 3488012 - DNA, 25 bp, Homo sapien
ttctgaatgtctactgtcctggcca

SEQ ID NO: 3488013 - DNA, 25 bp, Homo sapien
cttgcgggtttattattagaggcct

SEQ ID NO: 3488014 - DNA, 25 bp, Homo sapien
gcttgcgggtttattattagaggcc

SEQ ID NO: 3488015 - DNA, 25 bp, Homo sapien
ttgcgggtttattattagaggcctg

SEQ ID NO: 3488016 - DNA, 25 bp, Homo sapien
gactctgttattgtagggttgctca

SEQ ID NO: 3488017 - DNA, 25 bp, Homo sapien
agactctgttattgtagggttgctc

SEQ ID NO: 3488018 - DNA, 25 bp, Homo sapien
actctgttattgtagggttgctcat

SEQ ID NO: 3488019 - DNA, 25 bp, Homo sapien
gagactctgttattgtagggttgct

SEQ ID NO: 3488020 - DNA, 25 bp, Homo sapien
tgccaccccttaatgaaggttttgc

SEQ ID NO: 3488021 - DNA, 25 bp, Homo sapien
catgactgggtgaccctcctctgct

SEQ ID NO: 3488022 - DNA, 25 bp, Homo sapien
tttcatgactgggtgaccctcctct

SEQ ID NO: 3488023 - DNA, 25 bp, Homo sapien
tagggcatgtgagtcagagcttgtt

SEQ ID NO: 3488024 - DNA, 25 bp, Homo sapien
cctagagcacggaggagattccatc

SEQ ID NO: 3488025 - DNA, 25 bp, Homo sapien
ctcctagagcacggaggagattcca

SEQ ID NO: 3488026 - DNA, 25 bp, Homo sapien
ctagagcacggaggagattccatct

SEQ ID NO: 3488027 - DNA, 25 bp, Homo sapien
agagcacggaggagattccatcttc

SEQ ID NO: 3488028 - DNA, 25 bp, Homo sapien
gggccgtgaactgcagcccaacaac

SEQ ID NO: 3488029 - DNA, 25 bp, Homo sapien
tgagagcccagcttcccggtcacag

SEQ ID NO: 3488030 - DNA, 25 bp, Homo sapien
gaggtgcgcagattcccgtaggcca

SEQ ID NO: 3488031 - DNA, 25 bp, Homo sapien
aacaacctccaatgagagcccagct

SEQ ID NO: 3488032 - DNA, 25 bp, Homo sapien
ccagagaccaagctgcaggtagagt

SEQ ID NO: 3488033 - DNA, 25 bp, Homo sapien
tacatgtctcatgtctaaggaagtc

SEQ ID NO: 3488034 - DNA, 25 bp, Homo sapien
catgggttaggcattggaccaggac

SEQ ID NO: 3488035 - DNA, 25 bp, Homo sapien
gacagagtgtttgcaggagaatatc

SEQ ID NO: 3488036 - DNA, 25 bp, Homo sapien
catgttgttttgtcttgacaagcag

SEQ ID NO: 3488037 - DNA, 25 bp, Homo sapien
agagtgatgtcaggtagttgcttcc

SEQ ID NO: 3488038 - DNA, 25 bp, Homo sapien
cctgagcggctctggtagggctgaa

SEQ ID NO: 3488039 - DNA, 25 bp, Homo sapien
tctgctgggaaagccttagtgcctc

SEQ ID NO: 3488040 - DNA, 25 bp, Homo sapien
tagccgtaatcaagtggaacccagg

SEQ ID NO: 3488041 - DNA, 25 bp, Homo sapien
tctgctctgttcattggtgtacccc

SEQ ID NO: 3488042 - DNA, 25 bp, Homo sapien
cgggttaaccctgaaactcagctat

SEQ ID NO: 3488043 - DNA, 25 bp, Homo sapien
tcgcaactctgcaactccgggttaa

SEQ ID NO: 3488044 - DNA, 25 bp, Homo sapien
gtgcagggcctgcccagggctgatc

SEQ ID NO: 3488045 - DNA, 25 bp, Homo sapien
gggcctgcccagggctgatccagag

SEQ ID NO: 3488046 - DNA, 25 bp, Homo sapien
gcagggcctgcccagggctgatcca

SEQ ID NO: 3488047 - DNA, 25 bp, Homo sapien
agggcctgcccagggctgatccaga

SEQ ID NO: 3488048 - DNA, 25 bp, Homo sapien
acttgctgctctgataatgcaggat

SEQ ID NO: 3488049 - DNA, 25 bp, Homo sapien
tgctctgataatgcaggatattgtc

SEQ ID NO: 3488050 - DNA, 25 bp, Homo sapien
gctgctctgataatgcaggatattg

SEQ ID NO: 3488051 - DNA, 25 bp, Homo sapien
tcacttgctgctctgataatgcagg

SEQ ID NO: 3488052 - DNA, 25 bp, Homo sapien
tctttgtggacctgaggtgttccgg

SEQ ID NO: 3488053 - DNA, 25 bp, Homo sapien
tgtggacctgaggtgttccggacat

SEQ ID NO: 3488054 - DNA, 25 bp, Homo sapien
tttgtggacctgaggtgttccggac

SEQ ID NO: 3488055 - DNA, 25 bp, Homo sapien
cttctttgtggacctgaggtgttcc

SEQ ID NO: 3488056 - DNA, 25 bp, Homo sapien
ggccctgctgattgcattaatcttg

SEQ ID NO: 3488057 - DNA, 25 bp, Homo sapien
catacgttggtgttcttgtacacga

SEQ ID NO: 3488058 - DNA, 25 bp, Homo sapien
tgtacacgaggtaggcagttactgc

SEQ ID NO: 3488059 - DNA, 25 bp, Homo sapien
ggtgccccaatatgtggccctgctg

SEQ ID NO: 3488060 - DNA, 25 bp, Homo sapien
cacacggtacagcattggaaaagta

SEQ ID NO: 3488061 - DNA, 25 bp, Homo sapien
gattgacagctggatggctctgaca

SEQ ID NO: 3488062 - DNA, 25 bp, Homo sapien
tcagcacaaacatacagcctgttat

SEQ ID NO: 3488063 - DNA, 25 bp, Homo sapien
agctgcctgcttatttgcgatttta

SEQ ID NO: 3488064 - DNA, 25 bp, Homo sapien
tgtccaacaagtcatattcatggag

SEQ ID NO: 3488065 - DNA, 25 bp, Homo sapien
cacagtcattgaatgtccaacaagt

SEQ ID NO: 3488066 - DNA, 25 bp, Homo sapien
ttgaatgtccaacaagtcatattca

SEQ ID NO: 3488067 - DNA, 25 bp, Homo sapien
aacaagtcatattcatggaggtgag

SEQ ID NO: 3488068 - DNA, 25 bp, Homo sapien
gacccttctcctatctggaggctgt

SEQ ID NO: 3488069 - DNA, 25 bp, Homo sapien
tgcactaccgtggaaatgtcaatga

SEQ ID NO: 3488070 - DNA, 25 bp, Homo sapien
cagacccttctcctatctggaggct

SEQ ID NO: 3488071 - DNA, 25 bp, Homo sapien
agtaggtctcgagggctgtatgcac

SEQ ID NO: 3488072 - DNA, 25 bp, Homo sapien
acaatgcctggactatagcttcaag

SEQ ID NO: 3488073 - DNA, 25 bp, Homo sapien
gggatgatacctgtcttgctcacca

SEQ ID NO: 3488074 - DNA, 25 bp, Homo sapien
tgcccagcacttaacacgatttgaa

SEQ ID NO: 3488075 - DNA, 25 bp, Homo sapien
tcccaaactgttagggtcataagca

SEQ ID NO: 3488076 - DNA, 25 bp, Homo sapien
tgtagcccgtattcgtgagatgatc

SEQ ID NO: 3488077 - DNA, 25 bp, Homo sapien
tgaccagaagggtttgctttagttg

SEQ ID NO: 3488078 - DNA, 25 bp, Homo sapien
tagttgtggagttgtttgtagcccg

SEQ ID NO: 3488079 - DNA, 25 bp, Homo sapien
cgtgagatgatctttcgtattttaa

SEQ ID NO: 3488080 - DNA, 25 bp, Homo sapien
atgttgtactgctgctcgtccgaaa

SEQ ID NO: 3488081 - DNA, 25 bp, Homo sapien
catgttgtactgctgctcgtccgaa

SEQ ID NO: 3488082 - DNA, 25 bp, Homo sapien
ccattctcccattcttgtaggccat

SEQ ID NO: 3488083 - DNA, 25 bp, Homo sapien
tggccattgacaacaggaagacata

SEQ ID NO: 3488084 - DNA, 25 bp, Homo sapien
tggacggctggtggccattgacaac

SEQ ID NO: 3488085 - DNA, 25 bp, Homo sapien
ccctggaagtggctccgggatgctg

SEQ ID NO: 3488086 - DNA, 25 bp, Homo sapien
gctggcagtcatagacccagtggag

SEQ ID NO: 3488087 - DNA, 25 bp, Homo sapien
ggaggctgttgcagtgcagccatgc

SEQ ID NO: 3488088 - DNA, 25 bp, Homo sapien
agggaggctgttgcagtgcagccat

SEQ ID NO: 3488089 - DNA, 25 bp, Homo sapien
gggaggctgttgcagtgcagccatg

SEQ ID NO: 3488090 - DNA, 25 bp, Homo sapien
ttccagacggcagcatttgtggaac

SEQ ID NO: 3488091 - DNA, 25 bp, Homo sapien
attccagacggcagcatttgtggaa

SEQ ID NO: 3488092 - DNA, 25 bp, Homo sapien
gcctgcttcctggatggaactctgg

SEQ ID NO: 3488093 - DNA, 25 bp, Homo sapien
ttgctgctgcaaaactgggtcaggg

SEQ ID NO: 3488094 - DNA, 25 bp, Homo sapien
ctggatggaactctgggtcttgctg

SEQ ID NO: 3488095 - DNA, 25 bp, Homo sapien
gctgctgcaaaactgggtcaggggc

SEQ ID NO: 3488096 - DNA, 25 bp, Homo sapien
tctgtgcgggccgaaaacctccgta

SEQ ID NO: 3488097 - DNA, 25 bp, Homo sapien
tgaatgcattgagctttgccctttc

SEQ ID NO: 3488098 - DNA, 25 bp, Homo sapien
tcggtgtccaagacgggaacctgct

SEQ ID NO: 3488099 - DNA, 25 bp, Homo sapien
aacctccgtaaagacactaatgttg

SEQ ID NO: 3488100 - DNA, 25 bp, Homo sapien
gaccgtccaagacagggacctgctg

SEQ ID NO: 3488101 - DNA, 25 bp, Homo sapien
gacctgctgcttattgggttcaatg

SEQ ID NO: 3488102 - DNA, 25 bp, Homo sapien
tatgggccgaaaaccttcataacga

SEQ ID NO: 3488103 - DNA, 25 bp, Homo sapien
ggttcaatgcattgagacttgccct

SEQ ID NO: 3488104 - DNA, 25 bp, Homo sapien
tgatgcttggattgaacttggtggc

SEQ ID NO: 3488105 - DNA, 25 bp, Homo sapien
tgagatgatgcttggattgaacttg

SEQ ID NO: 3488106 - DNA, 25 bp, Homo sapien
gatgatgcttggattgaacttggtg

SEQ ID NO: 3488107 - DNA, 25 bp, Homo sapien
cttcaattgtctctgcttgatgtaa

SEQ ID NO: 3488108 - DNA, 25 bp, Homo sapien
tgcgatactgttacaccaaaagaaa

SEQ ID NO: 3488109 - DNA, 25 bp, Homo sapien
gtatccaaatagtttcatgacagtc

SEQ ID NO: 3488110 - DNA, 25 bp, Homo sapien
cttggctcatgcgatactgttacac

SEQ ID NO: 3488111 - DNA, 25 bp, Homo sapien
tccaaatagtttcatgacagtcttg

SEQ ID NO: 3488112 - DNA, 25 bp, Homo sapien
cacttgatactgtgaaggaggaaaa

SEQ ID NO: 3488113 - DNA, 25 bp, Homo sapien
tgctgccatccttgaacattactct

SEQ ID NO: 3488114 - DNA, 25 bp, Homo sapien
tggcctggcacttgatactgtgaag

SEQ ID NO: 3488115 - DNA, 25 bp, Homo sapien
ttatccccgggttcatggcagaggc

SEQ ID NO: 3488116 - DNA, 25 bp, Homo sapien
aaagaggtgcaagcgcaaaggctga

SEQ ID NO: 3488117 - DNA, 25 bp, Homo sapien
tcagataaacctcttcattagggtc

SEQ ID NO: 3488118 - DNA, 25 bp, Homo sapien
aaggctgaagctattcatcccacat

SEQ ID NO: 3488119 - DNA, 25 bp, Homo sapien
cccgttcttgattggagtggacagc

SEQ ID NO: 3488120 - DNA, 25 bp, Homo sapien
tctaaagaaaacttcctctccagtc

SEQ ID NO: 3488121 - DNA, 25 bp, Homo sapien
gcttcttgtggatatttctaaagaa

SEQ ID NO: 3488122 - DNA, 25 bp, Homo sapien
ctgctgcttcttgtggatatttcta

SEQ ID NO: 3488123 - DNA, 25 bp, Homo sapien
gctgcttcttgtggatatttctaaa

SEQ ID NO: 3488124 - DNA, 25 bp, Homo sapien
tccttggcaaggagtcagcaggcca

SEQ ID NO: 3488125 - DNA, 25 bp, Homo sapien
aaaaagtgcttgtagatccttggca

SEQ ID NO: 3488126 - DNA, 25 bp, Homo sapien
cagcaggccataacggtgcattgtg

SEQ ID NO: 3488127 - DNA, 25 bp, Homo sapien
ccagaattgcctggcagcggttgta

SEQ ID NO: 3488128 - DNA, 25 bp, Homo sapien
tagactgctccttctttgacttaga

SEQ ID NO: 3488129 - DNA, 25 bp, Homo sapien
tgctagaggctctattcttgaggac

SEQ ID NO: 3488130 - DNA, 25 bp, Homo sapien
ccttcccgtggcagcctttgacaag

SEQ ID NO: 3488131 - DNA, 25 bp, Homo sapien
tgaggacgctgaatatcaggtagga

SEQ ID NO: 3488132 - DNA, 25 bp, Homo sapien
caaaccttgtagttgcccactaatt

SEQ ID NO: 3488133 - DNA, 25 bp, Homo sapien
aaaccttgtagttgcccactaattg

SEQ ID NO: 3488134 - DNA, 25 bp, Homo sapien
tcaaaccttgtagttgcccactaat

SEQ ID NO: 3488135 - DNA, 25 bp, Homo sapien
cagacttcgagtcaggcttcagtgc

SEQ ID NO: 3488136 - DNA, 25 bp, Homo sapien
tgaatttcccgcaaatcaatcctgg

SEQ ID NO: 3488137 - DNA, 25 bp, Homo sapien
tcaatcctggatgcagttattattt

SEQ ID NO: 3488138 - DNA, 25 bp, Homo sapien
tattattttatagggatgttgtaag

SEQ ID NO: 3488139 - DNA, 25 bp, Homo sapien
taagaatttgagaagctttcctcca

SEQ ID NO: 3488140 - DNA, 25 bp, Homo sapien
catagcttgtaggatttgggacgga

SEQ ID NO: 3488141 - DNA, 25 bp, Homo sapien
ctgtgccctcgacacggctgtggag

SEQ ID NO: 3488142 - DNA, 25 bp, Homo sapien
gtcccgacagccgtgtgaccatcag

SEQ ID NO: 3488143 - DNA, 25 bp, Homo sapien
gccacttgataattgtgacgagatg

SEQ ID NO: 3488144 - DNA, 25 bp, Homo sapien
cgagttgatccacaggcagcgtgaa

SEQ ID NO: 3488145 - DNA, 25 bp, Homo sapien
tcccgagttgatccacaggcagcgt

SEQ ID NO: 3488146 - DNA, 25 bp, Homo sapien
taattgtgacgagatgtgtctgaga

SEQ ID NO: 3488147 - DNA, 25 bp, Homo sapien
tgtcacccttggcaatgctgggagc

SEQ ID NO: 3488148 - DNA, 25 bp, Homo sapien
gtgcagtgtgacagtccacctgtca

SEQ ID NO: 3488149 - DNA, 25 bp, Homo sapien
tgggagcaatgacagcttcagagta

SEQ ID NO: 3488150 - DNA, 25 bp, Homo sapien
caaatgtcacaggtgactcggctct

SEQ ID NO: 3488151 - DNA, 25 bp, Homo sapien
ctttggcctgttctcttcaggaact

SEQ ID NO: 3488152 - DNA, 25 bp, Homo sapien
tttggcctgttctcttcaggaactg

SEQ ID NO: 3488153 - DNA, 25 bp, Homo sapien
gagctcttgtcttgcctcgaggcca

SEQ ID NO: 3488154 - DNA, 25 bp, Homo sapien
tcgtaagggagtgagcagcaaagcc

SEQ ID NO: 3488155 - DNA, 25 bp, Homo sapien
gactttaatggtggcgcttgcagca

SEQ ID NO: 3488156 - DNA, 25 bp, Homo sapien
tatactgcgcccaggttgtaatcgc

SEQ ID NO: 3488157 - DNA, 25 bp, Homo sapien
tgggatgacgtcttgtctagaggaa

SEQ ID NO: 3488158 - DNA, 25 bp, Homo sapien
gaaggtcaatacacagctgccaagg

SEQ ID NO: 3488159 - DNA, 25 bp, Homo sapien
cccagtagggagtcctcagttgcca

SEQ ID NO: 3488160 - DNA, 25 bp, Homo sapien
cagaaccccatgtgggatgacgtct

SEQ ID NO: 3488161 - DNA, 25 bp, Homo sapien
ggaagaatctaagcagcccacttgc

SEQ ID NO: 3488162 - DNA, 25 bp, Homo sapien
tctccctactgggaagaatctaagc

SEQ ID NO: 3488163 - DNA, 25 bp, Homo sapien
tgttaatggcatccctgagctaagg

SEQ ID NO: 3488164 - DNA, 25 bp, Homo sapien
gaggtaccatctccctactgggaag

SEQ ID NO: 3488165 - DNA, 25 bp, Homo sapien
acagctcttagaggtgcaagactca

SEQ ID NO: 3488166 - DNA, 25 bp, Homo sapien
aacacagctcttagaggtgcaagac

SEQ ID NO: 3488167 - DNA, 25 bp, Homo sapien
taaaagttttcgagaaagcaaagca

SEQ ID NO: 3488168 - DNA, 25 bp, Homo sapien
ctcttagaggtgcaagactcagaaa

SEQ ID NO: 3488169 - DNA, 25 bp, Homo sapien
tgaaacccttccagctcgatctgct

SEQ ID NO: 3488170 - DNA, 25 bp, Homo sapien
tcgctgcgctaaggaatgaaaccct

SEQ ID NO: 3488171 - DNA, 25 bp, Homo sapien
aaagtcggctgggttgtcagggcgc

SEQ ID NO: 3488172 - DNA, 25 bp, Homo sapien
tcttcagtcaaggtaggacccctgc

SEQ ID NO: 3488173 - DNA, 25 bp, Homo sapien
gctgcagatacccagaggcacaaag

SEQ ID NO: 3488174 - DNA, 25 bp, Homo sapien
ggacattgctgacaatcccggcttc

SEQ ID NO: 3488175 - DNA, 25 bp, Homo sapien
ccgaggcggctaagaacaggcagtt

SEQ ID NO: 3488176 - DNA, 25 bp, Homo sapien
aagccgtgtgcctgggatgccaaga

SEQ ID NO: 3488177 - DNA, 25 bp, Homo sapien
gaaacaagatccttccaacctggat

SEQ ID NO: 3488178 - DNA, 25 bp, Homo sapien
tgcgggagaccggaggttacaggga

SEQ ID NO: 3488179 - DNA, 25 bp, Homo sapien
tgggagagcgaaacaagatccttcc

SEQ ID NO: 3488180 - DNA, 25 bp, Homo sapien
ggccaatgggagagcgaaacaagat

SEQ ID NO: 3488181 - DNA, 25 bp, Homo sapien
ggcgggcagctcatcacttaatcca

SEQ ID NO: 3488182 - DNA, 25 bp, Homo sapien
agaggcgggcagctcatcacttaat

SEQ ID NO: 3488183 - DNA, 25 bp, Homo sapien
cgggcagctcatcacttaatccaag

SEQ ID NO: 3488184 - DNA, 25 bp, Homo sapien
tttagaggcgggcagctcatcactt

SEQ ID NO: 3488185 - DNA, 25 bp, Homo sapien
ggcagccttgcagcgccaggaggct

SEQ ID NO: 3488186 - DNA, 25 bp, Homo sapien
tgcaggtactgctcgcgttctctgc

SEQ ID NO: 3488187 - DNA, 25 bp, Homo sapien
gctgctgaagattgccgtgggtttt

SEQ ID NO: 3488188 - DNA, 25 bp, Homo sapien
tgggttttccggcactcaggcttga

SEQ ID NO: 3488189 - DNA, 25 bp, Homo sapien
ctttcggctgtctctgtagggctgc

SEQ ID NO: 3488190 - DNA, 25 bp, Homo sapien
gcgcactccgaggtctagggactct

SEQ ID NO: 3488191 - DNA, 25 bp, Homo sapien
catgatagacattgggctgacagcc

SEQ ID NO: 3488192 - DNA, 25 bp, Homo sapien
ggatgtgcagaaacccagaattcgg

SEQ ID NO: 3488193 - DNA, 25 bp, Homo sapien
tgcccttcaggggatgcttctgaaa

SEQ ID NO: 3488194 - DNA, 25 bp, Homo sapien
tatctggttctctgagccctttccc

SEQ ID NO: 3488195 - DNA, 25 bp, Homo sapien
aatcaggggagcagacaacctgccc

SEQ ID NO: 3488196 - DNA, 25 bp, Homo sapien
gcagggttaaggtctcgtaatccac

SEQ ID NO: 3488197 - DNA, 25 bp, Homo sapien
cctacctgggtaagagctgtggaga

SEQ ID NO: 3488198 - DNA, 25 bp, Homo sapien
gaagaataagttaaattggattcag

SEQ ID NO: 3488199 - DNA, 25 bp, Homo sapien
cattcagcagtacgtagtgagagcc

SEQ ID NO: 3488200 - DNA, 25 bp, Homo sapien
ctgtggagacggctgtgaactagag

SEQ ID NO: 3488201 - DNA, 25 bp, Homo sapien
agtgccctgcatgcatgagcgtgtc

SEQ ID NO: 3488202 - DNA, 25 bp, Homo sapien
gcagctcccatgtgaattgagtatc

SEQ ID NO: 3488203 - DNA, 25 bp, Homo sapien
attgttcttaaacagcgctgctgga

SEQ ID NO: 3488204 - DNA, 25 bp, Homo sapien
gcgctgctggagaattgtatccttg

SEQ ID NO: 3488205 - DNA, 25 bp, Homo sapien
tatcaaatcatgctccgtgcaagtg

SEQ ID NO: 3488206 - DNA, 25 bp, Homo sapien
tcccctttctgacacttcgcagata

SEQ ID NO: 3488207 - DNA, 25 bp, Homo sapien
ttagtgtggaatttgtctgccctca

SEQ ID NO: 3488208 - DNA, 25 bp, Homo sapien
tggaatttgtctgccctcactgaaa

SEQ ID NO: 3488209 - DNA, 25 bp, Homo sapien
gctttcggatgccattttgggatca

SEQ ID NO: 3488210 - DNA, 25 bp, Homo sapien
cttggcggcattgcagaacgctttc

SEQ ID NO: 3488211 - DNA, 25 bp, Homo sapien
tatcgtcagatgcttccgaaagtgc

SEQ ID NO: 3488212 - DNA, 25 bp, Homo sapien
aaattaatatcgtcagatgcttccg

SEQ ID NO: 3488213 - DNA, 25 bp, Homo sapien
atatccaaagtttatttgcccctgg

SEQ ID NO: 3488214 - DNA, 25 bp, Homo sapien
ccaggtacctgatatgaacttgaca

SEQ ID NO: 3488215 - DNA, 25 bp, Homo sapien
ccctggtcctgaattatcgagctcc

SEQ ID NO: 3488216 - DNA, 25 bp, Homo sapien
tatcgagctccaggtacctgatatg

SEQ ID NO: 3488217 - DNA, 25 bp, Homo sapien
aacaaaggtatgctgcgtgttcatt

SEQ ID NO: 3488218 - DNA, 25 bp, Homo sapien
ttttgcacaggaggattacagagct

SEQ ID NO: 3488219 - DNA, 25 bp, Homo sapien
gggaatggtgacatgctgtatgaac

SEQ ID NO: 3488220 - DNA, 25 bp, Homo sapien
tgcaaacctccaccggtgtggcaca

SEQ ID NO: 3488221 - DNA, 25 bp, Homo sapien
tcagctcagatgccacatcctcaat

SEQ ID NO: 3488222 - DNA, 25 bp, Homo sapien
gaggaaccggagctgctgtgccagg

SEQ ID NO: 3488223 - DNA, 25 bp, Homo sapien
tacacagaggtgctgaacaagaccc

SEQ ID NO: 3488224 - DNA, 25 bp, Homo sapien
cacagaggtgctgaacaagaccctt

SEQ ID NO: 3488225 - DNA, 25 bp, Homo sapien
tctgtacacagaggtgctgaacaag

SEQ ID NO: 3488226 - DNA, 25 bp, Homo sapien
tgttctgtacacagaggtgctgaac

SEQ ID NO: 3488227 - DNA, 25 bp, Homo sapien
ccacactggctttcatagagagcca

SEQ ID NO: 3488228 - DNA, 25 bp, Homo sapien
cacactggctttcatagagagccat

SEQ ID NO: 3488229 - DNA, 25 bp, Homo sapien
atccacactggctttcatagagagc

SEQ ID NO: 3488230 - DNA, 25 bp, Homo sapien
tccacactggctttcatagagagcc

SEQ ID NO: 3488231 - DNA, 25 bp, Homo sapien
tgtggagcaggtttttgatgcttga

SEQ ID NO: 3488232 - DNA, 25 bp, Homo sapien
gctgtggagcaggtttttgatgctt

SEQ ID NO: 3488233 - DNA, 25 bp, Homo sapien
tggctgtggagcaggtttttgatgc

SEQ ID NO: 3488234 - DNA, 25 bp, Homo sapien
gctggctgtggagcaggtttttgat

SEQ ID NO: 3488235 - DNA, 25 bp, Homo sapien
gcgtcaccccttctgttgagcacaa

SEQ ID NO: 3488236 - DNA, 25 bp, Homo sapien
taacatggcatccatatggcgtcac

SEQ ID NO: 3488237 - DNA, 25 bp, Homo sapien
tcatctcggttagcaggtgacaggc

SEQ ID NO: 3488238 - DNA, 25 bp, Homo sapien
aattttagggcaagattcataccgc

SEQ ID NO: 3488239 - DNA, 25 bp, Homo sapien
tctataaaataactcctgcctggct

SEQ ID NO: 3488240 - DNA, 25 bp, Homo sapien
tgcttggccccgtagaaattacttc

SEQ ID NO: 3488241 - DNA, 25 bp, Homo sapien
ttattattgcttggccccgtagaaa

SEQ ID NO: 3488242 - DNA, 25 bp, Homo sapien
tcggaagatagtccttgacttccaa

SEQ ID NO: 3488243 - DNA, 25 bp, Homo sapien
gagcaggatggcaggagtgatcata

SEQ ID NO: 3488244 - DNA, 25 bp, Homo sapien
gcaggatggcaggagtgatcataat

SEQ ID NO: 3488245 - DNA, 25 bp, Homo sapien
gatggcaggagtgatcataatttcc

SEQ ID NO: 3488246 - DNA, 25 bp, Homo sapien
caggatggcaggagtgatcataatt

SEQ ID NO: 3488247 - DNA, 25 bp, Homo sapien
tgaaacatcagggaataacagcccc

SEQ ID NO: 3488248 - DNA, 25 bp, Homo sapien
caataggcagtgtgatgagggttcc

SEQ ID NO: 3488249 - DNA, 25 bp, Homo sapien
catagggccacagagagtaagtcca

SEQ ID NO: 3488250 - DNA, 25 bp, Homo sapien
gactgcccaggagcaaaattggtga

SEQ ID NO: 3488251 - DNA, 25 bp, Homo sapien
tcactcatcacttccgctgccacag

SEQ ID NO: 3488252 - DNA, 25 bp, Homo sapien
gctttggagagctgtttctggctgc

SEQ ID NO: 3488253 - DNA, 25 bp, Homo sapien
cacagtctctgtcagagggctttgg

SEQ ID NO: 3488254 - DNA, 25 bp, Homo sapien
tccaccaaaagcacctggcagcttt

SEQ ID NO: 3488255 - DNA, 25 bp, Homo sapien
gaaccaactatgtgggtccagtgga

SEQ ID NO: 3488256 - DNA, 25 bp, Homo sapien
catccatcggtttgtgttaagcaag

SEQ ID NO: 3488257 - DNA, 25 bp, Homo sapien
cccatgaccatgagccgactgtgtt

SEQ ID NO: 3488258 - DNA, 25 bp, Homo sapien
tcggagatccctgtttcagaagcat

SEQ ID NO: 3488259 - DNA, 25 bp, Homo sapien
acaggcacctgtcggagggtcttct

SEQ ID NO: 3488260 - DNA, 25 bp, Homo sapien
cagactctctttctaggccacggct

SEQ ID NO: 3488261 - DNA, 25 bp, Homo sapien
acgggctgcaaccagtgactcctca

SEQ ID NO: 3488262 - DNA, 25 bp, Homo sapien
aagaatctgcttgcagaattctgcc

SEQ ID NO: 3488263 - DNA, 25 bp, Homo sapien
tctgtctctcaggtgtaagcgattc

SEQ ID NO: 3488264 - DNA, 25 bp, Homo sapien
ctgtctctcaggtgtaagcgattct

SEQ ID NO: 3488265 - DNA, 25 bp, Homo sapien
cctctgtctctcaggtgtaagcgat

SEQ ID NO: 3488266 - DNA, 25 bp, Homo sapien
aacctctgtctctcaggtgtaagcg

SEQ ID NO: 3488267 - DNA, 25 bp, Homo sapien
aggtgattaccgaaatggccactgc

SEQ ID NO: 3488268 - DNA, 25 bp, Homo sapien
ttgcctcaggtgattaccgaaatgg

SEQ ID NO: 3488269 - DNA, 25 bp, Homo sapien
cttggttcagcagcttgaagtcatc

SEQ ID NO: 3488270 - DNA, 25 bp, Homo sapien
ggtcagcatctctgcaattctttta

SEQ ID NO: 3488271 - DNA, 25 bp, Homo sapien
tgggaaggtagccatagccgccttg

SEQ ID NO: 3488272 - DNA, 25 bp, Homo sapien
tgtctcagaccgatcatgtttgcct

SEQ ID NO: 3488273 - DNA, 25 bp, Homo sapien
catgcgctgccgtagcagagctaca

SEQ ID NO: 3488274 - DNA, 25 bp, Homo sapien
tcttgcccttgacattcgagtggta

SEQ ID NO: 3488275 - DNA, 25 bp, Homo sapien
ggtgtgtctgaaacagccaaacaac

SEQ ID NO: 3488276 - DNA, 25 bp, Homo sapien
ttcaggtggcgaatgaccagcaggt

SEQ ID NO: 3488277 - DNA, 25 bp, Homo sapien
tactggagttctagagacgaaaaca

SEQ ID NO: 3488278 - DNA, 25 bp, Homo sapien
tgccgagtccaaatacccgattgtg

SEQ ID NO: 3488279 - DNA, 25 bp, Homo sapien
cattttttgcctcgaaattctggca

SEQ ID NO: 3488280 - DNA, 25 bp, Homo sapien
cctttgcattgactttgggacggca

SEQ ID NO: 3488281 - DNA, 25 bp, Homo sapien
gactgaggccacagcaaatgttctg

SEQ ID NO: 3488282 - DNA, 25 bp, Homo sapien
tgggacggcatttttcccctgtaga

SEQ ID NO: 3488283 - DNA, 25 bp, Homo sapien
gggggattggcaatcctactcctca

SEQ ID NO: 3488284 - DNA, 25 bp, Homo sapien
cccaggctaatctactgtttatgtt

SEQ ID NO: 3488285 - DNA, 25 bp, Homo sapien
caggctctccagcaactaggactaa

SEQ ID NO: 3488286 - DNA, 25 bp, Homo sapien
agcaactaggactaaggcaggccac

SEQ ID NO: 3488287 - DNA, 25 bp, Homo sapien
tcatgattgcacaaatgggtaaatg

SEQ ID NO: 3488288 - DNA, 25 bp, Homo sapien
gggctagagcgaaaataggaattga

SEQ ID NO: 3488289 - DNA, 25 bp, Homo sapien
ggaattgactataaatgggcatggg

SEQ ID NO: 3488290 - DNA, 25 bp, Homo sapien
gggaatcttactagggcgatgaaac

SEQ ID NO: 3488291 - DNA, 25 bp, Homo sapien
gagttttgtgagccattccaacaaa

SEQ ID NO: 3488292 - DNA, 25 bp, Homo sapien
ttcctgagttttgtgagccattcca

SEQ ID NO: 3488293 - DNA, 25 bp, Homo sapien
cttcctgagttttgtgagccattcc

SEQ ID NO: 3488294 - DNA, 25 bp, Homo sapien
cctgagttttgtgagccattccaac

SEQ ID NO: 3488295 - DNA, 25 bp, Homo sapien
gcagtagctttagggggtcctcctg

SEQ ID NO: 3488296 - DNA, 25 bp, Homo sapien
cctgcagtgcaatcaaactcacagg

SEQ ID NO: 3488297 - DNA, 25 bp, Homo sapien
ggcctttgctctaggagcattttgc

SEQ ID NO: 3488298 - DNA, 25 bp, Homo sapien
ttgctctaggagcattttgcagcag

SEQ ID NO: 3488299 - DNA, 25 bp, Homo sapien
caatcagtgagggtgtaaatgcgtt

SEQ ID NO: 3488300 - DNA, 25 bp, Homo sapien
gtctccaagccagcagtaccatggt

SEQ ID NO: 3488301 - DNA, 25 bp, Homo sapien
taacacaaaaatggagagctgagca

SEQ ID NO: 3488302 - DNA, 25 bp, Homo sapien
aattgcctctattctggcccctcag

SEQ ID NO: 3488303 - DNA, 25 bp, Homo sapien
gatgtattgtcaaatttagttggct

SEQ ID NO: 3488304 - DNA, 25 bp, Homo sapien
accaaacttgcattctaagaatata

SEQ ID NO: 3488305 - DNA, 25 bp, Homo sapien
gtacttccagtgctaggtagaatag

SEQ ID NO: 3488306 - DNA, 25 bp, Homo sapien
tatattatctgggagtctttcatac

SEQ ID NO: 3488307 - DNA, 25 bp, Homo sapien
aggaataaagcctagcctacatggt

SEQ ID NO: 3488308 - DNA, 25 bp, Homo sapien
ggggtttggcctatagattgtttca

SEQ ID NO: 3488309 - DNA, 25 bp, Homo sapien
cctacatggttgtggtactggtttg

SEQ ID NO: 3488310 - DNA, 25 bp, Homo sapien
aattgcatatctcaggggtttggcc

SEQ ID NO: 3488311 - DNA, 25 bp, Homo sapien
ctttgatgcataccgagttctggct

SEQ ID NO: 3488312 - DNA, 25 bp, Homo sapien
tgatgcataccgagttctggctgag

SEQ ID NO: 3488313 - DNA, 25 bp, Homo sapien
ttgatgcataccgagttctggctga

SEQ ID NO: 3488314 - DNA, 25 bp, Homo sapien
tttgatgcataccgagttctggctg

SEQ ID NO: 3488315 - DNA, 25 bp, Homo sapien
cattctgattgtgaatgtcatccat

SEQ ID NO: 3488316 - DNA, 25 bp, Homo sapien
caagggacaaaactgtgatagtacc

SEQ ID NO: 3488317 - DNA, 25 bp, Homo sapien
gtgatagtaccaggaaacacattca

SEQ ID NO: 3488318 - DNA, 25 bp, Homo sapien
cacattcagccagtcattctgattg

SEQ ID NO: 3488319 - DNA, 25 bp, Homo sapien
gcatcatgagctgcatgtatttcaa

SEQ ID NO: 3488320 - DNA, 25 bp, Homo sapien
ttctgccaggttgagtccctccctt

SEQ ID NO: 3488321 - DNA, 25 bp, Homo sapien
cttccttctaaagtgctttcatgct

SEQ ID NO: 3488322 - DNA, 25 bp, Homo sapien
ttctaaagtgctttcatgctgcagc

SEQ ID NO: 3488323 - DNA, 25 bp, Homo sapien
tcagagagctatttccaggctcaga

SEQ ID NO: 3488324 - DNA, 25 bp, Homo sapien
caatcctcctttcaggtgggcatct

SEQ ID NO: 3488325 - DNA, 25 bp, Homo sapien
tttcacatccaatcctcctttcagg

SEQ ID NO: 3488326 - DNA, 25 bp, Homo sapien
ctgtttctggttcccggtcttcatt

SEQ ID NO: 3488327 - DNA, 25 bp, Homo sapien
ctcctttcaggtgggcatctttcca

SEQ ID NO: 3488328 - DNA, 25 bp, Homo sapien
cttgatctttcttctcagaaagcat

SEQ ID NO: 3488329 - DNA, 25 bp, Homo sapien
cagtactgtactgagggactctgtg

SEQ ID NO: 3488330 - DNA, 25 bp, Homo sapien
taggtccagtactgtactgagggac

SEQ ID NO: 3488331 - DNA, 25 bp, Homo sapien
ccaaatccgattttaactctgacat

SEQ ID NO: 3488332 - DNA, 25 bp, Homo sapien
ccatgcaatgggtctttgggtgatg

SEQ ID NO: 3488333 - DNA, 25 bp, Homo sapien
ccaaccaaatccgattttaactctg

SEQ ID NO: 3488334 - DNA, 25 bp, Homo sapien
catgcaatgggtctttgggtgatga

SEQ ID NO: 3488335 - DNA, 25 bp, Homo sapien
gaatccctcccttgcacttctgcat

SEQ ID NO: 3488336 - DNA, 25 bp, Homo sapien
taggtgggcatattgccagattctc

SEQ ID NO: 3488337 - DNA, 25 bp, Homo sapien
ggccctgaatccctcccttgcactt

SEQ ID NO: 3488338 - DNA, 25 bp, Homo sapien
ggtgggcatattgccagattctcca

SEQ ID NO: 3488339 - DNA, 25 bp, Homo sapien
ggaaaccctgaagacctgccacatt

SEQ ID NO: 3488340 - DNA, 25 bp, Homo sapien
cacatttggaatctcacagccaggg

SEQ ID NO: 3488341 - DNA, 25 bp, Homo sapien
gaacaaattgcttcaccgcttggaa

SEQ ID NO: 3488342 - DNA, 25 bp, Homo sapien
gcttcacatcaattaggaggctcgg

SEQ ID NO: 3488343 - DNA, 25 bp, Homo sapien
ctgagtcagtctgctacactccgat

SEQ ID NO: 3488344 - DNA, 25 bp, Homo sapien
ttggatttcagtagaatctgcatct

SEQ ID NO: 3488345 - DNA, 25 bp, Homo sapien
cagtctgctacactccgatgcctat

SEQ ID NO: 3488346 - DNA, 25 bp, Homo sapien
agtcagtctgctacactccgatgcc

SEQ ID NO: 3488347 - DNA, 25 bp, Homo sapien
tcctttgtacatggtcctacctcct

SEQ ID NO: 3488348 - DNA, 25 bp, Homo sapien
gggcttttgctagaagaatgacaat

SEQ ID NO: 3488349 - DNA, 25 bp, Homo sapien
gtatataatataagctcagcaagtg

SEQ ID NO: 3488350 - DNA, 25 bp, Homo sapien
gaagccacagaggatatcaaatctt

SEQ ID NO: 3488351 - DNA, 25 bp, Homo sapien
gaatttatacagagacaagcctaca

SEQ ID NO: 3488352 - DNA, 25 bp, Homo sapien
agttcttagtcatgacaccgaaagt

SEQ ID NO: 3488353 - DNA, 25 bp, Homo sapien
ttagtcatgacaccgaaagtacaat

SEQ ID NO: 3488354 - DNA, 25 bp, Homo sapien
aattgaatttatacagagacaagcc

SEQ ID NO: 3488355 - DNA, 25 bp, Homo sapien
aaagtgactttcactcccatccagc

SEQ ID NO: 3488356 - DNA, 25 bp, Homo sapien
gcagctgacaatagcaaagtgactt

SEQ ID NO: 3488357 - DNA, 25 bp, Homo sapien
ctccaatgcagctgacaatagcaaa

SEQ ID NO: 3488358 - DNA, 25 bp, Homo sapien
cttccctacttctgggacagagaga

SEQ ID NO: 3488359 - DNA, 25 bp, Homo sapien
cccaaaagcacaaaagacgttggtg

SEQ ID NO: 3488360 - DNA, 25 bp, Homo sapien
ggtggtgtctctaaatgactcctca

SEQ ID NO: 3488361 - DNA, 25 bp, Homo sapien
ctgcaattagcagaagactagaggt

SEQ ID NO: 3488362 - DNA, 25 bp, Homo sapien
cacaaaagacgttggtggtgtctct

SEQ ID NO: 3488363 - DNA, 25 bp, Homo sapien
tctttccattgactgggtccccaag

SEQ ID NO: 3488364 - DNA, 25 bp, Homo sapien
aagccgtcagaacaagctctccagg

SEQ ID NO: 3488365 - DNA, 25 bp, Homo sapien
gtttacatgatgactccagagcaag

SEQ ID NO: 3488366 - DNA, 25 bp, Homo sapien
gagacgaaacccgatgaaaccagta

SEQ ID NO: 3488367 - DNA, 25 bp, Homo sapien
gctctaattgacaagattctgaggg

SEQ ID NO: 3488368 - DNA, 25 bp, Homo sapien
taccacgtcttcagatcttgcagtg

SEQ ID NO: 3488369 - DNA, 25 bp, Homo sapien
gatgcttttgctaccacgtcttcag

SEQ ID NO: 3488370 - DNA, 25 bp, Homo sapien
gaaagctaggcagcaatgctgatgc

SEQ ID NO: 3488371 - DNA, 25 bp, Homo sapien
tcaaataggttgaacttggttgaca

SEQ ID NO: 3488372 - DNA, 25 bp, Homo sapien
caaataggttgaacttggttgacaa

SEQ ID NO: 3488373 - DNA, 25 bp, Homo sapien
gcttagagtgaagaggctgctgtat

SEQ ID NO: 3488374 - DNA, 25 bp, Homo sapien
gagcttctagctggcttttatgaca

SEQ ID NO: 3488375 - DNA, 25 bp, Homo sapien
tctgagcttctagctggcttttatg

SEQ ID NO: 3488376 - DNA, 25 bp, Homo sapien
tcattgcttagagtgaagaggctgc

SEQ ID NO: 3488377 - DNA, 25 bp, Homo sapien
ttggaggggagagacgctctgcttt

SEQ ID NO: 3488378 - DNA, 25 bp, Homo sapien
tggaggggagagacgctctgctttt

SEQ ID NO: 3488379 - DNA, 25 bp, Homo sapien
gaggggagagacgctctgcttttta

SEQ ID NO: 3488380 - DNA, 25 bp, Homo sapien
ggaggggagagacgctctgcttttt

SEQ ID NO: 3488381 - DNA, 25 bp, Homo sapien
tattcagagcttcccttgcttcttg

SEQ ID NO: 3488382 - DNA, 25 bp, Homo sapien
tcttgacacagcttcgctgagaacc

SEQ ID NO: 3488383 - DNA, 25 bp, Homo sapien
gctagaactcatgcttagagcaagc

SEQ ID NO: 3488384 - DNA, 25 bp, Homo sapien
agaacctggacatccacagccctgg

SEQ ID NO: 3488385 - DNA, 25 bp, Homo sapien
catctccaatggtgtttgccattcc

SEQ ID NO: 3488386 - DNA, 25 bp, Homo sapien
cacagttactgagggatcgagcacc

SEQ ID NO: 3488387 - DNA, 25 bp, Homo sapien
atatccacctcggtcactgccagga

SEQ ID NO: 3488388 - DNA, 25 bp, Homo sapien
atctccaacatgagcaccacctgga

SEQ ID NO: 3488389 - DNA, 25 bp, Homo sapien
caccaccccttgaggttacggccat

SEQ ID NO: 3488390 - DNA, 25 bp, Homo sapien
ggtccttccatgagacatgtataaa

SEQ ID NO: 3488391 - DNA, 25 bp, Homo sapien
gtggtccttccatgagacatgtata

SEQ ID NO: 3488392 - DNA, 25 bp, Homo sapien
tggaggagctgtggataattccacc

SEQ ID NO: 3488393 - DNA, 25 bp, Homo sapien
gggtcatgcacatatgcacggagat

SEQ ID NO: 3488394 - DNA, 25 bp, Homo sapien
ctggggtcatgcacatatgcacgga

SEQ ID NO: 3488395 - DNA, 25 bp, Homo sapien
catgcacatatgcacggagatacat

SEQ ID NO: 3488396 - DNA, 25 bp, Homo sapien
tcatgcacatatgcacggagataca

SEQ ID NO: 3488397 - DNA, 25 bp, Homo sapien
tagtatacgctccattaaaggagct

SEQ ID NO: 3488398 - DNA, 25 bp, Homo sapien
tcaagaaagcccacggtggctttcc

SEQ ID NO: 3488399 - DNA, 25 bp, Homo sapien
ggtcattaggtttatcaactctctg

SEQ ID NO: 3488400 - DNA, 25 bp, Homo sapien
cacggtggctttcctggtcattagg

SEQ ID NO: 3488401 - DNA, 25 bp, Homo sapien
catccattcccaactgtcttccaga

SEQ ID NO: 3488402 - DNA, 25 bp, Homo sapien
tctcacctgcagtaattcttaactc

SEQ ID NO: 3488403 - DNA, 25 bp, Homo sapien
gtaattcttaactcttgctctgaga

SEQ ID NO: 3488404 - DNA, 25 bp, Homo sapien
gcagtaattcttaactcttgctctg

SEQ ID NO: 3488405 - DNA, 25 bp, Homo sapien
taacatatttcagcgtgaatgtctt

SEQ ID NO: 3488406 - DNA, 25 bp, Homo sapien
gcgcatttgaggaaagaccaaccat

SEQ ID NO: 3488407 - DNA, 25 bp, Homo sapien
aattcccttgatagccactttgagg

SEQ ID NO: 3488408 - DNA, 25 bp, Homo sapien
agtgacactgcatgagcgcatttga

SEQ ID NO: 3488409 - DNA, 25 bp, Homo sapien
tcttctatcaaggatggtcatcctt

SEQ ID NO: 3488410 - DNA, 25 bp, Homo sapien
aaccggatcagccaaaacaaccctg

SEQ ID NO: 3488411 - DNA, 25 bp, Homo sapien
aaatcaagaatgagagcttgtttgg

SEQ ID NO: 3488412 - DNA, 25 bp, Homo sapien
tccttttccactaagcatgcagctt

SEQ ID NO: 3488413 - DNA, 25 bp, Homo sapien
ccaattagtttctggcagactctgc

SEQ ID NO: 3488414 - DNA, 25 bp, Homo sapien
cagcctccaattagtttctggcaga

SEQ ID NO: 3488415 - DNA, 25 bp, Homo sapien
tgggctccggatgacattgaaagct

SEQ ID NO: 3488416 - DNA, 25 bp, Homo sapien
aaagctgtcagcctccaattagttt

SEQ ID NO: 3488417 - DNA, 25 bp, Homo sapien
cacaatcgcttcttggagactggtc

SEQ ID NO: 3488418 - DNA, 25 bp, Homo sapien
gaaacaacacggtgccagatgggag

SEQ ID NO: 3488419 - DNA, 25 bp, Homo sapien
gaccaaatctggttgacacaggcag

SEQ ID NO: 3488420 - DNA, 25 bp, Homo sapien
gagagaggccttgtgcgaaatccag

SEQ ID NO: 3488421 - DNA, 25 bp, Homo sapien
atcttccagtctaccacggccagtg

SEQ ID NO: 3488422 - DNA, 25 bp, Homo sapien
gcagcatgtggtcaaggtgagcact

SEQ ID NO: 3488423 - DNA, 25 bp, Homo sapien
gccagtgggtctttcaagtcttgaa

SEQ ID NO: 3488424 - DNA, 25 bp, Homo sapien
aaaggcagagatgcactgaggcttc

SEQ ID NO: 3488425 - DNA, 25 bp, Homo sapien
tcatagcacccacaagactggcctg

SEQ ID NO: 3488426 - DNA, 25 bp, Homo sapien
agagagccagcaaccctcatagcac

SEQ ID NO: 3488427 - DNA, 25 bp, Homo sapien
gtgctccctatatccaccttcccag

SEQ ID NO: 3488428 - DNA, 25 bp, Homo sapien
ttctcacccacaatgccccatttgc

SEQ ID NO: 3488429 - DNA, 25 bp, Homo sapien
tggaaatgttcttccccatcacagt

SEQ ID NO: 3488430 - DNA, 25 bp, Homo sapien
tcttttggaaatgttcttccccatc

SEQ ID NO: 3488431 - DNA, 25 bp, Homo sapien
taacaaacagcatctctgttctgtc

SEQ ID NO: 3488432 - DNA, 25 bp, Homo sapien
ccatcacagtgctccctgtatccac

SEQ ID NO: 3488433 - DNA, 25 bp, Homo sapien
caaagatcctcttcttaatggactc

SEQ ID NO: 3488434 - DNA, 25 bp, Homo sapien
tctcctacagtccatgggttccaag

SEQ ID NO: 3488435 - DNA, 25 bp, Homo sapien
taatggactcatccgcccactctag

SEQ ID NO: 3488436 - DNA, 25 bp, Homo sapien
tttgactgtctaacatattcgccag

SEQ ID NO: 3488437 - DNA, 25 bp, Homo sapien
tggcctctgtatctgagacccctgt

SEQ ID NO: 3488438 - DNA, 25 bp, Homo sapien
caggggagatgacagacacgcatca

SEQ ID NO: 3488439 - DNA, 25 bp, Homo sapien
taatgcaggaggtgcaaggcaactg

SEQ ID NO: 3488440 - DNA, 25 bp, Homo sapien
gacacgcatcactggtgccgctaat

SEQ ID NO: 3488441 - DNA, 25 bp, Homo sapien
catcctcccaggactgtttgtcgct

SEQ ID NO: 3488442 - DNA, 25 bp, Homo sapien
tgatccctttcatccatcccggtgc

SEQ ID NO: 3488443 - DNA, 25 bp, Homo sapien
gactgtttgtcgctaggcatttttg

SEQ ID NO: 3488444 - DNA, 25 bp, Homo sapien
taggcatttttgaagagcaggctcc

SEQ ID NO: 3488445 - DNA, 25 bp, Homo sapien
gagatacatgcactttgcccagggt

SEQ ID NO: 3488446 - DNA, 25 bp, Homo sapien
cattcgttagaggttgggagataca

SEQ ID NO: 3488447 - DNA, 25 bp, Homo sapien
taagataggaactctaggccgggca

SEQ ID NO: 3488448 - DNA, 25 bp, Homo sapien
gacccagctggtatgctttccatga

SEQ ID NO: 3488449 - DNA, 25 bp, Homo sapien
catagaggctgactcatgtcttctc

SEQ ID NO: 3488450 - DNA, 25 bp, Homo sapien
gccacatttccacttttgctactga

SEQ ID NO: 3488451 - DNA, 25 bp, Homo sapien
gaatgtgccacatttccacttttgc

SEQ ID NO: 3488452 - DNA, 25 bp, Homo sapien
tgtgccacatttccacttttgctac

SEQ ID NO: 3488453 - DNA, 25 bp, Homo sapien
ggacatctctcagccagactcagca

SEQ ID NO: 3488454 - DNA, 25 bp, Homo sapien
acactttcaatggagatgcaatggg

SEQ ID NO: 3488455 - DNA, 25 bp, Homo sapien
ctaaacactttcaatggagatgcaa

SEQ ID NO: 3488456 - DNA, 25 bp, Homo sapien
agatgcaatggggacatctctcagc

SEQ ID NO: 3488457 - DNA, 25 bp, Homo sapien
tataccagtcaaggtaacgacggca

SEQ ID NO: 3488458 - DNA, 25 bp, Homo sapien
gctgtgttggctgcagtctaggcaa

SEQ ID NO: 3488459 - DNA, 25 bp, Homo sapien
gtctaggcaataaccaactgtctca

SEQ ID NO: 3488460 - DNA, 25 bp, Homo sapien
cccatgtgggagaattataccagtc

SEQ ID NO: 3488461 - DNA, 25 bp, Homo sapien
gcaaaattgagggatagttctgtct

SEQ ID NO: 3488462 - DNA, 25 bp, Homo sapien
catctgacatctcagggccctcttt

SEQ ID NO: 3488463 - DNA, 25 bp, Homo sapien
taccactcgattccctggcagtaat

SEQ ID NO: 3488464 - DNA, 25 bp, Homo sapien
ccctctttatgtaagctgtcatcca

SEQ ID NO: 3488465 - DNA, 25 bp, Homo sapien
gaattcgtcacccaataacaagctg

SEQ ID NO: 3488466 - DNA, 25 bp, Homo sapien
caagctgtgaagtcgaatagctggc

SEQ ID NO: 3488467 - DNA, 25 bp, Homo sapien
gaaacattagcaaaagcactggctt

SEQ ID NO: 3488468 - DNA, 25 bp, Homo sapien
ctgtgtaggaatgtggtatgccttc

SEQ ID NO: 3488469 - DNA, 25 bp, Homo sapien
tgtgaagctttgtcttgacatccac

SEQ ID NO: 3488470 - DNA, 25 bp, Homo sapien
tcttccctgatgttggatcatcttt

SEQ ID NO: 3488471 - DNA, 25 bp, Homo sapien
tttagcagatgtcttccctgatgtt

SEQ ID NO: 3488472 - DNA, 25 bp, Homo sapien
cttgacatccactttagcagatgtc

SEQ ID NO: 3488473 - DNA, 25 bp, Homo sapien
taggcttaactttgtgacactctct

SEQ ID NO: 3488474 - DNA, 25 bp, Homo sapien
agaaaattgcactaacagctgaatt

SEQ ID NO: 3488475 - DNA, 25 bp, Homo sapien
gaattgatcagctcaaactgagagc

SEQ ID NO: 3488476 - DNA, 25 bp, Homo sapien
tgttctcgatcacaatatacccggt

SEQ ID NO: 3488477 - DNA, 25 bp, Homo sapien
cctatcacaaaatttggagatataa

SEQ ID NO: 3488478 - DNA, 25 bp, Homo sapien
caaaatttggagatataaattacac

SEQ ID NO: 3488479 - DNA, 25 bp, Homo sapien
tttctaattttgtctgctgcttgtc

SEQ ID NO: 3488480 - DNA, 25 bp, Homo sapien
tctaattttgtctgctgcttgtccc

SEQ ID NO: 3488481 - DNA, 25 bp, Homo sapien
ggaggctgacacaaaagcgtcttct

SEQ ID NO: 3488482 - DNA, 25 bp, Homo sapien
tacttaggcagtactgaagcctgcc

SEQ ID NO: 3488483 - DNA, 25 bp, Homo sapien
caggtgccatcacatcatcgtgtga

SEQ ID NO: 3488484 - DNA, 25 bp, Homo sapien
cctaaatttgcctgccgttctggca

SEQ ID NO: 3488485 - DNA, 25 bp, Homo sapien
agcacccgtctgggctctctcagct

SEQ ID NO: 3488486 - DNA, 25 bp, Homo sapien
tcagctctgtgaagttgagtctagt

SEQ ID NO: 3488487 - DNA, 25 bp, Homo sapien
agtagcacccgtctgggctctctca

SEQ ID NO: 3488488 - DNA, 25 bp, Homo sapien
ctcagctctgtgaagttgagtctag

SEQ ID NO: 3488489 - DNA, 25 bp, Homo sapien
actgacatatggatcttctcaactt

SEQ ID NO: 3488490 - DNA, 25 bp, Homo sapien
caacttgctaccaaggagctgcttt

SEQ ID NO: 3488491 - DNA, 25 bp, Homo sapien
catatggatcttctcaacttgctac

SEQ ID NO: 3488492 - DNA, 25 bp, Homo sapien
ctcaacttgctaccaaggagctgct

SEQ ID NO: 3488493 - DNA, 25 bp, Homo sapien
ggtgtgtacttgattcttactcaga

SEQ ID NO: 3488494 - DNA, 25 bp, Homo sapien
gcaaggctagtctgcaaagaaagga

SEQ ID NO: 3488495 - DNA, 25 bp, Homo sapien
agcaccttcttactactggtgtgta

SEQ ID NO: 3488496 - DNA, 25 bp, Homo sapien
ggcagtgtgatacccctgaggaagc

SEQ ID NO: 3488497 - DNA, 25 bp, Homo sapien
cagcttctttccagccgtagctgac

SEQ ID NO: 3488498 - DNA, 25 bp, Homo sapien
agccgtagctgactccactgacttc

SEQ ID NO: 3488499 - DNA, 25 bp, Homo sapien
acttctctcccctttgatgagaggt

SEQ ID NO: 3488500 - DNA, 25 bp, Homo sapien
gatgagaggtacttcttccaaacca

SEQ ID NO: 3488501 - DNA, 25 bp, Homo sapien
actactctgtgttcaattatgtatt

SEQ ID NO: 3488502 - DNA, 25 bp, Homo sapien
tgtactactctgtgttcaattatgt

SEQ ID NO: 3488503 - DNA, 25 bp, Homo sapien
gtactactctgtgttcaattatgta

SEQ ID NO: 3488504 - DNA, 25 bp, Homo sapien
cttgtactactctgtgttcaattat

SEQ ID NO: 3488505 - DNA, 25 bp, Homo sapien
cctagggaaggcaaattgcagttca

SEQ ID NO: 3488506 - DNA, 25 bp, Homo sapien
catgagacagttccatcctagggaa

SEQ ID NO: 3488507 - DNA, 25 bp, Homo sapien
gatcaatgagcatggagaatcatga

SEQ ID NO: 3488508 - DNA, 25 bp, Homo sapien
attaagtgactgtagatcaatgagc

SEQ ID NO: 3488509 - DNA, 25 bp, Homo sapien
ttcaaagacaggttctaaggcttca

SEQ ID NO: 3488510 - DNA, 25 bp, Homo sapien
gctcattcaagtcttcttcaaagac

SEQ ID NO: 3488511 - DNA, 25 bp, Homo sapien
aacacgtgccccttccgtatctgga

SEQ ID NO: 3488512 - DNA, 25 bp, Homo sapien
aaggcttcattaatgcttataaaac

SEQ ID NO: 3488513 - DNA, 25 bp, Homo sapien
catcagggcattcatgttaccttca

SEQ ID NO: 3488514 - DNA, 25 bp, Homo sapien
tgttaccttcagtggctggccatgc

SEQ ID NO: 3488515 - DNA, 25 bp, Homo sapien
aaaccatcagggcattcatgttacc

SEQ ID NO: 3488516 - DNA, 25 bp, Homo sapien
gcattcatgttaccttcagtggctg

SEQ ID NO: 3488517 - DNA, 25 bp, Homo sapien
ctggtggagtccaatgtcgctggct

SEQ ID NO: 3488518 - DNA, 25 bp, Homo sapien
ttcgcacaagcccagctggtggagt

SEQ ID NO: 3488519 - DNA, 25 bp, Homo sapien
tgacggcacagatgcttcgcacaag

SEQ ID NO: 3488520 - DNA, 25 bp, Homo sapien
ttccctgtcgggctcttgacggcac

SEQ ID NO: 3488521 - DNA, 25 bp, Homo sapien
gctgagcatctggaatcatgcagtt

SEQ ID NO: 3488522 - DNA, 25 bp, Homo sapien
tttcatggttaaggctgagctgagc

SEQ ID NO: 3488523 - DNA, 25 bp, Homo sapien
caagaataaggcagttccaggtcag

SEQ ID NO: 3488524 - DNA, 25 bp, Homo sapien
aagtttttcatggttaaggctgagc

SEQ ID NO: 3488525 - DNA, 25 bp, Homo sapien
gtgtcagccacgtagcaagctctcc

SEQ ID NO: 3488526 - DNA, 25 bp, Homo sapien
aaggttcccaccacatatgcagaga

SEQ ID NO: 3488527 - DNA, 25 bp, Homo sapien
gaagaaactcttagtgtgggcgtag

SEQ ID NO: 3488528 - DNA, 25 bp, Homo sapien
tttcagtgcgtagaacagtgtcagc

SEQ ID NO: 3488529 - DNA, 25 bp, Homo sapien
ctttggaccataagtttctcaaaat

SEQ ID NO: 3488530 - DNA, 25 bp, Homo sapien
ttctcaaaatgagaggctgtgcctt

SEQ ID NO: 3488531 - DNA, 25 bp, Homo sapien
tggaccataagtttctcaaaatgag

SEQ ID NO: 3488532 - DNA, 25 bp, Homo sapien
caaaatgagaggctgtgcctttgtt

SEQ ID NO: 3488533 - DNA, 25 bp, Homo sapien
tgccccctgagcatcctcctctttg

SEQ ID NO: 3488534 - DNA, 25 bp, Homo sapien
ccccctgagcatcctcctctttgga

SEQ ID NO: 3488535 - DNA, 25 bp, Homo sapien
ctgagcatcctcctctttggacaca

SEQ ID NO: 3488536 - DNA, 25 bp, Homo sapien
ccctgagcatcctcctctttggaca

SEQ ID NO: 3488537 - DNA, 25 bp, Homo sapien
ttacctcgacctccaagagaagctg

SEQ ID NO: 3488538 - DNA, 25 bp, Homo sapien
gaagctgtccactatgctttcccat

SEQ ID NO: 3488539 - DNA, 25 bp, Homo sapien
cattgtctttgctcatccggttcac

SEQ ID NO: 3488540 - DNA, 25 bp, Homo sapien
cacttgatctccatcaggatgctct

SEQ ID NO: 3488541 - DNA, 25 bp, Homo sapien
cccatgaggagatacagctgactgt

SEQ ID NO: 3488542 - DNA, 25 bp, Homo sapien
aatgtttatgcaaagggcccatgag

SEQ ID NO: 3488543 - DNA, 25 bp, Homo sapien
tgggatcgcacagtgattcagtctc

SEQ ID NO: 3488544 - DNA, 25 bp, Homo sapien
tccaactccactcataatgggatcg

SEQ ID NO: 3488545 - DNA, 25 bp, Homo sapien
gactaggtcctgtgcacgacagata

SEQ ID NO: 3488546 - DNA, 25 bp, Homo sapien
acgacagatactgctccctgccaga

SEQ ID NO: 3488547 - DNA, 25 bp, Homo sapien
tgtttccctgataagtcgggcaggg

SEQ ID NO: 3488548 - DNA, 25 bp, Homo sapien
cctgtttaggttgattagtgctgta

SEQ ID NO: 3488549 - DNA, 25 bp, Homo sapien
gggcaaggcactgcattgggattcc

SEQ ID NO: 3488550 - DNA, 25 bp, Homo sapien
tgctctccagggcaaggcactgcat

SEQ ID NO: 3488551 - DNA, 25 bp, Homo sapien
atctttccaaaagacagttcattgt

SEQ ID NO: 3488552 - DNA, 25 bp, Homo sapien
gacaagagatgaggaggtgctctcc

SEQ ID NO: 3488553 - DNA, 25 bp, Homo sapien
gctgaaagcactggctatggccctg

SEQ ID NO: 3488554 - DNA, 25 bp, Homo sapien
tgagtggtaatgcaggtgcgtgtca

SEQ ID NO: 3488555 - DNA, 25 bp, Homo sapien
cctatgggtactgttgggttcttgc

SEQ ID NO: 3488556 - DNA, 25 bp, Homo sapien
gatggccttgctcaggcaacctatg

SEQ ID NO: 3488557 - DNA, 25 bp, Homo sapien
tagaataagctcagtccaccagtgt

SEQ ID NO: 3488558 - DNA, 25 bp, Homo sapien
ataagctcagtccaccagtgtgtct

SEQ ID NO: 3488559 - DNA, 25 bp, Homo sapien
gctcagtccaccagtgtgtctcact

SEQ ID NO: 3488560 - DNA, 25 bp, Homo sapien
agtccaccagtgtgtctcactactc

SEQ ID NO: 3488561 - DNA, 25 bp, Homo sapien
tccaggtgaagtggaggtgtcgtca

SEQ ID NO: 3488562 - DNA, 25 bp, Homo sapien
atccaggtgaagtggaggtgtcgtc

SEQ ID NO: 3488563 - DNA, 25 bp, Homo sapien
ccaggtgaagtggaggtgtcgtcac

SEQ ID NO: 3488564 - DNA, 25 bp, Homo sapien
ccttctgggtgtgatgttttcatcc

SEQ ID NO: 3488565 - DNA, 25 bp, Homo sapien
gttttcatcctcacgcttgtcacaa

SEQ ID NO: 3488566 - DNA, 25 bp, Homo sapien
tggtatctgggcatgactgtcttag

SEQ ID NO: 3488567 - DNA, 25 bp, Homo sapien
ggtggttgctggaatttcagtgcca

SEQ ID NO: 3488568 - DNA, 25 bp, Homo sapien
tatcatggtcgggaactagaagcag

SEQ ID NO: 3488569 - DNA, 25 bp, Homo sapien
aaatgccctggcaacaacatcttca

SEQ ID NO: 3488570 - DNA, 25 bp, Homo sapien
cagagagtgcttgaatatcatggtc

SEQ ID NO: 3488571 - DNA, 25 bp, Homo sapien
tcttatctcaacaccaaatgccctg

SEQ ID NO: 3488572 - DNA, 25 bp, Homo sapien
tgtgttctgcaggataaatggaaat

SEQ ID NO: 3488573 - DNA, 25 bp, Homo sapien
aaaggggacgatggctgtactcaac

SEQ ID NO: 3488574 - DNA, 25 bp, Homo sapien
ccattgaagttgtgttctgcaggat

SEQ ID NO: 3488575 - DNA, 25 bp, Homo sapien
ctcaacagtggttccattgaagttg

SEQ ID NO: 3488576 - DNA, 25 bp, Homo sapien
tgccttcacctctacaccctttctc

SEQ ID NO: 3488577 - DNA, 25 bp, Homo sapien
actctccctgccttcacctctacac

SEQ ID NO: 3488578 - DNA, 25 bp, Homo sapien
cctgccttcacctctacaccctttc

SEQ ID NO: 3488579 - DNA, 25 bp, Homo sapien
tccctgccttcacctctacaccctt

SEQ ID NO: 3488580 - DNA, 25 bp, Homo sapien
cggacataatgatgagaatacgctc

SEQ ID NO: 3488581 - DNA, 25 bp, Homo sapien
gaatacgctctgcttgttgcaaggg

SEQ ID NO: 3488582 - DNA, 25 bp, Homo sapien
gaaacttcagcttcgccaccactat

SEQ ID NO: 3488583 - DNA, 25 bp, Homo sapien
ttggaagcctgagatgctgcggaca

SEQ ID NO: 3488584 - DNA, 25 bp, Homo sapien
tgtttaatgttgttactgacttgcc

SEQ ID NO: 3488585 - DNA, 25 bp, Homo sapien
ggtaaaggtaaagcctccaagctgc

SEQ ID NO: 3488586 - DNA, 25 bp, Homo sapien
tactgacttgcctgcattggcggta

SEQ ID NO: 3488587 - DNA, 25 bp, Homo sapien
gcattggcggtaaaggtaaagcctc

SEQ ID NO: 3488588 - DNA, 25 bp, Homo sapien
ctatgtgcagctttcccagaagata

SEQ ID NO: 3488589 - DNA, 25 bp, Homo sapien
gtgcagctttcccagaagataaatt

SEQ ID NO: 3488590 - DNA, 25 bp, Homo sapien
agctttcccagaagataaattccac

SEQ ID NO: 3488591 - DNA, 25 bp, Homo sapien
gcagctttcccagaagataaattcc

SEQ ID NO: 3488592 - DNA, 25 bp, Homo sapien
gccagtcacttgcaggatcttttag

SEQ ID NO: 3488593 - DNA, 25 bp, Homo sapien
aacaccttgcgcaggtgtgcgtgcc

SEQ ID NO: 3488594 - DNA, 25 bp, Homo sapien
tgcaggatcttttagaagcctcaag

SEQ ID NO: 3488595 - DNA, 25 bp, Homo sapien
gagggttcttgccaacaccttgcgc

SEQ ID NO: 3488596 - DNA, 25 bp, Homo sapien
tacagggatggcactaataacagaa

SEQ ID NO: 3488597 - DNA, 25 bp, Homo sapien
ttggctaggtatttcagactttcag

SEQ ID NO: 3488598 - DNA, 25 bp, Homo sapien
tgtgactaagtgtcttaactacagg

SEQ ID NO: 3488599 - DNA, 25 bp, Homo sapien
gaaacatcctgattggctaggtatt

SEQ ID NO: 3488600 - DNA, 25 bp, Homo sapien
gcctcttcaaccttgtagataagat

SEQ ID NO: 3488601 - DNA, 25 bp, Homo sapien
attcaggaaattggattttcacact

SEQ ID NO: 3488602 - DNA, 25 bp, Homo sapien
cattcaggaaattggattttcacac

SEQ ID NO: 3488603 - DNA, 25 bp, Homo sapien
cagcatatagtaattcctccggtgc

SEQ ID NO: 3488604 - DNA, 25 bp, Homo sapien
catatagtaattcctccggtgcagg

SEQ ID NO: 3488605 - DNA, 25 bp, Homo sapien
gtaattcctccggtgcaggcttggc

SEQ ID NO: 3488606 - DNA, 25 bp, Homo sapien
tatagtaattcctccggtgcaggct

SEQ ID NO: 3488607 - DNA, 25 bp, Homo sapien
tccacactgaacatcgatgaaacgg

SEQ ID NO: 3488608 - DNA, 25 bp, Homo sapien
gaatcacgattttcttgggtcatca

SEQ ID NO: 3488609 - DNA, 25 bp, Homo sapien
atcattgaaaccaggtcctctgcat

SEQ ID NO: 3488610 - DNA, 25 bp, Homo sapien
tcgatgaaacggacccggctgtcca

SEQ ID NO: 3488611 - DNA, 25 bp, Homo sapien
ccagccagaacctaggcttagaatt

SEQ ID NO: 3488612 - DNA, 25 bp, Homo sapien
ttaaattgatagccagccagaacct

SEQ ID NO: 3488613 - DNA, 25 bp, Homo sapien
gaacctaggcttagaattaagccac

SEQ ID NO: 3488614 - DNA, 25 bp, Homo sapien
ccagaacctaggcttagaattaagc

SEQ ID NO: 3488615 - DNA, 25 bp, Homo sapien
gccaggtccgtgaattctgtgcctc

SEQ ID NO: 3488616 - DNA, 25 bp, Homo sapien
aatcatcaggccaagctgtcttcag

SEQ ID NO: 3488617 - DNA, 25 bp, Homo sapien
cattgattatgtcccctttcttggc

SEQ ID NO: 3488618 - DNA, 25 bp, Homo sapien
cctgaagccaggtccgtgaattctg

SEQ ID NO: 3488619 - DNA, 25 bp, Homo sapien
aggaatgaatgggtggacccattcg

SEQ ID NO: 3488620 - DNA, 25 bp, Homo sapien
gggtggacccattcgtgcattcgtg

SEQ ID NO: 3488621 - DNA, 25 bp, Homo sapien
aatgggtggacccattcgtgcattc

SEQ ID NO: 3488622 - DNA, 25 bp, Homo sapien
aatgaatgggtggacccattcgtgc

SEQ ID NO: 3488623 - DNA, 25 bp, Homo sapien
acagtcccattgatcaccacgggaa

SEQ ID NO: 3488624 - DNA, 25 bp, Homo sapien
gacatcatcgggactggttcctacc

SEQ ID NO: 3488625 - DNA, 25 bp, Homo sapien
tgcaaaaagacagtgttcccatggt

SEQ ID NO: 3488626 - DNA, 25 bp, Homo sapien
ggttcctaccgtgaatacagtccca

SEQ ID NO: 3488627 - DNA, 25 bp, Homo sapien
tccacagatacaactatatttttgg

SEQ ID NO: 3488628 - DNA, 25 bp, Homo sapien
agacataattaacttgtaattttgc

SEQ ID NO: 3488629 - DNA, 25 bp, Homo sapien
tacaaaatataagacataattaact

SEQ ID NO: 3488630 - DNA, 25 bp, Homo sapien
tgcatttacaaaatataagacataa

SEQ ID NO: 3488631 - DNA, 25 bp, Homo sapien
taattaacttgtaattttgcaatca

SEQ ID NO: 3488632 - DNA, 25 bp, Homo sapien
gcatcctctgttggcactgggctct

SEQ ID NO: 3488633 - DNA, 25 bp, Homo sapien
cgcatatcctgatttcctgagaggg

SEQ ID NO: 3488634 - DNA, 25 bp, Homo sapien
gattactgagcctgctacctcagag

SEQ ID NO: 3488635 - DNA, 25 bp, Homo sapien
tctaatattcccaagaaaggctggg

SEQ ID NO: 3488636 - DNA, 25 bp, Homo sapien
gccttgtaccagtttcacctaatat

SEQ ID NO: 3488637 - DNA, 25 bp, Homo sapien
tctgggggtcatgaaagatcttatt

SEQ ID NO: 3488638 - DNA, 25 bp, Homo sapien
caaaatagtgatacattaaaatctg

SEQ ID NO: 3488639 - DNA, 25 bp, Homo sapien
tatttactgcatcttgtagactacc

SEQ ID NO: 3488640 - DNA, 25 bp, Homo sapien
gaatacaacggggatggagctcctt

SEQ ID NO: 3488641 - DNA, 25 bp, Homo sapien
ttgcatgacatgtgactggcccctt

SEQ ID NO: 3488642 - DNA, 25 bp, Homo sapien
tggcccctttgagcatagcgaatac

SEQ ID NO: 3488643 - DNA, 25 bp, Homo sapien
gtgcacagagtctgaccggtttttc

SEQ ID NO: 3488644 - DNA, 25 bp, Homo sapien
gacaggaacgaatgcctcttggttc

SEQ ID NO: 3488645 - DNA, 25 bp, Homo sapien
accctgcggacaggaacgaatgcct

SEQ ID NO: 3488646 - DNA, 25 bp, Homo sapien
ctggcacaccctgcggacaggaacg

SEQ ID NO: 3488647 - DNA, 25 bp, Homo sapien
tgcggacaggaacgaatgcctcttg

SEQ ID NO: 3488648 - DNA, 25 bp, Homo sapien
gcaagatgggaaagatcttcaggta

SEQ ID NO: 3488649 - DNA, 25 bp, Homo sapien
tactacatgcttgctgagagggctc

SEQ ID NO: 3488650 - DNA, 25 bp, Homo sapien
gatagactggaatcttatctcccca

SEQ ID NO: 3488651 - DNA, 25 bp, Homo sapien
tagatgtttgagtctgagcgccaga

SEQ ID NO: 3488652 - DNA, 25 bp, Homo sapien
gataacaagtaattcaacgcacgca

SEQ ID NO: 3488653 - DNA, 25 bp, Homo sapien
tttataaacagctcatcggagcctc

SEQ ID NO: 3488654 - DNA, 25 bp, Homo sapien
caaagagaattgtcgagaacggtca

SEQ ID NO: 3488655 - DNA, 25 bp, Homo sapien
tgttgggaccacataataggaccat

SEQ ID NO: 3488656 - DNA, 25 bp, Homo sapien
attctcttccacgtcatttggtggt

SEQ ID NO: 3488657 - DNA, 25 bp, Homo sapien
gggcaacttcaaatagatatcaact

SEQ ID NO: 3488658 - DNA, 25 bp, Homo sapien
tcttccacgtcatttggtggtagtg

SEQ ID NO: 3488659 - DNA, 25 bp, Homo sapien
ggcatgggcaacttcaaatagatat

SEQ ID NO: 3488660 - DNA, 25 bp, Homo sapien
gggtcactaggtcacgggggcctca

SEQ ID NO: 3488661 - DNA, 25 bp, Homo sapien
tgggtcactaggtcacgggggcctc

SEQ ID NO: 3488662 - DNA, 25 bp, Homo sapien
tatgaagttctaggcgtgcagagac

SEQ ID NO: 3488663 - DNA, 25 bp, Homo sapien
caacaatctcgtaaaacatggtgga

SEQ ID NO: 3488664 - DNA, 25 bp, Homo sapien
tatgaagtgctgtcggatgctaaga

SEQ ID NO: 3488665 - DNA, 25 bp, Homo sapien
taaaaaggcatatcggaaactggca

SEQ ID NO: 3488666 - DNA, 25 bp, Homo sapien
acatgtctgcggctttatatgtgtt

SEQ ID NO: 3488667 - DNA, 25 bp, Homo sapien
tacatttacatgtctgcggctttat

SEQ ID NO: 3488668 - DNA, 25 bp, Homo sapien
catttacatgtctgcggctttatat

SEQ ID NO: 3488669 - DNA, 25 bp, Homo sapien
atgtctgcggctttatatgtgttgc

SEQ ID NO: 3488670 - DNA, 25 bp, Homo sapien
gaagtcaatggtgcaacctccaagt

SEQ ID NO: 3488671 - DNA, 25 bp, Homo sapien
gaggtgcctgcccacaaagagtgag

SEQ ID NO: 3488672 - DNA, 25 bp, Homo sapien
gagaagccccgcaatagaccatttg

SEQ ID NO: 3488673 - DNA, 25 bp, Homo sapien
gaagaaaagatgtcccgctctggag

SEQ ID NO: 3488674 - DNA, 25 bp, Homo sapien
caacgacagctgtttgtgtgcatgt

SEQ ID NO: 3488675 - DNA, 25 bp, Homo sapien
ggttgagggactgccacatgcaaat

SEQ ID NO: 3488676 - DNA, 25 bp, Homo sapien
ttgctccctggaagttagtaatggt

SEQ ID NO: 3488677 - DNA, 25 bp, Homo sapien
ctagaacaacctcaacgacagctgt

SEQ ID NO: 3488678 - DNA, 25 bp, Homo sapien
cagcacagctcttcttccatcgggc

SEQ ID NO: 3488679 - DNA, 25 bp, Homo sapien
agcacagctcttcttccatcgggca

SEQ ID NO: 3488680 - DNA, 25 bp, Homo sapien
actcagtggcattaatgggagtgga

SEQ ID NO: 3488681 - DNA, 25 bp, Homo sapien
cactctatcagaatcaagtatctgt

SEQ ID NO: 3488682 - DNA, 25 bp, Homo sapien
cagaaaagtagtaactcagtggcat

SEQ ID NO: 3488683 - DNA, 25 bp, Homo sapien
ctagggccagaaaagtagtaactca

SEQ ID NO: 3488684 - DNA, 25 bp, Homo sapien
aggccgtgctcaccagctgtcctct

SEQ ID NO: 3488685 - DNA, 25 bp, Homo sapien
tgaagaggccgtgctcaccagctgt

SEQ ID NO: 3488686 - DNA, 25 bp, Homo sapien
ttttcagcatctctcactgaagagg

SEQ ID NO: 3488687 - DNA, 25 bp, Homo sapien
tctctcactgaagaggccgtgctca

SEQ ID NO: 3488688 - DNA, 25 bp, Homo sapien
gtgcctgcctgacacgcaccatgtt

SEQ ID NO: 3488689 - DNA, 25 bp, Homo sapien
ccatgtttgccagttggacggtcca

SEQ ID NO: 3488690 - DNA, 25 bp, Homo sapien
atggagcagtctggtgatgcattcc

SEQ ID NO: 3488691 - DNA, 25 bp, Homo sapien
agagctcagctgtcccgtgcctgcc

SEQ ID NO: 3488692 - DNA, 25 bp, Homo sapien
tcctccaagataagagtacccatgt

SEQ ID NO: 3488693 - DNA, 25 bp, Homo sapien
ttgagttgataagagaagagatgga

SEQ ID NO: 3488694 - DNA, 25 bp, Homo sapien
tagtctgtgccatgccgcccagctg

SEQ ID NO: 3488695 - DNA, 25 bp, Homo sapien
tacccatgtcctccactagtctgtg

SEQ ID NO: 3488696 - DNA, 25 bp, Homo sapien
cttgagaggtaagaagatgaaatct

SEQ ID NO: 3488697 - DNA, 25 bp, Homo sapien
ctctccaaaagcttaaacctgagca

SEQ ID NO: 3488698 - DNA, 25 bp, Homo sapien
caaaagcttaaacctgagcatcccg

SEQ ID NO: 3488699 - DNA, 25 bp, Homo sapien
gaggtaagaagatgaaatctgttgg

SEQ ID NO: 3488700 - DNA, 25 bp, Homo sapien
gatatagggatatccgcagtgtcgg

SEQ ID NO: 3488701 - DNA, 25 bp, Homo sapien
tgtttggtttggtcattgatatagg

SEQ ID NO: 3488702 - DNA, 25 bp, Homo sapien
tcggtgggaacgatggagcaggaac

SEQ ID NO: 3488703 - DNA, 25 bp, Homo sapien
tatccgcagtgtcggtgggaacgat

SEQ ID NO: 3488704 - DNA, 25 bp, Homo sapien
gcatggttcgtatccaagctctcca

SEQ ID NO: 3488705 - DNA, 25 bp, Homo sapien
tcaccaacagggcagataatcaatg

SEQ ID NO: 3488706 - DNA, 25 bp, Homo sapien
catttacaggatggagcatggttcg

SEQ ID NO: 3488707 - DNA, 25 bp, Homo sapien
ggttgttccagcagtctattgccga

SEQ ID NO: 3488708 - DNA, 25 bp, Homo sapien
tggtatgtgaatatccgaggcagcc

SEQ ID NO: 3488709 - DNA, 25 bp, Homo sapien
ctgcgggcccaaagataacaagcca

SEQ ID NO: 3488710 - DNA, 25 bp, Homo sapien
gaggagggaagaatcagagggtaaa

SEQ ID NO: 3488711 - DNA, 25 bp, Homo sapien
atatccgaggcagccagacacgctg

SEQ ID NO: 3488712 - DNA, 25 bp, Homo sapien
tcaggcatttaaccagatcattggg

SEQ ID NO: 3488713 - DNA, 25 bp, Homo sapien
accaatgtcggtccagtgcgttgac

SEQ ID NO: 3488714 - DNA, 25 bp, Homo sapien
ggaacagcatctggacatcaggcat

SEQ ID NO: 3488715 - DNA, 25 bp, Homo sapien
tcactgatcgagagaggacacaggc

SEQ ID NO: 3488716 - DNA, 25 bp, Homo sapien
tagcagagtgtaggttaggccagga

SEQ ID NO: 3488717 - DNA, 25 bp, Homo sapien
tgtggttagcagagtgtaggttagg

SEQ ID NO: 3488718 - DNA, 25 bp, Homo sapien
ctgtgtggttagcagagtgtaggtt

SEQ ID NO: 3488719 - DNA, 25 bp, Homo sapien
gttagcagagtgtaggttaggccag

SEQ ID NO: 3488720 - DNA, 25 bp, Homo sapien
caaattactgcccacacattgaaat

SEQ ID NO: 3488721 - DNA, 25 bp, Homo sapien
ctgccttgcaacacagtcatgaagg

SEQ ID NO: 3488722 - DNA, 25 bp, Homo sapien
tctacaaattactgcccacacattg

SEQ ID NO: 3488723 - DNA, 25 bp, Homo sapien
ctgcaccctggcgatgactgccttg

SEQ ID NO: 3488724 - DNA, 25 bp, Homo sapien
ttctccaggaattccaccttgtggc

SEQ ID NO: 3488725 - DNA, 25 bp, Homo sapien
tgtggcttactttgtaaacggtcat

SEQ ID NO: 3488726 - DNA, 25 bp, Homo sapien
tccaccttgtggcttactttgtaaa

SEQ ID NO: 3488727 - DNA, 25 bp, Homo sapien
ccaggaattccaccttgtggcttac

SEQ ID NO: 3488728 - DNA, 25 bp, Homo sapien
tttacaacaccttcctgtatttcag

SEQ ID NO: 3488729 - DNA, 25 bp, Homo sapien
ctgaagcttcgctcatggaggtctc

SEQ ID NO: 3488730 - DNA, 25 bp, Homo sapien
tcatggaggtctcctggtttacaac

SEQ ID NO: 3488731 - DNA, 25 bp, Homo sapien
ttttttcactgaagcttcgctcatg

SEQ ID NO: 3488732 - DNA, 25 bp, Homo sapien
gaatcagtcgtaacacatttccttc

SEQ ID NO: 3488733 - DNA, 25 bp, Homo sapien
tgtgaatcagtcgtaacacatttcc

SEQ ID NO: 3488734 - DNA, 25 bp, Homo sapien
agccatgtgaatcagtcgtaacaca

SEQ ID NO: 3488735 - DNA, 25 bp, Homo sapien
cccaagccatgtgaatcagtcgtaa

SEQ ID NO: 3488736 - DNA, 25 bp, Homo sapien
caagagggtggtactctgaactggc

SEQ ID NO: 3488737 - DNA, 25 bp, Homo sapien
caggtactgacgaggagactggaac

SEQ ID NO: 3488738 - DNA, 25 bp, Homo sapien
tactgacgaggagactggaacagga

SEQ ID NO: 3488739 - DNA, 25 bp, Homo sapien
actctgaactggcttatcaggaagc

SEQ ID NO: 3488740 - DNA, 25 bp, Homo sapien
tacatctacgctaaacccggcatag

SEQ ID NO: 3488741 - DNA, 25 bp, Homo sapien
gaggagccttttgtctacatctacg

SEQ ID NO: 3488742 - DNA, 25 bp, Homo sapien
tgggagactctgaaacacaaccagt

SEQ ID NO: 3488743 - DNA, 25 bp, Homo sapien
tagccttggtgtattgagagctcca

SEQ ID NO: 3488744 - DNA, 25 bp, Homo sapien
tctggaaaaggcacagtttcatagg

SEQ ID NO: 3488745 - DNA, 25 bp, Homo sapien
tccagccaggttacacacagcagca

SEQ ID NO: 3488746 - DNA, 25 bp, Homo sapien
tgctacatttggatctcaaagccac

SEQ ID NO: 3488747 - DNA, 25 bp, Homo sapien
ggactgggctaatgctacatttgga

SEQ ID NO: 3488748 - DNA, 25 bp, Homo sapien
gttttggaatcaggccttatataag

SEQ ID NO: 3488749 - DNA, 25 bp, Homo sapien
tctactttccagtagactgtgtagg

SEQ ID NO: 3488750 - DNA, 25 bp, Homo sapien
agactgtgtaggattggaatatttc

SEQ ID NO: 3488751 - DNA, 25 bp, Homo sapien
tatttctagttctcctttgtcagct

SEQ ID NO: 3488752 - DNA, 25 bp, Homo sapien
gatggatttggcattcagcatcact

SEQ ID NO: 3488753 - DNA, 25 bp, Homo sapien
catgtttagcattttcttgtgtgtg

SEQ ID NO: 3488754 - DNA, 25 bp, Homo sapien
gcttttccgtatttcagaggctggg

SEQ ID NO: 3488755 - DNA, 25 bp, Homo sapien
gatatgatggattggcactgatgga

SEQ ID NO: 3488756 - DNA, 25 bp, Homo sapien
aagagaagcaatggtcaattatctg

SEQ ID NO: 3488757 - DNA, 25 bp, Homo sapien
gatctggtggctccggaaaagggac

SEQ ID NO: 3488758 - DNA, 25 bp, Homo sapien
aagggacctctaagcctcctgtcct

SEQ ID NO: 3488759 - DNA, 25 bp, Homo sapien
gcaatggtcaattatctgtactgga

SEQ ID NO: 3488760 - DNA, 25 bp, Homo sapien
gaaaatcagttgagcgactactgcc

SEQ ID NO: 3488761 - DNA, 25 bp, Homo sapien
atcaagataattgttggggtgagaa

SEQ ID NO: 3488762 - DNA, 25 bp, Homo sapien
caagataattgttggggtgagaaaa

SEQ ID NO: 3488763 - DNA, 25 bp, Homo sapien
tgttggggtgagaaaatcagttgag

SEQ ID NO: 3488764 - DNA, 25 bp, Homo sapien
tgagcagcaataccagcaacgacat

SEQ ID NO: 3488765 - DNA, 25 bp, Homo sapien
tcccataaacctggggcaaactgta

SEQ ID NO: 3488766 - DNA, 25 bp, Homo sapien
taccagcaacgacatcttggattcg

SEQ ID NO: 3488767 - DNA, 25 bp, Homo sapien
cgttaagagctttgcagatgagctc

SEQ ID NO: 3488768 - DNA, 25 bp, Homo sapien
caagagccatttctcatcacgtgta

SEQ ID NO: 3488769 - DNA, 25 bp, Homo sapien
tcatcacgtgtacaaggaactggag

SEQ ID NO: 3488770 - DNA, 25 bp, Homo sapien
cagaataatctattctctttgagat

SEQ ID NO: 3488771 - DNA, 25 bp, Homo sapien
gagactaagatattccaactcagaa

SEQ ID NO: 3488772 - DNA, 25 bp, Homo sapien
tatgaactttcaacaggctgctgca

SEQ ID NO: 3488773 - DNA, 25 bp, Homo sapien
cctgggtagagatgcagtgcaaaca

SEQ ID NO: 3488774 - DNA, 25 bp, Homo sapien
tacaagcaaacgctgacggaatccg

SEQ ID NO: 3488775 - DNA, 25 bp, Homo sapien
cataaagcactggactctgaggtca

SEQ ID NO: 3488776 - DNA, 25 bp, Homo sapien
actaatctgttgaggttccaagcat

SEQ ID NO: 3488777 - DNA, 25 bp, Homo sapien
cacatccgcgtgtgtcatggtgcac

SEQ ID NO: 3488778 - DNA, 25 bp, Homo sapien
taagaatccatatccaattgcccat

SEQ ID NO: 3488779 - DNA, 25 bp, Homo sapien
catggtgcacacacgctaggtttgg

SEQ ID NO: 3488780 - DNA, 25 bp, Homo sapien
cagacaagggaagatgctcagcaca

SEQ ID NO: 3488781 - DNA, 25 bp, Homo sapien
ttactctccgagcaacctcaagcag

SEQ ID NO: 3488782 - DNA, 25 bp, Homo sapien
catgagccttcaggccaaagtgagc

SEQ ID NO: 3488783 - DNA, 25 bp, Homo sapien
agcttctgttctagttctcattctg

SEQ ID NO: 3488784 - DNA, 25 bp, Homo sapien
ggtggcacagttgaatctacaggtt

SEQ ID NO: 3488785 - DNA, 25 bp, Homo sapien
catcatcacaagtccaaataggtag

SEQ ID NO: 3488786 - DNA, 25 bp, Homo sapien
catatgcttgactcagtgtgctggg

SEQ ID NO: 3488787 - DNA, 25 bp, Homo sapien
tcttagaattcactgtggtggcaca

SEQ ID NO: 3488788 - DNA, 25 bp, Homo sapien
tgcatactgggcaccaagcacttag

SEQ ID NO: 3488789 - DNA, 25 bp, Homo sapien
tctgtcaatagaagagtaggatccc

SEQ ID NO: 3488790 - DNA, 25 bp, Homo sapien
caaaaagataagacctaggcatgct

SEQ ID NO: 3488791 - DNA, 25 bp, Homo sapien
taggatcccatctgtaaatatgcac

SEQ ID NO: 3488792 - DNA, 25 bp, Homo sapien
gggaactcaaagtctggtagtgcag

SEQ ID NO: 3488793 - DNA, 25 bp, Homo sapien
actcaaagtctggtagtgcagagaa

SEQ ID NO: 3488794 - DNA, 25 bp, Homo sapien
gcgtgaggtccaagcaatattttta

SEQ ID NO: 3488795 - DNA, 25 bp, Homo sapien
caggtattcaggtacagcgtgaggt

SEQ ID NO: 3488796 - DNA, 25 bp, Homo sapien
gttgcgaatactcttccagctggca

SEQ ID NO: 3488797 - DNA, 25 bp, Homo sapien
aagtgtgactcttcattgtatatgg

SEQ ID NO: 3488798 - DNA, 25 bp, Homo sapien
gaaaaagtgaaatgcagtgtcttag

SEQ ID NO: 3488799 - DNA, 25 bp, Homo sapien
gggacatcggctttcttcttggaag

SEQ ID NO: 3488800 - DNA, 25 bp, Homo sapien
aaaagatcttttgcttccaacagca

SEQ ID NO: 3488801 - DNA, 25 bp, Homo sapien
atgaaaaagatcttttgcttccaac

SEQ ID NO: 3488802 - DNA, 25 bp, Homo sapien
gcttccaacagcaactggtagaatt

SEQ ID NO: 3488803 - DNA, 25 bp, Homo sapien
tttgcttccaacagcaactggtaga

SEQ ID NO: 3488804 - DNA, 25 bp, Homo sapien
ccaacagtcgttgagacaccttatc

SEQ ID NO: 3488805 - DNA, 25 bp, Homo sapien
tgtctctcaaattccggttaggaaa

SEQ ID NO: 3488806 - DNA, 25 bp, Homo sapien
cgttgagacaccttatctctttcca

SEQ ID NO: 3488807 - DNA, 25 bp, Homo sapien
atgtctctcaaattccggttaggaa

SEQ ID NO: 3488808 - DNA, 25 bp, Homo sapien
agcacttgagtgacacagctttgtg

SEQ ID NO: 3488809 - DNA, 25 bp, Homo sapien
ctttgtttttgtcctatacggtgtg

SEQ ID NO: 3488810 - DNA, 25 bp, Homo sapien
cctatacggtgtgtgggttgttttg

SEQ ID NO: 3488811 - DNA, 25 bp, Homo sapien
cagcacttgagtgacacagctttgt

SEQ ID NO: 3488812 - DNA, 25 bp, Homo sapien
ccttgaccccaaattctgaaccaga

SEQ ID NO: 3488813 - DNA, 25 bp, Homo sapien
cacatttagttgtgggtttgaccct

SEQ ID NO: 3488814 - DNA, 25 bp, Homo sapien
caggttctctttgaggaatctgcat

SEQ ID NO: 3488815 - DNA, 25 bp, Homo sapien
tgaccccaaattctgaaccagaact

SEQ ID NO: 3488816 - DNA, 25 bp, Homo sapien
tgctctccgggcttagtagaaatcc

SEQ ID NO: 3488817 - DNA, 25 bp, Homo sapien
tttgggatccgatacctaccctgat

SEQ ID NO: 3488818 - DNA, 25 bp, Homo sapien
caactggcttctttcggtggctgtc

SEQ ID NO: 3488819 - DNA, 25 bp, Homo sapien
ccaaaggtccagagtgccctgaaca

SEQ ID NO: 3488820 - DNA, 25 bp, Homo sapien
ttctctttcagtcgctcttgctcag

SEQ ID NO: 3488821 - DNA, 25 bp, Homo sapien
tttcagtcgctcttgctcagatgca

SEQ ID NO: 3488822 - DNA, 25 bp, Homo sapien
tcagaaatttaagctcctgccaaga

SEQ ID NO: 3488823 - DNA, 25 bp, Homo sapien
ttaagctcctgccaagaacactttt

SEQ ID NO: 3488824 - DNA, 25 bp, Homo sapien
gcacaaccagaaaagctatgaatgg

SEQ ID NO: 3488825 - DNA, 25 bp, Homo sapien
ttacaaaacagtctgacaaggtgct

SEQ ID NO: 3488826 - DNA, 25 bp, Homo sapien
gggtttccggtcctgttatcagcca

SEQ ID NO: 3488827 - DNA, 25 bp, Homo sapien
tggagcccatgcctgctgagagcct

SEQ ID NO: 3488828 - DNA, 25 bp, Homo sapien
ctgaatcagaaccacctacaggagc

SEQ ID NO: 3488829 - DNA, 25 bp, Homo sapien
gaatcagaaccacctacaggagctt

SEQ ID NO: 3488830 - DNA, 25 bp, Homo sapien
ttcaaaccacacagtccccccattg

SEQ ID NO: 3488831 - DNA, 25 bp, Homo sapien
cacagtccccccattggcaggagag

SEQ ID NO: 3488832 - DNA, 25 bp, Homo sapien
agtttaggcagacccgaggaaagtg

SEQ ID NO: 3488833 - DNA, 25 bp, Homo sapien
aacagtttttcatgagttgggtggt

SEQ ID NO: 3488834 - DNA, 25 bp, Homo sapien
aaaagatcaggggtagtatctcttg

SEQ ID NO: 3488835 - DNA, 25 bp, Homo sapien
gatcaggggtagtatctcttgatga

SEQ ID NO: 3488836 - DNA, 25 bp, Homo sapien
aggtctgagcacactacttttcccc

SEQ ID NO: 3488837 - DNA, 25 bp, Homo sapien
gatcaatagcagtaggtctgagcac

SEQ ID NO: 3488838 - DNA, 25 bp, Homo sapien
tagcagtaggtctgagcacactact

SEQ ID NO: 3488839 - DNA, 25 bp, Homo sapien
gtaggtctgagcacactacttttcc

SEQ ID NO: 3488840 - DNA, 25 bp, Homo sapien
ctctccagctgactgaggttttctg

SEQ ID NO: 3488841 - DNA, 25 bp, Homo sapien
ttttctgtcctggagtatttgagca

SEQ ID NO: 3488842 - DNA, 25 bp, Homo sapien
gttttctgtcctggagtatttgagc

SEQ ID NO: 3488843 - DNA, 25 bp, Homo sapien
cagctgactgaggttttctgtcctg

SEQ ID NO: 3488844 - DNA, 25 bp, Homo sapien
gcagggacaagttcaagttaacgca

SEQ ID NO: 3488845 - DNA, 25 bp, Homo sapien
gagtcttttaggatacccacatggg

SEQ ID NO: 3488846 - DNA, 25 bp, Homo sapien
ggctgctggtttccaattgtaccca

SEQ ID NO: 3488847 - DNA, 25 bp, Homo sapien
ccattatgtttcgatgcagggacaa

SEQ ID NO: 3488848 - DNA, 25 bp, Homo sapien
tgtacttcttgtgaagtcttatgcc

SEQ ID NO: 3488849 - DNA, 25 bp, Homo sapien
ctattatgtacttcttgtgaagtct

SEQ ID NO: 3488850 - DNA, 25 bp, Homo sapien
gctagggatgatttctattatgtac

SEQ ID NO: 3488851 - DNA, 25 bp, Homo sapien
ctttcttctcaatgctagggatgat

SEQ ID NO: 3488852 - DNA, 25 bp, Homo sapien
tagccagagtgggattccccagggc

SEQ ID NO: 3488853 - DNA, 25 bp, Homo sapien
acatagccagagtgggattccccag

SEQ ID NO: 3488854 - DNA, 25 bp, Homo sapien
cagagtgggattccccagggcagaa

SEQ ID NO: 3488855 - DNA, 25 bp, Homo sapien
gccagagtgggattccccagggcag

SEQ ID NO: 3488856 - DNA, 25 bp, Homo sapien
tgttctgtgttcttcatctaccatc

SEQ ID NO: 3488857 - DNA, 25 bp, Homo sapien
gttctgtgttcttcatctaccatcc

SEQ ID NO: 3488858 - DNA, 25 bp, Homo sapien
ttgttctgtgttcttcatctaccat

SEQ ID NO: 3488859 - DNA, 25 bp, Homo sapien
cttgttctgtgttcttcatctacca

SEQ ID NO: 3488860 - DNA, 25 bp, Homo sapien
tatgagccctttaaactatagtggt

SEQ ID NO: 3488861 - DNA, 25 bp, Homo sapien
gatctgaggcatgttggagcataaa

SEQ ID NO: 3488862 - DNA, 25 bp, Homo sapien
gactaaaaggtgtttgtgcatcagc

SEQ ID NO: 3488863 - DNA, 25 bp, Homo sapien
ttttcttactagcaagatctgaggc

SEQ ID NO: 3488864 - DNA, 25 bp, Homo sapien
cacggaactgaatttatagtctttt

SEQ ID NO: 3488865 - DNA, 25 bp, Homo sapien
tacacacggaactgaatttatagtc

SEQ ID NO: 3488866 - DNA, 25 bp, Homo sapien
gagtagtacacacggaactgaattt

SEQ ID NO: 3488867 - DNA, 25 bp, Homo sapien
atcacctgagtagtacacacggaac

SEQ ID NO: 3488868 - DNA, 25 bp, Homo sapien
ggcccacacaaccagcctctaaggt

SEQ ID NO: 3488869 - DNA, 25 bp, Homo sapien
gctcttcgagtgcattcttggccca

SEQ ID NO: 3488870 - DNA, 25 bp, Homo sapien
cacggttcccgtggacaccggcagc

SEQ ID NO: 3488871 - DNA, 25 bp, Homo sapien
tgttcctgctcttcgagtgcattct

SEQ ID NO: 3488872 - DNA, 25 bp, Homo sapien
ccagtcgggactaacttcttgctca

SEQ ID NO: 3488873 - DNA, 25 bp, Homo sapien
caggaagggcatgcagttccctgct

SEQ ID NO: 3488874 - DNA, 25 bp, Homo sapien
ggcttaagcaaatctctcactcgga

SEQ ID NO: 3488875 - DNA, 25 bp, Homo sapien
caaacctgtggtgctgtctggaaga

SEQ ID NO: 3488876 - DNA, 25 bp, Homo sapien
gcatgattctcagtaggttcggaca

SEQ ID NO: 3488877 - DNA, 25 bp, Homo sapien
tactatgtggagacttgaagcacag

SEQ ID NO: 3488878 - DNA, 25 bp, Homo sapien
ttattagtagctgggcatacccagg

SEQ ID NO: 3488879 - DNA, 25 bp, Homo sapien
aaacaaatatgtagccctcgagggc

SEQ ID NO: 3488880 - DNA, 25 bp, Homo sapien
ctttgagattgaagtcttgatggag

SEQ ID NO: 3488881 - DNA, 25 bp, Homo sapien
tttgagattgaagtcttgatggaga

SEQ ID NO: 3488882 - DNA, 25 bp, Homo sapien
cagcacctccattgctgacaggctt

SEQ ID NO: 3488883 - DNA, 25 bp, Homo sapien
tccttgaagagaggcgtcatgaacg

SEQ ID NO: 3488884 - DNA, 25 bp, Homo sapien
aacagtcagcagtcccttggtggtc

SEQ ID NO: 3488885 - DNA, 25 bp, Homo sapien
gatgcaaacattgatccatgcctgg

SEQ ID NO: 3488886 - DNA, 25 bp, Homo sapien
tgggagcccctggtccagaccattg

SEQ ID NO: 3488887 - DNA, 25 bp, Homo sapien
taggcgaatcgtgaaagaactccac

SEQ ID NO: 3488888 - DNA, 25 bp, Homo sapien
ttctggaaataggagctgagggcct

SEQ ID NO: 3488889 - DNA, 25 bp, Homo sapien
cacagactttcagagtgggagcccc

SEQ ID NO: 3488890 - DNA, 25 bp, Homo sapien
agctaccatcacaaaattgttcttt

SEQ ID NO: 3488891 - DNA, 25 bp, Homo sapien
aatgcttcctagaagcattttgctc

SEQ ID NO: 3488892 - DNA, 25 bp, Homo sapien
tcctagaagcattttgctcaagttc

SEQ ID NO: 3488893 - DNA, 25 bp, Homo sapien
tgctgttatctttctccaaatgctt

SEQ ID NO: 3488894 - DNA, 25 bp, Homo sapien
gcttcctagaagcattttgctcaag

SEQ ID NO: 3488895 - DNA, 25 bp, Homo sapien
tcatcaagagttacatgaactttat

SEQ ID NO: 3488896 - DNA, 25 bp, Homo sapien
atcaagagttacatgaactttatca

SEQ ID NO: 3488897 - DNA, 25 bp, Homo sapien
catcaagagttacatgaactttatc

SEQ ID NO: 3488898 - DNA, 25 bp, Homo sapien
ctcatcaagagttacatgaacttta

SEQ ID NO: 3488899 - DNA, 25 bp, Homo sapien
gcgtaatcccgcaatcgaatgtgga

SEQ ID NO: 3488900 - DNA, 25 bp, Homo sapien
tgaagcccacctcttaagcgtaatc

SEQ ID NO: 3488901 - DNA, 25 bp, Homo sapien
aacagtgtaacggtaggtggagtca

SEQ ID NO: 3488902 - DNA, 25 bp, Homo sapien
taaacacctactggagtgcagggca

SEQ ID NO: 3488903 - DNA, 25 bp, Homo sapien
cagataccgatcattgtcacacagt

SEQ ID NO: 3488904 - DNA, 25 bp, Homo sapien
ggtctgacagtctctaaggcaacca

SEQ ID NO: 3488905 - DNA, 25 bp, Homo sapien
taaggcaaccagataccgatcattg

SEQ ID NO: 3488906 - DNA, 25 bp, Homo sapien
cgcagagatgccaggtctgacagtc

SEQ ID NO: 3488907 - DNA, 25 bp, Homo sapien
ctatgctacactcaaccaggccaca

SEQ ID NO: 3488908 - DNA, 25 bp, Homo sapien
tcctccaatagcgacactgtggctc

SEQ ID NO: 3488909 - DNA, 25 bp, Homo sapien
gccacatggggcagtcattggagca

SEQ ID NO: 3488910 - DNA, 25 bp, Homo sapien
gcgacactgtggctctcagtgctgg

SEQ ID NO: 3488911 - DNA, 25 bp, Homo sapien
caggtttctcctccaatagcgacac

SEQ ID NO: 3488912 - DNA, 25 bp, Homo sapien
gactctgcaaagcatgagatactga

SEQ ID NO: 3488913 - DNA, 25 bp, Homo sapien
agggaaaatttcacagggactctgc

SEQ ID NO: 3488914 - DNA, 25 bp, Homo sapien
ctgtggaacttcattagacgctgga

SEQ ID NO: 3488915 - DNA, 25 bp, Homo sapien
gagatactgaaaggcctgctgaggc

SEQ ID NO: 3488916 - DNA, 25 bp, Homo sapien
gagacacagaaagacgccccttcca

SEQ ID NO: 3488917 - DNA, 25 bp, Homo sapien
cctgctctgggaagtcggggaccat

SEQ ID NO: 3488918 - DNA, 25 bp, Homo sapien
agggcctggcctgatagatgaaaaa

SEQ ID NO: 3488919 - DNA, 25 bp, Homo sapien
caggagcaaacttccaggaaacagc

SEQ ID NO: 3488920 - DNA, 25 bp, Homo sapien
aagtacctaagcttccaaccctgag

SEQ ID NO: 3488921 - DNA, 25 bp, Homo sapien
tagtctggctggagctgctaactca

SEQ ID NO: 3488922 - DNA, 25 bp, Homo sapien
cttggccagaaatcacgagtgagga

SEQ ID NO: 3488923 - DNA, 25 bp, Homo sapien
taactcagtgctgctcagagtggct

SEQ ID NO: 3488924 - DNA, 25 bp, Homo sapien
ttctcgatccgaagtggaaccactg

SEQ ID NO: 3488925 - DNA, 25 bp, Homo sapien
gatgaacaggcacgaacttcttgac

SEQ ID NO: 3488926 - DNA, 25 bp, Homo sapien
cagggcccgataagatcaaatagca

SEQ ID NO: 3488927 - DNA, 25 bp, Homo sapien
tgagtctatgacacccgctgctgtt

SEQ ID NO: 3488928 - DNA, 25 bp, Homo sapien
tttttgttggcacacagcacgtcct

SEQ ID NO: 3488929 - DNA, 25 bp, Homo sapien
gttttttgttggcacacagcacgtc

SEQ ID NO: 3488930 - DNA, 25 bp, Homo sapien
tcagtcccgcaacctttctacccca

SEQ ID NO: 3488931 - DNA, 25 bp, Homo sapien
ttgttttttgttggcacacagcacg

SEQ ID NO: 3488932 - DNA, 25 bp, Homo sapien
tgctgggtgttcaggatatgccatt

SEQ ID NO: 3488933 - DNA, 25 bp, Homo sapien
tgttcaggatatgccatttagcaat

SEQ ID NO: 3488934 - DNA, 25 bp, Homo sapien
cctctggtatttttagccccagagt

SEQ ID NO: 3488935 - DNA, 25 bp, Homo sapien
ctggtatttttagccccagagtgct

SEQ ID NO: 3488936 - DNA, 25 bp, Homo sapien
tggtggaagctagttgagtgttcag

SEQ ID NO: 3488937 - DNA, 25 bp, Homo sapien
gtggaagctagttgagtgttcagag

SEQ ID NO: 3488938 - DNA, 25 bp, Homo sapien
gctggtggaagctagttgagtgttc

SEQ ID NO: 3488939 - DNA, 25 bp, Homo sapien
agctggtggaagctagttgagtgtt

SEQ ID NO: 3488940 - DNA, 25 bp, Homo sapien
ttgggataagtcagagcctgcggac

SEQ ID NO: 3488941 - DNA, 25 bp, Homo sapien
cttgcagagtgcagtaaacaggaca

SEQ ID NO: 3488942 - DNA, 25 bp, Homo sapien
gctggactcgggttgttaacaagcc

SEQ ID NO: 3488943 - DNA, 25 bp, Homo sapien
tgcagcccacattgggataagtcag

SEQ ID NO: 3488944 - DNA, 25 bp, Homo sapien
taaatgtatgatagccctggcagtg

SEQ ID NO: 3488945 - DNA, 25 bp, Homo sapien
tccagagaacccaagaggtaatgtg

SEQ ID NO: 3488946 - DNA, 25 bp, Homo sapien
gagactgcaattgtcagcaattcca

SEQ ID NO: 3488947 - DNA, 25 bp, Homo sapien
tgtataccttcaggctccaagctcc

SEQ ID NO: 3488948 - DNA, 25 bp, Homo sapien
gtcatggtcctgagactggcctgct

SEQ ID NO: 3488949 - DNA, 25 bp, Homo sapien
tgggagcttcacagtctggcacagc

SEQ ID NO: 3488950 - DNA, 25 bp, Homo sapien
gcctgctgggagcttcacagtctgg

SEQ ID NO: 3488951 - DNA, 25 bp, Homo sapien
gagcttcacagtctggcacagccgc

SEQ ID NO: 3488952 - DNA, 25 bp, Homo sapien
ttttaccctggggaggtctctcaca

SEQ ID NO: 3488953 - DNA, 25 bp, Homo sapien
ctgtagctcatactcccaacctgct

SEQ ID NO: 3488954 - DNA, 25 bp, Homo sapien
tcatactcccaacctgctcttttta

SEQ ID NO: 3488955 - DNA, 25 bp, Homo sapien
ccctggggaggtctctcacagtcat

SEQ ID NO: 3488956 - DNA, 25 bp, Homo sapien
ctcagattctttccagtgcttaggg

SEQ ID NO: 3488957 - DNA, 25 bp, Homo sapien
ctatctcagattctttccagtgctt

SEQ ID NO: 3488958 - DNA, 25 bp, Homo sapien
aatgaagccacgatagaggctgccc

SEQ ID NO: 3488959 - DNA, 25 bp, Homo sapien
aataaatgaagccacgatagaggct

SEQ ID NO: 3488960 - DNA, 25 bp, Homo sapien
atatggaaatgtgcacattgattcc

SEQ ID NO: 3488961 - DNA, 25 bp, Homo sapien
ctcctttcactgaggtcctgtgcgg

SEQ ID NO: 3488962 - DNA, 25 bp, Homo sapien
tcctgtgcggggagcttgtttcttt

SEQ ID NO: 3488963 - DNA, 25 bp, Homo sapien
gaaagttggggagcggaattcatct

SEQ ID NO: 3488964 - DNA, 25 bp, Homo sapien
tttgttactcccagaggcgaaggcc

SEQ ID NO: 3488965 - DNA, 25 bp, Homo sapien
cagaggacatgtgttgcccttccgg

SEQ ID NO: 3488966 - DNA, 25 bp, Homo sapien
tcattgcacctgaacattcggcacg

SEQ ID NO: 3488967 - DNA, 25 bp, Homo sapien
gagtactccacccatgcagcttgat

SEQ ID NO: 3488968 - DNA, 25 bp, Homo sapien
cctggctataacattgggaaagtaa

SEQ ID NO: 3488969 - DNA, 25 bp, Homo sapien
tgcagttctccctggctataacatt

SEQ ID NO: 3488970 - DNA, 25 bp, Homo sapien
tctagattttctcttggggattctc

SEQ ID NO: 3488971 - DNA, 25 bp, Homo sapien
tataacattgggaaagtaagtaatc

SEQ ID NO: 3488972 - DNA, 25 bp, Homo sapien
tgggcagagtctttgacacagagcc

SEQ ID NO: 3488973 - DNA, 25 bp, Homo sapien
gtttgtccttcattgcaatgctgcc

SEQ ID NO: 3488974 - DNA, 25 bp, Homo sapien
tccttcattgcaatgctgccttctt

SEQ ID NO: 3488975 - DNA, 25 bp, Homo sapien
gagcctaagtggtttatgtttgtcc

SEQ ID NO: 3488976 - DNA, 25 bp, Homo sapien
ttttcaagggagatgccagatttcg

SEQ ID NO: 3488977 - DNA, 25 bp, Homo sapien
tccatgttagtagaagtacaaggtc

SEQ ID NO: 3488978 - DNA, 25 bp, Homo sapien
tacaaggtcttatgggagaaaggct

SEQ ID NO: 3488979 - DNA, 25 bp, Homo sapien
tatctgttgaaggagcggttccatg

SEQ ID NO: 3488980 - DNA, 25 bp, Homo sapien
atgtgctgatgcagacttcttctca

SEQ ID NO: 3488981 - DNA, 25 bp, Homo sapien
tgtgctgatgcagacttcttctcag

SEQ ID NO: 3488982 - DNA, 25 bp, Homo sapien
acttcttctcagccccaaacacagc

SEQ ID NO: 3488983 - DNA, 25 bp, Homo sapien
tcttctcagccccaaacacagccag

SEQ ID NO: 3488984 - DNA, 25 bp, Homo sapien
ttccgcccacttctcatcagcccag

SEQ ID NO: 3488985 - DNA, 25 bp, Homo sapien
tcccttccgcccacttctcatcagc

SEQ ID NO: 3488986 - DNA, 25 bp, Homo sapien
ttgtggggccagtacactcccttcc

SEQ ID NO: 3488987 - DNA, 25 bp, Homo sapien
agtacactcccttccgcccacttct

SEQ ID NO: 3488988 - DNA, 25 bp, Homo sapien
tgtctgctgtcctttgacggtgtga

SEQ ID NO: 3488989 - DNA, 25 bp, Homo sapien
ctgctgtcctttgacggtgtgagga

SEQ ID NO: 3488990 - DNA, 25 bp, Homo sapien
tgacggtgtgaggattgggactctc

SEQ ID NO: 3488991 - DNA, 25 bp, Homo sapien
cggtgtgaggattgggactctctgg

SEQ ID NO: 3488992 - DNA, 25 bp, Homo sapien
caggtcacttttaagtaagcagttt

SEQ ID NO: 3488993 - DNA, 25 bp, Homo sapien
ttggaagctctcaggtcacttttaa

SEQ ID NO: 3488994 - DNA, 25 bp, Homo sapien
gaagctctcaggtcacttttaagta

SEQ ID NO: 3488995 - DNA, 25 bp, Homo sapien
tctcaggtcacttttaagtaagcag

SEQ ID NO: 3488996 - DNA, 25 bp, Homo sapien
gtgatgctggcaagtcgtagtgaaa

SEQ ID NO: 3488997 - DNA, 25 bp, Homo sapien
tagtttgtcacagcacgaccttctg

SEQ ID NO: 3488998 - DNA, 25 bp, Homo sapien
ggcaagtcgtagtgaaatgtaaatc

SEQ ID NO: 3488999 - DNA, 25 bp, Homo sapien
gctcataagctaccttgctgcagaa

SEQ ID NO: 3489000 - DNA, 25 bp, Homo sapien
caagtctataatgccagccatcggc

SEQ ID NO: 3489001 - DNA, 25 bp, Homo sapien
catcggctctggttgtactgtccac

SEQ ID NO: 3489002 - DNA, 25 bp, Homo sapien
gctttgttccggctcccgttgcaag

SEQ ID NO: 3489003 - DNA, 25 bp, Homo sapien
cacttgttaggggtgagaagctcat

SEQ ID NO: 3489004 - DNA, 25 bp, Homo sapien
tgaactgtcacgtagctggctatcc

SEQ ID NO: 3489005 - DNA, 25 bp, Homo sapien
gagccgcaaccaaattccctaagac

SEQ ID NO: 3489006 - DNA, 25 bp, Homo sapien
gaatccggacttctaaggatctgca

SEQ ID NO: 3489007 - DNA, 25 bp, Homo sapien
gtataaacacgatccctggcattca

SEQ ID NO: 3489008 - DNA, 25 bp, Homo sapien
gcagtctccggaaggattttagttg

SEQ ID NO: 3489009 - DNA, 25 bp, Homo sapien
ctgcagtctccggaaggattttagt

SEQ ID NO: 3489010 - DNA, 25 bp, Homo sapien
tgggttctgcagtctccggaaggat

SEQ ID NO: 3489011 - DNA, 25 bp, Homo sapien
gttctgcagtctccggaaggatttt

SEQ ID NO: 3489012 - DNA, 25 bp, Homo sapien
caataccatcagcttgagtgagctt

SEQ ID NO: 3489013 - DNA, 25 bp, Homo sapien
ccaggtatgctgcttctcgtgggca

SEQ ID NO: 3489014 - DNA, 25 bp, Homo sapien
tgtttggagctgtggagcattgacc

SEQ ID NO: 3489015 - DNA, 25 bp, Homo sapien
gcaggtgtcgggtccagccttccct

SEQ ID NO: 3489016 - DNA, 25 bp, Homo sapien
tctgttttcccaatcagcccgagtc

SEQ ID NO: 3489017 - DNA, 25 bp, Homo sapien
catctgttttcccaatcagcccgag

SEQ ID NO: 3489018 - DNA, 25 bp, Homo sapien
tcctcctcccctcttagtgttcttc

SEQ ID NO: 3489019 - DNA, 25 bp, Homo sapien
tgttttcccaatcagcccgagtcct

SEQ ID NO: 3489020 - DNA, 25 bp, Homo sapien
ccatgtggaagtaaaattctcggta

SEQ ID NO: 3489021 - DNA, 25 bp, Homo sapien
ccagggctttcaggctcatttttca

SEQ ID NO: 3489022 - DNA, 25 bp, Homo sapien
taaaattctcggtaaatcaccagga

SEQ ID NO: 3489023 - DNA, 25 bp, Homo sapien
gaaagcccatgtggaagtaaaattc

SEQ ID NO: 3489024 - DNA, 25 bp, Homo sapien
ccttgcagcaattccagaatttatg

SEQ ID NO: 3489025 - DNA, 25 bp, Homo sapien
cttgcagcaattccagaatttatgc

SEQ ID NO: 3489026 - DNA, 25 bp, Homo sapien
gaccttgcagcaattccagaattta

SEQ ID NO: 3489027 - DNA, 25 bp, Homo sapien
tgcagcaattccagaatttatgcat

SEQ ID NO: 3489028 - DNA, 25 bp, Homo sapien
tggaactgtgcaggttccagagcca

SEQ ID NO: 3489029 - DNA, 25 bp, Homo sapien
atctgtggcattcttctctctcttg

SEQ ID NO: 3489030 - DNA, 25 bp, Homo sapien
cttggtaggcaagtttccactgttt

SEQ ID NO: 3489031 - DNA, 25 bp, Homo sapien
aaaactgtcagaacttcctctccat

SEQ ID NO: 3489032 - DNA, 25 bp, Homo sapien
aacaggtgaccaacctgtgagtcag

SEQ ID NO: 3489033 - DNA, 25 bp, Homo sapien
ggaaaactgctgtggcccattgctc

SEQ ID NO: 3489034 - DNA, 25 bp, Homo sapien
tgagcaacctcatgggtgtgctctc

SEQ ID NO: 3489035 - DNA, 25 bp, Homo sapien
acagcccattccaaacaggtgacca

SEQ ID NO: 3489036 - DNA, 25 bp, Homo sapien
tcttgcacaaagtaccattgtatgg

SEQ ID NO: 3489037 - DNA, 25 bp, Homo sapien
tctgaatgatgtccaacagcaacgc

SEQ ID NO: 3489038 - DNA, 25 bp, Homo sapien
aaggcgaaggccgttccggccagct

SEQ ID NO: 3489039 - DNA, 25 bp, Homo sapien
cgtctcctcccgttggcaggcggag

SEQ ID NO: 3489040 - DNA, 25 bp, Homo sapien
tcagaactgaggtagcttagagatg

SEQ ID NO: 3489041 - DNA, 25 bp, Homo sapien
gatgtagcgatgtaagtgtcgatgt

SEQ ID NO: 3489042 - DNA, 25 bp, Homo sapien
ggagagttttttatatactgtagcc

SEQ ID NO: 3489043 - DNA, 25 bp, Homo sapien
taagctgagaagtatagggatgaaa

SEQ ID NO: 3489044 - DNA, 25 bp, Homo sapien
gagtgtccccatactgatgaattgg

SEQ ID NO: 3489045 - DNA, 25 bp, Homo sapien
gaattggagcatccatatggaaagc

SEQ ID NO: 3489046 - DNA, 25 bp, Homo sapien
tagctctgtgattcatgagtgtccc

SEQ ID NO: 3489047 - DNA, 25 bp, Homo sapien
gatcttttggatgcaggtgccttaa

SEQ ID NO: 3489048 - DNA, 25 bp, Homo sapien
gggggaaggatctcgatcttcccat

SEQ ID NO: 3489049 - DNA, 25 bp, Homo sapien
cgggggaaggatctcgatcttccca

SEQ ID NO: 3489050 - DNA, 25 bp, Homo sapien
cattccgtcagagggttcgtcctct

SEQ ID NO: 3489051 - DNA, 25 bp, Homo sapien
gggaattgaaggtcccttctctgca

SEQ ID NO: 3489052 - DNA, 25 bp, Homo sapien
tgcaaaccacgggaattgaaggtcc

SEQ ID NO: 3489053 - DNA, 25 bp, Homo sapien
ctctgggagctggtgcaaaccacgg

SEQ ID NO: 3489054 - DNA, 25 bp, Homo sapien
gcatctacagcctatgactgcttga

SEQ ID NO: 3489055 - DNA, 25 bp, Homo sapien
cgggtcccgtatgctgacatcacag

SEQ ID NO: 3489056 - DNA, 25 bp, Homo sapien
cagggcagggcatctacagcctatg

SEQ ID NO: 3489057 - DNA, 25 bp, Homo sapien
gcctatgactgcttgacatttcagt

SEQ ID NO: 3489058 - DNA, 25 bp, Homo sapien
gagaacttctgatgggcctggatgt

SEQ ID NO: 3489059 - DNA, 25 bp, Homo sapien
ctgtgtagccagtgtgccttccaac

SEQ ID NO: 3489060 - DNA, 25 bp, Homo sapien
agaacttctgatgggcctggatgtg

SEQ ID NO: 3489061 - DNA, 25 bp, Homo sapien
gatctgtgtagccagtgtgccttcc

SEQ ID NO: 3489062 - DNA, 25 bp, Homo sapien
gccactggattcctgatgtgtgaca

SEQ ID NO: 3489063 - DNA, 25 bp, Homo sapien
acactcccgggcagcatcgtgaagg

SEQ ID NO: 3489064 - DNA, 25 bp, Homo sapien
cactggattcctgatgtgtgacact

SEQ ID NO: 3489065 - DNA, 25 bp, Homo sapien
agcatcgtgaagggtgctgttgact

SEQ ID NO: 3489066 - DNA, 25 bp, Homo sapien
agtagaaggaaattcccctgcagcc

SEQ ID NO: 3489067 - DNA, 25 bp, Homo sapien
agaagaacaaagcagtagaaggaaa

SEQ ID NO: 3489068 - DNA, 25 bp, Homo sapien
cagtagaaggaaattcccctgcagc

SEQ ID NO: 3489069 - DNA, 25 bp, Homo sapien
ctgagaagaacaaagcagtagaagg

SEQ ID NO: 3489070 - DNA, 25 bp, Homo sapien
tagcacgttcttcaaatcagacctg

SEQ ID NO: 3489071 - DNA, 25 bp, Homo sapien
tcagagcttgtagcacgttcttcaa

SEQ ID NO: 3489072 - DNA, 25 bp, Homo sapien
caaatcagacctgtcagtgtgtagt

SEQ ID NO: 3489073 - DNA, 25 bp, Homo sapien
gtgtgtagtaagaactgtcctcttc

SEQ ID NO: 3489074 - DNA, 25 bp, Homo sapien
catttctggattcgaatgttctgtt

SEQ ID NO: 3489075 - DNA, 25 bp, Homo sapien
tagcatgaaaggcagattgatacac

SEQ ID NO: 3489076 - DNA, 25 bp, Homo sapien
tcctcctgtggtagcatgaaaggca

SEQ ID NO: 3489077 - DNA, 25 bp, Homo sapien
tgatacacttgtgaacagatgggtc

SEQ ID NO: 3489078 - DNA, 25 bp, Homo sapien
gagggttgacagaaaggggtgatgc

SEQ ID NO: 3489079 - DNA, 25 bp, Homo sapien
tgatgcctgcaggttggagcactca

SEQ ID NO: 3489080 - DNA, 25 bp, Homo sapien
cttcctgtctccctaaggtgacttg

SEQ ID NO: 3489081 - DNA, 25 bp, Homo sapien
tgcaggttggagcactcatcagcac

SEQ ID NO: 3489082 - DNA, 25 bp, Homo sapien
gttggagcactcatcagcaccccat

SEQ ID NO: 3489083 - DNA, 25 bp, Homo sapien
tggccttggcttccgtccagaatta

SEQ ID NO: 3489084 - DNA, 25 bp, Homo sapien
cattctgcacagaggtagcttctga

SEQ ID NO: 3489085 - DNA, 25 bp, Homo sapien
gaaagcctgcctgttagctgagtta

SEQ ID NO: 3489086 - DNA, 25 bp, Homo sapien
caacacagtcctagagaagtagccc

SEQ ID NO: 3489087 - DNA, 25 bp, Homo sapien
cttaccagtgtcctgcttcttgtct

SEQ ID NO: 3489088 - DNA, 25 bp, Homo sapien
cttaaatgttgcctgctcatgctgg

SEQ ID NO: 3489089 - DNA, 25 bp, Homo sapien
tcagatagctagctcctgtggagac

SEQ ID NO: 3489090 - DNA, 25 bp, Homo sapien
gatgcaggacattttagacctagca

SEQ ID NO: 3489091 - DNA, 25 bp, Homo sapien
tatttgtttgtcagggatgcaggac

SEQ ID NO: 3489092 - DNA, 25 bp, Homo sapien
tgctttctgaacatcattaattggg

SEQ ID NO: 3489093 - DNA, 25 bp, Homo sapien
gaagaggcctgtctctgtgtttgtt

SEQ ID NO: 3489094 - DNA, 25 bp, Homo sapien
attgggagtcggttgttgcctcttc

SEQ ID NO: 3489095 - DNA, 25 bp, Homo sapien
tcccgggctaactttgaacaactga

SEQ ID NO: 3489096 - DNA, 25 bp, Homo sapien
atgttggttttccaggaacaaggtg

SEQ ID NO: 3489097 - DNA, 25 bp, Homo sapien
ccaggaacaaggtgggaagttagtg

SEQ ID NO: 3489098 - DNA, 25 bp, Homo sapien
gaagttagtgacaggaacttgaggc

SEQ ID NO: 3489099 - DNA, 25 bp, Homo sapien
tgggaagttagtgacaggaacttga

SEQ ID NO: 3489100 - DNA, 25 bp, Homo sapien
gggatgattcagcagggcccttaga

SEQ ID NO: 3489101 - DNA, 25 bp, Homo sapien
catgtggttcccatgtggctcttgt

SEQ ID NO: 3489102 - DNA, 25 bp, Homo sapien
tgtggctcttgtgaattacactggg

SEQ ID NO: 3489103 - DNA, 25 bp, Homo sapien
cagggcccttagagaagggaataat

SEQ ID NO: 3489104 - DNA, 25 bp, Homo sapien
ggtttagcagtgagcgtaatggttt

SEQ ID NO: 3489105 - DNA, 25 bp, Homo sapien
cgtaatggtttagggagcataagca

SEQ ID NO: 3489106 - DNA, 25 bp, Homo sapien
gctcgtatgataggtttagcagtga

SEQ ID NO: 3489107 - DNA, 25 bp, Homo sapien
ggagtaggctcgtatgataggttta

SEQ ID NO: 3489108 - DNA, 25 bp, Homo sapien
gtgtttggggccattaaagagaagc

SEQ ID NO: 3489109 - DNA, 25 bp, Homo sapien
tgccctgggtccgtgtgggcgagac

SEQ ID NO: 3489110 - DNA, 25 bp, Homo sapien
actgggagaggcgtctgaggctgtc

SEQ ID NO: 3489111 - DNA, 25 bp, Homo sapien
agaggcgtctgaggctgtctgccct

SEQ ID NO: 3489112 - DNA, 25 bp, Homo sapien
caccctcttgggcttgctactggga

SEQ ID NO: 3489113 - DNA, 25 bp, Homo sapien
tccccagaaaatggccatcgcagtt

SEQ ID NO: 3489114 - DNA, 25 bp, Homo sapien
caggaaccatgcacctctggggttt

SEQ ID NO: 3489115 - DNA, 25 bp, Homo sapien
ggttgatttatagccagaatctggc

SEQ ID NO: 3489116 - DNA, 25 bp, Homo sapien
cgcagttctagcaggcttcccctaa

SEQ ID NO: 3489117 - DNA, 25 bp, Homo sapien
agttgcagcggaaggcagctccagt

SEQ ID NO: 3489118 - DNA, 25 bp, Homo sapien
gttgcagcggaaggcagctccagtg

SEQ ID NO: 3489119 - DNA, 25 bp, Homo sapien
tgaaaatatgtgtggatcaatgact

SEQ ID NO: 3489120 - DNA, 25 bp, Homo sapien
cataggtcagcttcatgggaaacag

SEQ ID NO: 3489121 - DNA, 25 bp, Homo sapien
cagggaaaggattattttccatata

SEQ ID NO: 3489122 - DNA, 25 bp, Homo sapien
ttttccatatagagagcagcgtggg

SEQ ID NO: 3489123 - DNA, 25 bp, Homo sapien
tttctgaagccttcgcctatctgca

SEQ ID NO: 3489124 - DNA, 25 bp, Homo sapien
agccttcgcctatctgcaccccctt

SEQ ID NO: 3489125 - DNA, 25 bp, Homo sapien
cttcgcctatctgcacccccttttc

SEQ ID NO: 3489126 - DNA, 25 bp, Homo sapien
ttctgaagccttcgcctatctgcac

SEQ ID NO: 3489127 - DNA, 25 bp, Homo sapien
agatgtctctctggtttgtgtaatg

SEQ ID NO: 3489128 - DNA, 25 bp, Homo sapien
caggagacaaaccagctcgtggtca

SEQ ID NO: 3489129 - DNA, 25 bp, Homo sapien
tgtaggtcaggatttttcaggagag

SEQ ID NO: 3489130 - DNA, 25 bp, Homo sapien
tcgtggtcaacctcccggagcccag

SEQ ID NO: 3489131 - DNA, 25 bp, Homo sapien
gctcatggctgggttctagtttggg

SEQ ID NO: 3489132 - DNA, 25 bp, Homo sapien
agctcatggctgggttctagtttgg

SEQ ID NO: 3489133 - DNA, 25 bp, Homo sapien
ctcatggctgggttctagtttgggg

SEQ ID NO: 3489134 - DNA, 25 bp, Homo sapien
aagctcatggctgggttctagtttg

SEQ ID NO: 3489135 - DNA, 25 bp, Homo sapien
tcaagactcaggagtagataacatg

SEQ ID NO: 3489136 - DNA, 25 bp, Homo sapien
tagctcaaaactcagagattctttg

SEQ ID NO: 3489137 - DNA, 25 bp, Homo sapien
ggagtagataacatgctaggacact

SEQ ID NO: 3489138 - DNA, 25 bp, Homo sapien
catgctaggacacttctggagaggg

SEQ ID NO: 3489139 - DNA, 25 bp, Homo sapien
gcccacactactatcctctttgttt

SEQ ID NO: 3489140 - DNA, 25 bp, Homo sapien
ggctagttggtagagtaagaatttg

SEQ ID NO: 3489141 - DNA, 25 bp, Homo sapien
aaagcccacactactatcctctttg

SEQ ID NO: 3489142 - DNA, 25 bp, Homo sapien
tttgaacctgagtcttattccaaag

SEQ ID NO: 3489143 - DNA, 25 bp, Homo sapien
tgtcgcttggtctgtggattaggcc

SEQ ID NO: 3489144 - DNA, 25 bp, Homo sapien
gagagcactgataaactcccattga

SEQ ID NO: 3489145 - DNA, 25 bp, Homo sapien
agggcatctggttctagtactgaca

SEQ ID NO: 3489146 - DNA, 25 bp, Homo sapien
gaggaatacgtgtctaaactgctgg

SEQ ID NO: 3489147 - DNA, 25 bp, Homo sapien
agtgggtgaaatcctgtagccctgg

SEQ ID NO: 3489148 - DNA, 25 bp, Homo sapien
cttggacagtgggtgaaatcctgta

SEQ ID NO: 3489149 - DNA, 25 bp, Homo sapien
tcttctctcatattattaaaggatg

SEQ ID NO: 3489150 - DNA, 25 bp, Homo sapien
ctcttgccatctgtgctattgccat

SEQ ID NO: 3489151 - DNA, 25 bp, Homo sapien
tgctccacttatctctgcttcttga

SEQ ID NO: 3489152 - DNA, 25 bp, Homo sapien
tccattgttctcagaggacttccct

SEQ ID NO: 3489153 - DNA, 25 bp, Homo sapien
cagaggacttcccttccactacttc

SEQ ID NO: 3489154 - DNA, 25 bp, Homo sapien
tccacttatctctgcttcttgatct

SEQ ID NO: 3489155 - DNA, 25 bp, Homo sapien
ctcctcatctcctccccttctctgt

SEQ ID NO: 3489156 - DNA, 25 bp, Homo sapien
cctccccttctctgtcctcgactta

SEQ ID NO: 3489157 - DNA, 25 bp, Homo sapien
atctcctccccttctctgtcctcga

SEQ ID NO: 3489158 - DNA, 25 bp, Homo sapien
ctcctccccttctctgtcctcgact

SEQ ID NO: 3489159 - DNA, 25 bp, Homo sapien
aataaaagattcaactcgaagttcg

SEQ ID NO: 3489160 - DNA, 25 bp, Homo sapien
actcgaagttcggaaattcctgaag

SEQ ID NO: 3489161 - DNA, 25 bp, Homo sapien
taaaagattcaactcgaagttcgga

SEQ ID NO: 3489162 - DNA, 25 bp, Homo sapien
gattcaactcgaagttcggaaattc

SEQ ID NO: 3489163 - DNA, 25 bp, Homo sapien
caatccagatagatgagatgtgagc

SEQ ID NO: 3489164 - DNA, 25 bp, Homo sapien
cctcatgagtcatgggcaggaccat

SEQ ID NO: 3489165 - DNA, 25 bp, Homo sapien
aggaccatccactacattctgactc

SEQ ID NO: 3489166 - DNA, 25 bp, Homo sapien
tgatgcaagatgtggagtgagcaca

SEQ ID NO: 3489167 - DNA, 25 bp, Homo sapien
caacattgataaggatggcttttca

SEQ ID NO: 3489168 - DNA, 25 bp, Homo sapien
taaggatggcttttcaaaggcgacg

SEQ ID NO: 3489169 - DNA, 25 bp, Homo sapien
caaaggcgacggctaattggcgatg

SEQ ID NO: 3489170 - DNA, 25 bp, Homo sapien
tggcttttcaaaggcgacggctaat

SEQ ID NO: 3489171 - DNA, 25 bp, Homo sapien
tcacttgggatcctactgtatccac

SEQ ID NO: 3489172 - DNA, 25 bp, Homo sapien
tccagttcatacttgaactcaggca

SEQ ID NO: 3489173 - DNA, 25 bp, Homo sapien
caatgacagctttgcttattccgac

SEQ ID NO: 3489174 - DNA, 25 bp, Homo sapien
tcccctaattcccaactgcgattta

SEQ ID NO: 3489175 - DNA, 25 bp, Homo sapien
tctaagccacttaggaagtttagaa

SEQ ID NO: 3489176 - DNA, 25 bp, Homo sapien
ccatttggagtttcccgggcagcct

SEQ ID NO: 3489177 - DNA, 25 bp, Homo sapien
cactgaactttggtgaagcatatgg

SEQ ID NO: 3489178 - DNA, 25 bp, Homo sapien
catatggtcttaagatgatgttcat

SEQ ID NO: 3489179 - DNA, 25 bp, Homo sapien
tgctgagacggacacagccaagctg

SEQ ID NO: 3489180 - DNA, 25 bp, Homo sapien
aggaacatcacgcaacctggctgcc

SEQ ID NO: 3489181 - DNA, 25 bp, Homo sapien
tgtggttcagtctcatcctcaagga

SEQ ID NO: 3489182 - DNA, 25 bp, Homo sapien
ggtgtcagtgacattagagcatctt

SEQ ID NO: 3489183 - DNA, 25 bp, Homo sapien
tcaatggatctgcattcccagggac

SEQ ID NO: 3489184 - DNA, 25 bp, Homo sapien
tcatcaggaataaacagacgcaggg

SEQ ID NO: 3489185 - DNA, 25 bp, Homo sapien
tgccctctggtgagtgggagtctcc

SEQ ID NO: 3489186 - DNA, 25 bp, Homo sapien
cagggcaagatgctgtggcactcca

SEQ ID NO: 3489187 - DNA, 25 bp, Homo sapien
ccataaccaggttttgagtcagcct

SEQ ID NO: 3489188 - DNA, 25 bp, Homo sapien
tcagcctgtttcagcgagtgttggc

SEQ ID NO: 3489189 - DNA, 25 bp, Homo sapien
tactggatagtcttctggccatggc

SEQ ID NO: 3489190 - DNA, 25 bp, Homo sapien
gggcaacttgaaacctgcagatcta

SEQ ID NO: 3489191 - DNA, 25 bp, Homo sapien
cgtgggctgtgcacaagggctgcag

SEQ ID NO: 3489192 - DNA, 25 bp, Homo sapien
cttcaggggccgtgggctgtgcaca

SEQ ID NO: 3489193 - DNA, 25 bp, Homo sapien
gttgagagtcttgctcacctgttgt

SEQ ID NO: 3489194 - DNA, 25 bp, Homo sapien
caaagagaaaacgctttttcttcag

SEQ ID NO: 3489195 - DNA, 25 bp, Homo sapien
ccggatgctttctggttggtgcaaa

SEQ ID NO: 3489196 - DNA, 25 bp, Homo sapien
tagataatgagccagattctctcca

SEQ ID NO: 3489197 - DNA, 25 bp, Homo sapien
ggatgagctgtgatgcaagttgcaa

SEQ ID NO: 3489198 - DNA, 25 bp, Homo sapien
gactgtatcatgttgtgctttggcc

SEQ ID NO: 3489199 - DNA, 25 bp, Homo sapien
ggatttatctatagggtcatcaaga

SEQ ID NO: 3489200 - DNA, 25 bp, Homo sapien
cggcagcaattgctcattggattta

SEQ ID NO: 3489201 - DNA, 25 bp, Homo sapien
tcaagaatgtgactatctgatccca

SEQ ID NO: 3489202 - DNA, 25 bp, Homo sapien
caattaagtaatgtgcacggcagca

SEQ ID NO: 3489203 - DNA, 25 bp, Homo sapien
cagtgaaaggcaaatgggacagtta

SEQ ID NO: 3489204 - DNA, 25 bp, Homo sapien
agtagccagtactcctaaggttcta

SEQ ID NO: 3489205 - DNA, 25 bp, Homo sapien
taaggttctattagggttgtcacag

SEQ ID NO: 3489206 - DNA, 25 bp, Homo sapien
gagtgtatcttagagctgatcccag

SEQ ID NO: 3489207 - DNA, 25 bp, Homo sapien
caacggcattgaatgtttgatgact

SEQ ID NO: 3489208 - DNA, 25 bp, Homo sapien
atgtttgatgactttgtccccgtca

SEQ ID NO: 3489209 - DNA, 25 bp, Homo sapien
agctctgacaacggcattgaatgtt

SEQ ID NO: 3489210 - DNA, 25 bp, Homo sapien
tgtttgatgactttgtccccgtcac

SEQ ID NO: 3489211 - DNA, 25 bp, Homo sapien
tctgaggcactatgcaggtccaagc

SEQ ID NO: 3489212 - DNA, 25 bp, Homo sapien
tgtgctcatctgaggcactatgcag

SEQ ID NO: 3489213 - DNA, 25 bp, Homo sapien
tgcttatactagtagctgacatgct

SEQ ID NO: 3489214 - DNA, 25 bp, Homo sapien
cactatgcaggtccaagctctggtc

SEQ ID NO: 3489215 - DNA, 25 bp, Homo sapien
ttggcctctcatggacgtcccctga

SEQ ID NO: 3489216 - DNA, 25 bp, Homo sapien
tctcatggacgtcccctgacaagaa

SEQ ID NO: 3489217 - DNA, 25 bp, Homo sapien
gtcccctgacaagaactcaaaggcc

SEQ ID NO: 3489218 - DNA, 25 bp, Homo sapien
gctctttggcctctcatggacgtcc

SEQ ID NO: 3489219 - DNA, 25 bp, Homo sapien
ctgggttggagcagctggaggctga

SEQ ID NO: 3489220 - DNA, 25 bp, Homo sapien
tgggttggagcagctggaggctgag

SEQ ID NO: 3489221 - DNA, 25 bp, Homo sapien
atgtgatgtggatacgggtaagtta

SEQ ID NO: 3489222 - DNA, 25 bp, Homo sapien
gaggatgtgatgtggatacgggtaa

SEQ ID NO: 3489223 - DNA, 25 bp, Homo sapien
tggatacgggtaagttagctcaagt

SEQ ID NO: 3489224 - DNA, 25 bp, Homo sapien
atgtggatacgggtaagttagctca

SEQ ID NO: 3489225 - DNA, 25 bp, Homo sapien
ctgcgagagaagttaagaaagttta

SEQ ID NO: 3489226 - DNA, 25 bp, Homo sapien
tgcgagagaagttaagaaagtttac

SEQ ID NO: 3489227 - DNA, 25 bp, Homo sapien
ttacagctttgtcttgagacatttg

SEQ ID NO: 3489228 - DNA, 25 bp, Homo sapien
gaaagtttacagctttgtcttgaga

SEQ ID NO: 3489229 - DNA, 25 bp, Homo sapien
ccgacacgtgtcatggccagaagga

SEQ ID NO: 3489230 - DNA, 25 bp, Homo sapien
cacacgtgtggcatttcctcaaggc

SEQ ID NO: 3489231 - DNA, 25 bp, Homo sapien
aactcccagcgtgtggcttcttgga

SEQ ID NO: 3489232 - DNA, 25 bp, Homo sapien
aagctctttgctgtccgttcatctg

SEQ ID NO: 3489233 - DNA, 25 bp, Homo sapien
gccctgccatgtgattgtcagctgc

SEQ ID NO: 3489234 - DNA, 25 bp, Homo sapien
ttgtcagctgctgaagaatgttaaa

SEQ ID NO: 3489235 - DNA, 25 bp, Homo sapien
gtcagctgctgaagaatgttaaaac

SEQ ID NO: 3489236 - DNA, 25 bp, Homo sapien
cctgccctgccatgtgattgtcagc

SEQ ID NO: 3489237 - DNA, 25 bp, Homo sapien
tatggtccctgcaatgagctgctgc

SEQ ID NO: 3489238 - DNA, 25 bp, Homo sapien
gttctatggtccctgcaatgagctg

SEQ ID NO: 3489239 - DNA, 25 bp, Homo sapien
atggtccctgcaatgagctgctgcc

SEQ ID NO: 3489240 - DNA, 25 bp, Homo sapien
cttagttctatggtccctgcaatga

SEQ ID NO: 3489241 - DNA, 25 bp, Homo sapien
taaaaaattcagtgtgggttgttgc

SEQ ID NO: 3489242 - DNA, 25 bp, Homo sapien
gggttgttgccctactgagctgatt

SEQ ID NO: 3489243 - DNA, 25 bp, Homo sapien
tgttgccctactgagctgattgtgc

SEQ ID NO: 3489244 - DNA, 25 bp, Homo sapien
gttgttgccctactgagctgattgt

SEQ ID NO: 3489245 - DNA, 25 bp, Homo sapien
tttgatgtagagtggttgccgagcc

SEQ ID NO: 3489246 - DNA, 25 bp, Homo sapien
ggatctgtgagctgtttgatgtaga

SEQ ID NO: 3489247 - DNA, 25 bp, Homo sapien
gagccaagctcacaactttattgct

SEQ ID NO: 3489248 - DNA, 25 bp, Homo sapien
aagctcacaactttattgctgccca

SEQ ID NO: 3489249 - DNA, 25 bp, Homo sapien
ttctcattcgttttggtggctagta

SEQ ID NO: 3489250 - DNA, 25 bp, Homo sapien
atttttgcaagctttgctgaacctg

SEQ ID NO: 3489251 - DNA, 25 bp, Homo sapien
cattcgttttggtggctagtattat

SEQ ID NO: 3489252 - DNA, 25 bp, Homo sapien
ttttgcaagctttgctgaacctggt

SEQ ID NO: 3489253 - DNA, 25 bp, Homo sapien
cagggtccccgattttgatcttagc

SEQ ID NO: 3489254 - DNA, 25 bp, Homo sapien
cgcagggtccccgattttgatctta

SEQ ID NO: 3489255 - DNA, 25 bp, Homo sapien
tccccgattttgatcttagccttcc

SEQ ID NO: 3489256 - DNA, 25 bp, Homo sapien
gattttgatcttagccttcctggct

SEQ ID NO: 3489257 - DNA, 25 bp, Homo sapien
cagatgggagcctgggaagagcttg

SEQ ID NO: 3489258 - DNA, 25 bp, Homo sapien
atgccagatgggagcctgggaagag

SEQ ID NO: 3489259 - DNA, 25 bp, Homo sapien
gcctgatgccagatgggagcctggg

SEQ ID NO: 3489260 - DNA, 25 bp, Homo sapien
cctgatgccagatgggagcctggga

SEQ ID NO: 3489261 - DNA, 25 bp, Homo sapien
gctcaaataactcccctctgggaga

SEQ ID NO: 3489262 - DNA, 25 bp, Homo sapien
ttataggcatgtgctctcggcgctg

SEQ ID NO: 3489263 - DNA, 25 bp, Homo sapien
acctgctcatccgtgtgcccagcag

SEQ ID NO: 3489264 - DNA, 25 bp, Homo sapien
tctgggagagtcctcggtgtgaccc

SEQ ID NO: 3489265 - DNA, 25 bp, Homo sapien
tttgctcttccccaactgttgccat

SEQ ID NO: 3489266 - DNA, 25 bp, Homo sapien
tccccaactgttgccattgcagttt

SEQ ID NO: 3489267 - DNA, 25 bp, Homo sapien
cagttttaggaatctacggtcaagc

SEQ ID NO: 3489268 - DNA, 25 bp, Homo sapien
ggtcaagcttttcgtcatcctccac

SEQ ID NO: 3489269 - DNA, 25 bp, Homo sapien
attggtggtgggcagtatgatgata

SEQ ID NO: 3489270 - DNA, 25 bp, Homo sapien
ttggtggtgggcagtatgatgatat

SEQ ID NO: 3489271 - DNA, 25 bp, Homo sapien
cagtatgatgatattcatgatattg

SEQ ID NO: 3489272 - DNA, 25 bp, Homo sapien
tatgatgatattcatgatattgatt

SEQ ID NO: 3489273 - DNA, 25 bp, Homo sapien
gaaggtgaccagcagatttgcttca

SEQ ID NO: 3489274 - DNA, 25 bp, Homo sapien
ggagagcagactggcatgggaaggt

SEQ ID NO: 3489275 - DNA, 25 bp, Homo sapien
aaggtgaccagcagatttgcttcat

SEQ ID NO: 3489276 - DNA, 25 bp, Homo sapien
tcatgctgaagtctggtgcctacac

SEQ ID NO: 3489277 - DNA, 25 bp, Homo sapien
tgcttccgcccgactgtattcctgg

SEQ ID NO: 3489278 - DNA, 25 bp, Homo sapien
tcagggctgagttaacttcccagcg

SEQ ID NO: 3489279 - DNA, 25 bp, Homo sapien
agcttagtctcctggcatgacaggg

SEQ ID NO: 3489280 - DNA, 25 bp, Homo sapien
cagctggatgaaatagagggttgca

SEQ ID NO: 3489281 - DNA, 25 bp, Homo sapien
tgaatcacaggtggccccaatggag

SEQ ID NO: 3489282 - DNA, 25 bp, Homo sapien
caatggagttccatagaggttgtca

SEQ ID NO: 3489283 - DNA, 25 bp, Homo sapien
ggatccacttattgggaacaggttc

SEQ ID NO: 3489284 - DNA, 25 bp, Homo sapien
caacaatatcccgatttttctctcc

SEQ ID NO: 3489285 - DNA, 25 bp, Homo sapien
ttccttctcaacaatatcccgattt

SEQ ID NO: 3489286 - DNA, 25 bp, Homo sapien
gttattcgttatttccttctcaaca

SEQ ID NO: 3489287 - DNA, 25 bp, Homo sapien
gggctggcggcagggttattcgtta

SEQ ID NO: 3489288 - DNA, 25 bp, Homo sapien
tggatctctggcaacagggagttgt

SEQ ID NO: 3489289 - DNA, 25 bp, Homo sapien
tcctctgtggatctctggcaacagg

SEQ ID NO: 3489290 - DNA, 25 bp, Homo sapien
ctgtggatctctggcaacagggagt

SEQ ID NO: 3489291 - DNA, 25 bp, Homo sapien
ctctgtggatctctggcaacaggga

SEQ ID NO: 3489292 - DNA, 25 bp, Homo sapien
tatcaatattccaactgctgtctga

SEQ ID NO: 3489293 - DNA, 25 bp, Homo sapien
tctagaaaccactcggtgttactag

SEQ ID NO: 3489294 - DNA, 25 bp, Homo sapien
gaattattcttacaggacagccacc

SEQ ID NO: 3489295 - DNA, 25 bp, Homo sapien
tatgcgtgcactgaagctttcccct

SEQ ID NO: 3489296 - DNA, 25 bp, Homo sapien
tgtaagacgacgtgtcggggactgt

SEQ ID NO: 3489297 - DNA, 25 bp, Homo sapien
cttgatgtaagacgacgtgtcgggg

SEQ ID NO: 3489298 - DNA, 25 bp, Homo sapien
tgatgtaagacgacgtgtcggggac

SEQ ID NO: 3489299 - DNA, 25 bp, Homo sapien
gatgtaagacgacgtgtcggggact

SEQ ID NO: 3489300 - DNA, 25 bp, Homo sapien
agcactgcggagagtccttcctcct

SEQ ID NO: 3489301 - DNA, 25 bp, Homo sapien
gactcagatggtcctaagctttggg

SEQ ID NO: 3489302 - DNA, 25 bp, Homo sapien
atctgggaaaagtatgcgggtgttt

SEQ ID NO: 3489303 - DNA, 25 bp, Homo sapien
tccgctctcggactgactcagatgg

SEQ ID NO: 3489304 - DNA, 25 bp, Homo sapien
cacagctcccagactgccgtctcct

SEQ ID NO: 3489305 - DNA, 25 bp, Homo sapien
cacgtgcccctctagggctcctcat

SEQ ID NO: 3489306 - DNA, 25 bp, Homo sapien
ctgccgtctcctcgcctccgctttg

SEQ ID NO: 3489307 - DNA, 25 bp, Homo sapien
gctttgtccctgacccgtggcctga

SEQ ID NO: 3489308 - DNA, 25 bp, Homo sapien
tttcgccgccatcaatgcacccctt

SEQ ID NO: 3489309 - DNA, 25 bp, Homo sapien
cccctttgtgcaacaatacaaactt

SEQ ID NO: 3489310 - DNA, 25 bp, Homo sapien
caatacaaactttgtggctgctgaa

SEQ ID NO: 3489311 - DNA, 25 bp, Homo sapien
caaactttgtggctgctgaaaaatc

SEQ ID NO: 3489312 - DNA, 25 bp, Homo sapien
gcctgggcccaatcctcaggctgat

SEQ ID NO: 3489313 - DNA, 25 bp, Homo sapien
ggacaggcggaagacggcatctccc

SEQ ID NO: 3489314 - DNA, 25 bp, Homo sapien
caggctgataagtgaaggagttaga

SEQ ID NO: 3489315 - DNA, 25 bp, Homo sapien
aagacggcatctccctcagaatgca

SEQ ID NO: 3489316 - DNA, 25 bp, Homo sapien
actgtgaacattctggggctagcaa

SEQ ID NO: 3489317 - DNA, 25 bp, Homo sapien
ctgtgaacattctggggctagcaac

SEQ ID NO: 3489318 - DNA, 25 bp, Homo sapien
cactgtgaacattctggggctagca

SEQ ID NO: 3489319 - DNA, 25 bp, Homo sapien
atgcgcttgaatgccggggaatatt

SEQ ID NO: 3489320 - DNA, 25 bp, Homo sapien
ctgcaggcgcgcctgctttgaattt

SEQ ID NO: 3489321 - DNA, 25 bp, Homo sapien
aatgccggggaatatttctgcagga

SEQ ID NO: 3489322 - DNA, 25 bp, Homo sapien
agccaaacaaggcagctcaagccgc

SEQ ID NO: 3489323 - DNA, 25 bp, Homo sapien
tgggcggacctgacgatctgagcct

SEQ ID NO: 3489324 - DNA, 25 bp, Homo sapien
tattttcaaagatgcggaagtcctg

SEQ ID NO: 3489325 - DNA, 25 bp, Homo sapien
gaaacgtgtcttggctcgctcaatg

SEQ ID NO: 3489326 - DNA, 25 bp, Homo sapien
cttgaaactccgcaggatgccaggc

SEQ ID NO: 3489327 - DNA, 25 bp, Homo sapien
ttttcatttggaacgctggtgagac

SEQ ID NO: 3489328 - DNA, 25 bp, Homo sapien
catttggaacgctggtgagacgact

SEQ ID NO: 3489329 - DNA, 25 bp, Homo sapien
aacgctggtgagacgacttgcctcg

SEQ ID NO: 3489330 - DNA, 25 bp, Homo sapien
ttggaacgctggtgagacgacttgc

SEQ ID NO: 3489331 - DNA, 25 bp, Homo sapien
ttgaatgtttgcattgagacaaatt

SEQ ID NO: 3489332 - DNA, 25 bp, Homo sapien
ctggaaagatggtttgatcctggca

SEQ ID NO: 3489333 - DNA, 25 bp, Homo sapien
cattgttttcacgagcagccaaagg

SEQ ID NO: 3489334 - DNA, 25 bp, Homo sapien
gtttgatcctggcagctcacattgt

SEQ ID NO: 3489335 - DNA, 25 bp, Homo sapien
ttgtccacgctctccggaccacgct

SEQ ID NO: 3489336 - DNA, 25 bp, Homo sapien
tccggaccacgctttggacttgctc

SEQ ID NO: 3489337 - DNA, 25 bp, Homo sapien
cacgctctccggaccacgctttgga

SEQ ID NO: 3489338 - DNA, 25 bp, Homo sapien
gctctccggaccacgctttggactt

SEQ ID NO: 3489339 - DNA, 25 bp, Homo sapien
tatataaatatacgcggagatgccc

SEQ ID NO: 3489340 - DNA, 25 bp, Homo sapien
gaaggtggccctcctgactcattca

SEQ ID NO: 3489341 - DNA, 25 bp, Homo sapien
tgcttttcctgaggcggttggccga

SEQ ID NO: 3489342 - DNA, 25 bp, Homo sapien
catgcgctgcgcacacaggatactt

SEQ ID NO: 3489343 - DNA, 25 bp, Homo sapien
tcactcccctgtgcacgtttgttgt

SEQ ID NO: 3489344 - DNA, 25 bp, Homo sapien
cacgtttgttgttgtagcggagcga

SEQ ID NO: 3489345 - DNA, 25 bp, Homo sapien
aagtgacttcactttgcgaatcggg

SEQ ID NO: 3489346 - DNA, 25 bp, Homo sapien
gaaagagacagttaaccggatgaaa

SEQ ID NO: 3489347 - DNA, 25 bp, Homo sapien
attccacacattgacccggttacag

SEQ ID NO: 3489348 - DNA, 25 bp, Homo sapien
cacattgacccggttacagcctgac

SEQ ID NO: 3489349 - DNA, 25 bp, Homo sapien
ttgacccggttacagcctgacctcg

SEQ ID NO: 3489350 - DNA, 25 bp, Homo sapien
ttccacacattgacccggttacagc

SEQ ID NO: 3489351 - DNA, 25 bp, Homo sapien
tgaggtaccaccaattcccataagg

SEQ ID NO: 3489352 - DNA, 25 bp, Homo sapien
tatcttctcgctagatctcctggca

SEQ ID NO: 3489353 - DNA, 25 bp, Homo sapien
cagggtgtagtcttctgcagaggaa

SEQ ID NO: 3489354 - DNA, 25 bp, Homo sapien
gaacatagtttagtccctgcctaac

SEQ ID NO: 3489355 - DNA, 25 bp, Homo sapien
gaccttcgcaatgatgtgtacctga

SEQ ID NO: 3489356 - DNA, 25 bp, Homo sapien
taaaaccacaggaggtgtagcaggc

SEQ ID NO: 3489357 - DNA, 25 bp, Homo sapien
tgatggacacaggattgaccttcgc

SEQ ID NO: 3489358 - DNA, 25 bp, Homo sapien
tctgagactaggttaggtccccacg

SEQ ID NO: 3489359 - DNA, 25 bp, Homo sapien
ctccctgttctgcagttgaggaaac

SEQ ID NO: 3489360 - DNA, 25 bp, Homo sapien
tgagaaggcccacatctttgatgga

SEQ ID NO: 3489361 - DNA, 25 bp, Homo sapien
atagcagtttatgtcggcgccagcc

SEQ ID NO: 3489362 - DNA, 25 bp, Homo sapien
tttattacaacatcacttcgaggta

SEQ ID NO: 3489363 - DNA, 25 bp, Homo sapien
tatcaacctctgtagactctctaga

SEQ ID NO: 3489364 - DNA, 25 bp, Homo sapien
gatcttaaaagccaatcccagttat

SEQ ID NO: 3489365 - DNA, 25 bp, Homo sapien
gtgctgggctcatcagtaactactc

SEQ ID NO: 3489366 - DNA, 25 bp, Homo sapien
taatgaggtaaagggaacagccatt

SEQ ID NO: 3489367 - DNA, 25 bp, Homo sapien
ggtagtagaccacatcttagagcca

SEQ ID NO: 3489368 - DNA, 25 bp, Homo sapien
tgtagcatgacacatttagcagatg

SEQ ID NO: 3489369 - DNA, 25 bp, Homo sapien
gaacatctggaggacttctggatca

SEQ ID NO: 3489370 - DNA, 25 bp, Homo sapien
tagagccaccccttttcaacttcag

SEQ ID NO: 3489371 - DNA, 25 bp, Homo sapien
tcacatggccggaaatggcagagct

SEQ ID NO: 3489372 - DNA, 25 bp, Homo sapien
caaagctccgtaattacagggttca

SEQ ID NO: 3489373 - DNA, 25 bp, Homo sapien
gatttacccagggattggcctcttg

SEQ ID NO: 3489374 - DNA, 25 bp, Homo sapien
gccactgtgggtgtagtgagtccca

SEQ ID NO: 3489375 - DNA, 25 bp, Homo sapien
catctgggctgcattaagaggcaca

SEQ ID NO: 3489376 - DNA, 25 bp, Homo sapien
tctacaccgtgctgagaataggagg

SEQ ID NO: 3489377 - DNA, 25 bp, Homo sapien
tctttcttacaaggagcccggctga

SEQ ID NO: 3489378 - DNA, 25 bp, Homo sapien
tttgtgctatcagatcgggccctgg

SEQ ID NO: 3489379 - DNA, 25 bp, Homo sapien
cctaaataaggcctgctttgacctg

SEQ ID NO: 3489380 - DNA, 25 bp, Homo sapien
tatcatccatactcgattcagtgag

SEQ ID NO: 3489381 - DNA, 25 bp, Homo sapien
gaaccatgcacccatttagatcccg

SEQ ID NO: 3489382 - DNA, 25 bp, Homo sapien
tagatcccgtatcaagacgatgtgt

SEQ ID NO: 3489383 - DNA, 25 bp, Homo sapien
ccggccggccgccttatgtcctgct

SEQ ID NO: 3489384 - DNA, 25 bp, Homo sapien
ttatgatctgaagtggaccggccgg

SEQ ID NO: 3489385 - DNA, 25 bp, Homo sapien
aggtgtgcctcccatgctgggtccc

SEQ ID NO: 3489386 - DNA, 25 bp, Homo sapien
cacttgagcattggggtagttctca

SEQ ID NO: 3489387 - DNA, 25 bp, Homo sapien
tcattgcgcagcaaagggacacaca

SEQ ID NO: 3489388 - DNA, 25 bp, Homo sapien
actggaacgtttgccttgactctgc

SEQ ID NO: 3489389 - DNA, 25 bp, Homo sapien
tgttcaaaaagtgtccaagcgtcaa

SEQ ID NO: 3489390 - DNA, 25 bp, Homo sapien
tactgcaaaacaggagtggctctgg

SEQ ID NO: 3489391 - DNA, 25 bp, Homo sapien
agacaagcacactggctcgctggtg

SEQ ID NO: 3489392 - DNA, 25 bp, Homo sapien
gacctcttgttttgtggtgcaaaag

SEQ ID NO: 3489393 - DNA, 25 bp, Homo sapien
aagggctgctcaatttgttaaccac

SEQ ID NO: 3489394 - DNA, 25 bp, Homo sapien
tgcaaaagttacacgagcagaccgt

SEQ ID NO: 3489395 - DNA, 25 bp, Homo sapien
tatttttcagcacgtggtagcaaag

SEQ ID NO: 3489396 - DNA, 25 bp, Homo sapien
ttgcagcccagataggaggagcatg

SEQ ID NO: 3489397 - DNA, 25 bp, Homo sapien
cattgcacaggtagcagtactctga

SEQ ID NO: 3489398 - DNA, 25 bp, Homo sapien
agcaagccccggtcataatcatgtg

SEQ ID NO: 3489399 - DNA, 25 bp, Homo sapien
tgaactttcagtgggctcattaggg

SEQ ID NO: 3489400 - DNA, 25 bp, Homo sapien
cgtttgaactttcagtgggctcatt

SEQ ID NO: 3489401 - DNA, 25 bp, Homo sapien
tttgaactttcagtgggctcattag

SEQ ID NO: 3489402 - DNA, 25 bp, Homo sapien
ttcagtgggctcattaggggtccag

SEQ ID NO: 3489403 - DNA, 25 bp, Homo sapien
ctgattgctctgcatatatgaatga

SEQ ID NO: 3489404 - DNA, 25 bp, Homo sapien
tacagctcttcggaaaggaaagcaa

SEQ ID NO: 3489405 - DNA, 25 bp, Homo sapien
ctcgtatcacccctttcattggaag

SEQ ID NO: 3489406 - DNA, 25 bp, Homo sapien
tgtgagaattattatcaggtgttct

SEQ ID NO: 3489407 - DNA, 25 bp, Homo sapien
aaacagcatggagccagaggtccag

SEQ ID NO: 3489408 - DNA, 25 bp, Homo sapien
cttggttgtcttgtatttcaaggca

SEQ ID NO: 3489409 - DNA, 25 bp, Homo sapien
gctatgggatattagcaaaaagcag

SEQ ID NO: 3489410 - DNA, 25 bp, Homo sapien
ccaggtagcgggtcttgagtttcag

SEQ ID NO: 3489411 - DNA, 25 bp, Homo sapien
gagagggcttcgggctttgcatcat

SEQ ID NO: 3489412 - DNA, 25 bp, Homo sapien
ggcggtagtggatgaagtcaggtgg

SEQ ID NO: 3489413 - DNA, 25 bp, Homo sapien
ggagagggcttcgggctttgcatca

SEQ ID NO: 3489414 - DNA, 25 bp, Homo sapien
ctcaggcggtagtggatgaagtcag

SEQ ID NO: 3489415 - DNA, 25 bp, Homo sapien
ggtaaagaaactgcgcctgagctag

SEQ ID NO: 3489416 - DNA, 25 bp, Homo sapien
cagagcagaaatgtagccctgggtc

SEQ ID NO: 3489417 - DNA, 25 bp, Homo sapien
gctgggctctgttcacgctatacaa

SEQ ID NO: 3489418 - DNA, 25 bp, Homo sapien
tgggctggacactaataacgacgac

SEQ ID NO: 3489419 - DNA, 25 bp, Homo sapien
tgctgataaacatcgagtttggtgc

SEQ ID NO: 3489420 - DNA, 25 bp, Homo sapien
gtttggtgcttatccgcagcaaaca

SEQ ID NO: 3489421 - DNA, 25 bp, Homo sapien
gcttatccgcagcaaacatgatctt

SEQ ID NO: 3489422 - DNA, 25 bp, Homo sapien
acatcgagtttggtgcttatccgca

SEQ ID NO: 3489423 - DNA, 25 bp, Homo sapien
aatggagcaagtgctattgggccac

SEQ ID NO: 3489424 - DNA, 25 bp, Homo sapien
gggaagagcaagagaaccacgttcc

SEQ ID NO: 3489425 - DNA, 25 bp, Homo sapien
agctcatccccataccttcagtaaa

SEQ ID NO: 3489426 - DNA, 25 bp, Homo sapien
gagaaccacgttcctaagaatggag

SEQ ID NO: 3489427 - DNA, 25 bp, Homo sapien
catgaaccaaacagtctgtcttgtc

SEQ ID NO: 3489428 - DNA, 25 bp, Homo sapien
tccatgcaattaaggccacatctgt

SEQ ID NO: 3489429 - DNA, 25 bp, Homo sapien
tttccatgcaattaaggccacatct

SEQ ID NO: 3489430 - DNA, 25 bp, Homo sapien
gaaccaaacagtctgtcttgtcgat

SEQ ID NO: 3489431 - DNA, 25 bp, Homo sapien
tgccagcctggtctccaactcctga

SEQ ID NO: 3489432 - DNA, 25 bp, Homo sapien
catgagccaccatgcctggctgagt

SEQ ID NO: 3489433 - DNA, 25 bp, Homo sapien
acagggtttcgttatgtttgccagc

SEQ ID NO: 3489434 - DNA, 25 bp, Homo sapien
gggtttcgttatgtttgccagcctg

SEQ ID NO: 3489435 - DNA, 25 bp, Homo sapien
aagttgcccctgcatccggactggc

SEQ ID NO: 3489436 - DNA, 25 bp, Homo sapien
acccattagatctggagtcctctgg

SEQ ID NO: 3489437 - DNA, 25 bp, Homo sapien
ggtcctgaaacacccattagatctg

SEQ ID NO: 3489438 - DNA, 25 bp, Homo sapien
gtccacagtaagttgcccctgcatc

SEQ ID NO: 3489439 - DNA, 25 bp, Homo sapien
agatgtcccaaaccgcctcaaaaat

SEQ ID NO: 3489440 - DNA, 25 bp, Homo sapien
acatgccctgagatgtcccaaaccg

SEQ ID NO: 3489441 - DNA, 25 bp, Homo sapien
tgagatgtcccaaaccgcctcaaaa

SEQ ID NO: 3489442 - DNA, 25 bp, Homo sapien
cctgagatgtcccaaaccgcctcaa

SEQ ID NO: 3489443 - DNA, 25 bp, Homo sapien
taagcctggacagtccagcacaggg

SEQ ID NO: 3489444 - DNA, 25 bp, Homo sapien
ccggcatccatctacaggaaaagta

SEQ ID NO: 3489445 - DNA, 25 bp, Homo sapien
gggctggcctacatcctgcttgact

SEQ ID NO: 3489446 - DNA, 25 bp, Homo sapien
cttgactggagtgctaagcctggac

SEQ ID NO: 3489447 - DNA, 25 bp, Homo sapien
ggaacagttccgctttatgctgttg

SEQ ID NO: 3489448 - DNA, 25 bp, Homo sapien
caggaaatgcttatcccgctcaaaa

SEQ ID NO: 3489449 - DNA, 25 bp, Homo sapien
gtaagctcagataactcagtgttca

SEQ ID NO: 3489450 - DNA, 25 bp, Homo sapien
tatggccactctgtctacgagtaag

SEQ ID NO: 3489451 - DNA, 25 bp, Homo sapien
caatttcctcacgtggcagttgcca

SEQ ID NO: 3489452 - DNA, 25 bp, Homo sapien
caaacaaccacttgaggtcctattc

SEQ ID NO: 3489453 - DNA, 25 bp, Homo sapien
tttaaacatgaagccactgaccact

SEQ ID NO: 3489454 - DNA, 25 bp, Homo sapien
tagaagctatgatcttatccgacaa

SEQ ID NO: 3489455 - DNA, 25 bp, Homo sapien
gggaatggtttcctgatcccagtga

SEQ ID NO: 3489456 - DNA, 25 bp, Homo sapien
ttcctgatcccagtgatggtgccgc

SEQ ID NO: 3489457 - DNA, 25 bp, Homo sapien
tggtttcctgatcccagtgatggtg

SEQ ID NO: 3489458 - DNA, 25 bp, Homo sapien
tgccgcctgaggatgggtgaagatc

SEQ ID NO: 3489459 - DNA, 25 bp, Homo sapien
tctgaaccccacgaagagaacattt

SEQ ID NO: 3489460 - DNA, 25 bp, Homo sapien
ctgaaccccacgaagagaacatttt

SEQ ID NO: 3489461 - DNA, 25 bp, Homo sapien
cattcatctgaaccccacgaagaga

SEQ ID NO: 3489462 - DNA, 25 bp, Homo sapien
gaacattcatctgaaccccacgaag

SEQ ID NO: 3489463 - DNA, 25 bp, Homo sapien
gatttcactaatctgcgtgtccact

SEQ ID NO: 3489464 - DNA, 25 bp, Homo sapien
tttctgagtccaggcctctaggtgc

SEQ ID NO: 3489465 - DNA, 25 bp, Homo sapien
catgggtgtcattccattgcaggct

SEQ ID NO: 3489466 - DNA, 25 bp, Homo sapien
ctctaggtgccatagataaggctct

SEQ ID NO: 3489467 - DNA, 25 bp, Homo sapien
gatctccctagccctaacatctgct

SEQ ID NO: 3489468 - DNA, 25 bp, Homo sapien
aggggatctccctagccctaacatc

SEQ ID NO: 3489469 - DNA, 25 bp, Homo sapien
tctccctagccctaacatctgctgg

SEQ ID NO: 3489470 - DNA, 25 bp, Homo sapien
gggatctccctagccctaacatctg

SEQ ID NO: 3489471 - DNA, 25 bp, Homo sapien
gactttgggcagtggagtggggatg

SEQ ID NO: 3489472 - DNA, 25 bp, Homo sapien
tgggtgaggagggactttgggcagt

SEQ ID NO: 3489473 - DNA, 25 bp, Homo sapien
gaggagggactttgggcagtggagt

SEQ ID NO: 3489474 - DNA, 25 bp, Homo sapien
gagggactttgggcagtggagtggg

SEQ ID NO: 3489475 - DNA, 25 bp, Homo sapien
tcaggactccccgaggcagtcatgt

SEQ ID NO: 3489476 - DNA, 25 bp, Homo sapien
tcaaagagggactggtcgtcgctca

SEQ ID NO: 3489477 - DNA, 25 bp, Homo sapien
gcttgacgttgaccctcactggctg

SEQ ID NO: 3489478 - DNA, 25 bp, Homo sapien
tgccgctccgtacgctgagtcaaag

SEQ ID NO: 3489479 - DNA, 25 bp, Homo sapien
tatgagctggcaagtgggttctgaa

SEQ ID NO: 3489480 - DNA, 25 bp, Homo sapien
gatcagtatcctgaagtgcttgagg

SEQ ID NO: 3489481 - DNA, 25 bp, Homo sapien
cactggaatattcacacaggccctc

SEQ ID NO: 3489482 - DNA, 25 bp, Homo sapien
tgtagccaaagccaggtaaatatcc

SEQ ID NO: 3489483 - DNA, 25 bp, Homo sapien
ctggcgatagctgtgcctaagctgc

SEQ ID NO: 3489484 - DNA, 25 bp, Homo sapien
gggtgagaagatatcagtctttctg

SEQ ID NO: 3489485 - DNA, 25 bp, Homo sapien
gtgctggcgatagctgtgcctaagc

SEQ ID NO: 3489486 - DNA, 25 bp, Homo sapien
tgagcccttagggaatatttgtggg

SEQ ID NO: 3489487 - DNA, 25 bp, Homo sapien
cttgcatttccctctataacctgat

SEQ ID NO: 3489488 - DNA, 25 bp, Homo sapien
gcatttccctctataacctgatatt

SEQ ID NO: 3489489 - DNA, 25 bp, Homo sapien
cttcatgggatgttttcccctatcc

SEQ ID NO: 3489490 - DNA, 25 bp, Homo sapien
ttcttcatgggatgttttcccctat

SEQ ID NO: 3489491 - DNA, 25 bp, Homo sapien
caagggtgtaataactcagcacatc

SEQ ID NO: 3489492 - DNA, 25 bp, Homo sapien
ggccccaagggtgtaataactcagc

SEQ ID NO: 3489493 - DNA, 25 bp, Homo sapien
ccatctcagggcgacagaggccaca

SEQ ID NO: 3489494 - DNA, 25 bp, Homo sapien
gctgccgagggtagggtagcccttg

SEQ ID NO: 3489495 - DNA, 25 bp, Homo sapien
cactgggacaggtgacaagagagcc

SEQ ID NO: 3489496 - DNA, 25 bp, Homo sapien
tgatagcactgggacaggtgacaag

SEQ ID NO: 3489497 - DNA, 25 bp, Homo sapien
ctgggacaggtgacaagagagcctg

SEQ ID NO: 3489498 - DNA, 25 bp, Homo sapien
gggacaggtgacaagagagcctggg

SEQ ID NO: 3489499 - DNA, 25 bp, Homo sapien
cagccagcgcaagccctgcgtgcgg

SEQ ID NO: 3489500 - DNA, 25 bp, Homo sapien
ccacggctgccgctcagggtgggta

SEQ ID NO: 3489501 - DNA, 25 bp, Homo sapien
ggctgccgctcagggtgggtacagg

SEQ ID NO: 3489502 - DNA, 25 bp, Homo sapien
ggctgctctttaatgaggcagctgg

SEQ ID NO: 3489503 - DNA, 25 bp, Homo sapien
ctcgcccgctcgcctgccagtcctc

SEQ ID NO: 3489504 - DNA, 25 bp, Homo sapien
ccctccattcttgcagctcccaagc

SEQ ID NO: 3489505 - DNA, 25 bp, Homo sapien
ctccattcttgcagctcccaagcac

SEQ ID NO: 3489506 - DNA, 25 bp, Homo sapien
gcccgctcgcctgccagtcctccct

SEQ ID NO: 3489507 - DNA, 25 bp, Homo sapien
atcctggttccccacacttgcccag

SEQ ID NO: 3489508 - DNA, 25 bp, Homo sapien
ccagctggacaggtgatcggtttgg

SEQ ID NO: 3489509 - DNA, 25 bp, Homo sapien
cgctcgcccgccagggtgtttctcc

SEQ ID NO: 3489510 - DNA, 25 bp, Homo sapien
aggtgatcggtttggccgctcgccc

SEQ ID NO: 3489511 - DNA, 25 bp, Homo sapien
acggaccacagcgaggccttgagga

SEQ ID NO: 3489512 - DNA, 25 bp, Homo sapien
atcccacaagcagggacggcagtca

SEQ ID NO: 3489513 - DNA, 25 bp, Homo sapien
acggcagtcactaacccaggagaag

SEQ ID NO: 3489514 - DNA, 25 bp, Homo sapien
gcagggccgtaccagatagggaccc

SEQ ID NO: 3489515 - DNA, 25 bp, Homo sapien
gggacgatgactctcctctcgttgg

SEQ ID NO: 3489516 - DNA, 25 bp, Homo sapien
ccatatagctgttgtagttcatggg

SEQ ID NO: 3489517 - DNA, 25 bp, Homo sapien
tttgctaacgctgcagtccaccgga

SEQ ID NO: 3489518 - DNA, 25 bp, Homo sapien
gggccattcttctcgtccatatagc

SEQ ID NO: 3489519 - DNA, 25 bp, Homo sapien
ccaggcagcctggttctcgaattac

SEQ ID NO: 3489520 - DNA, 25 bp, Homo sapien
tccacagggaatagagtatcagata

SEQ ID NO: 3489521 - DNA, 25 bp, Homo sapien
gataaaggtttagatgctccctgcc

SEQ ID NO: 3489522 - DNA, 25 bp, Homo sapien
cctgacaagtgattcacccgtcttg

SEQ ID NO: 3489523 - DNA, 25 bp, Homo sapien
gactgaaggactgaacgatgatttt

SEQ ID NO: 3489524 - DNA, 25 bp, Homo sapien
tggcaccagttctacacgtggcagt

SEQ ID NO: 3489525 - DNA, 25 bp, Homo sapien
ccagccaatggactgaaggactgaa

SEQ ID NO: 3489526 - DNA, 25 bp, Homo sapien
tttgtaaacacccttcttgtgcagg

SEQ ID NO: 3489527 - DNA, 25 bp, Homo sapien
taaagcaatttacgtggtgcctggc

SEQ ID NO: 3489528 - DNA, 25 bp, Homo sapien
tattttcaccaccagcgctataggt

SEQ ID NO: 3489529 - DNA, 25 bp, Homo sapien
gagggtcgacatagcagtctggcca

SEQ ID NO: 3489530 - DNA, 25 bp, Homo sapien
gggagacgatacacctgggctaaac

SEQ ID NO: 3489531 - DNA, 25 bp, Homo sapien
gcagaggagaagacgttgttagcaa

SEQ ID NO: 3489532 - DNA, 25 bp, Homo sapien
gaggagaagacgttgttagcaagga

SEQ ID NO: 3489533 - DNA, 25 bp, Homo sapien
ctgcagaggagaagacgttgttagc

SEQ ID NO: 3489534 - DNA, 25 bp, Homo sapien
cagaggagaagacgttgttagcaag

SEQ ID NO: 3489535 - DNA, 25 bp, Homo sapien
tcaagctgtactcctttatggccca

SEQ ID NO: 3489536 - DNA, 25 bp, Homo sapien
ggatgtgtcgatctccatcaagctg

SEQ ID NO: 3489537 - DNA, 25 bp, Homo sapien
aacagcacttccgtgttgtagaggg

SEQ ID NO: 3489538 - DNA, 25 bp, Homo sapien
ctgaggtaactgaggtgtgacaaca

SEQ ID NO: 3489539 - DNA, 25 bp, Homo sapien
tctgtaggagcccacgtgaccttgg

SEQ ID NO: 3489540 - DNA, 25 bp, Homo sapien
tccctgggttggctccatgccaagc

SEQ ID NO: 3489541 - DNA, 25 bp, Homo sapien
tcacagggtctgtaggagcccacgt

SEQ ID NO: 3489542 - DNA, 25 bp, Homo sapien
ttggcaacactacaggccccacgat

SEQ ID NO: 3489543 - DNA, 25 bp, Homo sapien
ttctccatttctcgtcttacttcct

SEQ ID NO: 3489544 - DNA, 25 bp, Homo sapien
ccatttctcgtcttacttcctttga

SEQ ID NO: 3489545 - DNA, 25 bp, Homo sapien
tctcgtcttacttcctttgacactt

SEQ ID NO: 3489546 - DNA, 25 bp, Homo sapien
tcttacttcctttgacacttcagga

SEQ ID NO: 3489547 - DNA, 25 bp, Homo sapien
cagaacgatggcgagcaaacagagc

SEQ ID NO: 3489548 - DNA, 25 bp, Homo sapien
tctaaggatctgaacttgcgaaggg

SEQ ID NO: 3489549 - DNA, 25 bp, Homo sapien
gcaggtcccagagttgctgtctaag

SEQ ID NO: 3489550 - DNA, 25 bp, Homo sapien
ctgaagggacagtggattccaaaga

SEQ ID NO: 3489551 - DNA, 25 bp, Homo sapien
actttctcgcactagttaccagacg

SEQ ID NO: 3489552 - DNA, 25 bp, Homo sapien
gactcagacatgaggtaattgctcc

SEQ ID NO: 3489553 - DNA, 25 bp, Homo sapien
ttaccagacgcctcggaaaggtgac

SEQ ID NO: 3489554 - DNA, 25 bp, Homo sapien
gctccggagctaacaaatactgcat

SEQ ID NO: 3489555 - DNA, 25 bp, Homo sapien
ttcaatggcagaacaactacttccc

SEQ ID NO: 3489556 - DNA, 25 bp, Homo sapien
tcagtatacaagctggattccacct

SEQ ID NO: 3489557 - DNA, 25 bp, Homo sapien
tgcacagaccactttataatgagct

SEQ ID NO: 3489558 - DNA, 25 bp, Homo sapien
tcttgtggatgtactactgttcgcc

SEQ ID NO: 3489559 - DNA, 25 bp, Homo sapien
tctctttgagattctcctaaggaaa

SEQ ID NO: 3489560 - DNA, 25 bp, Homo sapien
ggtcggtgtgggaggttgtattata

SEQ ID NO: 3489561 - DNA, 25 bp, Homo sapien
ctcaatcgtgaggattggtcggtgt

SEQ ID NO: 3489562 - DNA, 25 bp, Homo sapien
ggttgtattataggccagcagtgaa

SEQ ID NO: 3489563 - DNA, 25 bp, Homo sapien
cttctttgacactcaatcgtgagga

SEQ ID NO: 3489564 - DNA, 25 bp, Homo sapien
ggtaaccaccatgtaccttctggct

SEQ ID NO: 3489565 - DNA, 25 bp, Homo sapien
tatgcaacgattaccaccatccagc

SEQ ID NO: 3489566 - DNA, 25 bp, Homo sapien
tctacaaagttgacagttacctcct

SEQ ID NO: 3489567 - DNA, 25 bp, Homo sapien
tgtgctgtcagaactaagggctggt

SEQ ID NO: 3489568 - DNA, 25 bp, Homo sapien
gattgattgcactgggtcaggctcc

SEQ ID NO: 3489569 - DNA, 25 bp, Homo sapien
tggtcacccctagttgtgcccgtgg

SEQ ID NO: 3489570 - DNA, 25 bp, Homo sapien
aacttgtctctagcggtcccacaga

SEQ ID NO: 3489571 - DNA, 25 bp, Homo sapien
cacattgaagggcaggtgatcacct

SEQ ID NO: 3489572 - DNA, 25 bp, Homo sapien
taaattctggaagtgtactcacccc

SEQ ID NO: 3489573 - DNA, 25 bp, Homo sapien
gagtcccattgagacattgagcagg

SEQ ID NO: 3489574 - DNA, 25 bp, Homo sapien
gacatcacagcggtgggagcacatt

SEQ ID NO: 3489575 - DNA, 25 bp, Homo sapien
tagcaactggcatgaaaagcaacac

SEQ ID NO: 3489576 - DNA, 25 bp, Homo sapien
tgttattgccccaagctcctcttct

SEQ ID NO: 3489577 - DNA, 25 bp, Homo sapien
cagaattcatgttattgccccaagc

SEQ ID NO: 3489578 - DNA, 25 bp, Homo sapien
atgttattgccccaagctcctcttc

SEQ ID NO: 3489579 - DNA, 25 bp, Homo sapien
attcatgttattgccccaagctcct

SEQ ID NO: 3489580 - DNA, 25 bp, Homo sapien
gggaaattggtacgacttagcctca

SEQ ID NO: 3489581 - DNA, 25 bp, Homo sapien
tgatgtctactcaaaaagcagggaa

SEQ ID NO: 3489582 - DNA, 25 bp, Homo sapien
gcttatgggaccagtgcatgtctga

SEQ ID NO: 3489583 - DNA, 25 bp, Homo sapien
cctcatcagggacagaagataacct

SEQ ID NO: 3489584 - DNA, 25 bp, Homo sapien
gcatcactgatggtactgaggctgt

SEQ ID NO: 3489585 - DNA, 25 bp, Homo sapien
caagcagttcctggtagaactcgca

SEQ ID NO: 3489586 - DNA, 25 bp, Homo sapien
gaaatgcagtgagtaggacccagct

SEQ ID NO: 3489587 - DNA, 25 bp, Homo sapien
gaactcgcattccaatgggagagac

SEQ ID NO: 3489588 - DNA, 25 bp, Homo sapien
tcttactgatcgtttgtgcccctcc

SEQ ID NO: 3489589 - DNA, 25 bp, Homo sapien
actgatcgtttgtgcccctccaagg

SEQ ID NO: 3489590 - DNA, 25 bp, Homo sapien
tggggccgttgctctgtattcttac

SEQ ID NO: 3489591 - DNA, 25 bp, Homo sapien
tgtattcttactgatcgtttgtgcc

SEQ ID NO: 3489592 - DNA, 25 bp, Homo sapien
acttcattcacaggactattagggt

SEQ ID NO: 3489593 - DNA, 25 bp, Homo sapien
gatagaccctctttgagagaaataa

SEQ ID NO: 3489594 - DNA, 25 bp, Homo sapien
gtatattgtttaaaccctccatcag

SEQ ID NO: 3489595 - DNA, 25 bp, Homo sapien
catatgtggtatattgtttaaaccc

SEQ ID NO: 3489596 - DNA, 25 bp, Homo sapien
tgaaatgtcacacaagccagaaatg

SEQ ID NO: 3489597 - DNA, 25 bp, Homo sapien
aaaaacacatgcctagaaaccaagc

SEQ ID NO: 3489598 - DNA, 25 bp, Homo sapien
agtgggttgggctactggattcctc

SEQ ID NO: 3489599 - DNA, 25 bp, Homo sapien
gagctgggtctcgacttggcaaaat

SEQ ID NO: 3489600 - DNA, 25 bp, Homo sapien
taggcgactgctggtcgggcccagg

SEQ ID NO: 3489601 - DNA, 25 bp, Homo sapien
ttggctaggcgactgctggtcgggc

SEQ ID NO: 3489602 - DNA, 25 bp, Homo sapien
cagggttggctaggcgactgctggt

SEQ ID NO: 3489603 - DNA, 25 bp, Homo sapien
gctaggcgactgctggtcgggccca

SEQ ID NO: 3489604 - DNA, 25 bp, Homo sapien
tatcttttgccgtgcactttggtca

SEQ ID NO: 3489605 - DNA, 25 bp, Homo sapien
tacttgtacatggacgactcggtcg

SEQ ID NO: 3489606 - DNA, 25 bp, Homo sapien
ctgggcaatgccgtggaagtcaaat

SEQ ID NO: 3489607 - DNA, 25 bp, Homo sapien
tatcatagtaataacggagggcccg

SEQ ID NO: 3489608 - DNA, 25 bp, Homo sapien
aagtgacaggcatggaggatggatg

SEQ ID NO: 3489609 - DNA, 25 bp, Homo sapien
tgtgatgcggctccaaagaagctgg

SEQ ID NO: 3489610 - DNA, 25 bp, Homo sapien
gaggtccagtattgtgatgcggctc

SEQ ID NO: 3489611 - DNA, 25 bp, Homo sapien
ctagtagtagctgcctaagtgtgaa

SEQ ID NO: 3489612 - DNA, 25 bp, Homo sapien
ttgagtccaaagcatccagtaagtg

SEQ ID NO: 3489613 - DNA, 25 bp, Homo sapien
ccagtaagtgtgcaggatgggcttc

SEQ ID NO: 3489614 - DNA, 25 bp, Homo sapien
ttcaaactggcatactggcccatgg

SEQ ID NO: 3489615 - DNA, 25 bp, Homo sapien
tgaaccccgtgtattgacaagaaac

SEQ ID NO: 3489616 - DNA, 25 bp, Homo sapien
tttccatcaaattccagttgggtga

SEQ ID NO: 3489617 - DNA, 25 bp, Homo sapien
aaattagattataagcttcccacct

SEQ ID NO: 3489618 - DNA, 25 bp, Homo sapien
ctggccttacaatcaatgttccagt

SEQ ID NO: 3489619 - DNA, 25 bp, Homo sapien
aacttcactggccttacaatcaatg

SEQ ID NO: 3489620 - DNA, 25 bp, Homo sapien
tactgtccactgagagggattctgc

SEQ ID NO: 3489621 - DNA, 25 bp, Homo sapien
tgatggtctgacaagcgcacagcac

SEQ ID NO: 3489622 - DNA, 25 bp, Homo sapien
taaaactgcttttgtgaccgaggtc

SEQ ID NO: 3489623 - DNA, 25 bp, Homo sapien
aatgcccttggcgtcttaaacacac

SEQ ID NO: 3489624 - DNA, 25 bp, Homo sapien
ttttcagctataggcatattatgct

SEQ ID NO: 3489625 - DNA, 25 bp, Homo sapien
tttgctttctcataagtcagtgact

SEQ ID NO: 3489626 - DNA, 25 bp, Homo sapien
tcagctataggcatattatgctttt

SEQ ID NO: 3489627 - DNA, 25 bp, Homo sapien
ccttttcagctataggcatattatg

SEQ ID NO: 3489628 - DNA, 25 bp, Homo sapien
cttctttgacagttgtcagcttaac

SEQ ID NO: 3489629 - DNA, 25 bp, Homo sapien
gcttatatagagcaggaaaatccct

SEQ ID NO: 3489630 - DNA, 25 bp, Homo sapien
taaaaaagtcaacaattacctgcaa

SEQ ID NO: 3489631 - DNA, 25 bp, Homo sapien
tactgttacacgcatttccaaagca

SEQ ID NO: 3489632 - DNA, 25 bp, Homo sapien
gtaggtacattcgaaaaattcttga

SEQ ID NO: 3489633 - DNA, 25 bp, Homo sapien
aattcttgatagtgcaagaagtaaa

SEQ ID NO: 3489634 - DNA, 25 bp, Homo sapien
actgcagtaggtacattcgaaaaat

SEQ ID NO: 3489635 - DNA, 25 bp, Homo sapien
tagtgcaagaagtaaataggaaagt

SEQ ID NO: 3489636 - DNA, 25 bp, Homo sapien
gctgtgagtctaattccttgcaaat

SEQ ID NO: 3489637 - DNA, 25 bp, Homo sapien
taagctacctaacagtgaaggaact

SEQ ID NO: 3489638 - DNA, 25 bp, Homo sapien
gacatgttgtctagaaggtacttag

SEQ ID NO: 3489639 - DNA, 25 bp, Homo sapien
tctagggttaccaatgctgtgagtc

SEQ ID NO: 3489640 - DNA, 25 bp, Homo sapien
tttaaggcaacaggtttacatgatg

SEQ ID NO: 3489641 - DNA, 25 bp, Homo sapien
agccatgcttaagggttgcttcccc

SEQ ID NO: 3489642 - DNA, 25 bp, Homo sapien
ctgagggccttctggacacaagctc

SEQ ID NO: 3489643 - DNA, 25 bp, Homo sapien
cagacagccatgcttaagggttgct

SEQ ID NO: 3489644 - DNA, 25 bp, Homo sapien
tcccatccaacattgctgtgaaagc

SEQ ID NO: 3489645 - DNA, 25 bp, Homo sapien
atcccatccaacattgctgtgaaag

SEQ ID NO: 3489646 - DNA, 25 bp, Homo sapien
tttatttgcaacatcctgcagcttg

SEQ ID NO: 3489647 - DNA, 25 bp, Homo sapien
ccatccaacattgctgtgaaagcac

SEQ ID NO: 3489648 - DNA, 25 bp, Homo sapien
tccggctcccgcgggatgccgccca

SEQ ID NO: 3489649 - DNA, 25 bp, Homo sapien
cacgagcaccctcgaggggaaggtc

SEQ ID NO: 3489650 - DNA, 25 bp, Homo sapien
cccacgagcaccctcgaggggaagg

SEQ ID NO: 3489651 - DNA, 25 bp, Homo sapien
ggatgccgcccacgagcaccctcga

SEQ ID NO: 3489652 - DNA, 25 bp, Homo sapien
gtggaatcggctcaggccagctggc

SEQ ID NO: 3489653 - DNA, 25 bp, Homo sapien
gagttttgccaatactctatgtcca

SEQ ID NO: 3489654 - DNA, 25 bp, Homo sapien
gaacacaagcgtgggcagtaaggct

SEQ ID NO: 3489655 - DNA, 25 bp, Homo sapien
tttcccctcggagaacacaagcgtg

SEQ ID NO: 3489656 - DNA, 25 bp, Homo sapien
ctagtgtgaggcaccgaggagagag

SEQ ID NO: 3489657 - DNA, 25 bp, Homo sapien
gaggcaccgaggagagagagcttct

SEQ ID NO: 3489658 - DNA, 25 bp, Homo sapien
tagtgtgaggcaccgaggagagaga

SEQ ID NO: 3489659 - DNA, 25 bp, Homo sapien
tgtgaggcaccgaggagagagagct

SEQ ID NO: 3489660 - DNA, 25 bp, Homo sapien
ctctttgcagggtgactctagggct

SEQ ID NO: 3489661 - DNA, 25 bp, Homo sapien
gagcctgagagatggtggccttttc

SEQ ID NO: 3489662 - DNA, 25 bp, Homo sapien
ttgcagtagttgctgggatcttgct

SEQ ID NO: 3489663 - DNA, 25 bp, Homo sapien
tgctgggatcttgctccagaggccc

SEQ ID NO: 3489664 - DNA, 25 bp, Homo sapien
catgagctctaggtcatccaccagg

SEQ ID NO: 3489665 - DNA, 25 bp, Homo sapien
tgcaggttctaggaaaaggcagtct

SEQ ID NO: 3489666 - DNA, 25 bp, Homo sapien
cctggcgagtgctgaacgaacatct

SEQ ID NO: 3489667 - DNA, 25 bp, Homo sapien
caccaggtcagtatacggaagtatc

SEQ ID NO: 3489668 - DNA, 25 bp, Homo sapien
attccccagggccatcgcacacttc

SEQ ID NO: 3489669 - DNA, 25 bp, Homo sapien
atcctctgagcagattccccagggc

SEQ ID NO: 3489670 - DNA, 25 bp, Homo sapien
agggccatcgcacacttccctgaaa

SEQ ID NO: 3489671 - DNA, 25 bp, Homo sapien
catcctctgagcagattccccaggg

SEQ ID NO: 3489672 - DNA, 25 bp, Homo sapien
caggggcagggaataaaggttatcg

SEQ ID NO: 3489673 - DNA, 25 bp, Homo sapien
ttcctctttctgtccggcaagggct

SEQ ID NO: 3489674 - DNA, 25 bp, Homo sapien
ttctgtccggcaagggctgtttgtc

SEQ ID NO: 3489675 - DNA, 25 bp, Homo sapien
gctgtttgtcattggggagataaaa

SEQ ID NO: 3489676 - DNA, 25 bp, Homo sapien
tatgggtcctcaacaggatgcttct

SEQ ID NO: 3489677 - DNA, 25 bp, Homo sapien
tggaccttccagaagaactccctgg

SEQ ID NO: 3489678 - DNA, 25 bp, Homo sapien
actccctgggcggattgcagagacg

SEQ ID NO: 3489679 - DNA, 25 bp, Homo sapien
cagagacggttgaggaagtgtcttc

SEQ ID NO: 3489680 - DNA, 25 bp, Homo sapien
ttggaacttctttcagctcccccat

SEQ ID NO: 3489681 - DNA, 25 bp, Homo sapien
gaggatgggctctgaagctagcata

SEQ ID NO: 3489682 - DNA, 25 bp, Homo sapien
tatggcccatttcgctccaggaggt

SEQ ID NO: 3489683 - DNA, 25 bp, Homo sapien
agtgacccctgattaaactgccatg

SEQ ID NO: 3489684 - DNA, 25 bp, Homo sapien
agatcttctgttgcgcactgggagg

SEQ ID NO: 3489685 - DNA, 25 bp, Homo sapien
gcattttcttgtttcctctgtgctt

SEQ ID NO: 3489686 - DNA, 25 bp, Homo sapien
tttcttgtttcctctgtgcttgcat

SEQ ID NO: 3489687 - DNA, 25 bp, Homo sapien
tctgagcagcttccttcagcatttt

SEQ ID NO: 3489688 - DNA, 25 bp, Homo sapien
ctggcctccacttttctgagcagct

SEQ ID NO: 3489689 - DNA, 25 bp, Homo sapien
cacaggcgggctaatttccaaatgc

SEQ ID NO: 3489690 - DNA, 25 bp, Homo sapien
cagaaaagcgcctcgggcggaagct

SEQ ID NO: 3489691 - DNA, 25 bp, Homo sapien
tggcggcaccagagtttctgtcttt

SEQ ID NO: 3489692 - DNA, 25 bp, Homo sapien
tgacacagtgaatgccacccatatt

SEQ ID NO: 3489693 - DNA, 25 bp, Homo sapien
tttccatgcattgaaggcttcctgg

SEQ ID NO: 3489694 - DNA, 25 bp, Homo sapien
gatgccagtgatgactattgtcttt

SEQ ID NO: 3489695 - DNA, 25 bp, Homo sapien
ggtgccctctcagtggaattgcttc

SEQ ID NO: 3489696 - DNA, 25 bp, Homo sapien
ctccccttggctccataatttaaga

SEQ ID NO: 3489697 - DNA, 25 bp, Homo sapien
tttgatctgctggttgtacctggat

SEQ ID NO: 3489698 - DNA, 25 bp, Homo sapien
gatctgctggttgtacctggattat

SEQ ID NO: 3489699 - DNA, 25 bp, Homo sapien
tgtacctggattattagttgcgagc

SEQ ID NO: 3489700 - DNA, 25 bp, Homo sapien
attattagttgcgagctgcacgctg

SEQ ID NO: 3489701 - DNA, 25 bp, Homo sapien
ggtggcatcctttcaattgtagcaa

SEQ ID NO: 3489702 - DNA, 25 bp, Homo sapien
tctttaaggtagaggatcaaggtgc

SEQ ID NO: 3489703 - DNA, 25 bp, Homo sapien
gtaacacaacctctgccaagccgtt

SEQ ID NO: 3489704 - DNA, 25 bp, Homo sapien
gcaagaccttgcctagtaacacaac

SEQ ID NO: 3489705 - DNA, 25 bp, Homo sapien
gaatttctccgtgaagacagtggta

SEQ ID NO: 3489706 - DNA, 25 bp, Homo sapien
ggtaagataactccctggtctgcat

SEQ ID NO: 3489707 - DNA, 25 bp, Homo sapien
aaggactgagagtgcatcccgctgg

SEQ ID NO: 3489708 - DNA, 25 bp, Homo sapien
tgtaggattccatcagggcaaacgc

SEQ ID NO: 3489709 - DNA, 25 bp, Homo sapien
caggagcccctgtgtctgggatttc

SEQ ID NO: 3489710 - DNA, 25 bp, Homo sapien
tgttcacagctcaaccaagttaggg

SEQ ID NO: 3489711 - DNA, 25 bp, Homo sapien
gactctttgcttcttgcccgtgcag

SEQ ID NO: 3489712 - DNA, 25 bp, Homo sapien
taaacaccctcttaacacatgtggg

SEQ ID NO: 3489713 - DNA, 25 bp, Homo sapien
tgcttctcgggaggaaagttaccgc

SEQ ID NO: 3489714 - DNA, 25 bp, Homo sapien
cagaggaatccgtggtggaaaccca

SEQ ID NO: 3489715 - DNA, 25 bp, Homo sapien
tgttcccaggacagcgctatcgagt

SEQ ID NO: 3489716 - DNA, 25 bp, Homo sapien
aaagtgcacagtccgggaaggttct

SEQ ID NO: 3489717 - DNA, 25 bp, Homo sapien
gcaggtgaacagacgatcatcttca

SEQ ID NO: 3489718 - DNA, 25 bp, Homo sapien
tgtgaactgcaggtgaacagacgat

SEQ ID NO: 3489719 - DNA, 25 bp, Homo sapien
tgaacagacgatcatcttcacctac

SEQ ID NO: 3489720 - DNA, 25 bp, Homo sapien
aactgcaggtgaacagacgatcatc

SEQ ID NO: 3489721 - DNA, 25 bp, Homo sapien
ctttaggatgggtgttcaaggccct

SEQ ID NO: 3489722 - DNA, 25 bp, Homo sapien
gctggtgtggtacctagctatggaa

SEQ ID NO: 3489723 - DNA, 25 bp, Homo sapien
gatggtcctatttcactggagcagg

SEQ ID NO: 3489724 - DNA, 25 bp, Homo sapien
tgggcaggccagaggtgacttctaa

SEQ ID NO: 3489725 - DNA, 25 bp, Homo sapien
atgcaggctccaagtgggtcacccc

SEQ ID NO: 3489726 - DNA, 25 bp, Homo sapien
gcaggctccaagtgggtcaccccac

SEQ ID NO: 3489727 - DNA, 25 bp, Homo sapien
tgcaggctccaagtgggtcacccca

SEQ ID NO: 3489728 - DNA, 25 bp, Homo sapien
ccaagcctctcaaagagcacagaca

SEQ ID NO: 3489729 - DNA, 25 bp, Homo sapien
gcgaaatttggggattctagtcctg

SEQ ID NO: 3489730 - DNA, 25 bp, Homo sapien
aaatttggggattctagtcctgagc

SEQ ID NO: 3489731 - DNA, 25 bp, Homo sapien
caagcctctcaaagagcacagacaa

SEQ ID NO: 3489732 - DNA, 25 bp, Homo sapien
taggtataaagaccatgatattcct

SEQ ID NO: 3489733 - DNA, 25 bp, Homo sapien
gattaggtataaagaccatgatatt

SEQ ID NO: 3489734 - DNA, 25 bp, Homo sapien
tttggattaggtataaagaccatga

SEQ ID NO: 3489735 - DNA, 25 bp, Homo sapien
tggattaggtataaagaccatgata

SEQ ID NO: 3489736 - DNA, 25 bp, Homo sapien
tagcacaagtgctaggtgaatgatg

SEQ ID NO: 3489737 - DNA, 25 bp, Homo sapien
tgatgtctacgaccagaaaactggt

SEQ ID NO: 3489738 - DNA, 25 bp, Homo sapien
actggtttattacgttgcaatgaga

SEQ ID NO: 3489739 - DNA, 25 bp, Homo sapien
cttgtcactaatactggagggcacc

SEQ ID NO: 3489740 - DNA, 25 bp, Homo sapien
tggggtcaacaccccccctgccagc

SEQ ID NO: 3489741 - DNA, 25 bp, Homo sapien
tggcccttctcacccggtggtgttc

SEQ ID NO: 3489742 - DNA, 25 bp, Homo sapien
ttctggcccctctccgttacccagc

SEQ ID NO: 3489743 - DNA, 25 bp, Homo sapien
tctgaggaccggtctgttcggggtg

SEQ ID NO: 3489744 - DNA, 25 bp, Homo sapien
cttctcacccggtggtgttccttct

SEQ ID NO: 3489745 - DNA, 25 bp, Homo sapien
ggaagccgtaggaaaggcagctgcc

SEQ ID NO: 3489746 - DNA, 25 bp, Homo sapien
tctttaattcgtggaagccgtagga

SEQ ID NO: 3489747 - DNA, 25 bp, Homo sapien
gtgtgttctttaattcgtggaagcc

SEQ ID NO: 3489748 - DNA, 25 bp, Homo sapien
tggaagccgtaggaaaggcagctgc

SEQ ID NO: 3489749 - DNA, 25 bp, Homo sapien
gaaatcttggctcggagcctcggcg

SEQ ID NO: 3489750 - DNA, 25 bp, Homo sapien
gcatttcgccgtttcccgagaggga

SEQ ID NO: 3489751 - DNA, 25 bp, Homo sapien
gggctgctcagtcgctccgcggtgc

SEQ ID NO: 3489752 - DNA, 25 bp, Homo sapien
taagcggacggttggcagcatttcg

SEQ ID NO: 3489753 - DNA, 25 bp, Homo sapien
gagtcccactgatgctaacttctgg

SEQ ID NO: 3489754 - DNA, 25 bp, Homo sapien
gcagaggtacctaagccatcctgtc

SEQ ID NO: 3489755 - DNA, 25 bp, Homo sapien
tgttgagatcggagcttccgagtcc

SEQ ID NO: 3489756 - DNA, 25 bp, Homo sapien
tccctttctctagcgagagcagctg

SEQ ID NO: 3489757 - DNA, 25 bp, Homo sapien
ggctcatgctaaggctgatgacctg

SEQ ID NO: 3489758 - DNA, 25 bp, Homo sapien
acacaacggccagcagacactgatg

SEQ ID NO: 3489759 - DNA, 25 bp, Homo sapien
cacacaacggccagcagacactgat

SEQ ID NO: 3489760 - DNA, 25 bp, Homo sapien
gacactgatgctccggggctcatgc

SEQ ID NO: 3489761 - DNA, 25 bp, Homo sapien
ttcactagaacacaagatggaaggc

SEQ ID NO: 3489762 - DNA, 25 bp, Homo sapien
tctgattcactagaacacaagatgg

SEQ ID NO: 3489763 - DNA, 25 bp, Homo sapien
ctgattcactagaacacaagatgga

SEQ ID NO: 3489764 - DNA, 25 bp, Homo sapien
gattcactagaacacaagatggaag

SEQ ID NO: 3489765 - DNA, 25 bp, Homo sapien
tggaaaacatgagggtctccgctct

SEQ ID NO: 3489766 - DNA, 25 bp, Homo sapien
gcaatgagccaccaaatgaagccga

SEQ ID NO: 3489767 - DNA, 25 bp, Homo sapien
ggtcaccccggatataagcaatgag

SEQ ID NO: 3489768 - DNA, 25 bp, Homo sapien
taaaccatggtgaagacgagcaagt

SEQ ID NO: 3489769 - DNA, 25 bp, Homo sapien
gagctccgggcttggcaggtcatgc

SEQ ID NO: 3489770 - DNA, 25 bp, Homo sapien
caaggtgaggactggtgtgaatcgg

SEQ ID NO: 3489771 - DNA, 25 bp, Homo sapien
gtgtgaatcggtggccccagagcac

SEQ ID NO: 3489772 - DNA, 25 bp, Homo sapien
ggactggtgtgaatcggtggcccca

SEQ ID NO: 3489773 - DNA, 25 bp, Homo sapien
tatcatggaaggtgttgtagtccac

SEQ ID NO: 3489774 - DNA, 25 bp, Homo sapien
ggtatcatggaaggtgttgtagtcc

SEQ ID NO: 3489775 - DNA, 25 bp, Homo sapien
ctgggtgtgttggtctcataggtat

SEQ ID NO: 3489776 - DNA, 25 bp, Homo sapien
tgtgttggtctcataggtatcatgg

SEQ ID NO: 3489777 - DNA, 25 bp, Homo sapien
caccgagcccctggcctccctggac

SEQ ID NO: 3489778 - DNA, 25 bp, Homo sapien
tcacaccgagcccctggcctccctg

SEQ ID NO: 3489779 - DNA, 25 bp, Homo sapien
gagcccctggcctccctggacccac

SEQ ID NO: 3489780 - DNA, 25 bp, Homo sapien
cgagcccctggcctccctggaccca

SEQ ID NO: 3489781 - DNA, 25 bp, Homo sapien
cagtgacaggaggtcttagggaggc

SEQ ID NO: 3489782 - DNA, 25 bp, Homo sapien
gctctgcagtgtctgtgttcactga

SEQ ID NO: 3489783 - DNA, 25 bp, Homo sapien
cttagccagcacctacaagaggcag

SEQ ID NO: 3489784 - DNA, 25 bp, Homo sapien
ggagagaacagatgccatccggtaa

SEQ ID NO: 3489785 - DNA, 25 bp, Homo sapien
gatggatcttaactcatgagggctc

SEQ ID NO: 3489786 - DNA, 25 bp, Homo sapien
aaaagcactcgaaaagccccagctg

SEQ ID NO: 3489787 - DNA, 25 bp, Homo sapien
gaacaccaagggctgtacgctctgt

SEQ ID NO: 3489788 - DNA, 25 bp, Homo sapien
cacatttggcagataacagcagaga

SEQ ID NO: 3489789 - DNA, 25 bp, Homo sapien
ttctgagatgaaccgggcctaagct

SEQ ID NO: 3489790 - DNA, 25 bp, Homo sapien
catttcgggacctgacaatctgccc

SEQ ID NO: 3489791 - DNA, 25 bp, Homo sapien
aacccgaagcccgtgtgtgtcaaca

SEQ ID NO: 3489792 - DNA, 25 bp, Homo sapien
tctgtggcctgggaacattggcact

SEQ ID NO: 3489793 - DNA, 25 bp, Homo sapien
tcattgcatcagttggtcaccagga

SEQ ID NO: 3489794 - DNA, 25 bp, Homo sapien
tctctgactacacaggaggccggtg

SEQ ID NO: 3489795 - DNA, 25 bp, Homo sapien
tgtgggaatgaccagcgcatgaccc

SEQ ID NO: 3489796 - DNA, 25 bp, Homo sapien
tgttacagatcacgagcagggacag

SEQ ID NO: 3489797 - DNA, 25 bp, Homo sapien
tcacatgaggcacaggattgatggg

SEQ ID NO: 3489798 - DNA, 25 bp, Homo sapien
ttattactacccgtggccttgagca

SEQ ID NO: 3489799 - DNA, 25 bp, Homo sapien
tgttttgagaatcaagtgcctgacc

SEQ ID NO: 3489800 - DNA, 25 bp, Homo sapien
cacgttggtaagagcttctcggcag

SEQ ID NO: 3489801 - DNA, 25 bp, Homo sapien
tgagagtttaggcaggaccacggcc

SEQ ID NO: 3489802 - DNA, 25 bp, Homo sapien
gccagggctctccttatctctgttg

SEQ ID NO: 3489803 - DNA, 25 bp, Homo sapien
ccagggctctccttatctctgttgc

SEQ ID NO: 3489804 - DNA, 25 bp, Homo sapien
cagggctctccttatctctgttgcc

SEQ ID NO: 3489805 - DNA, 25 bp, Homo sapien
gattgatgaatcctacacagggaga

SEQ ID NO: 3489806 - DNA, 25 bp, Homo sapien
tgttagcaaaaaccaaggcgagccg

SEQ ID NO: 3489807 - DNA, 25 bp, Homo sapien
tgtttcccaattatcccgccacagg

SEQ ID NO: 3489808 - DNA, 25 bp, Homo sapien
cgagtaagtggcttctccccgaaag

SEQ ID NO: 3489809 - DNA, 25 bp, Homo sapien
ttagattatatgtctagttctcctt

SEQ ID NO: 3489810 - DNA, 25 bp, Homo sapien
ttctaagggtaacattcagattgtt

SEQ ID NO: 3489811 - DNA, 25 bp, Homo sapien
agattatatgtctagttctccttcc

SEQ ID NO: 3489812 - DNA, 25 bp, Homo sapien
ttttctaagggtaacattcagattg

SEQ ID NO: 3489813 - DNA, 25 bp, Homo sapien
agccagatagagctgtcagaccgtg

SEQ ID NO: 3489814 - DNA, 25 bp, Homo sapien
cccaatgtggctgatgacccgtgac

SEQ ID NO: 3489815 - DNA, 25 bp, Homo sapien
cagggttgaggacagccagatagag

SEQ ID NO: 3489816 - DNA, 25 bp, Homo sapien
ctgtcagaccgtgccccaatgtggc

SEQ ID NO: 3489817 - DNA, 25 bp, Homo sapien
tccaaatgcactctctagttcctcg

SEQ ID NO: 3489818 - DNA, 25 bp, Homo sapien
ccccccgagagtctgctcagctctc

SEQ ID NO: 3489819 - DNA, 25 bp, Homo sapien
cctcgctctcctcaggaagtgcttc

SEQ ID NO: 3489820 - DNA, 25 bp, Homo sapien
aatgcactctctagttcctcgctct

SEQ ID NO: 3489821 - DNA, 25 bp, Homo sapien
ttttcacttctgcagctgcattctg

SEQ ID NO: 3489822 - DNA, 25 bp, Homo sapien
gctgcattctgtgcagatgctggtt

SEQ ID NO: 3489823 - DNA, 25 bp, Homo sapien
atgctggttgggctgccccgtccat

SEQ ID NO: 3489824 - DNA, 25 bp, Homo sapien
gcagatgctggttgggctgccccgt

SEQ ID NO: 3489825 - DNA, 25 bp, Homo sapien
ccttgatgtgcaggcccctgtcact

SEQ ID NO: 3489826 - DNA, 25 bp, Homo sapien
gctctgcctgggaagcacatggcct

SEQ ID NO: 3489827 - DNA, 25 bp, Homo sapien
tgggaagcacatggccttgatgtgc

SEQ ID NO: 3489828 - DNA, 25 bp, Homo sapien
tgcctgggaagcacatggccttgat

SEQ ID NO: 3489829 - DNA, 25 bp, Homo sapien
tgcccaagttcacggagggtgccgg

SEQ ID NO: 3489830 - DNA, 25 bp, Homo sapien
gggaatagaagctctgtcagtctcg

SEQ ID NO: 3489831 - DNA, 25 bp, Homo sapien
tctgtcagtctcgtctggatcttgg

SEQ ID NO: 3489832 - DNA, 25 bp, Homo sapien
cagatcccttagttttgggtgccca

SEQ ID NO: 3489833 - DNA, 25 bp, Homo sapien
tgggaacctgagtggcagcgtcatc

SEQ ID NO: 3489834 - DNA, 25 bp, Homo sapien
tcctcctgtcccagtttggtttcca

SEQ ID NO: 3489835 - DNA, 25 bp, Homo sapien
agcgtcatcactttgctgaggtgaa

SEQ ID NO: 3489836 - DNA, 25 bp, Homo sapien
tgagtggcagcgtcatcactttgct

SEQ ID NO: 3489837 - DNA, 25 bp, Homo sapien
ctcacacgcagcgtctgaggtgcag

SEQ ID NO: 3489838 - DNA, 25 bp, Homo sapien
tgtgctggggtgacaaagccccgag

SEQ ID NO: 3489839 - DNA, 25 bp, Homo sapien
ttctctccccagaagctcacacgca

SEQ ID NO: 3489840 - DNA, 25 bp, Homo sapien
tggaggcccacacttctctccccag

SEQ ID NO: 3489841 - DNA, 25 bp, Homo sapien
gcacaggcagcgcatggctccggaa

SEQ ID NO: 3489842 - DNA, 25 bp, Homo sapien
cccagcacaggcagcgcatggctcc

SEQ ID NO: 3489843 - DNA, 25 bp, Homo sapien
caggcagcgcatggctccggaagca

SEQ ID NO: 3489844 - DNA, 25 bp, Homo sapien
gggggtaaggatgcaggggccatgc

SEQ ID NO: 3489845 - DNA, 25 bp, Homo sapien
aataatgaagatgacgcactcggaa

SEQ ID NO: 3489846 - DNA, 25 bp, Homo sapien
caataatgaagatgacgcactcgga

SEQ ID NO: 3489847 - DNA, 25 bp, Homo sapien
ataatgaagatgacgcactcggaag

SEQ ID NO: 3489848 - DNA, 25 bp, Homo sapien
tccaagaagtcgtttcctgtggcca

SEQ ID NO: 3489849 - DNA, 25 bp, Homo sapien
ctgcatccagaaagtgagagctaaa

SEQ ID NO: 3489850 - DNA, 25 bp, Homo sapien
agagctaaatggagaggctgaacaa

SEQ ID NO: 3489851 - DNA, 25 bp, Homo sapien
aacaaaggacgcatgtggagcgcat

SEQ ID NO: 3489852 - DNA, 25 bp, Homo sapien
tctgagaaacaaggcttttggaagg

SEQ ID NO: 3489853 - DNA, 25 bp, Homo sapien
ctcagagctgcatgcggactgtccc

SEQ ID NO: 3489854 - DNA, 25 bp, Homo sapien
cccagttcagagcattggacagagc

SEQ ID NO: 3489855 - DNA, 25 bp, Homo sapien
gcggactgtccccagttcagagcat

SEQ ID NO: 3489856 - DNA, 25 bp, Homo sapien
aactgacagccctgatcaatagtcc

SEQ ID NO: 3489857 - DNA, 25 bp, Homo sapien
cgagacggtcttttgcctgccacag

SEQ ID NO: 3489858 - DNA, 25 bp, Homo sapien
gtaagtccctgcagtgaaaaccgag

SEQ ID NO: 3489859 - DNA, 25 bp, Homo sapien
gatcttcctctgaggcgagcttcag

SEQ ID NO: 3489860 - DNA, 25 bp, Homo sapien
tggtgccgacatcccaagttttcag

SEQ ID NO: 3489861 - DNA, 25 bp, Homo sapien
atgcaggtggcgctgctgtgagctg

SEQ ID NO: 3489862 - DNA, 25 bp, Homo sapien
ctgtgggtgatgcaggtggcgctgc

SEQ ID NO: 3489863 - DNA, 25 bp, Homo sapien
tgggtgatgcaggtggcgctgctgt

SEQ ID NO: 3489864 - DNA, 25 bp, Homo sapien
caggtggcgctgctgtgagctgccc

SEQ ID NO: 3489865 - DNA, 25 bp, Homo sapien
ctggcctgtgatgagtgctcccact

SEQ ID NO: 3489866 - DNA, 25 bp, Homo sapien
ctgaggtgtctgatgctacttgctg

SEQ ID NO: 3489867 - DNA, 25 bp, Homo sapien
gatgctacttgctgggcttctggcc

SEQ ID NO: 3489868 - DNA, 25 bp, Homo sapien
tggcctgtgatgagtgctcccactc

SEQ ID NO: 3489869 - DNA, 25 bp, Homo sapien
tggcggcgctgaagctgacactagc

SEQ ID NO: 3489870 - DNA, 25 bp, Homo sapien
tcttgcccgggcttgtcgagatgaa

SEQ ID NO: 3489871 - DNA, 25 bp, Homo sapien
acatgaacgcccctcgagactgggc

SEQ ID NO: 3489872 - DNA, 25 bp, Homo sapien
aacttcctgatgctggcggcgctga

SEQ ID NO: 3489873 - DNA, 25 bp, Homo sapien
gcagaccaagtcctggtacaaggaa

SEQ ID NO: 3489874 - DNA, 25 bp, Homo sapien
tgtgtttgccacaacctctagaggg

SEQ ID NO: 3489875 - DNA, 25 bp, Homo sapien
gtacaaggaagcacgggctggcact

SEQ ID NO: 3489876 - DNA, 25 bp, Homo sapien
ggtcccttcatattcacgtctgtgc

SEQ ID NO: 3489877 - DNA, 25 bp, Homo sapien
agatgtgcaggaggagaccatttcc

SEQ ID NO: 3489878 - DNA, 25 bp, Homo sapien
gaggagaccatttccacggaccctc

SEQ ID NO: 3489879 - DNA, 25 bp, Homo sapien
ctgctcagacctgcacccagtcaca

SEQ ID NO: 3489880 - DNA, 25 bp, Homo sapien
tgctcagacctgcacccagtcacag

SEQ ID NO: 3489881 - DNA, 25 bp, Homo sapien
tttgtgcagagacgccaatttctgc

SEQ ID NO: 3489882 - DNA, 25 bp, Homo sapien
tcagctttgtgcagagacgccaatt

SEQ ID NO: 3489883 - DNA, 25 bp, Homo sapien
gatgtgcacatacagcgagctggcc

SEQ ID NO: 3489884 - DNA, 25 bp, Homo sapien
tgctgcacacatggaaacgatgtgc

SEQ ID NO: 3489885 - DNA, 25 bp, Homo sapien
tggaataggtgactcggtgtgattc

SEQ ID NO: 3489886 - DNA, 25 bp, Homo sapien
ggtgactcggtgtgattcttcctca

SEQ ID NO: 3489887 - DNA, 25 bp, Homo sapien
agatatgggatggaataggtgactc

SEQ ID NO: 3489888 - DNA, 25 bp, Homo sapien
atagatatgggatggaataggtgac

SEQ ID NO: 3489889 - DNA, 25 bp, Homo sapien
gttcctgttgattggaaagattcac

SEQ ID NO: 3489890 - DNA, 25 bp, Homo sapien
cagtgttcctgttgattggaaagat

SEQ ID NO: 3489891 - DNA, 25 bp, Homo sapien
ctgttgattggaaagattcactgag

SEQ ID NO: 3489892 - DNA, 25 bp, Homo sapien
tgattggaaagattcactgagcttc

SEQ ID NO: 3489893 - DNA, 25 bp, Homo sapien
agcagcatgcggaagaagagtgctc

SEQ ID NO: 3489894 - DNA, 25 bp, Homo sapien
ctccactctcgactcaggttctccc

SEQ ID NO: 3489895 - DNA, 25 bp, Homo sapien
tcccactccactctcgactcaggtt

SEQ ID NO: 3489896 - DNA, 25 bp, Homo sapien
acaagggcagcagcatgcggaagaa

SEQ ID NO: 3489897 - DNA, 25 bp, Homo sapien
gagcagtgcacagcatggacatcta

SEQ ID NO: 3489898 - DNA, 25 bp, Homo sapien
agcagtgcacagcatggacatctac

SEQ ID NO: 3489899 - DNA, 25 bp, Homo sapien
aaggccatgccagtacaagcaaggt

SEQ ID NO: 3489900 - DNA, 25 bp, Homo sapien
acacatgtcgttcctgctcacaact

SEQ ID NO: 3489901 - DNA, 25 bp, Homo sapien
gtgcgagttaaaggcagtagacccc

SEQ ID NO: 3489902 - DNA, 25 bp, Homo sapien
tcacaactcatcagatagaatgagt

SEQ ID NO: 3489903 - DNA, 25 bp, Homo sapien
ctgagatagcaaaacctgatttttc

SEQ ID NO: 3489904 - DNA, 25 bp, Homo sapien
attctgagatagcaaaacctgattt

SEQ ID NO: 3489905 - DNA, 25 bp, Homo sapien
gccccgtgctgaaacccagtagaga

SEQ ID NO: 3489906 - DNA, 25 bp, Homo sapien
gagcctgaggactgcctttaactga

SEQ ID NO: 3489907 - DNA, 25 bp, Homo sapien
tcacatcgatttcctggtaggcgtc

SEQ ID NO: 3489908 - DNA, 25 bp, Homo sapien
tgcgagcaatagagttgaagcagcc

SEQ ID NO: 3489909 - DNA, 25 bp, Homo sapien
tcagttcccttagactcagagaagt

SEQ ID NO: 3489910 - DNA, 25 bp, Homo sapien
tgggaagaacagtatgccaactgtc

SEQ ID NO: 3489911 - DNA, 25 bp, Homo sapien
tcttggatcaggaccagtctccacc

SEQ ID NO: 3489912 - DNA, 25 bp, Homo sapien
tctgatgatcatgtaagtttccctg

SEQ ID NO: 3489913 - DNA, 25 bp, Homo sapien
ccttgcttagatgtgatcattaata

SEQ ID NO: 3489914 - DNA, 25 bp, Homo sapien
taacaccatgtaacatgttaaacct

SEQ ID NO: 3489915 - DNA, 25 bp, Homo sapien
ccatgtaacatgttaaaccttgctt

SEQ ID NO: 3489916 - DNA, 25 bp, Homo sapien
tgggcaacatggcacgtttaacacc

SEQ ID NO: 3489917 - DNA, 25 bp, Homo sapien
gaacagggaaatagatctgtaactg

SEQ ID NO: 3489918 - DNA, 25 bp, Homo sapien
tagaacagggaaatagatctgtaac

SEQ ID NO: 3489919 - DNA, 25 bp, Homo sapien
agatctgtaactgacatgggtacaa

SEQ ID NO: 3489920 - DNA, 25 bp, Homo sapien
ctgacatgggtacaatctattgaga

SEQ ID NO: 3489921 - DNA, 25 bp, Homo sapien
gtgacccctgcatatggagacatta

SEQ ID NO: 3489922 - DNA, 25 bp, Homo sapien
gaagagtgacccctgcatatggaga

SEQ ID NO: 3489923 - DNA, 25 bp, Homo sapien
aacagaaggaaatctgaagagtgac

SEQ ID NO: 3489924 - DNA, 25 bp, Homo sapien
cagaaggaaatctgaagagtgaccc

SEQ ID NO: 3489925 - DNA, 25 bp, Homo sapien
cccaagtcctcttcatgagagtctc

SEQ ID NO: 3489926 - DNA, 25 bp, Homo sapien
agagctcatagcatcaaggtctcca

SEQ ID NO: 3489927 - DNA, 25 bp, Homo sapien
gtcctcttcatgagagtctccagag

SEQ ID NO: 3489928 - DNA, 25 bp, Homo sapien
gactcacaccggagactacatctgg

SEQ ID NO: 3489929 - DNA, 25 bp, Homo sapien
gtgctgggatggtgttggcaggcca

SEQ ID NO: 3489930 - DNA, 25 bp, Homo sapien
tctacctctgtgtcgtttacattca

SEQ ID NO: 3489931 - DNA, 25 bp, Homo sapien
gacttcatgttgttcatgcatccaa

SEQ ID NO: 3489932 - DNA, 25 bp, Homo sapien
gcatccaatccagttgatcatatct

SEQ ID NO: 3489933 - DNA, 25 bp, Homo sapien
tgcaggagcattcttgacttcatgt

SEQ ID NO: 3489934 - DNA, 25 bp, Homo sapien
gctcgcctggctctggttacatgtg

SEQ ID NO: 3489935 - DNA, 25 bp, Homo sapien
cacagtgttgcatatgtcttctgcc

SEQ ID NO: 3489936 - DNA, 25 bp, Homo sapien
tcttctgccgagaggatgtccgatg

SEQ ID NO: 3489937 - DNA, 25 bp, Homo sapien
actgatgcttctgtcagcaggtgca

SEQ ID NO: 3489938 - DNA, 25 bp, Homo sapien
tgtagtcgcatcctgagtttctggg

SEQ ID NO: 3489939 - DNA, 25 bp, Homo sapien
ggatgtgaaaccctcatatatggag

SEQ ID NO: 3489940 - DNA, 25 bp, Homo sapien
gagggactctcttacatagacttgg

SEQ ID NO: 3489941 - DNA, 25 bp, Homo sapien
gaagctggttgagccacctttaggg

SEQ ID NO: 3489942 - DNA, 25 bp, Homo sapien
tttctggtttttggcacttccacat

SEQ ID NO: 3489943 - DNA, 25 bp, Homo sapien
taggtgggtccaagcttagactttc

SEQ ID NO: 3489944 - DNA, 25 bp, Homo sapien
gactaaggaccattggttagccagg

SEQ ID NO: 3489945 - DNA, 25 bp, Homo sapien
cagtggctcctacgtttgtatctga

SEQ ID NO: 3489946 - DNA, 25 bp, Homo sapien
taagttgctgttatggcccaagtag

SEQ ID NO: 3489947 - DNA, 25 bp, Homo sapien
tgaatgcattcaggtttaagtctga

SEQ ID NO: 3489948 - DNA, 25 bp, Homo sapien
tcattttcattgaatgcattcaggt

SEQ ID NO: 3489949 - DNA, 25 bp, Homo sapien
caggtttaagtctgaagatgtttta

SEQ ID NO: 3489950 - DNA, 25 bp, Homo sapien
taagtctgaagatgttttacagaaa

SEQ ID NO: 3489951 - DNA, 25 bp, Homo sapien
cgcaggggcggtgctaatctctgta

SEQ ID NO: 3489952 - DNA, 25 bp, Homo sapien
ttgttccaattttagtatatgtact

SEQ ID NO: 3489953 - DNA, 25 bp, Homo sapien
tatatgtactgctgaagcaagcact

SEQ ID NO: 3489954 - DNA, 25 bp, Homo sapien
tgcgcaggggcggtgctaatctctg

SEQ ID NO: 3489955 - DNA, 25 bp, Homo sapien
gaaagtacggcaaggaacatgaacc

SEQ ID NO: 3489956 - DNA, 25 bp, Homo sapien
tacctagaagtaacagttatcctga

SEQ ID NO: 3489957 - DNA, 25 bp, Homo sapien
gagacctctattatgtctatccgta

SEQ ID NO: 3489958 - DNA, 25 bp, Homo sapien
aaatattatacaattgaacccctga

SEQ ID NO: 3489959 - DNA, 25 bp, Homo sapien
gtacccccgatgaacattgatgcca

SEQ ID NO: 3489960 - DNA, 25 bp, Homo sapien
gctaggatgtaacaaatgaccagta

SEQ ID NO: 3489961 - DNA, 25 bp, Homo sapien
tagaatgtaaagtccctgggagcaa

SEQ ID NO: 3489962 - DNA, 25 bp, Homo sapien
cctttaacacgctaaagcacttatc

SEQ ID NO: 3489963 - DNA, 25 bp, Homo sapien
gatcaatgcagtagccttaaactgg

SEQ ID NO: 3489964 - DNA, 25 bp, Homo sapien
catcaaaatgcgtcttcagttgggc

SEQ ID NO: 3489965 - DNA, 25 bp, Homo sapien
tctttatagagcagccagattatcc

SEQ ID NO: 3489966 - DNA, 25 bp, Homo sapien
ccttctcagtgtaaggagagtcatg

SEQ ID NO: 3489967 - DNA, 25 bp, Homo sapien
cagctccgtagatgccatgtttgga

SEQ ID NO: 3489968 - DNA, 25 bp, Homo sapien
tgcagtgttcagtagtaaaatatct

SEQ ID NO: 3489969 - DNA, 25 bp, Homo sapien
taaaatatctagttcaaatgtgtgc

SEQ ID NO: 3489970 - DNA, 25 bp, Homo sapien
tcctttatcattatgaccagctccg

SEQ ID NO: 3489971 - DNA, 25 bp, Homo sapien
ctgaggtagccatgtgatctagtcc

SEQ ID NO: 3489972 - DNA, 25 bp, Homo sapien
gagattcgcggaagtcttagccctt

SEQ ID NO: 3489973 - DNA, 25 bp, Homo sapien
caagctgtagcagtattctagagac

SEQ ID NO: 3489974 - DNA, 25 bp, Homo sapien
gacttgtaccacagagaattgcttc

SEQ ID NO: 3489975 - DNA, 25 bp, Homo sapien
ggctgtgcatctgaacaagggattg

SEQ ID NO: 3489976 - DNA, 25 bp, Homo sapien
gccagtagacttgggatatgctttc

SEQ ID NO: 3489977 - DNA, 25 bp, Homo sapien
ttgtaactaccatggaactgagcac

SEQ ID NO: 3489978 - DNA, 25 bp, Homo sapien
tgttgcagcccatttcattgaagga

SEQ ID NO: 3489979 - DNA, 25 bp, Homo sapien
cccgcggggccagaggtctctgctc

SEQ ID NO: 3489980 - DNA, 25 bp, Homo sapien
tcccgcccccaggtgtgcgtgggcc

SEQ ID NO: 3489981 - DNA, 25 bp, Homo sapien
gaggagccgcgggagcgtttccctc

SEQ ID NO: 3489982 - DNA, 25 bp, Homo sapien
gctgcccgcgggcgacatcgcgggt

SEQ ID NO: 3489983 - DNA, 25 bp, Homo sapien
cattctagacccaaatgtgcaaggg

SEQ ID NO: 3489984 - DNA, 25 bp, Homo sapien
gagaggagccactgccgtagtctcg

SEQ ID NO: 3489985 - DNA, 25 bp, Homo sapien
tagtctcggaggatgcctcttcccg

SEQ ID NO: 3489986 - DNA, 25 bp, Homo sapien
tttttgcaccgcagcacaatgccgg

SEQ ID NO: 3489987 - DNA, 25 bp, Homo sapien
taactaggacacaggacatttggac

SEQ ID NO: 3489988 - DNA, 25 bp, Homo sapien
caaggttaggtacgtattgcagtcc

SEQ ID NO: 3489989 - DNA, 25 bp, Homo sapien
tgaggtctccaatagcttcggcaag

SEQ ID NO: 3489990 - DNA, 25 bp, Homo sapien
tctgaaacgccaagggcagatggct

SEQ ID NO: 3489991 - DNA, 25 bp, Homo sapien
aggaccgaccctgctagcgagatca

SEQ ID NO: 3489992 - DNA, 25 bp, Homo sapien
aaaagtgcttccgtgtcagaggcca

SEQ ID NO: 3489993 - DNA, 25 bp, Homo sapien
tgagttttcattcagccgaccttgg

SEQ ID NO: 3489994 - DNA, 25 bp, Homo sapien
tactcactccaagagtcacccaggg

SEQ ID NO: 3489995 - DNA, 25 bp, Homo sapien
gacaatgcgtgcttgcgttccagcc

SEQ ID NO: 3489996 - DNA, 25 bp, Homo sapien
gtcaatcagcgcgagcttcctgcag

SEQ ID NO: 3489997 - DNA, 25 bp, Homo sapien
agctgtcaatcagcgcgagcttcct

SEQ ID NO: 3489998 - DNA, 25 bp, Homo sapien
aacgcagctgtcaatcagcgcgagc

SEQ ID NO: 3489999 - DNA, 25 bp, Homo sapien
actccggcgccgacctgcgcgccta

SEQ ID NO: 3490000 - DNA, 25 bp, Homo sapien
cccgagcgcggctgcgagtgcccgg

SEQ ID NO: 3490001 - DNA, 25 bp, Homo sapien
gtgagccggcgcgagcgtccgccgg

SEQ ID NO: 3490002 - DNA, 25 bp, Homo sapien
ggtgagccggcgcgagcgtccgccg

SEQ ID NO: 3490003 - DNA, 25 bp, Homo sapien
tggccgggcgagctcagcctcagct

SEQ ID NO: 3490004 - DNA, 25 bp, Homo sapien
agcgccgcctggctgctttgagctg

SEQ ID NO: 3490005 - DNA, 25 bp, Homo sapien
gcctcagctcggcgtggcagtgcat

SEQ ID NO: 3490006 - DNA, 25 bp, Homo sapien
gaaagtcttgtagcgccgcctggct

SEQ ID NO: 3490007 - DNA, 25 bp, Homo sapien
tttctcaaagtaatcgcaggtctcc

SEQ ID NO: 3490008 - DNA, 25 bp, Homo sapien
ccttggagaggatctcgtcgatcat

SEQ ID NO: 3490009 - DNA, 25 bp, Homo sapien
ggtcgcacgaccagcgacgggcaca

SEQ ID NO: 3490010 - DNA, 25 bp, Homo sapien
gcacacggagtagagggaaagtttc

SEQ ID NO: 3490011 - DNA, 25 bp, Homo sapien
agatgcctttgcaatgcccaccgct

SEQ ID NO: 3490012 - DNA, 25 bp, Homo sapien
tgccatccacaccttgcgtggtcct

SEQ ID NO: 3490013 - DNA, 25 bp, Homo sapien
tgcgtggtccttcccggccacgtcg

SEQ ID NO: 3490014 - DNA, 25 bp, Homo sapien
ttatttccactcgtgccatccacac

SEQ ID NO: 3490015 - DNA, 25 bp, Homo sapien
tgagtccttgcagccctctaaccat

SEQ ID NO: 3490016 - DNA, 25 bp, Homo sapien
agccctctaaccatattccagctga

SEQ ID NO: 3490017 - DNA, 25 bp, Homo sapien
tccagctgagagcttgtcaatgggc

SEQ ID NO: 3490018 - DNA, 25 bp, Homo sapien
ttgcagccctctaaccatattccag

SEQ ID NO: 3490019 - DNA, 25 bp, Homo sapien
tagtttggtgctgagatcctcccag

SEQ ID NO: 3490020 - DNA, 25 bp, Homo sapien
tgtctgcttgtacatggaacgtagt

SEQ ID NO: 3490021 - DNA, 25 bp, Homo sapien
cctaaggacatgttggtaagctgga

SEQ ID NO: 3490022 - DNA, 25 bp, Homo sapien
aaggaatcctgcaagcgtgtctgct

SEQ ID NO: 3490023 - DNA, 25 bp, Homo sapien
actgctcacaccaaatggacaggct

SEQ ID NO: 3490024 - DNA, 25 bp, Homo sapien
tccattcactgctcacaccaaatgg

SEQ ID NO: 3490025 - DNA, 25 bp, Homo sapien
cattcactgctcacaccaaatggac

SEQ ID NO: 3490026 - DNA, 25 bp, Homo sapien
tcactgctcacaccaaatggacagg

SEQ ID NO: 3490027 - DNA, 25 bp, Homo sapien
acaacttttaaaatgagatgcttaa

SEQ ID NO: 3490028 - DNA, 25 bp, Homo sapien
caacttttaaaatgagatgcttaat

SEQ ID NO: 3490029 - DNA, 25 bp, Homo sapien
cacaacttttaaaatgagatgctta

SEQ ID NO: 3490030 - DNA, 25 bp, Homo sapien
acttttaaaatgagatgcttaatgc

SEQ ID NO: 3490031 - DNA, 25 bp, Homo sapien
gaacagccagcccatccaatccaac

SEQ ID NO: 3490032 - DNA, 25 bp, Homo sapien
acagccagcccatccaatccaacct

SEQ ID NO: 3490033 - DNA, 25 bp, Homo sapien
cagccagcccatccaatccaacctt

SEQ ID NO: 3490034 - DNA, 25 bp, Homo sapien
agagaacagccagcccatccaatcc

SEQ ID NO: 3490035 - DNA, 25 bp, Homo sapien
tgtcttccaggcagttgatgtgcat

SEQ ID NO: 3490036 - DNA, 25 bp, Homo sapien
ttctgtcttccaggcagttgatgtg

SEQ ID NO: 3490037 - DNA, 25 bp, Homo sapien
acattctgtcttccaggcagttgat

SEQ ID NO: 3490038 - DNA, 25 bp, Homo sapien
ctgtcttccaggcagttgatgtgca

SEQ ID NO: 3490039 - DNA, 25 bp, Homo sapien
tgaccgtgtccccatacgcataatc

SEQ ID NO: 3490040 - DNA, 25 bp, Homo sapien
ccagatgtgaaagttccatgaccgt

SEQ ID NO: 3490041 - DNA, 25 bp, Homo sapien
tgtccccatacgcataatctgtaag

SEQ ID NO: 3490042 - DNA, 25 bp, Homo sapien
cagatgtgaaagttccatgaccgtg

SEQ ID NO: 3490043 - DNA, 25 bp, Homo sapien
ctctttgctcaatggaagtcttcca

SEQ ID NO: 3490044 - DNA, 25 bp, Homo sapien
agcagagtcggccagtttctctttg

SEQ ID NO: 3490045 - DNA, 25 bp, Homo sapien
tcacatgcaaagcaagattcagcag

SEQ ID NO: 3490046 - DNA, 25 bp, Homo sapien
tttctctttgctcaatggaagtctt

SEQ ID NO: 3490047 - DNA, 25 bp, Homo sapien
aactgggcagctatagctgagtttc

SEQ ID NO: 3490048 - DNA, 25 bp, Homo sapien
tgtacgccatggataactgggcagc

SEQ ID NO: 3490049 - DNA, 25 bp, Homo sapien
gcagataacctggaagatgtacgcc

SEQ ID NO: 3490050 - DNA, 25 bp, Homo sapien
tggtccagaagtatgcagataacct

SEQ ID NO: 3490051 - DNA, 25 bp, Homo sapien
acatttcaggatcttaaaaggatca

SEQ ID NO: 3490052 - DNA, 25 bp, Homo sapien
cttgagctcttggtatttgatatgt

SEQ ID NO: 3490053 - DNA, 25 bp, Homo sapien
aatagaatcgcaatgaggcactgtc

SEQ ID NO: 3490054 - DNA, 25 bp, Homo sapien
ccattgtcaacaaatagaatcgcaa

SEQ ID NO: 3490055 - DNA, 25 bp, Homo sapien
aagtccattgtttcagcaatcttga

SEQ ID NO: 3490056 - DNA, 25 bp, Homo sapien
gcaatcttgacccaacgttctgatg

SEQ ID NO: 3490057 - DNA, 25 bp, Homo sapien
aggcgcacacacaaagctgccgtga

SEQ ID NO: 3490058 - DNA, 25 bp, Homo sapien
caaattccgctctaagagtgtactc

SEQ ID NO: 3490059 - DNA, 25 bp, Homo sapien
gaagtctgtgtaccttgaagcatag

SEQ ID NO: 3490060 - DNA, 25 bp, Homo sapien
cacggcccagaagaggttcctgcaa

SEQ ID NO: 3490061 - DNA, 25 bp, Homo sapien
catctcagagggagtaaattgcccc

SEQ ID NO: 3490062 - DNA, 25 bp, Homo sapien
caaacttcctgagaaccacctgtgg

SEQ ID NO: 3490063 - DNA, 25 bp, Homo sapien
cagggaacggtgtggggaagcaggc

SEQ ID NO: 3490064 - DNA, 25 bp, Homo sapien
ggaaggagaggtaactcaagaccta

SEQ ID NO: 3490065 - DNA, 25 bp, Homo sapien
gaaggagaggtaactcaagacctac

SEQ ID NO: 3490066 - DNA, 25 bp, Homo sapien
gtcaccacagggaacggtgtgggga

SEQ ID NO: 3490067 - DNA, 25 bp, Homo sapien
tgacagtgggctggcgggtgatcac

SEQ ID NO: 3490068 - DNA, 25 bp, Homo sapien
ggtgatcaccgagaggagcggatat

SEQ ID NO: 3490069 - DNA, 25 bp, Homo sapien
tcaccgagaggagcggatatgcccg

SEQ ID NO: 3490070 - DNA, 25 bp, Homo sapien
gatcaccgagaggagcggatatgcc

SEQ ID NO: 3490071 - DNA, 25 bp, Homo sapien
agaccgcctcggtgacctggtggca

SEQ ID NO: 3490072 - DNA, 25 bp, Homo sapien
cagcagagaccgcctcggtgacctg

SEQ ID NO: 3490073 - DNA, 25 bp, Homo sapien
ggacagtgcctgggcgattcccggg

SEQ ID NO: 3490074 - DNA, 25 bp, Homo sapien
cagagaccgcctcggtgacctggtg

SEQ ID NO: 3490075 - DNA, 25 bp, Homo sapien
tgactcgctgctggctagggcctcg

SEQ ID NO: 3490076 - DNA, 25 bp, Homo sapien
ggcgtgggctgttccgtctctgact

SEQ ID NO: 3490077 - DNA, 25 bp, Homo sapien
cagctcggtgaagatggtgcgactc

SEQ ID NO: 3490078 - DNA, 25 bp, Homo sapien
ctgtctggggttgacaaatacttct

SEQ ID NO: 3490079 - DNA, 25 bp, Homo sapien
tgcaatctgatgcaatcatacctca

SEQ ID NO: 3490080 - DNA, 25 bp, Homo sapien
gtctcgcctagagtgcagcgatgca

SEQ ID NO: 3490081 - DNA, 25 bp, Homo sapien
acagggtctcgcctagagtgcagcg

SEQ ID NO: 3490082 - DNA, 25 bp, Homo sapien
gcagcgatgcaatctgatgcaatca

SEQ ID NO: 3490083 - DNA, 25 bp, Homo sapien
tgcgattctgataccaggtcttcac

SEQ ID NO: 3490084 - DNA, 25 bp, Homo sapien
gcgattctgataccaggtcttcacc

SEQ ID NO: 3490085 - DNA, 25 bp, Homo sapien
catcctgcgattctgataccaggtc

SEQ ID NO: 3490086 - DNA, 25 bp, Homo sapien
cctgcgattctgataccaggtcttc

SEQ ID NO: 3490087 - DNA, 25 bp, Homo sapien
gtgctttcggttcctgtgcttcaca

SEQ ID NO: 3490088 - DNA, 25 bp, Homo sapien
tgctttcggttcctgtgcttcacag

SEQ ID NO: 3490089 - DNA, 25 bp, Homo sapien
atggagttcttcttggggcgacctt

SEQ ID NO: 3490090 - DNA, 25 bp, Homo sapien
cgaagagggtattggcaactcctgg

SEQ ID NO: 3490091 - DNA, 25 bp, Homo sapien
tccgaagagggtattggcaactcct

SEQ ID NO: 3490092 - DNA, 25 bp, Homo sapien
gttccgaagagggtattggcaactc

SEQ ID NO: 3490093 - DNA, 25 bp, Homo sapien
aagagggtattggcaactcctgggg

SEQ ID NO: 3490094 - DNA, 25 bp, Homo sapien
ggtagatctcttcgcccgcagttta

SEQ ID NO: 3490095 - DNA, 25 bp, Homo sapien
tctcttcgcccgcagtttactgggc

SEQ ID NO: 3490096 - DNA, 25 bp, Homo sapien
agggagacgggtagatctcttcgcc

SEQ ID NO: 3490097 - DNA, 25 bp, Homo sapien
ccgcagtttactgggctgctggaag

SEQ ID NO: 3490098 - DNA, 25 bp, Homo sapien
tgcagtttcagggatggcaccttaa

SEQ ID NO: 3490099 - DNA, 25 bp, Homo sapien
cactgcatgctaggatatagggctt

SEQ ID NO: 3490100 - DNA, 25 bp, Homo sapien
tcaaatgcttgcgatgacaaggcca

SEQ ID NO: 3490101 - DNA, 25 bp, Homo sapien
tatagggcttgcaacatagacccag

SEQ ID NO: 3490102 - DNA, 25 bp, Homo sapien
tgagaacttgtcatggctctctcct

SEQ ID NO: 3490103 - DNA, 25 bp, Homo sapien
tgttgcgtaacaccctgaacttgca

SEQ ID NO: 3490104 - DNA, 25 bp, Homo sapien
tccacgtcagattcctgagaacttg

SEQ ID NO: 3490105 - DNA, 25 bp, Homo sapien
tcctggatgccggaaaagggagagg

SEQ ID NO: 3490106 - DNA, 25 bp, Homo sapien
tggggcatataactcaacccagaca

SEQ ID NO: 3490107 - DNA, 25 bp, Homo sapien
ctggggcatataactcaacccagac

SEQ ID NO: 3490108 - DNA, 25 bp, Homo sapien
ggggcatataactcaacccagacat

SEQ ID NO: 3490109 - DNA, 25 bp, Homo sapien
caccaggactctgggaaaaagcagc

SEQ ID NO: 3490110 - DNA, 25 bp, Homo sapien
acttgctccaccaggactctgggaa

SEQ ID NO: 3490111 - DNA, 25 bp, Homo sapien
aggactctgggaaaaagcagcagga

SEQ ID NO: 3490112 - DNA, 25 bp, Homo sapien
ctctgggaaaaagcagcaggaggca

SEQ ID NO: 3490113 - DNA, 25 bp, Homo sapien
agaagagtagtcttaaaatatagga

SEQ ID NO: 3490114 - DNA, 25 bp, Homo sapien
tagaagagtagtcttaaaatatagg

SEQ ID NO: 3490115 - DNA, 25 bp, Homo sapien
ttagaagagtagtcttaaaatatag

SEQ ID NO: 3490116 - DNA, 25 bp, Homo sapien
tgtccatgggccgtacttcgtgtac

SEQ ID NO: 3490117 - DNA, 25 bp, Homo sapien
tgtactgtgcaccatatggaaagct

SEQ ID NO: 3490118 - DNA, 25 bp, Homo sapien
ctaaaagaccaaggcgtggacatcc

SEQ ID NO: 3490119 - DNA, 25 bp, Homo sapien
taataggagcatccagttggtcgct

SEQ ID NO: 3490120 - DNA, 25 bp, Homo sapien
ctgcagcgtccttgcagttcccagt

SEQ ID NO: 3490121 - DNA, 25 bp, Homo sapien
acgtcaaaaccctcctggtgatggc

SEQ ID NO: 3490122 - DNA, 25 bp, Homo sapien
cctggtgatggctgaccttggccat

SEQ ID NO: 3490123 - DNA, 25 bp, Homo sapien
agttcccagtctctccacgtcaaaa

SEQ ID NO: 3490124 - DNA, 25 bp, Homo sapien
tcttgtaatagccatgcagttgggc

SEQ ID NO: 3490125 - DNA, 25 bp, Homo sapien
ggaaatggcttcaatcacctggata

SEQ ID NO: 3490126 - DNA, 25 bp, Homo sapien
tagttttgccgcttacagcttccac

SEQ ID NO: 3490127 - DNA, 25 bp, Homo sapien
ggcccatttgggtcaggtgagaaca

SEQ ID NO: 3490128 - DNA, 25 bp, Homo sapien
tctattcctttcagcagattgggtc

SEQ ID NO: 3490129 - DNA, 25 bp, Homo sapien
caggtcccctcttgtctattccttt

SEQ ID NO: 3490130 - DNA, 25 bp, Homo sapien
attcctttcagcagattgggtcttg

SEQ ID NO: 3490131 - DNA, 25 bp, Homo sapien
ttgtctattcctttcagcagattgg

SEQ ID NO: 3490132 - DNA, 25 bp, Homo sapien
ttcttgtgatgagggcatcactgcc

SEQ ID NO: 3490133 - DNA, 25 bp, Homo sapien
cactgccagaaaggctctttgtgaa

SEQ ID NO: 3490134 - DNA, 25 bp, Homo sapien
gttcttgtgatgagggcatcactgc

SEQ ID NO: 3490135 - DNA, 25 bp, Homo sapien
actgccagaaaggctctttgtgaac

SEQ ID NO: 3490136 - DNA, 25 bp, Homo sapien
caggaaccagggatctgccccaagc

SEQ ID NO: 3490137 - DNA, 25 bp, Homo sapien
tactgttcgtgcgtaggaaaaggcc

SEQ ID NO: 3490138 - DNA, 25 bp, Homo sapien
aggaaaaggccattgtgactgtaga

SEQ ID NO: 3490139 - DNA, 25 bp, Homo sapien
gactgtagagcatcctggacatctc

SEQ ID NO: 3490140 - DNA, 25 bp, Homo sapien
gccaacatgtgaaactactgttcgt

SEQ ID NO: 3490141 - DNA, 25 bp, Homo sapien
ttagcactacttcctcctaaaggga

SEQ ID NO: 3490142 - DNA, 25 bp, Homo sapien
aaggtgtttgccaggtacaaacctg

SEQ ID NO: 3490143 - DNA, 25 bp, Homo sapien
cggtgaaggatggagattgcagaat

SEQ ID NO: 3490144 - DNA, 25 bp, Homo sapien
caggtacaaacctggcggtgaagga

SEQ ID NO: 3490145 - DNA, 25 bp, Homo sapien
tcatcctgaaggtgtttgccaggta

SEQ ID NO: 3490146 - DNA, 25 bp, Homo sapien
agctgattgagggtggtagacatca

SEQ ID NO: 3490147 - DNA, 25 bp, Homo sapien
caaagctgattgagggtggtagaca

SEQ ID NO: 3490148 - DNA, 25 bp, Homo sapien
ttgagggtggtagacatcaggatac

SEQ ID NO: 3490149 - DNA, 25 bp, Homo sapien
acaagcaaagctgattgagggtggt

SEQ ID NO: 3490150 - DNA, 25 bp, Homo sapien
gcctccatgcgcttattcacacagg

SEQ ID NO: 3490151 - DNA, 25 bp, Homo sapien
ttctccaaaccggagggctgcttcc

SEQ ID NO: 3490152 - DNA, 25 bp, Homo sapien
ttccctgcctccatgcgcttattca

SEQ ID NO: 3490153 - DNA, 25 bp, Homo sapien
ctttctccaaaccggagggctgctt

SEQ ID NO: 3490154 - DNA, 25 bp, Homo sapien
gctgttgcccctcaggtgagagcac

SEQ ID NO: 3490155 - DNA, 25 bp, Homo sapien
cagctgttgcccctcaggtgagagc

SEQ ID NO: 3490156 - DNA, 25 bp, Homo sapien
tgcccctcaggtgagagcacctgag

SEQ ID NO: 3490157 - DNA, 25 bp, Homo sapien
tgttgcccctcaggtgagagcacct

SEQ ID NO: 3490158 - DNA, 25 bp, Homo sapien
tgttgcaggccgagacagtttgtgt

SEQ ID NO: 3490159 - DNA, 25 bp, Homo sapien
ggcaggacaagtcgcgccttgaaac

SEQ ID NO: 3490160 - DNA, 25 bp, Homo sapien
gccttgaaactagggatggtgtccc

SEQ ID NO: 3490161 - DNA, 25 bp, Homo sapien
gacctgaaaggtccagacagatgtc

SEQ ID NO: 3490162 - DNA, 25 bp, Homo sapien
gacatatttatttgctgggccacat

SEQ ID NO: 3490163 - DNA, 25 bp, Homo sapien
tacatcttgttgaaaagctccagcc

SEQ ID NO: 3490164 - DNA, 25 bp, Homo sapien
cagcctggaccttgtggactctaga

SEQ ID NO: 3490165 - DNA, 25 bp, Homo sapien
taagatctcagaaagtaggtcgtgg

SEQ ID NO: 3490166 - DNA, 25 bp, Homo sapien
ttgagagtcattggaagccaatatt

SEQ ID NO: 3490167 - DNA, 25 bp, Homo sapien
gccatgagtaatgatgcaacctgtg

SEQ ID NO: 3490168 - DNA, 25 bp, Homo sapien
gcaacctgtgttaactgataaatgg

SEQ ID NO: 3490169 - DNA, 25 bp, Homo sapien
gataaatgatgcaatgccatgagta

SEQ ID NO: 3490170 - DNA, 25 bp, Homo sapien
ttgaggaggtcctttgtgtcccttg

SEQ ID NO: 3490171 - DNA, 25 bp, Homo sapien
taaagcttacttgattgtggcggat

SEQ ID NO: 3490172 - DNA, 25 bp, Homo sapien
cggccggcggataaatcttttgttg

SEQ ID NO: 3490173 - DNA, 25 bp, Homo sapien
atgatggccccatagcatgagttag

SEQ ID NO: 3490174 - DNA, 25 bp, Homo sapien
tatcaccgcatcacctagattaagc

SEQ ID NO: 3490175 - DNA, 25 bp, Homo sapien
tagattaagcccagcatgtgttagc

SEQ ID NO: 3490176 - DNA, 25 bp, Homo sapien
cagtgagtattgttctcctcctgtg

SEQ ID NO: 3490177 - DNA, 25 bp, Homo sapien
caatggtcgaactatttacattccc

SEQ ID NO: 3490178 - DNA, 25 bp, Homo sapien
acttgttattgatctgctcatggtt

SEQ ID NO: 3490179 - DNA, 25 bp, Homo sapien
tattgatctgctcatggtttcagtt

SEQ ID NO: 3490180 - DNA, 25 bp, Homo sapien
ctgaggtttttgtatatctagggtc

SEQ ID NO: 3490181 - DNA, 25 bp, Homo sapien
tttttgtatatctagggtcagtggt

SEQ ID NO: 3490182 - DNA, 25 bp, Homo sapien
ttctggagggtaggcattcatgaga

SEQ ID NO: 3490183 - DNA, 25 bp, Homo sapien
ggtaggcattcatgagatgattttc

SEQ ID NO: 3490184 - DNA, 25 bp, Homo sapien
gagggtaggcattcatgagatgatt

SEQ ID NO: 3490185 - DNA, 25 bp, Homo sapien
acacttctggagggtaggcattcat

SEQ ID NO: 3490186 - DNA, 25 bp, Homo sapien
gcagttccaccacgggccatgaggg

SEQ ID NO: 3490187 - DNA, 25 bp, Homo sapien
ttcctcgcaggctcctgcgaccgcc

SEQ ID NO: 3490188 - DNA, 25 bp, Homo sapien
tgagggtgcagttccaccacgggcc

SEQ ID NO: 3490189 - DNA, 25 bp, Homo sapien
gaccgccctctccagtgctgagggt

SEQ ID NO: 3490190 - DNA, 25 bp, Homo sapien
tgtaggtcacgcagatcatctcctg

SEQ ID NO: 3490191 - DNA, 25 bp, Homo sapien
gctcttggttgctatctgcctttgc

SEQ ID NO: 3490192 - DNA, 25 bp, Homo sapien
tctttcagggtagtcaaccaactgg

SEQ ID NO: 3490193 - DNA, 25 bp, Homo sapien
ggcataactttgacagtctctttca

SEQ ID NO: 3490194 - DNA, 25 bp, Homo sapien
ctggagcactgacaacccattctgg

SEQ ID NO: 3490195 - DNA, 25 bp, Homo sapien
gagcactgacaacccattctgggcc

SEQ ID NO: 3490196 - DNA, 25 bp, Homo sapien
ggagcactgacaacccattctgggc

SEQ ID NO: 3490197 - DNA, 25 bp, Homo sapien
gcactgacaacccattctgggccat

SEQ ID NO: 3490198 - DNA, 25 bp, Homo sapien
tttgctgtctcatggactcagcttc

SEQ ID NO: 3490199 - DNA, 25 bp, Homo sapien
tctcgttccaactccatgcttctgt

SEQ ID NO: 3490200 - DNA, 25 bp, Homo sapien
tctttggccaacgtggactccttat

SEQ ID NO: 3490201 - DNA, 25 bp, Homo sapien
gatgcctggcaaagtcccgtgtgtt

SEQ ID NO: 3490202 - DNA, 25 bp, Homo sapien
ttacaaggtgcttgcatgtgagttt

SEQ ID NO: 3490203 - DNA, 25 bp, Homo sapien
gaatttacaaggtgcttgcatgtga

SEQ ID NO: 3490204 - DNA, 25 bp, Homo sapien
tttacaaggtgcttgcatgtgagtt

SEQ ID NO: 3490205 - DNA, 25 bp, Homo sapien
aatttacaaggtgcttgcatgtgag

SEQ ID NO: 3490206 - DNA, 25 bp, Homo sapien
ctacagtgtcctgcccggcaagtgc

SEQ ID NO: 3490207 - DNA, 25 bp, Homo sapien
ggagctgctctacagtgtcctgccc

SEQ ID NO: 3490208 - DNA, 25 bp, Homo sapien
agctgctctacagtgtcctgcccgg

SEQ ID NO: 3490209 - DNA, 25 bp, Homo sapien
tgctctacagtgtcctgcccggcaa

SEQ ID NO: 3490210 - DNA, 25 bp, Homo sapien
tttacagaaagaatgagagaggaat

SEQ ID NO: 3490211 - DNA, 25 bp, Homo sapien
gtttacagaaagaatgagagaggaa

SEQ ID NO: 3490212 - DNA, 25 bp, Homo sapien
ccatctggactactgtcaagatgtc

SEQ ID NO: 3490213 - DNA, 25 bp, Homo sapien
caaagatgatacatgtaccggtgct

SEQ ID NO: 3490214 - DNA, 25 bp, Homo sapien
aagcttgtcaagatgtcgtggagcc

SEQ ID NO: 3490215 - DNA, 25 bp, Homo sapien
gcaggcagcaactggaagcttgtca

SEQ ID NO: 3490216 - DNA, 25 bp, Homo sapien
tcagaacatggtcaggcagggatcg

SEQ ID NO: 3490217 - DNA, 25 bp, Homo sapien
tcaggcagggatcggttgagtgcag

SEQ ID NO: 3490218 - DNA, 25 bp, Homo sapien
gtcaggcagggatcggttgagtgca

SEQ ID NO: 3490219 - DNA, 25 bp, Homo sapien
ctctcagaacatggtcaggcaggga

SEQ ID NO: 3490220 - DNA, 25 bp, Homo sapien
tgtttgctcttgaagttgtcacccc

SEQ ID NO: 3490221 - DNA, 25 bp, Homo sapien
tttccaagcgactcggtgcagcgct

SEQ ID NO: 3490222 - DNA, 25 bp, Homo sapien
taagtggctgaagcaacgtctttgg

SEQ ID NO: 3490223 - DNA, 25 bp, Homo sapien
agagattccgatcgccctgggagga

SEQ ID NO: 3490224 - DNA, 25 bp, Homo sapien
caacgaagaacacatgttggagccc

SEQ ID NO: 3490225 - DNA, 25 bp, Homo sapien
cttggcatcgttcccgcagctaact

SEQ ID NO: 3490226 - DNA, 25 bp, Homo sapien
caattattttatcgccttgcttctc

SEQ ID NO: 3490227 - DNA, 25 bp, Homo sapien
agcgcctgctaatctccctttcatt

SEQ ID NO: 3490228 - DNA, 25 bp, Homo sapien
tttggaagcatttgtcccgacagcg

SEQ ID NO: 3490229 - DNA, 25 bp, Homo sapien
cagcaacccaccacgattacttaga

SEQ ID NO: 3490230 - DNA, 25 bp, Homo sapien
ggcactttcattagaaggacgaagc

SEQ ID NO: 3490231 - DNA, 25 bp, Homo sapien
tgagactgaggttgaatgcactctt

SEQ ID NO: 3490232 - DNA, 25 bp, Homo sapien
cagctgctcaagagtggcactttca

SEQ ID NO: 3490233 - DNA, 25 bp, Homo sapien
ctgtagatgactgacttccagccca

SEQ ID NO: 3490234 - DNA, 25 bp, Homo sapien
caagttatacacaggcttaggccac

SEQ ID NO: 3490235 - DNA, 25 bp, Homo sapien
gcaaaacgttcaagggctgtcccat

SEQ ID NO: 3490236 - DNA, 25 bp, Homo sapien
ctaaagcaagtggtccgactctggg

SEQ ID NO: 3490237 - DNA, 25 bp, Homo sapien
agggcggcctcggcagaaggtgagt

SEQ ID NO: 3490238 - DNA, 25 bp, Homo sapien
cagggcggcctcggcagaaggtgag

SEQ ID NO: 3490239 - DNA, 25 bp, Homo sapien
gggcggcctcggcagaaggtgagtg

SEQ ID NO: 3490240 - DNA, 25 bp, Homo sapien
gcagggcggcctcggcagaaggtga

SEQ ID NO: 3490241 - DNA, 25 bp, Homo sapien
cactggtttggtgagagtacctgta

SEQ ID NO: 3490242 - DNA, 25 bp, Homo sapien
taagagagactatcattccactggt

SEQ ID NO: 3490243 - DNA, 25 bp, Homo sapien
tgactttcaggcatatctacttggc

SEQ ID NO: 3490244 - DNA, 25 bp, Homo sapien
tctacttggccattgcaggcaataa

SEQ ID NO: 3490245 - DNA, 25 bp, Homo sapien
gcccagcgcctcgcagccgtctgca

SEQ ID NO: 3490246 - DNA, 25 bp, Homo sapien
ggcaacgcggcagacctgactcgcg

SEQ ID NO: 3490247 - DNA, 25 bp, Homo sapien
agcaatattcgttccagggccgcgg

SEQ ID NO: 3490248 - DNA, 25 bp, Homo sapien
agtagtgtgcgcaccggttccgcag

SEQ ID NO: 3490249 - DNA, 25 bp, Homo sapien
cagctgggcttccgcgacaccaggg

SEQ ID NO: 3490250 - DNA, 25 bp, Homo sapien
gaaaggcagtcggtaccagtgccca

SEQ ID NO: 3490251 - DNA, 25 bp, Homo sapien
tatcgcagctaacaaggaaaggcag

SEQ ID NO: 3490252 - DNA, 25 bp, Homo sapien
caccgcccggtgttattagattcca

SEQ ID NO: 3490253 - DNA, 25 bp, Homo sapien
ctcaggaaaggatctggctcgtgta

SEQ ID NO: 3490254 - DNA, 25 bp, Homo sapien
tgtggcctgaggataagtaagtggg

SEQ ID NO: 3490255 - DNA, 25 bp, Homo sapien
acaaccaacatcaaccagaagggtg

SEQ ID NO: 3490256 - DNA, 25 bp, Homo sapien
accaacatcaaccagaagggtgtgg

SEQ ID NO: 3490257 - DNA, 25 bp, Homo sapien
aggtgtggcctgaggataagtaagt

SEQ ID NO: 3490258 - DNA, 25 bp, Homo sapien
tctggatcaaagtgcaggccgatca

SEQ ID NO: 3490259 - DNA, 25 bp, Homo sapien
gatcaaagtgcaggccgatcaaaga

SEQ ID NO: 3490260 - DNA, 25 bp, Homo sapien
gctctggatcaaagtgcaggccgat

SEQ ID NO: 3490261 - DNA, 25 bp, Homo sapien
tggatcaaagtgcaggccgatcaaa

SEQ ID NO: 3490262 - DNA, 25 bp, Homo sapien
cctgagcagaagatagtctcagccc

SEQ ID NO: 3490263 - DNA, 25 bp, Homo sapien
gagcagaagatagtctcagccctgc

SEQ ID NO: 3490264 - DNA, 25 bp, Homo sapien
ttcctgagcagaagatagtctcagc

SEQ ID NO: 3490265 - DNA, 25 bp, Homo sapien
tgagcagaagatagtctcagccctg

SEQ ID NO: 3490266 - DNA, 25 bp, Homo sapien
taagtcacgtccctgctctacagtg

SEQ ID NO: 3490267 - DNA, 25 bp, Homo sapien
actgtggccgcagtcctgaacttca

SEQ ID NO: 3490268 - DNA, 25 bp, Homo sapien
tccccgtctttagaatttgacagct

SEQ ID NO: 3490269 - DNA, 25 bp, Homo sapien
cctgaggaggtccagagtctatccc

SEQ ID NO: 3490270 - DNA, 25 bp, Homo sapien
ctttattctagatataggtttctta

SEQ ID NO: 3490271 - DNA, 25 bp, Homo sapien
tctttattctagatataggtttctt

SEQ ID NO: 3490272 - DNA, 25 bp, Homo sapien
ctgtgaagaattgcatgtttttgtg

SEQ ID NO: 3490273 - DNA, 25 bp, Homo sapien
cacttgttagtagatggacgtttga

SEQ ID NO: 3490274 - DNA, 25 bp, Homo sapien
aatgatgctgtgaagaattgcatgt

SEQ ID NO: 3490275 - DNA, 25 bp, Homo sapien
ctcttggatatgcagtagtctcccc

SEQ ID NO: 3490276 - DNA, 25 bp, Homo sapien
taacaaggtctatctttcttctagt

SEQ ID NO: 3490277 - DNA, 25 bp, Homo sapien
ccaccttcagtactttgcttagaaa

SEQ ID NO: 3490278 - DNA, 25 bp, Homo sapien
tctcaccagaagtacgtttaacatt

SEQ ID NO: 3490279 - DNA, 25 bp, Homo sapien
tgctttccatgaaacatgagaatcc

SEQ ID NO: 3490280 - DNA, 25 bp, Homo sapien
accgctgacactccgtgtcactcca

SEQ ID NO: 3490281 - DNA, 25 bp, Homo sapien
gctgacactccgtgtcactccaccg

SEQ ID NO: 3490282 - DNA, 25 bp, Homo sapien
agccgtgattgcaccgctgacactc

SEQ ID NO: 3490283 - DNA, 25 bp, Homo sapien
acactccgtgtcactccaccgctgg

SEQ ID NO: 3490284 - DNA, 25 bp, Homo sapien
aaattcacaccagtggacagcaggg

SEQ ID NO: 3490285 - DNA, 25 bp, Homo sapien
taaaattcacaccagtggacagcag

SEQ ID NO: 3490286 - DNA, 25 bp, Homo sapien
ctaaaattcacaccagtggacagca

SEQ ID NO: 3490287 - DNA, 25 bp, Homo sapien
aaaattcacaccagtggacagcagg

SEQ ID NO: 3490288 - DNA, 25 bp, Homo sapien
cattcttgttcttgacaccttgtag

SEQ ID NO: 3490289 - DNA, 25 bp, Homo sapien
tctgcggcttccattacacgtatgt

SEQ ID NO: 3490290 - DNA, 25 bp, Homo sapien
gattagttaaccttatatgagtggg

SEQ ID NO: 3490291 - DNA, 25 bp, Homo sapien
gaaatcaacgctagcaccaatgtca

SEQ ID NO: 3490292 - DNA, 25 bp, Homo sapien
ctttcgacctgaaggatgtccttta

SEQ ID NO: 3490293 - DNA, 25 bp, Homo sapien
ttaacagagttatcaccttacctgg

SEQ ID NO: 3490294 - DNA, 25 bp, Homo sapien
tgtgaaatgattggtatgatcaagc

SEQ ID NO: 3490295 - DNA, 25 bp, Homo sapien
cctttgtaatgagaatccttaagat

SEQ ID NO: 3490296 - DNA, 25 bp, Homo sapien
taactgcttatagaaaaacatgaga

SEQ ID NO: 3490297 - DNA, 25 bp, Homo sapien
tgtgtggcttctcttaactgcttat

SEQ ID NO: 3490298 - DNA, 25 bp, Homo sapien
agaaagcaaagtgttcaggatgctg

SEQ ID NO: 3490299 - DNA, 25 bp, Homo sapien
caaagtgttcaggatgctgtgtggc

SEQ ID NO: 3490300 - DNA, 25 bp, Homo sapien
gcgcgtggcccttgaaatttgccat

SEQ ID NO: 3490301 - DNA, 25 bp, Homo sapien
agcgggtacttcactgaccaacaca

SEQ ID NO: 3490302 - DNA, 25 bp, Homo sapien
aagaaactccctggaagcgcgtggc

SEQ ID NO: 3490303 - DNA, 25 bp, Homo sapien
cacagcccaatgatcaggaagaaac

SEQ ID NO: 3490304 - DNA, 25 bp, Homo sapien
gttcttccgcgtgtggctaaagtac

SEQ ID NO: 3490305 - DNA, 25 bp, Homo sapien
ctgatagtaatgtagtgggctgttc

SEQ ID NO: 3490306 - DNA, 25 bp, Homo sapien
tgggctgttcttccgcgtgtggcta

SEQ ID NO: 3490307 - DNA, 25 bp, Homo sapien
taatgtagtgggctgttcttccgcg

SEQ ID NO: 3490308 - DNA, 25 bp, Homo sapien
ttgcggcttcgacgatctcgagacg

SEQ ID NO: 3490309 - DNA, 25 bp, Homo sapien
cagtgacggaaaacaaagtcctaat

SEQ ID NO: 3490310 - DNA, 25 bp, Homo sapien
cctaattgcggcttcgacgatctcg

SEQ ID NO: 3490311 - DNA, 25 bp, Homo sapien
aaacaaagtcctaattgcggcttcg

SEQ ID NO: 3490312 - DNA, 25 bp, Homo sapien
gaggagattccctagaccaaatgac

SEQ ID NO: 3490313 - DNA, 25 bp, Homo sapien
catgatgtgagagctgtcaaccgtt

SEQ ID NO: 3490314 - DNA, 25 bp, Homo sapien
ccatcaggaaattgttgccctatta

SEQ ID NO: 3490315 - DNA, 25 bp, Homo sapien
aaaatagtctagtggccatcaggaa

SEQ ID NO: 3490316 - DNA, 25 bp, Homo sapien
gactgcaaagaataggtacatggtg

SEQ ID NO: 3490317 - DNA, 25 bp, Homo sapien
ccaagggaacgtggctgaccagata

SEQ ID NO: 3490318 - DNA, 25 bp, Homo sapien
catgtcaacaattcctgagactgca

SEQ ID NO: 3490319 - DNA, 25 bp, Homo sapien
gaccagataggtgagcatgtcaaca

SEQ ID NO: 3490320 - DNA, 25 bp, Homo sapien
caacctttttcgactcttgctgagg

SEQ ID NO: 3490321 - DNA, 25 bp, Homo sapien
aaatctctatggaacccatggtggg

SEQ ID NO: 3490322 - DNA, 25 bp, Homo sapien
gcatggtggcattcaaccagctggg

SEQ ID NO: 3490323 - DNA, 25 bp, Homo sapien
ttgtgatggaggcaagacggtacct

SEQ ID NO: 3490324 - DNA, 25 bp, Homo sapien
tgtctcagctaggttcttcagcatt

SEQ ID NO: 3490325 - DNA, 25 bp, Homo sapien
gctttcaccatcaccgaagtttcct

SEQ ID NO: 3490326 - DNA, 25 bp, Homo sapien
ccacaaaccagatggcagctgtcag

SEQ ID NO: 3490327 - DNA, 25 bp, Homo sapien
tcagggctacgcttggctttcacca

SEQ ID NO: 3490328 - DNA, 25 bp, Homo sapien
gggagatactaacacaccctccgaa

SEQ ID NO: 3490329 - DNA, 25 bp, Homo sapien
aatgtggtcccggaagatcacctct

SEQ ID NO: 3490330 - DNA, 25 bp, Homo sapien
tgtgctggtccagcggaggccggtt

SEQ ID NO: 3490331 - DNA, 25 bp, Homo sapien
gatgagactggttcggaaaagttcc

SEQ ID NO: 3490332 - DNA, 25 bp, Homo sapien
tcagggatttctctgggatgcgctc

SEQ ID NO: 3490333 - DNA, 25 bp, Homo sapien
tctaaacccctttgcatggcatgtt

SEQ ID NO: 3490334 - DNA, 25 bp, Homo sapien
tcagaccccatattctcgtcaggga

SEQ ID NO: 3490335 - DNA, 25 bp, Homo sapien
gcttctccatccagaccagcgaggg

SEQ ID NO: 3490336 - DNA, 25 bp, Homo sapien
caagagaatagttgacggccacaat

SEQ ID NO: 3490337 - DNA, 25 bp, Homo sapien
aaggtgggaacagcacaaacccaat

SEQ ID NO: 3490338 - DNA, 25 bp, Homo sapien
tctggtcccattcgggtgttccaaa

SEQ ID NO: 3490339 - DNA, 25 bp, Homo sapien
atcatccttctggtcccattcgggt

SEQ ID NO: 3490340 - DNA, 25 bp, Homo sapien
taaaattcacccttgcactgagagg

SEQ ID NO: 3490341 - DNA, 25 bp, Homo sapien
gaaagagtaagagccaattagccag

SEQ ID NO: 3490342 - DNA, 25 bp, Homo sapien
gttatctgtatacctctaaggagcc

SEQ ID NO: 3490343 - DNA, 25 bp, Homo sapien
cgatggtggaaactactgaatgtca

SEQ ID NO: 3490344 - DNA, 25 bp, Homo sapien
tctgagccactcaagagggcggtct

SEQ ID NO: 3490345 - DNA, 25 bp, Homo sapien
gtgtctcttcatccgagtcaaaagg

SEQ ID NO: 3490346 - DNA, 25 bp, Homo sapien
tggtaagtgtcatctgaattcagct

SEQ ID NO: 3490347 - DNA, 25 bp, Homo sapien
ggcggtctggtaagtgtcatctgaa

SEQ ID NO: 3490348 - DNA, 25 bp, Homo sapien
caaaagcagcacgttctcctgggct

SEQ ID NO: 3490349 - DNA, 25 bp, Homo sapien
gggtactataccaacacagacttta

SEQ ID NO: 3490350 - DNA, 25 bp, Homo sapien
tctcagtagagccagtaaccagctt

SEQ ID NO: 3490351 - DNA, 25 bp, Homo sapien
ccttgctggacacatatctcaggag

SEQ ID NO: 3490352 - DNA, 25 bp, Homo sapien
catttcttccaaagcgcatgcagtg

SEQ ID NO: 3490353 - DNA, 25 bp, Homo sapien
agtattatttggtctctaaggccca

SEQ ID NO: 3490354 - DNA, 25 bp, Homo sapien
tctcctggatttgtgtgacgtagca

SEQ ID NO: 3490355 - DNA, 25 bp, Homo sapien
tggatcctgaaagtggaacccggag

SEQ ID NO: 3490356 - DNA, 25 bp, Homo sapien
tgtattgaagctcttgtgggttgaa

SEQ ID NO: 3490357 - DNA, 25 bp, Homo sapien
atggaggcagcctggcttagttgtt

SEQ ID NO: 3490358 - DNA, 25 bp, Homo sapien
gttgcgaagcggaggagggtctggg

SEQ ID NO: 3490359 - DNA, 25 bp, Homo sapien
taatttttggagtgtattgaagctc

SEQ ID NO: 3490360 - DNA, 25 bp, Homo sapien
gtaccagccccaaaagaagccagtc

SEQ ID NO: 3490361 - DNA, 25 bp, Homo sapien
ttttgacccttgatccagagtagag

SEQ ID NO: 3490362 - DNA, 25 bp, Homo sapien
aagccagtctagatttgcaggtcat

SEQ ID NO: 3490363 - DNA, 25 bp, Homo sapien
caggcagagctcaggacgatatttt

SEQ ID NO: 3490364 - DNA, 25 bp, Homo sapien
taactgcatagtaatcgagaggctg

SEQ ID NO: 3490365 - DNA, 25 bp, Homo sapien
aaatgggattcgcttggcactgcct

SEQ ID NO: 3490366 - DNA, 25 bp, Homo sapien
gaattcatcgtaggcagcgaggtag

SEQ ID NO: 3490367 - DNA, 25 bp, Homo sapien
tgctccagagcaagagttgcaaacc

SEQ ID NO: 3490368 - DNA, 25 bp, Homo sapien
caacatgcgtggtgatacatactgg

SEQ ID NO: 3490369 - DNA, 25 bp, Homo sapien
tctgggccagagaatacctgtcgat

SEQ ID NO: 3490370 - DNA, 25 bp, Homo sapien
gagcgtttcttgcagaagtgcacac

SEQ ID NO: 3490371 - DNA, 25 bp, Homo sapien
taaagggcacgatgaaatgagtctg

SEQ ID NO: 3490372 - DNA, 25 bp, Homo sapien
gcactgtgccatgtactgagggata

SEQ ID NO: 3490373 - DNA, 25 bp, Homo sapien
cttggactgtgctaaagtgaggaca

SEQ ID NO: 3490374 - DNA, 25 bp, Homo sapien
tgtttgttcctcaccagtggccctg

SEQ ID NO: 3490375 - DNA, 25 bp, Homo sapien
tagctaacctctcttatctccggga

SEQ ID NO: 3490376 - DNA, 25 bp, Homo sapien
ccccactagcttgaaaggctgcatt

SEQ ID NO: 3490377 - DNA, 25 bp, Homo sapien
tatggagtcttttgctctacagatc

SEQ ID NO: 3490378 - DNA, 25 bp, Homo sapien
tgtgtcttccttaccccaggatcat

SEQ ID NO: 3490379 - DNA, 25 bp, Homo sapien
tctaggtttcgtgtctgtgtcttcc

SEQ ID NO: 3490380 - DNA, 25 bp, Homo sapien
ccacagccacgttggatttacaaga

SEQ ID NO: 3490381 - DNA, 25 bp, Homo sapien
agcacgttctcctagtcctgcggtg

SEQ ID NO: 3490382 - DNA, 25 bp, Homo sapien
tggtgcccacactttcaaccacgga

SEQ ID NO: 3490383 - DNA, 25 bp, Homo sapien
tctcccctattggagtccacagcca

SEQ ID NO: 3490384 - DNA, 25 bp, Homo sapien
gccactgctgggagtacctggaata

SEQ ID NO: 3490385 - DNA, 25 bp, Homo sapien
tgtgaagccgtactaagcaaaaccc

SEQ ID NO: 3490386 - DNA, 25 bp, Homo sapien
caacagtgtaacaggaacttagagc

SEQ ID NO: 3490387 - DNA, 25 bp, Homo sapien
gggaagaacattagctcggccggcc

SEQ ID NO: 3490388 - DNA, 25 bp, Homo sapien
tggcctctctcaagacacattgaca

SEQ ID NO: 3490389 - DNA, 25 bp, Homo sapien
gatgctaaagctgacccactggttg

SEQ ID NO: 3490390 - DNA, 25 bp, Homo sapien
gatggcagtcgagccaaatcgcatg

SEQ ID NO: 3490391 - DNA, 25 bp, Homo sapien
gcatggctttcagatcaggtattct

SEQ ID NO: 3490392 - DNA, 25 bp, Homo sapien
tggatcaagcctgtaggaagtttct

SEQ ID NO: 3490393 - DNA, 25 bp, Homo sapien
atcaagcctgtaggaagtttctgac

SEQ ID NO: 3490394 - DNA, 25 bp, Homo sapien
tttggatcaagcctgtaggaagttt

SEQ ID NO: 3490395 - DNA, 25 bp, Homo sapien
gatcaagcctgtaggaagtttctga

SEQ ID NO: 3490396 - DNA, 25 bp, Homo sapien
tgttgataggtccagcaaatcacca

SEQ ID NO: 3490397 - DNA, 25 bp, Homo sapien
atgatgtgttgataggtccagcaaa

SEQ ID NO: 3490398 - DNA, 25 bp, Homo sapien
tgtgttgataggtccagcaaatcac

SEQ ID NO: 3490399 - DNA, 25 bp, Homo sapien
gatgtgttgataggtccagcaaatc

SEQ ID NO: 3490400 - DNA, 25 bp, Homo sapien
tacatcgcggttttactagaataac

SEQ ID NO: 3490401 - DNA, 25 bp, Homo sapien
atacatcgcggttttactagaataa

SEQ ID NO: 3490402 - DNA, 25 bp, Homo sapien
aatacatcgcggttttactagaata

SEQ ID NO: 3490403 - DNA, 25 bp, Homo sapien
aaatacatcgcggttttactagaat

SEQ ID NO: 3490404 - DNA, 25 bp, Homo sapien
tcaaagcgtgggtgacgtttaccgc

SEQ ID NO: 3490405 - DNA, 25 bp, Homo sapien
tagactgaattccatagggccatcg

SEQ ID NO: 3490406 - DNA, 25 bp, Homo sapien
tctcagcagtggcaagaagccagtc

SEQ ID NO: 3490407 - DNA, 25 bp, Homo sapien
gttgtaacatcacctggcctcagag

SEQ ID NO: 3490408 - DNA, 25 bp, Homo sapien
cacctcagtggttgtcagtttatct

SEQ ID NO: 3490409 - DNA, 25 bp, Homo sapien
caagacagtgtaactattggcttag

SEQ ID NO: 3490410 - DNA, 25 bp, Homo sapien
aagttagattgagggttgaacacag

SEQ ID NO: 3490411 - DNA, 25 bp, Homo sapien
caaaccctgacattacaagacagtg

SEQ ID NO: 3490412 - DNA, 25 bp, Homo sapien
ccgtgagcagtgttatgtgtgaacc

SEQ ID NO: 3490413 - DNA, 25 bp, Homo sapien
tgtgtaggcaggctatccaaagagc

SEQ ID NO: 3490414 - DNA, 25 bp, Homo sapien
cattcagtcccaagaaaggctttgc

SEQ ID NO: 3490415 - DNA, 25 bp, Homo sapien
gccattgggatggttagcttataca

SEQ ID NO: 3490416 - DNA, 25 bp, Homo sapien
gcagctgagttccatgtcccttgac

SEQ ID NO: 3490417 - DNA, 25 bp, Homo sapien
tgacagttgtattgtacgagatcat

SEQ ID NO: 3490418 - DNA, 25 bp, Homo sapien
gcttgggagcagctgagttccatgt

SEQ ID NO: 3490419 - DNA, 25 bp, Homo sapien
ctggttttgattttgtgtggcttgg

SEQ ID NO: 3490420 - DNA, 25 bp, Homo sapien
caggtggaaaccatgctcgggtcct

SEQ ID NO: 3490421 - DNA, 25 bp, Homo sapien
tatttaaaggacatctgacagtgcc

SEQ ID NO: 3490422 - DNA, 25 bp, Homo sapien
tctggttccctcgagatcaagtcta

SEQ ID NO: 3490423 - DNA, 25 bp, Homo sapien
gaatgcatttcgaatcaggtggact

SEQ ID NO: 3490424 - DNA, 25 bp, Homo sapien
tctctttgtttctatcactcctcca

SEQ ID NO: 3490425 - DNA, 25 bp, Homo sapien
agggaaccagataagccagggtcca

SEQ ID NO: 3490426 - DNA, 25 bp, Homo sapien
gggtccagactaccccatagactgg

SEQ ID NO: 3490427 - DNA, 25 bp, Homo sapien
ccatagactgggagggtgtttcgtc

SEQ ID NO: 3490428 - DNA, 25 bp, Homo sapien
gagggtgtttcgtctttgcttagtc

SEQ ID NO: 3490429 - DNA, 25 bp, Homo sapien
ttctcgtctctaggcacggcatggg

SEQ ID NO: 3490430 - DNA, 25 bp, Homo sapien
ggttttacacgaacagcagagcacg

SEQ ID NO: 3490431 - DNA, 25 bp, Homo sapien
taacgtcgagatcaggttgccaggc

SEQ ID NO: 3490432 - DNA, 25 bp, Homo sapien
gttgatttctatcacccctagggag

SEQ ID NO: 3490433 - DNA, 25 bp, Homo sapien
agcgggggcttgaccccaatgcgaa

SEQ ID NO: 3490434 - DNA, 25 bp, Homo sapien
caatgcgaagagtcgggttttctga

SEQ ID NO: 3490435 - DNA, 25 bp, Homo sapien
cccaatgcgaagagtcgggttttct

SEQ ID NO: 3490436 - DNA, 25 bp, Homo sapien
ccgcagcgggggcttgaccccaatg

SEQ ID NO: 3490437 - DNA, 25 bp, Homo sapien
gcgggcttagcacgggcgcaggctg

SEQ ID NO: 3490438 - DNA, 25 bp, Homo sapien
aggcgggcttagcacgggcgcaggc

SEQ ID NO: 3490439 - DNA, 25 bp, Homo sapien
gggaggcgggcttagcacgggcgca

SEQ ID NO: 3490440 - DNA, 25 bp, Homo sapien
aggctgccctcggcgcccgagacac

SEQ ID NO: 3490441 - DNA, 25 bp, Homo sapien
cagtgaaagcgctctcaaggtgcgg

SEQ ID NO: 3490442 - DNA, 25 bp, Homo sapien
ccagattggtagaggagaaaaaaga

SEQ ID NO: 3490443 - DNA, 25 bp, Homo sapien
gagttcggttttcgccggcgctcca

SEQ ID NO: 3490444 - DNA, 25 bp, Homo sapien
ggccaggccacttcggaggcaatct

SEQ ID NO: 3490445 - DNA, 25 bp, Homo sapien
gttggagctgggtatctctccaaag

SEQ ID NO: 3490446 - DNA, 25 bp, Homo sapien
tgtgaaggcaattttaagggacagc

SEQ ID NO: 3490447 - DNA, 25 bp, Homo sapien
gccctgcgtattgcctgccagtggg

SEQ ID NO: 3490448 - DNA, 25 bp, Homo sapien
agctgggtatctctccaaagctggg

SEQ ID NO: 3490449 - DNA, 25 bp, Homo sapien
gatatcaccgaagggaaaaccgctc

SEQ ID NO: 3490450 - DNA, 25 bp, Homo sapien
tgctaagcaaagcactttactcggt

SEQ ID NO: 3490451 - DNA, 25 bp, Homo sapien
tactcggtaaagtaagagctcactt

SEQ ID NO: 3490452 - DNA, 25 bp, Homo sapien
cgtagcaaggtagatatcacgaaca

SEQ ID NO: 3490453 - DNA, 25 bp, Homo sapien
taaggaagaacaagacacggcctag

SEQ ID NO: 3490454 - DNA, 25 bp, Homo sapien
gggaccatctcagttcatcagcaag

SEQ ID NO: 3490455 - DNA, 25 bp, Homo sapien
gaccctctgaataaaaactctgtgg

SEQ ID NO: 3490456 - DNA, 25 bp, Homo sapien
taaggtcggcctcatctaagtccag

SEQ ID NO: 3490457 - DNA, 25 bp, Homo sapien
tgtgccctgcaaacttgagtctccc

SEQ ID NO: 3490458 - DNA, 25 bp, Homo sapien
tcaattcagagaaactgccaagctc

SEQ ID NO: 3490459 - DNA, 25 bp, Homo sapien
gctgaatattcaagggggccttctg

SEQ ID NO: 3490460 - DNA, 25 bp, Homo sapien
tccctggaagcccagtcatgtctcc

SEQ ID NO: 3490461 - DNA, 25 bp, Homo sapien
agttccagcaacaccgggggcgcag

SEQ ID NO: 3490462 - DNA, 25 bp, Homo sapien
caaagatacacgtgttggcctcggg

SEQ ID NO: 3490463 - DNA, 25 bp, Homo sapien
tcttccgtcccaggtcaaagataca

SEQ ID NO: 3490464 - DNA, 25 bp, Homo sapien
caaattcgttcttgcagttccagca

SEQ ID NO: 3490465 - DNA, 25 bp, Homo sapien
tcagagtccgatacttgcccagggc

SEQ ID NO: 3490466 - DNA, 25 bp, Homo sapien
ttggtgcggacggacttgacaaccc

SEQ ID NO: 3490467 - DNA, 25 bp, Homo sapien
ttctggcgccgggaacctgtccttg

SEQ ID NO: 3490468 - DNA, 25 bp, Homo sapien
tcatccgaatcgaaggtggcaaagc

SEQ ID NO: 3490469 - DNA, 25 bp, Homo sapien
caaccggaactgacttcatattacc

SEQ ID NO: 3490470 - DNA, 25 bp, Homo sapien
gaactgacttcatattaccacgccc

SEQ ID NO: 3490471 - DNA, 25 bp, Homo sapien
gaagcatctaaagccagttcgccgc

SEQ ID NO: 3490472 - DNA, 25 bp, Homo sapien
ttacaccaaccggaactgacttcat

SEQ ID NO: 3490473 - DNA, 25 bp, Homo sapien
ggactcctcgcttagcacaccgcga

SEQ ID NO: 3490474 - DNA, 25 bp, Homo sapien
ctcacacactcggactcctcgctta

SEQ ID NO: 3490475 - DNA, 25 bp, Homo sapien
tcggactcctcgcttagcacaccgc

SEQ ID NO: 3490476 - DNA, 25 bp, Homo sapien
acactcggactcctcgcttagcaca

SEQ ID NO: 3490477 - DNA, 25 bp, Homo sapien
ctcgccgggtcgctctagcgcgcgg

SEQ ID NO: 3490478 - DNA, 25 bp, Homo sapien
cctcgccgggtcgctctagcgcgcg

SEQ ID NO: 3490479 - DNA, 25 bp, Homo sapien
ccctcgccgggtcgctctagcgcgc

SEQ ID NO: 3490480 - DNA, 25 bp, Homo sapien
cgatgtagccggccagcgccaaggc

SEQ ID NO: 3490481 - DNA, 25 bp, Homo sapien
caaggcaggcgccgtgagccccacc

SEQ ID NO: 3490482 - DNA, 25 bp, Homo sapien
gccaaggcaggcgccgtgagcccca

SEQ ID NO: 3490483 - DNA, 25 bp, Homo sapien
ctcgatgtagccggccagcgccaag

SEQ ID NO: 3490484 - DNA, 25 bp, Homo sapien
cgtccacctggcaacaaaggcgaag

SEQ ID NO: 3490485 - DNA, 25 bp, Homo sapien
ccagagcgggtttcctcggtctacg

SEQ ID NO: 3490486 - DNA, 25 bp, Homo sapien
tcatttggcctctgcggcggctgag

SEQ ID NO: 3490487 - DNA, 25 bp, Homo sapien
gccacttaaaaaatgcgcgtccgcg

SEQ ID NO: 3490488 - DNA, 25 bp, Homo sapien
ggaagtaaagatcaagctcgccgtc

SEQ ID NO: 3490489 - DNA, 25 bp, Homo sapien
caacagtttacacgccttcgcgggc

SEQ ID NO: 3490490 - DNA, 25 bp, Homo sapien
gttcaagcaccacttcgagaaggga

SEQ ID NO: 3490491 - DNA, 25 bp, Homo sapien
gatggaattctgacacccgaagagg

SEQ ID NO: 3490492 - DNA, 25 bp, Homo sapien
tatcccagatctaacaaacgcattg

SEQ ID NO: 3490493 - DNA, 25 bp, Homo sapien
tctaggcgaaatatctccctcacag

SEQ ID NO: 3490494 - DNA, 25 bp, Homo sapien
gcaagttacatgcttagccttccag

SEQ ID NO: 3490495 - DNA, 25 bp, Homo sapien
agctctaatagttcacctctccggg

SEQ ID NO: 3490496 - DNA, 25 bp, Homo sapien
gctcataatagtctcacgatacttt

SEQ ID NO: 3490497 - DNA, 25 bp, Homo sapien
gttactgatctgctcaagttttcta

SEQ ID NO: 3490498 - DNA, 25 bp, Homo sapien
tcttggtagtttgcacgtttttaga

SEQ ID NO: 3490499 - DNA, 25 bp, Homo sapien
accgcactcagcctgttgggaggtt

SEQ ID NO: 3490500 - DNA, 25 bp, Homo sapien
gaggaatccttcagtcagttctctg

SEQ ID NO: 3490501 - DNA, 25 bp, Homo sapien
tcctgcacatgcacaaggtcaagag

SEQ ID NO: 3490502 - DNA, 25 bp, Homo sapien
gaagtctttggtgatcctaagccat

SEQ ID NO: 3490503 - DNA, 25 bp, Homo sapien
tctcgttcatgttcaaggtgttcct

SEQ ID NO: 3490504 - DNA, 25 bp, Homo sapien
cgcgcccggccaaatatccatgttt

SEQ ID NO: 3490505 - DNA, 25 bp, Homo sapien
ccgcgcccggccaaatatccatgtt

SEQ ID NO: 3490506 - DNA, 25 bp, Homo sapien
gcgcccggccaaatatccatgtttt

SEQ ID NO: 3490507 - DNA, 25 bp, Homo sapien
tattaacataccgacggctcaggcc

SEQ ID NO: 3490508 - DNA, 25 bp, Homo sapien
gcttgaacccgaggtgcacaaggga

SEQ ID NO: 3490509 - DNA, 25 bp, Homo sapien
taactatggacatgaggaaagcagg

SEQ ID NO: 3490510 - DNA, 25 bp, Homo sapien
gccgcagagcaagcacgttagcatc

SEQ ID NO: 3490511 - DNA, 25 bp, Homo sapien
tccggttgtatagcagtaaaatgaa

SEQ ID NO: 3490512 - DNA, 25 bp, Homo sapien
tgtctccaacgctttttatggaaac

SEQ ID NO: 3490513 - DNA, 25 bp, Homo sapien
ttcttacagtgacatatgccggctg

SEQ ID NO: 3490514 - DNA, 25 bp, Homo sapien
tcttgttaagcattttccggttgta

SEQ ID NO: 3490515 - DNA, 25 bp, Homo sapien
gaaacttggattgtgtgtcgagaaa

SEQ ID NO: 3490516 - DNA, 25 bp, Homo sapien
aaaaagatgtgtaccaaaagtcctg

SEQ ID NO: 3490517 - DNA, 25 bp, Homo sapien
gcttcccacttcgaaagttcagata

SEQ ID NO: 3490518 - DNA, 25 bp, Homo sapien
tcgtgtactgaaaccagtgctctcc

SEQ ID NO: 3490519 - DNA, 25 bp, Homo sapien
aaaagtgtgaccacattcccaaatg

SEQ ID NO: 3490520 - DNA, 25 bp, Homo sapien
aaaaagtgtgaccacattcccaaat

SEQ ID NO: 3490521 - DNA, 25 bp, Homo sapien
aaagtgtgaccacattcccaaatgt

SEQ ID NO: 3490522 - DNA, 25 bp, Homo sapien
gcaaatcctgttccggcattggctg

SEQ ID NO: 3490523 - DNA, 25 bp, Homo sapien
tgcgatttgaggctcagcaacagca

SEQ ID NO: 3490524 - DNA, 25 bp, Homo sapien
ctgttccggcattggctgcaagagc

SEQ ID NO: 3490525 - DNA, 25 bp, Homo sapien
tttaacttcccacaaaacattgcga

SEQ ID NO: 3490526 - DNA, 25 bp, Homo sapien
ccatttcccagtctgaatgttcaca

SEQ ID NO: 3490527 - DNA, 25 bp, Homo sapien
cccatttcccagtctgaatgttcac

SEQ ID NO: 3490528 - DNA, 25 bp, Homo sapien
tttcccagtctgaatgttcacatgc

SEQ ID NO: 3490529 - DNA, 25 bp, Homo sapien
catttcccagtctgaatgttcacat

SEQ ID NO: 3490530 - DNA, 25 bp, Homo sapien
cacttgaaaggtgtaacaaagcgac

SEQ ID NO: 3490531 - DNA, 25 bp, Homo sapien
ctttttgtccctccggcaccagttg

SEQ ID NO: 3490532 - DNA, 25 bp, Homo sapien
tgtaacaaagcgactcttgcattgc

SEQ ID NO: 3490533 - DNA, 25 bp, Homo sapien
agttgtcaatactaacccgctggtt

SEQ ID NO: 3490534 - DNA, 25 bp, Homo sapien
tgtaattccaatgtatcaggcacaa

SEQ ID NO: 3490535 - DNA, 25 bp, Homo sapien
tggtcaaatggtgcaaacgtgtgtg

SEQ ID NO: 3490536 - DNA, 25 bp, Homo sapien
gaatggcaggtcctataagccctgg

SEQ ID NO: 3490537 - DNA, 25 bp, Homo sapien
tattccctgagcatttgaagcaaca

SEQ ID NO: 3490538 - DNA, 25 bp, Homo sapien
agtcactggacaaacataaagctct

SEQ ID NO: 3490539 - DNA, 25 bp, Homo sapien
tatattcaagctggtaacatcctca

SEQ ID NO: 3490540 - DNA, 25 bp, Homo sapien
catcctcaattttatcagcggagta

SEQ ID NO: 3490541 - DNA, 25 bp, Homo sapien
tacctaggcagatcagtattactct

SEQ ID NO: 3490542 - DNA, 25 bp, Homo sapien
taaaagcaagctgtaaaaggtcagg

SEQ ID NO: 3490543 - DNA, 25 bp, Homo sapien
caggtacagtatgatgccattaatg

SEQ ID NO: 3490544 - DNA, 25 bp, Homo sapien
taactcaatctatacaacaccttgg

SEQ ID NO: 3490545 - DNA, 25 bp, Homo sapien
tgcgcctggtcagaaatacaacctt

SEQ ID NO: 3490546 - DNA, 25 bp, Homo sapien
aggacatcacttacaaattcaccca

SEQ ID NO: 3490547 - DNA, 25 bp, Homo sapien
gtgattctcacacacctccatccgc

SEQ ID NO: 3490548 - DNA, 25 bp, Homo sapien
ctctttgactaccgtgtgccagtgc

SEQ ID NO: 3490549 - DNA, 25 bp, Homo sapien
cttttctggaactagcaggacatca

SEQ ID NO: 3490550 - DNA, 25 bp, Homo sapien
tgggagcagcatgccgtagctatat

SEQ ID NO: 3490551 - DNA, 25 bp, Homo sapien
taaggtcattccctgagtcagacat

SEQ ID NO: 3490552 - DNA, 25 bp, Homo sapien
ccgtagctatataaggtcattccct

SEQ ID NO: 3490553 - DNA, 25 bp, Homo sapien
cagcatgccgtagctatataaggtc

SEQ ID NO: 3490554 - DNA, 25 bp, Homo sapien
gtgccatggaactggtctaccccac

SEQ ID NO: 3490555 - DNA, 25 bp, Homo sapien
ttgacacagatccaataatctttgt

SEQ ID NO: 3490556 - DNA, 25 bp, Homo sapien
tttgacacagatccaataatctttg

SEQ ID NO: 3490557 - DNA, 25 bp, Homo sapien
ttttgacacagatccaataatcttt

SEQ ID NO: 3490558 - DNA, 25 bp, Homo sapien
agtcttccagatctgcttcagtagg

SEQ ID NO: 3490559 - DNA, 25 bp, Homo sapien
gtcttccagatctgcttcagtagga

SEQ ID NO: 3490560 - DNA, 25 bp, Homo sapien
ttccttgtctgacatggtgccgtcg

SEQ ID NO: 3490561 - DNA, 25 bp, Homo sapien
cgctgccgggttcagtaggattctc

SEQ ID NO: 3490562 - DNA, 25 bp, Homo sapien
gacatcatgagtaatttccttgtct

SEQ ID NO: 3490563 - DNA, 25 bp, Homo sapien
ttgtctgacatggtgccgtcgctgc

SEQ ID NO: 3490564 - DNA, 25 bp, Homo sapien
gtgcagaggtaccacacctttcctt

SEQ ID NO: 3490565 - DNA, 25 bp, Homo sapien
agtgcagaggtaccacacctttcct

SEQ ID NO: 3490566 - DNA, 25 bp, Homo sapien
atcgctttacacacagccatacaat

SEQ ID NO: 3490567 - DNA, 25 bp, Homo sapien
gcagccaccatatataaagcgcacg

SEQ ID NO: 3490568 - DNA, 25 bp, Homo sapien
attgttcctgttgccgccgcagcca

SEQ ID NO: 3490569 - DNA, 25 bp, Homo sapien
agcgcacgcactttcccttggagag

SEQ ID NO: 3490570 - DNA, 25 bp, Homo sapien
acgccagacaggacggtgctgccgc

SEQ ID NO: 3490571 - DNA, 25 bp, Homo sapien
acagatgcagccacgaagacggcag

SEQ ID NO: 3490572 - DNA, 25 bp, Homo sapien
gggaagacgaccgacagcaaacacc

SEQ ID NO: 3490573 - DNA, 25 bp, Homo sapien
gtgggcagggacaccacacagatgc

SEQ ID NO: 3490574 - DNA, 25 bp, Homo sapien
cactgccggcaggagagcaaagcct

SEQ ID NO: 3490575 - DNA, 25 bp, Homo sapien
ctataaaggcctgagcgctggagac

SEQ ID NO: 3490576 - DNA, 25 bp, Homo sapien
gacagcgggccgaaatgcttttttc

SEQ ID NO: 3490577 - DNA, 25 bp, Homo sapien
ttggttcacattgctggactggaaa

SEQ ID NO: 3490578 - DNA, 25 bp, Homo sapien
agacggagcctttggttcacattgc

SEQ ID NO: 3490579 - DNA, 25 bp, Homo sapien
atagggcttcccaagcgttccccag

SEQ ID NO: 3490580 - DNA, 25 bp, Homo sapien
tggagcacccccgactgctggatgg

SEQ ID NO: 3490581 - DNA, 25 bp, Homo sapien
gctggatgggcataatctctcatgg

SEQ ID NO: 3490582 - DNA, 25 bp, Homo sapien
gcaagtctctgcacgatggaattta

SEQ ID NO: 3490583 - DNA, 25 bp, Homo sapien
ctttcaccgatatgaagatagggct

SEQ ID NO: 3490584 - DNA, 25 bp, Homo sapien
tgaagatagggctttttgatccatg

SEQ ID NO: 3490585 - DNA, 25 bp, Homo sapien
gaagatagggctttttgatccatga

SEQ ID NO: 3490586 - DNA, 25 bp, Homo sapien
ccgatatgaagatagggctttttga

SEQ ID NO: 3490587 - DNA, 25 bp, Homo sapien
tctttgggatcagatgcactgtgct

SEQ ID NO: 3490588 - DNA, 25 bp, Homo sapien
ctctttgggatcagatgcactgtgc

SEQ ID NO: 3490589 - DNA, 25 bp, Homo sapien
cctgtccattcggttgcggtgccga

SEQ ID NO: 3490590 - DNA, 25 bp, Homo sapien
cacatcaacatcattggttggcaga

SEQ ID NO: 3490591 - DNA, 25 bp, Homo sapien
ccttctggaagcgagcatgctcatt

SEQ ID NO: 3490592 - DNA, 25 bp, Homo sapien
tctgcagaggtctcgaaatacacat

SEQ ID NO: 3490593 - DNA, 25 bp, Homo sapien
gaagatgaagaaattgtcaaggttt

SEQ ID NO: 3490594 - DNA, 25 bp, Homo sapien
catgaagatgaagaaattgtcaagg

SEQ ID NO: 3490595 - DNA, 25 bp, Homo sapien
agatgaagaaattgtcaaggtttac

SEQ ID NO: 3490596 - DNA, 25 bp, Homo sapien
tgaagatgaagaaattgtcaaggtt

SEQ ID NO: 3490597 - DNA, 25 bp, Homo sapien
cttagcttgaagctctgcctcttcc

SEQ ID NO: 3490598 - DNA, 25 bp, Homo sapien
ctgctttggggaggttcttagcttg

SEQ ID NO: 3490599 - DNA, 25 bp, Homo sapien
caggtagttctccagagccatccga

SEQ ID NO: 3490600 - DNA, 25 bp, Homo sapien
cgacggcggtcattcagcatagctt

SEQ ID NO: 3490601 - DNA, 25 bp, Homo sapien
gcgggtcagactgcaaggcagccag

SEQ ID NO: 3490602 - DNA, 25 bp, Homo sapien
catagcttccactcgggccaggtgg

SEQ ID NO: 3490603 - DNA, 25 bp, Homo sapien
ttgttctcagcacggacataacgcc

SEQ ID NO: 3490604 - DNA, 25 bp, Homo sapien
taatgacggatggtatgtaagcgat

SEQ ID NO: 3490605 - DNA, 25 bp, Homo sapien
tgggccgccttttctgggtcaacag

SEQ ID NO: 3490606 - DNA, 25 bp, Homo sapien
tcaacagccaacacatgctggtaat

SEQ ID NO: 3490607 - DNA, 25 bp, Homo sapien
tcctcctttcttcaatcacgtggag

SEQ ID NO: 3490608 - DNA, 25 bp, Homo sapien
tagagcagagagaggctttggttcc

SEQ ID NO: 3490609 - DNA, 25 bp, Homo sapien
tcttcaatcacgtggagatgtgtca

SEQ ID NO: 3490610 - DNA, 25 bp, Homo sapien
caatcacgtggagatgtgtcatcac

SEQ ID NO: 3490611 - DNA, 25 bp, Homo sapien
tgaagacagggcaggggacagaaag

SEQ ID NO: 3490612 - DNA, 25 bp, Homo sapien
gaagacagggcaggggacagaaagc

SEQ ID NO: 3490613 - DNA, 25 bp, Homo sapien
gacagggcaggggacagaaagcagg

SEQ ID NO: 3490614 - DNA, 25 bp, Homo sapien
ctgatgaagacagggcaggggacag

SEQ ID NO: 3490615 - DNA, 25 bp, Homo sapien
tggtccatatctgcacgctgctcct

SEQ ID NO: 3490616 - DNA, 25 bp, Homo sapien
agagctcacccggacgtccacaggg

SEQ ID NO: 3490617 - DNA, 25 bp, Homo sapien
ggtggaacggtgggatctcctcact

SEQ ID NO: 3490618 - DNA, 25 bp, Homo sapien
gattgaggcagtgaactggtccata

SEQ ID NO: 3490619 - DNA, 25 bp, Homo sapien
tcattgggtggtacaactccggctg

SEQ ID NO: 3490620 - DNA, 25 bp, Homo sapien
tttcattgggtggtacaactccggc

SEQ ID NO: 3490621 - DNA, 25 bp, Homo sapien
cattgggtggtacaactccggctga

SEQ ID NO: 3490622 - DNA, 25 bp, Homo sapien
ttgggtggtacaactccggctgagt

SEQ ID NO: 3490623 - DNA, 25 bp, Homo sapien
taaaaacactactcatcctacaggg

SEQ ID NO: 3490624 - DNA, 25 bp, Homo sapien
tacagggacgttcagtggactaaga

SEQ ID NO: 3490625 - DNA, 25 bp, Homo sapien
aaacttcttcaattgtctaatctag

SEQ ID NO: 3490626 - DNA, 25 bp, Homo sapien
tactcatcctacagggacgttcagt

SEQ ID NO: 3490627 - DNA, 25 bp, Homo sapien
gggatcccgtgacaccgacaactca

SEQ ID NO: 3490628 - DNA, 25 bp, Homo sapien
cccgtgacaccgacaactcaggtaa

SEQ ID NO: 3490629 - DNA, 25 bp, Homo sapien
ctgggggatcccgtgacaccgacaa

SEQ ID NO: 3490630 - DNA, 25 bp, Homo sapien
tgacaccgacaactcaggtaatgaa

SEQ ID NO: 3490631 - DNA, 25 bp, Homo sapien
tcttagccgggcaacaccgtttggc

SEQ ID NO: 3490632 - DNA, 25 bp, Homo sapien
tgtaagacacatagaagcggagccg

SEQ ID NO: 3490633 - DNA, 25 bp, Homo sapien
tataactggatcaacccgacagcgt

SEQ ID NO: 3490634 - DNA, 25 bp, Homo sapien
catgttcacaagtctgagggtgccc

SEQ ID NO: 3490635 - DNA, 25 bp, Homo sapien
ttctcttcggcaccgatcagtcccc

SEQ ID NO: 3490636 - DNA, 25 bp, Homo sapien
gcaccgatcagtcccccatcctgct

SEQ ID NO: 3490637 - DNA, 25 bp, Homo sapien
tcttcggcaccgatcagtcccccat

SEQ ID NO: 3490638 - DNA, 25 bp, Homo sapien
actttctcttcggcaccgatcagtc

SEQ ID NO: 3490639 - DNA, 25 bp, Homo sapien
catgttttcatccactttattctta

SEQ ID NO: 3490640 - DNA, 25 bp, Homo sapien
atgttttcatccactttattcttac

SEQ ID NO: 3490641 - DNA, 25 bp, Homo sapien
caaccttctactgtgcggaaaacga

SEQ ID NO: 3490642 - DNA, 25 bp, Homo sapien
gaatgtcggcagcaagcaactgggt

SEQ ID NO: 3490643 - DNA, 25 bp, Homo sapien
ctatattatggcagctggtcccgta

SEQ ID NO: 3490644 - DNA, 25 bp, Homo sapien
taatgagtctcaaaagtaaagcgtg

SEQ ID NO: 3490645 - DNA, 25 bp, Homo sapien
gctcttcctcgaggcctccaactct

SEQ ID NO: 3490646 - DNA, 25 bp, Homo sapien
catttccttaacatccagagtctcg

SEQ ID NO: 3490647 - DNA, 25 bp, Homo sapien
tcatttccttaacatccagagtctc

SEQ ID NO: 3490648 - DNA, 25 bp, Homo sapien
ctctctcggcattgaaaatcatttc

SEQ ID NO: 3490649 - DNA, 25 bp, Homo sapien
tctctcccgttttctacttgaactg

SEQ ID NO: 3490650 - DNA, 25 bp, Homo sapien
ggatgagggacccttattagctcag

SEQ ID NO: 3490651 - DNA, 25 bp, Homo sapien
tgagggacccttattagctcaggca

SEQ ID NO: 3490652 - DNA, 25 bp, Homo sapien
gacccttattagctcaggcatctct

SEQ ID NO: 3490653 - DNA, 25 bp, Homo sapien
ggagaacgcccactcttcccaatct

SEQ ID NO: 3490654 - DNA, 25 bp, Homo sapien
gagaacgcccactcttcccaatctc

SEQ ID NO: 3490655 - DNA, 25 bp, Homo sapien
acgcccactcttcccaatctccatg

SEQ ID NO: 3490656 - DNA, 25 bp, Homo sapien
gaacgcccactcttcccaatctcca

SEQ ID NO: 3490657 - DNA, 25 bp, Homo sapien
gaggcaagtaactcactgagggcca

SEQ ID NO: 3490658 - DNA, 25 bp, Homo sapien
gctcctggaaggtcgagcccctaaa

SEQ ID NO: 3490659 - DNA, 25 bp, Homo sapien
cagtgaccatctggcagccgtgagg

SEQ ID NO: 3490660 - DNA, 25 bp, Homo sapien
taaaacccaaagtagcaccaagatc

SEQ ID NO: 3490661 - DNA, 25 bp, Homo sapien
agactgaagtcctcccgcagtgggc

SEQ ID NO: 3490662 - DNA, 25 bp, Homo sapien
tggcaatggccactgcgatgaccag

SEQ ID NO: 3490663 - DNA, 25 bp, Homo sapien
ctgatgacgatgaccgtggcaatgg

SEQ ID NO: 3490664 - DNA, 25 bp, Homo sapien
gagagcactgctactcagactgaag

SEQ ID NO: 3490665 - DNA, 25 bp, Homo sapien
ggttctgcatcttgttcaggtgacg

SEQ ID NO: 3490666 - DNA, 25 bp, Homo sapien
cttctggggtgagcattggatcaac

SEQ ID NO: 3490667 - DNA, 25 bp, Homo sapien
cttgttcaggtgacgctcttctggg

SEQ ID NO: 3490668 - DNA, 25 bp, Homo sapien
agccatggttctgcatcttgttcag

SEQ ID NO: 3490669 - DNA, 25 bp, Homo sapien
ccgccagggctgccgcgctccctgc

SEQ ID NO: 3490670 - DNA, 25 bp, Homo sapien
ccagggctgccgcgctccctgccac

SEQ ID NO: 3490671 - DNA, 25 bp, Homo sapien
ctgcatccctccgccagggctgccg

SEQ ID NO: 3490672 - DNA, 25 bp, Homo sapien
ctccgccagggctgccgcgctccct

SEQ ID NO: 3490673 - DNA, 25 bp, Homo sapien
tccaggaggtcaggatgtcagacgc

SEQ ID NO: 3490674 - DNA, 25 bp, Homo sapien
cggaatcgtgggatcttccggccca

SEQ ID NO: 3490675 - DNA, 25 bp, Homo sapien
tatatagtcctacagtccaggaggt

SEQ ID NO: 3490676 - DNA, 25 bp, Homo sapien
gctgcttggcagtcgatcggaatcg

SEQ ID NO: 3490677 - DNA, 25 bp, Homo sapien
tacactaagctctctagaagacgct

SEQ ID NO: 3490678 - DNA, 25 bp, Homo sapien
tcacatcattttgcgagggtctctc

SEQ ID NO: 3490679 - DNA, 25 bp, Homo sapien
tacggtaggtaaacaacagacagtg

SEQ ID NO: 3490680 - DNA, 25 bp, Homo sapien
cactggattccgaaggaaagcagca

SEQ ID NO: 3490681 - DNA, 25 bp, Homo sapien
cacagactcagtttcagggacagcc

SEQ ID NO: 3490682 - DNA, 25 bp, Homo sapien
tacaagcattacaaagactcctgtg

SEQ ID NO: 3490683 - DNA, 25 bp, Homo sapien
gactcctgtgacgaaaacacaattg

SEQ ID NO: 3490684 - DNA, 25 bp, Homo sapien
gaagcagtgagcatcgacatcaact

SEQ ID NO: 3490685 - DNA, 25 bp, Homo sapien
gtgccctcgccctggcgcgctctct

SEQ ID NO: 3490686 - DNA, 25 bp, Homo sapien
ggcggcgggattccgggcaggccca

SEQ ID NO: 3490687 - DNA, 25 bp, Homo sapien
tccccgaggccgctcgcgggtctca

SEQ ID NO: 3490688 - DNA, 25 bp, Homo sapien
gcgggtctcacaggcgtcgtccctg

SEQ ID NO: 3490689 - DNA, 25 bp, Homo sapien
ttgtacttgagtcccgcgccgaagt

SEQ ID NO: 3490690 - DNA, 25 bp, Homo sapien
ccttgcgggcccgatcgctccccat

SEQ ID NO: 3490691 - DNA, 25 bp, Homo sapien
ctcgtgccgggagttgtacttgagt

SEQ ID NO: 3490692 - DNA, 25 bp, Homo sapien
ccgggagttgtacttgagtcccgcg

SEQ ID NO: 3490693 - DNA, 25 bp, Homo sapien
tcgcaaaaggctcaagacatgtgtg

SEQ ID NO: 3490694 - DNA, 25 bp, Homo sapien
gagcttcctgtttcggtacttcgca

SEQ ID NO: 3490695 - DNA, 25 bp, Homo sapien
gagttcttagctccagcccgtatgg

SEQ ID NO: 3490696 - DNA, 25 bp, Homo sapien
tcaatgaagtgactagcgacccatc

SEQ ID NO: 3490697 - DNA, 25 bp, Homo sapien
ggaagggcccaagccttcaggtcca

SEQ ID NO: 3490698 - DNA, 25 bp, Homo sapien
ttcaggtccactggaagctttcctc

SEQ ID NO: 3490699 - DNA, 25 bp, Homo sapien
agggcccaagccttcaggtccactg

SEQ ID NO: 3490700 - DNA, 25 bp, Homo sapien
caggtccactggaagctttcctcct

SEQ ID NO: 3490701 - DNA, 25 bp, Homo sapien
acaggccagcaagtcggctcgagca

SEQ ID NO: 3490702 - DNA, 25 bp, Homo sapien
gctgtgactcgttctccttccgcag

SEQ ID NO: 3490703 - DNA, 25 bp, Homo sapien
cttccgcagccggtgacaacgtggc

SEQ ID NO: 3490704 - DNA, 25 bp, Homo sapien
ggagggagctgtgactcgttctcct

SEQ ID NO: 3490705 - DNA, 25 bp, Homo sapien
agggccacagtgttccgagggacag

SEQ ID NO: 3490706 - DNA, 25 bp, Homo sapien
ccacagcagtaggcagtctggtagt

SEQ ID NO: 3490707 - DNA, 25 bp, Homo sapien
gagggccacagtgttccgagggaca

SEQ ID NO: 3490708 - DNA, 25 bp, Homo sapien
gggccacagtgttccgagggacaga

SEQ ID NO: 3490709 - DNA, 25 bp, Homo sapien
gcttctgccgatagcacatgccgtc

SEQ ID NO: 3490710 - DNA, 25 bp, Homo sapien
cggcgaaggcttctgccgatagcac

SEQ ID NO: 3490711 - DNA, 25 bp, Homo sapien
aaggcttctgccgatagcacatgcc

SEQ ID NO: 3490712 - DNA, 25 bp, Homo sapien
tctgccgatagcacatgccgtctgc

SEQ ID NO: 3490713 - DNA, 25 bp, Homo sapien
cgctcttcccctgcaccccgctggg

SEQ ID NO: 3490714 - DNA, 25 bp, Homo sapien
gggaagatgttcacattttgtgagg

SEQ ID NO: 3490715 - DNA, 25 bp, Homo sapien
ccctgcaccccgctggggaagatgt

SEQ ID NO: 3490716 - DNA, 25 bp, Homo sapien
gatgttcacattttgtgaggtccag

SEQ ID NO: 3490717 - DNA, 25 bp, Homo sapien
ttgttgactggcaggaactccacgc

SEQ ID NO: 3490718 - DNA, 25 bp, Homo sapien
gatccccagcaagaccaagaggagg

SEQ ID NO: 3490719 - DNA, 25 bp, Homo sapien
caagaggaggccgatcagcacggct

SEQ ID NO: 3490720 - DNA, 25 bp, Homo sapien
tcttgacgttgttgactggcaggaa

SEQ ID NO: 3490721 - DNA, 25 bp, Homo sapien
cgtaggcatccacaaaattctcatt

SEQ ID NO: 3490722 - DNA, 25 bp, Homo sapien
tggagttggagttctcgtaggcatc

SEQ ID NO: 3490723 - DNA, 25 bp, Homo sapien
atcctcatgtagccattgaagacct

SEQ ID NO: 3490724 - DNA, 25 bp, Homo sapien
gccaggcttacaaactcagtggagt

SEQ ID NO: 3490725 - DNA, 25 bp, Homo sapien
ccgactccttgtggtaggggcccag

SEQ ID NO: 3490726 - DNA, 25 bp, Homo sapien
aggaatgggactccgctgtacagca

SEQ ID NO: 3490727 - DNA, 25 bp, Homo sapien
gcccaggaatgggactccgctgtac

SEQ ID NO: 3490728 - DNA, 25 bp, Homo sapien
ctgaaggccgtcacagccgactcct

SEQ ID NO: 3490729 - DNA, 25 bp, Homo sapien
accacaaaggacttcagggagcgcg

SEQ ID NO: 3490730 - DNA, 25 bp, Homo sapien
aagccaccactgaggtgaccacaaa

SEQ ID NO: 3490731 - DNA, 25 bp, Homo sapien
tgctgcgggatgctgaactcagacc

SEQ ID NO: 3490732 - DNA, 25 bp, Homo sapien
atgactacgcgctcctcggccatga

SEQ ID NO: 3490733 - DNA, 25 bp, Homo sapien
gtcctctgtactgttttggagtccg

SEQ ID NO: 3490734 - DNA, 25 bp, Homo sapien
gtcctgggtcctctgtactgttttg

SEQ ID NO: 3490735 - DNA, 25 bp, Homo sapien
ctctgtactgttttggagtccgtgg

SEQ ID NO: 3490736 - DNA, 25 bp, Homo sapien
tgtcctgggtcctctgtactgtttt

SEQ ID NO: 3490737 - DNA, 25 bp, Homo sapien
cgtcgcaggacgcaaggtcaaagct

SEQ ID NO: 3490738 - DNA, 25 bp, Homo sapien
gttgtacaccgtcaccaggtcgctg

SEQ ID NO: 3490739 - DNA, 25 bp, Homo sapien
cgtggtgaagcgcatcagctccaca

SEQ ID NO: 3490740 - DNA, 25 bp, Homo sapien
ggctgtcagggaagccgggcgtggt

SEQ ID NO: 3490741 - DNA, 25 bp, Homo sapien
cagtgttggttatcagtgtgatgag

SEQ ID NO: 3490742 - DNA, 25 bp, Homo sapien
gtggcctcaaagccgggatgccgcc

SEQ ID NO: 3490743 - DNA, 25 bp, Homo sapien
tgatgagcaggacgttctgggagga

SEQ ID NO: 3490744 - DNA, 25 bp, Homo sapien
gccgccgctcagtgttggttatcag

SEQ ID NO: 3490745 - DNA, 25 bp, Homo sapien
tcaatgttgggtgggtagtggcctg

SEQ ID NO: 3490746 - DNA, 25 bp, Homo sapien
tgtgcagtcaatgttgggtgggtag

SEQ ID NO: 3490747 - DNA, 25 bp, Homo sapien
ggctttacgtaagcggcctccacag

SEQ ID NO: 3490748 - DNA, 25 bp, Homo sapien
gtagtaggggctgttgaatgtcccc

SEQ ID NO: 3490749 - DNA, 25 bp, Homo sapien
agaagaatttgaagcgcaccttcac

SEQ ID NO: 3490750 - DNA, 25 bp, Homo sapien
aagaatttgaagcgcaccttcacat

SEQ ID NO: 3490751 - DNA, 25 bp, Homo sapien
gaagaatttgaagcgcaccttcaca

SEQ ID NO: 3490752 - DNA, 25 bp, Homo sapien
ttgctggtgacgacgaactgggacc

SEQ ID NO: 3490753 - DNA, 25 bp, Homo sapien
taggactgatctgagtggaagcgaa

SEQ ID NO: 3490754 - DNA, 25 bp, Homo sapien
cactggagtcgtaggagaggtattc

SEQ ID NO: 3490755 - DNA, 25 bp, Homo sapien
tattcagctaagaagccggtgtcgg

SEQ ID NO: 3490756 - DNA, 25 bp, Homo sapien
cggcacgtgaactgccccgggcatg

SEQ ID NO: 3490757 - DNA, 25 bp, Homo sapien
atacaccgccccgtgcggcacgtga

SEQ ID NO: 3490758 - DNA, 25 bp, Homo sapien
ctcatcgctgtggtcggtgcagtcg

SEQ ID NO: 3490759 - DNA, 25 bp, Homo sapien
tgcagttgagctcatcgctgtggtc

SEQ ID NO: 3490760 - DNA, 25 bp, Homo sapien
tgctcgtcgctgttgtctccgcagt

SEQ ID NO: 3490761 - DNA, 25 bp, Homo sapien
tcttgcacgtgaactggtggccggc

SEQ ID NO: 3490762 - DNA, 25 bp, Homo sapien
tgttgtctccgcagtcgttcacact

SEQ ID NO: 3490763 - DNA, 25 bp, Homo sapien
acactgtcgcagacccagaagaggg

SEQ ID NO: 3490764 - DNA, 25 bp, Homo sapien
ttcccattggaacacctgaaggtct

SEQ ID NO: 3490765 - DNA, 25 bp, Homo sapien
ttttcgagaggcacttcccattgga

SEQ ID NO: 3490766 - DNA, 25 bp, Homo sapien
cattgcactgctggcttttcgagag

SEQ ID NO: 3490767 - DNA, 25 bp, Homo sapien
acacctgaaggtctgggccggacaa

SEQ ID NO: 3490768 - DNA, 25 bp, Homo sapien
tgtgttcattaaactcggggcgtcc

SEQ ID NO: 3490769 - DNA, 25 bp, Homo sapien
taacacacaggtggtttgtgttcat

SEQ ID NO: 3490770 - DNA, 25 bp, Homo sapien
acacacaggtggtttgtgttcatta

SEQ ID NO: 3490771 - DNA, 25 bp, Homo sapien
aactcggggcgtcctgcatgtgcgt

SEQ ID NO: 3490772 - DNA, 25 bp, Homo sapien
ctgagccgtcgctacagtcctcctt

SEQ ID NO: 3490773 - DNA, 25 bp, Homo sapien
agggttgcccttgctcaagcagagc

SEQ ID NO: 3490774 - DNA, 25 bp, Homo sapien
cctccttcccgtcacactcagggtt

SEQ ID NO: 3490775 - DNA, 25 bp, Homo sapien
agagcccattgaggcagcggtaggt

SEQ ID NO: 3490776 - DNA, 25 bp, Homo sapien
tgcacaaccgtactcggatgccctg

SEQ ID NO: 3490777 - DNA, 25 bp, Homo sapien
ccatgctacagaggcgctgagatgc

SEQ ID NO: 3490778 - DNA, 25 bp, Homo sapien
tctggtgggcacttcacacagtgaa

SEQ ID NO: 3490779 - DNA, 25 bp, Homo sapien
gagatgctggccgtacgggcctttc

SEQ ID NO: 3490780 - DNA, 25 bp, Homo sapien
ctgtggccagccaacgcttctgaaa

SEQ ID NO: 3490781 - DNA, 25 bp, Homo sapien
cacagaacgctggagctgtgctcaa

SEQ ID NO: 3490782 - DNA, 25 bp, Homo sapien
tgtgaggtcacagaacgctggagct

SEQ ID NO: 3490783 - DNA, 25 bp, Homo sapien
tgaggtcacagaacgctggagctgt

SEQ ID NO: 3490784 - DNA, 25 bp, Homo sapien
ggtcacagaacgctggagctgtgct

SEQ ID NO: 3490785 - DNA, 25 bp, Homo sapien
cagagaccagccagttgggagagat

SEQ ID NO: 3490786 - DNA, 25 bp, Homo sapien
ctgaatcctctgtcatcgatgtagc

SEQ ID NO: 3490787 - DNA, 25 bp, Homo sapien
atgtagcagtgtgcggcagagacca

SEQ ID NO: 3490788 - DNA, 25 bp, Homo sapien
gagcatgcaggcttacctgccaggg

SEQ ID NO: 3490789 - DNA, 25 bp, Homo sapien
cacaggaggaataacagaacaatca

SEQ ID NO: 3490790 - DNA, 25 bp, Homo sapien
tctttcacaggaggaataacagaac

SEQ ID NO: 3490791 - DNA, 25 bp, Homo sapien
ttcacaggaggaataacagaacaat

SEQ ID NO: 3490792 - DNA, 25 bp, Homo sapien
caggaggaataacagaacaatcaat

SEQ ID NO: 3490793 - DNA, 25 bp, Homo sapien
gagatgatgcgcttgagcctgcgct

SEQ ID NO: 3490794 - DNA, 25 bp, Homo sapien
gccgcaccatggagctgtactctgc

SEQ ID NO: 3490795 - DNA, 25 bp, Homo sapien
tctggtcgtgcaagcccaggaaggc

SEQ ID NO: 3490796 - DNA, 25 bp, Homo sapien
ccagcagcgcgatgtcatagtcgaa

SEQ ID NO: 3490797 - DNA, 25 bp, Homo sapien
ccacgggtcattggactagaaaact

SEQ ID NO: 3490798 - DNA, 25 bp, Homo sapien
gcagcgtcattcgagacgctcccca

SEQ ID NO: 3490799 - DNA, 25 bp, Homo sapien
attcgagacgctccccacgggtcat

SEQ ID NO: 3490800 - DNA, 25 bp, Homo sapien
actagaaaactctggaacagcccag

SEQ ID NO: 3490801 - DNA, 25 bp, Homo sapien
ctcacccttttgcaggatcagcgcg

SEQ ID NO: 3490802 - DNA, 25 bp, Homo sapien
gttgatgacgcggatctcacccttt

SEQ ID NO: 3490803 - DNA, 25 bp, Homo sapien
cacgcacatcatgcgcggcgtgatc

SEQ ID NO: 3490804 - DNA, 25 bp, Homo sapien
tctcgcaggtggtctggttgatgac

SEQ ID NO: 3490805 - DNA, 25 bp, Homo sapien
tgccgccctcctgccccgggggcca

SEQ ID NO: 3490806 - DNA, 25 bp, Homo sapien
gagacaagccctgccgtgagtcccc

SEQ ID NO: 3490807 - DNA, 25 bp, Homo sapien
gagccttgtgtacacgcctggcttg

SEQ ID NO: 3490808 - DNA, 25 bp, Homo sapien
acaccggcctggaagatccgcccat

SEQ ID NO: 3490809 - DNA, 25 bp, Homo sapien
ctttgatccagtcccgaaacagagg

SEQ ID NO: 3490810 - DNA, 25 bp, Homo sapien
agagggagccttgtgtacacgcctg

SEQ ID NO: 3490811 - DNA, 25 bp, Homo sapien
ggcagatatgcacaaacgcgcctcg

SEQ ID NO: 3490812 - DNA, 25 bp, Homo sapien
gtgtacacatttgggtggccccggc

SEQ ID NO: 3490813 - DNA, 25 bp, Homo sapien
ttctaggcagatttggagccctgga

SEQ ID NO: 3490814 - DNA, 25 bp, Homo sapien
tgggtggccccgcaggtgtacacat

SEQ ID NO: 3490815 - DNA, 25 bp, Homo sapien
gcctgggcttcctcaagagcgtggc

SEQ ID NO: 3490816 - DNA, 25 bp, Homo sapien
caggcccctggtcttggaagctaca

SEQ ID NO: 3490817 - DNA, 25 bp, Homo sapien
tcttgcaaatcgagtaggaaaaagg

SEQ ID NO: 3490818 - DNA, 25 bp, Homo sapien
tgagtgtgtgcgctcacagggccac

SEQ ID NO: 3490819 - DNA, 25 bp, Homo sapien
tgtggcgcatcagcatacaagaagc

SEQ ID NO: 3490820 - DNA, 25 bp, Homo sapien
tccctaagccttccccagattgttg

SEQ ID NO: 3490821 - DNA, 25 bp, Homo sapien
tgacattgtcccttcaggccaccaa

SEQ ID NO: 3490822 - DNA, 25 bp, Homo sapien
cagcatgttctaagacaagcctgag

SEQ ID NO: 3490823 - DNA, 25 bp, Homo sapien
ttttgtttccataactcatggcagg

SEQ ID NO: 3490824 - DNA, 25 bp, Homo sapien
ctttttgtttccataactcatggca

SEQ ID NO: 3490825 - DNA, 25 bp, Homo sapien
tgtttccataactcatggcaggcaa

SEQ ID NO: 3490826 - DNA, 25 bp, Homo sapien
tttgtttccataactcatggcaggc

SEQ ID NO: 3490827 - DNA, 25 bp, Homo sapien
taggcggaaactgtacaccatggtc

SEQ ID NO: 3490828 - DNA, 25 bp, Homo sapien
tacagggctaacataaagctggctc

SEQ ID NO: 3490829 - DNA, 25 bp, Homo sapien
taatatttgcctatagcccggcagc

SEQ ID NO: 3490830 - DNA, 25 bp, Homo sapien
tgaaactctcaagggaaggtgatgc

SEQ ID NO: 3490831 - DNA, 25 bp, Homo sapien
gactagtcaatacatctgatgtcca

SEQ ID NO: 3490832 - DNA, 25 bp, Homo sapien
tacagtaattagatcccctgttacg

SEQ ID NO: 3490833 - DNA, 25 bp, Homo sapien
ccctgttacgacacatgccctttgt

SEQ ID NO: 3490834 - DNA, 25 bp, Homo sapien
ccttctaactaataggctggttcag

SEQ ID NO: 3490835 - DNA, 25 bp, Homo sapien
tgaaaacttcgcattaagagccaag

SEQ ID NO: 3490836 - DNA, 25 bp, Homo sapien
tgtttttagcacatccccaaccctg

SEQ ID NO: 3490837 - DNA, 25 bp, Homo sapien
tggtagctccaagatattctgactg

SEQ ID NO: 3490838 - DNA, 25 bp, Homo sapien
gaatgagggattacccatcactggg

SEQ ID NO: 3490839 - DNA, 25 bp, Homo sapien
cgcctactgatagagatatgatgac

SEQ ID NO: 3490840 - DNA, 25 bp, Homo sapien
cctgcataaaacattaacagggatg

SEQ ID NO: 3490841 - DNA, 25 bp, Homo sapien
taatggattgttcagtgtttacact

SEQ ID NO: 3490842 - DNA, 25 bp, Homo sapien
ttagaaacaggaatgataatacgcc

SEQ ID NO: 3490843 - DNA, 25 bp, Homo sapien
caatactggacagggtcgagagaaa

SEQ ID NO: 3490844 - DNA, 25 bp, Homo sapien
aagcttctaacaacgtgcctttctg

SEQ ID NO: 3490845 - DNA, 25 bp, Homo sapien
gaactgcaggccagaatgggcaact

SEQ ID NO: 3490846 - DNA, 25 bp, Homo sapien
aaatttatcgtgacttcttccctga

SEQ ID NO: 3490847 - DNA, 25 bp, Homo sapien
gaatatcactgtaagtccagggtga

SEQ ID NO: 3490848 - DNA, 25 bp, Homo sapien
agaccttataaactgcctgtgtgag

SEQ ID NO: 3490849 - DNA, 25 bp, Homo sapien
ggatcaacatccaaggcttagcatt

SEQ ID NO: 3490850 - DNA, 25 bp, Homo sapien
cagggtgactgtgggcgtacccaaa

SEQ ID NO: 3490851 - DNA, 25 bp, Homo sapien
tctggtgcgctttgcttttgttccc

SEQ ID NO: 3490852 - DNA, 25 bp, Homo sapien
attagccaggtgagtcccgtacacc

SEQ ID NO: 3490853 - DNA, 25 bp, Homo sapien
gtgagtcccgtacacctgttatccc

SEQ ID NO: 3490854 - DNA, 25 bp, Homo sapien
ccaaaataaagtctggtgcgctttg

SEQ ID NO: 3490855 - DNA, 25 bp, Homo sapien
acctttcagccagaatcccagatgc

SEQ ID NO: 3490856 - DNA, 25 bp, Homo sapien
gccgcaagatagaaggagccacagt

SEQ ID NO: 3490857 - DNA, 25 bp, Homo sapien
ccagaatcccagatgccgcaagata

SEQ ID NO: 3490858 - DNA, 25 bp, Homo sapien
tcccagatgccgcaagatagaagga

SEQ ID NO: 3490859 - DNA, 25 bp, Homo sapien
attacccctgctgcatactggctgc

SEQ ID NO: 3490860 - DNA, 25 bp, Homo sapien
ggagcattacccctgctgcatactg

SEQ ID NO: 3490861 - DNA, 25 bp, Homo sapien
gcattacccctgctgcatactggct

SEQ ID NO: 3490862 - DNA, 25 bp, Homo sapien
ggtgggctggatcagtggctggagc

SEQ ID NO: 3490863 - DNA, 25 bp, Homo sapien
ctgtttgttagtactttcaccattc

SEQ ID NO: 3490864 - DNA, 25 bp, Homo sapien
tcaaatctctgaactagaaagggct

SEQ ID NO: 3490865 - DNA, 25 bp, Homo sapien
ccttttaccagagtttgtgagtcca

SEQ ID NO: 3490866 - DNA, 25 bp, Homo sapien
tggtgactactaacaaggagaggaa

SEQ ID NO: 3490867 - DNA, 25 bp, Homo sapien
tgcccggcctataactggatataaa

SEQ ID NO: 3490868 - DNA, 25 bp, Homo sapien
taggttctggtgccgcagtttgagt

SEQ ID NO: 3490869 - DNA, 25 bp, Homo sapien
ttcttgcgcaggagtttttcattgg

SEQ ID NO: 3490870 - DNA, 25 bp, Homo sapien
ggttctggtgccgcagtttgagttt

SEQ ID NO: 3490871 - DNA, 25 bp, Homo sapien
cttcttgcgcaggagtttttcattg

SEQ ID NO: 3490872 - DNA, 25 bp, Homo sapien
aatgagttctactgcaggtttgaga

SEQ ID NO: 3490873 - DNA, 25 bp, Homo sapien
cagaagtggtctgatactttcatgc

SEQ ID NO: 3490874 - DNA, 25 bp, Homo sapien
ttccagaagtggtctgatactttca

SEQ ID NO: 3490875 - DNA, 25 bp, Homo sapien
tttcagtcatgttggtaaaacccat

SEQ ID NO: 3490876 - DNA, 25 bp, Homo sapien
caaggactccgcatgcattcctggg

SEQ ID NO: 3490877 - DNA, 25 bp, Homo sapien
aacaaggactccgcatgcattcctg

SEQ ID NO: 3490878 - DNA, 25 bp, Homo sapien
ggactccgcatgcattcctgggcat

SEQ ID NO: 3490879 - DNA, 25 bp, Homo sapien
agaacaaggactccgcatgcattcc

SEQ ID NO: 3490880 - DNA, 25 bp, Homo sapien
ccttaagaacaccaaaaatttgcat

SEQ ID NO: 3490881 - DNA, 25 bp, Homo sapien
tccttaagaacaccaaaaatttgca

SEQ ID NO: 3490882 - DNA, 25 bp, Homo sapien
gtggtgagtctttagctccttaaga

SEQ ID NO: 3490883 - DNA, 25 bp, Homo sapien
agtctttagctccttaagaacacca

SEQ ID NO: 3490884 - DNA, 25 bp, Homo sapien
gtgcttcagcagatccgttactgcc

SEQ ID NO: 3490885 - DNA, 25 bp, Homo sapien
gcttcagcagatccgttactgccac

SEQ ID NO: 3490886 - DNA, 25 bp, Homo sapien
ctgtgcttcagcagatccgttactg

SEQ ID NO: 3490887 - DNA, 25 bp, Homo sapien
tcagcagatccgttactgccaccca

SEQ ID NO: 3490888 - DNA, 25 bp, Homo sapien
atacagcagacggcctggtgtggcc

SEQ ID NO: 3490889 - DNA, 25 bp, Homo sapien
aaaccctgggatattctgcatatga

SEQ ID NO: 3490890 - DNA, 25 bp, Homo sapien
caacatccaagatacgatcagcttc

SEQ ID NO: 3490891 - DNA, 25 bp, Homo sapien
gcatatgatacagcagacggcctgg

SEQ ID NO: 3490892 - DNA, 25 bp, Homo sapien
gaaaagagcatagtctgtctacatg

SEQ ID NO: 3490893 - DNA, 25 bp, Homo sapien
gcatagtctgtctacatgttggcaa

SEQ ID NO: 3490894 - DNA, 25 bp, Homo sapien
tgtctacatgttggcaaaagtttaa

SEQ ID NO: 3490895 - DNA, 25 bp, Homo sapien
tagtctgtctacatgttggcaaaag

SEQ ID NO: 3490896 - DNA, 25 bp, Homo sapien
atggctccttttttcagagaaatcc

SEQ ID NO: 3490897 - DNA, 25 bp, Homo sapien
gctccttttttcagagaaatccttg

SEQ ID NO: 3490898 - DNA, 25 bp, Homo sapien
ccttttttcagagaaatccttgcca

SEQ ID NO: 3490899 - DNA, 25 bp, Homo sapien
ttttttcagagaaatccttgccaac

SEQ ID NO: 3490900 - DNA, 25 bp, Homo sapien
aagaagaccacgagcttctttcggt

SEQ ID NO: 3490901 - DNA, 25 bp, Homo sapien
gaatgtggtcgtacatttattttgc

SEQ ID NO: 3490902 - DNA, 25 bp, Homo sapien
atgaaaagaagaccacgagcttctt

SEQ ID NO: 3490903 - DNA, 25 bp, Homo sapien
ccaagacgggcaaatcaatgtagtt

SEQ ID NO: 3490904 - DNA, 25 bp, Homo sapien
gatggtcatagtgaacaatccagtt

SEQ ID NO: 3490905 - DNA, 25 bp, Homo sapien
gtgaacaatccagttgacttgagga

SEQ ID NO: 3490906 - DNA, 25 bp, Homo sapien
catccgtacacaatgtgttcccaaa

SEQ ID NO: 3490907 - DNA, 25 bp, Homo sapien
gccaccacatccgtacacaatgtgt

SEQ ID NO: 3490908 - DNA, 25 bp, Homo sapien
tctcaagctgagactgaatgtcaga

SEQ ID NO: 3490909 - DNA, 25 bp, Homo sapien
tttcaatcaatttctcaagctgaga

SEQ ID NO: 3490910 - DNA, 25 bp, Homo sapien
atggaaccttggattgtttcaagta

SEQ ID NO: 3490911 - DNA, 25 bp, Homo sapien
ggaaccttggattgtttcaagtaga

SEQ ID NO: 3490912 - DNA, 25 bp, Homo sapien
tgaggcaaatttaagttatttacat

SEQ ID NO: 3490913 - DNA, 25 bp, Homo sapien
ttgaggcaaatttaagttatttaca

SEQ ID NO: 3490914 - DNA, 25 bp, Homo sapien
gccattgacattcagatcaacaaag

SEQ ID NO: 3490915 - DNA, 25 bp, Homo sapien
tgccattgacattcagatcaacaaa

SEQ ID NO: 3490916 - DNA, 25 bp, Homo sapien
tcggcataggatactacagtccaga

SEQ ID NO: 3490917 - DNA, 25 bp, Homo sapien
atcggcataggatactacagtccag

SEQ ID NO: 3490918 - DNA, 25 bp, Homo sapien
aatcggcataggatactacagtcca

SEQ ID NO: 3490919 - DNA, 25 bp, Homo sapien
ggagctgcccgtcctttgcacgccc

SEQ ID NO: 3490920 - DNA, 25 bp, Homo sapien
gggatcccctcggtggcatttaatc

SEQ ID NO: 3490921 - DNA, 25 bp, Homo sapien
tggcgccgaagggagcggagagccg

SEQ ID NO: 3490922 - DNA, 25 bp, Homo sapien
gagagccgggtctgtcagcctagtc

SEQ ID NO: 3490923 - DNA, 25 bp, Homo sapien
ggcggcccgagataggggcccctga

SEQ ID NO: 3490924 - DNA, 25 bp, Homo sapien
cggcggcccgagataggggcccctg

SEQ ID NO: 3490925 - DNA, 25 bp, Homo sapien
acgggcctaggcgcggcggcccgag

SEQ ID NO: 3490926 - DNA, 25 bp, Homo sapien
acaggctgctcacgggcctaggcgc

SEQ ID NO: 3490927 - DNA, 25 bp, Homo sapien
gtcacgcaggctccaccgtctaagg

SEQ ID NO: 3490928 - DNA, 25 bp, Homo sapien
gggtcacgcaggctccaccgtctaa

SEQ ID NO: 3490929 - DNA, 25 bp, Homo sapien
acgcaggctccaccgtctaaggaga

SEQ ID NO: 3490930 - DNA, 25 bp, Homo sapien
ctgggtcacgcaggctccaccgtct

SEQ ID NO: 3490931 - DNA, 25 bp, Homo sapien
caactaacctccctcgccgaagagg

SEQ ID NO: 3490932 - DNA, 25 bp, Homo sapien
caatgggcaccttaccaactaacct

SEQ ID NO: 3490933 - DNA, 25 bp, Homo sapien
gtgtttctatttcgacctccctaca

SEQ ID NO: 3490934 - DNA, 25 bp, Homo sapien
cgaagaggggctgaagtgtttctat

SEQ ID NO: 3490935 - DNA, 25 bp, Homo sapien
gcggcccttggcaggcctgtttcca

SEQ ID NO: 3490936 - DNA, 25 bp, Homo sapien
cggcccttggcaggcctgtttccat

SEQ ID NO: 3490937 - DNA, 25 bp, Homo sapien
gggcggcccttggcaggcctgtttc

SEQ ID NO: 3490938 - DNA, 25 bp, Homo sapien
cggggcggcccttggcaggcctgtt

SEQ ID NO: 3490939 - DNA, 25 bp, Homo sapien
ctcaagaaccgcacgtcctgccagg

SEQ ID NO: 3490940 - DNA, 25 bp, Homo sapien
tctcaagaaccgcacgtcctgccag

SEQ ID NO: 3490941 - DNA, 25 bp, Homo sapien
tcatctcaagaaccgcacgtcctgc

SEQ ID NO: 3490942 - DNA, 25 bp, Homo sapien
atctcaagaaccgcacgtcctgcca

SEQ ID NO: 3490943 - DNA, 25 bp, Homo sapien
gaagccaagacttagggccctagga

SEQ ID NO: 3490944 - DNA, 25 bp, Homo sapien
tctttcggtttgcaaactggaggcg

SEQ ID NO: 3490945 - DNA, 25 bp, Homo sapien
ggaaaacagaaagcgcccaaggagc

SEQ ID NO: 3490946 - DNA, 25 bp, Homo sapien
agctctagctgtccctgtgttggaa

SEQ ID NO: 3490947 - DNA, 25 bp, Homo sapien
ttctgggcctagttcgcatctttct

SEQ ID NO: 3490948 - DNA, 25 bp, Homo sapien
gggcctagttcgcatctttctgatt

SEQ ID NO: 3490949 - DNA, 25 bp, Homo sapien
ggcctagttcgcatctttctgattt

SEQ ID NO: 3490950 - DNA, 25 bp, Homo sapien
ctgggcctagttcgcatctttctga

SEQ ID NO: 3490951 - DNA, 25 bp, Homo sapien
tcttgtccagttgcttaccacctac

SEQ ID NO: 3490952 - DNA, 25 bp, Homo sapien
tccagttgcttaccacctacataca

SEQ ID NO: 3490953 - DNA, 25 bp, Homo sapien
tgcttaccacctacatacattctca

SEQ ID NO: 3490954 - DNA, 25 bp, Homo sapien
ccaccctgattcttgtccagttgct

SEQ ID NO: 3490955 - DNA, 25 bp, Homo sapien
ggacaaatacagaatttcaggtcct

SEQ ID NO: 3490956 - DNA, 25 bp, Homo sapien
aatacagaatttcaggtcctattcc

SEQ ID NO: 3490957 - DNA, 25 bp, Homo sapien
caaaacagctggctagtgtgccctt

SEQ ID NO: 3490958 - DNA, 25 bp, Homo sapien
tggcaaaacagctggctagtgtgcc

SEQ ID NO: 3490959 - DNA, 25 bp, Homo sapien
gaatgacactcacccatgttggtga

SEQ ID NO: 3490960 - DNA, 25 bp, Homo sapien
gggtgatctctacttaatctactga

SEQ ID NO: 3490961 - DNA, 25 bp, Homo sapien
ggtcctcaatggattgaatgacact

SEQ ID NO: 3490962 - DNA, 25 bp, Homo sapien
gcagagagaacaaatgcacccttcc

SEQ ID NO: 3490963 - DNA, 25 bp, Homo sapien
cagaagtcagaaggcctgcgagcca

SEQ ID NO: 3490964 - DNA, 25 bp, Homo sapien
atggtgagtcagaagtcagaaggcc

SEQ ID NO: 3490965 - DNA, 25 bp, Homo sapien
attgtttcatgcgattagagggcaa

SEQ ID NO: 3490966 - DNA, 25 bp, Homo sapien
ttagagggcaaggagtcccacgatc

SEQ ID NO: 3490967 - DNA, 25 bp, Homo sapien
tatatttatttaataggagacatac

SEQ ID NO: 3490968 - DNA, 25 bp, Homo sapien
gatatatatttatttaataggagac

SEQ ID NO: 3490969 - DNA, 25 bp, Homo sapien
tatatatttatttaataggagacat

SEQ ID NO: 3490970 - DNA, 25 bp, Homo sapien
agatatatatttatttaataggaga

SEQ ID NO: 3490971 - DNA, 25 bp, Homo sapien
catcttgactgggagaaggcagagt

SEQ ID NO: 3490972 - DNA, 25 bp, Homo sapien
agagtccatggctccacatgctggg

SEQ ID NO: 3490973 - DNA, 25 bp, Homo sapien
agaaggcagagtccatggctccaca

SEQ ID NO: 3490974 - DNA, 25 bp, Homo sapien
atggctccacatgctggggaatagg

SEQ ID NO: 3490975 - DNA, 25 bp, Homo sapien
tggtatctcaagcctgtgattccag

SEQ ID NO: 3490976 - DNA, 25 bp, Homo sapien
catggtatctcaagcctgtgattcc

SEQ ID NO: 3490977 - DNA, 25 bp, Homo sapien
atggtatctcaagcctgtgattcca

SEQ ID NO: 3490978 - DNA, 25 bp, Homo sapien
gcatggtatctcaagcctgtgattc

SEQ ID NO: 3490979 - DNA, 25 bp, Homo sapien
agcactatgcacagtagccaggatc

SEQ ID NO: 3490980 - DNA, 25 bp, Homo sapien
acagtagccaggatctggaatcaac

SEQ ID NO: 3490981 - DNA, 25 bp, Homo sapien
ctatgcacagtagccaggatctgga

SEQ ID NO: 3490982 - DNA, 25 bp, Homo sapien
agatatcggcactcccatgttgact

SEQ ID NO: 3490983 - DNA, 25 bp, Homo sapien
gtagcctttgttgccagctgtcaac

SEQ ID NO: 3490984 - DNA, 25 bp, Homo sapien
cttggttgaggttgaagcctttatt

SEQ ID NO: 3490985 - DNA, 25 bp, Homo sapien
cctttttggtgggtattcaggagct

SEQ ID NO: 3490986 - DNA, 25 bp, Homo sapien
caggagctcttttgcttctaatggc

SEQ ID NO: 3490987 - DNA, 25 bp, Homo sapien
aagatggtgcatcagactgctttaa

SEQ ID NO: 3490988 - DNA, 25 bp, Homo sapien
gatggtgcatcagactgctttaatg

SEQ ID NO: 3490989 - DNA, 25 bp, Homo sapien
ggaagatggtgcatcagactgcttt

SEQ ID NO: 3490990 - DNA, 25 bp, Homo sapien
tgaggaagatggtgcatcagactgc

SEQ ID NO: 3490991 - DNA, 25 bp, Homo sapien
acagaagagaggttcaactcctcat

SEQ ID NO: 3490992 - DNA, 25 bp, Homo sapien
gggacagaagagaggttcaactcct

SEQ ID NO: 3490993 - DNA, 25 bp, Homo sapien
agggacagaagagaggttcaactcc

SEQ ID NO: 3490994 - DNA, 25 bp, Homo sapien
ggacagaagagaggttcaactcctc

SEQ ID NO: 3490995 - DNA, 25 bp, Homo sapien
aaaacttatgggatgtagtgaaagc

SEQ ID NO: 3490996 - DNA, 25 bp, Homo sapien
gtgctaagagggaatatgcagctgt

SEQ ID NO: 3490997 - DNA, 25 bp, Homo sapien
ataagccactgtatttagccagaaa

SEQ ID NO: 3490998 - DNA, 25 bp, Homo sapien
ttaaattatgcaaggtgtccattca

SEQ ID NO: 3490999 - DNA, 25 bp, Homo sapien
taataactgtgacaaccagcttgca

SEQ ID NO: 3491000 - DNA, 25 bp, Homo sapien
cagtttgttgattgccttgattgcc

SEQ ID NO: 3491001 - DNA, 25 bp, Homo sapien
caggttggagtttcgtggctcaatc

SEQ ID NO: 3491002 - DNA, 25 bp, Homo sapien
tcagctcatataagtgcaggccagc

SEQ ID NO: 3491003 - DNA, 25 bp, Homo sapien
tgatcttatctcattccctacccat

SEQ ID NO: 3491004 - DNA, 25 bp, Homo sapien
gacatagctcaacattttagtccaa

SEQ ID NO: 3491005 - DNA, 25 bp, Homo sapien
ttcccacatcctgcacatcggactc

SEQ ID NO: 3491006 - DNA, 25 bp, Homo sapien
aaatgatgttgccaagtcttgatct

SEQ ID NO: 3491007 - DNA, 25 bp, Homo sapien
ccctctcaacgtcaggcactgtgtt

SEQ ID NO: 3491008 - DNA, 25 bp, Homo sapien
tattaagagccctctcaacgtcagg

SEQ ID NO: 3491009 - DNA, 25 bp, Homo sapien
cactgtgttgggtactggagacatg

SEQ ID NO: 3491010 - DNA, 25 bp, Homo sapien
agggcattgctctaccagtctttca

SEQ ID NO: 3491011 - DNA, 25 bp, Homo sapien
aaactggatgacgtctaaagaactc

SEQ ID NO: 3491012 - DNA, 25 bp, Homo sapien
tcacagcacatagcaaggaaaactg

SEQ ID NO: 3491013 - DNA, 25 bp, Homo sapien
ccctctactgatggcacggctgtaa

SEQ ID NO: 3491014 - DNA, 25 bp, Homo sapien
actcctggatctgagaacggtaacc

SEQ ID NO: 3491015 - DNA, 25 bp, Homo sapien
cccggacatggtgctttatcagccg

SEQ ID NO: 3491016 - DNA, 25 bp, Homo sapien
tggcacaaatctgggtaaatgccaa

SEQ ID NO: 3491017 - DNA, 25 bp, Homo sapien
tgtggcattcaacacccggacatgg

SEQ ID NO: 3491018 - DNA, 25 bp, Homo sapien
gacacttgacgtttagctggcacaa

SEQ ID NO: 3491019 - DNA, 25 bp, Homo sapien
ctctcctgacactggaagggagaaa

SEQ ID NO: 3491020 - DNA, 25 bp, Homo sapien
gggccgtgacagcagcatccttctc

SEQ ID NO: 3491021 - DNA, 25 bp, Homo sapien
cagagtaacagaaggcgtgctgtca

SEQ ID NO: 3491022 - DNA, 25 bp, Homo sapien
gccctgctgcggcagtgtgaagaga

SEQ ID NO: 3491023 - DNA, 25 bp, Homo sapien
tgtgcagtgtagaccacactcctct

SEQ ID NO: 3491024 - DNA, 25 bp, Homo sapien
agagatgtgcagtgtagaccacact

SEQ ID NO: 3491025 - DNA, 25 bp, Homo sapien
ggaacttcaaatcccgtgccaggct

SEQ ID NO: 3491026 - DNA, 25 bp, Homo sapien
tggtgtggaacttcaaatcccgtgc

SEQ ID NO: 3491027 - DNA, 25 bp, Homo sapien
gccagaaacatgtgctcccagagct

SEQ ID NO: 3491028 - DNA, 25 bp, Homo sapien
tgccagaaacatgtgctcccagagc

SEQ ID NO: 3491029 - DNA, 25 bp, Homo sapien
ctgccagaaacatgtgctcccagag

SEQ ID NO: 3491030 - DNA, 25 bp, Homo sapien
gtccacagctccctcgaagcatgct

SEQ ID NO: 3491031 - DNA, 25 bp, Homo sapien
tctctgcagcccgagtagtacatcc

SEQ ID NO: 3491032 - DNA, 25 bp, Homo sapien
ccgagtagtacatccaagcatcaga

SEQ ID NO: 3491033 - DNA, 25 bp, Homo sapien
tgcagcattggtgccgctgaacctc

SEQ ID NO: 3491034 - DNA, 25 bp, Homo sapien
tgcctggccaggacctatcttctgt

SEQ ID NO: 3491035 - DNA, 25 bp, Homo sapien
ggcccgctgtgataactcctttctg

SEQ ID NO: 3491036 - DNA, 25 bp, Homo sapien
tgaacagcagtgtcaggcccgctgt

SEQ ID NO: 3491037 - DNA, 25 bp, Homo sapien
tgcacaggctgggtatgtttccaac

SEQ ID NO: 3491038 - DNA, 25 bp, Homo sapien
tcccaggggcactgagagagtttgt

SEQ ID NO: 3491039 - DNA, 25 bp, Homo sapien
tttgtccgcagccaaacacaacttc

SEQ ID NO: 3491040 - DNA, 25 bp, Homo sapien
tccaaacatcttgtaagtcccaggg

SEQ ID NO: 3491041 - DNA, 25 bp, Homo sapien
tcattccaaacatcttgtaagtccc

SEQ ID NO: 3491042 - DNA, 25 bp, Homo sapien
tcattggctcaatgttggtgatcac

SEQ ID NO: 3491043 - DNA, 25 bp, Homo sapien
tattgaccgtacatatgacaacatt

SEQ ID NO: 3491044 - DNA, 25 bp, Homo sapien
cactaatgcgacaaatactgtggtt

SEQ ID NO: 3491045 - DNA, 25 bp, Homo sapien
ctgtggttgtattgaccgtacatat

SEQ ID NO: 3491046 - DNA, 25 bp, Homo sapien
agaacagcaggcccgggttactcct

SEQ ID NO: 3491047 - DNA, 25 bp, Homo sapien
ggcctccgctgagctcgcattggga

SEQ ID NO: 3491048 - DNA, 25 bp, Homo sapien
ggacagtctgtcttatggggaaaac

SEQ ID NO: 3491049 - DNA, 25 bp, Homo sapien
aggatgcagccgcattcagtcccag

SEQ ID NO: 3491050 - DNA, 25 bp, Homo sapien
gaagctacatttcggaacacatggc

SEQ ID NO: 3491051 - DNA, 25 bp, Homo sapien
gtagcacgacccttggattcccaga

SEQ ID NO: 3491052 - DNA, 25 bp, Homo sapien
ggttactggccctgagacgtgtcct

SEQ ID NO: 3491053 - DNA, 25 bp, Homo sapien
ttcctcaggtgaagacaggctcgtc

SEQ ID NO: 3491054 - DNA, 25 bp, Homo sapien
gtgaacaggaaggcagaatttatca

SEQ ID NO: 3491055 - DNA, 25 bp, Homo sapien
aaggcagaatttatcaaagaggact

SEQ ID NO: 3491056 - DNA, 25 bp, Homo sapien
aacaggaaggcagaatttatcaaag

SEQ ID NO: 3491057 - DNA, 25 bp, Homo sapien
aggcagaatttatcaaagaggacta

SEQ ID NO: 3491058 - DNA, 25 bp, Homo sapien
tgtgctccggagttgtttcaaacca

SEQ ID NO: 3491059 - DNA, 25 bp, Homo sapien
tactgggctttcctgcgtggtgcag

SEQ ID NO: 3491060 - DNA, 25 bp, Homo sapien
ggtaggacccatctcactagatccg

SEQ ID NO: 3491061 - DNA, 25 bp, Homo sapien
tatggcgtctgcagcgttgagcagc

SEQ ID NO: 3491062 - DNA, 25 bp, Homo sapien
tacttcgaaggtggtacagtagcat

SEQ ID NO: 3491063 - DNA, 25 bp, Homo sapien
gattgtgttttccagctagtgctcc

SEQ ID NO: 3491064 - DNA, 25 bp, Homo sapien
tactctcttctaatgggaggccctg

SEQ ID NO: 3491065 - DNA, 25 bp, Homo sapien
ggcacctgccagaaatacttcgaag

SEQ ID NO: 3491066 - DNA, 25 bp, Homo sapien
cagcttggctctcccggttgtgtgg

SEQ ID NO: 3491067 - DNA, 25 bp, Homo sapien
gaggctgatgtatgcttccgcaact

SEQ ID NO: 3491068 - DNA, 25 bp, Homo sapien
tcggcgaggctctcagaacgcatac

SEQ ID NO: 3491069 - DNA, 25 bp, Homo sapien
gcatcattaccaggcacagcttttg

SEQ ID NO: 3491070 - DNA, 25 bp, Homo sapien
ggacccgggacagctctcatagtgt

SEQ ID NO: 3491071 - DNA, 25 bp, Homo sapien
gagcctggcaaagtcaaggagagaa

SEQ ID NO: 3491072 - DNA, 25 bp, Homo sapien
gatctccacctaaatgggctctgca

SEQ ID NO: 3491073 - DNA, 25 bp, Homo sapien
ggagagaaattacgctcatcttcca

SEQ ID NO: 3491074 - DNA, 25 bp, Homo sapien
aagatactgcctgggtcggagagcc

SEQ ID NO: 3491075 - DNA, 25 bp, Homo sapien
aaatgattgaggcagtttacggcac

SEQ ID NO: 3491076 - DNA, 25 bp, Homo sapien
taccagtcatgccacacggaggaat

SEQ ID NO: 3491077 - DNA, 25 bp, Homo sapien
cattgtatgttgcagcccgtggcag

SEQ ID NO: 3491078 - DNA, 25 bp, Homo sapien
tgtcgtatgagcaactattactttt

SEQ ID NO: 3491079 - DNA, 25 bp, Homo sapien
taatggttttatctgggtagtggtg

SEQ ID NO: 3491080 - DNA, 25 bp, Homo sapien
ttggtgaaaatcatgttaatggttt

SEQ ID NO: 3491081 - DNA, 25 bp, Homo sapien
gatatattcagagcaaaagtatgaa

SEQ ID NO: 3491082 - DNA, 25 bp, Homo sapien
gaaggctatcccctcggtcagtggg

SEQ ID NO: 3491083 - DNA, 25 bp, Homo sapien
aagcatatttatccacacggtgagg

SEQ ID NO: 3491084 - DNA, 25 bp, Homo sapien
catccaaactgtgaggctgatcgca

SEQ ID NO: 3491085 - DNA, 25 bp, Homo sapien
gagccactgtcaattccgtcatgaa

SEQ ID NO: 3491086 - DNA, 25 bp, Homo sapien
acttgagagtcatgaaccgagagac

SEQ ID NO: 3491087 - DNA, 25 bp, Homo sapien
cacacttgagagtcatgaaccgaga

SEQ ID NO: 3491088 - DNA, 25 bp, Homo sapien
ctgttctccagaaggaaaccacact

SEQ ID NO: 3491089 - DNA, 25 bp, Homo sapien
aggaaaccacacttgagagtcatga

SEQ ID NO: 3491090 - DNA, 25 bp, Homo sapien
tgtgccacacgaagaatggcagcct

SEQ ID NO: 3491091 - DNA, 25 bp, Homo sapien
aagtcggtcctgaagagcgtttgca

SEQ ID NO: 3491092 - DNA, 25 bp, Homo sapien
gggcaatgcttcctagatgttcagg

SEQ ID NO: 3491093 - DNA, 25 bp, Homo sapien
ttagctggcattcactgggtacaca

SEQ ID NO: 3491094 - DNA, 25 bp, Homo sapien
tgtcccgccagtgcttctgcagtga

SEQ ID NO: 3491095 - DNA, 25 bp, Homo sapien
ggactgacttcagggacggctgtca

SEQ ID NO: 3491096 - DNA, 25 bp, Homo sapien
gcagtgagcagagttttcgagtcct

SEQ ID NO: 3491097 - DNA, 25 bp, Homo sapien
ccagcagaacactcgcaggaggtca

SEQ ID NO: 3491098 - DNA, 25 bp, Homo sapien
gacgtcatagttccctgaaacaggg

SEQ ID NO: 3491099 - DNA, 25 bp, Homo sapien
tgcagaatagtccagacaaggaggc

SEQ ID NO: 3491100 - DNA, 25 bp, Homo sapien
tcccagcagagatgaaaattgagcg

SEQ ID NO: 3491101 - DNA, 25 bp, Homo sapien
ggatcctggcaatgcagcagctaag

SEQ ID NO: 3491102 - DNA, 25 bp, Homo sapien
ttagagtggggctgccgacgcccat

SEQ ID NO: 3491103 - DNA, 25 bp, Homo sapien
cccaaacgagattctctcctgtctg

SEQ ID NO: 3491104 - DNA, 25 bp, Homo sapien
tcatcttctccagccttaccccaaa

SEQ ID NO: 3491105 - DNA, 25 bp, Homo sapien
acgcccatccctctcatccgaatct

SEQ ID NO: 3491106 - DNA, 25 bp, Homo sapien
tgctggacggcgaggagttcaccat

SEQ ID NO: 3491107 - DNA, 25 bp, Homo sapien
tctaaagggtcagtccagcatggta

SEQ ID NO: 3491108 - DNA, 25 bp, Homo sapien
tcctagcgcccgagttcaagatcga

SEQ ID NO: 3491109 - DNA, 25 bp, Homo sapien
aaacctcttatgtcaagccgggaag

SEQ ID NO: 3491110 - DNA, 25 bp, Homo sapien
ttgtaggtagagaacagggccctcc

SEQ ID NO: 3491111 - DNA, 25 bp, Homo sapien
tgaagtcccgggcaactagcagtat

SEQ ID NO: 3491112 - DNA, 25 bp, Homo sapien
ctgtggcaacgcagtgaaagggcct

SEQ ID NO: 3491113 - DNA, 25 bp, Homo sapien
gatgcagttttgtggtcttgagacc

SEQ ID NO: 3491114 - DNA, 25 bp, Homo sapien
cataagcacagagctgggtacctgg

SEQ ID NO: 3491115 - DNA, 25 bp, Homo sapien
tacttagagggaatttggcagcact

SEQ ID NO: 3491116 - DNA, 25 bp, Homo sapien
cctctttggaggtaacaagccctga

SEQ ID NO: 3491117 - DNA, 25 bp, Homo sapien
tgaaaagaatcagcgatgacctcga

SEQ ID NO: 3491118 - DNA, 25 bp, Homo sapien
caagcactgtacaggatgtcccaag

SEQ ID NO: 3491119 - DNA, 25 bp, Homo sapien
cattctagactcgttattcctatcc

SEQ ID NO: 3491120 - DNA, 25 bp, Homo sapien
tgaactgttacaatagccctgaggc

SEQ ID NO: 3491121 - DNA, 25 bp, Homo sapien
ctgtgctaggacgaagtgttttgct

SEQ ID NO: 3491122 - DNA, 25 bp, Homo sapien
ttcacaaccaaaggctccatggaca

SEQ ID NO: 3491123 - DNA, 25 bp, Homo sapien
gcccttagcattcgggcgggagaaa

SEQ ID NO: 3491124 - DNA, 25 bp, Homo sapien
gaaaacccacaggacctaactgcta

SEQ ID NO: 3491125 - DNA, 25 bp, Homo sapien
gatgcttacactcgagaaagaagga

SEQ ID NO: 3491126 - DNA, 25 bp, Homo sapien
gataaagtccagaactcactatctg

SEQ ID NO: 3491127 - DNA, 25 bp, Homo sapien
ataaagtccagaactcactatctga

SEQ ID NO: 3491128 - DNA, 25 bp, Homo sapien
ggataaagtccagaactcactatct

SEQ ID NO: 3491129 - DNA, 25 bp, Homo sapien
taacatagccaaggtaagcctgaca

SEQ ID NO: 3491130 - DNA, 25 bp, Homo sapien
ccttgtggttgcattgcgaacggca

SEQ ID NO: 3491131 - DNA, 25 bp, Homo sapien
caggagctaccttggaagttagcag

SEQ ID NO: 3491132 - DNA, 25 bp, Homo sapien
gggccagtcaatgaaccagtcagca

SEQ ID NO: 3491133 - DNA, 25 bp, Homo sapien
ggcaaccctgccgtaattacatatt

SEQ ID NO: 3491134 - DNA, 25 bp, Homo sapien
caagggccgtagtttggcaaccctg

SEQ ID NO: 3491135 - DNA, 25 bp, Homo sapien
cagtgtgcagcaattagcccaaggg

SEQ ID NO: 3491136 - DNA, 25 bp, Homo sapien
cagaatgccgttatgggattttcac

SEQ ID NO: 3491137 - DNA, 25 bp, Homo sapien
gcgagcttaagtaatcccagattcc

SEQ ID NO: 3491138 - DNA, 25 bp, Homo sapien
ttccctcgcagctcaagagcaaaga

SEQ ID NO: 3491139 - DNA, 25 bp, Homo sapien
gctcttttacattcaggagtcagca

SEQ ID NO: 3491140 - DNA, 25 bp, Homo sapien
ccataagaatggcatatagcgagct

SEQ ID NO: 3491141 - DNA, 25 bp, Homo sapien
tctttctgagcccaacagagccagg

SEQ ID NO: 3491142 - DNA, 25 bp, Homo sapien
caggaagtccctcccacttagtgct

SEQ ID NO: 3491143 - DNA, 25 bp, Homo sapien
caaagggattagcatgtattgcagg

SEQ ID NO: 3491144 - DNA, 25 bp, Homo sapien
catgtcagtcaagatggcagggacc

SEQ ID NO: 3491145 - DNA, 25 bp, Homo sapien
gcaattgttttactacacccggcag

SEQ ID NO: 3491146 - DNA, 25 bp, Homo sapien
ctctccgcagaatcaacttctttct

SEQ ID NO: 3491147 - DNA, 25 bp, Homo sapien
ccgctgccgcggtctccgtgcagcc

SEQ ID NO: 3491148 - DNA, 25 bp, Homo sapien
gggcagcgcaccgccgcgctgtggg

SEQ ID NO: 3491149 - DNA, 25 bp, Homo sapien
gcgcaccgccgcgctgtgggaaggg

SEQ ID NO: 3491150 - DNA, 25 bp, Homo sapien
agcccgcactctggaaccgccaacg

SEQ ID NO: 3491151 - DNA, 25 bp, Homo sapien
gaaagccagggttaggatgcccagc

SEQ ID NO: 3491152 - DNA, 25 bp, Homo sapien
gtccccagaatagaagcagcgtcgc

SEQ ID NO: 3491153 - DNA, 25 bp, Homo sapien
aaaaatgagtccctgatccccggag

SEQ ID NO: 3491154 - DNA, 25 bp, Homo sapien
gcagataatgttccaggtccgcgcc

SEQ ID NO: 3491155 - DNA, 25 bp, Homo sapien
tatcggtcttggacacaaactgcag

SEQ ID NO: 3491156 - DNA, 25 bp, Homo sapien
cctgatccaggaggcgctgattggc

SEQ ID NO: 3491157 - DNA, 25 bp, Homo sapien
cggaggcattgcacgatacaaaggg

SEQ ID NO: 3491158 - DNA, 25 bp, Homo sapien
tcaacgaggtttaaactcggaggca

SEQ ID NO: 3491159 - DNA, 25 bp, Homo sapien
cttcagttctacaacccttgaaagg

SEQ ID NO: 3491160 - DNA, 25 bp, Homo sapien
tcagttctacaacccttgaaaggag

SEQ ID NO: 3491161 - DNA, 25 bp, Homo sapien
cgagaagactcagccgcccatacaa

SEQ ID NO: 3491162 - DNA, 25 bp, Homo sapien
agacctcaggaggtgtccgagaaga

SEQ ID NO: 3491163 - DNA, 25 bp, Homo sapien
agtggcagctcaacagacctcagtt

SEQ ID NO: 3491164 - DNA, 25 bp, Homo sapien
ggtccctattcccagcaggagttct

SEQ ID NO: 3491165 - DNA, 25 bp, Homo sapien
ggaaacagactcaggccaaagacct

SEQ ID NO: 3491166 - DNA, 25 bp, Homo sapien
tttggagccagtgagtgacctgcac

SEQ ID NO: 3491167 - DNA, 25 bp, Homo sapien
cacccaaacggcagcgttattggac

SEQ ID NO: 3491168 - DNA, 25 bp, Homo sapien
tcacccaaacggcagcgttattgga

SEQ ID NO: 3491169 - DNA, 25 bp, Homo sapien
ggcctcgccctgtagctcaagcaag

SEQ ID NO: 3491170 - DNA, 25 bp, Homo sapien
gctcaagcaagtgccggttgacact

SEQ ID NO: 3491171 - DNA, 25 bp, Homo sapien
catatcgccccaagaatggaaggcc

SEQ ID NO: 3491172 - DNA, 25 bp, Homo sapien
tgcctctggtgcatatcgccccaag

SEQ ID NO: 3491173 - DNA, 25 bp, Homo sapien
gatgatcctggaatcatcttggcca

SEQ ID NO: 3491174 - DNA, 25 bp, Homo sapien
tgcctcacgattcccagcaattggc

SEQ ID NO: 3491175 - DNA, 25 bp, Homo sapien
aaataatttaggattggagccacac

SEQ ID NO: 3491176 - DNA, 25 bp, Homo sapien
ttggccaggaaccttaatcctcctg

SEQ ID NO: 3491177 - DNA, 25 bp, Homo sapien
tctggagcaaagacatgcagctgca

SEQ ID NO: 3491178 - DNA, 25 bp, Homo sapien
ccatcaagaagtcccggtttccctg

SEQ ID NO: 3491179 - DNA, 25 bp, Homo sapien
gaagcagccgtcttgcagtaaccag

SEQ ID NO: 3491180 - DNA, 25 bp, Homo sapien
aaagagccggcaaatttcctgaggg

SEQ ID NO: 3491181 - DNA, 25 bp, Homo sapien
gcccagggtgtcacaggtggtggct

SEQ ID NO: 3491182 - DNA, 25 bp, Homo sapien
cccagggtgtcacaggtggtggctc

SEQ ID NO: 3491183 - DNA, 25 bp, Homo sapien
cagggtgtcacaggtggtggctcca

SEQ ID NO: 3491184 - DNA, 25 bp, Homo sapien
ggtgtcacaggtggtggctccacac

SEQ ID NO: 3491185 - DNA, 25 bp, Homo sapien
gaaggctgatggaagcccatcgtcc

SEQ ID NO: 3491186 - DNA, 25 bp, Homo sapien
tcacacatggtacccacatcagcca

SEQ ID NO: 3491187 - DNA, 25 bp, Homo sapien
tggtgaaggctgatggaagcccatc

SEQ ID NO: 3491188 - DNA, 25 bp, Homo sapien
tggaagcccatcgtcctcaatgaca

SEQ ID NO: 3491189 - DNA, 25 bp, Homo sapien
gacatcatgtggttggctcggagct

SEQ ID NO: 3491190 - DNA, 25 bp, Homo sapien
tgtcatggggcatgttgaacacgtg

SEQ ID NO: 3491191 - DNA, 25 bp, Homo sapien
gggttggcacggtcgatctggatga

SEQ ID NO: 3491192 - DNA, 25 bp, Homo sapien
cttcccaaacacctcctcacagact

SEQ ID NO: 3491193 - DNA, 25 bp, Homo sapien
cctgtgcttgttgaggttgtgtctc

SEQ ID NO: 3491194 - DNA, 25 bp, Homo sapien
accacagcttggtgcagtactgcat

SEQ ID NO: 3491195 - DNA, 25 bp, Homo sapien
tactgcatgtaaggacagggcttgg

SEQ ID NO: 3491196 - DNA, 25 bp, Homo sapien
caaaagccagctcgcactgctggct

SEQ ID NO: 3491197 - DNA, 25 bp, Homo sapien
gggaaatactggcactgcaggagag

SEQ ID NO: 3491198 - DNA, 25 bp, Homo sapien
gcgatgtccctaacaagcgagaggg

SEQ ID NO: 3491199 - DNA, 25 bp, Homo sapien
atgggagaaattacaacaggtttgt

SEQ ID NO: 3491200 - DNA, 25 bp, Homo sapien
gagagagaattgatcagcgatgtcc

SEQ ID NO: 3491201 - DNA, 25 bp, Homo sapien
aggaggaggacaaccgagaggcagt

SEQ ID NO: 3491202 - DNA, 25 bp, Homo sapien
gaaaatgagagtacaaggaagaagc

SEQ ID NO: 3491203 - DNA, 25 bp, Homo sapien
cagtggagaccctgttccagggccc

SEQ ID NO: 3491204 - DNA, 25 bp, Homo sapien
agaaatgctgctagccggctggacg

SEQ ID NO: 3491205 - DNA, 25 bp, Homo sapien
caaagcccctaaagggtgctgagca

SEQ ID NO: 3491206 - DNA, 25 bp, Homo sapien
tgtcactagggccaacaaggcagcg

SEQ ID NO: 3491207 - DNA, 25 bp, Homo sapien
taacctaaggtgcattccaaaagag

SEQ ID NO: 3491208 - DNA, 25 bp, Homo sapien
caaaagagctgccatggcgggaatc

SEQ ID NO: 3491209 - DNA, 25 bp, Homo sapien
tactcgcctggaattaaaactctgc

SEQ ID NO: 3491210 - DNA, 25 bp, Homo sapien
gacagcgtcacccacgtttgctctt

SEQ ID NO: 3491211 - DNA, 25 bp, Homo sapien
ctaactcacatggaactaagcagga

SEQ ID NO: 3491212 - DNA, 25 bp, Homo sapien
atgagtttggatcctctgaacacac

SEQ ID NO: 3491213 - DNA, 25 bp, Homo sapien
catagggatcccatttggcccagga

SEQ ID NO: 3491214 - DNA, 25 bp, Homo sapien
gcagtacttgcccccgttggcaggg

SEQ ID NO: 3491215 - DNA, 25 bp, Homo sapien
cacatgtgcgcgagcaggggccata

SEQ ID NO: 3491216 - DNA, 25 bp, Homo sapien
ttgcaggatcggtatttcaccctca

SEQ ID NO: 3491217 - DNA, 25 bp, Homo sapien
tagccagtgccattggctcggcaga

SEQ ID NO: 3491218 - DNA, 25 bp, Homo sapien
gagacacgccggagtacttgggcac

SEQ ID NO: 3491219 - DNA, 25 bp, Homo sapien
tggttgtagccgttgaaagcctcac

SEQ ID NO: 3491220 - DNA, 25 bp, Homo sapien
ttgggtgccagcacatagaagtagc

SEQ ID NO: 3491221 - DNA, 25 bp, Homo sapien
cttcttgcagctcttattgtctccc

SEQ ID NO: 3491222 - DNA, 25 bp, Homo sapien
tgccttggacacagacggaggtgga

SEQ ID NO: 3491223 - DNA, 25 bp, Homo sapien
cacacttgtcgaatctcttcttgga

SEQ ID NO: 3491224 - DNA, 25 bp, Homo sapien
ggagagcacagcgtgccgtccacca

SEQ ID NO: 3491225 - DNA, 25 bp, Homo sapien
cacgaaatgcccgttgagcaggtac

SEQ ID NO: 3491226 - DNA, 25 bp, Homo sapien
gggatggccaccacgaaattgtagc

SEQ ID NO: 3491227 - DNA, 25 bp, Homo sapien
tcagagccaggtagttgtcatcccc

SEQ ID NO: 3491228 - DNA, 25 bp, Homo sapien
cacacttgagtgagcgcctctgaaa

SEQ ID NO: 3491229 - DNA, 25 bp, Homo sapien
caatgggtacgggactgtggccact

SEQ ID NO: 3491230 - DNA, 25 bp, Homo sapien
gcaaacagtggagaagctaaggcct

SEQ ID NO: 3491231 - DNA, 25 bp, Homo sapien
taaggcctaggatgcaacgtgacgt

SEQ ID NO: 3491232 - DNA, 25 bp, Homo sapien
gatgagaaacctcgggactccctgt

SEQ ID NO: 3491233 - DNA, 25 bp, Homo sapien
ccaatcagtgcacgcgatgggcaga

SEQ ID NO: 3491234 - DNA, 25 bp, Homo sapien
agcccagcgttagaccggatgagaa

SEQ ID NO: 3491235 - DNA, 25 bp, Homo sapien
ggcaagcaagacaaactccctaggt

SEQ ID NO: 3491236 - DNA, 25 bp, Homo sapien
cacaacagataaaagcaccgaggcc

SEQ ID NO: 3491237 - DNA, 25 bp, Homo sapien
tctcgcagctcaagaggaagtcatt

SEQ ID NO: 3491238 - DNA, 25 bp, Homo sapien
agctctcgcagctcaagaggaagtc

SEQ ID NO: 3491239 - DNA, 25 bp, Homo sapien
agctcaagaggaagtcattccccat

SEQ ID NO: 3491240 - DNA, 25 bp, Homo sapien
tcgcagctcaagaggaagtcattcc

SEQ ID NO: 3491241 - DNA, 25 bp, Homo sapien
gcccacgcatgagaccaagagtgca

SEQ ID NO: 3491242 - DNA, 25 bp, Homo sapien
cacgcatgagaccaagagtgcagag

SEQ ID NO: 3491243 - DNA, 25 bp, Homo sapien
cgcatgagaccaagagtgcagagcc

SEQ ID NO: 3491244 - DNA, 25 bp, Homo sapien
ccggcccacgcatgagaccaagagt

SEQ ID NO: 3491245 - DNA, 25 bp, Homo sapien
agcatctccaacaatgagttgattg

SEQ ID NO: 3491246 - DNA, 25 bp, Homo sapien
tggattttgaatgaccccagaagca

SEQ ID NO: 3491247 - DNA, 25 bp, Homo sapien
agtggctgggcttagctccctccat

SEQ ID NO: 3491248 - DNA, 25 bp, Homo sapien
ttgattgttcccattccagtggctg

SEQ ID NO: 3491249 - DNA, 25 bp, Homo sapien
acacatagaccttgtcctccagtcc

SEQ ID NO: 3491250 - DNA, 25 bp, Homo sapien
tcacacatagaccttgtcctccagt

SEQ ID NO: 3491251 - DNA, 25 bp, Homo sapien
cacacatagaccttgtcctccagtc

SEQ ID NO: 3491252 - DNA, 25 bp, Homo sapien
aattcatctaaaaggtcatcaacta

SEQ ID NO: 3491253 - DNA, 25 bp, Homo sapien
tgataaattcatctaaaaggtcatc

SEQ ID NO: 3491254 - DNA, 25 bp, Homo sapien
tcacgtgataaattcatctaaaagg

SEQ ID NO: 3491255 - DNA, 25 bp, Homo sapien
attcatctaaaaggtcatcaactat

SEQ ID NO: 3491256 - DNA, 25 bp, Homo sapien
cttgtcaagccattgggcccctgtt

SEQ ID NO: 3491257 - DNA, 25 bp, Homo sapien
ggtgatgaggaagcagaacctccat

SEQ ID NO: 3491258 - DNA, 25 bp, Homo sapien
tcagaacaggtgctttgaacctggt

SEQ ID NO: 3491259 - DNA, 25 bp, Homo sapien
gccattgggcccctgttcaggaacc

SEQ ID NO: 3491260 - DNA, 25 bp, Homo sapien
gaatctctacattggccacaaactt

SEQ ID NO: 3491261 - DNA, 25 bp, Homo sapien
tcatgaatctctacattggccacaa

SEQ ID NO: 3491262 - DNA, 25 bp, Homo sapien
cttcatgaatctctacattggccac

SEQ ID NO: 3491263 - DNA, 25 bp, Homo sapien
catgaatctctacattggccacaaa

SEQ ID NO: 3491264 - DNA, 25 bp, Homo sapien
aaggccagtcgctgtgggaaatttg

SEQ ID NO: 3491265 - DNA, 25 bp, Homo sapien
cgctgtgggaaatttgtcatccaaa

SEQ ID NO: 3491266 - DNA, 25 bp, Homo sapien
cagtcgctgtgggaaatttgtcatc

SEQ ID NO: 3491267 - DNA, 25 bp, Homo sapien
ctgaaaggccagtcgctgtgggaaa

SEQ ID NO: 3491268 - DNA, 25 bp, Homo sapien
gggcggattggaagggcagaaacac

SEQ ID NO: 3491269 - DNA, 25 bp, Homo sapien
aggatgggcggattggaagggcaga

SEQ ID NO: 3491270 - DNA, 25 bp, Homo sapien
gagcaaacatcaaacccaggtgctg

SEQ ID NO: 3491271 - DNA, 25 bp, Homo sapien
cagagcaaacatcaaacccaggtgc

SEQ ID NO: 3491272 - DNA, 25 bp, Homo sapien
acacatgtcgttccttctaagccat

SEQ ID NO: 3491273 - DNA, 25 bp, Homo sapien
cacatgtcgttccttctaagccatg

SEQ ID NO: 3491274 - DNA, 25 bp, Homo sapien
acatgtcgttccttctaagccatgg

SEQ ID NO: 3491275 - DNA, 25 bp, Homo sapien
aaagggctacttgcagataccaggc

SEQ ID NO: 3491276 - DNA, 25 bp, Homo sapien
ctgagaaaattgtgacggttgtatt

SEQ ID NO: 3491277 - DNA, 25 bp, Homo sapien
gtaactgagaaaattgtgacggttg

SEQ ID NO: 3491278 - DNA, 25 bp, Homo sapien
gagaaaattgtgacggttgtattaa

SEQ ID NO: 3491279 - DNA, 25 bp, Homo sapien
aactgagaaaattgtgacggttgta

SEQ ID NO: 3491280 - DNA, 25 bp, Homo sapien
ccatgcaaactttttctggagagct

SEQ ID NO: 3491281 - DNA, 25 bp, Homo sapien
tgcaaactttttctggagagctcat

SEQ ID NO: 3491282 - DNA, 25 bp, Homo sapien
tcccatgcaaactttttctggagag

SEQ ID NO: 3491283 - DNA, 25 bp, Homo sapien
catgcaaactttttctggagagctc

SEQ ID NO: 3491284 - DNA, 25 bp, Homo sapien
tggagtttcctaaagaccctggtca

SEQ ID NO: 3491285 - DNA, 25 bp, Homo sapien
tggagcccttgacaaagttcctagg

SEQ ID NO: 3491286 - DNA, 25 bp, Homo sapien
tctgctggtgaaatctcaggtcttt

SEQ ID NO: 3491287 - DNA, 25 bp, Homo sapien
ctaaagaccctggtcatggagccct

SEQ ID NO: 3491288 - DNA, 25 bp, Homo sapien
ttcacacagcttggtgtcctgaaca

SEQ ID NO: 3491289 - DNA, 25 bp, Homo sapien
gagcaagtgccagaagataagcttc

SEQ ID NO: 3491290 - DNA, 25 bp, Homo sapien
accagcctggagtgctttcacacag

SEQ ID NO: 3491291 - DNA, 25 bp, Homo sapien
tgggagcggtattcccaccagcctg

SEQ ID NO: 3491292 - DNA, 25 bp, Homo sapien
gctgagatgcatgtaactggctcca

SEQ ID NO: 3491293 - DNA, 25 bp, Homo sapien
ccctgggctgagatgcatgtaactg

SEQ ID NO: 3491294 - DNA, 25 bp, Homo sapien
atgcatgtaactggctccatctcac

SEQ ID NO: 3491295 - DNA, 25 bp, Homo sapien
ccctccctgggctgagatgcatgta

SEQ ID NO: 3491296 - DNA, 25 bp, Homo sapien
gaaagctgataaagcatgacatcag

SEQ ID NO: 3491297 - DNA, 25 bp, Homo sapien
atgcacagtggaaagctgataaagc

SEQ ID NO: 3491298 - DNA, 25 bp, Homo sapien
cagtggaaagctgataaagcatgac

SEQ ID NO: 3491299 - DNA, 25 bp, Homo sapien
ctgataaagcatgacatcagtaggg

SEQ ID NO: 3491300 - DNA, 25 bp, Homo sapien
gtagccatgtttaccaaggtagcca

SEQ ID NO: 3491301 - DNA, 25 bp, Homo sapien
tgtagccatgtttaccaaggtagcc

SEQ ID NO: 3491302 - DNA, 25 bp, Homo sapien
catgctgtgtcccgaaacctaaagt

SEQ ID NO: 3491303 - DNA, 25 bp, Homo sapien
tgctgtgtcccgaaacctaaagtta

SEQ ID NO: 3491304 - DNA, 25 bp, Homo sapien
atgctgtgtcccgaaacctaaagtt

SEQ ID NO: 3491305 - DNA, 25 bp, Homo sapien
ccatgctgtgtcccgaaacctaaag

SEQ ID NO: 3491306 - DNA, 25 bp, Homo sapien
ccagcagtccgggagctgaggatgc

SEQ ID NO: 3491307 - DNA, 25 bp, Homo sapien
tcacgtcactcaggaatcctgattt

SEQ ID NO: 3491308 - DNA, 25 bp, Homo sapien
ctcacgtcactcaggaatcctgatt

SEQ ID NO: 3491309 - DNA, 25 bp, Homo sapien
tgtggccactgacaaactgaggtgt

SEQ ID NO: 3491310 - DNA, 25 bp, Homo sapien
cagtagcccgttgtacagatgtggc

SEQ ID NO: 3491311 - DNA, 25 bp, Homo sapien
gcaaatgcgtgggtttgaaatagca

SEQ ID NO: 3491312 - DNA, 25 bp, Homo sapien
tgagcacatttccagtagcccgttg

SEQ ID NO: 3491313 - DNA, 25 bp, Homo sapien
ccttgcctgctagagaagtgggaac

SEQ ID NO: 3491314 - DNA, 25 bp, Homo sapien
tgcccagatccttgcctgctagaga

SEQ ID NO: 3491315 - DNA, 25 bp, Homo sapien
cagatccttgcctgctagagaagtg

SEQ ID NO: 3491316 - DNA, 25 bp, Homo sapien
gatccttgcctgctagagaagtggg

SEQ ID NO: 3491317 - DNA, 25 bp, Homo sapien
ccctggagacttttctgcaaaccgc

SEQ ID NO: 3491318 - DNA, 25 bp, Homo sapien
agctggatagtgtgcttctccccag

SEQ ID NO: 3491319 - DNA, 25 bp, Homo sapien
aaagctggatagtgtgcttctcccc

SEQ ID NO: 3491320 - DNA, 25 bp, Homo sapien
tctgcaaaccgctttttccatttca

SEQ ID NO: 3491321 - DNA, 25 bp, Homo sapien
tctttatcccgaggatcacatttct

SEQ ID NO: 3491322 - DNA, 25 bp, Homo sapien
gaggaattcacgcatgacaatccca

SEQ ID NO: 3491323 - DNA, 25 bp, Homo sapien
tatccccatagtctttatcccgagg

SEQ ID NO: 3491324 - DNA, 25 bp, Homo sapien
tgattccagaatcctacataggaaa

SEQ ID NO: 3491325 - DNA, 25 bp, Homo sapien
ttggtggtgtccagacataaggcag

SEQ ID NO: 3491326 - DNA, 25 bp, Homo sapien
ggtggtgtccagacataaggcagcc

SEQ ID NO: 3491327 - DNA, 25 bp, Homo sapien
tggtggtgtccagacataaggcagc

SEQ ID NO: 3491328 - DNA, 25 bp, Homo sapien
tctggtggcccagtagcagaagcaa

SEQ ID NO: 3491329 - DNA, 25 bp, Homo sapien
cagacttgctgccaataaagccagg

SEQ ID NO: 3491330 - DNA, 25 bp, Homo sapien
taaagccagggcgactgccaaattg

SEQ ID NO: 3491331 - DNA, 25 bp, Homo sapien
tccggatcctgtcagtgcagactgg

SEQ ID NO: 3491332 - DNA, 25 bp, Homo sapien
tggatgccagatgccttatccttca

SEQ ID NO: 3491333 - DNA, 25 bp, Homo sapien
tcctctgtccctgacaagtgatgga

SEQ ID NO: 3491334 - DNA, 25 bp, Homo sapien
acaagtgatggatgccagatgcctt

SEQ ID NO: 3491335 - DNA, 25 bp, Homo sapien
ctctgtccctgacaagtgatggatg

SEQ ID NO: 3491336 - DNA, 25 bp, Homo sapien
tgtcagcgtaggcagcctgatcctg

SEQ ID NO: 3491337 - DNA, 25 bp, Homo sapien
ccaaatcatacaactcttaattggc

SEQ ID NO: 3491338 - DNA, 25 bp, Homo sapien
gatcctggtcccaaggtcccaaaca

SEQ ID NO: 3491339 - DNA, 25 bp, Homo sapien
cagagctgagatgtcagcgtaggca

SEQ ID NO: 3491340 - DNA, 25 bp, Homo sapien
ttcactcaacactcactggatatgc

SEQ ID NO: 3491341 - DNA, 25 bp, Homo sapien
gtcacatgctaggaacaagacccac

SEQ ID NO: 3491342 - DNA, 25 bp, Homo sapien
ggctgcgagaaagccgcctgcagcc

SEQ ID NO: 3491343 - DNA, 25 bp, Homo sapien
gctctttgccaggtcacatgctagg

SEQ ID NO: 3491344 - DNA, 25 bp, Homo sapien
tggacatcgtctcctgacttactca

SEQ ID NO: 3491345 - DNA, 25 bp, Homo sapien
ggacatcgtctcctgacttactcat

SEQ ID NO: 3491346 - DNA, 25 bp, Homo sapien
ctggacatcgtctcctgacttactc

SEQ ID NO: 3491347 - DNA, 25 bp, Homo sapien
cctgagccagcccgaacttggaaga

SEQ ID NO: 3491348 - DNA, 25 bp, Homo sapien
agagagttcttcctggcagtgggct

SEQ ID NO: 3491349 - DNA, 25 bp, Homo sapien
tcttcctggcagtgggctgccgtct

SEQ ID NO: 3491350 - DNA, 25 bp, Homo sapien
ccagcccgaacttggaagagagttc

SEQ ID NO: 3491351 - DNA, 25 bp, Homo sapien
tcttcatgctggcaatgcttctgat

SEQ ID NO: 3491352 - DNA, 25 bp, Homo sapien
tcatgctggcaatgctttggcatgc

SEQ ID NO: 3491353 - DNA, 25 bp, Homo sapien
gctggcaatgcttctgattcaacag

SEQ ID NO: 3491354 - DNA, 25 bp, Homo sapien
tgctggcaatgctttggcatgcttt

SEQ ID NO: 3491355 - DNA, 25 bp, Homo sapien
ttgctgcatacgtgcaatcttggag

SEQ ID NO: 3491356 - DNA, 25 bp, Homo sapien
tctcttgctgcatacgtgcaatctt

SEQ ID NO: 3491357 - DNA, 25 bp, Homo sapien
ctgcatacgtgcaatcttggagatg

SEQ ID NO: 3491358 - DNA, 25 bp, Homo sapien
tcttgctgcatacgtgcaatcttgg

SEQ ID NO: 3491359 - DNA, 25 bp, Homo sapien
tccagtgagaactggaagccagcta

SEQ ID NO: 3491360 - DNA, 25 bp, Homo sapien
tccactccactgagcatccagtgag

SEQ ID NO: 3491361 - DNA, 25 bp, Homo sapien
actggaagccagctagaggaagggc

SEQ ID NO: 3491362 - DNA, 25 bp, Homo sapien
agtgagaactggaagccagctagag

SEQ ID NO: 3491363 - DNA, 25 bp, Homo sapien
ttaaacactcaagaatgttttggac

SEQ ID NO: 3491364 - DNA, 25 bp, Homo sapien
aaaacagctgaagaattaaacactc

SEQ ID NO: 3491365 - DNA, 25 bp, Homo sapien
ggcttgtaaaacagctgaagaatta

SEQ ID NO: 3491366 - DNA, 25 bp, Homo sapien
accaggcaggcttgtaaaacagctg

SEQ ID NO: 3491367 - DNA, 25 bp, Homo sapien
caggatgtgactcaaacagagcccc

SEQ ID NO: 3491368 - DNA, 25 bp, Homo sapien
ctgcttctgacacgcatttaccagg

SEQ ID NO: 3491369 - DNA, 25 bp, Homo sapien
gacacgcatttaccaggatgtgact

SEQ ID NO: 3491370 - DNA, 25 bp, Homo sapien
atttaccaggatgtgactcaaacag

SEQ ID NO: 3491371 - DNA, 25 bp, Homo sapien
ttgtgtgaaatttaacatcgctcac

SEQ ID NO: 3491372 - DNA, 25 bp, Homo sapien
tttgtgtgaaatttaacatcgctca

SEQ ID NO: 3491373 - DNA, 25 bp, Homo sapien
ccaggtcatcaacatgaatgacagc

SEQ ID NO: 3491374 - DNA, 25 bp, Homo sapien
tcggtgtcagggtttcagccaggtc

SEQ ID NO: 3491375 - DNA, 25 bp, Homo sapien
agtggccaaggcatgtgtaccacca

SEQ ID NO: 3491376 - DNA, 25 bp, Homo sapien
ttattccactaaagcggaagtggcc

SEQ ID NO: 3491377 - DNA, 25 bp, Homo sapien
gagtttcaatttgagtttcgagtgc

SEQ ID NO: 3491378 - DNA, 25 bp, Homo sapien
tttcgagtgcacgagagatgtgtca

SEQ ID NO: 3491379 - DNA, 25 bp, Homo sapien
gtgtcaaatgatccagtttgtagct

SEQ ID NO: 3491380 - DNA, 25 bp, Homo sapien
gcacgagagatgtgtcaaatgatcc

SEQ ID NO: 3491381 - DNA, 25 bp, Homo sapien
tgacagcccacgagggagtcactgc

SEQ ID NO: 3491382 - DNA, 25 bp, Homo sapien
gaccaggttgtatatccagtgtaca

SEQ ID NO: 3491383 - DNA, 25 bp, Homo sapien
tgtgatggtgttgaccaggttgtat

SEQ ID NO: 3491384 - DNA, 25 bp, Homo sapien
ggttgtatatccagtgtacactatg

SEQ ID NO: 3491385 - DNA, 25 bp, Homo sapien
tgtcggtgtttcacctaggctccca

SEQ ID NO: 3491386 - DNA, 25 bp, Homo sapien
cttttactgtggtcgtcctcccctg

SEQ ID NO: 3491387 - DNA, 25 bp, Homo sapien
tgtggtcgtcctcccctgtcggtgt

SEQ ID NO: 3491388 - DNA, 25 bp, Homo sapien
ctgtcggtgtttcacctaggctccc

SEQ ID NO: 3491389 - DNA, 25 bp, Homo sapien
tgtgcttgctggcaagaggcacact

SEQ ID NO: 3491390 - DNA, 25 bp, Homo sapien
taaatgtgcttgctggcaagaggca

SEQ ID NO: 3491391 - DNA, 25 bp, Homo sapien
gcatgtaaatgtgcttgctggcaag

SEQ ID NO: 3491392 - DNA, 25 bp, Homo sapien
cttgctggcaagaggcacactcatc

SEQ ID NO: 3491393 - DNA, 25 bp, Homo sapien
ctgggccagaatggagaggccgctg

SEQ ID NO: 3491394 - DNA, 25 bp, Homo sapien
ccagagtgatgtggtcatgaccaga

SEQ ID NO: 3491395 - DNA, 25 bp, Homo sapien
gtgatgtggtcatgaccagatccct

SEQ ID NO: 3491396 - DNA, 25 bp, Homo sapien
agccagactccagagtgatgtggtc

SEQ ID NO: 3491397 - DNA, 25 bp, Homo sapien
ctccagagtgatgtggtcatgacca

SEQ ID NO: 3491398 - DNA, 25 bp, Homo sapien
tgttacttcagaatggaccatgggc

SEQ ID NO: 3491399 - DNA, 25 bp, Homo sapien
gagtcttgttacttcagaatggacc

SEQ ID NO: 3491400 - DNA, 25 bp, Homo sapien
gtgtgagtcttgttacttcagaatg

SEQ ID NO: 3491401 - DNA, 25 bp, Homo sapien
cagaatggaccatgggcttcgccat

SEQ ID NO: 3491402 - DNA, 25 bp, Homo sapien
gcctcacattccattgctgcccctg

SEQ ID NO: 3491403 - DNA, 25 bp, Homo sapien
ccttgggaatgagtgaacacggagc

SEQ ID NO: 3491404 - DNA, 25 bp, Homo sapien
cttgggaatgagtgaacacggagcc

SEQ ID NO: 3491405 - DNA, 25 bp, Homo sapien
tgggaatgagtgaacacggagccat

SEQ ID NO: 3491406 - DNA, 25 bp, Homo sapien
ggccttgggaatgagtgaacacgga

SEQ ID NO: 3491407 - DNA, 25 bp, Homo sapien
gcttcaagcctggtgagctcacggc

SEQ ID NO: 3491408 - DNA, 25 bp, Homo sapien
tcaggcaatgtgaagcgtgatgtct

SEQ ID NO: 3491409 - DNA, 25 bp, Homo sapien
gggacacaagtatctcattccgctg

SEQ ID NO: 3491410 - DNA, 25 bp, Homo sapien
gagatgaggttctcgagcgtcccgt

SEQ ID NO: 3491411 - DNA, 25 bp, Homo sapien
tgtatccctaagagacagcttgcag

SEQ ID NO: 3491412 - DNA, 25 bp, Homo sapien
gaagtcagcccgaaccgggtatgca

SEQ ID NO: 3491413 - DNA, 25 bp, Homo sapien
tatgcatgtgcagctggatttgcac

SEQ ID NO: 3491414 - DNA, 25 bp, Homo sapien
aacactcacgatgacccatgggctc

SEQ ID NO: 3491415 - DNA, 25 bp, Homo sapien
gtaaagccatcaaggtcgagcaaca

SEQ ID NO: 3491416 - DNA, 25 bp, Homo sapien
aagccatcaaggtcgagcaacagga

SEQ ID NO: 3491417 - DNA, 25 bp, Homo sapien
aaagccatcaaggtcgagcaacagg

SEQ ID NO: 3491418 - DNA, 25 bp, Homo sapien
taaagccatcaaggtcgagcaacag

SEQ ID NO: 3491419 - DNA, 25 bp, Homo sapien
ccagctgctcctgagttgtagtctc

SEQ ID NO: 3491420 - DNA, 25 bp, Homo sapien
tcttccatctcatccagctgctcct

SEQ ID NO: 3491421 - DNA, 25 bp, Homo sapien
gagagggcatggaagtcctgcctcc

SEQ ID NO: 3491422 - DNA, 25 bp, Homo sapien
gaggcggtgggacaggagagggcat

SEQ ID NO: 3491423 - DNA, 25 bp, Homo sapien
tggacaacagagcaagactctgtct

SEQ ID NO: 3491424 - DNA, 25 bp, Homo sapien
agcctggacaacagagcaagactct

SEQ ID NO: 3491425 - DNA, 25 bp, Homo sapien
ctatgatggcaccattgctctccag

SEQ ID NO: 3491426 - DNA, 25 bp, Homo sapien
cctggacaacagagcaagactctgt

SEQ ID NO: 3491427 - DNA, 25 bp, Homo sapien
tgaagaaaacactcagggcatggcc

SEQ ID NO: 3491428 - DNA, 25 bp, Homo sapien
catctggcagaaagttgggcatcac

SEQ ID NO: 3491429 - DNA, 25 bp, Homo sapien
tcagtccagcagatatgttcaagcg

SEQ ID NO: 3491430 - DNA, 25 bp, Homo sapien
gatctagagattacacccaaggctg

SEQ ID NO: 3491431 - DNA, 25 bp, Homo sapien
ggagacttgccccttgtgcaaagct

SEQ ID NO: 3491432 - DNA, 25 bp, Homo sapien
caggagacttgccccttgtgcaaag

SEQ ID NO: 3491433 - DNA, 25 bp, Homo sapien
ggcaggagacttgccccttgtgcaa

SEQ ID NO: 3491434 - DNA, 25 bp, Homo sapien
agacttgccccttgtgcaaagctgc

SEQ ID NO: 3491435 - DNA, 25 bp, Homo sapien
ggtgggtataacatagtagtaaggc

SEQ ID NO: 3491436 - DNA, 25 bp, Homo sapien
gggccaattgcttgacctctctgag

SEQ ID NO: 3491437 - DNA, 25 bp, Homo sapien
aggcacatgggagccaaatagacca

SEQ ID NO: 3491438 - DNA, 25 bp, Homo sapien
tataacatagtagtaaggcacatgg

SEQ ID NO: 3491439 - DNA, 25 bp, Homo sapien
cttggcatgactcaacatgggtgta

SEQ ID NO: 3491440 - DNA, 25 bp, Homo sapien
cccataactgaaggcaaatgattgc

SEQ ID NO: 3491441 - DNA, 25 bp, Homo sapien
tgaggttgcttgtacgtccccttgt

SEQ ID NO: 3491442 - DNA, 25 bp, Homo sapien
tgccaagtgaggtgtcgtccgaatc

SEQ ID NO: 3491443 - DNA, 25 bp, Homo sapien
catcccagctggtgacctagaagga

SEQ ID NO: 3491444 - DNA, 25 bp, Homo sapien
cccatcccagctggtgacctagaag

SEQ ID NO: 3491445 - DNA, 25 bp, Homo sapien
atttggagagttggcctcccatccc

SEQ ID NO: 3491446 - DNA, 25 bp, Homo sapien
tcttctgatttggagagttggcctc

SEQ ID NO: 3491447 - DNA, 25 bp, Homo sapien
gacacaaaggtacctccaggaagtg

SEQ ID NO: 3491448 - DNA, 25 bp, Homo sapien
tatagacacaaaggtacctccagga

SEQ ID NO: 3491449 - DNA, 25 bp, Homo sapien
cacatatagacacaaaggtacctcc

SEQ ID NO: 3491450 - DNA, 25 bp, Homo sapien
caaaggtacctccaggaagtgatgg

SEQ ID NO: 3491451 - DNA, 25 bp, Homo sapien
tgctctatttatggaaaacacttgc

SEQ ID NO: 3491452 - DNA, 25 bp, Homo sapien
tctatttatactagccaagagctct

SEQ ID NO: 3491453 - DNA, 25 bp, Homo sapien
taagcatgcccactttagacttcaa

SEQ ID NO: 3491454 - DNA, 25 bp, Homo sapien
tctgccatatgaactaattcaggcc

SEQ ID NO: 3491455 - DNA, 25 bp, Homo sapien
aagagtctcactgaattagtccctc

SEQ ID NO: 3491456 - DNA, 25 bp, Homo sapien
atttacgtttccatatgggcctggg

SEQ ID NO: 3491457 - DNA, 25 bp, Homo sapien
aacaacattgttccaggggctcgga

SEQ ID NO: 3491458 - DNA, 25 bp, Homo sapien
ccctcaagaacatttacgtttccat

SEQ ID NO: 3491459 - DNA, 25 bp, Homo sapien
ggatattaccgcagtagagcttaga

SEQ ID NO: 3491460 - DNA, 25 bp, Homo sapien
gaacagctgtatcagagatcaggcg

SEQ ID NO: 3491461 - DNA, 25 bp, Homo sapien
tctctggcaggagttgcgaacagct

SEQ ID NO: 3491462 - DNA, 25 bp, Homo sapien
tgctgggcgggacactccttgatct

SEQ ID NO: 3491463 - DNA, 25 bp, Homo sapien
tagtaagatgcagaacagggacgga

SEQ ID NO: 3491464 - DNA, 25 bp, Homo sapien
ggaatttatgccacactccacgcaa

SEQ ID NO: 3491465 - DNA, 25 bp, Homo sapien
gaattatgagatcaagcagaatcag

SEQ ID NO: 3491466 - DNA, 25 bp, Homo sapien
aacaaactcggccactactcctgtg

SEQ ID NO: 3491467 - DNA, 25 bp, Homo sapien
gcccaatttcaggtacttcttgagc

SEQ ID NO: 3491468 - DNA, 25 bp, Homo sapien
ctagcccaatttcaggtacttcttg

SEQ ID NO: 3491469 - DNA, 25 bp, Homo sapien
agcccaatttcaggtacttcttgag

SEQ ID NO: 3491470 - DNA, 25 bp, Homo sapien
ccaatttcaggtacttcttgagctt

SEQ ID NO: 3491471 - DNA, 25 bp, Homo sapien
catttggagagcataggtggagtca

SEQ ID NO: 3491472 - DNA, 25 bp, Homo sapien
actatgtgccagtcttctgagaccc

SEQ ID NO: 3491473 - DNA, 25 bp, Homo sapien
ggtgtatcagtcaaccagcaatgaa

SEQ ID NO: 3491474 - DNA, 25 bp, Homo sapien
tgtaatttgctcatggtccacagcc

SEQ ID NO: 3491475 - DNA, 25 bp, Homo sapien
caacaatgtcctaaaatctccacct

SEQ ID NO: 3491476 - DNA, 25 bp, Homo sapien
ccaccatatcccaacaatgtcctaa

SEQ ID NO: 3491477 - DNA, 25 bp, Homo sapien
catatcccaacaatgtcctaaaatc

SEQ ID NO: 3491478 - DNA, 25 bp, Homo sapien
aacaatgtcctaaaatctccacctc

SEQ ID NO: 3491479 - DNA, 25 bp, Homo sapien
gcatgctcagaaactactgctgtcc

SEQ ID NO: 3491480 - DNA, 25 bp, Homo sapien
ccttgggtccaaactgatctttgaa

SEQ ID NO: 3491481 - DNA, 25 bp, Homo sapien
gctcagaaactactgctgtccccac

SEQ ID NO: 3491482 - DNA, 25 bp, Homo sapien
ttgggtccaaactgatctttgaaat

SEQ ID NO: 3491483 - DNA, 25 bp, Homo sapien
cacctcacactaacaaccccaacct

SEQ ID NO: 3491484 - DNA, 25 bp, Homo sapien
acctcaagtgctttcttccccagag

SEQ ID NO: 3491485 - DNA, 25 bp, Homo sapien
cttccacgtttgcttcaccccacct

SEQ ID NO: 3491486 - DNA, 25 bp, Homo sapien
tcacactaacaaccccaacctcaag

SEQ ID NO: 3491487 - DNA, 25 bp, Homo sapien
tgggcaggaaccatgggttgccttt

SEQ ID NO: 3491488 - DNA, 25 bp, Homo sapien
acggtgtctgacagcacggcatggt

SEQ ID NO: 3491489 - DNA, 25 bp, Homo sapien
ctgggcaggaaccatgggttgcctt

SEQ ID NO: 3491490 - DNA, 25 bp, Homo sapien
ggtgtagtggctggacggtgtctga

SEQ ID NO: 3491491 - DNA, 25 bp, Homo sapien
agggctatcagacaccatcgcagaa

SEQ ID NO: 3491492 - DNA, 25 bp, Homo sapien
tgaaagcgcaccaacgtcagagtga

SEQ ID NO: 3491493 - DNA, 25 bp, Homo sapien
catcgcagaatgttagccagtgact

SEQ ID NO: 3491494 - DNA, 25 bp, Homo sapien
gaggttccagtcagggttgcagcaa

SEQ ID NO: 3491495 - DNA, 25 bp, Homo sapien
caaatccccaaggagataagtgagc

SEQ ID NO: 3491496 - DNA, 25 bp, Homo sapien
caagggctaaatgcaaatccccaag

SEQ ID NO: 3491497 - DNA, 25 bp, Homo sapien
caaggccaagggctaaatgcaaatc

SEQ ID NO: 3491498 - DNA, 25 bp, Homo sapien
tgcaaatccccaaggagataagtga

SEQ ID NO: 3491499 - DNA, 25 bp, Homo sapien
ggtctttgtgaccaggcaggctaga

SEQ ID NO: 3491500 - DNA, 25 bp, Homo sapien
aggcaggctagacagccacctggcc

SEQ ID NO: 3491501 - DNA, 25 bp, Homo sapien
tttgtgaccaggcaggctagacagc

SEQ ID NO: 3491502 - DNA, 25 bp, Homo sapien
tgaccaggcaggctagacagccacc

SEQ ID NO: 3491503 - DNA, 25 bp, Homo sapien
gcgcaaaaacacatgtttctcaagg

SEQ ID NO: 3491504 - DNA, 25 bp, Homo sapien
ggcagactgaagggagctatgcaaa

SEQ ID NO: 3491505 - DNA, 25 bp, Homo sapien
ggagctatgcaaacggcagcgcaaa

SEQ ID NO: 3491506 - DNA, 25 bp, Homo sapien
acggcagcgcaaaaacacatgtttc

SEQ ID NO: 3491507 - DNA, 25 bp, Homo sapien
gatggtacttggtgccgaagaaaga

SEQ ID NO: 3491508 - DNA, 25 bp, Homo sapien
ttctctggatcacataggctcctct

SEQ ID NO: 3491509 - DNA, 25 bp, Homo sapien
tacttggtgccgaagaaagagacag

SEQ ID NO: 3491510 - DNA, 25 bp, Homo sapien
gaaacagagatggtacttggtgccg

SEQ ID NO: 3491511 - DNA, 25 bp, Homo sapien
gttactggctgagaattgagtcact

SEQ ID NO: 3491512 - DNA, 25 bp, Homo sapien
caggaatttctattaagctgtagga

SEQ ID NO: 3491513 - DNA, 25 bp, Homo sapien
tccaggaatttctattaagctgtag

SEQ ID NO: 3491514 - DNA, 25 bp, Homo sapien
ttcccaaatctttccactaactgag

SEQ ID NO: 3491515 - DNA, 25 bp, Homo sapien
tatgtagctgacaccggagctgagg

SEQ ID NO: 3491516 - DNA, 25 bp, Homo sapien
aacgattgccagtaacaccacggaa

SEQ ID NO: 3491517 - DNA, 25 bp, Homo sapien
caagatgctgagattcttatgtagc

SEQ ID NO: 3491518 - DNA, 25 bp, Homo sapien
cagccagggatatccaacgattgcc

SEQ ID NO: 3491519 - DNA, 25 bp, Homo sapien
ccagggcctagcagtgagccttgca

SEQ ID NO: 3491520 - DNA, 25 bp, Homo sapien
tagatgagtgcatgtcccttaggag

SEQ ID NO: 3491521 - DNA, 25 bp, Homo sapien
gaactagtgtctgcgccacgcattg

SEQ ID NO: 3491522 - DNA, 25 bp, Homo sapien
cattggatgcttggcacatgcgtcc

SEQ ID NO: 3491523 - DNA, 25 bp, Homo sapien
taagttagggtcttgcacatcttca

SEQ ID NO: 3491524 - DNA, 25 bp, Homo sapien
catactcaggagtagggacaggaag

SEQ ID NO: 3491525 - DNA, 25 bp, Homo sapien
agcaggcgggcaccagtgtgcggct

SEQ ID NO: 3491526 - DNA, 25 bp, Homo sapien
caagccgtgctccagtaagttaggg

SEQ ID NO: 3491527 - DNA, 25 bp, Homo sapien
ggtgacttggctaccccactaatct

SEQ ID NO: 3491528 - DNA, 25 bp, Homo sapien
taaaatagcccctagagatcccaat

SEQ ID NO: 3491529 - DNA, 25 bp, Homo sapien
caatatggacatcaacttaaggcta

SEQ ID NO: 3491530 - DNA, 25 bp, Homo sapien
tgaagtcagaataactaccgaccct

SEQ ID NO: 3491531 - DNA, 25 bp, Homo sapien
cactgacactgagaatggcattgtg

SEQ ID NO: 3491532 - DNA, 25 bp, Homo sapien
tgcctggtaccagctaatagttaac

SEQ ID NO: 3491533 - DNA, 25 bp, Homo sapien
tgactcattggctagaaccacccac

SEQ ID NO: 3491534 - DNA, 25 bp, Homo sapien
tctgctctagggatgggtcattctg

SEQ ID NO: 3491535 - DNA, 25 bp, Homo sapien
gacttattacctagcatacccgtta

SEQ ID NO: 3491536 - DNA, 25 bp, Homo sapien
catgctttaagaccagtgtttgtcc

SEQ ID NO: 3491537 - DNA, 25 bp, Homo sapien
acctattttgaactgtgtgccatgc

SEQ ID NO: 3491538 - DNA, 25 bp, Homo sapien
tctatcgctggtgtattagcccaca

SEQ ID NO: 3491539 - DNA, 25 bp, Homo sapien
tcataatgaataccctgtctccaga

SEQ ID NO: 3491540 - DNA, 25 bp, Homo sapien
cattcctaatgagaaggcgcacata

SEQ ID NO: 3491541 - DNA, 25 bp, Homo sapien
agaaaattgtaaagcaccagccaca

SEQ ID NO: 3491542 - DNA, 25 bp, Homo sapien
tgcccacagtatacctcaaccgaaa

SEQ ID NO: 3491543 - DNA, 25 bp, Homo sapien
taagttcccagtctttctcccatta

SEQ ID NO: 3491544 - DNA, 25 bp, Homo sapien
tagccaattatgagtagtttgaaat

SEQ ID NO: 3491545 - DNA, 25 bp, Homo sapien
gatttttatatggacatataactga

SEQ ID NO: 3491546 - DNA, 25 bp, Homo sapien
aaaatgagaacgaaataatatagcc

SEQ ID NO: 3491547 - DNA, 25 bp, Homo sapien
gctcagagactacctcgcgcagggc

SEQ ID NO: 3491548 - DNA, 25 bp, Homo sapien
aggctcagagactacctcgcgcagg

SEQ ID NO: 3491549 - DNA, 25 bp, Homo sapien
ggcgcgcgcggacgctctcccagca

SEQ ID NO: 3491550 - DNA, 25 bp, Homo sapien
gctcaggctcagagactacctcgcg

SEQ ID NO: 3491551 - DNA, 25 bp, Homo sapien
ggcacttcggaaatctgcgccagct

SEQ ID NO: 3491552 - DNA, 25 bp, Homo sapien
taggacgcgttttaaagcgcctgga

SEQ ID NO: 3491553 - DNA, 25 bp, Homo sapien
aagtctgggtcttagcggtgattgc

SEQ ID NO: 3491554 - DNA, 25 bp, Homo sapien
ctgcggcggctgtttcgtggcactt

SEQ ID NO: 3491555 - DNA, 25 bp, Homo sapien
tctagggagtagtccatgatgatga

SEQ ID NO: 3491556 - DNA, 25 bp, Homo sapien
gatgatgaaagactgctcacagcac

SEQ ID NO: 3491557 - DNA, 25 bp, Homo sapien
gagcagctctgtgcaaacgatgcga

SEQ ID NO: 3491558 - DNA, 25 bp, Homo sapien
ctatgcctaaatggaaaggagaccc

SEQ ID NO: 3491559 - DNA, 25 bp, Homo sapien
ataattccataccatcgcctcttct

SEQ ID NO: 3491560 - DNA, 25 bp, Homo sapien
ttctatatcccacagcaataattcc

SEQ ID NO: 3491561 - DNA, 25 bp, Homo sapien
ttcgatagctccctttctatatccc

SEQ ID NO: 3491562 - DNA, 25 bp, Homo sapien
tatcccacagcaataattccatacc

SEQ ID NO: 3491563 - DNA, 25 bp, Homo sapien
tgtgaaattgttatggcctggagca

SEQ ID NO: 3491564 - DNA, 25 bp, Homo sapien
ctgtcactcttggtgtagcctgtga

SEQ ID NO: 3491565 - DNA, 25 bp, Homo sapien
cactcttggtgtagcctgtgaaatt

SEQ ID NO: 3491566 - DNA, 25 bp, Homo sapien
gcatgtaggtcacctctccttggca

SEQ ID NO: 3491567 - DNA, 25 bp, Homo sapien
gaaagccttcgtcccatgactgagg

SEQ ID NO: 3491568 - DNA, 25 bp, Homo sapien
gtcttagaaagccttcgtcccatga

SEQ ID NO: 3491569 - DNA, 25 bp, Homo sapien
ttagaaagccttcgtcccatgactg

SEQ ID NO: 3491570 - DNA, 25 bp, Homo sapien
aagccttcgtcccatgactgaggaa

SEQ ID NO: 3491571 - DNA, 25 bp, Homo sapien
taaaattgacattcagccagttata

SEQ ID NO: 3491572 - DNA, 25 bp, Homo sapien
cacctgctcggtgagataaagtagc

SEQ ID NO: 3491573 - DNA, 25 bp, Homo sapien
taaagtagcagctatctttctagtt

SEQ ID NO: 3491574 - DNA, 25 bp, Homo sapien
tctcatcacttagatggttgttgac

SEQ ID NO: 3491575 - DNA, 25 bp, Homo sapien
acagccgatgtacccaattgccgaa

SEQ ID NO: 3491576 - DNA, 25 bp, Homo sapien
ttgccgaaggaccaatgtccccagg

SEQ ID NO: 3491577 - DNA, 25 bp, Homo sapien
ctggcacagccgatgtacccaattg

SEQ ID NO: 3491578 - DNA, 25 bp, Homo sapien
gatgtacccaattgccgaaggacca

SEQ ID NO: 3491579 - DNA, 25 bp, Homo sapien
cctattgcgatgtctaaaaatggta

SEQ ID NO: 3491580 - DNA, 25 bp, Homo sapien
cacaaactaacatgcagaccacagt

SEQ ID NO: 3491581 - DNA, 25 bp, Homo sapien
cacagtcatgtcatcatcttttcct

SEQ ID NO: 3491582 - DNA, 25 bp, Homo sapien
tcctgtgtcacaaactaacatgcag

SEQ ID NO: 3491583 - DNA, 25 bp, Homo sapien
ctggagaggtagtccctaaaataat

SEQ ID NO: 3491584 - DNA, 25 bp, Homo sapien
gaagggtttcttaatctgggctcca

SEQ ID NO: 3491585 - DNA, 25 bp, Homo sapien
agggtttcttaatctgggctccaca

SEQ ID NO: 3491586 - DNA, 25 bp, Homo sapien
aggtagtccctaaaataatgctcgt

SEQ ID NO: 3491587 - DNA, 25 bp, Homo sapien
ttctctgtagccatggattataata

SEQ ID NO: 3491588 - DNA, 25 bp, Homo sapien
cttctctgtagccatggattataat

SEQ ID NO: 3491589 - DNA, 25 bp, Homo sapien
tctctgtagccatggattataataa

SEQ ID NO: 3491590 - DNA, 25 bp, Homo sapien
ccttctctgtagccatggattataa

SEQ ID NO: 3491591 - DNA, 25 bp, Homo sapien
aagcccatttgtgagttggccccat

SEQ ID NO: 3491592 - DNA, 25 bp, Homo sapien
catcagaaccaaagcccatttgtga

SEQ ID NO: 3491593 - DNA, 25 bp, Homo sapien
accatcagaaccaaagcccatttgt

SEQ ID NO: 3491594 - DNA, 25 bp, Homo sapien
gaaccaaagcccatttgtgagttgg

SEQ ID NO: 3491595 - DNA, 25 bp, Homo sapien
cagtatggcattggtcatcgaagtc

SEQ ID NO: 3491596 - DNA, 25 bp, Homo sapien
aagtcatgggttaggatgatcgccc

SEQ ID NO: 3491597 - DNA, 25 bp, Homo sapien
cattggtcatcgaagtcatgggtta

SEQ ID NO: 3491598 - DNA, 25 bp, Homo sapien
ctaagcatcatcagtatggcattgg

SEQ ID NO: 3491599 - DNA, 25 bp, Homo sapien
cactttgtaggtaacctccctcagg

SEQ ID NO: 3491600 - DNA, 25 bp, Homo sapien
ggcatgaatttgtagtgtatgacat

SEQ ID NO: 3491601 - DNA, 25 bp, Homo sapien
tcactttgtaggtaacctccctcag

SEQ ID NO: 3491602 - DNA, 25 bp, Homo sapien
cttcaggcatgaatttgtagtgtat

SEQ ID NO: 3491603 - DNA, 25 bp, Homo sapien
tagcagtagcagaagtcggtcccgg

SEQ ID NO: 3491604 - DNA, 25 bp, Homo sapien
tcccggtgagtgagagcccatgttg

SEQ ID NO: 3491605 - DNA, 25 bp, Homo sapien
gaagatcttcaacatggcgccttga

SEQ ID NO: 3491606 - DNA, 25 bp, Homo sapien
taatggctaatgtcaactccctggc

SEQ ID NO: 3491607 - DNA, 25 bp, Homo sapien
gaggtattaagctttctgaccaagg

SEQ ID NO: 3491608 - DNA, 25 bp, Homo sapien
caggaagatgatgtatattatcagt

SEQ ID NO: 3491609 - DNA, 25 bp, Homo sapien
ctgaccaaggatactttttagatgg

SEQ ID NO: 3491610 - DNA, 25 bp, Homo sapien
agtcttcagaggaggtattaagctt

SEQ ID NO: 3491611 - DNA, 25 bp, Homo sapien
cagtcaagcacatgttagagatgag

SEQ ID NO: 3491612 - DNA, 25 bp, Homo sapien
gcaaatcactcaatcattattaatt

SEQ ID NO: 3491613 - DNA, 25 bp, Homo sapien
tcattattaattggcagtcttccac

SEQ ID NO: 3491614 - DNA, 25 bp, Homo sapien
ccacagtcaagcacatgttagagat

SEQ ID NO: 3491615 - DNA, 25 bp, Homo sapien
gggcagggatgatggtgtggatctg

SEQ ID NO: 3491616 - DNA, 25 bp, Homo sapien
agtcaactggaagggcagggatgat

SEQ ID NO: 3491617 - DNA, 25 bp, Homo sapien
tcagtcaactggaagggcagggatg

SEQ ID NO: 3491618 - DNA, 25 bp, Homo sapien
gcagggatgatggtgtggatctgtg

SEQ ID NO: 3491619 - DNA, 25 bp, Homo sapien
ggcagctgggagattttcattgtac

SEQ ID NO: 3491620 - DNA, 25 bp, Homo sapien
tgtaaggtcccctgtcttggcagct

SEQ ID NO: 3491621 - DNA, 25 bp, Homo sapien
agttttttgttctgcaaggtggcct

SEQ ID NO: 3491622 - DNA, 25 bp, Homo sapien
gaaaacaggcacagccatacttcat

SEQ ID NO: 3491623 - DNA, 25 bp, Homo sapien
accaaatggccgatccgtgggccca

SEQ ID NO: 3491624 - DNA, 25 bp, Homo sapien
aatggcgagaaccaaagcactgccc

SEQ ID NO: 3491625 - DNA, 25 bp, Homo sapien
caaatggagatacacttggcaactc

SEQ ID NO: 3491626 - DNA, 25 bp, Homo sapien
agccaccaaccagaataggcccaga

SEQ ID NO: 3491627 - DNA, 25 bp, Homo sapien
gctccaggagtcaaggcatgcctct

SEQ ID NO: 3491628 - DNA, 25 bp, Homo sapien
cacttccaagtggtagctccaggag

SEQ ID NO: 3491629 - DNA, 25 bp, Homo sapien
ggtcatcagcagaggcgagcactct

SEQ ID NO: 3491630 - DNA, 25 bp, Homo sapien
tatgtgtcagctgcaaagatgaatc

SEQ ID NO: 3491631 - DNA, 25 bp, Homo sapien
tatattccaccacgttttctctgtc

SEQ ID NO: 3491632 - DNA, 25 bp, Homo sapien
taaaaagatgggtggaccctgctat

SEQ ID NO: 3491633 - DNA, 25 bp, Homo sapien
cacctggctcagaactagagtttga

SEQ ID NO: 3491634 - DNA, 25 bp, Homo sapien
gaatatagtgctttgatctcggact

SEQ ID NO: 3491635 - DNA, 25 bp, Homo sapien
ctgctgtcctcggtacttagccaaa

SEQ ID NO: 3491636 - DNA, 25 bp, Homo sapien
tagccaaagattgtctgaagccaca

SEQ ID NO: 3491637 - DNA, 25 bp, Homo sapien
tacttagccaaagattgtctgaagc

SEQ ID NO: 3491638 - DNA, 25 bp, Homo sapien
aggctggattctttcaatgttggaa

SEQ ID NO: 3491639 - DNA, 25 bp, Homo sapien
tatcagaggtactaatgaatttaat

SEQ ID NO: 3491640 - DNA, 25 bp, Homo sapien
atatcagaggtactaatgaatttaa

SEQ ID NO: 3491641 - DNA, 25 bp, Homo sapien
taaatcttgaatgttgctcgtggcc

SEQ ID NO: 3491642 - DNA, 25 bp, Homo sapien
tgtaacccgctggactgataattcc

SEQ ID NO: 3491643 - DNA, 25 bp, Homo sapien
tagaaaaccattatccagtaggaga

SEQ ID NO: 3491644 - DNA, 25 bp, Homo sapien
ggagagaaagatgccaacatgcagc

SEQ ID NO: 3491645 - DNA, 25 bp, Homo sapien
gtcccttgattttctaacctgtgct

SEQ ID NO: 3491646 - DNA, 25 bp, Homo sapien
tttctaacctgtgctccagaacctg

SEQ ID NO: 3491647 - DNA, 25 bp, Homo sapien
tgattttctaacctgtgctccagaa

SEQ ID NO: 3491648 - DNA, 25 bp, Homo sapien
tctaacctgtgctccagaacctggc

SEQ ID NO: 3491649 - DNA, 25 bp, Homo sapien
gataatatccatacctctttccctc

SEQ ID NO: 3491650 - DNA, 25 bp, Homo sapien
tgaaaggtagatgttacccttgctg

SEQ ID NO: 3491651 - DNA, 25 bp, Homo sapien
aaaggtagatgttacccttgctgtg

SEQ ID NO: 3491652 - DNA, 25 bp, Homo sapien
gaggattggaatgataatatccata

SEQ ID NO: 3491653 - DNA, 25 bp, Homo sapien
cagcatctggccgagttgtccaaat

SEQ ID NO: 3491654 - DNA, 25 bp, Homo sapien
gagtcagcatctggccgagttgtcc

SEQ ID NO: 3491655 - DNA, 25 bp, Homo sapien
tctggccgagttgtccaaataggga

SEQ ID NO: 3491656 - DNA, 25 bp, Homo sapien
cgagttgtccaaatagggagggaat

SEQ ID NO: 3491657 - DNA, 25 bp, Homo sapien
tcgttggccctttcccattgatggc

SEQ ID NO: 3491658 - DNA, 25 bp, Homo sapien
tttgatatctctcggccagctctct

SEQ ID NO: 3491659 - DNA, 25 bp, Homo sapien
catacagcgtgtcaaatgcttccca

SEQ ID NO: 3491660 - DNA, 25 bp, Homo sapien
gatggctttgttcctagaaccttca

SEQ ID NO: 3491661 - DNA, 25 bp, Homo sapien
ctatatggagtaggaaaaggaaagg

SEQ ID NO: 3491662 - DNA, 25 bp, Homo sapien
gacattttctttgatggggtggttg

SEQ ID NO: 3491663 - DNA, 25 bp, Homo sapien
aagacattttctttgatggggtggt

SEQ ID NO: 3491664 - DNA, 25 bp, Homo sapien
cattttctttgatggggtggttggg

SEQ ID NO: 3491665 - DNA, 25 bp, Homo sapien
ttactggctgccaacaaagacattt

SEQ ID NO: 3491666 - DNA, 25 bp, Homo sapien
tcatttggatgaaggaggaagaaaa

SEQ ID NO: 3491667 - DNA, 25 bp, Homo sapien
tttggatgaaggaggaagaaaagct

SEQ ID NO: 3491668 - DNA, 25 bp, Homo sapien
catttggatgaaggaggaagaaaag

SEQ ID NO: 3491669 - DNA, 25 bp, Homo sapien
atttggatgaaggaggaagaaaagc

SEQ ID NO: 3491670 - DNA, 25 bp, Homo sapien
gaattcttgctggtgcaatccaagg

SEQ ID NO: 3491671 - DNA, 25 bp, Homo sapien
tccaaggaagtcgtgcaatctctca

SEQ ID NO: 3491672 - DNA, 25 bp, Homo sapien
agcccacgaggagtcattgttcagt

SEQ ID NO: 3491673 - DNA, 25 bp, Homo sapien
ttaatcattgtcgtccaaacatggg

SEQ ID NO: 3491674 - DNA, 25 bp, Homo sapien
taaaagcacgcagtgcactgctgta

SEQ ID NO: 3491675 - DNA, 25 bp, Homo sapien
ataaaagcacgcagtgcactgctgt

SEQ ID NO: 3491676 - DNA, 25 bp, Homo sapien
catcagcttttatgtgaaccaggcc

SEQ ID NO: 3491677 - DNA, 25 bp, Homo sapien
ctgttttacatcagcttttatgtga

SEQ ID NO: 3491678 - DNA, 25 bp, Homo sapien
ggcacttctggcgagcgtggagctg

SEQ ID NO: 3491679 - DNA, 25 bp, Homo sapien
cagcagggtttgaagtgagtctggc

SEQ ID NO: 3491680 - DNA, 25 bp, Homo sapien
tgttagccttgcatcttcgctcaat

SEQ ID NO: 3491681 - DNA, 25 bp, Homo sapien
cttcagagaagatggtccccgggca

SEQ ID NO: 3491682 - DNA, 25 bp, Homo sapien
tctctgcagcctgttagagcctgcc

SEQ ID NO: 3491683 - DNA, 25 bp, Homo sapien
tgcagcctgttagagcctgccacga

SEQ ID NO: 3491684 - DNA, 25 bp, Homo sapien
taagggtcatcgattggctttcttc

SEQ ID NO: 3491685 - DNA, 25 bp, Homo sapien
cttctaagggtcatcgattggcttt

SEQ ID NO: 3491686 - DNA, 25 bp, Homo sapien
gaaacagtccatcatatataagcaa

SEQ ID NO: 3491687 - DNA, 25 bp, Homo sapien
gatatgatatatactcccctagata

SEQ ID NO: 3491688 - DNA, 25 bp, Homo sapien
ggaagtggtgagtctaaaagcagcc

SEQ ID NO: 3491689 - DNA, 25 bp, Homo sapien
taaagattggacctctgaacagaaa

SEQ ID NO: 3491690 - DNA, 25 bp, Homo sapien
tgtccgcagggaaaccacaatagct

SEQ ID NO: 3491691 - DNA, 25 bp, Homo sapien
aaggaccctttcatgtcaggcctgg

SEQ ID NO: 3491692 - DNA, 25 bp, Homo sapien
gacgagttctgagccctgtgacgtg

SEQ ID NO: 3491693 - DNA, 25 bp, Homo sapien
tccagcgagcttggaaaggaccctt

SEQ ID NO: 3491694 - DNA, 25 bp, Homo sapien
ggcaccaatggctaattgctccgaa

SEQ ID NO: 3491695 - DNA, 25 bp, Homo sapien
tcagtagctggcaaatgaatcctcc

SEQ ID NO: 3491696 - DNA, 25 bp, Homo sapien
aatagctagtctccatttcagggtg

SEQ ID NO: 3491697 - DNA, 25 bp, Homo sapien
cctcctagggattataataaccctg

SEQ ID NO: 3491698 - DNA, 25 bp, Homo sapien
gctggtttgcaaggagctggctcat

SEQ ID NO: 3491699 - DNA, 25 bp, Homo sapien
tattctcagcaagtgttcccaggca

SEQ ID NO: 3491700 - DNA, 25 bp, Homo sapien
cattaactgaccacggagctggtgt

SEQ ID NO: 3491701 - DNA, 25 bp, Homo sapien
gagcccgaagagcaccattaactga

SEQ ID NO: 3491702 - DNA, 25 bp, Homo sapien
tcaagtcccagaacagagtatagct

SEQ ID NO: 3491703 - DNA, 25 bp, Homo sapien
tgcctgcagtgagaactgagccaga

SEQ ID NO: 3491704 - DNA, 25 bp, Homo sapien
tagagactttggacacggctaaaca

SEQ ID NO: 3491705 - DNA, 25 bp, Homo sapien
gggaaccaccggcatctggtaggta

SEQ ID NO: 3491706 - DNA, 25 bp, Homo sapien
catcctgacccagcttggtgaatga

SEQ ID NO: 3491707 - DNA, 25 bp, Homo sapien
tgacccagcttggtgaatgagccgg

SEQ ID NO: 3491708 - DNA, 25 bp, Homo sapien
gaatgagccgggtcatcagatcctt

SEQ ID NO: 3491709 - DNA, 25 bp, Homo sapien
gcttggtgaatgagccgggtcatca

SEQ ID NO: 3491710 - DNA, 25 bp, Homo sapien
tggagacataactaaccttcagtcc

SEQ ID NO: 3491711 - DNA, 25 bp, Homo sapien
tcctcaggagtcattatggagacat

SEQ ID NO: 3491712 - DNA, 25 bp, Homo sapien
tgtttctaacactctccttttgtcc

SEQ ID NO: 3491713 - DNA, 25 bp, Homo sapien
tcctgtttctaacactctccttttg

SEQ ID NO: 3491714 - DNA, 25 bp, Homo sapien
tagtcaaacaccgaatgtaggaggc

SEQ ID NO: 3491715 - DNA, 25 bp, Homo sapien
tctgtgtttatacagtagtcaaaca

SEQ ID NO: 3491716 - DNA, 25 bp, Homo sapien
tgtttatacagtagtcaaacaccga

SEQ ID NO: 3491717 - DNA, 25 bp, Homo sapien
gtttctgtgtttatacagtagtcaa

SEQ ID NO: 3491718 - DNA, 25 bp, Homo sapien
agcagtgcatctggaagccaacgtg

SEQ ID NO: 3491719 - DNA, 25 bp, Homo sapien
gtgcatctggaagccaacgtgtaga

SEQ ID NO: 3491720 - DNA, 25 bp, Homo sapien
tctggaagccaacgtgtagatctgt

SEQ ID NO: 3491721 - DNA, 25 bp, Homo sapien
catctggaagccaacgtgtagatct

SEQ ID NO: 3491722 - DNA, 25 bp, Homo sapien
aaatcagggacagggcaacactggg

SEQ ID NO: 3491723 - DNA, 25 bp, Homo sapien
taaacatccgctaatgtgtggtaat

SEQ ID NO: 3491724 - DNA, 25 bp, Homo sapien
caggcactgtctgatttgatgaaca

SEQ ID NO: 3491725 - DNA, 25 bp, Homo sapien
aaaggcccgcttccatgtagcagtg

SEQ ID NO: 3491726 - DNA, 25 bp, Homo sapien
tttcttccatcatcgaagtatgccc

SEQ ID NO: 3491727 - DNA, 25 bp, Homo sapien
atttccttgagggttttcatcacca

SEQ ID NO: 3491728 - DNA, 25 bp, Homo sapien
gaagtatgccccagtcatccagtct

SEQ ID NO: 3491729 - DNA, 25 bp, Homo sapien
cagctctgatgttactggaggtgaa

SEQ ID NO: 3491730 - DNA, 25 bp, Homo sapien
tcttttactctggtgctaccagatg

SEQ ID NO: 3491731 - DNA, 25 bp, Homo sapien
cagtgtttagtgagacttcttttac

SEQ ID NO: 3491732 - DNA, 25 bp, Homo sapien
cccgggatgctcacaccgagcagca

SEQ ID NO: 3491733 - DNA, 25 bp, Homo sapien
agatgaatcttttatcaccgtggaa

SEQ ID NO: 3491734 - DNA, 25 bp, Homo sapien
catgagaattagaaacatctattac

SEQ ID NO: 3491735 - DNA, 25 bp, Homo sapien
cactaaagggctcctgaaacacggg

SEQ ID NO: 3491736 - DNA, 25 bp, Homo sapien
accctaggacactaaagggctcctg

SEQ ID NO: 3491737 - DNA, 25 bp, Homo sapien
catctattacaaaccctaggacact

SEQ ID NO: 3491738 - DNA, 25 bp, Homo sapien
cagacacagatgcaactggtaggtg

SEQ ID NO: 3491739 - DNA, 25 bp, Homo sapien
cagatgcaactggtaggtgattcat

SEQ ID NO: 3491740 - DNA, 25 bp, Homo sapien
tagtaggagtaagctggagttgaaa

SEQ ID NO: 3491741 - DNA, 25 bp, Homo sapien
atagttgcagtagtagtaggagtaa

SEQ ID NO: 3491742 - DNA, 25 bp, Homo sapien
aagtaataggaaacatccatcttcc

SEQ ID NO: 3491743 - DNA, 25 bp, Homo sapien
gctgtaaaggtttcattagcttgcc

SEQ ID NO: 3491744 - DNA, 25 bp, Homo sapien
gcctcacagtcattacgtcaagtaa

SEQ ID NO: 3491745 - DNA, 25 bp, Homo sapien
caatgcattggaactgtaactcagg

SEQ ID NO: 3491746 - DNA, 25 bp, Homo sapien
cactgtcggagaagatgaatgcgtc

SEQ ID NO: 3491747 - DNA, 25 bp, Homo sapien
caccttgccggagggtggcttctga

SEQ ID NO: 3491748 - DNA, 25 bp, Homo sapien
ccacaagttgtgcatgggaacactg

SEQ ID NO: 3491749 - DNA, 25 bp, Homo sapien
gaatgcgtcatgtgtcagaagccga

SEQ ID NO: 3491750 - DNA, 25 bp, Homo sapien
ccaaaagtggttctggcggcacaaa

SEQ ID NO: 3491751 - DNA, 25 bp, Homo sapien
gacccgcaattttgactgacccaga

SEQ ID NO: 3491752 - DNA, 25 bp, Homo sapien
gaaaatctcttagtgcaacatagcc

SEQ ID NO: 3491753 - DNA, 25 bp, Homo sapien
tatgaccaatcaatccatgtccagg

SEQ ID NO: 3491754 - DNA, 25 bp, Homo sapien
gaatcaaatttgtctccggcagaga

SEQ ID NO: 3491755 - DNA, 25 bp, Homo sapien
cgggtcagtctgcatctgtatgact

SEQ ID NO: 3491756 - DNA, 25 bp, Homo sapien
tgccgaaagttctgcagataaagcc

SEQ ID NO: 3491757 - DNA, 25 bp, Homo sapien
gaatttgccataaaaggacaggcag

SEQ ID NO: 3491758 - DNA, 25 bp, Homo sapien
tagtgtctcgaatataccaaagagg

SEQ ID NO: 3491759 - DNA, 25 bp, Homo sapien
taccaaagaggtaaattaaatgcat

SEQ ID NO: 3491760 - DNA, 25 bp, Homo sapien
gcaaggaactcccaattggctgctg

SEQ ID NO: 3491761 - DNA, 25 bp, Homo sapien
tggctgctgaatagtgtctcgaata

SEQ ID NO: 3491762 - DNA, 25 bp, Homo sapien
tcatctgtccttgtagttcagctct

SEQ ID NO: 3491763 - DNA, 25 bp, Homo sapien
tctgtccttgtagttcagctctttc

SEQ ID NO: 3491764 - DNA, 25 bp, Homo sapien
ccttgtagttcagctctttccaatt

SEQ ID NO: 3491765 - DNA, 25 bp, Homo sapien
tgtccttgtagttcagctctttcca

SEQ ID NO: 3491766 - DNA, 25 bp, Homo sapien
agctgggcttgagggtaagggtcat

SEQ ID NO: 3491767 - DNA, 25 bp, Homo sapien
agatgctatttccatagttgttgct

SEQ ID NO: 3491768 - DNA, 25 bp, Homo sapien
atttccatagttgttgcttccatgg

SEQ ID NO: 3491769 - DNA, 25 bp, Homo sapien
tggtaacctctgcaggttaacagga

SEQ ID NO: 3491770 - DNA, 25 bp, Homo sapien
gtaacctctgcaggttaacaggacc

SEQ ID NO: 3491771 - DNA, 25 bp, Homo sapien
taacctctgcaggttaacaggaccc

SEQ ID NO: 3491772 - DNA, 25 bp, Homo sapien
gctggtaacctctgcaggttaacag

SEQ ID NO: 3491773 - DNA, 25 bp, Homo sapien
gatgacaagagctaaggccacttct

SEQ ID NO: 3491774 - DNA, 25 bp, Homo sapien
cttgggcctccccgcaagggaagct

SEQ ID NO: 3491775 - DNA, 25 bp, Homo sapien
ggccacttctgcagccaacgcttgg

SEQ ID NO: 3491776 - DNA, 25 bp, Homo sapien
tgcaacattgctcagctctgtgagt

SEQ ID NO: 3491777 - DNA, 25 bp, Homo sapien
tgctgaagttgtggctgtgatgtgg

SEQ ID NO: 3491778 - DNA, 25 bp, Homo sapien
tgtggccctcagggtagagtgtgcc

SEQ ID NO: 3491779 - DNA, 25 bp, Homo sapien
gctgctgaagttgtggctgtgatgt

SEQ ID NO: 3491780 - DNA, 25 bp, Homo sapien
gccctgtgctgctgaagttgtggct

SEQ ID NO: 3491781 - DNA, 25 bp, Homo sapien
tccggtgttgaagagcaatgcttgc

SEQ ID NO: 3491782 - DNA, 25 bp, Homo sapien
ggtccggtgttgaagagcaatgctt

SEQ ID NO: 3491783 - DNA, 25 bp, Homo sapien
ccggtgttgaagagcaatgcttgcc

SEQ ID NO: 3491784 - DNA, 25 bp, Homo sapien
tggtccggtgttgaagagcaatgct

SEQ ID NO: 3491785 - DNA, 25 bp, Homo sapien
gccaatgaggtcaagggggaagaag

SEQ ID NO: 3491786 - DNA, 25 bp, Homo sapien
tcccagaggccaatgaggtcaaggg

SEQ ID NO: 3491787 - DNA, 25 bp, Homo sapien
aggtcccagaggccaatgaggtcaa

SEQ ID NO: 3491788 - DNA, 25 bp, Homo sapien
ccaatgaggtcaagggggaagaaga

SEQ ID NO: 3491789 - DNA, 25 bp, Homo sapien
tagaatgataaatgccactttgccc

SEQ ID NO: 3491790 - DNA, 25 bp, Homo sapien
gattgacagagctacaacacacgcg

SEQ ID NO: 3491791 - DNA, 25 bp, Homo sapien
tcaggctagctgattaaagagacag

SEQ ID NO: 3491792 - DNA, 25 bp, Homo sapien
catttactgggcaaatcaggctagc

SEQ ID NO: 3491793 - DNA, 25 bp, Homo sapien
ggacacaacaagaaagccgagggtg

SEQ ID NO: 3491794 - DNA, 25 bp, Homo sapien
gattgtgttgctctcaagcttgtgc

SEQ ID NO: 3491795 - DNA, 25 bp, Homo sapien
catactctggcactgagacacattg

SEQ ID NO: 3491796 - DNA, 25 bp, Homo sapien
cattgtacaatctggccctggacag

SEQ ID NO: 3491797 - DNA, 25 bp, Homo sapien
agccagccccgtgaagattgcccaa

SEQ ID NO: 3491798 - DNA, 25 bp, Homo sapien
attgcccaagagatagaattgtgca

SEQ ID NO: 3491799 - DNA, 25 bp, Homo sapien
agattgcccaagagatagaattgtg

SEQ ID NO: 3491800 - DNA, 25 bp, Homo sapien
cagccccgtgaagattgcccaagag

SEQ ID NO: 3491801 - DNA, 25 bp, Homo sapien
gaggttgattcaattgccacagacc

SEQ ID NO: 3491802 - DNA, 25 bp, Homo sapien
gagagcttcctatgtacaaggcagt

SEQ ID NO: 3491803 - DNA, 25 bp, Homo sapien
gccgctgtgttaggagccgctacgt

SEQ ID NO: 3491804 - DNA, 25 bp, Homo sapien
cgctacgttataatcactctccaga

SEQ ID NO: 3491805 - DNA, 25 bp, Homo sapien
cctatggactagagggcctcttcca

SEQ ID NO: 3491806 - DNA, 25 bp, Homo sapien
taaccatatgtgtaccctatggact

SEQ ID NO: 3491807 - DNA, 25 bp, Homo sapien
ggtagaattgccttaaccatatgtg

SEQ ID NO: 3491808 - DNA, 25 bp, Homo sapien
tgtgtaccctatggactagagggcc

SEQ ID NO: 3491809 - DNA, 25 bp, Homo sapien
aacctctgcctgccatgttccagca

SEQ ID NO: 3491810 - DNA, 25 bp, Homo sapien
aggagccaccactccaggccaacca

SEQ ID NO: 3491811 - DNA, 25 bp, Homo sapien
gcaggagccaccactccaggccaac

SEQ ID NO: 3491812 - DNA, 25 bp, Homo sapien
gagccaccactccaggccaaccacc

SEQ ID NO: 3491813 - DNA, 25 bp, Homo sapien
aattgttctgtcagcaagccgctcc

SEQ ID NO: 3491814 - DNA, 25 bp, Homo sapien
agatattctgggcaccggcaaattg

SEQ ID NO: 3491815 - DNA, 25 bp, Homo sapien
gccaggctgccgctttgccgaggct

SEQ ID NO: 3491816 - DNA, 25 bp, Homo sapien
tgccaccaaggcgaatgataaatcc

SEQ ID NO: 3491817 - DNA, 25 bp, Homo sapien
tcacgggtgtagaaatgagccgcac

SEQ ID NO: 3491818 - DNA, 25 bp, Homo sapien
ggcttggaccctatatattttgaag

SEQ ID NO: 3491819 - DNA, 25 bp, Homo sapien
ggctggcactaggtaactaacttta

SEQ ID NO: 3491820 - DNA, 25 bp, Homo sapien
actttatgtttacctgtcacgggtg

SEQ ID NO: 3491821 - DNA, 25 bp, Homo sapien
aaagccagccagtcaggtgcagagt

SEQ ID NO: 3491822 - DNA, 25 bp, Homo sapien
cataactggtttccaaatgggcgct

SEQ ID NO: 3491823 - DNA, 25 bp, Homo sapien
gagctgaccacaagagaaccatggc

SEQ ID NO: 3491824 - DNA, 25 bp, Homo sapien
gatgagctgttagggcaatcaggcc

SEQ ID NO: 3491825 - DNA, 25 bp, Homo sapien
taggaagaagctcagcaacaacagc

SEQ ID NO: 3491826 - DNA, 25 bp, Homo sapien
caataggaagaagctcagcaacaac

SEQ ID NO: 3491827 - DNA, 25 bp, Homo sapien
ataggaagaagctcagcaacaacag

SEQ ID NO: 3491828 - DNA, 25 bp, Homo sapien
ggaagaagctcagcaacaacagcat

SEQ ID NO: 3491829 - DNA, 25 bp, Homo sapien
tggacagccacagcgagactgctgc

SEQ ID NO: 3491830 - DNA, 25 bp, Homo sapien
gatatctcaggtgccggtcttctgc

SEQ ID NO: 3491831 - DNA, 25 bp, Homo sapien
ttgggttcacttcagggaatatgct

SEQ ID NO: 3491832 - DNA, 25 bp, Homo sapien
gtttcagatttgtccaccctgtgag

SEQ ID NO: 3491833 - DNA, 25 bp, Homo sapien
cctcacaatgtcaaataccttcccc

SEQ ID NO: 3491834 - DNA, 25 bp, Homo sapien
acaatgtcaaataccttcccctcgg

SEQ ID NO: 3491835 - DNA, 25 bp, Homo sapien
caatgtcaaataccttcccctcggg

SEQ ID NO: 3491836 - DNA, 25 bp, Homo sapien
tcacaatgtcaaataccttcccctc

SEQ ID NO: 3491837 - DNA, 25 bp, Homo sapien
gattaggataatggcacattcacgg

SEQ ID NO: 3491838 - DNA, 25 bp, Homo sapien
gttacattccgtcactcatctgtgg

SEQ ID NO: 3491839 - DNA, 25 bp, Homo sapien
caagctgattcaggctgcaaacccc

SEQ ID NO: 3491840 - DNA, 25 bp, Homo sapien
gacatgactaattacagtggcctga

SEQ ID NO: 3491841 - DNA, 25 bp, Homo sapien
ccaaggcaagtgattcaagaaggac

SEQ ID NO: 3491842 - DNA, 25 bp, Homo sapien
acagtgacacctcatgccatggaag

SEQ ID NO: 3491843 - DNA, 25 bp, Homo sapien
gccatggaagttggcattcaccaag

SEQ ID NO: 3491844 - DNA, 25 bp, Homo sapien
cttggaagtgagttcccatagctgc

SEQ ID NO: 3491845 - DNA, 25 bp, Homo sapien
tctctggtcaagatctcttatgagg

SEQ ID NO: 3491846 - DNA, 25 bp, Homo sapien
gaagcagaatgaggcttagctgagt

SEQ ID NO: 3491847 - DNA, 25 bp, Homo sapien
cacagattctgtaggtcgggaagca

SEQ ID NO: 3491848 - DNA, 25 bp, Homo sapien
tgagcatcagggtttgacttccctt

SEQ ID NO: 3491849 - DNA, 25 bp, Homo sapien
caggtctcctaatccaatgcgtgcg

SEQ ID NO: 3491850 - DNA, 25 bp, Homo sapien
cattgcctggaacgaacaagtggag

SEQ ID NO: 3491851 - DNA, 25 bp, Homo sapien
cagcagcagtttcatggaggtaacc

SEQ ID NO: 3491852 - DNA, 25 bp, Homo sapien
tagctaaagcttgctgggacatctc

SEQ ID NO: 3491853 - DNA, 25 bp, Homo sapien
tctgagagtggcgtagatgtctgca

SEQ ID NO: 3491854 - DNA, 25 bp, Homo sapien
ctgagagtggcgtagatgtctgcac

SEQ ID NO: 3491855 - DNA, 25 bp, Homo sapien
ctgtggcccctggacgcagtaggtc

SEQ ID NO: 3491856 - DNA, 25 bp, Homo sapien
ctggacgcagtaggtcctgaatggc

SEQ ID NO: 3491857 - DNA, 25 bp, Homo sapien
ggtgatacaactgtagagaagcagg

SEQ ID NO: 3491858 - DNA, 25 bp, Homo sapien
gagaagcaggtgaggacaatgggca

SEQ ID NO: 3491859 - DNA, 25 bp, Homo sapien
ctgggtgatacaactgtagagaagc

SEQ ID NO: 3491860 - DNA, 25 bp, Homo sapien
agaagcaggtgaggacaatgggcac

SEQ ID NO: 3491861 - DNA, 25 bp, Homo sapien
catctggtggtcattagcaagtatc

SEQ ID NO: 3491862 - DNA, 25 bp, Homo sapien
gagtgatagcttctaccctgaaggg

SEQ ID NO: 3491863 - DNA, 25 bp, Homo sapien
tcaaagggccatgcccccttgtggt

SEQ ID NO: 3491864 - DNA, 25 bp, Homo sapien
tgctttgcctgacactcctgcagag

SEQ ID NO: 3491865 - DNA, 25 bp, Homo sapien
gaggaccaaagaggccctagttgct

SEQ ID NO: 3491866 - DNA, 25 bp, Homo sapien
tatgctgacctagggtgcttccctg

SEQ ID NO: 3491867 - DNA, 25 bp, Homo sapien
gcagcacggctcatgtttgccattg

SEQ ID NO: 3491868 - DNA, 25 bp, Homo sapien
gaagcttgaggcttagcagcacggc

SEQ ID NO: 3491869 - DNA, 25 bp, Homo sapien
ctagcatcggaagggccaagtcctg

SEQ ID NO: 3491870 - DNA, 25 bp, Homo sapien
gatttagcaggtagaccggggccat

SEQ ID NO: 3491871 - DNA, 25 bp, Homo sapien
gtcttgaggtgttgaatccatcttc

SEQ ID NO: 3491872 - DNA, 25 bp, Homo sapien
ccaagtcctgtgtgggatttagcag

SEQ ID NO: 3491873 - DNA, 25 bp, Homo sapien
cacactggcccagcaccgcataggc

SEQ ID NO: 3491874 - DNA, 25 bp, Homo sapien
agaaggagggcagcctactcccaag

SEQ ID NO: 3491875 - DNA, 25 bp, Homo sapien
tactcccaagtatcgaccacactgg

SEQ ID NO: 3491876 - DNA, 25 bp, Homo sapien
actggcccagcaccgcataggcggc

SEQ ID NO: 3491877 - DNA, 25 bp, Homo sapien
gtcaaatgtatcattgtgcacattc

SEQ ID NO: 3491878 - DNA, 25 bp, Homo sapien
aagtcaaatgtatcattgtgcacat

SEQ ID NO: 3491879 - DNA, 25 bp, Homo sapien
aatgaagtcaaatgtatcattgtgc

SEQ ID NO: 3491880 - DNA, 25 bp, Homo sapien
tgaagtcaaatgtatcattgtgcac

SEQ ID NO: 3491881 - DNA, 25 bp, Homo sapien
tcttttgctagcaaatccatcccac

SEQ ID NO: 3491882 - DNA, 25 bp, Homo sapien
agctgacagacatgtgagggcacgc

SEQ ID NO: 3491883 - DNA, 25 bp, Homo sapien
gcagtgcaggtcgaggtagacaagc

SEQ ID NO: 3491884 - DNA, 25 bp, Homo sapien
cagggagtctggcagctgacagaca

SEQ ID NO: 3491885 - DNA, 25 bp, Homo sapien
acagacatgtgagggcacgctgaca

SEQ ID NO: 3491886 - DNA, 25 bp, Homo sapien
ttggtagatatccttaggtcttgtg

SEQ ID NO: 3491887 - DNA, 25 bp, Homo sapien
tgcttttggtagatatccttaggtc

SEQ ID NO: 3491888 - DNA, 25 bp, Homo sapien
ggtagatatccttaggtcttgtgtc

SEQ ID NO: 3491889 - DNA, 25 bp, Homo sapien
agatatccttaggtcttgtgtccat

SEQ ID NO: 3491890 - DNA, 25 bp, Homo sapien
cagggtgatgagtagaaagcccgct

SEQ ID NO: 3491891 - DNA, 25 bp, Homo sapien
agggagccagggtgatgagtagaaa

SEQ ID NO: 3491892 - DNA, 25 bp, Homo sapien
gatgagtagaaagcccgctgcggat

SEQ ID NO: 3491893 - DNA, 25 bp, Homo sapien
agccagggtgatgagtagaaagccc

SEQ ID NO: 3491894 - DNA, 25 bp, Homo sapien
accttaggcttcagattgaagtttg

SEQ ID NO: 3491895 - DNA, 25 bp, Homo sapien
gagaccttaggcttcagattgaagt

SEQ ID NO: 3491896 - DNA, 25 bp, Homo sapien
atgagaccttaggcttcagattgaa

SEQ ID NO: 3491897 - DNA, 25 bp, Homo sapien
gaccttaggcttcagattgaagttt

SEQ ID NO: 3491898 - DNA, 25 bp, Homo sapien
gggggtctgcctgcatcctcgtcat

SEQ ID NO: 3491899 - DNA, 25 bp, Homo sapien
ggtctgcctgcatcctcgtcatgga

SEQ ID NO: 3491900 - DNA, 25 bp, Homo sapien
tctgcctgcatcctcgtcatggatc

SEQ ID NO: 3491901 - DNA, 25 bp, Homo sapien
gggtctgcctgcatcctcgtcatgg

SEQ ID NO: 3491902 - DNA, 25 bp, Homo sapien
tcagggacggggagccatggagcct

SEQ ID NO: 3491903 - DNA, 25 bp, Homo sapien
gaaggttgtgaagctcagggacggg

SEQ ID NO: 3491904 - DNA, 25 bp, Homo sapien
agggacggggagccatggagccttc

SEQ ID NO: 3491905 - DNA, 25 bp, Homo sapien
aaggttgtgaagctcagggacgggg

SEQ ID NO: 3491906 - DNA, 25 bp, Homo sapien
ttgccaatgtcttgggtgtagacac

SEQ ID NO: 3491907 - DNA, 25 bp, Homo sapien
gggtgtagacacaatcaggcatcca

SEQ ID NO: 3491908 - DNA, 25 bp, Homo sapien
atcttttgccaatgtcttgggtgta

SEQ ID NO: 3491909 - DNA, 25 bp, Homo sapien
tagacacaatcaggcatccatttgg

SEQ ID NO: 3491910 - DNA, 25 bp, Homo sapien
gccctgaggagagcgcatctgattc

SEQ ID NO: 3491911 - DNA, 25 bp, Homo sapien
caagcaggttctaggtcccagtgaa

SEQ ID NO: 3491912 - DNA, 25 bp, Homo sapien
gcttctcctcatgaagtggccctga

SEQ ID NO: 3491913 - DNA, 25 bp, Homo sapien
aaagatgcagcctcctatgaagacc

SEQ ID NO: 3491914 - DNA, 25 bp, Homo sapien
caaattgcgtggctatcctggacac

SEQ ID NO: 3491915 - DNA, 25 bp, Homo sapien
gactggcagctgtcataagacacaa

SEQ ID NO: 3491916 - DNA, 25 bp, Homo sapien
gacaccacagaagtatgctggacag

SEQ ID NO: 3491917 - DNA, 25 bp, Homo sapien
taatgccgcccagtggactcctggt

SEQ ID NO: 3491918 - DNA, 25 bp, Homo sapien
caattatttcgaggagattactcca

SEQ ID NO: 3491919 - DNA, 25 bp, Homo sapien
tgtgctgaagcgatactcaatccca

SEQ ID NO: 3491920 - DNA, 25 bp, Homo sapien
gaggagatccatataagctacagtc

SEQ ID NO: 3491921 - DNA, 25 bp, Homo sapien
cttactctgtactgggatctgtggg

SEQ ID NO: 3491922 - DNA, 25 bp, Homo sapien
ctatgagtcactcagcaagagaggc

SEQ ID NO: 3491923 - DNA, 25 bp, Homo sapien
caaggtctgcagtgcctcggaggta

SEQ ID NO: 3491924 - DNA, 25 bp, Homo sapien
tatatgactccgcacacctaaagac

SEQ ID NO: 3491925 - DNA, 25 bp, Homo sapien
gaagaagctcatccctgtggacctt

SEQ ID NO: 3491926 - DNA, 25 bp, Homo sapien
tctttagtcctctaatcttgaagtc

SEQ ID NO: 3491927 - DNA, 25 bp, Homo sapien
ttccaagtgccagaaagagatgtct

SEQ ID NO: 3491928 - DNA, 25 bp, Homo sapien
tgggactgacctgcatgcatcttgg

SEQ ID NO: 3491929 - DNA, 25 bp, Homo sapien
gaagtcagcccatgatccattccat

SEQ ID NO: 3491930 - DNA, 25 bp, Homo sapien
tcttcggttccaagggcatgtctcc

SEQ ID NO: 3491931 - DNA, 25 bp, Homo sapien
taaacaagggcagcaccgttggcat

SEQ ID NO: 3491932 - DNA, 25 bp, Homo sapien
acttcctctcggtcataaacaaggg

SEQ ID NO: 3491933 - DNA, 25 bp, Homo sapien
gaaactatcattttctggcaaacgc

SEQ ID NO: 3491934 - DNA, 25 bp, Homo sapien
atgatgagtcgagcagcagtttggc

SEQ ID NO: 3491935 - DNA, 25 bp, Homo sapien
tggatgatgagtcgagcagcagttt

SEQ ID NO: 3491936 - DNA, 25 bp, Homo sapien
tgcgtggatgatgagtcgagcagca

SEQ ID NO: 3491937 - DNA, 25 bp, Homo sapien
cgtggatgatgagtcgagcagcagt

SEQ ID NO: 3491938 - DNA, 25 bp, Homo sapien
ctccgggcagcaggtcagactttac

SEQ ID NO: 3491939 - DNA, 25 bp, Homo sapien
atagaagatgacatgggctccgggc

SEQ ID NO: 3491940 - DNA, 25 bp, Homo sapien
cctgggcttcggctgctactgcttc

SEQ ID NO: 3491941 - DNA, 25 bp, Homo sapien
ttaccagttgctcccaaaccctctc

SEQ ID NO: 3491942 - DNA, 25 bp, Homo sapien
tgcgacttcccctgcgactgtggtt

SEQ ID NO: 3491943 - DNA, 25 bp, Homo sapien
cttcccctgcgactgtggttcctgg

SEQ ID NO: 3491944 - DNA, 25 bp, Homo sapien
acttttgcgacttcccctgcgactg

SEQ ID NO: 3491945 - DNA, 25 bp, Homo sapien
agagagaacttttgcgacttcccct

SEQ ID NO: 3491946 - DNA, 25 bp, Homo sapien
tggcctgatagagtcctttctccac

SEQ ID NO: 3491947 - DNA, 25 bp, Homo sapien
tcaatggcctgatagagtcctttct

SEQ ID NO: 3491948 - DNA, 25 bp, Homo sapien
cttcaatggcctgatagagtccttt

SEQ ID NO: 3491949 - DNA, 25 bp, Homo sapien
gcagctgcgcttcttcaatggcctg

SEQ ID NO: 3491950 - DNA, 25 bp, Homo sapien
ctatctcggtgttttgatgaaatgc

SEQ ID NO: 3491951 - DNA, 25 bp, Homo sapien
ttctatctcggtgttttgatgaaat

SEQ ID NO: 3491952 - DNA, 25 bp, Homo sapien
tatctcggtgttttgatgaaatgcc

SEQ ID NO: 3491953 - DNA, 25 bp, Homo sapien
tctatctcggtgttttgatgaaatg

SEQ ID NO: 3491954 - DNA, 25 bp, Homo sapien
gctgtcaactactgtaattctctct

SEQ ID NO: 3491955 - DNA, 25 bp, Homo sapien
tgtattccaccagccctgaacttgt

SEQ ID NO: 3491956 - DNA, 25 bp, Homo sapien
ttgttttgatctctgaccacctctt

SEQ ID NO: 3491957 - DNA, 25 bp, Homo sapien
gatctctgaccacctcttctttcat

SEQ ID NO: 3491958 - DNA, 25 bp, Homo sapien
ccctgaacttgttttgatctctgac

SEQ ID NO: 3491959 - DNA, 25 bp, Homo sapien
ccatgggaattgaatgatgacacaa

SEQ ID NO: 3491960 - DNA, 25 bp, Homo sapien
gcttcaggtatctctgctcccacct

SEQ ID NO: 3491961 - DNA, 25 bp, Homo sapien
ggaattgaatgatgacacaagcccc

SEQ ID NO: 3491962 - DNA, 25 bp, Homo sapien
cccaccatgggaattgaatgatgac

SEQ ID NO: 3491963 - DNA, 25 bp, Homo sapien
gcgggaagtcatttgttacagatct

SEQ ID NO: 3491964 - DNA, 25 bp, Homo sapien
cacagcttgtctctgcgggaagtca

SEQ ID NO: 3491965 - DNA, 25 bp, Homo sapien
cagcagcagatagaccaagcaggcc

SEQ ID NO: 3491966 - DNA, 25 bp, Homo sapien
tctggttctgcgatgagtgagtgac

SEQ ID NO: 3491967 - DNA, 25 bp, Homo sapien
tcagatgggacgaatctcagcaggc

SEQ ID NO: 3491968 - DNA, 25 bp, Homo sapien
gaatccatgcatctccgtgcagggt

SEQ ID NO: 3491969 - DNA, 25 bp, Homo sapien
cagggttgtcagatgggacgaatct

SEQ ID NO: 3491970 - DNA, 25 bp, Homo sapien
cagtagatagtcttgttaggcaggg

SEQ ID NO: 3491971 - DNA, 25 bp, Homo sapien
gagctgttcctctgatcctttgaca

SEQ ID NO: 3491972 - DNA, 25 bp, Homo sapien
gcccagtaattctgcctcccatagt

SEQ ID NO: 3491973 - DNA, 25 bp, Homo sapien
gacttaacctgttatgaggaacatc

SEQ ID NO: 3491974 - DNA, 25 bp, Homo sapien
gaggaacatcattatccaaccaggg

SEQ ID NO: 3491975 - DNA, 25 bp, Homo sapien
gatatgtccgggtaggataaaagag

SEQ ID NO: 3491976 - DNA, 25 bp, Homo sapien
gcgccttaggccttgatatgtccgg

SEQ ID NO: 3491977 - DNA, 25 bp, Homo sapien
gaacaggaacttgcgcgccttaggc

SEQ ID NO: 3491978 - DNA, 25 bp, Homo sapien
aggaccttggcccagaatgcggaat

SEQ ID NO: 3491979 - DNA, 25 bp, Homo sapien
gatttctgtggagacactgagcaca

SEQ ID NO: 3491980 - DNA, 25 bp, Homo sapien
cactctggggcacctgaaaaggggt

SEQ ID NO: 3491981 - DNA, 25 bp, Homo sapien
tcactctggggcacctgaaaagggg

SEQ ID NO: 3491982 - DNA, 25 bp, Homo sapien
gcacaaagctcagggacaggaccat

SEQ ID NO: 3491983 - DNA, 25 bp, Homo sapien
ctctccatttgcttttgcctccccc

SEQ ID NO: 3491984 - DNA, 25 bp, Homo sapien
gttctctccatttgcttttgcctcc

SEQ ID NO: 3491985 - DNA, 25 bp, Homo sapien
gtaggaaattgaagattttaattga

SEQ ID NO: 3491986 - DNA, 25 bp, Homo sapien
atgttctctccatttgcttttgcct

SEQ ID NO: 3491987 - DNA, 25 bp, Homo sapien
cctgtggaatcagaactacaggctt

SEQ ID NO: 3491988 - DNA, 25 bp, Homo sapien
ggaatcagaactacaggcttcctgg

SEQ ID NO: 3491989 - DNA, 25 bp, Homo sapien
gctccaggaatccctgtggaatcag

SEQ ID NO: 3491990 - DNA, 25 bp, Homo sapien
ctccaggaatccctgtggaatcaga

SEQ ID NO: 3491991 - DNA, 25 bp, Homo sapien
ggaaaactcactaaagcacactggc

SEQ ID NO: 3491992 - DNA, 25 bp, Homo sapien
gaaatggacagacttaactccaggg

SEQ ID NO: 3491993 - DNA, 25 bp, Homo sapien
tcctgcggtactcagggcatcaaag

SEQ ID NO: 3491994 - DNA, 25 bp, Homo sapien
ggtttgagcaacacagatcctgcgg

SEQ ID NO: 3491995 - DNA, 25 bp, Homo sapien
caactagtgttcattacaggcaggc

SEQ ID NO: 3491996 - DNA, 25 bp, Homo sapien
gatgtgacccaaggataacctactg

SEQ ID NO: 3491997 - DNA, 25 bp, Homo sapien
cagcacagggaggactataaccgca

SEQ ID NO: 3491998 - DNA, 25 bp, Homo sapien
tctactttggccacggatgtgaccc

SEQ ID NO: 3491999 - DNA, 25 bp, Homo sapien
gagaaagctctacaaacagggcaca

SEQ ID NO: 3492000 - DNA, 25 bp, Homo sapien
gactccatcgtcaactcactgtagg

SEQ ID NO: 3492001 - DNA, 25 bp, Homo sapien
gatgggacatcctcacatggacaaa

SEQ ID NO: 3492002 - DNA, 25 bp, Homo sapien
tgtaggacaccattgaatccagcgt

SEQ ID NO: 3492003 - DNA, 25 bp, Homo sapien
gcctcccgaggttcagagaaaactg

SEQ ID NO: 3492004 - DNA, 25 bp, Homo sapien
taagccaggcgtaacaatgcaaaca

SEQ ID NO: 3492005 - DNA, 25 bp, Homo sapien
gttacaaagagcagggatacccacc

SEQ ID NO: 3492006 - DNA, 25 bp, Homo sapien
taactgttgggcatgcgaataggcc

SEQ ID NO: 3492007 - DNA, 25 bp, Homo sapien
ctgggatgcacaggctcagcacagc

SEQ ID NO: 3492008 - DNA, 25 bp, Homo sapien
cagccacgcttagccttgcttctta

SEQ ID NO: 3492009 - DNA, 25 bp, Homo sapien
cttgcttcttacattcggctctggg

SEQ ID NO: 3492010 - DNA, 25 bp, Homo sapien
gaagcagaggtcctgccgtgttcac

SEQ ID NO: 3492011 - DNA, 25 bp, Homo sapien
tgggaaggactctaggctacgcccc

SEQ ID NO: 3492012 - DNA, 25 bp, Homo sapien
cccaagccccatttctgggtgatag

SEQ ID NO: 3492013 - DNA, 25 bp, Homo sapien
tccgtccgcggtcatttcccactct

SEQ ID NO: 3492014 - DNA, 25 bp, Homo sapien
tgttgagcaggttgtcttgggtgag

SEQ ID NO: 3492015 - DNA, 25 bp, Homo sapien
catttctgggtgatagggatgttga

SEQ ID NO: 3492016 - DNA, 25 bp, Homo sapien
tgagcccgctggagcaaccagcttg

SEQ ID NO: 3492017 - DNA, 25 bp, Homo sapien
gcttgtcaaacacgccagatcctcg

SEQ ID NO: 3492018 - DNA, 25 bp, Homo sapien
tggagcaaccagcttgtcaaacacg

SEQ ID NO: 3492019 - DNA, 25 bp, Homo sapien
ttaatctcccattccagcgcctgag

SEQ ID NO: 3492020 - DNA, 25 bp, Homo sapien
cattcaatcatagatgcctccgtga

SEQ ID NO: 3492021 - DNA, 25 bp, Homo sapien
ttatacaccagaataagccgtctgc

SEQ ID NO: 3492022 - DNA, 25 bp, Homo sapien
gccctaatatgcattgtctgagcgt

SEQ ID NO: 3492023 - DNA, 25 bp, Homo sapien
gtttacccagtatgctccaagctca

SEQ ID NO: 3492024 - DNA, 25 bp, Homo sapien
tcaggggatctccttttcaaactga

SEQ ID NO: 3492025 - DNA, 25 bp, Homo sapien
caggggatctccttttcaaactgat

SEQ ID NO: 3492026 - DNA, 25 bp, Homo sapien
aggggatctccttttcaaactgata

SEQ ID NO: 3492027 - DNA, 25 bp, Homo sapien
agctccaggcactcgggtaggagca

SEQ ID NO: 3492028 - DNA, 25 bp, Homo sapien
gctaaacatctcacagtttgcacag

SEQ ID NO: 3492029 - DNA, 25 bp, Homo sapien
tgtgttctcatactggaagctccac

SEQ ID NO: 3492030 - DNA, 25 bp, Homo sapien
tgcacagatgaggattgccctccac

SEQ ID NO: 3492031 - DNA, 25 bp, Homo sapien
ccctggaggttgttgctgaccttgc

SEQ ID NO: 3492032 - DNA, 25 bp, Homo sapien
gctaagctctcagatactaagccag

SEQ ID NO: 3492033 - DNA, 25 bp, Homo sapien
tgcacagaaacaaccgagccagaga

SEQ ID NO: 3492034 - DNA, 25 bp, Homo sapien
tcccggatgatggagcaagtgtctg

SEQ ID NO: 3492035 - DNA, 25 bp, Homo sapien
ggacccagggtcagtgccggctggt

SEQ ID NO: 3492036 - DNA, 25 bp, Homo sapien
aaggtttcgaggcatgaggagccgc

SEQ ID NO: 3492037 - DNA, 25 bp, Homo sapien
tcagatgtgggcagcaaggtttcga

SEQ ID NO: 3492038 - DNA, 25 bp, Homo sapien
ttcgaggcatgaggagccgcttttc

SEQ ID NO: 3492039 - DNA, 25 bp, Homo sapien
gaagaattgagtatgcacctacctg

SEQ ID NO: 3492040 - DNA, 25 bp, Homo sapien
aaacatccaactttgccttggggat

SEQ ID NO: 3492041 - DNA, 25 bp, Homo sapien
tgtcacaggacaaacccctttcaaa

SEQ ID NO: 3492042 - DNA, 25 bp, Homo sapien
aaaggaatctccaccgaatctaggg

SEQ ID NO: 3492043 - DNA, 25 bp, Homo sapien
gcataattgtgaggaccaaggccat

SEQ ID NO: 3492044 - DNA, 25 bp, Homo sapien
tccttgcagcataattgtgaggacc

SEQ ID NO: 3492045 - DNA, 25 bp, Homo sapien
gcagcataattgtgaggaccaaggc

SEQ ID NO: 3492046 - DNA, 25 bp, Homo sapien
ttgcagcataattgtgaggaccaag

SEQ ID NO: 3492047 - DNA, 25 bp, Homo sapien
atggttccaggttctgggaagctca

SEQ ID NO: 3492048 - DNA, 25 bp, Homo sapien
acctttcgtggaaagattattctga

SEQ ID NO: 3492049 - DNA, 25 bp, Homo sapien
tccttcttattacccagaaatagac

SEQ ID NO: 3492050 - DNA, 25 bp, Homo sapien
attacactgccttgtcacttcctgc

SEQ ID NO: 3492051 - DNA, 25 bp, Homo sapien
tattctgactaacgaggttctgggc

SEQ ID NO: 3492052 - DNA, 25 bp, Homo sapien
atctggatctggatgactagagtgg

SEQ ID NO: 3492053 - DNA, 25 bp, Homo sapien
agtggacagccctgaatgaccaacc

SEQ ID NO: 3492054 - DNA, 25 bp, Homo sapien
ctggatctggatgactagagtggac

SEQ ID NO: 3492055 - DNA, 25 bp, Homo sapien
tagagtggacagccctgaatgacca

SEQ ID NO: 3492056 - DNA, 25 bp, Homo sapien
aaatatcattgcctccaccagcgtc

SEQ ID NO: 3492057 - DNA, 25 bp, Homo sapien
tgccacttctttgatcgaccactgt

SEQ ID NO: 3492058 - DNA, 25 bp, Homo sapien
tcattactctgaggcgagctcaggg

SEQ ID NO: 3492059 - DNA, 25 bp, Homo sapien
cgaccactgtcgatgggcgctttgt

SEQ ID NO: 3492060 - DNA, 25 bp, Homo sapien
tttctgccatctgatctcggggtgt

SEQ ID NO: 3492061 - DNA, 25 bp, Homo sapien
ccccgggaactgactaggtgcgctg

SEQ ID NO: 3492062 - DNA, 25 bp, Homo sapien
cagtccccgggaactgactaggtgc

SEQ ID NO: 3492063 - DNA, 25 bp, Homo sapien
tgactaggtgcgctgggctggcttg

SEQ ID NO: 3492064 - DNA, 25 bp, Homo sapien
ttctgagggcagagaacgctttccc

SEQ ID NO: 3492065 - DNA, 25 bp, Homo sapien
taagcgtggagtcccctgggtgctt

SEQ ID NO: 3492066 - DNA, 25 bp, Homo sapien
ggttcgcgctgagcccgtgcagcat

SEQ ID NO: 3492067 - DNA, 25 bp, Homo sapien
gcccgtgcagcaaggttcgcgctga

SEQ ID NO: 3492068 - DNA, 25 bp, Homo sapien
cttgcagatgggaagtgtgttctgt

SEQ ID NO: 3492069 - DNA, 25 bp, Homo sapien
tgcagatgggaagtgtgttctgtat

SEQ ID NO: 3492070 - DNA, 25 bp, Homo sapien
tgggaagtgtgttctgtatttccgt

SEQ ID NO: 3492071 - DNA, 25 bp, Homo sapien
ggaagtgtgttctgtatttccgtac

SEQ ID NO: 3492072 - DNA, 25 bp, Homo sapien
gccattctcccgcactcaggccccg

SEQ ID NO: 3492073 - DNA, 25 bp, Homo sapien
tccatgatcccaaactgtaaggagg

SEQ ID NO: 3492074 - DNA, 25 bp, Homo sapien
gtgggccacggcctacgcttagcac

SEQ ID NO: 3492075 - DNA, 25 bp, Homo sapien
acgcttagcacccacgtcctgcctt

SEQ ID NO: 3492076 - DNA, 25 bp, Homo sapien
tttcccgccaccgagcaggtggctt

SEQ ID NO: 3492077 - DNA, 25 bp, Homo sapien
ctttcccgccaccgagcaggtggct

SEQ ID NO: 3492078 - DNA, 25 bp, Homo sapien
cccgccaccgagcaggtggcttaag

SEQ ID NO: 3492079 - DNA, 25 bp, Homo sapien
tcccgccaccgagcaggtggcttaa

SEQ ID NO: 3492080 - DNA, 25 bp, Homo sapien
cgcaaagctcatggtcttggcataa

SEQ ID NO: 3492081 - DNA, 25 bp, Homo sapien
agcctttatgcccttccgcaaagct

SEQ ID NO: 3492082 - DNA, 25 bp, Homo sapien
cacacgtccagtctcggctctggag

SEQ ID NO: 3492083 - DNA, 25 bp, Homo sapien
gctctggagccgtccttcggaggta

SEQ ID NO: 3492084 - DNA, 25 bp, Homo sapien
ggaattctaactctcaaggtgatgg

SEQ ID NO: 3492085 - DNA, 25 bp, Homo sapien
tcctcaccgtaagtgaattggctgg

SEQ ID NO: 3492086 - DNA, 25 bp, Homo sapien
catagctagaaagtgccatccataa

SEQ ID NO: 3492087 - DNA, 25 bp, Homo sapien
atgattcagctattccactcctagg

SEQ ID NO: 3492088 - DNA, 25 bp, Homo sapien
ccttgtgagtttcgcctaaagttga

SEQ ID NO: 3492089 - DNA, 25 bp, Homo sapien
ttccacttagatcctggagagtgaa

SEQ ID NO: 3492090 - DNA, 25 bp, Homo sapien
tgggcacagtcagaccaaagtaatt

SEQ ID NO: 3492091 - DNA, 25 bp, Homo sapien
gtgaatttcccagcggaggtaatgc

SEQ ID NO: 3492092 - DNA, 25 bp, Homo sapien
ccttttggccgtcaggcaacaggaa

SEQ ID NO: 3492093 - DNA, 25 bp, Homo sapien
ttgccttttggccgtcaggcaacag

SEQ ID NO: 3492094 - DNA, 25 bp, Homo sapien
agttgccttttggccgtcaggcaac

SEQ ID NO: 3492095 - DNA, 25 bp, Homo sapien
gccttttggccgtcaggcaacagga

SEQ ID NO: 3492096 - DNA, 25 bp, Homo sapien
ccatcatcaggaacaatagcgggct

SEQ ID NO: 3492097 - DNA, 25 bp, Homo sapien
gatggcacaccatttaacccgtctg

SEQ ID NO: 3492098 - DNA, 25 bp, Homo sapien
ttcaacggctagactccagaaggag

SEQ ID NO: 3492099 - DNA, 25 bp, Homo sapien
catcaactggctatgtggccctgga

SEQ ID NO: 3492100 - DNA, 25 bp, Homo sapien
taacatggaatttaggactctgcta

SEQ ID NO: 3492101 - DNA, 25 bp, Homo sapien
ggcccaagtttatctgcttcactga

SEQ ID NO: 3492102 - DNA, 25 bp, Homo sapien
gactctgctatcctttgcatagaaa

SEQ ID NO: 3492103 - DNA, 25 bp, Homo sapien
cccatcaagtttagtgtctgttttc

SEQ ID NO: 3492104 - DNA, 25 bp, Homo sapien
gaagcctccagctacgtatcagaca

SEQ ID NO: 3492105 - DNA, 25 bp, Homo sapien
aatccaagacctgtagtgggctacg

SEQ ID NO: 3492106 - DNA, 25 bp, Homo sapien
tagggccagacagcacgcttgagtt

SEQ ID NO: 3492107 - DNA, 25 bp, Homo sapien
tgagcactcccttctagcacgtgtg

SEQ ID NO: 3492108 - DNA, 25 bp, Homo sapien
gatcagcatcaagactaagtgttga

SEQ ID NO: 3492109 - DNA, 25 bp, Homo sapien
aagtggaagatcagcatcaagacta

SEQ ID NO: 3492110 - DNA, 25 bp, Homo sapien
gaagatcagcatcaagactaagtgt

SEQ ID NO: 3492111 - DNA, 25 bp, Homo sapien
gtggaagatcagcatcaagactaag

SEQ ID NO: 3492112 - DNA, 25 bp, Homo sapien
gaacattacatctatgtttccgatg

SEQ ID NO: 3492113 - DNA, 25 bp, Homo sapien
cattacatctatgtttccgatggag

SEQ ID NO: 3492114 - DNA, 25 bp, Homo sapien
aacacattgtacttggcttttctcg

SEQ ID NO: 3492115 - DNA, 25 bp, Homo sapien
cgtgaactgtatactgaacattaca

SEQ ID NO: 3492116 - DNA, 25 bp, Homo sapien
tctctggggagtaattcatggctta

SEQ ID NO: 3492117 - DNA, 25 bp, Homo sapien
attggcaaagcatagatgtccacct

SEQ ID NO: 3492118 - DNA, 25 bp, Homo sapien
agcatagatgtccacctgagggcca

SEQ ID NO: 3492119 - DNA, 25 bp, Homo sapien
ggcaaagcatagatgtccacctgag

SEQ ID NO: 3492120 - DNA, 25 bp, Homo sapien
agcagaaagagggacacaggctgga

SEQ ID NO: 3492121 - DNA, 25 bp, Homo sapien
ctcccaccagcgcacgtgataaagg

SEQ ID NO: 3492122 - DNA, 25 bp, Homo sapien
gcacgtgataaagggggcagcagaa

SEQ ID NO: 3492123 - DNA, 25 bp, Homo sapien
accagcgcacgtgataaagggggca

SEQ ID NO: 3492124 - DNA, 25 bp, Homo sapien
tgaaagtcaccttcggcgggaggat

SEQ ID NO: 3492125 - DNA, 25 bp, Homo sapien
tgacgactcccacaaagagggtaaa

SEQ ID NO: 3492126 - DNA, 25 bp, Homo sapien
taccttcacggtccttctgattata

SEQ ID NO: 3492127 - DNA, 25 bp, Homo sapien
gattatatccatggcagtaggagag

SEQ ID NO: 3492128 - DNA, 25 bp, Homo sapien
tgaaccagcatatcggaaataccaa

SEQ ID NO: 3492129 - DNA, 25 bp, Homo sapien
taaaatcccactgaagccttggaat

SEQ ID NO: 3492130 - DNA, 25 bp, Homo sapien
taacaatgcgccatgctgatgaacc

SEQ ID NO: 3492131 - DNA, 25 bp, Homo sapien
aaggactccataaatccgtgaagat

SEQ ID NO: 3492132 - DNA, 25 bp, Homo sapien
ccttggcctgcatgcagcccacact

SEQ ID NO: 3492133 - DNA, 25 bp, Homo sapien
ttggcctgcatgcagcccacactgc

SEQ ID NO: 3492134 - DNA, 25 bp, Homo sapien
tggcctgcatgcagcccacactgcc

SEQ ID NO: 3492135 - DNA, 25 bp, Homo sapien
agcagactgcccggcttcaggtcct

SEQ ID NO: 3492136 - DNA, 25 bp, Homo sapien
tggcatgatgcgacattcccgggct

SEQ ID NO: 3492137 - DNA, 25 bp, Homo sapien
atttcaaggaagctctcagttctcc

SEQ ID NO: 3492138 - DNA, 25 bp, Homo sapien
gaaccgagcccgttgtttgaatgga

SEQ ID NO: 3492139 - DNA, 25 bp, Homo sapien
taagcacatggcatcgctcagcggt

SEQ ID NO: 3492140 - DNA, 25 bp, Homo sapien
gtgtggcgaggtgacaagctggctc

SEQ ID NO: 3492141 - DNA, 25 bp, Homo sapien
tcggtgcatctgattttgctgccat

SEQ ID NO: 3492142 - DNA, 25 bp, Homo sapien
cggtgcatctgattttgctgccatt

SEQ ID NO: 3492143 - DNA, 25 bp, Homo sapien
ctcccgtgtgtggcgaggtgacaag

SEQ ID NO: 3492144 - DNA, 25 bp, Homo sapien
cggcaaagctgatgttgtcatcctt

SEQ ID NO: 3492145 - DNA, 25 bp, Homo sapien
caaagctgatgttgtcatccttcat

SEQ ID NO: 3492146 - DNA, 25 bp, Homo sapien
agcggcaaagctgatgttgtcatcc

SEQ ID NO: 3492147 - DNA, 25 bp, Homo sapien
cagcggcaaagctgatgttgtcatc

SEQ ID NO: 3492148 - DNA, 25 bp, Homo sapien
agaaagagcaacagcaccacaccaa

SEQ ID NO: 3492149 - DNA, 25 bp, Homo sapien
gaaagagcaacagcaccacaccaaa

SEQ ID NO: 3492150 - DNA, 25 bp, Homo sapien
gaaaggcgacatcatcctgaatctg

SEQ ID NO: 3492151 - DNA, 25 bp, Homo sapien
caagtttttctaggcatatgcttag

SEQ ID NO: 3492152 - DNA, 25 bp, Homo sapien
agtcaccagtgctacggtaaatgtg

SEQ ID NO: 3492153 - DNA, 25 bp, Homo sapien
taggcatatgcttagaggacttttc

SEQ ID NO: 3492154 - DNA, 25 bp, Homo sapien
gcacctaaataacccaaggcaggtg

SEQ ID NO: 3492155 - DNA, 25 bp, Homo sapien
tgccagtacagagggttattatcca

SEQ ID NO: 3492156 - DNA, 25 bp, Homo sapien
tgcttcctgaaagcacctaaataac

SEQ ID NO: 3492157 - DNA, 25 bp, Homo sapien
gcaggtgccagtacagagggttatt

SEQ ID NO: 3492158 - DNA, 25 bp, Homo sapien
aaattgctgtttgatgtgcaaggcc

SEQ ID NO: 3492159 - DNA, 25 bp, Homo sapien
gcttgatagatttgattagggtaga

SEQ ID NO: 3492160 - DNA, 25 bp, Homo sapien
gacacaagctcacccctaaattggg

SEQ ID NO: 3492161 - DNA, 25 bp, Homo sapien
catgtgaaagattatggtgggcagc

SEQ ID NO: 3492162 - DNA, 25 bp, Homo sapien
tcccacaaattgaatgaggatgacc

SEQ ID NO: 3492163 - DNA, 25 bp, Homo sapien
gtcccctctcaattaagtttgtcag

SEQ ID NO: 3492164 - DNA, 25 bp, Homo sapien
aacaggtggcaaaagatgaagaagc

SEQ ID NO: 3492165 - DNA, 25 bp, Homo sapien
tgaagaagcgtgaagatgccaggaa

SEQ ID NO: 3492166 - DNA, 25 bp, Homo sapien
tttgtccagattggggggtgcagac

SEQ ID NO: 3492167 - DNA, 25 bp, Homo sapien
tccagattggggggtgcagacccat

SEQ ID NO: 3492168 - DNA, 25 bp, Homo sapien
tcattcatctaccagagtccacagt

SEQ ID NO: 3492169 - DNA, 25 bp, Homo sapien
agtccacagtggtttgtccagattg

SEQ ID NO: 3492170 - DNA, 25 bp, Homo sapien
gagggtgacagaagccacacgagta

SEQ ID NO: 3492171 - DNA, 25 bp, Homo sapien
ttgcgcacagcccagctagggagac

SEQ ID NO: 3492172 - DNA, 25 bp, Homo sapien
gatggtccctctaagccaagcggag

SEQ ID NO: 3492173 - DNA, 25 bp, Homo sapien
tgtctactgtgctccagaaccctgc

SEQ ID NO: 3492174 - DNA, 25 bp, Homo sapien
tataagggactaaggcatggacatt

SEQ ID NO: 3492175 - DNA, 25 bp, Homo sapien
gctatgccacatgacccttgtgaaa

SEQ ID NO: 3492176 - DNA, 25 bp, Homo sapien
tatccaggaagatacgtaccccaga

SEQ ID NO: 3492177 - DNA, 25 bp, Homo sapien
caaagcctctaagatacagggtatc

SEQ ID NO: 3492178 - DNA, 25 bp, Homo sapien
gtcctcgaagaagccaaagacatca

SEQ ID NO: 3492179 - DNA, 25 bp, Homo sapien
agccaaagacatcaagtgctagcct

SEQ ID NO: 3492180 - DNA, 25 bp, Homo sapien
cagtcctcgaagaagccaaagacat

SEQ ID NO: 3492181 - DNA, 25 bp, Homo sapien
caaagacatcaagtgctagcctcat

SEQ ID NO: 3492182 - DNA, 25 bp, Homo sapien
gaatagagactaggttagtgagaag

SEQ ID NO: 3492183 - DNA, 25 bp, Homo sapien
taaaagttgtatgccttgtcctggt

SEQ ID NO: 3492184 - DNA, 25 bp, Homo sapien
gatactctgatacttggaaggtaga

SEQ ID NO: 3492185 - DNA, 25 bp, Homo sapien
caaagaagctggttgagtaaaagtt

SEQ ID NO: 3492186 - DNA, 25 bp, Homo sapien
ggcaggagattaaggtgacaggaag

SEQ ID NO: 3492187 - DNA, 25 bp, Homo sapien
tgactgccatttgcacgcagctcat

SEQ ID NO: 3492188 - DNA, 25 bp, Homo sapien
tcccatagatcatctgtctgtcctc

SEQ ID NO: 3492189 - DNA, 25 bp, Homo sapien
ggaggcttcaaagcacacactgact

SEQ ID NO: 3492190 - DNA, 25 bp, Homo sapien
agggagtaatcgagaataaacaaag

SEQ ID NO: 3492191 - DNA, 25 bp, Homo sapien
tccactaaagggagtaatcgagaat

SEQ ID NO: 3492192 - DNA, 25 bp, Homo sapien
ccaggacagtgtccatgaagcccac

SEQ ID NO: 3492193 - DNA, 25 bp, Homo sapien
taaagggagtaatcgagaataaaca

SEQ ID NO: 3492194 - DNA, 25 bp, Homo sapien
gtctcatcaactacacctctctggt

SEQ ID NO: 3492195 - DNA, 25 bp, Homo sapien
ctcatcaactacacctctctggtct

SEQ ID NO: 3492196 - DNA, 25 bp, Homo sapien
ctgtctcatcaactacacctctctg

SEQ ID NO: 3492197 - DNA, 25 bp, Homo sapien
tgtctcatcaactacacctctctgg

SEQ ID NO: 3492198 - DNA, 25 bp, Homo sapien
ctgaatctctagtgtagccctgcac

SEQ ID NO: 3492199 - DNA, 25 bp, Homo sapien
tgtaggaaagctccctcaagctccc

SEQ ID NO: 3492200 - DNA, 25 bp, Homo sapien
gctttgtaggaaagctccctcaagc

SEQ ID NO: 3492201 - DNA, 25 bp, Homo sapien
agagctttgtaggaaagctccctca

SEQ ID NO: 3492202 - DNA, 25 bp, Homo sapien
taggaaagctccctcaagctccctg

SEQ ID NO: 3492203 - DNA, 25 bp, Homo sapien
tgctatttctataagacgccacagg

SEQ ID NO: 3492204 - DNA, 25 bp, Homo sapien
cctgtggatgagcaattgttctgct

SEQ ID NO: 3492205 - DNA, 25 bp, Homo sapien
aatgcctgtggttagcagcgtcaga

SEQ ID NO: 3492206 - DNA, 25 bp, Homo sapien
ggatttggagcaagactgttcctga

SEQ ID NO: 3492207 - DNA, 25 bp, Homo sapien
gaacctgatgagcttggaggcagca

SEQ ID NO: 3492208 - DNA, 25 bp, Homo sapien
ggcagcagcgtctttaaatttcctc

SEQ ID NO: 3492209 - DNA, 25 bp, Homo sapien
gtctgttaacaagagggcagcatgt

SEQ ID NO: 3492210 - DNA, 25 bp, Homo sapien
gcaccatgccgacaatgcagtcaaa

SEQ ID NO: 3492211 - DNA, 25 bp, Homo sapien
tgaatttatgtgacccagtgtgacc

SEQ ID NO: 3492212 - DNA, 25 bp, Homo sapien
taatgtcatggtcccatctacccag

SEQ ID NO: 3492213 - DNA, 25 bp, Homo sapien
taaaattgccactgtccaaagcagg

SEQ ID NO: 3492214 - DNA, 25 bp, Homo sapien
caaagcaggtaactcggacatctga

SEQ ID NO: 3492215 - DNA, 25 bp, Homo sapien
gataagaacatcttgggcctgcctc

SEQ ID NO: 3492216 - DNA, 25 bp, Homo sapien
caaggtgcctgatggctgaatccaa

SEQ ID NO: 3492217 - DNA, 25 bp, Homo sapien
caaagcttcttcgaccatgcaaggc

SEQ ID NO: 3492218 - DNA, 25 bp, Homo sapien
gggattggccttgtaacctctgtga

SEQ ID NO: 3492219 - DNA, 25 bp, Homo sapien
cccaggctgtgcaccagcccagccc

SEQ ID NO: 3492220 - DNA, 25 bp, Homo sapien
gggcccaggctgtgcaccagcccag

SEQ ID NO: 3492221 - DNA, 25 bp, Homo sapien
cagcccaggccaggagtttaaccat

SEQ ID NO: 3492222 - DNA, 25 bp, Homo sapien
ccgcgccgggcccaggctgtgcacc

SEQ ID NO: 3492223 - DNA, 25 bp, Homo sapien
gctccatccctgaccgccactttct

SEQ ID NO: 3492224 - DNA, 25 bp, Homo sapien
ctccatccctgaccgccactttctc

SEQ ID NO: 3492225 - DNA, 25 bp, Homo sapien
tctgcagtccctcagttcgaacggg

SEQ ID NO: 3492226 - DNA, 25 bp, Homo sapien
ttgtaagtttcggagccgggctcgc

SEQ ID NO: 3492227 - DNA, 25 bp, Homo sapien
ggctcgccaccggaaaacaatcgga

SEQ ID NO: 3492228 - DNA, 25 bp, Homo sapien
aacaatagcagatgggaagtggagc

SEQ ID NO: 3492229 - DNA, 25 bp, Homo sapien
tggagaggagtaagcactttggtac

SEQ ID NO: 3492230 - DNA, 25 bp, Homo sapien
tcctcgctgcttccgccgggaaggt

SEQ ID NO: 3492231 - DNA, 25 bp, Homo sapien
tcagacacggcactttggagaggag

SEQ ID NO: 3492232 - DNA, 25 bp, Homo sapien
gcctcggcttttgccagcctcggaa

SEQ ID NO: 3492233 - DNA, 25 bp, Homo sapien
acgaggcacttccagggcaggaaca

SEQ ID NO: 3492234 - DNA, 25 bp, Homo sapien
agacacgaccacgaggcacttccag

SEQ ID NO: 3492235 - DNA, 25 bp, Homo sapien
acgaccacgaggcacttccagggca

SEQ ID NO: 3492236 - DNA, 25 bp, Homo sapien
ctgagagacacgaccacgaggcact

SEQ ID NO: 3492237 - DNA, 25 bp, Homo sapien
ggaaggtggcatctccgctgcgcac

SEQ ID NO: 3492238 - DNA, 25 bp, Homo sapien
ctgccggaccgtcacgttgtccata

SEQ ID NO: 3492239 - DNA, 25 bp, Homo sapien
aaggtggcatctccgctgcgcacgg

SEQ ID NO: 3492240 - DNA, 25 bp, Homo sapien
ccgtcacgttgtccatagctttggg

SEQ ID NO: 3492241 - DNA, 25 bp, Homo sapien
ggcaccccaggaaagcccgggcaca

SEQ ID NO: 3492242 - DNA, 25 bp, Homo sapien
caccccaggaaagcccgggcacagt

SEQ ID NO: 3492243 - DNA, 25 bp, Homo sapien
aggcccaggacaaagcagcggctct

SEQ ID NO: 3492244 - DNA, 25 bp, Homo sapien
gcggctctcccagagtgcaggagcc

SEQ ID NO: 3492245 - DNA, 25 bp, Homo sapien
gggagcagcacaggcctcctgagta

SEQ ID NO: 3492246 - DNA, 25 bp, Homo sapien
gcagtgggagcagcacaggcctcct

SEQ ID NO: 3492247 - DNA, 25 bp, Homo sapien
agtgggagcagcacaggcctcctga

SEQ ID NO: 3492248 - DNA, 25 bp, Homo sapien
tgggagcagcacaggcctcctgagt

SEQ ID NO: 3492249 - DNA, 25 bp, Homo sapien
acaggacaccagccggatgcctggc

SEQ ID NO: 3492250 - DNA, 25 bp, Homo sapien
acaccagccggatgcctggcaagcc

SEQ ID NO: 3492251 - DNA, 25 bp, Homo sapien
accagccggatgcctggcaagccca

SEQ ID NO: 3492252 - DNA, 25 bp, Homo sapien
ggacaccagccggatgcctggcaag

SEQ ID NO: 3492253 - DNA, 25 bp, Homo sapien
tatagcatgtcttgagttaagtcca

SEQ ID NO: 3492254 - DNA, 25 bp, Homo sapien
tcttgagttaagtccattatggata

SEQ ID NO: 3492255 - DNA, 25 bp, Homo sapien
attatggatatgtgctcatttgcct

SEQ ID NO: 3492256 - DNA, 25 bp, Homo sapien
tatgtgctcatttgcctcaaggtaa

SEQ ID NO: 3492257 - DNA, 25 bp, Homo sapien
gcgccgctgtctcctatgtctaaag

SEQ ID NO: 3492258 - DNA, 25 bp, Homo sapien
gagctactggatatcaatggcgggc

SEQ ID NO: 3492259 - DNA, 25 bp, Homo sapien
caaatatagttcatcaagagctcac

SEQ ID NO: 3492260 - DNA, 25 bp, Homo sapien
cagtgtcacataggttgtcttcaaa

SEQ ID NO: 3492261 - DNA, 25 bp, Homo sapien
catggacgcctctgctatgttgcca

SEQ ID NO: 3492262 - DNA, 25 bp, Homo sapien
cggacacactgattttaggacaagc

SEQ ID NO: 3492263 - DNA, 25 bp, Homo sapien
aaagaagcccttgagataccatgag

SEQ ID NO: 3492264 - DNA, 25 bp, Homo sapien
gacaagcaatcactcctcctagaag

SEQ ID NO: 3492265 - DNA, 25 bp, Homo sapien
caggacatttttcgtgactcaggag

SEQ ID NO: 3492266 - DNA, 25 bp, Homo sapien
ccccaagggtgccagagacaatgat

SEQ ID NO: 3492267 - DNA, 25 bp, Homo sapien
tagggccagtactcaaggtggaccc

SEQ ID NO: 3492268 - DNA, 25 bp, Homo sapien
gtcactgttctaggtatagggccag

SEQ ID NO: 3492269 - DNA, 25 bp, Homo sapien
cctgtgcctcccagtttcaagcatt

SEQ ID NO: 3492270 - DNA, 25 bp, Homo sapien
acctgtgcctcccagtttcaagcat

SEQ ID NO: 3492271 - DNA, 25 bp, Homo sapien
ctgtgcctcccagtttcaagcattt

SEQ ID NO: 3492272 - DNA, 25 bp, Homo sapien
tataccgcaaatgaagagccccact

SEQ ID NO: 3492273 - DNA, 25 bp, Homo sapien
caccgctggctatgaaactagggaa

SEQ ID NO: 3492274 - DNA, 25 bp, Homo sapien
gatgcatgcagatgggcactcttgc

SEQ ID NO: 3492275 - DNA, 25 bp, Homo sapien
cactgacaaatggtaagagacgaca

SEQ ID NO: 3492276 - DNA, 25 bp, Homo sapien
gagtaaattagtcaatgagctggca

SEQ ID NO: 3492277 - DNA, 25 bp, Homo sapien
gagctggcaagaccttaagaccaaa

SEQ ID NO: 3492278 - DNA, 25 bp, Homo sapien
tgaagacagttaaaacatacagagc

SEQ ID NO: 3492279 - DNA, 25 bp, Homo sapien
tacgtaagcctttaaccatgtcaca

SEQ ID NO: 3492280 - DNA, 25 bp, Homo sapien
agccatttgatcctgaaagtttttc

SEQ ID NO: 3492281 - DNA, 25 bp, Homo sapien
aatcttgccttgattaaattggctt

SEQ ID NO: 3492282 - DNA, 25 bp, Homo sapien
tccactgggattctttaggtaaatg

SEQ ID NO: 3492283 - DNA, 25 bp, Homo sapien
taaatgaaaatcataagccatttga

SEQ ID NO: 3492284 - DNA, 25 bp, Homo sapien
agtagggcgtactccacaatgacca

SEQ ID NO: 3492285 - DNA, 25 bp, Homo sapien
caagtagggcgtactccacaatgac

SEQ ID NO: 3492286 - DNA, 25 bp, Homo sapien
cccaagtagggcgtactccacaatg

SEQ ID NO: 3492287 - DNA, 25 bp, Homo sapien
agggcgtactccacaatgaccactt

SEQ ID NO: 3492288 - DNA, 25 bp, Homo sapien
atagtctaggtttcctaagagatgt

SEQ ID NO: 3492289 - DNA, 25 bp, Homo sapien
ggacctgtcatggttgatgtttcaa

SEQ ID NO: 3492290 - DNA, 25 bp, Homo sapien
tctttagcggccaaaggacctgtca

SEQ ID NO: 3492291 - DNA, 25 bp, Homo sapien
aactgtttccaataggccagatggg

SEQ ID NO: 3492292 - DNA, 25 bp, Homo sapien
gagaatagcctagaaaagtgttgtg

SEQ ID NO: 3492293 - DNA, 25 bp, Homo sapien
tgtaatgagattaaaggcaggagtg

SEQ ID NO: 3492294 - DNA, 25 bp, Homo sapien
gcaggagtggatttaaagcaattca

SEQ ID NO: 3492295 - DNA, 25 bp, Homo sapien
catttgcacagggatcaggctataa

SEQ ID NO: 3492296 - DNA, 25 bp, Homo sapien
cattagccaaatgggatgaggcttc

SEQ ID NO: 3492297 - DNA, 25 bp, Homo sapien
ggagttgtcaagatgcattagccaa

SEQ ID NO: 3492298 - DNA, 25 bp, Homo sapien
gagaagcatgcctaatcagatgagg

SEQ ID NO: 3492299 - DNA, 25 bp, Homo sapien
tacacatccttgaatgcgaacacca

SEQ ID NO: 3492300 - DNA, 25 bp, Homo sapien
actgtcagaaagcctcagagctgcc

SEQ ID NO: 3492301 - DNA, 25 bp, Homo sapien
ggactgtcagaaagcctcagagctg

SEQ ID NO: 3492302 - DNA, 25 bp, Homo sapien
aattagggctccaaagacgtccctg

SEQ ID NO: 3492303 - DNA, 25 bp, Homo sapien
cacagtgtcagtgccagaaacgaca

SEQ ID NO: 3492304 - DNA, 25 bp, Homo sapien
aaaacagagtgcacgaaagcagtgc

SEQ ID NO: 3492305 - DNA, 25 bp, Homo sapien
aagtgtggcgtgcaaaacagagtgc

SEQ ID NO: 3492306 - DNA, 25 bp, Homo sapien
ccatcttccaagtgtggcgtgcaaa

SEQ ID NO: 3492307 - DNA, 25 bp, Homo sapien
taatgccatcttccaagtgtggcgt

SEQ ID NO: 3492308 - DNA, 25 bp, Homo sapien
gagtaactcactcgaggtcatacag

SEQ ID NO: 3492309 - DNA, 25 bp, Homo sapien
tcctcggacagatttccagagatgg

SEQ ID NO: 3492310 - DNA, 25 bp, Homo sapien
cctatgcagaacgagaatagcagta

SEQ ID NO: 3492311 - DNA, 25 bp, Homo sapien
aacaacactgctccagatcctcgga

SEQ ID NO: 3492312 - DNA, 25 bp, Homo sapien
tagcaatacgagaaagagaagctca

SEQ ID NO: 3492313 - DNA, 25 bp, Homo sapien
cctggctgggtaactattagcttgc

SEQ ID NO: 3492314 - DNA, 25 bp, Homo sapien
tagcttgcctttcagcaacgcatag

SEQ ID NO: 3492315 - DNA, 25 bp, Homo sapien
ctgcttgaccctggctgggtaacta

SEQ ID NO: 3492316 - DNA, 25 bp, Homo sapien
gatgagcaatggaccaactagtaac

SEQ ID NO: 3492317 - DNA, 25 bp, Homo sapien
ctagtaacatccctcagtgagctca

SEQ ID NO: 3492318 - DNA, 25 bp, Homo sapien
tgtccactgccaatttaattagttc

SEQ ID NO: 3492319 - DNA, 25 bp, Homo sapien
aattagttctcttgcctcccacctg

SEQ ID NO: 3492320 - DNA, 25 bp, Homo sapien
ccatagcacattccacgccttcccc

SEQ ID NO: 3492321 - DNA, 25 bp, Homo sapien
tgccccatagcacattccacgcctt

SEQ ID NO: 3492322 - DNA, 25 bp, Homo sapien
gccccatagcacattccacgccttc

SEQ ID NO: 3492323 - DNA, 25 bp, Homo sapien
ccccatagcacattccacgccttcc

SEQ ID NO: 3492324 - DNA, 25 bp, Homo sapien
cacctggcccgtgaatcccatgtgt

SEQ ID NO: 3492325 - DNA, 25 bp, Homo sapien
gtccgacaagctcctctctacaaag

SEQ ID NO: 3492326 - DNA, 25 bp, Homo sapien
tcatcttcctttgtggaggccagac

SEQ ID NO: 3492327 - DNA, 25 bp, Homo sapien
ggatccaggttgttgggctgctgaa

SEQ ID NO: 3492328 - DNA, 25 bp, Homo sapien
ttgtgcaaatgctcaaacccagtga

SEQ ID NO: 3492329 - DNA, 25 bp, Homo sapien
agttttggtactaagataagccctg

SEQ ID NO: 3492330 - DNA, 25 bp, Homo sapien
tacacaggctgtaagctcactttca

SEQ ID NO: 3492331 - DNA, 25 bp, Homo sapien
cagttgcttactcaatgggagggcc

SEQ ID NO: 3492332 - DNA, 25 bp, Homo sapien
aagaggtagccgccagtccctgcag

SEQ ID NO: 3492333 - DNA, 25 bp, Homo sapien
agaggtagccgccagtccctgcaga

SEQ ID NO: 3492334 - DNA, 25 bp, Homo sapien
gaagaggtagccgccagtccctgca

SEQ ID NO: 3492335 - DNA, 25 bp, Homo sapien
gatgtgccaattggtatcagtctgt

SEQ ID NO: 3492336 - DNA, 25 bp, Homo sapien
tggaccccaaagatggtagaagggc

SEQ ID NO: 3492337 - DNA, 25 bp, Homo sapien
tagaagggcctgattccaatctggc

SEQ ID NO: 3492338 - DNA, 25 bp, Homo sapien
caatctggcagggacgatgtgccaa

SEQ ID NO: 3492339 - DNA, 25 bp, Homo sapien
taaagagctagggtatttttgtatc

SEQ ID NO: 3492340 - DNA, 25 bp, Homo sapien
agaaaatgtggcgtcccggagccga

SEQ ID NO: 3492341 - DNA, 25 bp, Homo sapien
gggctaactcgtgtaggtcttgaca

SEQ ID NO: 3492342 - DNA, 25 bp, Homo sapien
ggtacagtacacaatgctgtgcaca

SEQ ID NO: 3492343 - DNA, 25 bp, Homo sapien
cccactgcccggtttatggatggca

SEQ ID NO: 3492344 - DNA, 25 bp, Homo sapien
cccatggtgtctaggtgattagatc

SEQ ID NO: 3492345 - DNA, 25 bp, Homo sapien
taataggcagtttaggtgctcccct

SEQ ID NO: 3492346 - DNA, 25 bp, Homo sapien
gattagatctgtctgcagaatacag

SEQ ID NO: 3492347 - DNA, 25 bp, Homo sapien
tgtttctgctttgtgcaattggcac

SEQ ID NO: 3492348 - DNA, 25 bp, Homo sapien
gtatttctgcactcgttcacacacc

SEQ ID NO: 3492349 - DNA, 25 bp, Homo sapien
cagcgttcttgtgtgacaatttcaa

SEQ ID NO: 3492350 - DNA, 25 bp, Homo sapien
tatctccctgctattgttcacagcg

SEQ ID NO: 3492351 - DNA, 25 bp, Homo sapien
ggatcctctggctcggagctgtttg

SEQ ID NO: 3492352 - DNA, 25 bp, Homo sapien
tactgaggatagtgccagagactct

SEQ ID NO: 3492353 - DNA, 25 bp, Homo sapien
gagttctgatacatcggctgattgg

SEQ ID NO: 3492354 - DNA, 25 bp, Homo sapien
gcctaagctactgggtcaagttacc

SEQ ID NO: 3492355 - DNA, 25 bp, Homo sapien
tacttctaggtaggcatgaaaaacc

SEQ ID NO: 3492356 - DNA, 25 bp, Homo sapien
ctgcgatcacctcagcttgcttgtt

SEQ ID NO: 3492357 - DNA, 25 bp, Homo sapien
cgatcacctcagcttgcttgttcat

SEQ ID NO: 3492358 - DNA, 25 bp, Homo sapien
tgcgatcacctcagcttgcttgttc

SEQ ID NO: 3492359 - DNA, 25 bp, Homo sapien
gcgatcacctcagcttgcttgttca

SEQ ID NO: 3492360 - DNA, 25 bp, Homo sapien
ctcgatgggggcctcatcatttgca

SEQ ID NO: 3492361 - DNA, 25 bp, Homo sapien
gatgggggcctcatcatttgcacag

SEQ ID NO: 3492362 - DNA, 25 bp, Homo sapien
gggggcctcatcatttgcacagcca

SEQ ID NO: 3492363 - DNA, 25 bp, Homo sapien
ggcctcatcatttgcacagccactg

SEQ ID NO: 3492364 - DNA, 25 bp, Homo sapien
tggggcctgttgtcattccagagcc

SEQ ID NO: 3492365 - DNA, 25 bp, Homo sapien
ctggggcctgttgtcattccagagc

SEQ ID NO: 3492366 - DNA, 25 bp, Homo sapien
ctatcctgtagagcccacagaagcc

SEQ ID NO: 3492367 - DNA, 25 bp, Homo sapien
tctctctagtggactgtgaggaggc

SEQ ID NO: 3492368 - DNA, 25 bp, Homo sapien
gcctctcctctctctagtggactgt

SEQ ID NO: 3492369 - DNA, 25 bp, Homo sapien
tgtccctatcctgtagagcccacag

SEQ ID NO: 3492370 - DNA, 25 bp, Homo sapien
gcacagtaggtgagtggactggcat

SEQ ID NO: 3492371 - DNA, 25 bp, Homo sapien
ctaggtgagagtgaggcacagtagg

SEQ ID NO: 3492372 - DNA, 25 bp, Homo sapien
tgagtggactggcatcctccaagga

SEQ ID NO: 3492373 - DNA, 25 bp, Homo sapien
tgagagtgaggcacagtaggtgagt

SEQ ID NO: 3492374 - DNA, 25 bp, Homo sapien
ctttggtggtaacacagtgcccaca

SEQ ID NO: 3492375 - DNA, 25 bp, Homo sapien
taacacagtgcccacatgactgcct

SEQ ID NO: 3492376 - DNA, 25 bp, Homo sapien
ggtggtaacacagtgcccacatgac

SEQ ID NO: 3492377 - DNA, 25 bp, Homo sapien
cacagtgcccacatgactgcctggg

SEQ ID NO: 3492378 - DNA, 25 bp, Homo sapien
gttccagctgcggttctgaacacat

SEQ ID NO: 3492379 - DNA, 25 bp, Homo sapien
tctgcggctcctgtgatgtactact

SEQ ID NO: 3492380 - DNA, 25 bp, Homo sapien
aatttccagcatggttctgcggctc

SEQ ID NO: 3492381 - DNA, 25 bp, Homo sapien
tagcactcagaacgcagccaatttc

SEQ ID NO: 3492382 - DNA, 25 bp, Homo sapien
tccttgcagaccccatgactgccat

SEQ ID NO: 3492383 - DNA, 25 bp, Homo sapien
cttgcagaccccatgactgccatct

SEQ ID NO: 3492384 - DNA, 25 bp, Homo sapien
agaccccatgactgccatctggtac

SEQ ID NO: 3492385 - DNA, 25 bp, Homo sapien
ccttgcagaccccatgactgccatc

SEQ ID NO: 3492386 - DNA, 25 bp, Homo sapien
ggaagaccagacaggtacgtcaagg

SEQ ID NO: 3492387 - DNA, 25 bp, Homo sapien
agggaagaccagacaggtacgtcaa

SEQ ID NO: 3492388 - DNA, 25 bp, Homo sapien
gaagaccagacaggtacgtcaaggg

SEQ ID NO: 3492389 - DNA, 25 bp, Homo sapien
aagaccagacaggtacgtcaaggga

SEQ ID NO: 3492390 - DNA, 25 bp, Homo sapien
ctgtactgcgtttgggtgttgctca

SEQ ID NO: 3492391 - DNA, 25 bp, Homo sapien
gttgctcagaaggaccacgcgagga

SEQ ID NO: 3492392 - DNA, 25 bp, Homo sapien
gtaagggccctcgtcatacacatcc

SEQ ID NO: 3492393 - DNA, 25 bp, Homo sapien
cgggtgacccggttgtcaatagtgc

SEQ ID NO: 3492394 - DNA, 25 bp, Homo sapien
gaaatggcatccaaaacccctggct

SEQ ID NO: 3492395 - DNA, 25 bp, Homo sapien
ggcagtgcccagtgcatcctggttg

SEQ ID NO: 3492396 - DNA, 25 bp, Homo sapien
tctgctttcgttcaaggctggaggg

SEQ ID NO: 3492397 - DNA, 25 bp, Homo sapien
cctggaccccagatgcgtagaataa

SEQ ID NO: 3492398 - DNA, 25 bp, Homo sapien
cctcatgaactaggagtcaggggag

SEQ ID NO: 3492399 - DNA, 25 bp, Homo sapien
gcctcatgaactaggagtcagggga

SEQ ID NO: 3492400 - DNA, 25 bp, Homo sapien
acaaacatacaaggcctcatgaact

SEQ ID NO: 3492401 - DNA, 25 bp, Homo sapien
cacacaaacatacaaggcctcatga

SEQ ID NO: 3492402 - DNA, 25 bp, Homo sapien
taagtgttgtctgaatgccccagga

SEQ ID NO: 3492403 - DNA, 25 bp, Homo sapien
ccagaaagtggccaagtgtgatgcc

SEQ ID NO: 3492404 - DNA, 25 bp, Homo sapien
gaaagagaaccctgagacacggtaa

SEQ ID NO: 3492405 - DNA, 25 bp, Homo sapien
gaggtgagctccattcccagggtct

SEQ ID NO: 3492406 - DNA, 25 bp, Homo sapien
tcaacagtgctgatcacgacccaag

SEQ ID NO: 3492407 - DNA, 25 bp, Homo sapien
gttgaaagggcctcgggatcagcct

SEQ ID NO: 3492408 - DNA, 25 bp, Homo sapien
tggagctacacgtccctggttgaaa

SEQ ID NO: 3492409 - DNA, 25 bp, Homo sapien
gaggagtttgtcaccctggagctac

SEQ ID NO: 3492410 - DNA, 25 bp, Homo sapien
tcagtccaggcatatcgacagcgga

SEQ ID NO: 3492411 - DNA, 25 bp, Homo sapien
ggcacctagctaagtcacagatgta

SEQ ID NO: 3492412 - DNA, 25 bp, Homo sapien
tgtgtcatgcgagagggcacctagc

SEQ ID NO: 3492413 - DNA, 25 bp, Homo sapien
ttggagcccatataagatcacctgg

SEQ ID NO: 3492414 - DNA, 25 bp, Homo sapien
gccttggcctcacggctgtctgcaa

SEQ ID NO: 3492415 - DNA, 25 bp, Homo sapien
caggatgccctttgctcctagcttg

SEQ ID NO: 3492416 - DNA, 25 bp, Homo sapien
gagacttgctccatgtggtcgcctt

SEQ ID NO: 3492417 - DNA, 25 bp, Homo sapien
accatattggatcagaaccacaggg

SEQ ID NO: 3492418 - DNA, 25 bp, Homo sapien
tgagcttcggagctgtttgactcca

SEQ ID NO: 3492419 - DNA, 25 bp, Homo sapien
ctgagcttcggagctgtttgactcc

SEQ ID NO: 3492420 - DNA, 25 bp, Homo sapien
gagcttcggagctgtttgactccaa

SEQ ID NO: 3492421 - DNA, 25 bp, Homo sapien
agcttcggagctgtttgactccaaa

SEQ ID NO: 3492422 - DNA, 25 bp, Homo sapien
gatgttttcctctaccattgactcg

SEQ ID NO: 3492423 - DNA, 25 bp, Homo sapien
acttcagtctatttcgaattggatc

SEQ ID NO: 3492424 - DNA, 25 bp, Homo sapien
ggagccttgtcctgccagaagggca

SEQ ID NO: 3492425 - DNA, 25 bp, Homo sapien
cattgactcgcttgaatgggaagtg

SEQ ID NO: 3492426 - DNA, 25 bp, Homo sapien
ccataagggtcatctaaactttctg

SEQ ID NO: 3492427 - DNA, 25 bp, Homo sapien
ctctatgagtgggtgtgaaaggcta

SEQ ID NO: 3492428 - DNA, 25 bp, Homo sapien
cactcttctgcaaaagacgccaagt

SEQ ID NO: 3492429 - DNA, 25 bp, Homo sapien
gacttctgtaagtgcttgctgtaaa

SEQ ID NO: 3492430 - DNA, 25 bp, Homo sapien
agctccatacatgttgacttgcatt

SEQ ID NO: 3492431 - DNA, 25 bp, Homo sapien
ccatacatgttgacttgcatttctt

SEQ ID NO: 3492432 - DNA, 25 bp, Homo sapien
gctccatacatgttgacttgcattt

SEQ ID NO: 3492433 - DNA, 25 bp, Homo sapien
tccatacatgttgacttgcatttct

SEQ ID NO: 3492434 - DNA, 25 bp, Homo sapien
taacactagatttctggagatgcag

SEQ ID NO: 3492435 - DNA, 25 bp, Homo sapien
ctatcccggctcagtcagcacttgg

SEQ ID NO: 3492436 - DNA, 25 bp, Homo sapien
cagcacttggctcacagcatctgaa

SEQ ID NO: 3492437 - DNA, 25 bp, Homo sapien
gaggctctgctaggtcctggaataa

SEQ ID NO: 3492438 - DNA, 25 bp, Homo sapien
tgagatctgtcaattggtaataatg

SEQ ID NO: 3492439 - DNA, 25 bp, Homo sapien
ggttttgactatgtggacattatca

SEQ ID NO: 3492440 - DNA, 25 bp, Homo sapien
catcgttggttttgactatgtggac

SEQ ID NO: 3492441 - DNA, 25 bp, Homo sapien
tatcaaacatctctgtatgagatct

SEQ ID NO: 3492442 - DNA, 25 bp, Homo sapien
ggatatgtccagaaaatgagtgagg

SEQ ID NO: 3492443 - DNA, 25 bp, Homo sapien
ttaaagagaaggcttgtaggttctg

SEQ ID NO: 3492444 - DNA, 25 bp, Homo sapien
agacatctccttggcaatggatatg

SEQ ID NO: 3492445 - DNA, 25 bp, Homo sapien
gaaggcttgtaggttctgaacacat

SEQ ID NO: 3492446 - DNA, 25 bp, Homo sapien
caaaagcgatcgaaacaaagggcag

SEQ ID NO: 3492447 - DNA, 25 bp, Homo sapien
cagaatgctcccgacacaaatgcaa

SEQ ID NO: 3492448 - DNA, 25 bp, Homo sapien
gaatgctcccgacacaaatgcaatt

SEQ ID NO: 3492449 - DNA, 25 bp, Homo sapien
aatcacacatggcaaaagcgatcga

SEQ ID NO: 3492450 - DNA, 25 bp, Homo sapien
catgaagccgtagcataggttcaca

SEQ ID NO: 3492451 - DNA, 25 bp, Homo sapien
ggttcacaatgacatggtacgttca

SEQ ID NO: 3492452 - DNA, 25 bp, Homo sapien
tttctgaattggcacctctgacgcc

SEQ ID NO: 3492453 - DNA, 25 bp, Homo sapien
tggcacctctgacgccatgaagccg

SEQ ID NO: 3492454 - DNA, 25 bp, Homo sapien
gcgtttgaggaaatcatccggatcc

SEQ ID NO: 3492455 - DNA, 25 bp, Homo sapien
ggaaatcatccggatccccacaggg

SEQ ID NO: 3492456 - DNA, 25 bp, Homo sapien
tttgaggaaatcatccggatcccca

SEQ ID NO: 3492457 - DNA, 25 bp, Homo sapien
ctagcgtttgaggaaatcatccgga

SEQ ID NO: 3492458 - DNA, 25 bp, Homo sapien
tgggctagcttatctttaggaggct

SEQ ID NO: 3492459 - DNA, 25 bp, Homo sapien
cgtagacatgttagtcagagggaca

SEQ ID NO: 3492460 - DNA, 25 bp, Homo sapien
cttgctctgaacctcacttgttagg

SEQ ID NO: 3492461 - DNA, 25 bp, Homo sapien
caatccatgttcactttcaaagcag

SEQ ID NO: 3492462 - DNA, 25 bp, Homo sapien
tgctaaggttaagaaccttcaggcc

SEQ ID NO: 3492463 - DNA, 25 bp, Homo sapien
ggccctttctatctcttaaagatgc

SEQ ID NO: 3492464 - DNA, 25 bp, Homo sapien
cacacccggccctttctatctctta

SEQ ID NO: 3492465 - DNA, 25 bp, Homo sapien
aagatgctaaggttaagaaccttca

SEQ ID NO: 3492466 - DNA, 25 bp, Homo sapien
taggaactcttgtgaagtaggcctg

SEQ ID NO: 3492467 - DNA, 25 bp, Homo sapien
tgtcagtgggctacatacttaagca

SEQ ID NO: 3492468 - DNA, 25 bp, Homo sapien
gagatatatctctcaacggcagcag

SEQ ID NO: 3492469 - DNA, 25 bp, Homo sapien
taaattcaaccggtcaagtgtcatg

SEQ ID NO: 3492470 - DNA, 25 bp, Homo sapien
ttctgagctgtcaatctgctggctg

SEQ ID NO: 3492471 - DNA, 25 bp, Homo sapien
ggtggtcgccgctctcggctctcag

SEQ ID NO: 3492472 - DNA, 25 bp, Homo sapien
tggctgccaacagcgccaagctcac

SEQ ID NO: 3492473 - DNA, 25 bp, Homo sapien
tgtccccaggtggtcgccgctctcg

SEQ ID NO: 3492474 - DNA, 25 bp, Homo sapien
ctctgctgactcccttgttctccat

SEQ ID NO: 3492475 - DNA, 25 bp, Homo sapien
ctttccatggccatccccagtgatc

SEQ ID NO: 3492476 - DNA, 25 bp, Homo sapien
ccatggccatccccagtgatcccac

SEQ ID NO: 3492477 - DNA, 25 bp, Homo sapien
tttccatggccatccccagtgatcc

SEQ ID NO: 3492478 - DNA, 25 bp, Homo sapien
ttccatggccatccccagtgatccc

SEQ ID NO: 3492479 - DNA, 25 bp, Homo sapien
cagggagtccgaatgggaataaatt

SEQ ID NO: 3492480 - DNA, 25 bp, Homo sapien
ttcctcctatttaaacacaaagtca

SEQ ID NO: 3492481 - DNA, 25 bp, Homo sapien
cctcctatttaaacacaaagtcagg

SEQ ID NO: 3492482 - DNA, 25 bp, Homo sapien
aaagtcagggagtccgaatgggaat

SEQ ID NO: 3492483 - DNA, 25 bp, Homo sapien
tctggtctaccagttgctatgcagg

SEQ ID NO: 3492484 - DNA, 25 bp, Homo sapien
ctttgggagagatgtgtctccaagt

SEQ ID NO: 3492485 - DNA, 25 bp, Homo sapien
tgcaggtgaggctaatattgttccc

SEQ ID NO: 3492486 - DNA, 25 bp, Homo sapien
tgtctccaagtaaccgtaggctctg

SEQ ID NO: 3492487 - DNA, 25 bp, Homo sapien
ttattgccagggtgcatacaggcat

SEQ ID NO: 3492488 - DNA, 25 bp, Homo sapien
cttattgccagggtgcatacaggca

SEQ ID NO: 3492489 - DNA, 25 bp, Homo sapien
agcacacggaggaacgtgaccgctc

SEQ ID NO: 3492490 - DNA, 25 bp, Homo sapien
tcagcacacggaggaacgtgaccgc

SEQ ID NO: 3492491 - DNA, 25 bp, Homo sapien
cacggaggaacgtgaccgctcagaa

SEQ ID NO: 3492492 - DNA, 25 bp, Homo sapien
ggaggaacgtgaccgctcagaagca

SEQ ID NO: 3492493 - DNA, 25 bp, Homo sapien
ctgcattagaaaacccatgtgggtt

SEQ ID NO: 3492494 - DNA, 25 bp, Homo sapien
tccagaattcatcccattgacaact

SEQ ID NO: 3492495 - DNA, 25 bp, Homo sapien
tagaatctgggcttcattccagaat

SEQ ID NO: 3492496 - DNA, 25 bp, Homo sapien
tcccattgacaactagggaatgtca

SEQ ID NO: 3492497 - DNA, 25 bp, Homo sapien
gggtcggaagatgattctaatggta

SEQ ID NO: 3492498 - DNA, 25 bp, Homo sapien
aggggtcggaagatgattctaatgg

SEQ ID NO: 3492499 - DNA, 25 bp, Homo sapien
ttgaggggtcggaagatgattctaa

SEQ ID NO: 3492500 - DNA, 25 bp, Homo sapien
ggtcggaagatgattctaatggtat

SEQ ID NO: 3492501 - DNA, 25 bp, Homo sapien
aatggtaatggagtcacggctcaga

SEQ ID NO: 3492502 - DNA, 25 bp, Homo sapien
taataaatgggtaatattccggtga

SEQ ID NO: 3492503 - DNA, 25 bp, Homo sapien
tgtaaaacaattggtctctgaagcc

SEQ ID NO: 3492504 - DNA, 25 bp, Homo sapien
tctctgaagcccagtattcatcttc

SEQ ID NO: 3492505 - DNA, 25 bp, Homo sapien
tactgacgacatatctcaacgtgtt

SEQ ID NO: 3492506 - DNA, 25 bp, Homo sapien
ccatttgtgatatcatgtcagtgct

SEQ ID NO: 3492507 - DNA, 25 bp, Homo sapien
tgccaaagcgcattttactgacgac

SEQ ID NO: 3492508 - DNA, 25 bp, Homo sapien
tttccccagccacaatatttctgta

SEQ ID NO: 3492509 - DNA, 25 bp, Homo sapien
ctgatccagaaacaagagggtcaat

SEQ ID NO: 3492510 - DNA, 25 bp, Homo sapien
tccagaaacaagagggtcaatgata

SEQ ID NO: 3492511 - DNA, 25 bp, Homo sapien
gatccagaaacaagagggtcaatga

SEQ ID NO: 3492512 - DNA, 25 bp, Homo sapien
ccagaaacaagagggtcaatgatag

SEQ ID NO: 3492513 - DNA, 25 bp, Homo sapien
gtaaattgaagcctttgtttgacaa

SEQ ID NO: 3492514 - DNA, 25 bp, Homo sapien
gggcatttgctgagtcaggtaaatt

SEQ ID NO: 3492515 - DNA, 25 bp, Homo sapien
catttgctgagtcaggtaaattgaa

SEQ ID NO: 3492516 - DNA, 25 bp, Homo sapien
caggtaaattgaagcctttgtttga

SEQ ID NO: 3492517 - DNA, 25 bp, Homo sapien
tggccctgccacacataaattggat

SEQ ID NO: 3492518 - DNA, 25 bp, Homo sapien
cactaggacggcaggtgagcaatct

SEQ ID NO: 3492519 - DNA, 25 bp, Homo sapien
tctattaggaaatcgaaggcccctc

SEQ ID NO: 3492520 - DNA, 25 bp, Homo sapien
ttctaattagagatgccgcatggct

SEQ ID NO: 3492521 - DNA, 25 bp, Homo sapien
gagagagattctagatacatgattc

SEQ ID NO: 3492522 - DNA, 25 bp, Homo sapien
aatatttctagcagttaaatcaggg

SEQ ID NO: 3492523 - DNA, 25 bp, Homo sapien
tactagaaagtcatatatttgtggg

SEQ ID NO: 3492524 - DNA, 25 bp, Homo sapien
gattcttacctatcatcagcctgct

SEQ ID NO: 3492525 - DNA, 25 bp, Homo sapien
ccaaggagagaggccctcccagaaa

SEQ ID NO: 3492526 - DNA, 25 bp, Homo sapien
aaggagagaggccctcccagaaatc

SEQ ID NO: 3492527 - DNA, 25 bp, Homo sapien
caaggagagaggccctcccagaaat

SEQ ID NO: 3492528 - DNA, 25 bp, Homo sapien
acagtcccagagtgacccttcctgc

SEQ ID NO: 3492529 - DNA, 25 bp, Homo sapien
cagcacacattcctaagtcacgcat

SEQ ID NO: 3492530 - DNA, 25 bp, Homo sapien
ctgtgcagcagtcgcagtgctgggc

SEQ ID NO: 3492531 - DNA, 25 bp, Homo sapien
catctgaggcgggtctccatgaggc

SEQ ID NO: 3492532 - DNA, 25 bp, Homo sapien
tacagcttcttaaggtctacttgcc

SEQ ID NO: 3492533 - DNA, 25 bp, Homo sapien
gaaacactgacactaggctctgtgc

SEQ ID NO: 3492534 - DNA, 25 bp, Homo sapien
gaatcatattctgcacgatgtggct

SEQ ID NO: 3492535 - DNA, 25 bp, Homo sapien
ttggtaagcctgcacgtgtcttggc

SEQ ID NO: 3492536 - DNA, 25 bp, Homo sapien
ataccaggccatacgataccatcat

SEQ ID NO: 3492537 - DNA, 25 bp, Homo sapien
ggccatacgataccatcatcccaaa

SEQ ID NO: 3492538 - DNA, 25 bp, Homo sapien
ccaggccatacgataccatcatccc

SEQ ID NO: 3492539 - DNA, 25 bp, Homo sapien
taccaggccatacgataccatcatc

SEQ ID NO: 3492540 - DNA, 25 bp, Homo sapien
gctgacaactcactcctttaaatga

SEQ ID NO: 3492541 - DNA, 25 bp, Homo sapien
taatgtctgccttaacaccactgtt

SEQ ID NO: 3492542 - DNA, 25 bp, Homo sapien
taatgtcataatctcctaactgccc

SEQ ID NO: 3492543 - DNA, 25 bp, Homo sapien
gtaactgtctaacaaatgtcttccc

SEQ ID NO: 3492544 - DNA, 25 bp, Homo sapien
gagtagctgtcttgtgctgcacaca

SEQ ID NO: 3492545 - DNA, 25 bp, Homo sapien
tgacagacccagaacaacacgttga

SEQ ID NO: 3492546 - DNA, 25 bp, Homo sapien
gaaaccaggttcttggacatctctg

SEQ ID NO: 3492547 - DNA, 25 bp, Homo sapien
ccaatgcgattgaaggcctttgaca

SEQ ID NO: 3492548 - DNA, 25 bp, Homo sapien
ttgctggtgcataccagaagccagg

SEQ ID NO: 3492549 - DNA, 25 bp, Homo sapien
taaaaagggattcgggcagacatgc

SEQ ID NO: 3492550 - DNA, 25 bp, Homo sapien
taaccatcagtacctcagagagtga

SEQ ID NO: 3492551 - DNA, 25 bp, Homo sapien
ggtatgttgagatcctaaccatcag

SEQ ID NO: 3492552 - DNA, 25 bp, Homo sapien
tttaaatggtagtccttggtacata

SEQ ID NO: 3492553 - DNA, 25 bp, Homo sapien
caagcatctcggagaccagtgtcac

SEQ ID NO: 3492554 - DNA, 25 bp, Homo sapien
gtgccaagcatctcggagaccagtg

SEQ ID NO: 3492555 - DNA, 25 bp, Homo sapien
acatatgtgtggcaattggtgtcat

SEQ ID NO: 3492556 - DNA, 25 bp, Homo sapien
tcccctgccagaatgctataattac

SEQ ID NO: 3492557 - DNA, 25 bp, Homo sapien
cttcccctgccagaatgctataatt

SEQ ID NO: 3492558 - DNA, 25 bp, Homo sapien
ttatttgctaccaaccacgggctta

SEQ ID NO: 3492559 - DNA, 25 bp, Homo sapien
accacgggcttacatttgtcagatc

SEQ ID NO: 3492560 - DNA, 25 bp, Homo sapien
cggtaacgtgtggtgaaatacaagg

SEQ ID NO: 3492561 - DNA, 25 bp, Homo sapien
ggtaacgtgtggtgaaatacaagga

SEQ ID NO: 3492562 - DNA, 25 bp, Homo sapien
gtaacgtgtggtgaaatacaaggaa

SEQ ID NO: 3492563 - DNA, 25 bp, Homo sapien
ccggtaacgtgtggtgaaatacaag

SEQ ID NO: 3492564 - DNA, 25 bp, Homo sapien
aggcactgcactcgtagtcccctga

SEQ ID NO: 3492565 - DNA, 25 bp, Homo sapien
gcgcggccacgtcattggaggcact

SEQ ID NO: 3492566 - DNA, 25 bp, Homo sapien
tattcgtcttcactcacaaagccaa

SEQ ID NO: 3492567 - DNA, 25 bp, Homo sapien
tcacggtgacctttactctccgtac

SEQ ID NO: 3492568 - DNA, 25 bp, Homo sapien
tgcattcatttgacgtctttaccaa

SEQ ID NO: 3492569 - DNA, 25 bp, Homo sapien
cagagcaagtgaccaagctaggcct

SEQ ID NO: 3492570 - DNA, 25 bp, Homo sapien
gctaggcctacgcacttggtttgca

SEQ ID NO: 3492571 - DNA, 25 bp, Homo sapien
gacgtctttaccaaactactcttca

SEQ ID NO: 3492572 - DNA, 25 bp, Homo sapien
cacctgtacccttggcttctgaaat

SEQ ID NO: 3492573 - DNA, 25 bp, Homo sapien
tgcagtgtccccttttgtcccacgg

SEQ ID NO: 3492574 - DNA, 25 bp, Homo sapien
gaggcttcacactgcagtgtcccct

SEQ ID NO: 3492575 - DNA, 25 bp, Homo sapien
ttgtaccactggaattctgctgagg

SEQ ID NO: 3492576 - DNA, 25 bp, Homo sapien
gatctgttggttggccagtgataat

SEQ ID NO: 3492577 - DNA, 25 bp, Homo sapien
cagatctgttggttggccagtgata

SEQ ID NO: 3492578 - DNA, 25 bp, Homo sapien
ttcagatctgttggttggccagtga

SEQ ID NO: 3492579 - DNA, 25 bp, Homo sapien
ctttcagatctgttggttggccagt

SEQ ID NO: 3492580 - DNA, 25 bp, Homo sapien
ttttcattggtcaatgcccctgttg

SEQ ID NO: 3492581 - DNA, 25 bp, Homo sapien
cgtaggtatagcattccattcctct

SEQ ID NO: 3492582 - DNA, 25 bp, Homo sapien
tcattggtcaatgcccctgttggat

SEQ ID NO: 3492583 - DNA, 25 bp, Homo sapien
atgggtggccttccgtaggtatagc

SEQ ID NO: 3492584 - DNA, 25 bp, Homo sapien
cactggccgttttgacaccattcgt

SEQ ID NO: 3492585 - DNA, 25 bp, Homo sapien
gaggattctgcgagcaagtcaggct

SEQ ID NO: 3492586 - DNA, 25 bp, Homo sapien
tttgacaccattcgtccaccatggg

SEQ ID NO: 3492587 - DNA, 25 bp, Homo sapien
caggctgattgatcccactggccgt

SEQ ID NO: 3492588 - DNA, 25 bp, Homo sapien
ggaggccacgcaagtgtagttccca

SEQ ID NO: 3492589 - DNA, 25 bp, Homo sapien
tgagaggaaaggtctgttttccact

SEQ ID NO: 3492590 - DNA, 25 bp, Homo sapien
ttgagaggaaaggtctgttttccac

SEQ ID NO: 3492591 - DNA, 25 bp, Homo sapien
cacgcaagtgtagttcccatagtca

SEQ ID NO: 3492592 - DNA, 25 bp, Homo sapien
tttccattatagaatgaaacatgaa

SEQ ID NO: 3492593 - DNA, 25 bp, Homo sapien
tcctatctcgggatcttttccatta

SEQ ID NO: 3492594 - DNA, 25 bp, Homo sapien
tccatgtccactgataccctgctaa

SEQ ID NO: 3492595 - DNA, 25 bp, Homo sapien
cacttctgagatctacttttataca

SEQ ID NO: 3492596 - DNA, 25 bp, Homo sapien
gcattagcggccctgagaagccacc

SEQ ID NO: 3492597 - DNA, 25 bp, Homo sapien
ctgacacacgatatccctcttgatt

SEQ ID NO: 3492598 - DNA, 25 bp, Homo sapien
acgatatccctcttgatttaagtgg

SEQ ID NO: 3492599 - DNA, 25 bp, Homo sapien
gatttaagtgggcattagcggccct

SEQ ID NO: 3492600 - DNA, 25 bp, Homo sapien
ctttccaaggggtcagggctgtagt

SEQ ID NO: 3492601 - DNA, 25 bp, Homo sapien
caaggggtcagggctgtagttttca

SEQ ID NO: 3492602 - DNA, 25 bp, Homo sapien
aggggtcagggctgtagttttcact

SEQ ID NO: 3492603 - DNA, 25 bp, Homo sapien
tgtgaccatatccagtctgcgcagc

SEQ ID NO: 3492604 - DNA, 25 bp, Homo sapien
tagtatatctgggaaaagcctgagc

SEQ ID NO: 3492605 - DNA, 25 bp, Homo sapien
ctccatctcaggctggtgagtggct

SEQ ID NO: 3492606 - DNA, 25 bp, Homo sapien
gtgagtggctggcactatgtgacca

SEQ ID NO: 3492607 - DNA, 25 bp, Homo sapien
tgtgtttggtctccttgctacgccc

SEQ ID NO: 3492608 - DNA, 25 bp, Homo sapien
cctgtggcagatctcaatggccctg

SEQ ID NO: 3492609 - DNA, 25 bp, Homo sapien
tacgcccctcagagttcttttgtgg

SEQ ID NO: 3492610 - DNA, 25 bp, Homo sapien
cacagagagcttgtaaagacgagtc

SEQ ID NO: 3492611 - DNA, 25 bp, Homo sapien
tggaaaacaagtgccgcttccctgc

SEQ ID NO: 3492612 - DNA, 25 bp, Homo sapien
cctccttgcagcctgacctgccagt

SEQ ID NO: 3492613 - DNA, 25 bp, Homo sapien
gcttccctgcactgaggtgttctct

SEQ ID NO: 3492614 - DNA, 25 bp, Homo sapien
gatggaaaacaagtgccgcttccct

SEQ ID NO: 3492615 - DNA, 25 bp, Homo sapien
gcttctgcttccttgggcacagagg

SEQ ID NO: 3492616 - DNA, 25 bp, Homo sapien
tgcttctgcttccttgggcacagag

SEQ ID NO: 3492617 - DNA, 25 bp, Homo sapien
acaaaacaatgtgtctgcctgctgc

SEQ ID NO: 3492618 - DNA, 25 bp, Homo sapien
ggacaaaacaatgtgtctgcctgct

SEQ ID NO: 3492619 - DNA, 25 bp, Homo sapien
gccctcctcgacgtgccgttgctca

SEQ ID NO: 3492620 - DNA, 25 bp, Homo sapien
tgccctcctcgacgtgccgttgctc

SEQ ID NO: 3492621 - DNA, 25 bp, Homo sapien
ccctcctcgacgtgccgttgctcac

SEQ ID NO: 3492622 - DNA, 25 bp, Homo sapien
tatatctgattggttgctgtcggtg

SEQ ID NO: 3492623 - DNA, 25 bp, Homo sapien
tatctgattggttgctgtcggtgtt

SEQ ID NO: 3492624 - DNA, 25 bp, Homo sapien
tctgattggttgctgtcggtgttgc

SEQ ID NO: 3492625 - DNA, 25 bp, Homo sapien
tatatatctgattggttgctgtcgg

SEQ ID NO: 3492626 - DNA, 25 bp, Homo sapien
ctggaaagatgctgcgcccggtatt

SEQ ID NO: 3492627 - DNA, 25 bp, Homo sapien
taaagcaagtgggtactgacggtac

SEQ ID NO: 3492628 - DNA, 25 bp, Homo sapien
gaccctgcggagaaataaaatggct

SEQ ID NO: 3492629 - DNA, 25 bp, Homo sapien
caccaaagaggttgcacgatgcagc

SEQ ID NO: 3492630 - DNA, 25 bp, Homo sapien
agattcctgaggcttggccaggtag

SEQ ID NO: 3492631 - DNA, 25 bp, Homo sapien
tggttcctggacataggcagggata

SEQ ID NO: 3492632 - DNA, 25 bp, Homo sapien
gaccttgctgctgcgaaaaacttgg

SEQ ID NO: 3492633 - DNA, 25 bp, Homo sapien
gggataaacaccagtgcagccaaga

SEQ ID NO: 3492634 - DNA, 25 bp, Homo sapien
ggtctgtgacttgttcctataagct

SEQ ID NO: 3492635 - DNA, 25 bp, Homo sapien
aaaggtaggtctgtgacttgttcct

SEQ ID NO: 3492636 - DNA, 25 bp, Homo sapien
ccatttccagaaaaggtaggtctgt

SEQ ID NO: 3492637 - DNA, 25 bp, Homo sapien
ccagaaaaggtaggtctgtgacttg

SEQ ID NO: 3492638 - DNA, 25 bp, Homo sapien
ggggtccagtatacttggaatccag

SEQ ID NO: 3492639 - DNA, 25 bp, Homo sapien
aatctgtagcaattgtcctccatca

SEQ ID NO: 3492640 - DNA, 25 bp, Homo sapien
caaggggtccagtatacttggaatc

SEQ ID NO: 3492641 - DNA, 25 bp, Homo sapien
caggccaatctgtagcaattgtcct

SEQ ID NO: 3492642 - DNA, 25 bp, Homo sapien
tgctccaaccccacgctttgccctc

SEQ ID NO: 3492643 - DNA, 25 bp, Homo sapien
ctgctccaaccccacgctttgccct

SEQ ID NO: 3492644 - DNA, 25 bp, Homo sapien
acgggggtatgtcccagtgaggaca

SEQ ID NO: 3492645 - DNA, 25 bp, Homo sapien
caggtgagtttttgtaggaatggcc

SEQ ID NO: 3492646 - DNA, 25 bp, Homo sapien
aatttgacgggggtatgtcccagtg

SEQ ID NO: 3492647 - DNA, 25 bp, Homo sapien
ccttggacaatttgacgggggtatg

SEQ ID NO: 3492648 - DNA, 25 bp, Homo sapien
tcactccagtgctttcaatgcctcg

SEQ ID NO: 3492649 - DNA, 25 bp, Homo sapien
cttcactccagtgctttcaatgcct

SEQ ID NO: 3492650 - DNA, 25 bp, Homo sapien
ttcactccagtgctttcaatgcctc

SEQ ID NO: 3492651 - DNA, 25 bp, Homo sapien
tgttgtgggaaagctgctgcatccc

SEQ ID NO: 3492652 - DNA, 25 bp, Homo sapien
tgtaactcacatctctaaggccaaa

SEQ ID NO: 3492653 - DNA, 25 bp, Homo sapien
tatcaggccgtgagctccttcttgt

SEQ ID NO: 3492654 - DNA, 25 bp, Homo sapien
tctcatctgggaaccgaggtagcca

SEQ ID NO: 3492655 - DNA, 25 bp, Homo sapien
gcagggccctgagtgatgatggcgg

SEQ ID NO: 3492656 - DNA, 25 bp, Homo sapien
cgccttttccttgaagacccttgtg

SEQ ID NO: 3492657 - DNA, 25 bp, Homo sapien
atgatggcggggagggaccgccttt

SEQ ID NO: 3492658 - DNA, 25 bp, Homo sapien
tttccttgaagacccttgtgagtta

SEQ ID NO: 3492659 - DNA, 25 bp, Homo sapien
acagtgagcactggaggatggtttt

SEQ ID NO: 3492660 - DNA, 25 bp, Homo sapien
gagaccatcgttgagaaacagtgag

SEQ ID NO: 3492661 - DNA, 25 bp, Homo sapien
ttcagacttgcctccgcagagacca

SEQ ID NO: 3492662 - DNA, 25 bp, Homo sapien
cttagcagacttgcttatgcttgga

SEQ ID NO: 3492663 - DNA, 25 bp, Homo sapien
tctagtccctgtgagtttgtctatc

SEQ ID NO: 3492664 - DNA, 25 bp, Homo sapien
agtccctgtgagtttgtctatcgtg

SEQ ID NO: 3492665 - DNA, 25 bp, Homo sapien
gctgtgtctagtccctgtgagtttg

SEQ ID NO: 3492666 - DNA, 25 bp, Homo sapien
tggatatggctgtgtctagtccctg

SEQ ID NO: 3492667 - DNA, 25 bp, Homo sapien
ttgctgaatagaccccaagactagg

SEQ ID NO: 3492668 - DNA, 25 bp, Homo sapien
aacacccgggtcatttgcatgtcag

SEQ ID NO: 3492669 - DNA, 25 bp, Homo sapien
tgagttctccaaccagctggcttgt

SEQ ID NO: 3492670 - DNA, 25 bp, Homo sapien
tgtgatgtaggatgaaacacccggg

SEQ ID NO: 3492671 - DNA, 25 bp, Homo sapien
tcttccgcagggataaaacgctgga

SEQ ID NO: 3492672 - DNA, 25 bp, Homo sapien
gagtgctagttgaggccaaacccta

SEQ ID NO: 3492673 - DNA, 25 bp, Homo sapien
ggagggacctcaactggcaactgac

SEQ ID NO: 3492674 - DNA, 25 bp, Homo sapien
cccctacagggaatggaacacagat

SEQ ID NO: 3492675 - DNA, 25 bp, Homo sapien
gatggttgtgattgtgcagtgtacc

SEQ ID NO: 3492676 - DNA, 25 bp, Homo sapien
caagggtgaatatactacctgaatt

SEQ ID NO: 3492677 - DNA, 25 bp, Homo sapien
gaattttgtgcatgttacattgtag

SEQ ID NO: 3492678 - DNA, 25 bp, Homo sapien
tcaggatgaatacgagatggttgtg

SEQ ID NO: 3492679 - DNA, 25 bp, Homo sapien
gcctggagcagtcattgatggtgta

SEQ ID NO: 3492680 - DNA, 25 bp, Homo sapien
ttgataagaaatcctaggtcctctg

SEQ ID NO: 3492681 - DNA, 25 bp, Homo sapien
gatggtgtaaactcggcctccagag

SEQ ID NO: 3492682 - DNA, 25 bp, Homo sapien
gggaccctcttagcccacttcttca

SEQ ID NO: 3492683 - DNA, 25 bp, Homo sapien
cagcctcagggaaggcagccagcat

SEQ ID NO: 3492684 - DNA, 25 bp, Homo sapien
tcagcctcagggaaggcagccagca

SEQ ID NO: 3492685 - DNA, 25 bp, Homo sapien
tgtcagcctcagggaaggcagccag

SEQ ID NO: 3492686 - DNA, 25 bp, Homo sapien
gtcagcctcagggaaggcagccagc

SEQ ID NO: 3492687 - DNA, 25 bp, Homo sapien
tcagtaggctaggagtatgtcggcc

SEQ ID NO: 3492688 - DNA, 25 bp, Homo sapien
aaagtacactgtcgaccgggtatgg

SEQ ID NO: 3492689 - DNA, 25 bp, Homo sapien
taagatgtcaccagtagctaaggcc

SEQ ID NO: 3492690 - DNA, 25 bp, Homo sapien
tagggcctgacagcagacctttcag

SEQ ID NO: 3492691 - DNA, 25 bp, Homo sapien
gggagacagacttgcctagaatagc

SEQ ID NO: 3492692 - DNA, 25 bp, Homo sapien
tagtggagacttcgccccttgagtg

SEQ ID NO: 3492693 - DNA, 25 bp, Homo sapien
tgccagctaagttttcaaagggacc

SEQ ID NO: 3492694 - DNA, 25 bp, Homo sapien
acctttatgctctgcgaagtgtgca

SEQ ID NO: 3492695 - DNA, 25 bp, Homo sapien
caggcctgctctgttggagccctag

SEQ ID NO: 3492696 - DNA, 25 bp, Homo sapien
tgtttctatccacgatcctgcagtc

SEQ ID NO: 3492697 - DNA, 25 bp, Homo sapien
ggagccctagtcaccttgcgttcct

SEQ ID NO: 3492698 - DNA, 25 bp, Homo sapien
tctatccacgatcctgcagtccagg

SEQ ID NO: 3492699 - DNA, 25 bp, Homo sapien
catcagtgtcccgactcaatcctga

SEQ ID NO: 3492700 - DNA, 25 bp, Homo sapien
caatcctgatttgatgtatgaggtg

SEQ ID NO: 3492701 - DNA, 25 bp, Homo sapien
ggtgattaagccactccagatctgc

SEQ ID NO: 3492702 - DNA, 25 bp, Homo sapien
gatgtatgaggtgattaagccactc

SEQ ID NO: 3492703 - DNA, 25 bp, Homo sapien
agaaactgcccgtgtcagcagagca

SEQ ID NO: 3492704 - DNA, 25 bp, Homo sapien
agatcctctgggaaattcttgtaca

SEQ ID NO: 3492705 - DNA, 25 bp, Homo sapien
ctctgggaaattcttgtacagcttc

SEQ ID NO: 3492706 - DNA, 25 bp, Homo sapien
caggagagaaactgcccgtgtcagc

SEQ ID NO: 3492707 - DNA, 25 bp, Homo sapien
tcttaagagctactgatccttcaag

SEQ ID NO: 3492708 - DNA, 25 bp, Homo sapien
ggttgtgggcgactttcaagcctcc

SEQ ID NO: 3492709 - DNA, 25 bp, Homo sapien
tgccttcattcttaagagctactga

SEQ ID NO: 3492710 - DNA, 25 bp, Homo sapien
ttcaagctctgtcgcactggccttt

SEQ ID NO: 3492711 - DNA, 25 bp, Homo sapien
cagttatgggcaaacaagctgttcc

SEQ ID NO: 3492712 - DNA, 25 bp, Homo sapien
tagagcctaattaatccctggagtg

SEQ ID NO: 3492713 - DNA, 25 bp, Homo sapien
tcttgctcagtggaacagttatggg

SEQ ID NO: 3492714 - DNA, 25 bp, Homo sapien
gcttttcgccatatgggtacccata

SEQ ID NO: 3492715 - DNA, 25 bp, Homo sapien
gaaacaaggacggtgaagatgggct

SEQ ID NO: 3492716 - DNA, 25 bp, Homo sapien
gcgctgacttgaatgggatggtttt

SEQ ID NO: 3492717 - DNA, 25 bp, Homo sapien
ttctcctgttgtggtccgcagtgtg

SEQ ID NO: 3492718 - DNA, 25 bp, Homo sapien
gacggtgaagatgggcttctcctgt

SEQ ID NO: 3492719 - DNA, 25 bp, Homo sapien
catgccatttactcttgattcgccc

SEQ ID NO: 3492720 - DNA, 25 bp, Homo sapien
aacttgcctaaagctccaccaacgg

SEQ ID NO: 3492721 - DNA, 25 bp, Homo sapien
tccaagatgcctgcatgccatttac

SEQ ID NO: 3492722 - DNA, 25 bp, Homo sapien
cagcatgggtctgctcttccctttc

SEQ ID NO: 3492723 - DNA, 25 bp, Homo sapien
tgagcgatgtagatagacaacctgg

SEQ ID NO: 3492724 - DNA, 25 bp, Homo sapien
gacaacctggagactttgctagcac

SEQ ID NO: 3492725 - DNA, 25 bp, Homo sapien
tacttctaaagtgcccaggagttct

SEQ ID NO: 3492726 - DNA, 25 bp, Homo sapien
ttgtttgattaatataggcctcccc

SEQ ID NO: 3492727 - DNA, 25 bp, Homo sapien
cagaacaacttgtccccatgtgcca

SEQ ID NO: 3492728 - DNA, 25 bp, Homo sapien
gagtgcaaatgaattcttcaggtcc

SEQ ID NO: 3492729 - DNA, 25 bp, Homo sapien
tcagagctcgatcgtctttctcaga

SEQ ID NO: 3492730 - DNA, 25 bp, Homo sapien
ccatgtgccactgtactgagcaaaa

SEQ ID NO: 3492731 - DNA, 25 bp, Homo sapien
cagtagttgattgtctacaggcagc

SEQ ID NO: 3492732 - DNA, 25 bp, Homo sapien
gtagttgattgtctacaggcagctc

SEQ ID NO: 3492733 - DNA, 25 bp, Homo sapien
ttgattgtctacaggcagctcccag

SEQ ID NO: 3492734 - DNA, 25 bp, Homo sapien
gtgtctgtctctcataacggttgtg

SEQ ID NO: 3492735 - DNA, 25 bp, Homo sapien
tttgagcagacatgaatcatagtgc

SEQ ID NO: 3492736 - DNA, 25 bp, Homo sapien
agtggcagtctgtgagaacagtgtc

SEQ ID NO: 3492737 - DNA, 25 bp, Homo sapien
tttgtgaattcagtaaacacttgca

SEQ ID NO: 3492738 - DNA, 25 bp, Homo sapien
gatagcttcttacacgacagatcac

SEQ ID NO: 3492739 - DNA, 25 bp, Homo sapien
ggttgatagcttcttacacgacaga

SEQ ID NO: 3492740 - DNA, 25 bp, Homo sapien
tcttacacgacagatcacaaatttg

SEQ ID NO: 3492741 - DNA, 25 bp, Homo sapien
cacgacagatcacaaatttgcagtc

SEQ ID NO: 3492742 - DNA, 25 bp, Homo sapien
tatgatgaactcaacgctgcacctg

SEQ ID NO: 3492743 - DNA, 25 bp, Homo sapien
gactgtcacgaggaagaagttcatt

SEQ ID NO: 3492744 - DNA, 25 bp, Homo sapien
gatcagctagactgcataagcaagc

SEQ ID NO: 3492745 - DNA, 25 bp, Homo sapien
gccaagcattatctactgtactcag

SEQ ID NO: 3492746 - DNA, 25 bp, Homo sapien
gaaaagatccagaggtgcctgagag

SEQ ID NO: 3492747 - DNA, 25 bp, Homo sapien
tgaaaagatccagaggtgcctgaga

SEQ ID NO: 3492748 - DNA, 25 bp, Homo sapien
caggaaactgagagcattcatcctc

SEQ ID NO: 3492749 - DNA, 25 bp, Homo sapien
aggaaactgagagcattcatcctca

SEQ ID NO: 3492750 - DNA, 25 bp, Homo sapien
ctctttgggaagatcttctcttcgg

SEQ ID NO: 3492751 - DNA, 25 bp, Homo sapien
ctcttgatgatgacgttctcttggg

SEQ ID NO: 3492752 - DNA, 25 bp, Homo sapien
ttctcttgatgatgacgttctcttg

SEQ ID NO: 3492753 - DNA, 25 bp, Homo sapien
tttgggaagatcttctcttcgggag

SEQ ID NO: 3492754 - DNA, 25 bp, Homo sapien
attaaagcagatgtccaaccctgag

SEQ ID NO: 3492755 - DNA, 25 bp, Homo sapien
aatggcttgatcacggccactcagc

SEQ ID NO: 3492756 - DNA, 25 bp, Homo sapien
tgagttgatgagagggcccatgata

SEQ ID NO: 3492757 - DNA, 25 bp, Homo sapien
gcaggtgcattgcacaatggcttga

SEQ ID NO: 3492758 - DNA, 25 bp, Homo sapien
aagtttaggtgctaattctgttagc

SEQ ID NO: 3492759 - DNA, 25 bp, Homo sapien
ggaagtttaggtgctaattctgtta

SEQ ID NO: 3492760 - DNA, 25 bp, Homo sapien
cacaggaagtttaggtgctaattct

SEQ ID NO: 3492761 - DNA, 25 bp, Homo sapien
gcccacaggaagtttaggtgctaat

SEQ ID NO: 3492762 - DNA, 25 bp, Homo sapien
ctggacctctccgtggtggcccttg

SEQ ID NO: 3492763 - DNA, 25 bp, Homo sapien
tcagagactcgtgtccagatgtgtc

SEQ ID NO: 3492764 - DNA, 25 bp, Homo sapien
cgtggtggcccttgattatttctag

SEQ ID NO: 3492765 - DNA, 25 bp, Homo sapien
ttctagcccaataaaagagaaagga

SEQ ID NO: 3492766 - DNA, 25 bp, Homo sapien
tggaaaccagatcttgggccaactc

SEQ ID NO: 3492767 - DNA, 25 bp, Homo sapien
aactccagatttctggccgaatcca

SEQ ID NO: 3492768 - DNA, 25 bp, Homo sapien
cttgggccaactccagatttctggc

SEQ ID NO: 3492769 - DNA, 25 bp, Homo sapien
ggaatggaaaccagatcttgggcca

SEQ ID NO: 3492770 - DNA, 25 bp, Homo sapien
aatggcacctggataactctttttc

SEQ ID NO: 3492771 - DNA, 25 bp, Homo sapien
tgttcataactcatgggcttagctg

SEQ ID NO: 3492772 - DNA, 25 bp, Homo sapien
aaatggcacctggataactcttttt

SEQ ID NO: 3492773 - DNA, 25 bp, Homo sapien
taactcatgggcttagctgttgacc

SEQ ID NO: 3492774 - DNA, 25 bp, Homo sapien
tgtcgaatggaaaaccggtgtgtcc

SEQ ID NO: 3492775 - DNA, 25 bp, Homo sapien
gcaaggcccattactcaaataaaac

SEQ ID NO: 3492776 - DNA, 25 bp, Homo sapien
tgaaaagatatgtatttcaggccgc

SEQ ID NO: 3492777 - DNA, 25 bp, Homo sapien
ccgcaggggtgctaatttgcaaggc

SEQ ID NO: 3492778 - DNA, 25 bp, Homo sapien
ttgcactgtgaactgttttctgctc

SEQ ID NO: 3492779 - DNA, 25 bp, Homo sapien
ttcctttgcactgtgaactgttttc

SEQ ID NO: 3492780 - DNA, 25 bp, Homo sapien
agatcaccctcagagctctctgtta

SEQ ID NO: 3492781 - DNA, 25 bp, Homo sapien
ccacatcatcctagctggaataaaa

SEQ ID NO: 3492782 - DNA, 25 bp, Homo sapien
tgccaagcctgtacgaggtacttaa

SEQ ID NO: 3492783 - DNA, 25 bp, Homo sapien
caatgccaagcctgtacgaggtact

SEQ ID NO: 3492784 - DNA, 25 bp, Homo sapien
caagcctgtacgaggtacttaataa

SEQ ID NO: 3492785 - DNA, 25 bp, Homo sapien
tcccaatgccaagcctgtacgaggt

SEQ ID NO: 3492786 - DNA, 25 bp, Homo sapien
cacataggacacgtatggacacgtc

SEQ ID NO: 3492787 - DNA, 25 bp, Homo sapien
cgtatggacacgtcagccagcgcct

SEQ ID NO: 3492788 - DNA, 25 bp, Homo sapien
taggacacgtatggacacgtcagcc

SEQ ID NO: 3492789 - DNA, 25 bp, Homo sapien
ctagccacataggacacgtatggac

SEQ ID NO: 3492790 - DNA, 25 bp, Homo sapien
ggccttgccactgctgagctgtcat

SEQ ID NO: 3492791 - DNA, 25 bp, Homo sapien
tgcaccaagggctggctcaggatct

SEQ ID NO: 3492792 - DNA, 25 bp, Homo sapien
aagcccagagctgcgtgcaccaagg

SEQ ID NO: 3492793 - DNA, 25 bp, Homo sapien
ggatcttggcctgcactcggccttg

SEQ ID NO: 3492794 - DNA, 25 bp, Homo sapien
ttttctgacaaactccacggctgtc

SEQ ID NO: 3492795 - DNA, 25 bp, Homo sapien
gatgttttctgacaaactccacggc

SEQ ID NO: 3492796 - DNA, 25 bp, Homo sapien
tcaaccaacaaaggcggtctgatgt

SEQ ID NO: 3492797 - DNA, 25 bp, Homo sapien
ccaacaaaggcggtctgatgttttc

SEQ ID NO: 3492798 - DNA, 25 bp, Homo sapien
tgcctgtgggtagttctttttcaga

SEQ ID NO: 3492799 - DNA, 25 bp, Homo sapien
tggtgcctgtgggtagttctttttc

SEQ ID NO: 3492800 - DNA, 25 bp, Homo sapien
tacttttcttggctatagctggttg

SEQ ID NO: 3492801 - DNA, 25 bp, Homo sapien
tcttggctatagctggttgattggt

SEQ ID NO: 3492802 - DNA, 25 bp, Homo sapien
gagcatgacgttgtcatgcaccaga

SEQ ID NO: 3492803 - DNA, 25 bp, Homo sapien
gacgttgtcatgcaccagaaccctg

SEQ ID NO: 3492804 - DNA, 25 bp, Homo sapien
cagttcctgagcataatgtgaaaga

SEQ ID NO: 3492805 - DNA, 25 bp, Homo sapien
aagtccattcacgagcatgacgttg

SEQ ID NO: 3492806 - DNA, 25 bp, Homo sapien
tgctggtgagtttcatggaacatgg

SEQ ID NO: 3492807 - DNA, 25 bp, Homo sapien
tgtacactatagtttgtctccactg

SEQ ID NO: 3492808 - DNA, 25 bp, Homo sapien
tgagacggctctttttgggtagttg

SEQ ID NO: 3492809 - DNA, 25 bp, Homo sapien
cacaggttcagaagccttggcatga

SEQ ID NO: 3492810 - DNA, 25 bp, Homo sapien
gtttccctgatagagcctcaagtac

SEQ ID NO: 3492811 - DNA, 25 bp, Homo sapien
agtttccctgatagagcctcaagta

SEQ ID NO: 3492812 - DNA, 25 bp, Homo sapien
cttctggtaatgtctcattctcaaa

SEQ ID NO: 3492813 - DNA, 25 bp, Homo sapien
gagcttctggtaatgtctcattctc

SEQ ID NO: 3492814 - DNA, 25 bp, Homo sapien
tcatcgtccaatacctaaataccgg

SEQ ID NO: 3492815 - DNA, 25 bp, Homo sapien
tgtctttactgtacccctgggtggc

SEQ ID NO: 3492816 - DNA, 25 bp, Homo sapien
actgcctacatgacatctctgtttg

SEQ ID NO: 3492817 - DNA, 25 bp, Homo sapien
taccggatttctcagagctcagttc

SEQ ID NO: 3492818 - DNA, 25 bp, Homo sapien
tccccagagtcgcactcagcacaca

SEQ ID NO: 3492819 - DNA, 25 bp, Homo sapien
cttccccagagtcgcactcagcaca

SEQ ID NO: 3492820 - DNA, 25 bp, Homo sapien
gtcgcactcagcacacaaccccagg

SEQ ID NO: 3492821 - DNA, 25 bp, Homo sapien
ccagagtcgcactcagcacacaacc

SEQ ID NO: 3492822 - DNA, 25 bp, Homo sapien
gtgccccagacaggtattcggcgac

SEQ ID NO: 3492823 - DNA, 25 bp, Homo sapien
cagacaggtattcggcgaccagagg

SEQ ID NO: 3492824 - DNA, 25 bp, Homo sapien
gccccagacaggtattcggcgacca

SEQ ID NO: 3492825 - DNA, 25 bp, Homo sapien
ctgctcctctccaatgtgccccaga

SEQ ID NO: 3492826 - DNA, 25 bp, Homo sapien
cagaagaggtcctttgatagccaca

SEQ ID NO: 3492827 - DNA, 25 bp, Homo sapien
tccagagtgaagcaatcagacacac

SEQ ID NO: 3492828 - DNA, 25 bp, Homo sapien
gcaggttaatgtaccgctgccagcc

SEQ ID NO: 3492829 - DNA, 25 bp, Homo sapien
gttgctcaccgcgagccggcaggtt

SEQ ID NO: 3492830 - DNA, 25 bp, Homo sapien
cagaaaatggcagtcgctgtcttga

SEQ ID NO: 3492831 - DNA, 25 bp, Homo sapien
ggcagtcgctgtcttgatgggcaca

SEQ ID NO: 3492832 - DNA, 25 bp, Homo sapien
gaaaatggcagtcgctgtcttgatg

SEQ ID NO: 3492833 - DNA, 25 bp, Homo sapien
aatggcagtcgctgtcttgatgggc

SEQ ID NO: 3492834 - DNA, 25 bp, Homo sapien
gctgcccatgccgatccagagatga

SEQ ID NO: 3492835 - DNA, 25 bp, Homo sapien
taaggtctctcctggaatttactgc

SEQ ID NO: 3492836 - DNA, 25 bp, Homo sapien
ggtcagccttccaggagaacataaa

SEQ ID NO: 3492837 - DNA, 25 bp, Homo sapien
tgtggcttccctaagttactgctgg

SEQ ID NO: 3492838 - DNA, 25 bp, Homo sapien
tattacacagactggagctccgacc

SEQ ID NO: 3492839 - DNA, 25 bp, Homo sapien
taatctaaagtatccctttcatttc

SEQ ID NO: 3492840 - DNA, 25 bp, Homo sapien
gcaaagtctgccactgctccctatt

SEQ ID NO: 3492841 - DNA, 25 bp, Homo sapien
aacaaaatgatggagagttggtggc

SEQ ID NO: 3492842 - DNA, 25 bp, Homo sapien
agtgcattcctcgaggagcaggtcc

SEQ ID NO: 3492843 - DNA, 25 bp, Homo sapien
gacagtgcattcctcgaggagcagg

SEQ ID NO: 3492844 - DNA, 25 bp, Homo sapien
ctcttggacagtgcattcctcgagg

SEQ ID NO: 3492845 - DNA, 25 bp, Homo sapien
ttggacagtgcattcctcgaggagc

SEQ ID NO: 3492846 - DNA, 25 bp, Homo sapien
ctttgtatgtatgtcgttgacccat

SEQ ID NO: 3492847 - DNA, 25 bp, Homo sapien
cttggccccttgctgatgtgcacac

SEQ ID NO: 3492848 - DNA, 25 bp, Homo sapien
tgaagtcagggttctagcgttcccc

SEQ ID NO: 3492849 - DNA, 25 bp, Homo sapien
gggttctagcgttcccctgtcgctc

SEQ ID NO: 3492850 - DNA, 25 bp, Homo sapien
tcagctttcatgcttgcggttccga

SEQ ID NO: 3492851 - DNA, 25 bp, Homo sapien
gcttgcggttccgatcttcaccagc

SEQ ID NO: 3492852 - DNA, 25 bp, Homo sapien
cactcttgtacaggtggctttggca

SEQ ID NO: 3492853 - DNA, 25 bp, Homo sapien
gattcagctttaagtgtgtccactc

SEQ ID NO: 3492854 - DNA, 25 bp, Homo sapien
tttggcagtgcgtctaaacagaacc

SEQ ID NO: 3492855 - DNA, 25 bp, Homo sapien
aaacagaaccttagcctgtgaccag

SEQ ID NO: 3492856 - DNA, 25 bp, Homo sapien
tcatgtgtcaaatgagagggtggcg

SEQ ID NO: 3492857 - DNA, 25 bp, Homo sapien
gcatcacctaacattttagggtgaa

SEQ ID NO: 3492858 - DNA, 25 bp, Homo sapien
cttcagtgtcgtagcatcacctaac

SEQ ID NO: 3492859 - DNA, 25 bp, Homo sapien
gtcgtagcatcacctaacattttag

SEQ ID NO: 3492860 - DNA, 25 bp, Homo sapien
tctgccacaatctcaataacagtga

SEQ ID NO: 3492861 - DNA, 25 bp, Homo sapien
tggtcaggtacaatcggcagcattc

SEQ ID NO: 3492862 - DNA, 25 bp, Homo sapien
cagaatctacaaagatgtggtcagg

SEQ ID NO: 3492863 - DNA, 25 bp, Homo sapien
ggcagcattcgcctgtccttcgcag

SEQ ID NO: 3492864 - DNA, 25 bp, Homo sapien
tcttgtctcaatacaggccttcggg

SEQ ID NO: 3492865 - DNA, 25 bp, Homo sapien
cttgaagcaggacgtaatggattgc

SEQ ID NO: 3492866 - DNA, 25 bp, Homo sapien
cactatgcatcttgtctcaatacag

SEQ ID NO: 3492867 - DNA, 25 bp, Homo sapien
ggattgccgtggctttcactatgca

SEQ ID NO: 3492868 - DNA, 25 bp, Homo sapien
ctggatgggcattcggtgtttgctt

SEQ ID NO: 3492869 - DNA, 25 bp, Homo sapien
ctgggtcttccttcacactagagca

SEQ ID NO: 3492870 - DNA, 25 bp, Homo sapien
tggatgggcattcggtgtttgcttc

SEQ ID NO: 3492871 - DNA, 25 bp, Homo sapien
tcttccttcacactagagcaggtat

SEQ ID NO: 3492872 - DNA, 25 bp, Homo sapien
tttacccctgaagatccagctggtg

SEQ ID NO: 3492873 - DNA, 25 bp, Homo sapien
acggcaactccttccctgatggcat

SEQ ID NO: 3492874 - DNA, 25 bp, Homo sapien
gctggtggtatacggcaactccttc

SEQ ID NO: 3492875 - DNA, 25 bp, Homo sapien
gatccagctggtggtatacggcaac

SEQ ID NO: 3492876 - DNA, 25 bp, Homo sapien
agcctgaacaccaaatgacttctgt

SEQ ID NO: 3492877 - DNA, 25 bp, Homo sapien
cttgaaatgtccccagcctgaacac

SEQ ID NO: 3492878 - DNA, 25 bp, Homo sapien
gaaatgtccccagcctgaacaccaa

SEQ ID NO: 3492879 - DNA, 25 bp, Homo sapien
atgtccccagcctgaacaccaaatg

SEQ ID NO: 3492880 - DNA, 25 bp, Homo sapien
ctccccctcctctgtagttaaggat

SEQ ID NO: 3492881 - DNA, 25 bp, Homo sapien
cattgctagcaagtggcatccacca

SEQ ID NO: 3492882 - DNA, 25 bp, Homo sapien
gatgcagagcttatcagttccccgg

SEQ ID NO: 3492883 - DNA, 25 bp, Homo sapien
gacccatattgtgttttgcagccca

SEQ ID NO: 3492884 - DNA, 25 bp, Homo sapien
tagctcctttctagtaaggacccat

SEQ ID NO: 3492885 - DNA, 25 bp, Homo sapien
ggtgaccatcaacttctttttagaa

SEQ ID NO: 3492886 - DNA, 25 bp, Homo sapien
catcaacttctttttagaaatccct

SEQ ID NO: 3492887 - DNA, 25 bp, Homo sapien
agaggtataacatgactattggtca

SEQ ID NO: 3492888 - DNA, 25 bp, Homo sapien
gtcttcctgttattagtcaggccgt

SEQ ID NO: 3492889 - DNA, 25 bp, Homo sapien
catttgtcatgctcctgtcagtctt

SEQ ID NO: 3492890 - DNA, 25 bp, Homo sapien
tagtcaggccgtatttgatgggcag

SEQ ID NO: 3492891 - DNA, 25 bp, Homo sapien
tggccaagggagacgacctcccaag

SEQ ID NO: 3492892 - DNA, 25 bp, Homo sapien
ctgtggcacacagcatgcagaagca

SEQ ID NO: 3492893 - DNA, 25 bp, Homo sapien
tgtggcacacagcatgcagaagcat

SEQ ID NO: 3492894 - DNA, 25 bp, Homo sapien
tggccttgaagctcctattgggttg

SEQ ID NO: 3492895 - DNA, 25 bp, Homo sapien
ttgaagctcctattgggttggggtg

SEQ ID NO: 3492896 - DNA, 25 bp, Homo sapien
ggccttgaagctcctattgggttgg

SEQ ID NO: 3492897 - DNA, 25 bp, Homo sapien
ccttgaagctcctattgggttgggg

SEQ ID NO: 3492898 - DNA, 25 bp, Homo sapien
tctctgccgttgcttcaggctgctc

SEQ ID NO: 3492899 - DNA, 25 bp, Homo sapien
agctgcaggtctctgccgttgcttc

SEQ ID NO: 3492900 - DNA, 25 bp, Homo sapien
gtctctgccgttgcttcaggctgct

SEQ ID NO: 3492901 - DNA, 25 bp, Homo sapien
gctgcaggtctctgccgttgcttca

SEQ ID NO: 3492902 - DNA, 25 bp, Homo sapien
tcagtgcatgtgatgccaaggctca

SEQ ID NO: 3492903 - DNA, 25 bp, Homo sapien
gaaattcttcgcaaagttgaccctg

SEQ ID NO: 3492904 - DNA, 25 bp, Homo sapien
tgtcagatggcgctcactggtctct

SEQ ID NO: 3492905 - DNA, 25 bp, Homo sapien
ggagagttcccgagacaatcaggca

SEQ ID NO: 3492906 - DNA, 25 bp, Homo sapien
taacctctacttcctccatttcctg

SEQ ID NO: 3492907 - DNA, 25 bp, Homo sapien
aacctctacttcctccatttcctgt

SEQ ID NO: 3492908 - DNA, 25 bp, Homo sapien
ctctacttcctccatttcctgtgtc

SEQ ID NO: 3492909 - DNA, 25 bp, Homo sapien
acctctacttcctccatttcctgtg

SEQ ID NO: 3492910 - DNA, 25 bp, Homo sapien
tgatgcgtctcaattagttccaaat

SEQ ID NO: 3492911 - DNA, 25 bp, Homo sapien
actgatgcgtctcaattagttccaa

SEQ ID NO: 3492912 - DNA, 25 bp, Homo sapien
tcactgatgcgtctcaattagttcc

SEQ ID NO: 3492913 - DNA, 25 bp, Homo sapien
gatgcgtctcaattagttccaaatt

SEQ ID NO: 3492914 - DNA, 25 bp, Homo sapien
ttgacaactctaatgggaattcagt

SEQ ID NO: 3492915 - DNA, 25 bp, Homo sapien
ccttgacaactctaatgggaattca

SEQ ID NO: 3492916 - DNA, 25 bp, Homo sapien
ccaccttgacaactctaatgggaat

SEQ ID NO: 3492917 - DNA, 25 bp, Homo sapien
caccttgacaactctaatgggaatt

SEQ ID NO: 3492918 - DNA, 25 bp, Homo sapien
gattccgatggttctgttccagagt

SEQ ID NO: 3492919 - DNA, 25 bp, Homo sapien
ttccgatggttctgttccagagttt

SEQ ID NO: 3492920 - DNA, 25 bp, Homo sapien
ctgattccgatggttctgttccaga

SEQ ID NO: 3492921 - DNA, 25 bp, Homo sapien
tggttctgttccagagtttcttcat

SEQ ID NO: 3492922 - DNA, 25 bp, Homo sapien
gccaaacagggaggcgaacttgtct

SEQ ID NO: 3492923 - DNA, 25 bp, Homo sapien
caaacagggaggcgaacttgtcttc

SEQ ID NO: 3492924 - DNA, 25 bp, Homo sapien
aagccaaacagggaggcgaacttgt

SEQ ID NO: 3492925 - DNA, 25 bp, Homo sapien
acagggaggcgaacttgtcttccat

SEQ ID NO: 3492926 - DNA, 25 bp, Homo sapien
ccacagattgtccagtatttctctg

SEQ ID NO: 3492927 - DNA, 25 bp, Homo sapien
gcgagtctccacagattgtccagta

SEQ ID NO: 3492928 - DNA, 25 bp, Homo sapien
tcatagttctcgttcaagcgagtct

SEQ ID NO: 3492929 - DNA, 25 bp, Homo sapien
ttcaagcgagtctccacagattgtc

SEQ ID NO: 3492930 - DNA, 25 bp, Homo sapien
gcctgtgtctcagttattggtccac

SEQ ID NO: 3492931 - DNA, 25 bp, Homo sapien
tgctcctgtctaccctgcttatgtg

SEQ ID NO: 3492932 - DNA, 25 bp, Homo sapien
gaggtctaggccaagtgacgcttgc

SEQ ID NO: 3492933 - DNA, 25 bp, Homo sapien
tttggagagcacttcacatccaggc

SEQ ID NO: 3492934 - DNA, 25 bp, Homo sapien
caaactatgcaaagtcttcactatc

SEQ ID NO: 3492935 - DNA, 25 bp, Homo sapien
caaatcacttgccagaggggacagt

SEQ ID NO: 3492936 - DNA, 25 bp, Homo sapien
gacagttgaatccaccaatgatggc

SEQ ID NO: 3492937 - DNA, 25 bp, Homo sapien
agtctgatccaaactatgcaaagtc

SEQ ID NO: 3492938 - DNA, 25 bp, Homo sapien
caaagtttgcttgagttcttctgtg

SEQ ID NO: 3492939 - DNA, 25 bp, Homo sapien
tcaaagtttgcttgagttcttctgt

SEQ ID NO: 3492940 - DNA, 25 bp, Homo sapien
aagtttgcttgagttcttctgtggg

SEQ ID NO: 3492941 - DNA, 25 bp, Homo sapien
gtttgcttgagttcttctgtgggtc

SEQ ID NO: 3492942 - DNA, 25 bp, Homo sapien
cctgcttgggcaccgtgatgagaac

SEQ ID NO: 3492943 - DNA, 25 bp, Homo sapien
gaagtccacgtgtgggactccatgg

SEQ ID NO: 3492944 - DNA, 25 bp, Homo sapien
gctggtccaggatcttatgcgtgaa

SEQ ID NO: 3492945 - DNA, 25 bp, Homo sapien
gactccatggttctttgaagccacg

SEQ ID NO: 3492946 - DNA, 25 bp, Homo sapien
tctgcagaacgtgcccaactgaatc

SEQ ID NO: 3492947 - DNA, 25 bp, Homo sapien
gaattctcagactccggagagcccg

SEQ ID NO: 3492948 - DNA, 25 bp, Homo sapien
cttaaagtagcgtctcgaagagaga

SEQ ID NO: 3492949 - DNA, 25 bp, Homo sapien
aaagctctttttggatgcaggaggg

SEQ ID NO: 3492950 - DNA, 25 bp, Homo sapien
gccaattgtgcagagcccagtctaa

SEQ ID NO: 3492951 - DNA, 25 bp, Homo sapien
gaaagagacaaatccgagaccaaag

SEQ ID NO: 3492952 - DNA, 25 bp, Homo sapien
cacgataaggtgtaggacagggaca

SEQ ID NO: 3492953 - DNA, 25 bp, Homo sapien
gggtttgtcaacttctgcgctggca

SEQ ID NO: 3492954 - DNA, 25 bp, Homo sapien
cccttctaggtaagatgctctaatt

SEQ ID NO: 3492955 - DNA, 25 bp, Homo sapien
gaagtacacactaggatagtcacac

SEQ ID NO: 3492956 - DNA, 25 bp, Homo sapien
agtgataagtattctcccttctagg

SEQ ID NO: 3492957 - DNA, 25 bp, Homo sapien
catatatgtgggctaacccttttag

SEQ ID NO: 3492958 - DNA, 25 bp, Homo sapien
gtttcatgtagcttctctggggcat

SEQ ID NO: 3492959 - DNA, 25 bp, Homo sapien
tgtctttctccgtaattgtgggttc

SEQ ID NO: 3492960 - DNA, 25 bp, Homo sapien
aattgtgggttcctgagttgtgtgc

SEQ ID NO: 3492961 - DNA, 25 bp, Homo sapien
tctccgtaattgtgggttcctgagt

SEQ ID NO: 3492962 - DNA, 25 bp, Homo sapien
tgggttcctgagttgtgtgcaccat

SEQ ID NO: 3492963 - DNA, 25 bp, Homo sapien
tctctcccgtgttatgcccctgccc

SEQ ID NO: 3492964 - DNA, 25 bp, Homo sapien
atcctgcttctctcccgtgttatgc

SEQ ID NO: 3492965 - DNA, 25 bp, Homo sapien
tgcttctctcccgtgttatgcccct

SEQ ID NO: 3492966 - DNA, 25 bp, Homo sapien
cttctctcccgtgttatgcccctgc

SEQ ID NO: 3492967 - DNA, 25 bp, Homo sapien
tggaggctgctagattcagcaggaa

SEQ ID NO: 3492968 - DNA, 25 bp, Homo sapien
gctctagatggaggctgctagattc

SEQ ID NO: 3492969 - DNA, 25 bp, Homo sapien
gaagaaagtcactcatgcccttttt

SEQ ID NO: 3492970 - DNA, 25 bp, Homo sapien
ctttttcggaatccggcagctttgc

SEQ ID NO: 3492971 - DNA, 25 bp, Homo sapien
tcttgtcacctctgtacagctgcat

SEQ ID NO: 3492972 - DNA, 25 bp, Homo sapien
tgtcttgtcacctctgtacagctgc

SEQ ID NO: 3492973 - DNA, 25 bp, Homo sapien
gtcttgtcacctctgtacagctgca

SEQ ID NO: 3492974 - DNA, 25 bp, Homo sapien
gggctttccatcctgacatgttgtg

SEQ ID NO: 3492975 - DNA, 25 bp, Homo sapien
tgcagcaccagaaaatgaataatgg

SEQ ID NO: 3492976 - DNA, 25 bp, Homo sapien
gcttaacatgacaaacgatggcttt

SEQ ID NO: 3492977 - DNA, 25 bp, Homo sapien
gctttaataaaaacgcacacgaaga

SEQ ID NO: 3492978 - DNA, 25 bp, Homo sapien
ttgtcaggctgacggtccttgcgca

SEQ ID NO: 3492979 - DNA, 25 bp, Homo sapien
agagccacttgtcaggctgacggtc

SEQ ID NO: 3492980 - DNA, 25 bp, Homo sapien
tgcgcattgctactgtggcaatagt

SEQ ID NO: 3492981 - DNA, 25 bp, Homo sapien
ggctgacggtccttgcgcattgcta

SEQ ID NO: 3492982 - DNA, 25 bp, Homo sapien
ggctgcggtttcccatgaagatcac

SEQ ID NO: 3492983 - DNA, 25 bp, Homo sapien
gctgcggtttcccatgaagatcaca

SEQ ID NO: 3492984 - DNA, 25 bp, Homo sapien
ctgcggtttcccatgaagatcacag

SEQ ID NO: 3492985 - DNA, 25 bp, Homo sapien
tctctccaatgagatcataaactcc

SEQ ID NO: 3492986 - DNA, 25 bp, Homo sapien
agggactgtgcagatcttatctctc

SEQ ID NO: 3492987 - DNA, 25 bp, Homo sapien
ctgtatccaatcctgatgttctcca

SEQ ID NO: 3492988 - DNA, 25 bp, Homo sapien
gtatccaatcctgatgttctccagg

SEQ ID NO: 3492989 - DNA, 25 bp, Homo sapien
catagacagtgcacaaagcagcatg

SEQ ID NO: 3492990 - DNA, 25 bp, Homo sapien
ctcatcgcctttaatcttctattct

SEQ ID NO: 3492991 - DNA, 25 bp, Homo sapien
tcgcctttaatcttctattctgcaa

SEQ ID NO: 3492992 - DNA, 25 bp, Homo sapien
catcgcctttaatcttctattctgc

SEQ ID NO: 3492993 - DNA, 25 bp, Homo sapien
cgcctttaatcttctattctgcaaa

SEQ ID NO: 3492994 - DNA, 25 bp, Homo sapien
gctttaaccacaaggctggtgtcct

SEQ ID NO: 3492995 - DNA, 25 bp, Homo sapien
tggggacagcttgggaatcacatcc

SEQ ID NO: 3492996 - DNA, 25 bp, Homo sapien
gcagtaaggaaagtgctttaaccac

SEQ ID NO: 3492997 - DNA, 25 bp, Homo sapien
ggtgtcctgatgaacgtaatcactg

SEQ ID NO: 3492998 - DNA, 25 bp, Homo sapien
tggcgccggagttcctgacatttct

SEQ ID NO: 3492999 - DNA, 25 bp, Homo sapien
tactttttgctgtctcgtagctctt

SEQ ID NO: 3493000 - DNA, 25 bp, Homo sapien
tttctgatggccgcctctggctgta

SEQ ID NO: 3493001 - DNA, 25 bp, Homo sapien
tggctgtaccacacaggcacgctcg

SEQ ID NO: 3493002 - DNA, 25 bp, Homo sapien
cttgccagatcatgaggattttgtc

SEQ ID NO: 3493003 - DNA, 25 bp, Homo sapien
tgaggattttgtcaagcacatccct

SEQ ID NO: 3493004 - DNA, 25 bp, Homo sapien
gaggattttgtcaagcacatccctc

SEQ ID NO: 3493005 - DNA, 25 bp, Homo sapien
aataaatactcttgccagatcatga

SEQ ID NO: 3493006 - DNA, 25 bp, Homo sapien
ccacatgctgccttgctgggacttg

SEQ ID NO: 3493007 - DNA, 25 bp, Homo sapien
acttggctgtcaattgccagatgat

SEQ ID NO: 3493008 - DNA, 25 bp, Homo sapien
tcaattgccagatgatagacacgat

SEQ ID NO: 3493009 - DNA, 25 bp, Homo sapien
gatgatagacacgattccaacttcc

SEQ ID NO: 3493010 - DNA, 25 bp, Homo sapien
gataagggaggttaaatcaatccag

SEQ ID NO: 3493011 - DNA, 25 bp, Homo sapien
tttaatggggcgataagcaccaagt

SEQ ID NO: 3493012 - DNA, 25 bp, Homo sapien
gagattctgtctaaggacaggttca

SEQ ID NO: 3493013 - DNA, 25 bp, Homo sapien
aatagaataatcagcagggctttgt

SEQ ID NO: 3493014 - DNA, 25 bp, Homo sapien
cggacgtaatgatgctgtatggaga

SEQ ID NO: 3493015 - DNA, 25 bp, Homo sapien
tttcatccccgagcatcgtgaagtg

SEQ ID NO: 3493016 - DNA, 25 bp, Homo sapien
caaaacgcagcggttgtctagctgt

SEQ ID NO: 3493017 - DNA, 25 bp, Homo sapien
tagctgtactgcttggctgcactgc

SEQ ID NO: 3493018 - DNA, 25 bp, Homo sapien
ttttatgtgaggagtcttgatgtcc

SEQ ID NO: 3493019 - DNA, 25 bp, Homo sapien
tttatgtgaggagtcttgatgtcca

SEQ ID NO: 3493020 - DNA, 25 bp, Homo sapien
ttttttatgtgaggagtcttgatgt

SEQ ID NO: 3493021 - DNA, 25 bp, Homo sapien
ttatgtgaggagtcttgatgtccat

SEQ ID NO: 3493022 - DNA, 25 bp, Homo sapien
tggtctcctgatagtcatagcccat

SEQ ID NO: 3493023 - DNA, 25 bp, Homo sapien
catggtctcctgatagtcatagccc

SEQ ID NO: 3493024 - DNA, 25 bp, Homo sapien
atggtctcctgatagtcatagccca

SEQ ID NO: 3493025 - DNA, 25 bp, Homo sapien
atgcatctgtcaaagggtttattca

SEQ ID NO: 3493026 - DNA, 25 bp, Homo sapien
cgcctagccggcagaactgtccaaa

SEQ ID NO: 3493027 - DNA, 25 bp, Homo sapien
tgcatctgtcaaagggtttattcat

SEQ ID NO: 3493028 - DNA, 25 bp, Homo sapien
gatgcgcctagccggcagaactgtc

SEQ ID NO: 3493029 - DNA, 25 bp, Homo sapien
ctagaagacgaagatatcactggtt

SEQ ID NO: 3493030 - DNA, 25 bp, Homo sapien
cactgttcagtaaacgtgaagcccg

SEQ ID NO: 3493031 - DNA, 25 bp, Homo sapien
tgaagcccgatgacaggtgatgctc

SEQ ID NO: 3493032 - DNA, 25 bp, Homo sapien
gatatcactggttgcacactgttca

SEQ ID NO: 3493033 - DNA, 25 bp, Homo sapien
ctggccatctatcttgattgttcag

SEQ ID NO: 3493034 - DNA, 25 bp, Homo sapien
tatgaacctggtggtttagccagaa

SEQ ID NO: 3493035 - DNA, 25 bp, Homo sapien
tgggggtttatctcctccccgctga

SEQ ID NO: 3493036 - DNA, 25 bp, Homo sapien
ctgagggtatgaacctggtggttta

SEQ ID NO: 3493037 - DNA, 25 bp, Homo sapien
tggtggtttagccagaattgaaatc

SEQ ID NO: 3493038 - DNA, 25 bp, Homo sapien
cattatacggtagaggcggctccct

SEQ ID NO: 3493039 - DNA, 25 bp, Homo sapien
cagtagaggcgtctccctcacgggg

SEQ ID NO: 3493040 - DNA, 25 bp, Homo sapien
gtctcaccacttggaagtaccatgg

SEQ ID NO: 3493041 - DNA, 25 bp, Homo sapien
gcattgtatggtagaggtggctccc

SEQ ID NO: 3493042 - DNA, 25 bp, Homo sapien
tgttgcgggcaccaaggttctcagg

SEQ ID NO: 3493043 - DNA, 25 bp, Homo sapien
gatatcccagggcaaggctgacaga

SEQ ID NO: 3493044 - DNA, 25 bp, Homo sapien
tattgcaggacccaagtcaggacca

SEQ ID NO: 3493045 - DNA, 25 bp, Homo sapien
aagtcccatccagtgagtccaagtg

SEQ ID NO: 3493046 - DNA, 25 bp, Homo sapien
tcatacttgatagacttagtccaca

SEQ ID NO: 3493047 - DNA, 25 bp, Homo sapien
gccaaaagacgtttcatacttgata

SEQ ID NO: 3493048 - DNA, 25 bp, Homo sapien
tagtccacatctggtcatcaagccg

SEQ ID NO: 3493049 - DNA, 25 bp, Homo sapien
tggaaaagtgccaaaagacgtttca

SEQ ID NO: 3493050 - DNA, 25 bp, Homo sapien
cctttcattccagccaatgctgcca

SEQ ID NO: 3493051 - DNA, 25 bp, Homo sapien
agttctgtcctcctttcattccagc

SEQ ID NO: 3493052 - DNA, 25 bp, Homo sapien
cctcctttcattccagccaatgctg

SEQ ID NO: 3493053 - DNA, 25 bp, Homo sapien
accagttctgtcctcctttcattcc

SEQ ID NO: 3493054 - DNA, 25 bp, Homo sapien
agctaataaggcctggcggtaagcc

SEQ ID NO: 3493055 - DNA, 25 bp, Homo sapien
gctaataaggcctggcggtaagccc

SEQ ID NO: 3493056 - DNA, 25 bp, Homo sapien
aaagctaataaggcctggcggtaag

SEQ ID NO: 3493057 - DNA, 25 bp, Homo sapien
aagctaataaggcctggcggtaagc

SEQ ID NO: 3493058 - DNA, 25 bp, Homo sapien
agattctggattgggtgatgagtac

SEQ ID NO: 3493059 - DNA, 25 bp, Homo sapien
ctgccattcgaacggcgggggctgg

SEQ ID NO: 3493060 - DNA, 25 bp, Homo sapien
ggattgggtgatgagtaccattgat

SEQ ID NO: 3493061 - DNA, 25 bp, Homo sapien
tctggattgggtgatgagtaccatt

SEQ ID NO: 3493062 - DNA, 25 bp, Homo sapien
agggtgggggctgtatgcggagagg

SEQ ID NO: 3493063 - DNA, 25 bp, Homo sapien
gggtgggggctgtatgcggagaggg

SEQ ID NO: 3493064 - DNA, 25 bp, Homo sapien
agaagggtgggggctgtatgcggag

SEQ ID NO: 3493065 - DNA, 25 bp, Homo sapien
gaagggtgggggctgtatgcggaga

SEQ ID NO: 3493066 - DNA, 25 bp, Homo sapien
ccaaggccccaagactccagcgcgg

SEQ ID NO: 3493067 - DNA, 25 bp, Homo sapien
aggccccaagactccagcgcgggag

SEQ ID NO: 3493068 - DNA, 25 bp, Homo sapien
cccaagactccagcgcgggagctgg

SEQ ID NO: 3493069 - DNA, 25 bp, Homo sapien
caggaccccgggtcgtgcggacgcg

SEQ ID NO: 3493070 - DNA, 25 bp, Homo sapien
cgcggacgaggtgcggtcccggcga

SEQ ID NO: 3493071 - DNA, 25 bp, Homo sapien
cggtcccggcgaggcactggcgcga

SEQ ID NO: 3493072 - DNA, 25 bp, Homo sapien
cactggcgcgacgtccgccccggcc

SEQ ID NO: 3493073 - DNA, 25 bp, Homo sapien
gcggccgcgcggacgaggtgcggtc

SEQ ID NO: 3493074 - DNA, 25 bp, Homo sapien
ttccgggcgggtgccctgtggctcc

SEQ ID NO: 3493075 - DNA, 25 bp, Homo sapien
ccgggcgggtgccctgtggctccac

SEQ ID NO: 3493076 - DNA, 25 bp, Homo sapien
tttccgggcgggtgccctgtggctc

SEQ ID NO: 3493077 - DNA, 25 bp, Homo sapien
cgcaggcggtgtttccgggcgggtg

SEQ ID NO: 3493078 - DNA, 25 bp, Homo sapien
gcatctggcattccacatgggcctc

SEQ ID NO: 3493079 - DNA, 25 bp, Homo sapien
ggcgaggccgtgttccaaaggaata

SEQ ID NO: 3493080 - DNA, 25 bp, Homo sapien
aacatttaggattgggacatctacc

SEQ ID NO: 3493081 - DNA, 25 bp, Homo sapien
catgggcctcccgttattggagatg

SEQ ID NO: 3493082 - DNA, 25 bp, Homo sapien
catgtggagctgtctaatgggctcc

SEQ ID NO: 3493083 - DNA, 25 bp, Homo sapien
gacatgtggagctgtctaatgggct

SEQ ID NO: 3493084 - DNA, 25 bp, Homo sapien
gagctgtctaatgggctcctgcttt

SEQ ID NO: 3493085 - DNA, 25 bp, Homo sapien
ctgtggacatgtggagctgtctaat

SEQ ID NO: 3493086 - DNA, 25 bp, Homo sapien
tttcttgcagaaagtctgcgttatg

SEQ ID NO: 3493087 - DNA, 25 bp, Homo sapien
ttgggactatttctagttgccatca

SEQ ID NO: 3493088 - DNA, 25 bp, Homo sapien
aaagtctgcgttatgtatttccatg

SEQ ID NO: 3493089 - DNA, 25 bp, Homo sapien
gactatttctagttgccatcatcat

SEQ ID NO: 3493090 - DNA, 25 bp, Homo sapien
tgccatctggatgtagcacattgct

SEQ ID NO: 3493091 - DNA, 25 bp, Homo sapien
catctggatgtagcacattgctata

SEQ ID NO: 3493092 - DNA, 25 bp, Homo sapien
atttgccatctggatgtagcacatt

SEQ ID NO: 3493093 - DNA, 25 bp, Homo sapien
tggatgtagcacattgctataagca

SEQ ID NO: 3493094 - DNA, 25 bp, Homo sapien
tttgaagtatcattagttgcttcct

SEQ ID NO: 3493095 - DNA, 25 bp, Homo sapien
ttgaagtatcattagttgcttcctc

SEQ ID NO: 3493096 - DNA, 25 bp, Homo sapien
gaagtatcattagttgcttcctcat

SEQ ID NO: 3493097 - DNA, 25 bp, Homo sapien
atttgaagtatcattagttgcttcc

SEQ ID NO: 3493098 - DNA, 25 bp, Homo sapien
tattgtctggtcctggatatgtcat

SEQ ID NO: 3493099 - DNA, 25 bp, Homo sapien
ttgtctggtcctggatatgtcattt

SEQ ID NO: 3493100 - DNA, 25 bp, Homo sapien
ctattgtctggtcctggatatgtca

SEQ ID NO: 3493101 - DNA, 25 bp, Homo sapien
tgtctggtcctggatatgtcatttg

SEQ ID NO: 3493102 - DNA, 25 bp, Homo sapien
ggacaaggacagcaatgcctctgta

SEQ ID NO: 3493103 - DNA, 25 bp, Homo sapien
ctccagaagcatggacaaggacagc

SEQ ID NO: 3493104 - DNA, 25 bp, Homo sapien
gacaaggacagcaatgcctctgtaa

SEQ ID NO: 3493105 - DNA, 25 bp, Homo sapien
gccaggtatctgtgcactttgaatc

SEQ ID NO: 3493106 - DNA, 25 bp, Homo sapien
gacattctaaccgagctcaggtcag

SEQ ID NO: 3493107 - DNA, 25 bp, Homo sapien
tggaaagctctagcgcacgacattc

SEQ ID NO: 3493108 - DNA, 25 bp, Homo sapien
ctaagtaaatgtgtagccaggtatc

SEQ ID NO: 3493109 - DNA, 25 bp, Homo sapien
caatgcttcctgacagggcaaaatc

SEQ ID NO: 3493110 - DNA, 25 bp, Homo sapien
tccctttctaggtctgatcttccag

SEQ ID NO: 3493111 - DNA, 25 bp, Homo sapien
tcttccagggttcaacaatgcttcc

SEQ ID NO: 3493112 - DNA, 25 bp, Homo sapien
cctgacagggcaaaatcatggataa

SEQ ID NO: 3493113 - DNA, 25 bp, Homo sapien
tggctgaggctgacacagcgaaagc

SEQ ID NO: 3493114 - DNA, 25 bp, Homo sapien
tgtcctttaacctgctcgcccttgg

SEQ ID NO: 3493115 - DNA, 25 bp, Homo sapien
actcttctggagcttgtgcgattaa

SEQ ID NO: 3493116 - DNA, 25 bp, Homo sapien
tgcgattaagagtttctcggtgtcc

SEQ ID NO: 3493117 - DNA, 25 bp, Homo sapien
ggttcctcggaaactctcatctgcc

SEQ ID NO: 3493118 - DNA, 25 bp, Homo sapien
tcccaaagtgatacgaaagaattag

SEQ ID NO: 3493119 - DNA, 25 bp, Homo sapien
ttctaggcactgaatctactccggg

SEQ ID NO: 3493120 - DNA, 25 bp, Homo sapien
ggtggcttccgtagaaattctaggc

SEQ ID NO: 3493121 - DNA, 25 bp, Homo sapien
agggcaatgagaacacctaaatgtt

SEQ ID NO: 3493122 - DNA, 25 bp, Homo sapien
ggcaatgagaacacctaaatgttca

SEQ ID NO: 3493123 - DNA, 25 bp, Homo sapien
tcacaggttctcctcaagggcaatg

SEQ ID NO: 3493124 - DNA, 25 bp, Homo sapien
ggttctcctcaagggcaatgagaac

SEQ ID NO: 3493125 - DNA, 25 bp, Homo sapien
catcctgtgcgacgtgaacatggaa

SEQ ID NO: 3493126 - DNA, 25 bp, Homo sapien
ctgtgcgacgtgaacatggaactca

SEQ ID NO: 3493127 - DNA, 25 bp, Homo sapien
cgtgcatcctgtgcgacgtgaacat

SEQ ID NO: 3493128 - DNA, 25 bp, Homo sapien
cccacgtgcatcctgtgcgacgtga

SEQ ID NO: 3493129 - DNA, 25 bp, Homo sapien
ctagctaggtaaatcaacgctgagt

SEQ ID NO: 3493130 - DNA, 25 bp, Homo sapien
tagctaggtaaatcaacgctgagtt

SEQ ID NO: 3493131 - DNA, 25 bp, Homo sapien
agctaggtaaatcaacgctgagttg

SEQ ID NO: 3493132 - DNA, 25 bp, Homo sapien
aattttctagttgaggtggatttgg

SEQ ID NO: 3493133 - DNA, 25 bp, Homo sapien
tgaattttctagttgaggtggattt

SEQ ID NO: 3493134 - DNA, 25 bp, Homo sapien
agcaggtatgttgaattttctagtt

SEQ ID NO: 3493135 - DNA, 25 bp, Homo sapien
acagcaggtatgttgaattttctag

SEQ ID NO: 3493136 - DNA, 25 bp, Homo sapien
tagccaatcagtatatctccagtga

SEQ ID NO: 3493137 - DNA, 25 bp, Homo sapien
cttcttagaaccaggattgtagcca

SEQ ID NO: 3493138 - DNA, 25 bp, Homo sapien
gattgtagccaatcagtatatctcc

SEQ ID NO: 3493139 - DNA, 25 bp, Homo sapien
ctcccgacgttgcttcttagaacca

SEQ ID NO: 3493140 - DNA, 25 bp, Homo sapien
ctacccctttgtcaagctcctgcat

SEQ ID NO: 3493141 - DNA, 25 bp, Homo sapien
tgctacccctttgtcaagctcctgc

SEQ ID NO: 3493142 - DNA, 25 bp, Homo sapien
gctacccctttgtcaagctcctgca

SEQ ID NO: 3493143 - DNA, 25 bp, Homo sapien
ttttcagtgatgacatgcacctttt

SEQ ID NO: 3493144 - DNA, 25 bp, Homo sapien
ttcagtgatgacatgcaccttttcc

SEQ ID NO: 3493145 - DNA, 25 bp, Homo sapien
tcttccaggcactctctttttcagt

SEQ ID NO: 3493146 - DNA, 25 bp, Homo sapien
cagtgatgacatgcaccttttccat

SEQ ID NO: 3493147 - DNA, 25 bp, Homo sapien
ccatcagttttcagtatgcctccac

SEQ ID NO: 3493148 - DNA, 25 bp, Homo sapien
gctccttcagactgactctgcaagg

SEQ ID NO: 3493149 - DNA, 25 bp, Homo sapien
actctcagcagtcactgtgaggtgc

SEQ ID NO: 3493150 - DNA, 25 bp, Homo sapien
cattaggacaactgtcagaagagca

SEQ ID NO: 3493151 - DNA, 25 bp, Homo sapien
tgtttctcttgtggttccaagataa

SEQ ID NO: 3493152 - DNA, 25 bp, Homo sapien
tttctcttgtggttccaagataact

SEQ ID NO: 3493153 - DNA, 25 bp, Homo sapien
cttgtttctcttgtggttccaagat

SEQ ID NO: 3493154 - DNA, 25 bp, Homo sapien
ctcttgtttctcttgtggttccaag

SEQ ID NO: 3493155 - DNA, 25 bp, Homo sapien
gcatatcattccaaactcttactcc

SEQ ID NO: 3493156 - DNA, 25 bp, Homo sapien
aggcatagacaccacagtcaaaagc

SEQ ID NO: 3493157 - DNA, 25 bp, Homo sapien
tgagtttggcagcagaggcatagac

SEQ ID NO: 3493158 - DNA, 25 bp, Homo sapien
ggctctgcactaaaagctccttctg

SEQ ID NO: 3493159 - DNA, 25 bp, Homo sapien
tttagtgttagatgcttccaagaca

SEQ ID NO: 3493160 - DNA, 25 bp, Homo sapien
ccagcccattaggaagcagctctat

SEQ ID NO: 3493161 - DNA, 25 bp, Homo sapien
tcagtattgatctggaagctgcttt

SEQ ID NO: 3493162 - DNA, 25 bp, Homo sapien
gctcctggtgtgctacaaaggcttc

SEQ ID NO: 3493163 - DNA, 25 bp, Homo sapien
taaaccagcgatgagaaaaccatcc

SEQ ID NO: 3493164 - DNA, 25 bp, Homo sapien
atccttcacgttaatggtccttttg

SEQ ID NO: 3493165 - DNA, 25 bp, Homo sapien
aaataggagctaaaccagcgatgag

SEQ ID NO: 3493166 - DNA, 25 bp, Homo sapien
gagaaaaccatccttcacgttaatg

SEQ ID NO: 3493167 - DNA, 25 bp, Homo sapien
gctgcagacaaagcctgcgtgtaga

SEQ ID NO: 3493168 - DNA, 25 bp, Homo sapien
aaagcctgcgtgtagaaagtggcac

SEQ ID NO: 3493169 - DNA, 25 bp, Homo sapien
cagacaaagcctgcgtgtagaaagt

SEQ ID NO: 3493170 - DNA, 25 bp, Homo sapien
atgctgcagacaaagcctgcgtgta

SEQ ID NO: 3493171 - DNA, 25 bp, Homo sapien
tgaagcgggtagggctttctccgtg

SEQ ID NO: 3493172 - DNA, 25 bp, Homo sapien
cgggtagggctttctccgtgtcctg

SEQ ID NO: 3493173 - DNA, 25 bp, Homo sapien
ttttctcgctcagagggtagagtct

SEQ ID NO: 3493174 - DNA, 25 bp, Homo sapien
ttctcgctcagagggtagagtcttc

SEQ ID NO: 3493175 - DNA, 25 bp, Homo sapien
tttctcgctcagagggtagagtctt

SEQ ID NO: 3493176 - DNA, 25 bp, Homo sapien
tttttctcgctcagagggtagagtc

SEQ ID NO: 3493177 - DNA, 25 bp, Homo sapien
accatggcttcccaacatcagatgg

SEQ ID NO: 3493178 - DNA, 25 bp, Homo sapien
atggcttcccaacatcagatggcag

SEQ ID NO: 3493179 - DNA, 25 bp, Homo sapien
ccatggcttcccaacatcagatggc

SEQ ID NO: 3493180 - DNA, 25 bp, Homo sapien
catggcttcccaacatcagatggca

SEQ ID NO: 3493181 - DNA, 25 bp, Homo sapien
tcccacacaagctgaccacttctgc

SEQ ID NO: 3493182 - DNA, 25 bp, Homo sapien
cacttctgcagtgtcggagctggaa

SEQ ID NO: 3493183 - DNA, 25 bp, Homo sapien
ggccatcccacacaagctgaccact

SEQ ID NO: 3493184 - DNA, 25 bp, Homo sapien
ctacaaggtccattagagagattcc

SEQ ID NO: 3493185 - DNA, 25 bp, Homo sapien
ttcataatgatgacagcctgcccgt

SEQ ID NO: 3493186 - DNA, 25 bp, Homo sapien
gccattgggtgacctgataagcaga

SEQ ID NO: 3493187 - DNA, 25 bp, Homo sapien
gaaattgccggctccctctgaagat

SEQ ID NO: 3493188 - DNA, 25 bp, Homo sapien
gagcccagcatctcgtatctccgtg

SEQ ID NO: 3493189 - DNA, 25 bp, Homo sapien
ggagggtaccgggaggcaggcactg

SEQ ID NO: 3493190 - DNA, 25 bp, Homo sapien
caaggaaagtgtcactggagggtac

SEQ ID NO: 3493191 - DNA, 25 bp, Homo sapien
tgttgtggttatccctgatctagca

SEQ ID NO: 3493192 - DNA, 25 bp, Homo sapien
tccctgatctagcaaggaaagtgtc

SEQ ID NO: 3493193 - DNA, 25 bp, Homo sapien
caagttagctcatgccgtgggtggc

SEQ ID NO: 3493194 - DNA, 25 bp, Homo sapien
cagagggtctgttacttgcccagag

SEQ ID NO: 3493195 - DNA, 25 bp, Homo sapien
gaaacatttgttgatggccccagtt

SEQ ID NO: 3493196 - DNA, 25 bp, Homo sapien
gaccccgcaagagaggcatcatagt

SEQ ID NO: 3493197 - DNA, 25 bp, Homo sapien
cacagtggacgaatcaccctggaga

SEQ ID NO: 3493198 - DNA, 25 bp, Homo sapien
tgagctgagatttccttaggaatgg

SEQ ID NO: 3493199 - DNA, 25 bp, Homo sapien
tagccagggcactcaaggtgaaatt

SEQ ID NO: 3493200 - DNA, 25 bp, Homo sapien
ggaaaaccctgatattgagctgaga

SEQ ID NO: 3493201 - DNA, 25 bp, Homo sapien
ttgatcttcttcatagcccacaaac

SEQ ID NO: 3493202 - DNA, 25 bp, Homo sapien
taattttcaaaaacgtgcttctcaa

SEQ ID NO: 3493203 - DNA, 25 bp, Homo sapien
gaatattaactgcatgtctccaaga

SEQ ID NO: 3493204 - DNA, 25 bp, Homo sapien
tgttgctccactgatccacctgtca

SEQ ID NO: 3493205 - DNA, 25 bp, Homo sapien
tcaggtctcaggtaggagtcacttc

SEQ ID NO: 3493206 - DNA, 25 bp, Homo sapien
gaggagtaggtgcttggtaccacac

SEQ ID NO: 3493207 - DNA, 25 bp, Homo sapien
cagcacttagcatattgtatggcaa

SEQ ID NO: 3493208 - DNA, 25 bp, Homo sapien
taactgtcatgttcatcacctcgtg

SEQ ID NO: 3493209 - DNA, 25 bp, Homo sapien
agttcctgatttatggccgcagtgc

SEQ ID NO: 3493210 - DNA, 25 bp, Homo sapien
gggcctgccaggccgtttctccatg

SEQ ID NO: 3493211 - DNA, 25 bp, Homo sapien
tgatttatgtcagcgtcccggtgca

SEQ ID NO: 3493212 - DNA, 25 bp, Homo sapien
tctccatgctcatccgttgctgccc

SEQ ID NO: 3493213 - DNA, 25 bp, Homo sapien
gggtcccgctggcaggatgatggca

SEQ ID NO: 3493214 - DNA, 25 bp, Homo sapien
acttggtgttgccagggtcccgctg

SEQ ID NO: 3493215 - DNA, 25 bp, Homo sapien
ggcccttggaccattgctctgaagg

SEQ ID NO: 3493216 - DNA, 25 bp, Homo sapien
ggtgctgagcaacttggtgttgcca

SEQ ID NO: 3493217 - DNA, 25 bp, Homo sapien
catctattgtcagttgtccttggaa

SEQ ID NO: 3493218 - DNA, 25 bp, Homo sapien
gaaacgaataccacttgactgatca

SEQ ID NO: 3493219 - DNA, 25 bp, Homo sapien
gactttagagcactcatgaatctgc

SEQ ID NO: 3493220 - DNA, 25 bp, Homo sapien
tgaaccatgagcagagaggccgtgc

SEQ ID NO: 3493221 - DNA, 25 bp, Homo sapien
cttccagatcgcagaaggtcccaga

SEQ ID NO: 3493222 - DNA, 25 bp, Homo sapien
ggccatgcagaagactgcgaaccat

SEQ ID NO: 3493223 - DNA, 25 bp, Homo sapien
caggccatgcagaagactgcgaacc

SEQ ID NO: 3493224 - DNA, 25 bp, Homo sapien
gccaggccatgcagaagactgcgaa

SEQ ID NO: 3493225 - DNA, 25 bp, Homo sapien
ggctgctcgtttgcgtactcagatt

SEQ ID NO: 3493226 - DNA, 25 bp, Homo sapien
gtggttgtctccattccaaaatgct

SEQ ID NO: 3493227 - DNA, 25 bp, Homo sapien
catgtctggctgctcgtttgcgtac

SEQ ID NO: 3493228 - DNA, 25 bp, Homo sapien
tttgcgtactcagattcatgctcag

SEQ ID NO: 3493229 - DNA, 25 bp, Homo sapien
cttctgctcctactagctgtcccct

SEQ ID NO: 3493230 - DNA, 25 bp, Homo sapien
tgctcctactagctgtcccctccat

SEQ ID NO: 3493231 - DNA, 25 bp, Homo sapien
tctgctcctactagctgtcccctcc

SEQ ID NO: 3493232 - DNA, 25 bp, Homo sapien
ttctgctcctactagctgtcccctc

SEQ ID NO: 3493233 - DNA, 25 bp, Homo sapien
agctccctagttcatccaacttctc

SEQ ID NO: 3493234 - DNA, 25 bp, Homo sapien
ggccccagctccctagttcatccaa

SEQ ID NO: 3493235 - DNA, 25 bp, Homo sapien
cagctccctagttcatccaacttct

SEQ ID NO: 3493236 - DNA, 25 bp, Homo sapien
cccagctccctagttcatccaactt

SEQ ID NO: 3493237 - DNA, 25 bp, Homo sapien
tcgtaatgcataggccaggtctggg

SEQ ID NO: 3493238 - DNA, 25 bp, Homo sapien
gtctgaacgcacacgtgagggtccg

SEQ ID NO: 3493239 - DNA, 25 bp, Homo sapien
gggcttttgcaatcagctgctgctg

SEQ ID NO: 3493240 - DNA, 25 bp, Homo sapien
gatttgaaccatattgacactgagc

SEQ ID NO: 3493241 - DNA, 25 bp, Homo sapien
tgattcttgtgcagatcctcttgcc

SEQ ID NO: 3493242 - DNA, 25 bp, Homo sapien
atgtgattcttgtgcagatcctctt

SEQ ID NO: 3493243 - DNA, 25 bp, Homo sapien
ttgtgcagatcctcttgcccctctt

SEQ ID NO: 3493244 - DNA, 25 bp, Homo sapien
ttcttgtgcagatcctcttgcccct

SEQ ID NO: 3493245 - DNA, 25 bp, Homo sapien
ttcacagccttaatgagggcgagcg

SEQ ID NO: 3493246 - DNA, 25 bp, Homo sapien
gagggcgagcgatgtcatacctatt

SEQ ID NO: 3493247 - DNA, 25 bp, Homo sapien
gcagccttcacagccttaatgaggg

SEQ ID NO: 3493248 - DNA, 25 bp, Homo sapien
taatgagggcgagcgatgtcatacc

SEQ ID NO: 3493249 - DNA, 25 bp, Homo sapien
ttgaaggcagattggaagagaagct

SEQ ID NO: 3493250 - DNA, 25 bp, Homo sapien
gggctgccttccaattactctgtgg

SEQ ID NO: 3493251 - DNA, 25 bp, Homo sapien
ctgcaccgtgcaggcagatgttgga

SEQ ID NO: 3493252 - DNA, 25 bp, Homo sapien
ggaggcttcactgtgccagctttgg

SEQ ID NO: 3493253 - DNA, 25 bp, Homo sapien
tcttcaggaaatcctacaggtttag

SEQ ID NO: 3493254 - DNA, 25 bp, Homo sapien
tcaggaaatcctacaggtttaggaa

SEQ ID NO: 3493255 - DNA, 25 bp, Homo sapien
tctgccaccatcaggaatgttttct

SEQ ID NO: 3493256 - DNA, 25 bp, Homo sapien
cagcttggaattctgccaccatcag

SEQ ID NO: 3493257 - DNA, 25 bp, Homo sapien
agaaagctgtattaatttaagtggc

SEQ ID NO: 3493258 - DNA, 25 bp, Homo sapien
ggtgttgatggttggtaataaaaga

SEQ ID NO: 3493259 - DNA, 25 bp, Homo sapien
tcacatttaggactgctattatggt

SEQ ID NO: 3493260 - DNA, 25 bp, Homo sapien
ttaggactgctattatggtgttgat

SEQ ID NO: 3493261 - DNA, 25 bp, Homo sapien
gcttttggcatatgccttatactcc

SEQ ID NO: 3493262 - DNA, 25 bp, Homo sapien
ctcctgtcttggtgaagcagaaagg

SEQ ID NO: 3493263 - DNA, 25 bp, Homo sapien
tcaagtcccagcctcttttaactgt

SEQ ID NO: 3493264 - DNA, 25 bp, Homo sapien
agcagaaaggtagaagttgcgcagg

SEQ ID NO: 3493265 - DNA, 25 bp, Homo sapien
accaagcttgtacacagcttttcca

SEQ ID NO: 3493266 - DNA, 25 bp, Homo sapien
gaaccaagcttgtacacagcttttc

SEQ ID NO: 3493267 - DNA, 25 bp, Homo sapien
tggaaccaagcttgtacacagcttt

SEQ ID NO: 3493268 - DNA, 25 bp, Homo sapien
caagcttgtacacagcttttccatc

SEQ ID NO: 3493269 - DNA, 25 bp, Homo sapien
caaaatagtgcccattagtggtttt

SEQ ID NO: 3493270 - DNA, 25 bp, Homo sapien
aatagtgcccattagtggttttcat

SEQ ID NO: 3493271 - DNA, 25 bp, Homo sapien
aaatagtgcccattagtggttttca

SEQ ID NO: 3493272 - DNA, 25 bp, Homo sapien
atagtgcccattagtggttttcatt

SEQ ID NO: 3493273 - DNA, 25 bp, Homo sapien
tgagaggcgaagatactcctggcct

SEQ ID NO: 3493274 - DNA, 25 bp, Homo sapien
gcctccgaggcgaacactgacttcc

SEQ ID NO: 3493275 - DNA, 25 bp, Homo sapien
gagaggcgaagatactcctggcctc

SEQ ID NO: 3493276 - DNA, 25 bp, Homo sapien
ctgagaggcgaagatactcctggcc

SEQ ID NO: 3493277 - DNA, 25 bp, Homo sapien
aagcagcagctgtaaagccttttct

SEQ ID NO: 3493278 - DNA, 25 bp, Homo sapien
tgaataagaataggtggcaacaaca

SEQ ID NO: 3493279 - DNA, 25 bp, Homo sapien
ggaatgaataagaataggtggcaac

SEQ ID NO: 3493280 - DNA, 25 bp, Homo sapien
tgcccgagagggcaaggaatgaata

SEQ ID NO: 3493281 - DNA, 25 bp, Homo sapien
atccaaatatgactttcctgtatga

SEQ ID NO: 3493282 - DNA, 25 bp, Homo sapien
gactttcctgtatgacaagatgcta

SEQ ID NO: 3493283 - DNA, 25 bp, Homo sapien
ctgtatgacaagatgctatagggca

SEQ ID NO: 3493284 - DNA, 25 bp, Homo sapien
tatgactttcctgtatgacaagatg

SEQ ID NO: 3493285 - DNA, 25 bp, Homo sapien
caggaggacactagttcaccgtctt

SEQ ID NO: 3493286 - DNA, 25 bp, Homo sapien
cacaggaggacactagttcaccgtc

SEQ ID NO: 3493287 - DNA, 25 bp, Homo sapien
atgcacaggaggacactagttcacc

SEQ ID NO: 3493288 - DNA, 25 bp, Homo sapien
gaggacactagttcaccgtctttgt

SEQ ID NO: 3493289 - DNA, 25 bp, Homo sapien
gaagtaagaacatcctccagaaaca

SEQ ID NO: 3493290 - DNA, 25 bp, Homo sapien
gattttaagacctgaagtaagaaca

SEQ ID NO: 3493291 - DNA, 25 bp, Homo sapien
caggctgaaagtgcctgcgttcctt

SEQ ID NO: 3493292 - DNA, 25 bp, Homo sapien
gaaagtgcctgcgttccttgaggaa

SEQ ID NO: 3493293 - DNA, 25 bp, Homo sapien
atctgcaggcccctgaatttgcatc

SEQ ID NO: 3493294 - DNA, 25 bp, Homo sapien
tctgcaggcccctgaatttgcatct

SEQ ID NO: 3493295 - DNA, 25 bp, Homo sapien
ctaaggaggtgggagatgtgggatt

SEQ ID NO: 3493296 - DNA, 25 bp, Homo sapien
tgagggctgcccacgtcttggtaga

SEQ ID NO: 3493297 - DNA, 25 bp, Homo sapien
gcttcttgcacccatggttgtagtt

SEQ ID NO: 3493298 - DNA, 25 bp, Homo sapien
acgtcttggtagattctgcttcttg

SEQ ID NO: 3493299 - DNA, 25 bp, Homo sapien
gctgcccacgtcttggtagattctg

SEQ ID NO: 3493300 - DNA, 25 bp, Homo sapien
gagctgagttattactactgtgtca

SEQ ID NO: 3493301 - DNA, 25 bp, Homo sapien
tactgtgaaaatgccccaacgagct

SEQ ID NO: 3493302 - DNA, 25 bp, Homo sapien
ccccaagtacttcatggctgtcata

SEQ ID NO: 3493303 - DNA, 25 bp, Homo sapien
tactgtgtcataattacagcaagaa

SEQ ID NO: 3493304 - DNA, 25 bp, Homo sapien
tgaaacaggttcgagctgacaccgg

SEQ ID NO: 3493305 - DNA, 25 bp, Homo sapien
cacatcagccgaggcaaattctttt

SEQ ID NO: 3493306 - DNA, 25 bp, Homo sapien
agctgacaccggcacatcagccgag

SEQ ID NO: 3493307 - DNA, 25 bp, Homo sapien
taacacgacggtctccttgaaacag

SEQ ID NO: 3493308 - DNA, 25 bp, Homo sapien
gcctccaaagaagcccgtgaggagc

SEQ ID NO: 3493309 - DNA, 25 bp, Homo sapien
tggtaccaggatgtagtgtgcctcc

SEQ ID NO: 3493310 - DNA, 25 bp, Homo sapien
ggtgaaacagggatcccatgcctgg

SEQ ID NO: 3493311 - DNA, 25 bp, Homo sapien
cgtgaggagccggtgcagggtgcgg

SEQ ID NO: 3493312 - DNA, 25 bp, Homo sapien
tgactttgacgaagacctggctggg

SEQ ID NO: 3493313 - DNA, 25 bp, Homo sapien
agtcttctgagttgactttgacgaa

SEQ ID NO: 3493314 - DNA, 25 bp, Homo sapien
ttctgagttgactttgacgaagacc

SEQ ID NO: 3493315 - DNA, 25 bp, Homo sapien
gagttgactttgacgaagacctggc

SEQ ID NO: 3493316 - DNA, 25 bp, Homo sapien
tggtggagtgcttgtcattcctggg

SEQ ID NO: 3493317 - DNA, 25 bp, Homo sapien
tcattcctgggatcttttgtgttcc

SEQ ID NO: 3493318 - DNA, 25 bp, Homo sapien
gcgcgaaggagtttctcctccgtgg

SEQ ID NO: 3493319 - DNA, 25 bp, Homo sapien
tggctgtaattagcgcgaaggagtt

SEQ ID NO: 3493320 - DNA, 25 bp, Homo sapien
ctaacgatttgggatgtgatatttg

SEQ ID NO: 3493321 - DNA, 25 bp, Homo sapien
cgccatcatagcctcttctacatca

SEQ ID NO: 3493322 - DNA, 25 bp, Homo sapien
tgctgagcagccacgccatcatagc

SEQ ID NO: 3493323 - DNA, 25 bp, Homo sapien
cctcatgctgagcagccacgccatc

SEQ ID NO: 3493324 - DNA, 25 bp, Homo sapien
cacgccatcatagcctcttctacat

SEQ ID NO: 3493325 - DNA, 25 bp, Homo sapien
cagccccagtagatgtgttgcaaaa

SEQ ID NO: 3493326 - DNA, 25 bp, Homo sapien
tagatgtgttgcaaaaagctgttcc

SEQ ID NO: 3493327 - DNA, 25 bp, Homo sapien
tccttcagccccagtagatgtgttg

SEQ ID NO: 3493328 - DNA, 25 bp, Homo sapien
ccccagtagatgtgttgcaaaaagc

SEQ ID NO: 3493329 - DNA, 25 bp, Homo sapien
tagaagctcaatcatcataacctct

SEQ ID NO: 3493330 - DNA, 25 bp, Homo sapien
ctctggtggaccttcttgttcaaag

SEQ ID NO: 3493331 - DNA, 25 bp, Homo sapien
tcaatcatcataacctctggtggac

SEQ ID NO: 3493332 - DNA, 25 bp, Homo sapien
ctggtggaccttcttgttcaaagtc

SEQ ID NO: 3493333 - DNA, 25 bp, Homo sapien
tgcgctgttcctttatacaccgagg

SEQ ID NO: 3493334 - DNA, 25 bp, Homo sapien
tacaccgaggatatgacagcgaaca

SEQ ID NO: 3493335 - DNA, 25 bp, Homo sapien
caaccaagtgttactgtgcatgtac

SEQ ID NO: 3493336 - DNA, 25 bp, Homo sapien
taatgactgggttagcctgcacagc

SEQ ID NO: 3493337 - DNA, 25 bp, Homo sapien
gggtatcctggaagtacatcaaaga

SEQ ID NO: 3493338 - DNA, 25 bp, Homo sapien
attcccactccacagtcagggtatc

SEQ ID NO: 3493339 - DNA, 25 bp, Homo sapien
tccacagtcagggtatcctggaagt

SEQ ID NO: 3493340 - DNA, 25 bp, Homo sapien
ctgcatatgtcattcccactccaca

SEQ ID NO: 3493341 - DNA, 25 bp, Homo sapien
ttccttcaggtattaacttgccttg

SEQ ID NO: 3493342 - DNA, 25 bp, Homo sapien
tccttcaggtattaacttgccttgg

SEQ ID NO: 3493343 - DNA, 25 bp, Homo sapien
atttgcaatatgttgtctccgtcac

SEQ ID NO: 3493344 - DNA, 25 bp, Homo sapien
tctccgtcacttggaaggagtcatt

SEQ ID NO: 3493345 - DNA, 25 bp, Homo sapien
aataatttgcaatatgttgtctccg

SEQ ID NO: 3493346 - DNA, 25 bp, Homo sapien
gttgtctccgtcacttggaaggagt

SEQ ID NO: 3493347 - DNA, 25 bp, Homo sapien
tgagaattcactgagaaaggctttg

SEQ ID NO: 3493348 - DNA, 25 bp, Homo sapien
tcttgagaattcactgagaaaggct

SEQ ID NO: 3493349 - DNA, 25 bp, Homo sapien
cttgagaattcactgagaaaggctt

SEQ ID NO: 3493350 - DNA, 25 bp, Homo sapien
gagaattcactgagaaaggctttga

SEQ ID NO: 3493351 - DNA, 25 bp, Homo sapien
ccctccataccaggagttcacatgt

SEQ ID NO: 3493352 - DNA, 25 bp, Homo sapien
ttgggggttctcaagttagcctcac

SEQ ID NO: 3493353 - DNA, 25 bp, Homo sapien
caggagttcacatgtctgtgctggg

SEQ ID NO: 3493354 - DNA, 25 bp, Homo sapien
ctgtgctgggtgcaaggaaatggtt

SEQ ID NO: 3493355 - DNA, 25 bp, Homo sapien
ggccggcccagaggggaaggagcat

SEQ ID NO: 3493356 - DNA, 25 bp, Homo sapien
cgagcgtccccgggccggcccagag

SEQ ID NO: 3493357 - DNA, 25 bp, Homo sapien
gggccggcccagaggggaaggagca

SEQ ID NO: 3493358 - DNA, 25 bp, Homo sapien
ctgtcagaggctttcttctcaaaga

SEQ ID NO: 3493359 - DNA, 25 bp, Homo sapien
ccgggtctggatcattcctttgtgc

SEQ ID NO: 3493360 - DNA, 25 bp, Homo sapien
tagaaacttggcttctccgggtctg

SEQ ID NO: 3493361 - DNA, 25 bp, Homo sapien
ttggatattctgtcagaggctttct

SEQ ID NO: 3493362 - DNA, 25 bp, Homo sapien
actccacattaccttaagaacagca

SEQ ID NO: 3493363 - DNA, 25 bp, Homo sapien
cattaccttaagaacagcaccaagc

SEQ ID NO: 3493364 - DNA, 25 bp, Homo sapien
ctcacatcagctcagagcaagaact

SEQ ID NO: 3493365 - DNA, 25 bp, Homo sapien
cacattaccttaagaacagcaccaa

SEQ ID NO: 3493366 - DNA, 25 bp, Homo sapien
ggttggcattcctctttgatctgtg

SEQ ID NO: 3493367 - DNA, 25 bp, Homo sapien
ttgatctgtgctaaagggcaaaccc

SEQ ID NO: 3493368 - DNA, 25 bp, Homo sapien
gatctgtgctaaagggcaaacccat

SEQ ID NO: 3493369 - DNA, 25 bp, Homo sapien
ttggcattcctctttgatctgtgct

SEQ ID NO: 3493370 - DNA, 25 bp, Homo sapien
ggccagggtgtagatttccttggca

SEQ ID NO: 3493371 - DNA, 25 bp, Homo sapien
gccagggtgtagatttccttggcag

SEQ ID NO: 3493372 - DNA, 25 bp, Homo sapien
gggccagggtgtagatttccttggc

SEQ ID NO: 3493373 - DNA, 25 bp, Homo sapien
atagtttataaaactgtaaggccat

SEQ ID NO: 3493374 - DNA, 25 bp, Homo sapien
aagcttgtttgggatagatgatatt

SEQ ID NO: 3493375 - DNA, 25 bp, Homo sapien
tcaccgacggccatattgatgtagc

SEQ ID NO: 3493376 - DNA, 25 bp, Homo sapien
tagctctccaggacgggcctaataa

SEQ ID NO: 3493377 - DNA, 25 bp, Homo sapien
cacctccacattgatgaagtaagga

SEQ ID NO: 3493378 - DNA, 25 bp, Homo sapien
ccacctccacattgatgaagtaagg

SEQ ID NO: 3493379 - DNA, 25 bp, Homo sapien
tcaacttggtccacctccacattga

SEQ ID NO: 3493380 - DNA, 25 bp, Homo sapien
cttggtccacctccacattgatgaa

SEQ ID NO: 3493381 - DNA, 25 bp, Homo sapien
tctgattaatggctccagagttgcc

SEQ ID NO: 3493382 - DNA, 25 bp, Homo sapien
gaatgaaacctctgattaatggctc

SEQ ID NO: 3493383 - DNA, 25 bp, Homo sapien
gaaacctctgattaatggctccaga

SEQ ID NO: 3493384 - DNA, 25 bp, Homo sapien
cctctttgttttgcataattaagtt

SEQ ID NO: 3493385 - DNA, 25 bp, Homo sapien
aaataagtgattgggcacttgttct

SEQ ID NO: 3493386 - DNA, 25 bp, Homo sapien
tgattgggcacttgttcttgataac

SEQ ID NO: 3493387 - DNA, 25 bp, Homo sapien
cctttaggcaattgggaaataagtg

SEQ ID NO: 3493388 - DNA, 25 bp, Homo sapien
cttgataacttgtggatggttttgg

SEQ ID NO: 3493389 - DNA, 25 bp, Homo sapien
ttttgcttcaagaaggcattgggta

SEQ ID NO: 3493390 - DNA, 25 bp, Homo sapien
gggctcgtgtctgtaaccttagcac

SEQ ID NO: 3493391 - DNA, 25 bp, Homo sapien
gcccagacgcttgggatattccatg

SEQ ID NO: 3493392 - DNA, 25 bp, Homo sapien
catcggcatagaatggccaagcaca

SEQ ID NO: 3493393 - DNA, 25 bp, Homo sapien
tccttttccagtgttgacatcctca

SEQ ID NO: 3493394 - DNA, 25 bp, Homo sapien
tgtggtcgtccttggagaggggtac

SEQ ID NO: 3493395 - DNA, 25 bp, Homo sapien
catgttgctgtggtcgtccttggag

SEQ ID NO: 3493396 - DNA, 25 bp, Homo sapien
ttttccagtgttgacatcctcatgt

SEQ ID NO: 3493397 - DNA, 25 bp, Homo sapien
gagctgctgtaaatcaggttgccat

SEQ ID NO: 3493398 - DNA, 25 bp, Homo sapien
tttccacaagctgttggtaagagct

SEQ ID NO: 3493399 - DNA, 25 bp, Homo sapien
gttgaaataacgatgtgaaggtcct

SEQ ID NO: 3493400 - DNA, 25 bp, Homo sapien
caaattactggtgagtcgtttgacc

SEQ ID NO: 3493401 - DNA, 25 bp, Homo sapien
gaaacacagacacctgttttgttga

SEQ ID NO: 3493402 - DNA, 25 bp, Homo sapien
agaaacacagacacctgttttgttg

SEQ ID NO: 3493403 - DNA, 25 bp, Homo sapien
gattgccaagattacagcacgacaa

SEQ ID NO: 3493404 - DNA, 25 bp, Homo sapien
tgccgtctgcagtgatgaacagatg

SEQ ID NO: 3493405 - DNA, 25 bp, Homo sapien
caaggtcctatcatgtttagcaaat

SEQ ID NO: 3493406 - DNA, 25 bp, Homo sapien
gaaacgatatgttcatctgttacgc

SEQ ID NO: 3493407 - DNA, 25 bp, Homo sapien
ctagtcgaggataggggccgtttct

SEQ ID NO: 3493408 - DNA, 25 bp, Homo sapien
cacttggtaactgctgtatgctttt

SEQ ID NO: 3493409 - DNA, 25 bp, Homo sapien
gaaaactgaggttttgagtattgca

SEQ ID NO: 3493410 - DNA, 25 bp, Homo sapien
tttttagattgtgagctagtcgagg

SEQ ID NO: 3493411 - DNA, 25 bp, Homo sapien
ttcagttctgactctacggggccac

SEQ ID NO: 3493412 - DNA, 25 bp, Homo sapien
tacggggccactccttgcagggtct

SEQ ID NO: 3493413 - DNA, 25 bp, Homo sapien
catctcacctgctcgttcttgaact

SEQ ID NO: 3493414 - DNA, 25 bp, Homo sapien
tgctgctttcatctcacctgctcgt

SEQ ID NO: 3493415 - DNA, 25 bp, Homo sapien
ttatgtgtctggcatcagtaggcgg

SEQ ID NO: 3493416 - DNA, 25 bp, Homo sapien
tctgctgttgaagcctctcaatgag

SEQ ID NO: 3493417 - DNA, 25 bp, Homo sapien
tctggagggatgacttgcagcccgc

SEQ ID NO: 3493418 - DNA, 25 bp, Homo sapien
tgcagcccgccttgtttatgtgtct

SEQ ID NO: 3493419 - DNA, 25 bp, Homo sapien
ctggttcaggtacttcccacaatac

SEQ ID NO: 3493420 - DNA, 25 bp, Homo sapien
aaacttctcaataccatttacagtt

SEQ ID NO: 3493421 - DNA, 25 bp, Homo sapien
ctaaacttctcaataccatttacag

SEQ ID NO: 3493422 - DNA, 25 bp, Homo sapien
ttctcaataccatttacagttttta

SEQ ID NO: 3493423 - DNA, 25 bp, Homo sapien
acttctcaataccatttacagtttt

SEQ ID NO: 3493424 - DNA, 25 bp, Homo sapien
gaaaatccaccgtggggaatgtggc

SEQ ID NO: 3493425 - DNA, 25 bp, Homo sapien
gggaatgtggccacagacagaacaa

SEQ ID NO: 3493426 - DNA, 25 bp, Homo sapien
cagaacaaagtctataggaaagaaa

SEQ ID NO: 3493427 - DNA, 25 bp, Homo sapien
cagacagaacaaagtctataggaaa

SEQ ID NO: 3493428 - DNA, 25 bp, Homo sapien
cgaagacatttagtgccatttagca

SEQ ID NO: 3493429 - DNA, 25 bp, Homo sapien
tttagaggcatcattgctgcagtga

SEQ ID NO: 3493430 - DNA, 25 bp, Homo sapien
gccatttagcagaattccaatgcag

SEQ ID NO: 3493431 - DNA, 25 bp, Homo sapien
ccttttgatttcgaagacatttagt

SEQ ID NO: 3493432 - DNA, 25 bp, Homo sapien
tgctcccagaagcggagcctctccg

SEQ ID NO: 3493433 - DNA, 25 bp, Homo sapien
ccagaggagaccggcttccttcctt

SEQ ID NO: 3493434 - DNA, 25 bp, Homo sapien
tggctccaaagctgtctgagcctgc

SEQ ID NO: 3493435 - DNA, 25 bp, Homo sapien
tcccagaagcggagcctctccgtct

SEQ ID NO: 3493436 - DNA, 25 bp, Homo sapien
tgaataaccgtcactcaggcagcat

SEQ ID NO: 3493437 - DNA, 25 bp, Homo sapien
caggcagccagcgagcattgcgctc

SEQ ID NO: 3493438 - DNA, 25 bp, Homo sapien
actttcaggctgagatgagaccgca

SEQ ID NO: 3493439 - DNA, 25 bp, Homo sapien
ggacttcaccccagagggctcgtct

SEQ ID NO: 3493440 - DNA, 25 bp, Homo sapien
tgaccccgacgttgggctggcccca

SEQ ID NO: 3493441 - DNA, 25 bp, Homo sapien
cagtgaccccgacgttgggctggcc

SEQ ID NO: 3493442 - DNA, 25 bp, Homo sapien
gcacagtgaccccgacgttgggctg

SEQ ID NO: 3493443 - DNA, 25 bp, Homo sapien
gcggcgggcgaaccgcttgctcttc

SEQ ID NO: 3493444 - DNA, 25 bp, Homo sapien
tttgtctgcaagaacgcattggtgg

SEQ ID NO: 3493445 - DNA, 25 bp, Homo sapien
cttcctcccacagcataggtgcatt

SEQ ID NO: 3493446 - DNA, 25 bp, Homo sapien
gcggcgtggctctctaggcgcttat

SEQ ID NO: 3493447 - DNA, 25 bp, Homo sapien
tctagaagcctctgcgctgcaaagg

SEQ ID NO: 3493448 - DNA, 25 bp, Homo sapien
gaggaaggacaccattttctccggc

SEQ ID NO: 3493449 - DNA, 25 bp, Homo sapien
tttgtcgggtcatttgacagagctc

SEQ ID NO: 3493450 - DNA, 25 bp, Homo sapien
cccgcatgctgagctcattagtgca

SEQ ID NO: 3493451 - DNA, 25 bp, Homo sapien
gatgtttgtgagtgtggtggaagaa

SEQ ID NO: 3493452 - DNA, 25 bp, Homo sapien
ctgctactggagaagtggctaatgg

SEQ ID NO: 3493453 - DNA, 25 bp, Homo sapien
tgctaaatgggatcagaggttgctc

SEQ ID NO: 3493454 - DNA, 25 bp, Homo sapien
ggttgctccccctgaagcaagttat

SEQ ID NO: 3493455 - DNA, 25 bp, Homo sapien
gactgccagttttcgctcccagtgg

SEQ ID NO: 3493456 - DNA, 25 bp, Homo sapien
agcattctgtctgccctcacggaca

SEQ ID NO: 3493457 - DNA, 25 bp, Homo sapien
ccagtgtggagtgaagcatggccct

SEQ ID NO: 3493458 - DNA, 25 bp, Homo sapien
acccctaagtgtcaccgtgctctgt

SEQ ID NO: 3493459 - DNA, 25 bp, Homo sapien
gcagaggagagtacaaaatgtgaga

SEQ ID NO: 3493460 - DNA, 25 bp, Homo sapien
cagaggagagtacaaaatgtgagat

SEQ ID NO: 3493461 - DNA, 25 bp, Homo sapien
gatggtttatctctgctgcctgtcc

SEQ ID NO: 3493462 - DNA, 25 bp, Homo sapien
gagtcgtgcaggtgggtaaatcttc

SEQ ID NO: 3493463 - DNA, 25 bp, Homo sapien
gcaaacttcttcttccgctgagtcg

SEQ ID NO: 3493464 - DNA, 25 bp, Homo sapien
taaaccatccattgcaacatcgtcg

SEQ ID NO: 3493465 - DNA, 25 bp, Homo sapien
tgtttgtgttgttcgctgaatgccc

SEQ ID NO: 3493466 - DNA, 25 bp, Homo sapien
tgttcgctgaatgcccactgtcctg

SEQ ID NO: 3493467 - DNA, 25 bp, Homo sapien
catggcaatgaggttggtctgcaac

SEQ ID NO: 3493468 - DNA, 25 bp, Homo sapien
tgccatggcaatgaggttggtctgc

SEQ ID NO: 3493469 - DNA, 25 bp, Homo sapien
ccttggcgacttgggtccagtggct

SEQ ID NO: 3493470 - DNA, 25 bp, Homo sapien
gaggtgctttcatggcttagagttt

SEQ ID NO: 3493471 - DNA, 25 bp, Homo sapien
cttggtttggccttggcgacttggg

SEQ ID NO: 3493472 - DNA, 25 bp, Homo sapien
ttagaggtgctttcatggcttagag

SEQ ID NO: 3493473 - DNA, 25 bp, Homo sapien
cattggcgtctgctctctcgctgtg

SEQ ID NO: 3493474 - DNA, 25 bp, Homo sapien
ttggcctccttgcatggttttcagg

SEQ ID NO: 3493475 - DNA, 25 bp, Homo sapien
tctctcgctgtgtttctttcctgat

SEQ ID NO: 3493476 - DNA, 25 bp, Homo sapien
gcctttgctaagcacatttgtggca

SEQ ID NO: 3493477 - DNA, 25 bp, Homo sapien
tgcactatccagagaacttgctaaa

SEQ ID NO: 3493478 - DNA, 25 bp, Homo sapien
gctaaaatagcttcataaattgctt

SEQ ID NO: 3493479 - DNA, 25 bp, Homo sapien
caatttttgcactatccagagaact

SEQ ID NO: 3493480 - DNA, 25 bp, Homo sapien
ttgaacaatttttgcactatccaga

SEQ ID NO: 3493481 - DNA, 25 bp, Homo sapien
gtagatggggtatggtggtctccat

SEQ ID NO: 3493482 - DNA, 25 bp, Homo sapien
tgtagatggggtatggtggtctcca

SEQ ID NO: 3493483 - DNA, 25 bp, Homo sapien
ctgagagccactggcaagcacagtg

SEQ ID NO: 3493484 - DNA, 25 bp, Homo sapien
agcacagtgctgtgctttgaccctg

SEQ ID NO: 3493485 - DNA, 25 bp, Homo sapien
ttgcaggtaggggtctgagagccac

SEQ ID NO: 3493486 - DNA, 25 bp, Homo sapien
ttgaccctgccatgggaccctggag

SEQ ID NO: 3493487 - DNA, 25 bp, Homo sapien
tcttcacctcaacccaaatggagag

SEQ ID NO: 3493488 - DNA, 25 bp, Homo sapien
gcagagctgctgaacatattatact

SEQ ID NO: 3493489 - DNA, 25 bp, Homo sapien
aacccaaatggagaggctgtagatg

SEQ ID NO: 3493490 - DNA, 25 bp, Homo sapien
tattatactgcttacctatcctctt

SEQ ID NO: 3493491 - DNA, 25 bp, Homo sapien
cagattgtctgggaccagctgtgtg

SEQ ID NO: 3493492 - DNA, 25 bp, Homo sapien
cgtgacatttgccagattgtctggg

SEQ ID NO: 3493493 - DNA, 25 bp, Homo sapien
cttcctcgtgacatttgccagattg

SEQ ID NO: 3493494 - DNA, 25 bp, Homo sapien
ctgtgaggcttttccaccctctggt

SEQ ID NO: 3493495 - DNA, 25 bp, Homo sapien
tccatgagcataggctggatgttgt

SEQ ID NO: 3493496 - DNA, 25 bp, Homo sapien
cagagaggacgctttctgtctggtg

SEQ ID NO: 3493497 - DNA, 25 bp, Homo sapien
tgggacagagaggacgctttctgtc

SEQ ID NO: 3493498 - DNA, 25 bp, Homo sapien
ggtgcttcttgtttggaaggtccat

SEQ ID NO: 3493499 - DNA, 25 bp, Homo sapien
tcagcagtcaactctcctgctgatg

SEQ ID NO: 3493500 - DNA, 25 bp, Homo sapien
ttaagactggatttcagcagtcaac

SEQ ID NO: 3493501 - DNA, 25 bp, Homo sapien
tttcagcagtcaactctcctgctga

SEQ ID NO: 3493502 - DNA, 25 bp, Homo sapien
cagcagtcaactctcctgctgatgt

SEQ ID NO: 3493503 - DNA, 25 bp, Homo sapien
tgtttcaagcagatagcctcttcct

SEQ ID NO: 3493504 - DNA, 25 bp, Homo sapien
cagaggtgacccaggtttaataaag

SEQ ID NO: 3493505 - DNA, 25 bp, Homo sapien
gattaatggatttgagctaaaggtc

SEQ ID NO: 3493506 - DNA, 25 bp, Homo sapien
taatttgccgggactcagaggtgac

SEQ ID NO: 3493507 - DNA, 25 bp, Homo sapien
taattggtgctatccgttgagagta

SEQ ID NO: 3493508 - DNA, 25 bp, Homo sapien
attggtgctatccgttgagagtaac

SEQ ID NO: 3493509 - DNA, 25 bp, Homo sapien
gtaattggtgctatccgttgagagt

SEQ ID NO: 3493510 - DNA, 25 bp, Homo sapien
aattggtgctatccgttgagagtaa

SEQ ID NO: 3493511 - DNA, 25 bp, Homo sapien
tgcggtgatcccttattacgggcaa

SEQ ID NO: 3493512 - DNA, 25 bp, Homo sapien
gatcccttattacgggcaaggagac

SEQ ID NO: 3493513 - DNA, 25 bp, Homo sapien
gttctgtttgcggtgatcccttatt

SEQ ID NO: 3493514 - DNA, 25 bp, Homo sapien
ccttattacgggcaaggagacaaca

SEQ ID NO: 3493515 - DNA, 25 bp, Homo sapien
tatagaagctggacgggtgaatctg

SEQ ID NO: 3493516 - DNA, 25 bp, Homo sapien
gaatctggcgcttgtgtgtctccat

SEQ ID NO: 3493517 - DNA, 25 bp, Homo sapien
ttcactagccgcactgtaccgtggg

SEQ ID NO: 3493518 - DNA, 25 bp, Homo sapien
acagtttgcgttgcctgtggacagc

SEQ ID NO: 3493519 - DNA, 25 bp, Homo sapien
tttctgccacgcttctgccaaaggc

SEQ ID NO: 3493520 - DNA, 25 bp, Homo sapien
ccacagtcagagatgcactttgggc

SEQ ID NO: 3493521 - DNA, 25 bp, Homo sapien
ggcaaagttgtgccagcttcttttc

SEQ ID NO: 3493522 - DNA, 25 bp, Homo sapien
gcaccaggtctctcggggcaaagtt

SEQ ID NO: 3493523 - DNA, 25 bp, Homo sapien
cctcgtgcaggcttctctttagaaa

SEQ ID NO: 3493524 - DNA, 25 bp, Homo sapien
tataaagcagcaataagtggacagt

SEQ ID NO: 3493525 - DNA, 25 bp, Homo sapien
ccggatagatcccatgtcccaggaa

SEQ ID NO: 3493526 - DNA, 25 bp, Homo sapien
tatcaaacttgttgccagcttttcc

SEQ ID NO: 3493527 - DNA, 25 bp, Homo sapien
gatgtgatctgtggtgtaaagtcac

SEQ ID NO: 3493528 - DNA, 25 bp, Homo sapien
tgtgatctgtggtgtaaagtcacgg

SEQ ID NO: 3493529 - DNA, 25 bp, Homo sapien
gggcagaagacgtttggcagatcct

SEQ ID NO: 3493530 - DNA, 25 bp, Homo sapien
tggcagatcctttcacaattacttg

SEQ ID NO: 3493531 - DNA, 25 bp, Homo sapien
cctgtccttacttctggttgttgga

SEQ ID NO: 3493532 - DNA, 25 bp, Homo sapien
aggctggcgttgtgttgagcaggca

SEQ ID NO: 3493533 - DNA, 25 bp, Homo sapien
aagcgccctgcacacgtagacctgt

SEQ ID NO: 3493534 - DNA, 25 bp, Homo sapien
gttgtttctcccgataagcgccctg

SEQ ID NO: 3493535 - DNA, 25 bp, Homo sapien
tgttcttgctgagatgtgtccctcc

SEQ ID NO: 3493536 - DNA, 25 bp, Homo sapien
gttcttgctgagatgtgtccctcca

SEQ ID NO: 3493537 - DNA, 25 bp, Homo sapien
tgctgagatgtgtccctccattcag

SEQ ID NO: 3493538 - DNA, 25 bp, Homo sapien
tcttgctgagatgtgtccctccatt

SEQ ID NO: 3493539 - DNA, 25 bp, Homo sapien
tggctcagaaaactcctccagttct

SEQ ID NO: 3493540 - DNA, 25 bp, Homo sapien
ggctcagaaaactcctccagttctc

SEQ ID NO: 3493541 - DNA, 25 bp, Homo sapien
tctggctcagaaaactcctccagtt

SEQ ID NO: 3493542 - DNA, 25 bp, Homo sapien
ctcagaaaactcctccagttctcac

SEQ ID NO: 3493543 - DNA, 25 bp, Homo sapien
tctgtaggaagcaggaagcgaatac

SEQ ID NO: 3493544 - DNA, 25 bp, Homo sapien
gctctgtaggaagcaggaagcgaat

SEQ ID NO: 3493545 - DNA, 25 bp, Homo sapien
tgggtctgggggctctgtaggaagc

SEQ ID NO: 3493546 - DNA, 25 bp, Homo sapien
tgtaggaagcaggaagcgaatactg

SEQ ID NO: 3493547 - DNA, 25 bp, Homo sapien
caactggcattaaccagctgtggtc

SEQ ID NO: 3493548 - DNA, 25 bp, Homo sapien
gggtagggtgcagatttaaatgtct

SEQ ID NO: 3493549 - DNA, 25 bp, Homo sapien
ccgtgggtagcagttcctgctccat

SEQ ID NO: 3493550 - DNA, 25 bp, Homo sapien
aatgctgttaatggccgaatggagg

SEQ ID NO: 3493551 - DNA, 25 bp, Homo sapien
aaatgtctgagctctccccgtgggt

SEQ ID NO: 3493552 - DNA, 25 bp, Homo sapien
actgccggtgtaaactgccattcca

SEQ ID NO: 3493553 - DNA, 25 bp, Homo sapien
cagagatactgccatcctgtgtaaa

SEQ ID NO: 3493554 - DNA, 25 bp, Homo sapien
acccagagatactgccatcctgtgt

SEQ ID NO: 3493555 - DNA, 25 bp, Homo sapien
ccatcctgtgtaaactgccggtgta

SEQ ID NO: 3493556 - DNA, 25 bp, Homo sapien
agcaggggaaagttctgaggtttct

SEQ ID NO: 3493557 - DNA, 25 bp, Homo sapien
gagcaggggaaagttctgaggtttc

SEQ ID NO: 3493558 - DNA, 25 bp, Homo sapien
cccatttcgtgcagggtggtgacga

SEQ ID NO: 3493559 - DNA, 25 bp, Homo sapien
aaatgttcccatttcgtgcagggtg

SEQ ID NO: 3493560 - DNA, 25 bp, Homo sapien
aatattggtgcggtgtgcttcattt

SEQ ID NO: 3493561 - DNA, 25 bp, Homo sapien
tcatttaaatcataactggggcctg

SEQ ID NO: 3493562 - DNA, 25 bp, Homo sapien
gccggtcctctgcttgaattggttg

SEQ ID NO: 3493563 - DNA, 25 bp, Homo sapien
caagttcccctctcagaaagccggt

SEQ ID NO: 3493564 - DNA, 25 bp, Homo sapien
gaattggttgcttctcggatgggcc

SEQ ID NO: 3493565 - DNA, 25 bp, Homo sapien
gctcgagccaagtgcattgaaagga

SEQ ID NO: 3493566 - DNA, 25 bp, Homo sapien
aacataagtagaaaatgttgaagct

SEQ ID NO: 3493567 - DNA, 25 bp, Homo sapien
acataagtagaaaatgttgaagctg

SEQ ID NO: 3493568 - DNA, 25 bp, Homo sapien
cataagtagaaaatgttgaagctgg

SEQ ID NO: 3493569 - DNA, 25 bp, Homo sapien
tgggaattttctgcgtcagctctga

SEQ ID NO: 3493570 - DNA, 25 bp, Homo sapien
ctgggaattttctgcgtcagctctg

SEQ ID NO: 3493571 - DNA, 25 bp, Homo sapien
ccagtgcagagttatgttctccagg

SEQ ID NO: 3493572 - DNA, 25 bp, Homo sapien
cagtgcagagttatgttctccaggc

SEQ ID NO: 3493573 - DNA, 25 bp, Homo sapien
caaagtacttgtcagcaaatgcaca

SEQ ID NO: 3493574 - DNA, 25 bp, Homo sapien
tcttgcatgcggcagatgaaatgga

SEQ ID NO: 3493575 - DNA, 25 bp, Homo sapien
ttctgtctgactggaggatggccct

SEQ ID NO: 3493576 - DNA, 25 bp, Homo sapien
ttcagccttgtgtaagggccaactt

SEQ ID NO: 3493577 - DNA, 25 bp, Homo sapien
agttggagctgacacaatgccggca

SEQ ID NO: 3493578 - DNA, 25 bp, Homo sapien
ggtgagttggagctgacacaatgcc

SEQ ID NO: 3493579 - DNA, 25 bp, Homo sapien
acacaatgccggcaggtgcctttgt

SEQ ID NO: 3493580 - DNA, 25 bp, Homo sapien
gagctgacacaatgccggcaggtgc

SEQ ID NO: 3493581 - DNA, 25 bp, Homo sapien
tcagatctctgtccatcgcctcttc

SEQ ID NO: 3493582 - DNA, 25 bp, Homo sapien
atctctgtccatcgcctcttcaccg

SEQ ID NO: 3493583 - DNA, 25 bp, Homo sapien
gtccatcgcctcttcaccgcactta

SEQ ID NO: 3493584 - DNA, 25 bp, Homo sapien
tgtccatcgcctcttcaccgcactt

SEQ ID NO: 3493585 - DNA, 25 bp, Homo sapien
ctttctgttagtctctcttcatcct

SEQ ID NO: 3493586 - DNA, 25 bp, Homo sapien
tctgttagtctctcttcatcctctt

SEQ ID NO: 3493587 - DNA, 25 bp, Homo sapien
tgttagtctctcttcatcctcttcc

SEQ ID NO: 3493588 - DNA, 25 bp, Homo sapien
ttagtctctcttcatcctcttccag

SEQ ID NO: 3493589 - DNA, 25 bp, Homo sapien
caaaagatttggacctggacatcag

SEQ ID NO: 3493590 - DNA, 25 bp, Homo sapien
ttaggttcacggaagctgagactcc

SEQ ID NO: 3493591 - DNA, 25 bp, Homo sapien
gattatacggatctggagctcagca

SEQ ID NO: 3493592 - DNA, 25 bp, Homo sapien
ggcgatcctggagcacatagatttt

SEQ ID NO: 3493593 - DNA, 25 bp, Homo sapien
tgtttgaacacagacgtgcccagtg

SEQ ID NO: 3493594 - DNA, 25 bp, Homo sapien
cctcgcggtggcctagtgtttgaac

SEQ ID NO: 3493595 - DNA, 25 bp, Homo sapien
gacgtgcccagtgttgaaagggttc

SEQ ID NO: 3493596 - DNA, 25 bp, Homo sapien
cgcggtggcctagtgtttgaacaca

SEQ ID NO: 3493597 - DNA, 25 bp, Homo sapien
ggtggcactctaatttcttgcaagc

SEQ ID NO: 3493598 - DNA, 25 bp, Homo sapien
ggcactctaatttcttgcaagcctg

SEQ ID NO: 3493599 - DNA, 25 bp, Homo sapien
tgaaggtggcactctaatttcttgc

SEQ ID NO: 3493600 - DNA, 25 bp, Homo sapien
aaggtggcactctaatttcttgcaa

SEQ ID NO: 3493601 - DNA, 25 bp, Homo sapien
cttctggctcctttcgtagcttctc

SEQ ID NO: 3493602 - DNA, 25 bp, Homo sapien
ttctggctcctttcgtagcttctcc

SEQ ID NO: 3493603 - DNA, 25 bp, Homo sapien
acatttgccacctggttcaccggca

SEQ ID NO: 3493604 - DNA, 25 bp, Homo sapien
ttgtcaggggtctctcgcaggtatg

SEQ ID NO: 3493605 - DNA, 25 bp, Homo sapien
ggttcaccggcatctcttgtcaggg

SEQ ID NO: 3493606 - DNA, 25 bp, Homo sapien
ccagattggattctcaatgtgtgct

SEQ ID NO: 3493607 - DNA, 25 bp, Homo sapien
tgtgctgcggttgttagcaggtgca

SEQ ID NO: 3493608 - DNA, 25 bp, Homo sapien
ctgtgctgcggttgttagcaggtgc

SEQ ID NO: 3493609 - DNA, 25 bp, Homo sapien
gcctgtgctgcggttgttagcaggt

SEQ ID NO: 3493610 - DNA, 25 bp, Homo sapien
gctgcggttgttagcaggtgcaggc

SEQ ID NO: 3493611 - DNA, 25 bp, Homo sapien
cttagcaaggccgaccctctggcag

SEQ ID NO: 3493612 - DNA, 25 bp, Homo sapien
tctgatcccttagcaaggccgaccc

SEQ ID NO: 3493613 - DNA, 25 bp, Homo sapien
tagcaaggccgaccctctggcaggg

SEQ ID NO: 3493614 - DNA, 25 bp, Homo sapien
atcccttagcaaggccgaccctctg

SEQ ID NO: 3493615 - DNA, 25 bp, Homo sapien
gcagttctgagcgattgctgggctt

SEQ ID NO: 3493616 - DNA, 25 bp, Homo sapien
attgctgggctttttatgacgaaga

SEQ ID NO: 3493617 - DNA, 25 bp, Homo sapien
tgggctttttatgacgaagatgagg

SEQ ID NO: 3493618 - DNA, 25 bp, Homo sapien
ctctgatttttagcgagcagttctg

SEQ ID NO: 3493619 - DNA, 25 bp, Homo sapien
ggtgtgaacgccctcttccacagac

SEQ ID NO: 3493620 - DNA, 25 bp, Homo sapien
cctgcagcaccctttaggactgttt

SEQ ID NO: 3493621 - DNA, 25 bp, Homo sapien
ctttgtggagtaagccgccagccct

SEQ ID NO: 3493622 - DNA, 25 bp, Homo sapien
cacagaccccagctttgtggagtaa

SEQ ID NO: 3493623 - DNA, 25 bp, Homo sapien
tgtcagaggcaggtactcaatgcag

SEQ ID NO: 3493624 - DNA, 25 bp, Homo sapien
caggtactcaatgcagtccagtggg

SEQ ID NO: 3493625 - DNA, 25 bp, Homo sapien
gaggcaggtactcaatgcagtccag

SEQ ID NO: 3493626 - DNA, 25 bp, Homo sapien
cagaggcaggtactcaatgcagtcc

SEQ ID NO: 3493627 - DNA, 25 bp, Homo sapien
cctgcttgtccactgcaggggccat

SEQ ID NO: 3493628 - DNA, 25 bp, Homo sapien
gcctgcttgtccactgcaggggcca

SEQ ID NO: 3493629 - DNA, 25 bp, Homo sapien
tggcctgcttgtccactgcaggggc

SEQ ID NO: 3493630 - DNA, 25 bp, Homo sapien
ggcctgcttgtccactgcaggggcc

SEQ ID NO: 3493631 - DNA, 25 bp, Homo sapien
agtgagattttactaggtccacatt

SEQ ID NO: 3493632 - DNA, 25 bp, Homo sapien
gccacacgcagtttagcccctttgt

SEQ ID NO: 3493633 - DNA, 25 bp, Homo sapien
ccttcaacaaggctttagccacacg

SEQ ID NO: 3493634 - DNA, 25 bp, Homo sapien
gattttactaggtccacattccttc

SEQ ID NO: 3493635 - DNA, 25 bp, Homo sapien
tgggtcctgttgctggtaacggcac

SEQ ID NO: 3493636 - DNA, 25 bp, Homo sapien
ctggtaacggcacctcatctccagg

SEQ ID NO: 3493637 - DNA, 25 bp, Homo sapien
tcagctccacttgcgtacatgacta

SEQ ID NO: 3493638 - DNA, 25 bp, Homo sapien
cgtacatgactaaatgactcctctg

SEQ ID NO: 3493639 - DNA, 25 bp, Homo sapien
ataattacagatgatgattgcctgg

SEQ ID NO: 3493640 - DNA, 25 bp, Homo sapien
tggccgccagcaattacaagcagca

SEQ ID NO: 3493641 - DNA, 25 bp, Homo sapien
taagactgaaaacctcgaagttcca

SEQ ID NO: 3493642 - DNA, 25 bp, Homo sapien
aaacagaacagcttttggccgccag

SEQ ID NO: 3493643 - DNA, 25 bp, Homo sapien
agggtcttccctgatgtctgcggca

SEQ ID NO: 3493644 - DNA, 25 bp, Homo sapien
agtctgtcgctggtgtggctttgca

SEQ ID NO: 3493645 - DNA, 25 bp, Homo sapien
aggtgagttcagtctgtcgctggtg

SEQ ID NO: 3493646 - DNA, 25 bp, Homo sapien
gagggtcttccctgatgtctgcggc

SEQ ID NO: 3493647 - DNA, 25 bp, Homo sapien
tcaaaatatccgacagcgactcata

SEQ ID NO: 3493648 - DNA, 25 bp, Homo sapien
aaatatccgacagcgactcatagga

SEQ ID NO: 3493649 - DNA, 25 bp, Homo sapien
tccgacagcgactcataggagaatg

SEQ ID NO: 3493650 - DNA, 25 bp, Homo sapien
cagcgactcataggagaatggcaac

SEQ ID NO: 3493651 - DNA, 25 bp, Homo sapien
aaacatgcaggacagccgagtcaca

SEQ ID NO: 3493652 - DNA, 25 bp, Homo sapien
caggcaaaagaacacgtctttttgg

SEQ ID NO: 3493653 - DNA, 25 bp, Homo sapien
gacagccgagtcacagaatgtactt

SEQ ID NO: 3493654 - DNA, 25 bp, Homo sapien
acagaatgtacttcctcagtgaaag

SEQ ID NO: 3493655 - DNA, 25 bp, Homo sapien
tctcctgaagtcttggaggatgtca

SEQ ID NO: 3493656 - DNA, 25 bp, Homo sapien
ctctcctgaagtcttggaggatgtc

SEQ ID NO: 3493657 - DNA, 25 bp, Homo sapien
tcctctcctgaagtcttggaggatg

SEQ ID NO: 3493658 - DNA, 25 bp, Homo sapien
cctctcctgaagtcttggaggatgt

SEQ ID NO: 3493659 - DNA, 25 bp, Homo sapien
ccagcagcattgtaggtctggttta

SEQ ID NO: 3493660 - DNA, 25 bp, Homo sapien
cagcagcattgtaggtctggtttaa

SEQ ID NO: 3493661 - DNA, 25 bp, Homo sapien
cagcattgtaggtctggtttaaggc

SEQ ID NO: 3493662 - DNA, 25 bp, Homo sapien
cattgtaggtctggtttaaggccca

SEQ ID NO: 3493663 - DNA, 25 bp, Homo sapien
tatcaaactgcttgggagccgtagc

SEQ ID NO: 3493664 - DNA, 25 bp, Homo sapien
gagccgtagcgagatatagacaagt

SEQ ID NO: 3493665 - DNA, 25 bp, Homo sapien
ggcctccaaatctggctgagtaatt

SEQ ID NO: 3493666 - DNA, 25 bp, Homo sapien
tgccagctgacagtaaatatcaaac

SEQ ID NO: 3493667 - DNA, 25 bp, Homo sapien
ccaggccctggatggtacaccgtga

SEQ ID NO: 3493668 - DNA, 25 bp, Homo sapien
aggccctggatggtacaccgtgagg

SEQ ID NO: 3493669 - DNA, 25 bp, Homo sapien
tgtcagatgtcccccagtgccaccc

SEQ ID NO: 3493670 - DNA, 25 bp, Homo sapien
acccaggccctggatggtacaccgt

SEQ ID NO: 3493671 - DNA, 25 bp, Homo sapien
gatttgctctggttccttgtttaca

SEQ ID NO: 3493672 - DNA, 25 bp, Homo sapien
ctggctttgtctaagttgggacttg

SEQ ID NO: 3493673 - DNA, 25 bp, Homo sapien
gcaccgattgtgttgatgaggattt

SEQ ID NO: 3493674 - DNA, 25 bp, Homo sapien
tggagggcccttactgcaggccaga

SEQ ID NO: 3493675 - DNA, 25 bp, Homo sapien
gagaagggggcgggattgcatagtg

SEQ ID NO: 3493676 - DNA, 25 bp, Homo sapien
gtgagaagggggcgggattgcatag

SEQ ID NO: 3493677 - DNA, 25 bp, Homo sapien
agcacagtgtctctgcgggtgagaa

SEQ ID NO: 3493678 - DNA, 25 bp, Homo sapien
aagggggcgggattgcatagtgcac

SEQ ID NO: 3493679 - DNA, 25 bp, Homo sapien
tgtatatcagatctgtcctcacgct

SEQ ID NO: 3493680 - DNA, 25 bp, Homo sapien
tgttgatttatgtatatcagatctg

SEQ ID NO: 3493681 - DNA, 25 bp, Homo sapien
aatatgttgatttatgtatatcaga

SEQ ID NO: 3493682 - DNA, 25 bp, Homo sapien
gatttatgtatatcagatctgtcct

SEQ ID NO: 3493683 - DNA, 25 bp, Homo sapien
tgggtggagatcatgatccttttgg

SEQ ID NO: 3493684 - DNA, 25 bp, Homo sapien
tcacttgctggcttcgtcccacata

SEQ ID NO: 3493685 - DNA, 25 bp, Homo sapien
tcgtcccacatagtttctagcctgt

SEQ ID NO: 3493686 - DNA, 25 bp, Homo sapien
tgatccttttggagctctctggttc

SEQ ID NO: 3493687 - DNA, 25 bp, Homo sapien
cacagctgcatcctcgggctcctgc

SEQ ID NO: 3493688 - DNA, 25 bp, Homo sapien
tattgccttgcagcaatgttctctc

SEQ ID NO: 3493689 - DNA, 25 bp, Homo sapien
tgccttgcagcaatgttctctcccc

SEQ ID NO: 3493690 - DNA, 25 bp, Homo sapien
ttattgccttgcagcaatgttctct

SEQ ID NO: 3493691 - DNA, 25 bp, Homo sapien
tcctgtgaaacaggggccttgcccc

SEQ ID NO: 3493692 - DNA, 25 bp, Homo sapien
ctgtgaaacaggggccttgccccgt

SEQ ID NO: 3493693 - DNA, 25 bp, Homo sapien
agtcctgtgaaacaggggccttgcc

SEQ ID NO: 3493694 - DNA, 25 bp, Homo sapien
gtcctgtgaaacaggggccttgccc

SEQ ID NO: 3493695 - DNA, 25 bp, Homo sapien
ttagctttggttctccaggttcact

SEQ ID NO: 3493696 - DNA, 25 bp, Homo sapien
gccagtgtccgtgggtgatacacca

SEQ ID NO: 3493697 - DNA, 25 bp, Homo sapien
tgtgtaccctctaggaggcacttcc

SEQ ID NO: 3493698 - DNA, 25 bp, Homo sapien
cgggcaatgtgaggagctccaccct

SEQ ID NO: 3493699 - DNA, 25 bp, Homo sapien
tctgctcgctgtgagagatgtcctt

SEQ ID NO: 3493700 - DNA, 25 bp, Homo sapien
accctgcaattcccgtcctagattc

SEQ ID NO: 3493701 - DNA, 25 bp, Homo sapien
ctggttcatcagcctagagaggtgg

SEQ ID NO: 3493702 - DNA, 25 bp, Homo sapien
gttcatcagcctagagaggtgggca

SEQ ID NO: 3493703 - DNA, 25 bp, Homo sapien
cctgcaattcccgtcctagattcat

SEQ ID NO: 3493704 - DNA, 25 bp, Homo sapien
aaactctgtacctctcggtgcgcgg

SEQ ID NO: 3493705 - DNA, 25 bp, Homo sapien
cttttctggatatgactgtcagttt

SEQ ID NO: 3493706 - DNA, 25 bp, Homo sapien
cagtttcgtcatgagatttcttgct

SEQ ID NO: 3493707 - DNA, 25 bp, Homo sapien
tgtacctctcggtgcgcggcagcct

SEQ ID NO: 3493708 - DNA, 25 bp, Homo sapien
gactcctgccccttggtcttcagtg

SEQ ID NO: 3493709 - DNA, 25 bp, Homo sapien
caggagggactttgatcatgcagga

SEQ ID NO: 3493710 - DNA, 25 bp, Homo sapien
gggcaagttttagatgagcttcttt

SEQ ID NO: 3493711 - DNA, 25 bp, Homo sapien
tgaagggaccacatcccgcttcatg

SEQ ID NO: 3493712 - DNA, 25 bp, Homo sapien
gaaaaggctctgtcgtggatttttg

SEQ ID NO: 3493713 - DNA, 25 bp, Homo sapien
tcttcttggcggtagatgttcatgg

SEQ ID NO: 3493714 - DNA, 25 bp, Homo sapien
gctctgtcgtggatttttgctgcct

SEQ ID NO: 3493715 - DNA, 25 bp, Homo sapien
gcttccactcttcttggcggtagat

SEQ ID NO: 3493716 - DNA, 25 bp, Homo sapien
tcagtgtgggccctgtccctcttcc

SEQ ID NO: 3493717 - DNA, 25 bp, Homo sapien
tgtgggccctgtccctcttccccac

SEQ ID NO: 3493718 - DNA, 25 bp, Homo sapien
cagtgtgggccctgtccctcttccc

SEQ ID NO: 3493719 - DNA, 25 bp, Homo sapien
gtgtgggccctgtccctcttcccca

SEQ ID NO: 3493720 - DNA, 25 bp, Homo sapien
cttctctggggcgttggaatccact

SEQ ID NO: 3493721 - DNA, 25 bp, Homo sapien
ggcttctgagactgggccgtgcacc

SEQ ID NO: 3493722 - DNA, 25 bp, Homo sapien
caccgcagttcctttctgaacacat

SEQ ID NO: 3493723 - DNA, 25 bp, Homo sapien
ctgggccttccagttgatgtgcttc

SEQ ID NO: 3493724 - DNA, 25 bp, Homo sapien
ccagtgacctcgcaggatgaggcct

SEQ ID NO: 3493725 - DNA, 25 bp, Homo sapien
ccacggcagcattggatggcttctg

SEQ ID NO: 3493726 - DNA, 25 bp, Homo sapien
gagttccctgcttggacgtgagcca

SEQ ID NO: 3493727 - DNA, 25 bp, Homo sapien
ttccctgcttggacgtgagccacgg

SEQ ID NO: 3493728 - DNA, 25 bp, Homo sapien
taattaccacttgtgcggagccgcc

SEQ ID NO: 3493729 - DNA, 25 bp, Homo sapien
tatttataccgtccccggctcagca

SEQ ID NO: 3493730 - DNA, 25 bp, Homo sapien
ggccttcgtcctccggtggacctga

SEQ ID NO: 3493731 - DNA, 25 bp, Homo sapien
agcggctgattggatcctcctttgc

SEQ ID NO: 3493732 - DNA, 25 bp, Homo sapien
tcaaaatggtcagctcctgggcgct

SEQ ID NO: 3493733 - DNA, 25 bp, Homo sapien
cctgggctacctggtcatgatttgg

SEQ ID NO: 3493734 - DNA, 25 bp, Homo sapien
agggtcaaaatggtcagctcctggg

SEQ ID NO: 3493735 - DNA, 25 bp, Homo sapien
cgtggcccagagggcagatctcttg

SEQ ID NO: 3493736 - DNA, 25 bp, Homo sapien
caactttgactgcttggagtcggga

SEQ ID NO: 3493737 - DNA, 25 bp, Homo sapien
tagggagactggaacatacgaagac

SEQ ID NO: 3493738 - DNA, 25 bp, Homo sapien
tcttggtttcatgcggccgagtcgg

SEQ ID NO: 3493739 - DNA, 25 bp, Homo sapien
ccatgtgcgtgaggaagcagccttt

SEQ ID NO: 3493740 - DNA, 25 bp, Homo sapien
tctgaaacccagttgagacatgtct

SEQ ID NO: 3493741 - DNA, 25 bp, Homo sapien
tcgatgacattcaggtacacctagg

SEQ ID NO: 3493742 - DNA, 25 bp, Homo sapien
aaagctcagccatacgccaagagga

SEQ ID NO: 3493743 - DNA, 25 bp, Homo sapien
tgatgatgatgacgaacttttccct

SEQ ID NO: 3493744 - DNA, 25 bp, Homo sapien
ttcattctgtggaagctcatgctta

SEQ ID NO: 3493745 - DNA, 25 bp, Homo sapien
gacatttcattctgtggaagctcat

SEQ ID NO: 3493746 - DNA, 25 bp, Homo sapien
gcttagaaactggaaggcctaccaa

SEQ ID NO: 3493747 - DNA, 25 bp, Homo sapien
tggaagctcatgcttagaaactgga

SEQ ID NO: 3493748 - DNA, 25 bp, Homo sapien
cattttgttttgcaatatacattca

SEQ ID NO: 3493749 - DNA, 25 bp, Homo sapien
cgaggctccaaaatcactttaaaag

SEQ ID NO: 3493750 - DNA, 25 bp, Homo sapien
cacattttgttttgcaatatacatt

SEQ ID NO: 3493751 - DNA, 25 bp, Homo sapien
tcactttaaaagcaacacattttgt

SEQ ID NO: 3493752 - DNA, 25 bp, Homo sapien
gctttcatctctagtatgtttcgtt

SEQ ID NO: 3493753 - DNA, 25 bp, Homo sapien
gtttcgtttcaaatgtgactttgca

SEQ ID NO: 3493754 - DNA, 25 bp, Homo sapien
tataatccagaagtgtaaattccag

SEQ ID NO: 3493755 - DNA, 25 bp, Homo sapien
ttctctcttcgtgccataaaatatt

SEQ ID NO: 3493756 - DNA, 25 bp, Homo sapien
gcataaggtgccttgggacagatct

SEQ ID NO: 3493757 - DNA, 25 bp, Homo sapien
gcagtgtgtggaggccggtggagta

SEQ ID NO: 3493758 - DNA, 25 bp, Homo sapien
cctaccttgagtcctgcagtgtgtg

SEQ ID NO: 3493759 - DNA, 25 bp, Homo sapien
tgtggaggccggtggagtagctctg

SEQ ID NO: 3493760 - DNA, 25 bp, Homo sapien
ctgtctgcattcgagacttctcaga

SEQ ID NO: 3493761 - DNA, 25 bp, Homo sapien
agagggcagtgaccataactgtctg

SEQ ID NO: 3493762 - DNA, 25 bp, Homo sapien
tcgagacttctcagaaacgtccaca

SEQ ID NO: 3493763 - DNA, 25 bp, Homo sapien
tctcagaaacgtccacatcttccat

SEQ ID NO: 3493764 - DNA, 25 bp, Homo sapien
aatgaggatccactggactccctcc

SEQ ID NO: 3493765 - DNA, 25 bp, Homo sapien
aggatccactggactccctcctggg

SEQ ID NO: 3493766 - DNA, 25 bp, Homo sapien
gccatgccatgttggcaatgaggat

SEQ ID NO: 3493767 - DNA, 25 bp, Homo sapien
tccctcctgggagcggtcgttgtgt

SEQ ID NO: 3493768 - DNA, 25 bp, Homo sapien
gctgcacagctgttctcacccccat

SEQ ID NO: 3493769 - DNA, 25 bp, Homo sapien
gagctgcacagctgttctcaccccc

SEQ ID NO: 3493770 - DNA, 25 bp, Homo sapien
agctgcacagctgttctcaccccca

SEQ ID NO: 3493771 - DNA, 25 bp, Homo sapien
tgtgatggtcgcaaagctctgaagg

SEQ ID NO: 3493772 - DNA, 25 bp, Homo sapien
aggaagttgcagaagacaaaccagt

SEQ ID NO: 3493773 - DNA, 25 bp, Homo sapien
tcctggtgacttagcgtttccttac

SEQ ID NO: 3493774 - DNA, 25 bp, Homo sapien
ttacacttggactcatcatcgtcac

SEQ ID NO: 3493775 - DNA, 25 bp, Homo sapien
tccagggtcatacgcattgtgggtc

SEQ ID NO: 3493776 - DNA, 25 bp, Homo sapien
cattgtgggtctggtgtagcccctt

SEQ ID NO: 3493777 - DNA, 25 bp, Homo sapien
gtcatacgcattgtgggtctggtgt

SEQ ID NO: 3493778 - DNA, 25 bp, Homo sapien
gtggctccagggtcatacgcattgt

SEQ ID NO: 3493779 - DNA, 25 bp, Homo sapien
cagctccgggaactgaatccaatcc

SEQ ID NO: 3493780 - DNA, 25 bp, Homo sapien
gtaggctgcacagctccgggaactg

SEQ ID NO: 3493781 - DNA, 25 bp, Homo sapien
ctgcacagctccgggaactgaatcc

SEQ ID NO: 3493782 - DNA, 25 bp, Homo sapien
ggaactgaatccaatcctgccccaa

SEQ ID NO: 3493783 - DNA, 25 bp, Homo sapien
gatcttagcagaagtcaggacgcag

SEQ ID NO: 3493784 - DNA, 25 bp, Homo sapien
ccttggtggcagtactttgttttga

SEQ ID NO: 3493785 - DNA, 25 bp, Homo sapien
tgaaaacgcccaatggcttttgagg

SEQ ID NO: 3493786 - DNA, 25 bp, Homo sapien
gaatagtaaagatgctccggtccag

SEQ ID NO: 3493787 - DNA, 25 bp, Homo sapien
ggtccagtggtaatgtgaagaggtt

SEQ ID NO: 3493788 - DNA, 25 bp, Homo sapien
cagcaagcatgttggacggataggc

SEQ ID NO: 3493789 - DNA, 25 bp, Homo sapien
caagcatgttggacggataggcagc

SEQ ID NO: 3493790 - DNA, 25 bp, Homo sapien
gtacagcaagcatgttggacggata

SEQ ID NO: 3493791 - DNA, 25 bp, Homo sapien
catttgctgccggggtacctttttg

SEQ ID NO: 3493792 - DNA, 25 bp, Homo sapien
ctggcaagggctgtggatgtcagag

SEQ ID NO: 3493793 - DNA, 25 bp, Homo sapien
tggcaagggctgtggatgtcagagc

SEQ ID NO: 3493794 - DNA, 25 bp, Homo sapien
cttccccatgatcctggcaagggct

SEQ ID NO: 3493795 - DNA, 25 bp, Homo sapien
gcaagggctgtggatgtcagagctt

SEQ ID NO: 3493796 - DNA, 25 bp, Homo sapien
tccagcttcggtgctgattgaggca

SEQ ID NO: 3493797 - DNA, 25 bp, Homo sapien
gattgaggcacaatttaaatctgac

SEQ ID NO: 3493798 - DNA, 25 bp, Homo sapien
gagcattccagcttcggtgctgatt

SEQ ID NO: 3493799 - DNA, 25 bp, Homo sapien
tcggtgctgattgaggcacaattta

SEQ ID NO: 3493800 - DNA, 25 bp, Homo sapien
aggcagccccaaggtgtgtcaggcc

SEQ ID NO: 3493801 - DNA, 25 bp, Homo sapien
aaggcagccccaaggtgtgtcaggc

SEQ ID NO: 3493802 - DNA, 25 bp, Homo sapien
ggcagccccaaggtgtgtcaggccc

SEQ ID NO: 3493803 - DNA, 25 bp, Homo sapien
tctgcccttatcagtcatgcctctg

SEQ ID NO: 3493804 - DNA, 25 bp, Homo sapien
atgccctggtctccgagaccttctt

SEQ ID NO: 3493805 - DNA, 25 bp, Homo sapien
tatttctctcggaatcttcttcctg

SEQ ID NO: 3493806 - DNA, 25 bp, Homo sapien
gagtcaacaaggatgcacgtgctgg

SEQ ID NO: 3493807 - DNA, 25 bp, Homo sapien
gcttccttccgggcgtgatgtggca

SEQ ID NO: 3493808 - DNA, 25 bp, Homo sapien
ccctccaacgcagcccgcttccttc

SEQ ID NO: 3493809 - DNA, 25 bp, Homo sapien
caacgcagcccgcttccttccgggc

SEQ ID NO: 3493810 - DNA, 25 bp, Homo sapien
gcccgcttccttccgggcgtgatgt

SEQ ID NO: 3493811 - DNA, 25 bp, Homo sapien
tgaagtgaacgtaggaacaagcatg

SEQ ID NO: 3493812 - DNA, 25 bp, Homo sapien
gaacaagcatggatgggtggaagag

SEQ ID NO: 3493813 - DNA, 25 bp, Homo sapien
tgcagaggtgatctgggtgaccccc

SEQ ID NO: 3493814 - DNA, 25 bp, Homo sapien
cagaggtgatctgggtgaccccctc

SEQ ID NO: 3493815 - DNA, 25 bp, Homo sapien
cacctggtacttggtactgcagatg

SEQ ID NO: 3493816 - DNA, 25 bp, Homo sapien
ttcctccccggagtggtattcagag

SEQ ID NO: 3493817 - DNA, 25 bp, Homo sapien
tattcctccccggagtggtattcag

SEQ ID NO: 3493818 - DNA, 25 bp, Homo sapien
tacttggtactgcagatgagcattt

SEQ ID NO: 3493819 - DNA, 25 bp, Homo sapien
cctttagctcagcacgaacaaaccc

SEQ ID NO: 3493820 - DNA, 25 bp, Homo sapien
tttagctcagcacgaacaaacccag

SEQ ID NO: 3493821 - DNA, 25 bp, Homo sapien
agctcagcacgaacaaacccagggt

SEQ ID NO: 3493822 - DNA, 25 bp, Homo sapien
ttagctcagcacgaacaaacccagg

SEQ ID NO: 3493823 - DNA, 25 bp, Homo sapien
cacataaccatcctcgtcttccttt

SEQ ID NO: 3493824 - DNA, 25 bp, Homo sapien
tatccttcgggtccgcgcatttgcc

SEQ ID NO: 3493825 - DNA, 25 bp, Homo sapien
acataaccatcctcgtcttcctttt

SEQ ID NO: 3493826 - DNA, 25 bp, Homo sapien
ttttctatccttcgggtccgcgcat

SEQ ID NO: 3493827 - DNA, 25 bp, Homo sapien
gctctgagcaggctcgtgggacggc

SEQ ID NO: 3493828 - DNA, 25 bp, Homo sapien
tttaaatgttatcagcggcaattga

SEQ ID NO: 3493829 - DNA, 25 bp, Homo sapien
tttcgggtcctctgcggaattggga

SEQ ID NO: 3493830 - DNA, 25 bp, Homo sapien
gaattgggaggagcgtggatggtga

SEQ ID NO: 3493831 - DNA, 25 bp, Homo sapien
cttcctctttcccagggccgcctcg

SEQ ID NO: 3493832 - DNA, 25 bp, Homo sapien
ctctttcccagggccgcctcggcac

SEQ ID NO: 3493833 - DNA, 25 bp, Homo sapien
tcctctttcccagggccgcctcggc

SEQ ID NO: 3493834 - DNA, 25 bp, Homo sapien
cctctttcccagggccgcctcggca

SEQ ID NO: 3493835 - DNA, 25 bp, Homo sapien
tctcagtttccggtttgtgaaatga

SEQ ID NO: 3493836 - DNA, 25 bp, Homo sapien
ctcagtttccggtttgtgaaatgag

SEQ ID NO: 3493837 - DNA, 25 bp, Homo sapien
ccttccggctctgcagtgcctcgaa

SEQ ID NO: 3493838 - DNA, 25 bp, Homo sapien
tgcctcgaattctaggctgctggtg

SEQ ID NO: 3493839 - DNA, 25 bp, Homo sapien
tgggagctctgcgtctgcatagaaa

SEQ ID NO: 3493840 - DNA, 25 bp, Homo sapien
ttacaaagtcattcttggccgggcg

SEQ ID NO: 3493841 - DNA, 25 bp, Homo sapien
ttctgacgactgctggagaccaggc

SEQ ID NO: 3493842 - DNA, 25 bp, Homo sapien
ccttaacgatggcaattctgacgac

SEQ ID NO: 3493843 - DNA, 25 bp, Homo sapien
cctaaggctggtccgcctggtcctt

SEQ ID NO: 3493844 - DNA, 25 bp, Homo sapien
ttcaggcattcacgtcacaaggcaa

SEQ ID NO: 3493845 - DNA, 25 bp, Homo sapien
cgtcacaaggcaagctgagcacatc

SEQ ID NO: 3493846 - DNA, 25 bp, Homo sapien
agagcccggcctaaggctggtccgc

SEQ ID NO: 3493847 - DNA, 25 bp, Homo sapien
gcggagaggagactatttttagccc

SEQ ID NO: 3493848 - DNA, 25 bp, Homo sapien
ggcggagaggagactatttttagcc

SEQ ID NO: 3493849 - DNA, 25 bp, Homo sapien
cctgtgagtcctcttcggagctctg

SEQ ID NO: 3493850 - DNA, 25 bp, Homo sapien
gtccccccaactgcctgtgagtcct

SEQ ID NO: 3493851 - DNA, 25 bp, Homo sapien
ggtctaggcccatgcagtgtgtccg

SEQ ID NO: 3493852 - DNA, 25 bp, Homo sapien
aaattcgaagccaatccgagggagg

SEQ ID NO: 3493853 - DNA, 25 bp, Homo sapien
tccggacgccatgcaagatttatga

SEQ ID NO: 3493854 - DNA, 25 bp, Homo sapien
taaacaaggtgagctcaaaagcggc

SEQ ID NO: 3493855 - DNA, 25 bp, Homo sapien
tgatcatcattcagagggagctgca

SEQ ID NO: 3493856 - DNA, 25 bp, Homo sapien
gatggtgcagttggatgcctgcctc

SEQ ID NO: 3493857 - DNA, 25 bp, Homo sapien
gctgggtgagggtctcttgaagggt

SEQ ID NO: 3493858 - DNA, 25 bp, Homo sapien
tgagggtctcttgaagggtggtccc

SEQ ID NO: 3493859 - DNA, 25 bp, Homo sapien
agcagccacaggtattctgaacatg

SEQ ID NO: 3493860 - DNA, 25 bp, Homo sapien
cccacagcagccacaggtattctga

SEQ ID NO: 3493861 - DNA, 25 bp, Homo sapien
cacagcagccacaggtattctgaac

SEQ ID NO: 3493862 - DNA, 25 bp, Homo sapien
acagcagccacaggtattctgaaca

SEQ ID NO: 3493863 - DNA, 25 bp, Homo sapien
gccgtcgaactgagaggccaagctg

SEQ ID NO: 3493864 - DNA, 25 bp, Homo sapien
cgtgccgtcgaactgagaggccaag

SEQ ID NO: 3493865 - DNA, 25 bp, Homo sapien
tgcgtgccgtcgaactgagaggcca

SEQ ID NO: 3493866 - DNA, 25 bp, Homo sapien
tgccgtcgaactgagaggccaagct

SEQ ID NO: 3493867 - DNA, 25 bp, Homo sapien
ggggcagggcggcgcacgacagcac

SEQ ID NO: 3493868 - DNA, 25 bp, Homo sapien
tggggcagggcggcgcacgacagca

SEQ ID NO: 3493869 - DNA, 25 bp, Homo sapien
tgaagaaagcaagacgagacacagc

SEQ ID NO: 3493870 - DNA, 25 bp, Homo sapien
gaggcctccagtgcgtgcgttgcac

SEQ ID NO: 3493871 - DNA, 25 bp, Homo sapien
gcacatgggcaaactgtaggaactg

SEQ ID NO: 3493872 - DNA, 25 bp, Homo sapien
agacagtgcgtctgtgaggcctcca

SEQ ID NO: 3493873 - DNA, 25 bp, Homo sapien
acccactagatgacaagcgccttga

SEQ ID NO: 3493874 - DNA, 25 bp, Homo sapien
gcaactgttcctagcatgtcccaga

SEQ ID NO: 3493875 - DNA, 25 bp, Homo sapien
catgccggtgttgggtgtgaactta

SEQ ID NO: 3493876 - DNA, 25 bp, Homo sapien
gagctaaccggtgacaaaccacagg

SEQ ID NO: 3493877 - DNA, 25 bp, Homo sapien
caagcaggactttggaaccgacatc

SEQ ID NO: 3493878 - DNA, 25 bp, Homo sapien
ttttctggactgtgcctcggggctg

SEQ ID NO: 3493879 - DNA, 25 bp, Homo sapien
ccttcactggcttccggtgaggtcc

SEQ ID NO: 3493880 - DNA, 25 bp, Homo sapien
tgaggtcccggagcgcccgctgctt

SEQ ID NO: 3493881 - DNA, 25 bp, Homo sapien
agcctcagggacaggtatgccgcct

SEQ ID NO: 3493882 - DNA, 25 bp, Homo sapien
ggccccatgaagaatatcacccact

SEQ ID NO: 3493883 - DNA, 25 bp, Homo sapien
gaatttctcacttcaggccccatga

SEQ ID NO: 3493884 - DNA, 25 bp, Homo sapien
ttcaggccccatgaagaatatcacc

SEQ ID NO: 3493885 - DNA, 25 bp, Homo sapien
tcctgggaatttctcacttcaggcc

SEQ ID NO: 3493886 - DNA, 25 bp, Homo sapien
gcggcttgtagtccccgcgcgcatg

SEQ ID NO: 3493887 - DNA, 25 bp, Homo sapien
cagcgcggcgcggcttgtagtcccc

SEQ ID NO: 3493888 - DNA, 25 bp, Homo sapien
taccatggcgaccgccgggcccagc

SEQ ID NO: 3493889 - DNA, 25 bp, Homo sapien
gcgcggcttgtagtccccgcgcgca

SEQ ID NO: 3493890 - DNA, 25 bp, Homo sapien
tcaggcagccgagcgcagagccgga

SEQ ID NO: 3493891 - DNA, 25 bp, Homo sapien
ggaagaagtcaggcagccgagcgca

SEQ ID NO: 3493892 - DNA, 25 bp, Homo sapien
agtcaggcagccgagcgcagagccg

SEQ ID NO: 3493893 - DNA, 25 bp, Homo sapien
aagaagtcaggcagccgagcgcaga

SEQ ID NO: 3493894 - DNA, 25 bp, Homo sapien
gatagcatgactatggcagaatttg

SEQ ID NO: 3493895 - DNA, 25 bp, Homo sapien
aggctgaaccatagaaaccttggga

SEQ ID NO: 3493896 - DNA, 25 bp, Homo sapien
gaagaaggctgaaccatagaaacct

SEQ ID NO: 3493897 - DNA, 25 bp, Homo sapien
caaacatagcagatagcatgactat

SEQ ID NO: 3493898 - DNA, 25 bp, Homo sapien
gtggccagctgggattaatctgtag

SEQ ID NO: 3493899 - DNA, 25 bp, Homo sapien
gggattaatctgtaggcaaggcgcc

SEQ ID NO: 3493900 - DNA, 25 bp, Homo sapien
agcaagtgctgtagaagagtggcca

SEQ ID NO: 3493901 - DNA, 25 bp, Homo sapien
caatacaacctgttcctgagcaagt

SEQ ID NO: 3493902 - DNA, 25 bp, Homo sapien
tatccctcacaagtatcagcaggtg

SEQ ID NO: 3493903 - DNA, 25 bp, Homo sapien
cagtatacctcaaaatcaggcccag

SEQ ID NO: 3493904 - DNA, 25 bp, Homo sapien
tgttagtgggaaacatgctagctga

SEQ ID NO: 3493905 - DNA, 25 bp, Homo sapien
gctagctctgaaatcacccttagga

SEQ ID NO: 3493906 - DNA, 25 bp, Homo sapien
tttggtcctcgatgatggtgacata

SEQ ID NO: 3493907 - DNA, 25 bp, Homo sapien
gctcggagaagtctgattctctgaa

SEQ ID NO: 3493908 - DNA, 25 bp, Homo sapien
ggtcctcgatgatggtgacatacag

SEQ ID NO: 3493909 - DNA, 25 bp, Homo sapien
ttagctcggagaagtctgattctct

SEQ ID NO: 3493910 - DNA, 25 bp, Homo sapien
cccaattagtctagtagaggtttct

SEQ ID NO: 3493911 - DNA, 25 bp, Homo sapien
tattgttcccaattagtctagtaga

SEQ ID NO: 3493912 - DNA, 25 bp, Homo sapien
tattcctggcattgttaacttgttt

SEQ ID NO: 3493913 - DNA, 25 bp, Homo sapien
aagaaacagcttttggacttactgg

SEQ ID NO: 3493914 - DNA, 25 bp, Homo sapien
cttcacagcagaccgctgctgtaca

SEQ ID NO: 3493915 - DNA, 25 bp, Homo sapien
agtggagaaaggctacatgtttacc

SEQ ID NO: 3493916 - DNA, 25 bp, Homo sapien
aggctacatgtttacccttcacagc

SEQ ID NO: 3493917 - DNA, 25 bp, Homo sapien
gtacagctgcttcgcagagtctacc

SEQ ID NO: 3493918 - DNA, 25 bp, Homo sapien
gcagagccataagcctcccattttg

SEQ ID NO: 3493919 - DNA, 25 bp, Homo sapien
ccggctatgtgaactgcctatttcc

SEQ ID NO: 3493920 - DNA, 25 bp, Homo sapien
cattttgttagcgtcagctaggcca

SEQ ID NO: 3493921 - DNA, 25 bp, Homo sapien
gctggaatttgctgtgcagagccat

SEQ ID NO: 3493922 - DNA, 25 bp, Homo sapien
caacgcagtgagtagcgcagggact

SEQ ID NO: 3493923 - DNA, 25 bp, Homo sapien
tggtgaagcggtgtagcagcatttc

SEQ ID NO: 3493924 - DNA, 25 bp, Homo sapien
ccagaagaggtgtttttctgatcct

SEQ ID NO: 3493925 - DNA, 25 bp, Homo sapien
aaaagcaacgttgggcaacgcagtg

SEQ ID NO: 3493926 - DNA, 25 bp, Homo sapien
caagcttagaggttctatgtgccat

SEQ ID NO: 3493927 - DNA, 25 bp, Homo sapien
agggcagacttctgccgggctcagc

SEQ ID NO: 3493928 - DNA, 25 bp, Homo sapien
gcgttttcgctgacaagcttagagg

SEQ ID NO: 3493929 - DNA, 25 bp, Homo sapien
cgggctcagcacagcgttttcgctg

SEQ ID NO: 3493930 - DNA, 25 bp, Homo sapien
gaatatacgttgcacatttacggcg

SEQ ID NO: 3493931 - DNA, 25 bp, Homo sapien
cgctcgccagcgtttttcgttggaa

SEQ ID NO: 3493932 - DNA, 25 bp, Homo sapien
gcagcaagacagactcgtggagacg

SEQ ID NO: 3493933 - DNA, 25 bp, Homo sapien
ccgctgccgcagaggtaactgagga

SEQ ID NO: 3493934 - DNA, 25 bp, Homo sapien
ttttggctgcccgtgcagcggcggt

SEQ ID NO: 3493935 - DNA, 25 bp, Homo sapien
ttggctgcccgtgcagcggcggtgg

SEQ ID NO: 3493936 - DNA, 25 bp, Homo sapien
gcttttggctgcccgtgcagcggcg

SEQ ID NO: 3493937 - DNA, 25 bp, Homo sapien
tttggctgcccgtgcagcggcggtg

SEQ ID NO: 3493938 - DNA, 25 bp, Homo sapien
gctggcaccgtcatcttcaacacag

SEQ ID NO: 3493939 - DNA, 25 bp, Homo sapien
agctggcaccgtcatcttcaacaca

SEQ ID NO: 3493940 - DNA, 25 bp, Homo sapien
ctggcaccgtcatcttcaacacagc

SEQ ID NO: 3493941 - DNA, 25 bp, Homo sapien
cagctggcaccgtcatcttcaacac

SEQ ID NO: 3493942 - DNA, 25 bp, Homo sapien
tttcacatatgaggagccagccaat

SEQ ID NO: 3493943 - DNA, 25 bp, Homo sapien
tcggatgctagcgaggtcaatggct

SEQ ID NO: 3493944 - DNA, 25 bp, Homo sapien
gactacactcatgtcccagacaggg

SEQ ID NO: 3493945 - DNA, 25 bp, Homo sapien
tgctgggacttgaacgagctgtaca

SEQ ID NO: 3493946 - DNA, 25 bp, Homo sapien
tataaacaaatctgcaaggcactgc

SEQ ID NO: 3493947 - DNA, 25 bp, Homo sapien
catctgcatatgagtcaccacctct

SEQ ID NO: 3493948 - DNA, 25 bp, Homo sapien
tgggcaagacagaggatgacaaaga

SEQ ID NO: 3493949 - DNA, 25 bp, Homo sapien
gttttcctcagctctcagcaacaga

SEQ ID NO: 3493950 - DNA, 25 bp, Homo sapien
tatctctagtgtttcgttttgattc

SEQ ID NO: 3493951 - DNA, 25 bp, Homo sapien
tcctcaagctcagaggttgagtcca

SEQ ID NO: 3493952 - DNA, 25 bp, Homo sapien
tgttaatcttctgtagttgcccact

SEQ ID NO: 3493953 - DNA, 25 bp, Homo sapien
tgtttctgttggcatatcctcaagc

SEQ ID NO: 3493954 - DNA, 25 bp, Homo sapien
cttaagaagtatgaagccaagagaa

SEQ ID NO: 3493955 - DNA, 25 bp, Homo sapien
cttttctcttaagaagtatgaagcc

SEQ ID NO: 3493956 - DNA, 25 bp, Homo sapien
ctggatgatgactggacaacccaat

SEQ ID NO: 3493957 - DNA, 25 bp, Homo sapien
tggacaacccaatcacatcttttct

SEQ ID NO: 3493958 - DNA, 25 bp, Homo sapien
tttgagatttacagcccctatcagg

SEQ ID NO: 3493959 - DNA, 25 bp, Homo sapien
ttgagatttacagcccctatcaggc

SEQ ID NO: 3493960 - DNA, 25 bp, Homo sapien
cctgtaccactggggttcgattgct

SEQ ID NO: 3493961 - DNA, 25 bp, Homo sapien
cactggggttcgattgctggatttg

SEQ ID NO: 3493962 - DNA, 25 bp, Homo sapien
cacatatgtggtttgttcatcttga

SEQ ID NO: 3493963 - DNA, 25 bp, Homo sapien
gaattttcttccactcgatcctggg

SEQ ID NO: 3493964 - DNA, 25 bp, Homo sapien
gtaatgatgcaagacagttccacac

SEQ ID NO: 3493965 - DNA, 25 bp, Homo sapien
gggtcacttgtctgcgaatccgtaa

SEQ ID NO: 3493966 - DNA, 25 bp, Homo sapien
gagtgtatacccaggtctatggaca

SEQ ID NO: 3493967 - DNA, 25 bp, Homo sapien
gcaggttaccagtctgaggtaagtt

SEQ ID NO: 3493968 - DNA, 25 bp, Homo sapien
aaaaacggtcctagctacagatgca

SEQ ID NO: 3493969 - DNA, 25 bp, Homo sapien
tcagcaggcaagaggactacaggat

SEQ ID NO: 3493970 - DNA, 25 bp, Homo sapien
aatctcatcaatttccttgcggtca

SEQ ID NO: 3493971 - DNA, 25 bp, Homo sapien
ttgcggtcatttcgagcaacgacct

SEQ ID NO: 3493972 - DNA, 25 bp, Homo sapien
gcaacgacctcacagcgataaaggg

SEQ ID NO: 3493973 - DNA, 25 bp, Homo sapien
agtatttctgcacgacccgccaagt

SEQ ID NO: 3493974 - DNA, 25 bp, Homo sapien
ctctggaatccgtgggcagtggtac

SEQ ID NO: 3493975 - DNA, 25 bp, Homo sapien
tgcctgtttcagagtttaagtggaa

SEQ ID NO: 3493976 - DNA, 25 bp, Homo sapien
gaattgcgaaatctgggattggctc

SEQ ID NO: 3493977 - DNA, 25 bp, Homo sapien
tgcgataccagctgtagtgaggccg

SEQ ID NO: 3493978 - DNA, 25 bp, Homo sapien
gaatgacaagtaaataatcggaccc

SEQ ID NO: 3493979 - DNA, 25 bp, Homo sapien
agtaaataatcggacccatcatggg

SEQ ID NO: 3493980 - DNA, 25 bp, Homo sapien
catggggccgatttctgagagcaca

SEQ ID NO: 3493981 - DNA, 25 bp, Homo sapien
catcatggggccgatttctgagagc

SEQ ID NO: 3493982 - DNA, 25 bp, Homo sapien
cacacctggctgagcctgcgtcatt

SEQ ID NO: 3493983 - DNA, 25 bp, Homo sapien
ttggaagcaatgcagtagtactgcc

SEQ ID NO: 3493984 - DNA, 25 bp, Homo sapien
cagagtcgtccttgtgaacagcagt

SEQ ID NO: 3493985 - DNA, 25 bp, Homo sapien
gctgagcctgcgtcattggaagcaa

SEQ ID NO: 3493986 - DNA, 25 bp, Homo sapien
cagtgaaagttgcaaggctggccac

SEQ ID NO: 3493987 - DNA, 25 bp, Homo sapien
cagaagaaagctaacccatggcgga

SEQ ID NO: 3493988 - DNA, 25 bp, Homo sapien
aattactcgggctaaaactgtcagt

SEQ ID NO: 3493989 - DNA, 25 bp, Homo sapien
gttctggtggacctaggcagctcca

SEQ ID NO: 3493990 - DNA, 25 bp, Homo sapien
caataattccgccaatgttcaggtc

SEQ ID NO: 3493991 - DNA, 25 bp, Homo sapien
cagcagatgcccaacgtgatcaggg

SEQ ID NO: 3493992 - DNA, 25 bp, Homo sapien
tattgttgatgaagtagccacgtct

SEQ ID NO: 3493993 - DNA, 25 bp, Homo sapien
agggccagtacagcaaggacaacca

SEQ ID NO: 3493994 - DNA, 25 bp, Homo sapien
ctcgtcagtgcggatgtagttaact

SEQ ID NO: 3493995 - DNA, 25 bp, Homo sapien
tgtagttaactccatctggtttccc

SEQ ID NO: 3493996 - DNA, 25 bp, Homo sapien
tgcggatgtagttaactccatctgg

SEQ ID NO: 3493997 - DNA, 25 bp, Homo sapien
actccatctggtttccctgggttct

SEQ ID NO: 3493998 - DNA, 25 bp, Homo sapien
tcacaaacgatgacttgtgtctgaa

SEQ ID NO: 3493999 - DNA, 25 bp, Homo sapien
cacaaacgatgacttgtgtctgaag

SEQ ID NO: 3494000 - DNA, 25 bp, Homo sapien
atcacaaacgatgacttgtgtctga

SEQ ID NO: 3494001 - DNA, 25 bp, Homo sapien
atactcatgcgggaatcaggccaga

SEQ ID NO: 3494002 - DNA, 25 bp, Homo sapien
gaagagtagtggtcaactttggcca

SEQ ID NO: 3494003 - DNA, 25 bp, Homo sapien
gattaggaacccaactcagtgaacg

SEQ ID NO: 3494004 - DNA, 25 bp, Homo sapien
tcagctctcgctgccttgacaggag

SEQ ID NO: 3494005 - DNA, 25 bp, Homo sapien
caatggacactgcaacaccgatcag

SEQ ID NO: 3494006 - DNA, 25 bp, Homo sapien
taagaagaaactgcggtggtgtctg

SEQ ID NO: 3494007 - DNA, 25 bp, Homo sapien
tcgtggctgctgaacgaccagtggt

SEQ ID NO: 3494008 - DNA, 25 bp, Homo sapien
cagcacgggcgtttacgtgagcaaa

SEQ ID NO: 3494009 - DNA, 25 bp, Homo sapien
ccaaagctgggacgctacatggaag

SEQ ID NO: 3494010 - DNA, 25 bp, Homo sapien
gcaagggccacgtgagtaaagctca

SEQ ID NO: 3494011 - DNA, 25 bp, Homo sapien
tggacaagcagggttcctcaggcaa

SEQ ID NO: 3494012 - DNA, 25 bp, Homo sapien
ggtctgttacaggagcccaaagctg

SEQ ID NO: 3494013 - DNA, 25 bp, Homo sapien
cactatgacaaccaagaaggaggct

SEQ ID NO: 3494014 - DNA, 25 bp, Homo sapien
tatcggcctcgagtcttgagtcaca

SEQ ID NO: 3494015 - DNA, 25 bp, Homo sapien
tgtacagcaacatccatccaaaggc

SEQ ID NO: 3494016 - DNA, 25 bp, Homo sapien
cgtgaatccccaacgctgagggtgg

SEQ ID NO: 3494017 - DNA, 25 bp, Homo sapien
gagtagctgttgctcaccgtcctga

SEQ ID NO: 3494018 - DNA, 25 bp, Homo sapien
tatagatcctaggtctgccagggtg

SEQ ID NO: 3494019 - DNA, 25 bp, Homo sapien
cacacggccatttctaggagtagct

SEQ ID NO: 3494020 - DNA, 25 bp, Homo sapien
cgtcatcagaggttagtcagcccga

SEQ ID NO: 3494021 - DNA, 25 bp, Homo sapien
catgggtatttagcatctgtagagg

SEQ ID NO: 3494022 - DNA, 25 bp, Homo sapien
ttattagtgtaaaggaacatcccat

SEQ ID NO: 3494023 - DNA, 25 bp, Homo sapien
actattcaagatgggtctgtctgcc

SEQ ID NO: 3494024 - DNA, 25 bp, Homo sapien
gaagccattagcaagatgtatctgg

SEQ ID NO: 3494025 - DNA, 25 bp, Homo sapien
ttctgattcagtccgtcctggcttc

SEQ ID NO: 3494026 - DNA, 25 bp, Homo sapien
cttccttctgattcagtccgtcctg

SEQ ID NO: 3494027 - DNA, 25 bp, Homo sapien
cagggtggagaagcgcatcttcctt

SEQ ID NO: 3494028 - DNA, 25 bp, Homo sapien
ttaggggatatagcccagctgtgtc

SEQ ID NO: 3494029 - DNA, 25 bp, Homo sapien
tctggatgtatctgtaactgacccc

SEQ ID NO: 3494030 - DNA, 25 bp, Homo sapien
tcagacacgccactaattaggaacg

SEQ ID NO: 3494031 - DNA, 25 bp, Homo sapien
tgaccccatgcagttatgtagaaat

SEQ ID NO: 3494032 - DNA, 25 bp, Homo sapien
ggaacgtctacatataagtttcatg

SEQ ID NO: 3494033 - DNA, 25 bp, Homo sapien
ttgttaggttgtcatttacaatcct

SEQ ID NO: 3494034 - DNA, 25 bp, Homo sapien
tcatcatatttaattgttaggttgt

SEQ ID NO: 3494035 - DNA, 25 bp, Homo sapien
ttaggttgtcatttacaatcctgcc

SEQ ID NO: 3494036 - DNA, 25 bp, Homo sapien
tttctgagtggtattaagttattgc

SEQ ID NO: 3494037 - DNA, 25 bp, Homo sapien
cggtgcaacgcaccgaggcgcttcg

SEQ ID NO: 3494038 - DNA, 25 bp, Homo sapien
agggtcggccgtgcaatgctgcggg

SEQ ID NO: 3494039 - DNA, 25 bp, Homo sapien
gagcagcaatgcaccgaggagcagt

SEQ ID NO: 3494040 - DNA, 25 bp, Homo sapien
tgccctaggtaaagaaggccagagg

SEQ ID NO: 3494041 - DNA, 25 bp, Homo sapien
gaactcgatcttgatgccctggtgc

SEQ ID NO: 3494042 - DNA, 25 bp, Homo sapien
tcttgagggcaaggctcaccttccc

SEQ ID NO: 3494043 - DNA, 25 bp, Homo sapien
ttcagaaggatttccacctccacgc

SEQ ID NO: 3494044 - DNA, 25 bp, Homo sapien
tctccccgtcgtagaagaggaaata

SEQ ID NO: 3494045 - DNA, 25 bp, Homo sapien
atatgacaggcagaagcggagccgc

SEQ ID NO: 3494046 - DNA, 25 bp, Homo sapien
tcagtggtttcaatagtaggcagca

SEQ ID NO: 3494047 - DNA, 25 bp, Homo sapien
cagtgtccagaatcaatggtccaga

SEQ ID NO: 3494048 - DNA, 25 bp, Homo sapien
tctgggatcccacactagtgatgcc

SEQ ID NO: 3494049 - DNA, 25 bp, Homo sapien
cactgtggactgcaggccctttaaa

SEQ ID NO: 3494050 - DNA, 25 bp, Homo sapien
ctggactccaccctagtgtttctga

SEQ ID NO: 3494051 - DNA, 25 bp, Homo sapien
cttctgataagctccccaggacggc

SEQ ID NO: 3494052 - DNA, 25 bp, Homo sapien
taagttcatgccacccatttgtcct

SEQ ID NO: 3494053 - DNA, 25 bp, Homo sapien
tggttcccgcgatcgtagtagagtt

SEQ ID NO: 3494054 - DNA, 25 bp, Homo sapien
cctgtgtaggactcatacggcttct

SEQ ID NO: 3494055 - DNA, 25 bp, Homo sapien
taaactcaaagtcgaaggcctgcga

SEQ ID NO: 3494056 - DNA, 25 bp, Homo sapien
tctccacgtgggtaaactcaaagtc

SEQ ID NO: 3494057 - DNA, 25 bp, Homo sapien
cgggatccctgtgaagattctcaaa

SEQ ID NO: 3494058 - DNA, 25 bp, Homo sapien
gccggacagcaggtcaggatctcct

SEQ ID NO: 3494059 - DNA, 25 bp, Homo sapien
caaaggtaagacatgcgaaaatctc

SEQ ID NO: 3494060 - DNA, 25 bp, Homo sapien
catgctacaacctagggccactttc

SEQ ID NO: 3494061 - DNA, 25 bp, Homo sapien
tatgggtgtacagatatccgttcga

SEQ ID NO: 3494062 - DNA, 25 bp, Homo sapien
tctttcacgtagcacaatgtccttt

SEQ ID NO: 3494063 - DNA, 25 bp, Homo sapien
tctttctgccgtacaaacgcttaag

SEQ ID NO: 3494064 - DNA, 25 bp, Homo sapien
tccgcttctggatccaaaagaggaa

SEQ ID NO: 3494065 - DNA, 25 bp, Homo sapien
agtatttcagcctgccctctagagc

SEQ ID NO: 3494066 - DNA, 25 bp, Homo sapien
tctgagcagatcagtcctgactgca

SEQ ID NO: 3494067 - DNA, 25 bp, Homo sapien
ttgaaacactcttcccgcggttcca

SEQ ID NO: 3494068 - DNA, 25 bp, Homo sapien
tctgtccttagtgccaggtctgcgc

SEQ ID NO: 3494069 - DNA, 25 bp, Homo sapien
gacaacatcattgaggcggcggctg

SEQ ID NO: 3494070 - DNA, 25 bp, Homo sapien
tatgtgctgagtgtgtgaactacaa

SEQ ID NO: 3494071 - DNA, 25 bp, Homo sapien
tcaaattcaatgtgcagacagtcct

SEQ ID NO: 3494072 - DNA, 25 bp, Homo sapien
gaagagttcagctctgggtatgtgc

SEQ ID NO: 3494073 - DNA, 25 bp, Homo sapien
tctgagattgttcttagcagtagcg

SEQ ID NO: 3494074 - DNA, 25 bp, Homo sapien
tagcagtagcgggaaacagctgaag

SEQ ID NO: 3494075 - DNA, 25 bp, Homo sapien
gcacatgataatggaatggtattct

SEQ ID NO: 3494076 - DNA, 25 bp, Homo sapien
catggccaatatttggtttcgtcgc

SEQ ID NO: 3494077 - DNA, 25 bp, Homo sapien
ggtgccccgtccatgatctcgtact

SEQ ID NO: 3494078 - DNA, 25 bp, Homo sapien
gtacttggctatcgtgtcattctca

SEQ ID NO: 3494079 - DNA, 25 bp, Homo sapien
ttttgattctcaccagcaggaagta

SEQ ID NO: 3494080 - DNA, 25 bp, Homo sapien
gatgatgtctatctccatgtgcttg

SEQ ID NO: 3494081 - DNA, 25 bp, Homo sapien
ggttcaatcttcagtacaagcccga

SEQ ID NO: 3494082 - DNA, 25 bp, Homo sapien
ccaaagtgacgcttgaggttcaatc

SEQ ID NO: 3494083 - DNA, 25 bp, Homo sapien
ggtgaagatgggatagtagcctcaa

SEQ ID NO: 3494084 - DNA, 25 bp, Homo sapien
ggagctagagccaagtcacagacag

SEQ ID NO: 3494085 - DNA, 25 bp, Homo sapien
tctgggaaggtgcagtcgctctgct

SEQ ID NO: 3494086 - DNA, 25 bp, Homo sapien
cactccaggtcatgttgcagcttct

SEQ ID NO: 3494087 - DNA, 25 bp, Homo sapien
cagagagcaactgagtgggaacagc

SEQ ID NO: 3494088 - DNA, 25 bp, Homo sapien
gtgatgccctctcccttataccagg

SEQ ID NO: 3494089 - DNA, 25 bp, Homo sapien
cgcatggtgggcgtgagctcatacc

SEQ ID NO: 3494090 - DNA, 25 bp, Homo sapien
caggaagagccggatcgggatggac

SEQ ID NO: 3494091 - DNA, 25 bp, Homo sapien
gagaacttcttgttgatgtcccgca

SEQ ID NO: 3494092 - DNA, 25 bp, Homo sapien
caccaggttgaggtaatagcgcaca

SEQ ID NO: 3494093 - DNA, 25 bp, Homo sapien
agagagcctcctgttctgtcccaag

SEQ ID NO: 3494094 - DNA, 25 bp, Homo sapien
ttccataggaaagagagcctcctgt

SEQ ID NO: 3494095 - DNA, 25 bp, Homo sapien
cctgttctgtcccaagggcatcggg

SEQ ID NO: 3494096 - DNA, 25 bp, Homo sapien
cttccataggaaagagagcctcctg

SEQ ID NO: 3494097 - DNA, 25 bp, Homo sapien
ctcaaagcgctgtgaggcgatggcc

SEQ ID NO: 3494098 - DNA, 25 bp, Homo sapien
gccctcaaagcgctgtgaggcgatg

SEQ ID NO: 3494099 - DNA, 25 bp, Homo sapien
ggcgatggccgcctggtgggacatg

SEQ ID NO: 3494100 - DNA, 25 bp, Homo sapien
tgctcttccgtacgatgtcaccctt

SEQ ID NO: 3494101 - DNA, 25 bp, Homo sapien
tgcctgcagttgttgtcagacagct

SEQ ID NO: 3494102 - DNA, 25 bp, Homo sapien
cagacagctggctgggggtccgcac

SEQ ID NO: 3494103 - DNA, 25 bp, Homo sapien
agctggctgggggtccgcacctcac

SEQ ID NO: 3494104 - DNA, 25 bp, Homo sapien
acagctggctgggggtccgcacctc

SEQ ID NO: 3494105 - DNA, 25 bp, Homo sapien
gattcccaaagaggtagcttcccaa

SEQ ID NO: 3494106 - DNA, 25 bp, Homo sapien
caagtaacgggtcaactgagcctca

SEQ ID NO: 3494107 - DNA, 25 bp, Homo sapien
catcttccgtggtgggccgggttca

SEQ ID NO: 3494108 - DNA, 25 bp, Homo sapien
gtacaagatgtgactacccagggcc

SEQ ID NO: 3494109 - DNA, 25 bp, Homo sapien
tatttggcaagcagaatgattcgga

SEQ ID NO: 3494110 - DNA, 25 bp, Homo sapien
agcagaatgattcggaagtgtggca

SEQ ID NO: 3494111 - DNA, 25 bp, Homo sapien
cagaatgattcggaagtgtggcagc

SEQ ID NO: 3494112 - DNA, 25 bp, Homo sapien
aagatgacctatttggcaagcagaa

SEQ ID NO: 3494113 - DNA, 25 bp, Homo sapien
tgcacagcgcctgagagaatcaaag

SEQ ID NO: 3494114 - DNA, 25 bp, Homo sapien
cagagccgtagagggagaagtacct

SEQ ID NO: 3494115 - DNA, 25 bp, Homo sapien
tcaagggcagcgcatgggtgatcct

SEQ ID NO: 3494116 - DNA, 25 bp, Homo sapien
tcccatgaggattgtgtgtcgcacc

SEQ ID NO: 3494117 - DNA, 25 bp, Homo sapien
agccacaggggctttctttaatcag

SEQ ID NO: 3494118 - DNA, 25 bp, Homo sapien
tgggcacaatgcctccaaagccaca

SEQ ID NO: 3494119 - DNA, 25 bp, Homo sapien
ggaccgtgggcacaatgcctccaaa

SEQ ID NO: 3494120 - DNA, 25 bp, Homo sapien
aagccacaggggctttctttaatca

SEQ ID NO: 3494121 - DNA, 25 bp, Homo sapien
acttctggttcaggtgagctgcccc

SEQ ID NO: 3494122 - DNA, 25 bp, Homo sapien
tgggacttctggttcaggtgagctg

SEQ ID NO: 3494123 - DNA, 25 bp, Homo sapien
ggacttctggttcaggtgagctgcc

SEQ ID NO: 3494124 - DNA, 25 bp, Homo sapien
gacttctggttcaggtgagctgccc

SEQ ID NO: 3494125 - DNA, 25 bp, Homo sapien
ctccgttgcgctcgcactggcggga

SEQ ID NO: 3494126 - DNA, 25 bp, Homo sapien
gtctgaacgccttcgacctccgttg

SEQ ID NO: 3494127 - DNA, 25 bp, Homo sapien
gctccgcgttcagctaagagtctga

SEQ ID NO: 3494128 - DNA, 25 bp, Homo sapien
ttgcgctcgcactggcgggacctgc

SEQ ID NO: 3494129 - DNA, 25 bp, Homo sapien
atgcaggaggtcaagctccggtggc

SEQ ID NO: 3494130 - DNA, 25 bp, Homo sapien
tcaagctccggtggccggtctggac

SEQ ID NO: 3494131 - DNA, 25 bp, Homo sapien
aggcgcgccccgaaacgccggcagc

SEQ ID NO: 3494132 - DNA, 25 bp, Homo sapien
tctggacgaggacccggagaccgcc

SEQ ID NO: 3494133 - DNA, 25 bp, Homo sapien
ctgtcctactgcccgccaggagatc

SEQ ID NO: 3494134 - DNA, 25 bp, Homo sapien
gtcctactgcccgccaggagatcct

SEQ ID NO: 3494135 - DNA, 25 bp, Homo sapien
ctactgcccgccaggagatccttac

SEQ ID NO: 3494136 - DNA, 25 bp, Homo sapien
cctactgcccgccaggagatcctta

SEQ ID NO: 3494137 - DNA, 25 bp, Homo sapien
cacttctctaagcatccgagggtga

SEQ ID NO: 3494138 - DNA, 25 bp, Homo sapien
cagcccctcgcggacatatgtccgc

SEQ ID NO: 3494139 - DNA, 25 bp, Homo sapien
cggatggtggtgaccgaccggaggg

SEQ ID NO: 3494140 - DNA, 25 bp, Homo sapien
gtgaccggccggagtagggagccag

SEQ ID NO: 3494141 - DNA, 25 bp, Homo sapien
ctgtgggcaggattgcatatactgt

SEQ ID NO: 3494142 - DNA, 25 bp, Homo sapien
tgtgggcaggattgcatatactgtt

SEQ ID NO: 3494143 - DNA, 25 bp, Homo sapien
atttggagccatctctcgggcagca

SEQ ID NO: 3494144 - DNA, 25 bp, Homo sapien
tatttggagccatctctcgggcagc

SEQ ID NO: 3494145 - DNA, 25 bp, Homo sapien
tgtttgtatgtagacccctccgaag

SEQ ID NO: 3494146 - DNA, 25 bp, Homo sapien
tccgcatcacatccactgggaacag

SEQ ID NO: 3494147 - DNA, 25 bp, Homo sapien
tgctggtgcagcctgtagccaaggc

SEQ ID NO: 3494148 - DNA, 25 bp, Homo sapien
ggtatcaagacgtgacagcccagac

SEQ ID NO: 3494149 - DNA, 25 bp, Homo sapien
caattgggaagactctttaaaggca

SEQ ID NO: 3494150 - DNA, 25 bp, Homo sapien
aaggactacccagagataaccaggc

SEQ ID NO: 3494151 - DNA, 25 bp, Homo sapien
tacttctagttaggttacacgagcc

SEQ ID NO: 3494152 - DNA, 25 bp, Homo sapien
gctgaggtacttctcaccagcacgt

SEQ ID NO: 3494153 - DNA, 25 bp, Homo sapien
cgaagctatcaatcatccaggcaca

SEQ ID NO: 3494154 - DNA, 25 bp, Homo sapien
cagagcggtgggcaaaatttgtgcc

SEQ ID NO: 3494155 - DNA, 25 bp, Homo sapien
gcaaacttctccatggtacagagcg

SEQ ID NO: 3494156 - DNA, 25 bp, Homo sapien
gcctctgttcctcatttccgaagct

SEQ ID NO: 3494157 - DNA, 25 bp, Homo sapien
gaggagggatcaaaaggcagcagag

SEQ ID NO: 3494158 - DNA, 25 bp, Homo sapien
agcccagcacaattctatcttctag

SEQ ID NO: 3494159 - DNA, 25 bp, Homo sapien
gggagcccagcacaattctatcttc

SEQ ID NO: 3494160 - DNA, 25 bp, Homo sapien
gaaagtcagtgaggtcgagggagcc

SEQ ID NO: 3494161 - DNA, 25 bp, Homo sapien
gaggatgtaatgatctccctgtttc

SEQ ID NO: 3494162 - DNA, 25 bp, Homo sapien
ccctgtttcttagcggaggtcagaa

SEQ ID NO: 3494163 - DNA, 25 bp, Homo sapien
taatgatctccctgtttcttagcgg

SEQ ID NO: 3494164 - DNA, 25 bp, Homo sapien
gccattgaggatgtaatgatctccc

SEQ ID NO: 3494165 - DNA, 25 bp, Homo sapien
gcgtctgggaacaccactgggtcct

SEQ ID NO: 3494166 - DNA, 25 bp, Homo sapien
gcttgagttctcacagcgtctggga

SEQ ID NO: 3494167 - DNA, 25 bp, Homo sapien
gacaaaagtcaacgaaatgatctgg

SEQ ID NO: 3494168 - DNA, 25 bp, Homo sapien
gtaaaaggtcgctgcagtgactgca

SEQ ID NO: 3494169 - DNA, 25 bp, Homo sapien
tgaccacatagatgtctgactcacc

SEQ ID NO: 3494170 - DNA, 25 bp, Homo sapien
gcctggtcctcctgttcggcacatg

SEQ ID NO: 3494171 - DNA, 25 bp, Homo sapien
gggtccccttctcaacaactatgca

SEQ ID NO: 3494172 - DNA, 25 bp, Homo sapien
aacaactatgcatgagatgcccttg

SEQ ID NO: 3494173 - DNA, 25 bp, Homo sapien
gaattgtttcctgtccaacagccac

SEQ ID NO: 3494174 - DNA, 25 bp, Homo sapien
tgaattgtttcctgtccaacagcca

SEQ ID NO: 3494175 - DNA, 25 bp, Homo sapien
actgcttcaaaggtaggttagcaag

SEQ ID NO: 3494176 - DNA, 25 bp, Homo sapien
caaaggtaggttagcaagtatgcaa

SEQ ID NO: 3494177 - DNA, 25 bp, Homo sapien
gaatttactggcaaacattgtcact

SEQ ID NO: 3494178 - DNA, 25 bp, Homo sapien
ccccagaggcctagtgtttaataat

SEQ ID NO: 3494179 - DNA, 25 bp, Homo sapien
tttaataatgccctgttgtatttca

SEQ ID NO: 3494180 - DNA, 25 bp, Homo sapien
aggtggcttgaagaatttactggca

SEQ ID NO: 3494181 - DNA, 25 bp, Homo sapien
ctggataaggaacacaggccaaaag

SEQ ID NO: 3494182 - DNA, 25 bp, Homo sapien
tggataaggaacacaggccaaaagc

SEQ ID NO: 3494183 - DNA, 25 bp, Homo sapien
aggcaggagaggtcagaacactcac

SEQ ID NO: 3494184 - DNA, 25 bp, Homo sapien
cagaggcaggagaggtcagaacact

SEQ ID NO: 3494185 - DNA, 25 bp, Homo sapien
caacaaagtgcaccaacgtaagcag

SEQ ID NO: 3494186 - DNA, 25 bp, Homo sapien
agcaacaaagtgcaccaacgtaagc

SEQ ID NO: 3494187 - DNA, 25 bp, Homo sapien
gcaacaaagtgcaccaacgtaagca

SEQ ID NO: 3494188 - DNA, 25 bp, Homo sapien
ggaccacacgccttccattactgag

SEQ ID NO: 3494189 - DNA, 25 bp, Homo sapien
ccaggtcttctctaagcgtctcttc

SEQ ID NO: 3494190 - DNA, 25 bp, Homo sapien
ggccaacaccaggtcttctctaagc

SEQ ID NO: 3494191 - DNA, 25 bp, Homo sapien
gcaaaagggaccacacgccttccat

SEQ ID NO: 3494192 - DNA, 25 bp, Homo sapien
ggttgctgaaatacccacaatcatc

SEQ ID NO: 3494193 - DNA, 25 bp, Homo sapien
cttgggttgctgaaatacccacaat

SEQ ID NO: 3494194 - DNA, 25 bp, Homo sapien
tgggttgctgaaatacccacaatca

SEQ ID NO: 3494195 - DNA, 25 bp, Homo sapien
ttcttgggttgctgaaatacccaca

SEQ ID NO: 3494196 - DNA, 25 bp, Homo sapien
gaaacccgaggagctgtgagaaaga

SEQ ID NO: 3494197 - DNA, 25 bp, Homo sapien
gccatggcggctcttaatcctagaa

SEQ ID NO: 3494198 - DNA, 25 bp, Homo sapien
ccaattacggttacatgatcacaag

SEQ ID NO: 3494199 - DNA, 25 bp, Homo sapien
acaagtctcctgttcatgccctggc

SEQ ID NO: 3494200 - DNA, 25 bp, Homo sapien
caggagttagcatgggcttcacaca

SEQ ID NO: 3494201 - DNA, 25 bp, Homo sapien
tttaggattgtgacaccaactgccc

SEQ ID NO: 3494202 - DNA, 25 bp, Homo sapien
cagtagaagcctaggaaatggttgc

SEQ ID NO: 3494203 - DNA, 25 bp, Homo sapien
ggtttaaaggcctgtcagcactcag

SEQ ID NO: 3494204 - DNA, 25 bp, Homo sapien
ttgcccaacaatccagcaggtaggg

SEQ ID NO: 3494205 - DNA, 25 bp, Homo sapien
cccaacaatccagcaggtagggcgg

SEQ ID NO: 3494206 - DNA, 25 bp, Homo sapien
ggttgcccaacaatccagcaggtag

SEQ ID NO: 3494207 - DNA, 25 bp, Homo sapien
tgcgtggttgcccaacaatccagca

SEQ ID NO: 3494208 - DNA, 25 bp, Homo sapien
aattctgttggccacagggacagca

SEQ ID NO: 3494209 - DNA, 25 bp, Homo sapien
gggacagcacagtcttcgaagatca

SEQ ID NO: 3494210 - DNA, 25 bp, Homo sapien
tcgaagatcacagctcgtgttggct

SEQ ID NO: 3494211 - DNA, 25 bp, Homo sapien
tctcacggcaatgaggaagccctgc

SEQ ID NO: 3494212 - DNA, 25 bp, Homo sapien
ctgcttccggacattgaggtggtct

SEQ ID NO: 3494213 - DNA, 25 bp, Homo sapien
tccggacattgaggtggtctcgggt

SEQ ID NO: 3494214 - DNA, 25 bp, Homo sapien
cttccggacattgaggtggtctcgg

SEQ ID NO: 3494215 - DNA, 25 bp, Homo sapien
tggtctcgggtgaggatgacagagg

SEQ ID NO: 3494216 - DNA, 25 bp, Homo sapien
ggcaaagcattcatctgtagcaaag

SEQ ID NO: 3494217 - DNA, 25 bp, Homo sapien
tatcagccagtgtgaattgcaagta

SEQ ID NO: 3494218 - DNA, 25 bp, Homo sapien
gccactgctgcattgcggaccatca

SEQ ID NO: 3494219 - DNA, 25 bp, Homo sapien
gccaccagccttgttgccatatcag

SEQ ID NO: 3494220 - DNA, 25 bp, Homo sapien
accctggctgggatgataaaaagct

SEQ ID NO: 3494221 - DNA, 25 bp, Homo sapien
cctggctgggatgataaaaagctat

SEQ ID NO: 3494222 - DNA, 25 bp, Homo sapien
aaagctatggttccccctagtggca

SEQ ID NO: 3494223 - DNA, 25 bp, Homo sapien
ggctgggatgataaaaagctatggt

SEQ ID NO: 3494224 - DNA, 25 bp, Homo sapien
cagcccgccataaacccatgaaaga

SEQ ID NO: 3494225 - DNA, 25 bp, Homo sapien
agactgtggagcaagcagcttccct

SEQ ID NO: 3494226 - DNA, 25 bp, Homo sapien
gactagacgtcttggactctgggaa

SEQ ID NO: 3494227 - DNA, 25 bp, Homo sapien
tggttagagacaagggaagttcacc

SEQ ID NO: 3494228 - DNA, 25 bp, Homo sapien
gtaatccttcaggtagccgtagccc

SEQ ID NO: 3494229 - DNA, 25 bp, Homo sapien
tgaacagcgtaatccttcaggtagc

SEQ ID NO: 3494230 - DNA, 25 bp, Homo sapien
tactgctgaacagcgtaatccttca

SEQ ID NO: 3494231 - DNA, 25 bp, Homo sapien
tggagtcccgcacgtactgctgaac

SEQ ID NO: 3494232 - DNA, 25 bp, Homo sapien
gggcttgactgcaccctgaggccca

SEQ ID NO: 3494233 - DNA, 25 bp, Homo sapien
gaggaggaagcctcgagacagacag

SEQ ID NO: 3494234 - DNA, 25 bp, Homo sapien
gaaagcagcgatcccgcccccgttc

SEQ ID NO: 3494235 - DNA, 25 bp, Homo sapien
cctcgagacagacagggcttgactg

SEQ ID NO: 3494236 - DNA, 25 bp, Homo sapien
agcagagcgatctgaggccccccga

SEQ ID NO: 3494237 - DNA, 25 bp, Homo sapien
gaagctgcggctctggactccaggc

SEQ ID NO: 3494238 - DNA, 25 bp, Homo sapien
ccccgaaagggacgaagctgcggct

SEQ ID NO: 3494239 - DNA, 25 bp, Homo sapien
ccttctcgcagatctccagaggaaa

SEQ ID NO: 3494240 - DNA, 25 bp, Homo sapien
gagtgccccaattcttctgtaagtg

SEQ ID NO: 3494241 - DNA, 25 bp, Homo sapien
taacctgtggtagcctgtgactctg

SEQ ID NO: 3494242 - DNA, 25 bp, Homo sapien
agtttgaacactggcgactgagccc

SEQ ID NO: 3494243 - DNA, 25 bp, Homo sapien
tgttgcagatacaaattcccaggcc

SEQ ID NO: 3494244 - DNA, 25 bp, Homo sapien
gaaaggagggtatcaattatttgct

SEQ ID NO: 3494245 - DNA, 25 bp, Homo sapien
aaaggagggtatcaattatttgctt

SEQ ID NO: 3494246 - DNA, 25 bp, Homo sapien
tataattttagacagtcggggcttc

SEQ ID NO: 3494247 - DNA, 25 bp, Homo sapien
ataattttagacagtcggggcttca

SEQ ID NO: 3494248 - DNA, 25 bp, Homo sapien
attttagacagtcggggcttcaccg

SEQ ID NO: 3494249 - DNA, 25 bp, Homo sapien
taattttagacagtcggggcttcac

SEQ ID NO: 3494250 - DNA, 25 bp, Homo sapien
cagagtagctgcagatttaaactac

SEQ ID NO: 3494251 - DNA, 25 bp, Homo sapien
gaatttcacagcagcaaagtctgag

SEQ ID NO: 3494252 - DNA, 25 bp, Homo sapien
ctacaatcattgcttttagcctggg

SEQ ID NO: 3494253 - DNA, 25 bp, Homo sapien
tgctccaggcctagttcagagtagc

SEQ ID NO: 3494254 - DNA, 25 bp, Homo sapien
cagtatcctcatcacttcattgcta

SEQ ID NO: 3494255 - DNA, 25 bp, Homo sapien
agtatcctcatcacttcattgctac

SEQ ID NO: 3494256 - DNA, 25 bp, Homo sapien
ctactcctgaagcaggcttctagag

SEQ ID NO: 3494257 - DNA, 25 bp, Homo sapien
tcagtatcctcatcacttcattgct

SEQ ID NO: 3494258 - DNA, 25 bp, Homo sapien
gaagagcatcagtgaaagtccccag

SEQ ID NO: 3494259 - DNA, 25 bp, Homo sapien
tgaatagcactcctagaccacaggc

SEQ ID NO: 3494260 - DNA, 25 bp, Homo sapien
cattcagaggtgtgctatccagaga

SEQ ID NO: 3494261 - DNA, 25 bp, Homo sapien
tcctttggaatagagcggcccacat

SEQ ID NO: 3494262 - DNA, 25 bp, Homo sapien
tccacagcagacaggtctgcatttg

SEQ ID NO: 3494263 - DNA, 25 bp, Homo sapien
tgaattgccacattccttgactatt

SEQ ID NO: 3494264 - DNA, 25 bp, Homo sapien
ggaagcagcctgactactagcaagg

SEQ ID NO: 3494265 - DNA, 25 bp, Homo sapien
tgcatttgctaacacttgtctttcc

SEQ ID NO: 3494266 - DNA, 25 bp, Homo sapien
gatactttgctctccgacaccttag

SEQ ID NO: 3494267 - DNA, 25 bp, Homo sapien
cctgaaagtttcctagatcgtccat

SEQ ID NO: 3494268 - DNA, 25 bp, Homo sapien
aaggatactttgctctccgacacct

SEQ ID NO: 3494269 - DNA, 25 bp, Homo sapien
ccttagctccctgaaagtttcctag

SEQ ID NO: 3494270 - DNA, 25 bp, Homo sapien
tcttggcaaacgagcgagaattggg

SEQ ID NO: 3494271 - DNA, 25 bp, Homo sapien
agcctcacagcagatgcgagcgcgg

SEQ ID NO: 3494272 - DNA, 25 bp, Homo sapien
gcgcggcgggcgctttggtgacgaa

SEQ ID NO: 3494273 - DNA, 25 bp, Homo sapien
cgctttggtgacgaagtagcgggac

SEQ ID NO: 3494274 - DNA, 25 bp, Homo sapien
aggcagaaatccgtcccgaggcgcg

SEQ ID NO: 3494275 - DNA, 25 bp, Homo sapien
tcgggcttcctaacctgggtcgaca

SEQ ID NO: 3494276 - DNA, 25 bp, Homo sapien
cgctccaggtgttcccgcagtgcgt

SEQ ID NO: 3494277 - DNA, 25 bp, Homo sapien
aggctcaggtctgcgcgctgcgcct

SEQ ID NO: 3494278 - DNA, 25 bp, Homo sapien
cggatgcgctcttccaagcatgaag

SEQ ID NO: 3494279 - DNA, 25 bp, Homo sapien
aagatgcccgccattctcttccagg

SEQ ID NO: 3494280 - DNA, 25 bp, Homo sapien
ccaagcatgaagttctcttcctgct

SEQ ID NO: 3494281 - DNA, 25 bp, Homo sapien
taaaccgaggagcaaaacctgatga

SEQ ID NO: 3494282 - DNA, 25 bp, Homo sapien
ggcttaccccgacctgtgctttcag

SEQ ID NO: 3494283 - DNA, 25 bp, Homo sapien
gtgacagtattgaagccacaggcct

SEQ ID NO: 3494284 - DNA, 25 bp, Homo sapien
gatcaggaacttgtggccctccagt

SEQ ID NO: 3494285 - DNA, 25 bp, Homo sapien
aagtcccacagatcgattcttcagc

SEQ ID NO: 3494286 - DNA, 25 bp, Homo sapien
ccaggtccaggttcccagagaagtc

SEQ ID NO: 3494287 - DNA, 25 bp, Homo sapien
tctggctcatgcaggttccacggaa

SEQ ID NO: 3494288 - DNA, 25 bp, Homo sapien
ggctcatgcaggttccacggaacat

SEQ ID NO: 3494289 - DNA, 25 bp, Homo sapien
gaagtcaaatttgcctctttctggc

SEQ ID NO: 3494290 - DNA, 25 bp, Homo sapien
tttggttgctaatccacccccagta

SEQ ID NO: 3494291 - DNA, 25 bp, Homo sapien
ttctctttggttgctaatccacccc

SEQ ID NO: 3494292 - DNA, 25 bp, Homo sapien
tggttgctaatccacccccagtagc

SEQ ID NO: 3494293 - DNA, 25 bp, Homo sapien
tggttctctttggttgctaatccac

SEQ ID NO: 3494294 - DNA, 25 bp, Homo sapien
caggtcggtggcctgagctgctccc

SEQ ID NO: 3494295 - DNA, 25 bp, Homo sapien
agagcctctgcacagccccatcggg

SEQ ID NO: 3494296 - DNA, 25 bp, Homo sapien
ctcagagcctctgcacagccccatc

SEQ ID NO: 3494297 - DNA, 25 bp, Homo sapien
ctgctcccagcctcagagcctctgc

SEQ ID NO: 3494298 - DNA, 25 bp, Homo sapien
cctcccacgacggcccaggatgagg

SEQ ID NO: 3494299 - DNA, 25 bp, Homo sapien
ctagggaggtccacatcgtcagccc

SEQ ID NO: 3494300 - DNA, 25 bp, Homo sapien
agggaggtccacatcgtcagcccct

SEQ ID NO: 3494301 - DNA, 25 bp, Homo sapien
agcccctcccacgacggcccaggat

SEQ ID NO: 3494302 - DNA, 25 bp, Homo sapien
agaatcacccacagcccgatctctg

SEQ ID NO: 3494303 - DNA, 25 bp, Homo sapien
gggcaagcccccgaggtccatctca

SEQ ID NO: 3494304 - DNA, 25 bp, Homo sapien
atctctgcggccatcaggacgaagg

SEQ ID NO: 3494305 - DNA, 25 bp, Homo sapien
ggcctggacgcagaatcacccacag

SEQ ID NO: 3494306 - DNA, 25 bp, Homo sapien
tctcaactgcttcaatgaagctctt

SEQ ID NO: 3494307 - DNA, 25 bp, Homo sapien
tgttggttgtcctcaacagtaaccg

SEQ ID NO: 3494308 - DNA, 25 bp, Homo sapien
aatgaagctcttgttggttgtcctc

SEQ ID NO: 3494309 - DNA, 25 bp, Homo sapien
taaccgggggtcttgcaggagccag

SEQ ID NO: 3494310 - DNA, 25 bp, Homo sapien
gaaggcgtttcttatcaagtgcatg

SEQ ID NO: 3494311 - DNA, 25 bp, Homo sapien
tgactgtgtgctctaggttgccatg

SEQ ID NO: 3494312 - DNA, 25 bp, Homo sapien
taaaaaaggcaatgctgttgggcgc

SEQ ID NO: 3494313 - DNA, 25 bp, Homo sapien
caagtgcatgaggtctgggtacacc

SEQ ID NO: 3494314 - DNA, 25 bp, Homo sapien
gcctgtgaacggcatttgtgcttct

SEQ ID NO: 3494315 - DNA, 25 bp, Homo sapien
cctcgttgcatacatgtgcctgtga

SEQ ID NO: 3494316 - DNA, 25 bp, Homo sapien
aaaagtttcctagcatttcccacag

SEQ ID NO: 3494317 - DNA, 25 bp, Homo sapien
ccacagttcaatgggatgcctgtaa

SEQ ID NO: 3494318 - DNA, 25 bp, Homo sapien
ggtatggggcattacatttcactta

SEQ ID NO: 3494319 - DNA, 25 bp, Homo sapien
tatgcgaggtatggggcattacatt

SEQ ID NO: 3494320 - DNA, 25 bp, Homo sapien
attagtgcaaggtatgcgaggtatg

SEQ ID NO: 3494321 - DNA, 25 bp, Homo sapien
aaattagtgcaaggtatgcgaggta

SEQ ID NO: 3494322 - DNA, 25 bp, Homo sapien
tcattctccacttgcaccgcgatga

SEQ ID NO: 3494323 - DNA, 25 bp, Homo sapien
tgaatgagccatactcattctccac

SEQ ID NO: 3494324 - DNA, 25 bp, Homo sapien
catcagaggtcaagagaagctccac

SEQ ID NO: 3494325 - DNA, 25 bp, Homo sapien
gaggtcaagagaagctccacaatcc

SEQ ID NO: 3494326 - DNA, 25 bp, Homo sapien
gtcaagagaagctccacaatccctc

SEQ ID NO: 3494327 - DNA, 25 bp, Homo sapien
agagaagctccacaatccctcttct

SEQ ID NO: 3494328 - DNA, 25 bp, Homo sapien
tgtggccactcagcacatgtttctc

SEQ ID NO: 3494329 - DNA, 25 bp, Homo sapien
gtggccactcagcacatgtttctca

SEQ ID NO: 3494330 - DNA, 25 bp, Homo sapien
tggccactcagcacatgtttctcac

SEQ ID NO: 3494331 - DNA, 25 bp, Homo sapien
gtgtggccactcagcacatgtttct

SEQ ID NO: 3494332 - DNA, 25 bp, Homo sapien
tttaaagacggcaggagcaaggcca

SEQ ID NO: 3494333 - DNA, 25 bp, Homo sapien
tggccctgagccttaaccttgagtc

SEQ ID NO: 3494334 - DNA, 25 bp, Homo sapien
tgttcaagatttacacgggctggct

SEQ ID NO: 3494335 - DNA, 25 bp, Homo sapien
tttcccaagttagtggagatggccc

SEQ ID NO: 3494336 - DNA, 25 bp, Homo sapien
ttttgcaaattgatggcggccaaca

SEQ ID NO: 3494337 - DNA, 25 bp, Homo sapien
tatgaagctgattgaaagtatcctg

SEQ ID NO: 3494338 - DNA, 25 bp, Homo sapien
gctgattgaaagtatcctggtgaag

SEQ ID NO: 3494339 - DNA, 25 bp, Homo sapien
gtttttgcaaattgatggcggccaa

SEQ ID NO: 3494340 - DNA, 25 bp, Homo sapien
ggtcttcttgtcaaacctgttttca

SEQ ID NO: 3494341 - DNA, 25 bp, Homo sapien
caaacctgttttcacggaataccag

SEQ ID NO: 3494342 - DNA, 25 bp, Homo sapien
ggtgaaaacctgcggtcttcttgtc

SEQ ID NO: 3494343 - DNA, 25 bp, Homo sapien
cctgcggtcttcttgtcaaacctgt

SEQ ID NO: 3494344 - DNA, 25 bp, Homo sapien
cccactcatctccatgacgtgatcc

SEQ ID NO: 3494345 - DNA, 25 bp, Homo sapien
gaggtgacacaagcagggttccctc

SEQ ID NO: 3494346 - DNA, 25 bp, Homo sapien
ggtgacacaagcagggttccctcct

SEQ ID NO: 3494347 - DNA, 25 bp, Homo sapien
tgacacaagcagggttccctcctcc

SEQ ID NO: 3494348 - DNA, 25 bp, Homo sapien
ccacatggcctagcagaatgaaagg

SEQ ID NO: 3494349 - DNA, 25 bp, Homo sapien
ggcaggctgatctccaagacagtat

SEQ ID NO: 3494350 - DNA, 25 bp, Homo sapien
catactatagctgagagatccgcaa

SEQ ID NO: 3494351 - DNA, 25 bp, Homo sapien
caatgcaaaggcgagactcagaggg

SEQ ID NO: 3494352 - DNA, 25 bp, Homo sapien
gttgctgcttgtgaggcatctgaga

SEQ ID NO: 3494353 - DNA, 25 bp, Homo sapien
ttgctgcttgtgaggcatctgagag

SEQ ID NO: 3494354 - DNA, 25 bp, Homo sapien
gctggtgaagggaatgcactttaca

SEQ ID NO: 3494355 - DNA, 25 bp, Homo sapien
tatcagttacagaatagggtgcaca

SEQ ID NO: 3494356 - DNA, 25 bp, Homo sapien
gaagcttagaaggacaaaattatgg

SEQ ID NO: 3494357 - DNA, 25 bp, Homo sapien
cactttacataattcagtgcatcag

SEQ ID NO: 3494358 - DNA, 25 bp, Homo sapien
gacccagtattccataatcagaagg

SEQ ID NO: 3494359 - DNA, 25 bp, Homo sapien
catctttaacatggtgcttatctcc

SEQ ID NO: 3494360 - DNA, 25 bp, Homo sapien
tctgtcgaaccagccgacccagtat

SEQ ID NO: 3494361 - DNA, 25 bp, Homo sapien
aacatggtgcttatctccccatctg

SEQ ID NO: 3494362 - DNA, 25 bp, Homo sapien
cattttcagagaagcttcggtgacc

SEQ ID NO: 3494363 - DNA, 25 bp, Homo sapien
tagagagggcctatgcactgctaga

SEQ ID NO: 3494364 - DNA, 25 bp, Homo sapien
gctatcgctgcatgttgtcccctga

SEQ ID NO: 3494365 - DNA, 25 bp, Homo sapien
tgaaggaagcctgcatgaagctagc

SEQ ID NO: 3494366 - DNA, 25 bp, Homo sapien
ttgatggtgatggtggtgatagtgg

SEQ ID NO: 3494367 - DNA, 25 bp, Homo sapien
atggtggtgatggtgttgatggtga

SEQ ID NO: 3494368 - DNA, 25 bp, Homo sapien
gatggtgatggtggtgatagtggtg

SEQ ID NO: 3494369 - DNA, 25 bp, Homo sapien
gatgatggtggtgatggtgttgatg

SEQ ID NO: 3494370 - DNA, 25 bp, Homo sapien
aggagatctcatatttgatgaattc

SEQ ID NO: 3494371 - DNA, 25 bp, Homo sapien
atttgatgaattcagacacagcatg

SEQ ID NO: 3494372 - DNA, 25 bp, Homo sapien
tatttgatgaattcagacacagcat

SEQ ID NO: 3494373 - DNA, 25 bp, Homo sapien
tttgatgaattcagacacagcatgt

SEQ ID NO: 3494374 - DNA, 25 bp, Homo sapien
tgcttcccgaaatatgtggccccgt

SEQ ID NO: 3494375 - DNA, 25 bp, Homo sapien
tgcccgagtgcttcccgaaatatgt

SEQ ID NO: 3494376 - DNA, 25 bp, Homo sapien
tgtggccccgttcatgaaaccaaag

SEQ ID NO: 3494377 - DNA, 25 bp, Homo sapien
gtgacaatgcccgagtgcttcccga

SEQ ID NO: 3494378 - DNA, 25 bp, Homo sapien
gctggagaggctactacaccagcga

SEQ ID NO: 3494379 - DNA, 25 bp, Homo sapien
ctggagaggctactacaccagcgac

SEQ ID NO: 3494380 - DNA, 25 bp, Homo sapien
tcaagaacccagtggtgccagaaca

SEQ ID NO: 3494381 - DNA, 25 bp, Homo sapien
tgccagaacaggcttccggagcctc

SEQ ID NO: 3494382 - DNA, 25 bp, Homo sapien
cagtggtgccagaacaggcttccgg

SEQ ID NO: 3494383 - DNA, 25 bp, Homo sapien
gaacccagtggtgccagaacaggct

SEQ ID NO: 3494384 - DNA, 25 bp, Homo sapien
tgtgaagcggagctctaagtcccgg

SEQ ID NO: 3494385 - DNA, 25 bp, Homo sapien
tctactgcaatgacagcctgttggg

SEQ ID NO: 3494386 - DNA, 25 bp, Homo sapien
gccaacagggcagtataccagatgt

SEQ ID NO: 3494387 - DNA, 25 bp, Homo sapien
gatgccagtctaaggacattcccca

SEQ ID NO: 3494388 - DNA, 25 bp, Homo sapien
tgtgtaatctccagcctccgtgagc

SEQ ID NO: 3494389 - DNA, 25 bp, Homo sapien
gtaatctccagcctccgtgagcact

SEQ ID NO: 3494390 - DNA, 25 bp, Homo sapien
aatctccagcctccgtgagcactgc

SEQ ID NO: 3494391 - DNA, 25 bp, Homo sapien
gtgtaatctccagcctccgtgagca

SEQ ID NO: 3494392 - DNA, 25 bp, Homo sapien
cgtaagttaaatgggtgctgagtac

SEQ ID NO: 3494393 - DNA, 25 bp, Homo sapien
ggcccgtaagttaaatgggtgctga

SEQ ID NO: 3494394 - DNA, 25 bp, Homo sapien
atgaggagggctggcccgtaagtta

SEQ ID NO: 3494395 - DNA, 25 bp, Homo sapien
gctggcccgtaagttaaatgggtgc

SEQ ID NO: 3494396 - DNA, 25 bp, Homo sapien
tactatgtcatccatggtataagag

SEQ ID NO: 3494397 - DNA, 25 bp, Homo sapien
gagtaactcaatcttcgcagtcatc

SEQ ID NO: 3494398 - DNA, 25 bp, Homo sapien
gagcttggtgtaactgctgcccaca

SEQ ID NO: 3494399 - DNA, 25 bp, Homo sapien
catcacaggagaccaaggttactat

SEQ ID NO: 3494400 - DNA, 25 bp, Homo sapien
gtctcacggggggatacacagcctt

SEQ ID NO: 3494401 - DNA, 25 bp, Homo sapien
ggaggtacagcgacggtctcacggg

SEQ ID NO: 3494402 - DNA, 25 bp, Homo sapien
ttaagtaggatagggcgtcccacag

SEQ ID NO: 3494403 - DNA, 25 bp, Homo sapien
ccacagcgggaggtacagcgacggt

SEQ ID NO: 3494404 - DNA, 25 bp, Homo sapien
ggcagaagctagtctcccgattcca

SEQ ID NO: 3494405 - DNA, 25 bp, Homo sapien
gaaacagatgccatgtgacactgct

SEQ ID NO: 3494406 - DNA, 25 bp, Homo sapien
gcagcttttcctacgtggattccgt

SEQ ID NO: 3494407 - DNA, 25 bp, Homo sapien
tggattccgtaaggaccacacagtc

SEQ ID NO: 3494408 - DNA, 25 bp, Homo sapien
tgacgggctgacgcgacctgactgg

SEQ ID NO: 3494409 - DNA, 25 bp, Homo sapien
gttgacgggctgacgcgacctgact

SEQ ID NO: 3494410 - DNA, 25 bp, Homo sapien
ttgacgggctgacgcgacctgactg

SEQ ID NO: 3494411 - DNA, 25 bp, Homo sapien
cgtgggcacggaggcggcctccgga

SEQ ID NO: 3494412 - DNA, 25 bp, Homo sapien
aggacaagcccgtaggactggccgc

SEQ ID NO: 3494413 - DNA, 25 bp, Homo sapien
gatggacttctcatacaggacaagc

SEQ ID NO: 3494414 - DNA, 25 bp, Homo sapien
tgtgccacgtcatgagcgtgggcac

SEQ ID NO: 3494415 - DNA, 25 bp, Homo sapien
tgagttcaggaatgtgcaggtcctt

SEQ ID NO: 3494416 - DNA, 25 bp, Homo sapien
ccctatcattgtctcatccaaaaac

SEQ ID NO: 3494417 - DNA, 25 bp, Homo sapien
gagttcaggaatgtgcaggtcctta

SEQ ID NO: 3494418 - DNA, 25 bp, Homo sapien
cagaatccctatcattgtctcatcc

SEQ ID NO: 3494419 - DNA, 25 bp, Homo sapien
tctgtatttgccatgaaaaattgac

SEQ ID NO: 3494420 - DNA, 25 bp, Homo sapien
gccatgaaaaattgactcgtccttg

SEQ ID NO: 3494421 - DNA, 25 bp, Homo sapien
aattgactcgtccttgattctccac

SEQ ID NO: 3494422 - DNA, 25 bp, Homo sapien
gactcgtccttgattctccaccagg

SEQ ID NO: 3494423 - DNA, 25 bp, Homo sapien
cagggaatagatggtaaagccctcc

SEQ ID NO: 3494424 - DNA, 25 bp, Homo sapien
cagggaagagttattgatgctgaca

SEQ ID NO: 3494425 - DNA, 25 bp, Homo sapien
gaatagatggtaaagccctccaggg

SEQ ID NO: 3494426 - DNA, 25 bp, Homo sapien
cctccagggaagagttattgatgct

SEQ ID NO: 3494427 - DNA, 25 bp, Homo sapien
tcccacagtagaaggccgggccctg

SEQ ID NO: 3494428 - DNA, 25 bp, Homo sapien
tatcgcccaaggttacgtccattga

SEQ ID NO: 3494429 - DNA, 25 bp, Homo sapien
ctcattgtcttctggatgaagccaa

SEQ ID NO: 3494430 - DNA, 25 bp, Homo sapien
tccattgatgaacacaaatccataa

SEQ ID NO: 3494431 - DNA, 25 bp, Homo sapien
caatattccaatatcgcccaaggtt

SEQ ID NO: 3494432 - DNA, 25 bp, Homo sapien
tttgatctgaaagtttatgagatct

SEQ ID NO: 3494433 - DNA, 25 bp, Homo sapien
tgatctgaaagtttatgagatctca

SEQ ID NO: 3494434 - DNA, 25 bp, Homo sapien
attttgatctgaaagtttatgagat

SEQ ID NO: 3494435 - DNA, 25 bp, Homo sapien
ttgatctgaaagtttatgagatctc

SEQ ID NO: 3494436 - DNA, 25 bp, Homo sapien
ctgtagatttgatatctgagccact

SEQ ID NO: 3494437 - DNA, 25 bp, Homo sapien
gtagatttgatatctgagccactca

SEQ ID NO: 3494438 - DNA, 25 bp, Homo sapien
gatttgatatctgagccactcatca

SEQ ID NO: 3494439 - DNA, 25 bp, Homo sapien
tgatatctgagccactcatcatctt

SEQ ID NO: 3494440 - DNA, 25 bp, Homo sapien
cacatctactcaaaggcacgtttaa

SEQ ID NO: 3494441 - DNA, 25 bp, Homo sapien
caaaaatgacttatagatgaactcc

SEQ ID NO: 3494442 - DNA, 25 bp, Homo sapien
aaaatatgttcacggccgggagtgg

SEQ ID NO: 3494443 - DNA, 25 bp, Homo sapien
aataagagcctgctaaggattaagc

SEQ ID NO: 3494444 - DNA, 25 bp, Homo sapien
tagtagcgaaagaggaggtgccaat

SEQ ID NO: 3494445 - DNA, 25 bp, Homo sapien
cttatgggacattgagaaaggccgc

SEQ ID NO: 3494446 - DNA, 25 bp, Homo sapien
ccctgagagcgtgaagatgtaatgc

SEQ ID NO: 3494447 - DNA, 25 bp, Homo sapien
gaaaagactggcatacgtgtggaac

SEQ ID NO: 3494448 - DNA, 25 bp, Homo sapien
tagatctggaaatgtttgctttaca

SEQ ID NO: 3494449 - DNA, 25 bp, Homo sapien
tatgggtaaccctctatacctagta

SEQ ID NO: 3494450 - DNA, 25 bp, Homo sapien
taccgtttagagtttagcgcattta

SEQ ID NO: 3494451 - DNA, 25 bp, Homo sapien
tatccttggactttcgatcattgca

SEQ ID NO: 3494452 - DNA, 25 bp, Homo sapien
cattgggtaaggctatgattgcttg

SEQ ID NO: 3494453 - DNA, 25 bp, Homo sapien
tggaatataccagctagccccgaag

SEQ ID NO: 3494454 - DNA, 25 bp, Homo sapien
gagaaattgtcaaaggctagcccct

SEQ ID NO: 3494455 - DNA, 25 bp, Homo sapien
taagcaccgcaaacattcccagagg

SEQ ID NO: 3494456 - DNA, 25 bp, Homo sapien
agtccgcactcagccgcgcgcggga

SEQ ID NO: 3494457 - DNA, 25 bp, Homo sapien
cgctcattggctggggctcgcggct

SEQ ID NO: 3494458 - DNA, 25 bp, Homo sapien
cggagccgcgcactggtcgcctggg

SEQ ID NO: 3494459 - DNA, 25 bp, Homo sapien
cgtgttctctaagcgcggggacccg

SEQ ID NO: 3494460 - DNA, 25 bp, Homo sapien
gtgcgggccggcctccgccggaggc

SEQ ID NO: 3494461 - DNA, 25 bp, Homo sapien
accaggaagcccaagacgaccagca

SEQ ID NO: 3494462 - DNA, 25 bp, Homo sapien
cggcctccgccggaggctccacgtg

SEQ ID NO: 3494463 - DNA, 25 bp, Homo sapien
tcccagcgtgcgggccggcctccgc

SEQ ID NO: 3494464 - DNA, 25 bp, Homo sapien
gagctctccgcggagcagtggggac

SEQ ID NO: 3494465 - DNA, 25 bp, Homo sapien
gggtgcgtctgagagggctctgacg

SEQ ID NO: 3494466 - DNA, 25 bp, Homo sapien
cgatggggtgcgtctgagagggctc

SEQ ID NO: 3494467 - DNA, 25 bp, Homo sapien
tgagagggctctgacggctggaggg

SEQ ID NO: 3494468 - DNA, 25 bp, Homo sapien
tgcggaataaggcgcctcccagagg

SEQ ID NO: 3494469 - DNA, 25 bp, Homo sapien
ctgcggaataaggcgcctcccagag

SEQ ID NO: 3494470 - DNA, 25 bp, Homo sapien
agtgctgacctgaaagatagggtca

SEQ ID NO: 3494471 - DNA, 25 bp, Homo sapien
tcattcgatactgccggtcggcttc

SEQ ID NO: 3494472 - DNA, 25 bp, Homo sapien
tcagttcattcgatactgccggtcg

SEQ ID NO: 3494473 - DNA, 25 bp, Homo sapien
ggttttgaatatggaaagtgctgac

SEQ ID NO: 3494474 - DNA, 25 bp, Homo sapien
tcagagctccttgagcttctgttct

SEQ ID NO: 3494475 - DNA, 25 bp, Homo sapien
gctccttgagcttctgttctacctg

SEQ ID NO: 3494476 - DNA, 25 bp, Homo sapien
cagagctccttgagcttctgttcta

SEQ ID NO: 3494477 - DNA, 25 bp, Homo sapien
gagctccttgagcttctgttctacc

SEQ ID NO: 3494478 - DNA, 25 bp, Homo sapien
agataggccaggatccatgcaaccg

SEQ ID NO: 3494479 - DNA, 25 bp, Homo sapien
aacatccggagtacgatgaccgccg

SEQ ID NO: 3494480 - DNA, 25 bp, Homo sapien
tgccatgcagagtatgaccagacac

SEQ ID NO: 3494481 - DNA, 25 bp, Homo sapien
cacagcagaacatccggagtgccgt

SEQ ID NO: 3494482 - DNA, 25 bp, Homo sapien
ggccgtcgaaggctccggtccgcga

SEQ ID NO: 3494483 - DNA, 25 bp, Homo sapien
gtccgcgagaaagcgcctctcggca

SEQ ID NO: 3494484 - DNA, 25 bp, Homo sapien
cgaaggctccggtccgcgagaaagc

SEQ ID NO: 3494485 - DNA, 25 bp, Homo sapien
cggtccgcgagaaagcgcctctcgg

SEQ ID NO: 3494486 - DNA, 25 bp, Homo sapien
ccatccacccgattccaggtcttca

SEQ ID NO: 3494487 - DNA, 25 bp, Homo sapien
cacccatccacccgattccaggtct

SEQ ID NO: 3494488 - DNA, 25 bp, Homo sapien
gtctgcgttggcggcgtccacccat

SEQ ID NO: 3494489 - DNA, 25 bp, Homo sapien
tgcgttggcggcgtccacccatcca

SEQ ID NO: 3494490 - DNA, 25 bp, Homo sapien
agcgacttcacacggtacctccgag

SEQ ID NO: 3494491 - DNA, 25 bp, Homo sapien
gcggccacgcgcgacagcgacttca

SEQ ID NO: 3494492 - DNA, 25 bp, Homo sapien
agccgcccgaccgcaggagcagaga

SEQ ID NO: 3494493 - DNA, 25 bp, Homo sapien
acgcgcgacagcgacttcacacggt

SEQ ID NO: 3494494 - DNA, 25 bp, Homo sapien
gcaagcacagcactcggcatggagg

SEQ ID NO: 3494495 - DNA, 25 bp, Homo sapien
gaggctgcagccggcagcaagcaca

SEQ ID NO: 3494496 - DNA, 25 bp, Homo sapien
agccggcagcaagcacagcactcgg

SEQ ID NO: 3494497 - DNA, 25 bp, Homo sapien
gcagcaagcacagcactcggcatgg

SEQ ID NO: 3494498 - DNA, 25 bp, Homo sapien
ccttcgcaggtcctcggcatttctc

SEQ ID NO: 3494499 - DNA, 25 bp, Homo sapien
tggctgggaaaagctcccctccgcc

SEQ ID NO: 3494500 - DNA, 25 bp, Homo sapien
ctccgggccgcagagagatcggctt

SEQ ID NO: 3494501 - DNA, 25 bp, Homo sapien
agagagatcggcttcctcgcccctt

SEQ ID NO: 3494502 - DNA, 25 bp, Homo sapien
tgcagccccagctgtcgatggcgga

SEQ ID NO: 3494503 - DNA, 25 bp, Homo sapien
gtgagggtgttcaagccacaggcct

SEQ ID NO: 3494504 - DNA, 25 bp, Homo sapien
tggtgagggtgttcaagccacaggc

SEQ ID NO: 3494505 - DNA, 25 bp, Homo sapien
tgtcgatggcggagccgcagaggga

SEQ ID NO: 3494506 - DNA, 25 bp, Homo sapien
ccaggtccaggttcccagagaagtc

SEQ ID NO: 3494507 - DNA, 25 bp, Homo sapien
ggctcatgcaggttccacggaacat

SEQ ID NO: 3494508 - DNA, 25 bp, Homo sapien
tctggctcatgcaggttccacggaa

SEQ ID NO: 3494509 - DNA, 25 bp, Homo sapien
gaagtcaaatttgcctctttctggc

SEQ ID NO: 3494510 - DNA, 25 bp, Homo sapien
cggggactcccacaccaggtcggtg

SEQ ID NO: 3494511 - DNA, 25 bp, Homo sapien
cctcccacgacggcccaggatgagg

SEQ ID NO: 3494512 - DNA, 25 bp, Homo sapien
agggaggtccacatcgtcagcccct

SEQ ID NO: 3494513 - DNA, 25 bp, Homo sapien
ctagggaggtccacatcgtcagccc

SEQ ID NO: 3494514 - DNA, 25 bp, Homo sapien
agcccctcccacgacggcccaggat

SEQ ID NO: 3494515 - DNA, 25 bp, Homo sapien
agaatcacccacagcccgatctctg

SEQ ID NO: 3494516 - DNA, 25 bp, Homo sapien
gggcaagcccccgaggtccatctca

SEQ ID NO: 3494517 - DNA, 25 bp, Homo sapien
atctctgcggccatcaggacgaagg

SEQ ID NO: 3494518 - DNA, 25 bp, Homo sapien
ggcctggacgcagaatcacccacag

SEQ ID NO: 3494519 - DNA, 25 bp, Homo sapien
gaaagcgatcccctctgggtgctgc

SEQ ID NO: 3494520 - DNA, 25 bp, Homo sapien
catgcatggctacgtgagggcactc

SEQ ID NO: 3494521 - DNA, 25 bp, Homo sapien
aactggaacacaattcagtacagaa

SEQ ID NO: 3494522 - DNA, 25 bp, Homo sapien
gacctatgtctgtgagctttttgcc

SEQ ID NO: 3494523 - DNA, 25 bp, Homo sapien
gtagtggagacagaagctatgcccc

SEQ ID NO: 3494524 - DNA, 25 bp, Homo sapien
ccctgggtagtggagacagaagcta

SEQ ID NO: 3494525 - DNA, 25 bp, Homo sapien
atggatcagtgcctgagaagtggcc

SEQ ID NO: 3494526 - DNA, 25 bp, Homo sapien
ggctggatggatcagtgcctgagaa

SEQ ID NO: 3494527 - DNA, 25 bp, Homo sapien
gaaaagcttttcacaggactccagg

SEQ ID NO: 3494528 - DNA, 25 bp, Homo sapien
tctggaagtcctaaacagggtcagg

SEQ ID NO: 3494529 - DNA, 25 bp, Homo sapien
caaaagggttaggaatcactgaggc

SEQ ID NO: 3494530 - DNA, 25 bp, Homo sapien
cacagcagcgtggattggttccaaa

SEQ ID NO: 3494531 - DNA, 25 bp, Homo sapien
caggtggtcaaaataaaggtccact

SEQ ID NO: 3494532 - DNA, 25 bp, Homo sapien
taaaggtccactgcttcggtgaagc

SEQ ID NO: 3494533 - DNA, 25 bp, Homo sapien
cactgcttcggtgaagcccttgtaa

SEQ ID NO: 3494534 - DNA, 25 bp, Homo sapien
tcggtgaagcccttgtaagttgtcc

SEQ ID NO: 3494535 - DNA, 25 bp, Homo sapien
cttcttgacgtagggcatgtatgcg

SEQ ID NO: 3494536 - DNA, 25 bp, Homo sapien
ccacctgcacggcaatgataggtcc

SEQ ID NO: 3494537 - DNA, 25 bp, Homo sapien
tatgcggggtctttattataggaac

SEQ ID NO: 3494538 - DNA, 25 bp, Homo sapien
gcaatgataggtcccccacgcttgt

SEQ ID NO: 3494539 - DNA, 25 bp, Homo sapien
tccttgttgtctgaagtcaggagca

SEQ ID NO: 3494540 - DNA, 25 bp, Homo sapien
gtcaggagcagttccacaatgccac

SEQ ID NO: 3494541 - DNA, 25 bp, Homo sapien
aggagcagttccacaatgccacggt

SEQ ID NO: 3494542 - DNA, 25 bp, Homo sapien
tggacaatccccttgctcagcccat

SEQ ID NO: 3494543 - DNA, 25 bp, Homo sapien
cccacggcccaacacaagtgcagtt

SEQ ID NO: 3494544 - DNA, 25 bp, Homo sapien
cacggcccaacacaagtgcagttac

SEQ ID NO: 3494545 - DNA, 25 bp, Homo sapien
cccacagcgggagcgtgcacagcca

SEQ ID NO: 3494546 - DNA, 25 bp, Homo sapien
acagcgggagcgtgcacagccagcc

SEQ ID NO: 3494547 - DNA, 25 bp, Homo sapien
gaaagcctcgctaacttcggagaac

SEQ ID NO: 3494548 - DNA, 25 bp, Homo sapien
gaggcctttcgaggtcattcccaga

SEQ ID NO: 3494549 - DNA, 25 bp, Homo sapien
caagtgtggtgctacagaaagcctc

SEQ ID NO: 3494550 - DNA, 25 bp, Homo sapien
cacggaggctgatatgctgagaaca

SEQ ID NO: 3494551 - DNA, 25 bp, Homo sapien
gagtactgctgggtgaaacagatga

SEQ ID NO: 3494552 - DNA, 25 bp, Homo sapien
aagccccgccaagagtactgctggg

SEQ ID NO: 3494553 - DNA, 25 bp, Homo sapien
ctgctgggtgaaacagatgaatgac

SEQ ID NO: 3494554 - DNA, 25 bp, Homo sapien
cagatgaatgacataaataaactac

SEQ ID NO: 3494555 - DNA, 25 bp, Homo sapien
ccggagacacgaggtctgggtcctt

SEQ ID NO: 3494556 - DNA, 25 bp, Homo sapien
agccgtggggatcactgctggtcct

SEQ ID NO: 3494557 - DNA, 25 bp, Homo sapien
ccctgggtgccagctaggcgctgct

SEQ ID NO: 3494558 - DNA, 25 bp, Homo sapien
ttttcctcgccattcatggaccttc

SEQ ID NO: 3494559 - DNA, 25 bp, Homo sapien
cgctggcgcctatcagggctgaaca

SEQ ID NO: 3494560 - DNA, 25 bp, Homo sapien
cgttgtcatacacatccgcgaggcc

SEQ ID NO: 3494561 - DNA, 25 bp, Homo sapien
tccttgcaaggcctgaaaccgggag

SEQ ID NO: 3494562 - DNA, 25 bp, Homo sapien
ggaaagaacactcatcacctactgg

SEQ ID NO: 3494563 - DNA, 25 bp, Homo sapien
cgggaagccacggagcaccaagaaa

SEQ ID NO: 3494564 - DNA, 25 bp, Homo sapien
gaagcaggattccacgcgggatgca

SEQ ID NO: 3494565 - DNA, 25 bp, Homo sapien
ttccacgcgggatgcagccaagcag

SEQ ID NO: 3494566 - DNA, 25 bp, Homo sapien
aagccacggagcaccaagaaacatc

SEQ ID NO: 3494567 - DNA, 25 bp, Homo sapien
cccggatgcgcagcagcacgagaag

SEQ ID NO: 3494568 - DNA, 25 bp, Homo sapien
ccaggaaacgctcgggagccggagt

SEQ ID NO: 3494569 - DNA, 25 bp, Homo sapien
gtaactgggccgctccccggatgcg

SEQ ID NO: 3494570 - DNA, 25 bp, Homo sapien
aggaagaagacccaggaaacgctcg

SEQ ID NO: 3494571 - DNA, 25 bp, Homo sapien
ctgcctgagaaccctgggcccgagc

SEQ ID NO: 3494572 - DNA, 25 bp, Homo sapien
gcctgagaaccctgggcccgagctg

SEQ ID NO: 3494573 - DNA, 25 bp, Homo sapien
cctgcctgagaaccctgggcccgag

SEQ ID NO: 3494574 - DNA, 25 bp, Homo sapien
tgcctgagaaccctgggcccgagct

SEQ ID NO: 3494575 - DNA, 25 bp, Homo sapien
gctcgtgtgttgactgcaagttgat

SEQ ID NO: 3494576 - DNA, 25 bp, Homo sapien
tggtcagtagctgcagctcgtgtgt

SEQ ID NO: 3494577 - DNA, 25 bp, Homo sapien
ctggacgttgaagagaaaggtggtc

SEQ ID NO: 3494578 - DNA, 25 bp, Homo sapien
gactgcaagttgatggtggccaaga

SEQ ID NO: 3494579 - DNA, 25 bp, Homo sapien
agaattcccataggccgctgagcag

SEQ ID NO: 3494580 - DNA, 25 bp, Homo sapien
cctcacaggttaaggtcggatgcct

SEQ ID NO: 3494581 - DNA, 25 bp, Homo sapien
caatccctgggagcaagtctggagc

SEQ ID NO: 3494582 - DNA, 25 bp, Homo sapien
ctctaggagtgcaccaaaagggccc

SEQ ID NO: 3494583 - DNA, 25 bp, Homo sapien
ctgccacgtttgcagaagcccagag

SEQ ID NO: 3494584 - DNA, 25 bp, Homo sapien
gatcattcctgggaccatgctccac

SEQ ID NO: 3494585 - DNA, 25 bp, Homo sapien
cccaaggaggccaagatcattcctg

SEQ ID NO: 3494586 - DNA, 25 bp, Homo sapien
gctccactctgccacgtttgcagaa

SEQ ID NO: 3494587 - DNA, 25 bp, Homo sapien
gcacagctattcatggtgcaggttc

SEQ ID NO: 3494588 - DNA, 25 bp, Homo sapien
acagctattcatggtgcaggttctg

SEQ ID NO: 3494589 - DNA, 25 bp, Homo sapien
cacagctattcatggtgcaggttct

SEQ ID NO: 3494590 - DNA, 25 bp, Homo sapien
ataggtgagggccaaattcgcctgc

SEQ ID NO: 3494591 - DNA, 25 bp, Homo sapien
gtgagggccaaattcgcctgcacac

SEQ ID NO: 3494592 - DNA, 25 bp, Homo sapien
ggccaaattcgcctgcacaccagtt

SEQ ID NO: 3494593 - DNA, 25 bp, Homo sapien
gggcataggtgagggccaaattcgc

SEQ ID NO: 3494594 - DNA, 25 bp, Homo sapien
tgagggcctccccacgagtcaaacc

SEQ ID NO: 3494595 - DNA, 25 bp, Homo sapien
cacgagtcaaaccaccccgtccagt

SEQ ID NO: 3494596 - DNA, 25 bp, Homo sapien
agaagaatccaagatattgtgaggg

SEQ ID NO: 3494597 - DNA, 25 bp, Homo sapien
agaatccaagatattgtgagggcct

SEQ ID NO: 3494598 - DNA, 25 bp, Homo sapien
caatggcagacacggttttcaaaac

SEQ ID NO: 3494599 - DNA, 25 bp, Homo sapien
cctccgtggaacatgtagaggttga

SEQ ID NO: 3494600 - DNA, 25 bp, Homo sapien
gaagtgcatggctccattcatgaag

SEQ ID NO: 3494601 - DNA, 25 bp, Homo sapien
aagccaaagttggtgcctccgtgga

SEQ ID NO: 3494602 - DNA, 25 bp, Homo sapien
aggtactctattgccaaagacacga

SEQ ID NO: 3494603 - DNA, 25 bp, Homo sapien
ggtactctattgccaaagacacgaa

SEQ ID NO: 3494604 - DNA, 25 bp, Homo sapien
gtactctattgccaaagacacgaag

SEQ ID NO: 3494605 - DNA, 25 bp, Homo sapien
ccctcctctgggagtgtaacatgac

SEQ ID NO: 3494606 - DNA, 25 bp, Homo sapien
cctcctctgggagtgtaacatgact

SEQ ID NO: 3494607 - DNA, 25 bp, Homo sapien
tccctcctctgggagtgtaacatga

SEQ ID NO: 3494608 - DNA, 25 bp, Homo sapien
ctcctctgggagtgtaacatgactg

SEQ ID NO: 3494609 - DNA, 25 bp, Homo sapien
agtctcgaagcttcatgtacttggc

SEQ ID NO: 3494610 - DNA, 25 bp, Homo sapien
atgtacttggccgtgtaatcgccgg

SEQ ID NO: 3494611 - DNA, 25 bp, Homo sapien
tcgccggcttctgtcagcacagcat

SEQ ID NO: 3494612 - DNA, 25 bp, Homo sapien
gagatggagccgaagaagtctcgaa

SEQ ID NO: 3494613 - DNA, 25 bp, Homo sapien
tgtctaggatattcttgcacgcaga

SEQ ID NO: 3494614 - DNA, 25 bp, Homo sapien
tattcttgcacgcagatcaactggg

SEQ ID NO: 3494615 - DNA, 25 bp, Homo sapien
tcgaggtgggacagtaaggaagtaa

SEQ ID NO: 3494616 - DNA, 25 bp, Homo sapien
gaagtaactctttaggggtctgaga

SEQ ID NO: 3494617 - DNA, 25 bp, Homo sapien
tggcgttaagggctcatacggcatc

SEQ ID NO: 3494618 - DNA, 25 bp, Homo sapien
tcatacggcatcttgggaagaaggt

SEQ ID NO: 3494619 - DNA, 25 bp, Homo sapien
gggctcatacggcatcttgggaaga

SEQ ID NO: 3494620 - DNA, 25 bp, Homo sapien
gttaagggctcatacggcatcttgg

SEQ ID NO: 3494621 - DNA, 25 bp, Homo sapien
aggtacttgagggcgtcccacagag

SEQ ID NO: 3494622 - DNA, 25 bp, Homo sapien
caggtacttgagggcgtcccacaga

SEQ ID NO: 3494623 - DNA, 25 bp, Homo sapien
tcccgatgactgcccacagcactca

SEQ ID NO: 3494624 - DNA, 25 bp, Homo sapien
cccgatgactgcccacagcactcac

SEQ ID NO: 3494625 - DNA, 25 bp, Homo sapien
ctcccgatgactgcccacagcactc

SEQ ID NO: 3494626 - DNA, 25 bp, Homo sapien
ccgatcatgcacgtggccactgagg

SEQ ID NO: 3494627 - DNA, 25 bp, Homo sapien
ctcatagagaatgtacccgaaggac

SEQ ID NO: 3494628 - DNA, 25 bp, Homo sapien
ccagacgaggtgatgctggtctcat

SEQ ID NO: 3494629 - DNA, 25 bp, Homo sapien
catttcccccattgactggcaggtt

SEQ ID NO: 3494630 - DNA, 25 bp, Homo sapien
aggaatttagaagagaagctcctac

SEQ ID NO: 3494631 - DNA, 25 bp, Homo sapien
ggtcacaggaatttagaagagaagc

SEQ ID NO: 3494632 - DNA, 25 bp, Homo sapien
caggaatttagaagagaagctccta

SEQ ID NO: 3494633 - DNA, 25 bp, Homo sapien
cagaaggtcacaggaatttagaaga

SEQ ID NO: 3494634 - DNA, 25 bp, Homo sapien
gggacagcaatcttcgttgtcttgt

SEQ ID NO: 3494635 - DNA, 25 bp, Homo sapien
caatcttcgttgtcttgtagtccaa

SEQ ID NO: 3494636 - DNA, 25 bp, Homo sapien
ctatggatactgtgttcacaaacac

SEQ ID NO: 3494637 - DNA, 25 bp, Homo sapien
tccaagaatcctatggatactgtgt

SEQ ID NO: 3494638 - DNA, 25 bp, Homo sapien
accaagatcctcagcacggtgtaac

SEQ ID NO: 3494639 - DNA, 25 bp, Homo sapien
ccatagttgactcgcccacgattct

SEQ ID NO: 3494640 - DNA, 25 bp, Homo sapien
ccaagatcctcagcacggtgtaacc

SEQ ID NO: 3494641 - DNA, 25 bp, Homo sapien
tttgcgctggtcatcaatattctcc

SEQ ID NO: 3494642 - DNA, 25 bp, Homo sapien
gaaaccacccacatttagctagatt

SEQ ID NO: 3494643 - DNA, 25 bp, Homo sapien
tgaaaccacccacatttagctagat

SEQ ID NO: 3494644 - DNA, 25 bp, Homo sapien
gggtgaatcattcagatagagattt

SEQ ID NO: 3494645 - DNA, 25 bp, Homo sapien
cattcagatagagatttccaattaa

SEQ ID NO: 3494646 - DNA, 25 bp, Homo sapien
gaatcattcagatagagatttccaa

SEQ ID NO: 3494647 - DNA, 25 bp, Homo sapien
agtttttcaggggtgaatcattcag

SEQ ID NO: 3494648 - DNA, 25 bp, Homo sapien
ctggcccctggaggcgttcacacct

SEQ ID NO: 3494649 - DNA, 25 bp, Homo sapien
ggcgttcacacctgggtgcgggcca

SEQ ID NO: 3494650 - DNA, 25 bp, Homo sapien
cctggaggcgttcacacctgggtgc

SEQ ID NO: 3494651 - DNA, 25 bp, Homo sapien
gcgttcacacctgggtgcgggccag

SEQ ID NO: 3494652 - DNA, 25 bp, Homo sapien
tttctgggagggaactccatttgtc

SEQ ID NO: 3494653 - DNA, 25 bp, Homo sapien
gagggaactccatttgtccaggccg

SEQ ID NO: 3494654 - DNA, 25 bp, Homo sapien
gggagggaactccatttgtccaggc

SEQ ID NO: 3494655 - DNA, 25 bp, Homo sapien
ggaactccatttgtccaggccgaac

SEQ ID NO: 3494656 - DNA, 25 bp, Homo sapien
tgaaacagaggggaagggtgttcat

SEQ ID NO: 3494657 - DNA, 25 bp, Homo sapien
ttgaaacagaggggaagggtgttca

SEQ ID NO: 3494658 - DNA, 25 bp, Homo sapien
gggtccaatgttccagtaacgtcca

SEQ ID NO: 3494659 - DNA, 25 bp, Homo sapien
ccagtaacgtccaaggttctggcca

SEQ ID NO: 3494660 - DNA, 25 bp, Homo sapien
tcttctggggtccaatgttccagta

SEQ ID NO: 3494661 - DNA, 25 bp, Homo sapien
cctgggaggtaaagcgtcttctggg

SEQ ID NO: 3494662 - DNA, 25 bp, Homo sapien
ggtgggcagggcgtcatggggaaca

SEQ ID NO: 3494663 - DNA, 25 bp, Homo sapien
cgaaggctccctgggacggcaggtg

SEQ ID NO: 3494664 - DNA, 25 bp, Homo sapien
ctccctgggacggcaggtgggcagg

SEQ ID NO: 3494665 - DNA, 25 bp, Homo sapien
tgggcagggcgtcatggggaacagg

SEQ ID NO: 3494666 - DNA, 25 bp, Homo sapien
cggctgggagggcagctgacgtctg

SEQ ID NO: 3494667 - DNA, 25 bp, Homo sapien
tgtggagagagggcccggctgggag

SEQ ID NO: 3494668 - DNA, 25 bp, Homo sapien
gctgggagggcagctgacgtctgtc

SEQ ID NO: 3494669 - DNA, 25 bp, Homo sapien
tggagagagggcccggctgggaggg

SEQ ID NO: 3494670 - DNA, 25 bp, Homo sapien
ttaatgtactggttcctgcccaggt

SEQ ID NO: 3494671 - DNA, 25 bp, Homo sapien
gccatcgtctcctcaaaaacgatga

SEQ ID NO: 3494672 - DNA, 25 bp, Homo sapien
aactgtaatgcagggcccgccatcg

SEQ ID NO: 3494673 - DNA, 25 bp, Homo sapien
ttccgtgaactgtaatgcagggccc

SEQ ID NO: 3494674 - DNA, 25 bp, Homo sapien
gggcagactgtagcccccagtccct

SEQ ID NO: 3494675 - DNA, 25 bp, Homo sapien
cagtccctgaggttgctacttaagg

SEQ ID NO: 3494676 - DNA, 25 bp, Homo sapien
gcagactgtagcccccagtccctga

SEQ ID NO: 3494677 - DNA, 25 bp, Homo sapien
aggaggcggcagtctcccactggca

SEQ ID NO: 3494678 - DNA, 25 bp, Homo sapien
cgacagcctcggcacaagagcaggg

SEQ ID NO: 3494679 - DNA, 25 bp, Homo sapien
caaaggctgggcgatctgattagct

SEQ ID NO: 3494680 - DNA, 25 bp, Homo sapien
tgctcccaccctagagacagcccga

SEQ ID NO: 3494681 - DNA, 25 bp, Homo sapien
ggcgatctgattagctgctcccacc

SEQ ID NO: 3494682 - DNA, 25 bp, Homo sapien
tgcaagggcacgtttcagcactttt

SEQ ID NO: 3494683 - DNA, 25 bp, Homo sapien
aagtcacatgtttctcacgccgagt

SEQ ID NO: 3494684 - DNA, 25 bp, Homo sapien
cagatgctcgcagggctgtgacgtc

SEQ ID NO: 3494685 - DNA, 25 bp, Homo sapien
aagagcacgcctgagtccagcagat

SEQ ID NO: 3494686 - DNA, 25 bp, Homo sapien
tgggaagacgcagggtgaggatttc

SEQ ID NO: 3494687 - DNA, 25 bp, Homo sapien
cacctgctaacttgggaagacgcag

SEQ ID NO: 3494688 - DNA, 25 bp, Homo sapien
cagagacacctgctaacttgggaag

SEQ ID NO: 3494689 - DNA, 25 bp, Homo sapien
ctgctaacttgggaagacgcagggt

SEQ ID NO: 3494690 - DNA, 25 bp, Homo sapien
gggccatggcttctgccaggactca

SEQ ID NO: 3494691 - DNA, 25 bp, Homo sapien
ggccatggcttctgccaggactcac

SEQ ID NO: 3494692 - DNA, 25 bp, Homo sapien
tgggccatggcttctgccaggactc

SEQ ID NO: 3494693 - DNA, 25 bp, Homo sapien
atgggccatggcttctgccaggact

SEQ ID NO: 3494694 - DNA, 25 bp, Homo sapien
ggccatggcttctgccaggactcac

SEQ ID NO: 3494695 - DNA, 25 bp, Homo sapien
ctccctggatgtgcagacatgggcc

SEQ ID NO: 3494696 - DNA, 25 bp, Homo sapien
tcctccctggatgtgcagacatggg

SEQ ID NO: 3494697 - DNA, 25 bp, Homo sapien
tgccaggactcacatgtgagctggg

SEQ ID NO: 3494698 - DNA, 25 bp, Homo sapien
ggccatggcttctgccaggactcac

SEQ ID NO: 3494699 - DNA, 25 bp, Homo sapien
tgggccatggcttctgccaggactc

SEQ ID NO: 3494700 - DNA, 25 bp, Homo sapien
atgggccatggcttctgccaggact

SEQ ID NO: 3494701 - DNA, 25 bp, Homo sapien
gggccatggcttctgccaggactca

SEQ ID NO: 3494702 - DNA, 25 bp, Homo sapien
ttctgtcctcctccctggatgtgca

SEQ ID NO: 3494703 - DNA, 25 bp, Homo sapien
ctgtcctcctccctggatgtgcaga

SEQ ID NO: 3494704 - DNA, 25 bp, Homo sapien
gtgagctgggccttctgtcctcctc

SEQ ID NO: 3494705 - DNA, 25 bp, Homo sapien
ccttctgtcctcctccctggatgtg

SEQ ID NO: 3494706 - DNA, 25 bp, Homo sapien
gggccatggcttctgccaggactca

SEQ ID NO: 3494707 - DNA, 25 bp, Homo sapien
tgggccatggcttctgccaggactc

SEQ ID NO: 3494708 - DNA, 25 bp, Homo sapien
ggccatggcttctgccaggactcac

SEQ ID NO: 3494709 - DNA, 25 bp, Homo sapien
atgggccatggcttctgccaggact

SEQ ID NO: 3494710 - DNA, 25 bp, Homo sapien
ctgtcctcctccctggatgtgcaga

SEQ ID NO: 3494711 - DNA, 25 bp, Homo sapien
ttctgtcctcctccctggatgtgca

SEQ ID NO: 3494712 - DNA, 25 bp, Homo sapien
tgtgagctgggccttctgtcctcct

SEQ ID NO: 3494713 - DNA, 25 bp, Homo sapien
ccttctgtcctcctccctggatgtg

SEQ ID NO: 3494714 - DNA, 25 bp, Homo sapien
aactcaggacagtgagcccaagcca

SEQ ID NO: 3494715 - DNA, 25 bp, Homo sapien
tcaaggttatagctttactgcaact

SEQ ID NO: 3494716 - DNA, 25 bp, Homo sapien
acacacttcgaaggagggctgctct

SEQ ID NO: 3494717 - DNA, 25 bp, Homo sapien
caaggctcaaatgcggacttggaca

SEQ ID NO: 3494718 - DNA, 25 bp, Homo sapien
gggcttctccaccttacaggaggat

SEQ ID NO: 3494719 - DNA, 25 bp, Homo sapien
caggtctgcgtggaagtgtgatcca

SEQ ID NO: 3494720 - DNA, 25 bp, Homo sapien
gaggatttgcaggaaggttcccttc

SEQ ID NO: 3494721 - DNA, 25 bp, Homo sapien
tgacggaaccagctcatacacagct

SEQ ID NO: 3494722 - DNA, 25 bp, Homo sapien
cggaacaagcgttgctcagcctgct

SEQ ID NO: 3494723 - DNA, 25 bp, Homo sapien
agtgacccttgagcgaagcagcaac

SEQ ID NO: 3494724 - DNA, 25 bp, Homo sapien
cagaggcctccgtgataagtgaccc

SEQ ID NO: 3494725 - DNA, 25 bp, Homo sapien
gtcagtgctctgtagggtgaccaca

SEQ ID NO: 3494726 - DNA, 25 bp, Homo sapien
cattcagaatatagcattggttgcc

SEQ ID NO: 3494727 - DNA, 25 bp, Homo sapien
tgagccaccttgcaggacgttttcc

SEQ ID NO: 3494728 - DNA, 25 bp, Homo sapien
tatgtgtgggcactctactgcctca

SEQ ID NO: 3494729 - DNA, 25 bp, Homo sapien
tggatgtcactttggaaaccaagcc

SEQ ID NO: 3494730 - DNA, 25 bp, Homo sapien
gggtgtcaccttccaaacatcttgc

SEQ ID NO: 3494731 - DNA, 25 bp, Homo sapien
ttcactgacccctcggtggagatct

SEQ ID NO: 3494732 - DNA, 25 bp, Homo sapien
taactttcacccacgcagctgggtc

SEQ ID NO: 3494733 - DNA, 25 bp, Homo sapien
ggttgggccgaatcaactgtctcat

SEQ ID NO: 3494734 - DNA, 25 bp, Homo sapien
gcaggcacctgagtcgctgtggtca

SEQ ID NO: 3494735 - DNA, 25 bp, Homo sapien
tccaagcaacgcattgaggaggaca

SEQ ID NO: 3494736 - DNA, 25 bp, Homo sapien
tgcacatgggtgtcaagcagcaggc

SEQ ID NO: 3494737 - DNA, 25 bp, Homo sapien
tcagactggcgtctccccaaatcat

SEQ ID NO: 3494738 - DNA, 25 bp, Homo sapien
agcatcctggtttggatcaggaagt

SEQ ID NO: 3494739 - DNA, 25 bp, Homo sapien
cctggtttggatcaggaagtgtaag

SEQ ID NO: 3494740 - DNA, 25 bp, Homo sapien
agtgtaaggtcacactagctctgat

SEQ ID NO: 3494741 - DNA, 25 bp, Homo sapien
gaagtgtaaggtcacactagctctg

SEQ ID NO: 3494742 - DNA, 25 bp, Homo sapien
ggtgctctccatcactgggcagcag

SEQ ID NO: 3494743 - DNA, 25 bp, Homo sapien
cgagctattttctggtttggctttg

SEQ ID NO: 3494744 - DNA, 25 bp, Homo sapien
ggtggaagttgcactccctgactct

SEQ ID NO: 3494745 - DNA, 25 bp, Homo sapien
agcaggcagacgagctattttctgg

SEQ ID NO: 3494746 - DNA, 25 bp, Homo sapien
gcctctctgcctgaaagccgtgaga

SEQ ID NO: 3494747 - DNA, 25 bp, Homo sapien
acccatctagaaaattgagcctctt

SEQ ID NO: 3494748 - DNA, 25 bp, Homo sapien
acccagaggacagaagatcatggct

SEQ ID NO: 3494749 - DNA, 25 bp, Homo sapien
ctgaaagccgtgagaggtgaagtcc

SEQ ID NO: 3494750 - DNA, 25 bp, Homo sapien
gctagggctccgacaccagccaggg

SEQ ID NO: 3494751 - DNA, 25 bp, Homo sapien
atggctgcgctagggctccgacacc

SEQ ID NO: 3494752 - DNA, 25 bp, Homo sapien
ctgtgagatggctgcgctagggctc

SEQ ID NO: 3494753 - DNA, 25 bp, Homo sapien
agatggctgcgctagggctccgaca

SEQ ID NO: 3494754 - DNA, 25 bp, Homo sapien
taccaccgttgccacagacaggaag

SEQ ID NO: 3494755 - DNA, 25 bp, Homo sapien
gaaggtggcgccagaggatgtcccc

SEQ ID NO: 3494756 - DNA, 25 bp, Homo sapien
caggtaccaccgttgccacagacag

SEQ ID NO: 3494757 - DNA, 25 bp, Homo sapien
agacaggaaggtggcgccagaggat

SEQ ID NO: 3494758 - DNA, 25 bp, Homo sapien
gctgtgattacgacaaaggaatcta

SEQ ID NO: 3494759 - DNA, 25 bp, Homo sapien
acgacaaaggaatctatatttattg

SEQ ID NO: 3494760 - DNA, 25 bp, Homo sapien
tggggatttgcatcggagatacagt

SEQ ID NO: 3494761 - DNA, 25 bp, Homo sapien
tttgcatcggagatacagtgatctt

SEQ ID NO: 3494762 - DNA, 25 bp, Homo sapien
ccaaaccatagaccaaaaatggcct

SEQ ID NO: 3494763 - DNA, 25 bp, Homo sapien
tggcttccaaaccatagaccaaaaa

SEQ ID NO: 3494764 - DNA, 25 bp, Homo sapien
ctgaactgaggtttgagcttcctca

SEQ ID NO: 3494765 - DNA, 25 bp, Homo sapien
tcagcagacctggcgagggcttgag

SEQ ID NO: 3494766 - DNA, 25 bp, Homo sapien
catcctcacttcctacttctcccat

SEQ ID NO: 3494767 - DNA, 25 bp, Homo sapien
gccatcctcacttcctacttctccc

SEQ ID NO: 3494768 - DNA, 25 bp, Homo sapien
aggccatcctcacttcctacttctc

SEQ ID NO: 3494769 - DNA, 25 bp, Homo sapien
caggccatcctcacttcctacttct

SEQ ID NO: 3494770 - DNA, 25 bp, Homo sapien
attcggggccacaaatgagcgctct

SEQ ID NO: 3494771 - DNA, 25 bp, Homo sapien
gggccacaaatgagcgctcttgcaa

SEQ ID NO: 3494772 - DNA, 25 bp, Homo sapien
caaatgagcgctcttgcaaataggc

SEQ ID NO: 3494773 - DNA, 25 bp, Homo sapien
gcgctcttgcaaataggcagcacag

SEQ ID NO: 3494774 - DNA, 25 bp, Homo sapien
tcattgtgataggaaagggcatcgg

SEQ ID NO: 3494775 - DNA, 25 bp, Homo sapien
tcccgggagcttaagaaatcagctg

SEQ ID NO: 3494776 - DNA, 25 bp, Homo sapien
cagcatagactctccctggtgtgaa

SEQ ID NO: 3494777 - DNA, 25 bp, Homo sapien
ttttccgtgaaagagtacacacagc

SEQ ID NO: 3494778 - DNA, 25 bp, Homo sapien
tcagacactcgttcatgcacagatg

SEQ ID NO: 3494779 - DNA, 25 bp, Homo sapien
tcacgacggcacttcatgattgggc

SEQ ID NO: 3494780 - DNA, 25 bp, Homo sapien
caaacctgggccttgagactcatgc

SEQ ID NO: 3494781 - DNA, 25 bp, Homo sapien
tccagggcggctcatgactgtataa

SEQ ID NO: 3494782 - DNA, 25 bp, Homo sapien
gcctgggcaacaagagcaaacctcc

SEQ ID NO: 3494783 - DNA, 25 bp, Homo sapien
gagattgtgccattgcactccagcc

SEQ ID NO: 3494784 - DNA, 25 bp, Homo sapien
tgggaggcaggggctgcagtgagcc

SEQ ID NO: 3494785 - DNA, 25 bp, Homo sapien
ctgaggcgtaagaattgcttgagcc

SEQ ID NO: 3494786 - DNA, 25 bp, Homo sapien
tctgttttgtttaagctattgatct

SEQ ID NO: 3494787 - DNA, 25 bp, Homo sapien
tgttttgtttaagctattgatcttc

SEQ ID NO: 3494788 - DNA, 25 bp, Homo sapien
ctgttttgtttaagctattgatctt

SEQ ID NO: 3494789 - DNA, 25 bp, Homo sapien
cagaaacgtgtatccagaccccacg

SEQ ID NO: 3494790 - DNA, 25 bp, Homo sapien
gcctagggagttggatctgtgggct

SEQ ID NO: 3494791 - DNA, 25 bp, Homo sapien
gtcctctgggtaacaagaatcacct

SEQ ID NO: 3494792 - DNA, 25 bp, Homo sapien
ggcagatggcagaaacgtgtatcca

SEQ ID NO: 3494793 - DNA, 25 bp, Homo sapien
aaagtgatccataaaccagctgcgc

SEQ ID NO: 3494794 - DNA, 25 bp, Homo sapien
catttgtctggccagcattcaggag

SEQ ID NO: 3494795 - DNA, 25 bp, Homo sapien
cagggattcaccagcttagggtcag

SEQ ID NO: 3494796 - DNA, 25 bp, Homo sapien
ggagcaaatgggatcacagccttag

SEQ ID NO: 3494797 - DNA, 25 bp, Homo sapien
gaaattgccattattattattctcg

SEQ ID NO: 3494798 - DNA, 25 bp, Homo sapien
gaaaacacagatgagagaaattgcc

SEQ ID NO: 3494799 - DNA, 25 bp, Homo sapien
attgccattattattattctcgagc

SEQ ID NO: 3494800 - DNA, 25 bp, Homo sapien
ctgaaaacacagatgagagaaattg

SEQ ID NO: 3494801 - DNA, 25 bp, Homo sapien
tcatgaccacgttgactcagcccat

SEQ ID NO: 3494802 - DNA, 25 bp, Homo sapien
cacgttgactcagcccatgtcaggg

SEQ ID NO: 3494803 - DNA, 25 bp, Homo sapien
catgttcatgaccacgttgactcag

SEQ ID NO: 3494804 - DNA, 25 bp, Homo sapien
ccatgtcaggggtattgggagttcc

SEQ ID NO: 3494805 - DNA, 25 bp, Homo sapien
gcctttttcaaacgtgcctcactct

SEQ ID NO: 3494806 - DNA, 25 bp, Homo sapien
agcctttttcaaacgtgcctcactc

SEQ ID NO: 3494807 - DNA, 25 bp, Homo sapien
acacccttgcctggacagaaacatt

SEQ ID NO: 3494808 - DNA, 25 bp, Homo sapien
cttgagtcattcagcacacaccctt

SEQ ID NO: 3494809 - DNA, 25 bp, Homo sapien
agatgggaagcggagtcctatttga

SEQ ID NO: 3494810 - DNA, 25 bp, Homo sapien
caaatgcttagatgggaagcggagt

SEQ ID NO: 3494811 - DNA, 25 bp, Homo sapien
agcggagtcctatttgagggtgaga

SEQ ID NO: 3494812 - DNA, 25 bp, Homo sapien
cttagatgggaagcggagtcctatt

SEQ ID NO: 3494813 - DNA, 25 bp, Homo sapien
tgcaaagcccttcagacgtggtctc

SEQ ID NO: 3494814 - DNA, 25 bp, Homo sapien
tattagacatgtccaaggagggatg

SEQ ID NO: 3494815 - DNA, 25 bp, Homo sapien
tggaagggccccgataactgagtgc

SEQ ID NO: 3494816 - DNA, 25 bp, Homo sapien
tgtactcattgtcaggaactggctg

SEQ ID NO: 3494817 - DNA, 25 bp, Homo sapien
ttttggactgagcaaccgagaggga

SEQ ID NO: 3494818 - DNA, 25 bp, Homo sapien
gagccttcatgcaggaggtcgacct

SEQ ID NO: 3494819 - DNA, 25 bp, Homo sapien
cacagggacctagtactgaggcagc

SEQ ID NO: 3494820 - DNA, 25 bp, Homo sapien
ggtcatctggtacggaatccacaag

SEQ ID NO: 3494821 - DNA, 25 bp, Homo sapien
gtgacctgaggttgtcagttgaagg

SEQ ID NO: 3494822 - DNA, 25 bp, Homo sapien
ttgtcagttgaagggtagctgtgtg

SEQ ID NO: 3494823 - DNA, 25 bp, Homo sapien
tcagttgaagggtagctgtgtgacc

SEQ ID NO: 3494824 - DNA, 25 bp, Homo sapien
acctgaggttgtcagttgaagggta

SEQ ID NO: 3494825 - DNA, 25 bp, Homo sapien
caggctcagcctcgttttatagaga

SEQ ID NO: 3494826 - DNA, 25 bp, Homo sapien
caccaccatgtgtagttggccaagc

SEQ ID NO: 3494827 - DNA, 25 bp, Homo sapien
tcacaggaggaagtttatgccaccc

SEQ ID NO: 3494828 - DNA, 25 bp, Homo sapien
catccacaggtggaaagaggccact

SEQ ID NO: 3494829 - DNA, 25 bp, Homo sapien
cagcattggataccggcttggtgac

SEQ ID NO: 3494830 - DNA, 25 bp, Homo sapien
aaagcaatgcaaggcctttcacggg

SEQ ID NO: 3494831 - DNA, 25 bp, Homo sapien
taaatgcagtgcaattgcagcccac

SEQ ID NO: 3494832 - DNA, 25 bp, Homo sapien
caagcgcacgtgtgttacgcatcat

SEQ ID NO: 3494833 - DNA, 25 bp, Homo sapien
aatgtcccgctgttcattcaatgca

SEQ ID NO: 3494834 - DNA, 25 bp, Homo sapien
tggccccttcgcctggtgaggcagc

SEQ ID NO: 3494835 - DNA, 25 bp, Homo sapien
acagtctcatgcctggtcttctcca

SEQ ID NO: 3494836 - DNA, 25 bp, Homo sapien
ggtgatggatcagcaggtgtccaat

SEQ ID NO: 3494837 - DNA, 25 bp, Homo sapien
agaagcagccgctcagttttctgag

SEQ ID NO: 3494838 - DNA, 25 bp, Homo sapien
gggcctcctcagcaagatcagcggc

SEQ ID NO: 3494839 - DNA, 25 bp, Homo sapien
agtgacgtcccagtaccctggcagg

SEQ ID NO: 3494840 - DNA, 25 bp, Homo sapien
agatcagcggctgggtcccgccgct

SEQ ID NO: 3494841 - DNA, 25 bp, Homo sapien
tgcatcacgctaaacaaaaggagct

SEQ ID NO: 3494842 - DNA, 25 bp, Homo sapien
ataaagcagacagcaatctccaggg

SEQ ID NO: 3494843 - DNA, 25 bp, Homo sapien
gggcagctgtcacctgatcctcaca

SEQ ID NO: 3494844 - DNA, 25 bp, Homo sapien
tcgtggtggtgattaaatgcctaca

SEQ ID NO: 3494845 - DNA, 25 bp, Homo sapien
gaccaatccacaggagcacatggca

SEQ ID NO: 3494846 - DNA, 25 bp, Homo sapien
accacactggcctgattcttccaac

SEQ ID NO: 3494847 - DNA, 25 bp, Homo sapien
ggcagacaggaccaatccacaggag

SEQ ID NO: 3494848 - DNA, 25 bp, Homo sapien
aatccacaggagcacatggcaccac

SEQ ID NO: 3494849 - DNA, 25 bp, Homo sapien
ttagacctcccgacaagcctgcgag

SEQ ID NO: 3494850 - DNA, 25 bp, Homo sapien
atgggtaactggcacaggcagcggg

SEQ ID NO: 3494851 - DNA, 25 bp, Homo sapien
gaggagacactcctattatcccatt

SEQ ID NO: 3494852 - DNA, 25 bp, Homo sapien
atctgtgggctgtggcctataacca

SEQ ID NO: 3494853 - DNA, 25 bp, Homo sapien
cctccaaggcgctcctatcaattgg

SEQ ID NO: 3494854 - DNA, 25 bp, Homo sapien
atcaattggatcaaaggtcactggc

SEQ ID NO: 3494855 - DNA, 25 bp, Homo sapien
ggcgctcctatcaattggatcaaag

SEQ ID NO: 3494856 - DNA, 25 bp, Homo sapien
cctatcaattggatcaaaggtcact

SEQ ID NO: 3494857 - DNA, 25 bp, Homo sapien
taccctcagcgcttagagtccgata

SEQ ID NO: 3494858 - DNA, 25 bp, Homo sapien
tcattattactcttccattgtgcct

SEQ ID NO: 3494859 - DNA, 25 bp, Homo sapien
ttccattgtgcctcattaccctcag

SEQ ID NO: 3494860 - DNA, 25 bp, Homo sapien
agcgcttagagtccgatactcctgc

SEQ ID NO: 3494861 - DNA, 25 bp, Homo sapien
gaacctgagcagttgtaagagcagc

SEQ ID NO: 3494862 - DNA, 25 bp, Homo sapien
attccagccctgctccggaagggcc

SEQ ID NO: 3494863 - DNA, 25 bp, Homo sapien
gagcttggtgcgaacctgagcagtt

SEQ ID NO: 3494864 - DNA, 25 bp, Homo sapien
tcttcacgctgggagcttggtgcga

SEQ ID NO: 3494865 - DNA, 25 bp, Homo sapien
tccgggcatagaacgccgagcagca

SEQ ID NO: 3494866 - DNA, 25 bp, Homo sapien
cagagctccgggcatagaacgccga

SEQ ID NO: 3494867 - DNA, 25 bp, Homo sapien
ggccacagagctccgggcatagaac

SEQ ID NO: 3494868 - DNA, 25 bp, Homo sapien
aggaagggcgggcacagggccacag

SEQ ID NO: 3494869 - DNA, 25 bp, Homo sapien
tgtgacgggcccagcagtattgagt

SEQ ID NO: 3494870 - DNA, 25 bp, Homo sapien
ccaacttcacagtggaagacgcact

SEQ ID NO: 3494871 - DNA, 25 bp, Homo sapien
agtattgagttggtgtgactgtccc

SEQ ID NO: 3494872 - DNA, 25 bp, Homo sapien
cagtgactgccatccgttgcctgcc

SEQ ID NO: 3494873 - DNA, 25 bp, Homo sapien
aaggtagccggcagtcagcaaggac

SEQ ID NO: 3494874 - DNA, 25 bp, Homo sapien
agcaggacagcaaaggtagccggca

SEQ ID NO: 3494875 - DNA, 25 bp, Homo sapien
gaagagggaggaagtcggaggtctg

SEQ ID NO: 3494876 - DNA, 25 bp, Homo sapien
ggaggaagtcggaggtctggcagca

SEQ ID NO: 3494877 - DNA, 25 bp, Homo sapien
tgagtttctgcaactctaaagacct

SEQ ID NO: 3494878 - DNA, 25 bp, Homo sapien
cctgagtttctgcaactctaaagac

SEQ ID NO: 3494879 - DNA, 25 bp, Homo sapien
gagtttctgcaactctaaagacctt

SEQ ID NO: 3494880 - DNA, 25 bp, Homo sapien
gcctgagtttctgcaactctaaaga

SEQ ID NO: 3494881 - DNA, 25 bp, Homo sapien
ctgacagaatcagggcagtcatgag

SEQ ID NO: 3494882 - DNA, 25 bp, Homo sapien
gattgactgacagaatcagggcagt

SEQ ID NO: 3494883 - DNA, 25 bp, Homo sapien
acagaatcagggcagtcatgaggat

SEQ ID NO: 3494884 - DNA, 25 bp, Homo sapien
aatgcagattgactgacagaatcag

SEQ ID NO: 3494885 - DNA, 25 bp, Homo sapien
tggggagtctgcaccctggcagcag

SEQ ID NO: 3494886 - DNA, 25 bp, Homo sapien
gagctggggagtctgcaccctggca

SEQ ID NO: 3494887 - DNA, 25 bp, Homo sapien
ggcagcagggaaaggggtctgatgt

SEQ ID NO: 3494888 - DNA, 25 bp, Homo sapien
cagggaaaggggtctgatgttccat

SEQ ID NO: 3494889 - DNA, 25 bp, Homo sapien
taggagcgatgccacatctcccatt

SEQ ID NO: 3494890 - DNA, 25 bp, Homo sapien
actgaagtgtgtgagtccctgtggc

SEQ ID NO: 3494891 - DNA, 25 bp, Homo sapien
cccattcctggatagagggagggct

SEQ ID NO: 3494892 - DNA, 25 bp, Homo sapien
tcactttgctaggagcgatgccaca

SEQ ID NO: 3494893 - DNA, 25 bp, Homo sapien
gcagcagcacgggagagaatctgct

SEQ ID NO: 3494894 - DNA, 25 bp, Homo sapien
agcagcagcacgggagagaatctgc

SEQ ID NO: 3494895 - DNA, 25 bp, Homo sapien
cagcagccgagatggatcccaggcc

SEQ ID NO: 3494896 - DNA, 25 bp, Homo sapien
cgagatggatcccaggccccgctgg

SEQ ID NO: 3494897 - DNA, 25 bp, Homo sapien
tcagcattagggagctctatgtctc

SEQ ID NO: 3494898 - DNA, 25 bp, Homo sapien
ggaagagattcagcattagggagct

SEQ ID NO: 3494899 - DNA, 25 bp, Homo sapien
gggagctctatgtctccctcagtcc

SEQ ID NO: 3494900 - DNA, 25 bp, Homo sapien
gagattcagcattagggagctctat

SEQ ID NO: 3494901 - DNA, 25 bp, Homo sapien
ttctcagatttttcgcagtggtccg

SEQ ID NO: 3494902 - DNA, 25 bp, Homo sapien
ggaccccgaccaatcatgctggacg

SEQ ID NO: 3494903 - DNA, 25 bp, Homo sapien
cccgggtggtcagatcagtcctgga

SEQ ID NO: 3494904 - DNA, 25 bp, Homo sapien
cttgaagatcgtttcatctgaaggc

SEQ ID NO: 3494905 - DNA, 25 bp, Homo sapien
gcctggcctgggccgcctgaggcag

SEQ ID NO: 3494906 - DNA, 25 bp, Homo sapien
tgcctggcctgggccgcctgaggca

SEQ ID NO: 3494907 - DNA, 25 bp, Homo sapien
tggcctgggccgcctgaggcagcct

SEQ ID NO: 3494908 - DNA, 25 bp, Homo sapien
cctgggccgcctgaggcagcctcat

SEQ ID NO: 3494909 - DNA, 25 bp, Homo sapien
cactgagccacgtgcggatgcctta

SEQ ID NO: 3494910 - DNA, 25 bp, Homo sapien
ttttgctctgaatggagcggaagcc

SEQ ID NO: 3494911 - DNA, 25 bp, Homo sapien
gtgcggatgccttattttgctctga

SEQ ID NO: 3494912 - DNA, 25 bp, Homo sapien
ctgaatggagcggaagcccagtttg

SEQ ID NO: 3494913 - DNA, 25 bp, Homo sapien
gctctcctcagggcattcctccact

SEQ ID NO: 3494914 - DNA, 25 bp, Homo sapien
agaagttgccggcccttgtggccat

SEQ ID NO: 3494915 - DNA, 25 bp, Homo sapien
gcagaagttgccggcccttgtggcc

SEQ ID NO: 3494916 - DNA, 25 bp, Homo sapien
aagcagaagttgccggcccttgtgg

SEQ ID NO: 3494917 - DNA, 25 bp, Homo sapien
gacacgaataaaggtcaactaatgt

SEQ ID NO: 3494918 - DNA, 25 bp, Homo sapien
tctgttgctctggttcttaattatt

SEQ ID NO: 3494919 - DNA, 25 bp, Homo sapien
acacgaataaaggtcaactaatgtc

SEQ ID NO: 3494920 - DNA, 25 bp, Homo sapien
atctgttgctctggttcttaattat

SEQ ID NO: 3494921 - DNA, 25 bp, Homo sapien
tcttctccagaaataactgagggat

SEQ ID NO: 3494922 - DNA, 25 bp, Homo sapien
gaaataactgagggatccttcctgt

SEQ ID NO: 3494923 - DNA, 25 bp, Homo sapien
aataactgagggatccttcctgttt

SEQ ID NO: 3494924 - DNA, 25 bp, Homo sapien
tccagaaataactgagggatccttc

SEQ ID NO: 3494925 - DNA, 25 bp, Homo sapien
ctgagtaggaattactccctgctta

SEQ ID NO: 3494926 - DNA, 25 bp, Homo sapien
tgagtaggaattactccctgcttac

SEQ ID NO: 3494927 - DNA, 25 bp, Homo sapien
gaaaggagcttgtattaaatcctac

SEQ ID NO: 3494928 - DNA, 25 bp, Homo sapien
ggaccctaaatcatcattatagatg

SEQ ID NO: 3494929 - DNA, 25 bp, Homo sapien
taaatcctacaattccagtttcaat

SEQ ID NO: 3494930 - DNA, 25 bp, Homo sapien
tggcatcaaggaccctaaatcatca

SEQ ID NO: 3494931 - DNA, 25 bp, Homo sapien
gattcagccaccagatttagacact

SEQ ID NO: 3494932 - DNA, 25 bp, Homo sapien
tggccactcaaaccccatttgtggg

SEQ ID NO: 3494933 - DNA, 25 bp, Homo sapien
taaatactttaagccagctgcagaa

SEQ ID NO: 3494934 - DNA, 25 bp, Homo sapien
gtagaaacactatggattccagaga

SEQ ID NO: 3494935 - DNA, 25 bp, Homo sapien
gctgctgctcccctccgcgactcat

SEQ ID NO: 3494936 - DNA, 25 bp, Homo sapien
tcccctccgcgactcatctctccag

SEQ ID NO: 3494937 - DNA, 25 bp, Homo sapien
tgctgctcccctccgcgactcatct

SEQ ID NO: 3494938 - DNA, 25 bp, Homo sapien
gctcccctccgcgactcatctctcc

SEQ ID NO: 3494939 - DNA, 25 bp, Homo sapien
gtagggcccaagctcccggttctgc

SEQ ID NO: 3494940 - DNA, 25 bp, Homo sapien
ggctcacacggctgcggaaagccag

SEQ ID NO: 3494941 - DNA, 25 bp, Homo sapien
tcacacggctgcggaaagccaggcc

SEQ ID NO: 3494942 - DNA, 25 bp, Homo sapien
tgtagggcccaagctcccggttctg

SEQ ID NO: 3494943 - DNA, 25 bp, Homo sapien
attttcaggcatgccgaggaacatg

SEQ ID NO: 3494944 - DNA, 25 bp, Homo sapien
tcattttcaggcatgccgaggaaca

SEQ ID NO: 3494945 - DNA, 25 bp, Homo sapien
caggcatgccgaggaacatggatcc

SEQ ID NO: 3494946 - DNA, 25 bp, Homo sapien
ttcaggcatgccgaggaacatggat

SEQ ID NO: 3494947 - DNA, 25 bp, Homo sapien
gtggccacgtgaggtgagtccgagt

SEQ ID NO: 3494948 - DNA, 25 bp, Homo sapien
tctgtgaccgtgtcctgcaggatag

SEQ ID NO: 3494949 - DNA, 25 bp, Homo sapien
ccacgtgaggtgagtccgagtgaaa

SEQ ID NO: 3494950 - DNA, 25 bp, Homo sapien
ctaagctctctgtgaccgtgtcctg

SEQ ID NO: 3494951 - DNA, 25 bp, Homo sapien
ggcctgggctccccaactcgctgca

SEQ ID NO: 3494952 - DNA, 25 bp, Homo sapien
gggctccccaactcgctgcacacat

SEQ ID NO: 3494953 - DNA, 25 bp, Homo sapien
cccagcatgagctcagcagcccagg

SEQ ID NO: 3494954 - DNA, 25 bp, Homo sapien
ctgggctccccaactcgctgcacac

SEQ ID NO: 3494955 - DNA, 25 bp, Homo sapien
cctgagcggtgcagacaggccagct

SEQ ID NO: 3494956 - DNA, 25 bp, Homo sapien
ttcccgctccagatcctgagcggtg

SEQ ID NO: 3494957 - DNA, 25 bp, Homo sapien
cttcttgttggtggcactggtccgt

SEQ ID NO: 3494958 - DNA, 25 bp, Homo sapien
tggtggcactggtccgtcagcttcc

SEQ ID NO: 3494959 - DNA, 25 bp, Homo sapien
ccagcatagtgtggcctgccagtta

SEQ ID NO: 3494960 - DNA, 25 bp, Homo sapien
tagagaaggcatctagaggccacag

SEQ ID NO: 3494961 - DNA, 25 bp, Homo sapien
tgaatcctcagtgtgtaaacccagc

SEQ ID NO: 3494962 - DNA, 25 bp, Homo sapien
catgattggcaagcacgggtttctc

SEQ ID NO: 3494963 - DNA, 25 bp, Homo sapien
tgccgcagggtctccgacgtgctgc

SEQ ID NO: 3494964 - DNA, 25 bp, Homo sapien
tccgacgtgctgcactgtgctggga

SEQ ID NO: 3494965 - DNA, 25 bp, Homo sapien
gggaaggaaaggctctgacagtcat

SEQ ID NO: 3494966 - DNA, 25 bp, Homo sapien
ttctgcagggtctccgacgtgccgc

SEQ ID NO: 3494967 - DNA, 25 bp, Homo sapien
gggatttggtgacttgagtgcaggg

SEQ ID NO: 3494968 - DNA, 25 bp, Homo sapien
ttgagtgcaggggagcgtccaccag

SEQ ID NO: 3494969 - DNA, 25 bp, Homo sapien
ctgtgggatttggtgacttgagtgc

SEQ ID NO: 3494970 - DNA, 25 bp, Homo sapien
acttgagtgcaggggagcgtccacc

SEQ ID NO: 3494971 - DNA, 25 bp, Homo sapien
gggcttggagctgtcttcctcaccc

SEQ ID NO: 3494972 - DNA, 25 bp, Homo sapien
gctgcttgaagctctagttcacaga

SEQ ID NO: 3494973 - DNA, 25 bp, Homo sapien
ttcccgcttcgaggccaagatatca

SEQ ID NO: 3494974 - DNA, 25 bp, Homo sapien
tatcaatgttgcatagccaggagct

SEQ ID NO: 3494975 - DNA, 25 bp, Homo sapien
caaggacgtctttagccaggacctg

SEQ ID NO: 3494976 - DNA, 25 bp, Homo sapien
gtattctcaccatcgcctacaaggg

SEQ ID NO: 3494977 - DNA, 25 bp, Homo sapien
taatccgtgccattacccagctgga

SEQ ID NO: 3494978 - DNA, 25 bp, Homo sapien
gaaacgaggaggtgccgcaacaatt

SEQ ID NO: 3494979 - DNA, 25 bp, Homo sapien
tggtaaggtcatcaggatgctgcat

SEQ ID NO: 3494980 - DNA, 25 bp, Homo sapien
ctggtaaggtcatcaggatgctgca

SEQ ID NO: 3494981 - DNA, 25 bp, Homo sapien
cctcactgtaattggatcgctcatc

SEQ ID NO: 3494982 - DNA, 25 bp, Homo sapien
tccagctccttctgcggcttagctt

SEQ ID NO: 3494983 - DNA, 25 bp, Homo sapien
cggcaggaaatcttgccaaactgga

SEQ ID NO: 3494984 - DNA, 25 bp, Homo sapien
cttctgcggcttagctttcctcctt

SEQ ID NO: 3494985 - DNA, 25 bp, Homo sapien
gcaagtgtgaaattaagaataagat

SEQ ID NO: 3494986 - DNA, 25 bp, Homo sapien
gggagacagacgttttcagcactgg

SEQ ID NO: 3494987 - DNA, 25 bp, Homo sapien
gctcgattgtcagtgttagggagac

SEQ ID NO: 3494988 - DNA, 25 bp, Homo sapien
tgcctgagatttccccgggcaacac

SEQ ID NO: 3494989 - DNA, 25 bp, Homo sapien
gtcttatagctatggagatcaaaag

SEQ ID NO: 3494990 - DNA, 25 bp, Homo sapien
gtgctggcagtaccacgctccctgg

SEQ ID NO: 3494991 - DNA, 25 bp, Homo sapien
cctttataaatgatcctgtcgcttc

SEQ ID NO: 3494992 - DNA, 25 bp, Homo sapien
tcaagaggaaccttgcttttagcta

SEQ ID NO: 3494993 - DNA, 25 bp, Homo sapien
agcagctgaccaccggaggcggctg

SEQ ID NO: 3494994 - DNA, 25 bp, Homo sapien
ggctgcagaccacacgccgcaacta

SEQ ID NO: 3494995 - DNA, 25 bp, Homo sapien
gcaactacacaacccatctttgttt

SEQ ID NO: 3494996 - DNA, 25 bp, Homo sapien
gccgcaactacacaacccatctttg

SEQ ID NO: 3494997 - DNA, 25 bp, Homo sapien
tgtggaccgcccgggcatagcatga

SEQ ID NO: 3494998 - DNA, 25 bp, Homo sapien
aaggctctggagtgagtcattcccc

SEQ ID NO: 3494999 - DNA, 25 bp, Homo sapien
gcattgccgggcacgctttctctgg

SEQ ID NO: 3495000 - DNA, 25 bp, Homo sapien
ctggcacttgaagcattgccgggca

SEQ ID NO: 3495001 - DNA, 25 bp, Homo sapien
gcatcaggcaggttgcctcttttcc

SEQ ID NO: 3495002 - DNA, 25 bp, Homo sapien
cagaatctaaaggcatcaggcaggt

SEQ ID NO: 3495003 - DNA, 25 bp, Homo sapien
catcaggcaggttgcctcttttcca

SEQ ID NO: 3495004 - DNA, 25 bp, Homo sapien
ggcatcaggcaggttgcctcttttc

SEQ ID NO: 3495005 - DNA, 25 bp, Homo sapien
acagcaagccaaaagcagtatcctg

SEQ ID NO: 3495006 - DNA, 25 bp, Homo sapien
gggccatatattccagaagccgccc

SEQ ID NO: 3495007 - DNA, 25 bp, Homo sapien
ggaacttgccttgtgagttaatgct

SEQ ID NO: 3495008 - DNA, 25 bp, Homo sapien
atatattccagaagccgccctgcac

SEQ ID NO: 3495009 - DNA, 25 bp, Homo sapien
tctgctcacgaaccccagttctccg

SEQ ID NO: 3495010 - DNA, 25 bp, Homo sapien
ccacgaaccccagttctccgtcgct

SEQ ID NO: 3495011 - DNA, 25 bp, Homo sapien
actctgctcacgaaccccagttctc

SEQ ID NO: 3495012 - DNA, 25 bp, Homo sapien
acgaaccccagttctccgtcgctca

SEQ ID NO: 3495013 - DNA, 25 bp, Homo sapien
ccacgaaccccagttctccgtcgct

SEQ ID NO: 3495014 - DNA, 25 bp, Homo sapien
tctgcccacgaaccccagttctccg

SEQ ID NO: 3495015 - DNA, 25 bp, Homo sapien
cactctgcccacgaaccccagttct

SEQ ID NO: 3495016 - DNA, 25 bp, Homo sapien
acgaaccccagttctccgtcgctca

SEQ ID NO: 3495017 - DNA, 25 bp, Homo sapien
gggagtccttcgtcgctttcatggg

SEQ ID NO: 3495018 - DNA, 25 bp, Homo sapien
gggagtcagaatccacagtcttaga

SEQ ID NO: 3495019 - DNA, 25 bp, Homo sapien
caatgtctggcgtcgtttctggtgg

SEQ ID NO: 3495020 - DNA, 25 bp, Homo sapien
cagctcagctgagggtcattcctac

SEQ ID NO: 3495021 - DNA, 25 bp, Homo sapien
atcccacaggtgatgactgcctgtg

SEQ ID NO: 3495022 - DNA, 25 bp, Homo sapien
gagatcccacaggtgatgactgcct

SEQ ID NO: 3495023 - DNA, 25 bp, Homo sapien
gatcccacaggtgatgactgcctgt

SEQ ID NO: 3495024 - DNA, 25 bp, Homo sapien
agatcccacaggtgatgactgcctg

SEQ ID NO: 3495025 - DNA, 25 bp, Homo sapien
aaagaaggcttcagaatgcctttgg

SEQ ID NO: 3495026 - DNA, 25 bp, Homo sapien
tgtaagacagtgatccagcatcttt

SEQ ID NO: 3495027 - DNA, 25 bp, Homo sapien
gaaaacctgttgagccatgctgtta

SEQ ID NO: 3495028 - DNA, 25 bp, Homo sapien
cccctcaatactgggactgtgtttt

SEQ ID NO: 3495029 - DNA, 25 bp, Homo sapien
tcacctcctggactgtatggcagta

SEQ ID NO: 3495030 - DNA, 25 bp, Homo sapien
acctcctggactgtatggcagtaga

SEQ ID NO: 3495031 - DNA, 25 bp, Homo sapien
cctggactgtatggcagtagagagc

SEQ ID NO: 3495032 - DNA, 25 bp, Homo sapien
tcctggactgtatggcagtagagag

SEQ ID NO: 3495033 - DNA, 25 bp, Homo sapien
gaaccaagtgaaatctgacccttcg

SEQ ID NO: 3495034 - DNA, 25 bp, Homo sapien
gacttagcgttgacagcttgcagct

SEQ ID NO: 3495035 - DNA, 25 bp, Homo sapien
tcttgtcgggtcagcttcactgtgc

SEQ ID NO: 3495036 - DNA, 25 bp, Homo sapien
tgctgtgctgccgaaatgctgtgcg

SEQ ID NO: 3495037 - DNA, 25 bp, Homo sapien
actgcagagggcgagatcccgaagg

SEQ ID NO: 3495038 - DNA, 25 bp, Homo sapien
gaaggcctggatccgcgcagaagca

SEQ ID NO: 3495039 - DNA, 25 bp, Homo sapien
gtccagtgagttctccgcactgcag

SEQ ID NO: 3495040 - DNA, 25 bp, Homo sapien
tctctcgtctccgtccagtgagttc

SEQ ID NO: 3495041 - DNA, 25 bp, Homo sapien
tgaatgtcagccgtgtgtcaggcaa

SEQ ID NO: 3495042 - DNA, 25 bp, Homo sapien
agtgaatgaacagtgcgaaccgggc

SEQ ID NO: 3495043 - DNA, 25 bp, Homo sapien
tacattagacaaacagggctcagga

SEQ ID NO: 3495044 - DNA, 25 bp, Homo sapien
cacggcgcttatggaagagatggca

SEQ ID NO: 3495045 - DNA, 25 bp, Homo sapien
tctccttgaaatagggcatcaacat

SEQ ID NO: 3495046 - DNA, 25 bp, Homo sapien
gccccgtcattaagccgatgtggag

SEQ ID NO: 3495047 - DNA, 25 bp, Homo sapien
taagccgatgtggagccgaacacag

SEQ ID NO: 3495048 - DNA, 25 bp, Homo sapien
cgcaggccccgtcattaagccgatg

SEQ ID NO: 3495049 - DNA, 25 bp, Homo sapien
gagccgaacacagcgtcctgctgat

SEQ ID NO: 3495050 - DNA, 25 bp, Homo sapien
cagtgaggcagtggcgtaaatgggt

SEQ ID NO: 3495051 - DNA, 25 bp, Homo sapien
tgaggcagtggcgtaaatgggtgga

SEQ ID NO: 3495052 - DNA, 25 bp, Homo sapien
gcagtggcgtaaatgggtggagaaa

SEQ ID NO: 3495053 - DNA, 25 bp, Homo sapien
aggcagtggcgtaaatgggtggaga

SEQ ID NO: 3495054 - DNA, 25 bp, Homo sapien
gccaatggagctgagtttggtgact

SEQ ID NO: 3495055 - DNA, 25 bp, Homo sapien
gccatccgctgctcctgagtacggt

SEQ ID NO: 3495056 - DNA, 25 bp, Homo sapien
tgccatgtcctttagccttggtgca

SEQ ID NO: 3495057 - DNA, 25 bp, Homo sapien
tgagtacggtctgtatgccatgtcc

SEQ ID NO: 3495058 - DNA, 25 bp, Homo sapien
gccccatcatgctgtccccagaaag

SEQ ID NO: 3495059 - DNA, 25 bp, Homo sapien
ttggtgtatgggtttgaaaatatta

SEQ ID NO: 3495060 - DNA, 25 bp, Homo sapien
ccgacagcgccccatcatgctgtcc

SEQ ID NO: 3495061 - DNA, 25 bp, Homo sapien
aaaatattaacctcacccgacagcg

SEQ ID NO: 3495062 - DNA, 25 bp, Homo sapien
ctcctccagaagatgataatactcc

SEQ ID NO: 3495063 - DNA, 25 bp, Homo sapien
cctcctccagaagatgataatactc

SEQ ID NO: 3495064 - DNA, 25 bp, Homo sapien
tcctcctccagaagataatactccc

SEQ ID NO: 3495065 - DNA, 25 bp, Homo sapien
tcctcctccagaagataatactcct

SEQ ID NO: 3495066 - DNA, 25 bp, Homo sapien
gatttgtacatatttgctgttgtca

SEQ ID NO: 3495067 - DNA, 25 bp, Homo sapien
tggttcatgctcagtgatttgtaca

SEQ ID NO: 3495068 - DNA, 25 bp, Homo sapien
gttgtcactgttgttgttatcgtca

SEQ ID NO: 3495069 - DNA, 25 bp, Homo sapien
ttgtacatatttgctgttgtcactg

SEQ ID NO: 3495070 - DNA, 25 bp, Homo sapien
ggagacaccactcatgccgtgcagg

SEQ ID NO: 3495071 - DNA, 25 bp, Homo sapien
gaagttccgggtaatgaaggcagca

SEQ ID NO: 3495072 - DNA, 25 bp, Homo sapien
tacatagagggtgggagaggtccag

SEQ ID NO: 3495073 - DNA, 25 bp, Homo sapien
agaaggggatcattacatagagggt

SEQ ID NO: 3495074 - DNA, 25 bp, Homo sapien
ggtcttcatttcgtcccaactactg

SEQ ID NO: 3495075 - DNA, 25 bp, Homo sapien
catttcgtcccaactactgatcttc

SEQ ID NO: 3495076 - DNA, 25 bp, Homo sapien
tcgtcccaactactgatcttcagca

SEQ ID NO: 3495077 - DNA, 25 bp, Homo sapien
ctgggtcttcatttcgtcccaacta

SEQ ID NO: 3495078 - DNA, 25 bp, Homo sapien
tgcagcccctgctcagtgggactgt

SEQ ID NO: 3495079 - DNA, 25 bp, Homo sapien
tggtgccaggctctgattggaccca

SEQ ID NO: 3495080 - DNA, 25 bp, Homo sapien
tcgctgccaagggagcgtggcttct

SEQ ID NO: 3495081 - DNA, 25 bp, Homo sapien
ccaagtctttgatgcccaggcagct

SEQ ID NO: 3495082 - DNA, 25 bp, Homo sapien
tgcagcaatggttgtgcttcccggg

SEQ ID NO: 3495083 - DNA, 25 bp, Homo sapien
caatacatctgctaccactccatag

SEQ ID NO: 3495084 - DNA, 25 bp, Homo sapien
caggcaagcagattgaaggccctcg

SEQ ID NO: 3495085 - DNA, 25 bp, Homo sapien
tagttcaaacccagcatcaactggg

SEQ ID NO: 3495086 - DNA, 25 bp, Homo sapien
tctgtggctgaaggagagacagcca

SEQ ID NO: 3495087 - DNA, 25 bp, Homo sapien
ctgtggctgaaggagagacagccat

SEQ ID NO: 3495088 - DNA, 25 bp, Homo sapien
ttctgtggctgaaggagagacagcc

SEQ ID NO: 3495089 - DNA, 25 bp, Homo sapien
cttctgtggctgaaggagagacagc

SEQ ID NO: 3495090 - DNA, 25 bp, Homo sapien
accgcagtaggaggagacctgagca

SEQ ID NO: 3495091 - DNA, 25 bp, Homo sapien
gccagactggacatggccttgccca

SEQ ID NO: 3495092 - DNA, 25 bp, Homo sapien
tgtcttcctcttcaccgcagtagga

SEQ ID NO: 3495093 - DNA, 25 bp, Homo sapien
aggccagactggacatggccttgcc

SEQ ID NO: 3495094 - DNA, 25 bp, Homo sapien
tgaagtttgcactgtgtaccacacc

SEQ ID NO: 3495095 - DNA, 25 bp, Homo sapien
gggcccacgtggaattcagccatgt

SEQ ID NO: 3495096 - DNA, 25 bp, Homo sapien
acaccacttgcggtacacatgtggg

SEQ ID NO: 3495097 - DNA, 25 bp, Homo sapien
cacgtggaattcagccatgtagaag

SEQ ID NO: 3495098 - DNA, 25 bp, Homo sapien
gatgctatcagagcacggtgagcct

SEQ ID NO: 3495099 - DNA, 25 bp, Homo sapien
ccttgcctgattccccgcttcttgt

SEQ ID NO: 3495100 - DNA, 25 bp, Homo sapien
ttgcctgattccccgcttcttgttt

SEQ ID NO: 3495101 - DNA, 25 bp, Homo sapien
cttgcctgattccccgcttcttgtt

SEQ ID NO: 3495102 - DNA, 25 bp, Homo sapien
tgcctgattccccgcttcttgtttt

SEQ ID NO: 3495103 - DNA, 25 bp, Homo sapien
caggagcagaaccacacgttctttt

SEQ ID NO: 3495104 - DNA, 25 bp, Homo sapien
tgaggtcaggcagatctgcagaaca

SEQ ID NO: 3495105 - DNA, 25 bp, Homo sapien
aggtcaggcagatctgcagaacagt

SEQ ID NO: 3495106 - DNA, 25 bp, Homo sapien
ctctccagtgactgcagcgggaagt

SEQ ID NO: 3495107 - DNA, 25 bp, Homo sapien
gacaggctttctctcggaaagttct

SEQ ID NO: 3495108 - DNA, 25 bp, Homo sapien
ggcttggctggttttgtgctgagca

SEQ ID NO: 3495109 - DNA, 25 bp, Homo sapien
tccagtgactgcagcgggaagtgcc

SEQ ID NO: 3495110 - DNA, 25 bp, Homo sapien
gcgatgctacccagctgaatggcat

SEQ ID NO: 3495111 - DNA, 25 bp, Homo sapien
ggccctggccccactacaaggagct

SEQ ID NO: 3495112 - DNA, 25 bp, Homo sapien
tgcacagtgactgcgatgctaccca

SEQ ID NO: 3495113 - DNA, 25 bp, Homo sapien
tgaatggcatcagcttagctcatgg

SEQ ID NO: 3495114 - DNA, 25 bp, Homo sapien
gcaagcaaaacccatgagcacccag

SEQ ID NO: 3495115 - DNA, 25 bp, Homo sapien
tcagcaagcaaaacccatgagcacc

SEQ ID NO: 3495116 - DNA, 25 bp, Homo sapien
accctggctgaagcaacgctctctt

SEQ ID NO: 3495117 - DNA, 25 bp, Homo sapien
gcatgactaatcagaccctggctga

SEQ ID NO: 3495118 - DNA, 25 bp, Homo sapien
agctctcgctgtgggctcgcatggc

SEQ ID NO: 3495119 - DNA, 25 bp, Homo sapien
cttcagggatgcgttgactcaggga

SEQ ID NO: 3495120 - DNA, 25 bp, Homo sapien
gcagctctggtggacacgcgatgct

SEQ ID NO: 3495121 - DNA, 25 bp, Homo sapien
ggacacgcgatgctatgcagccaac

SEQ ID NO: 3495122 - DNA, 25 bp, Homo sapien
ctgtgtatcttcagggatgcgttga

SEQ ID NO: 3495123 - DNA, 25 bp, Homo sapien
acagttatacgaggcctcctagccc

SEQ ID NO: 3495124 - DNA, 25 bp, Homo sapien
cccacagttatacgaggcctcctag

SEQ ID NO: 3495125 - DNA, 25 bp, Homo sapien
cactagactggaattccgcgttctc

SEQ ID NO: 3495126 - DNA, 25 bp, Homo sapien
ctcacttccacactagactggaatt

SEQ ID NO: 3495127 - DNA, 25 bp, Homo sapien
gcggacggtggccagatgtgactca

SEQ ID NO: 3495128 - DNA, 25 bp, Homo sapien
acggtggccagatgtgactcagcgg

SEQ ID NO: 3495129 - DNA, 25 bp, Homo sapien
agatgtgactcagcggctctcgttg

SEQ ID NO: 3495130 - DNA, 25 bp, Homo sapien
actcagcggctctcgttggatctga

SEQ ID NO: 3495131 - DNA, 25 bp, Homo sapien
tgaccagatgtgagcgctgcggacg

SEQ ID NO: 3495132 - DNA, 25 bp, Homo sapien
cggacggtggccagatgtgagcgct

SEQ ID NO: 3495133 - DNA, 25 bp, Homo sapien
ggtgaccagatgtgagcgctgcgga

SEQ ID NO: 3495134 - DNA, 25 bp, Homo sapien
gtgaccagatgtgagcgcagcggac

SEQ ID NO: 3495135 - DNA, 25 bp, Homo sapien
gccaggttcctcgagcttagtaaaa

SEQ ID NO: 3495136 - DNA, 25 bp, Homo sapien
tcttgactgcttgctcgagccggct

SEQ ID NO: 3495137 - DNA, 25 bp, Homo sapien
agaacagcaggtgccgccagtttgt

SEQ ID NO: 3495138 - DNA, 25 bp, Homo sapien
gggttcagcatatgcagccagttca

SEQ ID NO: 3495139 - DNA, 25 bp, Homo sapien
gatgcagagtagctccaggccaaag

SEQ ID NO: 3495140 - DNA, 25 bp, Homo sapien
gcagagtagctccaggccaaagcag

SEQ ID NO: 3495141 - DNA, 25 bp, Homo sapien
ggtgggttgccactgtggaatgcat

SEQ ID NO: 3495142 - DNA, 25 bp, Homo sapien
aggaggtgggttgccactgtggaat

SEQ ID NO: 3495143 - DNA, 25 bp, Homo sapien
gccctgcagaatatccctctctgat

SEQ ID NO: 3495144 - DNA, 25 bp, Homo sapien
gcagaatatccctctctgatatgtt

SEQ ID NO: 3495145 - DNA, 25 bp, Homo sapien
tgccctgcagaatatccctctctga

SEQ ID NO: 3495146 - DNA, 25 bp, Homo sapien
cctgcagaatatccctctctgatat

SEQ ID NO: 3495147 - DNA, 25 bp, Homo sapien
tcctggctgtgggactggatccagg

SEQ ID NO: 3495148 - DNA, 25 bp, Homo sapien
tctgggagcagaagtcctgataaaa

SEQ ID NO: 3495149 - DNA, 25 bp, Homo sapien
gcagccttaaagctgtccctacaga

SEQ ID NO: 3495150 - DNA, 25 bp, Homo sapien
cagagaataaaagctgcagcgctgg

SEQ ID NO: 3495151 - DNA, 25 bp, Homo sapien
tgtgacacaacaggacactgctatg

SEQ ID NO: 3495152 - DNA, 25 bp, Homo sapien
cctcaagtccagcagtagcaacatg

SEQ ID NO: 3495153 - DNA, 25 bp, Homo sapien
tgctatgggcagtctcagtgttgta

SEQ ID NO: 3495154 - DNA, 25 bp, Homo sapien
gcctgtgtgtgtaccaacaatcaaa

SEQ ID NO: 3495155 - DNA, 25 bp, Homo sapien
aactgatggaactaataagttttgc

SEQ ID NO: 3495156 - DNA, 25 bp, Homo sapien
tacatatgcataaagtacctgttca

SEQ ID NO: 3495157 - DNA, 25 bp, Homo sapien
caggatataatgtcaaacaaagatc

SEQ ID NO: 3495158 - DNA, 25 bp, Homo sapien
caaagatctattatgtgcccataag

SEQ ID NO: 3495159 - DNA, 25 bp, Homo sapien
tgagatcttcttgtaaatcactagc

SEQ ID NO: 3495160 - DNA, 25 bp, Homo sapien
atgagatcttcttgtaaatcactag

SEQ ID NO: 3495161 - DNA, 25 bp, Homo sapien
agatcttcttgtaaatcactagctg

SEQ ID NO: 3495162 - DNA, 25 bp, Homo sapien
ttatgagatcttcttgtaaatcact

SEQ ID NO: 3495163 - DNA, 25 bp, Homo sapien
tccatctgtgaattagggtgtggcc

SEQ ID NO: 3495164 - DNA, 25 bp, Homo sapien
aagctgtccaacacattagggccac

SEQ ID NO: 3495165 - DNA, 25 bp, Homo sapien
aatgccagttggaacagggagtgac

SEQ ID NO: 3495166 - DNA, 25 bp, Homo sapien
taggtgtcggtacaggctagtctga

SEQ ID NO: 3495167 - DNA, 25 bp, Homo sapien
caaaggccatggctatgagcagcac

SEQ ID NO: 3495168 - DNA, 25 bp, Homo sapien
gtcaaaggccatggctatgagcagc

SEQ ID NO: 3495169 - DNA, 25 bp, Homo sapien
tgtcaaaggccatggctatgagcag

SEQ ID NO: 3495170 - DNA, 25 bp, Homo sapien
ctgtcaaaggccatggctatgagca

SEQ ID NO: 3495171 - DNA, 25 bp, Homo sapien
gatgaagaagatttgagcgatgcag

SEQ ID NO: 3495172 - DNA, 25 bp, Homo sapien
gaagaagatttgagcgatgcagcct

SEQ ID NO: 3495173 - DNA, 25 bp, Homo sapien
aagatttgagcgatgcagcctccaa

SEQ ID NO: 3495174 - DNA, 25 bp, Homo sapien
acgtggatgaagaagatttgagcga

SEQ ID NO: 3495175 - DNA, 25 bp, Homo sapien
tttgcactttctgaacaggtcataa

SEQ ID NO: 3495176 - DNA, 25 bp, Homo sapien
actttctgaacaggtcataaatcat

SEQ ID NO: 3495177 - DNA, 25 bp, Homo sapien
tgcactttctgaacaggtcataaat

SEQ ID NO: 3495178 - DNA, 25 bp, Homo sapien
cactttctgaacaggtcataaatca

SEQ ID NO: 3495179 - DNA, 25 bp, Homo sapien
cacagaggaaaacactaggaggagg

SEQ ID NO: 3495180 - DNA, 25 bp, Homo sapien
taagtgagggtcagtggtcacagaa

SEQ ID NO: 3495181 - DNA, 25 bp, Homo sapien
agcaggctcctaagtcaatgaagga

SEQ ID NO: 3495182 - DNA, 25 bp, Homo sapien
aatgcttgccacatagagcacagag

SEQ ID NO: 3495183 - DNA, 25 bp, Homo sapien
cagccaactgggctgtggctaaaat

SEQ ID NO: 3495184 - DNA, 25 bp, Homo sapien
ccagccaactgggctgtggctaaaa

SEQ ID NO: 3495185 - DNA, 25 bp, Homo sapien
gccaactgggctgtggctaaaatta

SEQ ID NO: 3495186 - DNA, 25 bp, Homo sapien
gaaaatggggaggaaattgtgatta

SEQ ID NO: 3495187 - DNA, 25 bp, Homo sapien
tctccttcacactgatttgttcttt

SEQ ID NO: 3495188 - DNA, 25 bp, Homo sapien
tcaaaggtcaattatgatctcaatc

SEQ ID NO: 3495189 - DNA, 25 bp, Homo sapien
gacaattctccttcacactgatttg

SEQ ID NO: 3495190 - DNA, 25 bp, Homo sapien
cttttcttgtaattttactgacaat

SEQ ID NO: 3495191 - DNA, 25 bp, Homo sapien
cccagaaatccctaaaagaggtgtg

SEQ ID NO: 3495192 - DNA, 25 bp, Homo sapien
caagataaagtgcatgcctctgaag

SEQ ID NO: 3495193 - DNA, 25 bp, Homo sapien
gagcttgagctagtcaagaagccca

SEQ ID NO: 3495194 - DNA, 25 bp, Homo sapien
tgcagcatgtgaaccctccacagag

SEQ ID NO: 3495195 - DNA, 25 bp, Homo sapien
ctgtaacagtgcaattaaacgttct

SEQ ID NO: 3495196 - DNA, 25 bp, Homo sapien
gattcaaggtgtgaaggtaacatca

SEQ ID NO: 3495197 - DNA, 25 bp, Homo sapien
tcacctgtaaaattgtctgagcaac

SEQ ID NO: 3495198 - DNA, 25 bp, Homo sapien
gcatgtttgctagaactcacctgta

SEQ ID NO: 3495199 - DNA, 25 bp, Homo sapien
tcagttgtttagttacaagatagaa

SEQ ID NO: 3495200 - DNA, 25 bp, Homo sapien
aattaacttctaacatacaaagcct

SEQ ID NO: 3495201 - DNA, 25 bp, Homo sapien
accatctacgctaagacataaaatt

SEQ ID NO: 3495202 - DNA, 25 bp, Homo sapien
tggccttgtaagaaagcaaattaac

SEQ ID NO: 3495203 - DNA, 25 bp, Homo sapien
ttgttaatgtataagagatgtagat

SEQ ID NO: 3495204 - DNA, 25 bp, Homo sapien
tgttaatgtataagagatgtagatt

SEQ ID NO: 3495205 - DNA, 25 bp, Homo sapien
attgttaatgtataagagatgtaga

SEQ ID NO: 3495206 - DNA, 25 bp, Homo sapien
tcaggtacttaaagttagctccaaa

SEQ ID NO: 3495207 - DNA, 25 bp, Homo sapien
tacctctctgtggcatttaatgata

SEQ ID NO: 3495208 - DNA, 25 bp, Homo sapien
tatctttacctctctgtggcattta

SEQ ID NO: 3495209 - DNA, 25 bp, Homo sapien
ttatctttacctctctgtggcattt

SEQ ID NO: 3495210 - DNA, 25 bp, Homo sapien
cctctctgtggcatttaatgataag

SEQ ID NO: 3495211 - DNA, 25 bp, Homo sapien
cttagaaaccacctcagctttctcc

SEQ ID NO: 3495212 - DNA, 25 bp, Homo sapien
cagctataaaattgtgcttttcctc

SEQ ID NO: 3495213 - DNA, 25 bp, Homo sapien
tataaaattgtgcttttcctcaaag

SEQ ID NO: 3495214 - DNA, 25 bp, Homo sapien
gctataaaattgtgcttttcctcaa

SEQ ID NO: 3495215 - DNA, 25 bp, Homo sapien
tcagctataaaattgtgcttttcct

SEQ ID NO: 3495216 - DNA, 25 bp, Homo sapien
gactttgtcgcatcacacctcagag

SEQ ID NO: 3495217 - DNA, 25 bp, Homo sapien
ccatattgaactgtaagtctcctga

SEQ ID NO: 3495218 - DNA, 25 bp, Homo sapien
caatataagttcctgcagaatgcag

SEQ ID NO: 3495219 - DNA, 25 bp, Homo sapien
tcctgcctagaaaggatcgtccctc

SEQ ID NO: 3495220 - DNA, 25 bp, Homo sapien
aagtcaaaagctagagtatagagaa

SEQ ID NO: 3495221 - DNA, 25 bp, Homo sapien
tctaaatacctcttaggtcagaaaa

SEQ ID NO: 3495222 - DNA, 25 bp, Homo sapien
aataaacagattatatggaggattt

SEQ ID NO: 3495223 - DNA, 25 bp, Homo sapien
agaaacgccctaaatttctaatctg

SEQ ID NO: 3495224 - DNA, 25 bp, Homo sapien
gatgggatgtagaatgataaggctc

SEQ ID NO: 3495225 - DNA, 25 bp, Homo sapien
gccctgctaggagttcacgctttag

SEQ ID NO: 3495226 - DNA, 25 bp, Homo sapien
tgagaactgcaattagagttaaatg

SEQ ID NO: 3495227 - DNA, 25 bp, Homo sapien
aaagacaaactcacaggaagatggg

SEQ ID NO: 3495228 - DNA, 25 bp, Homo sapien
tctttgtatcggtgctcagctgagt

SEQ ID NO: 3495229 - DNA, 25 bp, Homo sapien
ttgaatcattttaagatgctcgaac

SEQ ID NO: 3495230 - DNA, 25 bp, Homo sapien
tgtctttctttgtatcggtgctcag

SEQ ID NO: 3495231 - DNA, 25 bp, Homo sapien
tctttctttgtatcggtgctcagct

SEQ ID NO: 3495232 - DNA, 25 bp, Homo sapien
tctgcggccgtgttctcctggtact

SEQ ID NO: 3495233 - DNA, 25 bp, Homo sapien
ctgcggccgtgttctcctggtactc

SEQ ID NO: 3495234 - DNA, 25 bp, Homo sapien
cggccgtgttctcctggtactccat

SEQ ID NO: 3495235 - DNA, 25 bp, Homo sapien
tgcggccgtgttctcctggtactcc

SEQ ID NO: 3495236 - DNA, 25 bp, Homo sapien
ccaaagcccaacacccccaagtgtg

SEQ ID NO: 3495237 - DNA, 25 bp, Homo sapien
caaagcccaacacccccaagtgtgc

SEQ ID NO: 3495238 - DNA, 25 bp, Homo sapien
tgcactcccaacttgagctatactt

SEQ ID NO: 3495239 - DNA, 25 bp, Homo sapien
cagaacacgttgatcgtgggcgata

SEQ ID NO: 3495240 - DNA, 25 bp, Homo sapien
ctgcacttcgacacaggcagcggga

SEQ ID NO: 3495241 - DNA, 25 bp, Homo sapien
aaggcctgctcctcttatctatacc

SEQ ID NO: 3495242 - DNA, 25 bp, Homo sapien
cagggaggccgacttgctgctcttc

SEQ ID NO: 3495243 - DNA, 25 bp, Homo sapien
cacttccaggccgacttgaggacga

SEQ ID NO: 3495244 - DNA, 25 bp, Homo sapien
gtcgagaggacggagctgggcccag

SEQ ID NO: 3495245 - DNA, 25 bp, Homo sapien
tgggcccagggaggccgacttgctg

SEQ ID NO: 3495246 - DNA, 25 bp, Homo sapien
cctgcagatgtcatcggagggccag

SEQ ID NO: 3495247 - DNA, 25 bp, Homo sapien
gcctgcagatgtcatcggagggcca

SEQ ID NO: 3495248 - DNA, 25 bp, Homo sapien
aagacgttgttgggacctggagtcg

SEQ ID NO: 3495249 - DNA, 25 bp, Homo sapien
ctgcaagtgggtctgagaggccaac

SEQ ID NO: 3495250 - DNA, 25 bp, Homo sapien
aagtgggtctgagaggccaacttga

SEQ ID NO: 3495251 - DNA, 25 bp, Homo sapien
tggcctctgcctcccgcattgccca

SEQ ID NO: 3495252 - DNA, 25 bp, Homo sapien
gccaacttgaggaggcctggcctct

SEQ ID NO: 3495253 - DNA, 25 bp, Homo sapien
agcagcccgagtgcgatcctgttcc

SEQ ID NO: 3495254 - DNA, 25 bp, Homo sapien
cccagcagcccgagtgcgatcctgt

SEQ ID NO: 3495255 - DNA, 25 bp, Homo sapien
cagcagcccgagtgcgatcctgttc

SEQ ID NO: 3495256 - DNA, 25 bp, Homo sapien
ccagcagcccgagtgcgatcctgtt

SEQ ID NO: 3495257 - DNA, 25 bp, Homo sapien
tgacctctgtccgcgtgggaggggc

SEQ ID NO: 3495258 - DNA, 25 bp, Homo sapien
ctctgtccgcgtgggaggggccggt

SEQ ID NO: 3495259 - DNA, 25 bp, Homo sapien
ctgacctctgtccgcgtgggagggg

SEQ ID NO: 3495260 - DNA, 25 bp, Homo sapien
acctctgtccgcgtgggaggggccg

SEQ ID NO: 3495261 - DNA, 25 bp, Homo sapien
ccctcagagcttggctggagaaagt

SEQ ID NO: 3495262 - DNA, 25 bp, Homo sapien
ggtgggccctcagagcttggctgga

SEQ ID NO: 3495263 - DNA, 25 bp, Homo sapien
gggcaggagttgagccaaaagagct

SEQ ID NO: 3495264 - DNA, 25 bp, Homo sapien
cctacaaaggcggttgggagctggg

SEQ ID NO: 3495265 - DNA, 25 bp, Homo sapien
cgggagagcccgacttcaggacaac

SEQ ID NO: 3495266 - DNA, 25 bp, Homo sapien
acaacttgggcctgcggcagtcgcc

SEQ ID NO: 3495267 - DNA, 25 bp, Homo sapien
ggcctgcggcagtcgccgggaggcc

SEQ ID NO: 3495268 - DNA, 25 bp, Homo sapien
gggagagcccgacttcaggacaact

SEQ ID NO: 3495269 - DNA, 25 bp, Homo sapien
tggagaggccaccgtgaggcctgac

SEQ ID NO: 3495270 - DNA, 25 bp, Homo sapien
ctggagaggccaccgtgaggcctga

SEQ ID NO: 3495271 - DNA, 25 bp, Homo sapien
atgggtaggcactgagtccaaagag

SEQ ID NO: 3495272 - DNA, 25 bp, Homo sapien
caaagaggttgttgagaggcaggaa

SEQ ID NO: 3495273 - DNA, 25 bp, Homo sapien
aagaggttgttgagaggcaggaatc

SEQ ID NO: 3495274 - DNA, 25 bp, Homo sapien
aggttgttgagaggcaggaatcggg

SEQ ID NO: 3495275 - DNA, 25 bp, Homo sapien
ggaaatggcctcacagtcatgagtt

SEQ ID NO: 3495276 - DNA, 25 bp, Homo sapien
aatggcctcacagtcatgagttggg

SEQ ID NO: 3495277 - DNA, 25 bp, Homo sapien
tggcctcacagtcatgagttgggcc

SEQ ID NO: 3495278 - DNA, 25 bp, Homo sapien
gcctcacagtcatgagttgggccta

SEQ ID NO: 3495279 - DNA, 25 bp, Homo sapien
agtcaaagctgggcctgttgatgcc

SEQ ID NO: 3495280 - DNA, 25 bp, Homo sapien
tcaaagctgggcctgttgatgccac

SEQ ID NO: 3495281 - DNA, 25 bp, Homo sapien
tcaagtcaaagctgggcctgttgat

SEQ ID NO: 3495282 - DNA, 25 bp, Homo sapien
caagtcaaagctgggcctgttgatg

SEQ ID NO: 3495283 - DNA, 25 bp, Homo sapien
aactgggccaaaaaaggctgttgtg

SEQ ID NO: 3495284 - DNA, 25 bp, Homo sapien
actgggccaaaaaaggctgttgtga

SEQ ID NO: 3495285 - DNA, 25 bp, Homo sapien
cctggacaggtcaacttgaggagat

SEQ ID NO: 3495286 - DNA, 25 bp, Homo sapien
ccaccaggaggcagtagttgggact

SEQ ID NO: 3495287 - DNA, 25 bp, Homo sapien
gggaaggttgccatgagacaaaagt

SEQ ID NO: 3495288 - DNA, 25 bp, Homo sapien
tggaaaggcccttgtgaagcatgag

SEQ ID NO: 3495289 - DNA, 25 bp, Homo sapien
tagggtatgggcctaaataggccat

SEQ ID NO: 3495290 - DNA, 25 bp, Homo sapien
agggtatgggcctaaataggccatt

SEQ ID NO: 3495291 - DNA, 25 bp, Homo sapien
gggtatgggcctaaataggccattg

SEQ ID NO: 3495292 - DNA, 25 bp, Homo sapien
gtagggtatgggcctaaataggcca

SEQ ID NO: 3495293 - DNA, 25 bp, Homo sapien
ttttcctgcaactggatggtcccac

SEQ ID NO: 3495294 - DNA, 25 bp, Homo sapien
acgtttcgctgtcacccctctggaa

SEQ ID NO: 3495295 - DNA, 25 bp, Homo sapien
gcagtcagctgcgatagcactacta

SEQ ID NO: 3495296 - DNA, 25 bp, Homo sapien
acccctctggaatccacgtatacga

SEQ ID NO: 3495297 - DNA, 25 bp, Homo sapien
tccacgtatacgaaaattccaaata

SEQ ID NO: 3495298 - DNA, 25 bp, Homo sapien
ctggagagaaggctgggaggcagga

SEQ ID NO: 3495299 - DNA, 25 bp, Homo sapien
gagaatgttcagggcctggagagaa

SEQ ID NO: 3495300 - DNA, 25 bp, Homo sapien
gaggcaggagctgggtctaaagagg

SEQ ID NO: 3495301 - DNA, 25 bp, Homo sapien
tgagaatgttcagggcctggagaga

SEQ ID NO: 3495302 - DNA, 25 bp, Homo sapien
gtagggtatgggcctaaataggcca

SEQ ID NO: 3495303 - DNA, 25 bp, Homo sapien
tagggtatgggcctaaataggccat

SEQ ID NO: 3495304 - DNA, 25 bp, Homo sapien
agggtatgggcctaaataggccatt

SEQ ID NO: 3495305 - DNA, 25 bp, Homo sapien
gggtatgggcctaaataggccattg

SEQ ID NO: 3495306 - DNA, 25 bp, Homo sapien
tgtagaatcagtgggcgtgttaagc

SEQ ID NO: 3495307 - DNA, 25 bp, Homo sapien
ttttcctgcaactggatgttcccac

SEQ ID NO: 3495308 - DNA, 25 bp, Homo sapien
tagaatcagtgggcgtgttaagctt

SEQ ID NO: 3495309 - DNA, 25 bp, Homo sapien
gaatcagtgggcgtgttaagcttgt

SEQ ID NO: 3495310 - DNA, 25 bp, Homo sapien
gggtgcgttctcctatgagcatcta

SEQ ID NO: 3495311 - DNA, 25 bp, Homo sapien
tgcgttctcctatgagcatctaatg

SEQ ID NO: 3495312 - DNA, 25 bp, Homo sapien
aacagggtgcgttctcctatgagca

SEQ ID NO: 3495313 - DNA, 25 bp, Homo sapien
tgctgctcatctgagaaggtggagc

SEQ ID NO: 3495314 - DNA, 25 bp, Homo sapien
cttgagtcactgtgaggtcacctac

SEQ ID NO: 3495315 - DNA, 25 bp, Homo sapien
ccatttcccactggcaaagagctca

SEQ ID NO: 3495316 - DNA, 25 bp, Homo sapien
tcactgtgaggtcacctactggaaa

SEQ ID NO: 3495317 - DNA, 25 bp, Homo sapien
cagcactgccccctgggaaaccaaa

SEQ ID NO: 3495318 - DNA, 25 bp, Homo sapien
gctttcagggttgctggacacagga

SEQ ID NO: 3495319 - DNA, 25 bp, Homo sapien
catgttcaacagagggcatgggagc

SEQ ID NO: 3495320 - DNA, 25 bp, Homo sapien
gggtgactgcaagctcctaaatttc

SEQ ID NO: 3495321 - DNA, 25 bp, Homo sapien
caagaggagggctgattaccatgca

SEQ ID NO: 3495322 - DNA, 25 bp, Homo sapien
tcccattgcacctgatgcatgggaa

SEQ ID NO: 3495323 - DNA, 25 bp, Homo sapien
cctgatgcatgggaaacataatttg

SEQ ID NO: 3495324 - DNA, 25 bp, Homo sapien
tgcacctgatgcatgggaaacataa

SEQ ID NO: 3495325 - DNA, 25 bp, Homo sapien
cccattgcacctgatgcatgggaaa

SEQ ID NO: 3495326 - DNA, 25 bp, Homo sapien
ctggattcacaagtctttcatggta

SEQ ID NO: 3495327 - DNA, 25 bp, Homo sapien
tcctggattcacaagtctttcatgg

SEQ ID NO: 3495328 - DNA, 25 bp, Homo sapien
tcttcctggattcacaagtctttca

SEQ ID NO: 3495329 - DNA, 25 bp, Homo sapien
tctctcttcctggattcacaagtct

SEQ ID NO: 3495330 - DNA, 25 bp, Homo sapien
gtgcatttgaaaggaaccatcccac

SEQ ID NO: 3495331 - DNA, 25 bp, Homo sapien
ttgaaaggaaccatcccacgccatt

SEQ ID NO: 3495332 - DNA, 25 bp, Homo sapien
catttcacaatcaacagtatgtggc

SEQ ID NO: 3495333 - DNA, 25 bp, Homo sapien
catttgaaaggaaccatcccacgcc

SEQ ID NO: 3495334 - DNA, 25 bp, Homo sapien
atctcctggtacccttcctagcatc

SEQ ID NO: 3495335 - DNA, 25 bp, Homo sapien
tctcctggtacccttcctagcatca

SEQ ID NO: 3495336 - DNA, 25 bp, Homo sapien
ctcctggtacccttcctagcatcaa

SEQ ID NO: 3495337 - DNA, 25 bp, Homo sapien
agtgagcagaggttgtgccactgta

SEQ ID NO: 3495338 - DNA, 25 bp, Homo sapien
gctgcagtgagcagaggttgtgcca

SEQ ID NO: 3495339 - DNA, 25 bp, Homo sapien
gcagtgagcagaggttgtgccactg

SEQ ID NO: 3495340 - DNA, 25 bp, Homo sapien
ctgcagtgagcagaggttgtgccac

SEQ ID NO: 3495341 - DNA, 25 bp, Homo sapien
gctataatgagccatgataggacca

SEQ ID NO: 3495342 - DNA, 25 bp, Homo sapien
tgaggctataatgagccatgatagg

SEQ ID NO: 3495343 - DNA, 25 bp, Homo sapien
tgggaaggctgacatggtaggattg

SEQ ID NO: 3495344 - DNA, 25 bp, Homo sapien
taatgagccatgataggaccactga

SEQ ID NO: 3495345 - DNA, 25 bp, Homo sapien
ggatccttcctttggttctcagtag

SEQ ID NO: 3495346 - DNA, 25 bp, Homo sapien
atggctcgagttgagctaaggagaa

SEQ ID NO: 3495347 - DNA, 25 bp, Homo sapien
atttggatccttcctttggttctca

SEQ ID NO: 3495348 - DNA, 25 bp, Homo sapien
cgagttgagctaaggagaatttgga

SEQ ID NO: 3495349 - DNA, 25 bp, Homo sapien
gggagactgaagtgagagaaccact

SEQ ID NO: 3495350 - DNA, 25 bp, Homo sapien
tcatgtcactgtactgtagcctaag

SEQ ID NO: 3495351 - DNA, 25 bp, Homo sapien
tgggagactgaagtgagagaaccac

SEQ ID NO: 3495352 - DNA, 25 bp, Homo sapien
tgtcactgtactgtagcctaagcaa

SEQ ID NO: 3495353 - DNA, 25 bp, Homo sapien
gccaggtcgtgcttttaaatcagga

SEQ ID NO: 3495354 - DNA, 25 bp, Homo sapien
caatagcgtcccagggcttacacga

SEQ ID NO: 3495355 - DNA, 25 bp, Homo sapien
taatgcctttatcctgttgactcag

SEQ ID NO: 3495356 - DNA, 25 bp, Homo sapien
taaatcaggagacggatcatgtcgc

SEQ ID NO: 3495357 - DNA, 25 bp, Homo sapien
aaatgtaggagggaaggtgttactg

SEQ ID NO: 3495358 - DNA, 25 bp, Homo sapien
cagacatcagcacttaaaagtttta

SEQ ID NO: 3495359 - DNA, 25 bp, Homo sapien
cacagacagacatcagcacttaaaa

SEQ ID NO: 3495360 - DNA, 25 bp, Homo sapien
cagacagacatcagcacttaaaagt

SEQ ID NO: 3495361 - DNA, 25 bp, Homo sapien
taggaggtctttcatttatcacaca

SEQ ID NO: 3495362 - DNA, 25 bp, Homo sapien
ggaggtctttcatttatcacacaga

SEQ ID NO: 3495363 - DNA, 25 bp, Homo sapien
ataggaggtctttcatttatcacac

SEQ ID NO: 3495364 - DNA, 25 bp, Homo sapien
aggtctttcatttatcacacagaaa

SEQ ID NO: 3495365 - DNA, 25 bp, Homo sapien
taaacaaaaggtcatatgcacaaac

SEQ ID NO: 3495366 - DNA, 25 bp, Homo sapien
taagaatgctcatgccctgtgactc

SEQ ID NO: 3495367 - DNA, 25 bp, Homo sapien
tacagacagtgactcattatactgc

SEQ ID NO: 3495368 - DNA, 25 bp, Homo sapien
tttacatcgagggtaataagaatgc

SEQ ID NO: 3495369 - DNA, 25 bp, Homo sapien
taagtatgtgtgctactgaggcaag

SEQ ID NO: 3495370 - DNA, 25 bp, Homo sapien
tcacagaggccgtgccaatctctct

SEQ ID NO: 3495371 - DNA, 25 bp, Homo sapien
acttaagtatgtgtgctactgaggc

SEQ ID NO: 3495372 - DNA, 25 bp, Homo sapien
aagtatgtgtgctactgaggcaagc

SEQ ID NO: 3495373 - DNA, 25 bp, Homo sapien
ggacagtacttgttctcaagggaat

SEQ ID NO: 3495374 - DNA, 25 bp, Homo sapien
tccttctaaagtaacatcctctcaa

SEQ ID NO: 3495375 - DNA, 25 bp, Homo sapien
tctaaagtaacatcctctcaaggcc

SEQ ID NO: 3495376 - DNA, 25 bp, Homo sapien
tcacttgatatcaggagtcgaggcg

SEQ ID NO: 3495377 - DNA, 25 bp, Homo sapien
ttccattagtagaaagccttcctaa

SEQ ID NO: 3495378 - DNA, 25 bp, Homo sapien
gggcgataagagtgaaaactccatc

SEQ ID NO: 3495379 - DNA, 25 bp, Homo sapien
ggttgcagtgaccagcaaggttgcg

SEQ ID NO: 3495380 - DNA, 25 bp, Homo sapien
cctgggcgataagagtgaaaactcc

SEQ ID NO: 3495381 - DNA, 25 bp, Homo sapien
cagtgaccagcaaggttgcgccatt

SEQ ID NO: 3495382 - DNA, 25 bp, Homo sapien
gactggaaaaaagggtatgggatca

SEQ ID NO: 3495383 - DNA, 25 bp, Homo sapien
aaaagggtatgggatcatcaccgga

SEQ ID NO: 3495384 - DNA, 25 bp, Homo sapien
gaaaaaagggtatgggatcatcacc

SEQ ID NO: 3495385 - DNA, 25 bp, Homo sapien
aaagggtatgggatcatcaccggac

SEQ ID NO: 3495386 - DNA, 25 bp, Homo sapien
gatatcatttaaacacggtatgtag

SEQ ID NO: 3495387 - DNA, 25 bp, Homo sapien
tatcatttaaacacggtatgtagaa

SEQ ID NO: 3495388 - DNA, 25 bp, Homo sapien
gggatatcatttaaacacggtatgt

SEQ ID NO: 3495389 - DNA, 25 bp, Homo sapien
aagggatatcatttaaacacggtat

SEQ ID NO: 3495390 - DNA, 25 bp, Homo sapien
ttcacctgttgaattcataagttca

SEQ ID NO: 3495391 - DNA, 25 bp, Homo sapien
atcttcacctgttgaattcataagt

SEQ ID NO: 3495392 - DNA, 25 bp, Homo sapien
ctgacaaagttgatttatcaagttg

SEQ ID NO: 3495393 - DNA, 25 bp, Homo sapien
cacctgttgaattcataagttcatg

SEQ ID NO: 3495394 - DNA, 25 bp, Homo sapien
tttgatgtataccaacagagagagg

SEQ ID NO: 3495395 - DNA, 25 bp, Homo sapien
gatagaatagtatcagggcaatgat

SEQ ID NO: 3495396 - DNA, 25 bp, Homo sapien
taaaggtggcttcaggatagaatag

SEQ ID NO: 3495397 - DNA, 25 bp, Homo sapien
ggcaccttggtgagtactgaacatt

SEQ ID NO: 3495398 - DNA, 25 bp, Homo sapien
aaacatgtaaggatggcatgactcg

SEQ ID NO: 3495399 - DNA, 25 bp, Homo sapien
gatggcatgactcgccggcagccct

SEQ ID NO: 3495400 - DNA, 25 bp, Homo sapien
aaggagaaacatgtaaggatggcat

SEQ ID NO: 3495401 - DNA, 25 bp, Homo sapien
atgtaaggatggcatgactcgccgg

SEQ ID NO: 3495402 - DNA, 25 bp, Homo sapien
actgtgtaaacgcccatgaacataa

SEQ ID NO: 3495403 - DNA, 25 bp, Homo sapien
tgtaaacgcccatgaacataagatt

SEQ ID NO: 3495404 - DNA, 25 bp, Homo sapien
cataagattacaagacttttccagt

SEQ ID NO: 3495405 - DNA, 25 bp, Homo sapien
tccactgtgtaaacgcccatgaaca

SEQ ID NO: 3495406 - DNA, 25 bp, Homo sapien
ttacgtagatcagcgatacgatgat

SEQ ID NO: 3495407 - DNA, 25 bp, Homo sapien
acgtagatcagcgatacgatgattc

SEQ ID NO: 3495408 - DNA, 25 bp, Homo sapien
gtagatcagcgatacgatgattcca

SEQ ID NO: 3495409 - DNA, 25 bp, Homo sapien
gtttacgtagatcagcgatacgatg

SEQ ID NO: 3495410 - DNA, 25 bp, Homo sapien
tcggatccttgtaagagcagagcag

SEQ ID NO: 3495411 - DNA, 25 bp, Homo sapien
gtagtgacagaagcaggaaactcca

SEQ ID NO: 3495412 - DNA, 25 bp, Homo sapien
aggtgtagtgacagaagcaggaaac

SEQ ID NO: 3495413 - DNA, 25 bp, Homo sapien
gtgtagtgacagaagcaggaaactc

SEQ ID NO: 3495414 - DNA, 25 bp, Homo sapien
taggcattcccagatacagcaaagg

SEQ ID NO: 3495415 - DNA, 25 bp, Homo sapien
gcattcccagatacagcaaaggtcc

SEQ ID NO: 3495416 - DNA, 25 bp, Homo sapien
taccaaggtaaccagtaggcattcc

SEQ ID NO: 3495417 - DNA, 25 bp, Homo sapien
ttaccaaggtaaccagtaggcattc

SEQ ID NO: 3495418 - DNA, 25 bp, Homo sapien
cacaccaagatatgcacctggccac

SEQ ID NO: 3495419 - DNA, 25 bp, Homo sapien
tcacaccaagatatgcacctggcca

SEQ ID NO: 3495420 - DNA, 25 bp, Homo sapien
cacctggcacgaggcgtgcccagag

SEQ ID NO: 3495421 - DNA, 25 bp, Homo sapien
gatgcacctggcacgaggcgtgccc

SEQ ID NO: 3495422 - DNA, 25 bp, Homo sapien
agatgcacctggcacgaggcgtgcc

SEQ ID NO: 3495423 - DNA, 25 bp, Homo sapien
tgcacctggcacgaggcgtgcccag

SEQ ID NO: 3495424 - DNA, 25 bp, Homo sapien
ctccctcattttccgttccccagca

SEQ ID NO: 3495425 - DNA, 25 bp, Homo sapien
ctcattttccgttccccagcattgg

SEQ ID NO: 3495426 - DNA, 25 bp, Homo sapien
attttccgttccccagcattggcgg

SEQ ID NO: 3495427 - DNA, 25 bp, Homo sapien
cagagttgaactccctcattttccg

SEQ ID NO: 3495428 - DNA, 25 bp, Homo sapien
cttagaaggtggggaataatcatca

SEQ ID NO: 3495429 - DNA, 25 bp, Homo sapien
ttagaaggtggggaataatcatcat

SEQ ID NO: 3495430 - DNA, 25 bp, Homo sapien
ttctttttctgccctcttgggcttc

SEQ ID NO: 3495431 - DNA, 25 bp, Homo sapien
gccctcttgggcttctgaaatgaaa

SEQ ID NO: 3495432 - DNA, 25 bp, Homo sapien
tttttctgccctcttgggcttctga

SEQ ID NO: 3495433 - DNA, 25 bp, Homo sapien
tgccctcttgggcttctgaaatgaa

SEQ ID NO: 3495434 - DNA, 25 bp, Homo sapien
tgaagcagaattgtttttactaatc

SEQ ID NO: 3495435 - DNA, 25 bp, Homo sapien
aggaggctgttattgaagtgaagca

SEQ ID NO: 3495436 - DNA, 25 bp, Homo sapien
gaattgtttttactaatctgcttat

SEQ ID NO: 3495437 - DNA, 25 bp, Homo sapien
ggaggaggctgttattgaagtgaag

SEQ ID NO: 3495438 - DNA, 25 bp, Homo sapien
acaaggcttagacattcgtccagta

SEQ ID NO: 3495439 - DNA, 25 bp, Homo sapien
cacaaggcttagacattcgtccagt

SEQ ID NO: 3495440 - DNA, 25 bp, Homo sapien
caaggcttagacattcgtccagtat

SEQ ID NO: 3495441 - DNA, 25 bp, Homo sapien
aaggcttagacattcgtccagtatg

SEQ ID NO: 3495442 - DNA, 25 bp, Homo sapien
agcacagacgctcttgctcacagtt

SEQ ID NO: 3495443 - DNA, 25 bp, Homo sapien
ctctggtggcgccatggttcagcac

SEQ ID NO: 3495444 - DNA, 25 bp, Homo sapien
cgccatggttcagcacagacgctct

SEQ ID NO: 3495445 - DNA, 25 bp, Homo sapien
ggttcagcacagacgctcttgctca

SEQ ID NO: 3495446 - DNA, 25 bp, Homo sapien
agcgacgacctacacaaggcaaggg

SEQ ID NO: 3495447 - DNA, 25 bp, Homo sapien
agctgggcggcttcagcgacgacct

SEQ ID NO: 3495448 - DNA, 25 bp, Homo sapien
taatggggcccaataccgtcggcaa

SEQ ID NO: 3495449 - DNA, 25 bp, Homo sapien
tccttttccatcaagggccgcagca

SEQ ID NO: 3495450 - DNA, 25 bp, Homo sapien
gggtgacctgttacacatcaatggg

SEQ ID NO: 3495451 - DNA, 25 bp, Homo sapien
ttaggacgggtgacctcaacagaca

SEQ ID NO: 3495452 - DNA, 25 bp, Homo sapien
catcaatgggtcatacagggagtac

SEQ ID NO: 3495453 - DNA, 25 bp, Homo sapien
ggctttcagggaggtcactttagga

SEQ ID NO: 3495454 - DNA, 25 bp, Homo sapien
caggctgtgtattcgaagcacttca

SEQ ID NO: 3495455 - DNA, 25 bp, Homo sapien
cacttcgctgtgatcgtgccaggct

SEQ ID NO: 3495456 - DNA, 25 bp, Homo sapien
ctgctgaccttcacttcgctgtgat

SEQ ID NO: 3495457 - DNA, 25 bp, Homo sapien
tcgaagcacttcatgtttactctct

SEQ ID NO: 3495458 - DNA, 25 bp, Homo sapien
tactgtgcctacctagaaaaggaag

SEQ ID NO: 3495459 - DNA, 25 bp, Homo sapien
tattccctaagtggtgatgctatca

SEQ ID NO: 3495460 - DNA, 25 bp, Homo sapien
gtgatgctatcaggatccccatctg

SEQ ID NO: 3495461 - DNA, 25 bp, Homo sapien
acctgtaacgttagccctaatcctg

SEQ ID NO: 3495462 - DNA, 25 bp, Homo sapien
atgcagggtgtgccttcttaacaat

SEQ ID NO: 3495463 - DNA, 25 bp, Homo sapien
ctgcagggacctctgtccgaggaag

SEQ ID NO: 3495464 - DNA, 25 bp, Homo sapien
tatgcagggtgtgccttcttaacaa

SEQ ID NO: 3495465 - DNA, 25 bp, Homo sapien
gctatgcagggtgtgccttcttaac

SEQ ID NO: 3495466 - DNA, 25 bp, Homo sapien
ggaagccctctgtttcccgcatgtc

SEQ ID NO: 3495467 - DNA, 25 bp, Homo sapien
tgcgggtcctcccacgcttagtgtg

SEQ ID NO: 3495468 - DNA, 25 bp, Homo sapien
cgaaatatgctagcgatgatactgc

SEQ ID NO: 3495469 - DNA, 25 bp, Homo sapien
accctgtggctagaggcgaaatatg

SEQ ID NO: 3495470 - DNA, 25 bp, Homo sapien
ttggcagagtaggtaaccctggctc

SEQ ID NO: 3495471 - DNA, 25 bp, Homo sapien
tgtcagggattacagtcagcaaacc

SEQ ID NO: 3495472 - DNA, 25 bp, Homo sapien
gggcccctcaggaaactctggtctg

SEQ ID NO: 3495473 - DNA, 25 bp, Homo sapien
gaaattatgggatacagcctagcag

SEQ ID NO: 3495474 - DNA, 25 bp, Homo sapien
tcagaccccaaagtacctgggagag

SEQ ID NO: 3495475 - DNA, 25 bp, Homo sapien
ctagtttgcatcagcaagatgagca

SEQ ID NO: 3495476 - DNA, 25 bp, Homo sapien
ctggggtgtagctggttaccacagc

SEQ ID NO: 3495477 - DNA, 25 bp, Homo sapien
tccagcgaaagccactccgagatgc

SEQ ID NO: 3495478 - DNA, 25 bp, Homo sapien
gcagcctaacttcctagtttgcatc

SEQ ID NO: 3495479 - DNA, 25 bp, Homo sapien
tggagatacaatgcaggcagctgct

SEQ ID NO: 3495480 - DNA, 25 bp, Homo sapien
caagcccctgatgagcttgccatgg

SEQ ID NO: 3495481 - DNA, 25 bp, Homo sapien
tgctaccatgcttggtgaccagggt

SEQ ID NO: 3495482 - DNA, 25 bp, Homo sapien
cctgcagtgaccagatggagataca

SEQ ID NO: 3495483 - DNA, 25 bp, Homo sapien
tctcagccaggtacaatggagggtc

SEQ ID NO: 3495484 - DNA, 25 bp, Homo sapien
cagataacacagtagggtggcctcc

SEQ ID NO: 3495485 - DNA, 25 bp, Homo sapien
ggaaccttggatcacagacatggcc

SEQ ID NO: 3495486 - DNA, 25 bp, Homo sapien
caggaaccttcttgtgtagacccac

SEQ ID NO: 3495487 - DNA, 25 bp, Homo sapien
ccattgtggaaaagcgcttcacgct

SEQ ID NO: 3495488 - DNA, 25 bp, Homo sapien
tcttgtccggaccttgccattgtgg

SEQ ID NO: 3495489 - DNA, 25 bp, Homo sapien
gaagaaggccacaattagacccacg

SEQ ID NO: 3495490 - DNA, 25 bp, Homo sapien
tagaagcttccggttgtcttgtccg

SEQ ID NO: 3495491 - DNA, 25 bp, Homo sapien
cagaagtggtgatttgaccacccac

SEQ ID NO: 3495492 - DNA, 25 bp, Homo sapien
gggcactgatacacgcacaccgtgg

SEQ ID NO: 3495493 - DNA, 25 bp, Homo sapien
acccacccgcaccagtgctgaagga

SEQ ID NO: 3495494 - DNA, 25 bp, Homo sapien
agggaggaatcccagcaagatcaca

SEQ ID NO: 3495495 - DNA, 25 bp, Homo sapien
catccctatcgatgtccagggcgag

SEQ ID NO: 3495496 - DNA, 25 bp, Homo sapien
gatcctctgcatccctatcgatgtc

SEQ ID NO: 3495497 - DNA, 25 bp, Homo sapien
ggtaccggttctgatcctctgcatc

SEQ ID NO: 3495498 - DNA, 25 bp, Homo sapien
catgccatccaggtaccggttctga

SEQ ID NO: 3495499 - DNA, 25 bp, Homo sapien
gccagagcagacacataatacagca

SEQ ID NO: 3495500 - DNA, 25 bp, Homo sapien
gggccagagcagacacataatacag

SEQ ID NO: 3495501 - DNA, 25 bp, Homo sapien
gttgggccagagcagacacataata

SEQ ID NO: 3495502 - DNA, 25 bp, Homo sapien
gggttgggccagagcagacacataa

SEQ ID NO: 3495503 - DNA, 25 bp, Homo sapien
ccccagaccagataaaccctgccaa

SEQ ID NO: 3495504 - DNA, 25 bp, Homo sapien
ccagaccagataaaccctgccaaca

SEQ ID NO: 3495505 - DNA, 25 bp, Homo sapien
cccagaccagataaaccctgccaac

SEQ ID NO: 3495506 - DNA, 25 bp, Homo sapien
cagcagacagaaaggtccaggtgtc

SEQ ID NO: 3495507 - DNA, 25 bp, Homo sapien
acagaaaggtccaggtgtcagctgg

SEQ ID NO: 3495508 - DNA, 25 bp, Homo sapien
gggcctcatgcaggtgagcacagcc

SEQ ID NO: 3495509 - DNA, 25 bp, Homo sapien
ctgcagcagacagaaaggtccaggt

SEQ ID NO: 3495510 - DNA, 25 bp, Homo sapien
gaggtaagaggacagaccaccactg

SEQ ID NO: 3495511 - DNA, 25 bp, Homo sapien
gtggaggtaagaggacagaccacca

SEQ ID NO: 3495512 - DNA, 25 bp, Homo sapien
tggaggtaagaggacagaccaccac

SEQ ID NO: 3495513 - DNA, 25 bp, Homo sapien
ccccattccccaaaggcaccaggtg

SEQ ID NO: 3495514 - DNA, 25 bp, Homo sapien
gtcagccattcgcttgttctcccgg

SEQ ID NO: 3495515 - DNA, 25 bp, Homo sapien
ttctcccggtctagaatctcttcca

SEQ ID NO: 3495516 - DNA, 25 bp, Homo sapien
caggctgtcagccattcgcttgttc

SEQ ID NO: 3495517 - DNA, 25 bp, Homo sapien
cttgttctcccggtctagaatctct

SEQ ID NO: 3495518 - DNA, 25 bp, Homo sapien
tgctcggacccggaaggatccgaat

SEQ ID NO: 3495519 - DNA, 25 bp, Homo sapien
gcgcgccttcggtcctaacggcagt

SEQ ID NO: 3495520 - DNA, 25 bp, Homo sapien
aacccatgcagaacgatctcacagg

SEQ ID NO: 3495521 - DNA, 25 bp, Homo sapien
gtcctaacggcagtgccggccgaaa

SEQ ID NO: 3495522 - DNA, 25 bp, Homo sapien
agccgcctcagacgtggcgcagtcg

SEQ ID NO: 3495523 - DNA, 25 bp, Homo sapien
gacgcggacaccgacgcggccacag

SEQ ID NO: 3495524 - DNA, 25 bp, Homo sapien
ggccacagccgcctcagacgtggcg

SEQ ID NO: 3495525 - DNA, 25 bp, Homo sapien
ccggctcctcgacgcggacaccgac

SEQ ID NO: 3495526 - DNA, 25 bp, Homo sapien
taggaaggattcacaggcgggtcat

SEQ ID NO: 3495527 - DNA, 25 bp, Homo sapien
gaaagacgcttctgtgggttaggtc

SEQ ID NO: 3495528 - DNA, 25 bp, Homo sapien
tattttcagcactgtcgcgcagaca

SEQ ID NO: 3495529 - DNA, 25 bp, Homo sapien
attacagcagcaccgcggatgtgac

SEQ ID NO: 3495530 - DNA, 25 bp, Homo sapien
gagaccaacatgctagaagtgcggc

SEQ ID NO: 3495531 - DNA, 25 bp, Homo sapien
gaaaatgcccctcgtgtgaccatag

SEQ ID NO: 3495532 - DNA, 25 bp, Homo sapien
gaatgtgaccaccttcagagggagg

SEQ ID NO: 3495533 - DNA, 25 bp, Homo sapien
tgtcttcactgagcgcagggctgga

SEQ ID NO: 3495534 - DNA, 25 bp, Homo sapien
ccgaaaagcatcactcatgtagcct

SEQ ID NO: 3495535 - DNA, 25 bp, Homo sapien
ttccgaaaagcatcactcatgtagc

SEQ ID NO: 3495536 - DNA, 25 bp, Homo sapien
ttacttccgaaaagcatcactcatg

SEQ ID NO: 3495537 - DNA, 25 bp, Homo sapien
tcccacatagatgcagagaacttta

SEQ ID NO: 3495538 - DNA, 25 bp, Homo sapien
tagggagtgaaggtaacgcctatag

SEQ ID NO: 3495539 - DNA, 25 bp, Homo sapien
acacccagtcaggtccaggtagtgc

SEQ ID NO: 3495540 - DNA, 25 bp, Homo sapien
tggaggtattgaaagtaacacccag

SEQ ID NO: 3495541 - DNA, 25 bp, Homo sapien
gaaggtaacgcctatagtctgttaa

SEQ ID NO: 3495542 - DNA, 25 bp, Homo sapien
gggctccatatcaggtggaccatac

SEQ ID NO: 3495543 - DNA, 25 bp, Homo sapien
ggggctccatatcaggtggaccata

SEQ ID NO: 3495544 - DNA, 25 bp, Homo sapien
ttggatggtcctcctcagcagtctg

SEQ ID NO: 3495545 - DNA, 25 bp, Homo sapien
cctagagcagtgagaagggcagccc

SEQ ID NO: 3495546 - DNA, 25 bp, Homo sapien
gtgagaagggcagccccttggatgg

SEQ ID NO: 3495547 - DNA, 25 bp, Homo sapien
gggcagccccttggatggtcctcct

SEQ ID NO: 3495548 - DNA, 25 bp, Homo sapien
cagtttcccgctgcacaaggtcccg

SEQ ID NO: 3495549 - DNA, 25 bp, Homo sapien
ccgctgcacaaggtcccgcatctct

SEQ ID NO: 3495550 - DNA, 25 bp, Homo sapien
tttcccgctgcacaaggtcccgcat

SEQ ID NO: 3495551 - DNA, 25 bp, Homo sapien
ttcccagtttcccgctgcacaaggt

SEQ ID NO: 3495552 - DNA, 25 bp, Homo sapien
cacgtccctgctgcgaggatgccaa

SEQ ID NO: 3495553 - DNA, 25 bp, Homo sapien
cggcctcggtcaagctggcaaaagg

SEQ ID NO: 3495554 - DNA, 25 bp, Homo sapien
caagtcccggttgatgagcagtcgg

SEQ ID NO: 3495555 - DNA, 25 bp, Homo sapien
gggaactgagctccgcacggcctcg

SEQ ID NO: 3495556 - DNA, 25 bp, Homo sapien
gggacaacagcacagactcgtccat

SEQ ID NO: 3495557 - DNA, 25 bp, Homo sapien
gagggacaacagcacagactcgtcc

SEQ ID NO: 3495558 - DNA, 25 bp, Homo sapien
agggacaacagcacagactcgtcca

SEQ ID NO: 3495559 - DNA, 25 bp, Homo sapien
agagggacaacagcacagactcgtc

SEQ ID NO: 3495560 - DNA, 25 bp, Homo sapien
tcacttcaacaataaagatggctgg

SEQ ID NO: 3495561 - DNA, 25 bp, Homo sapien
tggccagcacggtcagctggtctca

SEQ ID NO: 3495562 - DNA, 25 bp, Homo sapien
tcctaggcctagcatggcattctca

SEQ ID NO: 3495563 - DNA, 25 bp, Homo sapien
gctggtggcccaagtgtccacacct

SEQ ID NO: 3495564 - DNA, 25 bp, Homo sapien
cagtgccagccggtgattacctaca

SEQ ID NO: 3495565 - DNA, 25 bp, Homo sapien
gccccgtggccatcaatgctgactt

SEQ ID NO: 3495566 - DNA, 25 bp, Homo sapien
tgagatgacacttgtgccccacctt

SEQ ID NO: 3495567 - DNA, 25 bp, Homo sapien
tgaccgtgtatgtccaaagcactgg

SEQ ID NO: 3495568 - DNA, 25 bp, Homo sapien
tctcatcacagcttttaggaatttc

SEQ ID NO: 3495569 - DNA, 25 bp, Homo sapien
ggatttatcactcctcccactgcag

SEQ ID NO: 3495570 - DNA, 25 bp, Homo sapien
aaaacatcacagactgcgagtccag

SEQ ID NO: 3495571 - DNA, 25 bp, Homo sapien
gacgcagacgcagaacagctgcttg

SEQ ID NO: 3495572 - DNA, 25 bp, Homo sapien
ctgaccttacagaccaagccagacg

SEQ ID NO: 3495573 - DNA, 25 bp, Homo sapien
cctcctccctgcacaggcctgctga

SEQ ID NO: 3495574 - DNA, 25 bp, Homo sapien
agcctcctccctgcacaggcctgct

SEQ ID NO: 3495575 - DNA, 25 bp, Homo sapien
cctccctgcacaggcctgctgacaa

SEQ ID NO: 3495576 - DNA, 25 bp, Homo sapien
tcctccctgcacaggcctgctgaca

SEQ ID NO: 3495577 - DNA, 25 bp, Homo sapien
ttcacaacgccggtgcagaccgggc

SEQ ID NO: 3495578 - DNA, 25 bp, Homo sapien
ccaaagaacacaatgtcgggcttca

SEQ ID NO: 3495579 - DNA, 25 bp, Homo sapien
cagatctgccatggggaaatcaacc

SEQ ID NO: 3495580 - DNA, 25 bp, Homo sapien
gcaagaacctctggggcagcggctc

SEQ ID NO: 3495581 - DNA, 25 bp, Homo sapien
gagaaaacaggcctgaggaagatgc

SEQ ID NO: 3495582 - DNA, 25 bp, Homo sapien
gcctgaggaagatgcctgcaacacc

SEQ ID NO: 3495583 - DNA, 25 bp, Homo sapien
aaacaggcctgaggaagatgcctgc

SEQ ID NO: 3495584 - DNA, 25 bp, Homo sapien
ggcctgaggaagatgcctgcaacac

SEQ ID NO: 3495585 - DNA, 25 bp, Homo sapien
caaaggttccatgagcttcaaccag

SEQ ID NO: 3495586 - DNA, 25 bp, Homo sapien
gcagaggcaaaggttccatgagctt

SEQ ID NO: 3495587 - DNA, 25 bp, Homo sapien
ccctgggaagggtctttggcagact

SEQ ID NO: 3495588 - DNA, 25 bp, Homo sapien
gaggcaaaggttccatgagcttcaa

SEQ ID NO: 3495589 - DNA, 25 bp, Homo sapien
tgaaattcaagccaaagcgaagtgt

SEQ ID NO: 3495590 - DNA, 25 bp, Homo sapien
tgccgcctccgagatgagcacgcaa

SEQ ID NO: 3495591 - DNA, 25 bp, Homo sapien
aaagcgaagtgttgctgccgcctcc

SEQ ID NO: 3495592 - DNA, 25 bp, Homo sapien
cctccgagatgagcacgcaaggcca

SEQ ID NO: 3495593 - DNA, 25 bp, Homo sapien
tggggttgtgatgtcctcaagcctg

SEQ ID NO: 3495594 - DNA, 25 bp, Homo sapien
ccccttggggttgtgatgtcctcaa

SEQ ID NO: 3495595 - DNA, 25 bp, Homo sapien
gccccttggggttgtgatgtcctca

SEQ ID NO: 3495596 - DNA, 25 bp, Homo sapien
ccttggggttgtgatgtcctcaagc

SEQ ID NO: 3495597 - DNA, 25 bp, Homo sapien
cttgtagtttccagggtacagctcc

SEQ ID NO: 3495598 - DNA, 25 bp, Homo sapien
catcgatgttctgcgtgtagagccg

SEQ ID NO: 3495599 - DNA, 25 bp, Homo sapien
tgtcatgaagcagccggagaaagta

SEQ ID NO: 3495600 - DNA, 25 bp, Homo sapien
aggttgctgtacaggccactccccg

SEQ ID NO: 3495601 - DNA, 25 bp, Homo sapien
cagggagagaagaaaggctctgagg

SEQ ID NO: 3495602 - DNA, 25 bp, Homo sapien
tgcagggagagaagaaaggctctga

SEQ ID NO: 3495603 - DNA, 25 bp, Homo sapien
agggagagaagaaaggctctgaggc

SEQ ID NO: 3495604 - DNA, 25 bp, Homo sapien
ctgcagggagagaagaaaggctctg

SEQ ID NO: 3495605 - DNA, 25 bp, Homo sapien
ggaagtggaataaactgggcagtgg

SEQ ID NO: 3495606 - DNA, 25 bp, Homo sapien
agggaagtggaataaactgggcagt

SEQ ID NO: 3495607 - DNA, 25 bp, Homo sapien
gggaggggagcgcagaaggcaggtg

SEQ ID NO: 3495608 - DNA, 25 bp, Homo sapien
aagtggaataaactgggcagtgggg

SEQ ID NO: 3495609 - DNA, 25 bp, Homo sapien
gctctggcccgaatcagctcagcta

SEQ ID NO: 3495610 - DNA, 25 bp, Homo sapien
ggctctggcccgaatcagctcagct

SEQ ID NO: 3495611 - DNA, 25 bp, Homo sapien
tgggtgtgctgatgccggcccccac

SEQ ID NO: 3495612 - DNA, 25 bp, Homo sapien
cactgggtgtgctgatgccggcccc

SEQ ID NO: 3495613 - DNA, 25 bp, Homo sapien
agaaaaagatatggaccttcttcca

SEQ ID NO: 3495614 - DNA, 25 bp, Homo sapien
cagaaaaagatatggaccttcttcc

SEQ ID NO: 3495615 - DNA, 25 bp, Homo sapien
ttccaacaacacttgaagcacccac

SEQ ID NO: 3495616 - DNA, 25 bp, Homo sapien
acaacacttgaagcacccacagaaa

SEQ ID NO: 3495617 - DNA, 25 bp, Homo sapien
cgccaccctcgagaatgagcatgtg

SEQ ID NO: 3495618 - DNA, 25 bp, Homo sapien
gatagcaaccaatctcaggatagca

SEQ ID NO: 3495619 - DNA, 25 bp, Homo sapien
gcaagaacgagcatggctctgccct

SEQ ID NO: 3495620 - DNA, 25 bp, Homo sapien
tcacctttcttagacgactattggg

SEQ ID NO: 3495621 - DNA, 25 bp, Homo sapien
attcaggttaatgggaactgtgctc

SEQ ID NO: 3495622 - DNA, 25 bp, Homo sapien
taggcactcaactctgactgactgc

SEQ ID NO: 3495623 - DNA, 25 bp, Homo sapien
tgactgactgcaaacctccaaaggg

SEQ ID NO: 3495624 - DNA, 25 bp, Homo sapien
aaattcaggttaatgggaactgtgc

SEQ ID NO: 3495625 - DNA, 25 bp, Homo sapien
gacatctattcacttaaggtcgttc

SEQ ID NO: 3495626 - DNA, 25 bp, Homo sapien
tctattcacttaaggtcgttcccca

SEQ ID NO: 3495627 - DNA, 25 bp, Homo sapien
ggtcgttccccaaacagctactgtg

SEQ ID NO: 3495628 - DNA, 25 bp, Homo sapien
gctactgtgctcctactaaacacga

SEQ ID NO: 3495629 - DNA, 25 bp, Homo sapien
gagggacactgtgcaaaggacacaa

SEQ ID NO: 3495630 - DNA, 25 bp, Homo sapien
tagggccagtggtagcaaggatttt

SEQ ID NO: 3495631 - DNA, 25 bp, Homo sapien
gcaatggactactcctcacacgcag

SEQ ID NO: 3495632 - DNA, 25 bp, Homo sapien
ccaaactggaggaagcccatgcaat

SEQ ID NO: 3495633 - DNA, 25 bp, Homo sapien
gagacgggtacgatcacatgccagt

SEQ ID NO: 3495634 - DNA, 25 bp, Homo sapien
gaataagagctcagtcagggcttct

SEQ ID NO: 3495635 - DNA, 25 bp, Homo sapien
gccagtgggagtattaaccgcacaa

SEQ ID NO: 3495636 - DNA, 25 bp, Homo sapien
tgcaaacagtgaggtgccaacaagg

SEQ ID NO: 3495637 - DNA, 25 bp, Homo sapien
aactcccagacatgccgcaaaggaa

SEQ ID NO: 3495638 - DNA, 25 bp, Homo sapien
tgggcgaggtgtcgacaacgaacac

SEQ ID NO: 3495639 - DNA, 25 bp, Homo sapien
caacgaacacgcaagaagtgcttgt

SEQ ID NO: 3495640 - DNA, 25 bp, Homo sapien
gcaaaggaaacacggcaaggtgaga

SEQ ID NO: 3495641 - DNA, 25 bp, Homo sapien
tcggctgcctccggaatgccctggg

SEQ ID NO: 3495642 - DNA, 25 bp, Homo sapien
ggctgcctccggaatgccctgggca

SEQ ID NO: 3495643 - DNA, 25 bp, Homo sapien
cggctgcctccggaatgccctgggc

SEQ ID NO: 3495644 - DNA, 25 bp, Homo sapien
ctcggctgcctccggaatgccctgg

SEQ ID NO: 3495645 - DNA, 25 bp, Homo sapien
tgcaaggggcgcgccgggtccaagg

SEQ ID NO: 3495646 - DNA, 25 bp, Homo sapien
ctgcaaggggcgcgccgggtccaag

SEQ ID NO: 3495647 - DNA, 25 bp, Homo sapien
ggctgcctctcagccccgcactcac

SEQ ID NO: 3495648 - DNA, 25 bp, Homo sapien
ccatggctgcctctcagccccgcac

SEQ ID NO: 3495649 - DNA, 25 bp, Homo sapien
cgcgggccccatggctgcctctcag

SEQ ID NO: 3495650 - DNA, 25 bp, Homo sapien
atggctgcctctcagccccgcactc

SEQ ID NO: 3495651 - DNA, 25 bp, Homo sapien
ccctgccgccaagcaccagccgaca

SEQ ID NO: 3495652 - DNA, 25 bp, Homo sapien
agccgcaggcctgaaacggccccac

SEQ ID NO: 3495653 - DNA, 25 bp, Homo sapien
ccggccccacagccggagggctgcc

SEQ ID NO: 3495654 - DNA, 25 bp, Homo sapien
cgccaagcaccagccgacagccgca

SEQ ID NO: 3495655 - DNA, 25 bp, Homo sapien
gttccgcgcagtccaaggagtcctc

SEQ ID NO: 3495656 - DNA, 25 bp, Homo sapien
caaggagtcctccggactcgccccg

SEQ ID NO: 3495657 - DNA, 25 bp, Homo sapien
tccaaggagtcctccggactcgccc

SEQ ID NO: 3495658 - DNA, 25 bp, Homo sapien
tctttgacgcctcaatggcacagcc

SEQ ID NO: 3495659 - DNA, 25 bp, Homo sapien
cacaaagctagtccgtagcgggttc

SEQ ID NO: 3495660 - DNA, 25 bp, Homo sapien
cccggatggcggtgatagttaatac

SEQ ID NO: 3495661 - DNA, 25 bp, Homo sapien
cgcaaaacactactgggaagatcct

SEQ ID NO: 3495662 - DNA, 25 bp, Homo sapien
tgcccaccaccacagccagctgatt

SEQ ID NO: 3495663 - DNA, 25 bp, Homo sapien
gagatggggtttcaccagtgttggc

SEQ ID NO: 3495664 - DNA, 25 bp, Homo sapien
ctgcctgccttggcctcccagagtg

SEQ ID NO: 3495665 - DNA, 25 bp, Homo sapien
tttgtatttcttagtagagatgggg

SEQ ID NO: 3495666 - DNA, 25 bp, Homo sapien
gagtgagtctggttcgttaccccta

SEQ ID NO: 3495667 - DNA, 25 bp, Homo sapien
ggttcggccttgcactctggacaga

SEQ ID NO: 3495668 - DNA, 25 bp, Homo sapien
tgtcttggccagtactagcctctga

SEQ ID NO: 3495669 - DNA, 25 bp, Homo sapien
tgccccaggcgtgtttctaaaatag

SEQ ID NO: 3495670 - DNA, 25 bp, Homo sapien
tcttccaaaaaaactgcgttgaatg

SEQ ID NO: 3495671 - DNA, 25 bp, Homo sapien
tatactccataaaattgagatgcaa

SEQ ID NO: 3495672 - DNA, 25 bp, Homo sapien
accgcatacttgatcctgatactac

SEQ ID NO: 3495673 - DNA, 25 bp, Homo sapien
gatcctgatactacattatgtcttt

SEQ ID NO: 3495674 - DNA, 25 bp, Homo sapien
cgcaggccatcttcacaagggtcca

SEQ ID NO: 3495675 - DNA, 25 bp, Homo sapien
caagggtccaaataccaacagcccg

SEQ ID NO: 3495676 - DNA, 25 bp, Homo sapien
taagtaagccctgatatggtctcct

SEQ ID NO: 3495677 - DNA, 25 bp, Homo sapien
gagaactgagggagcgtttcaatct

SEQ ID NO: 3495678 - DNA, 25 bp, Homo sapien
tgaagtctgtgtactccgaggtgga

SEQ ID NO: 3495679 - DNA, 25 bp, Homo sapien
tcacctgagagaggcgtttgcagcc

SEQ ID NO: 3495680 - DNA, 25 bp, Homo sapien
tctcagggtcttaggtgatacggga

SEQ ID NO: 3495681 - DNA, 25 bp, Homo sapien
gctggctgctcagacggtcgacatt

SEQ ID NO: 3495682 - DNA, 25 bp, Homo sapien
gacagcatggagctcttgcagctct

SEQ ID NO: 3495683 - DNA, 25 bp, Homo sapien
tgcagctctccaggtcgggtgagac

SEQ ID NO: 3495684 - DNA, 25 bp, Homo sapien
agctgatgaatgtgagagccccacg

SEQ ID NO: 3495685 - DNA, 25 bp, Homo sapien
atgaatgtgagagccccacggcctg

SEQ ID NO: 3495686 - DNA, 25 bp, Homo sapien
agcaggaaatagcggtcagcgccag

SEQ ID NO: 3495687 - DNA, 25 bp, Homo sapien
tagagcaggaaatagcggtcagcgc

SEQ ID NO: 3495688 - DNA, 25 bp, Homo sapien
ctagagcaggaaatagcggtcagcg

SEQ ID NO: 3495689 - DNA, 25 bp, Homo sapien
agagcaggaaatagcggtcagcgcc

SEQ ID NO: 3495690 - DNA, 25 bp, Homo sapien
ggcaggtggtcagaggcctcgggag

SEQ ID NO: 3495691 - DNA, 25 bp, Homo sapien
gcctcgggagaggagacatttgagc

SEQ ID NO: 3495692 - DNA, 25 bp, Homo sapien
acccaggagggcacactggaccagg

SEQ ID NO: 3495693 - DNA, 25 bp, Homo sapien
gggctcggtccactgtagcacaggg

SEQ ID NO: 3495694 - DNA, 25 bp, Homo sapien
gtgtgtgcaccagagctgtgctggt

SEQ ID NO: 3495695 - DNA, 25 bp, Homo sapien
ctggtgagcgaggaggaactaccca

SEQ ID NO: 3495696 - DNA, 25 bp, Homo sapien
cagtgagtgcccaatggaacgagca

SEQ ID NO: 3495697 - DNA, 25 bp, Homo sapien
gcttcatgggggaggcgctttctct

SEQ ID NO: 3495698 - DNA, 25 bp, Homo sapien
tggaacgagcatttgaccagcagct

SEQ ID NO: 3495699 - DNA, 25 bp, Homo sapien
aggtttcctggtacagtgagtgccc

SEQ ID NO: 3495700 - DNA, 25 bp, Homo sapien
catgaaaccgaaacccacaggagag

SEQ ID NO: 3495701 - DNA, 25 bp, Homo sapien
gggccaagtgcacgttgcccttcca

SEQ ID NO: 3495702 - DNA, 25 bp, Homo sapien
caggagagtcgttctcccagaacaa

SEQ ID NO: 3495703 - DNA, 25 bp, Homo sapien
tgtacgagttacgaaggccttgggc

SEQ ID NO: 3495704 - DNA, 25 bp, Homo sapien
cagccttgaatgtctggagtaaatc

SEQ ID NO: 3495705 - DNA, 25 bp, Homo sapien
aaccatctgggtctaatgctttttg

SEQ ID NO: 3495706 - DNA, 25 bp, Homo sapien
tcctgccttgctagagttgttatca

SEQ ID NO: 3495707 - DNA, 25 bp, Homo sapien
tacatgtgagtgttaaaccagcctt

SEQ ID NO: 3495708 - DNA, 25 bp, Homo sapien
gcggcttctccgacaaggacaagaa

SEQ ID NO: 3495709 - DNA, 25 bp, Homo sapien
gcgcctaccgcttcgtgaaggagaa

SEQ ID NO: 3495710 - DNA, 25 bp, Homo sapien
cccttcgtgtgctggatcgtgtgca

SEQ ID NO: 3495711 - DNA, 25 bp, Homo sapien
aaaagatcctgtacgactgggcggc

SEQ ID NO: 3495712 - DNA, 25 bp, Homo sapien
ttcgaccaccctgctgtgacatctg

SEQ ID NO: 3495713 - DNA, 25 bp, Homo sapien
tgtgtgtgccggtgcaaacctgtgc

SEQ ID NO: 3495714 - DNA, 25 bp, Homo sapien
actggctccagaagtaccctttcga

SEQ ID NO: 3495715 - DNA, 25 bp, Homo sapien
ctctggaacacacgatgccctctgt

SEQ ID NO: 3495716 - DNA, 25 bp, Homo sapien
ccctggcgtggagcagagggacaca

SEQ ID NO: 3495717 - DNA, 25 bp, Homo sapien
tcccggccctggcgtggagcagagg

SEQ ID NO: 3495718 - DNA, 25 bp, Homo sapien
cctcccggccctggcgtggagcaga

SEQ ID NO: 3495719 - DNA, 25 bp, Homo sapien
ttcctggtggcgcggcagccgggcg

SEQ ID NO: 3495720 - DNA, 25 bp, Homo sapien
tgcctgtagcctggactcccgtgga

SEQ ID NO: 3495721 - DNA, 25 bp, Homo sapien
ctgggcaccctcctagcctgccatc

SEQ ID NO: 3495722 - DNA, 25 bp, Homo sapien
tgcttggcctgagttcaaggctttc

SEQ ID NO: 3495723 - DNA, 25 bp, Homo sapien
tggactgatgctatcgcgcaccgtc

SEQ ID NO: 3495724 - DNA, 25 bp, Homo sapien
cccagggttcggtcgtcagcagttt

SEQ ID NO: 3495725 - DNA, 25 bp, Homo sapien
ttccttctgaagtgagggccgtgcc

SEQ ID NO: 3495726 - DNA, 25 bp, Homo sapien
tcgggaagcacagcaactttaaggc

SEQ ID NO: 3495727 - DNA, 25 bp, Homo sapien
gctgctgaaaccctgatgaggacca

SEQ ID NO: 3495728 - DNA, 25 bp, Homo sapien
gaaccaggcacttttaatcgtggaa

SEQ ID NO: 3495729 - DNA, 25 bp, Homo sapien
cagagttagggcccgggaactctcg

SEQ ID NO: 3495730 - DNA, 25 bp, Homo sapien
ttcagccttaggtgcccatgttggg

SEQ ID NO: 3495731 - DNA, 25 bp, Homo sapien
gggctagtgccccagatcaggaccc

SEQ ID NO: 3495732 - DNA, 25 bp, Homo sapien
gtccgcgtcatcaaacttggtgctg

SEQ ID NO: 3495733 - DNA, 25 bp, Homo sapien
tggctttggagccaaaacgccgggc

SEQ ID NO: 3495734 - DNA, 25 bp, Homo sapien
tgctgaagaaggcggcagagtcctt

SEQ ID NO: 3495735 - DNA, 25 bp, Homo sapien
cacatcgcggccaggatgttgtagc

SEQ ID NO: 3495736 - DNA, 25 bp, Homo sapien
cagcacggcaaggaccccccacgga

SEQ ID NO: 3495737 - DNA, 25 bp, Homo sapien
cgcggcccccagcacggcaaggacc

SEQ ID NO: 3495738 - DNA, 25 bp, Homo sapien
gcggcccccagcacggcaaggaccc

SEQ ID NO: 3495739 - DNA, 25 bp, Homo sapien
cccagcacggcaaggaccccccacg

SEQ ID NO: 3495740 - DNA, 25 bp, Homo sapien
gggatacgccgtgtccatgggttcc

SEQ ID NO: 3495741 - DNA, 25 bp, Homo sapien
ccagatcaagtggtctcgaggcggg

SEQ ID NO: 3495742 - DNA, 25 bp, Homo sapien
ccgaggcaacacagattcaggtaga

SEQ ID NO: 3495743 - DNA, 25 bp, Homo sapien
aggtagagggtgctgaacaccgacc

SEQ ID NO: 3495744 - DNA, 25 bp, Homo sapien
gcacagatctccaaccggttggccc

SEQ ID NO: 3495745 - DNA, 25 bp, Homo sapien
cccacgaggaagtagaacttgcggg

SEQ ID NO: 3495746 - DNA, 25 bp, Homo sapien
cacgaggaagtagaacttgcgggca

SEQ ID NO: 3495747 - DNA, 25 bp, Homo sapien
acagatctccaaccggttggcccag

SEQ ID NO: 3495748 - DNA, 25 bp, Homo sapien
gggaaggcaccccacatgaacttgc

SEQ ID NO: 3495749 - DNA, 25 bp, Homo sapien
gacggaaagcatcctccaccgttcg

SEQ ID NO: 3495750 - DNA, 25 bp, Homo sapien
taaaaccagcgggtcagccaggcag

SEQ ID NO: 3495751 - DNA, 25 bp, Homo sapien
catgaacttgcgacggaaagcatcc

SEQ ID NO: 3495752 - DNA, 25 bp, Homo sapien
ctctggccctcacggcgggcgacga

SEQ ID NO: 3495753 - DNA, 25 bp, Homo sapien
tctggccctcacggcgggcgacgaa

SEQ ID NO: 3495754 - DNA, 25 bp, Homo sapien
cgggcgacgaagtgcggcgcgtgtg

SEQ ID NO: 3495755 - DNA, 25 bp, Homo sapien
ctcacggcgggcgacgaagtgcggc

SEQ ID NO: 3495756 - DNA, 25 bp, Homo sapien
ccgccacccgccgcacgcggaggcc

SEQ ID NO: 3495757 - DNA, 25 bp, Homo sapien
cccgccacccgccgcacgcggaggc

SEQ ID NO: 3495758 - DNA, 25 bp, Homo sapien
acccgccacccgccgcacgcggagg

SEQ ID NO: 3495759 - DNA, 25 bp, Homo sapien
cacccgccacccgccgcacgcggag

SEQ ID NO: 3495760 - DNA, 25 bp, Homo sapien
ttgacctgtattccacttactccac

SEQ ID NO: 3495761 - DNA, 25 bp, Homo sapien
tctgcccttgacctgtattccactt

SEQ ID NO: 3495762 - DNA, 25 bp, Homo sapien
gcccttgacctgtattccacttact

SEQ ID NO: 3495763 - DNA, 25 bp, Homo sapien
cttgacctgtattccacttactcca

SEQ ID NO: 3495764 - DNA, 25 bp, Homo sapien
accaaagaattgggtgtggcggctg

SEQ ID NO: 3495765 - DNA, 25 bp, Homo sapien
ggctgcccgcggcgagtgatggaga

SEQ ID NO: 3495766 - DNA, 25 bp, Homo sapien
gctgcccgcggcgagtgatggagac

SEQ ID NO: 3495767 - DNA, 25 bp, Homo sapien
cggctgcccgcggcgagtgatggag

SEQ ID NO: 3495768 - DNA, 25 bp, Homo sapien
taaggcgggaaatacatgtggtggg

SEQ ID NO: 3495769 - DNA, 25 bp, Homo sapien
aggcgggaaatacatgtggtgggaa

SEQ ID NO: 3495770 - DNA, 25 bp, Homo sapien
ggtccggagagggtagccactgttg

SEQ ID NO: 3495771 - DNA, 25 bp, Homo sapien
aaggcgggaaatacatgtggtggga

SEQ ID NO: 3495772 - DNA, 25 bp, Homo sapien
gtggagggggcaccgcgctgcctgc

SEQ ID NO: 3495773 - DNA, 25 bp, Homo sapien
ctggggacctggctttagttcctcg

SEQ ID NO: 3495774 - DNA, 25 bp, Homo sapien
ctgaaggagccccgggcctcgcagc

SEQ ID NO: 3495775 - DNA, 25 bp, Homo sapien
ctgtcggcaatccaggctgtcggct

SEQ ID NO: 3495776 - DNA, 25 bp, Homo sapien
ccatgggaattgctgggacccggaa

SEQ ID NO: 3495777 - DNA, 25 bp, Homo sapien
ttaataattgcaggcccacctttgg

SEQ ID NO: 3495778 - DNA, 25 bp, Homo sapien
tcatgatccttgtgcctgagggctc

SEQ ID NO: 3495779 - DNA, 25 bp, Homo sapien
tctcctgcatggctaggacccaacg

SEQ ID NO: 3495780 - DNA, 25 bp, Homo sapien
gagccgagaagtttcccagacggca

SEQ ID NO: 3495781 - DNA, 25 bp, Homo sapien
cccgggatcccgcagtcttgaaatg

SEQ ID NO: 3495782 - DNA, 25 bp, Homo sapien
tcttgaaatgtgacgggaagtccga

SEQ ID NO: 3495783 - DNA, 25 bp, Homo sapien
ggaagtccgaggcatcacgaagtcg

SEQ ID NO: 3495784 - DNA, 25 bp, Homo sapien
cggtgcgttcacagcgggagaaacc

SEQ ID NO: 3495785 - DNA, 25 bp, Homo sapien
caggcacggcgcaggtgctctctgt

SEQ ID NO: 3495786 - DNA, 25 bp, Homo sapien
agaatgcggccacgcgcggtgcgtt

SEQ ID NO: 3495787 - DNA, 25 bp, Homo sapien
tctgtcgggagaatgcggccacgcg

SEQ ID NO: 3495788 - DNA, 25 bp, Homo sapien
cgcttcctccgcgtccatcgccctt

SEQ ID NO: 3495789 - DNA, 25 bp, Homo sapien
ggcgcttcctccgcgtccatcgccc

SEQ ID NO: 3495790 - DNA, 25 bp, Homo sapien
cttcctccgcgtccatcgcccttgc

SEQ ID NO: 3495791 - DNA, 25 bp, Homo sapien
gcttcctccgcgtccatcgcccttg

SEQ ID NO: 3495792 - DNA, 25 bp, Homo sapien
ctggggtgagagcgcggctccgggg

SEQ ID NO: 3495793 - DNA, 25 bp, Homo sapien
ggggcgcgcatggccaccccagctc

SEQ ID NO: 3495794 - DNA, 25 bp, Homo sapien
tggagtcgcgggtggacggcggggc

SEQ ID NO: 3495795 - DNA, 25 bp, Homo sapien
gcgggggcgcgcatggccaccccag

SEQ ID NO: 3495796 - DNA, 25 bp, Homo sapien
ctggagtcgcgggtggacggcgggg

SEQ ID NO: 3495797 - DNA, 25 bp, Homo sapien
taacttcgatgagggtcgctccact

SEQ ID NO: 3495798 - DNA, 25 bp, Homo sapien
cccgggtagaggtaacttcgatgag

SEQ ID NO: 3495799 - DNA, 25 bp, Homo sapien
gatgagggtcgctccactctcctgc

SEQ ID NO: 3495800 - DNA, 25 bp, Homo sapien
agcagggcccatacccgctggacgg

SEQ ID NO: 3495801 - DNA, 25 bp, Homo sapien
ctccaccccgaggaactaaagccag

SEQ ID NO: 3495802 - DNA, 25 bp, Homo sapien
tggggagccggtgccaccttgcccc

SEQ ID NO: 3495803 - DNA, 25 bp, Homo sapien
ttattgaatgccattgtagaaaagc

SEQ ID NO: 3495804 - DNA, 25 bp, Homo sapien
aaagggctgatacaggactcggctc

SEQ ID NO: 3495805 - DNA, 25 bp, Homo sapien
tacaggactcggctccgggggcagg

SEQ ID NO: 3495806 - DNA, 25 bp, Homo sapien
aggaatggaagttggagtacgtggg

SEQ ID NO: 3495807 - DNA, 25 bp, Homo sapien
atggaagttggagtacgtgggatac

SEQ ID NO: 3495808 - DNA, 25 bp, Homo sapien
ctatccataggcctggaagatcagc

SEQ ID NO: 3495809 - DNA, 25 bp, Homo sapien
atccataggcctggaagatcagcac

SEQ ID NO: 3495810 - DNA, 25 bp, Homo sapien
tatccataggcctggaagatcagca

SEQ ID NO: 3495811 - DNA, 25 bp, Homo sapien
gcctgggccccggtcacgtcgccaa

SEQ ID NO: 3495812 - DNA, 25 bp, Homo sapien
ggtcatgaggatgcccagaatcagg

SEQ ID NO: 3495813 - DNA, 25 bp, Homo sapien
gccccggtcacgtcgccaaccatct

SEQ ID NO: 3495814 - DNA, 25 bp, Homo sapien
ataggcctgggccccggtcacgtcg

SEQ ID NO: 3495815 - DNA, 25 bp, Homo sapien
gctgagagccgcgtgctatggctcc

SEQ ID NO: 3495816 - DNA, 25 bp, Homo sapien
gagccgcgtgctatggctccgtctc

SEQ ID NO: 3495817 - DNA, 25 bp, Homo sapien
ccccagctgagagccgcgtgctatg

SEQ ID NO: 3495818 - DNA, 25 bp, Homo sapien
aggggaccaggatcccccagctgag

SEQ ID NO: 3495819 - DNA, 25 bp, Homo sapien
gtgaagtcacctgtgagttcccttc

SEQ ID NO: 3495820 - DNA, 25 bp, Homo sapien
tgaagtcacctgtgagttcccttct

SEQ ID NO: 3495821 - DNA, 25 bp, Homo sapien
acaaagccactgacgtgggcacaca

SEQ ID NO: 3495822 - DNA, 25 bp, Homo sapien
gtgaaggtgtaatttcttactgggc

SEQ ID NO: 3495823 - DNA, 25 bp, Homo sapien
gatcacacagacaaagccactgacg

SEQ ID NO: 3495824 - DNA, 25 bp, Homo sapien
tactgggctatagggagaactgctc

SEQ ID NO: 3495825 - DNA, 25 bp, Homo sapien
ggctcagcggcaccctctgagcatt

SEQ ID NO: 3495826 - DNA, 25 bp, Homo sapien
gctccaggctcagcggcaccctctg

SEQ ID NO: 3495827 - DNA, 25 bp, Homo sapien
caggctcagcggcaccctctgagca

SEQ ID NO: 3495828 - DNA, 25 bp, Homo sapien
tgagcattccctggggccatacgca

SEQ ID NO: 3495829 - DNA, 25 bp, Homo sapien
cttcacggagtaggcgaatgctatg

SEQ ID NO: 3495830 - DNA, 25 bp, Homo sapien
gctgcggatgtggatcacggtggac

SEQ ID NO: 3495831 - DNA, 25 bp, Homo sapien
catctcatagttggggggctggcca

SEQ ID NO: 3495832 - DNA, 25 bp, Homo sapien
accagacgacatggtcgggcacgga

SEQ ID NO: 3495833 - DNA, 25 bp, Homo sapien
caggagagaagaaggtttggacagt

SEQ ID NO: 3495834 - DNA, 25 bp, Homo sapien
agaagaaggtttggacagtgtgatt

SEQ ID NO: 3495835 - DNA, 25 bp, Homo sapien
gacaggagagaagaaggtttggaca

SEQ ID NO: 3495836 - DNA, 25 bp, Homo sapien
gagagaagaaggtttggacagtgtg

SEQ ID NO: 3495837 - DNA, 25 bp, Homo sapien
catttgtcaaatcgggatttggccg

SEQ ID NO: 3495838 - DNA, 25 bp, Homo sapien
tgtcaaatcgggatttggccggggc

SEQ ID NO: 3495839 - DNA, 25 bp, Homo sapien
tcaaatcgggatttggccggggcca

SEQ ID NO: 3495840 - DNA, 25 bp, Homo sapien
tggcatttgtcaaatcgggatttgg

SEQ ID NO: 3495841 - DNA, 25 bp, Homo sapien
caagacatggagaccgctagtggct

SEQ ID NO: 3495842 - DNA, 25 bp, Homo sapien
cctcatgaacatgcaaagtggcaga

SEQ ID NO: 3495843 - DNA, 25 bp, Homo sapien
aatattcaatgtccaggtccccgag

SEQ ID NO: 3495844 - DNA, 25 bp, Homo sapien
ttctgcagacagagacggtacctct

SEQ ID NO: 3495845 - DNA, 25 bp, Homo sapien
cctgggcacctgggtcatcctccac

SEQ ID NO: 3495846 - DNA, 25 bp, Homo sapien
ttgcctgggcacctgggtcatcctc

SEQ ID NO: 3495847 - DNA, 25 bp, Homo sapien
tgggcacctgggtcatcctccaccc

SEQ ID NO: 3495848 - DNA, 25 bp, Homo sapien
tcttgcctgggcacctgggtcatcc

SEQ ID NO: 3495849 - DNA, 25 bp, Homo sapien
cttgagcatgtctcaggtttccggg

SEQ ID NO: 3495850 - DNA, 25 bp, Homo sapien
tgagcatgtctcaggtttccgggaa

SEQ ID NO: 3495851 - DNA, 25 bp, Homo sapien
cttccttgagcatgtctcaggtttc

SEQ ID NO: 3495852 - DNA, 25 bp, Homo sapien
caggtttccgggaagctgatgtttt

SEQ ID NO: 3495853 - DNA, 25 bp, Homo sapien
tgtggagtagcgtccggacgctggg

SEQ ID NO: 3495854 - DNA, 25 bp, Homo sapien
agcgtccggacgctggggtaccgtg

SEQ ID NO: 3495855 - DNA, 25 bp, Homo sapien
ctgctgtttggaaattcgtgaattg

SEQ ID NO: 3495856 - DNA, 25 bp, Homo sapien
taacgtccggatgctggggtactgt

SEQ ID NO: 3495857 - DNA, 25 bp, Homo sapien
acctggactcaagggttctgctttc

SEQ ID NO: 3495858 - DNA, 25 bp, Homo sapien
tggaaattcgtgaattgtgtgaggt

SEQ ID NO: 3495859 - DNA, 25 bp, Homo sapien
agttatacattgagggtgggtagaa

SEQ ID NO: 3495860 - DNA, 25 bp, Homo sapien
tagaagcactgtgggctaagtaagg

SEQ ID NO: 3495861 - DNA, 25 bp, Homo sapien
acatttctgaacgtgaagttataca

SEQ ID NO: 3495862 - DNA, 25 bp, Homo sapien
tgtcagggcgtgtggaaaaactgta

SEQ ID NO: 3495863 - DNA, 25 bp, Homo sapien
gtgtgcagggcccaccctcttcgct

SEQ ID NO: 3495864 - DNA, 25 bp, Homo sapien
accctcttcgctcatgtcactggcc

SEQ ID NO: 3495865 - DNA, 25 bp, Homo sapien
ttcgctcatgtcactggccccttcc

SEQ ID NO: 3495866 - DNA, 25 bp, Homo sapien
gggcccaccctcttcgctcatgtca

SEQ ID NO: 3495867 - DNA, 25 bp, Homo sapien
tgcagctagagggtgccttccagga

SEQ ID NO: 3495868 - DNA, 25 bp, Homo sapien
agctgcagccgaaaagcccctttgg

SEQ ID NO: 3495869 - DNA, 25 bp, Homo sapien
gtgggagctgcagccgaaaagcccc

SEQ ID NO: 3495870 - DNA, 25 bp, Homo sapien
gttgcagctagagggtgccttccag

SEQ ID NO: 3495871 - DNA, 25 bp, Homo sapien
tgatgccacgttttgtgcagagaga

SEQ ID NO: 3495872 - DNA, 25 bp, Homo sapien
atgccacgttttgtgcagagagatt

SEQ ID NO: 3495873 - DNA, 25 bp, Homo sapien
gatgccacgttttgtgcagagagat

SEQ ID NO: 3495874 - DNA, 25 bp, Homo sapien
ctgatgccacgttttgtgcagagag

SEQ ID NO: 3495875 - DNA, 25 bp, Homo sapien
ctaggctggatgcggcaacttgtgt

SEQ ID NO: 3495876 - DNA, 25 bp, Homo sapien
gctggatgcggcaacttgtgtactt

SEQ ID NO: 3495877 - DNA, 25 bp, Homo sapien
tgggaggagacacagctaggctgga

SEQ ID NO: 3495878 - DNA, 25 bp, Homo sapien
ttgggaggagacacagctaggctgg

SEQ ID NO: 3495879 - DNA, 25 bp, Homo sapien
gaagggcagtcttctgagtacctcg

SEQ ID NO: 3495880 - DNA, 25 bp, Homo sapien
ggcagtcttctgagtacctcgcagg

SEQ ID NO: 3495881 - DNA, 25 bp, Homo sapien
agtcttctgagtacctcgcaggtgt

SEQ ID NO: 3495882 - DNA, 25 bp, Homo sapien
ctgcaggaagggcagtcttctgagt

SEQ ID NO: 3495883 - DNA, 25 bp, Homo sapien
acccggagtttttgctgcctgtggc

SEQ ID NO: 3495884 - DNA, 25 bp, Homo sapien
tgtttccaaaagcatagcgcgcacc

SEQ ID NO: 3495885 - DNA, 25 bp, Homo sapien
tctgggaattccagcacccggagtt

SEQ ID NO: 3495886 - DNA, 25 bp, Homo sapien
tccacggtgcctgtttatgcttcat

SEQ ID NO: 3495887 - DNA, 25 bp, Homo sapien
atctttgccctttgtatctaccttt

SEQ ID NO: 3495888 - DNA, 25 bp, Homo sapien
caggctttgtacaaccatattttcc

SEQ ID NO: 3495889 - DNA, 25 bp, Homo sapien
actcccttcctgatggcattaccca

SEQ ID NO: 3495890 - DNA, 25 bp, Homo sapien
ctttggcaaaccttcccatatccct

SEQ ID NO: 3495891 - DNA, 25 bp, Homo sapien
agacaagtactggttctcaggtgga

SEQ ID NO: 3495892 - DNA, 25 bp, Homo sapien
cactgcggccaccacttaattctaa

SEQ ID NO: 3495893 - DNA, 25 bp, Homo sapien
tcaggtggaggaatctcagactctg

SEQ ID NO: 3495894 - DNA, 25 bp, Homo sapien
cagtttctctagacaagtactggtt

SEQ ID NO: 3495895 - DNA, 25 bp, Homo sapien
cccagcccgagctgctattggtggg

SEQ ID NO: 3495896 - DNA, 25 bp, Homo sapien
cgagctgctattggtgggcggcacc

SEQ ID NO: 3495897 - DNA, 25 bp, Homo sapien
aggggctgaaaggtccccccagctg

SEQ ID NO: 3495898 - DNA, 25 bp, Homo sapien
cccgagctgctattggtgggcggca

SEQ ID NO: 3495899 - DNA, 25 bp, Homo sapien
tgaagcaagtcaccttacggtgacc

SEQ ID NO: 3495900 - DNA, 25 bp, Homo sapien
ggtgaagcaagtcaccttacggtga

SEQ ID NO: 3495901 - DNA, 25 bp, Homo sapien
aagcaagtcaccttacggtgaccct

SEQ ID NO: 3495902 - DNA, 25 bp, Homo sapien
gcaagtcaccttacggtgacccttc

SEQ ID NO: 3495903 - DNA, 25 bp, Homo sapien
cagatcgtggggctgtacaaccggc

SEQ ID NO: 3495904 - DNA, 25 bp, Homo sapien
gagctcaaccggcacacgacggagg

SEQ ID NO: 3495905 - DNA, 25 bp, Homo sapien
tgctgcagcgctgcgagctcaaccg

SEQ ID NO: 3495906 - DNA, 25 bp, Homo sapien
accccaagggcctcgagtggctgtg

SEQ ID NO: 3495907 - DNA, 25 bp, Homo sapien
cccgctgtccctatgatcctgcact

SEQ ID NO: 3495908 - DNA, 25 bp, Homo sapien
tcctgttgagcagaggagcgacgcc

SEQ ID NO: 3495909 - DNA, 25 bp, Homo sapien
gggttgtggtcctgttgagcagagg

SEQ ID NO: 3495910 - DNA, 25 bp, Homo sapien
tgtccctatgatcctgcactctggg

SEQ ID NO: 3495911 - DNA, 25 bp, Homo sapien
tgatggctctccaaagacaggcccc

SEQ ID NO: 3495912 - DNA, 25 bp, Homo sapien
gagatccgagacgtccacttcgctg

SEQ ID NO: 3495913 - DNA, 25 bp, Homo sapien
gtagtttcgcgagccgagatccgag

SEQ ID NO: 3495914 - DNA, 25 bp, Homo sapien
tcatccttggacaccaggcagtaga

SEQ ID NO: 3495915 - DNA, 25 bp, Homo sapien
gtggggagaccgagacgcctgaggt

SEQ ID NO: 3495916 - DNA, 25 bp, Homo sapien
agaccgagacgcctgaggtggccac

SEQ ID NO: 3495917 - DNA, 25 bp, Homo sapien
gagaccgagacgcctgaggtggcca

SEQ ID NO: 3495918 - DNA, 25 bp, Homo sapien
gggagaccgagacgcctgaggtggc

SEQ ID NO: 3495919 - DNA, 25 bp, Homo sapien
cgggaagagtcctcaacacctggag

SEQ ID NO: 3495920 - DNA, 25 bp, Homo sapien
tcccggtgccgggaagagtcctcaa

SEQ ID NO: 3495921 - DNA, 25 bp, Homo sapien
caggcagaccgagggccgagcacct

SEQ ID NO: 3495922 - DNA, 25 bp, Homo sapien
ttcccaggcagaccgagggccgagc

SEQ ID NO: 3495923 - DNA, 25 bp, Homo sapien
cagggactcggcctcgaagaatcag

SEQ ID NO: 3495924 - DNA, 25 bp, Homo sapien
cctcagggactcggcctcgaagaat

SEQ ID NO: 3495925 - DNA, 25 bp, Homo sapien
ctcggcctcgaagaatcagcatggg

SEQ ID NO: 3495926 - DNA, 25 bp, Homo sapien
ctgtactgcaccttccgcggcagcg

SEQ ID NO: 3495927 - DNA, 25 bp, Homo sapien
tgcaggtgtgaacacctcggaagcc

SEQ ID NO: 3495928 - DNA, 25 bp, Homo sapien
gcacacctgcggctgcccacgggtt

SEQ ID NO: 3495929 - DNA, 25 bp, Homo sapien
tgaacacctcggaagcccctggcgt

SEQ ID NO: 3495930 - DNA, 25 bp, Homo sapien
ggcggtttgcaggtgtgaacacctc

SEQ ID NO: 3495931 - DNA, 25 bp, Homo sapien
cccagggcccattcacaaagcgtgg

SEQ ID NO: 3495932 - DNA, 25 bp, Homo sapien
ttcacaaagcgtggtgccgcagagc

SEQ ID NO: 3495933 - DNA, 25 bp, Homo sapien
tgcgacagctattccgtggctccgg

SEQ ID NO: 3495934 - DNA, 25 bp, Homo sapien
cccattcacaaagcgtggtgccgca

SEQ ID NO: 3495935 - DNA, 25 bp, Homo sapien
ggtgatgaagatgggtctgcgggtg

SEQ ID NO: 3495936 - DNA, 25 bp, Homo sapien
aggtcaccaggtggcggtgctggcg

SEQ ID NO: 3495937 - DNA, 25 bp, Homo sapien
cctctggccctcgaaggtgatgaag

SEQ ID NO: 3495938 - DNA, 25 bp, Homo sapien
gggcctccagagcagcaaggtcacc

SEQ ID NO: 3495939 - DNA, 25 bp, Homo sapien
caggggggtgggtgctacgctgggg

SEQ ID NO: 3495940 - DNA, 25 bp, Homo sapien
ggggtgggtgctacgctggggccca

SEQ ID NO: 3495941 - DNA, 25 bp, Homo sapien
gggtgctacgctggggcccacccaa

SEQ ID NO: 3495942 - DNA, 25 bp, Homo sapien
gtgggtgctacgctggggcccaccc

SEQ ID NO: 3495943 - DNA, 25 bp, Homo sapien
gtccgaaagcaccacgatgaggcgt

SEQ ID NO: 3495944 - DNA, 25 bp, Homo sapien
aagcaccacgatgaggcgtcggcag

SEQ ID NO: 3495945 - DNA, 25 bp, Homo sapien
aggcgtccgaaagcaccacgatgag

SEQ ID NO: 3495946 - DNA, 25 bp, Homo sapien
ctcaggaaggcgtccgaaagcacca

SEQ ID NO: 3495947 - DNA, 25 bp, Homo sapien
tgggggcggagctcgatggtggggg

SEQ ID NO: 3495948 - DNA, 25 bp, Homo sapien
atgggggcggagctcgatggtgggg

SEQ ID NO: 3495949 - DNA, 25 bp, Homo sapien
gggcggagctcgatggtgggggtgg

SEQ ID NO: 3495950 - DNA, 25 bp, Homo sapien
agttcacgaacttgcggtcctcggg

SEQ ID NO: 3495951 - DNA, 25 bp, Homo sapien
cagcgcgcggcaggaggtcgcggtc

SEQ ID NO: 3495952 - DNA, 25 bp, Homo sapien
aggaagagcttgtagccccgacgcc

SEQ ID NO: 3495953 - DNA, 25 bp, Homo sapien
ggtcgcggtcgtccaggaagagctt

SEQ ID NO: 3495954 - DNA, 25 bp, Homo sapien
acgtaggcgtcgtagagcttcccgt

SEQ ID NO: 3495955 - DNA, 25 bp, Homo sapien
gtaggagacgtaggcgtcgtagagc

SEQ ID NO: 3495956 - DNA, 25 bp, Homo sapien
ctgtaggagacgtaggcgtcgtaga

SEQ ID NO: 3495957 - DNA, 25 bp, Homo sapien
gagacgtaggcgtcgtagagcttcc

SEQ ID NO: 3495958 - DNA, 25 bp, Homo sapien
cacctccccatacgcgtcctggtac

SEQ ID NO: 3495959 - DNA, 25 bp, Homo sapien
tccacctccccatacgcgtcctggt

SEQ ID NO: 3495960 - DNA, 25 bp, Homo sapien
ccacctccccatacgcgtcctggta

SEQ ID NO: 3495961 - DNA, 25 bp, Homo sapien
gacggcacttgacatagagcagggc

SEQ ID NO: 3495962 - DNA, 25 bp, Homo sapien
gcacttgacatagagcagggcggcc

SEQ ID NO: 3495963 - DNA, 25 bp, Homo sapien
cgttgagacggcacttgacatagag

SEQ ID NO: 3495964 - DNA, 25 bp, Homo sapien
cagagcagcacgttgagacggcact

SEQ ID NO: 3495965 - DNA, 25 bp, Homo sapien
tgaaggccccatagacttcagtgct

SEQ ID NO: 3495966 - DNA, 25 bp, Homo sapien
cacctctgacaggttggccttgacc

SEQ ID NO: 3495967 - DNA, 25 bp, Homo sapien
gacttcagtgctggtcacgttgacc

SEQ ID NO: 3495968 - DNA, 25 bp, Homo sapien
gaagctgatgttctggatggagcag

SEQ ID NO: 3495969 - DNA, 25 bp, Homo sapien
tgtctgggttcacccagggaggctg

SEQ ID NO: 3495970 - DNA, 25 bp, Homo sapien
ctgtctgggttcacccagggaggct

SEQ ID NO: 3495971 - DNA, 25 bp, Homo sapien
gagactacccaagccgtgcagttca

SEQ ID NO: 3495972 - DNA, 25 bp, Homo sapien
atggaagcccgtctttcagccactg

SEQ ID NO: 3495973 - DNA, 25 bp, Homo sapien
aagtcaggggccctatcacagacac

SEQ ID NO: 3495974 - DNA, 25 bp, Homo sapien
caggagtactcgtggaggctgtagt

SEQ ID NO: 3495975 - DNA, 25 bp, Homo sapien
ccacagtggtccgtggtgcaggaag

SEQ ID NO: 3495976 - DNA, 25 bp, Homo sapien
cacagtggtccgtggtgcaggaaga

SEQ ID NO: 3495977 - DNA, 25 bp, Homo sapien
ctccacagtggtccgtggtgcagga

SEQ ID NO: 3495978 - DNA, 25 bp, Homo sapien
tccacagtggtccgtggtgcaggaa

SEQ ID NO: 3495979 - DNA, 25 bp, Homo sapien
tttccccagtagtggccaggctttg

SEQ ID NO: 3495980 - DNA, 25 bp, Homo sapien
catgtctgtccacgagtcccatggg

SEQ ID NO: 3495981 - DNA, 25 bp, Homo sapien
ctttgggtgttccgcccaccctgtg

SEQ ID NO: 3495982 - DNA, 25 bp, Homo sapien
gggacaggcttagcacttggcacgt

SEQ ID NO: 3495983 - DNA, 25 bp, Homo sapien
ggccagcagactgatccaagagctg

SEQ ID NO: 3495984 - DNA, 25 bp, Homo sapien
ggctccaccgggctcctcggccagc

SEQ ID NO: 3495985 - DNA, 25 bp, Homo sapien
caagagctgggcaggactcctctct

SEQ ID NO: 3495986 - DNA, 25 bp, Homo sapien
tcctcggccagcagactgatccaag

SEQ ID NO: 3495987 - DNA, 25 bp, Homo sapien
tggacagggcacctggacaggtcag

SEQ ID NO: 3495988 - DNA, 25 bp, Homo sapien
acagggcacctggacaggtcagagg

SEQ ID NO: 3495989 - DNA, 25 bp, Homo sapien
gacagggcacctggacaggtcagag

SEQ ID NO: 3495990 - DNA, 25 bp, Homo sapien
ctggacagggcacctggacaggtca

SEQ ID NO: 3495991 - DNA, 25 bp, Homo sapien
gaccctgagcagccgcatggatgct

SEQ ID NO: 3495992 - DNA, 25 bp, Homo sapien
agaatgggcaccacttcacgcagcc

SEQ ID NO: 3495993 - DNA, 25 bp, Homo sapien
tttgagcccctcacacgtggccaga

SEQ ID NO: 3495994 - DNA, 25 bp, Homo sapien
atgctggcagagttctcggaggcca

SEQ ID NO: 3495995 - DNA, 25 bp, Homo sapien
gacggccccagggtgcagtggacga

SEQ ID NO: 3495996 - DNA, 25 bp, Homo sapien
acggccccagggtgcagtggacgaa

SEQ ID NO: 3495997 - DNA, 25 bp, Homo sapien
ggccccagggtgcagtggacgaaca

SEQ ID NO: 3495998 - DNA, 25 bp, Homo sapien
cggccccagggtgcagtggacgaac

SEQ ID NO: 3495999 - DNA, 25 bp, Homo sapien
cgggggtgcccagctctgaccatgt

SEQ ID NO: 3496000 - DNA, 25 bp, Homo sapien
ggggggtgcccagctctgaccatgt

SEQ ID NO: 3496001 - DNA, 25 bp, Homo sapien
gggggggtgcccagctctgaacatg

SEQ ID NO: 3496002 - DNA, 25 bp, Homo sapien
tctggatacagtcggcgggggtgcc

SEQ ID NO: 3496003 - DNA, 25 bp, Homo sapien
ggggggtgcccagctctgaccatgt

SEQ ID NO: 3496004 - DNA, 25 bp, Homo sapien
tctgaacatgtctggatacagtcgg

SEQ ID NO: 3496005 - DNA, 25 bp, Homo sapien
cgggggtgcccagctctgaccatgt

SEQ ID NO: 3496006 - DNA, 25 bp, Homo sapien
ctctgaccatgtctggatgcagtcg

SEQ ID NO: 3496007 - DNA, 25 bp, Homo sapien
ctctgaacatgtctggatacagtcg

SEQ ID NO: 3496008 - DNA, 25 bp, Homo sapien
tcaccctgtttatccaacaggcact

SEQ ID NO: 3496009 - DNA, 25 bp, Homo sapien
caccctgtttatccaacaggcactg

SEQ ID NO: 3496010 - DNA, 25 bp, Homo sapien
ctccggggggcaaatgttggtcatt

SEQ ID NO: 3496011 - DNA, 25 bp, Homo sapien
ctatggatgcatcgccaagcgcggt

SEQ ID NO: 3496012 - DNA, 25 bp, Homo sapien
tgcgcctttgggagcaaactctccc

SEQ ID NO: 3496013 - DNA, 25 bp, Homo sapien
gcaaatgttggtcattggtgcgcct

SEQ ID NO: 3496014 - DNA, 25 bp, Homo sapien
gcatgaacacccacaaagtctccga

SEQ ID NO: 3496015 - DNA, 25 bp, Homo sapien
ggctgctctgtgcacccggtctcag

SEQ ID NO: 3496016 - DNA, 25 bp, Homo sapien
acagctcttccgaggcgcccagaat

SEQ ID NO: 3496017 - DNA, 25 bp, Homo sapien
ggtccaccgtccagggtgagcatga

SEQ ID NO: 3496018 - DNA, 25 bp, Homo sapien
cgcgggtctgatggcgaccgccact

SEQ ID NO: 3496019 - DNA, 25 bp, Homo sapien
cttcgcgggtctgatggcgaccgcc

SEQ ID NO: 3496020 - DNA, 25 bp, Homo sapien
ttcgcgggtctgatggcgaccgcca

SEQ ID NO: 3496021 - DNA, 25 bp, Homo sapien
gggtctgatggcgaccgccactcac

SEQ ID NO: 3496022 - DNA, 25 bp, Homo sapien
ctggggctcgcgccgggcgggggcg

SEQ ID NO: 3496023 - DNA, 25 bp, Homo sapien
tcgcgccgggcgggggcggggcagc

SEQ ID NO: 3496024 - DNA, 25 bp, Homo sapien
gccgggcgggggcggggcagctcac

SEQ ID NO: 3496025 - DNA, 25 bp, Homo sapien
cgccgggcgggggcggggcagctca

SEQ ID NO: 3496026 - DNA, 25 bp, Homo sapien
cggcggcggcgtagccccggcagcg

SEQ ID NO: 3496027 - DNA, 25 bp, Homo sapien
tggttccagacgttccacactccgg

SEQ ID NO: 3496028 - DNA, 25 bp, Homo sapien
cagacgttccacactccgggtctgt

SEQ ID NO: 3496029 - DNA, 25 bp, Homo sapien
agacgttccacactccgggtctgtt

SEQ ID NO: 3496030 - DNA, 25 bp, Homo sapien
ttccagacgttccacactccgggtc

SEQ ID NO: 3496031 - DNA, 25 bp, Homo sapien
cagggtcacccagagttcaagtcag

SEQ ID NO: 3496032 - DNA, 25 bp, Homo sapien
tcaacacgcacagcggtgggcttgt

SEQ ID NO: 3496033 - DNA, 25 bp, Homo sapien
ttttactgcagaaacgggttggctg

SEQ ID NO: 3496034 - DNA, 25 bp, Homo sapien
gaaatttgcgccagttttcctgcct

SEQ ID NO: 3496035 - DNA, 25 bp, Homo sapien
tctgccttccatgccacatcttctc

SEQ ID NO: 3496036 - DNA, 25 bp, Homo sapien
tgccttccatgccacatcttctcac

SEQ ID NO: 3496037 - DNA, 25 bp, Homo sapien
cagcctctgccttccatgccacatc

SEQ ID NO: 3496038 - DNA, 25 bp, Homo sapien
gcctctgccttccatgccacatctt

SEQ ID NO: 3496039 - DNA, 25 bp, Homo sapien
tgagcttgatgcacaaggccacgtg

SEQ ID NO: 3496040 - DNA, 25 bp, Homo sapien
actgagggatgtcgggcacgaacca

SEQ ID NO: 3496041 - DNA, 25 bp, Homo sapien
aaccaggcggcgatgagcttgatgc

SEQ ID NO: 3496042 - DNA, 25 bp, Homo sapien
tcttcaccgactgagggatgtcggg

SEQ ID NO: 3496043 - DNA, 25 bp, Homo sapien
gaactgctcggagaagttgtaatcg

SEQ ID NO: 3496044 - DNA, 25 bp, Homo sapien
actgctcggagaagttgtaatcggg

SEQ ID NO: 3496045 - DNA, 25 bp, Homo sapien
accagaactgctcggagaagttgta

SEQ ID NO: 3496046 - DNA, 25 bp, Homo sapien
ggaaccagaactgctcggagaagtt

SEQ ID NO: 3496047 - DNA, 25 bp, Homo sapien
ggtcaggagttcagagggcattctt

SEQ ID NO: 3496048 - DNA, 25 bp, Homo sapien
tcaggagttcagagggcattcttgg

SEQ ID NO: 3496049 - DNA, 25 bp, Homo sapien
aggggtcaggagttcagagggcatt

SEQ ID NO: 3496050 - DNA, 25 bp, Homo sapien
tcaggggtcaggagttcagagggca

SEQ ID NO: 3496051 - DNA, 25 bp, Homo sapien
tgtggttgacgtagcccttgaggca

SEQ ID NO: 3496052 - DNA, 25 bp, Homo sapien
cctggaagtccttggtgtggaagac

SEQ ID NO: 3496053 - DNA, 25 bp, Homo sapien
tgagccctcaatcccatcagggtcc

SEQ ID NO: 3496054 - DNA, 25 bp, Homo sapien
tgtggaagacggacaggctgtggtt

SEQ ID NO: 3496055 - DNA, 25 bp, Homo sapien
gccccagagtgcttctagcctgcgt

SEQ ID NO: 3496056 - DNA, 25 bp, Homo sapien
tctagcctgcgttgtggagcaaaca

SEQ ID NO: 3496057 - DNA, 25 bp, Homo sapien
ccacagactgcgtccagtgggacgg

SEQ ID NO: 3496058 - DNA, 25 bp, Homo sapien
gcacatcttcacatccgggggcctt

SEQ ID NO: 3496059 - DNA, 25 bp, Homo sapien
ggggtaccaacaggtccagccattc

SEQ ID NO: 3496060 - DNA, 25 bp, Homo sapien
ccaggggtaccaacaggtccagcca

SEQ ID NO: 3496061 - DNA, 25 bp, Homo sapien
taccaacaggtccagccattcccag

SEQ ID NO: 3496062 - DNA, 25 bp, Homo sapien
gggtaccaacaggtccagccattcc

SEQ ID NO: 3496063 - DNA, 25 bp, Homo sapien
tctttcaggcatgggctatagcggt

SEQ ID NO: 3496064 - DNA, 25 bp, Homo sapien
tagcggtacttgtagaccactcggg

SEQ ID NO: 3496065 - DNA, 25 bp, Homo sapien
atgaccgccagcacaccgatggtct

SEQ ID NO: 3496066 - DNA, 25 bp, Homo sapien
ctcgggggatgaactcagatgtgaa

SEQ ID NO: 3496067 - DNA, 25 bp, Homo sapien
cagagcagtgggcaagcggtctgac

SEQ ID NO: 3496068 - DNA, 25 bp, Homo sapien
tgggcaagcggtctgactcagcgtc

SEQ ID NO: 3496069 - DNA, 25 bp, Homo sapien
actcagcgtccctcggctggttctg

SEQ ID NO: 3496070 - DNA, 25 bp, Homo sapien
gtctgactcagcgtccctcggctgg

SEQ ID NO: 3496071 - DNA, 25 bp, Homo sapien
gcagccctagggctgcagtattcac

SEQ ID NO: 3496072 - DNA, 25 bp, Homo sapien
gtgtctctgtgcgtggtgtcccctt

SEQ ID NO: 3496073 - DNA, 25 bp, Homo sapien
tctgtgcgtggtgtccccttgcagc

SEQ ID NO: 3496074 - DNA, 25 bp, Homo sapien
gtattcacaaggaagtccccagcca

SEQ ID NO: 3496075 - DNA, 25 bp, Homo sapien
tgtgggaggagcctacaaagcgctc

SEQ ID NO: 3496076 - DNA, 25 bp, Homo sapien
accttgtaacctgggcccgagactg

SEQ ID NO: 3496077 - DNA, 25 bp, Homo sapien
gcgtcaagcccctctgagatcctga

SEQ ID NO: 3496078 - DNA, 25 bp, Homo sapien
tgctgcctgtccgtctcagcgtggc

SEQ ID NO: 3496079 - DNA, 25 bp, Homo sapien
tgcggcctgagatccgagagattat

SEQ ID NO: 3496080 - DNA, 25 bp, Homo sapien
aacccgcatccgaggccgtcggaga

SEQ ID NO: 3496081 - DNA, 25 bp, Homo sapien
gctgtctgcggcctgagatccgaga

SEQ ID NO: 3496082 - DNA, 25 bp, Homo sapien
gcctgagatccgagagattattttt

SEQ ID NO: 3496083 - DNA, 25 bp, Homo sapien
gtccttggccttgcgcggcaccagg

SEQ ID NO: 3496084 - DNA, 25 bp, Homo sapien
gtccaggcggatctccacgaggttg

SEQ ID NO: 3496085 - DNA, 25 bp, Homo sapien
gccgctgcaaccagaccatcttgat

SEQ ID NO: 3496086 - DNA, 25 bp, Homo sapien
gaccatcttgatggcgtccaggcgg

SEQ ID NO: 3496087 - DNA, 25 bp, Homo sapien
ccccgccccgcattcgtctccgcga

SEQ ID NO: 3496088 - DNA, 25 bp, Homo sapien
accggcgccccgcactcatgtccgc

SEQ ID NO: 3496089 - DNA, 25 bp, Homo sapien
gccccgcactcatgtccgcggaccc

SEQ ID NO: 3496090 - DNA, 25 bp, Homo sapien
ccgccccgcattcgtctccgcgaac

SEQ ID NO: 3496091 - DNA, 25 bp, Homo sapien
ctgaaggtgttgaccgggttcagaa

SEQ ID NO: 3496092 - DNA, 25 bp, Homo sapien
tgaactcgtcgaacaggctgaaggt

SEQ ID NO: 3496093 - DNA, 25 bp, Homo sapien
gttcagaaggtagttgcgccgccag

SEQ ID NO: 3496094 - DNA, 25 bp, Homo sapien
cagagagcggcacttgtgggtcacc

SEQ ID NO: 3496095 - DNA, 25 bp, Homo sapien
ggaccaggtactcgacgcagttgct

SEQ ID NO: 3496096 - DNA, 25 bp, Homo sapien
tactcgacgcagttgctgagcgtct

SEQ ID NO: 3496097 - DNA, 25 bp, Homo sapien
acgaagaggtccatcatgcagccgc

SEQ ID NO: 3496098 - DNA, 25 bp, Homo sapien
gcccatgatgatggccatctgcacg

SEQ ID NO: 3496099 - DNA, 25 bp, Homo sapien
gacaggaggagatcagggaggggtc

SEQ ID NO: 3496100 - DNA, 25 bp, Homo sapien
cagacaggaggagatcagggagggg

SEQ ID NO: 3496101 - DNA, 25 bp, Homo sapien
ctgcggggccagacaggaggagatc

SEQ ID NO: 3496102 - DNA, 25 bp, Homo sapien
cggggccagacaggaggagatcagg

SEQ ID NO: 3496103 - DNA, 25 bp, Homo sapien
cccgccaggcgcgtggacttcccgg

SEQ ID NO: 3496104 - DNA, 25 bp, Homo sapien
cgccaggcgcgtggacttcccgggg

SEQ ID NO: 3496105 - DNA, 25 bp, Homo sapien
agcccgccaggcgcgtggacttccc

SEQ ID NO: 3496106 - DNA, 25 bp, Homo sapien
ccaggcgcgtggacttcccggggtg

SEQ ID NO: 3496107 - DNA, 25 bp, Homo sapien
gaaggggaagtctggggcactgcgg

SEQ ID NO: 3496108 - DNA, 25 bp, Homo sapien
aaggggaagtctggggcactgcggg

SEQ ID NO: 3496109 - DNA, 25 bp, Homo sapien
ggaaggggaagtctggggcactgcg

SEQ ID NO: 3496110 - DNA, 25 bp, Homo sapien
gaaatcaatcgatggagaaaaaggc

SEQ ID NO: 3496111 - DNA, 25 bp, Homo sapien
ctctccagatgttacaaggaggaga

SEQ ID NO: 3496112 - DNA, 25 bp, Homo sapien
gacgcgcgggaggaaaaggcggcgc

SEQ ID NO: 3496113 - DNA, 25 bp, Homo sapien
ttacaaggaggagacatggacacgg

SEQ ID NO: 3496114 - DNA, 25 bp, Homo sapien
gggagacactcaggaagcaacccag

SEQ ID NO: 3496115 - DNA, 25 bp, Homo sapien
ccactcaagacatcaggctttcggg

SEQ ID NO: 3496116 - DNA, 25 bp, Homo sapien
gatccccaggaagcctcgggacttg

SEQ ID NO: 3496117 - DNA, 25 bp, Homo sapien
ggagaggcctgaagtccactcaaga

SEQ ID NO: 3496118 - DNA, 25 bp, Homo sapien
cgctccgagaaggtcctgggcatct

SEQ ID NO: 3496119 - DNA, 25 bp, Homo sapien
tgaagaagcggatggtgaacctgct

SEQ ID NO: 3496120 - DNA, 25 bp, Homo sapien
gagagacgagaaatgggtgaagaac

SEQ ID NO: 3496121 - DNA, 25 bp, Homo sapien
caggatgaaggcgatgtagatgaga

SEQ ID NO: 3496122 - DNA, 25 bp, Homo sapien
tggaatgggaccggccctcacctct

SEQ ID NO: 3496123 - DNA, 25 bp, Homo sapien
gaatgggaccggccctcacctctct

SEQ ID NO: 3496124 - DNA, 25 bp, Homo sapien
atgggaccggccctcacctctctcc

SEQ ID NO: 3496125 - DNA, 25 bp, Homo sapien
ctggaatgggaccggccctcacctc

SEQ ID NO: 3496126 - DNA, 25 bp, Homo sapien
gtcacaaagcttcagggccacgcac

SEQ ID NO: 3496127 - DNA, 25 bp, Homo sapien
aaagcttcagggccacgcacctgtt

SEQ ID NO: 3496128 - DNA, 25 bp, Homo sapien
gcttcagggccacgcacctgttgat

SEQ ID NO: 3496129 - DNA, 25 bp, Homo sapien
agtcacaaagcttcagggccacgca

SEQ ID NO: 3496130 - DNA, 25 bp, Homo sapien
ggtagaccaccaggacgtgggccat

SEQ ID NO: 3496131 - DNA, 25 bp, Homo sapien
tgggccatgccgatcatgaggcaga

SEQ ID NO: 3496132 - DNA, 25 bp, Homo sapien
tggtcacatagtgcaccagagcccc

SEQ ID NO: 3496133 - DNA, 25 bp, Homo sapien
gagctgctgaagagcgcggaggcca

SEQ ID NO: 3496134 - DNA, 25 bp, Homo sapien
gcagttaatgagctgaagtgccatt

SEQ ID NO: 3496135 - DNA, 25 bp, Homo sapien
ggatgacggtgctgcgtaggtagga

SEQ ID NO: 3496136 - DNA, 25 bp, Homo sapien
ctggtatggccggagcttgtagtcg

SEQ ID NO: 3496137 - DNA, 25 bp, Homo sapien
gcagggtcaggacgaggatgacggt

SEQ ID NO: 3496138 - DNA, 25 bp, Homo sapien
gggtcggcctcagctgcgctgccag

SEQ ID NO: 3496139 - DNA, 25 bp, Homo sapien
agacacggcaggcatatgtgggccg

SEQ ID NO: 3496140 - DNA, 25 bp, Homo sapien
ccgtgcagggcatcgggcgccaaca

SEQ ID NO: 3496141 - DNA, 25 bp, Homo sapien
cgccaacagcccctgctcgggtcgg

SEQ ID NO: 3496142 - DNA, 25 bp, Homo sapien
ctgttcctcgtcccacacgtacagg

SEQ ID NO: 3496143 - DNA, 25 bp, Homo sapien
ctcgtcccacacgtacaggtcccag

SEQ ID NO: 3496144 - DNA, 25 bp, Homo sapien
tgttcctcgtcccacacgtacaggt

SEQ ID NO: 3496145 - DNA, 25 bp, Homo sapien
gtcccacacgtacaggtcccagtgc

SEQ ID NO: 3496146 - DNA, 25 bp, Homo sapien
gcggcgggggcaaggaggggcatca

SEQ ID NO: 3496147 - DNA, 25 bp, Homo sapien
ctgcggcgggggcaaggaggggcat

SEQ ID NO: 3496148 - DNA, 25 bp, Homo sapien
gggggcaaggaggggcatcactgca

SEQ ID NO: 3496149 - DNA, 25 bp, Homo sapien
ggcgggggcaaggaggggcatcact

SEQ ID NO: 3496150 - DNA, 25 bp, Homo sapien
ctcggagcttgggctggcacttccc

SEQ ID NO: 3496151 - DNA, 25 bp, Homo sapien
gcagaggcgtcccgcagcaactcac

SEQ ID NO: 3496152 - DNA, 25 bp, Homo sapien
cgcagaggcgtcccgcagcaactca

SEQ ID NO: 3496153 - DNA, 25 bp, Homo sapien
ccgcagaggcgtcccgcagcaactc

SEQ ID NO: 3496154 - DNA, 25 bp, Homo sapien
gaacaccaccgtgccatcattgtca

SEQ ID NO: 3496155 - DNA, 25 bp, Homo sapien
caccgtgccatcattgtcaaagagg

SEQ ID NO: 3496156 - DNA, 25 bp, Homo sapien
caccaccgtgccatcattgtcaaag

SEQ ID NO: 3496157 - DNA, 25 bp, Homo sapien
gcgaacaccaccgtgccatcattgt

SEQ ID NO: 3496158 - DNA, 25 bp, Homo sapien
gggtgataggtgggccggagaggag

SEQ ID NO: 3496159 - DNA, 25 bp, Homo sapien
tgatctcccccgcttcgggtggatg

SEQ ID NO: 3496160 - DNA, 25 bp, Homo sapien
gggctgaggaaatgggcgggtgggc

SEQ ID NO: 3496161 - DNA, 25 bp, Homo sapien
ggcctccccgtcagccctgtgggga

SEQ ID NO: 3496162 - DNA, 25 bp, Homo sapien
tcccatcttccgcaggccctggggt

SEQ ID NO: 3496163 - DNA, 25 bp, Homo sapien
ttcccatcttccgcaggccctgggg

SEQ ID NO: 3496164 - DNA, 25 bp, Homo sapien
cccatcttccgcaggccctggggtg

SEQ ID NO: 3496165 - DNA, 25 bp, Homo sapien
gcaggtttccgagagccgctggtac

SEQ ID NO: 3496166 - DNA, 25 bp, Homo sapien
ttggcaaaagtgcaggtttccgaga

SEQ ID NO: 3496167 - DNA, 25 bp, Homo sapien
aaagtgcaggtttccgagagccgct

SEQ ID NO: 3496168 - DNA, 25 bp, Homo sapien
caaaagtgcaggtttccgagagccg

SEQ ID NO: 3496169 - DNA, 25 bp, Homo sapien
ctgtggtcgccgaggggacacatga

SEQ ID NO: 3496170 - DNA, 25 bp, Homo sapien
tgaggatgtcgtgggcctcacagat

SEQ ID NO: 3496171 - DNA, 25 bp, Homo sapien
tgcggctgtggtcgccgaggggaca

SEQ ID NO: 3496172 - DNA, 25 bp, Homo sapien
ggacacatgaggatgtcgtgggcct

SEQ ID NO: 3496173 - DNA, 25 bp, Homo sapien
cggccggcaccagcatgtaggtgta

SEQ ID NO: 3496174 - DNA, 25 bp, Homo sapien
cagacgaagtacagggccacctttt

SEQ ID NO: 3496175 - DNA, 25 bp, Homo sapien
tcagaaagactaagaggcccgtcag

SEQ ID NO: 3496176 - DNA, 25 bp, Homo sapien
tggcctcaaacagcgagaatccgct

SEQ ID NO: 3496177 - DNA, 25 bp, Homo sapien
gtgtgggggctcccgtgggtatctg

SEQ ID NO: 3496178 - DNA, 25 bp, Homo sapien
cgcgggtatctgggggcttccgcgg

SEQ ID NO: 3496179 - DNA, 25 bp, Homo sapien
atctgggggcttccgcgggggtgtg

SEQ ID NO: 3496180 - DNA, 25 bp, Homo sapien
gctcccgcgggtatctgggggcttc

SEQ ID NO: 3496181 - DNA, 25 bp, Homo sapien
gtgtgggggctcccgcgggtatctg

SEQ ID NO: 3496182 - DNA, 25 bp, Homo sapien
ggccgtccgcggggttcctgtgctc

SEQ ID NO: 3496183 - DNA, 25 bp, Homo sapien
gccgtccgcggggttcctgtgctct

SEQ ID NO: 3496184 - DNA, 25 bp, Homo sapien
tgggggcgtccgcaggaggcggggc

SEQ ID NO: 3496185 - DNA, 25 bp, Homo sapien
caactggctgctcccggaacatgtg

SEQ ID NO: 3496186 - DNA, 25 bp, Homo sapien
atttcatcaactggctgctcccgga

SEQ ID NO: 3496187 - DNA, 25 bp, Homo sapien
ggaacatgtgtctccaccgcgccca

SEQ ID NO: 3496188 - DNA, 25 bp, Homo sapien
ctgatttcatcaactggctgctccc

SEQ ID NO: 3496189 - DNA, 25 bp, Homo sapien
gacagagagtgagagcccccatccc

SEQ ID NO: 3496190 - DNA, 25 bp, Homo sapien
aaagaccccgtccttcatcagatcc

SEQ ID NO: 3496191 - DNA, 25 bp, Homo sapien
tcaaagaccccgtccttcatcagat

SEQ ID NO: 3496192 - DNA, 25 bp, Homo sapien
agaccccgtccttcatcagatcctc

SEQ ID NO: 3496193 - DNA, 25 bp, Homo sapien
cctcaaagaccccgtccttcatcag

SEQ ID NO: 3496194 - DNA, 25 bp, Homo sapien
tgggtcacaggggttcacgagtcag

SEQ ID NO: 3496195 - DNA, 25 bp, Homo sapien
ctgggtcacaggggttcacgagtca

SEQ ID NO: 3496196 - DNA, 25 bp, Homo sapien
cacaggggttcacgagtcaggggga

SEQ ID NO: 3496197 - DNA, 25 bp, Homo sapien
ggtcacaggggttcacgagtcaggg

SEQ ID NO: 3496198 - DNA, 25 bp, Homo sapien
tgttcatgacaacgaagttcacgat

SEQ ID NO: 3496199 - DNA, 25 bp, Homo sapien
gacaacgaagttcacgattcggatt

SEQ ID NO: 3496200 - DNA, 25 bp, Homo sapien
tgttgttcatgacaacgaagttcac

SEQ ID NO: 3496201 - DNA, 25 bp, Homo sapien
aggtcttgttgttcatgacaacgaa

SEQ ID NO: 3496202 - DNA, 25 bp, Homo sapien
tgcctcgtaaccaatgccaggagtg

SEQ ID NO: 3496203 - DNA, 25 bp, Homo sapien
gaaccaccgtgatcctttaatggga

SEQ ID NO: 3496204 - DNA, 25 bp, Homo sapien
tgctctgagcgttgagaaccaccgt

SEQ ID NO: 3496205 - DNA, 25 bp, Homo sapien
tcaagagacactggccttgatccag

SEQ ID NO: 3496206 - DNA, 25 bp, Homo sapien
atggtggtcggcgcggccagctcgg

SEQ ID NO: 3496207 - DNA, 25 bp, Homo sapien
gccagctcggcgtggggggcaggcc

SEQ ID NO: 3496208 - DNA, 25 bp, Homo sapien
ctcgtggtgaccgggatggtggtcg

SEQ ID NO: 3496209 - DNA, 25 bp, Homo sapien
tggtgaccgggatggtggtcggcgc

SEQ ID NO: 3496210 - DNA, 25 bp, Homo sapien
gttgtcagcacggatcccaaagaag

SEQ ID NO: 3496211 - DNA, 25 bp, Homo sapien
cacggatcccaaagaagacctgttt

SEQ ID NO: 3496212 - DNA, 25 bp, Homo sapien
cagcacggatcccaaagaagacctg

SEQ ID NO: 3496213 - DNA, 25 bp, Homo sapien
acactgttgtcagcacggatcccaa

SEQ ID NO: 3496214 - DNA, 25 bp, Homo sapien
ggtctctctgggtgtgacgttgggc

SEQ ID NO: 3496215 - DNA, 25 bp, Homo sapien
gccacgaggacatagtcccactgct

SEQ ID NO: 3496216 - DNA, 25 bp, Homo sapien
caggaactgttgctgccgcgcctgc

SEQ ID NO: 3496217 - DNA, 25 bp, Homo sapien
agtcccactgctcggaggcctcggt

SEQ ID NO: 3496218 - DNA, 25 bp, Homo sapien
gcgggaagctgtccccttcgggctc

SEQ ID NO: 3496219 - DNA, 25 bp, Homo sapien
caccaggatccggaggctctcttcg

SEQ ID NO: 3496220 - DNA, 25 bp, Homo sapien
tccaccaggatccggaggctctctt

SEQ ID NO: 3496221 - DNA, 25 bp, Homo sapien
tccatcagcgggaagctgtcccctt

SEQ ID NO: 3496222 - DNA, 25 bp, Homo sapien
ggaggatgtgattgggggctagatg

SEQ ID NO: 3496223 - DNA, 25 bp, Homo sapien
gatgtgattgggggctagatgcccc

SEQ ID NO: 3496224 - DNA, 25 bp, Homo sapien
ggctagatgcccctcattggcgggt

SEQ ID NO: 3496225 - DNA, 25 bp, Homo sapien
ctagatgcccctcattggcgggtcc

SEQ ID NO: 3496226 - DNA, 25 bp, Homo sapien
gaacagcaaagagtcccgaggagat

SEQ ID NO: 3496227 - DNA, 25 bp, Homo sapien
cctgctacaaacaaccgacgaagga

SEQ ID NO: 3496228 - DNA, 25 bp, Homo sapien
agagggcctgctacaaacaaccgac

SEQ ID NO: 3496229 - DNA, 25 bp, Homo sapien
aggagatggctgtaggcgggtgaca

SEQ ID NO: 3496230 - DNA, 25 bp, Homo sapien
gtggaaacagaagcgcgtgaggggc

SEQ ID NO: 3496231 - DNA, 25 bp, Homo sapien
ctgtggaaacagaagcgcgtgaggg

SEQ ID NO: 3496232 - DNA, 25 bp, Homo sapien
tgtggaaacagaagcgcgtgagggg

SEQ ID NO: 3496233 - DNA, 25 bp, Homo sapien
ggaaacagaagcgcgtgaggggctc

SEQ ID NO: 3496234 - DNA, 25 bp, Homo sapien
ggaggtgcagacgagggcactcgcg

SEQ ID NO: 3496235 - DNA, 25 bp, Homo sapien
tgcagacgagggcactcgcggcggc

SEQ ID NO: 3496236 - DNA, 25 bp, Homo sapien
ctggaggtgcagacgagggcactcg

SEQ ID NO: 3496237 - DNA, 25 bp, Homo sapien
aggtgcagacgagggcactcgcggc

SEQ ID NO: 3496238 - DNA, 25 bp, Homo sapien
ctcctgcagggtgacgggcgcaggc

SEQ ID NO: 3496239 - DNA, 25 bp, Homo sapien
tcctgcagggtgacgggcgcaggca

SEQ ID NO: 3496240 - DNA, 25 bp, Homo sapien
cagcaggcaaggtgagtgcccgcag

SEQ ID NO: 3496241 - DNA, 25 bp, Homo sapien
ggcaaggtgagtgcccgcaggcaca

SEQ ID NO: 3496242 - DNA, 25 bp, Homo sapien
agtccctcccctctgccagccgcat

SEQ ID NO: 3496243 - DNA, 25 bp, Homo sapien
ctgagtccctcccctctgccagccg

SEQ ID NO: 3496244 - DNA, 25 bp, Homo sapien
tgagtccctcccctctgccagccgc

SEQ ID NO: 3496245 - DNA, 25 bp, Homo sapien
gagtccctcccctctgccagccgca

SEQ ID NO: 3496246 - DNA, 25 bp, Homo sapien
ggagtttgtggggggctcttggcac

SEQ ID NO: 3496247 - DNA, 25 bp, Homo sapien
gggagtttgtggggggctcttggca

SEQ ID NO: 3496248 - DNA, 25 bp, Homo sapien
agccagtcagcctaacacactacag

SEQ ID NO: 3496249 - DNA, 25 bp, Homo sapien
caccatactgatgtgcggacagcca

SEQ ID NO: 3496250 - DNA, 25 bp, Homo sapien
tactgatgtgcggacagccagtcag

SEQ ID NO: 3496251 - DNA, 25 bp, Homo sapien
gtgcggacagccagtcagcctaaca

SEQ ID NO: 3496252 - DNA, 25 bp, Homo sapien
tggctgtggccggagttccagctgg

SEQ ID NO: 3496253 - DNA, 25 bp, Homo sapien
cagctggggtttggcggccaggaga

SEQ ID NO: 3496254 - DNA, 25 bp, Homo sapien
atatggcagccacccgtggagcggt

SEQ ID NO: 3496255 - DNA, 25 bp, Homo sapien
cgggtttgagtgcagctcctgaaga

SEQ ID NO: 3496256 - DNA, 25 bp, Homo sapien
tgccttggcagagaactttggtcga

SEQ ID NO: 3496257 - DNA, 25 bp, Homo sapien
gcagcctccttttaactgtgggata

SEQ ID NO: 3496258 - DNA, 25 bp, Homo sapien
tttaggacattcacagataggagct

SEQ ID NO: 3496259 - DNA, 25 bp, Homo sapien
aaacctgctaccctttgtagtcgct

SEQ ID NO: 3496260 - DNA, 25 bp, Homo sapien
ttcatcgccccgaaagaaacctgct

SEQ ID NO: 3496261 - DNA, 25 bp, Homo sapien
ggtcaatattacagcactttcatcg

SEQ ID NO: 3496262 - DNA, 25 bp, Homo sapien
ctctcgccggtgacccggtgtgcgt

SEQ ID NO: 3496263 - DNA, 25 bp, Homo sapien
gcagcaccgagtccgaggtctacga

SEQ ID NO: 3496264 - DNA, 25 bp, Homo sapien
gccctctcgccgtcttggagtccag

SEQ ID NO: 3496265 - DNA, 25 bp, Homo sapien
ctccgggccgaaacgccatgcggag

SEQ ID NO: 3496266 - DNA, 25 bp, Homo sapien
aaggatcaagccgtcgacctgaaag

SEQ ID NO: 3496267 - DNA, 25 bp, Homo sapien
ggccctttgccgatgctcctctgtg

SEQ ID NO: 3496268 - DNA, 25 bp, Homo sapien
aaagcaggcttcgtgagaggagggt

SEQ ID NO: 3496269 - DNA, 25 bp, Homo sapien
caagccgtcgacctgaaagcaggct

SEQ ID NO: 3496270 - DNA, 25 bp, Homo sapien
ttagatccacagactccgagaagcc

SEQ ID NO: 3496271 - DNA, 25 bp, Homo sapien
aagccctgtgcgaagatgtggcagc

SEQ ID NO: 3496272 - DNA, 25 bp, Homo sapien
attcattcagggtagcaaggacaat

SEQ ID NO: 3496273 - DNA, 25 bp, Homo sapien
ccctgggagcacgaggctgagctct

SEQ ID NO: 3496274 - DNA, 25 bp, Homo sapien
tccatcatcctggatcggggctttc

SEQ ID NO: 3496275 - DNA, 25 bp, Homo sapien
ctccatcatcctggatcggggcttt

SEQ ID NO: 3496276 - DNA, 25 bp, Homo sapien
gcgcgagtagccagatgaagtcttt

SEQ ID NO: 3496277 - DNA, 25 bp, Homo sapien
aggagcctctcgcaggccttgggct

SEQ ID NO: 3496278 - DNA, 25 bp, Homo sapien
cttggccctttggacgacgacgccg

SEQ ID NO: 3496279 - DNA, 25 bp, Homo sapien
cgacgccgcgttttcctcttggtct

SEQ ID NO: 3496280 - DNA, 25 bp, Homo sapien
tggatttgagcagctctgagatgtg

SEQ ID NO: 3496281 - DNA, 25 bp, Homo sapien
agcgttggatttgagcagctctgag

SEQ ID NO: 3496282 - DNA, 25 bp, Homo sapien
cgttggatttgagcagctctgagat

SEQ ID NO: 3496283 - DNA, 25 bp, Homo sapien
aggagcgttggatttgagcagctct

SEQ ID NO: 3496284 - DNA, 25 bp, Homo sapien
ccttcctgttgggtcctcttcattc

SEQ ID NO: 3496285 - DNA, 25 bp, Homo sapien
gtggccacctcaatgacagtgtgca

SEQ ID NO: 3496286 - DNA, 25 bp, Homo sapien
tcctgttgggtcctcttcattccca

SEQ ID NO: 3496287 - DNA, 25 bp, Homo sapien
ctgggcactcggtggccacctcaat

SEQ ID NO: 3496288 - DNA, 25 bp, Homo sapien
agccctcctggcgtggttttactgg

SEQ ID NO: 3496289 - DNA, 25 bp, Homo sapien
tgagcccgagagtgcttgctcctcg

SEQ ID NO: 3496290 - DNA, 25 bp, Homo sapien
tgcaccctttggagaggtccctgct

SEQ ID NO: 3496291 - DNA, 25 bp, Homo sapien
tcttgctatggtctccggagatgcc

SEQ ID NO: 3496292 - DNA, 25 bp, Homo sapien
gcaccacgcacacggcatgaaggtg

SEQ ID NO: 3496293 - DNA, 25 bp, Homo sapien
gggcaccacgcacacggcatgaagg

SEQ ID NO: 3496294 - DNA, 25 bp, Homo sapien
ttgcctgcgggcaccacgcacacgg

SEQ ID NO: 3496295 - DNA, 25 bp, Homo sapien
gcgggcaccacgcacacggcatgaa

SEQ ID NO: 3496296 - DNA, 25 bp, Homo sapien
acagccagagccaccgcgctcctgg

SEQ ID NO: 3496297 - DNA, 25 bp, Homo sapien
gcccggggcacggacacagccagag

SEQ ID NO: 3496298 - DNA, 25 bp, Homo sapien
ctggcccggggcacggacacagcca

SEQ ID NO: 3496299 - DNA, 25 bp, Homo sapien
ggggcacggacacagccagagccac

SEQ ID NO: 3496300 - DNA, 25 bp, Homo sapien
atgtcacctgtatggaggaaagggt

SEQ ID NO: 3496301 - DNA, 25 bp, Homo sapien
aatctgatgtcacctgtatggagga

SEQ ID NO: 3496302 - DNA, 25 bp, Homo sapien
cgaaatctgatgtcacctgtatgga

SEQ ID NO: 3496303 - DNA, 25 bp, Homo sapien
tctgatgtcacctgtatggaggaaa

SEQ ID NO: 3496304 - DNA, 25 bp, Homo sapien
tacagacgcgtgcagcctacaaagt

SEQ ID NO: 3496305 - DNA, 25 bp, Homo sapien
cctgggcaacatgctttaagtgcat

SEQ ID NO: 3496306 - DNA, 25 bp, Homo sapien
tggcacaatcatcctagcgcactgc

SEQ ID NO: 3496307 - DNA, 25 bp, Homo sapien
ttcatggaggcaagtcctgggcaac

SEQ ID NO: 3496308 - DNA, 25 bp, Homo sapien
tccggtggatgtcggacctgggtta

SEQ ID NO: 3496309 - DNA, 25 bp, Homo sapien
ggttagacgtgaggacacactccgg

SEQ ID NO: 3496310 - DNA, 25 bp, Homo sapien
tggatgtcggacctgggttagacgt

SEQ ID NO: 3496311 - DNA, 25 bp, Homo sapien
ctgggttagacgtgaggacacactc

SEQ ID NO: 3496312 - DNA, 25 bp, Homo sapien
cgtttttggatttcaggcgagccca

SEQ ID NO: 3496313 - DNA, 25 bp, Homo sapien
gaaaagcgcgtgttttacgtgtcca

SEQ ID NO: 3496314 - DNA, 25 bp, Homo sapien
tttccaccagcgatgggacaggaca

SEQ ID NO: 3496315 - DNA, 25 bp, Homo sapien
tcatctcggagttacccagctaggg

SEQ ID NO: 3496316 - DNA, 25 bp, Homo sapien
aaggccttcaccagagggctgcgtg

SEQ ID NO: 3496317 - DNA, 25 bp, Homo sapien
aggccttcaccagagggctgcgtgg

SEQ ID NO: 3496318 - DNA, 25 bp, Homo sapien
ggccttcaccagagggctgcgtggg

SEQ ID NO: 3496319 - DNA, 25 bp, Homo sapien
gtcagcagccaagcgagtaaactcg

SEQ ID NO: 3496320 - DNA, 25 bp, Homo sapien
tgaacgtcatcacgcttgcacgggc

SEQ ID NO: 3496321 - DNA, 25 bp, Homo sapien
aattactgttgaggtgcctggaccc

SEQ ID NO: 3496322 - DNA, 25 bp, Homo sapien
tctagaacacaagcatgcccagtgc

SEQ ID NO: 3496323 - DNA, 25 bp, Homo sapien
tgtgtgacccggtctgagctggcct

SEQ ID NO: 3496324 - DNA, 25 bp, Homo sapien
gcctctgggcagcatgccgtgtggg

SEQ ID NO: 3496325 - DNA, 25 bp, Homo sapien
tggccaggttagagtcctgtgtgac

SEQ ID NO: 3496326 - DNA, 25 bp, Homo sapien
tagagtcctgtgtgacccggtctga

SEQ ID NO: 3496327 - DNA, 25 bp, Homo sapien
gtggatggcggcctggggtgacgcg

SEQ ID NO: 3496328 - DNA, 25 bp, Homo sapien
tggatggcggcctggggtgacgcgc

SEQ ID NO: 3496329 - DNA, 25 bp, Homo sapien
gatggcggcctggggtgacgcgcac

SEQ ID NO: 3496330 - DNA, 25 bp, Homo sapien
tggtggatggcggcctggggtgacg

SEQ ID NO: 3496331 - DNA, 25 bp, Homo sapien
cggcctggggtgacgtgcgcctgca

SEQ ID NO: 3496332 - DNA, 25 bp, Homo sapien
gatgcgcgcctgtcgggcggatggt

SEQ ID NO: 3496333 - DNA, 25 bp, Homo sapien
acagatggtagcctggggtgacgcg

SEQ ID NO: 3496334 - DNA, 25 bp, Homo sapien
gggtgacgtgcgcctgcaccgggag

SEQ ID NO: 3496335 - DNA, 25 bp, Homo sapien
tgacagcggtagtgtgggagctggg

SEQ ID NO: 3496336 - DNA, 25 bp, Homo sapien
ggctgacagcggtagtgtgggagct

SEQ ID NO: 3496337 - DNA, 25 bp, Homo sapien
aggctgacagcggtagtgtgggagc

SEQ ID NO: 3496338 - DNA, 25 bp, Homo sapien
ctggaggctgacagcggtagtgtgg

SEQ ID NO: 3496339 - DNA, 25 bp, Homo sapien
ctcaggtttcgcctgggtgggccat

SEQ ID NO: 3496340 - DNA, 25 bp, Homo sapien
ggtcagaaactcaggtttcgcctgg

SEQ ID NO: 3496341 - DNA, 25 bp, Homo sapien
ggtggagaccgggtcagaaactcag

SEQ ID NO: 3496342 - DNA, 25 bp, Homo sapien
agaaactcaggtttcgcctgggtgg

SEQ ID NO: 3496343 - DNA, 25 bp, Homo sapien
gcagtagacccttgtcccggctgca

SEQ ID NO: 3496344 - DNA, 25 bp, Homo sapien
ccagaagcagtagacccttgtcccg

SEQ ID NO: 3496345 - DNA, 25 bp, Homo sapien
ccagcgaccttgtgccctcctccat

SEQ ID NO: 3496346 - DNA, 25 bp, Homo sapien
agaagcagtagacccttgtcccggc

SEQ ID NO: 3496347 - DNA, 25 bp, Homo sapien
tcgggcggtgcttggcctcacctgc

SEQ ID NO: 3496348 - DNA, 25 bp, Homo sapien
caagcctcgggcggtgcttggcctc

SEQ ID NO: 3496349 - DNA, 25 bp, Homo sapien
cctgcaagcctcgggcggtgcttgg

SEQ ID NO: 3496350 - DNA, 25 bp, Homo sapien
agcctcgggcggtgcttggcctcac

SEQ ID NO: 3496351 - DNA, 25 bp, Homo sapien
ccagcgtgcgaacacgccaaggtgt

SEQ ID NO: 3496352 - DNA, 25 bp, Homo sapien
tgagctgagcacgactggagaggat

SEQ ID NO: 3496353 - DNA, 25 bp, Homo sapien
tgactgtcggcacggcactgccgag

SEQ ID NO: 3496354 - DNA, 25 bp, Homo sapien
cggccagtggatctcagaccctgag

SEQ ID NO: 3496355 - DNA, 25 bp, Homo sapien
cccctgcccagagcggtccctcgca

SEQ ID NO: 3496356 - DNA, 25 bp, Homo sapien
gagctttgccgaggagggagcacct

SEQ ID NO: 3496357 - DNA, 25 bp, Homo sapien
tgcccagagcggtccctcgcatcct

SEQ ID NO: 3496358 - DNA, 25 bp, Homo sapien
ccccaaggagctttgccgaggaggg

SEQ ID NO: 3496359 - DNA, 25 bp, Homo sapien
gcttccatcttatgaatcacaggag

SEQ ID NO: 3496360 - DNA, 25 bp, Homo sapien
gctctctagagacacttcctggggg

SEQ ID NO: 3496361 - DNA, 25 bp, Homo sapien
caggagtcccgttggttttggatga

SEQ ID NO: 3496362 - DNA, 25 bp, Homo sapien
ggatgagttgacaccaaaaagacac

SEQ ID NO: 3496363 - DNA, 25 bp, Homo sapien
acatgcggggcattcggtggcctct

SEQ ID NO: 3496364 - DNA, 25 bp, Homo sapien
gctgcaaatgtgagggcgaatgttg

SEQ ID NO: 3496365 - DNA, 25 bp, Homo sapien
tgagggcgaatgttgggtgcagggt

SEQ ID NO: 3496366 - DNA, 25 bp, Homo sapien
tcacatgcggggcattcggtggcct

SEQ ID NO: 3496367 - DNA, 25 bp, Homo sapien
cctcctctttccacagaccagagtg

SEQ ID NO: 3496368 - DNA, 25 bp, Homo sapien
ggagccgtccggtgacccaagcagg

SEQ ID NO: 3496369 - DNA, 25 bp, Homo sapien
gagccgtccggtgacccaagcaggc

SEQ ID NO: 3496370 - DNA, 25 bp, Homo sapien
ggaagaaaagctgccggaagctcaa

SEQ ID NO: 3496371 - DNA, 25 bp, Homo sapien
tggagatgcaccaaatccctcctgg

SEQ ID NO: 3496372 - DNA, 25 bp, Homo sapien
gcttgttgggtggatttggagggaa

SEQ ID NO: 3496373 - DNA, 25 bp, Homo sapien
aacccatggccgtccttgcttggag

SEQ ID NO: 3496374 - DNA, 25 bp, Homo sapien
tctcttgagttgtggctcgtcccct

SEQ ID NO: 3496375 - DNA, 25 bp, Homo sapien
atctgggcctgaaggtcttggcgct

SEQ ID NO: 3496376 - DNA, 25 bp, Homo sapien
gtcttggcgcttccaaaagctccgg

SEQ ID NO: 3496377 - DNA, 25 bp, Homo sapien
ggcgggatgtggagcatctgggcct

SEQ ID NO: 3496378 - DNA, 25 bp, Homo sapien
tgtagccgtagccattagtgactgg

SEQ ID NO: 3496379 - DNA, 25 bp, Homo sapien
cagtccggcagctgtagccgtagcc

SEQ ID NO: 3496380 - DNA, 25 bp, Homo sapien
gcagctgtagccgtagccattagtg

SEQ ID NO: 3496381 - DNA, 25 bp, Homo sapien
ccattagtgactgggcctcatgagg

SEQ ID NO: 3496382 - DNA, 25 bp, Homo sapien
ccctcctgtgtgaacggcattttct

SEQ ID NO: 3496383 - DNA, 25 bp, Homo sapien
cctctggtgtgatgtttagaaagac

SEQ ID NO: 3496384 - DNA, 25 bp, Homo sapien
gaccaagggcctgctgggtattccg

SEQ ID NO: 3496385 - DNA, 25 bp, Homo sapien
ctgctccgggaagcgacccaggaat

SEQ ID NO: 3496386 - DNA, 25 bp, Homo sapien
ggagaggagtccgagatgccacctt

SEQ ID NO: 3496387 - DNA, 25 bp, Homo sapien
ggaagttagtactggtcgtggtgac

SEQ ID NO: 3496388 - DNA, 25 bp, Homo sapien
agaaagattcgacttggcagtgcgg

SEQ ID NO: 3496389 - DNA, 25 bp, Homo sapien
tggtcgggtgggaagcgtgagtggg

SEQ ID NO: 3496390 - DNA, 25 bp, Homo sapien
gatacctgggaacttaggtgacagt

SEQ ID NO: 3496391 - DNA, 25 bp, Homo sapien
ctgtttttctgggttggatacctgg

SEQ ID NO: 3496392 - DNA, 25 bp, Homo sapien
ggatacctgggaacttaggtgacag

SEQ ID NO: 3496393 - DNA, 25 bp, Homo sapien
acctgggaacttaggtgacagtgtg

SEQ ID NO: 3496394 - DNA, 25 bp, Homo sapien
ggccacacttaaggagggcagggcc

SEQ ID NO: 3496395 - DNA, 25 bp, Homo sapien
cttcaaaacgtaggccgagctgcgg

SEQ ID NO: 3496396 - DNA, 25 bp, Homo sapien
ggagcatctgctggtggggcgctga

SEQ ID NO: 3496397 - DNA, 25 bp, Homo sapien
tttgcccacagctgtcgtatctgag

SEQ ID NO: 3496398 - DNA, 25 bp, Homo sapien
ccctaccgagtgcagaaagttctgt

SEQ ID NO: 3496399 - DNA, 25 bp, Homo sapien
tctgtgagtttttcgtagatctccc

SEQ ID NO: 3496400 - DNA, 25 bp, Homo sapien
tccctaccgagtgcagaaagttctg

SEQ ID NO: 3496401 - DNA, 25 bp, Homo sapien
cgtagatctccctaccgagtgcaga

SEQ ID NO: 3496402 - DNA, 25 bp, Homo sapien
tgtgcaggcgtctgtaaacacagcc

SEQ ID NO: 3496403 - DNA, 25 bp, Homo sapien
tgtgtgcaggcgtctgtaaacacag

SEQ ID NO: 3496404 - DNA, 25 bp, Homo sapien
tgtaaacacagccagtgcaggggtg

SEQ ID NO: 3496405 - DNA, 25 bp, Homo sapien
tgtgtgtgcaggcgtctgtaaacac

SEQ ID NO: 3496406 - DNA, 25 bp, Homo sapien
agtgtaaacagtgcacgggtgtgtg

SEQ ID NO: 3496407 - DNA, 25 bp, Homo sapien
cacgggtgtgtgtgctcactgtgca

SEQ ID NO: 3496408 - DNA, 25 bp, Homo sapien
tgactgagatgcagtttacaaccat

SEQ ID NO: 3496409 - DNA, 25 bp, Homo sapien
ggtgactgagatgcagtttacaacc

SEQ ID NO: 3496410 - DNA, 25 bp, Homo sapien
cagggtgactgagatgcagtttaca

SEQ ID NO: 3496411 - DNA, 25 bp, Homo sapien
ctccagggtgactgagatgcagttt

SEQ ID NO: 3496412 - DNA, 25 bp, Homo sapien
gggacatctcggtaccctttctgca

SEQ ID NO: 3496413 - DNA, 25 bp, Homo sapien
caaacactccgtggctgagaggcag

SEQ ID NO: 3496414 - DNA, 25 bp, Homo sapien
tgagggtcatcttcacgagcaaaga

SEQ ID NO: 3496415 - DNA, 25 bp, Homo sapien
cgtgtgtacacatgcgtggccgcct

SEQ ID NO: 3496416 - DNA, 25 bp, Homo sapien
tatactggcagaaataagcggatct

SEQ ID NO: 3496417 - DNA, 25 bp, Homo sapien
aagtgtccaaaatatactggcagaa

SEQ ID NO: 3496418 - DNA, 25 bp, Homo sapien
gcggatctgagcgtttctcttcaaa

SEQ ID NO: 3496419 - DNA, 25 bp, Homo sapien
acctaggatatgcagggtgagagca

SEQ ID NO: 3496420 - DNA, 25 bp, Homo sapien
tccatctcctcagaccagtaaatgt

SEQ ID NO: 3496421 - DNA, 25 bp, Homo sapien
gggaggcatgggcccgtgtcctccc

SEQ ID NO: 3496422 - DNA, 25 bp, Homo sapien
ctgcacacaggccagaagggaggca

SEQ ID NO: 3496423 - DNA, 25 bp, Homo sapien
aggcatgggcccgtgtcctccccca

SEQ ID NO: 3496424 - DNA, 25 bp, Homo sapien
gcacacaggccagaagggaggcatg

SEQ ID NO: 3496425 - DNA, 25 bp, Homo sapien
tggccaacagggttgcggcgaggct

SEQ ID NO: 3496426 - DNA, 25 bp, Homo sapien
tgaggtccagctcacgcaggctgtg

SEQ ID NO: 3496427 - DNA, 25 bp, Homo sapien
tgctgtcactcacatcgcagtcggc

SEQ ID NO: 3496428 - DNA, 25 bp, Homo sapien
gctgccggacgctctccaccagctg

SEQ ID NO: 3496429 - DNA, 25 bp, Homo sapien
ccgggcgtgcctggcaccgcactga

SEQ ID NO: 3496430 - DNA, 25 bp, Homo sapien
cgggcgtgcctggcaccgcactgac

SEQ ID NO: 3496431 - DNA, 25 bp, Homo sapien
tgccgggcgtgcctggcaccgcact

SEQ ID NO: 3496432 - DNA, 25 bp, Homo sapien
ggtgccgggcgtgcctggcaccgca

SEQ ID NO: 3496433 - DNA, 25 bp, Homo sapien
gctcggcaactcaggaccctcaggt

SEQ ID NO: 3496434 - DNA, 25 bp, Homo sapien
gacacctgtgctcggcaactcagga

SEQ ID NO: 3496435 - DNA, 25 bp, Homo sapien
gcgcgacggacacctgtgctcggca

SEQ ID NO: 3496436 - DNA, 25 bp, Homo sapien
cggcaactcaggaccctcaggtggg

SEQ ID NO: 3496437 - DNA, 25 bp, Homo sapien
agcgaggcacaagcagcctcactcg

SEQ ID NO: 3496438 - DNA, 25 bp, Homo sapien
acaagcagcctcactcgcctgagat

SEQ ID NO: 3496439 - DNA, 25 bp, Homo sapien
agcagcctcactcgcctgagatctt

SEQ ID NO: 3496440 - DNA, 25 bp, Homo sapien
agacaagcgaggcacaagcagcctc

SEQ ID NO: 3496441 - DNA, 25 bp, Homo sapien
aggagagagatgtcgtccacccaga

SEQ ID NO: 3496442 - DNA, 25 bp, Homo sapien
aaagcagatcgtgcacacaaggtca

SEQ ID NO: 3496443 - DNA, 25 bp, Homo sapien
gagggtcactccacaagacatcagg

SEQ ID NO: 3496444 - DNA, 25 bp, Homo sapien
gacaacagactttaggctccagaga

SEQ ID NO: 3496445 - DNA, 25 bp, Homo sapien
gttgcttatctgtagctccaggaga

SEQ ID NO: 3496446 - DNA, 25 bp, Homo sapien
cgcccgcatcctccagcctgttgtt

SEQ ID NO: 3496447 - DNA, 25 bp, Homo sapien
tctgggccagcactgagctgaagtg

SEQ ID NO: 3496448 - DNA, 25 bp, Homo sapien
tccaggagaaacctgttctgggcca

SEQ ID NO: 3496449 - DNA, 25 bp, Homo sapien
acagcagtcgggcaccctcatcccc

SEQ ID NO: 3496450 - DNA, 25 bp, Homo sapien
ggccctgaggacacggcacagatcc

SEQ ID NO: 3496451 - DNA, 25 bp, Homo sapien
ctcacacagcagtcgggcaccctca

SEQ ID NO: 3496452 - DNA, 25 bp, Homo sapien
gaggacacggcacagatccccgcag

SEQ ID NO: 3496453 - DNA, 25 bp, Homo sapien
agctcccgcagcgaggccttggagg

SEQ ID NO: 3496454 - DNA, 25 bp, Homo sapien
gtctgatgtcacaccgcagctctcc

SEQ ID NO: 3496455 - DNA, 25 bp, Homo sapien
tggaggccacaatgccgcacaggtc

SEQ ID NO: 3496456 - DNA, 25 bp, Homo sapien
cacatcacccagcttgttgctgccc

SEQ ID NO: 3496457 - DNA, 25 bp, Homo sapien
cctcattgatgtcgttgttgctaac

SEQ ID NO: 3496458 - DNA, 25 bp, Homo sapien
acacggacgccagcctcattgatgt

SEQ ID NO: 3496459 - DNA, 25 bp, Homo sapien
gttgctaaccgtgagctccttgaag

SEQ ID NO: 3496460 - DNA, 25 bp, Homo sapien
gcttggccctgagcacggaggccag

SEQ ID NO: 3496461 - DNA, 25 bp, Homo sapien
tggtcaactcacaatggccgggtcc

SEQ ID NO: 3496462 - DNA, 25 bp, Homo sapien
tgcctgggcatcaggtgtcagtgct

SEQ ID NO: 3496463 - DNA, 25 bp, Homo sapien
gtggacaccggcattccttctggaa

SEQ ID NO: 3496464 - DNA, 25 bp, Homo sapien
gcaccacacaggaatgtgcaccagc

SEQ ID NO: 3496465 - DNA, 25 bp, Homo sapien
gagtggaacctgactcacggccagg

SEQ ID NO: 3496466 - DNA, 25 bp, Homo sapien
gaacctgactcacggccaggcatct

SEQ ID NO: 3496467 - DNA, 25 bp, Homo sapien
cggtgagtggaacctgactcacggc

SEQ ID NO: 3496468 - DNA, 25 bp, Homo sapien
tggaacctgactcacggccaggcat

SEQ ID NO: 3496469 - DNA, 25 bp, Homo sapien
agggagggtgatgacagatcccccc

SEQ ID NO: 3496470 - DNA, 25 bp, Homo sapien
gtcccctcctcacggctcctggcag

SEQ ID NO: 3496471 - DNA, 25 bp, Homo sapien
agggtgatgacagatccccccagcc

SEQ ID NO: 3496472 - DNA, 25 bp, Homo sapien
caggcgatgttctatgtagggggct

SEQ ID NO: 3496473 - DNA, 25 bp, Homo sapien
cccaagaggttgtcgctgaggtgca

SEQ ID NO: 3496474 - DNA, 25 bp, Homo sapien
gggtccaggagtccttcgcagagca

SEQ ID NO: 3496475 - DNA, 25 bp, Homo sapien
gcatcccccaagaggttgtcgctga

SEQ ID NO: 3496476 - DNA, 25 bp, Homo sapien
ccaggagtccttcgcagagcagctg

SEQ ID NO: 3496477 - DNA, 25 bp, Homo sapien
gcagggtgggcagggtgcgtagtgt

SEQ ID NO: 3496478 - DNA, 25 bp, Homo sapien
tgcagggtgggcagggtgcgtagtg

SEQ ID NO: 3496479 - DNA, 25 bp, Homo sapien
cagggtgggcagggtgcgtagtgtg

SEQ ID NO: 3496480 - DNA, 25 bp, Homo sapien
ctgcagggtgggcagggtgcgtagt

SEQ ID NO: 3496481 - DNA, 25 bp, Homo sapien
agccggcccccgtcaggcagcagtt

SEQ ID NO: 3496482 - DNA, 25 bp, Homo sapien
gctggaaggctagggatggcgggca

SEQ ID NO: 3496483 - DNA, 25 bp, Homo sapien
aaggctagggatggcgggcagggcc

SEQ ID NO: 3496484 - DNA, 25 bp, Homo sapien
ggaaggctagggatggcgggcaggg

SEQ ID NO: 3496485 - DNA, 25 bp, Homo sapien
gatgctggaaggctagggatggcgg

SEQ ID NO: 3496486 - DNA, 25 bp, Homo sapien
cagggttgactcgaagtgcagagct

SEQ ID NO: 3496487 - DNA, 25 bp, Homo sapien
gagctgatgtccttgcaccgtgctt

SEQ ID NO: 3496488 - DNA, 25 bp, Homo sapien
gtgcttccgtgaggccacagtcgtc

SEQ ID NO: 3496489 - DNA, 25 bp, Homo sapien
tcgttgctgcgcaggttgagctctg

SEQ ID NO: 3496490 - DNA, 25 bp, Homo sapien
accaccaccccacgtgcaggttaca

SEQ ID NO: 3496491 - DNA, 25 bp, Homo sapien
tggaccacgcagacagcactggcct

SEQ ID NO: 3496492 - DNA, 25 bp, Homo sapien
tgagcagaccccagggtcatgtgga

SEQ ID NO: 3496493 - DNA, 25 bp, Homo sapien
gggtcatgtggaccacgcagacagc

SEQ ID NO: 3496494 - DNA, 25 bp, Homo sapien
aagctgctgggtttgtgaggacctc

SEQ ID NO: 3496495 - DNA, 25 bp, Homo sapien
tgtccacaaacaaggcgttccagag

SEQ ID NO: 3496496 - DNA, 25 bp, Homo sapien
gatcagtcacaggaggaaaggcagt

SEQ ID NO: 3496497 - DNA, 25 bp, Homo sapien
cagagcaatgcacccttcagaggga

SEQ ID NO: 3496498 - DNA, 25 bp, Homo sapien
tcctcacactggatgtccaggctct

SEQ ID NO: 3496499 - DNA, 25 bp, Homo sapien
cctcacactggatgtccaggctctg

SEQ ID NO: 3496500 - DNA, 25 bp, Homo sapien
atctagcgtcgctcagctcctcaca

SEQ ID NO: 3496501 - DNA, 25 bp, Homo sapien
ggaggagctcggcccatctagcgtc

SEQ ID NO: 3496502 - DNA, 25 bp, Homo sapien
cagagggaagaggacgtcttggccg

SEQ ID NO: 3496503 - DNA, 25 bp, Homo sapien
agaggacgtcttggccgaatcccct

SEQ ID NO: 3496504 - DNA, 25 bp, Homo sapien
ggaagaggacgtcttggccgaatcc

SEQ ID NO: 3496505 - DNA, 25 bp, Homo sapien
tcttggccgaatcccctcacagttt

SEQ ID NO: 3496506 - DNA, 25 bp, Homo sapien
gcaaacacttcctcttcagcaccct

SEQ ID NO: 3496507 - DNA, 25 bp, Homo sapien
tccccacctttgtctctggagcaga

SEQ ID NO: 3496508 - DNA, 25 bp, Homo sapien
cagcctctccctgggcaaacacttc

SEQ ID NO: 3496509 - DNA, 25 bp, Homo sapien
cccacagggctgatgtttcaggagg

SEQ ID NO: 3496510 - DNA, 25 bp, Homo sapien
caacaggaccgcttgagaggctcct

SEQ ID NO: 3496511 - DNA, 25 bp, Homo sapien
tggcaaagggtggtgacatcccacg

SEQ ID NO: 3496512 - DNA, 25 bp, Homo sapien
taccaactgggaggaaagacgcaag

SEQ ID NO: 3496513 - DNA, 25 bp, Homo sapien
gccacagtgtccgaagcaagacaga

SEQ ID NO: 3496514 - DNA, 25 bp, Homo sapien
cagacccaaggccagagccgctccg

SEQ ID NO: 3496515 - DNA, 25 bp, Homo sapien
aggccagagccgctccgcgttcctt

SEQ ID NO: 3496516 - DNA, 25 bp, Homo sapien
ggccagagccgctccgcgttccttc

SEQ ID NO: 3496517 - DNA, 25 bp, Homo sapien
cccaaggccagagccgctccgcgtt

SEQ ID NO: 3496518 - DNA, 25 bp, Homo sapien
acaggttgacgatgatttgttgtag

SEQ ID NO: 3496519 - DNA, 25 bp, Homo sapien
aggtggaacaggttgacgatgattt

SEQ ID NO: 3496520 - DNA, 25 bp, Homo sapien
gagacacccctttttgctaccagac

SEQ ID NO: 3496521 - DNA, 25 bp, Homo sapien
ttttgctaccagactggagaaggtg

SEQ ID NO: 3496522 - DNA, 25 bp, Homo sapien
gaggctgtgaggacgggttttggag

SEQ ID NO: 3496523 - DNA, 25 bp, Homo sapien
ggccgtcctcaaaactttggacaca

SEQ ID NO: 3496524 - DNA, 25 bp, Homo sapien
gacgggttttggagcgccgctcggc

SEQ ID NO: 3496525 - DNA, 25 bp, Homo sapien
ttttggagcgccgctcggccgtcct

SEQ ID NO: 3496526 - DNA, 25 bp, Homo sapien
gccggcatataatcatgagagttct

SEQ ID NO: 3496527 - DNA, 25 bp, Homo sapien
ctgggcggccggcatataatcatga

SEQ ID NO: 3496528 - DNA, 25 bp, Homo sapien
taatcatgagagttcttatgcagag

SEQ ID NO: 3496529 - DNA, 25 bp, Homo sapien
gagttcttatgcagagacagtaggt

SEQ ID NO: 3496530 - DNA, 25 bp, Homo sapien
agtttcgctcttgtcagccggctgg

SEQ ID NO: 3496531 - DNA, 25 bp, Homo sapien
gagtttcgctcttgtcagccggctg

SEQ ID NO: 3496532 - DNA, 25 bp, Homo sapien
gtttcgctcttgtcagccggctgga

SEQ ID NO: 3496533 - DNA, 25 bp, Homo sapien
agtgtaactgttaacggcaacatcg

SEQ ID NO: 3496534 - DNA, 25 bp, Homo sapien
taagacgacacttgagaccgttttc

SEQ ID NO: 3496535 - DNA, 25 bp, Homo sapien
tagtcagccaatcgctaagacgaca

SEQ ID NO: 3496536 - DNA, 25 bp, Homo sapien
gcaacatcgtgtgcagtctccggct

SEQ ID NO: 3496537 - DNA, 25 bp, Homo sapien
ccggtggtcccggagcgaagctccg

SEQ ID NO: 3496538 - DNA, 25 bp, Homo sapien
gacctcgcacgaccaagaccgccca

SEQ ID NO: 3496539 - DNA, 25 bp, Homo sapien
ccggagcgaagctccgcaatggaga

SEQ ID NO: 3496540 - DNA, 25 bp, Homo sapien
aatggagagcggaggaccctccctc

SEQ ID NO: 3496541 - DNA, 25 bp, Homo sapien
gtagctcgctggaatctaaggcact

SEQ ID NO: 3496542 - DNA, 25 bp, Homo sapien
gccaggattgcttgcgtagctcgct

SEQ ID NO: 3496543 - DNA, 25 bp, Homo sapien
gctgtgggagccgttcgagtcttct

SEQ ID NO: 3496544 - DNA, 25 bp, Homo sapien
taaggcactagagggcttgacggcc

SEQ ID NO: 3496545 - DNA, 25 bp, Homo sapien
gacggcctacttcgttctcgagcca

SEQ ID NO: 3496546 - DNA, 25 bp, Homo sapien
gcgggcgtgttcgagccggctcgtg

SEQ ID NO: 3496547 - DNA, 25 bp, Homo sapien
cagaacgggttgaacgtgtcgacaa

SEQ ID NO: 3496548 - DNA, 25 bp, Homo sapien
cctggagacccagagcgagacggcc

SEQ ID NO: 3496549 - DNA, 25 bp, Homo sapien
ggctcgtttgcgccgagctcgcgac

SEQ ID NO: 3496550 - DNA, 25 bp, Homo sapien
ggcctcgtcccgagtgttctgagcg

SEQ ID NO: 3496551 - DNA, 25 bp, Homo sapien
tggctgccgcctttgtttcgtggga

SEQ ID NO: 3496552 - DNA, 25 bp, Homo sapien
cgactctaggcgaccttggtagagg

SEQ ID NO: 3496553 - DNA, 25 bp, Homo sapien
gagtatatggaagtattcccacccc

SEQ ID NO: 3496554 - DNA, 25 bp, Homo sapien
cagttcacccactgtggaattggga

SEQ ID NO: 3496555 - DNA, 25 bp, Homo sapien
tcctggccgactcgagtgtgccttt

SEQ ID NO: 3496556 - DNA, 25 bp, Homo sapien
cagttttatataccgccccagagct

SEQ ID NO: 3496557 - DNA, 25 bp, Homo sapien
tctgtcttgggatgctgttaatcta

SEQ ID NO: 3496558 - DNA, 25 bp, Homo sapien
cttctgtcttgggatgctgttaatc

SEQ ID NO: 3496559 - DNA, 25 bp, Homo sapien
tgtcttgggatgctgttaatctata

SEQ ID NO: 3496560 - DNA, 25 bp, Homo sapien
tcttgggatgctgttaatctataac

SEQ ID NO: 3496561 - DNA, 25 bp, Homo sapien
gaaggagccgccccgaacgcgcgag

SEQ ID NO: 3496562 - DNA, 25 bp, Homo sapien
ccggagaggactcgcggcgccccct

SEQ ID NO: 3496563 - DNA, 25 bp, Homo sapien
gaaacgcagccagcgcggaaccgga

SEQ ID NO: 3496564 - DNA, 25 bp, Homo sapien
gggcaggaaacgcagccagcgcgga

SEQ ID NO: 3496565 - DNA, 25 bp, Homo sapien
ttgtctgactttatgcaaacactgc

SEQ ID NO: 3496566 - DNA, 25 bp, Homo sapien
gccaccgccagcgtactccggacct

SEQ ID NO: 3496567 - DNA, 25 bp, Homo sapien
ctctcgtcttgtctgactttatgca

SEQ ID NO: 3496568 - DNA, 25 bp, Homo sapien
tctgactttatgcaaacactgccac

SEQ ID NO: 3496569 - DNA, 25 bp, Homo sapien
ccggtggcatttgggatgttcaaga

SEQ ID NO: 3496570 - DNA, 25 bp, Homo sapien
gttccggtggcatttgggatgttca

SEQ ID NO: 3496571 - DNA, 25 bp, Homo sapien
gatcccatctgtgcccgacaagggc

SEQ ID NO: 3496572 - DNA, 25 bp, Homo sapien
tggcatttgggatgttcaagacagt

SEQ ID NO: 3496573 - DNA, 25 bp, Homo sapien
ctccttcctgcatccggcacctcca

SEQ ID NO: 3496574 - DNA, 25 bp, Homo sapien
tcctgcatccggcacctccatgtcc

SEQ ID NO: 3496575 - DNA, 25 bp, Homo sapien
tccttcctgcatccggcacctccat

SEQ ID NO: 3496576 - DNA, 25 bp, Homo sapien
cttcctgcatccggcacctccatgt

SEQ ID NO: 3496577 - DNA, 25 bp, Homo sapien
gccggggtcatccggtgggcgtggc

SEQ ID NO: 3496578 - DNA, 25 bp, Homo sapien
gttcagcttccgcagcttgtgctgc

SEQ ID NO: 3496579 - DNA, 25 bp, Homo sapien
tgccggatctcacgcaccaacgtgt

SEQ ID NO: 3496580 - DNA, 25 bp, Homo sapien
cgcaccaacgtgtagaaggcatcct

SEQ ID NO: 3496581 - DNA, 25 bp, Homo sapien
cagccggggccactctcatcaggag

SEQ ID NO: 3496582 - DNA, 25 bp, Homo sapien
accacacacacgggaagctggactc

SEQ ID NO: 3496583 - DNA, 25 bp, Homo sapien
agcagcccctcaaaggtcagggtgg

SEQ ID NO: 3496584 - DNA, 25 bp, Homo sapien
tggccatctcgaagtgcccagggcc

SEQ ID NO: 3496585 - DNA, 25 bp, Homo sapien
ccctgctgtgggatcaagccttgcc

SEQ ID NO: 3496586 - DNA, 25 bp, Homo sapien
tggagctagagccagagcggctgcc

SEQ ID NO: 3496587 - DNA, 25 bp, Homo sapien
atgccgtagcttcgggcgaggtcct

SEQ ID NO: 3496588 - DNA, 25 bp, Homo sapien
tcatccgagtccttcacccgtttga

SEQ ID NO: 3496589 - DNA, 25 bp, Homo sapien
attccacagtgcgtgcagccaggtc

SEQ ID NO: 3496590 - DNA, 25 bp, Homo sapien
ggtcctgagcctgccgagattccac

SEQ ID NO: 3496591 - DNA, 25 bp, Homo sapien
tggccggcggtatccaggatgtcca

SEQ ID NO: 3496592 - DNA, 25 bp, Homo sapien
ctgtactggtggatgtcctcaaaag

SEQ ID NO: 3496593 - DNA, 25 bp, Homo sapien
caaaagacttggtgttgttgatggc

SEQ ID NO: 3496594 - DNA, 25 bp, Homo sapien
ggtgcgcatgtactggtcccgcatg

SEQ ID NO: 3496595 - DNA, 25 bp, Homo sapien
tagtggggtcgtattcgtccacaaa

SEQ ID NO: 3496596 - DNA, 25 bp, Homo sapien
cacaaaatggttctggatcagctgg

SEQ ID NO: 3496597 - DNA, 25 bp, Homo sapien
ccaccaccagcttatattccgtcat

SEQ ID NO: 3496598 - DNA, 25 bp, Homo sapien
ctctatagtggggtcgtattcgtcc

SEQ ID NO: 3496599 - DNA, 25 bp, Homo sapien
cggggtcctcctacagggtctcctg

SEQ ID NO: 3496600 - DNA, 25 bp, Homo sapien
ggtcctcctacagggtctcctgccc

SEQ ID NO: 3496601 - DNA, 25 bp, Homo sapien
gcaacccagcgtgcgggagggctgt

SEQ ID NO: 3496602 - DNA, 25 bp, Homo sapien
gtgcgggagggctgtcgcctcgccc

SEQ ID NO: 3496603 - DNA, 25 bp, Homo sapien
ccagcgtgcgggagggctgtcgcct

SEQ ID NO: 3496604 - DNA, 25 bp, Homo sapien
cagctgcaacccagcgtgcgggagg

SEQ ID NO: 3496605 - DNA, 25 bp, Homo sapien
agccctcaaaggcagggctgacagc

SEQ ID NO: 3496606 - DNA, 25 bp, Homo sapien
tgatgggaaaagggacccagccctc

SEQ ID NO: 3496607 - DNA, 25 bp, Homo sapien
gggacccagccctcaaaggcagggc

SEQ ID NO: 3496608 - DNA, 25 bp, Homo sapien
ccctcaaaggcagggctgacagctg

SEQ ID NO: 3496609 - DNA, 25 bp, Homo sapien
gttcacaggcgcgactgcccccggg

SEQ ID NO: 3496610 - DNA, 25 bp, Homo sapien
gggggcgcgcggttcgccccgcgca

SEQ ID NO: 3496611 - DNA, 25 bp, Homo sapien
cgcggcgggtgcggctcgggttgcg

SEQ ID NO: 3496612 - DNA, 25 bp, Homo sapien
gcgcggttcgccccgcgcatgggct

SEQ ID NO: 3496613 - DNA, 25 bp, Homo sapien
taaaccgtacccacaagttgccaca

SEQ ID NO: 3496614 - DNA, 25 bp, Homo sapien
tctttctcgggcctgcgtggcaggc

SEQ ID NO: 3496615 - DNA, 25 bp, Homo sapien
ccaagcacatagacgcacatcctag

SEQ ID NO: 3496616 - DNA, 25 bp, Homo sapien
aggttccaacgctgcagaagctcag

SEQ ID NO: 3496617 - DNA, 25 bp, Homo sapien
cgcctgccgtccgtccaccgcgcgg

SEQ ID NO: 3496618 - DNA, 25 bp, Homo sapien
gccgtccgtccaccgcgcggtcgca

SEQ ID NO: 3496619 - DNA, 25 bp, Homo sapien
ctgccgtccgtccaccgcgcggtcg

SEQ ID NO: 3496620 - DNA, 25 bp, Homo sapien
gtcccgcctgccgtccgtccaccgc

SEQ ID NO: 3496621 - DNA, 25 bp, Homo sapien
gacacgcatgaacgcgagtgagaag

SEQ ID NO: 3496622 - DNA, 25 bp, Homo sapien
gtgagaagcggcgactggacggcgg

SEQ ID NO: 3496623 - DNA, 25 bp, Homo sapien
ctccggcgtccggtgtgtgtttcct

SEQ ID NO: 3496624 - DNA, 25 bp, Homo sapien
ggtgcttccttttgccgtcggcctc

SEQ ID NO: 3496625 - DNA, 25 bp, Homo sapien
cttccaaccgaaggtcaggacggca

SEQ ID NO: 3496626 - DNA, 25 bp, Homo sapien
agcctccagcagagaccgcctttac

SEQ ID NO: 3496627 - DNA, 25 bp, Homo sapien
ttccaaccgaaggtcaggacggcag

SEQ ID NO: 3496628 - DNA, 25 bp, Homo sapien
aagcgccaggatcgcgaggaaacgc

SEQ ID NO: 3496629 - DNA, 25 bp, Homo sapien
gccaggatcgcgaggaaacgcgaca

SEQ ID NO: 3496630 - DNA, 25 bp, Homo sapien
atcgcgaggaaacgcgacacgtgca

SEQ ID NO: 3496631 - DNA, 25 bp, Homo sapien
cgtgggaagcgccaggatcgcgagg

SEQ ID NO: 3496632 - DNA, 25 bp, Homo sapien
ggcccaggcacggagccgcaggaag

SEQ ID NO: 3496633 - DNA, 25 bp, Homo sapien
cgacggcccaggcacggagccgcag

SEQ ID NO: 3496634 - DNA, 25 bp, Homo sapien
cgcgacggcccaggcacggagccgc

SEQ ID NO: 3496635 - DNA, 25 bp, Homo sapien
acggcccaggcacggagccgcagga

SEQ ID NO: 3496636 - DNA, 25 bp, Homo sapien
agggagactcagaggcaatgaccca

SEQ ID NO: 3496637 - DNA, 25 bp, Homo sapien
gaaagggctccctgtcaggagacag

SEQ ID NO: 3496638 - DNA, 25 bp, Homo sapien
tcagaggcaatgacccagggtgctc

SEQ ID NO: 3496639 - DNA, 25 bp, Homo sapien
tggccctgcactgaaagggctccct

SEQ ID NO: 3496640 - DNA, 25 bp, Homo sapien
acagaaatgcggtttactttgtagg

SEQ ID NO: 3496641 - DNA, 25 bp, Homo sapien
taggccacgttggttcaataaatga

SEQ ID NO: 3496642 - DNA, 25 bp, Homo sapien
tgtaggccacgttggttcaataaat

SEQ ID NO: 3496643 - DNA, 25 bp, Homo sapien
cagaaatgcggtttactttgtaggc

SEQ ID NO: 3496644 - DNA, 25 bp, Homo sapien
gcgccgcggcaggtgtccgcggtga

SEQ ID NO: 3496645 - DNA, 25 bp, Homo sapien
tgtccgcggtgaccggcaggcagct

SEQ ID NO: 3496646 - DNA, 25 bp, Homo sapien
ggaagcggaagccgaatctgctctc

SEQ ID NO: 3496647 - DNA, 25 bp, Homo sapien
cgaatctgctctccgccgtgttctg

SEQ ID NO: 3496648 - DNA, 25 bp, Homo sapien
agggggcagctacggtccacgctct

SEQ ID NO: 3496649 - DNA, 25 bp, Homo sapien
gggcagctacggtccacgctcttcc

SEQ ID NO: 3496650 - DNA, 25 bp, Homo sapien
ggggcagctacggtccacgctcttc

SEQ ID NO: 3496651 - DNA, 25 bp, Homo sapien
cagggggcagctacggtccacgctc

SEQ ID NO: 3496652 - DNA, 25 bp, Homo sapien
ggcgcgggggctgagaggcgcgcgg

SEQ ID NO: 3496653 - DNA, 25 bp, Homo sapien
ctggggggcgcgggggctgagaggc

SEQ ID NO: 3496654 - DNA, 25 bp, Homo sapien
ggggcgcgggggctgagaggcgcgc

SEQ ID NO: 3496655 - DNA, 25 bp, Homo sapien
cgcgggggctgagaggcgcgcgggg

SEQ ID NO: 3496656 - DNA, 25 bp, Homo sapien
ccgaactcggtgttctttctggagc

SEQ ID NO: 3496657 - DNA, 25 bp, Homo sapien
tcccgcgcgtggaagagcttccccg

SEQ ID NO: 3496658 - DNA, 25 bp, Homo sapien
ttccccgagctcactgggggcagca

SEQ ID NO: 3496659 - DNA, 25 bp, Homo sapien
ttctggagccgacagtcctccaggc

SEQ ID NO: 3496660 - DNA, 25 bp, Homo sapien
ggatacgagggaccgtttctgctgg

SEQ ID NO: 3496661 - DNA, 25 bp, Homo sapien
gaaaggcggccctagagggctccgc

SEQ ID NO: 3496662 - DNA, 25 bp, Homo sapien
ccgcggggcgtactggaggaccagg

SEQ ID NO: 3496663 - DNA, 25 bp, Homo sapien
tccgtcctagcgaggggatacgagg

SEQ ID NO: 3496664 - DNA, 25 bp, Homo sapien
cggcctcagggagcgggaagcggtc

SEQ ID NO: 3496665 - DNA, 25 bp, Homo sapien
gcgcggcggcttgcgggtgtcggcg

SEQ ID NO: 3496666 - DNA, 25 bp, Homo sapien
cgtgggatccggtgctcactgagga

SEQ ID NO: 3496667 - DNA, 25 bp, Homo sapien
caagtcggtgccgtcggcgaagacc

SEQ ID NO: 3496668 - DNA, 25 bp, Homo sapien
gggctcaggagcagcgtcgcgcagc

SEQ ID NO: 3496669 - DNA, 25 bp, Homo sapien
gcttcttggcgctgcgggtcgcctc

SEQ ID NO: 3496670 - DNA, 25 bp, Homo sapien
cagcgtcgcgcagccgcggatggag

SEQ ID NO: 3496671 - DNA, 25 bp, Homo sapien
tcgaggacgcgcgcagcggcttctt

SEQ ID NO: 3496672 - DNA, 25 bp, Homo sapien
gcgggaagcggtacaggcgctccgg

SEQ ID NO: 3496673 - DNA, 25 bp, Homo sapien
cccggcgggaagcggtacaggcgct

SEQ ID NO: 3496674 - DNA, 25 bp, Homo sapien
ggaagcggtacaggcgctccgggaa

SEQ ID NO: 3496675 - DNA, 25 bp, Homo sapien
ccagcagcgtgcccggcgggaagcg

SEQ ID NO: 3496676 - DNA, 25 bp, Homo sapien
cagccacgatcttcaggcctgtcgg

SEQ ID NO: 3496677 - DNA, 25 bp, Homo sapien
gaagatgcggacgaacttctcccgg

SEQ ID NO: 3496678 - DNA, 25 bp, Homo sapien
tgcttcagcaccatgccgctcaggt

SEQ ID NO: 3496679 - DNA, 25 bp, Homo sapien
tgctctcctgcgacgggttgaagat

SEQ ID NO: 3496680 - DNA, 25 bp, Homo sapien
aggagacgctgtgaggagatgcggc

SEQ ID NO: 3496681 - DNA, 25 bp, Homo sapien
gacaggaccggctcgccgtgcctgg

SEQ ID NO: 3496682 - DNA, 25 bp, Homo sapien
agggctggggcgacaggaccggctc

SEQ ID NO: 3496683 - DNA, 25 bp, Homo sapien
aggagttccgggctccagtggtcgg

SEQ ID NO: 3496684 - DNA, 25 bp, Homo sapien
gccgtgcctgggtgagtgggttttc

SEQ ID NO: 3496685 - DNA, 25 bp, Homo sapien
gagagcagcgcttttggggagggga

SEQ ID NO: 3496686 - DNA, 25 bp, Homo sapien
ttccccgtgaggtcagaacaggcct

SEQ ID NO: 3496687 - DNA, 25 bp, Homo sapien
ctcgaatggagtccccaccggatgt

SEQ ID NO: 3496688 - DNA, 25 bp, Homo sapien
gaatggagtccccaccggatgttcc

SEQ ID NO: 3496689 - DNA, 25 bp, Homo sapien
cctccagggctctgagtgagatcac

SEQ ID NO: 3496690 - DNA, 25 bp, Homo sapien
cacctccagggctctgagtgagatc

SEQ ID NO: 3496691 - DNA, 25 bp, Homo sapien
tccagggctctgagtgagatcacag

SEQ ID NO: 3496692 - DNA, 25 bp, Homo sapien
ccagggctctgagtgagatcacagc

SEQ ID NO: 3496693 - DNA, 25 bp, Homo sapien
ctgcaccagcgcttgctcggaggaa

SEQ ID NO: 3496694 - DNA, 25 bp, Homo sapien
cctgcaccagcgcttgctcggagga

SEQ ID NO: 3496695 - DNA, 25 bp, Homo sapien
tgcaccagcgcttgctcggaggaag

SEQ ID NO: 3496696 - DNA, 25 bp, Homo sapien
tggtcccggggcgggtgccctatca

SEQ ID NO: 3496697 - DNA, 25 bp, Homo sapien
gatgccgctcggaatgctttccaga

SEQ ID NO: 3496698 - DNA, 25 bp, Homo sapien
gctgctggtgttcagacagggcagg

SEQ ID NO: 3496699 - DNA, 25 bp, Homo sapien
cacggtcttgtgatgccgctcggaa

SEQ ID NO: 3496700 - DNA, 25 bp, Homo sapien
gagccccactccacggtcttgtgat

SEQ ID NO: 3496701 - DNA, 25 bp, Homo sapien
cgtccagcctcacaaggcagtgcag

SEQ ID NO: 3496702 - DNA, 25 bp, Homo sapien
agtgatggctgcctcaaccccaacg

SEQ ID NO: 3496703 - DNA, 25 bp, Homo sapien
tgtggaccacgctctgcttgatggc

SEQ ID NO: 3496704 - DNA, 25 bp, Homo sapien
ccagcctcacaaggcagtgcagcag

SEQ ID NO: 3496705 - DNA, 25 bp, Homo sapien
ccaaggtgagccctcccttctggcc

SEQ ID NO: 3496706 - DNA, 25 bp, Homo sapien
ccttctggcccctggggagtccctg

SEQ ID NO: 3496707 - DNA, 25 bp, Homo sapien
ctggcccctggggagtccctgctct

SEQ ID NO: 3496708 - DNA, 25 bp, Homo sapien
gggagtccctgctctgtgcagttac

SEQ ID NO: 3496709 - DNA, 25 bp, Homo sapien
cggcgggcaacgctgttccaatcca

SEQ ID NO: 3496710 - DNA, 25 bp, Homo sapien
gataccggcgggcaacgctgttcca

SEQ ID NO: 3496711 - DNA, 25 bp, Homo sapien
accggcgggcaacgctgttccaatc

SEQ ID NO: 3496712 - DNA, 25 bp, Homo sapien
gcgggcaacgctgttccaatccacg

SEQ ID NO: 3496713 - DNA, 25 bp, Homo sapien
cagaccacacacgtgggaggcctag

SEQ ID NO: 3496714 - DNA, 25 bp, Homo sapien
cacacacgtgggaggcctagctcac

SEQ ID NO: 3496715 - DNA, 25 bp, Homo sapien
gctccagataccagaccacacacgt

SEQ ID NO: 3496716 - DNA, 25 bp, Homo sapien
cccctcccgcagggctccagatacc

SEQ ID NO: 3496717 - DNA, 25 bp, Homo sapien
agagaggtcgcttgggtccatcaga

SEQ ID NO: 3496718 - DNA, 25 bp, Homo sapien
atgttttcagagaggtcgcttgggt

SEQ ID NO: 3496719 - DNA, 25 bp, Homo sapien
tcgcttgggtccatcagagtctctg

SEQ ID NO: 3496720 - DNA, 25 bp, Homo sapien
gaggtcgcttgggtccatcagagtc

SEQ ID NO: 3496721 - DNA, 25 bp, Homo sapien
ctcttggagcgtgcgggtggtctgc

SEQ ID NO: 3496722 - DNA, 25 bp, Homo sapien
ccagtctgggatcgtagcatgcggc

SEQ ID NO: 3496723 - DNA, 25 bp, Homo sapien
tccatctcttggagcgtgcgggtgg

SEQ ID NO: 3496724 - DNA, 25 bp, Homo sapien
tagcatgcggcccacccacgaggag

SEQ ID NO: 3496725 - DNA, 25 bp, Homo sapien
gcttctggacctggttctgcaggag

SEQ ID NO: 3496726 - DNA, 25 bp, Homo sapien
tctgttccttcaactcctggatcag

SEQ ID NO: 3496727 - DNA, 25 bp, Homo sapien
cactgggctcgctccttctgttcct

SEQ ID NO: 3496728 - DNA, 25 bp, Homo sapien
ttcaactcctggatcagcttctgga

SEQ ID NO: 3496729 - DNA, 25 bp, Homo sapien
gtcctcgccattctggatggcccac

SEQ ID NO: 3496730 - DNA, 25 bp, Homo sapien
cacagcagccgcagtgtgcgagggt

SEQ ID NO: 3496731 - DNA, 25 bp, Homo sapien
ctggatggcccaccgcaaggcctgg

SEQ ID NO: 3496732 - DNA, 25 bp, Homo sapien
ggatgtggcagagccgggcgtcctc

SEQ ID NO: 3496733 - DNA, 25 bp, Homo sapien
tggcaggcacgtgggagtctcgggg

SEQ ID NO: 3496734 - DNA, 25 bp, Homo sapien
gtcggcagagcagaccaccggtgtg

SEQ ID NO: 3496735 - DNA, 25 bp, Homo sapien
caggtgcgcctgctggaggtcccag

SEQ ID NO: 3496736 - DNA, 25 bp, Homo sapien
aggtgaccactgaccgactcttgct

SEQ ID NO: 3496737 - DNA, 25 bp, Homo sapien
ggccattctcaatgttcttcgggag

SEQ ID NO: 3496738 - DNA, 25 bp, Homo sapien
tctttaacctcctggccagacttgg

SEQ ID NO: 3496739 - DNA, 25 bp, Homo sapien
ggacaggagagcctcttcctcggtt

SEQ ID NO: 3496740 - DNA, 25 bp, Homo sapien
gagagcctcttcctcggtttcttta

SEQ ID NO: 3496741 - DNA, 25 bp, Homo sapien
gagcgttgctctctgaagggaccca

SEQ ID NO: 3496742 - DNA, 25 bp, Homo sapien
agcgttgctctctgaagggacccac

SEQ ID NO: 3496743 - DNA, 25 bp, Homo sapien
agagcgttgctctctgaagggaccc

SEQ ID NO: 3496744 - DNA, 25 bp, Homo sapien
tgggtgtccacacccgtgtgtttct

SEQ ID NO: 3496745 - DNA, 25 bp, Homo sapien
tgtgggtgtccacacccgtgtgttt

SEQ ID NO: 3496746 - DNA, 25 bp, Homo sapien
ccgtgtgtttctgaccaggctggcg

SEQ ID NO: 3496747 - DNA, 25 bp, Homo sapien
tccacacccgtgtgtttctgaccag

SEQ ID NO: 3496748 - DNA, 25 bp, Homo sapien
atggataccagcacccagaaggggt

SEQ ID NO: 3496749 - DNA, 25 bp, Homo sapien
ggaagggctgtataccgttgccatg

SEQ ID NO: 3496750 - DNA, 25 bp, Homo sapien
tgaggcccgacctccaagcaggcct

SEQ ID NO: 3496751 - DNA, 25 bp, Homo sapien
gctgtttgttaccaggagcctccag

SEQ ID NO: 3496752 - DNA, 25 bp, Homo sapien
tgcccgcgggccgcagccaccgcat

SEQ ID NO: 3496753 - DNA, 25 bp, Homo sapien
cgcctgcccgcgggccgcagccacc

SEQ ID NO: 3496754 - DNA, 25 bp, Homo sapien
cccgacgcctgcccgcgggccgcag

SEQ ID NO: 3496755 - DNA, 25 bp, Homo sapien
ctgcccgcgggccgcagccaccgca

SEQ ID NO: 3496756 - DNA, 25 bp, Homo sapien
ggggcggggactgcggctcggcgcc

SEQ ID NO: 3496757 - DNA, 25 bp, Homo sapien
gggcggggactgcggctcggcgccc

SEQ ID NO: 3496758 - DNA, 25 bp, Homo sapien
gtgggggcggggactgcggctcggc

SEQ ID NO: 3496759 - DNA, 25 bp, Homo sapien
gaggtgggggcggggactgcggctc

SEQ ID NO: 3496760 - DNA, 25 bp, Homo sapien
gaccagcctgcgataggagtaggca

SEQ ID NO: 3496761 - DNA, 25 bp, Homo sapien
ttaatgattcgccttgttccgggag

SEQ ID NO: 3496762 - DNA, 25 bp, Homo sapien
cagccgtttctagggcaggccaaga

SEQ ID NO: 3496763 - DNA, 25 bp, Homo sapien
ggaagtggtcatcgcactagcccaa

SEQ ID NO: 3496764 - DNA, 25 bp, Homo sapien
cctagtccttgccaggtcgccagca

SEQ ID NO: 3496765 - DNA, 25 bp, Homo sapien
ggcgtagccagctcggaacttgcca

SEQ ID NO: 3496766 - DNA, 25 bp, Homo sapien
gcagtgggggactgccctagtcctt

SEQ ID NO: 3496767 - DNA, 25 bp, Homo sapien
ccctggagaagcatggggcgtagcc

SEQ ID NO: 3496768 - DNA, 25 bp, Homo sapien
tggcccacagtaagtcgccgtctgg

SEQ ID NO: 3496769 - DNA, 25 bp, Homo sapien
agtgcagcggcgtaatctcgtctcg

SEQ ID NO: 3496770 - DNA, 25 bp, Homo sapien
caggaggctccaaacgctggtgtca

SEQ ID NO: 3496771 - DNA, 25 bp, Homo sapien
cattcaaagctgttccatgggccaa

SEQ ID NO: 3496772 - DNA, 25 bp, Homo sapien
ccggtcctgattttaacagtagact

SEQ ID NO: 3496773 - DNA, 25 bp, Homo sapien
gctcggacacgacccggtcctgatt

SEQ ID NO: 3496774 - DNA, 25 bp, Homo sapien
agacagggcctgtaggctcggacac

SEQ ID NO: 3496775 - DNA, 25 bp, Homo sapien
aggctgctggaggatccacccgctg

SEQ ID NO: 3496776 - DNA, 25 bp, Homo sapien
gctgaagatatgaccacacctgtgc

SEQ ID NO: 3496777 - DNA, 25 bp, Homo sapien
atctgtcactctcttcccgtaggaa

SEQ ID NO: 3496778 - DNA, 25 bp, Homo sapien
tcctgttggctgaagatatgaccac

SEQ ID NO: 3496779 - DNA, 25 bp, Homo sapien
tgtcactctcttcccgtaggaagtc

SEQ ID NO: 3496780 - DNA, 25 bp, Homo sapien
caagagggtatctggcccagcctca

SEQ ID NO: 3496781 - DNA, 25 bp, Homo sapien
gagggcagcaaagcccccgaatgat

SEQ ID NO: 3496782 - DNA, 25 bp, Homo sapien
acggtatccagctgccctcgcgtcc

SEQ ID NO: 3496783 - DNA, 25 bp, Homo sapien
aggcacaccccgtccatagggcacc

SEQ ID NO: 3496784 - DNA, 25 bp, Homo sapien
caggcacagatcagccgctgtcaca

SEQ ID NO: 3496785 - DNA, 25 bp, Homo sapien
ggtcgcgctgcccaggcacagatca

SEQ ID NO: 3496786 - DNA, 25 bp, Homo sapien
ctgtcacacgcacagtgggtctggg

SEQ ID NO: 3496787 - DNA, 25 bp, Homo sapien
gcagcgcagtgtgcggtgggcaggg

SEQ ID NO: 3496788 - DNA, 25 bp, Homo sapien
cagctgcggccgctggcaccctctc

SEQ ID NO: 3496789 - DNA, 25 bp, Homo sapien
gccggctctcggcccaacttcagct

SEQ ID NO: 3496790 - DNA, 25 bp, Homo sapien
tgcggccgctggcaccctctcgccc

SEQ ID NO: 3496791 - DNA, 25 bp, Homo sapien
ttcagctgcggccgctggcaccctc

SEQ ID NO: 3496792 - DNA, 25 bp, Homo sapien
ttagtcattagcttttaatattact

SEQ ID NO: 3496793 - DNA, 25 bp, Homo sapien
aaatattagtcattagcttttaata

SEQ ID NO: 3496794 - DNA, 25 bp, Homo sapien
tattagtcattagcttttaatatta

SEQ ID NO: 3496795 - DNA, 25 bp, Homo sapien
taaatattagtcattagcttttaat

SEQ ID NO: 3496796 - DNA, 25 bp, Homo sapien
gccctcggtgagtcgcagtggccca

SEQ ID NO: 3496797 - DNA, 25 bp, Homo sapien
tgcagcaaattgacctgaaagagaa

SEQ ID NO: 3496798 - DNA, 25 bp, Homo sapien
tctttgcttcggctgcctaagaggg

SEQ ID NO: 3496799 - DNA, 25 bp, Homo sapien
tatcagcgcacctaggcgctcaggg

SEQ ID NO: 3496800 - DNA, 25 bp, Homo sapien
ggcgtcggttctcaagctcgtcctt

SEQ ID NO: 3496801 - DNA, 25 bp, Homo sapien
cttctgcgcggcatcctcaggacga

SEQ ID NO: 3496802 - DNA, 25 bp, Homo sapien
tcatttctccaaaagtccgcagcaa

SEQ ID NO: 3496803 - DNA, 25 bp, Homo sapien
agcatctaccgggagccggcacttc

SEQ ID NO: 3496804 - DNA, 25 bp, Homo sapien
tttgggagagagctgtgacttcgtt

SEQ ID NO: 3496805 - DNA, 25 bp, Homo sapien
actgggaggcccgtggcctgcgggc

SEQ ID NO: 3496806 - DNA, 25 bp, Homo sapien
ggcggacgtcctgggcttgcgagga

SEQ ID NO: 3496807 - DNA, 25 bp, Homo sapien
cgagtccgccctgccgcgtttggga

SEQ ID NO: 3496808 - DNA, 25 bp, Homo sapien
cgcaccagttctggcgttgccaggg

SEQ ID NO: 3496809 - DNA, 25 bp, Homo sapien
cgccaggtgactctgtccttgagat

SEQ ID NO: 3496810 - DNA, 25 bp, Homo sapien
cacattggatgccagagactctggg

SEQ ID NO: 3496811 - DNA, 25 bp, Homo sapien
tcatctgtagtaggtctccgcacca

SEQ ID NO: 3496812 - DNA, 25 bp, Homo sapien
agcaaacagtgcgccaagcagcagc

SEQ ID NO: 3496813 - DNA, 25 bp, Homo sapien
gcaaacagtgcgccaagcagcagct

SEQ ID NO: 3496814 - DNA, 25 bp, Homo sapien
aaacagtgcgccaagcagcagctgg

SEQ ID NO: 3496815 - DNA, 25 bp, Homo sapien
caaacagtgcgccaagcagcagctg

SEQ ID NO: 3496816 - DNA, 25 bp, Homo sapien
cagtggagaacaccaaagcgagcga

SEQ ID NO: 3496817 - DNA, 25 bp, Homo sapien
caaaaaacattctgaggctgcccac

SEQ ID NO: 3496818 - DNA, 25 bp, Homo sapien
aggcttttgctctgcgacggctgcg

SEQ ID NO: 3496819 - DNA, 25 bp, Homo sapien
gattctgtcctagatcccagtggag

SEQ ID NO: 3496820 - DNA, 25 bp, Homo sapien
tgacctgtgtgactgtcgtggagcc

SEQ ID NO: 3496821 - DNA, 25 bp, Homo sapien
tctgggacgcgctctgaatccaggg

SEQ ID NO: 3496822 - DNA, 25 bp, Homo sapien
tcgaggtcagcgtcaccatcagtgg

SEQ ID NO: 3496823 - DNA, 25 bp, Homo sapien
ccttctttggctctgaggagcggac

SEQ ID NO: 3496824 - DNA, 25 bp, Homo sapien
gatgatttctcaagcgacgccgttt

SEQ ID NO: 3496825 - DNA, 25 bp, Homo sapien
tggaggccggacacgtctttgatga

SEQ ID NO: 3496826 - DNA, 25 bp, Homo sapien
ttgatgcacgatgaagacccttcgc

SEQ ID NO: 3496827 - DNA, 25 bp, Homo sapien
gacctggacctggattatggcgact

SEQ ID NO: 3496828 - DNA, 25 bp, Homo sapien
agctgtcgggagtggcgggaatcgg

SEQ ID NO: 3496829 - DNA, 25 bp, Homo sapien
gaggccaggcaatcacgggctatgc

SEQ ID NO: 3496830 - DNA, 25 bp, Homo sapien
acatgcgcaggcacaagaaaccaga

SEQ ID NO: 3496831 - DNA, 25 bp, Homo sapien
ccaacctggtgaaggcgtacgtgga

SEQ ID NO: 3496832 - DNA, 25 bp, Homo sapien
ctttttattagactgggcggccgcg

SEQ ID NO: 3496833 - DNA, 25 bp, Homo sapien
ttattagactgggcggccgcggcca

SEQ ID NO: 3496834 - DNA, 25 bp, Homo sapien
tgctccagctttctggagttctcat

SEQ ID NO: 3496835 - DNA, 25 bp, Homo sapien
gctccagctttctggagttctcatt

SEQ ID NO: 3496836 - DNA, 25 bp, Homo sapien
cataaggaagcactcgatgtcgtca

SEQ ID NO: 3496837 - DNA, 25 bp, Homo sapien
gctgctccagctccataaggaagca

SEQ ID NO: 3496838 - DNA, 25 bp, Homo sapien
tgtcgtcatagaggctgttggcgct

SEQ ID NO: 3496839 - DNA, 25 bp, Homo sapien
ggaagacacaccctcacgctgcgtg

SEQ ID NO: 3496840 - DNA, 25 bp, Homo sapien
ggcatcaggcgtctgtcagtgggcc

SEQ ID NO: 3496841 - DNA, 25 bp, Homo sapien
gtcagtgacccggtgtatggcctcc

SEQ ID NO: 3496842 - DNA, 25 bp, Homo sapien
tctccgaggctctgagggcatcagg

SEQ ID NO: 3496843 - DNA, 25 bp, Homo sapien
gtctgtcagtgacccggcgtgtgtc

SEQ ID NO: 3496844 - DNA, 25 bp, Homo sapien
cacggcgctgccgtgcccggaattc

SEQ ID NO: 3496845 - DNA, 25 bp, Homo sapien
cccgaagcccaggtagatggtatag

SEQ ID NO: 3496846 - DNA, 25 bp, Homo sapien
tatagcgtggggagccacggcgctg

SEQ ID NO: 3496847 - DNA, 25 bp, Homo sapien
aagcccaggtagatggtatagcgtg

SEQ ID NO: 3496848 - DNA, 25 bp, Homo sapien
gactctgctgagtacctggcaggca

SEQ ID NO: 3496849 - DNA, 25 bp, Homo sapien
tgctcccaaggacccctggagacag

SEQ ID NO: 3496850 - DNA, 25 bp, Homo sapien
tggcaggcaggtgctcccaaggacc

SEQ ID NO: 3496851 - DNA, 25 bp, Homo sapien
gaagaaggggactctgctgagtacc

SEQ ID NO: 3496852 - DNA, 25 bp, Homo sapien
tgcttctggtccgggagctcggcag

SEQ ID NO: 3496853 - DNA, 25 bp, Homo sapien
gggtgtcacagttccgaggcagcag

SEQ ID NO: 3496854 - DNA, 25 bp, Homo sapien
ccgtataggaacgtgcagctcgggt

SEQ ID NO: 3496855 - DNA, 25 bp, Homo sapien
agtacaccttgcacttgcccatgcg

SEQ ID NO: 3496856 - DNA, 25 bp, Homo sapien
acgtccagcgcccctgggctgggct

SEQ ID NO: 3496857 - DNA, 25 bp, Homo sapien
gatggtcacgtccagcgcccctggg

SEQ ID NO: 3496858 - DNA, 25 bp, Homo sapien
gagggtgacaggtacggctctgcct

SEQ ID NO: 3496859 - DNA, 25 bp, Homo sapien
ttgcaccgcggtgcaggcgcttggg

SEQ ID NO: 3496860 - DNA, 25 bp, Homo sapien
cttgcaccgcggtgcaggcgcttgg

SEQ ID NO: 3496861 - DNA, 25 bp, Homo sapien
gctctgcctggtgcggggactctgg

SEQ ID NO: 3496862 - DNA, 25 bp, Homo sapien
gaagggaatcctgtgctggcacctc

SEQ ID NO: 3496863 - DNA, 25 bp, Homo sapien
ctggcacctcatccctagcctctcc

SEQ ID NO: 3496864 - DNA, 25 bp, Homo sapien
ctgcatccggaagggaatcctgtgc

SEQ ID NO: 3496865 - DNA, 25 bp, Homo sapien
tcctgtgctggcacctcatccctag

SEQ ID NO: 3496866 - DNA, 25 bp, Homo sapien
tgtcgttagtgccgcgggctggggc

SEQ ID NO: 3496867 - DNA, 25 bp, Homo sapien
ctgtcgttagtgccgcgggctgggg

SEQ ID NO: 3496868 - DNA, 25 bp, Homo sapien
tcgttagtgccgcgggctggggccc

SEQ ID NO: 3496869 - DNA, 25 bp, Homo sapien
cgttagtgccgcgggctggggcccg

SEQ ID NO: 3496870 - DNA, 25 bp, Homo sapien
tactgcccacccgtacagctcccca

SEQ ID NO: 3496871 - DNA, 25 bp, Homo sapien
ctgcccacccgtacagctccccagc

SEQ ID NO: 3496872 - DNA, 25 bp, Homo sapien
actgcccacccgtacagctccccag

SEQ ID NO: 3496873 - DNA, 25 bp, Homo sapien
ctactgcccacccgtacagctcccc

SEQ ID NO: 3496874 - DNA, 25 bp, Homo sapien
gtgtccgtccaggtgcactggcccc

SEQ ID NO: 3496875 - DNA, 25 bp, Homo sapien
aagtgtccgtccaggtgcactggcc

SEQ ID NO: 3496876 - DNA, 25 bp, Homo sapien
agtgtccgtccaggtgcactggccc

SEQ ID NO: 3496877 - DNA, 25 bp, Homo sapien
gtccgtccaggtgcactggcccctc

SEQ ID NO: 3496878 - DNA, 25 bp, Homo sapien
ccccatgacgctgtcagcagatggt

SEQ ID NO: 3496879 - DNA, 25 bp, Homo sapien
tggagcaggaggtcccccttgtcac

SEQ ID NO: 3496880 - DNA, 25 bp, Homo sapien
cagtcaggggaagcccttcttgtcc

SEQ ID NO: 3496881 - DNA, 25 bp, Homo sapien
cagcagatggtctgccaggcagctc

SEQ ID NO: 3496882 - DNA, 25 bp, Homo sapien
tggggcttggagtccagcatgtgtg

SEQ ID NO: 3496883 - DNA, 25 bp, Homo sapien
ctggggcttggagtccagcatgtgt

SEQ ID NO: 3496884 - DNA, 25 bp, Homo sapien
cctggggcttggagtccagcatgtg

SEQ ID NO: 3496885 - DNA, 25 bp, Homo sapien
ggggcttggagtccagcatgtgtgt

SEQ ID NO: 3496886 - DNA, 25 bp, Homo sapien
gtgaacgtaagcagctccgcggcct

SEQ ID NO: 3496887 - DNA, 25 bp, Homo sapien
cagggtgaacgtaagcagctccgcg

SEQ ID NO: 3496888 - DNA, 25 bp, Homo sapien
ggaaaagtcagggtgaacgtaagca

SEQ ID NO: 3496889 - DNA, 25 bp, Homo sapien
aagtcagggtgaacgtaagcagctc

SEQ ID NO: 3496890 - DNA, 25 bp, Homo sapien
tgcctcagtctggtccgtgcctggg

SEQ ID NO: 3496891 - DNA, 25 bp, Homo sapien
ctgcctcagtctggtccgtgcctgg

SEQ ID NO: 3496892 - DNA, 25 bp, Homo sapien
gcctcagtctggtccgtgcctgggc

SEQ ID NO: 3496893 - DNA, 25 bp, Homo sapien
tcgccagcacagctcccggctgagc

SEQ ID NO: 3496894 - DNA, 25 bp, Homo sapien
ctcgccagcacagctcccggctgag

SEQ ID NO: 3496895 - DNA, 25 bp, Homo sapien
cagcacagctcccggctgagcgcgt

SEQ ID NO: 3496896 - DNA, 25 bp, Homo sapien
acagctcccggctgagcgcgtacac

SEQ ID NO: 3496897 - DNA, 25 bp, Homo sapien
tcgcagcatcacgaagcgacgcgtg

SEQ ID NO: 3496898 - DNA, 25 bp, Homo sapien
atcacgaagcgacgcgtgctgcgca

SEQ ID NO: 3496899 - DNA, 25 bp, Homo sapien
cagtgcgcagcggaagttggttttc

SEQ ID NO: 3496900 - DNA, 25 bp, Homo sapien
cgagttatctcgcagcatcacgaag

SEQ ID NO: 3496901 - DNA, 25 bp, Homo sapien
agaacacgtgtgccgggcccgcggg

SEQ ID NO: 3496902 - DNA, 25 bp, Homo sapien
tgaagagggggacagaacacgtgtg

SEQ ID NO: 3496903 - DNA, 25 bp, Homo sapien
ctgaagagggggacagaacacgtgt

SEQ ID NO: 3496904 - DNA, 25 bp, Homo sapien
gcagccgctgctgatctctccaagg

SEQ ID NO: 3496905 - DNA, 25 bp, Homo sapien
tcgctcaggtccttgcgcgcgaagt

SEQ ID NO: 3496906 - DNA, 25 bp, Homo sapien
gcttccagggcacgcggaaacaggt

SEQ ID NO: 3496907 - DNA, 25 bp, Homo sapien
cactctccgaacagcacgcgtgggg

SEQ ID NO: 3496908 - DNA, 25 bp, Homo sapien
ggtgcccggccgcggagagtcaggg

SEQ ID NO: 3496909 - DNA, 25 bp, Homo sapien
gggtgcccggccgcggagagtcagg

SEQ ID NO: 3496910 - DNA, 25 bp, Homo sapien
ctgcgggtgcccggccgcggagagt

SEQ ID NO: 3496911 - DNA, 25 bp, Homo sapien
gcgggtgcccggccgcggagagtca

SEQ ID NO: 3496912 - DNA, 25 bp, Homo sapien
tggagagggtgggccgggctcttac

SEQ ID NO: 3496913 - DNA, 25 bp, Homo sapien
ctggagagggtgggccgggctctta

SEQ ID NO: 3496914 - DNA, 25 bp, Homo sapien
tggactgagggcttgtagccaccga

SEQ ID NO: 3496915 - DNA, 25 bp, Homo sapien
ccacaggtcgtgtggccaggtgtca

SEQ ID NO: 3496916 - DNA, 25 bp, Homo sapien
cgctgcctcggtatggatctcttgg

SEQ ID NO: 3496917 - DNA, 25 bp, Homo sapien
taggtggcggtcaggtgttataaca

SEQ ID NO: 3496918 - DNA, 25 bp, Homo sapien
ctgcaggtgtggccggcgcgcacac

SEQ ID NO: 3496919 - DNA, 25 bp, Homo sapien
tgttgaaccagtgtccaggcctggc

SEQ ID NO: 3496920 - DNA, 25 bp, Homo sapien
tgaagtcacaggtgttgaaccagtg

SEQ ID NO: 3496921 - DNA, 25 bp, Homo sapien
tcacaggtgttgaaccagtgtccag

SEQ ID NO: 3496922 - DNA, 25 bp, Homo sapien
aaccagtgtccaggcctggcgggaa

SEQ ID NO: 3496923 - DNA, 25 bp, Homo sapien
agtttcgtctcgcggggaagcggag

SEQ ID NO: 3496924 - DNA, 25 bp, Homo sapien
tgcgctccaacccaagcatgtagat

SEQ ID NO: 3496925 - DNA, 25 bp, Homo sapien
gcgcctcagtccaggtcactgggca

SEQ ID NO: 3496926 - DNA, 25 bp, Homo sapien
cagggtgtttactgctgcgctccaa

SEQ ID NO: 3496927 - DNA, 25 bp, Homo sapien
gaaagtgctgacaagccgcaaggga

SEQ ID NO: 3496928 - DNA, 25 bp, Homo sapien
caatctctgtgtagggtcgggagcg

SEQ ID NO: 3496929 - DNA, 25 bp, Homo sapien
agttgagccgggtgcctgagatctc

SEQ ID NO: 3496930 - DNA, 25 bp, Homo sapien
aggtgtttgagaccaccggctccca

SEQ ID NO: 3496931 - DNA, 25 bp, Homo sapien
tgggggtttgcatcggctcctcagc

SEQ ID NO: 3496932 - DNA, 25 bp, Homo sapien
tggttagagcgggagaggaacttcc

SEQ ID NO: 3496933 - DNA, 25 bp, Homo sapien
actgcaggtggtttacgggaagtgc

SEQ ID NO: 3496934 - DNA, 25 bp, Homo sapien
aggaacttcccagactagctggcac

SEQ ID NO: 3496935 - DNA, 25 bp, Homo sapien
cgggcactgcaggtggtttacggga

SEQ ID NO: 3496936 - DNA, 25 bp, Homo sapien
ggctcaagcgctaatgacgacaggg

SEQ ID NO: 3496937 - DNA, 25 bp, Homo sapien
ctgggctcaagcgctaatgacgaca

SEQ ID NO: 3496938 - DNA, 25 bp, Homo sapien
ggactgagtgaatgggacccccatg

SEQ ID NO: 3496939 - DNA, 25 bp, Homo sapien
ctaatgacgacaggggactgagtga

SEQ ID NO: 3496940 - DNA, 25 bp, Homo sapien
gagacctccagtgcccgtgcggctg

SEQ ID NO: 3496941 - DNA, 25 bp, Homo sapien
tttattctgcctcgggtcggaggct

SEQ ID NO: 3496942 - DNA, 25 bp, Homo sapien
tgctttattctgcctcgggtcggag

SEQ ID NO: 3496943 - DNA, 25 bp, Homo sapien
ggagcgagacctccagtgcccgtgc

SEQ ID NO: 3496944 - DNA, 25 bp, Homo sapien
aggagtcatcaccaccgggcgcatc

SEQ ID NO: 3496945 - DNA, 25 bp, Homo sapien
catcaccaccgggcgcatcgtaggg

SEQ ID NO: 3496946 - DNA, 25 bp, Homo sapien
tcaccaccgggcgcatcgtagggac

SEQ ID NO: 3496947 - DNA, 25 bp, Homo sapien
gagtcatcaccaccgggcgcatcgt

SEQ ID NO: 3496948 - DNA, 25 bp, Homo sapien
gcgccctcgccctcatcgccgctgc

SEQ ID NO: 3496949 - DNA, 25 bp, Homo sapien
cgcgccctcgccctcatcgccgctg

SEQ ID NO: 3496950 - DNA, 25 bp, Homo sapien
cgccctcgccctcatcgccgctgcc

SEQ ID NO: 3496951 - DNA, 25 bp, Homo sapien
ttggtcaggatggacctcaccgccg

SEQ ID NO: 3496952 - DNA, 25 bp, Homo sapien
gaacgcctggttgtcaaagccttgg

SEQ ID NO: 3496953 - DNA, 25 bp, Homo sapien
cacgtccagggtgggcgcgttgaga

SEQ ID NO: 3496954 - DNA, 25 bp, Homo sapien
gcgttgagaacgaccacgtctgcct

SEQ ID NO: 3496955 - DNA, 25 bp, Homo sapien
caaggacggcgaggccaaggagagc

SEQ ID NO: 3496956 - DNA, 25 bp, Homo sapien
agcagcacttgagccgggggccata

SEQ ID NO: 3496957 - DNA, 25 bp, Homo sapien
catagtgcttgtggacaaggacggc

SEQ ID NO: 3496958 - DNA, 25 bp, Homo sapien
ggagctttgccagagcagcacttga

SEQ ID NO: 3496959 - DNA, 25 bp, Homo sapien
agaagcgcttgtcctccgaggggcc

SEQ ID NO: 3496960 - DNA, 25 bp, Homo sapien
atccaccaccgagaagcgcttgtcc

SEQ ID NO: 3496961 - DNA, 25 bp, Homo sapien
ccgagaagcgcttgtcctccgaggg

SEQ ID NO: 3496962 - DNA, 25 bp, Homo sapien
ccaccgagaagcgcttgtcctccga

SEQ ID NO: 3496963 - DNA, 25 bp, Homo sapien
ggggcatcggctgagaggttcctgg

SEQ ID NO: 3496964 - DNA, 25 bp, Homo sapien
gggcatcggctgagaggttcctgcc

SEQ ID NO: 3496965 - DNA, 25 bp, Homo sapien
ggcatcggctgagaggttcctgcct

SEQ ID NO: 3496966 - DNA, 25 bp, Homo sapien
ggggcatcggctgagaggttcctgc

SEQ ID NO: 3496967 - DNA, 25 bp, Homo sapien
gtggcctcagagttgtgccagaggg

SEQ ID NO: 3496968 - DNA, 25 bp, Homo sapien
ggtggcctcagagttgtgccagagg

SEQ ID NO: 3496969 - DNA, 25 bp, Homo sapien
gtccagggcccagttgttcctccag

SEQ ID NO: 3496970 - DNA, 25 bp, Homo sapien
ggacctcggaagtggtgctggtcca

SEQ ID NO: 3496971 - DNA, 25 bp, Homo sapien
ggtctggggacctcggaagtggtgc

SEQ ID NO: 3496972 - DNA, 25 bp, Homo sapien
ctggtccagggcccagttgttcctc

SEQ ID NO: 3496973 - DNA, 25 bp, Homo sapien
tgtatctcaatgactgtggttgcgg

SEQ ID NO: 3496974 - DNA, 25 bp, Homo sapien
ccagaggtcaccgtgttgtgggcct

SEQ ID NO: 3496975 - DNA, 25 bp, Homo sapien
tcctgttcggaaacttgtatctcaa

SEQ ID NO: 3496976 - DNA, 25 bp, Homo sapien
ttgcggtgccagaggtcaccgtgtt

SEQ ID NO: 3496977 - DNA, 25 bp, Homo sapien
ctctgcgtagaaggctcccgcctgt

SEQ ID NO: 3496978 - DNA, 25 bp, Homo sapien
cctccatccggaagtgtgagtggtt

SEQ ID NO: 3496979 - DNA, 25 bp, Homo sapien
gaaggctcccgcctgtgccagtgtg

SEQ ID NO: 3496980 - DNA, 25 bp, Homo sapien
ttggtaattcgatatgtgatggccg

SEQ ID NO: 3496981 - DNA, 25 bp, Homo sapien
gaggggaggccttggatgcactctc

SEQ ID NO: 3496982 - DNA, 25 bp, Homo sapien
gggaggccttggatgcactctctac

SEQ ID NO: 3496983 - DNA, 25 bp, Homo sapien
cacagaggggaggccttggatgcac

SEQ ID NO: 3496984 - DNA, 25 bp, Homo sapien
ccacagaggggaggccttggatgca

SEQ ID NO: 3496985 - DNA, 25 bp, Homo sapien
atccttgaccacaacgcccgctcca

SEQ ID NO: 3496986 - DNA, 25 bp, Homo sapien
ggtcactgagtagcgggcaaggtcg

SEQ ID NO: 3496987 - DNA, 25 bp, Homo sapien
cacggtgccacgatacaggctctgg

SEQ ID NO: 3496988 - DNA, 25 bp, Homo sapien
ctgggtcactgagtagcgggcaagg

SEQ ID NO: 3496989 - DNA, 25 bp, Homo sapien
ctggggacactcctggccacggtga

SEQ ID NO: 3496990 - DNA, 25 bp, Homo sapien
ttcaccagcagaaggaaggtcatgg

SEQ ID NO: 3496991 - DNA, 25 bp, Homo sapien
ctggccacggtgaggttgcccgagt

SEQ ID NO: 3496992 - DNA, 25 bp, Homo sapien
cttcaccagcagaaggaaggtcatg

SEQ ID NO: 3496993 - DNA, 25 bp, Homo sapien
atgatgaatgtaccattcacgtttc

SEQ ID NO: 3496994 - DNA, 25 bp, Homo sapien
ggtggatgatgaatgtaccattcac

SEQ ID NO: 3496995 - DNA, 25 bp, Homo sapien
tggatgatgaatgtaccattcacgt

SEQ ID NO: 3496996 - DNA, 25 bp, Homo sapien
ctgggtggatgatgaatgtaccatt

SEQ ID NO: 3496997 - DNA, 25 bp, Homo sapien
ctgggaggatgatggaagtgctcag

SEQ ID NO: 3496998 - DNA, 25 bp, Homo sapien
aggatgatggaagtgctcagccccg

SEQ ID NO: 3496999 - DNA, 25 bp, Homo sapien
gggaggatgatggaagtgctcagcc

SEQ ID NO: 3497000 - DNA, 25 bp, Homo sapien
atgatggaagtgctcagccccggcc

SEQ ID NO: 3497001 - DNA, 25 bp, Homo sapien
cgcggtctccgtcctcagcgtagat

SEQ ID NO: 3497002 - DNA, 25 bp, Homo sapien
ccgggacgcaggacgaggggagatg

SEQ ID NO: 3497003 - DNA, 25 bp, Homo sapien
tagatgatgggctggttgatgccgc

SEQ ID NO: 3497004 - DNA, 25 bp, Homo sapien
cagcgtagatgggtccgggacgcag

SEQ ID NO: 3497005 - DNA, 25 bp, Homo sapien
tggcggaagggagggcacgtcgtgg

SEQ ID NO: 3497006 - DNA, 25 bp, Homo sapien
cccgtggtactgagcttgaatgcag

SEQ ID NO: 3497007 - DNA, 25 bp, Homo sapien
aggtcggcgggcaccacgttcagca

SEQ ID NO: 3497008 - DNA, 25 bp, Homo sapien
cacgttcagcactagtgtggcggtg

SEQ ID NO: 3497009 - DNA, 25 bp, Homo sapien
agcttgaatgcagacgtagccatct

SEQ ID NO: 3497010 - DNA, 25 bp, Homo sapien
gttccacattctcccccggagtgtc

SEQ ID NO: 3497011 - DNA, 25 bp, Homo sapien
ctgcaacagacggctgtgctggatc

SEQ ID NO: 3497012 - DNA, 25 bp, Homo sapien
cggctgtgctggatcaggcctggga

SEQ ID NO: 3497013 - DNA, 25 bp, Homo sapien
tgtgctggatcaggcctgggagcag

SEQ ID NO: 3497014 - DNA, 25 bp, Homo sapien
caacagacggctgtgctggatcagg

SEQ ID NO: 3497015 - DNA, 25 bp, Homo sapien
cagaaggtcatgttcggccgctcgt

SEQ ID NO: 3497016 - DNA, 25 bp, Homo sapien
atgttcggccgctcgtagaagtcca

SEQ ID NO: 3497017 - DNA, 25 bp, Homo sapien
gaaggtcatgttcggccgctcgtag

SEQ ID NO: 3497018 - DNA, 25 bp, Homo sapien
ctcagggcgggacggtttacactca

SEQ ID NO: 3497019 - DNA, 25 bp, Homo sapien
tgacggtggagttcactttcgtgtc

SEQ ID NO: 3497020 - DNA, 25 bp, Homo sapien
tttcctggagggtgtagaacagaat

SEQ ID NO: 3497021 - DNA, 25 bp, Homo sapien
ggatgacggtggagttcactttcgt

SEQ ID NO: 3497022 - DNA, 25 bp, Homo sapien
agaacagaatgtcgtccttgtcgcg

SEQ ID NO: 3497023 - DNA, 25 bp, Homo sapien
gctcccacacccccgtgcccagtcc

SEQ ID NO: 3497024 - DNA, 25 bp, Homo sapien
gacacgaacacccttagctgggtca

SEQ ID NO: 3497025 - DNA, 25 bp, Homo sapien
actgacacgaacacccttagctggg

SEQ ID NO: 3497026 - DNA, 25 bp, Homo sapien
agcactgacacgaacacccttagct

SEQ ID NO: 3497027 - DNA, 25 bp, Homo sapien
gtccagcactgacacgaacaccctt

SEQ ID NO: 3497028 - DNA, 25 bp, Homo sapien
tgtgcctccgctctgacacagcagc

SEQ ID NO: 3497029 - DNA, 25 bp, Homo sapien
atgtgcctccgctctgacacagcag

SEQ ID NO: 3497030 - DNA, 25 bp, Homo sapien
aatgtgcctccgctctgacacagca

SEQ ID NO: 3497031 - DNA, 25 bp, Homo sapien
caatgtgcctccgctctgacacagc

SEQ ID NO: 3497032 - DNA, 25 bp, Homo sapien
gacaggtctgcagtcaccgtcctgc

SEQ ID NO: 3497033 - DNA, 25 bp, Homo sapien
acaggtctgcagtcaccgtcctgcc

SEQ ID NO: 3497034 - DNA, 25 bp, Homo sapien
aggcagcttcatcccgaaatggccc

SEQ ID NO: 3497035 - DNA, 25 bp, Homo sapien
ggcagcttcatcccgaaatggccca

SEQ ID NO: 3497036 - DNA, 25 bp, Homo sapien
ccaggcagcttcatcccgaaatggc

SEQ ID NO: 3497037 - DNA, 25 bp, Homo sapien
caggcagcttcatcccgaaatggcc

SEQ ID NO: 3497038 - DNA, 25 bp, Homo sapien
ggtttccctggatccgaaatgcaaa

SEQ ID NO: 3497039 - DNA, 25 bp, Homo sapien
tccgggacgtggatgtccaccagcg

SEQ ID NO: 3497040 - DNA, 25 bp, Homo sapien
tcaggagtcacgttgagaaacagct

SEQ ID NO: 3497041 - DNA, 25 bp, Homo sapien
gtggacaaggctccgagggtcacct

SEQ ID NO: 3497042 - DNA, 25 bp, Homo sapien
acgagcagcccggtgaacagcaggg

SEQ ID NO: 3497043 - DNA, 25 bp, Homo sapien
cggacgagcagcccggtgaacagca

SEQ ID NO: 3497044 - DNA, 25 bp, Homo sapien
gggtcggacgagcagcccggtgaac

SEQ ID NO: 3497045 - DNA, 25 bp, Homo sapien
cgggggtcggacgagcagcccggtg

SEQ ID NO: 3497046 - DNA, 25 bp, Homo sapien
tctgagcgggtctggcgtctaggac

SEQ ID NO: 3497047 - DNA, 25 bp, Homo sapien
cgggtctggcgtctaggactggcgc

SEQ ID NO: 3497048 - DNA, 25 bp, Homo sapien
caggagggtctgagcgggtctggcg

SEQ ID NO: 3497049 - DNA, 25 bp, Homo sapien
gcgtctaggactggcgcagttccta

SEQ ID NO: 3497050 - DNA, 25 bp, Homo sapien
ctttacgaccggcttctgccaaggg

SEQ ID NO: 3497051 - DNA, 25 bp, Homo sapien
cagacgccgcccagtttatgatcct

SEQ ID NO: 3497052 - DNA, 25 bp, Homo sapien
cagtttatgatcctttacgaccggc

SEQ ID NO: 3497053 - DNA, 25 bp, Homo sapien
tatgatcctttacgaccggcttctg

SEQ ID NO: 3497054 - DNA, 25 bp, Homo sapien
aggggcagtcgtttggcccaagttg

SEQ ID NO: 3497055 - DNA, 25 bp, Homo sapien
gggcagtcgtttggcccaagttgga

SEQ ID NO: 3497056 - DNA, 25 bp, Homo sapien
ggcaccgaggcacagggcagaaggg

SEQ ID NO: 3497057 - DNA, 25 bp, Homo sapien
gggctcaggtcacaggcaccgaggc

SEQ ID NO: 3497058 - DNA, 25 bp, Homo sapien
cccgggcaggagctgagagggtgtc

SEQ ID NO: 3497059 - DNA, 25 bp, Homo sapien
ctgagagggtgtccgggatcccccg

SEQ ID NO: 3497060 - DNA, 25 bp, Homo sapien
cccccgggcaggagctgagagggtg

SEQ ID NO: 3497061 - DNA, 25 bp, Homo sapien
gagctgagagggtgtccgggatccc

SEQ ID NO: 3497062 - DNA, 25 bp, Homo sapien
tcctttattggtgccaagtaccacc

SEQ ID NO: 3497063 - DNA, 25 bp, Homo sapien
accccaaatgcagctgcgctcctgg

SEQ ID NO: 3497064 - DNA, 25 bp, Homo sapien
ggtctgattcctcctttattggtgc

SEQ ID NO: 3497065 - DNA, 25 bp, Homo sapien
cagctgcgctcctgggccgggcagg

SEQ ID NO: 3497066 - DNA, 25 bp, Homo sapien
ggccgcaaggttccttctgcagcag

SEQ ID NO: 3497067 - DNA, 25 bp, Homo sapien
tctgaaaccataggcccagggggca

SEQ ID NO: 3497068 - DNA, 25 bp, Homo sapien
tgggccgcaaggttccttctgcagc

SEQ ID NO: 3497069 - DNA, 25 bp, Homo sapien
gggccgcaaggttccttctgcagca

SEQ ID NO: 3497070 - DNA, 25 bp, Homo sapien
ctgcaggatgggcatgttggaccct

SEQ ID NO: 3497071 - DNA, 25 bp, Homo sapien
ctgacgggcagagcagacccgcgct

SEQ ID NO: 3497072 - DNA, 25 bp, Homo sapien
caggatgggcatgttggaccctgac

SEQ ID NO: 3497073 - DNA, 25 bp, Homo sapien
catgttggaccctgacgggcagagc

SEQ ID NO: 3497074 - DNA, 25 bp, Homo sapien
gctggtgaacgtcccgtctgagtgt

SEQ ID NO: 3497075 - DNA, 25 bp, Homo sapien
aacgtcccgtctgagtgtcgccggg

SEQ ID NO: 3497076 - DNA, 25 bp, Homo sapien
caccaggccctgtagcagccgctgg

SEQ ID NO: 3497077 - DNA, 25 bp, Homo sapien
ctgagctcgctggtgaacgtcccgt

SEQ ID NO: 3497078 - DNA, 25 bp, Homo sapien
gcagcaggaggggccggggggccat

SEQ ID NO: 3497079 - DNA, 25 bp, Homo sapien
gggcgcgcggcggagcccccgagga

SEQ ID NO: 3497080 - DNA, 25 bp, Homo sapien
cagcagcaggaggggccggggggcc

SEQ ID NO: 3497081 - DNA, 25 bp, Homo sapien
gcggggcgcgcggcggagcccccga

SEQ ID NO: 3497082 - DNA, 25 bp, Homo sapien
gggtcggggcgcaggagctgagcgc

SEQ ID NO: 3497083 - DNA, 25 bp, Homo sapien
ggtcggggcgcaggagctgagcgct

SEQ ID NO: 3497084 - DNA, 25 bp, Homo sapien
aaaatcgttcacagacgctcccgtc

SEQ ID NO: 3497085 - DNA, 25 bp, Homo sapien
gtcctcccaaaatcgttcacagacg

SEQ ID NO: 3497086 - DNA, 25 bp, Homo sapien
aatcgttcacagacgctcccgtcct

SEQ ID NO: 3497087 - DNA, 25 bp, Homo sapien
tcccaaaatcgttcacagacgctcc

SEQ ID NO: 3497088 - DNA, 25 bp, Homo sapien
tggattcacgtaattctcgtgtctc

SEQ ID NO: 3497089 - DNA, 25 bp, Homo sapien
tgtggaggatcttctatacataaga

SEQ ID NO: 3497090 - DNA, 25 bp, Homo sapien
ggatcttctatacataagaccatgt

SEQ ID NO: 3497091 - DNA, 25 bp, Homo sapien
tttcttgagtaatgctcttgctaga

SEQ ID NO: 3497092 - DNA, 25 bp, Homo sapien
gccagagtgcaatgacgtgatctcc

SEQ ID NO: 3497093 - DNA, 25 bp, Homo sapien
tcctcagcctgccaagcagctggga

SEQ ID NO: 3497094 - DNA, 25 bp, Homo sapien
cgctcaccgcaacctctgcctcctg

SEQ ID NO: 3497095 - DNA, 25 bp, Homo sapien
tgggttcaagtgattctccttcctc

SEQ ID NO: 3497096 - DNA, 25 bp, Homo sapien
tgaaggaactctaagccgaccagag

SEQ ID NO: 3497097 - DNA, 25 bp, Homo sapien
gggctacttgaaggaactctaagcc

SEQ ID NO: 3497098 - DNA, 25 bp, Homo sapien
gctggactcgccgtttggcgcccag

SEQ ID NO: 3497099 - DNA, 25 bp, Homo sapien
ctctaagccgaccagaggctgggct

SEQ ID NO: 3497100 - DNA, 25 bp, Homo sapien
cactggcagcaccaacggtgcagca

SEQ ID NO: 3497101 - DNA, 25 bp, Homo sapien
actggcagcaccaacggtgcagcac

SEQ ID NO: 3497102 - DNA, 25 bp, Homo sapien
tcactggcagcaccaacggtgcagc

SEQ ID NO: 3497103 - DNA, 25 bp, Homo sapien
cacgcccccttgtgccccccacagg

SEQ ID NO: 3497104 - DNA, 25 bp, Homo sapien
agcccagtgcccaaacacgctggac

SEQ ID NO: 3497105 - DNA, 25 bp, Homo sapien
aaacacgctggacacgcccccttgt

SEQ ID NO: 3497106 - DNA, 25 bp, Homo sapien
gcccagtgcccaaacacgctggaca

SEQ ID NO: 3497107 - DNA, 25 bp, Homo sapien
aggctctgcgtgtggatccctggac

SEQ ID NO: 3497108 - DNA, 25 bp, Homo sapien
ccatgagaaacaagggggagaccag

SEQ ID NO: 3497109 - DNA, 25 bp, Homo sapien
tggcgccagggccatgagaaacaag

SEQ ID NO: 3497110 - DNA, 25 bp, Homo sapien
gccatgaggctctgcgtgtggatcc

SEQ ID NO: 3497111 - DNA, 25 bp, Homo sapien
cgtgctggaccgtcgggcttgctca

SEQ ID NO: 3497112 - DNA, 25 bp, Homo sapien
actgaacaggccgtgctggaccgtc

SEQ ID NO: 3497113 - DNA, 25 bp, Homo sapien
ccgtcgggcttgctcaagcagccag

SEQ ID NO: 3497114 - DNA, 25 bp, Homo sapien
gctgtccacgtggactgaacaggcc

SEQ ID NO: 3497115 - DNA, 25 bp, Homo sapien
gaaggaacgaagacctcctggacta

SEQ ID NO: 3497116 - DNA, 25 bp, Homo sapien
tgtcccgtgcactggaggtgcggtg

SEQ ID NO: 3497117 - DNA, 25 bp, Homo sapien
cagccacgagggtctcgtggaacag

SEQ ID NO: 3497118 - DNA, 25 bp, Homo sapien
aagggccgtaggcctgctgcacctc

SEQ ID NO: 3497119 - DNA, 25 bp, Homo sapien
tcccagggcaccattcgcttaaagt

SEQ ID NO: 3497120 - DNA, 25 bp, Homo sapien
cggacgctcatgatcccagggataa

SEQ ID NO: 3497121 - DNA, 25 bp, Homo sapien
cacgtatgtatgtgcgtcgcagcac

SEQ ID NO: 3497122 - DNA, 25 bp, Homo sapien
gataaaaaatctgtccgcgagcggg

SEQ ID NO: 3497123 - DNA, 25 bp, Homo sapien
ctgactggccgcatatgtgctggtg

SEQ ID NO: 3497124 - DNA, 25 bp, Homo sapien
cgtctgcctggacggtgacagctgc

SEQ ID NO: 3497125 - DNA, 25 bp, Homo sapien
catcacgctttcagccacgtggact

SEQ ID NO: 3497126 - DNA, 25 bp, Homo sapien
cgcatatgtgctggtgatccttcca

SEQ ID NO: 3497127 - DNA, 25 bp, Homo sapien
ggtaatagactataaatctacatag

SEQ ID NO: 3497128 - DNA, 25 bp, Homo sapien
atctacatagcatgaaagcacatac

SEQ ID NO: 3497129 - DNA, 25 bp, Homo sapien
ctggtaatagactataaatctacat

SEQ ID NO: 3497130 - DNA, 25 bp, Homo sapien
gactataaatctacatagcatgaaa

SEQ ID NO: 3497131 - DNA, 25 bp, Homo sapien
gagctgccccccgtgagaggatgtg

SEQ ID NO: 3497132 - DNA, 25 bp, Homo sapien
ggttcctgccgagactctgtgtggg

SEQ ID NO: 3497133 - DNA, 25 bp, Homo sapien
tgagaggatgtgggcggcggacaag

SEQ ID NO: 3497134 - DNA, 25 bp, Homo sapien
tgggcggcggacaaggcccccagga

SEQ ID NO: 3497135 - DNA, 25 bp, Homo sapien
ccgggacgttgaggttgcagtgggc

SEQ ID NO: 3497136 - DNA, 25 bp, Homo sapien
tccagcctggcgacagagtgagatt

SEQ ID NO: 3497137 - DNA, 25 bp, Homo sapien
tgagatcgtgccattgcactccagc

SEQ ID NO: 3497138 - DNA, 25 bp, Homo sapien
cagcctggcgacagagtgagattgt

SEQ ID NO: 3497139 - DNA, 25 bp, Homo sapien
aaaaaggcagagactatcagactag

SEQ ID NO: 3497140 - DNA, 25 bp, Homo sapien
taaaacctaagatccaaccacattc

SEQ ID NO: 3497141 - DNA, 25 bp, Homo sapien
ggagtgtctatgctactatcagaaa

SEQ ID NO: 3497142 - DNA, 25 bp, Homo sapien
gatgcaaacattcaccataagacag

SEQ ID NO: 3497143 - DNA, 25 bp, Homo sapien
ttctgttggctggtgtagtgcctca

SEQ ID NO: 3497144 - DNA, 25 bp, Homo sapien
tctgttggctggtgtagtgcctcat

SEQ ID NO: 3497145 - DNA, 25 bp, Homo sapien
caaaaaccagataattcaacagtaa

SEQ ID NO: 3497146 - DNA, 25 bp, Homo sapien
gctggagagttcaacacttcactct

SEQ ID NO: 3497147 - DNA, 25 bp, Homo sapien
gaatatacaagcaacactctccatg

SEQ ID NO: 3497148 - DNA, 25 bp, Homo sapien
taactgatatctaatactccaccca

SEQ ID NO: 3497149 - DNA, 25 bp, Homo sapien
aaggtggagcagtagttgaccttgt

SEQ ID NO: 3497150 - DNA, 25 bp, Homo sapien
tcccggccgcagttaacgcaggact

SEQ ID NO: 3497151 - DNA, 25 bp, Homo sapien
gagcagtagttgaccttgtggcagc

SEQ ID NO: 3497152 - DNA, 25 bp, Homo sapien
ttgtggcagccggtgcactcgctca

SEQ ID NO: 3497153 - DNA, 25 bp, Homo sapien
ggccagtcagtgacgtggccatgga

SEQ ID NO: 3497154 - DNA, 25 bp, Homo sapien
caggccagtcagtgacgtggccatg

SEQ ID NO: 3497155 - DNA, 25 bp, Homo sapien
aacaggccagtcagtgacgtggcca

SEQ ID NO: 3497156 - DNA, 25 bp, Homo sapien
acaggccagtcagtgacgtggccat

SEQ ID NO: 3497157 - DNA, 25 bp, Homo sapien
ctgagacaccggggacagaggcagg

SEQ ID NO: 3497158 - DNA, 25 bp, Homo sapien
gtgcaggcaggaggccccaagttcc

SEQ ID NO: 3497159 - DNA, 25 bp, Homo sapien
gagacaccggggacagaggcaggtg

SEQ ID NO: 3497160 - DNA, 25 bp, Homo sapien
gacaccggggacagaggcaggtgca

SEQ ID NO: 3497161 - DNA, 25 bp, Homo sapien
cccacggccccacctgagctggttt

SEQ ID NO: 3497162 - DNA, 25 bp, Homo sapien
aggcatgtgtcccaaactgctgcgg

SEQ ID NO: 3497163 - DNA, 25 bp, Homo sapien
cgtggcaggcatgtgtcccaaactg

SEQ ID NO: 3497164 - DNA, 25 bp, Homo sapien
gtgtcccaaactgctgcggcggtgc

SEQ ID NO: 3497165 - DNA, 25 bp, Homo sapien
tttctcctggaattacattattgga

SEQ ID NO: 3497166 - DNA, 25 bp, Homo sapien
ttttaatcagcgcataggtcaacat

SEQ ID NO: 3497167 - DNA, 25 bp, Homo sapien
cctggaattacattattggagcttt

SEQ ID NO: 3497168 - DNA, 25 bp, Homo sapien
ttctttttaatcagcgcataggtca

SEQ ID NO: 3497169 - DNA, 25 bp, Homo sapien
gctgtcaatgattaatgtttgcggc

SEQ ID NO: 3497170 - DNA, 25 bp, Homo sapien
tgtcaatgattaatgtttgcggcat

SEQ ID NO: 3497171 - DNA, 25 bp, Homo sapien
ctgtcaatgattaatgtttgcggca

SEQ ID NO: 3497172 - DNA, 25 bp, Homo sapien
tgggttgctctgtggatggccgggc

SEQ ID NO: 3497173 - DNA, 25 bp, Homo sapien
gctttattaacattctgggttgctc

SEQ ID NO: 3497174 - DNA, 25 bp, Homo sapien
caccaccttccagattcgagcaatg

SEQ ID NO: 3497175 - DNA, 25 bp, Homo sapien
gattcgagcaatgcttccaccttag

SEQ ID NO: 3497176 - DNA, 25 bp, Homo sapien
tgagaagggcacgggtctccgtgtc

SEQ ID NO: 3497177 - DNA, 25 bp, Homo sapien
gcaccacacaccaggacgtcctgta

SEQ ID NO: 3497178 - DNA, 25 bp, Homo sapien
acacaccaggacgtcctgtacttgc

SEQ ID NO: 3497179 - DNA, 25 bp, Homo sapien
agaagggcacgggtctccgtgtcca

SEQ ID NO: 3497180 - DNA, 25 bp, Homo sapien
gctgggactttcaaccacttgggcc

SEQ ID NO: 3497181 - DNA, 25 bp, Homo sapien
tgaactgaacgggaagcctgtcctg

SEQ ID NO: 3497182 - DNA, 25 bp, Homo sapien
gcctttcacggtatgccctttgcaa

SEQ ID NO: 3497183 - DNA, 25 bp, Homo sapien
cacagatacagaagtggctgcggag

SEQ ID NO: 3497184 - DNA, 25 bp, Homo sapien
cactctctaagacttcccaataaaa

SEQ ID NO: 3497185 - DNA, 25 bp, Homo sapien
aggcctcactctctaagacttccca

SEQ ID NO: 3497186 - DNA, 25 bp, Homo sapien
ctcactctctaagacttcccaataa

SEQ ID NO: 3497187 - DNA, 25 bp, Homo sapien
ctctctaagacttcccaataaaagg

SEQ ID NO: 3497188 - DNA, 25 bp, Homo sapien
taaagtgagcccatccggatacaaa

SEQ ID NO: 3497189 - DNA, 25 bp, Homo sapien
catttctgcggccaaggacatcgac

SEQ ID NO: 3497190 - DNA, 25 bp, Homo sapien
taggacaagacaccgcatttctgcg

SEQ ID NO: 3497191 - DNA, 25 bp, Homo sapien
aaatcacaggactgcggatggcaca

SEQ ID NO: 3497192 - DNA, 25 bp, Homo sapien
gccacggcaggacgttggtccagtc

SEQ ID NO: 3497193 - DNA, 25 bp, Homo sapien
tggcgggctgctcccgagtatccca

SEQ ID NO: 3497194 - DNA, 25 bp, Homo sapien
gacgttggtccagtccggctctgga

SEQ ID NO: 3497195 - DNA, 25 bp, Homo sapien
ggctgctcccgagtatcccaaagac

SEQ ID NO: 3497196 - DNA, 25 bp, Homo sapien
cattccagatacaatgtggaatcgg

SEQ ID NO: 3497197 - DNA, 25 bp, Homo sapien
aggcttcctcattcccacacgtgga

SEQ ID NO: 3497198 - DNA, 25 bp, Homo sapien
tcagggtgctcatgagcaaggcttc

SEQ ID NO: 3497199 - DNA, 25 bp, Homo sapien
gtggaatcggcagcgtcacgcctgc

SEQ ID NO: 3497200 - DNA, 25 bp, Homo sapien
caaaacctagttgagcacggtggct

SEQ ID NO: 3497201 - DNA, 25 bp, Homo sapien
agcaactgcctctggtgtgaatacc

SEQ ID NO: 3497202 - DNA, 25 bp, Homo sapien
tcttgagaccacgtgttcaggacca

SEQ ID NO: 3497203 - DNA, 25 bp, Homo sapien
ctgactgggcgaatatcttgagacc

SEQ ID NO: 3497204 - DNA, 25 bp, Homo sapien
gtcacactcggtcactctaactaag

SEQ ID NO: 3497205 - DNA, 25 bp, Homo sapien
ggctcagctattcacactgagagga

SEQ ID NO: 3497206 - DNA, 25 bp, Homo sapien
gggtgtcacactcggtcactctaag

SEQ ID NO: 3497207 - DNA, 25 bp, Homo sapien
ggctcagctattcacaccgagagga

SEQ ID NO: 3497208 - DNA, 25 bp, Homo sapien
aataaataggccggcgtgttagctc

SEQ ID NO: 3497209 - DNA, 25 bp, Homo sapien
aaataaataggccggcgtgttagct

SEQ ID NO: 3497210 - DNA, 25 bp, Homo sapien
taaataggccggcgtgttagctcat

SEQ ID NO: 3497211 - DNA, 25 bp, Homo sapien
aaataggccggcgtgttagctcatg

SEQ ID NO: 3497212 - DNA, 25 bp, Homo sapien
actggagtgcagtggcccgatctca

SEQ ID NO: 3497213 - DNA, 25 bp, Homo sapien
agagtcttgctctgtcgccagactg

SEQ ID NO: 3497214 - DNA, 25 bp, Homo sapien
ttttgagacagagtcttgctctgtc

SEQ ID NO: 3497215 - DNA, 25 bp, Homo sapien
agccaccgcgcctggactttttgtt

SEQ ID NO: 3497216 - DNA, 25 bp, Homo sapien
aaacgtttcttacatagatttggtg

SEQ ID NO: 3497217 - DNA, 25 bp, Homo sapien
taccgtacccgaaaaagcagctaca

SEQ ID NO: 3497218 - DNA, 25 bp, Homo sapien
tcttacatagatttggtgggaaaaa

SEQ ID NO: 3497219 - DNA, 25 bp, Homo sapien
gctacaacaaaatccatccctgtcc

SEQ ID NO: 3497220 - DNA, 25 bp, Homo sapien
tctgaagaacgtgccagaagctggg

SEQ ID NO: 3497221 - DNA, 25 bp, Homo sapien
tgacacacggtacctgtctgctggg

SEQ ID NO: 3497222 - DNA, 25 bp, Homo sapien
aaaacatgggcactacgccctgtga

SEQ ID NO: 3497223 - DNA, 25 bp, Homo sapien
agaagtagctgagaaacctccaccc

SEQ ID NO: 3497224 - DNA, 25 bp, Homo sapien
tctgaaacaaagcaaccttatttac

SEQ ID NO: 3497225 - DNA, 25 bp, Homo sapien
aaaccaccttaacaacaatagctgt

SEQ ID NO: 3497226 - DNA, 25 bp, Homo sapien
tttgtaaatgactctccacagctcc

SEQ ID NO: 3497227 - DNA, 25 bp, Homo sapien
agccaaggtgggtcttacgcagctg

SEQ ID NO: 3497228 - DNA, 25 bp, Homo sapien
gcacaggtcgtgtcttcccatttgt

SEQ ID NO: 3497229 - DNA, 25 bp, Homo sapien
agcacaggtcgtgtcttcccatttg

SEQ ID NO: 3497230 - DNA, 25 bp, Homo sapien
cacaggtcgtgtcttcccatttgtt

SEQ ID NO: 3497231 - DNA, 25 bp, Homo sapien
tcagcacaggtcgtgtcttcccatt

SEQ ID NO: 3497232 - DNA, 25 bp, Homo sapien
gcttctcggtaggtgctggcatgct

SEQ ID NO: 3497233 - DNA, 25 bp, Homo sapien
tcaaacagcgtcttcagctgctgcg

SEQ ID NO: 3497234 - DNA, 25 bp, Homo sapien
cagcccattgaccaacgcgggaggt

SEQ ID NO: 3497235 - DNA, 25 bp, Homo sapien
tctgcgtcagcgtggatcttggcct

SEQ ID NO: 3497236 - DNA, 25 bp, Homo sapien
ggtgccagtggactcaagcctgggt

SEQ ID NO: 3497237 - DNA, 25 bp, Homo sapien
agcctgggtgacagagtgagactcc

SEQ ID NO: 3497238 - DNA, 25 bp, Homo sapien
gccgagatggtgccagtggactcaa

SEQ ID NO: 3497239 - DNA, 25 bp, Homo sapien
cctgggtgacagagtgagactccat

SEQ ID NO: 3497240 - DNA, 25 bp, Homo sapien
cttctggaaacggtgcgatctggca

SEQ ID NO: 3497241 - DNA, 25 bp, Homo sapien
cagctgtcctgatagccggggtagt

SEQ ID NO: 3497242 - DNA, 25 bp, Homo sapien
ggatgtgacgttggcaacgcagctt

SEQ ID NO: 3497243 - DNA, 25 bp, Homo sapien
tggcaacgcagcttctggaaacggt

SEQ ID NO: 3497244 - DNA, 25 bp, Homo sapien
gcccctgcgaagacgtcgccctggg

SEQ ID NO: 3497245 - DNA, 25 bp, Homo sapien
tgtggcccctgcgaagacgtcgccc

SEQ ID NO: 3497246 - DNA, 25 bp, Homo sapien
ctgcgaagacgtcgccctgggccgg

SEQ ID NO: 3497247 - DNA, 25 bp, Homo sapien
cgaagacgtcgccctgggccggact

SEQ ID NO: 3497248 - DNA, 25 bp, Homo sapien
cccgaggtcgtgatctgtcccgagg

SEQ ID NO: 3497249 - DNA, 25 bp, Homo sapien
gacgctcggtcaaaggtcagtgccc

SEQ ID NO: 3497250 - DNA, 25 bp, Homo sapien
gtggcctctaccgtggacgctcggt

SEQ ID NO: 3497251 - DNA, 25 bp, Homo sapien
gtcagtgcccccgaggtcgtgatct

SEQ ID NO: 3497252 - DNA, 25 bp, Homo sapien
gccactaccaattgttcgctgttta

SEQ ID NO: 3497253 - DNA, 25 bp, Homo sapien
ttcgctgtttaaactgtgaaccatg

SEQ ID NO: 3497254 - DNA, 25 bp, Homo sapien
gatggccaggatggcaacttgccac

SEQ ID NO: 3497255 - DNA, 25 bp, Homo sapien
ttaaactgtgaaccatggaaatgtg

SEQ ID NO: 3497256 - DNA, 25 bp, Homo sapien
cttgcgccttttgtaaggcacaaaa

SEQ ID NO: 3497257 - DNA, 25 bp, Homo sapien
cttcacgggagttgtgggcagttca

SEQ ID NO: 3497258 - DNA, 25 bp, Homo sapien
tagccgcggtggctggaagcaatgt

SEQ ID NO: 3497259 - DNA, 25 bp, Homo sapien
gctggaagcaatgtgatgttcttgg

SEQ ID NO: 3497260 - DNA, 25 bp, Homo sapien
gtgtcttcagaccttccatgcaatc

SEQ ID NO: 3497261 - DNA, 25 bp, Homo sapien
cagaccttccatgcaatctctagct

SEQ ID NO: 3497262 - DNA, 25 bp, Homo sapien
tcttcagaccttccatgcaatctct

SEQ ID NO: 3497263 - DNA, 25 bp, Homo sapien
ttcagaccttccatgcaatctctag

SEQ ID NO: 3497264 - DNA, 25 bp, Homo sapien
ggcagcgtgagggtttaagatccca

SEQ ID NO: 3497265 - DNA, 25 bp, Homo sapien
agcacaggtgcaagaggcagcgtga

SEQ ID NO: 3497266 - DNA, 25 bp, Homo sapien
cacaggtgcaagaggcagcgtgagg

SEQ ID NO: 3497267 - DNA, 25 bp, Homo sapien
cagcgtgagggtttaagatcccatc

SEQ ID NO: 3497268 - DNA, 25 bp, Homo sapien
tgccatggcctcaaactcggtggga

SEQ ID NO: 3497269 - DNA, 25 bp, Homo sapien
gcgtagcgaatgcttcttttccagt

SEQ ID NO: 3497270 - DNA, 25 bp, Homo sapien
cctgccatggcctcaaactcggtgg

SEQ ID NO: 3497271 - DNA, 25 bp, Homo sapien
atgaggcactgcaagggtcggcccg

SEQ ID NO: 3497272 - DNA, 25 bp, Homo sapien
ctgcttgatgcaccgtccccggccg

SEQ ID NO: 3497273 - DNA, 25 bp, Homo sapien
tgtaccagttctccccctgcttgat

SEQ ID NO: 3497274 - DNA, 25 bp, Homo sapien
ctgtaccagttctccccctgcttga

SEQ ID NO: 3497275 - DNA, 25 bp, Homo sapien
cccctgcttgatgcaccgtccccgg

SEQ ID NO: 3497276 - DNA, 25 bp, Homo sapien
cttgtacagagtgccgctgatgttc

SEQ ID NO: 3497277 - DNA, 25 bp, Homo sapien
cacctttttcttggccgggagccag

SEQ ID NO: 3497278 - DNA, 25 bp, Homo sapien
tgtcgtacacagaagggtcccagtt

SEQ ID NO: 3497279 - DNA, 25 bp, Homo sapien
tgatgttccggcaccgtacgggcag

SEQ ID NO: 3497280 - DNA, 25 bp, Homo sapien
tcccatctgtgtggacgacaatcag

SEQ ID NO: 3497281 - DNA, 25 bp, Homo sapien
cagtgtcgctttttcggtgttcagg

SEQ ID NO: 3497282 - DNA, 25 bp, Homo sapien
gtctccacgatgctcccatctgtgt

SEQ ID NO: 3497283 - DNA, 25 bp, Homo sapien
gtccccgatctgaagggccgtccta

SEQ ID NO: 3497284 - DNA, 25 bp, Homo sapien
caatgccgaagtctgtgtggtgctg

SEQ ID NO: 3497285 - DNA, 25 bp, Homo sapien
taggcaccccatatcttttccaaag

SEQ ID NO: 3497286 - DNA, 25 bp, Homo sapien
aaagatacctctcaaagacttgaaa

SEQ ID NO: 3497287 - DNA, 25 bp, Homo sapien
caagaagggacgctcacctaggcac

SEQ ID NO: 3497288 - DNA, 25 bp, Homo sapien
tccaaacaggaacacaccagtctct

SEQ ID NO: 3497289 - DNA, 25 bp, Homo sapien
ttatttcagaccgtgccccgctttg

SEQ ID NO: 3497290 - DNA, 25 bp, Homo sapien
gtttgtttaagagtcacagagtatt

SEQ ID NO: 3497291 - DNA, 25 bp, Homo sapien
ctttgttgtcagtttccaaacagga

SEQ ID NO: 3497292 - DNA, 25 bp, Homo sapien
tcctgagatggatgccgcgttcgcc

SEQ ID NO: 3497293 - DNA, 25 bp, Homo sapien
cacagacgtggtgaagacattgtct

SEQ ID NO: 3497294 - DNA, 25 bp, Homo sapien
cgttcgccacagacgtggtgaagac

SEQ ID NO: 3497295 - DNA, 25 bp, Homo sapien
atggatgccgcgttcgccacagacg

SEQ ID NO: 3497296 - DNA, 25 bp, Homo sapien
cacggttccctcatcctcgcctctc

SEQ ID NO: 3497297 - DNA, 25 bp, Homo sapien
aggtgcacggttccctcatcctcgc

SEQ ID NO: 3497298 - DNA, 25 bp, Homo sapien
gtgcacggttccctcatcctcgcct

SEQ ID NO: 3497299 - DNA, 25 bp, Homo sapien
caggtgcacggttccctcatcctcg

SEQ ID NO: 3497300 - DNA, 25 bp, Homo sapien
gcggcgcgcggccacagtgagtgct

SEQ ID NO: 3497301 - DNA, 25 bp, Homo sapien
agtgagtgctcaacgccaggcccat

SEQ ID NO: 3497302 - DNA, 25 bp, Homo sapien
cacaagccccggcatgcggcgcgcg

SEQ ID NO: 3497303 - DNA, 25 bp, Homo sapien
ggcgcgcggccacagtgagtgctca

SEQ ID NO: 3497304 - DNA, 25 bp, Homo sapien
cccaagggtctcaacactgagctgt

SEQ ID NO: 3497305 - DNA, 25 bp, Homo sapien
gggaaaagtgcctcacaacgcaaca

SEQ ID NO: 3497306 - DNA, 25 bp, Homo sapien
aacgcaacaagaagctcctcccaag

SEQ ID NO: 3497307 - DNA, 25 bp, Homo sapien
cgcaaagctccgtaggggaaaagtg

SEQ ID NO: 3497308 - DNA, 25 bp, Homo sapien
tgtgtggcaagaaactataagcagc

SEQ ID NO: 3497309 - DNA, 25 bp, Homo sapien
aagcagcttatataaaaatgtggac

SEQ ID NO: 3497310 - DNA, 25 bp, Homo sapien
taaaaatgtggactggaaagccaca

SEQ ID NO: 3497311 - DNA, 25 bp, Homo sapien
cccaaaggaagcccgacaggaagcg

SEQ ID NO: 3497312 - DNA, 25 bp, Homo sapien
ggcaggccgatcacgtggggcaggt

SEQ ID NO: 3497313 - DNA, 25 bp, Homo sapien
gggaaggctggaaacgtcgagcagg

SEQ ID NO: 3497314 - DNA, 25 bp, Homo sapien
tgtgcgaggcaggtatttgtggcag

SEQ ID NO: 3497315 - DNA, 25 bp, Homo sapien
aaacgtcgagcaggtgtgcgaggca

SEQ ID NO: 3497316 - DNA, 25 bp, Homo sapien
gacagttgtgcggggcaggcgcgcg

SEQ ID NO: 3497317 - DNA, 25 bp, Homo sapien
tgggacagttgtgcggggcaggcgc

SEQ ID NO: 3497318 - DNA, 25 bp, Homo sapien
gggacagttgtgcggggcaggcgcg

SEQ ID NO: 3497319 - DNA, 25 bp, Homo sapien
ggacagttgtgcggggcaggcgcgc

SEQ ID NO: 3497320 - DNA, 25 bp, Homo sapien
ggacgaggcgagaggccggcgggcg

SEQ ID NO: 3497321 - DNA, 25 bp, Homo sapien
cggacgaggcgagaggccggcgggc

SEQ ID NO: 3497322 - DNA, 25 bp, Homo sapien
gacgaggcgagaggccggcgggcgc

SEQ ID NO: 3497323 - DNA, 25 bp, Homo sapien
cggcggcctcgtcggggccgggcag

SEQ ID NO: 3497324 - DNA, 25 bp, Homo sapien
ccatgtccatgtgcccgggctccgc

SEQ ID NO: 3497325 - DNA, 25 bp, Homo sapien
gcgcccatgtccatgtgcccgggct

SEQ ID NO: 3497326 - DNA, 25 bp, Homo sapien
gcctcggcgcccatgtccatgtgcc

SEQ ID NO: 3497327 - DNA, 25 bp, Homo sapien
gtgacccgcggcgtctcccgctccg

SEQ ID NO: 3497328 - DNA, 25 bp, Homo sapien
cgctccgcctccgagtctgcgtcct

SEQ ID NO: 3497329 - DNA, 25 bp, Homo sapien
ccactgccgtgacccgcggcgtctc

SEQ ID NO: 3497330 - DNA, 25 bp, Homo sapien
tcccgctccgcctccgagtctgcgt

SEQ ID NO: 3497331 - DNA, 25 bp, Homo sapien
ccgccacagcggccgcggccgccac

SEQ ID NO: 3497332 - DNA, 25 bp, Homo sapien
gccgccacagcggccgcggccgcca

SEQ ID NO: 3497333 - DNA, 25 bp, Homo sapien
ccgccgccacagcggccgcggccgc

SEQ ID NO: 3497334 - DNA, 25 bp, Homo sapien
cgccgccgccacagcggccgcggcc

SEQ ID NO: 3497335 - DNA, 25 bp, Homo sapien
gcccagctgctttgccgccgagtcc

SEQ ID NO: 3497336 - DNA, 25 bp, Homo sapien
aggcccagctgctttgccgccgagt

SEQ ID NO: 3497337 - DNA, 25 bp, Homo sapien
cagctgctttgccgccgagtccgag

SEQ ID NO: 3497338 - DNA, 25 bp, Homo sapien
caggcccagctgctttgccgccgag

SEQ ID NO: 3497339 - DNA, 25 bp, Homo sapien
cccgaagtgggaagccgaatcagtc

SEQ ID NO: 3497340 - DNA, 25 bp, Homo sapien
tcctcacgagggcttccgagagact

SEQ ID NO: 3497341 - DNA, 25 bp, Homo sapien
gaatcagtccgaataggtccgagtc

SEQ ID NO: 3497342 - DNA, 25 bp, Homo sapien
tggacggctctaggcagattctcgc

SEQ ID NO: 3497343 - DNA, 25 bp, Homo sapien
tgggatcagccacaaaatctcacca

SEQ ID NO: 3497344 - DNA, 25 bp, Homo sapien
gatcgggtttaaagagtggcctgcc

SEQ ID NO: 3497345 - DNA, 25 bp, Homo sapien
gcctggtttagctaaggcctggaaa

SEQ ID NO: 3497346 - DNA, 25 bp, Homo sapien
aaactcttgcctgtgtgagattcca

SEQ ID NO: 3497347 - DNA, 25 bp, Homo sapien
tttcagacaattagtccgctccagg

SEQ ID NO: 3497348 - DNA, 25 bp, Homo sapien
catggagggacgtgcacatatcaca

SEQ ID NO: 3497349 - DNA, 25 bp, Homo sapien
tcagaggcgtcttcagatgcaaaac

SEQ ID NO: 3497350 - DNA, 25 bp, Homo sapien
tccttttatgagaggtttccaccca

SEQ ID NO: 3497351 - DNA, 25 bp, Homo sapien
caaaggccttgtcagctcatgggac

SEQ ID NO: 3497352 - DNA, 25 bp, Homo sapien
cattggcagccagcatagtgacaga

SEQ ID NO: 3497353 - DNA, 25 bp, Homo sapien
tatctcagcggaacgtactacgccc

SEQ ID NO: 3497354 - DNA, 25 bp, Homo sapien
gcagtgagccattgccaagactcca

SEQ ID NO: 3497355 - DNA, 25 bp, Homo sapien
tgctcatggtcgtaacatgtgcacc

SEQ ID NO: 3497356 - DNA, 25 bp, Homo sapien
ttgggcccctcttgttcacatacag

SEQ ID NO: 3497357 - DNA, 25 bp, Homo sapien
gatacacccctgatgcctgatgtcc

SEQ ID NO: 3497358 - DNA, 25 bp, Homo sapien
ttgtgaaacattgtcctgccgtggg

SEQ ID NO: 3497359 - DNA, 25 bp, Homo sapien
catggagcaggatcacggcaggttc

SEQ ID NO: 3497360 - DNA, 25 bp, Homo sapien
tcatgcatggagcaggatcacggca

SEQ ID NO: 3497361 - DNA, 25 bp, Homo sapien
tgcatggagcaggatcacggcaggt

SEQ ID NO: 3497362 - DNA, 25 bp, Homo sapien
catgcatggagcaggatcacggcag

SEQ ID NO: 3497363 - DNA, 25 bp, Homo sapien
cctggccctgttctgagcggtcaca

SEQ ID NO: 3497364 - DNA, 25 bp, Homo sapien
tcctcctcgtccagttgactgctgt

SEQ ID NO: 3497365 - DNA, 25 bp, Homo sapien
gccctgttctgagcggtcacagcag

SEQ ID NO: 3497366 - DNA, 25 bp, Homo sapien
tggcagccggtgctacccgctgtgt

SEQ ID NO: 3497367 - DNA, 25 bp, Homo sapien
cagatgaggacggaaccagacagtc

SEQ ID NO: 3497368 - DNA, 25 bp, Homo sapien
cgaggggacaggccgagcgcggggc

SEQ ID NO: 3497369 - DNA, 25 bp, Homo sapien
ccgaggggacaggccgagcgcgggg

SEQ ID NO: 3497370 - DNA, 25 bp, Homo sapien
acaccgggacgaacgcggcgtcgca

SEQ ID NO: 3497371 - DNA, 25 bp, Homo sapien
tggttcaggacaccgggacgaacgc

SEQ ID NO: 3497372 - DNA, 25 bp, Homo sapien
ggcttctggttcaggacaccgggac

SEQ ID NO: 3497373 - DNA, 25 bp, Homo sapien
cttctggttcaggacaccgggacga

SEQ ID NO: 3497374 - DNA, 25 bp, Homo sapien
gctgggggcctggtcgagtccccac

SEQ ID NO: 3497375 - DNA, 25 bp, Homo sapien
tcgagtccccacctctcctggacgg

SEQ ID NO: 3497376 - DNA, 25 bp, Homo sapien
ctggtcgagtccccacctctcctgg

SEQ ID NO: 3497377 - DNA, 25 bp, Homo sapien
tggtcgagtccccacctctcctgga

SEQ ID NO: 3497378 - DNA, 25 bp, Homo sapien
ctgccccgtcctgcccactcccagc

SEQ ID NO: 3497379 - DNA, 25 bp, Homo sapien
cgtcctgcccactcccagctctggg

SEQ ID NO: 3497380 - DNA, 25 bp, Homo sapien
ccgtcctgcccactcccagctctgg

SEQ ID NO: 3497381 - DNA, 25 bp, Homo sapien
cccgtcctgcccactcccagctctg

SEQ ID NO: 3497382 - DNA, 25 bp, Homo sapien
caaaatgctcggggaagaggtcagc

SEQ ID NO: 3497383 - DNA, 25 bp, Homo sapien
ccaaaatgctcggggaagaggtcag

SEQ ID NO: 3497384 - DNA, 25 bp, Homo sapien
tgccctggcggctgggccttagttt

SEQ ID NO: 3497385 - DNA, 25 bp, Homo sapien
tcacttatgtctttggacaaggtgc

SEQ ID NO: 3497386 - DNA, 25 bp, Homo sapien
cttatgtctttggacaaggtgccta

SEQ ID NO: 3497387 - DNA, 25 bp, Homo sapien
tatgtctttggacaaggtgcctagt

SEQ ID NO: 3497388 - DNA, 25 bp, Homo sapien
cacttatgtctttggacaaggtgcc

SEQ ID NO: 3497389 - DNA, 25 bp, Homo sapien
tctccgagctgcgtccttctccaag

SEQ ID NO: 3497390 - DNA, 25 bp, Homo sapien
cttctccgagctgcgtccttctcca

SEQ ID NO: 3497391 - DNA, 25 bp, Homo sapien
ccgagctgcgtccttctccaagggg

SEQ ID NO: 3497392 - DNA, 25 bp, Homo sapien
tccgagctgcgtccttctccaaggg

SEQ ID NO: 3497393 - DNA, 25 bp, Homo sapien
tgtcgtccaagcctgggtgcgagct

SEQ ID NO: 3497394 - DNA, 25 bp, Homo sapien
tgggctcccggttgtggtccaagcc

SEQ ID NO: 3497395 - DNA, 25 bp, Homo sapien
ggctcccggttgtcgtccaagcctg

SEQ ID NO: 3497396 - DNA, 25 bp, Homo sapien
ccggttgtcgtccaagcctgggtgc

SEQ ID NO: 3497397 - DNA, 25 bp, Homo sapien
ttctgttgccaccatagtcgaccca

SEQ ID NO: 3497398 - DNA, 25 bp, Homo sapien
tgtggttctgttgccaccatagtcg

SEQ ID NO: 3497399 - DNA, 25 bp, Homo sapien
tctgttgccaccatagtcgacccat

SEQ ID NO: 3497400 - DNA, 25 bp, Homo sapien
gttgccaccatagtcgacccatcag

SEQ ID NO: 3497401 - DNA, 25 bp, Homo sapien
gggcagcgggcggagcggggtcgca

SEQ ID NO: 3497402 - DNA, 25 bp, Homo sapien
agggcagcgggcggagcggggtcgc

SEQ ID NO: 3497403 - DNA, 25 bp, Homo sapien
agcgggcggagcggggtcgcagggg

SEQ ID NO: 3497404 - DNA, 25 bp, Homo sapien
gcagcgggcggagcggggtcgcagg

SEQ ID NO: 3497405 - DNA, 25 bp, Homo sapien
ccaagaatcgcgtgggcccgcaggt

SEQ ID NO: 3497406 - DNA, 25 bp, Homo sapien
gcagcggcagtccatcctgcctcct

SEQ ID NO: 3497407 - DNA, 25 bp, Homo sapien
caggtgccactcagcgagccaggtg

SEQ ID NO: 3497408 - DNA, 25 bp, Homo sapien
accaggagaagattcggcagcggca

SEQ ID NO: 3497409 - DNA, 25 bp, Homo sapien
ggcctgctacatgccaaagccagga

SEQ ID NO: 3497410 - DNA, 25 bp, Homo sapien
cgcttttgaggtgcaggtcccaccc

SEQ ID NO: 3497411 - DNA, 25 bp, Homo sapien
cacactgaccaggatggacggcctg

SEQ ID NO: 3497412 - DNA, 25 bp, Homo sapien
ggttctgggctagtgaagcctctcc

SEQ ID NO: 3497413 - DNA, 25 bp, Homo sapien
gaggcaccagggctaagcaattaaa

SEQ ID NO: 3497414 - DNA, 25 bp, Homo sapien
gacttgagtctcaccctacagatga

SEQ ID NO: 3497415 - DNA, 25 bp, Homo sapien
tttcaggccaatgatccccgcatgg

SEQ ID NO: 3497416 - DNA, 25 bp, Homo sapien
tcccaggagccgtgtgtctcagttc

SEQ ID NO: 3497417 - DNA, 25 bp, Homo sapien
ctatttatagaagtgtgcaagcgtg

SEQ ID NO: 3497418 - DNA, 25 bp, Homo sapien
gacagccacgaagccacgggtcgtt

SEQ ID NO: 3497419 - DNA, 25 bp, Homo sapien
ttgacacagccgagtgggcgccatt

SEQ ID NO: 3497420 - DNA, 25 bp, Homo sapien
tgcaagcgtgaaagcgctggctccc

SEQ ID NO: 3497421 - DNA, 25 bp, Homo sapien
cattgccggatccggaacccctcct

SEQ ID NO: 3497422 - DNA, 25 bp, Homo sapien
tgccggatccggaacccctcctgag

SEQ ID NO: 3497423 - DNA, 25 bp, Homo sapien
ttgccggatccggaacccctcctga

SEQ ID NO: 3497424 - DNA, 25 bp, Homo sapien
cgccattgccggatccggaacccct

SEQ ID NO: 3497425 - DNA, 25 bp, Homo sapien
cctgagggtcttcgcggggtctgag

SEQ ID NO: 3497426 - DNA, 25 bp, Homo sapien
ggtcttgctctctggcccaggtggg

SEQ ID NO: 3497427 - DNA, 25 bp, Homo sapien
tgctctctggcccaggtgggagtgt

SEQ ID NO: 3497428 - DNA, 25 bp, Homo sapien
tctctggcccaggtgggagtgtagt

SEQ ID NO: 3497429 - DNA, 25 bp, Homo sapien
ctgcacccggcctgaatttattttt

SEQ ID NO: 3497430 - DNA, 25 bp, Homo sapien
tccagcttgctctgcgtggtgggca

SEQ ID NO: 3497431 - DNA, 25 bp, Homo sapien
gagttgctgtcagagccattctgca

SEQ ID NO: 3497432 - DNA, 25 bp, Homo sapien
cggctcatcgagctctacaaggaag

SEQ ID NO: 3497433 - DNA, 25 bp, Homo sapien
tgggatcagcaaggaccgaattctt

SEQ ID NO: 3497434 - DNA, 25 bp, Homo sapien
cgtgggcagatgtggatgcctctca

SEQ ID NO: 3497435 - DNA, 25 bp, Homo sapien
taacctaggttaggactcagagatg

SEQ ID NO: 3497436 - DNA, 25 bp, Homo sapien
tctcaagcctccaagcgtgggcaga

SEQ ID NO: 3497437 - DNA, 25 bp, Homo sapien
cccagctgtgatgggctgtaaccta

SEQ ID NO: 3497438 - DNA, 25 bp, Homo sapien
aaagaacttccctcctagccaggca

SEQ ID NO: 3497439 - DNA, 25 bp, Homo sapien
tccgagccggtcaacaagctaagtc

SEQ ID NO: 3497440 - DNA, 25 bp, Homo sapien
catcaaaggtcttgtggctcccaat

SEQ ID NO: 3497441 - DNA, 25 bp, Homo sapien
ggtccgcccacatcatagaacgtaa

SEQ ID NO: 3497442 - DNA, 25 bp, Homo sapien
taatccaccatatgaatatattgcc

SEQ ID NO: 3497443 - DNA, 25 bp, Homo sapien
tatattgcccttattaatagatacc

SEQ ID NO: 3497444 - DNA, 25 bp, Homo sapien
tatccattaccatgagcagttctgc

SEQ ID NO: 3497445 - DNA, 25 bp, Homo sapien
acatattgacaacccactgtatgaa

SEQ ID NO: 3497446 - DNA, 25 bp, Homo sapien
gcatggttttattcctcatgggtag

SEQ ID NO: 3497447 - DNA, 25 bp, Homo sapien
tttattcctcatgggtagatgaaca

SEQ ID NO: 3497448 - DNA, 25 bp, Homo sapien
tggttttattcctcatgggtagatg

SEQ ID NO: 3497449 - DNA, 25 bp, Homo sapien
gttttattcctcatgggtagatgaa

SEQ ID NO: 3497450 - DNA, 25 bp, Homo sapien
ttctggaggtctgtcctcttgcttt

SEQ ID NO: 3497451 - DNA, 25 bp, Homo sapien
cttctggaggtctgtcctcttgctt

SEQ ID NO: 3497452 - DNA, 25 bp, Homo sapien
caaaagaggttgcatctactggtgc

SEQ ID NO: 3497453 - DNA, 25 bp, Homo sapien
ggcacagcctcatcatgggaccatc

SEQ ID NO: 3497454 - DNA, 25 bp, Homo sapien
gctgggctcaatgtcagatctggct

SEQ ID NO: 3497455 - DNA, 25 bp, Homo sapien
gctttgatcttcaatgctgggctca

SEQ ID NO: 3497456 - DNA, 25 bp, Homo sapien
cagtattttcttataggagcccaaa

SEQ ID NO: 3497457 - DNA, 25 bp, Homo sapien
cttataggagcccaaatggactagg

SEQ ID NO: 3497458 - DNA, 25 bp, Homo sapien
cccaaatggactaggacattaagac

SEQ ID NO: 3497459 - DNA, 25 bp, Homo sapien
cattaagacatgagcttgcctgtag

SEQ ID NO: 3497460 - DNA, 25 bp, Homo sapien
agccgagatcgtgccactgtgttcc

SEQ ID NO: 3497461 - DNA, 25 bp, Homo sapien
gagccgagatcgtgccactgtgttc

SEQ ID NO: 3497462 - DNA, 25 bp, Homo sapien
ccgagatcgtgccactgtgttccag

SEQ ID NO: 3497463 - DNA, 25 bp, Homo sapien
gagatcgtgccactgtgttccagcc

SEQ ID NO: 3497464 - DNA, 25 bp, Homo sapien
gtacttgttagccggacgtggcggc

SEQ ID NO: 3497465 - DNA, 25 bp, Homo sapien
aagtacttgttagccggacgtggcg

SEQ ID NO: 3497466 - DNA, 25 bp, Homo sapien
agtacttgttagccggacgtggcgg

SEQ ID NO: 3497467 - DNA, 25 bp, Homo sapien
aggcactggagggacgcagccttca

SEQ ID NO: 3497468 - DNA, 25 bp, Homo sapien
tcctgactaatctgcgaggcactgg

SEQ ID NO: 3497469 - DNA, 25 bp, Homo sapien
cagaggtccatcaccacacggggat

SEQ ID NO: 3497470 - DNA, 25 bp, Homo sapien
ataaaaagcatttgtccacagaggt

SEQ ID NO: 3497471 - DNA, 25 bp, Homo sapien
caaattctccttattgaacggcttt

SEQ ID NO: 3497472 - DNA, 25 bp, Homo sapien
aattctccttattgaacggctttat

SEQ ID NO: 3497473 - DNA, 25 bp, Homo sapien
ttccaaattctccttattgaacggc

SEQ ID NO: 3497474 - DNA, 25 bp, Homo sapien
cgcgcccagccaactgaacgttttt

SEQ ID NO: 3497475 - DNA, 25 bp, Homo sapien
gggacagcactttcctatcattgag

SEQ ID NO: 3497476 - DNA, 25 bp, Homo sapien
tgtctgctcttgatagccgctctac

SEQ ID NO: 3497477 - DNA, 25 bp, Homo sapien
taaacgtgcctctcaatgcttagga

SEQ ID NO: 3497478 - DNA, 25 bp, Homo sapien
agaaggccttcgatggctcaaactg

SEQ ID NO: 3497479 - DNA, 25 bp, Homo sapien
cacacgccaggaagatttcttcaac

SEQ ID NO: 3497480 - DNA, 25 bp, Homo sapien
aacaggaaagtgctgccagtgccgg

SEQ ID NO: 3497481 - DNA, 25 bp, Homo sapien
actttgaaaccacacgccaggaaga

SEQ ID NO: 3497482 - DNA, 25 bp, Homo sapien
agtgctgccagtgccggtcggcctt

SEQ ID NO: 3497483 - DNA, 25 bp, Homo sapien
tagtcaacagtgaccacacgtgaca

SEQ ID NO: 3497484 - DNA, 25 bp, Homo sapien
tgacaaccagtcctccctagaaaac

SEQ ID NO: 3497485 - DNA, 25 bp, Homo sapien
cgagccgactctgtctagtcaacag

SEQ ID NO: 3497486 - DNA, 25 bp, Homo sapien
attcccgaggaccacctagcagcta

SEQ ID NO: 3497487 - DNA, 25 bp, Homo sapien
gctgattccaggaggcctccaacaa

SEQ ID NO: 3497488 - DNA, 25 bp, Homo sapien
ctgtctcagggggtgcatctaccca

SEQ ID NO: 3497489 - DNA, 25 bp, Homo sapien
tctcagggggtgcatctacccagca

SEQ ID NO: 3497490 - DNA, 25 bp, Homo sapien
ggagagccgacaccccctcagagct

SEQ ID NO: 3497491 - DNA, 25 bp, Homo sapien
aagcaccgggtgcagctctgatgtg

SEQ ID NO: 3497492 - DNA, 25 bp, Homo sapien
ctgcaggacagacgtgtggtcaaag

SEQ ID NO: 3497493 - DNA, 25 bp, Homo sapien
agcttgggcaaaagcaccgggtgca

SEQ ID NO: 3497494 - DNA, 25 bp, Homo sapien
gacgtgtggtcaaagcttgggcaaa

SEQ ID NO: 3497495 - DNA, 25 bp, Homo sapien
agctggcattctggcctgtgaccag

SEQ ID NO: 3497496 - DNA, 25 bp, Homo sapien
agagcaggttctgcacggccgggac

SEQ ID NO: 3497497 - DNA, 25 bp, Homo sapien
gacgtggacagcgtcaggctcgctt

SEQ ID NO: 3497498 - DNA, 25 bp, Homo sapien
cctgtgaccaggtggcggtccagca

SEQ ID NO: 3497499 - DNA, 25 bp, Homo sapien
caccccatcttctgtaagtgcaggg

SEQ ID NO: 3497500 - DNA, 25 bp, Homo sapien
ggaggaccgagggcaccaacctcag

SEQ ID NO: 3497501 - DNA, 25 bp, Homo sapien
catgggggtctatagaacccagggc

SEQ ID NO: 3497502 - DNA, 25 bp, Homo sapien
cccagggtcagcagtaggtcagcct

SEQ ID NO: 3497503 - DNA, 25 bp, Homo sapien
ccctgacgagctcacacacagaggg

SEQ ID NO: 3497504 - DNA, 25 bp, Homo sapien
aagccgggggccctgacgagctcac

SEQ ID NO: 3497505 - DNA, 25 bp, Homo sapien
aggcgcccgaatccttcacgaagtc

SEQ ID NO: 3497506 - DNA, 25 bp, Homo sapien
cactgaagcaggcgcccgaatcctt

SEQ ID NO: 3497507 - DNA, 25 bp, Homo sapien
agcggggtgggggctcctgagacag

SEQ ID NO: 3497508 - DNA, 25 bp, Homo sapien
gtgggggctcctgagacaggcccag

SEQ ID NO: 3497509 - DNA, 25 bp, Homo sapien
ggggtgggggctcctgagacaggcc

SEQ ID NO: 3497510 - DNA, 25 bp, Homo sapien
ctgcgggagcggggtgggggctcct

SEQ ID NO: 3497511 - DNA, 25 bp, Homo sapien
acaccgtggccgacggcgcagatgg

SEQ ID NO: 3497512 - DNA, 25 bp, Homo sapien
gaacacccaggatctgtcctcgttg

SEQ ID NO: 3497513 - DNA, 25 bp, Homo sapien
aggatctgtcctcgttggtggcaca

SEQ ID NO: 3497514 - DNA, 25 bp, Homo sapien
caggctgtagctgtcgaacacccag

SEQ ID NO: 3497515 - DNA, 25 bp, Homo sapien
gaagtgctgcaggatacgggccagg

SEQ ID NO: 3497516 - DNA, 25 bp, Homo sapien
tgctgcaggatacgggccagggagc

SEQ ID NO: 3497517 - DNA, 25 bp, Homo sapien
gtggaagtgctgcaggatacgggcc

SEQ ID NO: 3497518 - DNA, 25 bp, Homo sapien
agtgctgcaggatacgggccaggga

SEQ ID NO: 3497519 - DNA, 25 bp, Homo sapien
gtcttgcacccagcgtgcattgctc

SEQ ID NO: 3497520 - DNA, 25 bp, Homo sapien
catcgatggactcgagcttggcggg

SEQ ID NO: 3497521 - DNA, 25 bp, Homo sapien
gggctggcgtaagccttgaggcgga

SEQ ID NO: 3497522 - DNA, 25 bp, Homo sapien
ttgaggcggaagtcttgcacccagc

SEQ ID NO: 3497523 - DNA, 25 bp, Homo sapien
gcggtgctggccatcgtgaaacagt

SEQ ID NO: 3497524 - DNA, 25 bp, Homo sapien
tgaaggcggtgctggccatcgtgaa

SEQ ID NO: 3497525 - DNA, 25 bp, Homo sapien
tggccatcgtgaaacagtggaggaa

SEQ ID NO: 3497526 - DNA, 25 bp, Homo sapien
tgctggccatcgtgaaacagtggag

SEQ ID NO: 3497527 - DNA, 25 bp, Homo sapien
cctcgccgggcagacgagactcgga

SEQ ID NO: 3497528 - DNA, 25 bp, Homo sapien
gctccctccgctagaaacgtcgggc

SEQ ID NO: 3497529 - DNA, 25 bp, Homo sapien
aggcacgcggctccctccgctagaa

SEQ ID NO: 3497530 - DNA, 25 bp, Homo sapien
tcggaggagcgacgcggcgccggga

SEQ ID NO: 3497531 - DNA, 25 bp, Homo sapien
acaggcgggcctgttagggagccgc

SEQ ID NO: 3497532 - DNA, 25 bp, Homo sapien
tgttagggagccgctcggacgccat

SEQ ID NO: 3497533 - DNA, 25 bp, Homo sapien
ggccacgagcagacaggcgggcctg

SEQ ID NO: 3497534 - DNA, 25 bp, Homo sapien
cacgagcagacaggcgggcctgtta

SEQ ID NO: 3497535 - DNA, 25 bp, Homo sapien
tgctttggccccggcgggttcggca

SEQ ID NO: 3497536 - DNA, 25 bp, Homo sapien
caggggccaataggtagggtcgcga

SEQ ID NO: 3497537 - DNA, 25 bp, Homo sapien
gggcgcgaaggtgcccgtggtgttc

SEQ ID NO: 3497538 - DNA, 25 bp, Homo sapien
catgcgcagtctgagcgcgcgcggg

SEQ ID NO: 3497539 - DNA, 25 bp, Homo sapien
gtggtgttccggtggccacacccga

SEQ ID NO: 3497540 - DNA, 25 bp, Homo sapien
ggtctgttgctgctccgctactccg

SEQ ID NO: 3497541 - DNA, 25 bp, Homo sapien
gtggtctgttgctgctccgctactc

SEQ ID NO: 3497542 - DNA, 25 bp, Homo sapien
ggtgcccccaggtggtctgttgctg

SEQ ID NO: 3497543 - DNA, 25 bp, Homo sapien
ctggagtgtgggtgcccccaggtgg

SEQ ID NO: 3497544 - DNA, 25 bp, Homo sapien
ctcgggtttttggaacgtctgtgct

SEQ ID NO: 3497545 - DNA, 25 bp, Homo sapien
ggtttttggaacgtctgtgctccag

SEQ ID NO: 3497546 - DNA, 25 bp, Homo sapien
gaatggttccaatttgataaactcg

SEQ ID NO: 3497547 - DNA, 25 bp, Homo sapien
ctgctgactggaggagataattgga

SEQ ID NO: 3497548 - DNA, 25 bp, Homo sapien
cgataccatttatctgcaatgctag

SEQ ID NO: 3497549 - DNA, 25 bp, Homo sapien
aatagactacagcatgggtggaccc

SEQ ID NO: 3497550 - DNA, 25 bp, Homo sapien
ggtggaccctgagtgaaataggcca

SEQ ID NO: 3497551 - DNA, 25 bp, Homo sapien
gaaaggacagatgttacacgatacc

SEQ ID NO: 3497552 - DNA, 25 bp, Homo sapien
tcagccacctgtcgggtgagaccca

SEQ ID NO: 3497553 - DNA, 25 bp, Homo sapien
ggccttgctgcttgttggcccgcat

SEQ ID NO: 3497554 - DNA, 25 bp, Homo sapien
gaggtggtcagggagctcttgtctg

SEQ ID NO: 3497555 - DNA, 25 bp, Homo sapien
gaagacagagctcaaaggagccctt

SEQ ID NO: 3497556 - DNA, 25 bp, Homo sapien
tacgctggttagactcaggtggtgc

SEQ ID NO: 3497557 - DNA, 25 bp, Homo sapien
accttctgggagttcgcctgctgct

SEQ ID NO: 3497558 - DNA, 25 bp, Homo sapien
gctgaggtgagtgcccaccccaggt

SEQ ID NO: 3497559 - DNA, 25 bp, Homo sapien
ggtcgccgccaaaagcagttctact

SEQ ID NO: 3497560 - DNA, 25 bp, Homo sapien
atgtccccacgagggccgggcccag

SEQ ID NO: 3497561 - DNA, 25 bp, Homo sapien
gccaccgcgccctttaatgtcccca

SEQ ID NO: 3497562 - DNA, 25 bp, Homo sapien
cgcgccctttaatgtccccacgagg

SEQ ID NO: 3497563 - DNA, 25 bp, Homo sapien
ggcccaggcccaacccatcccggca

SEQ ID NO: 3497564 - DNA, 25 bp, Homo sapien
atcctgtgctgtggaccccggagcc

SEQ ID NO: 3497565 - DNA, 25 bp, Homo sapien
ctgtgccctcgccccacatcctgtg

SEQ ID NO: 3497566 - DNA, 25 bp, Homo sapien
ctttcttgccgttccccagctgtgc

SEQ ID NO: 3497567 - DNA, 25 bp, Homo sapien
cctttcttgccgttccccagctgtg

SEQ ID NO: 3497568 - DNA, 25 bp, Homo sapien
aatgtgcgtgtgtacgaataggtaa

SEQ ID NO: 3497569 - DNA, 25 bp, Homo sapien
tgcatgcactggcttcctcgggtct

SEQ ID NO: 3497570 - DNA, 25 bp, Homo sapien
ggtaagggtgaactctgcatgcact

SEQ ID NO: 3497571 - DNA, 25 bp, Homo sapien
tcctcttcaccgtgcgcgtgtgttg

SEQ ID NO: 3497572 - DNA, 25 bp, Homo sapien
ctccttcttcgagggcttggtcaag

SEQ ID NO: 3497573 - DNA, 25 bp, Homo sapien
tcggccttggccgaggtcttcttgg

SEQ ID NO: 3497574 - DNA, 25 bp, Homo sapien
catcgggactgctggggaccgtggg

SEQ ID NO: 3497575 - DNA, 25 bp, Homo sapien
tggctgacttccctctggactccat

SEQ ID NO: 3497576 - DNA, 25 bp, Homo sapien
gctcaggacagtttgtcgcccctgg

SEQ ID NO: 3497577 - DNA, 25 bp, Homo sapien
aggacagtttgtcgcccctgggcat

SEQ ID NO: 3497578 - DNA, 25 bp, Homo sapien
tcaggacagtttgtcgcccctgggc

SEQ ID NO: 3497579 - DNA, 25 bp, Homo sapien
cagtttgtcgcccctgggcattcta

SEQ ID NO: 3497580 - DNA, 25 bp, Homo sapien
aggagagctcgggagtttcccacaa

SEQ ID NO: 3497581 - DNA, 25 bp, Homo sapien
gatgacggcggctgcgaacgcggag

SEQ ID NO: 3497582 - DNA, 25 bp, Homo sapien
acgcggaggagagctcgggagtttc

SEQ ID NO: 3497583 - DNA, 25 bp, Homo sapien
ctgcgaacgcggaggagagctcggg

SEQ ID NO: 3497584 - DNA, 25 bp, Homo sapien
gacattgatcccaacggtgcaggca

SEQ ID NO: 3497585 - DNA, 25 bp, Homo sapien
gagagcttcggctcacagcagggat

SEQ ID NO: 3497586 - DNA, 25 bp, Homo sapien
gattcctggctcaacagagagggca

SEQ ID NO: 3497587 - DNA, 25 bp, Homo sapien
gagtcaagtcctgccaaggcgacaa

SEQ ID NO: 3497588 - DNA, 25 bp, Homo sapien
agcgcgcggcagtaggcgcccttca

SEQ ID NO: 3497589 - DNA, 25 bp, Homo sapien
cagggactccgcgatgcccaggaag

SEQ ID NO: 3497590 - DNA, 25 bp, Homo sapien
ggaagtagaccacctgtgcgatgcc

SEQ ID NO: 3497591 - DNA, 25 bp, Homo sapien
aggggccctcgtgccgcaggatctt

SEQ ID NO: 3497592 - DNA, 25 bp, Homo sapien
cgctgaagtgactggagccgcgtct

SEQ ID NO: 3497593 - DNA, 25 bp, Homo sapien
gaagtgactggagccgcgtcttcac

SEQ ID NO: 3497594 - DNA, 25 bp, Homo sapien
cccagagtaggtgtcctcgttgacg

SEQ ID NO: 3497595 - DNA, 25 bp, Homo sapien
tcgttgacgcctcgctgaagtgact

SEQ ID NO: 3497596 - DNA, 25 bp, Homo sapien
ccaggaaggacacgtagaaaggcga

SEQ ID NO: 3497597 - DNA, 25 bp, Homo sapien
cagctggttcaggttggcaaagagc

SEQ ID NO: 3497598 - DNA, 25 bp, Homo sapien
atcacaggggttgacggccacagcg

SEQ ID NO: 3497599 - DNA, 25 bp, Homo sapien
aaagagcgggaagtacaccacagag

SEQ ID NO: 3497600 - DNA, 25 bp, Homo sapien
gtagagaccggcaatgccacggctc

SEQ ID NO: 3497601 - DNA, 25 bp, Homo sapien
ctccgcagcaggtcgcgggtcagct

SEQ ID NO: 3497602 - DNA, 25 bp, Homo sapien
aatgccacggctccgcagcaggtcg

SEQ ID NO: 3497603 - DNA, 25 bp, Homo sapien
acggctccgcagcaggtcgcgggtc

SEQ ID NO: 3497604 - DNA, 25 bp, Homo sapien
tctccatgggcgtggtcacgatcac

SEQ ID NO: 3497605 - DNA, 25 bp, Homo sapien
atctccatgggcgtggtcacgatca

SEQ ID NO: 3497606 - DNA, 25 bp, Homo sapien
catctccatgggcgtggtcacgatc

SEQ ID NO: 3497607 - DNA, 25 bp, Homo sapien
cccgccagcatctctttaagcaggg

SEQ ID NO: 3497608 - DNA, 25 bp, Homo sapien
gcccgccagcatctctttaagcagg

SEQ ID NO: 3497609 - DNA, 25 bp, Homo sapien
agcccgccagcatctctttaagcag

SEQ ID NO: 3497610 - DNA, 25 bp, Homo sapien
gggccgcagtaagtgggaagagaca

SEQ ID NO: 3497611 - DNA, 25 bp, Homo sapien
accgatggacagacggccccacagg

SEQ ID NO: 3497612 - DNA, 25 bp, Homo sapien
gacaggtctacctgccaccctcggg

SEQ ID NO: 3497613 - DNA, 25 bp, Homo sapien
gaggatggtgggagccgtggaggca

SEQ ID NO: 3497614 - DNA, 25 bp, Homo sapien
agggtgccccacgaggtcaaagaag

SEQ ID NO: 3497615 - DNA, 25 bp, Homo sapien
agggtggacccatcctttatctgaa

SEQ ID NO: 3497616 - DNA, 25 bp, Homo sapien
atctgctttgctcccctggtcaggg

SEQ ID NO: 3497617 - DNA, 25 bp, Homo sapien
tgaagccaaagacccctcgagtgtc

SEQ ID NO: 3497618 - DNA, 25 bp, Homo sapien
agctgatgtcggaagaagtcgttgg

SEQ ID NO: 3497619 - DNA, 25 bp, Homo sapien
tagagagctgatgtcggaagaagtc

SEQ ID NO: 3497620 - DNA, 25 bp, Homo sapien
tcgggggtgacgagggtcaagttca

SEQ ID NO: 3497621 - DNA, 25 bp, Homo sapien
atgtcggaagaagtcgttggctgcc

SEQ ID NO: 3497622 - DNA, 25 bp, Homo sapien
cgctccctgccacgactcgcgggcg

SEQ ID NO: 3497623 - DNA, 25 bp, Homo sapien
ctgcccatatcgagcccagccgagc

SEQ ID NO: 3497624 - DNA, 25 bp, Homo sapien
gggcgctacccaggcctgcccatat

SEQ ID NO: 3497625 - DNA, 25 bp, Homo sapien
gactcgcgggcgctacccaggcctg

SEQ ID NO: 3497626 - DNA, 25 bp, Homo sapien
gacggtcttgatgaggcagtcggac

SEQ ID NO: 3497627 - DNA, 25 bp, Homo sapien
agtagccctcggagcggacggtctt

SEQ ID NO: 3497628 - DNA, 25 bp, Homo sapien
ccggtacatgccgaagtagccctcg

SEQ ID NO: 3497629 - DNA, 25 bp, Homo sapien
ccctcggagcggacggtcttgatga

SEQ ID NO: 3497630 - DNA, 25 bp, Homo sapien
aggtgacaccgatcagcccggcgat

SEQ ID NO: 3497631 - DNA, 25 bp, Homo sapien
atgggaaacacgcaggtgacaccga

SEQ ID NO: 3497632 - DNA, 25 bp, Homo sapien
tcagcccggcgatgccgccattgat

SEQ ID NO: 3497633 - DNA, 25 bp, Homo sapien
ccgccattgatgagcttggctggca

SEQ ID NO: 3497634 - DNA, 25 bp, Homo sapien
ccttcaggggaatttccaggcgtca

SEQ ID NO: 3497635 - DNA, 25 bp, Homo sapien
aggcgtcagcaaccgccacttctgt

SEQ ID NO: 3497636 - DNA, 25 bp, Homo sapien
aatttccaggcgtcagcaaccgcca

SEQ ID NO: 3497637 - DNA, 25 bp, Homo sapien
ggtggtgctccaccttcaggggaat

SEQ ID NO: 3497638 - DNA, 25 bp, Homo sapien
gactgaagccgtcactgcgtcctga

SEQ ID NO: 3497639 - DNA, 25 bp, Homo sapien
actgaagccgtcactgcgtcctgag

SEQ ID NO: 3497640 - DNA, 25 bp, Homo sapien
agactgaagccgtcactgcgtcctg

SEQ ID NO: 3497641 - DNA, 25 bp, Homo sapien
cccagactgaagccgtcactgcgtc

SEQ ID NO: 3497642 - DNA, 25 bp, Homo sapien
ccccccaccgccagcgtcttcccag

SEQ ID NO: 3497643 - DNA, 25 bp, Homo sapien
ccccaccgccagcgtcttcccagcc

SEQ ID NO: 3497644 - DNA, 25 bp, Homo sapien
cccccaccgccagcgtcttcccagc

SEQ ID NO: 3497645 - DNA, 25 bp, Homo sapien
gcagcgccgttgcccagggccacgc

SEQ ID NO: 3497646 - DNA, 25 bp, Homo sapien
ccacagatcctcagggactcgtaac

SEQ ID NO: 3497647 - DNA, 25 bp, Homo sapien
cagatcctcagggactcgtaacctt

SEQ ID NO: 3497648 - DNA, 25 bp, Homo sapien
atcctcagggactcgtaaccttcac

SEQ ID NO: 3497649 - DNA, 25 bp, Homo sapien
gatcctcagggactcgtaaccttca

SEQ ID NO: 3497650 - DNA, 25 bp, Homo sapien
ggccatccaccaccgacccccgctc

SEQ ID NO: 3497651 - DNA, 25 bp, Homo sapien
actcactctggatggctcttccaca

SEQ ID NO: 3497652 - DNA, 25 bp, Homo sapien
gccacctgcccgctggtcctgctct

SEQ ID NO: 3497653 - DNA, 25 bp, Homo sapien
cctgcccgctggtcctgctctcact

SEQ ID NO: 3497654 - DNA, 25 bp, Homo sapien
ggcaggtccagagggcacacgagct

SEQ ID NO: 3497655 - DNA, 25 bp, Homo sapien
aggtccagagggcacacgagctggc

SEQ ID NO: 3497656 - DNA, 25 bp, Homo sapien
ctggcaggtccagagggcacacgag

SEQ ID NO: 3497657 - DNA, 25 bp, Homo sapien
gtccagagggcacacgagctggcat

SEQ ID NO: 3497658 - DNA, 25 bp, Homo sapien
tggccgtcgaggctactgcgcccag

SEQ ID NO: 3497659 - DNA, 25 bp, Homo sapien
cccctcctggccgtcgaggctactg

SEQ ID NO: 3497660 - DNA, 25 bp, Homo sapien
ggccagcacctaggcggggaggcgc

SEQ ID NO: 3497661 - DNA, 25 bp, Homo sapien
cgctcggccagcacctaggcgggga

SEQ ID NO: 3497662 - DNA, 25 bp, Homo sapien
agggtggcagttctgcgcgcagagg

SEQ ID NO: 3497663 - DNA, 25 bp, Homo sapien
agttctgcgcgcagaggccgggccg

SEQ ID NO: 3497664 - DNA, 25 bp, Homo sapien
gcagttctgcgcgcagaggccgggc

SEQ ID NO: 3497665 - DNA, 25 bp, Homo sapien
ggtggcagttctgcgcgcagaggcc

SEQ ID NO: 3497666 - DNA, 25 bp, Homo sapien
tgcaggcacaaggacccgcggggcg

SEQ ID NO: 3497667 - DNA, 25 bp, Homo sapien
caggcacaaggacccgcggggcgcg

SEQ ID NO: 3497668 - DNA, 25 bp, Homo sapien
acaaggacccgcggggcgcgggcag

SEQ ID NO: 3497669 - DNA, 25 bp, Homo sapien
gcacaaggacccgcggggcgcgggc

SEQ ID NO: 3497670 - DNA, 25 bp, Homo sapien
agttttgttgctcacagggacccgt

SEQ ID NO: 3497671 - DNA, 25 bp, Homo sapien
ctggagagacttgaaggtgggggct

SEQ ID NO: 3497672 - DNA, 25 bp, Homo sapien
ctgggccagcctaaaagtctgtggg

SEQ ID NO: 3497673 - DNA, 25 bp, Homo sapien
tttgttgctcacagggacccgtccc

SEQ ID NO: 3497674 - DNA, 25 bp, Homo sapien
gcccatgcgtcggatgctgtcctgg

SEQ ID NO: 3497675 - DNA, 25 bp, Homo sapien
ccaagcccatgcgtcggatgctgtc

SEQ ID NO: 3497676 - DNA, 25 bp, Homo sapien
gggccaagcccatgcgtcggatgct

SEQ ID NO: 3497677 - DNA, 25 bp, Homo sapien
catgcgtcggatgctgtcctggtac

SEQ ID NO: 3497678 - DNA, 25 bp, Homo sapien
ttgcggcggccgagctccaagactg

SEQ ID NO: 3497679 - DNA, 25 bp, Homo sapien
ggccgagctccaagactgcgcgcac

SEQ ID NO: 3497680 - DNA, 25 bp, Homo sapien
ggcggccgagctccaagactgcgcg

SEQ ID NO: 3497681 - DNA, 25 bp, Homo sapien
tgcggcggccgagctccaagactgc

SEQ ID NO: 3497682 - DNA, 25 bp, Homo sapien
agcatgtgacggatctgctcatcca

SEQ ID NO: 3497683 - DNA, 25 bp, Homo sapien
tcctgccggtcactctgctccaggg

SEQ ID NO: 3497684 - DNA, 25 bp, Homo sapien
aggagaagagcatgtgacggatctg

SEQ ID NO: 3497685 - DNA, 25 bp, Homo sapien
gaagagcatgtgacggatctgctca

SEQ ID NO: 3497686 - DNA, 25 bp, Homo sapien
ggatgggcgacagaggggtcctgtc

SEQ ID NO: 3497687 - DNA, 25 bp, Homo sapien
agcaggttgctctgcgtcagaaagc

SEQ ID NO: 3497688 - DNA, 25 bp, Homo sapien
ctgcgtcagaaagccggtctcggca

SEQ ID NO: 3497689 - DNA, 25 bp, Homo sapien
gttgctctgcgtcagaaagccggtc

SEQ ID NO: 3497690 - DNA, 25 bp, Homo sapien
tcagaaagccggtctcggcatctcc

SEQ ID NO: 3497691 - DNA, 25 bp, Homo sapien
aaaaagtgcattaagccctgggctc

SEQ ID NO: 3497692 - DNA, 25 bp, Homo sapien
actccaccatgtcaccctggtcacc

SEQ ID NO: 3497693 - DNA, 25 bp, Homo sapien
aaagtgcattaagccctgggctcca

SEQ ID NO: 3497694 - DNA, 25 bp, Homo sapien
aggaaaaagtgcattaagccctggg

SEQ ID NO: 3497695 - DNA, 25 bp, Homo sapien
ggcaccgcgccacggtagaaggaca

SEQ ID NO: 3497696 - DNA, 25 bp, Homo sapien
caggcaccgcgccacggtagaagga

SEQ ID NO: 3497697 - DNA, 25 bp, Homo sapien
gcagcttgatgggcagagtggccat

SEQ ID NO: 3497698 - DNA, 25 bp, Homo sapien
agtggccatccacagggcgtctgcg

SEQ ID NO: 3497699 - DNA, 25 bp, Homo sapien
gcctcccggtccagagtggtggtca

SEQ ID NO: 3497700 - DNA, 25 bp, Homo sapien
ctcccggtccagagtggtggtcacg

SEQ ID NO: 3497701 - DNA, 25 bp, Homo sapien
ggtccagagtggtggtcacgtatac

SEQ ID NO: 3497702 - DNA, 25 bp, Homo sapien
cccggtccagagtggtggtcacgta

SEQ ID NO: 3497703 - DNA, 25 bp, Homo sapien
tcacattcttcaggtgcgagtagaa

SEQ ID NO: 3497704 - DNA, 25 bp, Homo sapien
cattcttcaggtgcgagtagaagac

SEQ ID NO: 3497705 - DNA, 25 bp, Homo sapien
tcaggtgcgagtagaagacaaagca

SEQ ID NO: 3497706 - DNA, 25 bp, Homo sapien
tcttcaggtgcgagtagaagacaaa

SEQ ID NO: 3497707 - DNA, 25 bp, Homo sapien
atccacgtcgatgccgcgctcgaag

SEQ ID NO: 3497708 - DNA, 25 bp, Homo sapien
agcagccgccgaagggtggcgtcca

SEQ ID NO: 3497709 - DNA, 25 bp, Homo sapien
gctcgaaggccgcaaagaactcttc

SEQ ID NO: 3497710 - DNA, 25 bp, Homo sapien
acatctccaccgtgtcagagggctc

SEQ ID NO: 3497711 - DNA, 25 bp, Homo sapien
aggacctgctcagggtcccggcgcc

SEQ ID NO: 3497712 - DNA, 25 bp, Homo sapien
atgaggttcacacggtgcagccgca

SEQ ID NO: 3497713 - DNA, 25 bp, Homo sapien
acagttcttggtggtgtaccagagc

SEQ ID NO: 3497714 - DNA, 25 bp, Homo sapien
cgccgctgcagagcgatgaggttca

SEQ ID NO: 3497715 - DNA, 25 bp, Homo sapien
gggtgaggagggctgtacagactgg

SEQ ID NO: 3497716 - DNA, 25 bp, Homo sapien
gctgagaaagctggggggcactgac

SEQ ID NO: 3497717 - DNA, 25 bp, Homo sapien
gaggagggctgtacagactggggga

SEQ ID NO: 3497718 - DNA, 25 bp, Homo sapien
ggggctgagaaagctggggggcact

SEQ ID NO: 3497719 - DNA, 25 bp, Homo sapien
gcaggaggggcccagtacaacaggt

SEQ ID NO: 3497720 - DNA, 25 bp, Homo sapien
gaggggcccagtacaacaggtgcag

SEQ ID NO: 3497721 - DNA, 25 bp, Homo sapien
gggcccagtacaacaggtgcaggcg

SEQ ID NO: 3497722 - DNA, 25 bp, Homo sapien
cccagtacaacaggtgcaggcggga

SEQ ID NO: 3497723 - DNA, 25 bp, Homo sapien
cacaggtccaggtatgccccatggc

SEQ ID NO: 3497724 - DNA, 25 bp, Homo sapien
ggccacaggtccaggtatgccccat

SEQ ID NO: 3497725 - DNA, 25 bp, Homo sapien
tatggccacaggtccaggtatgccc

SEQ ID NO: 3497726 - DNA, 25 bp, Homo sapien
caccctatggccacaggtccaggta

SEQ ID NO: 3497727 - DNA, 25 bp, Homo sapien
agctctcggccagccatgcgcacca

SEQ ID NO: 3497728 - DNA, 25 bp, Homo sapien
gcagctgcacggtgaccggttggag

SEQ ID NO: 3497729 - DNA, 25 bp, Homo sapien
cggtgaccggttggaggaagctggg

SEQ ID NO: 3497730 - DNA, 25 bp, Homo sapien
gcacggtgaccggttggaggaagct

SEQ ID NO: 3497731 - DNA, 25 bp, Homo sapien
ctgtgggctgaggcgcggcctgcca

SEQ ID NO: 3497732 - DNA, 25 bp, Homo sapien
cctgtgggctgaggcgcggcctgcc

SEQ ID NO: 3497733 - DNA, 25 bp, Homo sapien
gagactcgacgaggctcctcagtgg

SEQ ID NO: 3497734 - DNA, 25 bp, Homo sapien
atgacccgaggagcacagcagtgtc

SEQ ID NO: 3497735 - DNA, 25 bp, Homo sapien
tgactttgaccccaggatgacccga

SEQ ID NO: 3497736 - DNA, 25 bp, Homo sapien
ctgcatggagactcgacgaggctcc

SEQ ID NO: 3497737 - DNA, 25 bp, Homo sapien
cccagctgttgtcattccgggtcct

SEQ ID NO: 3497738 - DNA, 25 bp, Homo sapien
cctgaccaccacttcacggcagcgc

SEQ ID NO: 3497739 - DNA, 25 bp, Homo sapien
accacttcacggcagcgccgggcct

SEQ ID NO: 3497740 - DNA, 25 bp, Homo sapien
gctgttgtcattccgggtcctgacc

SEQ ID NO: 3497741 - DNA, 25 bp, Homo sapien
ctgcccccgccacgccctgtccatg

SEQ ID NO: 3497742 - DNA, 25 bp, Homo sapien
tgcccccgccacgccctgtccatgc

SEQ ID NO: 3497743 - DNA, 25 bp, Homo sapien
actgcccccgccacgccctgtccat

SEQ ID NO: 3497744 - DNA, 25 bp, Homo sapien
tggctgagcagggcgtcatgaggac

SEQ ID NO: 3497745 - DNA, 25 bp, Homo sapien
ctgggaactgcaggcggacgccaca

SEQ ID NO: 3497746 - DNA, 25 bp, Homo sapien
gcagcagcagccgatagcggatggt

SEQ ID NO: 3497747 - DNA, 25 bp, Homo sapien
gaactgcaggcggacgccacaggcc

SEQ ID NO: 3497748 - DNA, 25 bp, Homo sapien
aggtcaggaacagtctgggcatttc

SEQ ID NO: 3497749 - DNA, 25 bp, Homo sapien
gaacagtctgggcatttctggaatg

SEQ ID NO: 3497750 - DNA, 25 bp, Homo sapien
aatctgaggtcaggaacagtctggg

SEQ ID NO: 3497751 - DNA, 25 bp, Homo sapien
aacagtctgggcatttctggaatga

SEQ ID NO: 3497752 - DNA, 25 bp, Homo sapien
tggtgaactcggggcgtctggcgag

SEQ ID NO: 3497753 - DNA, 25 bp, Homo sapien
ctcggggcgtctggcgaggcctcac

SEQ ID NO: 3497754 - DNA, 25 bp, Homo sapien
tgaactcggggcgtctggcgaggcc

SEQ ID NO: 3497755 - DNA, 25 bp, Homo sapien
aactcggggcgtctggcgaggcctc

SEQ ID NO: 3497756 - DNA, 25 bp, Homo sapien
cccggagctggttgtccctcaggtc

SEQ ID NO: 3497757 - DNA, 25 bp, Homo sapien
acaaagggggcgtctagcagctcag

SEQ ID NO: 3497758 - DNA, 25 bp, Homo sapien
tcgagccgggtgaggagtggaaggc

SEQ ID NO: 3497759 - DNA, 25 bp, Homo sapien
ggttcccctgcaggcgcacaaaggg

SEQ ID NO: 3497760 - DNA, 25 bp, Homo sapien
ttgctgtgcaggacaaggagccgca

SEQ ID NO: 3497761 - DNA, 25 bp, Homo sapien
gttgctgtgcaggacaaggagccgc

SEQ ID NO: 3497762 - DNA, 25 bp, Homo sapien
ggttgctgtgcaggacaaggagccg

SEQ ID NO: 3497763 - DNA, 25 bp, Homo sapien
gtgcaggacaaggagccgcaaggac

SEQ ID NO: 3497764 - DNA, 25 bp, Homo sapien
gtggagggacaaccaagaggcagct

SEQ ID NO: 3497765 - DNA, 25 bp, Homo sapien
ggcagctgtggaccaagcctgtggg

SEQ ID NO: 3497766 - DNA, 25 bp, Homo sapien
ggctcagagaactctgacgaagcca

SEQ ID NO: 3497767 - DNA, 25 bp, Homo sapien
agccactgagggagtctcaaaggcc

SEQ ID NO: 3497768 - DNA, 25 bp, Homo sapien
ttctgagagagatcgaggcgctgca

SEQ ID NO: 3497769 - DNA, 25 bp, Homo sapien
tccaatctcaggaggtagcgtgtcc

SEQ ID NO: 3497770 - DNA, 25 bp, Homo sapien
tagcgtgtccagcagattctgagag

SEQ ID NO: 3497771 - DNA, 25 bp, Homo sapien
ctctgcagccggttggaggccaggt

SEQ ID NO: 3497772 - DNA, 25 bp, Homo sapien
ctcagagaggcagttgtgagacagc

SEQ ID NO: 3497773 - DNA, 25 bp, Homo sapien
cagctcagagaggcagttgtgagac

SEQ ID NO: 3497774 - DNA, 25 bp, Homo sapien
gcagttgtgagacagcaagagcgca

SEQ ID NO: 3497775 - DNA, 25 bp, Homo sapien
cagagaggcagttgtgagacagcaa

SEQ ID NO: 3497776 - DNA, 25 bp, Homo sapien
ccactcagaccagcgggcaggttgg

SEQ ID NO: 3497777 - DNA, 25 bp, Homo sapien
gcacccagtgtgtcccggcgttgcc

SEQ ID NO: 3497778 - DNA, 25 bp, Homo sapien
ggttggtcagggcaccccggagaca

SEQ ID NO: 3497779 - DNA, 25 bp, Homo sapien
tgcaggacacaggccggcagtgtct

SEQ ID NO: 3497780 - DNA, 25 bp, Homo sapien
aggggggaggcggatgtggccctca

SEQ ID NO: 3497781 - DNA, 25 bp, Homo sapien
gggaggcggatgtggccctcagagc

SEQ ID NO: 3497782 - DNA, 25 bp, Homo sapien
tgctcagacgcaagaattccacctg

SEQ ID NO: 3497783 - DNA, 25 bp, Homo sapien
cagctgagggtcctcgtgagtgctc

SEQ ID NO: 3497784 - DNA, 25 bp, Homo sapien
ctcgtgagtgctcagacgcaagaat

SEQ ID NO: 3497785 - DNA, 25 bp, Homo sapien
tgagtgctcagacgcaagaattcca

SEQ ID NO: 3497786 - DNA, 25 bp, Homo sapien
cccaggaaaggcagcgccctggacc

SEQ ID NO: 3497787 - DNA, 25 bp, Homo sapien
tggaccctgcgtccgaatcctctga

SEQ ID NO: 3497788 - DNA, 25 bp, Homo sapien
gggtacaggtccaagctcagccggt

SEQ ID NO: 3497789 - DNA, 25 bp, Homo sapien
gcgtccgaatcctctgaagcatctc

SEQ ID NO: 3497790 - DNA, 25 bp, Homo sapien
agacatgtcccagcacgcaggcagg

SEQ ID NO: 3497791 - DNA, 25 bp, Homo sapien
tccttggaggccagacatgtcccag

SEQ ID NO: 3497792 - DNA, 25 bp, Homo sapien
caccgacggtccttggaggccagac

SEQ ID NO: 3497793 - DNA, 25 bp, Homo sapien
acggtccttggaggccagacatgtc

SEQ ID NO: 3497794 - DNA, 25 bp, Homo sapien
gggaatgggaccgccatggctcgca

SEQ ID NO: 3497795 - DNA, 25 bp, Homo sapien
ctgggtcaccactggaaagagggtt

SEQ ID NO: 3497796 - DNA, 25 bp, Homo sapien
aatgggaccgccatggctcgcagga

SEQ ID NO: 3497797 - DNA, 25 bp, Homo sapien
gttggggaatgggaccgccatggct

SEQ ID NO: 3497798 - DNA, 25 bp, Homo sapien
gtgactgcgccccgaaagtcaggga

SEQ ID NO: 3497799 - DNA, 25 bp, Homo sapien
cagggaaggccgtgtaagggtgagg

SEQ ID NO: 3497800 - DNA, 25 bp, Homo sapien
tgcgccccgaaagtcagggaaggcc

SEQ ID NO: 3497801 - DNA, 25 bp, Homo sapien
actgcgccccgaaagtcagggaagg

SEQ ID NO: 3497802 - DNA, 25 bp, Homo sapien
tgagccattgggcagcttcggggtc

SEQ ID NO: 3497803 - DNA, 25 bp, Homo sapien
gtgagccattgggcagcttcggggt

SEQ ID NO: 3497804 - DNA, 25 bp, Homo sapien
cgtgagccattgggcagcttcgggg

SEQ ID NO: 3497805 - DNA, 25 bp, Homo sapien
ggcgctcggcgcctggaatcccgcc

SEQ ID NO: 3497806 - DNA, 25 bp, Homo sapien
tcggcgcctggaatcccgccggcgc

SEQ ID NO: 3497807 - DNA, 25 bp, Homo sapien
gggtggctgctcagcgggcgctcgg

SEQ ID NO: 3497808 - DNA, 25 bp, Homo sapien
gcaggcggcgcgcaaagggtggctg

SEQ ID NO: 3497809 - DNA, 25 bp, Homo sapien
ggctggacgtgggaccaccggtcgc

SEQ ID NO: 3497810 - DNA, 25 bp, Homo sapien
tggacgtgggaccaccggtcgccgc

SEQ ID NO: 3497811 - DNA, 25 bp, Homo sapien
gaaccaccaaggagtcaaggcgagc

SEQ ID NO: 3497812 - DNA, 25 bp, Homo sapien
tgagcccggctggacgtgggaccac

SEQ ID NO: 3497813 - DNA, 25 bp, Homo sapien
acttgcagttcgctggcaaaggttg

SEQ ID NO: 3497814 - DNA, 25 bp, Homo sapien
cttccggcagcggtgcaccatggga

SEQ ID NO: 3497815 - DNA, 25 bp, Homo sapien
ttcgctggcaaaggttgagtcccgg

SEQ ID NO: 3497816 - DNA, 25 bp, Homo sapien
ccggcagcggtgcaccatgggactt

SEQ ID NO: 3497817 - DNA, 25 bp, Homo sapien
gagcgcctcgtgacgtcactctgag

SEQ ID NO: 3497818 - DNA, 25 bp, Homo sapien
gctaggtaccgaaggcagatgccgt

SEQ ID NO: 3497819 - DNA, 25 bp, Homo sapien
tataagagcagtcacttccggaact

SEQ ID NO: 3497820 - DNA, 25 bp, Homo sapien
tttgccgcgaaaagtgcctgacggg

SEQ ID NO: 3497821 - DNA, 25 bp, Homo sapien
ggagccttgaagttcgagactggtc

SEQ ID NO: 3497822 - DNA, 25 bp, Homo sapien
aaaagcagtcctggcgcatggctca

SEQ ID NO: 3497823 - DNA, 25 bp, Homo sapien
taccagtgagctgcgtaagattgct

SEQ ID NO: 3497824 - DNA, 25 bp, Homo sapien
gaggctcgtttcagtctagttggcg

SEQ ID NO: 3497825 - DNA, 25 bp, Homo sapien
gcagctctggcaacagctaggtcca

SEQ ID NO: 3497826 - DNA, 25 bp, Homo sapien
gcagggttgactttccagtgctgtc

SEQ ID NO: 3497827 - DNA, 25 bp, Homo sapien
gcttatgtaaatgcctaccggcccc

SEQ ID NO: 3497828 - DNA, 25 bp, Homo sapien
cctctttttaggacggagcctcgct

SEQ ID NO: 3497829 - DNA, 25 bp, Homo sapien
tggtggccaacgccacgcacatcta

SEQ ID NO: 3497830 - DNA, 25 bp, Homo sapien
gcgtctactacgtcggcgtggcctc

SEQ ID NO: 3497831 - DNA, 25 bp, Homo sapien
atccaatccgggtcgctggcctggg

SEQ ID NO: 3497832 - DNA, 25 bp, Homo sapien
ggcttcctcggcgtctactacgtcg

SEQ ID NO: 3497833 - DNA, 25 bp, Homo sapien
ggtctgtatgccatggaaccctgga

SEQ ID NO: 3497834 - DNA, 25 bp, Homo sapien
catagggcaggcagttgggaaatac

SEQ ID NO: 3497835 - DNA, 25 bp, Homo sapien
ttcattgaggtatctaaagaggccc

SEQ ID NO: 3497836 - DNA, 25 bp, Homo sapien
gaggtggccaaagtcccaactgtga

SEQ ID NO: 3497837 - DNA, 25 bp, Homo sapien
cctcactgcaggtgctgcgagagat

SEQ ID NO: 3497838 - DNA, 25 bp, Homo sapien
accgggatggcctgcgctttctgca

SEQ ID NO: 3497839 - DNA, 25 bp, Homo sapien
tgtccaacctccctgtacagctttg

SEQ ID NO: 3497840 - DNA, 25 bp, Homo sapien
tcttgttctggatctaggataggtt

SEQ ID NO: 3497841 - DNA, 25 bp, Homo sapien
cgcccggctcaatgagggtgcgcac

SEQ ID NO: 3497842 - DNA, 25 bp, Homo sapien
gcgcccaagcggaggattactcgca

SEQ ID NO: 3497843 - DNA, 25 bp, Homo sapien
accaggcagtggagagcgcccaagc

SEQ ID NO: 3497844 - DNA, 25 bp, Homo sapien
agctgcccggagaagatcacatcct

SEQ ID NO: 3497845 - DNA, 25 bp, Homo sapien
ggtgagcaggggagggaagccgagc

SEQ ID NO: 3497846 - DNA, 25 bp, Homo sapien
cggtgagcaggggagggaagccgag

SEQ ID NO: 3497847 - DNA, 25 bp, Homo sapien
agagagaggagaggacggtgagcag

SEQ ID NO: 3497848 - DNA, 25 bp, Homo sapien
aagagagagaggagaggacggtgag

SEQ ID NO: 3497849 - DNA, 25 bp, Homo sapien
agtcgctgccgtccgtgccgctgtc

SEQ ID NO: 3497850 - DNA, 25 bp, Homo sapien
tgcgccgcctacagagaggcactgc

SEQ ID NO: 3497851 - DNA, 25 bp, Homo sapien
gtgatgcgcgccaagaggaagctgg

SEQ ID NO: 3497852 - DNA, 25 bp, Homo sapien
agcaggtggagctgcgccgcgtcca

SEQ ID NO: 3497853 - DNA, 25 bp, Homo sapien
acattttctagcattacacgttcat

SEQ ID NO: 3497854 - DNA, 25 bp, Homo sapien
tcgttcacccatacatatacactga

SEQ ID NO: 3497855 - DNA, 25 bp, Homo sapien
tctagcattacacgttcattgtttt

SEQ ID NO: 3497856 - DNA, 25 bp, Homo sapien
cactgaatactgctaagttaaacat

SEQ ID NO: 3497857 - DNA, 25 bp, Homo sapien
tgcgtcccagaacttcgcccgcggg

SEQ ID NO: 3497858 - DNA, 25 bp, Homo sapien
agcggagaagccgtctggagctgga

SEQ ID NO: 3497859 - DNA, 25 bp, Homo sapien
ctcttttgcatggccgagcggccgg

SEQ ID NO: 3497860 - DNA, 25 bp, Homo sapien
aggctcagtggtcctccgtgcgtcc

SEQ ID NO: 3497861 - DNA, 25 bp, Homo sapien
tgactcacggaccatgagctagaag

SEQ ID NO: 3497862 - DNA, 25 bp, Homo sapien
tgtgtgccctctgccagtcttcgct

SEQ ID NO: 3497863 - DNA, 25 bp, Homo sapien
gaagacatgaaggacctagcctagg

SEQ ID NO: 3497864 - DNA, 25 bp, Homo sapien
caaccccatctcagttcagcagaaa

SEQ ID NO: 3497865 - DNA, 25 bp, Homo sapien
tcctccgtccttggacgggatgggc

SEQ ID NO: 3497866 - DNA, 25 bp, Homo sapien
cccagctcctccgtccttggacggg

SEQ ID NO: 3497867 - DNA, 25 bp, Homo sapien
cagctcctccgtccttggacgggat

SEQ ID NO: 3497868 - DNA, 25 bp, Homo sapien
gctcctccgtccttggacgggatgg

SEQ ID NO: 3497869 - DNA, 25 bp, Homo sapien
cccgcgtgcaagtgggcgcgccatt

SEQ ID NO: 3497870 - DNA, 25 bp, Homo sapien
gggacgcttggcaggcgcggagtcc

SEQ ID NO: 3497871 - DNA, 25 bp, Homo sapien
gacctcattgcagtgccccggggac

SEQ ID NO: 3497872 - DNA, 25 bp, Homo sapien
agcgggaaggagaggcgcctcccgg

SEQ ID NO: 3497873 - DNA, 25 bp, Homo sapien
gaaatgccacgtggtcactgtgcac

SEQ ID NO: 3497874 - DNA, 25 bp, Homo sapien
tcaagctggagcactactgaccctg

SEQ ID NO: 3497875 - DNA, 25 bp, Homo sapien
agcttcaagtgccttttgctgcgca

SEQ ID NO: 3497876 - DNA, 25 bp, Homo sapien
tgctgctgcacccaactactgagct

SEQ ID NO: 3497877 - DNA, 25 bp, Homo sapien
tctcagccccctgagtggccgggac

SEQ ID NO: 3497878 - DNA, 25 bp, Homo sapien
tcctgtctcagccccctgagtggcc

SEQ ID NO: 3497879 - DNA, 25 bp, Homo sapien
tgtctcagccccctgagtggccggg

SEQ ID NO: 3497880 - DNA, 25 bp, Homo sapien
ctgtctcagccccctgagtggccgg

SEQ ID NO: 3497881 - DNA, 25 bp, Homo sapien
cacagtgtgaaagctgggcctagac

SEQ ID NO: 3497882 - DNA, 25 bp, Homo sapien
cttcagattccgagagagagggtac

SEQ ID NO: 3497883 - DNA, 25 bp, Homo sapien
tcaaagagccccgagatggaaggct

SEQ ID NO: 3497884 - DNA, 25 bp, Homo sapien
taggagagttcatggcccagtctgc

SEQ ID NO: 3497885 - DNA, 25 bp, Homo sapien
gcggcagcagtagcgcttcaggccc

SEQ ID NO: 3497886 - DNA, 25 bp, Homo sapien
cagcagtagcgcttcaggcccaggg

SEQ ID NO: 3497887 - DNA, 25 bp, Homo sapien
ctgtgtcgaggggaggagcagaggc

SEQ ID NO: 3497888 - DNA, 25 bp, Homo sapien
gcgaagagattcacccggctcagaa

SEQ ID NO: 3497889 - DNA, 25 bp, Homo sapien
cacccggctcagaagctgagatcta

SEQ ID NO: 3497890 - DNA, 25 bp, Homo sapien
cagaagctgagatctagcagaatga

SEQ ID NO: 3497891 - DNA, 25 bp, Homo sapien
cggcaaggcgaagagattcacccgg

SEQ ID NO: 3497892 - DNA, 25 bp, Homo sapien
gcctgcagcagccccaggtaagcct

SEQ ID NO: 3497893 - DNA, 25 bp, Homo sapien
tgcagcagccccaggtaagcctccc

SEQ ID NO: 3497894 - DNA, 25 bp, Homo sapien
cagcagccccaggtaagcctcccac

SEQ ID NO: 3497895 - DNA, 25 bp, Homo sapien
ctgcagcagccccaggtaagcctcc

SEQ ID NO: 3497896 - DNA, 25 bp, Homo sapien
ttgttgccgacgatcttgccacaag

SEQ ID NO: 3497897 - DNA, 25 bp, Homo sapien
gacgatcttgccacaagtgaagcag

SEQ ID NO: 3497898 - DNA, 25 bp, Homo sapien
acaagtgaagcagcgtacagggatg

SEQ ID NO: 3497899 - DNA, 25 bp, Homo sapien
tgaagcagcgtacagggatgatcat

SEQ ID NO: 3497900 - DNA, 25 bp, Homo sapien
cgcgtcccagactgcccggcccggc

SEQ ID NO: 3497901 - DNA, 25 bp, Homo sapien
gcggcggcgcgtcccagactgcccg

SEQ ID NO: 3497902 - DNA, 25 bp, Homo sapien
gcgcgtcccagactgcccggcccgg

SEQ ID NO: 3497903 - DNA, 25 bp, Homo sapien
cgtcccagactgcccggcccggccg

SEQ ID NO: 3497904 - DNA, 25 bp, Homo sapien
cgcgtccactgttgcgggagaatcg

SEQ ID NO: 3497905 - DNA, 25 bp, Homo sapien
ctggccgcagtttccgccgcgatgg

SEQ ID NO: 3497906 - DNA, 25 bp, Homo sapien
gagaatcggctccgctcgttctccg

SEQ ID NO: 3497907 - DNA, 25 bp, Homo sapien
tccgctcgttctccgctgctctggc

SEQ ID NO: 3497908 - DNA, 25 bp, Homo sapien
gtcttggtgcatcccggcgctacgg

SEQ ID NO: 3497909 - DNA, 25 bp, Homo sapien
gcggcggttcgcgtttctcgtgtcc

SEQ ID NO: 3497910 - DNA, 25 bp, Homo sapien
tccgcttgactgacagctgcgcggc

SEQ ID NO: 3497911 - DNA, 25 bp, Homo sapien
tacggcgtctgagcagggccgtaaa

SEQ ID NO: 3497912 - DNA, 25 bp, Homo sapien
cacgcagcaacaagtggggtccggc

SEQ ID NO: 3497913 - DNA, 25 bp, Homo sapien
ccagagccgacacgcagcaacaagt

SEQ ID NO: 3497914 - DNA, 25 bp, Homo sapien
gagccgacacgcagcaacaagtggg

SEQ ID NO: 3497915 - DNA, 25 bp, Homo sapien
gttcgagcccagagccgacacgcag

SEQ ID NO: 3497916 - DNA, 25 bp, Homo sapien
tgtccgcgttctttccgctctttcc

SEQ ID NO: 3497917 - DNA, 25 bp, Homo sapien
gccctggcctcagctgcgcaattac

SEQ ID NO: 3497918 - DNA, 25 bp, Homo sapien
tctcggcgctgagttcgggggtccc

SEQ ID NO: 3497919 - DNA, 25 bp, Homo sapien
gggtcccattctggacgcggcccag

SEQ ID NO: 3497920 - DNA, 25 bp, Homo sapien
ggagggagtcgtggaagaggtgctc

SEQ ID NO: 3497921 - DNA, 25 bp, Homo sapien
gggagtcgtggaagaggtgctcttt

SEQ ID NO: 3497922 - DNA, 25 bp, Homo sapien
gaggtgctctttgagctgaacctgg

SEQ ID NO: 3497923 - DNA, 25 bp, Homo sapien
tcgtggaagaggtgctctttgagct

SEQ ID NO: 3497924 - DNA, 25 bp, Homo sapien
aatggggggtcggtgtgcagtgaga

SEQ ID NO: 3497925 - DNA, 25 bp, Homo sapien
ttccttggaggtgcgaggtgggctg

SEQ ID NO: 3497926 - DNA, 25 bp, Homo sapien
gggtcggtgtgcagtgagaggcaaa

SEQ ID NO: 3497927 - DNA, 25 bp, Homo sapien
ctccttggaggtgcgagggcagtga

SEQ ID NO: 3497928 - DNA, 25 bp, Homo sapien
ctgccgctttctcagggcaatgctg

SEQ ID NO: 3497929 - DNA, 25 bp, Homo sapien
ctccccccaggatgagtggacgcac

SEQ ID NO: 3497930 - DNA, 25 bp, Homo sapien
gcggagccacgagccgaggccactt

SEQ ID NO: 3497931 - DNA, 25 bp, Homo sapien
agccacgtgcggagccacgagccga

SEQ ID NO: 3497932 - DNA, 25 bp, Homo sapien
ccagccacgtgcggagccacgagcc

SEQ ID NO: 3497933 - DNA, 25 bp, Homo sapien
cctgagtaacggtggcctggggtca

SEQ ID NO: 3497934 - DNA, 25 bp, Homo sapien
gacaggggccctgagtaacggtggc

SEQ ID NO: 3497935 - DNA, 25 bp, Homo sapien
gccaggttcagctgcgaggctgctg

SEQ ID NO: 3497936 - DNA, 25 bp, Homo sapien
aggggccctgagtaacggtggcctg

SEQ ID NO: 3497937 - DNA, 25 bp, Homo sapien
ggagtagtgggcactgcgtttggct

SEQ ID NO: 3497938 - DNA, 25 bp, Homo sapien
tcactccagagagctagttctgagg

SEQ ID NO: 3497939 - DNA, 25 bp, Homo sapien
agtgggcactgcgtttggctgccca

SEQ ID NO: 3497940 - DNA, 25 bp, Homo sapien
aggtgttgcggggttgagccagcag

SEQ ID NO: 3497941 - DNA, 25 bp, Homo sapien
tggcccacgagtaggtgctctgagc

SEQ ID NO: 3497942 - DNA, 25 bp, Homo sapien
ccttgcctggcccacgagtaggtgc

SEQ ID NO: 3497943 - DNA, 25 bp, Homo sapien
ccctggaggcgctgcacacggctga

SEQ ID NO: 3497944 - DNA, 25 bp, Homo sapien
acgagtaggtgctctgagcgctgcc

SEQ ID NO: 3497945 - DNA, 25 bp, Homo sapien
gcacggacgagtccacgtaccggcg

SEQ ID NO: 3497946 - DNA, 25 bp, Homo sapien
aaggagccggacttcgcgcgcggcg

SEQ ID NO: 3497947 - DNA, 25 bp, Homo sapien
ggacgagtccacgtaccggcgcagc

SEQ ID NO: 3497948 - DNA, 25 bp, Homo sapien
ggcaaggagccggacttcgcgcgcg

SEQ ID NO: 3497949 - DNA, 25 bp, Homo sapien
agtgttcgcgggagacactggcttt

SEQ ID NO: 3497950 - DNA, 25 bp, Homo sapien
tgagcagggccgtgggccatcagtg

SEQ ID NO: 3497951 - DNA, 25 bp, Homo sapien
ttccgagggtttgagccggctgccg

SEQ ID NO: 3497952 - DNA, 25 bp, Homo sapien
cggaagggaatcctggacactgagc

SEQ ID NO: 3497953 - DNA, 25 bp, Homo sapien
gcctcatggagccgcgaccctgtcc

SEQ ID NO: 3497954 - DNA, 25 bp, Homo sapien
ggccaggttggagcaagcctcatgg

SEQ ID NO: 3497955 - DNA, 25 bp, Homo sapien
aagcctcatggagccgcgaccctgt

SEQ ID NO: 3497956 - DNA, 25 bp, Homo sapien
agcaagcctcatggagccgcgaccc

SEQ ID NO: 3497957 - DNA, 25 bp, Homo sapien
ccccgctgccggagtcctgctgggc

SEQ ID NO: 3497958 - DNA, 25 bp, Homo sapien
tcaagatccccgcgtgtgtctgtcc

SEQ ID NO: 3497959 - DNA, 25 bp, Homo sapien
aagatccccgcgtgtgtctgtcctg

SEQ ID NO: 3497960 - DNA, 25 bp, Homo sapien
gatccccgcgtgtgtctgtcctgac

SEQ ID NO: 3497961 - DNA, 25 bp, Homo sapien
atggtcaggctagggcccctggtca

SEQ ID NO: 3497962 - DNA, 25 bp, Homo sapien
ggcccctggtcactgacggcctggg

SEQ ID NO: 3497963 - DNA, 25 bp, Homo sapien
cccatggtcaggctagggcccctgg

SEQ ID NO: 3497964 - DNA, 25 bp, Homo sapien
ctccacacccatggtcaggctaggg

SEQ ID NO: 3497965 - DNA, 25 bp, Homo sapien
atagaggccctcacccggtgatggc

SEQ ID NO: 3497966 - DNA, 25 bp, Homo sapien
tcacccggtgatggcagctccgctg

SEQ ID NO: 3497967 - DNA, 25 bp, Homo sapien
ctgccttcagcaaatagaggccctc

SEQ ID NO: 3497968 - DNA, 25 bp, Homo sapien
gccttcagcaaatagaggccctcac

SEQ ID NO: 3497969 - DNA, 25 bp, Homo sapien
agctgctgccagcgacactcttccc

SEQ ID NO: 3497970 - DNA, 25 bp, Homo sapien
gtaggtcagacttgtccacccggtg

SEQ ID NO: 3497971 - DNA, 25 bp, Homo sapien
ggcctctgtgtggagagggctgtct

SEQ ID NO: 3497972 - DNA, 25 bp, Homo sapien
gcggagatgtggcattggcagccca

SEQ ID NO: 3497973 - DNA, 25 bp, Homo sapien
ttgtccacccggtgacacaggcctg

SEQ ID NO: 3497974 - DNA, 25 bp, Homo sapien
agcgagtgtctgatggactgagcct

SEQ ID NO: 3497975 - DNA, 25 bp, Homo sapien
cctggtatgctggacggacattggc

SEQ ID NO: 3497976 - DNA, 25 bp, Homo sapien
ttgctgctgaagatcagggtgagcg

SEQ ID NO: 3497977 - DNA, 25 bp, Homo sapien
attggccagagatggtctcacgcag

SEQ ID NO: 3497978 - DNA, 25 bp, Homo sapien
ggcagtggacagtgtgagctgatgt

SEQ ID NO: 3497979 - DNA, 25 bp, Homo sapien
gggcagtggacagtgtgagctgatg

SEQ ID NO: 3497980 - DNA, 25 bp, Homo sapien
taaccacgtgcacgcattttatctg

SEQ ID NO: 3497981 - DNA, 25 bp, Homo sapien
tattaaccacgtgcacgcattttat

SEQ ID NO: 3497982 - DNA, 25 bp, Homo sapien
gtaattttattaaccacgtgcacgc

SEQ ID NO: 3497983 - DNA, 25 bp, Homo sapien
cgtgcacgcattttatctgtgtggg

SEQ ID NO: 3497984 - DNA, 25 bp, Homo sapien
tgtgatggtgtgaggcgtctgtggc

SEQ ID NO: 3497985 - DNA, 25 bp, Homo sapien
cgtgtggccacgtgtgatggtgtga

SEQ ID NO: 3497986 - DNA, 25 bp, Homo sapien
tgcagggcggtaacgcgtgcgtgtg

SEQ ID NO: 3497987 - DNA, 25 bp, Homo sapien
tgtgaggcgtctgtggcaacgtggg

SEQ ID NO: 3497988 - DNA, 25 bp, Homo sapien
ggttgcttggcgcttgaggccagga

SEQ ID NO: 3497989 - DNA, 25 bp, Homo sapien
gcatttcgtctggaatgagacttgt

SEQ ID NO: 3497990 - DNA, 25 bp, Homo sapien
ccccagcctgggcatttcgtctgga

SEQ ID NO: 3497991 - DNA, 25 bp, Homo sapien
cctgggcatttcgtctggaatgaga

SEQ ID NO: 3497992 - DNA, 25 bp, Homo sapien
gtctgcccctccacaagacctggga

SEQ ID NO: 3497993 - DNA, 25 bp, Homo sapien
tctggacccagggccatatcccttc

SEQ ID NO: 3497994 - DNA, 25 bp, Homo sapien
ggacccagggccatatcccttctct

SEQ ID NO: 3497995 - DNA, 25 bp, Homo sapien
tctgcccagttcttggggcagtgat

SEQ ID NO: 3497996 - DNA, 25 bp, Homo sapien
gcttgcatgcacctcgcctcccacc

SEQ ID NO: 3497997 - DNA, 25 bp, Homo sapien
cctgctcacacgcaccccggctcac

SEQ ID NO: 3497998 - DNA, 25 bp, Homo sapien
tggctcacattcacgcctgctcaca

SEQ ID NO: 3497999 - DNA, 25 bp, Homo sapien
ggctcacatgcacccccgcttgcat

SEQ ID NO: 3498000 - DNA, 25 bp, Homo sapien
tgtgcccaggtctcctattggctcc

SEQ ID NO: 3498001 - DNA, 25 bp, Homo sapien
ccctggtgcgtctccgggccgccct

SEQ ID NO: 3498002 - DNA, 25 bp, Homo sapien
ccctccaccgggctgtgctggctgc

SEQ ID NO: 3498003 - DNA, 25 bp, Homo sapien
tcccctatcaccctaagctgcttct

SEQ ID NO: 3498004 - DNA, 25 bp, Homo sapien
gcctggcctgaatcttggggcacca

SEQ ID NO: 3498005 - DNA, 25 bp, Homo sapien
gagcccagagggaccgaagacacca

SEQ ID NO: 3498006 - DNA, 25 bp, Homo sapien
acaccagtgacaggcctggcctgaa

SEQ ID NO: 3498007 - DNA, 25 bp, Homo sapien
gaccgaagacaccagtgacaggcct

SEQ ID NO: 3498008 - DNA, 25 bp, Homo sapien
tgtcatggccatcggcttcgtgggc

SEQ ID NO: 3498009 - DNA, 25 bp, Homo sapien
gccatcaaggagaacaagtgcctcc

SEQ ID NO: 3498010 - DNA, 25 bp, Homo sapien
gctgccgtgggatctagcaggactc

SEQ ID NO: 3498011 - DNA, 25 bp, Homo sapien
ttctgccctgcgcagaccagacggt

SEQ ID NO: 3498012 - DNA, 25 bp, Homo sapien
cccagattgacaggtatgcccagca

SEQ ID NO: 3498013 - DNA, 25 bp, Homo sapien
gaagaaaggcttgcacctgtacggc

SEQ ID NO: 3498014 - DNA, 25 bp, Homo sapien
tactgattaacatgcctggccgagg

SEQ ID NO: 3498015 - DNA, 25 bp, Homo sapien
tatccatgaggtacgtggccctggc

SEQ ID NO: 3498016 - DNA, 25 bp, Homo sapien
caatgctgatctggcaatgcctagc

SEQ ID NO: 3498017 - DNA, 25 bp, Homo sapien
gccacagggatgacggtcagttcag

SEQ ID NO: 3498018 - DNA, 25 bp, Homo sapien
ggagacacagcccgctctagacatc

SEQ ID NO: 3498019 - DNA, 25 bp, Homo sapien
tcatttccagctaattcctgcccca

SEQ ID NO: 3498020 - DNA, 25 bp, Homo sapien
agaacaacttgaatgttagcgtcag

SEQ ID NO: 3498021 - DNA, 25 bp, Homo sapien
acaacttgaatgttagcgtcagcac

SEQ ID NO: 3498022 - DNA, 25 bp, Homo sapien
aacttgaatgttagcgtcagcacct

SEQ ID NO: 3498023 - DNA, 25 bp, Homo sapien
caggacccccgagaacaacttgaat

SEQ ID NO: 3498024 - DNA, 25 bp, Homo sapien
gcacacaccacttgtatctcctatg

SEQ ID NO: 3498025 - DNA, 25 bp, Homo sapien
tctcctatgcccgtgtcaagcagca

SEQ ID NO: 3498026 - DNA, 25 bp, Homo sapien
gacgtccaggcggaggctttctcaa

SEQ ID NO: 3498027 - DNA, 25 bp, Homo sapien
ctgcactgtggcagctcgcaggcct

SEQ ID NO: 3498028 - DNA, 25 bp, Homo sapien
tcaccaccggctggagatgtcctga

SEQ ID NO: 3498029 - DNA, 25 bp, Homo sapien
attctgagtgagggacgcccaggcc

SEQ ID NO: 3498030 - DNA, 25 bp, Homo sapien
tgcgccctaacattactgactctaa

SEQ ID NO: 3498031 - DNA, 25 bp, Homo sapien
ttgcccgggacatgtacccacctat

SEQ ID NO: 3498032 - DNA, 25 bp, Homo sapien
caggggaacgagggccaccaggcct

SEQ ID NO: 3498033 - DNA, 25 bp, Homo sapien
atggtgacgaggggcaggggaacga

SEQ ID NO: 3498034 - DNA, 25 bp, Homo sapien
tggtgacgaggggcaggggaacgag

SEQ ID NO: 3498035 - DNA, 25 bp, Homo sapien
tgacgaggggcaggggaacgagggc

SEQ ID NO: 3498036 - DNA, 25 bp, Homo sapien
tatggcccacgggtcctgccgttgc

SEQ ID NO: 3498037 - DNA, 25 bp, Homo sapien
cctggacaccgctgcatggcagggt

SEQ ID NO: 3498038 - DNA, 25 bp, Homo sapien
cctcgctggaaatgcctgtcccgat

SEQ ID NO: 3498039 - DNA, 25 bp, Homo sapien
tcaccatgctccctgatgtgtccag

SEQ ID NO: 3498040 - DNA, 25 bp, Homo sapien
gccaaggtccaggaccagtttcaag

SEQ ID NO: 3498041 - DNA, 25 bp, Homo sapien
accagtttcaagagggtgggccagg

SEQ ID NO: 3498042 - DNA, 25 bp, Homo sapien
ctgagtccatttctagggcagcccc

SEQ ID NO: 3498043 - DNA, 25 bp, Homo sapien
agtccatttctagggcagcccctgc

SEQ ID NO: 3498044 - DNA, 25 bp, Homo sapien
tccatggcttagaaaagaacacgtc

SEQ ID NO: 3498045 - DNA, 25 bp, Homo sapien
cgagtccgggatggttccagagctt

SEQ ID NO: 3498046 - DNA, 25 bp, Homo sapien
cctcgaatccaggagtgggcgagtc

SEQ ID NO: 3498047 - DNA, 25 bp, Homo sapien
cagcaaacggagtggaggcctgtat

SEQ ID NO: 3498048 - DNA, 25 bp, Homo sapien
gagcaggtcgtagaagtagtccagg

SEQ ID NO: 3498049 - DNA, 25 bp, Homo sapien
agcaggtcgtagaagtagtccaggc

SEQ ID NO: 3498050 - DNA, 25 bp, Homo sapien
ccggtcccacggctggcagcacacg

SEQ ID NO: 3498051 - DNA, 25 bp, Homo sapien
ggccagtgcctgctgtgctgtcgca

SEQ ID NO: 3498052 - DNA, 25 bp, Homo sapien
tgtgctgtcgcatggcccacccctc

SEQ ID NO: 3498053 - DNA, 25 bp, Homo sapien
gggatgtcctccaggccgaggggca

SEQ ID NO: 3498054 - DNA, 25 bp, Homo sapien
cagggttgggtagaagacgacgtgc

SEQ ID NO: 3498055 - DNA, 25 bp, Homo sapien
tgggtagaagacgacgtgcctccca

SEQ ID NO: 3498056 - DNA, 25 bp, Homo sapien
agaagacgacgtgcctcccactgcg

SEQ ID NO: 3498057 - DNA, 25 bp, Homo sapien
cttcagggttgggtagaagacgacg

SEQ ID NO: 3498058 - DNA, 25 bp, Homo sapien
ttgtactcgaagaagtgctctgagg

SEQ ID NO: 3498059 - DNA, 25 bp, Homo sapien
acaccatccggggcctgtggtcctt

SEQ ID NO: 3498060 - DNA, 25 bp, Homo sapien
tgtcccacaccatccggggcctgtg

SEQ ID NO: 3498061 - DNA, 25 bp, Homo sapien
ttcttgtactcgaagaagtgctctg

SEQ ID NO: 3498062 - DNA, 25 bp, Homo sapien
tacccccaaaggctgtggctctcag

SEQ ID NO: 3498063 - DNA, 25 bp, Homo sapien
ctgtacccccaaaggctgtggctct

SEQ ID NO: 3498064 - DNA, 25 bp, Homo sapien
ccccaaaggctgtggctctcagcag

SEQ ID NO: 3498065 - DNA, 25 bp, Homo sapien
caggggcagggccactcggggcagc

SEQ ID NO: 3498066 - DNA, 25 bp, Homo sapien
ggttccagaacactatgggccacag

SEQ ID NO: 3498067 - DNA, 25 bp, Homo sapien
agtcttgaacaatgaccaccccatg

SEQ ID NO: 3498068 - DNA, 25 bp, Homo sapien
gaggacaggctcattcccaaggtgc

SEQ ID NO: 3498069 - DNA, 25 bp, Homo sapien
gcacatctcacactgcacatttggg

SEQ ID NO: 3498070 - DNA, 25 bp, Homo sapien
cagaccaggcaacgtcatggaggct

SEQ ID NO: 3498071 - DNA, 25 bp, Homo sapien
ccctagactctggtaatgggatggc

SEQ ID NO: 3498072 - DNA, 25 bp, Homo sapien
gccacatgcaaacatggtccttcca

SEQ ID NO: 3498073 - DNA, 25 bp, Homo sapien
ctctgtgagaagaatgggatgtgca

SEQ ID NO: 3498074 - DNA, 25 bp, Homo sapien
atgaccagggcgctgtcagggaccc

SEQ ID NO: 3498075 - DNA, 25 bp, Homo sapien
ttggcgagtgggtggtgaccacgct

SEQ ID NO: 3498076 - DNA, 25 bp, Homo sapien
aggaatcgctactcccaagcaggcc

SEQ ID NO: 3498077 - DNA, 25 bp, Homo sapien
ccccagcctggtggtttggcgagtg

SEQ ID NO: 3498078 - DNA, 25 bp, Homo sapien
ggccatccaggctggtaactgggac

SEQ ID NO: 3498079 - DNA, 25 bp, Homo sapien
catccaggctggtaactgggacccc

SEQ ID NO: 3498080 - DNA, 25 bp, Homo sapien
ccatccaggctggtaactgggaccc

SEQ ID NO: 3498081 - DNA, 25 bp, Homo sapien
caggctggtaactgggacccccttg

SEQ ID NO: 3498082 - DNA, 25 bp, Homo sapien
acagtgagtggggagcgagcgaggg

SEQ ID NO: 3498083 - DNA, 25 bp, Homo sapien
gtcttttgggcgcaggcaccagcca

SEQ ID NO: 3498084 - DNA, 25 bp, Homo sapien
caggtcttttgggcgcaggcaccag

SEQ ID NO: 3498085 - DNA, 25 bp, Homo sapien
accagccacagtgagtggggagcga

SEQ ID NO: 3498086 - DNA, 25 bp, Homo sapien
tgtgagaaagatgtccttggacctc

SEQ ID NO: 3498087 - DNA, 25 bp, Homo sapien
cagctgcaaggcctcaaatggaaag

SEQ ID NO: 3498088 - DNA, 25 bp, Homo sapien
cagggacagaggttcgacgcgtttc

SEQ ID NO: 3498089 - DNA, 25 bp, Homo sapien
gacaaacctacagagacggtgggct

SEQ ID NO: 3498090 - DNA, 25 bp, Homo sapien
cacatgcagcaccccttggacttga

SEQ ID NO: 3498091 - DNA, 25 bp, Homo sapien
catgcagcaccccttggacttgacc

SEQ ID NO: 3498092 - DNA, 25 bp, Homo sapien
acatgcagcaccccttggacttgac

SEQ ID NO: 3498093 - DNA, 25 bp, Homo sapien
tggtatgctgtgagccgccctgagc

SEQ ID NO: 3498094 - DNA, 25 bp, Homo sapien
caaaggtagagcagtcatggtatgc

SEQ ID NO: 3498095 - DNA, 25 bp, Homo sapien
gggctgtcctggctccaaaggtaga

SEQ ID NO: 3498096 - DNA, 25 bp, Homo sapien
cgccctgagccaccattagaaaacg

SEQ ID NO: 3498097 - DNA, 25 bp, Homo sapien
agccagctccaaggaacgggtccaa

SEQ ID NO: 3498098 - DNA, 25 bp, Homo sapien
aggggcttgcaggctcgggccaggg

SEQ ID NO: 3498099 - DNA, 25 bp, Homo sapien
ggcttgcaggctcgggccagggctg

SEQ ID NO: 3498100 - DNA, 25 bp, Homo sapien
gagctgcttctggctggtgggagga

SEQ ID NO: 3498101 - DNA, 25 bp, Homo sapien
atttggtgtccagagtggatgacac

SEQ ID NO: 3498102 - DNA, 25 bp, Homo sapien
cctgtgcacgttgcaggcagtgagc

SEQ ID NO: 3498103 - DNA, 25 bp, Homo sapien
gcagtgagcccttgggctggatttg

SEQ ID NO: 3498104 - DNA, 25 bp, Homo sapien
ggatttggtgtccagagtggatgac

SEQ ID NO: 3498105 - DNA, 25 bp, Homo sapien
accacagggtgcagatgaacagtgc

SEQ ID NO: 3498106 - DNA, 25 bp, Homo sapien
ccacagggtgcagatgaacagtgca

SEQ ID NO: 3498107 - DNA, 25 bp, Homo sapien
ccgtgcagacattcaggcggaggca

SEQ ID NO: 3498108 - DNA, 25 bp, Homo sapien
actcgtagacgggactctggcacag

SEQ ID NO: 3498109 - DNA, 25 bp, Homo sapien
ggcaggagtgccgtccactcgtaga

SEQ ID NO: 3498110 - DNA, 25 bp, Homo sapien
gttccaaggagctgcgaacacggcc

SEQ ID NO: 3498111 - DNA, 25 bp, Homo sapien
gccctggggcatcgccctcgcctgt

SEQ ID NO: 3498112 - DNA, 25 bp, Homo sapien
cggagccccgcgtgtctcagtgtgt

SEQ ID NO: 3498113 - DNA, 25 bp, Homo sapien
gcagggacatgagagctggcaccca

SEQ ID NO: 3498114 - DNA, 25 bp, Homo sapien
agacagttgggcagacagggcggcc

SEQ ID NO: 3498115 - DNA, 25 bp, Homo sapien
aaaagaatcccagcccggtgtggtg

SEQ ID NO: 3498116 - DNA, 25 bp, Homo sapien
cactggatgagattaacggtaggct

SEQ ID NO: 3498117 - DNA, 25 bp, Homo sapien
ggtaaaattcgcaatgcctcaggca

SEQ ID NO: 3498118 - DNA, 25 bp, Homo sapien
gaaatgaccacgtcgggctcaggat

SEQ ID NO: 3498119 - DNA, 25 bp, Homo sapien
gacaccttcagcacggcagggagag

SEQ ID NO: 3498120 - DNA, 25 bp, Homo sapien
catcactctgtctccttacacccac

SEQ ID NO: 3498121 - DNA, 25 bp, Homo sapien
cagcccctatctctgactctgtggg

SEQ ID NO: 3498122 - DNA, 25 bp, Homo sapien
cccagtgacaccttcagcacggcag

SEQ ID NO: 3498123 - DNA, 25 bp, Homo sapien
ctggccccgacaacaggctcacggg

SEQ ID NO: 3498124 - DNA, 25 bp, Homo sapien
gctcacgggcatccttggaggtcgc

SEQ ID NO: 3498125 - DNA, 25 bp, Homo sapien
catccttggaggtcgcgtagtccat

SEQ ID NO: 3498126 - DNA, 25 bp, Homo sapien
acaacaggctcacgggcatccttgg

SEQ ID NO: 3498127 - DNA, 25 bp, Homo sapien
gagccccaggaggattttgcttcgc

SEQ ID NO: 3498128 - DNA, 25 bp, Homo sapien
aggacctggacgcaggctcgaaccc

SEQ ID NO: 3498129 - DNA, 25 bp, Homo sapien
cctggacgcaggctcgaacccagga

SEQ ID NO: 3498130 - DNA, 25 bp, Homo sapien
gccacttggacttcgggtccaggac

SEQ ID NO: 3498131 - DNA, 25 bp, Homo sapien
tgctcaaactccttgtgcgtgaaca

SEQ ID NO: 3498132 - DNA, 25 bp, Homo sapien
tagagtagtcgtaggtcatgaggct

SEQ ID NO: 3498133 - DNA, 25 bp, Homo sapien
gctcaaactccttgtgcgtgaacat

SEQ ID NO: 3498134 - DNA, 25 bp, Homo sapien
atgcgctgtagagtagtcgtaggtc

SEQ ID NO: 3498135 - DNA, 25 bp, Homo sapien
ctaatggcggggagacctgggccag

SEQ ID NO: 3498136 - DNA, 25 bp, Homo sapien
gcggggagacctgggccagggctgc

SEQ ID NO: 3498137 - DNA, 25 bp, Homo sapien
ggagacctgggccagggctgcccat

SEQ ID NO: 3498138 - DNA, 25 bp, Homo sapien
gggagacctgggccagggctgccca

SEQ ID NO: 3498139 - DNA, 25 bp, Homo sapien
ccagatctataagccaaggggagac

SEQ ID NO: 3498140 - DNA, 25 bp, Homo sapien
acggcagcaggacataggacaacag

SEQ ID NO: 3498141 - DNA, 25 bp, Homo sapien
ccacggcagcaggacataggacaac

SEQ ID NO: 3498142 - DNA, 25 bp, Homo sapien
gcagcaggacataggacaacagcat

SEQ ID NO: 3498143 - DNA, 25 bp, Homo sapien
agccccacatcgctcaggtcctggc

SEQ ID NO: 3498144 - DNA, 25 bp, Homo sapien
agatgccaggcagcgttggctgcgt

SEQ ID NO: 3498145 - DNA, 25 bp, Homo sapien
ccacatcgctcaggtcctggcggca

SEQ ID NO: 3498146 - DNA, 25 bp, Homo sapien
gcagcgttggctgcgtcggttccat

SEQ ID NO: 3498147 - DNA, 25 bp, Homo sapien
agccatctgtctccgtgccccgtgg

SEQ ID NO: 3498148 - DNA, 25 bp, Homo sapien
ttcacccagacacatgcgagagccg

SEQ ID NO: 3498149 - DNA, 25 bp, Homo sapien
cctgaggaccacccgggaatgtgga

SEQ ID NO: 3498150 - DNA, 25 bp, Homo sapien
tcctcctacttgcaagaaacactgc

SEQ ID NO: 3498151 - DNA, 25 bp, Homo sapien
acccaaccgcacacagcgagtggcc

SEQ ID NO: 3498152 - DNA, 25 bp, Homo sapien
gcacacagcgagtggcccgcagtca

SEQ ID NO: 3498153 - DNA, 25 bp, Homo sapien
tttgggggtgcacccaaccgcacac

SEQ ID NO: 3498154 - DNA, 25 bp, Homo sapien
gtttgggggtgcacccaaccgcaca

SEQ ID NO: 3498155 - DNA, 25 bp, Homo sapien
agagcctcggccaagtgggtgagca

SEQ ID NO: 3498156 - DNA, 25 bp, Homo sapien
tggtgcagagcctcggccaagtggg

SEQ ID NO: 3498157 - DNA, 25 bp, Homo sapien
gggtgatggcaggcgggatgaccag

SEQ ID NO: 3498158 - DNA, 25 bp, Homo sapien
gatggcaggcgggatgaccaggagg

SEQ ID NO: 3498159 - DNA, 25 bp, Homo sapien
cctggcgcagcaatgcgctcggagc

SEQ ID NO: 3498160 - DNA, 25 bp, Homo sapien
tccacttttctgttcggagccggct

SEQ ID NO: 3498161 - DNA, 25 bp, Homo sapien
catcttttgtgcagccccgtcccca

SEQ ID NO: 3498162 - DNA, 25 bp, Homo sapien
tgagggtcctcgagttcctctgacc

SEQ ID NO: 3498163 - DNA, 25 bp, Homo sapien
ccacgaagccatcgaaatgctggtt

SEQ ID NO: 3498164 - DNA, 25 bp, Homo sapien
ctccaccacgaagccatcgaaatgc

SEQ ID NO: 3498165 - DNA, 25 bp, Homo sapien
caccacgaagccatcgaaatgctgg

SEQ ID NO: 3498166 - DNA, 25 bp, Homo sapien
acgcgcttctggcttagcagctggt

SEQ ID NO: 3498167 - DNA, 25 bp, Homo sapien
tgaaagaagcagtcacaggtgagga

SEQ ID NO: 3498168 - DNA, 25 bp, Homo sapien
aaagaagcagtcacaggtgaggagg

SEQ ID NO: 3498169 - DNA, 25 bp, Homo sapien
agaagcagtcacaggtgaggagggc

SEQ ID NO: 3498170 - DNA, 25 bp, Homo sapien
ctgaaagaagcagtcacaggtgagg

SEQ ID NO: 3498171 - DNA, 25 bp, Homo sapien
gtctaagacgttccggaaatcatcg

SEQ ID NO: 3498172 - DNA, 25 bp, Homo sapien
gaaatcatcgtaagtccagtcctca

SEQ ID NO: 3498173 - DNA, 25 bp, Homo sapien
acctggaccacggtcttgctcagct

SEQ ID NO: 3498174 - DNA, 25 bp, Homo sapien
gtccagtcctcaaacaggagccgag

SEQ ID NO: 3498175 - DNA, 25 bp, Homo sapien
ggcatgcttcctgacagctcgcatc

SEQ ID NO: 3498176 - DNA, 25 bp, Homo sapien
ttggcatgcttcctgacagctcgca

SEQ ID NO: 3498177 - DNA, 25 bp, Homo sapien
ccttggcatgcttcctgacagctcg

SEQ ID NO: 3498178 - DNA, 25 bp, Homo sapien
tatgtgcaggcccttggcatgcttc

SEQ ID NO: 3498179 - DNA, 25 bp, Homo sapien
ctccctgagctgggacagctcagag

SEQ ID NO: 3498180 - DNA, 25 bp, Homo sapien
tccctgagctgggacagctcagagc

SEQ ID NO: 3498181 - DNA, 25 bp, Homo sapien
cctccctgagctgggacagctcaga

SEQ ID NO: 3498182 - DNA, 25 bp, Homo sapien
tcctccctggcattgaatgaaaatc

SEQ ID NO: 3498183 - DNA, 25 bp, Homo sapien
cctccctggcattgaatgaaaatcg

SEQ ID NO: 3498184 - DNA, 25 bp, Homo sapien
ttcctccctggcattgaatgaaaat

SEQ ID NO: 3498185 - DNA, 25 bp, Homo sapien
cttcctccctggcattgaatgaaaa

SEQ ID NO: 3498186 - DNA, 25 bp, Homo sapien
cttcccacttagcacaccagcccac

SEQ ID NO: 3498187 - DNA, 25 bp, Homo sapien
tggttctcacagtcaccacactcac

SEQ ID NO: 3498188 - DNA, 25 bp, Homo sapien
ctcacagtcaccacactcacactca

SEQ ID NO: 3498189 - DNA, 25 bp, Homo sapien
gggtgagggcgtggttctcacagtc

SEQ ID NO: 3498190 - DNA, 25 bp, Homo sapien
ccaaggggtgagggcgtggttctca

SEQ ID NO: 3498191 - DNA, 25 bp, Homo sapien
caagcacagtcaagcaggaaggatg

SEQ ID NO: 3498192 - DNA, 25 bp, Homo sapien
gggcaagcacagtcaagcaggaagg

SEQ ID NO: 3498193 - DNA, 25 bp, Homo sapien
tggggcaagcacagtcaagcaggaa

SEQ ID NO: 3498194 - DNA, 25 bp, Homo sapien
gcacagtcaagcaggaaggatgaga

SEQ ID NO: 3498195 - DNA, 25 bp, Homo sapien
cacggccacgtctcttcagctgcag

SEQ ID NO: 3498196 - DNA, 25 bp, Homo sapien
agctgcagccagacgggtgagatct

SEQ ID NO: 3498197 - DNA, 25 bp, Homo sapien
gcccgtgacctcaaacatctcacgg

SEQ ID NO: 3498198 - DNA, 25 bp, Homo sapien
tgacatcgtagccatggctgttcca

SEQ ID NO: 3498199 - DNA, 25 bp, Homo sapien
gatgctcaagaaccacactctcagc

SEQ ID NO: 3498200 - DNA, 25 bp, Homo sapien
agcaaagtgtctgtcccgggccttt

SEQ ID NO: 3498201 - DNA, 25 bp, Homo sapien
ggcctttgccgagcagtagctgcga

SEQ ID NO: 3498202 - DNA, 25 bp, Homo sapien
tggagtgacatagcccagtacatcc

SEQ ID NO: 3498203 - DNA, 25 bp, Homo sapien
gacagggtagtgtgaacagggctgc

SEQ ID NO: 3498204 - DNA, 25 bp, Homo sapien
ggcatctgactttgacagggtagtg

SEQ ID NO: 3498205 - DNA, 25 bp, Homo sapien
tctttgaggcggcttttttggcatc

SEQ ID NO: 3498206 - DNA, 25 bp, Homo sapien
agcagcgtctttgaggcggcttttt

SEQ ID NO: 3498207 - DNA, 25 bp, Homo sapien
tgtgtcacagtagggtccaacctcg

SEQ ID NO: 3498208 - DNA, 25 bp, Homo sapien
ggtgtgtcacagtagggtccaacct

SEQ ID NO: 3498209 - DNA, 25 bp, Homo sapien
gtaggtgtgtcacagtagggtccaa

SEQ ID NO: 3498210 - DNA, 25 bp, Homo sapien
tgtcacagtagggtccaacctcggg

SEQ ID NO: 3498211 - DNA, 25 bp, Homo sapien
ggatgttcatggacctggctctccc

SEQ ID NO: 3498212 - DNA, 25 bp, Homo sapien
gaggatgttcatggacctggctctc

SEQ ID NO: 3498213 - DNA, 25 bp, Homo sapien
tgctcgtggtgtgccggtcaatgaa

SEQ ID NO: 3498214 - DNA, 25 bp, Homo sapien
gccatgctcgtggtgtgccggtcaa

SEQ ID NO: 3498215 - DNA, 25 bp, Homo sapien
gacccctctagaccagctgagaggc

SEQ ID NO: 3498216 - DNA, 25 bp, Homo sapien
cctggagcaagatcaaccagtgaag

SEQ ID NO: 3498217 - DNA, 25 bp, Homo sapien
gaacagccacggcagttccgagagg

SEQ ID NO: 3498218 - DNA, 25 bp, Homo sapien
acagcagcacccagtacatggagcc

SEQ ID NO: 3498219 - DNA, 25 bp, Homo sapien
agcagcacccagtacatggagccac

SEQ ID NO: 3498220 - DNA, 25 bp, Homo sapien
cagtgagtgcttgaacagccacggc

SEQ ID NO: 3498221 - DNA, 25 bp, Homo sapien
gccaggctgaaacggtggctgcctc

SEQ ID NO: 3498222 - DNA, 25 bp, Homo sapien
caggctgaaacggtggctgcctcag

SEQ ID NO: 3498223 - DNA, 25 bp, Homo sapien
ccaggctgaaacggtggctgcctca

SEQ ID NO: 3498224 - DNA, 25 bp, Homo sapien
ctggccaggctgaaacggtggctgc

SEQ ID NO: 3498225 - DNA, 25 bp, Homo sapien
ctctgaggcccgtgaggacactctc

SEQ ID NO: 3498226 - DNA, 25 bp, Homo sapien
ctgaggcccgtgaggacactctcca

SEQ ID NO: 3498227 - DNA, 25 bp, Homo sapien
cggccgctcggctctgaggcccgtg

SEQ ID NO: 3498228 - DNA, 25 bp, Homo sapien
gctcggctctgaggcccgtgaggac

SEQ ID NO: 3498229 - DNA, 25 bp, Homo sapien
aaactgaggccgtgcaaggaggagg

SEQ ID NO: 3498230 - DNA, 25 bp, Homo sapien
aactgaggccgtgcaaggaggagga

SEQ ID NO: 3498231 - DNA, 25 bp, Homo sapien
ccggcgcgcccactttgcgggaggg

SEQ ID NO: 3498232 - DNA, 25 bp, Homo sapien
ggccgagcctcgctgcccggcgcgc

SEQ ID NO: 3498233 - DNA, 25 bp, Homo sapien
cccctcgcgcttggatgaacgagcg

SEQ ID NO: 3498234 - DNA, 25 bp, Homo sapien
gccttgcacattgcacgagccggag

SEQ ID NO: 3498235 - DNA, 25 bp, Homo sapien
gagctggttatcaggttcccggccc

SEQ ID NO: 3498236 - DNA, 25 bp, Homo sapien
gcgttcaccttgagcgcccctggtg

SEQ ID NO: 3498237 - DNA, 25 bp, Homo sapien
cactgcctgtctgccgtgggcatgg

SEQ ID NO: 3498238 - DNA, 25 bp, Homo sapien
gtgggtgtggagtgccctggcggag

SEQ ID NO: 3498239 - DNA, 25 bp, Homo sapien
ctggcggaggtccaggctctgccct

SEQ ID NO: 3498240 - DNA, 25 bp, Homo sapien
taggcccaggtctgacctgccctga

SEQ ID NO: 3498241 - DNA, 25 bp, Homo sapien
gcctgaggatgcctctcacagacat

SEQ ID NO: 3498242 - DNA, 25 bp, Homo sapien
tgaggatgcctctcacagacatcct

SEQ ID NO: 3498243 - DNA, 25 bp, Homo sapien
atcctcaaaagcactcgaaggctgg

SEQ ID NO: 3498244 - DNA, 25 bp, Homo sapien
cgacagataggatcctgtctcaaaa

SEQ ID NO: 3498245 - DNA, 25 bp, Homo sapien
cattctagttcagaggccggaagcc

SEQ ID NO: 3498246 - DNA, 25 bp, Homo sapien
ggctctgggcgactcctcatttgca

SEQ ID NO: 3498247 - DNA, 25 bp, Homo sapien
tctaactaggagaccttggcctggg

SEQ ID NO: 3498248 - DNA, 25 bp, Homo sapien
aacagtggcagcctcgtgactctgt

SEQ ID NO: 3498249 - DNA, 25 bp, Homo sapien
tctctgcctgtgttccacgtgtggg

SEQ ID NO: 3498250 - DNA, 25 bp, Homo sapien
cctggccagtgacagttgcgtgtag

SEQ ID NO: 3498251 - DNA, 25 bp, Homo sapien
ttggttgctgggctgatgctgagcc

SEQ ID NO: 3498252 - DNA, 25 bp, Homo sapien
ggctgatgctgagccccgaggtggg

SEQ ID NO: 3498253 - DNA, 25 bp, Homo sapien
tgggcgtattggtgtacacatctat

SEQ ID NO: 3498254 - DNA, 25 bp, Homo sapien
ggcgtattggtgtacacatctatag

SEQ ID NO: 3498255 - DNA, 25 bp, Homo sapien
tattggtgtacacatctatagtccc

SEQ ID NO: 3498256 - DNA, 25 bp, Homo sapien
cgtattggtgtacacatctatagtc

SEQ ID NO: 3498257 - DNA, 25 bp, Homo sapien
gactttagcttgaaagctgagctgg

SEQ ID NO: 3498258 - DNA, 25 bp, Homo sapien
gaaccttcctgactttagcttgaaa

SEQ ID NO: 3498259 - DNA, 25 bp, Homo sapien
cttcctgactttagcttgaaagctg

SEQ ID NO: 3498260 - DNA, 25 bp, Homo sapien
tcagaaccttcctgactttagcttg

SEQ ID NO: 3498261 - DNA, 25 bp, Homo sapien
aggtgggtgttcccgtgtagaagtg

SEQ ID NO: 3498262 - DNA, 25 bp, Homo sapien
tgggtgggataggttgaggtgggtg

SEQ ID NO: 3498263 - DNA, 25 bp, Homo sapien
gttgaggtgggtgttcccgtgtaga

SEQ ID NO: 3498264 - DNA, 25 bp, Homo sapien
cgggtgggtgggataggttgaggtg

SEQ ID NO: 3498265 - DNA, 25 bp, Homo sapien
aatggttgggggtatcaaggcttca

SEQ ID NO: 3498266 - DNA, 25 bp, Homo sapien
gaatggttgggggtatcaaggcttc

SEQ ID NO: 3498267 - DNA, 25 bp, Homo sapien
ggttgggggtatcaaggcttcagca

SEQ ID NO: 3498268 - DNA, 25 bp, Homo sapien
ttgggggtatcaaggcttcagcagg

SEQ ID NO: 3498269 - DNA, 25 bp, Homo sapien
ccactgtgcctgggcggttttgaat

SEQ ID NO: 3498270 - DNA, 25 bp, Homo sapien
ctgtgcctgggcggttttgaatttt

SEQ ID NO: 3498271 - DNA, 25 bp, Homo sapien
caccgcgcccagctggggtttcacc

SEQ ID NO: 3498272 - DNA, 25 bp, Homo sapien
aagtgatgcgcctgccttgggcccc

SEQ ID NO: 3498273 - DNA, 25 bp, Homo sapien
tcgaggcagtgtcttctctgaatgc

SEQ ID NO: 3498274 - DNA, 25 bp, Homo sapien
aggcagtgtcttctctgaatgcttc

SEQ ID NO: 3498275 - DNA, 25 bp, Homo sapien
tgatgtggtttttcctccggctgct

SEQ ID NO: 3498276 - DNA, 25 bp, Homo sapien
tcttgaggccgttgtttgatgtggt

SEQ ID NO: 3498277 - DNA, 25 bp, Homo sapien
ggactctcgactctcttctcttgct

SEQ ID NO: 3498278 - DNA, 25 bp, Homo sapien
agttcttccagaggactctcgactc

SEQ ID NO: 3498279 - DNA, 25 bp, Homo sapien
tgttgtgagcccggctgccatcatt

SEQ ID NO: 3498280 - DNA, 25 bp, Homo sapien
ggtgggtgttgtgagcccggctgcc

SEQ ID NO: 3498281 - DNA, 25 bp, Homo sapien
agatgcaggtggcagcggagatggc

SEQ ID NO: 3498282 - DNA, 25 bp, Homo sapien
agatggcaagagtaagagagtcccg

SEQ ID NO: 3498283 - DNA, 25 bp, Homo sapien
atggcaagagtaagagagtcccgac

SEQ ID NO: 3498284 - DNA, 25 bp, Homo sapien
gtggcagcggagatggcaagagtaa

SEQ ID NO: 3498285 - DNA, 25 bp, Homo sapien
gatggccggaatagagcactcgttt

SEQ ID NO: 3498286 - DNA, 25 bp, Homo sapien
gatgctgtagagactgacatggcac

SEQ ID NO: 3498287 - DNA, 25 bp, Homo sapien
cactcgtttggaggaaaagcggaca

SEQ ID NO: 3498288 - DNA, 25 bp, Homo sapien
tggtgatcccgtcgctcaggaaatg

SEQ ID NO: 3498289 - DNA, 25 bp, Homo sapien
actgattccctagtggctgtcctgg

SEQ ID NO: 3498290 - DNA, 25 bp, Homo sapien
tgactgattccctagtggctgtcct

SEQ ID NO: 3498291 - DNA, 25 bp, Homo sapien
gactgattccctagtggctgtcctg

SEQ ID NO: 3498292 - DNA, 25 bp, Homo sapien
caggctgcccggtgctttggggagg

SEQ ID NO: 3498293 - DNA, 25 bp, Homo sapien
ggtgacaggctgcccggtgctttgg

SEQ ID NO: 3498294 - DNA, 25 bp, Homo sapien
gtgacaggctgcccggtgctttggg

SEQ ID NO: 3498295 - DNA, 25 bp, Homo sapien
tgacaggctgcccggtgctttgggg

SEQ ID NO: 3498296 - DNA, 25 bp, Homo sapien
agcgtctccctctacagtgaacatg

SEQ ID NO: 3498297 - DNA, 25 bp, Homo sapien
ggtggcgtgtgcagcccacatgctt

SEQ ID NO: 3498298 - DNA, 25 bp, Homo sapien
gatcagtgtaaaggtagcgtctccc

SEQ ID NO: 3498299 - DNA, 25 bp, Homo sapien
gaacatgcgttattaaaccagaggc

SEQ ID NO: 3498300 - DNA, 25 bp, Homo sapien
ggatctgggctaagcatgacggaac

SEQ ID NO: 3498301 - DNA, 25 bp, Homo sapien
tctggctcttcgatgctggcaggga

SEQ ID NO: 3498302 - DNA, 25 bp, Homo sapien
ggctcttcgatgctggcagggatct

SEQ ID NO: 3498303 - DNA, 25 bp, Homo sapien
taagcatgacggaacttcccagttt

SEQ ID NO: 3498304 - DNA, 25 bp, Homo sapien
ttgttgttgtcgttggtactcttca

SEQ ID NO: 3498305 - DNA, 25 bp, Homo sapien
tgttgttgtcgttggtactcttcac

SEQ ID NO: 3498306 - DNA, 25 bp, Homo sapien
tgatgtctgctttagaattttgttg

SEQ ID NO: 3498307 - DNA, 25 bp, Homo sapien
aagaagttcctttctctatctagtt

SEQ ID NO: 3498308 - DNA, 25 bp, Homo sapien
cgtgatgagcggcaatcctcagcca

SEQ ID NO: 3498309 - DNA, 25 bp, Homo sapien
cacgggagcctcgttcctgattgtt

SEQ ID NO: 3498310 - DNA, 25 bp, Homo sapien
tgctctcgcccctctgcgtgatgag

SEQ ID NO: 3498311 - DNA, 25 bp, Homo sapien
caggcaggtgctcgttgactgtagc

SEQ ID NO: 3498312 - DNA, 25 bp, Homo sapien
ccccaacactaatctgttcagacga

SEQ ID NO: 3498313 - DNA, 25 bp, Homo sapien
ctttaccccaacactaatctgttca

SEQ ID NO: 3498314 - DNA, 25 bp, Homo sapien
cactaatctgttcagacgaccttca

SEQ ID NO: 3498315 - DNA, 25 bp, Homo sapien
caacactaatctgttcagacgacct

SEQ ID NO: 3498316 - DNA, 25 bp, Homo sapien
tgggctccatgactgtgcctccgtg

SEQ ID NO: 3498317 - DNA, 25 bp, Homo sapien
tcagttcaggtaagagccgcctgtg

SEQ ID NO: 3498318 - DNA, 25 bp, Homo sapien
tgcgtgtccgacttcacggaggcgc

SEQ ID NO: 3498319 - DNA, 25 bp, Homo sapien
ggcgccagtcctcaacattcagttc

SEQ ID NO: 3498320 - DNA, 25 bp, Homo sapien
tgcgcacaagtaaggaagccgtttc

SEQ ID NO: 3498321 - DNA, 25 bp, Homo sapien
acacacgtgtgtggctcaggaggaa

SEQ ID NO: 3498322 - DNA, 25 bp, Homo sapien
gattatgtgaattgctctcagcgca

SEQ ID NO: 3498323 - DNA, 25 bp, Homo sapien
tctgtttcagatgtaccggctcacg

SEQ ID NO: 3498324 - DNA, 25 bp, Homo sapien
ttctggcaaaagcacgtgtcctggc

SEQ ID NO: 3498325 - DNA, 25 bp, Homo sapien
ccttgggaggagcacagctgaccct

SEQ ID NO: 3498326 - DNA, 25 bp, Homo sapien
tgtcctggccggatgtaactgttct

SEQ ID NO: 3498327 - DNA, 25 bp, Homo sapien
ccagctcctgtttgtgaagggcgtc

SEQ ID NO: 3498328 - DNA, 25 bp, Homo sapien
aggctgcacgtctgacacctgagag

SEQ ID NO: 3498329 - DNA, 25 bp, Homo sapien
caagactcagaggtgtgctcgtctc

SEQ ID NO: 3498330 - DNA, 25 bp, Homo sapien
catgtgccacctgcggcttgtgtct

SEQ ID NO: 3498331 - DNA, 25 bp, Homo sapien
tctttcctgtcagagtgggcgtccc

SEQ ID NO: 3498332 - DNA, 25 bp, Homo sapien
gagcaggcagcgaccctgctagtct

SEQ ID NO: 3498333 - DNA, 25 bp, Homo sapien
tttggagtctctgaccgggtgacgc

SEQ ID NO: 3498334 - DNA, 25 bp, Homo sapien
atgggtctggtcgagcgcctgctct

SEQ ID NO: 3498335 - DNA, 25 bp, Homo sapien
tgcctgggaggtccgtgaccactgt

SEQ ID NO: 3498336 - DNA, 25 bp, Homo sapien
ctgcagggtgagtacgagccgccgg

SEQ ID NO: 3498337 - DNA, 25 bp, Homo sapien
cgagccgccggccaggcgtgctggg

SEQ ID NO: 3498338 - DNA, 25 bp, Homo sapien
gggtgagtacgagccgccggccagg

SEQ ID NO: 3498339 - DNA, 25 bp, Homo sapien
gccggccaggcgtgctgggatcggg

SEQ ID NO: 3498340 - DNA, 25 bp, Homo sapien
gcaggggcataaggcccctccctcc

SEQ ID NO: 3498341 - DNA, 25 bp, Homo sapien
ctgccgagaagtcaagacagagcag

SEQ ID NO: 3498342 - DNA, 25 bp, Homo sapien
gccgagaagtcaagacagagcaggg

SEQ ID NO: 3498343 - DNA, 25 bp, Homo sapien
tgcaggggcataaggcccctccctc

SEQ ID NO: 3498344 - DNA, 25 bp, Homo sapien
tggtggacgtggggcaggcctccca

SEQ ID NO: 3498345 - DNA, 25 bp, Homo sapien
gcaggcgcctgggtggggtgcccga

SEQ ID NO: 3498346 - DNA, 25 bp, Homo sapien
gggttgtgagcaccttggtggacgt

SEQ ID NO: 3498347 - DNA, 25 bp, Homo sapien
ctgggtggggtgcccgaacctctct

SEQ ID NO: 3498348 - DNA, 25 bp, Homo sapien
tcacagcgggttaccgtcacgttcg

SEQ ID NO: 3498349 - DNA, 25 bp, Homo sapien
gggttaccgtcacgttcgccatgca

SEQ ID NO: 3498350 - DNA, 25 bp, Homo sapien
atgcaggcgccctcacagcgggtta

SEQ ID NO: 3498351 - DNA, 25 bp, Homo sapien
atgcaccccttgaacgtgatctcct

SEQ ID NO: 3498352 - DNA, 25 bp, Homo sapien
cctctctggttggccagacccagga

SEQ ID NO: 3498353 - DNA, 25 bp, Homo sapien
ctctctggttggccagacccaggac

SEQ ID NO: 3498354 - DNA, 25 bp, Homo sapien
gcctctctggttggccagacccagg

SEQ ID NO: 3498355 - DNA, 25 bp, Homo sapien
ccccagagcgggacatatggtgttg

SEQ ID NO: 3498356 - DNA, 25 bp, Homo sapien
gccgaggacaccgtgccagtgaccc

SEQ ID NO: 3498357 - DNA, 25 bp, Homo sapien
agtgaccccagagcgggacatatgg

SEQ ID NO: 3498358 - DNA, 25 bp, Homo sapien
tgccagtgaccccagagcgggacat

SEQ ID NO: 3498359 - DNA, 25 bp, Homo sapien
tgcatgcgagggacccagtccctgg

SEQ ID NO: 3498360 - DNA, 25 bp, Homo sapien
gaaggcaactgtggcgttgtcgcct

SEQ ID NO: 3498361 - DNA, 25 bp, Homo sapien
tggaggtcgatgcatgcgagggacc

SEQ ID NO: 3498362 - DNA, 25 bp, Homo sapien
gcgttgtcgcctggtggaggtcgat

SEQ ID NO: 3498363 - DNA, 25 bp, Homo sapien
taggtgtcccgagagaagataccgg

SEQ ID NO: 3498364 - DNA, 25 bp, Homo sapien
gaggtgggcgtaggtgtcccgagag

SEQ ID NO: 3498365 - DNA, 25 bp, Homo sapien
gtgaggtgggcgtaggtgtcccgag

SEQ ID NO: 3498366 - DNA, 25 bp, Homo sapien
gcgtaggtgtcccgagagaagatac

SEQ ID NO: 3498367 - DNA, 25 bp, Homo sapien
caaagcctgatgtgggaactcgggt

SEQ ID NO: 3498368 - DNA, 25 bp, Homo sapien
cgtcacccccgaggtgagtgacaca

SEQ ID NO: 3498369 - DNA, 25 bp, Homo sapien
ggtgagagaagtggaccgcgaggtg

SEQ ID NO: 3498370 - DNA, 25 bp, Homo sapien
tcaggaaccgtgtggtaggcgacaa

SEQ ID NO: 3498371 - DNA, 25 bp, Homo sapien
acggaaatgcaatggtgctggaggc

SEQ ID NO: 3498372 - DNA, 25 bp, Homo sapien
tgggagacacggtaacagtggatat

SEQ ID NO: 3498373 - DNA, 25 bp, Homo sapien
cctgggcgtggacggaaatgcaatg

SEQ ID NO: 3498374 - DNA, 25 bp, Homo sapien
gggtgggagacacggtaacagtgga

SEQ ID NO: 3498375 - DNA, 25 bp, Homo sapien
gcagctggagaagaaggaaaaagag

SEQ ID NO: 3498376 - DNA, 25 bp, Homo sapien
gagaagaaggaaaaagaggagatgc

SEQ ID NO: 3498377 - DNA, 25 bp, Homo sapien
ctaatggtagtagaggcagctggag

SEQ ID NO: 3498378 - DNA, 25 bp, Homo sapien
agaaggaaaaagaggagatgcagac

SEQ ID NO: 3498379 - DNA, 25 bp, Homo sapien
gatgcagtcgtgggatgagtggaca

SEQ ID NO: 3498380 - DNA, 25 bp, Homo sapien
actgatgcagtcgtgggatgagtgg

SEQ ID NO: 3498381 - DNA, 25 bp, Homo sapien
tgatgcagtcgtgggatgagtggac

SEQ ID NO: 3498382 - DNA, 25 bp, Homo sapien
ctgatgcagtcgtgggatgagtgga

SEQ ID NO: 3498383 - DNA, 25 bp, Homo sapien
ccgagctcagggttgtggagtgcac

SEQ ID NO: 3498384 - DNA, 25 bp, Homo sapien
gatgtgccaacagaaggcgatgaag

SEQ ID NO: 3498385 - DNA, 25 bp, Homo sapien
ggaagatgtgccaacagaaggcgat

SEQ ID NO: 3498386 - DNA, 25 bp, Homo sapien
gggcggacacgaaagaggaagatgt

SEQ ID NO: 3498387 - DNA, 25 bp, Homo sapien
ggaggagggcacataagaagaaaca

SEQ ID NO: 3498388 - DNA, 25 bp, Homo sapien
gaggagggcacataagaagaaacag

SEQ ID NO: 3498389 - DNA, 25 bp, Homo sapien
gggaggagggcacataagaagaaac

SEQ ID NO: 3498390 - DNA, 25 bp, Homo sapien
ccaagacgaggaggatatgaaggaa

SEQ ID NO: 3498391 - DNA, 25 bp, Homo sapien
ggacagctgattagttgtggaaaca

SEQ ID NO: 3498392 - DNA, 25 bp, Homo sapien
cggtggccttgagctagagttctga

SEQ ID NO: 3498393 - DNA, 25 bp, Homo sapien
agagttctgaggcagccaagacgag

SEQ ID NO: 3498394 - DNA, 25 bp, Homo sapien
gggtggaccctgtggccttgagcgt

SEQ ID NO: 3498395 - DNA, 25 bp, Homo sapien
ccctgtggccttgagcgttgttggt

SEQ ID NO: 3498396 - DNA, 25 bp, Homo sapien
gataggtagtggtggtctggaagga

SEQ ID NO: 3498397 - DNA, 25 bp, Homo sapien
ctgtgtgagtacttggagtcaccaa

SEQ ID NO: 3498398 - DNA, 25 bp, Homo sapien
tgtggtaaggtagggatgtagaagt

SEQ ID NO: 3498399 - DNA, 25 bp, Homo sapien
ttttggccgtgctaaatgagcttgg

SEQ ID NO: 3498400 - DNA, 25 bp, Homo sapien
gatggtgtgttgaggaagtgtggta

SEQ ID NO: 3498401 - DNA, 25 bp, Homo sapien
tcgtggtcggtggaggaatggtgcc

SEQ ID NO: 3498402 - DNA, 25 bp, Homo sapien
ctgtgtgtgggtagggatgatgacc

SEQ ID NO: 3498403 - DNA, 25 bp, Homo sapien
gtagggatgatgaccgtgtgagtac

SEQ ID NO: 3498404 - DNA, 25 bp, Homo sapien
tgggtagggatgatgaccgtgtgag

SEQ ID NO: 3498405 - DNA, 25 bp, Homo sapien
tgtgtgggtagggatgatgaccgtg

SEQ ID NO: 3498406 - DNA, 25 bp, Homo sapien
ggtcccgctggtggtcagcgtcatt

SEQ ID NO: 3498407 - DNA, 25 bp, Homo sapien
ttttggccgtgctaaatgagcttcg

SEQ ID NO: 3498408 - DNA, 25 bp, Homo sapien
gcgttgtcggtggaggaatcgtgcc

SEQ ID NO: 3498409 - DNA, 25 bp, Homo sapien
aagagatgggagtggtccctgtagg

SEQ ID NO: 3498410 - DNA, 25 bp, Homo sapien
gtgtgagtacttggagtcaccaaag

SEQ ID NO: 3498411 - DNA, 25 bp, Homo sapien
ttgaaggatgttgccgtcatgggac

SEQ ID NO: 3498412 - DNA, 25 bp, Homo sapien
gggtggaccctgtggccttgagcgt

SEQ ID NO: 3498413 - DNA, 25 bp, Homo sapien
ccctgtggccttgagcgttgttggt

SEQ ID NO: 3498414 - DNA, 25 bp, Homo sapien
ggaccctgtggccttgagcgttgtt

SEQ ID NO: 3498415 - DNA, 25 bp, Homo sapien
tgtgtggaggaagtgtgtgaatgta

SEQ ID NO: 3498416 - DNA, 25 bp, Homo sapien
gggtgatgactgtgtgagtacttgg

SEQ ID NO: 3498417 - DNA, 25 bp, Homo sapien
tgtgtgagtacttggagtcaccaag

SEQ ID NO: 3498418 - DNA, 25 bp, Homo sapien
gatgactgtgtgagtacttggagtc

SEQ ID NO: 3498419 - DNA, 25 bp, Homo sapien
ctgtgtgagtacttggagtcaccaa

SEQ ID NO: 3498420 - DNA, 25 bp, Homo sapien
tggctgtgggcctcgtgggttgtcc

SEQ ID NO: 3498421 - DNA, 25 bp, Homo sapien
cctgtcgtctgggtggccgttgttc

SEQ ID NO: 3498422 - DNA, 25 bp, Homo sapien
gtcgttcttgtttgagtggtctctg

SEQ ID NO: 3498423 - DNA, 25 bp, Homo sapien
cctggcagttcctgattggtcgatt

SEQ ID NO: 3498424 - DNA, 25 bp, Homo sapien
gccctgagctgcgtgctgactcctt

SEQ ID NO: 3498425 - DNA, 25 bp, Homo sapien
gagctgcgtgctgactccttcagtg

SEQ ID NO: 3498426 - DNA, 25 bp, Homo sapien
caggccctactttatccccttctgg

SEQ ID NO: 3498427 - DNA, 25 bp, Homo sapien
gcgtgctgactccttcagtgcagct

SEQ ID NO: 3498428 - DNA, 25 bp, Homo sapien
tgagctgtggacgtcgtggctgggc

SEQ ID NO: 3498429 - DNA, 25 bp, Homo sapien
tggtagtgtcattgtggtccgtgtt

SEQ ID NO: 3498430 - DNA, 25 bp, Homo sapien
tttgtggctgtcgatctcagtgtgg

SEQ ID NO: 3498431 - DNA, 25 bp, Homo sapien
ccctggttgtggcctgggtcactgt

SEQ ID NO: 3498432 - DNA, 25 bp, Homo sapien
gatgtggcttgtggggtgacggccg

SEQ ID NO: 3498433 - DNA, 25 bp, Homo sapien
ctgatgtggcttgtggggtgacggc

SEQ ID NO: 3498434 - DNA, 25 bp, Homo sapien
aggcagccctgatgtggcttgtggg

SEQ ID NO: 3498435 - DNA, 25 bp, Homo sapien
gggaggcagccctgatgtggcttgt

SEQ ID NO: 3498436 - DNA, 25 bp, Homo sapien
tgcttagctgaacggactgtcgtcc

SEQ ID NO: 3498437 - DNA, 25 bp, Homo sapien
ttagctgaacggactgtcgtcctgt

SEQ ID NO: 3498438 - DNA, 25 bp, Homo sapien
tgaacggactgtcgtcctgtcccct

SEQ ID NO: 3498439 - DNA, 25 bp, Homo sapien
cttgcttagctgaacggactgtcgt

SEQ ID NO: 3498440 - DNA, 25 bp, Homo sapien
cagcagatggggccctgctcggtgt

SEQ ID NO: 3498441 - DNA, 25 bp, Homo sapien
tgggcagcagatggggccctgctcg

SEQ ID NO: 3498442 - DNA, 25 bp, Homo sapien
cagatggggccctgctcggtgtggg

SEQ ID NO: 3498443 - DNA, 25 bp, Homo sapien
atggggccctgctcggtgtggggca

SEQ ID NO: 3498444 - DNA, 25 bp, Homo sapien
cataggaagttctacgctgggaatc

SEQ ID NO: 3498445 - DNA, 25 bp, Homo sapien
tttggctcccaagcataggaagttc

SEQ ID NO: 3498446 - DNA, 25 bp, Homo sapien
gaagttctacgctgggaatctgctt

SEQ ID NO: 3498447 - DNA, 25 bp, Homo sapien
ggaagcagggccatccctaagccca

SEQ ID NO: 3498448 - DNA, 25 bp, Homo sapien
tgccctctccatgggctcagctgga

SEQ ID NO: 3498449 - DNA, 25 bp, Homo sapien
agctgccctctccatgggctcagct

SEQ ID NO: 3498450 - DNA, 25 bp, Homo sapien
ctaggacctcctgcagctgccctct

SEQ ID NO: 3498451 - DNA, 25 bp, Homo sapien
cctgcagctgccctctccatgggct

SEQ ID NO: 3498452 - DNA, 25 bp, Homo sapien
gctggcaggggtgtgattagagctg

SEQ ID NO: 3498453 - DNA, 25 bp, Homo sapien
gtggtggaggttcccgtcatgggcc

SEQ ID NO: 3498454 - DNA, 25 bp, Homo sapien
agctgagaagcccgatggtggtgga

SEQ ID NO: 3498455 - DNA, 25 bp, Homo sapien
ggccagacttgcgtgggccgtgagc

SEQ ID NO: 3498456 - DNA, 25 bp, Homo sapien
tgggtggctgcggcgtggtgggcgg

SEQ ID NO: 3498457 - DNA, 25 bp, Homo sapien
ggtggctgcggcgtggtgggcggca

SEQ ID NO: 3498458 - DNA, 25 bp, Homo sapien
agctgcggcgtggtgggtggctgcg

SEQ ID NO: 3498459 - DNA, 25 bp, Homo sapien
cgtggtgggtggctgcggcgtggtg

SEQ ID NO: 3498460 - DNA, 25 bp, Homo sapien
ccctcctcgtggtcgaagtactcat

SEQ ID NO: 3498461 - DNA, 25 bp, Homo sapien
cccctcctcgtggtcgaagtactca

SEQ ID NO: 3498462 - DNA, 25 bp, Homo sapien
cgtggtcgaagtactcatcctggga

SEQ ID NO: 3498463 - DNA, 25 bp, Homo sapien
cctcgtggtcgaagtactcatcctg

SEQ ID NO: 3498464 - DNA, 25 bp, Homo sapien
gctggtagtgccacgtgcagttggc

SEQ ID NO: 3498465 - DNA, 25 bp, Homo sapien
ttcgatgttgctgcctgggacgctc

SEQ ID NO: 3498466 - DNA, 25 bp, Homo sapien
ctcctgtgtgtactggtactcgcca

SEQ ID NO: 3498467 - DNA, 25 bp, Homo sapien
ggtactcgccatggccgtcctgcgt

SEQ ID NO: 3498468 - DNA, 25 bp, Homo sapien
caggcctcgtagtagggcaggtggt

SEQ ID NO: 3498469 - DNA, 25 bp, Homo sapien
acggcatcgcacagacactcacagt

SEQ ID NO: 3498470 - DNA, 25 bp, Homo sapien
ctgtcacacccacatgcgtcgcgca

SEQ ID NO: 3498471 - DNA, 25 bp, Homo sapien
ccttgtccagacaggcttgggcgta

SEQ ID NO: 3498472 - DNA, 25 bp, Homo sapien
ctgcaggggtgtgtgccagtcagtg

SEQ ID NO: 3498473 - DNA, 25 bp, Homo sapien
tgcaggggtgtgtgccagtcagtgt

SEQ ID NO: 3498474 - DNA, 25 bp, Homo sapien
gcacagccctcgtgcccggtgccca

SEQ ID NO: 3498475 - DNA, 25 bp, Homo sapien
gcgcacagccctcgtgcccggtgcc

SEQ ID NO: 3498476 - DNA, 25 bp, Homo sapien
ggcaggcgcacagccctcgtgcccg

SEQ ID NO: 3498477 - DNA, 25 bp, Homo sapien
aggcgcacagccctcgtgcccggtg

SEQ ID NO: 3498478 - DNA, 25 bp, Homo sapien
gttgaagttgccacacaagccgcag

SEQ ID NO: 3498479 - DNA, 25 bp, Homo sapien
agcgggctctccttccacgagttca

SEQ ID NO: 3498480 - DNA, 25 bp, Homo sapien
tgctgcgcgtctcgaagtcgtcctt

SEQ ID NO: 3498481 - DNA, 25 bp, Homo sapien
tgatgacgctgcacttgcgctcggc

SEQ ID NO: 3498482 - DNA, 25 bp, Homo sapien
tgatgtccacgacaaggctcagcgc

SEQ ID NO: 3498483 - DNA, 25 bp, Homo sapien
gaggcacgggcgatcctgatgagga

SEQ ID NO: 3498484 - DNA, 25 bp, Homo sapien
tgagcgtcaggttgtacctcccggg

SEQ ID NO: 3498485 - DNA, 25 bp, Homo sapien
gtgtagtttctgtccgccagcacca

SEQ ID NO: 3498486 - DNA, 25 bp, Homo sapien
atggcccgtgagcatgtgaccccgg

SEQ ID NO: 3498487 - DNA, 25 bp, Homo sapien
gtgagcatgtgaccccggagttccc

SEQ ID NO: 3498488 - DNA, 25 bp, Homo sapien
tctgtcaggatcttgaaggtgggct

SEQ ID NO: 3498489 - DNA, 25 bp, Homo sapien
tgtgagtcgttgacaccacagacgt

SEQ ID NO: 3498490 - DNA, 25 bp, Homo sapien
gccctggaggccgtgcctctgggtc

SEQ ID NO: 3498491 - DNA, 25 bp, Homo sapien
cctggaggccgtgcctctgggtccc

SEQ ID NO: 3498492 - DNA, 25 bp, Homo sapien
gagccctggaggccgtgcctctggg

SEQ ID NO: 3498493 - DNA, 25 bp, Homo sapien
ccctggaggccgtgcctctgggtcc

SEQ ID NO: 3498494 - DNA, 25 bp, Homo sapien
cgtcgaatacgaagcgctggccgtc

SEQ ID NO: 3498495 - DNA, 25 bp, Homo sapien
gtcgaaggtgatgacgtggccctcc

SEQ ID NO: 3498496 - DNA, 25 bp, Homo sapien
tgtactcgcagttgccgtcgaatac

SEQ ID NO: 3498497 - DNA, 25 bp, Homo sapien
tggccctccccgtagagggtgcagg

SEQ ID NO: 3498498 - DNA, 25 bp, Homo sapien
actgcccgtcggcattctcgtagag

SEQ ID NO: 3498499 - DNA, 25 bp, Homo sapien
taggagacccccgagaactcacatg

SEQ ID NO: 3498500 - DNA, 25 bp, Homo sapien
ggagacccccgagaactcacatggg

SEQ ID NO: 3498501 - DNA, 25 bp, Homo sapien
cacacactgcccgtcggcattctcg

SEQ ID NO: 3498502 - DNA, 25 bp, Homo sapien
caaacttgttctcggaggactggct

SEQ ID NO: 3498503 - DNA, 25 bp, Homo sapien
gctgccccaaacttgttctcggagg

SEQ ID NO: 3498504 - DNA, 25 bp, Homo sapien
acaggctgccccaaacttgttctcg

SEQ ID NO: 3498505 - DNA, 25 bp, Homo sapien
cccaaacttgttctcggaggactgg

SEQ ID NO: 3498506 - DNA, 25 bp, Homo sapien
gctgcgggcaactcagccgcccgtt

SEQ ID NO: 3498507 - DNA, 25 bp, Homo sapien
ccgctgcgggcaactcagccgcccg

SEQ ID NO: 3498508 - DNA, 25 bp, Homo sapien
cgctgcgggcaactcagccgcccgt

SEQ ID NO: 3498509 - DNA, 25 bp, Homo sapien
gccgctgcgggcaactcagccgccc

SEQ ID NO: 3498510 - DNA, 25 bp, Homo sapien
tgatgccgttgatgacagtggactg

SEQ ID NO: 3498511 - DNA, 25 bp, Homo sapien
cagtggactgctcggccaggatgaa

SEQ ID NO: 3498512 - DNA, 25 bp, Homo sapien
caggatgaacttgtaaccctccagt

SEQ ID NO: 3498513 - DNA, 25 bp, Homo sapien
tagctgaaggtggtgttacccgtgc

SEQ ID NO: 3498514 - DNA, 25 bp, Homo sapien
tcctcgtagttgcaggcctggtaca

SEQ ID NO: 3498515 - DNA, 25 bp, Homo sapien
gaaaggtctcctcgtagttgcaggc

SEQ ID NO: 3498516 - DNA, 25 bp, Homo sapien
tacgtagtcgcccagggcggcacag

SEQ ID NO: 3498517 - DNA, 25 bp, Homo sapien
acgccccgcaaggagcaggcgtgta

SEQ ID NO: 3498518 - DNA, 25 bp, Homo sapien
actgtggcgtggcacctctcgaaca

SEQ ID NO: 3498519 - DNA, 25 bp, Homo sapien
gcacctctcgaacaccgtgcctgtc

SEQ ID NO: 3498520 - DNA, 25 bp, Homo sapien
ttcactgtggcgtggcacctctcga

SEQ ID NO: 3498521 - DNA, 25 bp, Homo sapien
tctcgaacaccgtgcctgtcctcag

SEQ ID NO: 3498522 - DNA, 25 bp, Homo sapien
gggtcagtctcacgctccagagcgg

SEQ ID NO: 3498523 - DNA, 25 bp, Homo sapien
tgaagtcatccgttgtgtccccgtt

SEQ ID NO: 3498524 - DNA, 25 bp, Homo sapien
gagtccacaaacagcgaggcggtgc

SEQ ID NO: 3498525 - DNA, 25 bp, Homo sapien
tacccatgctagtggtgaagtcatc

SEQ ID NO: 3498526 - DNA, 25 bp, Homo sapien
ccaacagtgacataggcctggaaga

SEQ ID NO: 3498527 - DNA, 25 bp, Homo sapien
gtggacgtctgcctgaagaccgtga

SEQ ID NO: 3498528 - DNA, 25 bp, Homo sapien
tctggtctgacctctgaactggggc

SEQ ID NO: 3498529 - DNA, 25 bp, Homo sapien
gctccagcccgaagctggtggccat

SEQ ID NO: 3498530 - DNA, 25 bp, Homo sapien
gggccacagactgggccaggacgta

SEQ ID NO: 3498531 - DNA, 25 bp, Homo sapien
ggccacagactgggccaggacgtac

SEQ ID NO: 3498532 - DNA, 25 bp, Homo sapien
ggggggccacagactgggccaggac

SEQ ID NO: 3498533 - DNA, 25 bp, Homo sapien
tctggggggccacagactgggccag

SEQ ID NO: 3498534 - DNA, 25 bp, Homo sapien
acttggcttctccgttgttggtgac

SEQ ID NO: 3498535 - DNA, 25 bp, Homo sapien
cttggcttctccgttgttggtgacc

SEQ ID NO: 3498536 - DNA, 25 bp, Homo sapien
cctgagtcagggtgcaggcaccagg

SEQ ID NO: 3498537 - DNA, 25 bp, Homo sapien
gcctgagtcagggtgcaggcaccag

SEQ ID NO: 3498538 - DNA, 25 bp, Homo sapien
ggcctgagtcagggtgcaggcacca

SEQ ID NO: 3498539 - DNA, 25 bp, Homo sapien
gagacgccggacttgtcgtacacag

SEQ ID NO: 3498540 - DNA, 25 bp, Homo sapien
cttgtcgtacacagccatgagggca

SEQ ID NO: 3498541 - DNA, 25 bp, Homo sapien
tctcggagtgtgagacgccggactt

SEQ ID NO: 3498542 - DNA, 25 bp, Homo sapien
atgagggcaccgtcctcgggaagct

SEQ ID NO: 3498543 - DNA, 25 bp, Homo sapien
gcctggcgtcaaatgtggtaacaaa

SEQ ID NO: 3498544 - DNA, 25 bp, Homo sapien
cgtcaaatgtggtaacaaaggagcc

SEQ ID NO: 3498545 - DNA, 25 bp, Homo sapien
acaaaggagccaccttccagggagc

SEQ ID NO: 3498546 - DNA, 25 bp, Homo sapien
agcggtagggcctggcgtcaaatgt

SEQ ID NO: 3498547 - DNA, 25 bp, Homo sapien
ttggagaggtcattcaggaccgtac

SEQ ID NO: 3498548 - DNA, 25 bp, Homo sapien
atacatggcgccgtggagcacacag

SEQ ID NO: 3498549 - DNA, 25 bp, Homo sapien
tgacgggcacgcaggtgtggttatt

SEQ ID NO: 3498550 - DNA, 25 bp, Homo sapien
aggtttggcaggcagctattgtgac

SEQ ID NO: 3498551 - DNA, 25 bp, Homo sapien
agaagcacccgaaggtgcaggagct

SEQ ID NO: 3498552 - DNA, 25 bp, Homo sapien
ggtcttcacgcaggccgagccgcac

SEQ ID NO: 3498553 - DNA, 25 bp, Homo sapien
ctgtgctgcgggttggagcaggtct

SEQ ID NO: 3498554 - DNA, 25 bp, Homo sapien
ccgagccgcactcctggtacacctg

SEQ ID NO: 3498555 - DNA, 25 bp, Homo sapien
gctccttggacacgctgcactcagg

SEQ ID NO: 3498556 - DNA, 25 bp, Homo sapien
ccatgctgcactggcgggagtactc

SEQ ID NO: 3498557 - DNA, 25 bp, Homo sapien
cagcttagcacgaagggctccttgg

SEQ ID NO: 3498558 - DNA, 25 bp, Homo sapien
agtactccgacagggtggcacaact

SEQ ID NO: 3498559 - DNA, 25 bp, Homo sapien
cagcaaacttgtggggttccaggaa

SEQ ID NO: 3498560 - DNA, 25 bp, Homo sapien
gggcagcaaacttgtggggttccag

SEQ ID NO: 3498561 - DNA, 25 bp, Homo sapien
tgccggacgtgggtgctggggatgt

SEQ ID NO: 3498562 - DNA, 25 bp, Homo sapien
tcctggaaggtgcagatctcgccgg

SEQ ID NO: 3498563 - DNA, 25 bp, Homo sapien
agagcccgcacatctgacccatgta

SEQ ID NO: 3498564 - DNA, 25 bp, Homo sapien
cctcctcactgacaaactcgttggt

SEQ ID NO: 3498565 - DNA, 25 bp, Homo sapien
gacccatgtacttccgctccaccag

SEQ ID NO: 3498566 - DNA, 25 bp, Homo sapien
ttcccgtcaaagttcccgcagagcc

SEQ ID NO: 3498567 - DNA, 25 bp, Homo sapien
tccattgctggtatagggcaggctg

SEQ ID NO: 3498568 - DNA, 25 bp, Homo sapien
acgctctggccgaagggtgtgatct

SEQ ID NO: 3498569 - DNA, 25 bp, Homo sapien
tggctgtcaggaccccacacgactt

SEQ ID NO: 3498570 - DNA, 25 bp, Homo sapien
cagccgcacgctctggccgaagggt

SEQ ID NO: 3498571 - DNA, 25 bp, Homo sapien
agatgtagttgcacgtccccgagaa

SEQ ID NO: 3498572 - DNA, 25 bp, Homo sapien
cagctccacgatgatccgcgagatg

SEQ ID NO: 3498573 - DNA, 25 bp, Homo sapien
tgatggcttcgctcacagtgacgac

SEQ ID NO: 3498574 - DNA, 25 bp, Homo sapien
tccccgagaagtcgtacacgtggtg

SEQ ID NO: 3498575 - DNA, 25 bp, Homo sapien
tgtctgtggagagtccttcagcctc

SEQ ID NO: 3498576 - DNA, 25 bp, Homo sapien
ctgtctgtggagagtccttcagcct

SEQ ID NO: 3498577 - DNA, 25 bp, Homo sapien
gtctgtggagagtccttcagcctct

SEQ ID NO: 3498578 - DNA, 25 bp, Homo sapien
tgctccgcccgtttccctgcacaca

SEQ ID NO: 3498579 - DNA, 25 bp, Homo sapien
ctcagggctgctccgcccgtttccc

SEQ ID NO: 3498580 - DNA, 25 bp, Homo sapien
cctgcacacactcggcgtgcgagaa

SEQ ID NO: 3498581 - DNA, 25 bp, Homo sapien
cactcggcgtgcgagaagtgtccat

SEQ ID NO: 3498582 - DNA, 25 bp, Homo sapien
cttggccaggcgcatgggcatctgg

SEQ ID NO: 3498583 - DNA, 25 bp, Homo sapien
gctctgaagtccagcgggagactcc

SEQ ID NO: 3498584 - DNA, 25 bp, Homo sapien
catctgggcgggttggtccgccacc

SEQ ID NO: 3498585 - DNA, 25 bp, Homo sapien
aggaggttccccgagtccactggct

SEQ ID NO: 3498586 - DNA, 25 bp, Homo sapien
gggcgagctctgtcacgccagcgtc

SEQ ID NO: 3498587 - DNA, 25 bp, Homo sapien
agctccgagggcgagctctgtcacg

SEQ ID NO: 3498588 - DNA, 25 bp, Homo sapien
tccgagggcgagctctgtcacgcca

SEQ ID NO: 3498589 - DNA, 25 bp, Homo sapien
cgagggcgagctctgtcacgccagc

SEQ ID NO: 3498590 - DNA, 25 bp, Homo sapien
gcccgagctgggtaggggagcgcgg

SEQ ID NO: 3498591 - DNA, 25 bp, Homo sapien
agccgcagggcaggcggttggcaga

SEQ ID NO: 3498592 - DNA, 25 bp, Homo sapien
aggatgtcagtccctcctggatcct

SEQ ID NO: 3498593 - DNA, 25 bp, Homo sapien
ggcaggctgcctgcggcggttctga

SEQ ID NO: 3498594 - DNA, 25 bp, Homo sapien
cagcgctgagcagggctccgcagca

SEQ ID NO: 3498595 - DNA, 25 bp, Homo sapien
gacagcagcagccaccgctggacca

SEQ ID NO: 3498596 - DNA, 25 bp, Homo sapien
ctgagcagggctccgcagcaggaca

SEQ ID NO: 3498597 - DNA, 25 bp, Homo sapien
acagcagcagccaccgctggaccat

SEQ ID NO: 3498598 - DNA, 25 bp, Homo sapien
ctggtggccgggatggacctgttgg

SEQ ID NO: 3498599 - DNA, 25 bp, Homo sapien
aacaggaaagatcacccagcgggag

SEQ ID NO: 3498600 - DNA, 25 bp, Homo sapien
gcttggggggaaccctgctgcacct

SEQ ID NO: 3498601 - DNA, 25 bp, Homo sapien
gctctgccccttccggggagcccag

SEQ ID NO: 3498602 - DNA, 25 bp, Homo sapien
cccttcgagcgctgttggcagccat

SEQ ID NO: 3498603 - DNA, 25 bp, Homo sapien
cctgaggagctaccgtgtctctgca

SEQ ID NO: 3498604 - DNA, 25 bp, Homo sapien
ccttgcctgtggaggcacgtgccac

SEQ ID NO: 3498605 - DNA, 25 bp, Homo sapien
gattgccccagcttcgtttggcagc

SEQ ID NO: 3498606 - DNA, 25 bp, Homo sapien
accgagctcaggttctcaggaggga

SEQ ID NO: 3498607 - DNA, 25 bp, Homo sapien
ggcagagatcttagggcctccttcc

SEQ ID NO: 3498608 - DNA, 25 bp, Homo sapien
gcagctggtgccaaaagggacctca

SEQ ID NO: 3498609 - DNA, 25 bp, Homo sapien
tgtgcttgtctgaccacctgtctgg

SEQ ID NO: 3498610 - DNA, 25 bp, Homo sapien
gcttcctgttgatccggatgcccga

SEQ ID NO: 3498611 - DNA, 25 bp, Homo sapien
gttgatccggatgcccgatgtcttg

SEQ ID NO: 3498612 - DNA, 25 bp, Homo sapien
atccggatgcccgatgtcttgggag

SEQ ID NO: 3498613 - DNA, 25 bp, Homo sapien
cctgttgatccggatgcccgatgtc

SEQ ID NO: 3498614 - DNA, 25 bp, Homo sapien
ggccctcaggagcgggcacgtttca

SEQ ID NO: 3498615 - DNA, 25 bp, Homo sapien
ttttgtctacttatgccccgtgcag

SEQ ID NO: 3498616 - DNA, 25 bp, Homo sapien
tcaggagcgggcacgtttcagcctg

SEQ ID NO: 3498617 - DNA, 25 bp, Homo sapien
cagagaggggcccttgtcctttttg

SEQ ID NO: 3498618 - DNA, 25 bp, Homo sapien
gctcaagactggtggccaaggtgca

SEQ ID NO: 3498619 - DNA, 25 bp, Homo sapien
agtcctgatgccaccgactcttggg

SEQ ID NO: 3498620 - DNA, 25 bp, Homo sapien
ccacggaccctggctcaagactggt

SEQ ID NO: 3498621 - DNA, 25 bp, Homo sapien
cctcgctgtactaggcagtggcctc

SEQ ID NO: 3498622 - DNA, 25 bp, Homo sapien
tatagaagaagaaccttccaggctg

SEQ ID NO: 3498623 - DNA, 25 bp, Homo sapien
taatgtaattagtgatgtggccagg

SEQ ID NO: 3498624 - DNA, 25 bp, Homo sapien
tctgggcagcttatagagtgatctt

SEQ ID NO: 3498625 - DNA, 25 bp, Homo sapien
tgtggccaggtgaaaagctaccatc

SEQ ID NO: 3498626 - DNA, 25 bp, Homo sapien
tctggtttccctgctcgtggggctg

SEQ ID NO: 3498627 - DNA, 25 bp, Homo sapien
cagcattgctgcaactcttgattcg

SEQ ID NO: 3498628 - DNA, 25 bp, Homo sapien
ttgctgcaactcttgattcgctttc

SEQ ID NO: 3498629 - DNA, 25 bp, Homo sapien
cattgctgcaactcttgattcgctt

SEQ ID NO: 3498630 - DNA, 25 bp, Homo sapien
atgtctgggccggctgtacaaggca

SEQ ID NO: 3498631 - DNA, 25 bp, Homo sapien
gtctgggccggctgtacaaggcact

SEQ ID NO: 3498632 - DNA, 25 bp, Homo sapien
caacactgccgcgtgccgggctctg

SEQ ID NO: 3498633 - DNA, 25 bp, Homo sapien
tttgcatgtctgggccggctgtaca

SEQ ID NO: 3498634 - DNA, 25 bp, Homo sapien
gcctggaaccttctgggagtcacca

SEQ ID NO: 3498635 - DNA, 25 bp, Homo sapien
gatgtcctcttctgtaggaaaatgg

SEQ ID NO: 3498636 - DNA, 25 bp, Homo sapien
tgcagccaccggcttcccagcaagg

SEQ ID NO: 3498637 - DNA, 25 bp, Homo sapien
aaaatggggacgtcgggagcattct

SEQ ID NO: 3498638 - DNA, 25 bp, Homo sapien
tgctggcgggctacagcatcacggc

SEQ ID NO: 3498639 - DNA, 25 bp, Homo sapien
gggaccacagtctttgctccaagcg

SEQ ID NO: 3498640 - DNA, 25 bp, Homo sapien
ggaaccttccatggtgccacaccag

SEQ ID NO: 3498641 - DNA, 25 bp, Homo sapien
ccggtatgaggagccctggttccct

SEQ ID NO: 3498642 - DNA, 25 bp, Homo sapien
tacattgtgcttaaatcaagcagca

SEQ ID NO: 3498643 - DNA, 25 bp, Homo sapien
caaggatgcaatatggtgttattaa

SEQ ID NO: 3498644 - DNA, 25 bp, Homo sapien
aacacacatgacttcacatacttcc

SEQ ID NO: 3498645 - DNA, 25 bp, Homo sapien
tatatttatcatgtccaatgtgatg

SEQ ID NO: 3498646 - DNA, 25 bp, Homo sapien
caggtgtctccgaacctttggagcc

SEQ ID NO: 3498647 - DNA, 25 bp, Homo sapien
agtggcaccaacatcccgcctttca

SEQ ID NO: 3498648 - DNA, 25 bp, Homo sapien
tgtctccgaacctttggagccccag

SEQ ID NO: 3498649 - DNA, 25 bp, Homo sapien
acctccaggtgtctccgaacctttg

SEQ ID NO: 3498650 - DNA, 25 bp, Homo sapien
ttgccctcccttgaatcctcagatg

SEQ ID NO: 3498651 - DNA, 25 bp, Homo sapien
agctggacgtgactggtgttttatt

SEQ ID NO: 3498652 - DNA, 25 bp, Homo sapien
tggtgttttatttgccctcccttga

SEQ ID NO: 3498653 - DNA, 25 bp, Homo sapien
gacgtgactggtgttttatttgccc

SEQ ID NO: 3498654 - DNA, 25 bp, Homo sapien
cctccttggtgtccagagggctgag

SEQ ID NO: 3498655 - DNA, 25 bp, Homo sapien
gccagggtgtaggtctgggccttgc

SEQ ID NO: 3498656 - DNA, 25 bp, Homo sapien
ctgccagggtgtaggtctgggcctt

SEQ ID NO: 3498657 - DNA, 25 bp, Homo sapien
ctccttggtgtccagagggctgaga

SEQ ID NO: 3498658 - DNA, 25 bp, Homo sapien
gttggctctgcggacccagctggac

SEQ ID NO: 3498659 - DNA, 25 bp, Homo sapien
ctctgcggacccagctggacaaggg

SEQ ID NO: 3498660 - DNA, 25 bp, Homo sapien
atgttggagagctgagcccctgact

SEQ ID NO: 3498661 - DNA, 25 bp, Homo sapien
gtgcccactcatgttggagagctga

SEQ ID NO: 3498662 - DNA, 25 bp, Homo sapien
taagcctacagcagaggagataggg

SEQ ID NO: 3498663 - DNA, 25 bp, Homo sapien
gggccgaaagccacaggaaagctgt

SEQ ID NO: 3498664 - DNA, 25 bp, Homo sapien
tgttccgtgggctgaaacaggccat

SEQ ID NO: 3498665 - DNA, 25 bp, Homo sapien
tttctgggagcagacggaaggcccc

SEQ ID NO: 3498666 - DNA, 25 bp, Homo sapien
tgctcctctgggcatattcatcctc

SEQ ID NO: 3498667 - DNA, 25 bp, Homo sapien
gggcccagcactaaaccggaactgc

SEQ ID NO: 3498668 - DNA, 25 bp, Homo sapien
tggagactggaaatggcctgcatgc

SEQ ID NO: 3498669 - DNA, 25 bp, Homo sapien
gctggtccaccaggaacgggctgct

SEQ ID NO: 3498670 - DNA, 25 bp, Homo sapien
tgccctccccatgggctctcgacat

SEQ ID NO: 3498671 - DNA, 25 bp, Homo sapien
tgctcctgctcaggcgtctggggac

SEQ ID NO: 3498672 - DNA, 25 bp, Homo sapien
ggctgcactgccctccccatgggct

SEQ ID NO: 3498673 - DNA, 25 bp, Homo sapien
ccccatgggctctcgacatgggagg

SEQ ID NO: 3498674 - DNA, 25 bp, Homo sapien
actgggtggtcgtggtgccccactc

SEQ ID NO: 3498675 - DNA, 25 bp, Homo sapien
gcccagaagtgacctacgagtccca

SEQ ID NO: 3498676 - DNA, 25 bp, Homo sapien
catcactgggtggtcgtggtgcccc

SEQ ID NO: 3498677 - DNA, 25 bp, Homo sapien
agtgacctacgagtcccactcagcg

SEQ ID NO: 3498678 - DNA, 25 bp, Homo sapien
cgccccagggaacctggaagtgcct

SEQ ID NO: 3498679 - DNA, 25 bp, Homo sapien
ccccagggaacctggaagtgcctgc

SEQ ID NO: 3498680 - DNA, 25 bp, Homo sapien
ccagggaacctggaagtgcctgcac

SEQ ID NO: 3498681 - DNA, 25 bp, Homo sapien
cccagggaacctggaagtgcctgca

SEQ ID NO: 3498682 - DNA, 25 bp, Homo sapien
ggcaggcacgcaatgccggggtcag

SEQ ID NO: 3498683 - DNA, 25 bp, Homo sapien
atcctggattagcccccgagggcag

SEQ ID NO: 3498684 - DNA, 25 bp, Homo sapien
cccgagggcaggcacgcaatgccgg

SEQ ID NO: 3498685 - DNA, 25 bp, Homo sapien
caggcacgcaatgccggggtcagcc

SEQ ID NO: 3498686 - DNA, 25 bp, Homo sapien
aagagcacagtcaattcttggagga

SEQ ID NO: 3498687 - DNA, 25 bp, Homo sapien
ggctgccacagattgcaaagagcac

SEQ ID NO: 3498688 - DNA, 25 bp, Homo sapien
caaagagcacagtcaattcttggag

SEQ ID NO: 3498689 - DNA, 25 bp, Homo sapien
gaggacaaggggaggtgtcatgttt

SEQ ID NO: 3498690 - DNA, 25 bp, Homo sapien
tgacctgcaagaacgaagaccagac

SEQ ID NO: 3498691 - DNA, 25 bp, Homo sapien
caccaaagagcatagagtgccgggc

SEQ ID NO: 3498692 - DNA, 25 bp, Homo sapien
cccgaggtaagcatcgaccaggtcg

SEQ ID NO: 3498693 - DNA, 25 bp, Homo sapien
tgtgcttcaactacaacgtgcgtgt

SEQ ID NO: 3498694 - DNA, 25 bp, Homo sapien
gtatccaagtcacctttttaatgct

SEQ ID NO: 3498695 - DNA, 25 bp, Homo sapien
aaaatggaatgtttaacagtatcca

SEQ ID NO: 3498696 - DNA, 25 bp, Homo sapien
tgaacttttacgctctgttttcctc

SEQ ID NO: 3498697 - DNA, 25 bp, Homo sapien
ttctactgcatcattgggctgcaaa

SEQ ID NO: 3498698 - DNA, 25 bp, Homo sapien
cattcagcctgaaaccaccaagcag

SEQ ID NO: 3498699 - DNA, 25 bp, Homo sapien
aaggcaatgtgctcaagctatcagg

SEQ ID NO: 3498700 - DNA, 25 bp, Homo sapien
ggacacagagcctgacatcactttt

SEQ ID NO: 3498701 - DNA, 25 bp, Homo sapien
gagagcaaacgctccatcagtagag

SEQ ID NO: 3498702 - DNA, 25 bp, Homo sapien
gttcaagtgactctctggcctcagt

SEQ ID NO: 3498703 - DNA, 25 bp, Homo sapien
tgactctctggcctcagtctcccga

SEQ ID NO: 3498704 - DNA, 25 bp, Homo sapien
caagtgactctctggcctcagtctc

SEQ ID NO: 3498705 - DNA, 25 bp, Homo sapien
gtgactctctggcctcagtctcccg

SEQ ID NO: 3498706 - DNA, 25 bp, Homo sapien
gacaacagtgttgatagtcctgata

SEQ ID NO: 3498707 - DNA, 25 bp, Homo sapien
cagtctgtagacaacagtgttgata

SEQ ID NO: 3498708 - DNA, 25 bp, Homo sapien
gacaacagtctgtagacaacagtgt

SEQ ID NO: 3498709 - DNA, 25 bp, Homo sapien
tgtagacaacagtctgtagacaaca

SEQ ID NO: 3498710 - DNA, 25 bp, Homo sapien
tgtcatgctttgcacagcgatgccc

SEQ ID NO: 3498711 - DNA, 25 bp, Homo sapien
ccgttgctctgcagaaatctacagt

SEQ ID NO: 3498712 - DNA, 25 bp, Homo sapien
caagaaaagtgtccgccctttgctc

SEQ ID NO: 3498713 - DNA, 25 bp, Homo sapien
tagtgatacctgacagttaacaggc

SEQ ID NO: 3498714 - DNA, 25 bp, Homo sapien
tgatgccatcagtcatagccacaga

SEQ ID NO: 3498715 - DNA, 25 bp, Homo sapien
ccacagaggtaacggctggaagttt

SEQ ID NO: 3498716 - DNA, 25 bp, Homo sapien
tggaagtttgctgtggagtcaacac

SEQ ID NO: 3498717 - DNA, 25 bp, Homo sapien
gaaaggccacattcaggtggaggca

SEQ ID NO: 3498718 - DNA, 25 bp, Homo sapien
gtaaaataatcagaagcgcacgttc

SEQ ID NO: 3498719 - DNA, 25 bp, Homo sapien
acgttctgagaccactcctgcctgg

SEQ ID NO: 3498720 - DNA, 25 bp, Homo sapien
gaaaaatctggacaatggaccccag

SEQ ID NO: 3498721 - DNA, 25 bp, Homo sapien
ggcgacctgtcttctatctccggag

SEQ ID NO: 3498722 - DNA, 25 bp, Homo sapien
tctgagtgtgacgacctcatccaca

SEQ ID NO: 3498723 - DNA, 25 bp, Homo sapien
tggcagacaagcctgtccttctgag

SEQ ID NO: 3498724 - DNA, 25 bp, Homo sapien
cagcaagctgcttctacagtaagcc

SEQ ID NO: 3498725 - DNA, 25 bp, Homo sapien
cctccccttgtgagctggcagacaa

SEQ ID NO: 3498726 - DNA, 25 bp, Homo sapien
aaaactaagagatggcggcaagcgt

SEQ ID NO: 3498727 - DNA, 25 bp, Homo sapien
cgtggtcatcggcaaagggttgctc

SEQ ID NO: 3498728 - DNA, 25 bp, Homo sapien
tgtgcacgcgtgtggcagtctcact

SEQ ID NO: 3498729 - DNA, 25 bp, Homo sapien
gggccacgtcctctctaggagacac

SEQ ID NO: 3498730 - DNA, 25 bp, Homo sapien
tcagtgggtttacatccgaaggccg

SEQ ID NO: 3498731 - DNA, 25 bp, Homo sapien
gcctttaggacccacagctgaagaa

SEQ ID NO: 3498732 - DNA, 25 bp, Homo sapien
tcagaaagcttttacagggccacgc

SEQ ID NO: 3498733 - DNA, 25 bp, Homo sapien
tctacacaggcgtaagaccaggcca

SEQ ID NO: 3498734 - DNA, 25 bp, Homo sapien
tgaatggaatcggaaggcgctccac

SEQ ID NO: 3498735 - DNA, 25 bp, Homo sapien
gcatgagaaggagagacgcacgtcc

SEQ ID NO: 3498736 - DNA, 25 bp, Homo sapien
ctttcacgggaatcttgttgggaca

SEQ ID NO: 3498737 - DNA, 25 bp, Homo sapien
tgagacctcccagcacgagatggga

SEQ ID NO: 3498738 - DNA, 25 bp, Homo sapien
gcggcatccttgttccctcgctggg

SEQ ID NO: 3498739 - DNA, 25 bp, Homo sapien
tttcaggtcctcctcgctacagcgg

SEQ ID NO: 3498740 - DNA, 25 bp, Homo sapien
tgggcttccagcacggagcggatca

SEQ ID NO: 3498741 - DNA, 25 bp, Homo sapien
gagcggatcacctcctggtccatgt

SEQ ID NO: 3498742 - DNA, 25 bp, Homo sapien
ggtggtgttttgatcccttcagaac

SEQ ID NO: 3498743 - DNA, 25 bp, Homo sapien
cacgctcgtcttcactgaccagtgg

SEQ ID NO: 3498744 - DNA, 25 bp, Homo sapien
cacactagctcctgctgaaggaaga

SEQ ID NO: 3498745 - DNA, 25 bp, Homo sapien
gtgaatttgcactgcacacgctcgt

SEQ ID NO: 3498746 - DNA, 25 bp, Homo sapien
ctggtgtgactccaccatgcttgcc

SEQ ID NO: 3498747 - DNA, 25 bp, Homo sapien
tttgagattccacttctgagaagaa

SEQ ID NO: 3498748 - DNA, 25 bp, Homo sapien
atgcttgcctagtcggcccgagacg

SEQ ID NO: 3498749 - DNA, 25 bp, Homo sapien
tgtgggcgacacacatgctctggcc

SEQ ID NO: 3498750 - DNA, 25 bp, Homo sapien
cttcaaaggctcctaaaagcagtgt

SEQ ID NO: 3498751 - DNA, 25 bp, Homo sapien
ttctcctaatgggaaccagggctcc

SEQ ID NO: 3498752 - DNA, 25 bp, Homo sapien
ccaaagaacaaagatcccgcctgag

SEQ ID NO: 3498753 - DNA, 25 bp, Homo sapien
gagaaacagctaacgccagggctaa

SEQ ID NO: 3498754 - DNA, 25 bp, Homo sapien
atgctgcggactcagacgggctcca

SEQ ID NO: 3498755 - DNA, 25 bp, Homo sapien
cagggacgcccctgcttattggaaa

SEQ ID NO: 3498756 - DNA, 25 bp, Homo sapien
cccaacgcgtcagtgtcagcttcat

SEQ ID NO: 3498757 - DNA, 25 bp, Homo sapien
tctagatggccgtactgtgccaggg

SEQ ID NO: 3498758 - DNA, 25 bp, Homo sapien
tttgaccccacgacggcggctctgg

SEQ ID NO: 3498759 - DNA, 25 bp, Homo sapien
agacagaacttcactagccccatga

SEQ ID NO: 3498760 - DNA, 25 bp, Homo sapien
cccagttacaaatcagaacctccag

SEQ ID NO: 3498761 - DNA, 25 bp, Homo sapien
tttcaggttggccattggcctccaa

SEQ ID NO: 3498762 - DNA, 25 bp, Homo sapien
gctggtacactgttggcatcaggac

SEQ ID NO: 3498763 - DNA, 25 bp, Homo sapien
ctgttggcatcaggaccacgggctg

SEQ ID NO: 3498764 - DNA, 25 bp, Homo sapien
aacgccctgctggtacactgttggc

SEQ ID NO: 3498765 - DNA, 25 bp, Homo sapien
atagccaacgccctgctggtacact

SEQ ID NO: 3498766 - DNA, 25 bp, Homo sapien
cgcgtaggacatgacgaggttgatc

SEQ ID NO: 3498767 - DNA, 25 bp, Homo sapien
tgacgaggttgatcatgccctcctt

SEQ ID NO: 3498768 - DNA, 25 bp, Homo sapien
gcctcccgctcaggctgtaccactt

SEQ ID NO: 3498769 - DNA, 25 bp, Homo sapien
caatgcggtcgtccatggagaaggc

SEQ ID NO: 3498770 - DNA, 25 bp, Homo sapien
cgagatagaaagagtccacgcctgg

SEQ ID NO: 3498771 - DNA, 25 bp, Homo sapien
gggtcatgccgtaattcttggccaa

SEQ ID NO: 3498772 - DNA, 25 bp, Homo sapien
cagtggatgaccttattccagcggg

SEQ ID NO: 3498773 - DNA, 25 bp, Homo sapien
cattgtgtgccgtgggcgtctcgta

SEQ ID NO: 3498774 - DNA, 25 bp, Homo sapien
catgaagggcgcactctctaatgcc

SEQ ID NO: 3498775 - DNA, 25 bp, Homo sapien
atgaagggcgcactctctaatgccc

SEQ ID NO: 3498776 - DNA, 25 bp, Homo sapien
tgaagggcgcactctctaatgccct

SEQ ID NO: 3498777 - DNA, 25 bp, Homo sapien
gtgggcagagggatcggccacacca

SEQ ID NO: 3498778 - DNA, 25 bp, Homo sapien
aggacgggtgatggcactggctggc

SEQ ID NO: 3498779 - DNA, 25 bp, Homo sapien
tgcatgggcttacgggagttcactg

SEQ ID NO: 3498780 - DNA, 25 bp, Homo sapien
atcggccacaccagcacagtaacag

SEQ ID NO: 3498781 - DNA, 25 bp, Homo sapien
ttttcctgcagtcttacagacggtt

SEQ ID NO: 3498782 - DNA, 25 bp, Homo sapien
ttgaaagaccactaagcaaccacgg

SEQ ID NO: 3498783 - DNA, 25 bp, Homo sapien
gccgattttggctttcacttgaaag

SEQ ID NO: 3498784 - DNA, 25 bp, Homo sapien
tcgtgtgatcaaaatcggcgttcaa

SEQ ID NO: 3498785 - DNA, 25 bp, Homo sapien
caccgtgatgttcagtcggcccacg

SEQ ID NO: 3498786 - DNA, 25 bp, Homo sapien
gtgatgttcagtcggcccacggtgc

SEQ ID NO: 3498787 - DNA, 25 bp, Homo sapien
gcccactgcgcctccgtactgcagc

SEQ ID NO: 3498788 - DNA, 25 bp, Homo sapien
ctgtaccaccgtgatgttcagtcgg

SEQ ID NO: 3498789 - DNA, 25 bp, Homo sapien
ggcgtgatgcggaggaagtcctgcg

SEQ ID NO: 3498790 - DNA, 25 bp, Homo sapien
tgcggaggaagtcctgcgggagctc

SEQ ID NO: 3498791 - DNA, 25 bp, Homo sapien
aggaagtcctgcgggagctcaccga

SEQ ID NO: 3498792 - DNA, 25 bp, Homo sapien
tgctgtgtgggcgtgatgcggagga

SEQ ID NO: 3498793 - DNA, 25 bp, Homo sapien
aaccatgctccacaggtgaaaggtc

SEQ ID NO: 3498794 - DNA, 25 bp, Homo sapien
ctccacaggtgaaaggtcgctgatg

SEQ ID NO: 3498795 - DNA, 25 bp, Homo sapien
catgctccacaggtgaaaggtcgct

SEQ ID NO: 3498796 - DNA, 25 bp, Homo sapien
ggcctggggtaaaccatgctccaca

SEQ ID NO: 3498797 - DNA, 25 bp, Homo sapien
gagaacaagcagagcaccccggctt

SEQ ID NO: 3498798 - DNA, 25 bp, Homo sapien
cccggcttcacctccggagggtgtg

SEQ ID NO: 3498799 - DNA, 25 bp, Homo sapien
ctttgccctgtgagagaagccgtac

SEQ ID NO: 3498800 - DNA, 25 bp, Homo sapien
ttgactgggacacgtcacgagtgac

SEQ ID NO: 3498801 - DNA, 25 bp, Homo sapien
tccgttaaagacagtgggactgctc

SEQ ID NO: 3498802 - DNA, 25 bp, Homo sapien
agacaggcgactcatgtcccggaga

SEQ ID NO: 3498803 - DNA, 25 bp, Homo sapien
tcccggtatttgaaggcgtccagcg

SEQ ID NO: 3498804 - DNA, 25 bp, Homo sapien
tccaaaggcctaatgatcaagtgtc

SEQ ID NO: 3498805 - DNA, 25 bp, Homo sapien
tgccgcgaacacatggagactcggg

SEQ ID NO: 3498806 - DNA, 25 bp, Homo sapien
aaggaggcctctgtcgacaccaact

SEQ ID NO: 3498807 - DNA, 25 bp, Homo sapien
ggtccctgccgcgaacacatggaga

SEQ ID NO: 3498808 - DNA, 25 bp, Homo sapien
ggaggtgcggcacgacctgctgcag

SEQ ID NO: 3498809 - DNA, 25 bp, Homo sapien
ttctgccttgacagagccccggaag

SEQ ID NO: 3498810 - DNA, 25 bp, Homo sapien
gacgtggagtcctgaacacatgcag

SEQ ID NO: 3498811 - DNA, 25 bp, Homo sapien
aatacgtttccgactgagagtgccg

SEQ ID NO: 3498812 - DNA, 25 bp, Homo sapien
tgcccgacacctgttaggaatacgt

SEQ ID NO: 3498813 - DNA, 25 bp, Homo sapien
ggcactggcatgttcaataaacaac

SEQ ID NO: 3498814 - DNA, 25 bp, Homo sapien
cggcctcacgctccacaccagcctc

SEQ ID NO: 3498815 - DNA, 25 bp, Homo sapien
tcggcctcatgctccacgccagtct

SEQ ID NO: 3498816 - DNA, 25 bp, Homo sapien
ggcatgttcaataaacaacccttga

SEQ ID NO: 3498817 - DNA, 25 bp, Homo sapien
ggtccacacggtactcctcgatact

SEQ ID NO: 3498818 - DNA, 25 bp, Homo sapien
gggtccacatggtactccttgcagg

SEQ ID NO: 3498819 - DNA, 25 bp, Homo sapien
ctctctgacggcaccgcggtggctg

SEQ ID NO: 3498820 - DNA, 25 bp, Homo sapien
aacgtcccgagatctcactgcagaa

SEQ ID NO: 3498821 - DNA, 25 bp, Homo sapien
ttttgaaacgtgagggaagcactgc

SEQ ID NO: 3498822 - DNA, 25 bp, Homo sapien
aaacgtgagggaagcactgcacagg

SEQ ID NO: 3498823 - DNA, 25 bp, Homo sapien
ctttttgaaacgtgagggaagcact

SEQ ID NO: 3498824 - DNA, 25 bp, Homo sapien
ctgataatatgcagactatattgaa

SEQ ID NO: 3498825 - DNA, 25 bp, Homo sapien
cacgtccagtactgggctgcgcgag

SEQ ID NO: 3498826 - DNA, 25 bp, Homo sapien
ccaggacttgtggatacagtgttaa

SEQ ID NO: 3498827 - DNA, 25 bp, Homo sapien
gctgcgcgagggcagggaccttgga

SEQ ID NO: 3498828 - DNA, 25 bp, Homo sapien
aattatctcctcgggagaaacacca

SEQ ID NO: 3498829 - DNA, 25 bp, Homo sapien
cgccacagtcagctgacagccgccg

SEQ ID NO: 3498830 - DNA, 25 bp, Homo sapien
gtggctcgccgacccgacagtgacg

SEQ ID NO: 3498831 - DNA, 25 bp, Homo sapien
gccggagcctgcgacggagacagtt

SEQ ID NO: 3498832 - DNA, 25 bp, Homo sapien
gagacagttgtcacctcgaggccgc

SEQ ID NO: 3498833 - DNA, 25 bp, Homo sapien
cacagagactgttaggaccatgcaa

SEQ ID NO: 3498834 - DNA, 25 bp, Homo sapien
ccatgcaatggcacgggtggccaca

SEQ ID NO: 3498835 - DNA, 25 bp, Homo sapien
cactttagataaatgcggcttgttg

SEQ ID NO: 3498836 - DNA, 25 bp, Homo sapien
gctgaaagagagatgtatacctaca

SEQ ID NO: 3498837 - DNA, 25 bp, Homo sapien
tctcccagatgagctttaggcaaag

SEQ ID NO: 3498838 - DNA, 25 bp, Homo sapien
catgggcactgctcatgggacgtcc

SEQ ID NO: 3498839 - DNA, 25 bp, Homo sapien
gacgtcctcgaagctgtccctgaag

SEQ ID NO: 3498840 - DNA, 25 bp, Homo sapien
tcttttgaggcaccagatatgtcct

SEQ ID NO: 3498841 - DNA, 25 bp, Homo sapien
tgtagcacgaggttttgcggctcag

SEQ ID NO: 3498842 - DNA, 25 bp, Homo sapien
gagccgctgtagcacgaggttttgc

SEQ ID NO: 3498843 - DNA, 25 bp, Homo sapien
gtctcagagccgctgtagcacgagg

SEQ ID NO: 3498844 - DNA, 25 bp, Homo sapien
cgctgtagcacgaggttttgcggct

SEQ ID NO: 3498845 - DNA, 25 bp, Homo sapien
aggcccgtggccacctctgacgtgt

SEQ ID NO: 3498846 - DNA, 25 bp, Homo sapien
tccccaggtgactgtggagcacaca

SEQ ID NO: 3498847 - DNA, 25 bp, Homo sapien
tgtgcacctgtgtccgtggaaggca

SEQ ID NO: 3498848 - DNA, 25 bp, Homo sapien
ctcgcgggtccagctgggaaccagt

SEQ ID NO: 3498849 - DNA, 25 bp, Homo sapien
ctgctcggacagttgggaaagtgga

SEQ ID NO: 3498850 - DNA, 25 bp, Homo sapien
ccggggcctctgtcgtaggcctgca

SEQ ID NO: 3498851 - DNA, 25 bp, Homo sapien
gctcggacagttgggaaagtggaga

SEQ ID NO: 3498852 - DNA, 25 bp, Homo sapien
tctgtcgtaggcctgcagacaccac

SEQ ID NO: 3498853 - DNA, 25 bp, Homo sapien
tgcggctccacgtcgggctggcgcc

SEQ ID NO: 3498854 - DNA, 25 bp, Homo sapien
tcccctcgggttgggctggcccatc

SEQ ID NO: 3498855 - DNA, 25 bp, Homo sapien
tggcccatcaggctctgtacccgcc

SEQ ID NO: 3498856 - DNA, 25 bp, Homo sapien
tctgtacccgccctgctgcggctcc

SEQ ID NO: 3498857 - DNA, 25 bp, Homo sapien
gggcccagccctagatgagagctca

SEQ ID NO: 3498858 - DNA, 25 bp, Homo sapien
tctctgttaaatcatcaggaggacc

SEQ ID NO: 3498859 - DNA, 25 bp, Homo sapien
aggagagccctgacctggagcgaca

SEQ ID NO: 3498860 - DNA, 25 bp, Homo sapien
acctggcgggctgcacataggcaga

SEQ ID NO: 3498861 - DNA, 25 bp, Homo sapien
ggagcctgtgtttacctcataaggg

SEQ ID NO: 3498862 - DNA, 25 bp, Homo sapien
ccttatgttcttagagggtccctcg

SEQ ID NO: 3498863 - DNA, 25 bp, Homo sapien
ggctcacggaagagttgcaagcaga

SEQ ID NO: 3498864 - DNA, 25 bp, Homo sapien
cactggcgtttggtgaaaaactggc

SEQ ID NO: 3498865 - DNA, 25 bp, Homo sapien
accacgcccagctgataaacagcat

SEQ ID NO: 3498866 - DNA, 25 bp, Homo sapien
gcccagctgataaacagcatttttt

SEQ ID NO: 3498867 - DNA, 25 bp, Homo sapien
ttttttaaaagccacagctaacatc

SEQ ID NO: 3498868 - DNA, 25 bp, Homo sapien
attacagcacgtgccactgcgcctg

SEQ ID NO: 3498869 - DNA, 25 bp, Homo sapien
agtcgtgggcatctactggctggcc

SEQ ID NO: 3498870 - DNA, 25 bp, Homo sapien
cctgttgatccccacaaagatggca

SEQ ID NO: 3498871 - DNA, 25 bp, Homo sapien
cgtgctatggagaaggcgttgagtc

SEQ ID NO: 3498872 - DNA, 25 bp, Homo sapien
aagggcagtcatcctgttgatcccc

SEQ ID NO: 3498873 - DNA, 25 bp, Homo sapien
ctcagaggccccagaattgggtagg

SEQ ID NO: 3498874 - DNA, 25 bp, Homo sapien
gggccctgattgctcatgctcagag

SEQ ID NO: 3498875 - DNA, 25 bp, Homo sapien
tagggaggacccttagtccacagca

SEQ ID NO: 3498876 - DNA, 25 bp, Homo sapien
gctcatacgggcttaccagcgtggg

SEQ ID NO: 3498877 - DNA, 25 bp, Homo sapien
caccttctgcagcacgggcttaagg

SEQ ID NO: 3498878 - DNA, 25 bp, Homo sapien
ctgcagcacgggcttaaggaaatac

SEQ ID NO: 3498879 - DNA, 25 bp, Homo sapien
cacgggcttaaggaaataccagtgt

SEQ ID NO: 3498880 - DNA, 25 bp, Homo sapien
cagcacgggcttaaggaaataccag

SEQ ID NO: 3498881 - DNA, 25 bp, Homo sapien
ttaatggcgggtcgggcggcagcgg

SEQ ID NO: 3498882 - DNA, 25 bp, Homo sapien
gctccgtcccgggatgcgccttaat

SEQ ID NO: 3498883 - DNA, 25 bp, Homo sapien
ccttaatggcgggtcgggcggcagc

SEQ ID NO: 3498884 - DNA, 25 bp, Homo sapien
ccgtcccgggatgcgccttaatggc

SEQ ID NO: 3498885 - DNA, 25 bp, Homo sapien
gggcaggcccgatctccctccgcgg

SEQ ID NO: 3498886 - DNA, 25 bp, Homo sapien
tggacagcgccttgcgctgctccgg

SEQ ID NO: 3498887 - DNA, 25 bp, Homo sapien
agggctggacagcgccttgcgctgc

SEQ ID NO: 3498888 - DNA, 25 bp, Homo sapien
caggcccgatctccctccgcggtgg

SEQ ID NO: 3498889 - DNA, 25 bp, Homo sapien
ctgcatggggcgtcctctgcacagc

SEQ ID NO: 3498890 - DNA, 25 bp, Homo sapien
ccagtgtggctgtagggtcgtcctt

SEQ ID NO: 3498891 - DNA, 25 bp, Homo sapien
ctgtagggtcgtccttctgcatggg

SEQ ID NO: 3498892 - DNA, 25 bp, Homo sapien
gtcttgttgggtctgtgcgtcctgc

SEQ ID NO: 3498893 - DNA, 25 bp, Homo sapien
tcaatggcctttaggaaggttgagc

SEQ ID NO: 3498894 - DNA, 25 bp, Homo sapien
ctcaatggcctttaggaaggttgag

SEQ ID NO: 3498895 - DNA, 25 bp, Homo sapien
cagtgttcacctgctgtggcgtggg

SEQ ID NO: 3498896 - DNA, 25 bp, Homo sapien
agatggggtctgtttagaaagttga

SEQ ID NO: 3498897 - DNA, 25 bp, Homo sapien
gcaggacgggcagcgatgggctgtg

SEQ ID NO: 3498898 - DNA, 25 bp, Homo sapien
ggtctgtttagaaagttgagcagga

SEQ ID NO: 3498899 - DNA, 25 bp, Homo sapien
tttagaaagttgagcaggacgggca

SEQ ID NO: 3498900 - DNA, 25 bp, Homo sapien
taccccggagtatgttcctggagcc

SEQ ID NO: 3498901 - DNA, 25 bp, Homo sapien
cacagcagggagtttgccgactttg

SEQ ID NO: 3498902 - DNA, 25 bp, Homo sapien
ccttatgccctgttcgggaggcgga

SEQ ID NO: 3498903 - DNA, 25 bp, Homo sapien
caaacctgtcgtcagctgtgggtct

SEQ ID NO: 3498904 - DNA, 25 bp, Homo sapien
ctgttgtggcacctggtgcactgat

SEQ ID NO: 3498905 - DNA, 25 bp, Homo sapien
ctgctggtgacagtcctgttgtggc

SEQ ID NO: 3498906 - DNA, 25 bp, Homo sapien
cctggtggcgttggataaaccaagc

SEQ ID NO: 3498907 - DNA, 25 bp, Homo sapien
tgcactgatggtcgcctgtggaccc

SEQ ID NO: 3498908 - DNA, 25 bp, Homo sapien
tgtctgtgcggtgtggttctgttta

SEQ ID NO: 3498909 - DNA, 25 bp, Homo sapien
tctccttggaggctgtgtggcgtcc

SEQ ID NO: 3498910 - DNA, 25 bp, Homo sapien
gtggcgtccgcggaagttggtgtct

SEQ ID NO: 3498911 - DNA, 25 bp, Homo sapien
tgttgtagagaaggcgccgtccaga

SEQ ID NO: 3498912 - DNA, 25 bp, Homo sapien
tgaaagcacccagcgtagtcatgct

SEQ ID NO: 3498913 - DNA, 25 bp, Homo sapien
ggagcctgccggagacacaggtttt

SEQ ID NO: 3498914 - DNA, 25 bp, Homo sapien
acaggttttctgagcgcaccagcgg

SEQ ID NO: 3498915 - DNA, 25 bp, Homo sapien
gagcttcaggaaccaccgagatggg

SEQ ID NO: 3498916 - DNA, 25 bp, Homo sapien
gggcaccaccgagaccactgtggcc

SEQ ID NO: 3498917 - DNA, 25 bp, Homo sapien
tgggtgttccccagtctcagaggcc

SEQ ID NO: 3498918 - DNA, 25 bp, Homo sapien
ccttcgacggcccttttgtgcagaa

SEQ ID NO: 3498919 - DNA, 25 bp, Homo sapien
ccacttggtaggagggccttcgacg

SEQ ID NO: 3498920 - DNA, 25 bp, Homo sapien
gctgtggtaaaggccggagctccca

SEQ ID NO: 3498921 - DNA, 25 bp, Homo sapien
tcccagcagaggacttggagcggct

SEQ ID NO: 3498922 - DNA, 25 bp, Homo sapien
actgcccacacggtggtcccagcag

SEQ ID NO: 3498923 - DNA, 25 bp, Homo sapien
tcccagcagaggacttggtcccagc

SEQ ID NO: 3498924 - DNA, 25 bp, Homo sapien
ttgagagtgggtcacactgtgtcct

SEQ ID NO: 3498925 - DNA, 25 bp, Homo sapien
cttgagagtgggtcacactgtgtcc

SEQ ID NO: 3498926 - DNA, 25 bp, Homo sapien
tgagagtgggtcacctgtgtcctgc

SEQ ID NO: 3498927 - DNA, 25 bp, Homo sapien
tctcttgagagtgggtcacactgtg

SEQ ID NO: 3498928 - DNA, 25 bp, Homo sapien
tcttgagagtgggtcacctgtgtcc

SEQ ID NO: 3498929 - DNA, 25 bp, Homo sapien
cttgagagtgggtcacactgtgtcc

SEQ ID NO: 3498930 - DNA, 25 bp, Homo sapien
tgagagtgggtcacctgtgtcctgc

SEQ ID NO: 3498931 - DNA, 25 bp, Homo sapien
ttgagagtgggtcacctgtgtcctg

SEQ ID NO: 3498932 - DNA, 25 bp, Homo sapien
tgtatcctgcttctgttggctgttt

SEQ ID NO: 3498933 - DNA, 25 bp, Homo sapien
tcctgcttctgttggctgtttcttc

SEQ ID NO: 3498934 - DNA, 25 bp, Homo sapien
tatcctgcttctgttggctgtttct

SEQ ID NO: 3498935 - DNA, 25 bp, Homo sapien
ctgtatcctgcttctgttggctgtt

SEQ ID NO: 3498936 - DNA, 25 bp, Homo sapien
cttgagagtgggtcacactgtgtcc

SEQ ID NO: 3498937 - DNA, 25 bp, Homo sapien
ttgagagtgggtcacctgtgtcctg

SEQ ID NO: 3498938 - DNA, 25 bp, Homo sapien
tctcttgagagtgggtcacactgtg

SEQ ID NO: 3498939 - DNA, 25 bp, Homo sapien
tgagagtgggtcacctgtgtcctgc

SEQ ID NO: 3498940 - DNA, 25 bp, Homo sapien
aatttgagcacagcgcgtgcacgga

SEQ ID NO: 3498941 - DNA, 25 bp, Homo sapien
tgtgcgtgcaccaggataaaaacga

SEQ ID NO: 3498942 - DNA, 25 bp, Homo sapien
aggatggcggccactaaagcccagt

SEQ ID NO: 3498943 - DNA, 25 bp, Homo sapien
cacggtcagtaaacaccggtgacgt

SEQ ID NO: 3498944 - DNA, 25 bp, Homo sapien
gcaggcacatgggcgggtctggtgg

SEQ ID NO: 3498945 - DNA, 25 bp, Homo sapien
ctgctgcggtgaagccagccagcaa

SEQ ID NO: 3498946 - DNA, 25 bp, Homo sapien
ccccagacacgctgtcctgcctcag

SEQ ID NO: 3498947 - DNA, 25 bp, Homo sapien
caaagaagacaggtatacaccccga

SEQ ID NO: 3498948 - DNA, 25 bp, Homo sapien
gttaacattagacctctgccacagg

SEQ ID NO: 3498949 - DNA, 25 bp, Homo sapien
gagtcgtctgtctgcttcggtgcct

SEQ ID NO: 3498950 - DNA, 25 bp, Homo sapien
tctccacggagatcgaggacacgaa

SEQ ID NO: 3498951 - DNA, 25 bp, Homo sapien
ttttgtgcttcggacacacgcggac

SEQ ID NO: 3498952 - DNA, 25 bp, Homo sapien
ctttttattacgagtgaacagatga

SEQ ID NO: 3498953 - DNA, 25 bp, Homo sapien
gagaattctttttattacgagtgaa

SEQ ID NO: 3498954 - DNA, 25 bp, Homo sapien
gagagaattctttttattacgagtg

SEQ ID NO: 3498955 - DNA, 25 bp, Homo sapien
aattctttttattacgagtgaacag

SEQ ID NO: 3498956 - DNA, 25 bp, Homo sapien
taaggtaagcgggtctcagccttcc

SEQ ID NO: 3498957 - DNA, 25 bp, Homo sapien
ctaaggtaagcgggtctcagccttc

SEQ ID NO: 3498958 - DNA, 25 bp, Homo sapien
caaaggctcttctctacaaacggca

SEQ ID NO: 3498959 - DNA, 25 bp, Homo sapien
gagctgccaacagccaagactcctg

SEQ ID NO: 3498960 - DNA, 25 bp, Homo sapien
gaacgagtgaatgggcccaaaggct

SEQ ID NO: 3498961 - DNA, 25 bp, Homo sapien
aagcatcagtcccatgcgtgtctgc

SEQ ID NO: 3498962 - DNA, 25 bp, Homo sapien
ttcacgtggttctgtgctcccgggc

SEQ ID NO: 3498963 - DNA, 25 bp, Homo sapien
tcatctctccttcacgtggttctgt

SEQ ID NO: 3498964 - DNA, 25 bp, Homo sapien
tccttcacgtggttctgtgctcccg

SEQ ID NO: 3498965 - DNA, 25 bp, Homo sapien
tctctccttcacgtggttctgtgct

SEQ ID NO: 3498966 - DNA, 25 bp, Homo sapien
ccagcgtctccttgaagtgggccca

SEQ ID NO: 3498967 - DNA, 25 bp, Homo sapien
cacctcggtgaggtcgtccatgatg

SEQ ID NO: 3498968 - DNA, 25 bp, Homo sapien
ggttgaactcccgagcaaagaggat

SEQ ID NO: 3498969 - DNA, 25 bp, Homo sapien
tggacgtagagcgtgttcaagtgtc

SEQ ID NO: 3498970 - DNA, 25 bp, Homo sapien
ggaaggccaccgtgtcacaagctgc

SEQ ID NO: 3498971 - DNA, 25 bp, Homo sapien
gaaggccaccgtgtcacaagctgca

SEQ ID NO: 3498972 - DNA, 25 bp, Homo sapien
aaggccaccgtgtcacaagctgcag

SEQ ID NO: 3498973 - DNA, 25 bp, Homo sapien
tgccctgagggctgggagctcgttg

SEQ ID NO: 3498974 - DNA, 25 bp, Homo sapien
ggagtggcgtggagccccaccacat

SEQ ID NO: 3498975 - DNA, 25 bp, Homo sapien
tccctctggcagcacgggagtggcg

SEQ ID NO: 3498976 - DNA, 25 bp, Homo sapien
tctggacacaggcttggcggctgat

SEQ ID NO: 3498977 - DNA, 25 bp, Homo sapien
gcccaggtggctccatgctaagcag

SEQ ID NO: 3498978 - DNA, 25 bp, Homo sapien
ctgccccactgtgaggatgaccgcc

SEQ ID NO: 3498979 - DNA, 25 bp, Homo sapien
cccggcacaggagcttggtcacttg

SEQ ID NO: 3498980 - DNA, 25 bp, Homo sapien
ttgcagacacgtcctgaatgctccc

SEQ ID NO: 3498981 - DNA, 25 bp, Homo sapien
tattttgtggggaacacgtcctcat

SEQ ID NO: 3498982 - DNA, 25 bp, Homo sapien
gtattttgtggggaacacgtcctca

SEQ ID NO: 3498983 - DNA, 25 bp, Homo sapien
ttttgtggggaacacgtcctcatcc

SEQ ID NO: 3498984 - DNA, 25 bp, Homo sapien
ttgtggggaacacgtcctcatccgt

SEQ ID NO: 3498985 - DNA, 25 bp, Homo sapien
tactgtggggccgtgcacttgacct

SEQ ID NO: 3498986 - DNA, 25 bp, Homo sapien
catgacgaagtcaacgtactgtggg

SEQ ID NO: 3498987 - DNA, 25 bp, Homo sapien
gcacggagctcatgacgaagtcaac

SEQ ID NO: 3498988 - DNA, 25 bp, Homo sapien
agcttctgcacggagctcatgacga

SEQ ID NO: 3498989 - DNA, 25 bp, Homo sapien
tggagcatcctagggacatggacac

SEQ ID NO: 3498990 - DNA, 25 bp, Homo sapien
gacttagaactacgccaggatcacg

SEQ ID NO: 3498991 - DNA, 25 bp, Homo sapien
caacactatgggtcgggatttcctc

SEQ ID NO: 3498992 - DNA, 25 bp, Homo sapien
aagggcggccagtcctcatgtgaga

SEQ ID NO: 3498993 - DNA, 25 bp, Homo sapien
tgctgtgtccaagaagcccctcagc

SEQ ID NO: 3498994 - DNA, 25 bp, Homo sapien
gggctcgcccacttcctgcgcagcc

SEQ ID NO: 3498995 - DNA, 25 bp, Homo sapien
gtctctgggcacccctctgctgtgt

SEQ ID NO: 3498996 - DNA, 25 bp, Homo sapien
gcctccagtgtctccgggcacaggg

SEQ ID NO: 3498997 - DNA, 25 bp, Homo sapien
ccaagaagctagaggatgacactgc

SEQ ID NO: 3498998 - DNA, 25 bp, Homo sapien
ggacagctctgcatgaccttcacgc

SEQ ID NO: 3498999 - DNA, 25 bp, Homo sapien
agctctcatgtgtgccctgtgcggg

SEQ ID NO: 3499000 - DNA, 25 bp, Homo sapien
ggggctgactcagcccacccgaagg

SEQ ID NO: 3499001 - DNA, 25 bp, Homo sapien
gctgcaggcctcaccgtgggcatcg

SEQ ID NO: 3499002 - DNA, 25 bp, Homo sapien
cctcaccgtgggcatcgccaccagg

SEQ ID NO: 3499003 - DNA, 25 bp, Homo sapien
accgtgggcatcgccaccaggctgt

SEQ ID NO: 3499004 - DNA, 25 bp, Homo sapien
tcaccgtgggcatcgccaccaggct

SEQ ID NO: 3499005 - DNA, 25 bp, Homo sapien
cagcatctgctcctcgagaatgatg

SEQ ID NO: 3499006 - DNA, 25 bp, Homo sapien
tcgagaatgatgtagaggacgcacg

SEQ ID NO: 3499007 - DNA, 25 bp, Homo sapien
tgcagagacaacagtcctttcagca

SEQ ID NO: 3499008 - DNA, 25 bp, Homo sapien
tagaggacgcacgtatccccactgt

SEQ ID NO: 3499009 - DNA, 25 bp, Homo sapien
actagagtttcacagtaagtctcaa

SEQ ID NO: 3499010 - DNA, 25 bp, Homo sapien
tgctgcctagtgtcaggtcataagg

SEQ ID NO: 3499011 - DNA, 25 bp, Homo sapien
tctgatggccccgtttgtgtgggtc

SEQ ID NO: 3499012 - DNA, 25 bp, Homo sapien
gagttttagatgtttgcacgaggca

SEQ ID NO: 3499013 - DNA, 25 bp, Homo sapien
ttgatgtggtggaaaaacgtcgtgg

SEQ ID NO: 3499014 - DNA, 25 bp, Homo sapien
aactcggagatggtgctatactgca

SEQ ID NO: 3499015 - DNA, 25 bp, Homo sapien
gtctctcctgtgcagaactcggaga

SEQ ID NO: 3499016 - DNA, 25 bp, Homo sapien
ttgcacacggccatcgtctgacacg

SEQ ID NO: 3499017 - DNA, 25 bp, Homo sapien
tgtgaaaaacgccagagctgagccg

SEQ ID NO: 3499018 - DNA, 25 bp, Homo sapien
gctctgcccgtccacgggccacatt

SEQ ID NO: 3499019 - DNA, 25 bp, Homo sapien
gcaggagctcggctgggtgagctct

SEQ ID NO: 3499020 - DNA, 25 bp, Homo sapien
gggccacattctcccctcgcggcag

SEQ ID NO: 3499021 - DNA, 25 bp, Homo sapien
cactcgttaaggtcaatctcgcggg

SEQ ID NO: 3499022 - DNA, 25 bp, Homo sapien
cagccactcgttaaggtcaatctcg

SEQ ID NO: 3499023 - DNA, 25 bp, Homo sapien
tggccagccactcgttaaggtcaat

SEQ ID NO: 3499024 - DNA, 25 bp, Homo sapien
tgctggccagccactcgttaaggtc

SEQ ID NO: 3499025 - DNA, 25 bp, Homo sapien
ctccgcagcgggcttcttgccatta

SEQ ID NO: 3499026 - DNA, 25 bp, Homo sapien
cgggcttcttgccattaggcttggc

SEQ ID NO: 3499027 - DNA, 25 bp, Homo sapien
cttgccattaggcttggctttggac

SEQ ID NO: 3499028 - DNA, 25 bp, Homo sapien
ctggccttggtgtgctcaggctcca

SEQ ID NO: 3499029 - DNA, 25 bp, Homo sapien
ggaagaagggctggcgctcccactt

SEQ ID NO: 3499030 - DNA, 25 bp, Homo sapien
actttgctgacagcctgaagcacca

SEQ ID NO: 3499031 - DNA, 25 bp, Homo sapien
gcactttgctgacagcctgaagcac

SEQ ID NO: 3499032 - DNA, 25 bp, Homo sapien
ctgagcactttgctgacagcctgaa

SEQ ID NO: 3499033 - DNA, 25 bp, Homo sapien
gagcactttgctgacagcctgaagc

SEQ ID NO: 3499034 - DNA, 25 bp, Homo sapien
gactgcagtggtctcccagcatgag

SEQ ID NO: 3499035 - DNA, 25 bp, Homo sapien
ccactttgcagggactggccgggcc

SEQ ID NO: 3499036 - DNA, 25 bp, Homo sapien
tggccgggccgggcttggtcttcag

SEQ ID NO: 3499037 - DNA, 25 bp, Homo sapien
tttgcagcagagtccactttgcagg

SEQ ID NO: 3499038 - DNA, 25 bp, Homo sapien
agacctgcccactctcgggaggcat

SEQ ID NO: 3499039 - DNA, 25 bp, Homo sapien
tgctggcaggtcacccaagtggcaa

SEQ ID NO: 3499040 - DNA, 25 bp, Homo sapien
ccccgtgagtagcagggctgggacc

SEQ ID NO: 3499041 - DNA, 25 bp, Homo sapien
taggcaccgtgctcacggctgccgg

SEQ ID NO: 3499042 - DNA, 25 bp, Homo sapien
aagctgccccgtgaacactccaact

SEQ ID NO: 3499043 - DNA, 25 bp, Homo sapien
cagcagagctacctgagcttagcga

SEQ ID NO: 3499044 - DNA, 25 bp, Homo sapien
taacaacagctttccatcggttctc

SEQ ID NO: 3499045 - DNA, 25 bp, Homo sapien
ccaatctctatcaaagacatgcaca

SEQ ID NO: 3499046 - DNA, 25 bp, Homo sapien
gtgcatcagcacaaagccaagaggt

SEQ ID NO: 3499047 - DNA, 25 bp, Homo sapien
tcaaatcgatccacaggaaaagtcc

SEQ ID NO: 3499048 - DNA, 25 bp, Homo sapien
gcttgtaatcaaagatcaccacgtg

SEQ ID NO: 3499049 - DNA, 25 bp, Homo sapien
tcaccacgtgttcaaggaagaaagg

SEQ ID NO: 3499050 - DNA, 25 bp, Homo sapien
acaggacggccaggccatgtgcctg

SEQ ID NO: 3499051 - DNA, 25 bp, Homo sapien
gattagccgaatgaagcacatgaag

SEQ ID NO: 3499052 - DNA, 25 bp, Homo sapien
agaacgccaaacacgagcacaggat

SEQ ID NO: 3499053 - DNA, 25 bp, Homo sapien
acgcaagggatagctgcaaccacag

SEQ ID NO: 3499054 - DNA, 25 bp, Homo sapien
catgggacagccaaaccacgtgcct

SEQ ID NO: 3499055 - DNA, 25 bp, Homo sapien
atgggacagccaaaccacgtgcctg

SEQ ID NO: 3499056 - DNA, 25 bp, Homo sapien
ccatgggacagccaaaccacgtgcc

SEQ ID NO: 3499057 - DNA, 25 bp, Homo sapien
cagacatcccattttccggtcggcc

SEQ ID NO: 3499058 - DNA, 25 bp, Homo sapien
tcccattttccggtcggccactcat

SEQ ID NO: 3499059 - DNA, 25 bp, Homo sapien
cactcatttcttccgtctctggctg

SEQ ID NO: 3499060 - DNA, 25 bp, Homo sapien
tttccggtcggccactcatttcttc

SEQ ID NO: 3499061 - DNA, 25 bp, Homo sapien
tatattcccggcacccggaacagga

SEQ ID NO: 3499062 - DNA, 25 bp, Homo sapien
gtccagcactcctgttacaatgtaa

SEQ ID NO: 3499063 - DNA, 25 bp, Homo sapien
aatgtaaggcctcttgtgtccacta

SEQ ID NO: 3499064 - DNA, 25 bp, Homo sapien
tcctgttacaatgtaaggcctcttg

SEQ ID NO: 3499065 - DNA, 25 bp, Homo sapien
ccatgaggtcgaaaatcacaatgac

SEQ ID NO: 3499066 - DNA, 25 bp, Homo sapien
tgagaaatggcccatgaggtcgaaa

SEQ ID NO: 3499067 - DNA, 25 bp, Homo sapien
tagctgagaaatggcccatgaggtc

SEQ ID NO: 3499068 - DNA, 25 bp, Homo sapien
aatggcccatgaggtcgaaaatcac

SEQ ID NO: 3499069 - DNA, 25 bp, Homo sapien
tttcttccacgccaccctagtagga

SEQ ID NO: 3499070 - DNA, 25 bp, Homo sapien
ggaaagcacccgaaacacaacagct

SEQ ID NO: 3499071 - DNA, 25 bp, Homo sapien
aatgccatcaagtctaccccaaacc

SEQ ID NO: 3499072 - DNA, 25 bp, Homo sapien
gacagtgatagcctctcctcctagt

SEQ ID NO: 3499073 - DNA, 25 bp, Homo sapien
cacagggctcgtaccctcagacagt

SEQ ID NO: 3499074 - DNA, 25 bp, Homo sapien
ccatcgtagccctgaaagaagtccc

SEQ ID NO: 3499075 - DNA, 25 bp, Homo sapien
catgcagagaaggactgaagcaagc

SEQ ID NO: 3499076 - DNA, 25 bp, Homo sapien
tgaagcaagccagggccatcgtagc

SEQ ID NO: 3499077 - DNA, 25 bp, Homo sapien
cacattctagaatggagagagccac

SEQ ID NO: 3499078 - DNA, 25 bp, Homo sapien
tagaacaggcaaaacctccagcagg

SEQ ID NO: 3499079 - DNA, 25 bp, Homo sapien
agcatccgccccacattctagaaca

SEQ ID NO: 3499080 - DNA, 25 bp, Homo sapien
ggaaaaccacgcagaagatagcggg

SEQ ID NO: 3499081 - DNA, 25 bp, Homo sapien
aatgctaccatggacagaaacccag

SEQ ID NO: 3499082 - DNA, 25 bp, Homo sapien
gagggacttcgatgcatgctctgca

SEQ ID NO: 3499083 - DNA, 25 bp, Homo sapien
caacagatgtttccagcaaatgcta

SEQ ID NO: 3499084 - DNA, 25 bp, Homo sapien
ccagcaagtgaaggaacgaaggcca

SEQ ID NO: 3499085 - DNA, 25 bp, Homo sapien
ccctgccctgggcacgccaggtaca

SEQ ID NO: 3499086 - DNA, 25 bp, Homo sapien
gaggcataccctgggtggtcagacc

SEQ ID NO: 3499087 - DNA, 25 bp, Homo sapien
gccaggcagaggcataccctgggtg

SEQ ID NO: 3499088 - DNA, 25 bp, Homo sapien
aggcagaggcataccctgggtggtc

SEQ ID NO: 3499089 - DNA, 25 bp, Homo sapien
cggctttaaattctcttggctgctc

SEQ ID NO: 3499090 - DNA, 25 bp, Homo sapien
ctggagcacagccgggcagacacca

SEQ ID NO: 3499091 - DNA, 25 bp, Homo sapien
tgcctgtggaccatcggcggcttta

SEQ ID NO: 3499092 - DNA, 25 bp, Homo sapien
gaccatcggcggctttaaattctct

SEQ ID NO: 3499093 - DNA, 25 bp, Homo sapien
gagcgggcaccatgaaagctcagca

SEQ ID NO: 3499094 - DNA, 25 bp, Homo sapien
ccatggcccacagtagtgccgggct

SEQ ID NO: 3499095 - DNA, 25 bp, Homo sapien
aacgcgggctgtccagtgttggctc

SEQ ID NO: 3499096 - DNA, 25 bp, Homo sapien
agccctcggtggtacccggagacag

SEQ ID NO: 3499097 - DNA, 25 bp, Homo sapien
cgggacatccgcaaacaactgcagg

SEQ ID NO: 3499098 - DNA, 25 bp, Homo sapien
cagggagccgtgtgcgctggcaaag

SEQ ID NO: 3499099 - DNA, 25 bp, Homo sapien
gttagccccgggacatccgcaaaca

SEQ ID NO: 3499100 - DNA, 25 bp, Homo sapien
agccgtgtgcgctggcaaaggagac

SEQ ID NO: 3499101 - DNA, 25 bp, Homo sapien
cactggtgtcaaggcaccgtgcggc

SEQ ID NO: 3499102 - DNA, 25 bp, Homo sapien
agcccgagcccgctaacccacagtt

SEQ ID NO: 3499103 - DNA, 25 bp, Homo sapien
actgtggtgccacagcccgagcccg

SEQ ID NO: 3499104 - DNA, 25 bp, Homo sapien
ctgcagtctgtattcaatcaccagc

SEQ ID NO: 3499105 - DNA, 25 bp, Homo sapien
cacgtgtattatttagcctctagag

SEQ ID NO: 3499106 - DNA, 25 bp, Homo sapien
gcctctagagtatctaggtcctcgg

SEQ ID NO: 3499107 - DNA, 25 bp, Homo sapien
cccggccacacgtgtattatttagc

SEQ ID NO: 3499108 - DNA, 25 bp, Homo sapien
gagtatctaggtcctcggctccggg

SEQ ID NO: 3499109 - DNA, 25 bp, Homo sapien
aggctgagggtagccacagctgcca

SEQ ID NO: 3499110 - DNA, 25 bp, Homo sapien
ctctgagctggttcttgtgcttggg

SEQ ID NO: 3499111 - DNA, 25 bp, Homo sapien
tgtgcttgggacagtccccagtgag

SEQ ID NO: 3499112 - DNA, 25 bp, Homo sapien
cccagtgaggctgagggtagccaca

SEQ ID NO: 3499113 - DNA, 25 bp, Homo sapien
caaagaccaggtacccatctgcagt

SEQ ID NO: 3499114 - DNA, 25 bp, Homo sapien
gaccctctaagggacattgaccaag

SEQ ID NO: 3499115 - DNA, 25 bp, Homo sapien
cactgggtaccttctgtatgcaaag

SEQ ID NO: 3499116 - DNA, 25 bp, Homo sapien
agggccttggtaagtccatccacag

SEQ ID NO: 3499117 - DNA, 25 bp, Homo sapien
ctccgctggacttcccagcaaataa

SEQ ID NO: 3499118 - DNA, 25 bp, Homo sapien
ggcagtggccaacacaggaccttcg

SEQ ID NO: 3499119 - DNA, 25 bp, Homo sapien
tcactttgcggtaaccagtgcctca

SEQ ID NO: 3499120 - DNA, 25 bp, Homo sapien
cattgtctccaaatacaaagggagg

SEQ ID NO: 3499121 - DNA, 25 bp, Homo sapien
cagacatatgggaggcaaatttaca

SEQ ID NO: 3499122 - DNA, 25 bp, Homo sapien
ctcagaaacccaacgcaacagacat

SEQ ID NO: 3499123 - DNA, 25 bp, Homo sapien
caacgcaacagacatatgggaggca

SEQ ID NO: 3499124 - DNA, 25 bp, Homo sapien
agaccactgtctcccggacagcaca

SEQ ID NO: 3499125 - DNA, 25 bp, Homo sapien
ggctttacctgtcttgaggcagtgc

SEQ ID NO: 3499126 - DNA, 25 bp, Homo sapien
ggctggcatgccacctagagagaga

SEQ ID NO: 3499127 - DNA, 25 bp, Homo sapien
gcctttctgagccactctgtggctg

SEQ ID NO: 3499128 - DNA, 25 bp, Homo sapien
atacatttataacgggcctggctgc

SEQ ID NO: 3499129 - DNA, 25 bp, Homo sapien
catctggcagctgcggcgcttgaac

SEQ ID NO: 3499130 - DNA, 25 bp, Homo sapien
cagctgcggcgcttgaactgcgtct

SEQ ID NO: 3499131 - DNA, 25 bp, Homo sapien
gctgcggcgcttgaactgcgtctcc

SEQ ID NO: 3499132 - DNA, 25 bp, Homo sapien
tgcggcgcttgaactgcgtctccgg

SEQ ID NO: 3499133 - DNA, 25 bp, Homo sapien
gctcagccctcgctgcctcccgccg

SEQ ID NO: 3499134 - DNA, 25 bp, Homo sapien
cgcgtcccggggctcagccctcgct

SEQ ID NO: 3499135 - DNA, 25 bp, Homo sapien
ctcgggccagccggtccgcgcgtcc

SEQ ID NO: 3499136 - DNA, 25 bp, Homo sapien
tcgggccagccggtccgcgcgtccc

SEQ ID NO: 3499137 - DNA, 25 bp, Homo sapien
ggcgcccgcccggccgaagggcgca

SEQ ID NO: 3499138 - DNA, 25 bp, Homo sapien
gcgcccgcccggccgaagggcgcaa

SEQ ID NO: 3499139 - DNA, 25 bp, Homo sapien
ccgcccggccgaagggcgcaaacag

SEQ ID NO: 3499140 - DNA, 25 bp, Homo sapien
gcccggccgaagggcgcaaacagca

SEQ ID NO: 3499141 - DNA, 25 bp, Homo sapien
cagggcccgtcgggcgacggcgtgc

SEQ ID NO: 3499142 - DNA, 25 bp, Homo sapien
gaagttcaggccgaggctgtgcgcg

SEQ ID NO: 3499143 - DNA, 25 bp, Homo sapien
tgccgcggagtctgccgggccgcat

SEQ ID NO: 3499144 - DNA, 25 bp, Homo sapien
cccccgacgggctgtccagcttgca

SEQ ID NO: 3499145 - DNA, 25 bp, Homo sapien
gcgcggcgtccgggctgtccgggct

SEQ ID NO: 3499146 - DNA, 25 bp, Homo sapien
cgcttgaggcggttagtgtcctgca

SEQ ID NO: 3499147 - DNA, 25 bp, Homo sapien
ggcggtccgaggagaggtgcaggcc

SEQ ID NO: 3499148 - DNA, 25 bp, Homo sapien
gagaaggagcgcttgaggcggttag

SEQ ID NO: 3499149 - DNA, 25 bp, Homo sapien
ggttagtgtcctgcaggcggtccga

SEQ ID NO: 3499150 - DNA, 25 bp, Homo sapien
tccctgtggcagcgctctctgaggt

SEQ ID NO: 3499151 - DNA, 25 bp, Homo sapien
tccctggcagccgcattccctgtgg

SEQ ID NO: 3499152 - DNA, 25 bp, Homo sapien
ccctgtggcagcgctctctgaggta

SEQ ID NO: 3499153 - DNA, 25 bp, Homo sapien
ctggcagccgcattccctgtggcag

SEQ ID NO: 3499154 - DNA, 25 bp, Homo sapien
gctccggcgtccctgagggggtgcc

SEQ ID NO: 3499155 - DNA, 25 bp, Homo sapien
ggacgggcgcctgtccttcacgaac

SEQ ID NO: 3499156 - DNA, 25 bp, Homo sapien
tggacgggcgcctgtccttcacgaa

SEQ ID NO: 3499157 - DNA, 25 bp, Homo sapien
gacgctgtgagccacaagtgcgcga

SEQ ID NO: 3499158 - DNA, 25 bp, Homo sapien
agggaagcgacgctgtgagccacaa

SEQ ID NO: 3499159 - DNA, 25 bp, Homo sapien
tcattctggtgcaagtgggcagccg

SEQ ID NO: 3499160 - DNA, 25 bp, Homo sapien
ctgtgagccacaagtgcgcgactgg

SEQ ID NO: 3499161 - DNA, 25 bp, Homo sapien
tcgtcggaggacatgcccatggtct

SEQ ID NO: 3499162 - DNA, 25 bp, Homo sapien
gatggtggcagagcgggagatgcca

SEQ ID NO: 3499163 - DNA, 25 bp, Homo sapien
gatgccagccagacagtggacgatg

SEQ ID NO: 3499164 - DNA, 25 bp, Homo sapien
cgatgacttggcagctggagagctt

SEQ ID NO: 3499165 - DNA, 25 bp, Homo sapien
atgaagcggctctcgcagatgaagt

SEQ ID NO: 3499166 - DNA, 25 bp, Homo sapien
tgaagcggctctcgcagatgaagtc

SEQ ID NO: 3499167 - DNA, 25 bp, Homo sapien
agcggctctcgcagatgaagtcagg

SEQ ID NO: 3499168 - DNA, 25 bp, Homo sapien
cggctctcgcagatgaagtcaggct

SEQ ID NO: 3499169 - DNA, 25 bp, Homo sapien
gtttaggacgtccttctgcgagccc

SEQ ID NO: 3499170 - DNA, 25 bp, Homo sapien
tgtttaggacgtccttctgcgagcc

SEQ ID NO: 3499171 - DNA, 25 bp, Homo sapien
tttaggacgtccttctgcgagccca

SEQ ID NO: 3499172 - DNA, 25 bp, Homo sapien
cttgtttaggacgtccttctgcgag

SEQ ID NO: 3499173 - DNA, 25 bp, Homo sapien
gccatcacggcacgcgctgggccca

SEQ ID NO: 3499174 - DNA, 25 bp, Homo sapien
ctaggatgcccgtaaaggtggcgtt

SEQ ID NO: 3499175 - DNA, 25 bp, Homo sapien
aaaggtggcgttgaggtggctggcc

SEQ ID NO: 3499176 - DNA, 25 bp, Homo sapien
ctgaggacgccgctaggatgcccgt

SEQ ID NO: 3499177 - DNA, 25 bp, Homo sapien
ttgcagtgcagtcgcccggccaagg

SEQ ID NO: 3499178 - DNA, 25 bp, Homo sapien
ctgcgggccgctgcttaaagggcca

SEQ ID NO: 3499179 - DNA, 25 bp, Homo sapien
cgcttgccccccaacatcgtgagca

SEQ ID NO: 3499180 - DNA, 25 bp, Homo sapien
ggtccaaggccgactgcgggccgct

SEQ ID NO: 3499181 - DNA, 25 bp, Homo sapien
aggatggccacgctgtcgaagcagc

SEQ ID NO: 3499182 - DNA, 25 bp, Homo sapien
gtgaggatggccacgctgtcgaagc

SEQ ID NO: 3499183 - DNA, 25 bp, Homo sapien
tgaggatggccacgctgtcgaagca

SEQ ID NO: 3499184 - DNA, 25 bp, Homo sapien
agcagatgttgacggagctgagcac

SEQ ID NO: 3499185 - DNA, 25 bp, Homo sapien
gcagcagatgttgacggagctgagc

SEQ ID NO: 3499186 - DNA, 25 bp, Homo sapien
cagcagatgttgacggagctgagca

SEQ ID NO: 3499187 - DNA, 25 bp, Homo sapien
ctgggagtgacctagcacatggtgc

SEQ ID NO: 3499188 - DNA, 25 bp, Homo sapien
acccagcgtctctgtgcagcacatt

SEQ ID NO: 3499189 - DNA, 25 bp, Homo sapien
gctcccacacccagcgtctctgtgc

SEQ ID NO: 3499190 - DNA, 25 bp, Homo sapien
tacccgaggggtcagcttcagactc

SEQ ID NO: 3499191 - DNA, 25 bp, Homo sapien
tccttacaaacacgagctcccacac

SEQ ID NO: 3499192 - DNA, 25 bp, Homo sapien
atctcaggcggccctggtgggtcct

SEQ ID NO: 3499193 - DNA, 25 bp, Homo sapien
ccccattccacacccaaagaaggag

SEQ ID NO: 3499194 - DNA, 25 bp, Homo sapien
ggctcgcgcagatccgcgctggatc

SEQ ID NO: 3499195 - DNA, 25 bp, Homo sapien
gcagatccgcgctggatctcaggcg

SEQ ID NO: 3499196 - DNA, 25 bp, Homo sapien
tcggccgcgccgtccatgggcccgg

SEQ ID NO: 3499197 - DNA, 25 bp, Homo sapien
ggccgcgccgtccatgggcccggcg

SEQ ID NO: 3499198 - DNA, 25 bp, Homo sapien
cggccgcgccgtccatgggcccggc

SEQ ID NO: 3499199 - DNA, 25 bp, Homo sapien
gccgcgccgtccatgggcccggcgg

SEQ ID NO: 3499200 - DNA, 25 bp, Homo sapien
gaacgcacgggtaattgcaccttcg

SEQ ID NO: 3499201 - DNA, 25 bp, Homo sapien
ttcggcaggtgttgggcgggagcaa

SEQ ID NO: 3499202 - DNA, 25 bp, Homo sapien
taattgcaccttcggcaggtgttgg

SEQ ID NO: 3499203 - DNA, 25 bp, Homo sapien
gcaggaagaacgcacgggtaattgc

SEQ ID NO: 3499204 - DNA, 25 bp, Homo sapien
gggcttcggccgctggttgaatgaa

SEQ ID NO: 3499205 - DNA, 25 bp, Homo sapien
gaaaatgaagctggcgcaacgaccg

SEQ ID NO: 3499206 - DNA, 25 bp, Homo sapien
ctcagtgggcaccaggaccacggag

SEQ ID NO: 3499207 - DNA, 25 bp, Homo sapien
acggagctcagggtgccaatggtga

SEQ ID NO: 3499208 - DNA, 25 bp, Homo sapien
tgccaggcctaggtgagcccgatgg

SEQ ID NO: 3499209 - DNA, 25 bp, Homo sapien
cgatgggcgtgtcttctgcccagct

SEQ ID NO: 3499210 - DNA, 25 bp, Homo sapien
agcccgatgggcgtgtcttctgccc

SEQ ID NO: 3499211 - DNA, 25 bp, Homo sapien
ctaggtgagcccgatgggcgtgtct

SEQ ID NO: 3499212 - DNA, 25 bp, Homo sapien
aggaggtaaaggctgggcaggaatg

SEQ ID NO: 3499213 - DNA, 25 bp, Homo sapien
ctggccatggtaagagtcctgcaaa

SEQ ID NO: 3499214 - DNA, 25 bp, Homo sapien
ccatggtaagagtcctgcaaagcca

SEQ ID NO: 3499215 - DNA, 25 bp, Homo sapien
gcaggaatgcctggccatggtaaga

SEQ ID NO: 3499216 - DNA, 25 bp, Homo sapien
cagcacacggggacacagcaactgg

SEQ ID NO: 3499217 - DNA, 25 bp, Homo sapien
cagctggattggcaacaggatgacc

SEQ ID NO: 3499218 - DNA, 25 bp, Homo sapien
tcagatcttgcactggcagcacacg

SEQ ID NO: 3499219 - DNA, 25 bp, Homo sapien
gattggcaacaggatgacccacagc

SEQ ID NO: 3499220 - DNA, 25 bp, Homo sapien
aggatgacccgcagcctcccttaga

SEQ ID NO: 3499221 - DNA, 25 bp, Homo sapien
agcctcccttagaccccgcgcaaga

SEQ ID NO: 3499222 - DNA, 25 bp, Homo sapien
ggagcaggatgacccgcagcctccc

SEQ ID NO: 3499223 - DNA, 25 bp, Homo sapien
cgcgcaagagccacaactggaacag

SEQ ID NO: 3499224 - DNA, 25 bp, Homo sapien
cttggatcccccacaagaaccgcag

SEQ ID NO: 3499225 - DNA, 25 bp, Homo sapien
aaccgcagccccccttgcagcctcc

SEQ ID NO: 3499226 - DNA, 25 bp, Homo sapien
cagccggagccacaaccccccttgg

SEQ ID NO: 3499227 - DNA, 25 bp, Homo sapien
aagaaccacaggcccccttggagca

SEQ ID NO: 3499228 - DNA, 25 bp, Homo sapien
acagccccctttgccacagctggag

SEQ ID NO: 3499229 - DNA, 25 bp, Homo sapien
agcacatgggcttgcagcagcagac

SEQ ID NO: 3499230 - DNA, 25 bp, Homo sapien
acagctggagcaggaacaagctggc

SEQ ID NO: 3499231 - DNA, 25 bp, Homo sapien
acatcccccacagccggaaccacag

SEQ ID NO: 3499232 - DNA, 25 bp, Homo sapien
cttggatcccccacaagagccacag

SEQ ID NO: 3499233 - DNA, 25 bp, Homo sapien
caggagccacaaccccccttggatc

SEQ ID NO: 3499234 - DNA, 25 bp, Homo sapien
cacaggagccacaaccccccttgga

SEQ ID NO: 3499235 - DNA, 25 bp, Homo sapien
cccacaggagccacaaccccccttg

SEQ ID NO: 3499236 - DNA, 25 bp, Homo sapien
acaggttggcacacggcagcacacg

SEQ ID NO: 3499237 - DNA, 25 bp, Homo sapien
ggaacaggttggcacacggcagcac

SEQ ID NO: 3499238 - DNA, 25 bp, Homo sapien
ttggcacacggcagcacacgggctt

SEQ ID NO: 3499239 - DNA, 25 bp, Homo sapien
ccacagccccctttgccacagctgg

SEQ ID NO: 3499240 - DNA, 25 bp, Homo sapien
ctccggagcagccgcaacagcccat

SEQ ID NO: 3499241 - DNA, 25 bp, Homo sapien
tggagccagaacctccacagccaga

SEQ ID NO: 3499242 - DNA, 25 bp, Homo sapien
ctggagccagaacctccacagccag

SEQ ID NO: 3499243 - DNA, 25 bp, Homo sapien
agcctccggagcagccgcaacagcc

SEQ ID NO: 3499244 - DNA, 25 bp, Homo sapien
ggacacctcccgcatcagggaaaca

SEQ ID NO: 3499245 - DNA, 25 bp, Homo sapien
aggatgtgtgggacgaactgactca

SEQ ID NO: 3499246 - DNA, 25 bp, Homo sapien
aagtgcagggaacatcgtggcagtc

SEQ ID NO: 3499247 - DNA, 25 bp, Homo sapien
acacacgtttctggagtgaggaggc

SEQ ID NO: 3499248 - DNA, 25 bp, Homo sapien
tggcagcacacagggacacaacagt

SEQ ID NO: 3499249 - DNA, 25 bp, Homo sapien
aacagttggactggcagcaacaggg

SEQ ID NO: 3499250 - DNA, 25 bp, Homo sapien
agcacacagggacacaacagttgga

SEQ ID NO: 3499251 - DNA, 25 bp, Homo sapien
acacagggacacaacagttggactg

SEQ ID NO: 3499252 - DNA, 25 bp, Homo sapien
gactggcagcaggatgatccacagc

SEQ ID NO: 3499253 - DNA, 25 bp, Homo sapien
gctggactggcagcaggatgatcca

SEQ ID NO: 3499254 - DNA, 25 bp, Homo sapien
agctggactggcagcaggatgatcc

SEQ ID NO: 3499255 - DNA, 25 bp, Homo sapien
tggactggcagcaggatgatccaca

SEQ ID NO: 3499256 - DNA, 25 bp, Homo sapien
ggagcagcaacagggcttacaacag

SEQ ID NO: 3499257 - DNA, 25 bp, Homo sapien
caacagctggactgggagcagccac

SEQ ID NO: 3499258 - DNA, 25 bp, Homo sapien
tgaggagcagcaacagggcttacaa

SEQ ID NO: 3499259 - DNA, 25 bp, Homo sapien
cttacaacagctggactgggagcag

SEQ ID NO: 3499260 - DNA, 25 bp, Homo sapien
agacaggcacataacatctggagcc

SEQ ID NO: 3499261 - DNA, 25 bp, Homo sapien
agcagacaggcacataacatctgga

SEQ ID NO: 3499262 - DNA, 25 bp, Homo sapien
gacaggcacataacatctggagcca

SEQ ID NO: 3499263 - DNA, 25 bp, Homo sapien
caggcacataacatctggagccaca

SEQ ID NO: 3499264 - DNA, 25 bp, Homo sapien
cccacagccggagccacagcctctg

SEQ ID NO: 3499265 - DNA, 25 bp, Homo sapien
gctggagccacagcccccacagccg

SEQ ID NO: 3499266 - DNA, 25 bp, Homo sapien
acagcccccacagccggagccacag

SEQ ID NO: 3499267 - DNA, 25 bp, Homo sapien
gcccccacagccggagccacagcct

SEQ ID NO: 3499268 - DNA, 25 bp, Homo sapien
tgcaggtgtggagctccctgagcct

SEQ ID NO: 3499269 - DNA, 25 bp, Homo sapien
gagggaggtgcaggtgtggagctcc

SEQ ID NO: 3499270 - DNA, 25 bp, Homo sapien
ggaggtgcaggtgtggagctccctg

SEQ ID NO: 3499271 - DNA, 25 bp, Homo sapien
ggtgcaggtgtggagctccctgagc

SEQ ID NO: 3499272 - DNA, 25 bp, Homo sapien
agaactgaagctttggacccctggg

SEQ ID NO: 3499273 - DNA, 25 bp, Homo sapien
tcactttgctatgcattgggtctcc

SEQ ID NO: 3499274 - DNA, 25 bp, Homo sapien
ggatctaccctctcagtacgtttta

SEQ ID NO: 3499275 - DNA, 25 bp, Homo sapien
tgttgttgtaagtaaccagatctcc

SEQ ID NO: 3499276 - DNA, 25 bp, Homo sapien
tccagccatggggtggaggccgttt

SEQ ID NO: 3499277 - DNA, 25 bp, Homo sapien
tttagtttttcaacagctcagtgac

SEQ ID NO: 3499278 - DNA, 25 bp, Homo sapien
ctcttgcttgttggctctgaggatt

SEQ ID NO: 3499279 - DNA, 25 bp, Homo sapien
gccatggggtggaggccgtttttga

SEQ ID NO: 3499280 - DNA, 25 bp, Homo sapien
agtgtcagcgtgtttccagcaggct

SEQ ID NO: 3499281 - DNA, 25 bp, Homo sapien
cccagggatgtgggatcttgaagcc

SEQ ID NO: 3499282 - DNA, 25 bp, Homo sapien
cagcaggtcggaggattccagtgtc

SEQ ID NO: 3499283 - DNA, 25 bp, Homo sapien
ctaggtcaactccaaaagcaatcgg

SEQ ID NO: 3499284 - DNA, 25 bp, Homo sapien
agagcccggatctgtaggacccact

SEQ ID NO: 3499285 - DNA, 25 bp, Homo sapien
tctgtaggacccactgaggtttgtg

SEQ ID NO: 3499286 - DNA, 25 bp, Homo sapien
ccggatctgtaggacccactgaggt

SEQ ID NO: 3499287 - DNA, 25 bp, Homo sapien
tggagagcccggatctgtaggaccc

SEQ ID NO: 3499288 - DNA, 25 bp, Homo sapien
cagatcttgcactggcagcaaattg

SEQ ID NO: 3499289 - DNA, 25 bp, Homo sapien
cactggcagcaaattgggacacagc

SEQ ID NO: 3499290 - DNA, 25 bp, Homo sapien
tcttgcactggcagcaaattgggac

SEQ ID NO: 3499291 - DNA, 25 bp, Homo sapien
ttgcactggcagcaaattgggacac

SEQ ID NO: 3499292 - DNA, 25 bp, Homo sapien
agcagcagcagggcttatagcagct

SEQ ID NO: 3499293 - DNA, 25 bp, Homo sapien
gcaggatgacccacagcctgaggag

SEQ ID NO: 3499294 - DNA, 25 bp, Homo sapien
gcagcagggcttatagcagctgcac

SEQ ID NO: 3499295 - DNA, 25 bp, Homo sapien
ggcagcaggatgacccacagcctga

SEQ ID NO: 3499296 - DNA, 25 bp, Homo sapien
tggagcccccacgaaatccacagac

SEQ ID NO: 3499297 - DNA, 25 bp, Homo sapien
ttggagcccccacgaaatccacaga

SEQ ID NO: 3499298 - DNA, 25 bp, Homo sapien
gagcccccacgaaatccacagaccc

SEQ ID NO: 3499299 - DNA, 25 bp, Homo sapien
ccttggagcccccacgaaatccaca

SEQ ID NO: 3499300 - DNA, 25 bp, Homo sapien
ccttgcagcccccacaagagccaca

SEQ ID NO: 3499301 - DNA, 25 bp, Homo sapien
aagagccacagacccccttggagcc

SEQ ID NO: 3499302 - DNA, 25 bp, Homo sapien
tgcagcccccacaagagccacagac

SEQ ID NO: 3499303 - DNA, 25 bp, Homo sapien
aggagccacagccccccttgcagcc

SEQ ID NO: 3499304 - DNA, 25 bp, Homo sapien
ggcttgcagcagcagacaggtacac

SEQ ID NO: 3499305 - DNA, 25 bp, Homo sapien
gcacacgggcttgcagcagcagaca

SEQ ID NO: 3499306 - DNA, 25 bp, Homo sapien
acgggcttgcagcagcagacaggta

SEQ ID NO: 3499307 - DNA, 25 bp, Homo sapien
agcacacgggcttgcagcagcagac

SEQ ID NO: 3499308 - DNA, 25 bp, Homo sapien
gctggagccacagcctccagagcag

SEQ ID NO: 3499309 - DNA, 25 bp, Homo sapien
agccacagcccccatagccggagcc

SEQ ID NO: 3499310 - DNA, 25 bp, Homo sapien
acagcccccatagccggagccacag

SEQ ID NO: 3499311 - DNA, 25 bp, Homo sapien
ggagccacagcccccatagccggag

SEQ ID NO: 3499312 - DNA, 25 bp, Homo sapien
aggtttggagttctctgagcccggg

SEQ ID NO: 3499313 - DNA, 25 bp, Homo sapien
ggtttggagttctctgagcccgggc

SEQ ID NO: 3499314 - DNA, 25 bp, Homo sapien
gtttggagttctctgagcccgggct

SEQ ID NO: 3499315 - DNA, 25 bp, Homo sapien
cagtcatatttacgatgcagatttt

SEQ ID NO: 3499316 - DNA, 25 bp, Homo sapien
taagtaaaattgcaatgcttgcaag

SEQ ID NO: 3499317 - DNA, 25 bp, Homo sapien
gaaaagaaacgtaggattctgtgat

SEQ ID NO: 3499318 - DNA, 25 bp, Homo sapien
gcagaaccagctctcttaaatacat

SEQ ID NO: 3499319 - DNA, 25 bp, Homo sapien
tgtagcaggtgggacgcttatgccc

SEQ ID NO: 3499320 - DNA, 25 bp, Homo sapien
agaatttgttaggagagacaatgga

SEQ ID NO: 3499321 - DNA, 25 bp, Homo sapien
aaaaagatacagcagagtgttggac

SEQ ID NO: 3499322 - DNA, 25 bp, Homo sapien
tatggcatcgttctacagcagggaa

SEQ ID NO: 3499323 - DNA, 25 bp, Homo sapien
agcacacagggacacagcaactaga

SEQ ID NO: 3499324 - DNA, 25 bp, Homo sapien
cacagggacacagcaactagactgg

SEQ ID NO: 3499325 - DNA, 25 bp, Homo sapien
actagactgggagcagcagggattg

SEQ ID NO: 3499326 - DNA, 25 bp, Homo sapien
gatgacccacaacctgaggaggagc

SEQ ID NO: 3499327 - DNA, 25 bp, Homo sapien
agcagctggactggcagcagtaggg

SEQ ID NO: 3499328 - DNA, 25 bp, Homo sapien
gactggcagcaggatgacccacaac

SEQ ID NO: 3499329 - DNA, 25 bp, Homo sapien
cagctggactggcagcagtagggct

SEQ ID NO: 3499330 - DNA, 25 bp, Homo sapien
tggactggcagcagtagggcttgca

SEQ ID NO: 3499331 - DNA, 25 bp, Homo sapien
ggatgacccacagcctgaagagcag

SEQ ID NO: 3499332 - DNA, 25 bp, Homo sapien
gcagcaggatgacccacagcctgaa

SEQ ID NO: 3499333 - DNA, 25 bp, Homo sapien
ttggaacccccacaagagccatagc

SEQ ID NO: 3499334 - DNA, 25 bp, Homo sapien
ggaccccccacaggagacacagccc

SEQ ID NO: 3499335 - DNA, 25 bp, Homo sapien
ggattgagggtggagcaggtagagg

SEQ ID NO: 3499336 - DNA, 25 bp, Homo sapien
ttctggtggattgagggtggagcag

SEQ ID NO: 3499337 - DNA, 25 bp, Homo sapien
gtggattgagggtggagcaggtaga

SEQ ID NO: 3499338 - DNA, 25 bp, Homo sapien
ggttctggtggattgagggtggagc

SEQ ID NO: 3499339 - DNA, 25 bp, Homo sapien
gttttcctcatgtgatgggcagagg

SEQ ID NO: 3499340 - DNA, 25 bp, Homo sapien
cccttttctgttgggttcttgatct

SEQ ID NO: 3499341 - DNA, 25 bp, Homo sapien
ttttctgttgggttcttgatctgga

SEQ ID NO: 3499342 - DNA, 25 bp, Homo sapien
cttttctgttgggttcttgatctgg

SEQ ID NO: 3499343 - DNA, 25 bp, Homo sapien
tttctgttgggttcttgatctggag

SEQ ID NO: 3499344 - DNA, 25 bp, Homo sapien
ctgtggctccggctgtggaggcctt

SEQ ID NO: 3499345 - DNA, 25 bp, Homo sapien
gctgtggaggccttggctccggctg

SEQ ID NO: 3499346 - DNA, 25 bp, Homo sapien
gctccggctgtggaggccttggctc

SEQ ID NO: 3499347 - DNA, 25 bp, Homo sapien
cctcaatccaccagaaccatgggct

SEQ ID NO: 3499348 - DNA, 25 bp, Homo sapien
cgtgtgctgccagtgtaagatctga

SEQ ID NO: 3499349 - DNA, 25 bp, Homo sapien
tgctgtaagccctgtagctgcttct

SEQ ID NO: 3499350 - DNA, 25 bp, Homo sapien
aatccagctgctacaagccctgctg

SEQ ID NO: 3499351 - DNA, 25 bp, Homo sapien
ggatcatcctgctgccaatccagct

SEQ ID NO: 3499352 - DNA, 25 bp, Homo sapien
gtaatgacagacacgggggaaaaca

SEQ ID NO: 3499353 - DNA, 25 bp, Homo sapien
tgacagacacgggggaaaacatcat

SEQ ID NO: 3499354 - DNA, 25 bp, Homo sapien
taatgacagacacgggggaaaacat

SEQ ID NO: 3499355 - DNA, 25 bp, Homo sapien
tagtaatgacagacacgggggaaaa

SEQ ID NO: 3499356 - DNA, 25 bp, Homo sapien
ggctcaaacaggctccgtcctggtg

SEQ ID NO: 3499357 - DNA, 25 bp, Homo sapien
cacccaaacatggtagaaatacgtg

SEQ ID NO: 3499358 - DNA, 25 bp, Homo sapien
agtctccaaagattgagtggctgcc

SEQ ID NO: 3499359 - DNA, 25 bp, Homo sapien
aatacgtgaactggacgtgatgcac

SEQ ID NO: 3499360 - DNA, 25 bp, Homo sapien
agcaggatctgggtccaaggtcttc

SEQ ID NO: 3499361 - DNA, 25 bp, Homo sapien
caaggtcttcttccacgttcagggt

SEQ ID NO: 3499362 - DNA, 25 bp, Homo sapien
tgagtgatggtgtggagcaggatct

SEQ ID NO: 3499363 - DNA, 25 bp, Homo sapien
cgcggggtgagtgatggtgtggagc

SEQ ID NO: 3499364 - DNA, 25 bp, Homo sapien
tcagggatacgcagtaaagacaacc

SEQ ID NO: 3499365 - DNA, 25 bp, Homo sapien
aggtagaagagtgccaggacatgcc

SEQ ID NO: 3499366 - DNA, 25 bp, Homo sapien
cacaggctcccgaacatcagggata

SEQ ID NO: 3499367 - DNA, 25 bp, Homo sapien
gctgcccgctgtgcctcattctggg

SEQ ID NO: 3499368 - DNA, 25 bp, Homo sapien
ctgtttggatagagacaaacacagc

SEQ ID NO: 3499369 - DNA, 25 bp, Homo sapien
agcccagatctcagccccccggcag

SEQ ID NO: 3499370 - DNA, 25 bp, Homo sapien
agacaccagacaccgcaatgatttg

SEQ ID NO: 3499371 - DNA, 25 bp, Homo sapien
ccagacaccgcaatgatttgctcca

SEQ ID NO: 3499372 - DNA, 25 bp, Homo sapien
ggtccatgcagccaacacagaggtt

SEQ ID NO: 3499373 - DNA, 25 bp, Homo sapien
tgaggacattcgtgcagacactttg

SEQ ID NO: 3499374 - DNA, 25 bp, Homo sapien
agacactttgtccagtgcccgaggg

SEQ ID NO: 3499375 - DNA, 25 bp, Homo sapien
gctgtagcgtccatgcaagttctgc

SEQ ID NO: 3499376 - DNA, 25 bp, Homo sapien
gggccgggggactgtgcttcttcgc

SEQ ID NO: 3499377 - DNA, 25 bp, Homo sapien
ctgaagaaactgcccctcatttttg

SEQ ID NO: 3499378 - DNA, 25 bp, Homo sapien
tttgcatttgtgtgatggctgctaa

SEQ ID NO: 3499379 - DNA, 25 bp, Homo sapien
tgaagaaactgcccctcatttttgt

SEQ ID NO: 3499380 - DNA, 25 bp, Homo sapien
gaatgcatgtgaccggcaaagctgc

SEQ ID NO: 3499381 - DNA, 25 bp, Homo sapien
gatggatcccaggtacgtctctgag

SEQ ID NO: 3499382 - DNA, 25 bp, Homo sapien
gaaggacaccttcgctctgtctggg

SEQ ID NO: 3499383 - DNA, 25 bp, Homo sapien
gaaactcagcttagaacaggtcaca

SEQ ID NO: 3499384 - DNA, 25 bp, Homo sapien
tgccacaacagctcgcagtcaggct

SEQ ID NO: 3499385 - DNA, 25 bp, Homo sapien
atgccacaacagctcgcagtcaggc

SEQ ID NO: 3499386 - DNA, 25 bp, Homo sapien
cgtcgtgaggaagacgcgggtcagc

SEQ ID NO: 3499387 - DNA, 25 bp, Homo sapien
atgctgtcagggaaagcgtcggtgc

SEQ ID NO: 3499388 - DNA, 25 bp, Homo sapien
gctgccctagttgggtgatgatgat

SEQ ID NO: 3499389 - DNA, 25 bp, Homo sapien
aagacgcgggtcagctgccctagtt

SEQ ID NO: 3499390 - DNA, 25 bp, Homo sapien
gctgaatccgcatgtctggagtcac

SEQ ID NO: 3499391 - DNA, 25 bp, Homo sapien
tttggtcctggagcgaagaggctga

SEQ ID NO: 3499392 - DNA, 25 bp, Homo sapien
cctggagcgaagaggctgaatccgc

SEQ ID NO: 3499393 - DNA, 25 bp, Homo sapien
ccgcatgtctggagtcaccgtggag

SEQ ID NO: 3499394 - DNA, 25 bp, Homo sapien
ctgtgggaatcctatgtggccccat

SEQ ID NO: 3499395 - DNA, 25 bp, Homo sapien
gaccaagagccgtcaatgccagaag

SEQ ID NO: 3499396 - DNA, 25 bp, Homo sapien
gctttcccaacaagccatgctagag

SEQ ID NO: 3499397 - DNA, 25 bp, Homo sapien
tgctagagcagactcatgggttcaa

SEQ ID NO: 3499398 - DNA, 25 bp, Homo sapien
tcaaaaatggccgtagacctacacg

SEQ ID NO: 3499399 - DNA, 25 bp, Homo sapien
tggagaccgaccaagagccgccttg

SEQ ID NO: 3499400 - DNA, 25 bp, Homo sapien
tacagaacacataaatggaacacaa

SEQ ID NO: 3499401 - DNA, 25 bp, Homo sapien
ccaaatcccagtgccggagcggggc

SEQ ID NO: 3499402 - DNA, 25 bp, Homo sapien
caaatgggcattttcaacgcataaa

SEQ ID NO: 3499403 - DNA, 25 bp, Homo sapien
cataacatggaagacacctggacac

SEQ ID NO: 3499404 - DNA, 25 bp, Homo sapien
ttcaagggtcagtgctcaagagtcc

SEQ ID NO: 3499405 - DNA, 25 bp, Homo sapien
cattgcccggagttggatacaaaca

SEQ ID NO: 3499406 - DNA, 25 bp, Homo sapien
gcctctgggtctaatggtgcaagca

SEQ ID NO: 3499407 - DNA, 25 bp, Homo sapien
ggaatagcaagtccttcccactgcg

SEQ ID NO: 3499408 - DNA, 25 bp, Homo sapien
ttttacagctaaggagatgggcacg

SEQ ID NO: 3499409 - DNA, 25 bp, Homo sapien
catgactgtgcctgagttccaaggg

SEQ ID NO: 3499410 - DNA, 25 bp, Homo sapien
ggttagccaggcgtctatcgtctct

SEQ ID NO: 3499411 - DNA, 25 bp, Homo sapien
gcataagcccttcctgctaggtgtc

SEQ ID NO: 3499412 - DNA, 25 bp, Homo sapien
atgtctcagtgcttgtctccgccag

SEQ ID NO: 3499413 - DNA, 25 bp, Homo sapien
gggacaattttgcataagcccttcc

SEQ ID NO: 3499414 - DNA, 25 bp, Homo sapien
gatcctgcgtttcagggaccatgag

SEQ ID NO: 3499415 - DNA, 25 bp, Homo sapien
actggtgatgttgaacagccgggcc

SEQ ID NO: 3499416 - DNA, 25 bp, Homo sapien
tttgcatcctccacggctccattca

SEQ ID NO: 3499417 - DNA, 25 bp, Homo sapien
cggctccattcaggtcattgagaag

SEQ ID NO: 3499418 - DNA, 25 bp, Homo sapien
aacagccgggccgtctttgcatcct

SEQ ID NO: 3499419 - DNA, 25 bp, Homo sapien
ttccgagagctgacgaatgaacgat

SEQ ID NO: 3499420 - DNA, 25 bp, Homo sapien
cagtaccagtgctttgtttccgaga

SEQ ID NO: 3499421 - DNA, 25 bp, Homo sapien
tagaggaacatgtctctgccctggg

SEQ ID NO: 3499422 - DNA, 25 bp, Homo sapien
gggcactgtacacggatgaacttgg

SEQ ID NO: 3499423 - DNA, 25 bp, Homo sapien
ggcgacacaactgtctcctaatttg

SEQ ID NO: 3499424 - DNA, 25 bp, Homo sapien
aatattaaggcgaaaggagtgggct

SEQ ID NO: 3499425 - DNA, 25 bp, Homo sapien
gaatgaattatagggccctcccctc

SEQ ID NO: 3499426 - DNA, 25 bp, Homo sapien
tcctaatttgattggttctgcctcg

SEQ ID NO: 3499427 - DNA, 25 bp, Homo sapien
tgacatatgtgaacgaggcagtgct

SEQ ID NO: 3499428 - DNA, 25 bp, Homo sapien
caagtctagcttggtggccaggctc

SEQ ID NO: 3499429 - DNA, 25 bp, Homo sapien
tacggtcagaggagaccatccagga

SEQ ID NO: 3499430 - DNA, 25 bp, Homo sapien
cagggcccggtgcttctgaggacta

SEQ ID NO: 3499431 - DNA, 25 bp, Homo sapien
tgcctcgaggcttgtcttgtctcct

SEQ ID NO: 3499432 - DNA, 25 bp, Homo sapien
gccctgatcatatccttctctttcc

SEQ ID NO: 3499433 - DNA, 25 bp, Homo sapien
ccttctgcctcgaggcttgtcttgt

SEQ ID NO: 3499434 - DNA, 25 bp, Homo sapien
tgaaccttctgcctcgaggcttgtc

SEQ ID NO: 3499435 - DNA, 25 bp, Homo sapien
taaggcttcaatctctgcgctgcag

SEQ ID NO: 3499436 - DNA, 25 bp, Homo sapien
caagagctcggattttagccaagac

SEQ ID NO: 3499437 - DNA, 25 bp, Homo sapien
tagccaagaccttctgaacctaggg

SEQ ID NO: 3499438 - DNA, 25 bp, Homo sapien
gaggtgtaatgagccgtccctgacc

SEQ ID NO: 3499439 - DNA, 25 bp, Homo sapien
tggaccacaggtaatagtcgttcac

SEQ ID NO: 3499440 - DNA, 25 bp, Homo sapien
cagcagaagttgaggtagacgaagt

SEQ ID NO: 3499441 - DNA, 25 bp, Homo sapien
ttgaagatggaccacaggtaatagt

SEQ ID NO: 3499442 - DNA, 25 bp, Homo sapien
tttgagggagtaggccaaggcgatg

SEQ ID NO: 3499443 - DNA, 25 bp, Homo sapien
ggcttggacacgcaagcgaagcagc

SEQ ID NO: 3499444 - DNA, 25 bp, Homo sapien
tggtgtccgggtagacctcgatgac

SEQ ID NO: 3499445 - DNA, 25 bp, Homo sapien
cggaatccagaaggccccgtccagg

SEQ ID NO: 3499446 - DNA, 25 bp, Homo sapien
cttcttctcggctaggtgcttgcag

SEQ ID NO: 3499447 - DNA, 25 bp, Homo sapien
tcagagccattgacgagtaaacaac

SEQ ID NO: 3499448 - DNA, 25 bp, Homo sapien
gaaatgaacacttctccaacgaggc

SEQ ID NO: 3499449 - DNA, 25 bp, Homo sapien
ccagtggagacggaaatccctgcgg

SEQ ID NO: 3499450 - DNA, 25 bp, Homo sapien
catacatagacgcacaataacaggc

SEQ ID NO: 3499451 - DNA, 25 bp, Homo sapien
gggccgctgtctgtccactgatccg

SEQ ID NO: 3499452 - DNA, 25 bp, Homo sapien
actgatccgcctcccagcggcccaa

SEQ ID NO: 3499453 - DNA, 25 bp, Homo sapien
ctcggtgcgcgcgtccttccgccgt

SEQ ID NO: 3499454 - DNA, 25 bp, Homo sapien
cgcgcggccggaccccctgagcctc

SEQ ID NO: 3499455 - DNA, 25 bp, Homo sapien
tctcacggtatgcttgacgccagct

SEQ ID NO: 3499456 - DNA, 25 bp, Homo sapien
catctgctcgcagggcaaagtgtcc

SEQ ID NO: 3499457 - DNA, 25 bp, Homo sapien
aaagtgtcccgttccgagctctggt

SEQ ID NO: 3499458 - DNA, 25 bp, Homo sapien
tcctggctgctaaggacacttgtct

SEQ ID NO: 3499459 - DNA, 25 bp, Homo sapien
caaagtcccccggaagctgaggatg

SEQ ID NO: 3499460 - DNA, 25 bp, Homo sapien
gtgtctccgcaaccctctttcctgt

SEQ ID NO: 3499461 - DNA, 25 bp, Homo sapien
actgagcctcgaccctctccaaagt

SEQ ID NO: 3499462 - DNA, 25 bp, Homo sapien
ctgaggatgcatggcggcccccgtt

SEQ ID NO: 3499463 - DNA, 25 bp, Homo sapien
agctcatcctcaggcctctagcggc

SEQ ID NO: 3499464 - DNA, 25 bp, Homo sapien
caggctccaacaaggtgggttttgt

SEQ ID NO: 3499465 - DNA, 25 bp, Homo sapien
aggccaatacatgcccctgggactg

SEQ ID NO: 3499466 - DNA, 25 bp, Homo sapien
cactgaacaggtagggtggcagagc

SEQ ID NO: 3499467 - DNA, 25 bp, Homo sapien
ggccctcaggcagggcaggtttcca

SEQ ID NO: 3499468 - DNA, 25 bp, Homo sapien
gggctcagcccagcgggcgctggta

SEQ ID NO: 3499469 - DNA, 25 bp, Homo sapien
ggggctcagcccagcgggcgctggt

SEQ ID NO: 3499470 - DNA, 25 bp, Homo sapien
aggcagggcaggtttccaagggagg

SEQ ID NO: 3499471 - DNA, 25 bp, Homo sapien
tctgtttctgtgctggcgcgcggac

SEQ ID NO: 3499472 - DNA, 25 bp, Homo sapien
gggtcttccaatgcacgaaacagat

SEQ ID NO: 3499473 - DNA, 25 bp, Homo sapien
cacagaacaaaacagcaagtcgggc

SEQ ID NO: 3499474 - DNA, 25 bp, Homo sapien
tgaagggagccccaggatacacgag

SEQ ID NO: 3499475 - DNA, 25 bp, Homo sapien
gaggcgggcagcctcggcgaagccc

SEQ ID NO: 3499476 - DNA, 25 bp, Homo sapien
ggcgggcagcctcggcgaagcccac

SEQ ID NO: 3499477 - DNA, 25 bp, Homo sapien
ctagaggcgggcagcctcggcgaag

SEQ ID NO: 3499478 - DNA, 25 bp, Homo sapien
tagaggcgggcagcctcggcgaagc

SEQ ID NO: 3499479 - DNA, 25 bp, Homo sapien
gctgggtggcgggatgtccatgccc

SEQ ID NO: 3499480 - DNA, 25 bp, Homo sapien
tagtagcggccgatgaagacgtcgc

SEQ ID NO: 3499481 - DNA, 25 bp, Homo sapien
caaacacagtgtagtagcggccgat

SEQ ID NO: 3499482 - DNA, 25 bp, Homo sapien
cctgttgttgtcacggtcaaacaca

SEQ ID NO: 3499483 - DNA, 25 bp, Homo sapien
gcctcccagcttcagtgtgatcgcg

SEQ ID NO: 3499484 - DNA, 25 bp, Homo sapien
cttgagcgtgtagtcctctggggac

SEQ ID NO: 3499485 - DNA, 25 bp, Homo sapien
ggtggacaccttctcacaggggatc

SEQ ID NO: 3499486 - DNA, 25 bp, Homo sapien
ccagcttcagtgtgatcgcgggcag

SEQ ID NO: 3499487 - DNA, 25 bp, Homo sapien
ttggggctccccctgccagccccag

SEQ ID NO: 3499488 - DNA, 25 bp, Homo sapien
gctccccctgccagccccagcccca

SEQ ID NO: 3499489 - DNA, 25 bp, Homo sapien
cccagccccagcccccggcgctcac

SEQ ID NO: 3499490 - DNA, 25 bp, Homo sapien
ggggctccccctgccagccccagcc

SEQ ID NO: 3499491 - DNA, 25 bp, Homo sapien
gcacggccccgatggccttctgcag

SEQ ID NO: 3499492 - DNA, 25 bp, Homo sapien
ctcgccctgaatcagcggcacggcc

SEQ ID NO: 3499493 - DNA, 25 bp, Homo sapien
atccaccgggcccaccatgagggaa

SEQ ID NO: 3499494 - DNA, 25 bp, Homo sapien
tgcagctcgcgcacctcatccaccg

SEQ ID NO: 3499495 - DNA, 25 bp, Homo sapien
taggccttgcgggtgacattcaggt

SEQ ID NO: 3499496 - DNA, 25 bp, Homo sapien
gacagagaacccttgtaatacttgg

SEQ ID NO: 3499497 - DNA, 25 bp, Homo sapien
aggtggacctgccagtaggccttgc

SEQ ID NO: 3499498 - DNA, 25 bp, Homo sapien
taatacttggagtctgtgccaccca

SEQ ID NO: 3499499 - DNA, 25 bp, Homo sapien
agtaagagggtgaatgtggcaatca

SEQ ID NO: 3499500 - DNA, 25 bp, Homo sapien
gcacaagagtgccaggtcaggagta

SEQ ID NO: 3499501 - DNA, 25 bp, Homo sapien
cagacatcagggtcaaggctagcgg

SEQ ID NO: 3499502 - DNA, 25 bp, Homo sapien
ggagccaaggttcagccagacatca

SEQ ID NO: 3499503 - DNA, 25 bp, Homo sapien
ctgcatcaggttgtcgaagacgggc

SEQ ID NO: 3499504 - DNA, 25 bp, Homo sapien
agcacgttgttgacggagatgcggg

SEQ ID NO: 3499505 - DNA, 25 bp, Homo sapien
tcgaacttggctgcgatgaaggtga

SEQ ID NO: 3499506 - DNA, 25 bp, Homo sapien
aggatgccatcgaacttggctgcga

SEQ ID NO: 3499507 - DNA, 25 bp, Homo sapien
cagggcagaggctgacgacgctgac

SEQ ID NO: 3499508 - DNA, 25 bp, Homo sapien
cagaggctgacgacgctgactggca

SEQ ID NO: 3499509 - DNA, 25 bp, Homo sapien
actttgacaccgcccagggcagagg

SEQ ID NO: 3499510 - DNA, 25 bp, Homo sapien
tccactttgacaccgcccagggcag

SEQ ID NO: 3499511 - DNA, 25 bp, Homo sapien
gatgtcaaacgaggtaccattcttc

SEQ ID NO: 3499512 - DNA, 25 bp, Homo sapien
accattcttcacgtaggtgctggac

SEQ ID NO: 3499513 - DNA, 25 bp, Homo sapien
gctgcccgagccatagtggatgtca

SEQ ID NO: 3499514 - DNA, 25 bp, Homo sapien
cctggctcaggtacccggagaggct

SEQ ID NO: 3499515 - DNA, 25 bp, Homo sapien
ggggggcgtcccgatgccaatctcc

SEQ ID NO: 3499516 - DNA, 25 bp, Homo sapien
cgtgtcgaagacgactgtgaagcac

SEQ ID NO: 3499517 - DNA, 25 bp, Homo sapien
agcaagcgatgtccagcagtttgca

SEQ ID NO: 3499518 - DNA, 25 bp, Homo sapien
aggagcccgtgtcgaagacgactgt

SEQ ID NO: 3499519 - DNA, 25 bp, Homo sapien
catctccccactgggcctcagaagg

SEQ ID NO: 3499520 - DNA, 25 bp, Homo sapien
gagagggggccccatctccccactg

SEQ ID NO: 3499521 - DNA, 25 bp, Homo sapien
caggggacagggtccgtcagggatg

SEQ ID NO: 3499522 - DNA, 25 bp, Homo sapien
tgggcctcagaaggcccggctgtcc

SEQ ID NO: 3499523 - DNA, 25 bp, Homo sapien
tcttgagcacctcgggaatgggccc

SEQ ID NO: 3499524 - DNA, 25 bp, Homo sapien
aacctccgacatggtccggcggatg

SEQ ID NO: 3499525 - DNA, 25 bp, Homo sapien
caccgcctgggagtactttgagacg

SEQ ID NO: 3499526 - DNA, 25 bp, Homo sapien
ccggcggatggacgtgaacttgtgc

SEQ ID NO: 3499527 - DNA, 25 bp, Homo sapien
cgggtcggggcatatcagggaggcc

SEQ ID NO: 3499528 - DNA, 25 bp, Homo sapien
tcaaccacgggtcggggcatatcag

SEQ ID NO: 3499529 - DNA, 25 bp, Homo sapien
tgtcaaccacgggtcggggcatatc

SEQ ID NO: 3499530 - DNA, 25 bp, Homo sapien
gggcatatcagggaggccctcccgc

SEQ ID NO: 3499531 - DNA, 25 bp, Homo sapien
gagggagctccagactgagatcggg

SEQ ID NO: 3499532 - DNA, 25 bp, Homo sapien
tcagggtacccctccagagtcctgt

SEQ ID NO: 3499533 - DNA, 25 bp, Homo sapien
ggctccacgaggtccaggactgcac

SEQ ID NO: 3499534 - DNA, 25 bp, Homo sapien
taaacccaggaagcgagtaagagag

SEQ ID NO: 3499535 - DNA, 25 bp, Homo sapien
acaggggagcgcgaaagtcaccaca

SEQ ID NO: 3499536 - DNA, 25 bp, Homo sapien
gcgcaaggggctcgtgggggccaca

SEQ ID NO: 3499537 - DNA, 25 bp, Homo sapien
ccccgtaggcgggtggtccgtgcag

SEQ ID NO: 3499538 - DNA, 25 bp, Homo sapien
cgggtggtccgtgcaggaggccgcg

SEQ ID NO: 3499539 - DNA, 25 bp, Homo sapien
caggcagagggcgagcggcagaagg

SEQ ID NO: 3499540 - DNA, 25 bp, Homo sapien
gcgagcggcagaaggctggagggct

SEQ ID NO: 3499541 - DNA, 25 bp, Homo sapien
tgtttgcacccggaccggtcacgtg

SEQ ID NO: 3499542 - DNA, 25 bp, Homo sapien
atgacgccgcagttgggccggatca

SEQ ID NO: 3499543 - DNA, 25 bp, Homo sapien
gtcgccgaggccgtgcgcttatagc

SEQ ID NO: 3499544 - DNA, 25 bp, Homo sapien
gccggatcagctgacccgcgtgttt

SEQ ID NO: 3499545 - DNA, 25 bp, Homo sapien
ggctctagcctccagatcccaaatt

SEQ ID NO: 3499546 - DNA, 25 bp, Homo sapien
gatggctctagcctccagatcccaa

SEQ ID NO: 3499547 - DNA, 25 bp, Homo sapien
cgatggctctagcctccagatccca

SEQ ID NO: 3499548 - DNA, 25 bp, Homo sapien
tagcctccagatcccaaattccagc

SEQ ID NO: 3499549 - DNA, 25 bp, Homo sapien
ggatggggctcacgcaggcaatccc

SEQ ID NO: 3499550 - DNA, 25 bp, Homo sapien
ttcagcactagaaggaaatgagcag

SEQ ID NO: 3499551 - DNA, 25 bp, Homo sapien
ggagggagcttgaagtctcagctac

SEQ ID NO: 3499552 - DNA, 25 bp, Homo sapien
ctggagggagcttgaagtctcagct

SEQ ID NO: 3499553 - DNA, 25 bp, Homo sapien
cccatggactgaacttgcaagtgga

SEQ ID NO: 3499554 - DNA, 25 bp, Homo sapien
acccacaacgctgccatttgttgaa

SEQ ID NO: 3499555 - DNA, 25 bp, Homo sapien
agagagtgtgcagtgcccatggact

SEQ ID NO: 3499556 - DNA, 25 bp, Homo sapien
tctgaaggaggtgttattttaccca

SEQ ID NO: 3499557 - DNA, 25 bp, Homo sapien
gggagaaccggaagtccatggagcc

SEQ ID NO: 3499558 - DNA, 25 bp, Homo sapien
cccgtcgtgacctcattgtgggggt

SEQ ID NO: 3499559 - DNA, 25 bp, Homo sapien
tcattgtgggggtgcgaagggaggg

SEQ ID NO: 3499560 - DNA, 25 bp, Homo sapien
accggaagtccatggagcctgggca

SEQ ID NO: 3499561 - DNA, 25 bp, Homo sapien
aggctcgtcatacgcctgcttgctg

SEQ ID NO: 3499562 - DNA, 25 bp, Homo sapien
gggccaggctcgtcatacgcctgct

SEQ ID NO: 3499563 - DNA, 25 bp, Homo sapien
gaggggccaggctcgtcatacgcct

SEQ ID NO: 3499564 - DNA, 25 bp, Homo sapien
cgctgatccacgcagagtatttgcg

SEQ ID NO: 3499565 - DNA, 25 bp, Homo sapien
ctgtgttggtgtactggtcttcgag

SEQ ID NO: 3499566 - DNA, 25 bp, Homo sapien
ggggtgcatgctggtccctccagac

SEQ ID NO: 3499567 - DNA, 25 bp, Homo sapien
ggtgtactggtcttcgaggatgtcc

SEQ ID NO: 3499568 - DNA, 25 bp, Homo sapien
tactggtcttcgaggatgtccatgt

SEQ ID NO: 3499569 - DNA, 25 bp, Homo sapien
ggaaatgagggccagcctcagcttc

SEQ ID NO: 3499570 - DNA, 25 bp, Homo sapien
cttccacagcatggccccgagggtg

SEQ ID NO: 3499571 - DNA, 25 bp, Homo sapien
cacagcatggccccgagggtgacct

SEQ ID NO: 3499572 - DNA, 25 bp, Homo sapien
cagcatggccccgagggtgaccttc

SEQ ID NO: 3499573 - DNA, 25 bp, Homo sapien
gcagggccaggagggggtctccact

SEQ ID NO: 3499574 - DNA, 25 bp, Homo sapien
agggccaggagggggtctccactca

SEQ ID NO: 3499575 - DNA, 25 bp, Homo sapien
ggcagggccaggagggggtctccac

SEQ ID NO: 3499576 - DNA, 25 bp, Homo sapien
tgggcagggccaggagggggtctcc

SEQ ID NO: 3499577 - DNA, 25 bp, Homo sapien
gaaccgttcgttgccagtggggatg

SEQ ID NO: 3499578 - DNA, 25 bp, Homo sapien
aaccgttcgttgccagtggggatga

SEQ ID NO: 3499579 - DNA, 25 bp, Homo sapien
ctcctgcttgaagtccagggcaaca

SEQ ID NO: 3499580 - DNA, 25 bp, Homo sapien
tccagggcaacatagcacagcttct

SEQ ID NO: 3499581 - DNA, 25 bp, Homo sapien
ctgcttgaagtccagggcaacatag

SEQ ID NO: 3499582 - DNA, 25 bp, Homo sapien
ccagggcaacatagcacagcttctc

SEQ ID NO: 3499583 - DNA, 25 bp, Homo sapien
tgaagccgtagccatgcgcagtgag

SEQ ID NO: 3499584 - DNA, 25 bp, Homo sapien
aagccgtagccatgcgcagtgagat

SEQ ID NO: 3499585 - DNA, 25 bp, Homo sapien
gaagccgtagccatgcgcagtgaga

SEQ ID NO: 3499586 - DNA, 25 bp, Homo sapien
tttgtgaggtagtcagtctggtccc

SEQ ID NO: 3499587 - DNA, 25 bp, Homo sapien
ttgtgaggtagtcagtctggtcccg

SEQ ID NO: 3499588 - DNA, 25 bp, Homo sapien
ggtatggccaggagtgtacttggac

SEQ ID NO: 3499589 - DNA, 25 bp, Homo sapien
tgaccccgtcgctggagttcatcat

SEQ ID NO: 3499590 - DNA, 25 bp, Homo sapien
tcatagatggacactgtgcaggtga

SEQ ID NO: 3499591 - DNA, 25 bp, Homo sapien
agccctcatagatggacactgtgca

SEQ ID NO: 3499592 - DNA, 25 bp, Homo sapien
ccacgtacatggccgaggtgttgaa

SEQ ID NO: 3499593 - DNA, 25 bp, Homo sapien
cacgtacatggccgaggtgttgaag

SEQ ID NO: 3499594 - DNA, 25 bp, Homo sapien
gatggccacgtacatggccgaggtg

SEQ ID NO: 3499595 - DNA, 25 bp, Homo sapien
tggccacgtacatggccgaggtgtt

SEQ ID NO: 3499596 - DNA, 25 bp, Homo sapien
ttctattggctttggggctcgggag

SEQ ID NO: 3499597 - DNA, 25 bp, Homo sapien
attggctttggggctcgggaggcct

SEQ ID NO: 3499598 - DNA, 25 bp, Homo sapien
tctattggctttggggctcgggagg

SEQ ID NO: 3499599 - DNA, 25 bp, Homo sapien
ctattggctttggggctcgggaggc

SEQ ID NO: 3499600 - DNA, 25 bp, Homo sapien
ctgggcctcgccacccacatagaag

SEQ ID NO: 3499601 - DNA, 25 bp, Homo sapien
cctcgccacccacatagaagtcctt

SEQ ID NO: 3499602 - DNA, 25 bp, Homo sapien
ggcctcgccacccacatagaagtcc

SEQ ID NO: 3499603 - DNA, 25 bp, Homo sapien
tgggcctcgccacccacatagaagt

SEQ ID NO: 3499604 - DNA, 25 bp, Homo sapien
gcccaccgtcatgccctggtgtctg

SEQ ID NO: 3499605 - DNA, 25 bp, Homo sapien
tgccctggtgtctggggcaccccac

SEQ ID NO: 3499606 - DNA, 25 bp, Homo sapien
ccaccgtcatgccctggtgtctggg

SEQ ID NO: 3499607 - DNA, 25 bp, Homo sapien
catgccctggtgtctggggcacccc

SEQ ID NO: 3499608 - DNA, 25 bp, Homo sapien
catcgtcgtcggtgaagctggcctt

SEQ ID NO: 3499609 - DNA, 25 bp, Homo sapien
tgcacatgccagaggtgttgtctat

SEQ ID NO: 3499610 - DNA, 25 bp, Homo sapien
tgacaagcaaggtgatattatcatc

SEQ ID NO: 3499611 - DNA, 25 bp, Homo sapien
ccagaggtgttgtctatgacaagca

SEQ ID NO: 3499612 - DNA, 25 bp, Homo sapien
caaggcagtccaagacagaacaagg

SEQ ID NO: 3499613 - DNA, 25 bp, Homo sapien
tatgaccccaggcttcgagaaaaga

SEQ ID NO: 3499614 - DNA, 25 bp, Homo sapien
tgatgtgctcaaggctatgacccca

SEQ ID NO: 3499615 - DNA, 25 bp, Homo sapien
acagctcggcatcagcaaggcagtc

SEQ ID NO: 3499616 - DNA, 25 bp, Homo sapien
tgatggcggaggcttcgagtgaccc

SEQ ID NO: 3499617 - DNA, 25 bp, Homo sapien
tgtggggcccagactacaggctgat

SEQ ID NO: 3499618 - DNA, 25 bp, Homo sapien
catagtccttgagctgcatggaggg

SEQ ID NO: 3499619 - DNA, 25 bp, Homo sapien
gccctgtgccgtgtccacgggtgca

SEQ ID NO: 3499620 - DNA, 25 bp, Homo sapien
tgctgtgggtctggtatgtgtgagg

SEQ ID NO: 3499621 - DNA, 25 bp, Homo sapien
gccaaatcccacttgggtacaggtg

SEQ ID NO: 3499622 - DNA, 25 bp, Homo sapien
acctcccggccttcacacaaagctc

SEQ ID NO: 3499623 - DNA, 25 bp, Homo sapien
ccacctcccggccttcacacaaagc

SEQ ID NO: 3499624 - DNA, 25 bp, Homo sapien
acctggaggatgtgcaatgctccac

SEQ ID NO: 3499625 - DNA, 25 bp, Homo sapien
gaggatgtgcaatgctccacgctgg

SEQ ID NO: 3499626 - DNA, 25 bp, Homo sapien
tggaggatgtgcaatgctccacgct

SEQ ID NO: 3499627 - DNA, 25 bp, Homo sapien
aggatgtgcaatgctccacgctggg

SEQ ID NO: 3499628 - DNA, 25 bp, Homo sapien
ccaagagcaccagagcactgctcat

SEQ ID NO: 3499629 - DNA, 25 bp, Homo sapien
cactctggactcaaaggctcccaag

SEQ ID NO: 3499630 - DNA, 25 bp, Homo sapien
aggctcccaagagcaccagagcact

SEQ ID NO: 3499631 - DNA, 25 bp, Homo sapien
tcccaagagcaccagagcactgctc

SEQ ID NO: 3499632 - DNA, 25 bp, Homo sapien
tgactgctgagtaggcccctccact

SEQ ID NO: 3499633 - DNA, 25 bp, Homo sapien
tctctgtcccgcttggccaagctgt

SEQ ID NO: 3499634 - DNA, 25 bp, Homo sapien
cccttctctgtcccgcttggccaag

SEQ ID NO: 3499635 - DNA, 25 bp, Homo sapien
ggctgactgctgagtaggcccctcc

SEQ ID NO: 3499636 - DNA, 25 bp, Homo sapien
tgagcacttgtattggtgccaagtc

SEQ ID NO: 3499637 - DNA, 25 bp, Homo sapien
ttggtgccaagtcccacgctggctg

SEQ ID NO: 3499638 - DNA, 25 bp, Homo sapien
cccctgagcacttgtattggtgcca

SEQ ID NO: 3499639 - DNA, 25 bp, Homo sapien
ttgtattggtgccaagtcccacgct

SEQ ID NO: 3499640 - DNA, 25 bp, Homo sapien
tgcagcaactatgggcccccagcta

SEQ ID NO: 3499641 - DNA, 25 bp, Homo sapien
cttccctcagcaccccatgtgccct

SEQ ID NO: 3499642 - DNA, 25 bp, Homo sapien
tcctacatcccgacgcagacccctt

SEQ ID NO: 3499643 - DNA, 25 bp, Homo sapien
ctgaccaccctcctaaccatgcaga

SEQ ID NO: 3499644 - DNA, 25 bp, Homo sapien
tcagctccaggatggagcggactgt

SEQ ID NO: 3499645 - DNA, 25 bp, Homo sapien
tccagccagtcgctgtgcggttgaa

SEQ ID NO: 3499646 - DNA, 25 bp, Homo sapien
aagcgaggccggtacaggaagggca

SEQ ID NO: 3499647 - DNA, 25 bp, Homo sapien
tgacatgcggtacagcacggcatcc

SEQ ID NO: 3499648 - DNA, 25 bp, Homo sapien
cggggtgcggtgagggcgggcacct

SEQ ID NO: 3499649 - DNA, 25 bp, Homo sapien
ggggtgcggtgagggcgggcacctc

SEQ ID NO: 3499650 - DNA, 25 bp, Homo sapien
gagcttctgcaaacgcaagttgtcc

SEQ ID NO: 3499651 - DNA, 25 bp, Homo sapien
gggtgccatcgacgcagccgatatg

SEQ ID NO: 3499652 - DNA, 25 bp, Homo sapien
tggcactagcctctctgggcactga

SEQ ID NO: 3499653 - DNA, 25 bp, Homo sapien
gcagctagaatcctgcgctgggtga

SEQ ID NO: 3499654 - DNA, 25 bp, Homo sapien
agtataagacgccaggacataagct

SEQ ID NO: 3499655 - DNA, 25 bp, Homo sapien
ttgcagtataagacgccaggacata

SEQ ID NO: 3499656 - DNA, 25 bp, Homo sapien
tgcagtataagacgccaggacataa

SEQ ID NO: 3499657 - DNA, 25 bp, Homo sapien
cagtataagacgccaggacataagc

SEQ ID NO: 3499658 - DNA, 25 bp, Homo sapien
taagcaaagaaccactcgctaatgg

SEQ ID NO: 3499659 - DNA, 25 bp, Homo sapien
tcaggaaccgacgttggatttttca

SEQ ID NO: 3499660 - DNA, 25 bp, Homo sapien
tatctgaacacggttggaatggccg

SEQ ID NO: 3499661 - DNA, 25 bp, Homo sapien
tcagtcttccgccatcggttgtggg

SEQ ID NO: 3499662 - DNA, 25 bp, Homo sapien
tagagtctgtcaccttgttatttgc

SEQ ID NO: 3499663 - DNA, 25 bp, Homo sapien
gggagtttagcccattgatatttaa

SEQ ID NO: 3499664 - DNA, 25 bp, Homo sapien
taatgtgcttactggtatggttagg

SEQ ID NO: 3499665 - DNA, 25 bp, Homo sapien
tgcttcttaataggggagtttagcc

SEQ ID NO: 3499666 - DNA, 25 bp, Homo sapien
cccaaaggccacagttgggcactca

SEQ ID NO: 3499667 - DNA, 25 bp, Homo sapien
tgatccgcttgggacggtgaccaag

SEQ ID NO: 3499668 - DNA, 25 bp, Homo sapien
ccacagttgggcactcagcactggg

SEQ ID NO: 3499669 - DNA, 25 bp, Homo sapien
cagggggtagttggggtcagcagtg

SEQ ID NO: 3499670 - DNA, 25 bp, Homo sapien
ctgctgtgtttctgatgcagcctcc

SEQ ID NO: 3499671 - DNA, 25 bp, Homo sapien
tgtgtttctgatgcagcctcccgtc

SEQ ID NO: 3499672 - DNA, 25 bp, Homo sapien
agcctcccgtccacggccacagcaa

SEQ ID NO: 3499673 - DNA, 25 bp, Homo sapien
acagccctgctgtgtttctgatgca

SEQ ID NO: 3499674 - DNA, 25 bp, Homo sapien
tctgtgcctgaaccgaagagttccg

SEQ ID NO: 3499675 - DNA, 25 bp, Homo sapien
cctgggcgctggccaagaaggaacc

SEQ ID NO: 3499676 - DNA, 25 bp, Homo sapien
ccaccgcccacgctcagcctgtggg

SEQ ID NO: 3499677 - DNA, 25 bp, Homo sapien
tgcctgaaccgaagagttccgcaga

SEQ ID NO: 3499678 - DNA, 25 bp, Homo sapien
gtagagatgaaaacgaggacaggag

SEQ ID NO: 3499679 - DNA, 25 bp, Homo sapien
ctccaacaccgccattttgtagaga

SEQ ID NO: 3499680 - DNA, 25 bp, Homo sapien
taaagcccacgcagccttgggggcc

SEQ ID NO: 3499681 - DNA, 25 bp, Homo sapien
cctgtatggccagcccgagtgtgtt

SEQ ID NO: 3499682 - DNA, 25 bp, Homo sapien
acaccgggggcctggacaacactgg

SEQ ID NO: 3499683 - DNA, 25 bp, Homo sapien
cctccttacagaggatggccctaga

SEQ ID NO: 3499684 - DNA, 25 bp, Homo sapien
ccgtggcagttacaagaggcttaac

SEQ ID NO: 3499685 - DNA, 25 bp, Homo sapien
caacactggctcgtggggctgagga

SEQ ID NO: 3499686 - DNA, 25 bp, Homo sapien
caaaaccactaagtcagggaggcca

SEQ ID NO: 3499687 - DNA, 25 bp, Homo sapien
tatctgccagcgaggaggactcaag

SEQ ID NO: 3499688 - DNA, 25 bp, Homo sapien
ctgcaaaaccaagagcgctggcggg

SEQ ID NO: 3499689 - DNA, 25 bp, Homo sapien
ccttggctggaacgctcaggatgcc

SEQ ID NO: 3499690 - DNA, 25 bp, Homo sapien
gctcgtgggactccacatcctccag

SEQ ID NO: 3499691 - DNA, 25 bp, Homo sapien
ggcgtcccccgcgtctgtgtccttg

SEQ ID NO: 3499692 - DNA, 25 bp, Homo sapien
ccacaatcctgtcaggggctccctg

SEQ ID NO: 3499693 - DNA, 25 bp, Homo sapien
cgtcccccgcgtctgtgtccttgct

SEQ ID NO: 3499694 - DNA, 25 bp, Homo sapien
ctgtgtgatatctgatttgtagcac

SEQ ID NO: 3499695 - DNA, 25 bp, Homo sapien
gatttgtagcactcataaaacccca

SEQ ID NO: 3499696 - DNA, 25 bp, Homo sapien
aaactgtgtgatatctgatttgtag

SEQ ID NO: 3499697 - DNA, 25 bp, Homo sapien
tgatttgtagcactcataaaacccc

SEQ ID NO: 3499698 - DNA, 25 bp, Homo sapien
ccagtgtgagttattgattccggcc

SEQ ID NO: 3499699 - DNA, 25 bp, Homo sapien
tggaaagccctgcacgtgtttgctg

SEQ ID NO: 3499700 - DNA, 25 bp, Homo sapien
ctcgttatgtcgcagccagggtgct

SEQ ID NO: 3499701 - DNA, 25 bp, Homo sapien
gaagtcaagcctgctcgccataaaa

SEQ ID NO: 3499702 - DNA, 25 bp, Homo sapien
ctgagcatcccgatccgggccaagt

SEQ ID NO: 3499703 - DNA, 25 bp, Homo sapien
gggccaagtcctggactttgctcct

SEQ ID NO: 3499704 - DNA, 25 bp, Homo sapien
acgtccaccactcgtccctgtcctc

SEQ ID NO: 3499705 - DNA, 25 bp, Homo sapien
ttgctttcctccgagcatccccagc

SEQ ID NO: 3499706 - DNA, 25 bp, Homo sapien
cacgagggatgctcacgaactgggt

SEQ ID NO: 3499707 - DNA, 25 bp, Homo sapien
tggtccggcccaaaagaacacagtg

SEQ ID NO: 3499708 - DNA, 25 bp, Homo sapien
gaacacagtgccactttgcggctgc

SEQ ID NO: 3499709 - DNA, 25 bp, Homo sapien
gggatattgcactccatctgcccac

SEQ ID NO: 3499710 - DNA, 25 bp, Homo sapien
tgagggcacaatcccggatcttcct

SEQ ID NO: 3499711 - DNA, 25 bp, Homo sapien
ttagcgggtgacacgtcaggacaga

SEQ ID NO: 3499712 - DNA, 25 bp, Homo sapien
tatggctcccagacattgcccgttc

SEQ ID NO: 3499713 - DNA, 25 bp, Homo sapien
tggcccatgacccttagcgggtgac

SEQ ID NO: 3499714 - DNA, 25 bp, Homo sapien
gggccaccccaggtgagccctctcc

SEQ ID NO: 3499715 - DNA, 25 bp, Homo sapien
tctcctccttcgcagtgagaactgg

SEQ ID NO: 3499716 - DNA, 25 bp, Homo sapien
ctgggcagggcaccggacgagggag

SEQ ID NO: 3499717 - DNA, 25 bp, Homo sapien
ccacactcaggtcaggaggtcgggt

SEQ ID NO: 3499718 - DNA, 25 bp, Homo sapien
cagtaagtatccggggcgtgcccgt

SEQ ID NO: 3499719 - DNA, 25 bp, Homo sapien
tccagtgacagggcagtaagtatcc

SEQ ID NO: 3499720 - DNA, 25 bp, Homo sapien
cagtgacagggcagtaagtatccgg

SEQ ID NO: 3499721 - DNA, 25 bp, Homo sapien
ggcagtaagtatccggggcgtgccc

SEQ ID NO: 3499722 - DNA, 25 bp, Homo sapien
gatggacgtcttctactcaagtaag

SEQ ID NO: 3499723 - DNA, 25 bp, Homo sapien
caacaggatcgctcaggatggacgt

SEQ ID NO: 3499724 - DNA, 25 bp, Homo sapien
taagaccttggcagccttggtcggc

SEQ ID NO: 3499725 - DNA, 25 bp, Homo sapien
tgggaagattcccatgcgccagctg

SEQ ID NO: 3499726 - DNA, 25 bp, Homo sapien
cagcttgctgcagtttgagatggga

SEQ ID NO: 3499727 - DNA, 25 bp, Homo sapien
ggaactggccgtcctgagctggaca

SEQ ID NO: 3499728 - DNA, 25 bp, Homo sapien
cagcctggacgccttggaactggcc

SEQ ID NO: 3499729 - DNA, 25 bp, Homo sapien
tcaggagcttgtgctcttccgcccc

SEQ ID NO: 3499730 - DNA, 25 bp, Homo sapien
gacgccttggaactggccgtcctga

SEQ ID NO: 3499731 - DNA, 25 bp, Homo sapien
cagagctgtcctccgttccgcctcc

SEQ ID NO: 3499732 - DNA, 25 bp, Homo sapien
tccttgaccatctggctaagactca

SEQ ID NO: 3499733 - DNA, 25 bp, Homo sapien
tcattgtcctatccttgaccatctg

SEQ ID NO: 3499734 - DNA, 25 bp, Homo sapien
ccttgaccatctggctaagactcag

SEQ ID NO: 3499735 - DNA, 25 bp, Homo sapien
ccatcattgtcctatccttgaccat

SEQ ID NO: 3499736 - DNA, 25 bp, Homo sapien
aatgtccccggaccgatgcccgtgt

SEQ ID NO: 3499737 - DNA, 25 bp, Homo sapien
ttgggcagccttcccctcggacagg

SEQ ID NO: 3499738 - DNA, 25 bp, Homo sapien
tcccctcggacaggctgtccaggct

SEQ ID NO: 3499739 - DNA, 25 bp, Homo sapien
tggccagggattggtcactgcctga

SEQ ID NO: 3499740 - DNA, 25 bp, Homo sapien
gctgggcgcattcatgatgcctgcc

SEQ ID NO: 3499741 - DNA, 25 bp, Homo sapien
ggcgcattcatgatgcctgcctggg

SEQ ID NO: 3499742 - DNA, 25 bp, Homo sapien
cgggctgggcgcattcatgatgcct

SEQ ID NO: 3499743 - DNA, 25 bp, Homo sapien
ccgggctgggcgcattcatgatgcc

SEQ ID NO: 3499744 - DNA, 25 bp, Homo sapien
tcagactggccttgactgtagacac

SEQ ID NO: 3499745 - DNA, 25 bp, Homo sapien
tgtcagactggccttgactgtagac

SEQ ID NO: 3499746 - DNA, 25 bp, Homo sapien
actggccttgactgtagacacccca

SEQ ID NO: 3499747 - DNA, 25 bp, Homo sapien
agactggccttgactgtagacaccc

SEQ ID NO: 3499748 - DNA, 25 bp, Homo sapien
cgagcacatgggctccagtgcctct

SEQ ID NO: 3499749 - DNA, 25 bp, Homo sapien
gtgcctctgaggcaaagagcaggca

SEQ ID NO: 3499750 - DNA, 25 bp, Homo sapien
cagcaccgtgcgcacagcagtggga

SEQ ID NO: 3499751 - DNA, 25 bp, Homo sapien
agagcaggcagcaccgtgcgcacag

SEQ ID NO: 3499752 - DNA, 25 bp, Homo sapien
tcactgactgattgagacctgcaca

SEQ ID NO: 3499753 - DNA, 25 bp, Homo sapien
tccagatcttcacaaccggcaataa

SEQ ID NO: 3499754 - DNA, 25 bp, Homo sapien
gttgctggttgcgtaatcactgact

SEQ ID NO: 3499755 - DNA, 25 bp, Homo sapien
aaccggcaataaagtgctggttgct

SEQ ID NO: 3499756 - DNA, 25 bp, Homo sapien
tctgtcctctcctgcgtcagagcca

SEQ ID NO: 3499757 - DNA, 25 bp, Homo sapien
ggagggcaccgagccctgggcagca

SEQ ID NO: 3499758 - DNA, 25 bp, Homo sapien
agagccaccacctggcaaacagccc

SEQ ID NO: 3499759 - DNA, 25 bp, Homo sapien
cactgaagccccttccgggagggca

SEQ ID NO: 3499760 - DNA, 25 bp, Homo sapien
ctcctgggccaagcttcctgactga

SEQ ID NO: 3499761 - DNA, 25 bp, Homo sapien
gcgtacgtgccacgagggtgtccac

SEQ ID NO: 3499762 - DNA, 25 bp, Homo sapien
gtgtccacctgggagggacagtgcg

SEQ ID NO: 3499763 - DNA, 25 bp, Homo sapien
gctcctgggccaagcttcctgactg

SEQ ID NO: 3499764 - DNA, 25 bp, Homo sapien
cccgtagcagagtggtcgtaagcgt

SEQ ID NO: 3499765 - DNA, 25 bp, Homo sapien
cccagcccgtagcagagtggtcgta

SEQ ID NO: 3499766 - DNA, 25 bp, Homo sapien
cttcctgggccttcaatgtcccagg

SEQ ID NO: 3499767 - DNA, 25 bp, Homo sapien
gacccacggcctttagtgatttgtg

SEQ ID NO: 3499768 - DNA, 25 bp, Homo sapien
agtgtcttccctagccagaaggctc

SEQ ID NO: 3499769 - DNA, 25 bp, Homo sapien
agtggcctttgaccctccttcgctg

SEQ ID NO: 3499770 - DNA, 25 bp, Homo sapien
tgccacaccaaccaggccagtgtct

SEQ ID NO: 3499771 - DNA, 25 bp, Homo sapien
cggctgccccgaccccttggagagt

SEQ ID NO: 3499772 - DNA, 25 bp, Homo sapien
atgaagccgtctttctcccacgggc

SEQ ID NO: 3499773 - DNA, 25 bp, Homo sapien
gccagcggcccatgaagccgtcttt

SEQ ID NO: 3499774 - DNA, 25 bp, Homo sapien
caggcccagtgggtctctctgtgga

SEQ ID NO: 3499775 - DNA, 25 bp, Homo sapien
ggccgtccctggctcgaccctgtgc

SEQ ID NO: 3499776 - DNA, 25 bp, Homo sapien
acgaagcttctttgcgccctgctca

SEQ ID NO: 3499777 - DNA, 25 bp, Homo sapien
gccctcccgacgaagcttctttgcg

SEQ ID NO: 3499778 - DNA, 25 bp, Homo sapien
ccgccctcccgacgaagcttctttg

SEQ ID NO: 3499779 - DNA, 25 bp, Homo sapien
tcccgacgaagcttctttgcgccct

SEQ ID NO: 3499780 - DNA, 25 bp, Homo sapien
ggctgtatttcctaagacctgcggg

SEQ ID NO: 3499781 - DNA, 25 bp, Homo sapien
cctgacgcggaagtgggcaccgttt

SEQ ID NO: 3499782 - DNA, 25 bp, Homo sapien
cttactttctcagcgctgtgtggag

SEQ ID NO: 3499783 - DNA, 25 bp, Homo sapien
ggcaacacggtttccgctgtggaga

SEQ ID NO: 3499784 - DNA, 25 bp, Homo sapien
acatggcagttcatcctcagagaca

SEQ ID NO: 3499785 - DNA, 25 bp, Homo sapien
ggctcagctgacctcgtcccagagg

SEQ ID NO: 3499786 - DNA, 25 bp, Homo sapien
tctgagttaggatggcaggctcagc

SEQ ID NO: 3499787 - DNA, 25 bp, Homo sapien
cgccgggcacatggcagttcatcct

SEQ ID NO: 3499788 - DNA, 25 bp, Homo sapien
tttctcccggcgcccatgtggggcg

SEQ ID NO: 3499789 - DNA, 25 bp, Homo sapien
cagtatcctgggacgttgggccctc

SEQ ID NO: 3499790 - DNA, 25 bp, Homo sapien
ctcctttgagctctgcagtatcctg

SEQ ID NO: 3499791 - DNA, 25 bp, Homo sapien
ccatgtggggcgatgctctctgccc

SEQ ID NO: 3499792 - DNA, 25 bp, Homo sapien
aacgggaccagtttgcatgaggctc

SEQ ID NO: 3499793 - DNA, 25 bp, Homo sapien
gagatgtctccccaagtccagcttg

SEQ ID NO: 3499794 - DNA, 25 bp, Homo sapien
tggaacccgtgaacccaagagcagt

SEQ ID NO: 3499795 - DNA, 25 bp, Homo sapien
gagcagtcgtcatcaggccaacgtg

SEQ ID NO: 3499796 - DNA, 25 bp, Homo sapien
ctctgtcccacgacccagggtgagg

SEQ ID NO: 3499797 - DNA, 25 bp, Homo sapien
ccttatctcgaatgcttcctgtgaa

SEQ ID NO: 3499798 - DNA, 25 bp, Homo sapien
actcttgatgaacgtgccctctgtc

SEQ ID NO: 3499799 - DNA, 25 bp, Homo sapien
aaacagccacgtgtcccttgggagc

SEQ ID NO: 3499800 - DNA, 25 bp, Homo sapien
tgggaagctggggttctgggccaca

SEQ ID NO: 3499801 - DNA, 25 bp, Homo sapien
ggaagctggggttctgggccacagc

SEQ ID NO: 3499802 - DNA, 25 bp, Homo sapien
gctggggttctgggccacagccggc

SEQ ID NO: 3499803 - DNA, 25 bp, Homo sapien
aagctggggttctgggccacagccg

SEQ ID NO: 3499804 - DNA, 25 bp, Homo sapien
acagggctatgagcgcccccagccc

SEQ ID NO: 3499805 - DNA, 25 bp, Homo sapien
ctgtgtcacagggctatgagcgccc

SEQ ID NO: 3499806 - DNA, 25 bp, Homo sapien
gtcacagggctatgagcgcccccag

SEQ ID NO: 3499807 - DNA, 25 bp, Homo sapien
cagccccaggacctccacgtttctc

SEQ ID NO: 3499808 - DNA, 25 bp, Homo sapien
gggcagccgccatgccgggaagtta

SEQ ID NO: 3499809 - DNA, 25 bp, Homo sapien
ccaggccatgctgccaccccggacc

SEQ ID NO: 3499810 - DNA, 25 bp, Homo sapien
agaggagcagcggtgccaggacccc

SEQ ID NO: 3499811 - DNA, 25 bp, Homo sapien
cgccatgccgggaagttagggtggg

SEQ ID NO: 3499812 - DNA, 25 bp, Homo sapien
tcagtcggggaggaattttcctgac

SEQ ID NO: 3499813 - DNA, 25 bp, Homo sapien
cccggattccagagtcctcgagaca

SEQ ID NO: 3499814 - DNA, 25 bp, Homo sapien
agcccggattccagagtcctcgaga

SEQ ID NO: 3499815 - DNA, 25 bp, Homo sapien
ccggattccagagtcctcgagacaa

SEQ ID NO: 3499816 - DNA, 25 bp, Homo sapien
cggattccagagtcctcgagacaaa

SEQ ID NO: 3499817 - DNA, 25 bp, Homo sapien
tgatgtcggtcggagcttccagact

SEQ ID NO: 3499818 - DNA, 25 bp, Homo sapien
cagactaggcgagggcagggtgagg

SEQ ID NO: 3499819 - DNA, 25 bp, Homo sapien
cgtaatggaatgcttgaaggctgct

SEQ ID NO: 3499820 - DNA, 25 bp, Homo sapien
gcgtaatggaatgcttgaaggctgc

SEQ ID NO: 3499821 - DNA, 25 bp, Homo sapien
tcacgcacactcgtactgagactca

SEQ ID NO: 3499822 - DNA, 25 bp, Homo sapien
aggcacttgccaaggtggctcacac

SEQ ID NO: 3499823 - DNA, 25 bp, Homo sapien
tccaaccagtgcaaatgacttagtg

SEQ ID NO: 3499824 - DNA, 25 bp, Homo sapien
gaaacagagtcgtggaggctttgaa

SEQ ID NO: 3499825 - DNA, 25 bp, Homo sapien
cgggcgctgctgttccgatggtgtc

SEQ ID NO: 3499826 - DNA, 25 bp, Homo sapien
gggcgctgctgttccgatggtgtct

SEQ ID NO: 3499827 - DNA, 25 bp, Homo sapien
cgccggtgcggggtgggtgctgcgg

SEQ ID NO: 3499828 - DNA, 25 bp, Homo sapien
ctgcgggcgctgctgttccgatggt

SEQ ID NO: 3499829 - DNA, 25 bp, Homo sapien
ttgatgttgggctgatgaggtctgg

SEQ ID NO: 3499830 - DNA, 25 bp, Homo sapien
ttgggctgatgaggtctggttcctc

SEQ ID NO: 3499831 - DNA, 25 bp, Homo sapien
ggctgatgaggtctggttcctctag

SEQ ID NO: 3499832 - DNA, 25 bp, Homo sapien
tgatgttgggctgatgaggtctggt

SEQ ID NO: 3499833 - DNA, 25 bp, Homo sapien
agagatagcgacacgtgggtgggat

SEQ ID NO: 3499834 - DNA, 25 bp, Homo sapien
atgggggcagggtgctcgggggcct

SEQ ID NO: 3499835 - DNA, 25 bp, Homo sapien
gggcctggaggcttccggaaggagc

SEQ ID NO: 3499836 - DNA, 25 bp, Homo sapien
ctagagatagcgacacgtgggtggg

SEQ ID NO: 3499837 - DNA, 25 bp, Homo sapien
gattcctgagtcaggtagtgcagtg

SEQ ID NO: 3499838 - DNA, 25 bp, Homo sapien
agccgattcctgagtcaggtagtgc

SEQ ID NO: 3499839 - DNA, 25 bp, Homo sapien
tcctgagtcaggtagtgcagtggtt

SEQ ID NO: 3499840 - DNA, 25 bp, Homo sapien
cttccagagccgattcctgagtcag

SEQ ID NO: 3499841 - DNA, 25 bp, Homo sapien
tgtccggattcaaaggcccaggctt

SEQ ID NO: 3499842 - DNA, 25 bp, Homo sapien
ttttgtgtccggattcaaaggccca

SEQ ID NO: 3499843 - DNA, 25 bp, Homo sapien
tccggattcaaaggcccaggcttga

SEQ ID NO: 3499844 - DNA, 25 bp, Homo sapien
ttgtgtccggattcaaaggcccagg

SEQ ID NO: 3499845 - DNA, 25 bp, Homo sapien
ccaagtgtggcaggaagcccctcac

SEQ ID NO: 3499846 - DNA, 25 bp, Homo sapien
ggaaggagtgaggtcccactcagct

SEQ ID NO: 3499847 - DNA, 25 bp, Homo sapien
accccaagtgtggcaggaagcccct

SEQ ID NO: 3499848 - DNA, 25 bp, Homo sapien
ctcagctcctctcgcgtgcccccca

SEQ ID NO: 3499849 - DNA, 25 bp, Homo sapien
gaaacagacccgcttcttgccgcag

SEQ ID NO: 3499850 - DNA, 25 bp, Homo sapien
gggcagccatagtgtgccgactccg

SEQ ID NO: 3499851 - DNA, 25 bp, Homo sapien
atagtgtgccgactccgtggaggaa

SEQ ID NO: 3499852 - DNA, 25 bp, Homo sapien
tgccgactccgtggaggaagtaaag

SEQ ID NO: 3499853 - DNA, 25 bp, Homo sapien
gggccgcgtcctgacgcagggaggg

SEQ ID NO: 3499854 - DNA, 25 bp, Homo sapien
atggtggcccggcggggcggtctgg

SEQ ID NO: 3499855 - DNA, 25 bp, Homo sapien
gatggtggcccggcggggcggtctg

SEQ ID NO: 3499856 - DNA, 25 bp, Homo sapien
accggaccatgtcatgtcctgcttg

SEQ ID NO: 3499857 - DNA, 25 bp, Homo sapien
gccgtcacaccggaccatgtcatgt

SEQ ID NO: 3499858 - DNA, 25 bp, Homo sapien
tcacaccggaccatgtcatgtcctg

SEQ ID NO: 3499859 - DNA, 25 bp, Homo sapien
tgtcctcgccgtcacaccggaccat

SEQ ID NO: 3499860 - DNA, 25 bp, Homo sapien
acctggcgtcttggccttcggcagc

SEQ ID NO: 3499861 - DNA, 25 bp, Homo sapien
acgtccaccggacctggcgtcttgg

SEQ ID NO: 3499862 - DNA, 25 bp, Homo sapien
cttggccttcggcagctggtgggca

SEQ ID NO: 3499863 - DNA, 25 bp, Homo sapien
tggtgggcacgtccaccccagctgg

SEQ ID NO: 3499864 - DNA, 25 bp, Homo sapien
tcgtgtggggagaacgtgttggttg

SEQ ID NO: 3499865 - DNA, 25 bp, Homo sapien
ggagaacgagagagtcgtgtgggga

SEQ ID NO: 3499866 - DNA, 25 bp, Homo sapien
cgagagagtcgtgtggggagaacgt

SEQ ID NO: 3499867 - DNA, 25 bp, Homo sapien
gagaacgtgttggttgtgtggggag

SEQ ID NO: 3499868 - DNA, 25 bp, Homo sapien
tgagggcatacagcgtcaccaagtc

SEQ ID NO: 3499869 - DNA, 25 bp, Homo sapien
tgcagcctccttgctgcgcaatgtc

SEQ ID NO: 3499870 - DNA, 25 bp, Homo sapien
ataggcctgagaaagccgtgccgga

SEQ ID NO: 3499871 - DNA, 25 bp, Homo sapien
gcccctgtgcctgctactaaatgaa

SEQ ID NO: 3499872 - DNA, 25 bp, Homo sapien
tggggtaccaccccacgtgctggac

SEQ ID NO: 3499873 - DNA, 25 bp, Homo sapien
accccacgtgctggaccctacgctg

SEQ ID NO: 3499874 - DNA, 25 bp, Homo sapien
acgtgctggaccctacgctggccac

SEQ ID NO: 3499875 - DNA, 25 bp, Homo sapien
caggcctggggtaccaccccacgtg

SEQ ID NO: 3499876 - DNA, 25 bp, Homo sapien
cgccagccctcgatcccctaaacct

SEQ ID NO: 3499877 - DNA, 25 bp, Homo sapien
tcacctttgctaactctcctgcccc

SEQ ID NO: 3499878 - DNA, 25 bp, Homo sapien
tgctgccagctacacctccgttgcc

SEQ ID NO: 3499879 - DNA, 25 bp, Homo sapien
gtctcggctccccccgagaagatgt

SEQ ID NO: 3499880 - DNA, 25 bp, Homo sapien
agctcccctcgtccaaccagctgcc

SEQ ID NO: 3499881 - DNA, 25 bp, Homo sapien
ccctcgtccaaccagctgccacgtc

SEQ ID NO: 3499882 - DNA, 25 bp, Homo sapien
gctcccctcgtccaaccagctgcca

SEQ ID NO: 3499883 - DNA, 25 bp, Homo sapien
tcccctcgtccaaccagctgccacg

SEQ ID NO: 3499884 - DNA, 25 bp, Homo sapien
aaccaaaagtgaccgggatgaatgc

SEQ ID NO: 3499885 - DNA, 25 bp, Homo sapien
aaaagtgaccgggatgaatgcctgg

SEQ ID NO: 3499886 - DNA, 25 bp, Homo sapien
agtgaccgggatgaatgcctggctc

SEQ ID NO: 3499887 - DNA, 25 bp, Homo sapien
ctgtaaccaaaagtgaccgggatga

SEQ ID NO: 3499888 - DNA, 25 bp, Homo sapien
ccctgtctgcacgatgcctgggcgc

SEQ ID NO: 3499889 - DNA, 25 bp, Homo sapien
ctagcccctccacccgtcatcactc

SEQ ID NO: 3499890 - DNA, 25 bp, Homo sapien
cctgcctcgagctagcccctccacc

SEQ ID NO: 3499891 - DNA, 25 bp, Homo sapien
cagccctgcctcgagctagcccctc

SEQ ID NO: 3499892 - DNA, 25 bp, Homo sapien
gccctgcctcgagctagcccctcca

SEQ ID NO: 3499893 - DNA, 25 bp, Homo sapien
gactccagatgtccaaggtgctcct

SEQ ID NO: 3499894 - DNA, 25 bp, Homo sapien
agactccagatgtccaaggtgctcc

SEQ ID NO: 3499895 - DNA, 25 bp, Homo sapien
actccagatgtccaaggtgctcctt

SEQ ID NO: 3499896 - DNA, 25 bp, Homo sapien
gctttgtcgtgcgtgaaccccacga

SEQ ID NO: 3499897 - DNA, 25 bp, Homo sapien
agagttcacgggtccaatcacccag

SEQ ID NO: 3499898 - DNA, 25 bp, Homo sapien
tgcttgcctgctgagcactgaccgc

SEQ ID NO: 3499899 - DNA, 25 bp, Homo sapien
tctcgagtgtcaaagccgtgaaggg

SEQ ID NO: 3499900 - DNA, 25 bp, Homo sapien
gatgatccctgagcgtggagcacac

SEQ ID NO: 3499901 - DNA, 25 bp, Homo sapien
tgctgcacccacgataatggattat

SEQ ID NO: 3499902 - DNA, 25 bp, Homo sapien
tcgaacatcctaaccccatcaggat

SEQ ID NO: 3499903 - DNA, 25 bp, Homo sapien
accgagtccacaagccgcagggtgt

SEQ ID NO: 3499904 - DNA, 25 bp, Homo sapien
gggtgaatcaggcacgtagcccgat

SEQ ID NO: 3499905 - DNA, 25 bp, Homo sapien
tgtggctcgtacaagggtcctaccc

SEQ ID NO: 3499906 - DNA, 25 bp, Homo sapien
atgaccctcgcgaaccaatgcggtg

SEQ ID NO: 3499907 - DNA, 25 bp, Homo sapien
cctggcctgttgacccgggatgttt

SEQ ID NO: 3499908 - DNA, 25 bp, Homo sapien
gtcatgatcacctcagaacacaggg

SEQ ID NO: 3499909 - DNA, 25 bp, Homo sapien
ggcagcgagactccaggaacactgt

SEQ ID NO: 3499910 - DNA, 25 bp, Homo sapien
caactgattccgtggcatctgggca

SEQ ID NO: 3499911 - DNA, 25 bp, Homo sapien
cctctggagcatgcgcttgagtcct

SEQ ID NO: 3499912 - DNA, 25 bp, Homo sapien
cactggactgtccacgtgggttcac

SEQ ID NO: 3499913 - DNA, 25 bp, Homo sapien
tatttggttgcacccacaaaagccc

SEQ ID NO: 3499914 - DNA, 25 bp, Homo sapien
catcttggcagaaggtccgatccct

SEQ ID NO: 3499915 - DNA, 25 bp, Homo sapien
agcccctgccctttgaccgtgagga

SEQ ID NO: 3499916 - DNA, 25 bp, Homo sapien
agtaattgtaatggccacatgttcc

SEQ ID NO: 3499917 - DNA, 25 bp, Homo sapien
gcatggcaccagtaattgtaatggc

SEQ ID NO: 3499918 - DNA, 25 bp, Homo sapien
ggcaccagtaattgtaatggccaca

SEQ ID NO: 3499919 - DNA, 25 bp, Homo sapien
caccagtaattgtaatggccacatg

SEQ ID NO: 3499920 - DNA, 25 bp, Homo sapien
tccatactccatttttatacttcgt

SEQ ID NO: 3499921 - DNA, 25 bp, Homo sapien
tatacttcgtactccaatctccatt

SEQ ID NO: 3499922 - DNA, 25 bp, Homo sapien
tcatacttcattctcaatactccat

SEQ ID NO: 3499923 - DNA, 25 bp, Homo sapien
ttctccatacaccattctccatact

SEQ ID NO: 3499924 - DNA, 25 bp, Homo sapien
tgtttacacgcgcatccggtgggag

SEQ ID NO: 3499925 - DNA, 25 bp, Homo sapien
ccgtgctcaggtgctcgcttttgca

SEQ ID NO: 3499926 - DNA, 25 bp, Homo sapien
tcttgtccaaggaccgtctgtccat

SEQ ID NO: 3499927 - DNA, 25 bp, Homo sapien
ctttgtggagaacaaacccgagcca

SEQ ID NO: 3499928 - DNA, 25 bp, Homo sapien
gcaggcatagccaagtgcgcgaaca

SEQ ID NO: 3499929 - DNA, 25 bp, Homo sapien
gcatagccaagtgcgcgaacaaaga

SEQ ID NO: 3499930 - DNA, 25 bp, Homo sapien
ccaggagcaggcatagccaagtgcg

SEQ ID NO: 3499931 - DNA, 25 bp, Homo sapien
caagtgcgcgaacaaagaatgaaga

SEQ ID NO: 3499932 - DNA, 25 bp, Homo sapien
ccagtacccaagtcagagagtggaa

SEQ ID NO: 3499933 - DNA, 25 bp, Homo sapien
agtccagtacccaagtcagagagtg

SEQ ID NO: 3499934 - DNA, 25 bp, Homo sapien
cccaagtcagagagtggaacactca

SEQ ID NO: 3499935 - DNA, 25 bp, Homo sapien
tctggcagtccagtacccaagtcag

SEQ ID NO: 3499936 - DNA, 25 bp, Homo sapien
ccaagcatgggattttgccggaaat

SEQ ID NO: 3499937 - DNA, 25 bp, Homo sapien
gcaagcgttacaaggttaaagacaa

SEQ ID NO: 3499938 - DNA, 25 bp, Homo sapien
tgccggaaatattagcgttaaagga

SEQ ID NO: 3499939 - DNA, 25 bp, Homo sapien
aaggagttgagttgagtcaaacacg

SEQ ID NO: 3499940 - DNA, 25 bp, Homo sapien
ctaggcacggaggtcagacaggcag

SEQ ID NO: 3499941 - DNA, 25 bp, Homo sapien
aggcacggaggtcagacaggcagcc

SEQ ID NO: 3499942 - DNA, 25 bp, Homo sapien
taggcacggaggtcagacaggcagc

SEQ ID NO: 3499943 - DNA, 25 bp, Homo sapien
ctctgcgactgaggcggactggcat

SEQ ID NO: 3499944 - DNA, 25 bp, Homo sapien
tctgtccaatgttccgaatggccca

SEQ ID NO: 3499945 - DNA, 25 bp, Homo sapien
ctcgaagcgttttggatctcaggcc

SEQ ID NO: 3499946 - DNA, 25 bp, Homo sapien
gaatggcccactcacagggcgcttg

SEQ ID NO: 3499947 - DNA, 25 bp, Homo sapien
tcaggcctctagactgctagtcggg

SEQ ID NO: 3499948 - DNA, 25 bp, Homo sapien
aagcctcaggcctctagactgctag

SEQ ID NO: 3499949 - DNA, 25 bp, Homo sapien
cctctagactgctagtcgggctgcg

SEQ ID NO: 3499950 - DNA, 25 bp, Homo sapien
tagactgctagtcgggctgcgtgca

SEQ ID NO: 3499951 - DNA, 25 bp, Homo sapien
ctctgtgggctcagacccgcctgac

SEQ ID NO: 3499952 - DNA, 25 bp, Homo sapien
ggcgggcaagatgtcaccgagggag

SEQ ID NO: 3499953 - DNA, 25 bp, Homo sapien
cctcaagtgtgcggaaggcggccac

SEQ ID NO: 3499954 - DNA, 25 bp, Homo sapien
gagcttcggacctcctggagacaag

SEQ ID NO: 3499955 - DNA, 25 bp, Homo sapien
gaatcttagcgggactttggcctga

SEQ ID NO: 3499956 - DNA, 25 bp, Homo sapien
gatgatccctaggtgtgctccggtg

SEQ ID NO: 3499957 - DNA, 25 bp, Homo sapien
tccaatcagggcgataaatggcggg

SEQ ID NO: 3499958 - DNA, 25 bp, Homo sapien
ccaggagacgggcaaagatgatccc

SEQ ID NO: 3499959 - DNA, 25 bp, Homo sapien
tgtgtgtgctgtgttcatgtgtgct

SEQ ID NO: 3499960 - DNA, 25 bp, Homo sapien
gtgctgtgttcatgtgtgctgtgca

SEQ ID NO: 3499961 - DNA, 25 bp, Homo sapien
tgtgctgtgttcatgtgtgctgtgc

SEQ ID NO: 3499962 - DNA, 25 bp, Homo sapien
tgtgtgctgtgttcatgtgtgctgt

SEQ ID NO: 3499963 - DNA, 25 bp, Homo sapien
aacctgatggaaacgtccgtggtca

SEQ ID NO: 3499964 - DNA, 25 bp, Homo sapien
gagggtcgtgccaattacatttcat

SEQ ID NO: 3499965 - DNA, 25 bp, Homo sapien
gctattttcggatggccagtttacc

SEQ ID NO: 3499966 - DNA, 25 bp, Homo sapien
gactcaaagtccaagggagaagaga

SEQ ID NO: 3499967 - DNA, 25 bp, Homo sapien
tgcgcaggcgctgggtggactgctt

SEQ ID NO: 3499968 - DNA, 25 bp, Homo sapien
ggtcttgggtgggtagagcaatcag

SEQ ID NO: 3499969 - DNA, 25 bp, Homo sapien
ctcgagctccttggcgagcacgtga

SEQ ID NO: 3499970 - DNA, 25 bp, Homo sapien
aggtgtcatattggaagaacttgcc

SEQ ID NO: 3499971 - DNA, 25 bp, Homo sapien
gctgggcgcccgaagccctatttct

SEQ ID NO: 3499972 - DNA, 25 bp, Homo sapien
ttgtccctggccaagaggtcccaga

SEQ ID NO: 3499973 - DNA, 25 bp, Homo sapien
tgggcgcccgaagccctatttctct

SEQ ID NO: 3499974 - DNA, 25 bp, Homo sapien
aagcaaggaagtcacgggtccttgt

SEQ ID NO: 3499975 - DNA, 25 bp, Homo sapien
tcacagctgcggaaacagcactcct

SEQ ID NO: 3499976 - DNA, 25 bp, Homo sapien
ctcaacgatgccacggctgcgacgg

SEQ ID NO: 3499977 - DNA, 25 bp, Homo sapien
gacacgtccctctcggacttggcgg

SEQ ID NO: 3499978 - DNA, 25 bp, Homo sapien
gggtagcacagtacgtctccaggag

SEQ ID NO: 3499979 - DNA, 25 bp, Homo sapien
aagcagcaatgcagcacgaggcgaa

SEQ ID NO: 3499980 - DNA, 25 bp, Homo sapien
tgaagtagaagccgcggtccccaca

SEQ ID NO: 3499981 - DNA, 25 bp, Homo sapien
caatgcagcacgaggcgaaggccaa

SEQ ID NO: 3499982 - DNA, 25 bp, Homo sapien
cagacgaactggagggtgtccacca

SEQ ID NO: 3499983 - DNA, 25 bp, Homo sapien
gaagctggaagtctctttcacagga

SEQ ID NO: 3499984 - DNA, 25 bp, Homo sapien
tggaagtctctttcacaggagaagc

SEQ ID NO: 3499985 - DNA, 25 bp, Homo sapien
cagaaggctcgctggggcaggagga

SEQ ID NO: 3499986 - DNA, 25 bp, Homo sapien
ggaggaagctggaagtctctttcac

SEQ ID NO: 3499987 - DNA, 25 bp, Homo sapien
aagccggcgacgctgccgcccacct

SEQ ID NO: 3499988 - DNA, 25 bp, Homo sapien
gccggcgacgctgccgcccacctcc

SEQ ID NO: 3499989 - DNA, 25 bp, Homo sapien
gaagccggcgacgctgccgcccacc

SEQ ID NO: 3499990 - DNA, 25 bp, Homo sapien
agccggcgacgctgccgcccacctc

SEQ ID NO: 3499991 - DNA, 25 bp, Homo sapien
cactcctctgccagcgccgctctgg

SEQ ID NO: 3499992 - DNA, 25 bp, Homo sapien
ctgcgtgtcgcaaaccgaacagcgg

SEQ ID NO: 3499993 - DNA, 25 bp, Homo sapien
tcgcaaaccgaacagcgggcgttgg

SEQ ID NO: 3499994 - DNA, 25 bp, Homo sapien
gaacagcgggcgttggccctcctgc

SEQ ID NO: 3499995 - DNA, 25 bp, Homo sapien
gggaggacgggctgtcttcgggctg

SEQ ID NO: 3499996 - DNA, 25 bp, Homo sapien
ttcgtctgattgtccagggaggacg

SEQ ID NO: 3499997 - DNA, 25 bp, Homo sapien
gaattcgtctgattgtccagggagg

SEQ ID NO: 3499998 - DNA, 25 bp, Homo sapien
agggaggacgggctgtcttcgggct

SEQ ID NO: 3499999 - DNA, 25 bp, Homo sapien
gaaaaggtatcgggaaatgaggtca

SEQ ID NO: 3500000 - DNA, 25 bp, Homo sapien
aaaaggtatcgggaaatgaggtcag

SEQ ID NO: 3500001 - DNA, 25 bp, Homo sapien
gagaacagcacggagagaaacagaa

SEQ ID NO: 3500002 - DNA, 25 bp, Homo sapien
aatccactttggttcggcgaaggcg

SEQ ID NO: 3500003 - DNA, 25 bp, Homo sapien
aacagaaagcgtgtaattaatccac

SEQ ID NO: 3500004 - DNA, 25 bp, Homo sapien
gagagacagagtgaacgtgaaaggg

SEQ ID NO: 3500005 - DNA, 25 bp, Homo sapien
ttgggccgacggagccctctgccgt

SEQ ID NO: 3500006 - DNA, 25 bp, Homo sapien
ccgcgggcgcccagctcggtttggg

SEQ ID NO: 3500007 - DNA, 25 bp, Homo sapien
gctccgggacgcagcgcggaaaggg

SEQ ID NO: 3500008 - DNA, 25 bp, Homo sapien
tctgccgtcgcgagcccgggcctcg

SEQ ID NO: 3500009 - DNA, 25 bp, Homo sapien
ggtgacaacgccggcggcctgcgag

SEQ ID NO: 3500010 - DNA, 25 bp, Homo sapien
gcggggaatccgcaggcccggcgga

SEQ ID NO: 3500011 - DNA, 25 bp, Homo sapien
ggcctgcgagccggactgcctgcgg

SEQ ID NO: 3500012 - DNA, 25 bp, Homo sapien
cgcccgggacgggagtcagcagcga

SEQ ID NO: 3500013 - DNA, 25 bp, Homo sapien
cggccgggcctcacgcagctccgcc

SEQ ID NO: 3500014 - DNA, 25 bp, Homo sapien
gcagagcgcgggcaggcgtgggcca

SEQ ID NO: 3500015 - DNA, 25 bp, Homo sapien
ggccggccgggcctcacgcagctcc

SEQ ID NO: 3500016 - DNA, 25 bp, Homo sapien
agagcgcgggcaggcgtgggccagg

SEQ ID NO: 3500017 - DNA, 25 bp, Homo sapien
tgcatagacgcgagttcggtctcgg

SEQ ID NO: 3500018 - DNA, 25 bp, Homo sapien
ttgcggcccacccaaaatatctgga

SEQ ID NO: 3500019 - DNA, 25 bp, Homo sapien
cgtctaagtagctcgcctttgcggc

SEQ ID NO: 3500020 - DNA, 25 bp, Homo sapien
tggttaccccgtcctcagtgcgttg

SEQ ID NO: 3500021 - DNA, 25 bp, Homo sapien
cactttgggaccctccagccgcttt

SEQ ID NO: 3500022 - DNA, 25 bp, Homo sapien
gcaaacgaaagtggcgcggatttcg

SEQ ID NO: 3500023 - DNA, 25 bp, Homo sapien
agatgcgggccgagagccggtcagg

SEQ ID NO: 3500024 - DNA, 25 bp, Homo sapien
caaatgagatctttgcaatgagcaa

SEQ ID NO: 3500025 - DNA, 25 bp, Homo sapien
taatgactaaactcgagactccaga

SEQ ID NO: 3500026 - DNA, 25 bp, Homo sapien
gagcaacgcccagtccgttggaaga

SEQ ID NO: 3500027 - DNA, 25 bp, Homo sapien
gaatataagttagtggcctggacgc

SEQ ID NO: 3500028 - DNA, 25 bp, Homo sapien
aattgggaattttgccgtagagcca

SEQ ID NO: 3500029 - DNA, 25 bp, Homo sapien
tcggtccccgcgtgggaggtccgca

SEQ ID NO: 3500030 - DNA, 25 bp, Homo sapien
cctgccccggagctttgcgcgcgcc

SEQ ID NO: 3500031 - DNA, 25 bp, Homo sapien
tccgcgctgcgagcctaggcgaagc

SEQ ID NO: 3500032 - DNA, 25 bp, Homo sapien
ggggcaggctagtccccggcttggc

SEQ ID NO: 3500033 - DNA, 25 bp, Homo sapien
gtgcccacagcagggtgtagtggcc

SEQ ID NO: 3500034 - DNA, 25 bp, Homo sapien
gggtgcccacagcagggtgtagtgg

SEQ ID NO: 3500035 - DNA, 25 bp, Homo sapien
tggggtgcccacagcagggtgtagt

SEQ ID NO: 3500036 - DNA, 25 bp, Homo sapien
cttggggtgcccacagcagggtgta

SEQ ID NO: 3500037 - DNA, 25 bp, Homo sapien
cccggcttctatctgggatgggcaa

SEQ ID NO: 3500038 - DNA, 25 bp, Homo sapien
taaagacacctttgaaagaacactc

SEQ ID NO: 3500039 - DNA, 25 bp, Homo sapien
atctgggatgggcaaatcagcctga

SEQ ID NO: 3500040 - DNA, 25 bp, Homo sapien
ctttgaaagaacactcccggcttct

SEQ ID NO: 3500041 - DNA, 25 bp, Homo sapien
tacagaccgacagaaaggtcaggcc

SEQ ID NO: 3500042 - DNA, 25 bp, Homo sapien
tcaggccattggtgcaagaccccat

SEQ ID NO: 3500043 - DNA, 25 bp, Homo sapien
cctgaccagtgaatgggtgctgccc

SEQ ID NO: 3500044 - DNA, 25 bp, Homo sapien
tgtgtgactgaatccacgccagcct

SEQ ID NO: 3500045 - DNA, 25 bp, Homo sapien
tctctgcctcgcagttggggctgag

SEQ ID NO: 3500046 - DNA, 25 bp, Homo sapien
ctcagttctgggagcgctggggtcg

SEQ ID NO: 3500047 - DNA, 25 bp, Homo sapien
cctcagttctgggagcgctggggtc

SEQ ID NO: 3500048 - DNA, 25 bp, Homo sapien
aagctcggtggtgactcttcggccc

SEQ ID NO: 3500049 - DNA, 25 bp, Homo sapien
acaagctcggtggtgactcttcggc

SEQ ID NO: 3500050 - DNA, 25 bp, Homo sapien
caagctcggtggtgactcttcggcc

SEQ ID NO: 3500051 - DNA, 25 bp, Homo sapien
agctggcagcgattcagagccctgg

SEQ ID NO: 3500052 - DNA, 25 bp, Homo sapien
tctctcacactcaagggatgggagc

SEQ ID NO: 3500053 - DNA, 25 bp, Homo sapien
acgcctgaacacttaaagtgcagct

SEQ ID NO: 3500054 - DNA, 25 bp, Homo sapien
cctgaacacttaaagtgcagctttt

SEQ ID NO: 3500055 - DNA, 25 bp, Homo sapien
cactcaagggatgggagcccagtta

SEQ ID NO: 3500056 - DNA, 25 bp, Homo sapien
gcctggccaatattagcagtcacca

SEQ ID NO: 3500057 - DNA, 25 bp, Homo sapien
gggagtcactggtgcccaaggctct

SEQ ID NO: 3500058 - DNA, 25 bp, Homo sapien
aaactgcctggacgatgatccgccg

SEQ ID NO: 3500059 - DNA, 25 bp, Homo sapien
cctggacagtggataaagaggaccg

SEQ ID NO: 3500060 - DNA, 25 bp, Homo sapien
gggaatttgacacctcttcctcaag

SEQ ID NO: 3500061 - DNA, 25 bp, Homo sapien
ggaatttgacacctcttcctcaagc

SEQ ID NO: 3500062 - DNA, 25 bp, Homo sapien
tgggaatttgacacctcttcctcaa

SEQ ID NO: 3500063 - DNA, 25 bp, Homo sapien
tgccatgaccgtagctacagggccg

SEQ ID NO: 3500064 - DNA, 25 bp, Homo sapien
gagatttcctaatctggcccgagcc

SEQ ID NO: 3500065 - DNA, 25 bp, Homo sapien
gcttcagaaagcaccgccagtaaat

SEQ ID NO: 3500066 - DNA, 25 bp, Homo sapien
tgtggccacttgtgagaattgcatc

SEQ ID NO: 3500067 - DNA, 25 bp, Homo sapien
cggagggccccgtggaagcagccat

SEQ ID NO: 3500068 - DNA, 25 bp, Homo sapien
gggtttgggtgcctcattgcctcca

SEQ ID NO: 3500069 - DNA, 25 bp, Homo sapien
caccgagccacccatgtgtaacggg

SEQ ID NO: 3500070 - DNA, 25 bp, Homo sapien
ttttcttgcaccttgaaggtcaggg

SEQ ID NO: 3500071 - DNA, 25 bp, Homo sapien
ggcggggagcttggcgccagcacag

SEQ ID NO: 3500072 - DNA, 25 bp, Homo sapien
cgagagggacgatggggtgccgcct

SEQ ID NO: 3500073 - DNA, 25 bp, Homo sapien
ccggccccactttcgaaggaatctg

SEQ ID NO: 3500074 - DNA, 25 bp, Homo sapien
ctgaggacgcggaggagcgcgtggg

SEQ ID NO: 3500075 - DNA, 25 bp, Homo sapien
gcaccgctgagtccacactcatccc

SEQ ID NO: 3500076 - DNA, 25 bp, Homo sapien
atccccccggggtctgctcaggcct

SEQ ID NO: 3500077 - DNA, 25 bp, Homo sapien
tcagcaccgctgagtccacactcat

SEQ ID NO: 3500078 - DNA, 25 bp, Homo sapien
cctcagcaccgctgagtccacactc

SEQ ID NO: 3500079 - DNA, 25 bp, Homo sapien
gagtcctgggtctcaacaaggtgaa

SEQ ID NO: 3500080 - DNA, 25 bp, Homo sapien
tcccgtgtccacgttttccaggaca

SEQ ID NO: 3500081 - DNA, 25 bp, Homo sapien
tcaaggcgctggcgaagacaggctt

SEQ ID NO: 3500082 - DNA, 25 bp, Homo sapien
ccaactgcttctcattgggcctggg

SEQ ID NO: 3500083 - DNA, 25 bp, Homo sapien
gggccggctgggtgttcccatggac

SEQ ID NO: 3500084 - DNA, 25 bp, Homo sapien
cagggcgcccctgtctctacccgtg

SEQ ID NO: 3500085 - DNA, 25 bp, Homo sapien
tgtctctacccgtgcgagtggggcc

SEQ ID NO: 3500086 - DNA, 25 bp, Homo sapien
ccctgtctctacccgtgcgagtggg

SEQ ID NO: 3500087 - DNA, 25 bp, Homo sapien
tattccatctctctcggtgcaggag

SEQ ID NO: 3500088 - DNA, 25 bp, Homo sapien
ctcggtgcaggaggcggcgggtgtg

SEQ ID NO: 3500089 - DNA, 25 bp, Homo sapien
ctttattccatctctctcggtgcag

SEQ ID NO: 3500090 - DNA, 25 bp, Homo sapien
agggctttattccatctctctcggt

SEQ ID NO: 3500091 - DNA, 25 bp, Homo sapien
gcagatgctggtacagcattgttcc

SEQ ID NO: 3500092 - DNA, 25 bp, Homo sapien
gctggtacagcattgttccacaatg

SEQ ID NO: 3500093 - DNA, 25 bp, Homo sapien
cacaatgccacgcttctgcagggac

SEQ ID NO: 3500094 - DNA, 25 bp, Homo sapien
ttccacaatgccacgcttctgcagg

SEQ ID NO: 3500095 - DNA, 25 bp, Homo sapien
cccccgcccagctccacctgcccca

SEQ ID NO: 3500096 - DNA, 25 bp, Homo sapien
ggcccccgcccagctccacctgccc

SEQ ID NO: 3500097 - DNA, 25 bp, Homo sapien
ctgcaccagggcccccgcccagctc

SEQ ID NO: 3500098 - DNA, 25 bp, Homo sapien
agggcccccgcccagctccacctgc

SEQ ID NO: 3500099 - DNA, 25 bp, Homo sapien
aacaaaacacttgaatctgcggtca

SEQ ID NO: 3500100 - DNA, 25 bp, Homo sapien
tctgcggtcatcaaatgagggtgga

SEQ ID NO: 3500101 - DNA, 25 bp, Homo sapien
gtgatcccagtacttctccccaggg

SEQ ID NO: 3500102 - DNA, 25 bp, Homo sapien
gtgcccaccctctgatgtatctcgg

SEQ ID NO: 3500103 - DNA, 25 bp, Homo sapien
tgagccgcacaggtgttggttcaca

SEQ ID NO: 3500104 - DNA, 25 bp, Homo sapien
caaaggctgcggctgggtcaggtcc

SEQ ID NO: 3500105 - DNA, 25 bp, Homo sapien
tcgttccccgcacactaggtagaga

SEQ ID NO: 3500106 - DNA, 25 bp, Homo sapien
tgtgtagaagaagcctcgttccccg

SEQ ID NO: 3500107 - DNA, 25 bp, Homo sapien
acatgcttcacgagcccagccacgt

SEQ ID NO: 3500108 - DNA, 25 bp, Homo sapien
catgcttcacgagcccagccacgtc

SEQ ID NO: 3500109 - DNA, 25 bp, Homo sapien
cacatgcttcacgagcccagccacg

SEQ ID NO: 3500110 - DNA, 25 bp, Homo sapien
gggctcacccccacatgcttcacga

SEQ ID NO: 3500111 - DNA, 25 bp, Homo sapien
tgacgcaaaggcccttggaacagac

SEQ ID NO: 3500112 - DNA, 25 bp, Homo sapien
ctgacgcaaaggcccttggaacaga

SEQ ID NO: 3500113 - DNA, 25 bp, Homo sapien
tgcttgatggcctcttctgatgcag

SEQ ID NO: 3500114 - DNA, 25 bp, Homo sapien
ctcttctgatgcagcctgtcctgga

SEQ ID NO: 3500115 - DNA, 25 bp, Homo sapien
ctgatgcagcctgtcctggagggct

SEQ ID NO: 3500116 - DNA, 25 bp, Homo sapien
ggcctcttctgatgcagcctgtcct

SEQ ID NO: 3500117 - DNA, 25 bp, Homo sapien
ggcctgagctccgggacagtgcagg

SEQ ID NO: 3500118 - DNA, 25 bp, Homo sapien
acaggcagcacaacctcaccacggg

SEQ ID NO: 3500119 - DNA, 25 bp, Homo sapien
acacacagctgttgcgctgagaagc

SEQ ID NO: 3500120 - DNA, 25 bp, Homo sapien
ttcttttattgtgacggtgattggg

SEQ ID NO: 3500121 - DNA, 25 bp, Homo sapien
caatggcactcagcgcatgggcaag

SEQ ID NO: 3500122 - DNA, 25 bp, Homo sapien
atggccagcgtgtacgggtcgaact

SEQ ID NO: 3500123 - DNA, 25 bp, Homo sapien
ctagccaatggcactcagcgcatgg

SEQ ID NO: 3500124 - DNA, 25 bp, Homo sapien
cgtgtacgggtcgaacttcacggag

SEQ ID NO: 3500125 - DNA, 25 bp, Homo sapien
gactgactggtacgtctggtcttgg

SEQ ID NO: 3500126 - DNA, 25 bp, Homo sapien
tgagcttgtccttggcgtcactgaa

SEQ ID NO: 3500127 - DNA, 25 bp, Homo sapien
ggtcgaaggcccgaatctcaggctc

SEQ ID NO: 3500128 - DNA, 25 bp, Homo sapien
gtcactgaagctctcagacacgaag

SEQ ID NO: 3500129 - DNA, 25 bp, Homo sapien
cgaactccaccgtgaaccagtacag

SEQ ID NO: 3500130 - DNA, 25 bp, Homo sapien
agcagcccggcaccataggccttca

SEQ ID NO: 3500131 - DNA, 25 bp, Homo sapien
ttctgcttacacagcccgaactcca

SEQ ID NO: 3500132 - DNA, 25 bp, Homo sapien
gagctccccgtaggaggacagcagc

SEQ ID NO: 3500133 - DNA, 25 bp, Homo sapien
agggtgagggtcacaattcgtgggt

SEQ ID NO: 3500134 - DNA, 25 bp, Homo sapien
agcctggacggcaagagggtgaggc

SEQ ID NO: 3500135 - DNA, 25 bp, Homo sapien
gcctggacggcaagagggtgaggcc

SEQ ID NO: 3500136 - DNA, 25 bp, Homo sapien
gtcacaattcgtgggtggaaggaga

SEQ ID NO: 3500137 - DNA, 25 bp, Homo sapien
cgtggacagcttctcaatttcctca

SEQ ID NO: 3500138 - DNA, 25 bp, Homo sapien
tcaatttcctcatccgaggccccca

SEQ ID NO: 3500139 - DNA, 25 bp, Homo sapien
gcccccagggacgccaggccaatgt

SEQ ID NO: 3500140 - DNA, 25 bp, Homo sapien
atttcctcatccgaggcccccaggg

SEQ ID NO: 3500141 - DNA, 25 bp, Homo sapien
agccctgggtcatgctcgaggtggg

SEQ ID NO: 3500142 - DNA, 25 bp, Homo sapien
gaccacattcctaagcccgtgggcg

SEQ ID NO: 3500143 - DNA, 25 bp, Homo sapien
acaggccgtgggaggctccgctcca

SEQ ID NO: 3500144 - DNA, 25 bp, Homo sapien
cgccgttcccaggtagccggcaggt

SEQ ID NO: 3500145 - DNA, 25 bp, Homo sapien
tgccccagcagctcgtggcagcagt

SEQ ID NO: 3500146 - DNA, 25 bp, Homo sapien
tgcggtcggccagcatgggcacgtg

SEQ ID NO: 3500147 - DNA, 25 bp, Homo sapien
cgagaactgcgcgaaggtgcggtcg

SEQ ID NO: 3500148 - DNA, 25 bp, Homo sapien
gtgccccagcagctcgtggcagcag

SEQ ID NO: 3500149 - DNA, 25 bp, Homo sapien
cggatatactgggtgcactggaaca

SEQ ID NO: 3500150 - DNA, 25 bp, Homo sapien
gctcaggggagtgcatgggcgagga

SEQ ID NO: 3500151 - DNA, 25 bp, Homo sapien
gatatactgggtgcactggaacacg

SEQ ID NO: 3500152 - DNA, 25 bp, Homo sapien
ggcgaggacgcgtggcggatatact

SEQ ID NO: 3500153 - DNA, 25 bp, Homo sapien
ggatattgtcttcccggtagccgct

SEQ ID NO: 3500154 - DNA, 25 bp, Homo sapien
gctgaagcgctccagcaaagcaaag

SEQ ID NO: 3500155 - DNA, 25 bp, Homo sapien
cgcaggcgtgcgtggcgtagaggcc

SEQ ID NO: 3500156 - DNA, 25 bp, Homo sapien
cgtagaggcccttcagcgtggtgta

SEQ ID NO: 3500157 - DNA, 25 bp, Homo sapien
tcctcggcggtgtactccacacggg

SEQ ID NO: 3500158 - DNA, 25 bp, Homo sapien
tggcaatctcctcggcggtgtactc

SEQ ID NO: 3500159 - DNA, 25 bp, Homo sapien
ggtggcaatctcctcggcggtgtac

SEQ ID NO: 3500160 - DNA, 25 bp, Homo sapien
ctccacacggggaatcgggtcgccg

SEQ ID NO: 3500161 - DNA, 25 bp, Homo sapien
cctagtgcagcgaggcctttgggtt

SEQ ID NO: 3500162 - DNA, 25 bp, Homo sapien
gctgactgtgccgtgagccggctat

SEQ ID NO: 3500163 - DNA, 25 bp, Homo sapien
ctggtgacaagatgggtcctcccct

SEQ ID NO: 3500164 - DNA, 25 bp, Homo sapien
aggtccagcgtcagcctgcaggacg

SEQ ID NO: 3500165 - DNA, 25 bp, Homo sapien
actggaaggcgatctcagcaatcag

SEQ ID NO: 3500166 - DNA, 25 bp, Homo sapien
tggcggtacacctggtccgagaagc

SEQ ID NO: 3500167 - DNA, 25 bp, Homo sapien
tcagcaatcagcttcctgcgctggc

SEQ ID NO: 3500168 - DNA, 25 bp, Homo sapien
ggcggtacacctggtccgagaagcc

SEQ ID NO: 3500169 - DNA, 25 bp, Homo sapien
aagtccaggtcagggtcgaacttgg

SEQ ID NO: 3500170 - DNA, 25 bp, Homo sapien
ccaggtgatgacacttgtccagctc

SEQ ID NO: 3500171 - DNA, 25 bp, Homo sapien
tcagggtcgaacttggtgaccaggt

SEQ ID NO: 3500172 - DNA, 25 bp, Homo sapien
tcgaacttggtgaccaggtgatgac

SEQ ID NO: 3500173 - DNA, 25 bp, Homo sapien
agagatcttggtgagctcggagccg

SEQ ID NO: 3500174 - DNA, 25 bp, Homo sapien
agatcttggtgagctcggagccgtg

SEQ ID NO: 3500175 - DNA, 25 bp, Homo sapien
ggtgatggaggaagagatcttggtg

SEQ ID NO: 3500176 - DNA, 25 bp, Homo sapien
atcttggtgagctcggagccgtggg

SEQ ID NO: 3500177 - DNA, 25 bp, Homo sapien
tgacacctggcgcacaccactgagc

SEQ ID NO: 3500178 - DNA, 25 bp, Homo sapien
gcggggctgcgcacgtcctctgaca

SEQ ID NO: 3500179 - DNA, 25 bp, Homo sapien
gcacctcgaggcgcacgaagtactc

SEQ ID NO: 3500180 - DNA, 25 bp, Homo sapien
tgggcgggccgggtctctagatggt

SEQ ID NO: 3500181 - DNA, 25 bp, Homo sapien
agcaaaagcaggaagagagagagaa

SEQ ID NO: 3500182 - DNA, 25 bp, Homo sapien
cttagggagcaaaagcaggaagaga

SEQ ID NO: 3500183 - DNA, 25 bp, Homo sapien
aaaagcaggaagagagagagaagga

SEQ ID NO: 3500184 - DNA, 25 bp, Homo sapien
gagcaaaagcaggaagagagagaga

SEQ ID NO: 3500185 - DNA, 25 bp, Homo sapien
gctcgggacagcgccgagggcttgg

SEQ ID NO: 3500186 - DNA, 25 bp, Homo sapien
ggacagcgccgagggcttggtggcc

SEQ ID NO: 3500187 - DNA, 25 bp, Homo sapien
ctcaaacaccttcacagctcgggac

SEQ ID NO: 3500188 - DNA, 25 bp, Homo sapien
tcaaacaccttcacagctcgggaca

SEQ ID NO: 3500189 - DNA, 25 bp, Homo sapien
tgaggctctgcctgcgcccaatgaa

SEQ ID NO: 3500190 - DNA, 25 bp, Homo sapien
agcaggtttagcacggccttcccct

SEQ ID NO: 3500191 - DNA, 25 bp, Homo sapien
cgtcctcgatgaggctctgcctgcg

SEQ ID NO: 3500192 - DNA, 25 bp, Homo sapien
ctccttgcgggcgtcctcgatgagg

SEQ ID NO: 3500193 - DNA, 25 bp, Homo sapien
ggtgggggtgtaggatgcagctggg

SEQ ID NO: 3500194 - DNA, 25 bp, Homo sapien
caggccacggagagcctgtgaggct

SEQ ID NO: 3500195 - DNA, 25 bp, Homo sapien
ttggggtgggggtgtaggatgcagc

SEQ ID NO: 3500196 - DNA, 25 bp, Homo sapien
ggctgcagttccaggccacggagag

SEQ ID NO: 3500197 - DNA, 25 bp, Homo sapien
agacacggccctgcggaagcccttg

SEQ ID NO: 3500198 - DNA, 25 bp, Homo sapien
gtccagctcagacacggccctgcgg

SEQ ID NO: 3500199 - DNA, 25 bp, Homo sapien
ttggcgtccagctcagacacggccc

SEQ ID NO: 3500200 - DNA, 25 bp, Homo sapien
agctcagacacggccctgcggaagc

SEQ ID NO: 3500201 - DNA, 25 bp, Homo sapien
gcgtggtggcgtcgggggtgggcat

SEQ ID NO: 3500202 - DNA, 25 bp, Homo sapien
gattccaggccgtgtgtctcataga

SEQ ID NO: 3500203 - DNA, 25 bp, Homo sapien
taagctgagctgacgtcaaagcccc

SEQ ID NO: 3500204 - DNA, 25 bp, Homo sapien
gaaagggctcgtccgtggaatctaa

SEQ ID NO: 3500205 - DNA, 25 bp, Homo sapien
catagacgtggttcctaggagtgcc

SEQ ID NO: 3500206 - DNA, 25 bp, Homo sapien
acgggacgaggcctctccacgctgg

SEQ ID NO: 3500207 - DNA, 25 bp, Homo sapien
tctccagagatgtccacaaacacca

SEQ ID NO: 3500208 - DNA, 25 bp, Homo sapien
ggctccactccagcgcccacgggac

SEQ ID NO: 3500209 - DNA, 25 bp, Homo sapien
cctctccagagatgtccacaaacac

SEQ ID NO: 3500210 - DNA, 25 bp, Homo sapien
tgggaacccacgcaccagagcttgg

SEQ ID NO: 3500211 - DNA, 25 bp, Homo sapien
ttgccgagagcaccctggttgtgtg

SEQ ID NO: 3500212 - DNA, 25 bp, Homo sapien
gatgctggaattgccgagagcaccc

SEQ ID NO: 3500213 - DNA, 25 bp, Homo sapien
tggcctggagttttcgctggtctgt

SEQ ID NO: 3500214 - DNA, 25 bp, Homo sapien
aagcttgaatgacacttcagcggca

SEQ ID NO: 3500215 - DNA, 25 bp, Homo sapien
agcgcgacccaacagcgtctgtctt

SEQ ID NO: 3500216 - DNA, 25 bp, Homo sapien
aggtcatcatccacgcccgacatta

SEQ ID NO: 3500217 - DNA, 25 bp, Homo sapien
cacgcccgacattacaaagcttgaa

SEQ ID NO: 3500218 - DNA, 25 bp, Homo sapien
tttccatggcgtctgtatcaatccg

SEQ ID NO: 3500219 - DNA, 25 bp, Homo sapien
agaaaccttttccatggcgtctgta

SEQ ID NO: 3500220 - DNA, 25 bp, Homo sapien
cgctgtcaccgcaggtggccttgct

SEQ ID NO: 3500221 - DNA, 25 bp, Homo sapien
tgtttcgctgtcaccgcaggtggcc

SEQ ID NO: 3500222 - DNA, 25 bp, Homo sapien
gctcaggcagatacagtggcgtcac

SEQ ID NO: 3500223 - DNA, 25 bp, Homo sapien
tggctgtggcacaagatgttctctc

SEQ ID NO: 3500224 - DNA, 25 bp, Homo sapien
cagggtgtgccgtgtgctgtcctca

SEQ ID NO: 3500225 - DNA, 25 bp, Homo sapien
atgtgtccttataccaaccccgtgg

SEQ ID NO: 3500226 - DNA, 25 bp, Homo sapien
ggcataacctcgctcccggccgcct

SEQ ID NO: 3500227 - DNA, 25 bp, Homo sapien
ccccttgcggccatctgcggcataa

SEQ ID NO: 3500228 - DNA, 25 bp, Homo sapien
cataacctcgctcccggccgcctgt

SEQ ID NO: 3500229 - DNA, 25 bp, Homo sapien
cttgcggccatctgcggcataacct

SEQ ID NO: 3500230 - DNA, 25 bp, Homo sapien
ggtcttggcatcagggggctgaatc

SEQ ID NO: 3500231 - DNA, 25 bp, Homo sapien
gggggctgaatctggcctggtagag

SEQ ID NO: 3500232 - DNA, 25 bp, Homo sapien
gggctgaatctggcctggtagaggg

SEQ ID NO: 3500233 - DNA, 25 bp, Homo sapien
agggtgggccgtccctgggctgtgc

SEQ ID NO: 3500234 - DNA, 25 bp, Homo sapien
gttttattagcctatgcctttgttc

SEQ ID NO: 3500235 - DNA, 25 bp, Homo sapien
tccttacctaaagaacagggtgcta

SEQ ID NO: 3500236 - DNA, 25 bp, Homo sapien
tctgcctgatgactcccgtgggtgg

SEQ ID NO: 3500237 - DNA, 25 bp, Homo sapien
ccgctctgataaggcctggtccctg

SEQ ID NO: 3500238 - DNA, 25 bp, Homo sapien
tgcagctgccttataaggtagggtc

SEQ ID NO: 3500239 - DNA, 25 bp, Homo sapien
gcgtcgaacagccaccctatcttgt

SEQ ID NO: 3500240 - DNA, 25 bp, Homo sapien
tgaagaaccaagagggcgtcgaaca

SEQ ID NO: 3500241 - DNA, 25 bp, Homo sapien
gacatgggccttagatttgaagaac

SEQ ID NO: 3500242 - DNA, 25 bp, Homo sapien
gaatgtcacgatcagggaagaagca

SEQ ID NO: 3500243 - DNA, 25 bp, Homo sapien
tccagaagcgtcataggagatgccc

SEQ ID NO: 3500244 - DNA, 25 bp, Homo sapien
tacgtctgcagacaacccgtgtggg

SEQ ID NO: 3500245 - DNA, 25 bp, Homo sapien
gggtacgcaccaccttctgagagag

SEQ ID NO: 3500246 - DNA, 25 bp, Homo sapien
aatgtactgtcctaaatgtacactg

SEQ ID NO: 3500247 - DNA, 25 bp, Homo sapien
actgtttttcaatgcacagttcagg

SEQ ID NO: 3500248 - DNA, 25 bp, Homo sapien
gttactggcctcttgcatcgctgtg

SEQ ID NO: 3500249 - DNA, 25 bp, Homo sapien
tttattggggcaaaaaacacatcac

SEQ ID NO: 3500250 - DNA, 25 bp, Homo sapien
ggaacaagggccacaagtatgttca

SEQ ID NO: 3500251 - DNA, 25 bp, Homo sapien
gttcaaagtgttgatgatacatgtg

SEQ ID NO: 3500252 - DNA, 25 bp, Homo sapien
tgttcaaagtgttgatgatacatgt

SEQ ID NO: 3500253 - DNA, 25 bp, Homo sapien
aaaacactgtcacacttagggcacg

SEQ ID NO: 3500254 - DNA, 25 bp, Homo sapien
gataagctacatggtgggcccagag

SEQ ID NO: 3500255 - DNA, 25 bp, Homo sapien
ggcaggagtcccaagaatgcttcac

SEQ ID NO: 3500256 - DNA, 25 bp, Homo sapien
gaacaaaacccttagattgctggag

SEQ ID NO: 3500257 - DNA, 25 bp, Homo sapien
ctcccttgaagaggtgtgccccaca

SEQ ID NO: 3500258 - DNA, 25 bp, Homo sapien
tcgtgtccagatcttggccagcatg

SEQ ID NO: 3500259 - DNA, 25 bp, Homo sapien
ctcagggactgctcgtgtccagatc

SEQ ID NO: 3500260 - DNA, 25 bp, Homo sapien
tatttataaagttcacgctcccttg

SEQ ID NO: 3500261 - DNA, 25 bp, Homo sapien
tccaggtcatctttattacgcccca

SEQ ID NO: 3500262 - DNA, 25 bp, Homo sapien
caggggtccaggtcatctttattac

SEQ ID NO: 3500263 - DNA, 25 bp, Homo sapien
ggggtccaggtcatctttattacgc

SEQ ID NO: 3500264 - DNA, 25 bp, Homo sapien
ggtccaggtcatctttattacgccc

SEQ ID NO: 3500265 - DNA, 25 bp, Homo sapien
gccccactgcagtcgagaagctgtg

SEQ ID NO: 3500266 - DNA, 25 bp, Homo sapien
ggcggcgtcggaggaagccgccagc

SEQ ID NO: 3500267 - DNA, 25 bp, Homo sapien
tccaccgcggcattggtcaggctgg

SEQ ID NO: 3500268 - DNA, 25 bp, Homo sapien
ctgggccggacgaacgaggcggcgt

SEQ ID NO: 3500269 - DNA, 25 bp, Homo sapien
ttgcgcacggcgtcgtgctcggcca

SEQ ID NO: 3500270 - DNA, 25 bp, Homo sapien
gaagcccaagttcaccagcttcacg

SEQ ID NO: 3500271 - DNA, 25 bp, Homo sapien
gcggatgtactccacggctgagcgc

SEQ ID NO: 3500272 - DNA, 25 bp, Homo sapien
agaagtcgagtagctcgcgctccgc

SEQ ID NO: 3500273 - DNA, 25 bp, Homo sapien
gcgaaatctgcgagttcccggtgcg

SEQ ID NO: 3500274 - DNA, 25 bp, Homo sapien
ccaaagcaaggtacgcaggtcctgg

SEQ ID NO: 3500275 - DNA, 25 bp, Homo sapien
aatgtatagataaccctcctccgcg

SEQ ID NO: 3500276 - DNA, 25 bp, Homo sapien
tgtaaggcccaaagcgtgcgcatgt

SEQ ID NO: 3500277 - DNA, 25 bp, Homo sapien
catccaggcgggtgaacactcgtgt

SEQ ID NO: 3500278 - DNA, 25 bp, Homo sapien
ccttaaagactgtgagcgagctccc

SEQ ID NO: 3500279 - DNA, 25 bp, Homo sapien
agtccacagaggtgtctcatccagg

SEQ ID NO: 3500280 - DNA, 25 bp, Homo sapien
taagcagagatcactccggctgacg

SEQ ID NO: 3500281 - DNA, 25 bp, Homo sapien
ctctgatggacagaaaagggtccct

SEQ ID NO: 3500282 - DNA, 25 bp, Homo sapien
tgatggacagaaaagggtccctgtc

SEQ ID NO: 3500283 - DNA, 25 bp, Homo sapien
ctgatggacagaaaagggtccctgt

SEQ ID NO: 3500284 - DNA, 25 bp, Homo sapien
tctgatggacagaaaagggtccctg

SEQ ID NO: 3500285 - DNA, 25 bp, Homo sapien
gcctgcttctaagtccaagtcccat

SEQ ID NO: 3500286 - DNA, 25 bp, Homo sapien
tgggtgatccacaggttcatgagcg

SEQ ID NO: 3500287 - DNA, 25 bp, Homo sapien
acaagggcaccatgggcggagggtt

SEQ ID NO: 3500288 - DNA, 25 bp, Homo sapien
ggcccgaggacacagctttccagag

SEQ ID NO: 3500289 - DNA, 25 bp, Homo sapien
tagagtgagcgggcgcacctgggac

SEQ ID NO: 3500290 - DNA, 25 bp, Homo sapien
attgtagagtgagcgggcgcacctg

SEQ ID NO: 3500291 - DNA, 25 bp, Homo sapien
ctggtgggtaaggacattgtagagt

SEQ ID NO: 3500292 - DNA, 25 bp, Homo sapien
gtgggtaaggacattgtagagtgag

SEQ ID NO: 3500293 - DNA, 25 bp, Homo sapien
agatgacaagtgaggccacctgggc

SEQ ID NO: 3500294 - DNA, 25 bp, Homo sapien
acctgtcagggggttcgacgccact

SEQ ID NO: 3500295 - DNA, 25 bp, Homo sapien
gttcgacgccactttgagatgacaa

SEQ ID NO: 3500296 - DNA, 25 bp, Homo sapien
tgagatgacaagtgaggccacctgg

SEQ ID NO: 3500297 - DNA, 25 bp, Homo sapien
gacaaaatatccatgagtgccgccc

SEQ ID NO: 3500298 - DNA, 25 bp, Homo sapien
tcatcttccctggagaggacgggct

SEQ ID NO: 3500299 - DNA, 25 bp, Homo sapien
cacggctcggtgtaattgcaaattc

SEQ ID NO: 3500300 - DNA, 25 bp, Homo sapien
tgacactgtgggtgccaggcatctg

SEQ ID NO: 3500301 - DNA, 25 bp, Homo sapien
tccccgggcgccgtctcctccacat

SEQ ID NO: 3500302 - DNA, 25 bp, Homo sapien
tcctccccgggcgccgtctcctcca

SEQ ID NO: 3500303 - DNA, 25 bp, Homo sapien
acatcccacaccaggtcctgcccat

SEQ ID NO: 3500304 - DNA, 25 bp, Homo sapien
cccgggcgccgtctcctccacatcc

SEQ ID NO: 3500305 - DNA, 25 bp, Homo sapien
tcagcaaatgccctggtgtcttggg

SEQ ID NO: 3500306 - DNA, 25 bp, Homo sapien
caagaacgaggccatgtcttcctgg

SEQ ID NO: 3500307 - DNA, 25 bp, Homo sapien
gggcacccagcagctcggtcctagg

SEQ ID NO: 3500308 - DNA, 25 bp, Homo sapien
cggtcctagggcgatgttgacagac

SEQ ID NO: 3500309 - DNA, 25 bp, Homo sapien
agggctgaccgagagcctccactgc

SEQ ID NO: 3500310 - DNA, 25 bp, Homo sapien
tgggccccagtgcaatgaggaccgc

SEQ ID NO: 3500311 - DNA, 25 bp, Homo sapien
ggagccaagtttggcctggaaagtc

SEQ ID NO: 3500312 - DNA, 25 bp, Homo sapien
atgaggaccgccgtaagccaccctt

SEQ ID NO: 3500313 - DNA, 25 bp, Homo sapien
gcaactgtcatctcctgttatagca

SEQ ID NO: 3500314 - DNA, 25 bp, Homo sapien
tttatatgactggtagcacggcagg

SEQ ID NO: 3500315 - DNA, 25 bp, Homo sapien
cacggcaggtttacttacaccagca

SEQ ID NO: 3500316 - DNA, 25 bp, Homo sapien
catcttgaccagttttgtgaccgga

SEQ ID NO: 3500317 - DNA, 25 bp, Homo sapien
tctgttgatcggtccaagtcaggca

SEQ ID NO: 3500318 - DNA, 25 bp, Homo sapien
gagccttcttgtattcagcctgcca

SEQ ID NO: 3500319 - DNA, 25 bp, Homo sapien
ggttccgactgctaccacaatacag

SEQ ID NO: 3500320 - DNA, 25 bp, Homo sapien
gggacctaacacaaaactcgcaatg

SEQ ID NO: 3500321 - DNA, 25 bp, Homo sapien
tctccgtggtgcacaacagtcagct

SEQ ID NO: 3500322 - DNA, 25 bp, Homo sapien
ggtcacagatacaatctagcatagg

SEQ ID NO: 3500323 - DNA, 25 bp, Homo sapien
tgggctctgcttgactgatcttggc

SEQ ID NO: 3500324 - DNA, 25 bp, Homo sapien
caagacagcaagtcgtggctggcct

SEQ ID NO: 3500325 - DNA, 25 bp, Homo sapien
cagacgataccatgtgttcaccaca

SEQ ID NO: 3500326 - DNA, 25 bp, Homo sapien
catccatcggagatgctgggtctgg

SEQ ID NO: 3500327 - DNA, 25 bp, Homo sapien
actgggtggactttggcaggtcaac

SEQ ID NO: 3500328 - DNA, 25 bp, Homo sapien
gtggatggcggaacagacgatacca

SEQ ID NO: 3500329 - DNA, 25 bp, Homo sapien
ttagtgtggttgcatgagggtcatg

SEQ ID NO: 3500330 - DNA, 25 bp, Homo sapien
tcacctctatggttagtgtggttgc

SEQ ID NO: 3500331 - DNA, 25 bp, Homo sapien
gcatgagggtcatgtgaccgagttc

SEQ ID NO: 3500332 - DNA, 25 bp, Homo sapien
tcccagtcacctctatggttagtgt

SEQ ID NO: 3500333 - DNA, 25 bp, Homo sapien
tctctctccgctgattcatgttttt

SEQ ID NO: 3500334 - DNA, 25 bp, Homo sapien
taagttctcataattgcttgaatat

SEQ ID NO: 3500335 - DNA, 25 bp, Homo sapien
gtctctcagtagagtttatagcttt

SEQ ID NO: 3500336 - DNA, 25 bp, Homo sapien
aggaaaatagcttctctctccgctg

SEQ ID NO: 3500337 - DNA, 25 bp, Homo sapien
tgttccagacattccgaaaagttcg

SEQ ID NO: 3500338 - DNA, 25 bp, Homo sapien
tctccggttaaaccgtggttgcaca

SEQ ID NO: 3500339 - DNA, 25 bp, Homo sapien
aagaaacacaccctagcctcaaaat

SEQ ID NO: 3500340 - DNA, 25 bp, Homo sapien
accgtggttgcacaacaggttctat

SEQ ID NO: 3500341 - DNA, 25 bp, Homo sapien
gctgcacccgctcgatgtagatgac

SEQ ID NO: 3500342 - DNA, 25 bp, Homo sapien
tcacgctgcacccgctcgatgtaga

SEQ ID NO: 3500343 - DNA, 25 bp, Homo sapien
ttctcacgctgcacccgctcgatgt

SEQ ID NO: 3500344 - DNA, 25 bp, Homo sapien
gccttctcacgctgcacccgctcga

SEQ ID NO: 3500345 - DNA, 25 bp, Homo sapien
tcctgcgcacgtgtgagggggcatt

SEQ ID NO: 3500346 - DNA, 25 bp, Homo sapien
ctgcggtccgaggtaacgaagggat

SEQ ID NO: 3500347 - DNA, 25 bp, Homo sapien
tgcgcacgtgtgagggggcattgaa

SEQ ID NO: 3500348 - DNA, 25 bp, Homo sapien
atgatcttcctgcgcacgtgtgagg

SEQ ID NO: 3500349 - DNA, 25 bp, Homo sapien
tgttcatgccttagggatctgtgga

SEQ ID NO: 3500350 - DNA, 25 bp, Homo sapien
gaaaggctcacaagaagagaggaag

SEQ ID NO: 3500351 - DNA, 25 bp, Homo sapien
acctacacacagatgcgggagcaaa

SEQ ID NO: 3500352 - DNA, 25 bp, Homo sapien
ggaactacagcaaaagtcacatgtg

SEQ ID NO: 3500353 - DNA, 25 bp, Homo sapien
acagctttttcaggaaataaattca

SEQ ID NO: 3500354 - DNA, 25 bp, Homo sapien
gcctcagctaaaacgggtccaggta

SEQ ID NO: 3500355 - DNA, 25 bp, Homo sapien
caaaggcatttcagaaacttccaaa

SEQ ID NO: 3500356 - DNA, 25 bp, Homo sapien
taccgcttactagagaaatttgcac

SEQ ID NO: 3500357 - DNA, 25 bp, Homo sapien
ggcacttcctagtggacccatggga

SEQ ID NO: 3500358 - DNA, 25 bp, Homo sapien
ttttggacttgtatgcagcctgtag

SEQ ID NO: 3500359 - DNA, 25 bp, Homo sapien
gcttccgtgtagtgttaaacctgca

SEQ ID NO: 3500360 - DNA, 25 bp, Homo sapien
ggcactcaacaacctgtgacagcag

SEQ ID NO: 3500361 - DNA, 25 bp, Homo sapien
gccctcaaagccctagaactctaag

SEQ ID NO: 3500362 - DNA, 25 bp, Homo sapien
agtcccctgcttttggctgtcccag

SEQ ID NO: 3500363 - DNA, 25 bp, Homo sapien
ctgaggagtgctacactggaatgca

SEQ ID NO: 3500364 - DNA, 25 bp, Homo sapien
tttgccggctgtggctcccaagcat

SEQ ID NO: 3500365 - DNA, 25 bp, Homo sapien
gagcaagctctattctaatcctttg

SEQ ID NO: 3500366 - DNA, 25 bp, Homo sapien
ctttacatgtttagatactagtccc

SEQ ID NO: 3500367 - DNA, 25 bp, Homo sapien
gagcttatcggtcatatgtacatct

SEQ ID NO: 3500368 - DNA, 25 bp, Homo sapien
catcattaaaggtaggtggtttgtc

SEQ ID NO: 3500369 - DNA, 25 bp, Homo sapien
gctgagggctgcgagccgagtttcg

SEQ ID NO: 3500370 - DNA, 25 bp, Homo sapien
ctgctcttcgtcttcaatttcgtct

SEQ ID NO: 3500371 - DNA, 25 bp, Homo sapien
tcttctgggtaagggctgcgccggg

SEQ ID NO: 3500372 - DNA, 25 bp, Homo sapien
aggtcccgcggcagcgtgctaggcc

SEQ ID NO: 3500373 - DNA, 25 bp, Homo sapien
tgacgtcacatgtaggtggcgtgta

SEQ ID NO: 3500374 - DNA, 25 bp, Homo sapien
cttttcagggctgacgtcacatgta

SEQ ID NO: 3500375 - DNA, 25 bp, Homo sapien
tcacatgtaggtggcgtgtatgagt

SEQ ID NO: 3500376 - DNA, 25 bp, Homo sapien
gtgtatgagtggagacgggcctggg

SEQ ID NO: 3500377 - DNA, 25 bp, Homo sapien
agccactcgcccagagactcagctt

SEQ ID NO: 3500378 - DNA, 25 bp, Homo sapien
tcatttaataaagaaggaacatcag

SEQ ID NO: 3500379 - DNA, 25 bp, Homo sapien
cacgtcgccttcaactgtaatcaca

SEQ ID NO: 3500380 - DNA, 25 bp, Homo sapien
taatcacaacatcctgactccgtca

SEQ ID NO: 3500381 - DNA, 25 bp, Homo sapien
gccccggttcgagagccgagtctgt

SEQ ID NO: 3500382 - DNA, 25 bp, Homo sapien
cttgtcgcagggagaatctgggccc

SEQ ID NO: 3500383 - DNA, 25 bp, Homo sapien
ggcacaaggtgccaaccatctaggg

SEQ ID NO: 3500384 - DNA, 25 bp, Homo sapien
cagaggtctagcagccaaggagaac

SEQ ID NO: 3500385 - DNA, 25 bp, Homo sapien
gccacggctgacttggaagcttgag

SEQ ID NO: 3500386 - DNA, 25 bp, Homo sapien
ttccatctgagaggcatgagctcca

SEQ ID NO: 3500387 - DNA, 25 bp, Homo sapien
gattcaggtcctgatgagccgccct

SEQ ID NO: 3500388 - DNA, 25 bp, Homo sapien
gcatgagtgacaacggaggcttcaa

SEQ ID NO: 3500389 - DNA, 25 bp, Homo sapien
tacagcctggaagatgtgaccgagg

SEQ ID NO: 3500390 - DNA, 25 bp, Homo sapien
ttccgctggaggtcggcaaaggtca

SEQ ID NO: 3500391 - DNA, 25 bp, Homo sapien
ctgaagataaagcagccactggtgc

SEQ ID NO: 3500392 - DNA, 25 bp, Homo sapien
gggtacagtgttttccaggctccac

SEQ ID NO: 3500393 - DNA, 25 bp, Homo sapien
tcttgtcaggcaacacaagtcaggg

SEQ ID NO: 3500394 - DNA, 25 bp, Homo sapien
ggtggccccacacgtggcaggccaa

SEQ ID NO: 3500395 - DNA, 25 bp, Homo sapien
ggccccacacgtggcaggccaagca

SEQ ID NO: 3500396 - DNA, 25 bp, Homo sapien
gtggccccacacgtggcaggccaag

SEQ ID NO: 3500397 - DNA, 25 bp, Homo sapien
ccccacacgtggcaggccaagcagc

SEQ ID NO: 3500398 - DNA, 25 bp, Homo sapien
agccccgggttgttcccagccatct

SEQ ID NO: 3500399 - DNA, 25 bp, Homo sapien
cagctggcttccctcgccacagtgc

SEQ ID NO: 3500400 - DNA, 25 bp, Homo sapien
cttccctcgccacagtgctgagagc

SEQ ID NO: 3500401 - DNA, 25 bp, Homo sapien
gccagccccgggttgttcccagcca

SEQ ID NO: 3500402 - DNA, 25 bp, Homo sapien
acgtcagccacggaggacacgagca

SEQ ID NO: 3500403 - DNA, 25 bp, Homo sapien
agccacggaggacacgagcaccgag

SEQ ID NO: 3500404 - DNA, 25 bp, Homo sapien
acggaggacacgagcaccgagcagt

SEQ ID NO: 3500405 - DNA, 25 bp, Homo sapien
gacacgagcaccgagcagtagttga

SEQ ID NO: 3500406 - DNA, 25 bp, Homo sapien
aacacgtccgggaagctccagggct

SEQ ID NO: 3500407 - DNA, 25 bp, Homo sapien
agggagaggagctctggggctcgct

SEQ ID NO: 3500408 - DNA, 25 bp, Homo sapien
gagaggagctctggggctcgcttgc

SEQ ID NO: 3500409 - DNA, 25 bp, Homo sapien
ggagaggagctctggggctcgcttg

SEQ ID NO: 3500410 - DNA, 25 bp, Homo sapien
tcagggagaggagctctggggctcg

SEQ ID NO: 3500411 - DNA, 25 bp, Homo sapien
ccccgaggtacttggcaatgaagtc

SEQ ID NO: 3500412 - DNA, 25 bp, Homo sapien
tccagacacttgatgcgcttttctt

SEQ ID NO: 3500413 - DNA, 25 bp, Homo sapien
ctcagacccccgaggtacttggcaa

SEQ ID NO: 3500414 - DNA, 25 bp, Homo sapien
gacccccgaggtacttggcaatgaa

SEQ ID NO: 3500415 - DNA, 25 bp, Homo sapien
tggactgtctcccaggtgacgacct

SEQ ID NO: 3500416 - DNA, 25 bp, Homo sapien
cccaggtgacgaccttctggtccag

SEQ ID NO: 3500417 - DNA, 25 bp, Homo sapien
tgtgggcggttttccgcagcacctc

SEQ ID NO: 3500418 - DNA, 25 bp, Homo sapien
ctgtgggcggttttccgcagcacct

SEQ ID NO: 3500419 - DNA, 25 bp, Homo sapien
gtgctcccgcttgtgctcggcctca

SEQ ID NO: 3500420 - DNA, 25 bp, Homo sapien
aggtgctcccgcttgtgctcggcct

SEQ ID NO: 3500421 - DNA, 25 bp, Homo sapien
ccaggtgctcccgcttgtgctcggc

SEQ ID NO: 3500422 - DNA, 25 bp, Homo sapien
tgctcccgcttgtgctcggcctcac

SEQ ID NO: 3500423 - DNA, 25 bp, Homo sapien
tcgtggtactccacaatcaggttgt

SEQ ID NO: 3500424 - DNA, 25 bp, Homo sapien
cagaacatgtctgcgttgccctgca

SEQ ID NO: 3500425 - DNA, 25 bp, Homo sapien
aggtgctcccgcttgtgctcagcct

SEQ ID NO: 3500426 - DNA, 25 bp, Homo sapien
aagacccggcggagcgtcaggctca

SEQ ID NO: 3500427 - DNA, 25 bp, Homo sapien
gcaaagccctgcagtccaggctatg

SEQ ID NO: 3500428 - DNA, 25 bp, Homo sapien
aagccctgcagtccaggctatgcca

SEQ ID NO: 3500429 - DNA, 25 bp, Homo sapien
ggctatgccaccttctatctgccct

SEQ ID NO: 3500430 - DNA, 25 bp, Homo sapien
aggcaaagccctgcagtccaggcta

SEQ ID NO: 3500431 - DNA, 25 bp, Homo sapien
aggatggtgagtcctccagcagcag

SEQ ID NO: 3500432 - DNA, 25 bp, Homo sapien
tgaacatggcgatgagcaggttcat

SEQ ID NO: 3500433 - DNA, 25 bp, Homo sapien
ggatgaccagccagttggcatagag

SEQ ID NO: 3500434 - DNA, 25 bp, Homo sapien
aggttcatgagcagcacattggtga

SEQ ID NO: 3500435 - DNA, 25 bp, Homo sapien
acactctgggagcttgcaggctgag

SEQ ID NO: 3500436 - DNA, 25 bp, Homo sapien
tccaaaatgtattgagccagcaggc

SEQ ID NO: 3500437 - DNA, 25 bp, Homo sapien
gaacattcttcaggcggcacactct

SEQ ID NO: 3500438 - DNA, 25 bp, Homo sapien
gcactgggccactcaagtcaagaac

SEQ ID NO: 3500439 - DNA, 25 bp, Homo sapien
gtggtgacaccgtaggccacgagcc

SEQ ID NO: 3500440 - DNA, 25 bp, Homo sapien
agccacacgctcagaaagaagagga

SEQ ID NO: 3500441 - DNA, 25 bp, Homo sapien
agatccactccaggcggccgtcatg

SEQ ID NO: 3500442 - DNA, 25 bp, Homo sapien
tccagtgggatctggccgaagatct

SEQ ID NO: 3500443 - DNA, 25 bp, Homo sapien
ctaccacgatgatcttggggcccag

SEQ ID NO: 3500444 - DNA, 25 bp, Homo sapien
tggcaaagatatggatcagccgcag

SEQ ID NO: 3500445 - DNA, 25 bp, Homo sapien
ggactgtgcggccagcctcaaacgc

SEQ ID NO: 3500446 - DNA, 25 bp, Homo sapien
ccgcagcgtgaacaccatgaagtcc

SEQ ID NO: 3500447 - DNA, 25 bp, Homo sapien
gcaggtgacacccacgatgaacagg

SEQ ID NO: 3500448 - DNA, 25 bp, Homo sapien
agttgtcccccacatacagtgtgaa

SEQ ID NO: 3500449 - DNA, 25 bp, Homo sapien
cccacgatgaacaggaagatggcca

SEQ ID NO: 3500450 - DNA, 25 bp, Homo sapien
tgtcacacttgttccagttgtcccc

SEQ ID NO: 3500451 - DNA, 25 bp, Homo sapien
agcaccagcgtaaagacccagaagt

SEQ ID NO: 3500452 - DNA, 25 bp, Homo sapien
tgtgagcaggaagacagcacgtggg

SEQ ID NO: 3500453 - DNA, 25 bp, Homo sapien
cagaatttccgccagcgtgtgagca

SEQ ID NO: 3500454 - DNA, 25 bp, Homo sapien
ccaggaacacagtcacgggagcgcc

SEQ ID NO: 3500455 - DNA, 25 bp, Homo sapien
tgcaggccatacagcgggctcttct

SEQ ID NO: 3500456 - DNA, 25 bp, Homo sapien
gctctgcaggccatacagcgggctc

SEQ ID NO: 3500457 - DNA, 25 bp, Homo sapien
tctgcaggccatacagcgggctctt

SEQ ID NO: 3500458 - DNA, 25 bp, Homo sapien
gcaggccatacagcgggctcttctc

SEQ ID NO: 3500459 - DNA, 25 bp, Homo sapien
tgaggttggtatagacgagggcggg

SEQ ID NO: 3500460 - DNA, 25 bp, Homo sapien
gcagaggaaggctcctagcagccgc

SEQ ID NO: 3500461 - DNA, 25 bp, Homo sapien
atgggcgtgcctgcggccatgtccc

SEQ ID NO: 3500462 - DNA, 25 bp, Homo sapien
ggaaggctcctagcagccgcaggat

SEQ ID NO: 3500463 - DNA, 25 bp, Homo sapien
ttgctgtagcactcggagaagaggt

SEQ ID NO: 3500464 - DNA, 25 bp, Homo sapien
caaagaaggccttggcgtcagcctc

SEQ ID NO: 3500465 - DNA, 25 bp, Homo sapien
ctgaacgccgtcgtgggcaaagaag

SEQ ID NO: 3500466 - DNA, 25 bp, Homo sapien
tggtcttgctccagcagcggttccg

SEQ ID NO: 3500467 - DNA, 25 bp, Homo sapien
caagggccagccgctcgtatttcgc

SEQ ID NO: 3500468 - DNA, 25 bp, Homo sapien
ctcgtatttcgcctcgcgcgtggct

SEQ ID NO: 3500469 - DNA, 25 bp, Homo sapien
cggcctccgtctccaggtgcgacat

SEQ ID NO: 3500470 - DNA, 25 bp, Homo sapien
cgtatttcgcctcgcgcgtggctcg

SEQ ID NO: 3500471 - DNA, 25 bp, Homo sapien
tctttgaggattttgcaggcggcca

SEQ ID NO: 3500472 - DNA, 25 bp, Homo sapien
tttgaggattttgcaggcggccagt

SEQ ID NO: 3500473 - DNA, 25 bp, Homo sapien
ctctttgaggattttgcaggcggcc

SEQ ID NO: 3500474 - DNA, 25 bp, Homo sapien
gaggattttgcaggcggccagtgcg

SEQ ID NO: 3500475 - DNA, 25 bp, Homo sapien
tggcccagaagtaggtggccatctc

SEQ ID NO: 3500476 - DNA, 25 bp, Homo sapien
cacaggaacaggtcccgccaggggt

SEQ ID NO: 3500477 - DNA, 25 bp, Homo sapien
ggggttctcgctcttctggttcagg

SEQ ID NO: 3500478 - DNA, 25 bp, Homo sapien
tggcggttctgcagcacggcccaca

SEQ ID NO: 3500479 - DNA, 25 bp, Homo sapien
catacgtcaggaagtcggccacgtc

SEQ ID NO: 3500480 - DNA, 25 bp, Homo sapien
gaggcgcacaaactcgggcttgttg

SEQ ID NO: 3500481 - DNA, 25 bp, Homo sapien
gccgttgtccacaaagaggcgcaca

SEQ ID NO: 3500482 - DNA, 25 bp, Homo sapien
gaagtccttgagtacgcgggagacc

SEQ ID NO: 3500483 - DNA, 25 bp, Homo sapien
gtcacgcagaccctctcgctctcct

SEQ ID NO: 3500484 - DNA, 25 bp, Homo sapien
aggtcacgcagaccctctcgctctc

SEQ ID NO: 3500485 - DNA, 25 bp, Homo sapien
gccaggtcacgcagaccctctcgct

SEQ ID NO: 3500486 - DNA, 25 bp, Homo sapien
agggccaggtcacgcagaccctctc

SEQ ID NO: 3500487 - DNA, 25 bp, Homo sapien
ttgagctcatccagatagtcctgag

SEQ ID NO: 3500488 - DNA, 25 bp, Homo sapien
tccacgtccccattgaagatctcac

SEQ ID NO: 3500489 - DNA, 25 bp, Homo sapien
cactcttggcgatgtccacgcggtc

SEQ ID NO: 3500490 - DNA, 25 bp, Homo sapien
tcatccagatagtcctgaggctcct

SEQ ID NO: 3500491 - DNA, 25 bp, Homo sapien
agtcatacacggtgagcaggtgctg

SEQ ID NO: 3500492 - DNA, 25 bp, Homo sapien
tcggagccctcctgctcgaagtcat

SEQ ID NO: 3500493 - DNA, 25 bp, Homo sapien
gccttcaggatgaccgtgtccagct

SEQ ID NO: 3500494 - DNA, 25 bp, Homo sapien
agcgccttcaggatgaccgtgtcca

SEQ ID NO: 3500495 - DNA, 25 bp, Homo sapien
agggcagcaagcacatcggcgatgc

SEQ ID NO: 3500496 - DNA, 25 bp, Homo sapien
gcgcacgatgtcctcccaagagaaa

SEQ ID NO: 3500497 - DNA, 25 bp, Homo sapien
gaaatgcttgctggggaacttctcc

SEQ ID NO: 3500498 - DNA, 25 bp, Homo sapien
ggctggttcactagggcagcaagca

SEQ ID NO: 3500499 - DNA, 25 bp, Homo sapien
ccaaggtgttgggatcaccattgac

SEQ ID NO: 3500500 - DNA, 25 bp, Homo sapien
agaggacagggatctcgatgctgcc

SEQ ID NO: 3500501 - DNA, 25 bp, Homo sapien
tcaccattgaccagcaagcagagga

SEQ ID NO: 3500502 - DNA, 25 bp, Homo sapien
acagggatctcgatgctgccagtgc

SEQ ID NO: 3500503 - DNA, 25 bp, Homo sapien
gtggacagggcacccgtgaggcctg

SEQ ID NO: 3500504 - DNA, 25 bp, Homo sapien
cagggcacccgtgaggcctgaggac

SEQ ID NO: 3500505 - DNA, 25 bp, Homo sapien
acccgtgaggcctgaggaccctccg

SEQ ID NO: 3500506 - DNA, 25 bp, Homo sapien
ctgtggacagggcacccgtgaggcc

SEQ ID NO: 3500507 - DNA, 25 bp, Homo sapien
aggttgctgtccagtgaacagaggg

SEQ ID NO: 3500508 - DNA, 25 bp, Homo sapien
gcagctccgtcagcccatcgccctt

SEQ ID NO: 3500509 - DNA, 25 bp, Homo sapien
gctgccgccgtcatcctcagggtag

SEQ ID NO: 3500510 - DNA, 25 bp, Homo sapien
gccgtcatcctcagggtagtggaca

SEQ ID NO: 3500511 - DNA, 25 bp, Homo sapien
gatcctccctgccaggccgtgcaca

SEQ ID NO: 3500512 - DNA, 25 bp, Homo sapien
gctggtcccgctgcgggatcctccc

SEQ ID NO: 3500513 - DNA, 25 bp, Homo sapien
cgcacaaggcttctgcccgagcctt

SEQ ID NO: 3500514 - DNA, 25 bp, Homo sapien
tgcgcccatgcagggagacgaggct

SEQ ID NO: 3500515 - DNA, 25 bp, Homo sapien
gcggtgcaggacgcggcccagcgag

SEQ ID NO: 3500516 - DNA, 25 bp, Homo sapien
agcgaggccatgccgacagcaacca

SEQ ID NO: 3500517 - DNA, 25 bp, Homo sapien
ctcctccagaatgcggcggtgcagg

SEQ ID NO: 3500518 - DNA, 25 bp, Homo sapien
gcccagcgaggccatgccgacagca

SEQ ID NO: 3500519 - DNA, 25 bp, Homo sapien
ggtggacgtgctggccagcgagtgg

SEQ ID NO: 3500520 - DNA, 25 bp, Homo sapien
gtgctggccagcgagtggtcgcgca

SEQ ID NO: 3500521 - DNA, 25 bp, Homo sapien
ggacgtgctggccagcgagtggtcg

SEQ ID NO: 3500522 - DNA, 25 bp, Homo sapien
agtggtcgcgcacggcctgcccgac

SEQ ID NO: 3500523 - DNA, 25 bp, Homo sapien
ggacttcatggcgaaaggctgctcc

SEQ ID NO: 3500524 - DNA, 25 bp, Homo sapien
acttcatggcgaaaggctgctcctc

SEQ ID NO: 3500525 - DNA, 25 bp, Homo sapien
gccaggacttcatggcgaaaggctg

SEQ ID NO: 3500526 - DNA, 25 bp, Homo sapien
gccccttgcgcagcacatcccgcag

SEQ ID NO: 3500527 - DNA, 25 bp, Homo sapien
tgcaaggcaggtctgcagctcaggg

SEQ ID NO: 3500528 - DNA, 25 bp, Homo sapien
ctgcaaggcaggtctgcagctcagg

SEQ ID NO: 3500529 - DNA, 25 bp, Homo sapien
ttcttcccagaccctccaaagttga

SEQ ID NO: 3500530 - DNA, 25 bp, Homo sapien
cttcttcccagaccctccaaagttg

SEQ ID NO: 3500531 - DNA, 25 bp, Homo sapien
cttgcctcgcttcttcccagaccct

SEQ ID NO: 3500532 - DNA, 25 bp, Homo sapien
ctcgcttcttcccagaccctccaaa

SEQ ID NO: 3500533 - DNA, 25 bp, Homo sapien
ctcccgccggtcttcagcatccccg

SEQ ID NO: 3500534 - DNA, 25 bp, Homo sapien
cgccggtcttcagcatccccggggc

SEQ ID NO: 3500535 - DNA, 25 bp, Homo sapien
cccgccggtcttcagcatccccggg

SEQ ID NO: 3500536 - DNA, 25 bp, Homo sapien
agctcccgccggtcttcagcatccc

SEQ ID NO: 3500537 - DNA, 25 bp, Homo sapien
ttgtgagaagacaatggaccgttct

SEQ ID NO: 3500538 - DNA, 25 bp, Homo sapien
tttgtgagaagacaatggaccgttc

SEQ ID NO: 3500539 - DNA, 25 bp, Homo sapien
gtgagaagacaatggaccgttctgt

SEQ ID NO: 3500540 - DNA, 25 bp, Homo sapien
tgtgagaagacaatggaccgttctg

SEQ ID NO: 3500541 - DNA, 25 bp, Homo sapien
tccacacggccgagcccacaggcct

SEQ ID NO: 3500542 - DNA, 25 bp, Homo sapien
ctcaggtgtgattggcaccaaggcc

SEQ ID NO: 3500543 - DNA, 25 bp, Homo sapien
ggccgtcctcaggtgtgattggcac

SEQ ID NO: 3500544 - DNA, 25 bp, Homo sapien
cgtcctcaggtgtgattggcaccaa

SEQ ID NO: 3500545 - DNA, 25 bp, Homo sapien
tgtgaggactgtccctgcatccgga

SEQ ID NO: 3500546 - DNA, 25 bp, Homo sapien
tcagcaccagggatgctctgtgagg

SEQ ID NO: 3500547 - DNA, 25 bp, Homo sapien
tccctgcatccggagtcaggacagg

SEQ ID NO: 3500548 - DNA, 25 bp, Homo sapien
caccagggatgctctgtgaggactg

SEQ ID NO: 3500549 - DNA, 25 bp, Homo sapien
ccatgcgtgctgtcatgagggacat

SEQ ID NO: 3500550 - DNA, 25 bp, Homo sapien
cgtccatgcgtgctgtcatgaggga

SEQ ID NO: 3500551 - DNA, 25 bp, Homo sapien
ctgcgtccatgcgtgctgtcatgag

SEQ ID NO: 3500552 - DNA, 25 bp, Homo sapien
tccatgcgtgctgtcatgagggaca

SEQ ID NO: 3500553 - DNA, 25 bp, Homo sapien
cagtggtgcctgtgtccaaggcctc

SEQ ID NO: 3500554 - DNA, 25 bp, Homo sapien
ccacacacagtctagccccaggtgg

SEQ ID NO: 3500555 - DNA, 25 bp, Homo sapien
agtccgggaaccagtggagccgcac

SEQ ID NO: 3500556 - DNA, 25 bp, Homo sapien
attaagttccctggcccgggcagcg

SEQ ID NO: 3500557 - DNA, 25 bp, Homo sapien
cagatctgcaaaggaaggtgtagcc

SEQ ID NO: 3500558 - DNA, 25 bp, Homo sapien
ttggcgatcagacagcagatctgca

SEQ ID NO: 3500559 - DNA, 25 bp, Homo sapien
ccccgcagagggtgcttggcgatca

SEQ ID NO: 3500560 - DNA, 25 bp, Homo sapien
tcttagtgtgcgcaagggctgcccg

SEQ ID NO: 3500561 - DNA, 25 bp, Homo sapien
gtcccaccggctggaaatgcttcgt

SEQ ID NO: 3500562 - DNA, 25 bp, Homo sapien
agggccgcgtctacaacttcctcga

SEQ ID NO: 3500563 - DNA, 25 bp, Homo sapien
ttggctccacacctccgggagggta

SEQ ID NO: 3500564 - DNA, 25 bp, Homo sapien
cacttcgccgtgtgagtatcgccac

SEQ ID NO: 3500565 - DNA, 25 bp, Homo sapien
gtttgtggacacatgcctccgggct

SEQ ID NO: 3500566 - DNA, 25 bp, Homo sapien
tgcaaatgtctagcagatgccaggt

SEQ ID NO: 3500567 - DNA, 25 bp, Homo sapien
gactctctgagatgtccaagggtgg

SEQ ID NO: 3500568 - DNA, 25 bp, Homo sapien
taggtctcggaagtttgctcagcaa

SEQ ID NO: 3500569 - DNA, 25 bp, Homo sapien
gcccgggccacagctactttgttca

SEQ ID NO: 3500570 - DNA, 25 bp, Homo sapien
tctgctgtcctcgagtctcctggtg

SEQ ID NO: 3500571 - DNA, 25 bp, Homo sapien
ccagtggtgactcttgtggcgcccg

SEQ ID NO: 3500572 - DNA, 25 bp, Homo sapien
cctggtggtgaccagtggtgactct

SEQ ID NO: 3500573 - DNA, 25 bp, Homo sapien
gtctctttgcctgatgtgccggtgt

SEQ ID NO: 3500574 - DNA, 25 bp, Homo sapien
tctttgcctgatgtgccggtgtcca

SEQ ID NO: 3500575 - DNA, 25 bp, Homo sapien
tgcagtgggcacccgagccctgtgg

SEQ ID NO: 3500576 - DNA, 25 bp, Homo sapien
ctttgcctgatgtgccggtgtccag

SEQ ID NO: 3500577 - DNA, 25 bp, Homo sapien
agtggagcacgagggtcaccctcca

SEQ ID NO: 3500578 - DNA, 25 bp, Homo sapien
caggagtgagtggagcacgagggtc

SEQ ID NO: 3500579 - DNA, 25 bp, Homo sapien
gagtgagtggagcacgagggtcacc

SEQ ID NO: 3500580 - DNA, 25 bp, Homo sapien
gaaaccaggagtgagtggagcacga

SEQ ID NO: 3500581 - DNA, 25 bp, Homo sapien
tgagtggccgttggctgggaggctg

SEQ ID NO: 3500582 - DNA, 25 bp, Homo sapien
cctgtccaaagccagacttggctcc

SEQ ID NO: 3500583 - DNA, 25 bp, Homo sapien
tcctgtccaaagccagacttggctc

SEQ ID NO: 3500584 - DNA, 25 bp, Homo sapien
cctttgctccagtgagtggccgttg

SEQ ID NO: 3500585 - DNA, 25 bp, Homo sapien
ttccctgatatggccacgcagagac

SEQ ID NO: 3500586 - DNA, 25 bp, Homo sapien
cctcaagggacccatgggacttgag

SEQ ID NO: 3500587 - DNA, 25 bp, Homo sapien
tctggactcagctggaaaggtttca

SEQ ID NO: 3500588 - DNA, 25 bp, Homo sapien
gcagagactatctctaagtgtcagt

SEQ ID NO: 3500589 - DNA, 25 bp, Homo sapien
agcccggcagcatcttgccaggtgc

SEQ ID NO: 3500590 - DNA, 25 bp, Homo sapien
tcttagcctggtcatagagcccggc

SEQ ID NO: 3500591 - DNA, 25 bp, Homo sapien
ccggggcgcatttccgtgcaggaca

SEQ ID NO: 3500592 - DNA, 25 bp, Homo sapien
tggccggggcgcatttccgtgcagg

SEQ ID NO: 3500593 - DNA, 25 bp, Homo sapien
tgtccgcttccctgcgacggtggat

SEQ ID NO: 3500594 - DNA, 25 bp, Homo sapien
tcacggcccagtggcaataggtaca

SEQ ID NO: 3500595 - DNA, 25 bp, Homo sapien
tgttatccggtgtcctcaaggtgcc

SEQ ID NO: 3500596 - DNA, 25 bp, Homo sapien
ttaactctgtgtcaggtcacggccc

SEQ ID NO: 3500597 - DNA, 25 bp, Homo sapien
catttaaggctcgtcactggtccca

SEQ ID NO: 3500598 - DNA, 25 bp, Homo sapien
taaagcccgtgtatatcctctggaa

SEQ ID NO: 3500599 - DNA, 25 bp, Homo sapien
tacctgacatctttgcgggagctct

SEQ ID NO: 3500600 - DNA, 25 bp, Homo sapien
tcaacttagccagggtgtccgactc

SEQ ID NO: 3500601 - DNA, 25 bp, Homo sapien
cacactaggacagcttgagatgcgc

SEQ ID NO: 3500602 - DNA, 25 bp, Homo sapien
tgtcttgagacttcgggccttggca

SEQ ID NO: 3500603 - DNA, 25 bp, Homo sapien
gatcctgaggatgctacacgtcgac

SEQ ID NO: 3500604 - DNA, 25 bp, Homo sapien
ttgtcccaaacacatgccggatggt

SEQ ID NO: 3500605 - DNA, 25 bp, Homo sapien
cacatcttatgcatggcagagaggg

SEQ ID NO: 3500606 - DNA, 25 bp, Homo sapien
tgggactaacccgaatgtctcagct

SEQ ID NO: 3500607 - DNA, 25 bp, Homo sapien
caggctccccaggacttagatgcca

SEQ ID NO: 3500608 - DNA, 25 bp, Homo sapien
gattgtgccaaccaatgcccagtgc

SEQ ID NO: 3500609 - DNA, 25 bp, Homo sapien
aaattgcaaaccaccgacataccca

SEQ ID NO: 3500610 - DNA, 25 bp, Homo sapien
tcatcactgatgcaggacatccctg

SEQ ID NO: 3500611 - DNA, 25 bp, Homo sapien
gacatacccatcagtggaggtctgc

SEQ ID NO: 3500612 - DNA, 25 bp, Homo sapien
taaacagccatcaaaactgtgaagc

SEQ ID NO: 3500613 - DNA, 25 bp, Homo sapien
ctattcctagtatattgagtagggc

SEQ ID NO: 3500614 - DNA, 25 bp, Homo sapien
ctatcattaattgctatagactgaa

SEQ ID NO: 3500615 - DNA, 25 bp, Homo sapien
tgtgtgtttcctcaaaatgtatatg

SEQ ID NO: 3500616 - DNA, 25 bp, Homo sapien
tattctatcattaattgctatagac

SEQ ID NO: 3500617 - DNA, 25 bp, Homo sapien
tatgtctcatatcacttttgttcct

SEQ ID NO: 3500618 - DNA, 25 bp, Homo sapien
tctagaatgtgactcttatagacca

SEQ ID NO: 3500619 - DNA, 25 bp, Homo sapien
ttattgatatggaaggatttatatc

SEQ ID NO: 3500620 - DNA, 25 bp, Homo sapien
gaatgtgactcttatagaccatata

SEQ ID NO: 3500621 - DNA, 25 bp, Homo sapien
cacagtcagccaaggataagtagat

SEQ ID NO: 3500622 - DNA, 25 bp, Homo sapien
taagtagatagcaggaaacctctct

SEQ ID NO: 3500623 - DNA, 25 bp, Homo sapien
tgtgggttgcctccaattatttgcc

SEQ ID NO: 3500624 - DNA, 25 bp, Homo sapien
tgtcgcttgcccaaccagtattgaa

SEQ ID NO: 3500625 - DNA, 25 bp, Homo sapien
gaacatgtaccctgcaattttgctg

SEQ ID NO: 3500626 - DNA, 25 bp, Homo sapien
tcttgggctgttcattcctggtata

SEQ ID NO: 3500627 - DNA, 25 bp, Homo sapien
cctggtatatagaggcacaaatgat

SEQ ID NO: 3500628 - DNA, 25 bp, Homo sapien
tagcactgggtaaagcatacagcca

SEQ ID NO: 3500629 - DNA, 25 bp, Homo sapien
atttccctaatgacgtaagatgtgg

SEQ ID NO: 3500630 - DNA, 25 bp, Homo sapien
ggtcttcagtccattttgtaatcag

SEQ ID NO: 3500631 - DNA, 25 bp, Homo sapien
tattagatacgttcacaatgctgtg

SEQ ID NO: 3500632 - DNA, 25 bp, Homo sapien
tacaagtattgtctcccttctgtgg

SEQ ID NO: 3500633 - DNA, 25 bp, Homo sapien
ttctcccgctacatgtgctgccttt

SEQ ID NO: 3500634 - DNA, 25 bp, Homo sapien
ccgctacatgtgctgccttttcatt

SEQ ID NO: 3500635 - DNA, 25 bp, Homo sapien
aatattttctcccgctacatgtgct

SEQ ID NO: 3500636 - DNA, 25 bp, Homo sapien
tatttttgcgttttattccttgtgc

SEQ ID NO: 3500637 - DNA, 25 bp, Homo sapien
tagagtattcttaagttgcccgtat

SEQ ID NO: 3500638 - DNA, 25 bp, Homo sapien
aactccctctggcatatcttgtaag

SEQ ID NO: 3500639 - DNA, 25 bp, Homo sapien
ttatcatccttccatttaagcctga

SEQ ID NO: 3500640 - DNA, 25 bp, Homo sapien
taacctttatactagagttatgtga

SEQ ID NO: 3500641 - DNA, 25 bp, Homo sapien
ctggataatgtttattgatttgcat

SEQ ID NO: 3500642 - DNA, 25 bp, Homo sapien
gctggataatgtttattgatttgca

SEQ ID NO: 3500643 - DNA, 25 bp, Homo sapien
tggataatgtttattgatttgcata

SEQ ID NO: 3500644 - DNA, 25 bp, Homo sapien
gataatgtttattgatttgcatatg

SEQ ID NO: 3500645 - DNA, 25 bp, Homo sapien
gatgtacacttaggttcctgagtcc

SEQ ID NO: 3500646 - DNA, 25 bp, Homo sapien
ttttgaccgatacataatacttatg

SEQ ID NO: 3500647 - DNA, 25 bp, Homo sapien
gctattgttacatgcatcgaatgtg

SEQ ID NO: 3500648 - DNA, 25 bp, Homo sapien
catctctatagttaggaacatttca

SEQ ID NO: 3500649 - DNA, 25 bp, Homo sapien
taccatgctgcttttaatgctatag

SEQ ID NO: 3500650 - DNA, 25 bp, Homo sapien
aatacatggatttacttccaggttc

SEQ ID NO: 3500651 - DNA, 25 bp, Homo sapien
gtgtttccccaatgtctccttcatt

SEQ ID NO: 3500652 - DNA, 25 bp, Homo sapien
cccagctccattaagtgaagagggt

SEQ ID NO: 3500653 - DNA, 25 bp, Homo sapien
tcaatttattgatcagactgaagag

SEQ ID NO: 3500654 - DNA, 25 bp, Homo sapien
agtggttgtaaaagataatgccttc

SEQ ID NO: 3500655 - DNA, 25 bp, Homo sapien
tcatggtatgagttgtaatatcccc

SEQ ID NO: 3500656 - DNA, 25 bp, Homo sapien
gcagtatcccttaagtttcagaatg

SEQ ID NO: 3500657 - DNA, 25 bp, Homo sapien
taaacagcaccagtagtgtctggga

SEQ ID NO: 3500658 - DNA, 25 bp, Homo sapien
tctatggtgttctttgggcagggca

SEQ ID NO: 3500659 - DNA, 25 bp, Homo sapien
ccttgggcccaatggtagtgtatgc

SEQ ID NO: 3500660 - DNA, 25 bp, Homo sapien
aacttgctcaggtgccaatgatgac

SEQ ID NO: 3500661 - DNA, 25 bp, Homo sapien
ggtgaggacttttcttactctgctg

SEQ ID NO: 3500662 - DNA, 25 bp, Homo sapien
ctatgtataagattatgccatctgc

SEQ ID NO: 3500663 - DNA, 25 bp, Homo sapien
gacaatatgacattctcttttccaa

SEQ ID NO: 3500664 - DNA, 25 bp, Homo sapien
ttgcctaattgttctggtgaggact

SEQ ID NO: 3500665 - DNA, 25 bp, Homo sapien
cagtcttttggaattgtctgagaag

SEQ ID NO: 3500666 - DNA, 25 bp, Homo sapien
aacccgtgcaatcctgaggttttct

SEQ ID NO: 3500667 - DNA, 25 bp, Homo sapien
tatcaagatactgcttgcctcacag

SEQ ID NO: 3500668 - DNA, 25 bp, Homo sapien
tagaattcagtagaaaacccgtgca

SEQ ID NO: 3500669 - DNA, 25 bp, Homo sapien
tattgagacccgttttgtgtcctaa

SEQ ID NO: 3500670 - DNA, 25 bp, Homo sapien
tccaaatgaattgtccaatgctgag

SEQ ID NO: 3500671 - DNA, 25 bp, Homo sapien
gaaatgttgccatccctaactatta

SEQ ID NO: 3500672 - DNA, 25 bp, Homo sapien
tgtgtgctaacgaagcagcagttca

SEQ ID NO: 3500673 - DNA, 25 bp, Homo sapien
gcaattttgtgagcttttccccacc

SEQ ID NO: 3500674 - DNA, 25 bp, Homo sapien
tagtgtctcatatgtcacgcaggca

SEQ ID NO: 3500675 - DNA, 25 bp, Homo sapien
tcagagaggcccttttagggttgaa

SEQ ID NO: 3500676 - DNA, 25 bp, Homo sapien
ctgcttgacttagccggcttttgaa

SEQ ID NO: 3500677 - DNA, 25 bp, Homo sapien
tcacataacagctcaagggagttct

SEQ ID NO: 3500678 - DNA, 25 bp, Homo sapien
tcagcaagtgcctgaagtcagaggt

SEQ ID NO: 3500679 - DNA, 25 bp, Homo sapien
tcagagttctacaagcggctgagag

SEQ ID NO: 3500680 - DNA, 25 bp, Homo sapien
tttcactagtgagtgctgccccggt

SEQ ID NO: 3500681 - DNA, 25 bp, Homo sapien
tctctctaaggatgtcatgggcaca

SEQ ID NO: 3500682 - DNA, 25 bp, Homo sapien
cctggctgtgactaagtaatgtctg

SEQ ID NO: 3500683 - DNA, 25 bp, Homo sapien
caactgcattatataacctagggta

SEQ ID NO: 3500684 - DNA, 25 bp, Homo sapien
cttcaagccttacaggtccttccct

SEQ ID NO: 3500685 - DNA, 25 bp, Homo sapien
gacacttttgaagaataccagtcag

SEQ ID NO: 3500686 - DNA, 25 bp, Homo sapien
catctctgatcggtgacgggcttct

SEQ ID NO: 3500687 - DNA, 25 bp, Homo sapien
tcccatctaggatcgatcattacat

SEQ ID NO: 3500688 - DNA, 25 bp, Homo sapien
aggtgtcattgtccctcagtttgga

SEQ ID NO: 3500689 - DNA, 25 bp, Homo sapien
attgtattacgctgatgtgggaaaa

SEQ ID NO: 3500690 - DNA, 25 bp, Homo sapien
catgcttgatagtccctgcaaaagg

SEQ ID NO: 3500691 - DNA, 25 bp, Homo sapien
catataacaaggagttaatgtctgt

SEQ ID NO: 3500692 - DNA, 25 bp, Homo sapien
gggaagctatctatgcctcatataa

SEQ ID NO: 3500693 - DNA, 25 bp, Homo sapien
tctgcacgagatgccaaggaagccc

SEQ ID NO: 3500694 - DNA, 25 bp, Homo sapien
tgagtcataggatccccgtcagagc

SEQ ID NO: 3500695 - DNA, 25 bp, Homo sapien
gggagggctgtacagggctgcatga

SEQ ID NO: 3500696 - DNA, 25 bp, Homo sapien
tgtcttctgcaaagctccagaccac

SEQ ID NO: 3500697 - DNA, 25 bp, Homo sapien
accctattgggtgccactggtcaga

SEQ ID NO: 3500698 - DNA, 25 bp, Homo sapien
gctaacaggttttgacagctggtcc

SEQ ID NO: 3500699 - DNA, 25 bp, Homo sapien
ggatatccagtctagctcagcaccc

SEQ ID NO: 3500700 - DNA, 25 bp, Homo sapien
caatgtgaggccgaggtcaaggtcc

SEQ ID NO: 3500701 - DNA, 25 bp, Homo sapien
cgtttcctcttacagtggcgggcac

SEQ ID NO: 3500702 - DNA, 25 bp, Homo sapien
ttcgtttcctcttacagtggcgggc

SEQ ID NO: 3500703 - DNA, 25 bp, Homo sapien
tgcagggtctgaaaagtcctttgtg

SEQ ID NO: 3500704 - DNA, 25 bp, Homo sapien
tttcctcttacagtggcgggcactc

SEQ ID NO: 3500705 - DNA, 25 bp, Homo sapien
tggagagcaccccttattagagggt

SEQ ID NO: 3500706 - DNA, 25 bp, Homo sapien
tatttcatgagacatagcagtcaca

SEQ ID NO: 3500707 - DNA, 25 bp, Homo sapien
gcataccagccacgtgcatgcaggg

SEQ ID NO: 3500708 - DNA, 25 bp, Homo sapien
gctcctcagatagggtggagagcac

SEQ ID NO: 3500709 - DNA, 25 bp, Homo sapien
taatgtcagggagcatgagcacttg

SEQ ID NO: 3500710 - DNA, 25 bp, Homo sapien
tctattctggactgctgatgggcct

SEQ ID NO: 3500711 - DNA, 25 bp, Homo sapien
gactgaggcttcatcgtggcagcta

SEQ ID NO: 3500712 - DNA, 25 bp, Homo sapien
tcaaggaaggcagaatccaggtcgg

SEQ ID NO: 3500713 - DNA, 25 bp, Homo sapien
tctcactttgtcacctaggcgggaa

SEQ ID NO: 3500714 - DNA, 25 bp, Homo sapien
actacagacatctgccaccatgact

SEQ ID NO: 3500715 - DNA, 25 bp, Homo sapien
ctacagacatctgccaccatgactg

SEQ ID NO: 3500716 - DNA, 25 bp, Homo sapien
cactttgtcacctaggcgggaatgc

SEQ ID NO: 3500717 - DNA, 25 bp, Homo sapien
gaactagaggtgagatacagagcag

SEQ ID NO: 3500718 - DNA, 25 bp, Homo sapien
gatatatcgcaccaactcaggaggg

SEQ ID NO: 3500719 - DNA, 25 bp, Homo sapien
aaaaggctcccactgacagctcatg

SEQ ID NO: 3500720 - DNA, 25 bp, Homo sapien
gctcttgctagcctgaggaccagga

SEQ ID NO: 3500721 - DNA, 25 bp, Homo sapien
ggttaggctggagcattgcaactca

SEQ ID NO: 3500722 - DNA, 25 bp, Homo sapien
tgtggccctggatttgaggctaagc

SEQ ID NO: 3500723 - DNA, 25 bp, Homo sapien
cataaatgactttctggcagaggag

SEQ ID NO: 3500724 - DNA, 25 bp, Homo sapien
cagaggacttaggaagagaagcgcc

SEQ ID NO: 3500725 - DNA, 25 bp, Homo sapien
ggtctcctagtcaaggcctcctgtt

SEQ ID NO: 3500726 - DNA, 25 bp, Homo sapien
caaacatgcacacagagtatcgatc

SEQ ID NO: 3500727 - DNA, 25 bp, Homo sapien
gctcacacacggaggcactacttca

SEQ ID NO: 3500728 - DNA, 25 bp, Homo sapien
tctcatgggtgagcacatttcctgg

SEQ ID NO: 3500729 - DNA, 25 bp, Homo sapien
caaatatcttgtaatgagtcatggc

SEQ ID NO: 3500730 - DNA, 25 bp, Homo sapien
tgagtcatggcaaagttacattcat

SEQ ID NO: 3500731 - DNA, 25 bp, Homo sapien
catgagtgtaaaagtgaaaaacgca

SEQ ID NO: 3500732 - DNA, 25 bp, Homo sapien
tgttccctcctcagctttaattgtt

SEQ ID NO: 3500733 - DNA, 25 bp, Homo sapien
cagtccccactgatatgtggtgcca

SEQ ID NO: 3500734 - DNA, 25 bp, Homo sapien
tcctccattttagggctggctttcc

SEQ ID NO: 3500735 - DNA, 25 bp, Homo sapien
tcctattaaacaaatggcaactacc

SEQ ID NO: 3500736 - DNA, 25 bp, Homo sapien
tctggatcctgtttaagaaccccac

SEQ ID NO: 3500737 - DNA, 25 bp, Homo sapien
gcattcctaagagcaatcccacttg

SEQ ID NO: 3500738 - DNA, 25 bp, Homo sapien
gaccccagtggaatatgtgcttgta

SEQ ID NO: 3500739 - DNA, 25 bp, Homo sapien
ccatgtagcccagtaattttcaaag

SEQ ID NO: 3500740 - DNA, 25 bp, Homo sapien
taccccaaaatcacacataggcgtt

SEQ ID NO: 3500741 - DNA, 25 bp, Homo sapien
catgagaactatagacccggaatcc

SEQ ID NO: 3500742 - DNA, 25 bp, Homo sapien
gcggactcagaaccacgatgcggat

SEQ ID NO: 3500743 - DNA, 25 bp, Homo sapien
gctttgactcaaaaccacaacatgg

SEQ ID NO: 3500744 - DNA, 25 bp, Homo sapien
ggaatccgatccttgggacgcggcc

SEQ ID NO: 3500745 - DNA, 25 bp, Homo sapien
accgtgttcaaaccctcccagagag

SEQ ID NO: 3500746 - DNA, 25 bp, Homo sapien
tctgggagaaccgcactgaggagcc

SEQ ID NO: 3500747 - DNA, 25 bp, Homo sapien
cgcccaggtccgtgctgaccgtgtt

SEQ ID NO: 3500748 - DNA, 25 bp, Homo sapien
ctgacgcctgtgatctgggacggcc

SEQ ID NO: 3500749 - DNA, 25 bp, Homo sapien
acgtccactcggcttttctcttgat

SEQ ID NO: 3500750 - DNA, 25 bp, Homo sapien
tctcttgattccaaggtatttagag

SEQ ID NO: 3500751 - DNA, 25 bp, Homo sapien
ggaagttgctgagctaattcttttg

SEQ ID NO: 3500752 - DNA, 25 bp, Homo sapien
tcttttgcatttgccagcacagaag

SEQ ID NO: 3500753 - DNA, 25 bp, Homo sapien
gccctcttggggtcagccacagaga

SEQ ID NO: 3500754 - DNA, 25 bp, Homo sapien
gagcaggtgtgatggggtggtgatg

SEQ ID NO: 3500755 - DNA, 25 bp, Homo sapien
tcaaagggccctcttggggtcagcc

SEQ ID NO: 3500756 - DNA, 25 bp, Homo sapien
caggtgtgatggggtggtgatggga

SEQ ID NO: 3500757 - DNA, 25 bp, Homo sapien
agtagggagagagctcctgaaccca

SEQ ID NO: 3500758 - DNA, 25 bp, Homo sapien
catggctgagcggaacttggcaaag

SEQ ID NO: 3500759 - DNA, 25 bp, Homo sapien
ggagctcacttaggcacgtggtcct

SEQ ID NO: 3500760 - DNA, 25 bp, Homo sapien
cttggcaaagcagtgaattgggagc

SEQ ID NO: 3500761 - DNA, 25 bp, Homo sapien
tttcctcactggtgtctgcggcccg

SEQ ID NO: 3500762 - DNA, 25 bp, Homo sapien
cagggcacccacagcccccgaggag

SEQ ID NO: 3500763 - DNA, 25 bp, Homo sapien
cttcagggcacccacagcccccgag

SEQ ID NO: 3500764 - DNA, 25 bp, Homo sapien
tcagggcacccacagcccccgagga

SEQ ID NO: 3500765 - DNA, 25 bp, Homo sapien
ttcagggcacccacagcccccgagg

SEQ ID NO: 3500766 - DNA, 25 bp, Homo sapien
ttagtcacgtcagcttggccctgga

SEQ ID NO: 3500767 - DNA, 25 bp, Homo sapien
tcgctgtaaccctgttgtggcacgg

SEQ ID NO: 3500768 - DNA, 25 bp, Homo sapien
tgctgcacagaattcgctgtaaccc

SEQ ID NO: 3500769 - DNA, 25 bp, Homo sapien
ccatcactggcgagcggctgagtgt

SEQ ID NO: 3500770 - DNA, 25 bp, Homo sapien
ctttcaactcgagggtctcaaatcc

SEQ ID NO: 3500771 - DNA, 25 bp, Homo sapien
atttcctttcaactcgagggtctca

SEQ ID NO: 3500772 - DNA, 25 bp, Homo sapien
tcagcagacttaggagggagggtcc

SEQ ID NO: 3500773 - DNA, 25 bp, Homo sapien
tcaactcgagggtctcaaatccact

SEQ ID NO: 3500774 - DNA, 25 bp, Homo sapien
cttttggaccaaattggatcactgc

SEQ ID NO: 3500775 - DNA, 25 bp, Homo sapien
gccaaatggtatgcccagccttgct

SEQ ID NO: 3500776 - DNA, 25 bp, Homo sapien
ttggaccaaattggatcactgccaa

SEQ ID NO: 3500777 - DNA, 25 bp, Homo sapien
cagcacacagccaagtccttttgga

SEQ ID NO: 3500778 - DNA, 25 bp, Homo sapien
gaatcacattgttcactgcgcttct

SEQ ID NO: 3500779 - DNA, 25 bp, Homo sapien
ctgcgcttctcaggccttctgggct

SEQ ID NO: 3500780 - DNA, 25 bp, Homo sapien
tgctcgccataaaaactctccagtc

SEQ ID NO: 3500781 - DNA, 25 bp, Homo sapien
cgctccctggaaacgttccctgaat

SEQ ID NO: 3500782 - DNA, 25 bp, Homo sapien
atgcgggccaggactctttccgagc

SEQ ID NO: 3500783 - DNA, 25 bp, Homo sapien
tcctgctcggttcctgctaactcag

SEQ ID NO: 3500784 - DNA, 25 bp, Homo sapien
tttccgagcctctcctgttgctggg

SEQ ID NO: 3500785 - DNA, 25 bp, Homo sapien
ccacagagatagagcgccaaggatg

SEQ ID NO: 3500786 - DNA, 25 bp, Homo sapien
tgtcctatgttgggggtgtcagcct

SEQ ID NO: 3500787 - DNA, 25 bp, Homo sapien
tctctgagtgtcctatgttgggggt

SEQ ID NO: 3500788 - DNA, 25 bp, Homo sapien
gctcctgtgggtccttctctgagtg

SEQ ID NO: 3500789 - DNA, 25 bp, Homo sapien
gtgggtccttctctgagtgtcctat

SEQ ID NO: 3500790 - DNA, 25 bp, Homo sapien
ccaggccccagatgcaagaaagggt

SEQ ID NO: 3500791 - DNA, 25 bp, Homo sapien
tctcagatttccagggactcgggca

SEQ ID NO: 3500792 - DNA, 25 bp, Homo sapien
gccatggacggtccctggacacctg

SEQ ID NO: 3500793 - DNA, 25 bp, Homo sapien
aggccagagccatggacggtccctg

SEQ ID NO: 3500794 - DNA, 25 bp, Homo sapien
ctcgacaagttacgaaacatccagc

SEQ ID NO: 3500795 - DNA, 25 bp, Homo sapien
aacatccagcagcatccacgactaa

SEQ ID NO: 3500796 - DNA, 25 bp, Homo sapien
cctgtttgtcctaccgtggaggtcg

SEQ ID NO: 3500797 - DNA, 25 bp, Homo sapien
ccagggagacaactcgacaagttac

SEQ ID NO: 3500798 - DNA, 25 bp, Homo sapien
tgtgggccagctgcggcccaaaagc

SEQ ID NO: 3500799 - DNA, 25 bp, Homo sapien
ggccagctgcggcccaaaagcctcc

SEQ ID NO: 3500800 - DNA, 25 bp, Homo sapien
tgggccagctgcggcccaaaagcct

SEQ ID NO: 3500801 - DNA, 25 bp, Homo sapien
ttgtgggccagctgcggcccaaaag

SEQ ID NO: 3500802 - DNA, 25 bp, Homo sapien
tggacccgtttcagctccaggggag

SEQ ID NO: 3500803 - DNA, 25 bp, Homo sapien
caggcacggattcctgacgtggaga

SEQ ID NO: 3500804 - DNA, 25 bp, Homo sapien
cacggattcctgacgtggagacagg

SEQ ID NO: 3500805 - DNA, 25 bp, Homo sapien
attcctgacgtggagacaggaggaa

SEQ ID NO: 3500806 - DNA, 25 bp, Homo sapien
gatgtccgacatgggctacattcaa

SEQ ID NO: 3500807 - DNA, 25 bp, Homo sapien
tacggctgctgtaatgaattcccac

SEQ ID NO: 3500808 - DNA, 25 bp, Homo sapien
agctggttcccactggaagctcaaa

SEQ ID NO: 3500809 - DNA, 25 bp, Homo sapien
agtgacacgtttattatctaacagc

SEQ ID NO: 3500810 - DNA, 25 bp, Homo sapien
ggttcttcagtaatggtggtttcga

SEQ ID NO: 3500811 - DNA, 25 bp, Homo sapien
gacagacgctggagccgttttggtg

SEQ ID NO: 3500812 - DNA, 25 bp, Homo sapien
tcagtaatggtggtttcgaagggca

SEQ ID NO: 3500813 - DNA, 25 bp, Homo sapien
gcggattatggtatgaactgctgca

SEQ ID NO: 3500814 - DNA, 25 bp, Homo sapien
ttgctcatagaaaaggaaggccctt

SEQ ID NO: 3500815 - DNA, 25 bp, Homo sapien
gagtccccttcgctgcttgaggcaa

SEQ ID NO: 3500816 - DNA, 25 bp, Homo sapien
gcaccccactgttgcatggagagaa

SEQ ID NO: 3500817 - DNA, 25 bp, Homo sapien
ggtgcagcttcataaagccaagggt

SEQ ID NO: 3500818 - DNA, 25 bp, Homo sapien
cgcatctgcagctggtatgcggctg

SEQ ID NO: 3500819 - DNA, 25 bp, Homo sapien
tgcgcatctgcagctggtatgcggc

SEQ ID NO: 3500820 - DNA, 25 bp, Homo sapien
ctgcgcatctgcagctggtatgcgg

SEQ ID NO: 3500821 - DNA, 25 bp, Homo sapien
catctgcagctggtatgcggctgcc

SEQ ID NO: 3500822 - DNA, 25 bp, Homo sapien
accctggtacaggtggagtccaggg

SEQ ID NO: 3500823 - DNA, 25 bp, Homo sapien
gggaccctggtacaggtggagtcca

SEQ ID NO: 3500824 - DNA, 25 bp, Homo sapien
tacaggtggagtccaggggtctgca

SEQ ID NO: 3500825 - DNA, 25 bp, Homo sapien
gtacaggtggagtccaggggtctgc

SEQ ID NO: 3500826 - DNA, 25 bp, Homo sapien
tccttgcccagctggtattggccaa

SEQ ID NO: 3500827 - DNA, 25 bp, Homo sapien
agtgtcctaagggaggccagcccct

SEQ ID NO: 3500828 - DNA, 25 bp, Homo sapien
gccagcccctatgggtcgggacaga

SEQ ID NO: 3500829 - DNA, 25 bp, Homo sapien
tattggccaagttgaccgtgtccag

SEQ ID NO: 3500830 - DNA, 25 bp, Homo sapien
tgtgcaggcagcctcagacctgtag

SEQ ID NO: 3500831 - DNA, 25 bp, Homo sapien
tcagcagaaacggacgccagcgttt

SEQ ID NO: 3500832 - DNA, 25 bp, Homo sapien
cagtgactggttttgccgggctccg

SEQ ID NO: 3500833 - DNA, 25 bp, Homo sapien
gcaatttcttgggagctgatcatcc

SEQ ID NO: 3500834 - DNA, 25 bp, Homo sapien
ccttttccatataacgtaacatatt

SEQ ID NO: 3500835 - DNA, 25 bp, Homo sapien
catgaccttaattacagatacaaag

SEQ ID NO: 3500836 - DNA, 25 bp, Homo sapien
taaagaattggtgtatgtataacta

SEQ ID NO: 3500837 - DNA, 25 bp, Homo sapien
tattcataggttctaggacatcttt

SEQ ID NO: 3500838 - DNA, 25 bp, Homo sapien
agtgtgtgtcggtgcaggcaggaca

SEQ ID NO: 3500839 - DNA, 25 bp, Homo sapien
tgaagggctggttgcatcagaaagt

SEQ ID NO: 3500840 - DNA, 25 bp, Homo sapien
gctgctcttgagtgacagggccgta

SEQ ID NO: 3500841 - DNA, 25 bp, Homo sapien
tccctggcgtagcttcgcaactgga

SEQ ID NO: 3500842 - DNA, 25 bp, Homo sapien
aactggaggccttcgcctcgggctg

SEQ ID NO: 3500843 - DNA, 25 bp, Homo sapien
tgaactggaggccttcgcctcgggc

SEQ ID NO: 3500844 - DNA, 25 bp, Homo sapien
gaactggaggccttcgcctcgggct

SEQ ID NO: 3500845 - DNA, 25 bp, Homo sapien
caggatttacgaggactcggcccag

SEQ ID NO: 3500846 - DNA, 25 bp, Homo sapien
ccaggatttacgaggactcggccca

SEQ ID NO: 3500847 - DNA, 25 bp, Homo sapien
ggatttacgaggactcggcccagag

SEQ ID NO: 3500848 - DNA, 25 bp, Homo sapien
gatttacgaggactcggcccagagc

SEQ ID NO: 3500849 - DNA, 25 bp, Homo sapien
tcttgtatgtcttgaaggttctttg

SEQ ID NO: 3500850 - DNA, 25 bp, Homo sapien
tgcagcagggccctttacagtgtag

SEQ ID NO: 3500851 - DNA, 25 bp, Homo sapien
cgccttcttgtatgtcttgaaggtt

SEQ ID NO: 3500852 - DNA, 25 bp, Homo sapien
cctttacagtgtagtctggcccctc

SEQ ID NO: 3500853 - DNA, 25 bp, Homo sapien
aaatccacgtagaagtgcacccaca

SEQ ID NO: 3500854 - DNA, 25 bp, Homo sapien
taagcagatcattgtaaaggtcttc

SEQ ID NO: 3500855 - DNA, 25 bp, Homo sapien
ggttgttcagggtcgatgatacaca

SEQ ID NO: 3500856 - DNA, 25 bp, Homo sapien
cacggctcaaacttgggttgttcag

SEQ ID NO: 3500857 - DNA, 25 bp, Homo sapien
gtgacggttcctacacaggacaggg

SEQ ID NO: 3500858 - DNA, 25 bp, Homo sapien
tattaattgtgcaagcttttcctaa

SEQ ID NO: 3500859 - DNA, 25 bp, Homo sapien
ttctgggcattacatcgcatagaaa

SEQ ID NO: 3500860 - DNA, 25 bp, Homo sapien
tcctaataaacgtggagaatcacag

SEQ ID NO: 3500861 - DNA, 25 bp, Homo sapien
tggggacacatggacccatttcaca

SEQ ID NO: 3500862 - DNA, 25 bp, Homo sapien
gacgggccaaggcatggggacacat

SEQ ID NO: 3500863 - DNA, 25 bp, Homo sapien
ggtccctcctcagtgagcagatgga

SEQ ID NO: 3500864 - DNA, 25 bp, Homo sapien
gagcctcgctgactcaggggtccct

SEQ ID NO: 3500865 - DNA, 25 bp, Homo sapien
cagatttgagactttgtggcccctg

SEQ ID NO: 3500866 - DNA, 25 bp, Homo sapien
catgactcggtctatgaggaaccag

SEQ ID NO: 3500867 - DNA, 25 bp, Homo sapien
tcataaccctcaggctgggtccggg

SEQ ID NO: 3500868 - DNA, 25 bp, Homo sapien
cctgagtccccgatttctgagaaaa

SEQ ID NO: 3500869 - DNA, 25 bp, Homo sapien
tccaagtgacccaggtatctggcag

SEQ ID NO: 3500870 - DNA, 25 bp, Homo sapien
ccaagtgacccaggtatctggcaga

SEQ ID NO: 3500871 - DNA, 25 bp, Homo sapien
caagtgacccaggtatctggcagag

SEQ ID NO: 3500872 - DNA, 25 bp, Homo sapien
cctccaagtgacccaggtatctggc

SEQ ID NO: 3500873 - DNA, 25 bp, Homo sapien
ggcgcaggacgagcgagcgcagcgg

SEQ ID NO: 3500874 - DNA, 25 bp, Homo sapien
cggagccgtgctgcgcgcagggatg

SEQ ID NO: 3500875 - DNA, 25 bp, Homo sapien
gccagcggagccgtgctgcgcgcag

SEQ ID NO: 3500876 - DNA, 25 bp, Homo sapien
gcgcaggacgagcgggcgcaggacg

SEQ ID NO: 3500877 - DNA, 25 bp, Homo sapien
tgagcaccagagatcgggcccagac

SEQ ID NO: 3500878 - DNA, 25 bp, Homo sapien
gcatttttcggcctctttatttaga

SEQ ID NO: 3500879 - DNA, 25 bp, Homo sapien
gcagtggtacagacggctcaggaac

SEQ ID NO: 3500880 - DNA, 25 bp, Homo sapien
cccagagtccgcgatgaaaataaag

SEQ ID NO: 3500881 - DNA, 25 bp, Homo sapien
cgaagagactgcaagctagatgggc

SEQ ID NO: 3500882 - DNA, 25 bp, Homo sapien
taaccaataaccgagctagtgcgtg

SEQ ID NO: 3500883 - DNA, 25 bp, Homo sapien
ccagtgtaccttctcgtgcagaata

SEQ ID NO: 3500884 - DNA, 25 bp, Homo sapien
aagacgttattaatacattgcacag

SEQ ID NO: 3500885 - DNA, 25 bp, Homo sapien
aaagctttacaccttgggaccagtg

SEQ ID NO: 3500886 - DNA, 25 bp, Homo sapien
gttgctgctacatgaacggtcccag

SEQ ID NO: 3500887 - DNA, 25 bp, Homo sapien
tcttgcgcggggtctgctccaccga

SEQ ID NO: 3500888 - DNA, 25 bp, Homo sapien
caggcgctgatctcttgcgcttggc

SEQ ID NO: 3500889 - DNA, 25 bp, Homo sapien
gggacatcgcccgacgacttctcag

SEQ ID NO: 3500890 - DNA, 25 bp, Homo sapien
caggggcggcgcttggagagggaca

SEQ ID NO: 3500891 - DNA, 25 bp, Homo sapien
cggagatcagaggcccggacagctt

SEQ ID NO: 3500892 - DNA, 25 bp, Homo sapien
ggacagcttcttgatcgccgcgccg

SEQ ID NO: 3500893 - DNA, 25 bp, Homo sapien
ggacgtcccgaaatccccgagtgca

SEQ ID NO: 3500894 - DNA, 25 bp, Homo sapien
gatcgccgcgccgttggcgctggcg

SEQ ID NO: 3500895 - DNA, 25 bp, Homo sapien
ctggccgcgctgcccctggttcgcg

SEQ ID NO: 3500896 - DNA, 25 bp, Homo sapien
gtcagcgagaggctcctggccgcgc

SEQ ID NO: 3500897 - DNA, 25 bp, Homo sapien
tggccgcgctgcccctggttcgcgc

SEQ ID NO: 3500898 - DNA, 25 bp, Homo sapien
ctggtcagcgagaggctcctggccg

SEQ ID NO: 3500899 - DNA, 25 bp, Homo sapien
ggccgcgactggagccggggccgga

SEQ ID NO: 3500900 - DNA, 25 bp, Homo sapien
ggctggagccaggaccgggactggg

SEQ ID NO: 3500901 - DNA, 25 bp, Homo sapien
gaccggagccgcgaccggagccgga

SEQ ID NO: 3500902 - DNA, 25 bp, Homo sapien
ccaggaccgcgaccgcgaccggagc

SEQ ID NO: 3500903 - DNA, 25 bp, Homo sapien
cctcgaggccgtcgagggactcagc

SEQ ID NO: 3500904 - DNA, 25 bp, Homo sapien
ggcgcctcctcgaggccgtcgaggg

SEQ ID NO: 3500905 - DNA, 25 bp, Homo sapien
gcctcctcgaggccgtcgagggact

SEQ ID NO: 3500906 - DNA, 25 bp, Homo sapien
ccggcgcctcctcgaggccgtcgag

SEQ ID NO: 3500907 - DNA, 25 bp, Homo sapien
ccgcgaccgcgacgggccgcggcgc

SEQ ID NO: 3500908 - DNA, 25 bp, Homo sapien
accgtctcgcggtagaacgcgggca

SEQ ID NO: 3500909 - DNA, 25 bp, Homo sapien
tgcgcactagtactgggaaggtccc

SEQ ID NO: 3500910 - DNA, 25 bp, Homo sapien
tggaagtcgtaatcccagcggttct

SEQ ID NO: 3500911 - DNA, 25 bp, Homo sapien
agcggttctggtcctcggcgttcag

SEQ ID NO: 3500912 - DNA, 25 bp, Homo sapien
caaacgcgggcagcgagagaggaga

SEQ ID NO: 3500913 - DNA, 25 bp, Homo sapien
gcggaggccgggcgcaagggagacc

SEQ ID NO: 3500914 - DNA, 25 bp, Homo sapien
ctgcgtgtgcgagggacgcggcggc

SEQ ID NO: 3500915 - DNA, 25 bp, Homo sapien
cccgcgccgcccgactctgcgtgtg

SEQ ID NO: 3500916 - DNA, 25 bp, Homo sapien
atgcctgctggctagctcgctcgct

SEQ ID NO: 3500917 - DNA, 25 bp, Homo sapien
ctggctgtccggtggtggactcttc

SEQ ID NO: 3500918 - DNA, 25 bp, Homo sapien
ttcgcctgtctcgtccggacggcag

SEQ ID NO: 3500919 - DNA, 25 bp, Homo sapien
tggtggactcttctgcgtcgggttc

SEQ ID NO: 3500920 - DNA, 25 bp, Homo sapien
ccactcagagggtgtagctgccatc

SEQ ID NO: 3500921 - DNA, 25 bp, Homo sapien
aaatttcccgcaacaagcccagatg

SEQ ID NO: 3500922 - DNA, 25 bp, Homo sapien
caagcagggctcatatcaactggcc

SEQ ID NO: 3500923 - DNA, 25 bp, Homo sapien
tacagagtcaaacccagtgctgtgg

SEQ ID NO: 3500924 - DNA, 25 bp, Homo sapien
aggtgcaacaatcaagctctatttt

SEQ ID NO: 3500925 - DNA, 25 bp, Homo sapien
gtgcaacaatcaagctctatttttg

SEQ ID NO: 3500926 - DNA, 25 bp, Homo sapien
ggtgcaacaatcaagctctattttt

SEQ ID NO: 3500927 - DNA, 25 bp, Homo sapien
tgctgtgctagtgccctaaatcctg

SEQ ID NO: 3500928 - DNA, 25 bp, Homo sapien
tagaggaaaggcactacatccacca

SEQ ID NO: 3500929 - DNA, 25 bp, Homo sapien
tatcttgcacacaagtgggcggcgg

SEQ ID NO: 3500930 - DNA, 25 bp, Homo sapien
tcctcggagcacacagaaagacatt

SEQ ID NO: 3500931 - DNA, 25 bp, Homo sapien
gtcaatgtcgtaggcccgctttaca

SEQ ID NO: 3500932 - DNA, 25 bp, Homo sapien
cactggtccatgagtagcagaacga

SEQ ID NO: 3500933 - DNA, 25 bp, Homo sapien
gcccgctttacagccgaggagacag

SEQ ID NO: 3500934 - DNA, 25 bp, Homo sapien
caacctcatgggtggtcggtcaatg

SEQ ID NO: 3500935 - DNA, 25 bp, Homo sapien
ccatcaggaatgtgtgccgcaggtg

SEQ ID NO: 3500936 - DNA, 25 bp, Homo sapien
tgccttgtcggcatgttcatggccc

SEQ ID NO: 3500937 - DNA, 25 bp, Homo sapien
ctgtacagctgccttgtcggcatgt

SEQ ID NO: 3500938 - DNA, 25 bp, Homo sapien
tcccgggtgtggcagctgtacagct

SEQ ID NO: 3500939 - DNA, 25 bp, Homo sapien
cgattacagggactgccttgtgctg

SEQ ID NO: 3500940 - DNA, 25 bp, Homo sapien
ctccctgcggtgacgtggccacatg

SEQ ID NO: 3500941 - DNA, 25 bp, Homo sapien
ccccaggaaccgatgggcggagctg

SEQ ID NO: 3500942 - DNA, 25 bp, Homo sapien
catgcggcacaagctccgattacag

SEQ ID NO: 3500943 - DNA, 25 bp, Homo sapien
ctttcttcttcacccagcctaaagg

SEQ ID NO: 3500944 - DNA, 25 bp, Homo sapien
tctctgaagcggtgaatgccctggg

SEQ ID NO: 3500945 - DNA, 25 bp, Homo sapien
tctcatccggcagaactgtcgcctt

SEQ ID NO: 3500946 - DNA, 25 bp, Homo sapien
tgagaagccacctctcccaaacctg

SEQ ID NO: 3500947 - DNA, 25 bp, Homo sapien
tcaaccagttccctggctacctgag

SEQ ID NO: 3500948 - DNA, 25 bp, Homo sapien
aaaaaggtctctccgatttcctctg

SEQ ID NO: 3500949 - DNA, 25 bp, Homo sapien
aaccagttccctggctacctgaggc

SEQ ID NO: 3500950 - DNA, 25 bp, Homo sapien
ctgctcaaccagttccctggctacc

SEQ ID NO: 3500951 - DNA, 25 bp, Homo sapien
caaaatccagttcccaccagttgga

SEQ ID NO: 3500952 - DNA, 25 bp, Homo sapien
gatgtgcagtcagctgttaatgtgg

SEQ ID NO: 3500953 - DNA, 25 bp, Homo sapien
cagctgttaatgtggcaaaatttgg

SEQ ID NO: 3500954 - DNA, 25 bp, Homo sapien
ggaagtcctctgcagccgcaaaatc

SEQ ID NO: 3500955 - DNA, 25 bp, Homo sapien
tgcctcttcatgcagttctccatcg

SEQ ID NO: 3500956 - DNA, 25 bp, Homo sapien
ggactcatgccacgcttaagctgag

SEQ ID NO: 3500957 - DNA, 25 bp, Homo sapien
agccagggctgaaccgctgttcctc

SEQ ID NO: 3500958 - DNA, 25 bp, Homo sapien
tcgtgccagtgagtaacacacccca

SEQ ID NO: 3500959 - DNA, 25 bp, Homo sapien
agtctgtgggtcaggacgcccgcgg

SEQ ID NO: 3500960 - DNA, 25 bp, Homo sapien
ccctggtctccgcgtacgggtgagt

SEQ ID NO: 3500961 - DNA, 25 bp, Homo sapien
ttcggcgtcggagtcatcctcggct

SEQ ID NO: 3500962 - DNA, 25 bp, Homo sapien
cccagatggtcatcacggacctgtc

SEQ ID NO: 3500963 - DNA, 25 bp, Homo sapien
tgtgagctaggtgtcccacaaagcc

SEQ ID NO: 3500964 - DNA, 25 bp, Homo sapien
gatgacttctctcagccctgggctg

SEQ ID NO: 3500965 - DNA, 25 bp, Homo sapien
ggcttgtcaccgtagaacacacaga

SEQ ID NO: 3500966 - DNA, 25 bp, Homo sapien
tgggctggacatccagggacgctct

SEQ ID NO: 3500967 - DNA, 25 bp, Homo sapien
gtctcactgagccacagccggatgg

SEQ ID NO: 3500968 - DNA, 25 bp, Homo sapien
ctggatgagggtgtcctgcccgccc

SEQ ID NO: 3500969 - DNA, 25 bp, Homo sapien
ttattcattcaaagccggttcccag

SEQ ID NO: 3500970 - DNA, 25 bp, Homo sapien
accagccccgcaggactggatgagg

SEQ ID NO: 3500971 - DNA, 25 bp, Homo sapien
gtgactacaaagaaccagcgaaata

SEQ ID NO: 3500972 - DNA, 25 bp, Homo sapien
ccaataacttaaggcgcccgtgcaa

SEQ ID NO: 3500973 - DNA, 25 bp, Homo sapien
gatccgcgcgcacgggaagttcttc

SEQ ID NO: 3500974 - DNA, 25 bp, Homo sapien
tcggtccgactcgtccagcgtatgg

SEQ ID NO: 3500975 - DNA, 25 bp, Homo sapien
gcggcgggtgcggtgcgttcctggc

SEQ ID NO: 3500976 - DNA, 25 bp, Homo sapien
cctggcggctgcgaaagtcctgcag

SEQ ID NO: 3500977 - DNA, 25 bp, Homo sapien
ctggaaatcgatgagcgccagcgcg

SEQ ID NO: 3500978 - DNA, 25 bp, Homo sapien
tccgagggctcggagggtgcggcgg

SEQ ID NO: 3500979 - DNA, 25 bp, Homo sapien
tctcgcccgcgcagcggaagtcgat

SEQ ID NO: 3500980 - DNA, 25 bp, Homo sapien
tccacgcagtccaccttgaggatgg

SEQ ID NO: 3500981 - DNA, 25 bp, Homo sapien
ggaacaggctcaggcggtcggaggt

SEQ ID NO: 3500982 - DNA, 25 bp, Homo sapien
cgcgcttcttcttccatagctggaa

SEQ ID NO: 3500983 - DNA, 25 bp, Homo sapien
gtagcacctcgtcgggggatttcat

SEQ ID NO: 3500984 - DNA, 25 bp, Homo sapien
ctcgcgtagcacctcgtcgggggat

SEQ ID NO: 3500985 - DNA, 25 bp, Homo sapien
gcgtagcacctcgtcgggggatttc

SEQ ID NO: 3500986 - DNA, 25 bp, Homo sapien
tcgcgtagcacctcgtcgggggatt

SEQ ID NO: 3500987 - DNA, 25 bp, Homo sapien
ctgggagcggcaatgcgggcggtga

SEQ ID NO: 3500988 - DNA, 25 bp, Homo sapien
agcggcaatgcgggcggtgacggcg

SEQ ID NO: 3500989 - DNA, 25 bp, Homo sapien
ggagcggcaatgcgggcggtgacgg

SEQ ID NO: 3500990 - DNA, 25 bp, Homo sapien
cggcaatgcgggcggtgacggcgcc

SEQ ID NO: 3500991 - DNA, 25 bp, Homo sapien
ccgcaccgtcgcgtccgcgctctgg

SEQ ID NO: 3500992 - DNA, 25 bp, Homo sapien
gcgctctggtcggtccccggccgtc

SEQ ID NO: 3500993 - DNA, 25 bp, Homo sapien
gtcgcgtccgcgctctggtcggtcc

SEQ ID NO: 3500994 - DNA, 25 bp, Homo sapien
gtccgcgctctggtcggtccccggc

SEQ ID NO: 3500995 - DNA, 25 bp, Homo sapien
tatgctcggtgtggtgtgaatatgc

SEQ ID NO: 3500996 - DNA, 25 bp, Homo sapien
aatacgcttagtgtgaatatgctcg

SEQ ID NO: 3500997 - DNA, 25 bp, Homo sapien
tatgctcggtgtgaatatgctcggt

SEQ ID NO: 3500998 - DNA, 25 bp, Homo sapien
tatgcttggtgtgaatatgctcggt

SEQ ID NO: 3500999 - DNA, 25 bp, Homo sapien
tatgcttgtaatatgctcggtgtaa

SEQ ID NO: 3501000 - DNA, 25 bp, Homo sapien
atatgcttgtaatatgctcggtgta

SEQ ID NO: 3501001 - DNA, 25 bp, Homo sapien
ttgtaatatgctcggtgtaaatatg

SEQ ID NO: 3501002 - DNA, 25 bp, Homo sapien
tgcttgtaatatgctcggtgtaaat

SEQ ID NO: 3501003 - DNA, 25 bp, Homo sapien
gatggcagctgacagaagcgtctga

SEQ ID NO: 3501004 - DNA, 25 bp, Homo sapien
gctgcttgccgtgcgggttctttcc

SEQ ID NO: 3501005 - DNA, 25 bp, Homo sapien
gagcacccgtgtgatggcagctgac

SEQ ID NO: 3501006 - DNA, 25 bp, Homo sapien
cggacagaaacagggccctccaggt

SEQ ID NO: 3501007 - DNA, 25 bp, Homo sapien
cacaggcctggtcagtgcggacacg

SEQ ID NO: 3501008 - DNA, 25 bp, Homo sapien
ccatccccggctgccggagagcgcc

SEQ ID NO: 3501009 - DNA, 25 bp, Homo sapien
caagcggtcacaccaaacccaggac

SEQ ID NO: 3501010 - DNA, 25 bp, Homo sapien
gagagcgccgtcacccacttgaaaa

SEQ ID NO: 3501011 - DNA, 25 bp, Homo sapien
tgcgtcatgaggacgggctcgcatc

SEQ ID NO: 3501012 - DNA, 25 bp, Homo sapien
tcagaaacgttaaggacgagccaca

SEQ ID NO: 3501013 - DNA, 25 bp, Homo sapien
cagggagcggcgtttcttccgcaca

SEQ ID NO: 3501014 - DNA, 25 bp, Homo sapien
tacgctccactgaaacgcaggactt

SEQ ID NO: 3501015 - DNA, 25 bp, Homo sapien
ctgggctggtgtgtcacaaccctga

SEQ ID NO: 3501016 - DNA, 25 bp, Homo sapien
gctggtgtgtcacaaccctgaccca

SEQ ID NO: 3501017 - DNA, 25 bp, Homo sapien
ggtgtgtcacaaccctgacccaccc

SEQ ID NO: 3501018 - DNA, 25 bp, Homo sapien
gggctggtgtgtcacaaccctgacc

SEQ ID NO: 3501019 - DNA, 25 bp, Homo sapien
gagaacagggccctactctacacag

SEQ ID NO: 3501020 - DNA, 25 bp, Homo sapien
tgcacactcagcagattcagcggct

SEQ ID NO: 3501021 - DNA, 25 bp, Homo sapien
gaagcaacatcctaaggagaacagg

SEQ ID NO: 3501022 - DNA, 25 bp, Homo sapien
ttctgagatgatcggcatacagcag

SEQ ID NO: 3501023 - DNA, 25 bp, Homo sapien
cagagggtgctggacgaaacctcct

SEQ ID NO: 3501024 - DNA, 25 bp, Homo sapien
ttccagatcctgggaaccacatcac

SEQ ID NO: 3501025 - DNA, 25 bp, Homo sapien
aacgagttagatggagtaagctctg

SEQ ID NO: 3501026 - DNA, 25 bp, Homo sapien
taagctctgtccacgggattgtgct

SEQ ID NO: 3501027 - DNA, 25 bp, Homo sapien
gctgcttgcattccgccggctggct

SEQ ID NO: 3501028 - DNA, 25 bp, Homo sapien
gcattccgccggctggctgggttcc

SEQ ID NO: 3501029 - DNA, 25 bp, Homo sapien
tactgctgcttgcattccgccggct

SEQ ID NO: 3501030 - DNA, 25 bp, Homo sapien
ctgctgcttgcattccgccggctgg

SEQ ID NO: 3501031 - DNA, 25 bp, Homo sapien
gacaaggcttgtagagagcaaagcc

SEQ ID NO: 3501032 - DNA, 25 bp, Homo sapien
acaaggcttgtagagagcaaagcca

SEQ ID NO: 3501033 - DNA, 25 bp, Homo sapien
agacaaggcttgtagagagcaaagc

SEQ ID NO: 3501034 - DNA, 25 bp, Homo sapien
ctgcccatgaaagggctgggaagca

SEQ ID NO: 3501035 - DNA, 25 bp, Homo sapien
tcaagcattcaaattcatggcatgt

SEQ ID NO: 3501036 - DNA, 25 bp, Homo sapien
cattcaaattcatggcatgttcagc

SEQ ID NO: 3501037 - DNA, 25 bp, Homo sapien
ccaggggcctgcccatgaaagggct

SEQ ID NO: 3501038 - DNA, 25 bp, Homo sapien
cagtaacggcatccgggacacaaaa

SEQ ID NO: 3501039 - DNA, 25 bp, Homo sapien
ggcaatgctatccttccagtaacgg

SEQ ID NO: 3501040 - DNA, 25 bp, Homo sapien
tggcctgtactgcaccaacaaatga

SEQ ID NO: 3501041 - DNA, 25 bp, Homo sapien
ctctttgtactaccagggagcgccc

SEQ ID NO: 3501042 - DNA, 25 bp, Homo sapien
aaatcgttccaagagctgcatccgc

SEQ ID NO: 3501043 - DNA, 25 bp, Homo sapien
tggctaagttcttcagacatgcggg

SEQ ID NO: 3501044 - DNA, 25 bp, Homo sapien
gcatccgccctatgtaccatcagtt

SEQ ID NO: 3501045 - DNA, 25 bp, Homo sapien
ggtggcgctaagacctcaaggacgt

SEQ ID NO: 3501046 - DNA, 25 bp, Homo sapien
tattcaaagtcaaaacaatgcattg

SEQ ID NO: 3501047 - DNA, 25 bp, Homo sapien
cagaagtttggaagttaggtatgaa

SEQ ID NO: 3501048 - DNA, 25 bp, Homo sapien
gcaactccctctttattcaaagtca

SEQ ID NO: 3501049 - DNA, 25 bp, Homo sapien
caatgcattgtataaagtatagatc

SEQ ID NO: 3501050 - DNA, 25 bp, Homo sapien
ctagaaacgtatgaatgattaacag

SEQ ID NO: 3501051 - DNA, 25 bp, Homo sapien
tagaaacgtatgaatgattaacaga

SEQ ID NO: 3501052 - DNA, 25 bp, Homo sapien
taaaagtgtccattcagcgcccaca

SEQ ID NO: 3501053 - DNA, 25 bp, Homo sapien
tatacaggaggaaacggccacaatt

SEQ ID NO: 3501054 - DNA, 25 bp, Homo sapien
cacactgtgatgcacgcaaggcaga

SEQ ID NO: 3501055 - DNA, 25 bp, Homo sapien
gaacttcattcacaccattagccgg

SEQ ID NO: 3501056 - DNA, 25 bp, Homo sapien
tggggttaatttccgcatcatcctc

SEQ ID NO: 3501057 - DNA, 25 bp, Homo sapien
ttaatttccgcatcatcctcgtctt

SEQ ID NO: 3501058 - DNA, 25 bp, Homo sapien
ggttaatttccgcatcatcctcgtc

SEQ ID NO: 3501059 - DNA, 25 bp, Homo sapien
cttggggttaatttccgcatcatcc

SEQ ID NO: 3501060 - DNA, 25 bp, Homo sapien
aagtggcactgcataaacctgtctc

SEQ ID NO: 3501061 - DNA, 25 bp, Homo sapien
aaagacagcgtcacaaaaaatgggt

SEQ ID NO: 3501062 - DNA, 25 bp, Homo sapien
caaaaacgatggaaactgtcacagc

SEQ ID NO: 3501063 - DNA, 25 bp, Homo sapien
aaatgggtttaacacagccctgtga

SEQ ID NO: 3501064 - DNA, 25 bp, Homo sapien
ctcctcttctccttcttcaccttct

SEQ ID NO: 3501065 - DNA, 25 bp, Homo sapien
ctcttctccttcttcaccttcttca

SEQ ID NO: 3501066 - DNA, 25 bp, Homo sapien
tcctcttctccttcttcaccttctt

SEQ ID NO: 3501067 - DNA, 25 bp, Homo sapien
cttctccttcttcaccttcttcaaa

SEQ ID NO: 3501068 - DNA, 25 bp, Homo sapien
tatttgcttagagccaacttcggtg

SEQ ID NO: 3501069 - DNA, 25 bp, Homo sapien
tacaaggctgatcgaaccagcagca

SEQ ID NO: 3501070 - DNA, 25 bp, Homo sapien
tgactcactgaccaagcctaagagg

SEQ ID NO: 3501071 - DNA, 25 bp, Homo sapien
gaataggataggaagctggtcagcc

SEQ ID NO: 3501072 - DNA, 25 bp, Homo sapien
tgtggccagacctccataaaagaga

SEQ ID NO: 3501073 - DNA, 25 bp, Homo sapien
taggcagggctcacataggaaactg

SEQ ID NO: 3501074 - DNA, 25 bp, Homo sapien
gggttgatgaaccacaggctagcat

SEQ ID NO: 3501075 - DNA, 25 bp, Homo sapien
tgtgcacccgcaagttctgactgtg

SEQ ID NO: 3501076 - DNA, 25 bp, Homo sapien
gggccactctgcaccaacagagata

SEQ ID NO: 3501077 - DNA, 25 bp, Homo sapien
tttcctaagccacaattcagggcca

SEQ ID NO: 3501078 - DNA, 25 bp, Homo sapien
cagagataagcacccaggtggaagc

SEQ ID NO: 3501079 - DNA, 25 bp, Homo sapien
acaattcagggccactctgcaccaa

SEQ ID NO: 3501080 - DNA, 25 bp, Homo sapien
catcttctatggcctccccagtgaa

SEQ ID NO: 3501081 - DNA, 25 bp, Homo sapien
aagtacagcacagcccgcgggacta

SEQ ID NO: 3501082 - DNA, 25 bp, Homo sapien
gcccgcgggactatccgctcacgga

SEQ ID NO: 3501083 - DNA, 25 bp, Homo sapien
cacagcccgcgggactatccgctca

SEQ ID NO: 3501084 - DNA, 25 bp, Homo sapien
aacttgtccaaaggtctcacccaga

SEQ ID NO: 3501085 - DNA, 25 bp, Homo sapien
gcactgcacatttgctactgaaatc

SEQ ID NO: 3501086 - DNA, 25 bp, Homo sapien
gggacagccactagacactcaaagc

SEQ ID NO: 3501087 - DNA, 25 bp, Homo sapien
cagagtaggcggtatcagtctcaca

SEQ ID NO: 3501088 - DNA, 25 bp, Homo sapien
ccatgttcggctggctaatttattt

SEQ ID NO: 3501089 - DNA, 25 bp, Homo sapien
acaagtagacattcactcaggagag

SEQ ID NO: 3501090 - DNA, 25 bp, Homo sapien
actggcatacccagtccacacacag

SEQ ID NO: 3501091 - DNA, 25 bp, Homo sapien
tttttaacaagtagacaagtagaca

SEQ ID NO: 3501092 - DNA, 25 bp, Homo sapien
tatttaaattacagtgacaactccc

SEQ ID NO: 3501093 - DNA, 25 bp, Homo sapien
gaggaagctgtgctggtagataaaa

SEQ ID NO: 3501094 - DNA, 25 bp, Homo sapien
agctgtgctggtagataaaatgtaa

SEQ ID NO: 3501095 - DNA, 25 bp, Homo sapien
aagctgtgctggtagataaaatgta

SEQ ID NO: 3501096 - DNA, 25 bp, Homo sapien
caaagccttgcatctcctcacagac

SEQ ID NO: 3501097 - DNA, 25 bp, Homo sapien
cccaaagccttgcatctcctcacag

SEQ ID NO: 3501098 - DNA, 25 bp, Homo sapien
aagccttgcatctcctcacagacat

SEQ ID NO: 3501099 - DNA, 25 bp, Homo sapien
tccccaaagccttgcatctcctcac

SEQ ID NO: 3501100 - DNA, 25 bp, Homo sapien
aaataagggtgctaagctcagagac

SEQ ID NO: 3501101 - DNA, 25 bp, Homo sapien
tcattccccaaaccgtatgtatttg

SEQ ID NO: 3501102 - DNA, 25 bp, Homo sapien
caaagtctaattgcagaaaataggc

SEQ ID NO: 3501103 - DNA, 25 bp, Homo sapien
tgcatcttctaggttcaaagtctaa

SEQ ID NO: 3501104 - DNA, 25 bp, Homo sapien
gattgaagaagttgaaaaaggactc

SEQ ID NO: 3501105 - DNA, 25 bp, Homo sapien
agaagttgaaaaaggactcattggg

SEQ ID NO: 3501106 - DNA, 25 bp, Homo sapien
tgaagaagttgaaaaaggactcatt

SEQ ID NO: 3501107 - DNA, 25 bp, Homo sapien
ctttcaatggattgaagaagttgaa

SEQ ID NO: 3501108 - DNA, 25 bp, Homo sapien
ttcttgatggttttgacagtaacat

SEQ ID NO: 3501109 - DNA, 25 bp, Homo sapien
ggttcaaagtggaactctaacacaa

SEQ ID NO: 3501110 - DNA, 25 bp, Homo sapien
actgagttggtaaagtagtcgttgg

SEQ ID NO: 3501111 - DNA, 25 bp, Homo sapien
caggactgagttggtaaagtagtcg

SEQ ID NO: 3501112 - DNA, 25 bp, Homo sapien
tcgttgggttcaaagtggaactcta

SEQ ID NO: 3501113 - DNA, 25 bp, Homo sapien
tgggaaagctcaacagatagggcca

SEQ ID NO: 3501114 - DNA, 25 bp, Homo sapien
caacgatggactggcgggaaatatc

SEQ ID NO: 3501115 - DNA, 25 bp, Homo sapien
ccgcaaaaaagactagcgtgaggtt

SEQ ID NO: 3501116 - DNA, 25 bp, Homo sapien
gacagattgcttggagtacacaaca

SEQ ID NO: 3501117 - DNA, 25 bp, Homo sapien
cagaactgtttaaggctgtgaccac

SEQ ID NO: 3501118 - DNA, 25 bp, Homo sapien
cataaagagggaagacaagtagcca

SEQ ID NO: 3501119 - DNA, 25 bp, Homo sapien
ggcagctacagggaatcagcatcaa

SEQ ID NO: 3501120 - DNA, 25 bp, Homo sapien
tgaaccacacaaacgaaaggccagt

SEQ ID NO: 3501121 - DNA, 25 bp, Homo sapien
cgcactacagccaggtaagccataa

SEQ ID NO: 3501122 - DNA, 25 bp, Homo sapien
aaactgttttatagccaatggctgc

SEQ ID NO: 3501123 - DNA, 25 bp, Homo sapien
aatggctgcagtaacaactattccc

SEQ ID NO: 3501124 - DNA, 25 bp, Homo sapien
tgtaatcccaactgaacgacctttg

SEQ ID NO: 3501125 - DNA, 25 bp, Homo sapien
accagtcagtcagtcatgtgtcgct

SEQ ID NO: 3501126 - DNA, 25 bp, Homo sapien
gctattgcaccggaatggaacccat

SEQ ID NO: 3501127 - DNA, 25 bp, Homo sapien
aagacctgaaactgaaagccaccag

SEQ ID NO: 3501128 - DNA, 25 bp, Homo sapien
tggaacccattagctacagccaggc

SEQ ID NO: 3501129 - DNA, 25 bp, Homo sapien
tcctgcaggtgtttcaagattggtt

SEQ ID NO: 3501130 - DNA, 25 bp, Homo sapien
gctgtccagggtcagaaaatttcac

SEQ ID NO: 3501131 - DNA, 25 bp, Homo sapien
ggtgtttcaagattggttcatcata

SEQ ID NO: 3501132 - DNA, 25 bp, Homo sapien
cataggctgtccagggtcagaaaat

SEQ ID NO: 3501133 - DNA, 25 bp, Homo sapien
cagagatggcactgggacttcaaac

SEQ ID NO: 3501134 - DNA, 25 bp, Homo sapien
gactcagagttaatccgcctttgga

SEQ ID NO: 3501135 - DNA, 25 bp, Homo sapien
aaggcacaacactggaggcatcgca

SEQ ID NO: 3501136 - DNA, 25 bp, Homo sapien
tagtggcgcatatctacagtcccag

SEQ ID NO: 3501137 - DNA, 25 bp, Homo sapien
atctattcataggctttcccacagg

SEQ ID NO: 3501138 - DNA, 25 bp, Homo sapien
tattagcaacttgttcaaaaattca

SEQ ID NO: 3501139 - DNA, 25 bp, Homo sapien
ctggaatctattcataggctttccc

SEQ ID NO: 3501140 - DNA, 25 bp, Homo sapien
tgggctctggaatctattcataggc

SEQ ID NO: 3501141 - DNA, 25 bp, Homo sapien
ctggactaattcactcagcatgtcc

SEQ ID NO: 3501142 - DNA, 25 bp, Homo sapien
tcactcagcatgtccacatttctga

SEQ ID NO: 3501143 - DNA, 25 bp, Homo sapien
gccgctgctttttctgtgacgacta

SEQ ID NO: 3501144 - DNA, 25 bp, Homo sapien
tctggctcttcagccgttgccgctg

SEQ ID NO: 3501145 - DNA, 25 bp, Homo sapien
tgtgccattccgattccgcatctgt

SEQ ID NO: 3501146 - DNA, 25 bp, Homo sapien
cgattccgcatctgttggttcaaca

SEQ ID NO: 3501147 - DNA, 25 bp, Homo sapien
tctgttggttcaacatcgccggtga

SEQ ID NO: 3501148 - DNA, 25 bp, Homo sapien
ttttcactgtgccattccgattccg

SEQ ID NO: 3501149 - DNA, 25 bp, Homo sapien
aggctggtatagcgctgcatacttt

SEQ ID NO: 3501150 - DNA, 25 bp, Homo sapien
tatgtgagcacatctcacctgaagt

SEQ ID NO: 3501151 - DNA, 25 bp, Homo sapien
ggtatagcgctgcatactttctttc

SEQ ID NO: 3501152 - DNA, 25 bp, Homo sapien
ctatgtgagcacatctcacctgaag

SEQ ID NO: 3501153 - DNA, 25 bp, Homo sapien
agtaagaaatacaacatcctcatgc

SEQ ID NO: 3501154 - DNA, 25 bp, Homo sapien
gggagtaagaaatacaacatcctca

SEQ ID NO: 3501155 - DNA, 25 bp, Homo sapien
aagggagtaagaaatacaacatcct

SEQ ID NO: 3501156 - DNA, 25 bp, Homo sapien
gagtaagaaatacaacatcctcatg

SEQ ID NO: 3501157 - DNA, 25 bp, Homo sapien
cactggtctgggaggtattagaaca

SEQ ID NO: 3501158 - DNA, 25 bp, Homo sapien
gctacctcaagctaaaggtccttag

SEQ ID NO: 3501159 - DNA, 25 bp, Homo sapien
taacaaaatggtagactcccactgc

SEQ ID NO: 3501160 - DNA, 25 bp, Homo sapien
tgacttaccctccaacaacagacag

SEQ ID NO: 3501161 - DNA, 25 bp, Homo sapien
cattgtcaagtcgctcctgtaaagc

SEQ ID NO: 3501162 - DNA, 25 bp, Homo sapien
tcaagtcgctcctgtaaagctgcca

SEQ ID NO: 3501163 - DNA, 25 bp, Homo sapien
tgtcaagtcgctcctgtaaagctgc

SEQ ID NO: 3501164 - DNA, 25 bp, Homo sapien
ttgtcaagtcgctcctgtaaagctg

SEQ ID NO: 3501165 - DNA, 25 bp, Homo sapien
cacggaatctgaaggaaccccatct

SEQ ID NO: 3501166 - DNA, 25 bp, Homo sapien
tgcatttttagcagcttccacggaa

SEQ ID NO: 3501167 - DNA, 25 bp, Homo sapien
gaatctgaaggaaccccatctgaaa

SEQ ID NO: 3501168 - DNA, 25 bp, Homo sapien
agcttccacggaatctgaaggaacc

SEQ ID NO: 3501169 - DNA, 25 bp, Homo sapien
ttaaacaacggttatctgtgggatg

SEQ ID NO: 3501170 - DNA, 25 bp, Homo sapien
aaacaacggttatctgtgggatgga

SEQ ID NO: 3501171 - DNA, 25 bp, Homo sapien
ggatggagtccactagaagggacag

SEQ ID NO: 3501172 - DNA, 25 bp, Homo sapien
atctgtgggatggagtccactagaa

SEQ ID NO: 3501173 - DNA, 25 bp, Homo sapien
gtttacacgaaaagaagctgaggct

SEQ ID NO: 3501174 - DNA, 25 bp, Homo sapien
ccaaattgaaagtcacacggctagt

SEQ ID NO: 3501175 - DNA, 25 bp, Homo sapien
ttgatatggcaatagcaggaccgct

SEQ ID NO: 3501176 - DNA, 25 bp, Homo sapien
tagcaagggacctacatgtcaggca

SEQ ID NO: 3501177 - DNA, 25 bp, Homo sapien
actccatagctagagtaactataaa

SEQ ID NO: 3501178 - DNA, 25 bp, Homo sapien
aactataaaattgggccatggccag

SEQ ID NO: 3501179 - DNA, 25 bp, Homo sapien
tctactccatagctagagtaactat

SEQ ID NO: 3501180 - DNA, 25 bp, Homo sapien
atctactccatagctagagtaacta

SEQ ID NO: 3501181 - DNA, 25 bp, Homo sapien
ggaatcaagatacccctgtaggaca

SEQ ID NO: 3501182 - DNA, 25 bp, Homo sapien
tggtgattatacgaagccctgagac

SEQ ID NO: 3501183 - DNA, 25 bp, Homo sapien
tcagtctgaggaatggcaatccaac

SEQ ID NO: 3501184 - DNA, 25 bp, Homo sapien
aagagagtctgaccagccattgggc

SEQ ID NO: 3501185 - DNA, 25 bp, Homo sapien
cacctgccaccattgaacttgttcg

SEQ ID NO: 3501186 - DNA, 25 bp, Homo sapien
ctgttttattctgcgggaggcccca

SEQ ID NO: 3501187 - DNA, 25 bp, Homo sapien
tctgttttattctgcgggaggcccc

SEQ ID NO: 3501188 - DNA, 25 bp, Homo sapien
ctgtctcccatagcagaaacaagga

SEQ ID NO: 3501189 - DNA, 25 bp, Homo sapien
gcaaaatgtaaagctctggcaaaca

SEQ ID NO: 3501190 - DNA, 25 bp, Homo sapien
tgcacagtcattctttctaccacaa

SEQ ID NO: 3501191 - DNA, 25 bp, Homo sapien
atgcacagcgcatttttaaaagtcc

SEQ ID NO: 3501192 - DNA, 25 bp, Homo sapien
tctctcttaagagggcagggtggaa

SEQ ID NO: 3501193 - DNA, 25 bp, Homo sapien
ttcctatcaccatagtggtcgaaga

SEQ ID NO: 3501194 - DNA, 25 bp, Homo sapien
gaagaatcaaacgaagtaatatcag

SEQ ID NO: 3501195 - DNA, 25 bp, Homo sapien
ttcctgcagagatcagctacttcct

SEQ ID NO: 3501196 - DNA, 25 bp, Homo sapien
ccacaaaaattcagctgaggccagg

SEQ ID NO: 3501197 - DNA, 25 bp, Homo sapien
gaagaatctgatggctaaatggcta

SEQ ID NO: 3501198 - DNA, 25 bp, Homo sapien
gctaacactgctcaaccaggaaaaa

SEQ ID NO: 3501199 - DNA, 25 bp, Homo sapien
cagctatttaagacggcagtaacgt

SEQ ID NO: 3501200 - DNA, 25 bp, Homo sapien
cagtaccggatttaaagcttacaca

SEQ ID NO: 3501201 - DNA, 25 bp, Homo sapien
tgcccaccttggctgggaaaccaag

SEQ ID NO: 3501202 - DNA, 25 bp, Homo sapien
cccgtgagtaactagtctaaggcca

SEQ ID NO: 3501203 - DNA, 25 bp, Homo sapien
taactagtctaaggccactcaggcc

SEQ ID NO: 3501204 - DNA, 25 bp, Homo sapien
ccacagaggctcacgatgacaaccg

SEQ ID NO: 3501205 - DNA, 25 bp, Homo sapien
aacgggaagcctgaacgctccggcg

SEQ ID NO: 3501206 - DNA, 25 bp, Homo sapien
gcgcccggccgtgtaaccgccacag

SEQ ID NO: 3501207 - DNA, 25 bp, Homo sapien
gctccggcgcgcccggccgtgtaac

SEQ ID NO: 3501208 - DNA, 25 bp, Homo sapien
ccgcctctcgccgtcttcgcctcct

SEQ ID NO: 3501209 - DNA, 25 bp, Homo sapien
ctcacgcctcctgcggcagtggcgg

SEQ ID NO: 3501210 - DNA, 25 bp, Homo sapien
ctgcgccgccgtggcctccaacaac

SEQ ID NO: 3501211 - DNA, 25 bp, Homo sapien
cgccgtggcctccaacaacgccggc

SEQ ID NO: 3501212 - DNA, 25 bp, Homo sapien
attggccgaggctcctagctcctct

SEQ ID NO: 3501213 - DNA, 25 bp, Homo sapien
ggctcccattggccgaggctcctag

SEQ ID NO: 3501214 - DNA, 25 bp, Homo sapien
tgtgcccgaccccctttgaaatgtc

SEQ ID NO: 3501215 - DNA, 25 bp, Homo sapien
ttctgccctattctgctccctttga

SEQ ID NO: 3501216 - DNA, 25 bp, Homo sapien
agattatccctcaaacctggtggtt

SEQ ID NO: 3501217 - DNA, 25 bp, Homo sapien
tttgtttctcgagtctctcccagtc

SEQ ID NO: 3501218 - DNA, 25 bp, Homo sapien
ggagaaattcctcggccagctgaag

SEQ ID NO: 3501219 - DNA, 25 bp, Homo sapien
cacaccagagattagccgatagcca

SEQ ID NO: 3501220 - DNA, 25 bp, Homo sapien
tatggaacggctctaggaaaacctg

SEQ ID NO: 3501221 - DNA, 25 bp, Homo sapien
tttattcatcagaacccgagggcag

SEQ ID NO: 3501222 - DNA, 25 bp, Homo sapien
aaaaatttattatcaatgtctcaga

SEQ ID NO: 3501223 - DNA, 25 bp, Homo sapien
gacgacacgaacctacatgaacaca

SEQ ID NO: 3501224 - DNA, 25 bp, Homo sapien
cgaacctacatgaacacaactctta

SEQ ID NO: 3501225 - DNA, 25 bp, Homo sapien
gccaacgacgacacgaacctacatg

SEQ ID NO: 3501226 - DNA, 25 bp, Homo sapien
gacacgaacctacatgaacacaact

SEQ ID NO: 3501227 - DNA, 25 bp, Homo sapien
ctgtaaacatgataggagcgctggg

SEQ ID NO: 3501228 - DNA, 25 bp, Homo sapien
acccaagggtgactgtaaacatgat

SEQ ID NO: 3501229 - DNA, 25 bp, Homo sapien
tggtttaaaaagtcagtcctgtgcc

SEQ ID NO: 3501230 - DNA, 25 bp, Homo sapien
agcagccactagtccacaatggttt

SEQ ID NO: 3501231 - DNA, 25 bp, Homo sapien
ccatctgcagatattccttgtagag

SEQ ID NO: 3501232 - DNA, 25 bp, Homo sapien
tgcagatattccttgtagagcttct

SEQ ID NO: 3501233 - DNA, 25 bp, Homo sapien
catctgcagatattccttgtagagc

SEQ ID NO: 3501234 - DNA, 25 bp, Homo sapien
tctgcagatattccttgtagagctt

SEQ ID NO: 3501235 - DNA, 25 bp, Homo sapien
cttcttggcttgccctttgctgagc

SEQ ID NO: 3501236 - DNA, 25 bp, Homo sapien
ttcttggcttgccctttgctgagct

SEQ ID NO: 3501237 - DNA, 25 bp, Homo sapien
tcttggcttgccctttgctgagctc

SEQ ID NO: 3501238 - DNA, 25 bp, Homo sapien
caaagtgtctatctccctgatgcag

SEQ ID NO: 3501239 - DNA, 25 bp, Homo sapien
cctggacctaaagcgggtgtcagat

SEQ ID NO: 3501240 - DNA, 25 bp, Homo sapien
gagcacagcggctattggtctcctc

SEQ ID NO: 3501241 - DNA, 25 bp, Homo sapien
cagtggctgtgaatcgctatgacaa

SEQ ID NO: 3501242 - DNA, 25 bp, Homo sapien
gtatttgtcggtttctgacaagaac

SEQ ID NO: 3501243 - DNA, 25 bp, Homo sapien
caagaacatctcactggggggaatc

SEQ ID NO: 3501244 - DNA, 25 bp, Homo sapien
aacttggagtatttgtcggtttctg

SEQ ID NO: 3501245 - DNA, 25 bp, Homo sapien
cttggagtatttgtcggtttctgac

SEQ ID NO: 3501246 - DNA, 25 bp, Homo sapien
ctagaacacgcaacacggcacagtc

SEQ ID NO: 3501247 - DNA, 25 bp, Homo sapien
gaacgacatctgctcatacctccag

SEQ ID NO: 3501248 - DNA, 25 bp, Homo sapien
gggctccgcactgtgaacgacatct

SEQ ID NO: 3501249 - DNA, 25 bp, Homo sapien
tcaacttgcttccaagccctcagat

SEQ ID NO: 3501250 - DNA, 25 bp, Homo sapien
ccaaggtggagggaacatacaagga

SEQ ID NO: 3501251 - DNA, 25 bp, Homo sapien
cagggtgcactcctgcccagtagag

SEQ ID NO: 3501252 - DNA, 25 bp, Homo sapien
aaacgctgtcttggagcttgtgacc

SEQ ID NO: 3501253 - DNA, 25 bp, Homo sapien
gcctggctaaggtccacggaggcac

SEQ ID NO: 3501254 - DNA, 25 bp, Homo sapien
ctttcttcttcctcttctcctcttc

SEQ ID NO: 3501255 - DNA, 25 bp, Homo sapien
tcttcttcctcttctcctcttcaac

SEQ ID NO: 3501256 - DNA, 25 bp, Homo sapien
ctccgggccgcctcctctttcttct

SEQ ID NO: 3501257 - DNA, 25 bp, Homo sapien
ctgtttcctccgggccgcctcctct

SEQ ID NO: 3501258 - DNA, 25 bp, Homo sapien
cctggcatggagggctgaactctga

SEQ ID NO: 3501259 - DNA, 25 bp, Homo sapien
gagaggtctagccaaacaagcccct

SEQ ID NO: 3501260 - DNA, 25 bp, Homo sapien
tctctcggagtgagaggtctagcca

SEQ ID NO: 3501261 - DNA, 25 bp, Homo sapien
tggagggtcaatacagagccagatg

SEQ ID NO: 3501262 - DNA, 25 bp, Homo sapien
tgagccattgcacgaacagacatgc

SEQ ID NO: 3501263 - DNA, 25 bp, Homo sapien
tatcaggtaggcagctgggcaaact

SEQ ID NO: 3501264 - DNA, 25 bp, Homo sapien
tggagctatcaggtaggcacgccct

SEQ ID NO: 3501265 - DNA, 25 bp, Homo sapien
ccactgacggaaaaggagcaagttt

SEQ ID NO: 3501266 - DNA, 25 bp, Homo sapien
cacccacacttggatctggcatgag

SEQ ID NO: 3501267 - DNA, 25 bp, Homo sapien
cccaaggctaggtgagtgactgtga

SEQ ID NO: 3501268 - DNA, 25 bp, Homo sapien
tgcagcaagccagggcgtctgcaca

SEQ ID NO: 3501269 - DNA, 25 bp, Homo sapien
tccagttcgttattcctccaaagca

SEQ ID NO: 3501270 - DNA, 25 bp, Homo sapien
gattctgacattgcgtttttgttcc

SEQ ID NO: 3501271 - DNA, 25 bp, Homo sapien
ctattgggcaccgaggaacttgggc

SEQ ID NO: 3501272 - DNA, 25 bp, Homo sapien
agggtaccccatgcgctgtgcccag

SEQ ID NO: 3501273 - DNA, 25 bp, Homo sapien
ggcccaggtgcctctcatcctgctg

SEQ ID NO: 3501274 - DNA, 25 bp, Homo sapien
tttaataaggtgtttctgtctacca

SEQ ID NO: 3501275 - DNA, 25 bp, Homo sapien
taataaggtgtttctgtctaccagt

SEQ ID NO: 3501276 - DNA, 25 bp, Homo sapien
ttaataaggtgtttctgtctaccag

SEQ ID NO: 3501277 - DNA, 25 bp, Homo sapien
cccaagctcgggcaggatgttgtcc

SEQ ID NO: 3501278 - DNA, 25 bp, Homo sapien
ttcgtggtcttcaaaccgcacccca

SEQ ID NO: 3501279 - DNA, 25 bp, Homo sapien
cgcaccccaagctcgggcaggatgt

SEQ ID NO: 3501280 - DNA, 25 bp, Homo sapien
agctcgggcaggatgttgtcccgca

SEQ ID NO: 3501281 - DNA, 25 bp, Homo sapien
gagactagtgtctcccgtaagccca

SEQ ID NO: 3501282 - DNA, 25 bp, Homo sapien
tccaggaaagggacacaagttgggc

SEQ ID NO: 3501283 - DNA, 25 bp, Homo sapien
gaacgagtacctcctccagtgcttg

SEQ ID NO: 3501284 - DNA, 25 bp, Homo sapien
ggaccgcaggttgcttcccaagact

SEQ ID NO: 3501285 - DNA, 25 bp, Homo sapien
tgaccttgggtttgctggaatcacc

SEQ ID NO: 3501286 - DNA, 25 bp, Homo sapien
gagcttcgcttggaaacccatgtgt

SEQ ID NO: 3501287 - DNA, 25 bp, Homo sapien
aaaatattcacatatccgggcaggc

SEQ ID NO: 3501288 - DNA, 25 bp, Homo sapien
ctcattagaaggaaggcaagccagc

SEQ ID NO: 3501289 - DNA, 25 bp, Homo sapien
cgccatgggtgatcatcagagcagg

SEQ ID NO: 3501290 - DNA, 25 bp, Homo sapien
tcacgggtgtcatgggaggccacaa

SEQ ID NO: 3501291 - DNA, 25 bp, Homo sapien
ccatgggtgatcatcagagcaggca

SEQ ID NO: 3501292 - DNA, 25 bp, Homo sapien
tcactgtcacgggtgtcatgggagg

SEQ ID NO: 3501293 - DNA, 25 bp, Homo sapien
catggatagacctgaggacaccgtg

SEQ ID NO: 3501294 - DNA, 25 bp, Homo sapien
gaaatgtgggctacaaagataacgc

SEQ ID NO: 3501295 - DNA, 25 bp, Homo sapien
ccgtgatcagcgaaataagccagac

SEQ ID NO: 3501296 - DNA, 25 bp, Homo sapien
gaatagacagatcagggcccatcca

SEQ ID NO: 3501297 - DNA, 25 bp, Homo sapien
tgggccaagcagatcccagctgatc

SEQ ID NO: 3501298 - DNA, 25 bp, Homo sapien
gacagggtgattgcaccagagccac

SEQ ID NO: 3501299 - DNA, 25 bp, Homo sapien
tagggatcaccaccatcttaacctg

SEQ ID NO: 3501300 - DNA, 25 bp, Homo sapien
gctctctagctgactggaccatggg

SEQ ID NO: 3501301 - DNA, 25 bp, Homo sapien
tcggaattctgataacacctgaagg

SEQ ID NO: 3501302 - DNA, 25 bp, Homo sapien
cactccttctcggaattctgataac

SEQ ID NO: 3501303 - DNA, 25 bp, Homo sapien
aacacctgaaggtagggcatgactg

SEQ ID NO: 3501304 - DNA, 25 bp, Homo sapien
tcgggcaatcttccgcactccttct

SEQ ID NO: 3501305 - DNA, 25 bp, Homo sapien
tttcctcaggtcagacacgctgctg

SEQ ID NO: 3501306 - DNA, 25 bp, Homo sapien
gaagtgagcttcctttctactgcag

SEQ ID NO: 3501307 - DNA, 25 bp, Homo sapien
cagtccctgctaggtgtgcgagtca

SEQ ID NO: 3501308 - DNA, 25 bp, Homo sapien
cagaataatagctcagtggccgcga

SEQ ID NO: 3501309 - DNA, 25 bp, Homo sapien
acagcagccgttaagatgaaaaaca

SEQ ID NO: 3501310 - DNA, 25 bp, Homo sapien
cttcgcaatcagctgactgcaaagg

SEQ ID NO: 3501311 - DNA, 25 bp, Homo sapien
cgcagctgcttcttcgcaatcagct

SEQ ID NO: 3501312 - DNA, 25 bp, Homo sapien
accacagcagccgttaagatgaaaa

SEQ ID NO: 3501313 - DNA, 25 bp, Homo sapien
agctgaccacacttagcactctcag

SEQ ID NO: 3501314 - DNA, 25 bp, Homo sapien
agggcagctgaccacacttagcact

SEQ ID NO: 3501315 - DNA, 25 bp, Homo sapien
catttagctcgaggcgctgtccgga

SEQ ID NO: 3501316 - DNA, 25 bp, Homo sapien
cagaattgccatttagctcgaggcg

SEQ ID NO: 3501317 - DNA, 25 bp, Homo sapien
caggccctccgaccgggaatcccag

SEQ ID NO: 3501318 - DNA, 25 bp, Homo sapien
ggagctgtcctcttctacggcccca

SEQ ID NO: 3501319 - DNA, 25 bp, Homo sapien
ctccgaccgggaatcccagggagct

SEQ ID NO: 3501320 - DNA, 25 bp, Homo sapien
tgtcctcttctacggccccaaagat

SEQ ID NO: 3501321 - DNA, 25 bp, Homo sapien
ggcatgtggcgagcagctgtgagct

SEQ ID NO: 3501322 - DNA, 25 bp, Homo sapien
gctgtgttcctcgttcacgggaggg

SEQ ID NO: 3501323 - DNA, 25 bp, Homo sapien
aggatggccctgactcacagctacc

SEQ ID NO: 3501324 - DNA, 25 bp, Homo sapien
ctgaagctgcggcaagatgaaggcg

SEQ ID NO: 3501325 - DNA, 25 bp, Homo sapien
tacagggcgatgttctccagcagag

SEQ ID NO: 3501326 - DNA, 25 bp, Homo sapien
tagaggttgcactgactgaccaagg

SEQ ID NO: 3501327 - DNA, 25 bp, Homo sapien
catctcttccatgacggtgcgggtg

SEQ ID NO: 3501328 - DNA, 25 bp, Homo sapien
tgtcaacattgtcacagagggcttt

SEQ ID NO: 3501329 - DNA, 25 bp, Homo sapien
tcaaactgaccagtgatgtcaacag

SEQ ID NO: 3501330 - DNA, 25 bp, Homo sapien
gcgcgaaggatatctttcacattta

SEQ ID NO: 3501331 - DNA, 25 bp, Homo sapien
tgatgtcaacaggagcgcgaaggat

SEQ ID NO: 3501332 - DNA, 25 bp, Homo sapien
caacaggagcgcgaaggatatcttt

SEQ ID NO: 3501333 - DNA, 25 bp, Homo sapien
cagggtgtccttccacgagtgcatg

SEQ ID NO: 3501334 - DNA, 25 bp, Homo sapien
gtccagggtgtccttccacgagtgc

SEQ ID NO: 3501335 - DNA, 25 bp, Homo sapien
gaagcgctgactccatggtgttgct

SEQ ID NO: 3501336 - DNA, 25 bp, Homo sapien
tcaagaacttctcatattgaagcgc

SEQ ID NO: 3501337 - DNA, 25 bp, Homo sapien
tggggggacacaagacagccaacgc

SEQ ID NO: 3501338 - DNA, 25 bp, Homo sapien
ggggggacacaagacagccaacgcc

SEQ ID NO: 3501339 - DNA, 25 bp, Homo sapien
tgtgcaggaagtacctgacccagca

SEQ ID NO: 3501340 - DNA, 25 bp, Homo sapien
tgcagcctgcaatggtcaggtggcc

SEQ ID NO: 3501341 - DNA, 25 bp, Homo sapien
gatgaagttttttagtgactttgac

SEQ ID NO: 3501342 - DNA, 25 bp, Homo sapien
ctgagtgctttttcaaggcatcttt

SEQ ID NO: 3501343 - DNA, 25 bp, Homo sapien
ccatggccgagcactcgatatgcca

SEQ ID NO: 3501344 - DNA, 25 bp, Homo sapien
gaggtcgaacccacctccgtgaatg

SEQ ID NO: 3501345 - DNA, 25 bp, Homo sapien
aatgtccatcgaagcccctaggagg

SEQ ID NO: 3501346 - DNA, 25 bp, Homo sapien
agcactcgatatgccagcccggacg

SEQ ID NO: 3501347 - DNA, 25 bp, Homo sapien
tccgggcttagaggccttccataag

SEQ ID NO: 3501348 - DNA, 25 bp, Homo sapien
gccaggacggttctccgggcttaga

SEQ ID NO: 3501349 - DNA, 25 bp, Homo sapien
ccttccataaggcaaagtcgttggg

SEQ ID NO: 3501350 - DNA, 25 bp, Homo sapien
tgggagagcgcttctcactcaggcg

SEQ ID NO: 3501351 - DNA, 25 bp, Homo sapien
gacagcactgcgtttactgtctttt

SEQ ID NO: 3501352 - DNA, 25 bp, Homo sapien
cactgcgtttactgtcttttgtttc

SEQ ID NO: 3501353 - DNA, 25 bp, Homo sapien
gtcctctctcttatgtgggagctaa

SEQ ID NO: 3501354 - DNA, 25 bp, Homo sapien
agcactgcgtttactgtcttttgtt

SEQ ID NO: 3501355 - DNA, 25 bp, Homo sapien
catgtcatggtcttagagctgcaca

SEQ ID NO: 3501356 - DNA, 25 bp, Homo sapien
gttgagtgcagaaaactcctaaaat

SEQ ID NO: 3501357 - DNA, 25 bp, Homo sapien
caatgttgagtgcagaaaactccta

SEQ ID NO: 3501358 - DNA, 25 bp, Homo sapien
ccgtggcctgcaaagtcaacacaac

SEQ ID NO: 3501359 - DNA, 25 bp, Homo sapien
tgaagggctttctgatctccaacgg

SEQ ID NO: 3501360 - DNA, 25 bp, Homo sapien
gcaaacttcgctgtatcaaagtaga

SEQ ID NO: 3501361 - DNA, 25 bp, Homo sapien
tcaggcaccagcttcccataggagt

SEQ ID NO: 3501362 - DNA, 25 bp, Homo sapien
cccataggagtgcttctcgctagaa

SEQ ID NO: 3501363 - DNA, 25 bp, Homo sapien
tgggtgggtgcatctaacagacccg

SEQ ID NO: 3501364 - DNA, 25 bp, Homo sapien
aattgggtgggtgcatctaacagac

SEQ ID NO: 3501365 - DNA, 25 bp, Homo sapien
gtgcatctaacagacccgaaagtgt

SEQ ID NO: 3501366 - DNA, 25 bp, Homo sapien
aaaaggaattgggtgggtgcatcta

SEQ ID NO: 3501367 - DNA, 25 bp, Homo sapien
cagattctgggttaggttctcacca

SEQ ID NO: 3501368 - DNA, 25 bp, Homo sapien
gtctgctgggacttctagctacgca

SEQ ID NO: 3501369 - DNA, 25 bp, Homo sapien
catgactgatggtcttggctgccga

SEQ ID NO: 3501370 - DNA, 25 bp, Homo sapien
tccctgtgcgatgttctgcagccct

SEQ ID NO: 3501371 - DNA, 25 bp, Homo sapien
ctaacccgggttaagacatctggag

SEQ ID NO: 3501372 - DNA, 25 bp, Homo sapien
cacatactcactaacccgggttaag

SEQ ID NO: 3501373 - DNA, 25 bp, Homo sapien
tcactaacccgggttaagacatctg

SEQ ID NO: 3501374 - DNA, 25 bp, Homo sapien
ggcacatactcactaacccgggtta

SEQ ID NO: 3501375 - DNA, 25 bp, Homo sapien
tggaattgtcagtgacatcacagcc

SEQ ID NO: 3501376 - DNA, 25 bp, Homo sapien
gagaagatggaattgtcagtgacat

SEQ ID NO: 3501377 - DNA, 25 bp, Homo sapien
tcacagccaagtgtagaatccagcc

SEQ ID NO: 3501378 - DNA, 25 bp, Homo sapien
gacatcacagccaagtgtagaatcc

SEQ ID NO: 3501379 - DNA, 25 bp, Homo sapien
ctgcgcctggccgggaatgggtaaa

SEQ ID NO: 3501380 - DNA, 25 bp, Homo sapien
tgcgcctggccgggaatgggtaaaa

SEQ ID NO: 3501381 - DNA, 25 bp, Homo sapien
tctgtggcaagctgcactgcgtgct

SEQ ID NO: 3501382 - DNA, 25 bp, Homo sapien
cactgcgtgctgaatccgttcgagc

SEQ ID NO: 3501383 - DNA, 25 bp, Homo sapien
gctttctcaagtggctctgtggcaa

SEQ ID NO: 3501384 - DNA, 25 bp, Homo sapien
gagtctggactgcacagctttctca

SEQ ID NO: 3501385 - DNA, 25 bp, Homo sapien
cgggatccgtggtctcatttaattt

SEQ ID NO: 3501386 - DNA, 25 bp, Homo sapien
tccgtggtctcatttaattttactg

SEQ ID NO: 3501387 - DNA, 25 bp, Homo sapien
gctttttatcgggatccgtggtctc

SEQ ID NO: 3501388 - DNA, 25 bp, Homo sapien
tatcgggatccgtggtctcatttaa

SEQ ID NO: 3501389 - DNA, 25 bp, Homo sapien
cgaacaggtggttctgccgggccct

SEQ ID NO: 3501390 - DNA, 25 bp, Homo sapien
ttctcccgatactgctcgaacaggt

SEQ ID NO: 3501391 - DNA, 25 bp, Homo sapien
gagctgtgccgcttcaggcctcttc

SEQ ID NO: 3501392 - DNA, 25 bp, Homo sapien
atcctccaagagctgtgccgcttca

SEQ ID NO: 3501393 - DNA, 25 bp, Homo sapien
caagatatcaaaagagatgtaggac

SEQ ID NO: 3501394 - DNA, 25 bp, Homo sapien
cttgtcatcaatatccgtaatgttc

SEQ ID NO: 3501395 - DNA, 25 bp, Homo sapien
ccgtaatgttcatgcaataaaagac

SEQ ID NO: 3501396 - DNA, 25 bp, Homo sapien
caaatttgaagtaatccttcaacac

SEQ ID NO: 3501397 - DNA, 25 bp, Homo sapien
tccacaccagacgatatgtatagct

SEQ ID NO: 3501398 - DNA, 25 bp, Homo sapien
tagcttaacctccaacaacacgtgt

SEQ ID NO: 3501399 - DNA, 25 bp, Homo sapien
aaacaaacatttccacaccagacga

SEQ ID NO: 3501400 - DNA, 25 bp, Homo sapien
ccagacgatatgtatagcttaacct

SEQ ID NO: 3501401 - DNA, 25 bp, Homo sapien
gggaactcagcatctggggacccca

SEQ ID NO: 3501402 - DNA, 25 bp, Homo sapien
aactcagcatctggggaccccacga

SEQ ID NO: 3501403 - DNA, 25 bp, Homo sapien
tcagcatctggggaccccacgagag

SEQ ID NO: 3501404 - DNA, 25 bp, Homo sapien
gtgtcacgggaactcagcatctggg

SEQ ID NO: 3501405 - DNA, 25 bp, Homo sapien
gatgcgtcatagacggttggcccac

SEQ ID NO: 3501406 - DNA, 25 bp, Homo sapien
gttggcccacagcaataccacgtca

SEQ ID NO: 3501407 - DNA, 25 bp, Homo sapien
acagcaataccacgtcacctttttc

SEQ ID NO: 3501408 - DNA, 25 bp, Homo sapien
tggcgtgccccatgtgagatgcgtc

SEQ ID NO: 3501409 - DNA, 25 bp, Homo sapien
aaggaatgacgatcacaagaaatgc

SEQ ID NO: 3501410 - DNA, 25 bp, Homo sapien
gaatgacgatcacaagaaatgcaag

SEQ ID NO: 3501411 - DNA, 25 bp, Homo sapien
ggaatgaaggaatgacgatcacaag

SEQ ID NO: 3501412 - DNA, 25 bp, Homo sapien
tgaaggaatgacgatcacaagaaat

SEQ ID NO: 3501413 - DNA, 25 bp, Homo sapien
tggggctgcacacgccggcctttgc

SEQ ID NO: 3501414 - DNA, 25 bp, Homo sapien
actggggctgcacacgccggccttt

SEQ ID NO: 3501415 - DNA, 25 bp, Homo sapien
ttcctggtgaggctgttgtaaaggt

SEQ ID NO: 3501416 - DNA, 25 bp, Homo sapien
cttgttcctggtgaggctgttgtaa

SEQ ID NO: 3501417 - DNA, 25 bp, Homo sapien
tcagtcagggcttgacactgacaag

SEQ ID NO: 3501418 - DNA, 25 bp, Homo sapien
tatggcagcataccccaataacacc

SEQ ID NO: 3501419 - DNA, 25 bp, Homo sapien
aataacacccttagagccccaggag

SEQ ID NO: 3501420 - DNA, 25 bp, Homo sapien
caaggtatggtctgttctgccgcag

SEQ ID NO: 3501421 - DNA, 25 bp, Homo sapien
gattttgaggactcttgttgggaca

SEQ ID NO: 3501422 - DNA, 25 bp, Homo sapien
aggactcttgttgggacagaggcca

SEQ ID NO: 3501423 - DNA, 25 bp, Homo sapien
ctggacaaactgaggattttgagga

SEQ ID NO: 3501424 - DNA, 25 bp, Homo sapien
aaactgaggattttgaggactcttg

SEQ ID NO: 3501425 - DNA, 25 bp, Homo sapien
ggtcagattctaaagcgtaggcaat

SEQ ID NO: 3501426 - DNA, 25 bp, Homo sapien
cagacgctgatgactaacaggccaa

SEQ ID NO: 3501427 - DNA, 25 bp, Homo sapien
tctagctcaggccacacgagccagg

SEQ ID NO: 3501428 - DNA, 25 bp, Homo sapien
gagttccagtggtcacaggtggtca

SEQ ID NO: 3501429 - DNA, 25 bp, Homo sapien
tagctacgcgtgctgaggtgctcgt

SEQ ID NO: 3501430 - DNA, 25 bp, Homo sapien
ttctatgtgcctgaaccaccgagcc

SEQ ID NO: 3501431 - DNA, 25 bp, Homo sapien
ggctacccaggagcgcttctatgtg

SEQ ID NO: 3501432 - DNA, 25 bp, Homo sapien
tgagtacccctggacatagctacgc

SEQ ID NO: 3501433 - DNA, 25 bp, Homo sapien
catctggagtataacggataagcct

SEQ ID NO: 3501434 - DNA, 25 bp, Homo sapien
ccttgggaaagctacctacatgatc

SEQ ID NO: 3501435 - DNA, 25 bp, Homo sapien
aggaacacagttccacaccatcaca

SEQ ID NO: 3501436 - DNA, 25 bp, Homo sapien
tggtatccctcctgtcagctaagta

SEQ ID NO: 3501437 - DNA, 25 bp, Homo sapien
ggcccagctaatcatactcccttta

SEQ ID NO: 3501438 - DNA, 25 bp, Homo sapien
taaaatctgtctcaccattctaagg

SEQ ID NO: 3501439 - DNA, 25 bp, Homo sapien
taaggaatatctccctgcaattacc

SEQ ID NO: 3501440 - DNA, 25 bp, Homo sapien
tgctgaactggcagggaacgcagct

SEQ ID NO: 3501441 - DNA, 25 bp, Homo sapien
catttgggtaatcgtggtagctgca

SEQ ID NO: 3501442 - DNA, 25 bp, Homo sapien
tccatgagatggacgcagacagtca

SEQ ID NO: 3501443 - DNA, 25 bp, Homo sapien
taaatgtaccgtctagagcaggcta

SEQ ID NO: 3501444 - DNA, 25 bp, Homo sapien
tagacggctcatcaaaagggaacca

SEQ ID NO: 3501445 - DNA, 25 bp, Homo sapien
ggttgtcaccggctacaaaggtgga

SEQ ID NO: 3501446 - DNA, 25 bp, Homo sapien
actggccctcatcgtagagcctgca

SEQ ID NO: 3501447 - DNA, 25 bp, Homo sapien
gagaaggaatgtccaccaccggatg

SEQ ID NO: 3501448 - DNA, 25 bp, Homo sapien
caccggatgaccttgcagttcagtt

SEQ ID NO: 3501449 - DNA, 25 bp, Homo sapien
gctcttcaaatacccggaaacatgg

SEQ ID NO: 3501450 - DNA, 25 bp, Homo sapien
gaaatggcttaatctccaccccaag

SEQ ID NO: 3501451 - DNA, 25 bp, Homo sapien
gcaactcgttcacaaaggtggcccc

SEQ ID NO: 3501452 - DNA, 25 bp, Homo sapien
ccccaagggtactgcctaaggctct

SEQ ID NO: 3501453 - DNA, 25 bp, Homo sapien
catagaggagcaaacatttcatgtg

SEQ ID NO: 3501454 - DNA, 25 bp, Homo sapien
tgagttcatagaggagcaaacattt

SEQ ID NO: 3501455 - DNA, 25 bp, Homo sapien
tagaggagcaaacatttcatgtggc

SEQ ID NO: 3501456 - DNA, 25 bp, Homo sapien
gttcatagaggagcaaacatttcat

SEQ ID NO: 3501457 - DNA, 25 bp, Homo sapien
gccttaactcactgggttgagctat

SEQ ID NO: 3501458 - DNA, 25 bp, Homo sapien
ctgggttgagctattgtgagtctga

SEQ ID NO: 3501459 - DNA, 25 bp, Homo sapien
ggttgagctattgtgagtctgaaga

SEQ ID NO: 3501460 - DNA, 25 bp, Homo sapien
cgtctgccttaactcactgggttga

SEQ ID NO: 3501461 - DNA, 25 bp, Homo sapien
cctaaaatcttgctggagggacagt

SEQ ID NO: 3501462 - DNA, 25 bp, Homo sapien
aaggtctacccgctggtgacatgag

SEQ ID NO: 3501463 - DNA, 25 bp, Homo sapien
gattactcgggttgtcataactacc

SEQ ID NO: 3501464 - DNA, 25 bp, Homo sapien
cttggtacgatctaaactgagggtg

SEQ ID NO: 3501465 - DNA, 25 bp, Homo sapien
gacctcggcaggaaccaagtgagga

SEQ ID NO: 3501466 - DNA, 25 bp, Homo sapien
acccaaggacgtgccgtccctcaga

SEQ ID NO: 3501467 - DNA, 25 bp, Homo sapien
tccttcggatcctaggacgtgccac

SEQ ID NO: 3501468 - DNA, 25 bp, Homo sapien
cgggtctggcagaccctcacgcagg

SEQ ID NO: 3501469 - DNA, 25 bp, Homo sapien
ggctgggaatcccggacccgcagct

SEQ ID NO: 3501470 - DNA, 25 bp, Homo sapien
tacagacacttcctagaatctgatg

SEQ ID NO: 3501471 - DNA, 25 bp, Homo sapien
ctgggaatcccggacccgcagctgc

SEQ ID NO: 3501472 - DNA, 25 bp, Homo sapien
cggctacagacacttcctagaatct

SEQ ID NO: 3501473 - DNA, 25 bp, Homo sapien
ccatgccagaggatggacagtcccc

SEQ ID NO: 3501474 - DNA, 25 bp, Homo sapien
agttctccaagaacgctgctctttc

SEQ ID NO: 3501475 - DNA, 25 bp, Homo sapien
tcctaagggccaaggccaagttctc

SEQ ID NO: 3501476 - DNA, 25 bp, Homo sapien
gggcagcagggtgtcgctgggccca

SEQ ID NO: 3501477 - DNA, 25 bp, Homo sapien
aaaaacttgtcaacccattgctgaa

SEQ ID NO: 3501478 - DNA, 25 bp, Homo sapien
aaaacttgtcaacccattgctgaac

SEQ ID NO: 3501479 - DNA, 25 bp, Homo sapien
gaaaaacttgtcaacccattgctga

SEQ ID NO: 3501480 - DNA, 25 bp, Homo sapien
aacttgtcaacccattgctgaacat

SEQ ID NO: 3501481 - DNA, 25 bp, Homo sapien
tcacacttcatacactttccttggg

SEQ ID NO: 3501482 - DNA, 25 bp, Homo sapien
ggaaggctgtaagtgtcacctggtc

SEQ ID NO: 3501483 - DNA, 25 bp, Homo sapien
cctcacagcagacggaacacggcag

SEQ ID NO: 3501484 - DNA, 25 bp, Homo sapien
agttcacacagggttcaccaacaca

SEQ ID NO: 3501485 - DNA, 25 bp, Homo sapien
gcttggaagaaactcatgtctggac

SEQ ID NO: 3501486 - DNA, 25 bp, Homo sapien
tctggagaacgagtgtataggcccc

SEQ ID NO: 3501487 - DNA, 25 bp, Homo sapien
gcagcttcgggctctaagtgtagat

SEQ ID NO: 3501488 - DNA, 25 bp, Homo sapien
agccttctctgcaggtgcgtcggca

SEQ ID NO: 3501489 - DNA, 25 bp, Homo sapien
cacagtggaaccgaagcaaggggca

SEQ ID NO: 3501490 - DNA, 25 bp, Homo sapien
taaagtggcgaacttgagcctcccc

SEQ ID NO: 3501491 - DNA, 25 bp, Homo sapien
cacgatgtggtttaaggctctgtac

SEQ ID NO: 3501492 - DNA, 25 bp, Homo sapien
gctttagcattaaggccagcgctgg

SEQ ID NO: 3501493 - DNA, 25 bp, Homo sapien
tatgtgtagaggctcacacacgcgc

SEQ ID NO: 3501494 - DNA, 25 bp, Homo sapien
gttaatgaacagctgacacgccagg

SEQ ID NO: 3501495 - DNA, 25 bp, Homo sapien
gctgacacgccaggaacacgcagag

SEQ ID NO: 3501496 - DNA, 25 bp, Homo sapien
tgtggttaatgaacagctgacacgc

SEQ ID NO: 3501497 - DNA, 25 bp, Homo sapien
tgaggatgtggttaatgaacagctg

SEQ ID NO: 3501498 - DNA, 25 bp, Homo sapien
tctcgggataaaccagccctgtggc

SEQ ID NO: 3501499 - DNA, 25 bp, Homo sapien
tctgacccggagtctggatggacac

SEQ ID NO: 3501500 - DNA, 25 bp, Homo sapien
gcttacacagggacaatgacagttc

SEQ ID NO: 3501501 - DNA, 25 bp, Homo sapien
cagagtcaggagctttggacccgag

SEQ ID NO: 3501502 - DNA, 25 bp, Homo sapien
tgctgggcctctcggatggagagga

SEQ ID NO: 3501503 - DNA, 25 bp, Homo sapien
gctgggcctctcggatggagaggat

SEQ ID NO: 3501504 - DNA, 25 bp, Homo sapien
gcctccttcctgcaccgagggcatg

SEQ ID NO: 3501505 - DNA, 25 bp, Homo sapien
ctgggcctctcggatggagaggatg

SEQ ID NO: 3501506 - DNA, 25 bp, Homo sapien
ctgggacggccccgagtgagacaaa

SEQ ID NO: 3501507 - DNA, 25 bp, Homo sapien
gggacaaagtcaccatcctgctcct

SEQ ID NO: 3501508 - DNA, 25 bp, Homo sapien
gtcaccatcctgctcctcgtctgag

SEQ ID NO: 3501509 - DNA, 25 bp, Homo sapien
caccatcctgctcctcgtctgagag

SEQ ID NO: 3501510 - DNA, 25 bp, Homo sapien
cagggacaaagtcaccatcctgctc

SEQ ID NO: 3501511 - DNA, 25 bp, Homo sapien
ctctgggcaggactcaggcgtggat

SEQ ID NO: 3501512 - DNA, 25 bp, Homo sapien
tggtcgctggccttgcgaagccgct

SEQ ID NO: 3501513 - DNA, 25 bp, Homo sapien
tgcgaagccgctggtctgggccaga

SEQ ID NO: 3501514 - DNA, 25 bp, Homo sapien
gggcaggactcaggcgtggatccgc

SEQ ID NO: 3501515 - DNA, 25 bp, Homo sapien
ctgcagagaaatggagctgctgcag

SEQ ID NO: 3501516 - DNA, 25 bp, Homo sapien
catggcgttgcatccaataaatgca

SEQ ID NO: 3501517 - DNA, 25 bp, Homo sapien
atggcgttgcatccaataaatgcag

SEQ ID NO: 3501518 - DNA, 25 bp, Homo sapien
tcaaactgggcgatgtccttcaggg

SEQ ID NO: 3501519 - DNA, 25 bp, Homo sapien
tcctgctgcaaggtccgcaggatcc

SEQ ID NO: 3501520 - DNA, 25 bp, Homo sapien
aaggtccgcaggatcccgtcttgct

SEQ ID NO: 3501521 - DNA, 25 bp, Homo sapien
ccgtcttgctcaaactgggcgatgt

SEQ ID NO: 3501522 - DNA, 25 bp, Homo sapien
atgaggctctcctgccgctcacggg

SEQ ID NO: 3501523 - DNA, 25 bp, Homo sapien
ccctgtgctggtcgcccttgctgat

SEQ ID NO: 3501524 - DNA, 25 bp, Homo sapien
tggccctgtgctggtcgcccttgct

SEQ ID NO: 3501525 - DNA, 25 bp, Homo sapien
tcctcgtatcggtagtgccactcct

SEQ ID NO: 3501526 - DNA, 25 bp, Homo sapien
cgctcggggtccagaaaagcgcact

SEQ ID NO: 3501527 - DNA, 25 bp, Homo sapien
cctctgtctgcggacctccccgctc

SEQ ID NO: 3501528 - DNA, 25 bp, Homo sapien
cagcggcaccgtgtgctgcctcagc

SEQ ID NO: 3501529 - DNA, 25 bp, Homo sapien
tccagaaaagcgcactgcttccgct

SEQ ID NO: 3501530 - DNA, 25 bp, Homo sapien
ttcccgagatctggttgatgctggt

SEQ ID NO: 3501531 - DNA, 25 bp, Homo sapien
tctcccgacgtgatctttcccgaga

SEQ ID NO: 3501532 - DNA, 25 bp, Homo sapien
atgctggtgctacccccgaagaagg

SEQ ID NO: 3501533 - DNA, 25 bp, Homo sapien
ccagtggccactgaggctcgccagg

SEQ ID NO: 3501534 - DNA, 25 bp, Homo sapien
gttgttcttcgcacactcgatggtg

SEQ ID NO: 3501535 - DNA, 25 bp, Homo sapien
cagggtcatcgtgccatacaggatt

SEQ ID NO: 3501536 - DNA, 25 bp, Homo sapien
ttcgcacactcgatggtgaccttcc

SEQ ID NO: 3501537 - DNA, 25 bp, Homo sapien
ccagctccagggtcatcgtgccata

SEQ ID NO: 3501538 - DNA, 25 bp, Homo sapien
ccatgatggcatcccgtatgtttaa

SEQ ID NO: 3501539 - DNA, 25 bp, Homo sapien
tgcagttcccgctctggcattgggc

SEQ ID NO: 3501540 - DNA, 25 bp, Homo sapien
ccctgtgagacatgcatcgtgcttc

SEQ ID NO: 3501541 - DNA, 25 bp, Homo sapien
aggatggcacccagaacacagaggg

SEQ ID NO: 3501542 - DNA, 25 bp, Homo sapien
tgtagactcgatgacaactaagagt

SEQ ID NO: 3501543 - DNA, 25 bp, Homo sapien
ggatatgaaccagattgtagactcg

SEQ ID NO: 3501544 - DNA, 25 bp, Homo sapien
acggagcatggcctgatgcagagac

SEQ ID NO: 3501545 - DNA, 25 bp, Homo sapien
aaacggccaactgtcacgtgtgtgg

SEQ ID NO: 3501546 - DNA, 25 bp, Homo sapien
gccatcatgcctagtggaggaatct

SEQ ID NO: 3501547 - DNA, 25 bp, Homo sapien
tctgaaaacgctccacaccgtatga

SEQ ID NO: 3501548 - DNA, 25 bp, Homo sapien
ggcatgcactggtgccacgatggct

SEQ ID NO: 3501549 - DNA, 25 bp, Homo sapien
gaatctttaagtgcatattgccaag

SEQ ID NO: 3501550 - DNA, 25 bp, Homo sapien
gaaggtgagcgtggctttgccgtcc

SEQ ID NO: 3501551 - DNA, 25 bp, Homo sapien
taatcctcggctcggttcaggaagg

SEQ ID NO: 3501552 - DNA, 25 bp, Homo sapien
gcatggtaagggtgtaatcctcggc

SEQ ID NO: 3501553 - DNA, 25 bp, Homo sapien
tgagcgtggctttgccgtccagcag

SEQ ID NO: 3501554 - DNA, 25 bp, Homo sapien
gatgcagaagccgtccttccggttg

SEQ ID NO: 3501555 - DNA, 25 bp, Homo sapien
tgccactgatgcagaagccgtcctt

SEQ ID NO: 3501556 - DNA, 25 bp, Homo sapien
gaagccgtccttccggttgctgacg

SEQ ID NO: 3501557 - DNA, 25 bp, Homo sapien
cttccggttgctgacgtggaaggca

SEQ ID NO: 3501558 - DNA, 25 bp, Homo sapien
tccctgttggcagcggctgggtcca

SEQ ID NO: 3501559 - DNA, 25 bp, Homo sapien
cagcccttccggtgtgcaggatgtg

SEQ ID NO: 3501560 - DNA, 25 bp, Homo sapien
ttctgcaagaatccctgttggcagc

SEQ ID NO: 3501561 - DNA, 25 bp, Homo sapien
tcggggtcacgcttgcccctgcctg

SEQ ID NO: 3501562 - DNA, 25 bp, Homo sapien
ccaggccggttgcagcagaggtgct

SEQ ID NO: 3501563 - DNA, 25 bp, Homo sapien
ctgctatgtagaatgtgcggctgtc

SEQ ID NO: 3501564 - DNA, 25 bp, Homo sapien
tgctctgctatgtagaatgtgcggc

SEQ ID NO: 3501565 - DNA, 25 bp, Homo sapien
tagaatgtgcggctgtcagtctgcg

SEQ ID NO: 3501566 - DNA, 25 bp, Homo sapien
tatgtagaatgtgcggctgtcagtc

SEQ ID NO: 3501567 - DNA, 25 bp, Homo sapien
tggggttgtacggcttcttgattcc

SEQ ID NO: 3501568 - DNA, 25 bp, Homo sapien
atggggttgtacggcttcttgattc

SEQ ID NO: 3501569 - DNA, 25 bp, Homo sapien
gcagcggaaggtctcccccaggatg

SEQ ID NO: 3501570 - DNA, 25 bp, Homo sapien
cttgtagaagccagacaggtaccac

SEQ ID NO: 3501571 - DNA, 25 bp, Homo sapien
ttcatgcggctgtaggcatcctcct

SEQ ID NO: 3501572 - DNA, 25 bp, Homo sapien
aagccagacaggtaccaccgcagca

SEQ ID NO: 3501573 - DNA, 25 bp, Homo sapien
gcagcaccagcttcatgcggctgta

SEQ ID NO: 3501574 - DNA, 25 bp, Homo sapien
gaaggagcgcggctccagtacgaac

SEQ ID NO: 3501575 - DNA, 25 bp, Homo sapien
agcaccacgcgggacaggtccatgc

SEQ ID NO: 3501576 - DNA, 25 bp, Homo sapien
caggtctgcgtggtagtagtagtcg

SEQ ID NO: 3501577 - DNA, 25 bp, Homo sapien
tagtagtcggagagcttgttcagga

SEQ ID NO: 3501578 - DNA, 25 bp, Homo sapien
gcagcagacaggctgcagtcaggcc

SEQ ID NO: 3501579 - DNA, 25 bp, Homo sapien
tgcagcagacaggctgcagtcaggc

SEQ ID NO: 3501580 - DNA, 25 bp, Homo sapien
ctgcagcagacaggctgcagtcagg

SEQ ID NO: 3501581 - DNA, 25 bp, Homo sapien
catttttagcccaacggcagctgcc

SEQ ID NO: 3501582 - DNA, 25 bp, Homo sapien
tcagatctgaactcagggctctctg

SEQ ID NO: 3501583 - DNA, 25 bp, Homo sapien
gctatgcggcagaggtcagatctga

SEQ ID NO: 3501584 - DNA, 25 bp, Homo sapien
tgcaaaaccgacacgggcatgtgaa

SEQ ID NO: 3501585 - DNA, 25 bp, Homo sapien
gagaatgcatcgttctccagggaag

SEQ ID NO: 3501586 - DNA, 25 bp, Homo sapien
ctggacctgctccacataggtggtc

SEQ ID NO: 3501587 - DNA, 25 bp, Homo sapien
tcctgggtctcggtatctgactcct

SEQ ID NO: 3501588 - DNA, 25 bp, Homo sapien
gtcttccggctatggtcctgggtct

SEQ ID NO: 3501589 - DNA, 25 bp, Homo sapien
cttgcaggtgcccagtctcagtagg

SEQ ID NO: 3501590 - DNA, 25 bp, Homo sapien
ggtgatgcgtctggcgaggtccctg

SEQ ID NO: 3501591 - DNA, 25 bp, Homo sapien
aacaggtcttggtctgggtggacgg

SEQ ID NO: 3501592 - DNA, 25 bp, Homo sapien
tctcagtaggctagagcagcgcagg

SEQ ID NO: 3501593 - DNA, 25 bp, Homo sapien
tgtgatggagcccacgctctcacct

SEQ ID NO: 3501594 - DNA, 25 bp, Homo sapien
ccctgaagatcaggtagctgctggg

SEQ ID NO: 3501595 - DNA, 25 bp, Homo sapien
tggagcccacgctctcacctttggg

SEQ ID NO: 3501596 - DNA, 25 bp, Homo sapien
atctgactcggaggcggccctgaag

SEQ ID NO: 3501597 - DNA, 25 bp, Homo sapien
ctgggaccacctggacacccccagg

SEQ ID NO: 3501598 - DNA, 25 bp, Homo sapien
gaccacctggacacccccagggcca

SEQ ID NO: 3501599 - DNA, 25 bp, Homo sapien
aggcacctggccaggtagacacttg

SEQ ID NO: 3501600 - DNA, 25 bp, Homo sapien
gggccaggcacctggccaggtagac

SEQ ID NO: 3501601 - DNA, 25 bp, Homo sapien
ctgtcttcaaccccacccctccgca

SEQ ID NO: 3501602 - DNA, 25 bp, Homo sapien
gtcttcaaccccacccctccgcagc

SEQ ID NO: 3501603 - DNA, 25 bp, Homo sapien
gcctctgtcttcaaccccacccctc

SEQ ID NO: 3501604 - DNA, 25 bp, Homo sapien
cttcaaccccacccctccgcagcac

SEQ ID NO: 3501605 - DNA, 25 bp, Homo sapien
gcccagacggactgatccagcgggt

SEQ ID NO: 3501606 - DNA, 25 bp, Homo sapien
aagccgtccttcttggagggccgct

SEQ ID NO: 3501607 - DNA, 25 bp, Homo sapien
tcgatgagctcgcagcagtgcagca

SEQ ID NO: 3501608 - DNA, 25 bp, Homo sapien
cccaccttgggcgtcttgtagatga

SEQ ID NO: 3501609 - DNA, 25 bp, Homo sapien
tttccatcgtttcaggccacctggt

SEQ ID NO: 3501610 - DNA, 25 bp, Homo sapien
acctggtttatggtcctttgttatg

SEQ ID NO: 3501611 - DNA, 25 bp, Homo sapien
agcagcacgctgacccgtgtcctgg

SEQ ID NO: 3501612 - DNA, 25 bp, Homo sapien
cagtgataacggctagatgcaggga

SEQ ID NO: 3501613 - DNA, 25 bp, Homo sapien
cagctgccgtgtggcgcgcttcttc

SEQ ID NO: 3501614 - DNA, 25 bp, Homo sapien
tgagcagctgccgtgtggcgcgctt

SEQ ID NO: 3501615 - DNA, 25 bp, Homo sapien
caggctgtcagccatgatgaccacg

SEQ ID NO: 3501616 - DNA, 25 bp, Homo sapien
tggggtctgtcagagcgctgagcag

SEQ ID NO: 3501617 - DNA, 25 bp, Homo sapien
gggtgtggaggcgaccaggtgcggt

SEQ ID NO: 3501618 - DNA, 25 bp, Homo sapien
ctcaggtggccgtcggtctgacagt

SEQ ID NO: 3501619 - DNA, 25 bp, Homo sapien
tggccgtcggtctgacagtgacact

SEQ ID NO: 3501620 - DNA, 25 bp, Homo sapien
tgcggtttgtcccctccttttgaca

SEQ ID NO: 3501621 - DNA, 25 bp, Homo sapien
cattccttgtctgacccgttgcaca

SEQ ID NO: 3501622 - DNA, 25 bp, Homo sapien
cacattccttgtctgacccgttgca

SEQ ID NO: 3501623 - DNA, 25 bp, Homo sapien
ttccttgtctgacccgttgcacagc

SEQ ID NO: 3501624 - DNA, 25 bp, Homo sapien
tgggggacacacattccttgtctga

SEQ ID NO: 3501625 - DNA, 25 bp, Homo sapien
ttctcgtgcttggatggctgtgctg

SEQ ID NO: 3501626 - DNA, 25 bp, Homo sapien
gaacagcttccacagttttaatcag

SEQ ID NO: 3501627 - DNA, 25 bp, Homo sapien
ctttccagcggagcctctagggcga

SEQ ID NO: 3501628 - DNA, 25 bp, Homo sapien
tgctgagtacctggaacggagcctg

SEQ ID NO: 3501629 - DNA, 25 bp, Homo sapien
gtgcacacatgttcacggaagcatt

SEQ ID NO: 3501630 - DNA, 25 bp, Homo sapien
tcatgacagctatatggtgaaaaca

SEQ ID NO: 3501631 - DNA, 25 bp, Homo sapien
cagtctaggattgggagctgtttcc

SEQ ID NO: 3501632 - DNA, 25 bp, Homo sapien
gatagtcaaatacacgtgcacacat

SEQ ID NO: 3501633 - DNA, 25 bp, Homo sapien
tggcaccttcgtggcagagcttggg

SEQ ID NO: 3501634 - DNA, 25 bp, Homo sapien
gtggcaccttcgtggcagagcttgg

SEQ ID NO: 3501635 - DNA, 25 bp, Homo sapien
cgacgggccgttgggctccatgtcc

SEQ ID NO: 3501636 - DNA, 25 bp, Homo sapien
catccctgggcagcgacgggccgtt

SEQ ID NO: 3501637 - DNA, 25 bp, Homo sapien
gagcttccgggggtcgactttctga

SEQ ID NO: 3501638 - DNA, 25 bp, Homo sapien
agagctcattgtctccgctgaggag

SEQ ID NO: 3501639 - DNA, 25 bp, Homo sapien
ctgaggagcaagttccgggtgagct

SEQ ID NO: 3501640 - DNA, 25 bp, Homo sapien
gggagaagcggcgccggaggaaggc

SEQ ID NO: 3501641 - DNA, 25 bp, Homo sapien
cagcaggaggtcaccgccccggaag

SEQ ID NO: 3501642 - DNA, 25 bp, Homo sapien
gcagcaggaggtcaccgccccggaa

SEQ ID NO: 3501643 - DNA, 25 bp, Homo sapien
agcaggaggtcaccgccccggaagg

SEQ ID NO: 3501644 - DNA, 25 bp, Homo sapien
tgcctttcccctgtgggttcagaag

SEQ ID NO: 3501645 - DNA, 25 bp, Homo sapien
gttcagaagcgagtttcttgtttcc

SEQ ID NO: 3501646 - DNA, 25 bp, Homo sapien
tttcccctgtgggttcagaagcgag

SEQ ID NO: 3501647 - DNA, 25 bp, Homo sapien
cctgtgggttcagaagcgagtttct

SEQ ID NO: 3501648 - DNA, 25 bp, Homo sapien
ccttcccattcacctcacactcaga

SEQ ID NO: 3501649 - DNA, 25 bp, Homo sapien
ttccttcccattcacctcacactca

SEQ ID NO: 3501650 - DNA, 25 bp, Homo sapien
tccttcccattcacctcacactcag

SEQ ID NO: 3501651 - DNA, 25 bp, Homo sapien
ccttccttcccattcacctcacact

SEQ ID NO: 3501652 - DNA, 25 bp, Homo sapien
cagcttcaatgtcacttcccggagg

SEQ ID NO: 3501653 - DNA, 25 bp, Homo sapien
ggccactctgggagtcgattcagat

SEQ ID NO: 3501654 - DNA, 25 bp, Homo sapien
ttcagattctccacgtagcactggg

SEQ ID NO: 3501655 - DNA, 25 bp, Homo sapien
acttctttgttcttcgcacacactt

SEQ ID NO: 3501656 - DNA, 25 bp, Homo sapien
cacatcagatgctgggtcgcctcgt

SEQ ID NO: 3501657 - DNA, 25 bp, Homo sapien
ggccctgtgtttgccactgtagcca

SEQ ID NO: 3501658 - DNA, 25 bp, Homo sapien
tcttcctagtccagagtgagccagg

SEQ ID NO: 3501659 - DNA, 25 bp, Homo sapien
tgtgtccccaggaaccaattctcca

SEQ ID NO: 3501660 - DNA, 25 bp, Homo sapien
tgccctgctgagtttcctgggccac

SEQ ID NO: 3501661 - DNA, 25 bp, Homo sapien
ctcctggtcccctcctcatggctcc

SEQ ID NO: 3501662 - DNA, 25 bp, Homo sapien
cctcctgccctgctgagtttcctgg

SEQ ID NO: 3501663 - DNA, 25 bp, Homo sapien
ctggtcccctcctcatggctcccac

SEQ ID NO: 3501664 - DNA, 25 bp, Homo sapien
gagtcctggactcattccgcatcct

SEQ ID NO: 3501665 - DNA, 25 bp, Homo sapien
ggactcattccgcatccttcctgtg

SEQ ID NO: 3501666 - DNA, 25 bp, Homo sapien
gctgagtcctggactcattccgcat

SEQ ID NO: 3501667 - DNA, 25 bp, Homo sapien
cagctgagtcctggactcattccgc

SEQ ID NO: 3501668 - DNA, 25 bp, Homo sapien
cagagtgacagggctgggccgcgct

SEQ ID NO: 3501669 - DNA, 25 bp, Homo sapien
acagcccagagtgacagggctgggc

SEQ ID NO: 3501670 - DNA, 25 bp, Homo sapien
cccagagtgacagggctgggccgcg

SEQ ID NO: 3501671 - DNA, 25 bp, Homo sapien
ccacagcccagagtgacagggctgg

SEQ ID NO: 3501672 - DNA, 25 bp, Homo sapien
aggctgtgcgggacgggtggccccg

SEQ ID NO: 3501673 - DNA, 25 bp, Homo sapien
cagctgttcccgttcaggggaccct

SEQ ID NO: 3501674 - DNA, 25 bp, Homo sapien
gccagctgagtgagcggagaccagg

SEQ ID NO: 3501675 - DNA, 25 bp, Homo sapien
ccagctgagtgagcggagaccagga

SEQ ID NO: 3501676 - DNA, 25 bp, Homo sapien
caggaccgctggtttcatgtctctg

SEQ ID NO: 3501677 - DNA, 25 bp, Homo sapien
gagcctgggtggtgcgtttatcaac

SEQ ID NO: 3501678 - DNA, 25 bp, Homo sapien
tcctcatagacccactcaggtggag

SEQ ID NO: 3501679 - DNA, 25 bp, Homo sapien
caggtggagacctgtccctctgtct

SEQ ID NO: 3501680 - DNA, 25 bp, Homo sapien
gaggacattcacagactcgcaccct

SEQ ID NO: 3501681 - DNA, 25 bp, Homo sapien
ggagacatcggacccggctgcagtc

SEQ ID NO: 3501682 - DNA, 25 bp, Homo sapien
agggccagcgaggcatttacagccc

SEQ ID NO: 3501683 - DNA, 25 bp, Homo sapien
ctcgcaccctcagaccccagaccag

SEQ ID NO: 3501684 - DNA, 25 bp, Homo sapien
cgtgtccagggacgcgtgggtgcgt

SEQ ID NO: 3501685 - DNA, 25 bp, Homo sapien
gcatttatgggagtgagcgtgtcca

SEQ ID NO: 3501686 - DNA, 25 bp, Homo sapien
tctgctggaagagaggcggacggct

SEQ ID NO: 3501687 - DNA, 25 bp, Homo sapien
cccctgtaatcaatatctgctggaa

SEQ ID NO: 3501688 - DNA, 25 bp, Homo sapien
tacatactccccaaggtcatgaggg

SEQ ID NO: 3501689 - DNA, 25 bp, Homo sapien
gtgtatacagtacagccgggactcc

SEQ ID NO: 3501690 - DNA, 25 bp, Homo sapien
cagaggctcccattgcatggtgcag

SEQ ID NO: 3501691 - DNA, 25 bp, Homo sapien
tggagtaggtgccagtgaatgcctc

SEQ ID NO: 3501692 - DNA, 25 bp, Homo sapien
tagcagaggctccatatgaatgcag

SEQ ID NO: 3501693 - DNA, 25 bp, Homo sapien
catggcattcaaaccgccgctggtg

SEQ ID NO: 3501694 - DNA, 25 bp, Homo sapien
tgaatgcagcccagataaggtggct

SEQ ID NO: 3501695 - DNA, 25 bp, Homo sapien
ttctcagagccctggatagcagagg

SEQ ID NO: 3501696 - DNA, 25 bp, Homo sapien
ggaaagcaagcggtgcttcccgagc

SEQ ID NO: 3501697 - DNA, 25 bp, Homo sapien
gcccagatctaagggagtcagggcc

SEQ ID NO: 3501698 - DNA, 25 bp, Homo sapien
ccttgcggggcccagatctaaggga

SEQ ID NO: 3501699 - DNA, 25 bp, Homo sapien
tgcttcccgagcacgtgggaaaaag

SEQ ID NO: 3501700 - DNA, 25 bp, Homo sapien
catggtcagtgacacatgaggcctc

SEQ ID NO: 3501701 - DNA, 25 bp, Homo sapien
tcacggagcatcagtgacacatgag

SEQ ID NO: 3501702 - DNA, 25 bp, Homo sapien
tggccccaggatgtgcaagacagca

SEQ ID NO: 3501703 - DNA, 25 bp, Homo sapien
gggacaccccacgtgcagaagctag

SEQ ID NO: 3501704 - DNA, 25 bp, Homo sapien
tactgaaggtttgccatctcccctg

SEQ ID NO: 3501705 - DNA, 25 bp, Homo sapien
tgctctgccaggtacggcagcgctt

SEQ ID NO: 3501706 - DNA, 25 bp, Homo sapien
gggccatccgtgaccagcagtcagg

SEQ ID NO: 3501707 - DNA, 25 bp, Homo sapien
cagtcaggggcatgctgtctccaag

SEQ ID NO: 3501708 - DNA, 25 bp, Homo sapien
gtgccgcgagctcggtgctccgggc

SEQ ID NO: 3501709 - DNA, 25 bp, Homo sapien
cgtgccgcgagctcggtgctccggg

SEQ ID NO: 3501710 - DNA, 25 bp, Homo sapien
tgccgcgagctcggtgctccgggcc

SEQ ID NO: 3501711 - DNA, 25 bp, Homo sapien
cttgtgaggccttgggatgcagaac

SEQ ID NO: 3501712 - DNA, 25 bp, Homo sapien
aagactccgcccaaagctgaggtgc

SEQ ID NO: 3501713 - DNA, 25 bp, Homo sapien
gaactgctcagtcaagatgctcagg

SEQ ID NO: 3501714 - DNA, 25 bp, Homo sapien
cacatacaactgctgggtctgctct

SEQ ID NO: 3501715 - DNA, 25 bp, Homo sapien
tgggctgcatctgccacagtcttgg

SEQ ID NO: 3501716 - DNA, 25 bp, Homo sapien
atctgccacagtcttgggcgtctgc

SEQ ID NO: 3501717 - DNA, 25 bp, Homo sapien
cttgggcgtctgcctgccccatggt

SEQ ID NO: 3501718 - DNA, 25 bp, Homo sapien
tgccacagtcttgggcgtctgcctg

SEQ ID NO: 3501719 - DNA, 25 bp, Homo sapien
gtaagtcgctgacagcccatgagga

SEQ ID NO: 3501720 - DNA, 25 bp, Homo sapien
gaatgctggtgctcgaagacacgca

SEQ ID NO: 3501721 - DNA, 25 bp, Homo sapien
aatgagaccttgagccttcctagta

SEQ ID NO: 3501722 - DNA, 25 bp, Homo sapien
gatctggctctaagttaatgagacc

SEQ ID NO: 3501723 - DNA, 25 bp, Homo sapien
cactttcttatggaactggggttga

SEQ ID NO: 3501724 - DNA, 25 bp, Homo sapien
acttgcatactgagaggcagatgga

SEQ ID NO: 3501725 - DNA, 25 bp, Homo sapien
aacttgcatactgagaggcagatgg

SEQ ID NO: 3501726 - DNA, 25 bp, Homo sapien
gaactggggttgattggcaggtgta

SEQ ID NO: 3501727 - DNA, 25 bp, Homo sapien
gttgttgccacatcttgacgctcat

SEQ ID NO: 3501728 - DNA, 25 bp, Homo sapien
ctccagggtgcaggaatgcatttaa

SEQ ID NO: 3501729 - DNA, 25 bp, Homo sapien
tccagggtgcaggaatgcatttaac

SEQ ID NO: 3501730 - DNA, 25 bp, Homo sapien
gtgcaggatacagggtgcaggacac

SEQ ID NO: 3501731 - DNA, 25 bp, Homo sapien
tgcaggatacagggtgcaggacaca

SEQ ID NO: 3501732 - DNA, 25 bp, Homo sapien
ggtgcaggatacagggtgcaggaca

SEQ ID NO: 3501733 - DNA, 25 bp, Homo sapien
ggtgcaggatacagggtgcaggata

SEQ ID NO: 3501734 - DNA, 25 bp, Homo sapien
ctgagccccccagatggcctttaga

SEQ ID NO: 3501735 - DNA, 25 bp, Homo sapien
gtgctcacactcccgtccctctgag

SEQ ID NO: 3501736 - DNA, 25 bp, Homo sapien
tcaggctttcccgtccccctgagcc

SEQ ID NO: 3501737 - DNA, 25 bp, Homo sapien
agccccccagatggcctttagacca

SEQ ID NO: 3501738 - DNA, 25 bp, Homo sapien
tataggagacccatgggcagggact

SEQ ID NO: 3501739 - DNA, 25 bp, Homo sapien
ttataggagacccatgggcagggac

SEQ ID NO: 3501740 - DNA, 25 bp, Homo sapien
catgggcagggactgtcccctggca

SEQ ID NO: 3501741 - DNA, 25 bp, Homo sapien
gagacccatgggcagggactgtccc

SEQ ID NO: 3501742 - DNA, 25 bp, Homo sapien
gcgccctcccccagggccctccgca

SEQ ID NO: 3501743 - DNA, 25 bp, Homo sapien
cgccctcccccagggccctccgcag

SEQ ID NO: 3501744 - DNA, 25 bp, Homo sapien
ccagctcggcgccctcccccagggc

SEQ ID NO: 3501745 - DNA, 25 bp, Homo sapien
cagctcggcgccctcccccagggcc

SEQ ID NO: 3501746 - DNA, 25 bp, Homo sapien
aaggttctccagaggccgaacagcc

SEQ ID NO: 3501747 - DNA, 25 bp, Homo sapien
gggcccttcttgatgcggaagccga

SEQ ID NO: 3501748 - DNA, 25 bp, Homo sapien
tgagcacgaagtagagtgtgtcctg

SEQ ID NO: 3501749 - DNA, 25 bp, Homo sapien
cgtcaggtagaagaccacactgtcg

SEQ ID NO: 3501750 - DNA, 25 bp, Homo sapien
ggctcagagggtgctggcgagggac

SEQ ID NO: 3501751 - DNA, 25 bp, Homo sapien
tggccggctcagagggtgctggcga

SEQ ID NO: 3501752 - DNA, 25 bp, Homo sapien
cctggccggctcagagggtgctggc

SEQ ID NO: 3501753 - DNA, 25 bp, Homo sapien
ccggctcagagggtgctggcgaggg

SEQ ID NO: 3501754 - DNA, 25 bp, Homo sapien
gtgagggtgatgctgcaccctccac

SEQ ID NO: 3501755 - DNA, 25 bp, Homo sapien
cctccaccgtgtgccagacaagggt

SEQ ID NO: 3501756 - DNA, 25 bp, Homo sapien
tgtccatgtccctcatggatgtggt

SEQ ID NO: 3501757 - DNA, 25 bp, Homo sapien
tccatgtccctcatggatgtggtga

SEQ ID NO: 3501758 - DNA, 25 bp, Homo sapien
cctccccggagggtctctggaggtg

SEQ ID NO: 3501759 - DNA, 25 bp, Homo sapien
gaccagcctgctggcgaagtcccct

SEQ ID NO: 3501760 - DNA, 25 bp, Homo sapien
gagcctagaccagcctgctggcgaa

SEQ ID NO: 3501761 - DNA, 25 bp, Homo sapien
ctggtgagcctagaccagcctgctg

SEQ ID NO: 3501762 - DNA, 25 bp, Homo sapien
gggagtgcggctcgggccttggctc

SEQ ID NO: 3501763 - DNA, 25 bp, Homo sapien
tctttgtgcttgtcattgcccctag

SEQ ID NO: 3501764 - DNA, 25 bp, Homo sapien
gctcctgtgccttgccatggccggg

SEQ ID NO: 3501765 - DNA, 25 bp, Homo sapien
acacggtgatggtggcctgtcctcc

SEQ ID NO: 3501766 - DNA, 25 bp, Homo sapien
tccgggtactccactgatgttgggc

SEQ ID NO: 3501767 - DNA, 25 bp, Homo sapien
gctgctcctgctagtctttggttgg

SEQ ID NO: 3501768 - DNA, 25 bp, Homo sapien
gatgttgggctgctcctgctagtct

SEQ ID NO: 3501769 - DNA, 25 bp, Homo sapien
cttccgggtactccactgatgttgg

SEQ ID NO: 3501770 - DNA, 25 bp, Homo sapien
ttgttttccgcattttgctctgcag

SEQ ID NO: 3501771 - DNA, 25 bp, Homo sapien
ctcccagccgttgacggattgtttt

SEQ ID NO: 3501772 - DNA, 25 bp, Homo sapien
ctgcagaacactggacagtaagatg

SEQ ID NO: 3501773 - DNA, 25 bp, Homo sapien
tcttgataagagagtttttccttcc

SEQ ID NO: 3501774 - DNA, 25 bp, Homo sapien
gcgggatgaggagctcagcctcagc

SEQ ID NO: 3501775 - DNA, 25 bp, Homo sapien
cctcagccacagtgcgcaaggtgaa

SEQ ID NO: 3501776 - DNA, 25 bp, Homo sapien
gcgcaaggtgaagagttttgatccc

SEQ ID NO: 3501777 - DNA, 25 bp, Homo sapien
tgaagagttttgatccctcgtacat

SEQ ID NO: 3501778 - DNA, 25 bp, Homo sapien
tgatttacagactcgtacccgggcg

SEQ ID NO: 3501779 - DNA, 25 bp, Homo sapien
tgggaattctgtgctgaccgcggca

SEQ ID NO: 3501780 - DNA, 25 bp, Homo sapien
gggctcaaggaccacagaactggag

SEQ ID NO: 3501781 - DNA, 25 bp, Homo sapien
ggagtagccgcctgttcttgggaat

SEQ ID NO: 3501782 - DNA, 25 bp, Homo sapien
tgcagagtgggagcaccttcctaca

SEQ ID NO: 3501783 - DNA, 25 bp, Homo sapien
catttcccggactcctcgagaaggg

SEQ ID NO: 3501784 - DNA, 25 bp, Homo sapien
aagtgagcattctaagggtccgcaa

SEQ ID NO: 3501785 - DNA, 25 bp, Homo sapien
ctacattattacgaggattccccgg

SEQ ID NO: 3501786 - DNA, 25 bp, Homo sapien
cacatggtgcaacacagcagagcca

SEQ ID NO: 3501787 - DNA, 25 bp, Homo sapien
gatgtaccagagcaggttccgggac

SEQ ID NO: 3501788 - DNA, 25 bp, Homo sapien
ccaggcagaagtagacgacgggctt

SEQ ID NO: 3501789 - DNA, 25 bp, Homo sapien
tcaggcccacgatgtagcagaagaa

SEQ ID NO: 3501790 - DNA, 25 bp, Homo sapien
gcgccgttggcggcccccacgtgct

SEQ ID NO: 3501791 - DNA, 25 bp, Homo sapien
gccgttggcggcccccacgtgctgt

SEQ ID NO: 3501792 - DNA, 25 bp, Homo sapien
ctgggcgccgttggcggcccccacg

SEQ ID NO: 3501793 - DNA, 25 bp, Homo sapien
ttggcggcccccacgtgctgtccag

SEQ ID NO: 3501794 - DNA, 25 bp, Homo sapien
gcaggagtgtgttctgctcgctctc

SEQ ID NO: 3501795 - DNA, 25 bp, Homo sapien
ctgcaggagtgtgttctgctcgctc

SEQ ID NO: 3501796 - DNA, 25 bp, Homo sapien
tgcaggagtgtgttctgctcgctct

SEQ ID NO: 3501797 - DNA, 25 bp, Homo sapien
cccacaagaagcataagaggtcctt

SEQ ID NO: 3501798 - DNA, 25 bp, Homo sapien
cacaagaagcataagaggtcctttt

SEQ ID NO: 3501799 - DNA, 25 bp, Homo sapien
atacccacaagaagcataagaggtc

SEQ ID NO: 3501800 - DNA, 25 bp, Homo sapien
tacccacaagaagcataagaggtcc

SEQ ID NO: 3501801 - DNA, 25 bp, Homo sapien
tggacattagtgctctctggcttct

SEQ ID NO: 3501802 - DNA, 25 bp, Homo sapien
gtggacattagtgctctctggcttc

SEQ ID NO: 3501803 - DNA, 25 bp, Homo sapien
ttttgtccccatgtggacattagtg

SEQ ID NO: 3501804 - DNA, 25 bp, Homo sapien
attttgtccccatgtggacattagt

SEQ ID NO: 3501805 - DNA, 25 bp, Homo sapien
gatttgcacagcgtgtggtccccag

SEQ ID NO: 3501806 - DNA, 25 bp, Homo sapien
taatggatggatggcggatttgcac

SEQ ID NO: 3501807 - DNA, 25 bp, Homo sapien
taacggatggatggtggatttgcac

SEQ ID NO: 3501808 - DNA, 25 bp, Homo sapien
gatttgcacagcgtgtagacggtaa

SEQ ID NO: 3501809 - DNA, 25 bp, Homo sapien
tcacagggcagcacagctctctcag

SEQ ID NO: 3501810 - DNA, 25 bp, Homo sapien
ctaagaggatgggagcctcacaggg

SEQ ID NO: 3501811 - DNA, 25 bp, Homo sapien
tctctcagctcctggagcgtttccg

SEQ ID NO: 3501812 - DNA, 25 bp, Homo sapien
aagaggatgggagcctcacagggca

SEQ ID NO: 3501813 - DNA, 25 bp, Homo sapien
ccctcgtgcataggcatcgtgctgg

SEQ ID NO: 3501814 - DNA, 25 bp, Homo sapien
ctctgggtttccggcgctgctggca

SEQ ID NO: 3501815 - DNA, 25 bp, Homo sapien
gctgggctggcaggatggcggtggt

SEQ ID NO: 3501816 - DNA, 25 bp, Homo sapien
gcagtggccccgtctgcatcctgga

SEQ ID NO: 3501817 - DNA, 25 bp, Homo sapien
cgtttgctttgccagcattttcctt

SEQ ID NO: 3501818 - DNA, 25 bp, Homo sapien
gtttgctttgccagcattttccttc

SEQ ID NO: 3501819 - DNA, 25 bp, Homo sapien
tttgctttgccagcattttccttcc

SEQ ID NO: 3501820 - DNA, 25 bp, Homo sapien
acgtttgctttgccagcattttcct

SEQ ID NO: 3501821 - DNA, 25 bp, Homo sapien
ttgcttggttggaatggtgtccttg

SEQ ID NO: 3501822 - DNA, 25 bp, Homo sapien
gaatggtgtccttgcagtaggagag

SEQ ID NO: 3501823 - DNA, 25 bp, Homo sapien
ctgccataatctttgcttggttgga

SEQ ID NO: 3501824 - DNA, 25 bp, Homo sapien
atggtgtccttgcagtaggagagac

SEQ ID NO: 3501825 - DNA, 25 bp, Homo sapien
cctgaagtatcgatgaagtctaatc

SEQ ID NO: 3501826 - DNA, 25 bp, Homo sapien
caactgctttataagctagtgaaag

SEQ ID NO: 3501827 - DNA, 25 bp, Homo sapien
tgggttttgactcaaagcaactgga

SEQ ID NO: 3501828 - DNA, 25 bp, Homo sapien
cgtgcctgaagtatcgatgaagtct

SEQ ID NO: 3501829 - DNA, 25 bp, Homo sapien
tctagacaggcaggacgtgtcctcc

SEQ ID NO: 3501830 - DNA, 25 bp, Homo sapien
caatatccttatttgagtcagcctg

SEQ ID NO: 3501831 - DNA, 25 bp, Homo sapien
ccactgtggcttgggaggacatccc

SEQ ID NO: 3501832 - DNA, 25 bp, Homo sapien
cctggacacttcacggagggacaca

SEQ ID NO: 3501833 - DNA, 25 bp, Homo sapien
ctccatagaccgtggctgtagactg

SEQ ID NO: 3501834 - DNA, 25 bp, Homo sapien
gccgcctccatagaccgtggctgta

SEQ ID NO: 3501835 - DNA, 25 bp, Homo sapien
agccccactgaagagccgcctccat

SEQ ID NO: 3501836 - DNA, 25 bp, Homo sapien
ctgaagagccgcctccatagaccgt

SEQ ID NO: 3501837 - DNA, 25 bp, Homo sapien
ctcagggtttccagacctttgtgat

SEQ ID NO: 3501838 - DNA, 25 bp, Homo sapien
cccaaagtgtacaagcagataagca

SEQ ID NO: 3501839 - DNA, 25 bp, Homo sapien
cacagaaagctattgtaaaagtcag

SEQ ID NO: 3501840 - DNA, 25 bp, Homo sapien
tccaagcccaagctgatggagaggc

SEQ ID NO: 3501841 - DNA, 25 bp, Homo sapien
cacgcctttcgcaagtgacagatgg

SEQ ID NO: 3501842 - DNA, 25 bp, Homo sapien
tctccaccagcacgcctttcgcaag

SEQ ID NO: 3501843 - DNA, 25 bp, Homo sapien
accagcacgcctttcgcaagtgaca

SEQ ID NO: 3501844 - DNA, 25 bp, Homo sapien
gtgacagatggaaactcatgcagaa

SEQ ID NO: 3501845 - DNA, 25 bp, Homo sapien
aaatcggccgtccagagcccattga

SEQ ID NO: 3501846 - DNA, 25 bp, Homo sapien
ggaagcagagccgaggcgctgatgg

SEQ ID NO: 3501847 - DNA, 25 bp, Homo sapien
ctggcagggtagaaatcggccgtcc

SEQ ID NO: 3501848 - DNA, 25 bp, Homo sapien
catgtaaaaggaagacctagcctca

SEQ ID NO: 3501849 - DNA, 25 bp, Homo sapien
atgcaccttccccgctatgcgttct

SEQ ID NO: 3501850 - DNA, 25 bp, Homo sapien
ctttccatgcaccttccccgctatg

SEQ ID NO: 3501851 - DNA, 25 bp, Homo sapien
tgcaccttccccgctatgcgttctg

SEQ ID NO: 3501852 - DNA, 25 bp, Homo sapien
tccatgcaccttccccgctatgcgt

SEQ ID NO: 3501853 - DNA, 25 bp, Homo sapien
gtgcagcagcttgtgtctacctgag

SEQ ID NO: 3501854 - DNA, 25 bp, Homo sapien
atggattctagcctttcttgcaaaa

SEQ ID NO: 3501855 - DNA, 25 bp, Homo sapien
cctttcttgcaaaatgagttctagc

SEQ ID NO: 3501856 - DNA, 25 bp, Homo sapien
cagcttgtgtctacctgaggtctgc

SEQ ID NO: 3501857 - DNA, 25 bp, Homo sapien
ttgtggctatgctcatggccgttgg

SEQ ID NO: 3501858 - DNA, 25 bp, Homo sapien
tgttgagagagtgcatctgcctcag

SEQ ID NO: 3501859 - DNA, 25 bp, Homo sapien
ggctggcagacactttgtgttgaga

SEQ ID NO: 3501860 - DNA, 25 bp, Homo sapien
tcactcattggggtaattgcctcca

SEQ ID NO: 3501861 - DNA, 25 bp, Homo sapien
agggagaaattggtggctatgctca

SEQ ID NO: 3501862 - DNA, 25 bp, Homo sapien
gggagaaattggtggctatgctcac

SEQ ID NO: 3501863 - DNA, 25 bp, Homo sapien
ggagaaattggtggctatgctcacg

SEQ ID NO: 3501864 - DNA, 25 bp, Homo sapien
agggagaaattggtggctatgctca

SEQ ID NO: 3501865 - DNA, 25 bp, Homo sapien
gggagaaattggtggctatgctcac

SEQ ID NO: 3501866 - DNA, 25 bp, Homo sapien
ggagaaattggtggctatgctcacg

SEQ ID NO: 3501867 - DNA, 25 bp, Homo sapien
agggagaaattggtggctatgctca

SEQ ID NO: 3501868 - DNA, 25 bp, Homo sapien
gggagaaattggtggctatgctcac

SEQ ID NO: 3501869 - DNA, 25 bp, Homo sapien
agggagaaattggtggctatgctca

SEQ ID NO: 3501870 - DNA, 25 bp, Homo sapien
gggagaaattggtggctatgctcat

SEQ ID NO: 3501871 - DNA, 25 bp, Homo sapien
gccgctggtggcattgaagaggtgg

SEQ ID NO: 3501872 - DNA, 25 bp, Homo sapien
ggtggaaattggtggctatgctcat

SEQ ID NO: 3501873 - DNA, 25 bp, Homo sapien
gaagaggtggaaattggtggctatg

SEQ ID NO: 3501874 - DNA, 25 bp, Homo sapien
gaggtggaaattggtggctatgctc

SEQ ID NO: 3501875 - DNA, 25 bp, Homo sapien
gccagcgcaggtggcttttggcact

SEQ ID NO: 3501876 - DNA, 25 bp, Homo sapien
ggcattgaagcatggagccagcgca

SEQ ID NO: 3501877 - DNA, 25 bp, Homo sapien
ctacatggacctgagggccgcacag

SEQ ID NO: 3501878 - DNA, 25 bp, Homo sapien
tacatggacctgagggccgcacagg

SEQ ID NO: 3501879 - DNA, 25 bp, Homo sapien
cccacaagaagcataagaggtcctt

SEQ ID NO: 3501880 - DNA, 25 bp, Homo sapien
atacccacaagaagcataagaggtc

SEQ ID NO: 3501881 - DNA, 25 bp, Homo sapien
cacaagaagcataagaggtcctttt

SEQ ID NO: 3501882 - DNA, 25 bp, Homo sapien
tacccacaagaagcataagaggtcc

SEQ ID NO: 3501883 - DNA, 25 bp, Homo sapien
tggacattagtgctctctggcttct

SEQ ID NO: 3501884 - DNA, 25 bp, Homo sapien
ttttgtccccatgtggacattagtg

SEQ ID NO: 3501885 - DNA, 25 bp, Homo sapien
attttgtccccatgtggacattagt

SEQ ID NO: 3501886 - DNA, 25 bp, Homo sapien
gtggacattagtgctctctggcttc

SEQ ID NO: 3501887 - DNA, 25 bp, Homo sapien
gatttgcacagcgtgtggtccccag

SEQ ID NO: 3501888 - DNA, 25 bp, Homo sapien
taatggatggatggcggatttgcac

SEQ ID NO: 3501889 - DNA, 25 bp, Homo sapien
taacggatggatggtggatttgcac

SEQ ID NO: 3501890 - DNA, 25 bp, Homo sapien
gatttgcacagcgtgtagacggtaa

SEQ ID NO: 3501891 - DNA, 25 bp, Homo sapien
aagaggatgggagcctcacagggca

SEQ ID NO: 3501892 - DNA, 25 bp, Homo sapien
tcacagggcagcacagctctctcag

SEQ ID NO: 3501893 - DNA, 25 bp, Homo sapien
ctaagaggatgggagcctcacaggg

SEQ ID NO: 3501894 - DNA, 25 bp, Homo sapien
tctctcagctcctggagcgtttccg

SEQ ID NO: 3501895 - DNA, 25 bp, Homo sapien
tggaccttgccaatcacaccagtca

SEQ ID NO: 3501896 - DNA, 25 bp, Homo sapien
catggaccttgccaatcacaccagt

SEQ ID NO: 3501897 - DNA, 25 bp, Homo sapien
gtcacatggaccttgccaatcacac

SEQ ID NO: 3501898 - DNA, 25 bp, Homo sapien
cagtcacatggaccttgccaatcac

SEQ ID NO: 3501899 - DNA, 25 bp, Homo sapien
ctgccataatctttgcttggttgga

SEQ ID NO: 3501900 - DNA, 25 bp, Homo sapien
ttgcttggttggaatggtgtccttg

SEQ ID NO: 3501901 - DNA, 25 bp, Homo sapien
gaatggtgtccttgcagtaggagag

SEQ ID NO: 3501902 - DNA, 25 bp, Homo sapien
atggtgtccttgcagtaggagagac

SEQ ID NO: 3501903 - DNA, 25 bp, Homo sapien
cctgaagtatcgatgaagtctaatc

SEQ ID NO: 3501904 - DNA, 25 bp, Homo sapien
caactgctttataagctagtgaaag

SEQ ID NO: 3501905 - DNA, 25 bp, Homo sapien
tgggttttgactcaaagcaactgga

SEQ ID NO: 3501906 - DNA, 25 bp, Homo sapien
cgtgcctgaagtatcgatgaagtct

SEQ ID NO: 3501907 - DNA, 25 bp, Homo sapien
tctagacaggcaggacgtgtcctcc

SEQ ID NO: 3501908 - DNA, 25 bp, Homo sapien
cctggacacttcacggagggacaca

SEQ ID NO: 3501909 - DNA, 25 bp, Homo sapien
caatatccttatttgagtcagcctg

SEQ ID NO: 3501910 - DNA, 25 bp, Homo sapien
ccactgtggcttgggaggacatccc

SEQ ID NO: 3501911 - DNA, 25 bp, Homo sapien
ctccatagaccgtggctgtagactg

SEQ ID NO: 3501912 - DNA, 25 bp, Homo sapien
agccccactgaagagccgcctccat

SEQ ID NO: 3501913 - DNA, 25 bp, Homo sapien
gccgcctccatagaccgtggctgta

SEQ ID NO: 3501914 - DNA, 25 bp, Homo sapien
ctgaagagccgcctccatagaccgt

SEQ ID NO: 3501915 - DNA, 25 bp, Homo sapien
cacagaaagctattgtaaaagtcag

SEQ ID NO: 3501916 - DNA, 25 bp, Homo sapien
ctcagggtttccagacctttgtgat

SEQ ID NO: 3501917 - DNA, 25 bp, Homo sapien
cccaaagtgtacaagcagataagca

SEQ ID NO: 3501918 - DNA, 25 bp, Homo sapien
tccaagcccaagctgatggagaggc

SEQ ID NO: 3501919 - DNA, 25 bp, Homo sapien
gaatgtcgtccgctcacagaccagc

SEQ ID NO: 3501920 - DNA, 25 bp, Homo sapien
gagagcctgtggaatgtcgtccgct

SEQ ID NO: 3501921 - DNA, 25 bp, Homo sapien
tgtggaatgtcgtccgctcacagac

SEQ ID NO: 3501922 - DNA, 25 bp, Homo sapien
gccagtggggtgcactccaggctct

SEQ ID NO: 3501923 - DNA, 25 bp, Homo sapien
cacgcctttcgcaagtgacagatgg

SEQ ID NO: 3501924 - DNA, 25 bp, Homo sapien
tctccaccagcacgcctttcgcaag

SEQ ID NO: 3501925 - DNA, 25 bp, Homo sapien
accagcacgcctttcgcaagtgaca

SEQ ID NO: 3501926 - DNA, 25 bp, Homo sapien
gtgacagatggaaactcatgcagaa

SEQ ID NO: 3501927 - DNA, 25 bp, Homo sapien
gagggtgagtaagtgcggcgtctgg

SEQ ID NO: 3501928 - DNA, 25 bp, Homo sapien
agtaagtgcggcgtctggggcacac

SEQ ID NO: 3501929 - DNA, 25 bp, Homo sapien
gtgagtaagtgcggcgtctggggca

SEQ ID NO: 3501930 - DNA, 25 bp, Homo sapien
agggtgagtaagtgcggcgtctggg

SEQ ID NO: 3501931 - DNA, 25 bp, Homo sapien
atcaggcgatgagggcactgcagac

SEQ ID NO: 3501932 - DNA, 25 bp, Homo sapien
ccaggctcatcaggcgatgagggca

SEQ ID NO: 3501933 - DNA, 25 bp, Homo sapien
cccaggctcatcaggcgatgagggc

SEQ ID NO: 3501934 - DNA, 25 bp, Homo sapien
gctcatcaggcgatgagggcactgc

SEQ ID NO: 3501935 - DNA, 25 bp, Homo sapien
ttgtggctatgctcatggccgttgg

SEQ ID NO: 3501936 - DNA, 25 bp, Homo sapien
ggctggcagacactttgtgttgaga

SEQ ID NO: 3501937 - DNA, 25 bp, Homo sapien
tgttgagagagtgcatctgcctcag

SEQ ID NO: 3501938 - DNA, 25 bp, Homo sapien
tcactcattggggtaattgcctcca

SEQ ID NO: 3501939 - DNA, 25 bp, Homo sapien
agggagaaattggtggctatgctca

SEQ ID NO: 3501940 - DNA, 25 bp, Homo sapien
gggagaaattggtggctatgctcac

SEQ ID NO: 3501941 - DNA, 25 bp, Homo sapien
ggagaaattggtggctatgctcacg

SEQ ID NO: 3501942 - DNA, 25 bp, Homo sapien
agggagaaattggtggctatgctca

SEQ ID NO: 3501943 - DNA, 25 bp, Homo sapien
gggagaaattggtggctatgctcac

SEQ ID NO: 3501944 - DNA, 25 bp, Homo sapien
agggagaaattggtggctatgctca

SEQ ID NO: 3501945 - DNA, 25 bp, Homo sapien
gggagaaattggtggctatgctcac

SEQ ID NO: 3501946 - DNA, 25 bp, Homo sapien
gggagaaattggtggctatgctcat

SEQ ID NO: 3501947 - DNA, 25 bp, Homo sapien
agggagaaattggtggctatgctca

SEQ ID NO: 3501948 - DNA, 25 bp, Homo sapien
agggagaaattggtggctatgctca

SEQ ID NO: 3501949 - DNA, 25 bp, Homo sapien
gggagaaattggtggctatgctcac

SEQ ID NO: 3501950 - DNA, 25 bp, Homo sapien
agggagaaattggtggctatgctca

SEQ ID NO: 3501951 - DNA, 25 bp, Homo sapien
gggagaaattggtggctatgctcat

SEQ ID NO: 3501952 - DNA, 25 bp, Homo sapien
gccgctggtggcattgaagaggtgg

SEQ ID NO: 3501953 - DNA, 25 bp, Homo sapien
ggtggaaattggtggctatgctcat

SEQ ID NO: 3501954 - DNA, 25 bp, Homo sapien
gaagaggtggaaattggtggctatg

SEQ ID NO: 3501955 - DNA, 25 bp, Homo sapien
gaggtggaaattggtggctatgctc

SEQ ID NO: 3501956 - DNA, 25 bp, Homo sapien
ggcattgaagcatggagccagcgca

SEQ ID NO: 3501957 - DNA, 25 bp, Homo sapien
gccagcgcaggtggcttttggcact

SEQ ID NO: 3501958 - DNA, 25 bp, Homo sapien
tgtaggagatagttgaggtcccaga

SEQ ID NO: 3501959 - DNA, 25 bp, Homo sapien
taataagaaggttgttgaggttcca

SEQ ID NO: 3501960 - DNA, 25 bp, Homo sapien
cagtaggtagttgaagtcccagagg

SEQ ID NO: 3501961 - DNA, 25 bp, Homo sapien
gagtggaggaggttgatgaggtccc

SEQ ID NO: 3501962 - DNA, 25 bp, Homo sapien
tggaggatgtatcagaggtcccaga

SEQ ID NO: 3501963 - DNA, 25 bp, Homo sapien
cagtaaaacttcagctggagaaggt

SEQ ID NO: 3501964 - DNA, 25 bp, Homo sapien
gattctgacagagaacgaggctcct

SEQ ID NO: 3501965 - DNA, 25 bp, Homo sapien
gacactcgagtggaggacattgctg

SEQ ID NO: 3501966 - DNA, 25 bp, Homo sapien
agcagcatcagtgccataaagtctc

SEQ ID NO: 3501967 - DNA, 25 bp, Homo sapien
gtgccataaagtctcccttccactg

SEQ ID NO: 3501968 - DNA, 25 bp, Homo sapien
catgctgcaggtgatggtctcttgc

SEQ ID NO: 3501969 - DNA, 25 bp, Homo sapien
gcaggtgatggtctcttgcaccttc

SEQ ID NO: 3501970 - DNA, 25 bp, Homo sapien
accccagcacgaggaaccaaaagag

SEQ ID NO: 3501971 - DNA, 25 bp, Homo sapien
cccagcacgaggaaccaaaagagca

SEQ ID NO: 3501972 - DNA, 25 bp, Homo sapien
gctgggaaaccccagcacgaggaac

SEQ ID NO: 3501973 - DNA, 25 bp, Homo sapien
tgggaaaccccagcacgaggaacca

SEQ ID NO: 3501974 - DNA, 25 bp, Homo sapien
cagctaactgaggtgacaagaacgt

SEQ ID NO: 3501975 - DNA, 25 bp, Homo sapien
gaataccccaattcatcttgtccca

SEQ ID NO: 3501976 - DNA, 25 bp, Homo sapien
taccagtgacattctccacatacaa

SEQ ID NO: 3501977 - DNA, 25 bp, Homo sapien
gacacataggccaatagagcagaat

SEQ ID NO: 3501978 - DNA, 25 bp, Homo sapien
tgaagttcacatagaatcttaaaaa

SEQ ID NO: 3501979 - DNA, 25 bp, Homo sapien
tataatgcaggtgtaaggtcagccg

SEQ ID NO: 3501980 - DNA, 25 bp, Homo sapien
gaggcagacccgcttacagacaata

SEQ ID NO: 3501981 - DNA, 25 bp, Homo sapien
caggggtgcaagtgacttgtccgca

SEQ ID NO: 3501982 - DNA, 25 bp, Homo sapien
ctagttgctttcgaaggaggttcct

SEQ ID NO: 3501983 - DNA, 25 bp, Homo sapien
tgagattttatttgaacctgtttga

SEQ ID NO: 3501984 - DNA, 25 bp, Homo sapien
ttgctgccttatcagctttcgtgct

SEQ ID NO: 3501985 - DNA, 25 bp, Homo sapien
ggaggatgagtttttgattatctag

SEQ ID NO: 3501986 - DNA, 25 bp, Homo sapien
tttgggctgaatgttagcatcttgc

SEQ ID NO: 3501987 - DNA, 25 bp, Homo sapien
tgactgtgttgttgagttgttcaga

SEQ ID NO: 3501988 - DNA, 25 bp, Homo sapien
gagaacttaatgcttgggaggagag

SEQ ID NO: 3501989 - DNA, 25 bp, Homo sapien
tgctgctgtactgtaagacaggttg

SEQ ID NO: 3501990 - DNA, 25 bp, Homo sapien
catgatagaagctttgaatttggtt

SEQ ID NO: 3501991 - DNA, 25 bp, Homo sapien
gactctggttgagggggacaggaaa

SEQ ID NO: 3501992 - DNA, 25 bp, Homo sapien
atgatgggttgtaagtcctttggtg

SEQ ID NO: 3501993 - DNA, 25 bp, Homo sapien
acactactgggttaatgagggaggc

SEQ ID NO: 3501994 - DNA, 25 bp, Homo sapien
gaacggtctgatcagggtgacccta

SEQ ID NO: 3501995 - DNA, 25 bp, Homo sapien
tgggatgcgagcagatactaacggc

SEQ ID NO: 3501996 - DNA, 25 bp, Homo sapien
gcagagagcacaagggaccgtattg

SEQ ID NO: 3501997 - DNA, 25 bp, Homo sapien
tgtctctgtagactcaacacaggga

SEQ ID NO: 3501998 - DNA, 25 bp, Homo sapien
catgctcatgttcagtaaggtggga

SEQ ID NO: 3501999 - DNA, 25 bp, Homo sapien
gaatgctttcatgtacagtcaggtg

SEQ ID NO: 3502000 - DNA, 25 bp, Homo sapien
tctgagaaccacatgaagactctgc

SEQ ID NO: 3502001 - DNA, 25 bp, Homo sapien
gggtttttcctcagtaccatgctca

SEQ ID NO: 3502002 - DNA, 25 bp, Homo sapien
ataaattatcaaggccacaatttcc

SEQ ID NO: 3502003 - DNA, 25 bp, Homo sapien
tttgggaatgcatcttgtatgccct

SEQ ID NO: 3502004 - DNA, 25 bp, Homo sapien
ctttttgggaatgcatcttgtatgc

SEQ ID NO: 3502005 - DNA, 25 bp, Homo sapien
ttctttttgggaatgcatcttgtat

SEQ ID NO: 3502006 - DNA, 25 bp, Homo sapien
aaccatttcacagtttgcagcaccc

SEQ ID NO: 3502007 - DNA, 25 bp, Homo sapien
aaaccatttcacagtttgcagcacc

SEQ ID NO: 3502008 - DNA, 25 bp, Homo sapien
aaaaaccatttcacagtttgcagca

SEQ ID NO: 3502009 - DNA, 25 bp, Homo sapien
catttcacagtttgcagcaccccag

SEQ ID NO: 3502010 - DNA, 25 bp, Homo sapien
gcagcaccaggcgacaagtgtattg

SEQ ID NO: 3502011 - DNA, 25 bp, Homo sapien
aatacccatgacagcggtaggaagg

SEQ ID NO: 3502012 - DNA, 25 bp, Homo sapien
ccctgtgacacggagtgctgagaga

SEQ ID NO: 3502013 - DNA, 25 bp, Homo sapien
tctgctgagaccgaaaggaaatacc

SEQ ID NO: 3502014 - DNA, 25 bp, Homo sapien
aagcctgagtagcatggtgaaatcc

SEQ ID NO: 3502015 - DNA, 25 bp, Homo sapien
agtgaatttgtccacagaaacattg

SEQ ID NO: 3502016 - DNA, 25 bp, Homo sapien
cagaaacattgaggcctggctgggc

SEQ ID NO: 3502017 - DNA, 25 bp, Homo sapien
caagacaagcctgagtagcatggtg

SEQ ID NO: 3502018 - DNA, 25 bp, Homo sapien
acgatcacaccactgcacttccagc

SEQ ID NO: 3502019 - DNA, 25 bp, Homo sapien
agtggaggccgcagtgagccacgat

SEQ ID NO: 3502020 - DNA, 25 bp, Homo sapien
ggaagtggaggccgcagtgagccac

SEQ ID NO: 3502021 - DNA, 25 bp, Homo sapien
cacgatcacaccactgcacttccag

SEQ ID NO: 3502022 - DNA, 25 bp, Homo sapien
ttttatataatttccatggtaacca

SEQ ID NO: 3502023 - DNA, 25 bp, Homo sapien
gatgttttatataatttccatggta

SEQ ID NO: 3502024 - DNA, 25 bp, Homo sapien
aagatgttttatataatttccatgg

SEQ ID NO: 3502025 - DNA, 25 bp, Homo sapien
tatataatttccatggtaaccacaa

SEQ ID NO: 3502026 - DNA, 25 bp, Homo sapien
tcacagatatagagagaacactcca

SEQ ID NO: 3502027 - DNA, 25 bp, Homo sapien
cattctctaggataggccacctgtt

SEQ ID NO: 3502028 - DNA, 25 bp, Homo sapien
gaagggagaatgaactgggaaccta

SEQ ID NO: 3502029 - DNA, 25 bp, Homo sapien
ggaacctatgacaagcgtgggtgca

SEQ ID NO: 3502030 - DNA, 25 bp, Homo sapien
aaaaagacaatgatgctagacagca

SEQ ID NO: 3502031 - DNA, 25 bp, Homo sapien
ggagttaggaattagcatggtcaac

SEQ ID NO: 3502032 - DNA, 25 bp, Homo sapien
ggtgttcaccaccactagtacagtt

SEQ ID NO: 3502033 - DNA, 25 bp, Homo sapien
gcccataatgccagctttgggtggg

SEQ ID NO: 3502034 - DNA, 25 bp, Homo sapien
gtgtagtcatgaaaactaggtattt

SEQ ID NO: 3502035 - DNA, 25 bp, Homo sapien
aagaatttgcctagataactacagt

SEQ ID NO: 3502036 - DNA, 25 bp, Homo sapien
caaagcaactcaggacttagaagag

SEQ ID NO: 3502037 - DNA, 25 bp, Homo sapien
tctgctatgaaacattgatgtacca

SEQ ID NO: 3502038 - DNA, 25 bp, Homo sapien
aaaatgtgtcagtcttcttgtacag

SEQ ID NO: 3502039 - DNA, 25 bp, Homo sapien
aagagaatcaggcaccacggctcat

SEQ ID NO: 3502040 - DNA, 25 bp, Homo sapien
taatagagcttagtaatccagggag

SEQ ID NO: 3502041 - DNA, 25 bp, Homo sapien
aaatggtgacataggtggaccctgg

SEQ ID NO: 3502042 - DNA, 25 bp, Homo sapien
ataaagacaagctaaacgtttgcgg

SEQ ID NO: 3502043 - DNA, 25 bp, Homo sapien
aagacaagctaaacgtttgcggatg

SEQ ID NO: 3502044 - DNA, 25 bp, Homo sapien
tataaagacaagctaaacgtttgcg

SEQ ID NO: 3502045 - DNA, 25 bp, Homo sapien
taaagacaagctaaacgtttgcgga

SEQ ID NO: 3502046 - DNA, 25 bp, Homo sapien
aggcctggcttacagacagtgagac

SEQ ID NO: 3502047 - DNA, 25 bp, Homo sapien
tgctgagcgaggtccaggcatttcc

SEQ ID NO: 3502048 - DNA, 25 bp, Homo sapien
attctgctgagcgaggtccaggcat

SEQ ID NO: 3502049 - DNA, 25 bp, Homo sapien
caaattctgctgagcgaggtccagg

SEQ ID NO: 3502050 - DNA, 25 bp, Homo sapien
caacggagaacaagtttctgtagtt

SEQ ID NO: 3502051 - DNA, 25 bp, Homo sapien
cctcttaggaaagattctctggaca

SEQ ID NO: 3502052 - DNA, 25 bp, Homo sapien
ggatttcctcttaggaaagattctc

SEQ ID NO: 3502053 - DNA, 25 bp, Homo sapien
tttcctcttaggaaagattctctgg

SEQ ID NO: 3502054 - DNA, 25 bp, Homo sapien
ctgggatttcctcttaggaaagatt

SEQ ID NO: 3502055 - DNA, 25 bp, Homo sapien
cagggcctgaaattcactagatgct

SEQ ID NO: 3502056 - DNA, 25 bp, Homo sapien
tctgagaaataacccagggcctgaa

SEQ ID NO: 3502057 - DNA, 25 bp, Homo sapien
ctctgagaaataacccagggcctga

SEQ ID NO: 3502058 - DNA, 25 bp, Homo sapien
gaaattcactagatgctccagcaga

SEQ ID NO: 3502059 - DNA, 25 bp, Homo sapien
cctggcctccagagagcctggcgtt

SEQ ID NO: 3502060 - DNA, 25 bp, Homo sapien
tcctggcctccagagagcctggcgt

SEQ ID NO: 3502061 - DNA, 25 bp, Homo sapien
ctcctggcctccagagagcctggcg

SEQ ID NO: 3502062 - DNA, 25 bp, Homo sapien
gtcacacgacctacggctagcaggg

SEQ ID NO: 3502063 - DNA, 25 bp, Homo sapien
gtgcctgcgggtcacacgacctacg

SEQ ID NO: 3502064 - DNA, 25 bp, Homo sapien
gaagtggagctctgtcgggacaaag

SEQ ID NO: 3502065 - DNA, 25 bp, Homo sapien
aggaagtggagctctgtcgggacaa

SEQ ID NO: 3502066 - DNA, 25 bp, Homo sapien
cactggtgacatattgctatgttct

SEQ ID NO: 3502067 - DNA, 25 bp, Homo sapien
attgctatgttcttaggcaagtaca

SEQ ID NO: 3502068 - DNA, 25 bp, Homo sapien
tgtacactggtgacatattgctatg

SEQ ID NO: 3502069 - DNA, 25 bp, Homo sapien
ttgctatgttcttaggcaagtacat

SEQ ID NO: 3502070 - DNA, 25 bp, Homo sapien
tcccacccagagtttcaagtgaagc

SEQ ID NO: 3502071 - DNA, 25 bp, Homo sapien
tgaaagtcagcaggagaggtactat

SEQ ID NO: 3502072 - DNA, 25 bp, Homo sapien
ggccctgagatgaatgagtaaccca

SEQ ID NO: 3502073 - DNA, 25 bp, Homo sapien
gaagcagagacaactacgtggccat

SEQ ID NO: 3502074 - DNA, 25 bp, Homo sapien
agactgtgctgccatgcggccgccg

SEQ ID NO: 3502075 - DNA, 25 bp, Homo sapien
ttagactgtgctgccatgcggccgc

SEQ ID NO: 3502076 - DNA, 25 bp, Homo sapien
ggccgccgcaggacacttttcatat

SEQ ID NO: 3502077 - DNA, 25 bp, Homo sapien
cactgcaccctttctcggggaagat

SEQ ID NO: 3502078 - DNA, 25 bp, Homo sapien
gatgggagagttgagaaggttccca

SEQ ID NO: 3502079 - DNA, 25 bp, Homo sapien
agatgggagagttgagaaggttccc

SEQ ID NO: 3502080 - DNA, 25 bp, Homo sapien
gggagagttgagaaggttcccagaa

SEQ ID NO: 3502081 - DNA, 25 bp, Homo sapien
gagagttgagaaggttcccagaaga

SEQ ID NO: 3502082 - DNA, 25 bp, Homo sapien
tcaggagcatgtctctcttccatac

SEQ ID NO: 3502083 - DNA, 25 bp, Homo sapien
ataggagatgactctgctgtgagac

SEQ ID NO: 3502084 - DNA, 25 bp, Homo sapien
aaatggcaaagagagacatctgagt

SEQ ID NO: 3502085 - DNA, 25 bp, Homo sapien
tgactctgctgtgagactggatgtc

SEQ ID NO: 3502086 - DNA, 25 bp, Homo sapien
aaaaatggcaaagagagacatctga

SEQ ID NO: 3502087 - DNA, 25 bp, Homo sapien
acaggttggagaggaacaagtacat

SEQ ID NO: 3502088 - DNA, 25 bp, Homo sapien
gaaaccgatgtcaggcaaggacagg

SEQ ID NO: 3502089 - DNA, 25 bp, Homo sapien
gaccgtggtggaggtgaaaccgatg

SEQ ID NO: 3502090 - DNA, 25 bp, Homo sapien
caaggacaggttggagaggaacaag

SEQ ID NO: 3502091 - DNA, 25 bp, Homo sapien
cccagcgacgacctgctgcagttct

SEQ ID NO: 3502092 - DNA, 25 bp, Homo sapien
aggaacagcccagcgacgacctgct

SEQ ID NO: 3502093 - DNA, 25 bp, Homo sapien
cagcgacgacctgctgcagttctgg

SEQ ID NO: 3502094 - DNA, 25 bp, Homo sapien
aacagcccagcgacgacctgctgca

SEQ ID NO: 3502095 - DNA, 25 bp, Homo sapien
tcatttggatacaaccctcttttgc

SEQ ID NO: 3502096 - DNA, 25 bp, Homo sapien
tgtgggtctgtatcatttggataca

SEQ ID NO: 3502097 - DNA, 25 bp, Homo sapien
tatcatttggatacaaccctctttt

SEQ ID NO: 3502098 - DNA, 25 bp, Homo sapien
tctgtgggtctgtatcatttggata

SEQ ID NO: 3502099 - DNA, 25 bp, Homo sapien
aaccaatacccagcattgtgtctgc

SEQ ID NO: 3502100 - DNA, 25 bp, Homo sapien
aagtaaaccaatacccagcattgtg

SEQ ID NO: 3502101 - DNA, 25 bp, Homo sapien
acaagtaaaccaatacccagcattg

SEQ ID NO: 3502102 - DNA, 25 bp, Homo sapien
taaaccaatacccagcattgtgtct

SEQ ID NO: 3502103 - DNA, 25 bp, Homo sapien
gttgcattcgggaaggttccagaag

SEQ ID NO: 3502104 - DNA, 25 bp, Homo sapien
cagtaatgagttgcattcgggaagg

SEQ ID NO: 3502105 - DNA, 25 bp, Homo sapien
tgaagactcctggttcgtgctttag

SEQ ID NO: 3502106 - DNA, 25 bp, Homo sapien
taaggatgaagactcctggttcgtg

SEQ ID NO: 3502107 - DNA, 25 bp, Homo sapien
acattttgattcctgtcttgaaaaa

SEQ ID NO: 3502108 - DNA, 25 bp, Homo sapien
ttgattcctgtcttgaaaaaagcac

SEQ ID NO: 3502109 - DNA, 25 bp, Homo sapien
ttttgattcctgtcttgaaaaaagc

SEQ ID NO: 3502110 - DNA, 25 bp, Homo sapien
ctaacattttgattcctgtcttgaa

SEQ ID NO: 3502111 - DNA, 25 bp, Homo sapien
tgaggaatcgagtgtgtccaccgat

SEQ ID NO: 3502112 - DNA, 25 bp, Homo sapien
aggaatcgagtgtgtccaccgatgt

SEQ ID NO: 3502113 - DNA, 25 bp, Homo sapien
ggaatcgagtgtgtccaccgatgtg

SEQ ID NO: 3502114 - DNA, 25 bp, Homo sapien
gaggaatcgagtgtgtccaccgatg

SEQ ID NO: 3502115 - DNA, 25 bp, Homo sapien
cgttggggggaacatcatacttgat

SEQ ID NO: 3502116 - DNA, 25 bp, Homo sapien
tgtccacgttggggggaacatcata

SEQ ID NO: 3502117 - DNA, 25 bp, Homo sapien
cacgttggggggaacatcatacttg

SEQ ID NO: 3502118 - DNA, 25 bp, Homo sapien
agtgtgtccacgttggggggaacat

SEQ ID NO: 3502119 - DNA, 25 bp, Homo sapien
tctggtcatgacgaggttccacttc

SEQ ID NO: 3502120 - DNA, 25 bp, Homo sapien
agtttctggtcatgacgaggttcca

SEQ ID NO: 3502121 - DNA, 25 bp, Homo sapien
tggtcatgacgaggttccacttccc

SEQ ID NO: 3502122 - DNA, 25 bp, Homo sapien
gtcatgacgaggttccacttcccat

SEQ ID NO: 3502123 - DNA, 25 bp, Homo sapien
tggacaggcattggacccacgtctc

SEQ ID NO: 3502124 - DNA, 25 bp, Homo sapien
cgtggacaggcattggacccacgtc

SEQ ID NO: 3502125 - DNA, 25 bp, Homo sapien
ggacaggcattggacccacgtctct

SEQ ID NO: 3502126 - DNA, 25 bp, Homo sapien
gtggacaggcattggacccacgtct

SEQ ID NO: 3502127 - DNA, 25 bp, Homo sapien
cgataagggccacgtagacttgagg

SEQ ID NO: 3502128 - DNA, 25 bp, Homo sapien
tgggttgcggacgataagggccacg

SEQ ID NO: 3502129 - DNA, 25 bp, Homo sapien
gcggacgataagggccacgtagact

SEQ ID NO: 3502130 - DNA, 25 bp, Homo sapien
gacgataagggccacgtagacttga

SEQ ID NO: 3502131 - DNA, 25 bp, Homo sapien
tttcaggtgtctgccgatttgtctg

SEQ ID NO: 3502132 - DNA, 25 bp, Homo sapien
ggtgtctgccgatttgtctgctggc

SEQ ID NO: 3502133 - DNA, 25 bp, Homo sapien
cgtgtttcaggtgtctgccgatttg

SEQ ID NO: 3502134 - DNA, 25 bp, Homo sapien
caggtgtctgccgatttgtctgctg

SEQ ID NO: 3502135 - DNA, 25 bp, Homo sapien
taagaggcacccctgtcctttgatg

SEQ ID NO: 3502136 - DNA, 25 bp, Homo sapien
aggcacccctgtcctttgatgtcac

SEQ ID NO: 3502137 - DNA, 25 bp, Homo sapien
agaggcacccctgtcctttgatgtc

SEQ ID NO: 3502138 - DNA, 25 bp, Homo sapien
cttaagaggcacccctgtcctttga

SEQ ID NO: 3502139 - DNA, 25 bp, Homo sapien
cctggaggcccagagtaactcttct

SEQ ID NO: 3502140 - DNA, 25 bp, Homo sapien
gcccagagctgggtagagctgcaag

SEQ ID NO: 3502141 - DNA, 25 bp, Homo sapien
taactcttctggaagccccatcatg

SEQ ID NO: 3502142 - DNA, 25 bp, Homo sapien
tccatgcccgacagcgtccattgtt

SEQ ID NO: 3502143 - DNA, 25 bp, Homo sapien
cccggggctgggcattgcctgctgc

SEQ ID NO: 3502144 - DNA, 25 bp, Homo sapien
gctgggcattgcctgctgcaatgac

SEQ ID NO: 3502145 - DNA, 25 bp, Homo sapien
cacagagtgcccggggctgggcatt

SEQ ID NO: 3502146 - DNA, 25 bp, Homo sapien
tgcccggggctgggcattgcctgct

SEQ ID NO: 3502147 - DNA, 25 bp, Homo sapien
tggctggatggcagagagctgatgg

SEQ ID NO: 3502148 - DNA, 25 bp, Homo sapien
agagctgatggaccgtcgcgacgtc

SEQ ID NO: 3502149 - DNA, 25 bp, Homo sapien
agctgatggaccgtcgcgacgtccc

SEQ ID NO: 3502150 - DNA, 25 bp, Homo sapien
cagagagctgatggaccgtcgcgac

SEQ ID NO: 3502151 - DNA, 25 bp, Homo sapien
ctcggagcttctcgaggacctggct

SEQ ID NO: 3502152 - DNA, 25 bp, Homo sapien
ctgaagatgtatgcctggaggcggc

SEQ ID NO: 3502153 - DNA, 25 bp, Homo sapien
ttccctcggagcttctcgaggacct

SEQ ID NO: 3502154 - DNA, 25 bp, Homo sapien
gatgtatgcctggaggcggcacatc

SEQ ID NO: 3502155 - DNA, 25 bp, Homo sapien
gagcctgcctcggtgtcctgccgtg

SEQ ID NO: 3502156 - DNA, 25 bp, Homo sapien
ctgccaggtagagggcagcatctca

SEQ ID NO: 3502157 - DNA, 25 bp, Homo sapien
caggtagagggcagcatctcatgtg

SEQ ID NO: 3502158 - DNA, 25 bp, Homo sapien
ccaggtagagggcagcatctcatgt

SEQ ID NO: 3502159 - DNA, 25 bp, Homo sapien
ggtagagggcagcatctcatgtgac

SEQ ID NO: 3502160 - DNA, 25 bp, Homo sapien
gtgctctcggagagtgtgactgagc

SEQ ID NO: 3502161 - DNA, 25 bp, Homo sapien
ctgtgatgccatgggagatgatggc

SEQ ID NO: 3502162 - DNA, 25 bp, Homo sapien
tgtgatgccatgggagatgatggct

SEQ ID NO: 3502163 - DNA, 25 bp, Homo sapien
gctgtgctctcggagagtgtgactg

SEQ ID NO: 3502164 - DNA, 25 bp, Homo sapien
caagtattctttgaggactggacac

SEQ ID NO: 3502165 - DNA, 25 bp, Homo sapien
ttctttgaggactggacaccaggtc

SEQ ID NO: 3502166 - DNA, 25 bp, Homo sapien
tattctttgaggactggacaccagg

SEQ ID NO: 3502167 - DNA, 25 bp, Homo sapien
tgtcaagtattctttgaggactgga

SEQ ID NO: 3502168 - DNA, 25 bp, Homo sapien
gccaggtcctcgtacagcttgtcca

SEQ ID NO: 3502169 - DNA, 25 bp, Homo sapien
caggtcctcgtacagcttgtccaaa

SEQ ID NO: 3502170 - DNA, 25 bp, Homo sapien
agggtctctgccaggtcctcgtaca

SEQ ID NO: 3502171 - DNA, 25 bp, Homo sapien
ctgccaggtcctcgtacagcttgtc

SEQ ID NO: 3502172 - DNA, 25 bp, Homo sapien
ctttttggtgagttctgagagaaag

SEQ ID NO: 3502173 - DNA, 25 bp, Homo sapien
ttttggtgagttctgagagaaagca

SEQ ID NO: 3502174 - DNA, 25 bp, Homo sapien
ttctgagagaaagcaccgggcatac

SEQ ID NO: 3502175 - DNA, 25 bp, Homo sapien
ttggtgagttctgagagaaagcacc

SEQ ID NO: 3502176 - DNA, 25 bp, Homo sapien
tcacacacacaggatgcttcacagt

SEQ ID NO: 3502177 - DNA, 25 bp, Homo sapien
ttgactgacagccggtgcttcacac

SEQ ID NO: 3502178 - DNA, 25 bp, Homo sapien
gactgacagccggtgcttcacacac

SEQ ID NO: 3502179 - DNA, 25 bp, Homo sapien
cttcacacacacaggatgcttcaca

SEQ ID NO: 3502180 - DNA, 25 bp, Homo sapien
caccctgggcaaagtaagggcccat

SEQ ID NO: 3502181 - DNA, 25 bp, Homo sapien
ctgggcaaagtaagggcccatttag

SEQ ID NO: 3502182 - DNA, 25 bp, Homo sapien
agatgctcttgagtccaaaccccac

SEQ ID NO: 3502183 - DNA, 25 bp, Homo sapien
ctgcatgcagatgctcttgagtcca

SEQ ID NO: 3502184 - DNA, 25 bp, Homo sapien
caaaatatcccgcagaagctcagaa

SEQ ID NO: 3502185 - DNA, 25 bp, Homo sapien
aaatatctgggattctgcaaaatat

SEQ ID NO: 3502186 - DNA, 25 bp, Homo sapien
gaagctcagaatctgatgagtctct

SEQ ID NO: 3502187 - DNA, 25 bp, Homo sapien
aatatctgggattctgcaaaatatc

SEQ ID NO: 3502188 - DNA, 25 bp, Homo sapien
ggaaggaacgcagtgcgcgcgccgc

SEQ ID NO: 3502189 - DNA, 25 bp, Homo sapien
ggggaaggaacgcagtgcgcgcgcc

SEQ ID NO: 3502190 - DNA, 25 bp, Homo sapien
aaggaacgcagtgcgcgcgccgcca

SEQ ID NO: 3502191 - DNA, 25 bp, Homo sapien
caggggaaggaacgcagtgcgcgcg

SEQ ID NO: 3502192 - DNA, 25 bp, Homo sapien
tgccgggagaccgggcggaagccga

SEQ ID NO: 3502193 - DNA, 25 bp, Homo sapien
cagcgttgccgggagaccgggcgga

SEQ ID NO: 3502194 - DNA, 25 bp, Homo sapien
ccgcagcgttgccgggagaccgggc

SEQ ID NO: 3502195 - DNA, 25 bp, Homo sapien
cggggccgcagcgttgccgggagac

SEQ ID NO: 3502196 - DNA, 25 bp, Homo sapien
tggctttagaactgggccggggcac

SEQ ID NO: 3502197 - DNA, 25 bp, Homo sapien
ctttagaactgggccggggcactgc

SEQ ID NO: 3502198 - DNA, 25 bp, Homo sapien
ttggctttagaactgggccggggca

SEQ ID NO: 3502199 - DNA, 25 bp, Homo sapien
gctttagaactgggccggggcactg

SEQ ID NO: 3502200 - DNA, 25 bp, Homo sapien
gacatatgatgatcaactacgggag

SEQ ID NO: 3502201 - DNA, 25 bp, Homo sapien
acgggagacccaaagaccactctgt

SEQ ID NO: 3502202 - DNA, 25 bp, Homo sapien
tcaactacgggagacccaaagacca

SEQ ID NO: 3502203 - DNA, 25 bp, Homo sapien
gatgatcaactacgggagacccaaa

SEQ ID NO: 3502204 - DNA, 25 bp, Homo sapien
ggctgctggtcataagagttcatga

SEQ ID NO: 3502205 - DNA, 25 bp, Homo sapien
ctggctgctggtcataagagttcat

SEQ ID NO: 3502206 - DNA, 25 bp, Homo sapien
ggtcataagagttcatgagcatttc

SEQ ID NO: 3502207 - DNA, 25 bp, Homo sapien
gctggtcataagagttcatgagcat

SEQ ID NO: 3502208 - DNA, 25 bp, Homo sapien
tgatgttcatgtccatgaggacatt

SEQ ID NO: 3502209 - DNA, 25 bp, Homo sapien
gatgttcatgtccatgaggacatta

SEQ ID NO: 3502210 - DNA, 25 bp, Homo sapien
tatgatgttcatgtccatgaggaca

SEQ ID NO: 3502211 - DNA, 25 bp, Homo sapien
aatatgatgttcatgtccatgagga

SEQ ID NO: 3502212 - DNA, 25 bp, Homo sapien
tagaatgaacttatcccattaatac

SEQ ID NO: 3502213 - DNA, 25 bp, Homo sapien
ttagaatgaacttatcccattaata

SEQ ID NO: 3502214 - DNA, 25 bp, Homo sapien
gtagcccgcaatatcaaacttgacc

SEQ ID NO: 3502215 - DNA, 25 bp, Homo sapien
ttgccccaatttgggtaggggcagc

SEQ ID NO: 3502216 - DNA, 25 bp, Homo sapien
gtagacctggaggtgagggtgcgca

SEQ ID NO: 3502217 - DNA, 25 bp, Homo sapien
aactcctccttcttgtagacctgga

SEQ ID NO: 3502218 - DNA, 25 bp, Homo sapien
cttgatgtagttggtcaagggatct

SEQ ID NO: 3502219 - DNA, 25 bp, Homo sapien
tcaagggatcttgttgacgttgggt

SEQ ID NO: 3502220 - DNA, 25 bp, Homo sapien
agttggtcaagggatcttgttgacg

SEQ ID NO: 3502221 - DNA, 25 bp, Homo sapien
tgggtctcttcttcacggtggtcac

SEQ ID NO: 3502222 - DNA, 25 bp, Homo sapien
tctgcaggctgtgcttctcagtggc

SEQ ID NO: 3502223 - DNA, 25 bp, Homo sapien
ggtgctctgcaggctgtgcttctca

SEQ ID NO: 3502224 - DNA, 25 bp, Homo sapien
ctgaggtgctctgcaggctgtgctt

SEQ ID NO: 3502225 - DNA, 25 bp, Homo sapien
tgcaggctgtgcttctcagtggctc

SEQ ID NO: 3502226 - DNA, 25 bp, Homo sapien
cagatacacgatggtcctgccgatt

SEQ ID NO: 3502227 - DNA, 25 bp, Homo sapien
cacgatggtcctgccgatttgctga

SEQ ID NO: 3502228 - DNA, 25 bp, Homo sapien
aaagtcaaagtcttctgtgctgaag

SEQ ID NO: 3502229 - DNA, 25 bp, Homo sapien
agtcttctgtgctgaagcagttcat

SEQ ID NO: 3502230 - DNA, 25 bp, Homo sapien
atacctttctcacaatcagcaaagc

SEQ ID NO: 3502231 - DNA, 25 bp, Homo sapien
gcagcattactgtcattgaaggaaa

SEQ ID NO: 3502232 - DNA, 25 bp, Homo sapien
tggcagcattactgtcattgaagga

SEQ ID NO: 3502233 - DNA, 25 bp, Homo sapien
ttctggcagcattactgtcattgaa

SEQ ID NO: 3502234 - DNA, 25 bp, Homo sapien
tctggcagcattactgtcattgaag

SEQ ID NO: 3502235 - DNA, 25 bp, Homo sapien
cgctctgattgcagcggtttcccgc

SEQ ID NO: 3502236 - DNA, 25 bp, Homo sapien
ccgggccctgggttcgctctgattg

SEQ ID NO: 3502237 - DNA, 25 bp, Homo sapien
gccctgggttcgctctgattgcagc

SEQ ID NO: 3502238 - DNA, 25 bp, Homo sapien
tcgctctgattgcagcggtttcccg

SEQ ID NO: 3502239 - DNA, 25 bp, Homo sapien
cattctgccaatcaaaagttgaatc

SEQ ID NO: 3502240 - DNA, 25 bp, Homo sapien
tttcactggttgtagtttgggaatc

SEQ ID NO: 3502241 - DNA, 25 bp, Homo sapien
tgctcttacagagtaccattctgcc

SEQ ID NO: 3502242 - DNA, 25 bp, Homo sapien
taactaggccggattagtgggccag

SEQ ID NO: 3502243 - DNA, 25 bp, Homo sapien
atgtgtgacttccattgccataatg

SEQ ID NO: 3502244 - DNA, 25 bp, Homo sapien
gtgtgacttccattgccataatgca

SEQ ID NO: 3502245 - DNA, 25 bp, Homo sapien
tgacttccattgccataatgcatca

SEQ ID NO: 3502246 - DNA, 25 bp, Homo sapien
tgtgacttccattgccataatgcat

SEQ ID NO: 3502247 - DNA, 25 bp, Homo sapien
tagattgtcttgtgatatttacaat

SEQ ID NO: 3502248 - DNA, 25 bp, Homo sapien
ctagattgtcttgtgatatttacaa

SEQ ID NO: 3502249 - DNA, 25 bp, Homo sapien
tttggaaggtccaatgcttcattaa

SEQ ID NO: 3502250 - DNA, 25 bp, Homo sapien
aatgcttcattaagctcacatgcct

SEQ ID NO: 3502251 - DNA, 25 bp, Homo sapien
tggaaggtccaatgcttcattaagc

SEQ ID NO: 3502252 - DNA, 25 bp, Homo sapien
ggtccaatgcttcattaagctcaca

SEQ ID NO: 3502253 - DNA, 25 bp, Homo sapien
attgtcattttaaccaccagggcca

SEQ ID NO: 3502254 - DNA, 25 bp, Homo sapien
ttattgtcattttaaccaccagggc

SEQ ID NO: 3502255 - DNA, 25 bp, Homo sapien
gagcgtcggtagactcgtgtcttaa

SEQ ID NO: 3502256 - DNA, 25 bp, Homo sapien
cggccgggagcgtcggtagactcgt

SEQ ID NO: 3502257 - DNA, 25 bp, Homo sapien
taaccctgtcctattgatccccagg

SEQ ID NO: 3502258 - DNA, 25 bp, Homo sapien
tttcttttctcgggcggcgtagaca

SEQ ID NO: 3502259 - DNA, 25 bp, Homo sapien
gaagtaacagttatgtaagtaagaa

SEQ ID NO: 3502260 - DNA, 25 bp, Homo sapien
catttctcgggctacataccttgca

SEQ ID NO: 3502261 - DNA, 25 bp, Homo sapien
cagtggacacaaagaggctacgttc

SEQ ID NO: 3502262 - DNA, 25 bp, Homo sapien
gcggtgggagggctcagaacgacag

SEQ ID NO: 3502263 - DNA, 25 bp, Homo sapien
gagggctcagaacgacagtctgggg

SEQ ID NO: 3502264 - DNA, 25 bp, Homo sapien
ttgtttccacacattcataataact

SEQ ID NO: 3502265 - DNA, 25 bp, Homo sapien
gtttccatgtgatccgtaatatctt

SEQ ID NO: 3502266 - DNA, 25 bp, Homo sapien
gtcagccacaaatgccggcctgtta

SEQ ID NO: 3502267 - DNA, 25 bp, Homo sapien
gatccgtaatatctttgccgccttc

SEQ ID NO: 3502268 - DNA, 25 bp, Homo sapien
aatgccggcctgttatctgagccga

SEQ ID NO: 3502269 - DNA, 25 bp, Homo sapien
cacctacccagagtaggtacgccca

SEQ ID NO: 3502270 - DNA, 25 bp, Homo sapien
cctacccagagtaggtacgcccaag

SEQ ID NO: 3502271 - DNA, 25 bp, Homo sapien
tacccagagtaggtacgcccaagaa

SEQ ID NO: 3502272 - DNA, 25 bp, Homo sapien
tccacctacccagagtaggtacgcc

SEQ ID NO: 3502273 - DNA, 25 bp, Homo sapien
ggacattgcctagcattatgctgtg

SEQ ID NO: 3502274 - DNA, 25 bp, Homo sapien
gacattgcctagcattatgctgtgg

SEQ ID NO: 3502275 - DNA, 25 bp, Homo sapien
gactttccgtcaattacctcgcttc

SEQ ID NO: 3502276 - DNA, 25 bp, Homo sapien
caatttcttacccgggagagctctc

SEQ ID NO: 3502277 - DNA, 25 bp, Homo sapien
taacgggctgcctcgactttccgtc

SEQ ID NO: 3502278 - DNA, 25 bp, Homo sapien
tcttacccgggagagctctcaggat

SEQ ID NO: 3502279 - DNA, 25 bp, Homo sapien
ggcacccggcccagacattgtttga

SEQ ID NO: 3502280 - DNA, 25 bp, Homo sapien
ggcccagacattgtttgaagccacc

SEQ ID NO: 3502281 - DNA, 25 bp, Homo sapien
ttgtttgaagccacccatttcatgg

SEQ ID NO: 3502282 - DNA, 25 bp, Homo sapien
gacattgtttgaagccacccatttc

SEQ ID NO: 3502283 - DNA, 25 bp, Homo sapien
cattaccagtgacggagcaagtaca

SEQ ID NO: 3502284 - DNA, 25 bp, Homo sapien
tgtcattaccagtgacggagcaagt

SEQ ID NO: 3502285 - DNA, 25 bp, Homo sapien
cctgagatcgtgaagatgttcattg

SEQ ID NO: 3502286 - DNA, 25 bp, Homo sapien
aataaaacctgagatcgtgaagatg

SEQ ID NO: 3502287 - DNA, 25 bp, Homo sapien
tggggctggcgagcaaatacttaga

SEQ ID NO: 3502288 - DNA, 25 bp, Homo sapien
ctggcgagcaaatacttagaggaga

SEQ ID NO: 3502289 - DNA, 25 bp, Homo sapien
gagaaacgaacaccctttgtaagca

SEQ ID NO: 3502290 - DNA, 25 bp, Homo sapien
ccctttgtaagcatgtgaaatgttt

SEQ ID NO: 3502291 - DNA, 25 bp, Homo sapien
taatcggagaatttagcccattgac

SEQ ID NO: 3502292 - DNA, 25 bp, Homo sapien
cccattgacatttaaggttcatata

SEQ ID NO: 3502293 - DNA, 25 bp, Homo sapien
gacatttaaggttcatatagttatg

SEQ ID NO: 3502294 - DNA, 25 bp, Homo sapien
tgaaattctgagttgaacatttttt

SEQ ID NO: 3502295 - DNA, 25 bp, Homo sapien
ctgggatggcagtgaagtgggatgg

SEQ ID NO: 3502296 - DNA, 25 bp, Homo sapien
ctccccggccagacggtccaggttg

SEQ ID NO: 3502297 - DNA, 25 bp, Homo sapien
ttggccttgacgccctccccggcca

SEQ ID NO: 3502298 - DNA, 25 bp, Homo sapien
gatggggaggtcattgtgacaaggg

SEQ ID NO: 3502299 - DNA, 25 bp, Homo sapien
accggtgagaatcgtctaaagctcc

SEQ ID NO: 3502300 - DNA, 25 bp, Homo sapien
ctaaagctccctttctacttgagga

SEQ ID NO: 3502301 - DNA, 25 bp, Homo sapien
aagttgatgggtttctgagaggctc

SEQ ID NO: 3502302 - DNA, 25 bp, Homo sapien
acaagttgatgggtttctgagaggc

SEQ ID NO: 3502303 - DNA, 25 bp, Homo sapien
ccagtgggacctgcttctgtaatga

SEQ ID NO: 3502304 - DNA, 25 bp, Homo sapien
cttctgtaatgaggccgcccatggg

SEQ ID NO: 3502305 - DNA, 25 bp, Homo sapien
gacctgcttctgtaatgaggccgcc

SEQ ID NO: 3502306 - DNA, 25 bp, Homo sapien
catgggggggccctcccatgatgcc

SEQ ID NO: 3502307 - DNA, 25 bp, Homo sapien
gcataggaatatgctggtgcctgaa

SEQ ID NO: 3502308 - DNA, 25 bp, Homo sapien
ttttatctagaaatgcataggaata

SEQ ID NO: 3502309 - DNA, 25 bp, Homo sapien
tttatctagaaatgcataggaatat

SEQ ID NO: 3502310 - DNA, 25 bp, Homo sapien
ttatctagaaatgcataggaatatg

SEQ ID NO: 3502311 - DNA, 25 bp, Homo sapien
ccaataacaactgcagtctggctgg

SEQ ID NO: 3502312 - DNA, 25 bp, Homo sapien
cacagcctccaataacaactgcagt

SEQ ID NO: 3502313 - DNA, 25 bp, Homo sapien
agcctccaataacaactgcagtctg

SEQ ID NO: 3502314 - DNA, 25 bp, Homo sapien
ctccaataacaactgcagtctggct

SEQ ID NO: 3502315 - DNA, 25 bp, Homo sapien
tctgacattttggcgtacccatcat

SEQ ID NO: 3502316 - DNA, 25 bp, Homo sapien
gacattttggcgtacccatcatcaa

SEQ ID NO: 3502317 - DNA, 25 bp, Homo sapien
tgacattttggcgtacccatcatca

SEQ ID NO: 3502318 - DNA, 25 bp, Homo sapien
ctctgacattttggcgtacccatca

SEQ ID NO: 3502319 - DNA, 25 bp, Homo sapien
aggcagcggtcatggacttgtgggc

SEQ ID NO: 3502320 - DNA, 25 bp, Homo sapien
ggccacatttcagggcagtagggtc

SEQ ID NO: 3502321 - DNA, 25 bp, Homo sapien
tatgctcccggaaacgaaagcaggg

SEQ ID NO: 3502322 - DNA, 25 bp, Homo sapien
aggggccacatttcagggcagtagg

SEQ ID NO: 3502323 - DNA, 25 bp, Homo sapien
tcttctggatttggcagactgttgg

SEQ ID NO: 3502324 - DNA, 25 bp, Homo sapien
tcagtatcagattgttgtgtttttt

SEQ ID NO: 3502325 - DNA, 25 bp, Homo sapien
aggtcttcagtatcagattgttgtg

SEQ ID NO: 3502326 - DNA, 25 bp, Homo sapien
atttggcagactgttggtgctgagc

SEQ ID NO: 3502327 - DNA, 25 bp, Homo sapien
gaacatttttcaaccttggaacata

SEQ ID NO: 3502328 - DNA, 25 bp, Homo sapien
catgagcgtcaatcattgttgaaca

SEQ ID NO: 3502329 - DNA, 25 bp, Homo sapien
cattgttgaacatttttcaaccttg

SEQ ID NO: 3502330 - DNA, 25 bp, Homo sapien
tcaacatgagcgtcaatcattgttg

SEQ ID NO: 3502331 - DNA, 25 bp, Homo sapien
aagacccttgagaccatcagacgca

SEQ ID NO: 3502332 - DNA, 25 bp, Homo sapien
cacaagacccttgagaccatcagac

SEQ ID NO: 3502333 - DNA, 25 bp, Homo sapien
gagaccatcagacgcaatttgggtt

SEQ ID NO: 3502334 - DNA, 25 bp, Homo sapien
cttgagaccatcagacgcaatttgg

SEQ ID NO: 3502335 - DNA, 25 bp, Homo sapien
tggtgaccaagtctttccaatattt

SEQ ID NO: 3502336 - DNA, 25 bp, Homo sapien
tcctggtgaccaagtctttccaata

SEQ ID NO: 3502337 - DNA, 25 bp, Homo sapien
ttgggtcctggtgaccaagtctttc

SEQ ID NO: 3502338 - DNA, 25 bp, Homo sapien
cttgggtcctggtgaccaagtcttt

SEQ ID NO: 3502339 - DNA, 25 bp, Homo sapien
tattgaacatagcaggtgctttcac

SEQ ID NO: 3502340 - DNA, 25 bp, Homo sapien
cttatattgaacatagcaggtgctt

SEQ ID NO: 3502341 - DNA, 25 bp, Homo sapien
ttatattgaacatagcaggtgcttt

SEQ ID NO: 3502342 - DNA, 25 bp, Homo sapien
tatattgaacatagcaggtgctttc

SEQ ID NO: 3502343 - DNA, 25 bp, Homo sapien
tactgatctttcttagagaatggat

SEQ ID NO: 3502344 - DNA, 25 bp, Homo sapien
atcatactgatctttcttagagaat

SEQ ID NO: 3502345 - DNA, 25 bp, Homo sapien
catactgatctttcttagagaatgg

SEQ ID NO: 3502346 - DNA, 25 bp, Homo sapien
ctttcttagagaatggatcaactac

SEQ ID NO: 3502347 - DNA, 25 bp, Homo sapien
aaggcacttgttcttaacaacagcc

SEQ ID NO: 3502348 - DNA, 25 bp, Homo sapien
ggcacttgttcttaacaacagccat

SEQ ID NO: 3502349 - DNA, 25 bp, Homo sapien
cataaggcacttgttcttaacaaca

SEQ ID NO: 3502350 - DNA, 25 bp, Homo sapien
taaggcacttgttcttaacaacagc

SEQ ID NO: 3502351 - DNA, 25 bp, Homo sapien
tcatggaatatagcacatggcctct

SEQ ID NO: 3502352 - DNA, 25 bp, Homo sapien
tagcacatggcctcttcatgaagaa

SEQ ID NO: 3502353 - DNA, 25 bp, Homo sapien
agcacatggcctcttcatgaagaaa

SEQ ID NO: 3502354 - DNA, 25 bp, Homo sapien
gaatatagcacatggcctcttcatg

SEQ ID NO: 3502355 - DNA, 25 bp, Homo sapien
gaggaaacacatggtcaccaatgtc

SEQ ID NO: 3502356 - DNA, 25 bp, Homo sapien
ctgaggatcaaccaccatgatgaat

SEQ ID NO: 3502357 - DNA, 25 bp, Homo sapien
aagttcatgaccaatcgaccactcc

SEQ ID NO: 3502358 - DNA, 25 bp, Homo sapien
ccaatcgaccactccagaggaaaca

SEQ ID NO: 3502359 - DNA, 25 bp, Homo sapien
ctagagagaacaagtgaacatgtgg

SEQ ID NO: 3502360 - DNA, 25 bp, Homo sapien
gagaacaagtgaacatgtggataat

SEQ ID NO: 3502361 - DNA, 25 bp, Homo sapien
ggctagagagaacaagtgaacatgt

SEQ ID NO: 3502362 - DNA, 25 bp, Homo sapien
gagagaacaagtgaacatgtggata

SEQ ID NO: 3502363 - DNA, 25 bp, Homo sapien
ggttattaggatgagcttttgaggc

SEQ ID NO: 3502364 - DNA, 25 bp, Homo sapien
gagccctgtgcttaggcaggagcta

SEQ ID NO: 3502365 - DNA, 25 bp, Homo sapien
taagctaagctaaggcaggagccct

SEQ ID NO: 3502366 - DNA, 25 bp, Homo sapien
gaggactgccacctcagcgcacttg

SEQ ID NO: 3502367 - DNA, 25 bp, Homo sapien
ctcctcaaagaaatcgctgctgatc

SEQ ID NO: 3502368 - DNA, 25 bp, Homo sapien
gaaatcgctgctgatcctcacacca

SEQ ID NO: 3502369 - DNA, 25 bp, Homo sapien
caaagaaatcgctgctgatcctcac

SEQ ID NO: 3502370 - DNA, 25 bp, Homo sapien
ctaaaagggcactctgttcttcttg

SEQ ID NO: 3502371 - DNA, 25 bp, Homo sapien
acgctaagtgcttctatggatgagc

SEQ ID NO: 3502372 - DNA, 25 bp, Homo sapien
gagtttcagtcctaattcccattta

SEQ ID NO: 3502373 - DNA, 25 bp, Homo sapien
agccaagaactttgtctcttgtgat

SEQ ID NO: 3502374 - DNA, 25 bp, Homo sapien
tttgtctcttgtgatgcaccccaga

SEQ ID NO: 3502375 - DNA, 25 bp, Homo sapien
gatctcagagaaaattcgcctgagt

SEQ ID NO: 3502376 - DNA, 25 bp, Homo sapien
gagaaaattcgcctgagttcagtgt

SEQ ID NO: 3502377 - DNA, 25 bp, Homo sapien
ctcagagaaaattcgcctgagttca

SEQ ID NO: 3502378 - DNA, 25 bp, Homo sapien
tcccgggatctcagagaaaattcgc

SEQ ID NO: 3502379 - DNA, 25 bp, Homo sapien
agcgccccgggggatgcaaggaact

SEQ ID NO: 3502380 - DNA, 25 bp, Homo sapien
ccgggggatgcaaggaactttgcct

SEQ ID NO: 3502381 - DNA, 25 bp, Homo sapien
atgcaaggaactttgcctctctgtc

SEQ ID NO: 3502382 - DNA, 25 bp, Homo sapien
gcaaggaactttgcctctctgtccc

SEQ ID NO: 3502383 - DNA, 25 bp, Homo sapien
agcaacagccgcagcctcttctcct

SEQ ID NO: 3502384 - DNA, 25 bp, Homo sapien
tcttctcctcgggagggacgtcgtc

SEQ ID NO: 3502385 - DNA, 25 bp, Homo sapien
gtgccggtctccttcctgcccggcc

SEQ ID NO: 3502386 - DNA, 25 bp, Homo sapien
tcctccccgtcctcgggctgtgcgc

SEQ ID NO: 3502387 - DNA, 25 bp, Homo sapien
acctgccccggcccaagcggtcgct

SEQ ID NO: 3502388 - DNA, 25 bp, Homo sapien
cctggcctgcgctgcgctcacctgc

SEQ ID NO: 3502389 - DNA, 25 bp, Homo sapien
gccccggcccaagcggtcgctgtcc

SEQ ID NO: 3502390 - DNA, 25 bp, Homo sapien
ctgcgctcacctgccccggcccaag

SEQ ID NO: 3502391 - DNA, 25 bp, Homo sapien
cgaggctgctccaaactcgtggaga

SEQ ID NO: 3502392 - DNA, 25 bp, Homo sapien
tgggaaaaccgaggctgctccaaac

SEQ ID NO: 3502393 - DNA, 25 bp, Homo sapien
gctccaaactcgtggagaattccgc

SEQ ID NO: 3502394 - DNA, 25 bp, Homo sapien
aaaaccgaggctgctccaaactcgt

SEQ ID NO: 3502395 - DNA, 25 bp, Homo sapien
tcgctgtctagagcccggatctgcg

SEQ ID NO: 3502396 - DNA, 25 bp, Homo sapien
tgtcgctgtctagagcccggatctg

SEQ ID NO: 3502397 - DNA, 25 bp, Homo sapien
cggatctgcggcaccatgtccgtct

SEQ ID NO: 3502398 - DNA, 25 bp, Homo sapien
cagggtttgcatgtcgctgtctaga

SEQ ID NO: 3502399 - DNA, 25 bp, Homo sapien
caccgcctcccctttcgagaggcca

SEQ ID NO: 3502400 - DNA, 25 bp, Homo sapien
tcccctttcgagaggccattgtaaa

SEQ ID NO: 3502401 - DNA, 25 bp, Homo sapien
cgcctcccctttcgagaggccattg

SEQ ID NO: 3502402 - DNA, 25 bp, Homo sapien
cctcccctttcgagaggccattgta

SEQ ID NO: 3502403 - DNA, 25 bp, Homo sapien
ctgtgcgccttccgccgacgctccg

SEQ ID NO: 3502404 - DNA, 25 bp, Homo sapien
gcgccttccgccgacgctccgtgag

SEQ ID NO: 3502405 - DNA, 25 bp, Homo sapien
tccgccgacgctccgtgagcctcca

SEQ ID NO: 3502406 - DNA, 25 bp, Homo sapien
gccgacgctccgtgagcctccacat

SEQ ID NO: 3502407 - DNA, 25 bp, Homo sapien
tctggggagtcccaaggtccacacc

SEQ ID NO: 3502408 - DNA, 25 bp, Homo sapien
cttctggggagtcccaaggtccaca

SEQ ID NO: 3502409 - DNA, 25 bp, Homo sapien
ttctggggagtcccaaggtccacac

SEQ ID NO: 3502410 - DNA, 25 bp, Homo sapien
gctgagcagcctccgcagggcactt

SEQ ID NO: 3502411 - DNA, 25 bp, Homo sapien
tgagcagcctccgcagggcactttg

SEQ ID NO: 3502412 - DNA, 25 bp, Homo sapien
taagattcgactgttctgctgagca

SEQ ID NO: 3502413 - DNA, 25 bp, Homo sapien
tcataagattcgactgttctgctga

SEQ ID NO: 3502414 - DNA, 25 bp, Homo sapien
tgggaatccaacatgctaaggaaaa

SEQ ID NO: 3502415 - DNA, 25 bp, Homo sapien
gctgggaatccaacatgctaaggaa

SEQ ID NO: 3502416 - DNA, 25 bp, Homo sapien
ccaacatgctaaggaaaaaggacac

SEQ ID NO: 3502417 - DNA, 25 bp, Homo sapien
gaatccaacatgctaaggaaaaagg

SEQ ID NO: 3502418 - DNA, 25 bp, Homo sapien
gatgaagaaagacatctgcgtcaga

SEQ ID NO: 3502419 - DNA, 25 bp, Homo sapien
tgaagaaagacatctgcgtcagaca

SEQ ID NO: 3502420 - DNA, 25 bp, Homo sapien
gaagaaagacatctgcgtcagacag

SEQ ID NO: 3502421 - DNA, 25 bp, Homo sapien
aaggatgaagaaagacatctgcgtc

SEQ ID NO: 3502422 - DNA, 25 bp, Homo sapien
aatcctggatagggcaacccctggg

SEQ ID NO: 3502423 - DNA, 25 bp, Homo sapien
ggaatcctggatagggcaacccctg

SEQ ID NO: 3502424 - DNA, 25 bp, Homo sapien
gaatcctggatagggcaacccctgg

SEQ ID NO: 3502425 - DNA, 25 bp, Homo sapien
taaaactccatgtctccacattgca

SEQ ID NO: 3502426 - DNA, 25 bp, Homo sapien
aacaccgttcaatcaagtggctgcc

SEQ ID NO: 3502427 - DNA, 25 bp, Homo sapien
ccatcacatagcagagttccctcag

SEQ ID NO: 3502428 - DNA, 25 bp, Homo sapien
accatttaatcacgtagctacctca

SEQ ID NO: 3502429 - DNA, 25 bp, Homo sapien
tgaaggtcacccgttcccagggctc

SEQ ID NO: 3502430 - DNA, 25 bp, Homo sapien
tgctggaggtgcctcttcgtcatat

SEQ ID NO: 3502431 - DNA, 25 bp, Homo sapien
catatgaaggtcacccgttcccagg

SEQ ID NO: 3502432 - DNA, 25 bp, Homo sapien
tgcctcttcgtcatatgaaggtcac

SEQ ID NO: 3502433 - DNA, 25 bp, Homo sapien
ccctcagattgtgaccctagctgca

SEQ ID NO: 3502434 - DNA, 25 bp, Homo sapien
agaggaggccccctcagattgtgac

SEQ ID NO: 3502435 - DNA, 25 bp, Homo sapien
ctcagattgtgaccctagctgcacc

SEQ ID NO: 3502436 - DNA, 25 bp, Homo sapien
caagagcagagtcttccaggggggc

SEQ ID NO: 3502437 - DNA, 25 bp, Homo sapien
gacacacagccccgcctcttctccc

SEQ ID NO: 3502438 - DNA, 25 bp, Homo sapien
cgcagacacacagccccgcctcttc

SEQ ID NO: 3502439 - DNA, 25 bp, Homo sapien
gcagacacacagccccgcctcttct

SEQ ID NO: 3502440 - DNA, 25 bp, Homo sapien
ctggcgcagacacacagccccgcct

SEQ ID NO: 3502441 - DNA, 25 bp, Homo sapien
ccctgccttagcacttgggaatggc

SEQ ID NO: 3502442 - DNA, 25 bp, Homo sapien
tgcttgctaatctccttaaccaggt

SEQ ID NO: 3502443 - DNA, 25 bp, Homo sapien
gcagatggacccttttgaggacata

SEQ ID NO: 3502444 - DNA, 25 bp, Homo sapien
gaatggcacatacgtgccctgtcag

SEQ ID NO: 3502445 - DNA, 25 bp, Homo sapien
tgtataggggccccaaagcaagttg

SEQ ID NO: 3502446 - DNA, 25 bp, Homo sapien
cccagataggcgcagttaaaatggc

SEQ ID NO: 3502447 - DNA, 25 bp, Homo sapien
aaaagacttcatgggggggaatcag

SEQ ID NO: 3502448 - DNA, 25 bp, Homo sapien
tacaggtctgattatagctccagag

SEQ ID NO: 3502449 - DNA, 25 bp, Homo sapien
aaagtgcctcatgtagagctcccgg

SEQ ID NO: 3502450 - DNA, 25 bp, Homo sapien
tgggccactgccttatccagggagc

SEQ ID NO: 3502451 - DNA, 25 bp, Homo sapien
gattcaactcccagtacaaggtgtt

SEQ ID NO: 3502452 - DNA, 25 bp, Homo sapien
tgcagggcccggatcaggtagaaat

SEQ ID NO: 3502453 - DNA, 25 bp, Homo sapien
cgatcatcaaagccgccagcgccat

SEQ ID NO: 3502454 - DNA, 25 bp, Homo sapien
gggcgatcatcaaagccgccagcgc

SEQ ID NO: 3502455 - DNA, 25 bp, Homo sapien
agggcgatcatcaaagccgccagcg

SEQ ID NO: 3502456 - DNA, 25 bp, Homo sapien
ccgcagtttggctccgcctgagagg

SEQ ID NO: 3502457 - DNA, 25 bp, Homo sapien
tccagtctggggacctttccgagac

SEQ ID NO: 3502458 - DNA, 25 bp, Homo sapien
gctggaggcagatctggaccctgtc

SEQ ID NO: 3502459 - DNA, 25 bp, Homo sapien
tctccaggcgcacgggatcccgggt

SEQ ID NO: 3502460 - DNA, 25 bp, Homo sapien
aaaggttctcgaggctaactgtagc

SEQ ID NO: 3502461 - DNA, 25 bp, Homo sapien
tctgcgggaccctctttggctgtga

SEQ ID NO: 3502462 - DNA, 25 bp, Homo sapien
agggcagggactgaggagcaattcc

SEQ ID NO: 3502463 - DNA, 25 bp, Homo sapien
tccggagtccggctgaaagcaaagg

SEQ ID NO: 3502464 - DNA, 25 bp, Homo sapien
gggactgtacatcaactttagtgac

SEQ ID NO: 3502465 - DNA, 25 bp, Homo sapien
agtggggggactgtacatcaacttt

SEQ ID NO: 3502466 - DNA, 25 bp, Homo sapien
gcagtggggggactgtacatcaact

SEQ ID NO: 3502467 - DNA, 25 bp, Homo sapien
ttagcagtggggggactgtacatca

SEQ ID NO: 3502468 - DNA, 25 bp, Homo sapien
gttctgataacccaccaccatggac

SEQ ID NO: 3502469 - DNA, 25 bp, Homo sapien
ataacccaccaccatggacaccagc

SEQ ID NO: 3502470 - DNA, 25 bp, Homo sapien
ccaactttagtgacagtgacattaa

SEQ ID NO: 3502471 - DNA, 25 bp, Homo sapien
tgacagtgacattaataagttctga

SEQ ID NO: 3502472 - DNA, 25 bp, Homo sapien
ggtgtgtagacaatgagtgctccct

SEQ ID NO: 3502473 - DNA, 25 bp, Homo sapien
agcagatccctgtgacttagtccca

SEQ ID NO: 3502474 - DNA, 25 bp, Homo sapien
ccaaatgtctgtagggcctcctgct

SEQ ID NO: 3502475 - DNA, 25 bp, Homo sapien
ggaaactcgactgagaatccccgac

SEQ ID NO: 3502476 - DNA, 25 bp, Homo sapien
gctgttgagaatgtgaccatggtca

SEQ ID NO: 3502477 - DNA, 25 bp, Homo sapien
cacagacatcgtggctcgtggcaag

SEQ ID NO: 3502478 - DNA, 25 bp, Homo sapien
gacactgggaccacagtaatgcagg

SEQ ID NO: 3502479 - DNA, 25 bp, Homo sapien
gctacgtggtgcagtagggcttcct

SEQ ID NO: 3502480 - DNA, 25 bp, Homo sapien
gcgtcgaacgggaaggctgctacat

SEQ ID NO: 3502481 - DNA, 25 bp, Homo sapien
gcgcaagcagcgagatgagcacgca

SEQ ID NO: 3502482 - DNA, 25 bp, Homo sapien
accacgttggtgctggcggaacctg

SEQ ID NO: 3502483 - DNA, 25 bp, Homo sapien
agcgacaccttctcgcctgagtcgg

SEQ ID NO: 3502484 - DNA, 25 bp, Homo sapien
taagttcgagacactcacgacgcag

SEQ ID NO: 3502485 - DNA, 25 bp, Homo sapien
tgctggcctgatggcaggacatcag

SEQ ID NO: 3502486 - DNA, 25 bp, Homo sapien
tgcttatccaaagggcaccagtagg

SEQ ID NO: 3502487 - DNA, 25 bp, Homo sapien
tccccagaatattgaggctcgttaa

SEQ ID NO: 3502488 - DNA, 25 bp, Homo sapien
taggttccgaggagacgttcagcct

SEQ ID NO: 3502489 - DNA, 25 bp, Homo sapien
gagctaaaagtgtgccctagagagg

SEQ ID NO: 3502490 - DNA, 25 bp, Homo sapien
cacagacgtagccagaggatgtata

SEQ ID NO: 3502491 - DNA, 25 bp, Homo sapien
tctgcaaaacttgtagaagggcccc

SEQ ID NO: 3502492 - DNA, 25 bp, Homo sapien
tatagagtacgatgtctggccgcca

SEQ ID NO: 3502493 - DNA, 25 bp, Homo sapien
tatccacagatacagggtcagcacc

SEQ ID NO: 3502494 - DNA, 25 bp, Homo sapien
gggtcccatcgtaggtaggcatctg

SEQ ID NO: 3502495 - DNA, 25 bp, Homo sapien
tgtctggccgccacacaagactgct

SEQ ID NO: 3502496 - DNA, 25 bp, Homo sapien
ccttcatttcttgacactgtgacag

SEQ ID NO: 3502497 - DNA, 25 bp, Homo sapien
acaggtaagactccacagctgtacc

SEQ ID NO: 3502498 - DNA, 25 bp, Homo sapien
ccacagctgtaccaccaccacaacg

SEQ ID NO: 3502499 - DNA, 25 bp, Homo sapien
cttgacactgtgacaggtaagactc

SEQ ID NO: 3502500 - DNA, 25 bp, Homo sapien
tcagggcacttgtgtagttggcaaa

SEQ ID NO: 3502501 - DNA, 25 bp, Homo sapien
tcacattcagagtctggtctgtgtc

SEQ ID NO: 3502502 - DNA, 25 bp, Homo sapien
tcgatgatctgggacagtgtcacct

SEQ ID NO: 3502503 - DNA, 25 bp, Homo sapien
agcttgagagccagccggccctcag

SEQ ID NO: 3502504 - DNA, 25 bp, Homo sapien
ctgcagggagtagaaacagaagcag

SEQ ID NO: 3502505 - DNA, 25 bp, Homo sapien
ggctgaggtggtggctccggagccc

SEQ ID NO: 3502506 - DNA, 25 bp, Homo sapien
tgaggtggtggctccggagccccat

SEQ ID NO: 3502507 - DNA, 25 bp, Homo sapien
gcagggagtagaaacagaagcagaa

SEQ ID NO: 3502508 - DNA, 25 bp, Homo sapien
gcaggtctctggatgtgaggcctcc

SEQ ID NO: 3502509 - DNA, 25 bp, Homo sapien
cctggccagacctagggcaaaatta

SEQ ID NO: 3502510 - DNA, 25 bp, Homo sapien
tctctggatgtgaggcctcctggcc

SEQ ID NO: 3502511 - DNA, 25 bp, Homo sapien
tcctggccagacctagggcaaaatt

SEQ ID NO: 3502512 - DNA, 25 bp, Homo sapien
tacttccctggcaatcacatccata

SEQ ID NO: 3502513 - DNA, 25 bp, Homo sapien
tagccatgactttgggcatcgtgga

SEQ ID NO: 3502514 - DNA, 25 bp, Homo sapien
acagcagcacatacttccctggcaa

SEQ ID NO: 3502515 - DNA, 25 bp, Homo sapien
catcgtggatatgccagtgattccc

SEQ ID NO: 3502516 - DNA, 25 bp, Homo sapien
tattttttaagaaagtagcttcaga

SEQ ID NO: 3502517 - DNA, 25 bp, Homo sapien
ttaagaaagtagcttcagaaaaaga

SEQ ID NO: 3502518 - DNA, 25 bp, Homo sapien
taagaaagtagcttcagaaaaagag

SEQ ID NO: 3502519 - DNA, 25 bp, Homo sapien
ttgcctgagatagccctaacaccag

SEQ ID NO: 3502520 - DNA, 25 bp, Homo sapien
ctaacaccagctatctcatgccatt

SEQ ID NO: 3502521 - DNA, 25 bp, Homo sapien
cccaggtgtggccatattgcctgag

SEQ ID NO: 3502522 - DNA, 25 bp, Homo sapien
gccatattgcctgagatagccctaa

SEQ ID NO: 3502523 - DNA, 25 bp, Homo sapien
tgcaggcaaatccagacagagtctc

SEQ ID NO: 3502524 - DNA, 25 bp, Homo sapien
caaaggtatggtgttcatggaactc

SEQ ID NO: 3502525 - DNA, 25 bp, Homo sapien
gaagatcaatccctccgtgacaggc

SEQ ID NO: 3502526 - DNA, 25 bp, Homo sapien
gccctaagtgtgtcagaaagatccc

SEQ ID NO: 3502527 - DNA, 25 bp, Homo sapien
gaggatggtaaactgtctcctcttc

SEQ ID NO: 3502528 - DNA, 25 bp, Homo sapien
ctgaatgatcttgaggatggtaaac

SEQ ID NO: 3502529 - DNA, 25 bp, Homo sapien
gaagcccttatgctacgttcagtat

SEQ ID NO: 3502530 - DNA, 25 bp, Homo sapien
gaacaagtggaggatgctgcttctg

SEQ ID NO: 3502531 - DNA, 25 bp, Homo sapien
cagcaggttggctacacgtttggcc

SEQ ID NO: 3502532 - DNA, 25 bp, Homo sapien
tcaggcatgggaagccggccaatgt

SEQ ID NO: 3502533 - DNA, 25 bp, Homo sapien
caacagccagttctcgcagatagga

SEQ ID NO: 3502534 - DNA, 25 bp, Homo sapien
taaggctgcgcagttcgtccatggc

SEQ ID NO: 3502535 - DNA, 25 bp, Homo sapien
tttagcactgtaacactgaatctgc

SEQ ID NO: 3502536 - DNA, 25 bp, Homo sapien
ctgactgagccaggcgatctttagc

SEQ ID NO: 3502537 - DNA, 25 bp, Homo sapien
actgaatctgctctatccgactgca

SEQ ID NO: 3502538 - DNA, 25 bp, Homo sapien
tgctctatccgactgcacagtgaag

SEQ ID NO: 3502539 - DNA, 25 bp, Homo sapien
cactttgatgtgtaactgctccagg

SEQ ID NO: 3502540 - DNA, 25 bp, Homo sapien
tcactttgatgtgtaactgctccag

SEQ ID NO: 3502541 - DNA, 25 bp, Homo sapien
tttgatgtgtaactgctccaggtca

SEQ ID NO: 3502542 - DNA, 25 bp, Homo sapien
ctttgatgtgtaactgctccaggtc

SEQ ID NO: 3502543 - DNA, 25 bp, Homo sapien
caaggggagttcctatcactccaat

SEQ ID NO: 3502544 - DNA, 25 bp, Homo sapien
aagcagagaagccaattaatccaag

SEQ ID NO: 3502545 - DNA, 25 bp, Homo sapien
agaagccaattaatccaaggggagt

SEQ ID NO: 3502546 - DNA, 25 bp, Homo sapien
ccaaggggagttcctatcactccaa

SEQ ID NO: 3502547 - DNA, 25 bp, Homo sapien
taagcatttagtagaggccgaggtc

SEQ ID NO: 3502548 - DNA, 25 bp, Homo sapien
tttggtaagggcagaacacatactg

SEQ ID NO: 3502549 - DNA, 25 bp, Homo sapien
tgcttggcatacagtgagttctcca

SEQ ID NO: 3502550 - DNA, 25 bp, Homo sapien
tgtgctggcacattgatagtaccct

SEQ ID NO: 3502551 - DNA, 25 bp, Homo sapien
tatatggcggagcatttcaatgact

SEQ ID NO: 3502552 - DNA, 25 bp, Homo sapien
tatagtccaggtaaacaagcccaga

SEQ ID NO: 3502553 - DNA, 25 bp, Homo sapien
caggtcttccaagaaccccttcagg

SEQ ID NO: 3502554 - DNA, 25 bp, Homo sapien
gatgtttcccaatcctgaattaggc

SEQ ID NO: 3502555 - DNA, 25 bp, Homo sapien
aaacaaagtattgagcacaatgtct

SEQ ID NO: 3502556 - DNA, 25 bp, Homo sapien
ctgaagaaacaaagtattgagcaca

SEQ ID NO: 3502557 - DNA, 25 bp, Homo sapien
attgagcacaatgtctgcacaagtg

SEQ ID NO: 3502558 - DNA, 25 bp, Homo sapien
aagtattgagcacaatgtctgcaca

SEQ ID NO: 3502559 - DNA, 25 bp, Homo sapien
ggaatcgctatctatatggcagcta

SEQ ID NO: 3502560 - DNA, 25 bp, Homo sapien
ggcctacaaatacatctacaatggt

SEQ ID NO: 3502561 - DNA, 25 bp, Homo sapien
tgcccatgggttgcagagtagatgt

SEQ ID NO: 3502562 - DNA, 25 bp, Homo sapien
agttcactggcatggtcgtggctca

SEQ ID NO: 3502563 - DNA, 25 bp, Homo sapien
cagaactgaagggaggttaggcttt

SEQ ID NO: 3502564 - DNA, 25 bp, Homo sapien
agggagagttaacttgtcctttgca

SEQ ID NO: 3502565 - DNA, 25 bp, Homo sapien
tgtttttccgtttacagagcacagg

SEQ ID NO: 3502566 - DNA, 25 bp, Homo sapien
caaaaactttctccgcatcagccag

SEQ ID NO: 3502567 - DNA, 25 bp, Homo sapien
gatttgattcaagatggccatgtcc

SEQ ID NO: 3502568 - DNA, 25 bp, Homo sapien
taacaatattgctatctacccctgc

SEQ ID NO: 3502569 - DNA, 25 bp, Homo sapien
tatggatgcagttggtggcacccca

SEQ ID NO: 3502570 - DNA, 25 bp, Homo sapien
taaagttagagttgtgctacccttc

SEQ ID NO: 3502571 - DNA, 25 bp, Homo sapien
ctaagtgtcggatgatgagcttgtg

SEQ ID NO: 3502572 - DNA, 25 bp, Homo sapien
cagaagctaagtgtcggatgatgag

SEQ ID NO: 3502573 - DNA, 25 bp, Homo sapien
ttgtggcagcggttccagtgctcag

SEQ ID NO: 3502574 - DNA, 25 bp, Homo sapien
tgagcttgtggcagcggttccagtg

SEQ ID NO: 3502575 - DNA, 25 bp, Homo sapien
aacagctggcagtgccgggtaagca

SEQ ID NO: 3502576 - DNA, 25 bp, Homo sapien
gattccatgtgtgctcgcacagctt

SEQ ID NO: 3502577 - DNA, 25 bp, Homo sapien
aggtacacggagcttctgggtaagg

SEQ ID NO: 3502578 - DNA, 25 bp, Homo sapien
ttggcctcgtggatccatttggcag

SEQ ID NO: 3502579 - DNA, 25 bp, Homo sapien
tcaagctggccagcgtaactggcct

SEQ ID NO: 3502580 - DNA, 25 bp, Homo sapien
ctgagttgtcaatgtgcaggaggac

SEQ ID NO: 3502581 - DNA, 25 bp, Homo sapien
gccagcgtaactggcctgtagcaca

SEQ ID NO: 3502582 - DNA, 25 bp, Homo sapien
cctcactttcaagctggccagcgta

SEQ ID NO: 3502583 - DNA, 25 bp, Homo sapien
gctgttatgcttcgaggctccagca

SEQ ID NO: 3502584 - DNA, 25 bp, Homo sapien
cttcacactgcgctgagagatgggt

SEQ ID NO: 3502585 - DNA, 25 bp, Homo sapien
atgggtgtagttaagagccctcagc

SEQ ID NO: 3502586 - DNA, 25 bp, Homo sapien
ccagcttaggcggtagtccaaagga

SEQ ID NO: 3502587 - DNA, 25 bp, Homo sapien
gagctttaacatatgtagacacctg

SEQ ID NO: 3502588 - DNA, 25 bp, Homo sapien
ccaccatcacgatcaagaaaataaa

SEQ ID NO: 3502589 - DNA, 25 bp, Homo sapien
tgacatatttaaaactgcacgtatc

SEQ ID NO: 3502590 - DNA, 25 bp, Homo sapien
aactgcacgtatctagagtacacaa

SEQ ID NO: 3502591 - DNA, 25 bp, Homo sapien
gagacgttgttaaagatcctacaga

SEQ ID NO: 3502592 - DNA, 25 bp, Homo sapien
caatagacacaactaatgaggccag

SEQ ID NO: 3502593 - DNA, 25 bp, Homo sapien
gattgctaaactctaggtacaccaa

SEQ ID NO: 3502594 - DNA, 25 bp, Homo sapien
attttgtgactttaggccgggtgcg

SEQ ID NO: 3502595 - DNA, 25 bp, Homo sapien
gacatctcgaagtggtgtctgtgag

SEQ ID NO: 3502596 - DNA, 25 bp, Homo sapien
agttttgctcctccgctatcacaca

SEQ ID NO: 3502597 - DNA, 25 bp, Homo sapien
gtgaaagcagacatctcgaagtggt

SEQ ID NO: 3502598 - DNA, 25 bp, Homo sapien
gtgagttttgctcctccgctatcac

SEQ ID NO: 3502599 - DNA, 25 bp, Homo sapien
gagcaggcatatctgtcactgtcag

SEQ ID NO: 3502600 - DNA, 25 bp, Homo sapien
ccagatacgaaggaagtggggagca

SEQ ID NO: 3502601 - DNA, 25 bp, Homo sapien
gggagcaggcatatctgtcactgtc

SEQ ID NO: 3502602 - DNA, 25 bp, Homo sapien
ctccagatacgaaggaagtggggag

SEQ ID NO: 3502603 - DNA, 25 bp, Homo sapien
gcttggctctattggccacatatac

SEQ ID NO: 3502604 - DNA, 25 bp, Homo sapien
catcagatttcctggctccgcttca

SEQ ID NO: 3502605 - DNA, 25 bp, Homo sapien
gaagtagccttgtccagaggaagga

SEQ ID NO: 3502606 - DNA, 25 bp, Homo sapien
tcaatttgacaatactttaacaccc

SEQ ID NO: 3502607 - DNA, 25 bp, Homo sapien
tgctgagcgccctagaaatggaggc

SEQ ID NO: 3502608 - DNA, 25 bp, Homo sapien
gatagccagggagcgtttccaatcc

SEQ ID NO: 3502609 - DNA, 25 bp, Homo sapien
ctgggagcacacgtttatttgcttc

SEQ ID NO: 3502610 - DNA, 25 bp, Homo sapien
gaggctgttggtggaagcaaatacc

SEQ ID NO: 3502611 - DNA, 25 bp, Homo sapien
ccaacagagcaaagatgcgcagtct

SEQ ID NO: 3502612 - DNA, 25 bp, Homo sapien
taaaagaagagcaagacgatgatcc

SEQ ID NO: 3502613 - DNA, 25 bp, Homo sapien
tgcgcagtctctcatcctggatgaa

SEQ ID NO: 3502614 - DNA, 25 bp, Homo sapien
tggagctgatgccagtccaccaact

SEQ ID NO: 3502615 - DNA, 25 bp, Homo sapien
caaaataaatccagtcgatggctcc

SEQ ID NO: 3502616 - DNA, 25 bp, Homo sapien
ccataaatagtaccagacggaggct

SEQ ID NO: 3502617 - DNA, 25 bp, Homo sapien
tgacagtggaatgcaacaagccctt

SEQ ID NO: 3502618 - DNA, 25 bp, Homo sapien
tacatgttggtgtcctggtgagcat

SEQ ID NO: 3502619 - DNA, 25 bp, Homo sapien
gaggcgcagagaaggaccatatgcc

SEQ ID NO: 3502620 - DNA, 25 bp, Homo sapien
agagaaggaccatatgccttcccca

SEQ ID NO: 3502621 - DNA, 25 bp, Homo sapien
gagtaggaaggcgacagaggcgcag

SEQ ID NO: 3502622 - DNA, 25 bp, Homo sapien
cgacagaggcgcagagaaggaccat

SEQ ID NO: 3502623 - DNA, 25 bp, Homo sapien
gatagccagcgggagaaagctcttc

SEQ ID NO: 3502624 - DNA, 25 bp, Homo sapien
catgtcaggctccagtgcttcacaa

SEQ ID NO: 3502625 - DNA, 25 bp, Homo sapien
caatctgaggtgtggcagtacagga

SEQ ID NO: 3502626 - DNA, 25 bp, Homo sapien
cccatagggcttcacatagtgtcca

SEQ ID NO: 3502627 - DNA, 25 bp, Homo sapien
gtgcttctggtaagtctcctgatgc

SEQ ID NO: 3502628 - DNA, 25 bp, Homo sapien
tgcttctggtaagtctcctgatgct

SEQ ID NO: 3502629 - DNA, 25 bp, Homo sapien
gcttctggtaagtctcctgatgctt

SEQ ID NO: 3502630 - DNA, 25 bp, Homo sapien
gagaggacacagttcatccacatgg

SEQ ID NO: 3502631 - DNA, 25 bp, Homo sapien
gctccagaggtgtctgatataattt

SEQ ID NO: 3502632 - DNA, 25 bp, Homo sapien
tgtgttttaatttgagctccagagg

SEQ ID NO: 3502633 - DNA, 25 bp, Homo sapien
ccaatctgcatagtcatgaatgaca

SEQ ID NO: 3502634 - DNA, 25 bp, Homo sapien
gtgaactttgaatggggactcagtt

SEQ ID NO: 3502635 - DNA, 25 bp, Homo sapien
agtgaactttgaatggggactcagt

SEQ ID NO: 3502636 - DNA, 25 bp, Homo sapien
tcacctatcatgttgcctttctcaa

SEQ ID NO: 3502637 - DNA, 25 bp, Homo sapien
gccccaaccaacacgaaatgagcgt

SEQ ID NO: 3502638 - DNA, 25 bp, Homo sapien
aatgagcgtcccatgaatagggcca

SEQ ID NO: 3502639 - DNA, 25 bp, Homo sapien
caaactccatggaatcggcaatctg

SEQ ID NO: 3502640 - DNA, 25 bp, Homo sapien
ttctagttcatgagagccattcagc

SEQ ID NO: 3502641 - DNA, 25 bp, Homo sapien
tcacgagggactaggcctagttgcc

SEQ ID NO: 3502642 - DNA, 25 bp, Homo sapien
aggcctagttgcctacgtgtaccca

SEQ ID NO: 3502643 - DNA, 25 bp, Homo sapien
gacttttcacgagggactaggccta

SEQ ID NO: 3502644 - DNA, 25 bp, Homo sapien
ggtgacagacttttcacgagggact

SEQ ID NO: 3502645 - DNA, 25 bp, Homo sapien
gggctgggcattgtgaacacagaag

SEQ ID NO: 3502646 - DNA, 25 bp, Homo sapien
gctgggcattgtgaacacagaagtc

SEQ ID NO: 3502647 - DNA, 25 bp, Homo sapien
ggctgggcattgtgaacacagaagt

SEQ ID NO: 3502648 - DNA, 25 bp, Homo sapien
gtacgacattcttgcacagagacac

SEQ ID NO: 3502649 - DNA, 25 bp, Homo sapien
tgctctgggagtacgacattcttgc

SEQ ID NO: 3502650 - DNA, 25 bp, Homo sapien
atgctgctctgggagtacgacattc

SEQ ID NO: 3502651 - DNA, 25 bp, Homo sapien
ggatgggatattcattaaagatgct

SEQ ID NO: 3502652 - DNA, 25 bp, Homo sapien
tcttcatcagtaagcaatgatgctt

SEQ ID NO: 3502653 - DNA, 25 bp, Homo sapien
gaagcgttgatccagtgccatatct

SEQ ID NO: 3502654 - DNA, 25 bp, Homo sapien
tctgctttggaaggcaggcgactga

SEQ ID NO: 3502655 - DNA, 25 bp, Homo sapien
aacgagttttcgacgagtgggatgc

SEQ ID NO: 3502656 - DNA, 25 bp, Homo sapien
cccagtgaagatgcaatatgtgttg

SEQ ID NO: 3502657 - DNA, 25 bp, Homo sapien
tctaacatggtatccaaaactggct

SEQ ID NO: 3502658 - DNA, 25 bp, Homo sapien
ctgtaagacatgtggattaattccc

SEQ ID NO: 3502659 - DNA, 25 bp, Homo sapien
ggctcctgggtgatatctaccatgt

SEQ ID NO: 3502660 - DNA, 25 bp, Homo sapien
catttcatttgtcaatggagatttc

SEQ ID NO: 3502661 - DNA, 25 bp, Homo sapien
gatgatacaaagcatatgacagaca

SEQ ID NO: 3502662 - DNA, 25 bp, Homo sapien
ctggaaaaccaagtctatagcattt

SEQ ID NO: 3502663 - DNA, 25 bp, Homo sapien
ccctgtacgcgcaaacatgtatata

SEQ ID NO: 3502664 - DNA, 25 bp, Homo sapien
aatgtaggccctaatctccccaagc

SEQ ID NO: 3502665 - DNA, 25 bp, Homo sapien
tgctttcaacttcggtatcacggat

SEQ ID NO: 3502666 - DNA, 25 bp, Homo sapien
tgaacccacatgagcaaatcttaag

SEQ ID NO: 3502667 - DNA, 25 bp, Homo sapien
tgagcagagaattcagcaagtccaa

SEQ ID NO: 3502668 - DNA, 25 bp, Homo sapien
aatcctgaaggccatacttagaaaa

SEQ ID NO: 3502669 - DNA, 25 bp, Homo sapien
tgtactagttttagacggatgctcc

SEQ ID NO: 3502670 - DNA, 25 bp, Homo sapien
tctgcaagggcgtagtctggcttgc

SEQ ID NO: 3502671 - DNA, 25 bp, Homo sapien
aggtgcaggtttgccattaagagcc

SEQ ID NO: 3502672 - DNA, 25 bp, Homo sapien
ggcgatctgggctctttattaaaca

SEQ ID NO: 3502673 - DNA, 25 bp, Homo sapien
catagttgatatcagcaaggcgatc

SEQ ID NO: 3502674 - DNA, 25 bp, Homo sapien
tatctgttggccaaactccatccaa

SEQ ID NO: 3502675 - DNA, 25 bp, Homo sapien
gaattgagctccctgtttccttgaa

SEQ ID NO: 3502676 - DNA, 25 bp, Homo sapien
ttgtgtgttatccttgtgagggacc

SEQ ID NO: 3502677 - DNA, 25 bp, Homo sapien
gtgttatccttgtgagggaccatgc

SEQ ID NO: 3502678 - DNA, 25 bp, Homo sapien
tgtatttgtgtgttatccttgtgag

SEQ ID NO: 3502679 - DNA, 25 bp, Homo sapien
tgtgtgttatccttgtgagggacca

SEQ ID NO: 3502680 - DNA, 25 bp, Homo sapien
ggaaaagccttctgtatttgagtgc

SEQ ID NO: 3502681 - DNA, 25 bp, Homo sapien
tactgaataaggtaacgcttgcctc

SEQ ID NO: 3502682 - DNA, 25 bp, Homo sapien
taaacgcttagtagaattcaccaat

SEQ ID NO: 3502683 - DNA, 25 bp, Homo sapien
caatatactcatcaagtggtctgta

SEQ ID NO: 3502684 - DNA, 25 bp, Homo sapien
ccttcaaaatagattgaaccataac

SEQ ID NO: 3502685 - DNA, 25 bp, Homo sapien
gatttgtcaaattcacatctccttc

SEQ ID NO: 3502686 - DNA, 25 bp, Homo sapien
gacaactacttctttcctccggata

SEQ ID NO: 3502687 - DNA, 25 bp, Homo sapien
ggttatcatctaagtagacaactac

SEQ ID NO: 3502688 - DNA, 25 bp, Homo sapien
cctgaacctcctaaactgaaacaat

SEQ ID NO: 3502689 - DNA, 25 bp, Homo sapien
gcctgaacctcctaaactgaaacaa

SEQ ID NO: 3502690 - DNA, 25 bp, Homo sapien
ctgaacctcctaaactgaaacaatc

SEQ ID NO: 3502691 - DNA, 25 bp, Homo sapien
agcctgaacctcctaaactgaaaca

SEQ ID NO: 3502692 - DNA, 25 bp, Homo sapien
gatggaatagtatagtaaccaacct

SEQ ID NO: 3502693 - DNA, 25 bp, Homo sapien
gcaaggtcatccatagatggaatag

SEQ ID NO: 3502694 - DNA, 25 bp, Homo sapien
ccgaccaatagtgaaatcagagaca

SEQ ID NO: 3502695 - DNA, 25 bp, Homo sapien
taaccaaccttagtgagaataatac

SEQ ID NO: 3502696 - DNA, 25 bp, Homo sapien
atgattcctaggagaaggggtgtgt

SEQ ID NO: 3502697 - DNA, 25 bp, Homo sapien
catgattcctaggagaaggggtgtg

SEQ ID NO: 3502698 - DNA, 25 bp, Homo sapien
aataatcagcaactaaatcatcata

SEQ ID NO: 3502699 - DNA, 25 bp, Homo sapien
tttaagtttattgtagatatcaggt

SEQ ID NO: 3502700 - DNA, 25 bp, Homo sapien
ttaagtttattgtagatatcaggtc

SEQ ID NO: 3502701 - DNA, 25 bp, Homo sapien
agtttattgtagatatcaggtcttg

SEQ ID NO: 3502702 - DNA, 25 bp, Homo sapien
taagtttattgtagatatcaggtct

SEQ ID NO: 3502703 - DNA, 25 bp, Homo sapien
tctaaggtccaaagagtatgtgaac

SEQ ID NO: 3502704 - DNA, 25 bp, Homo sapien
tgggttctttagactacaccaggat

SEQ ID NO: 3502705 - DNA, 25 bp, Homo sapien
tctatccgagtttacaaagccaggg

SEQ ID NO: 3502706 - DNA, 25 bp, Homo sapien
tgagaggtcctgatccctggaggtt

SEQ ID NO: 3502707 - DNA, 25 bp, Homo sapien
ttccagcccatttcgcaaagcagca

SEQ ID NO: 3502708 - DNA, 25 bp, Homo sapien
gcagcacgcatgtttaatgcaacaa

SEQ ID NO: 3502709 - DNA, 25 bp, Homo sapien
tggtgattctcatcaacaggtttgc

SEQ ID NO: 3502710 - DNA, 25 bp, Homo sapien
tgcaacaatggtatcatccacactg

SEQ ID NO: 3502711 - DNA, 25 bp, Homo sapien
gaaaagagattgctattattaaggt

SEQ ID NO: 3502712 - DNA, 25 bp, Homo sapien
cattttctggatattcagatggtga

SEQ ID NO: 3502713 - DNA, 25 bp, Homo sapien
cagatggtgaagctagattttctga

SEQ ID NO: 3502714 - DNA, 25 bp, Homo sapien
tttctgaatcacgattaacaggaga

SEQ ID NO: 3502715 - DNA, 25 bp, Homo sapien
caggagcgagaacatcaataatgcc

SEQ ID NO: 3502716 - DNA, 25 bp, Homo sapien
aataggaaacaatcacaggagcgag

SEQ ID NO: 3502717 - DNA, 25 bp, Homo sapien
cagtaatactgggagatccctggtc

SEQ ID NO: 3502718 - DNA, 25 bp, Homo sapien
taggtgtccctatagacgccactga

SEQ ID NO: 3502719 - DNA, 25 bp, Homo sapien
tgttcagagcagtaatgggaaatcc

SEQ ID NO: 3502720 - DNA, 25 bp, Homo sapien
caaaaatagtgtcgcaagagtagtc

SEQ ID NO: 3502721 - DNA, 25 bp, Homo sapien
ggaggccaagtcagaataatcccga

SEQ ID NO: 3502722 - DNA, 25 bp, Homo sapien
catgtgagtacagagcgtcagggtt

SEQ ID NO: 3502723 - DNA, 25 bp, Homo sapien
tgtaaagcctttggccggactctag

SEQ ID NO: 3502724 - DNA, 25 bp, Homo sapien
gcatgaatgctccattggctaggga

SEQ ID NO: 3502725 - DNA, 25 bp, Homo sapien
tcatccagcccatcaaagagatgtg

SEQ ID NO: 3502726 - DNA, 25 bp, Homo sapien
tggctagggatggttcatcgtcatc

SEQ ID NO: 3502727 - DNA, 25 bp, Homo sapien
ccaaaaggtgagtatgttagactat

SEQ ID NO: 3502728 - DNA, 25 bp, Homo sapien
ttagggtctgacatcggattccgga

SEQ ID NO: 3502729 - DNA, 25 bp, Homo sapien
tctccaaaaggtgagtatgttagac

SEQ ID NO: 3502730 - DNA, 25 bp, Homo sapien
tgacatcggattccggaagagagga

SEQ ID NO: 3502731 - DNA, 25 bp, Homo sapien
gagagtatcttgatagattagcaaa

SEQ ID NO: 3502732 - DNA, 25 bp, Homo sapien
aacaaacaagcactagttaagcaac

SEQ ID NO: 3502733 - DNA, 25 bp, Homo sapien
gcaactactggtattacattcaatc

SEQ ID NO: 3502734 - DNA, 25 bp, Homo sapien
gacacaggtaagagagtatcttgat

SEQ ID NO: 3502735 - DNA, 25 bp, Homo sapien
aagtggctgtcgtagtattaaatcc

SEQ ID NO: 3502736 - DNA, 25 bp, Homo sapien
tcccaaacaaagatgcctgtccagc

SEQ ID NO: 3502737 - DNA, 25 bp, Homo sapien
gccccaaaggctcctgtaccaagag

SEQ ID NO: 3502738 - DNA, 25 bp, Homo sapien
caagaggccctccaatcttaggttg

SEQ ID NO: 3502739 - DNA, 25 bp, Homo sapien
tcttcaaatgctgattgcaggcaac

SEQ ID NO: 3502740 - DNA, 25 bp, Homo sapien
ggattagaagcataacccattaggc

SEQ ID NO: 3502741 - DNA, 25 bp, Homo sapien
ggtactatcgtaacccactgcagca

SEQ ID NO: 3502742 - DNA, 25 bp, Homo sapien
ccattaggcccagcctactgatttt

SEQ ID NO: 3502743 - DNA, 25 bp, Homo sapien
tccaaaaatactattcccactggta

SEQ ID NO: 3502744 - DNA, 25 bp, Homo sapien
gttccaaatcctgcaccaagcccag

SEQ ID NO: 3502745 - DNA, 25 bp, Homo sapien
atcctgcaccaagcccagttccaag

SEQ ID NO: 3502746 - DNA, 25 bp, Homo sapien
ctattcccactggtatttgtgccaa

SEQ ID NO: 3502747 - DNA, 25 bp, Homo sapien
ggccaatgccggcagaccatgaggt

SEQ ID NO: 3502748 - DNA, 25 bp, Homo sapien
cagaccatgaggtcacaacatcgag

SEQ ID NO: 3502749 - DNA, 25 bp, Homo sapien
ggaggccaatgccggcagaccatga

SEQ ID NO: 3502750 - DNA, 25 bp, Homo sapien
ccatgaggtcacaacatcgagacca

SEQ ID NO: 3502751 - DNA, 25 bp, Homo sapien
taacgtgtggtatagtcagtgtaac

SEQ ID NO: 3502752 - DNA, 25 bp, Homo sapien
gctaccgcttacctgagaactttta

SEQ ID NO: 3502753 - DNA, 25 bp, Homo sapien
tgtaactttaagagagccaaacctg

SEQ ID NO: 3502754 - DNA, 25 bp, Homo sapien
tacgaatcaggagaataacgtgtgg

SEQ ID NO: 3502755 - DNA, 25 bp, Homo sapien
tgtttgtattggttcctaaagtcag

SEQ ID NO: 3502756 - DNA, 25 bp, Homo sapien
gtgtttgtattggttcctaaagtca

SEQ ID NO: 3502757 - DNA, 25 bp, Homo sapien
gctgcttccaaatgtagtaagcttg

SEQ ID NO: 3502758 - DNA, 25 bp, Homo sapien
tgcactggttgtgctgcttccaaat

SEQ ID NO: 3502759 - DNA, 25 bp, Homo sapien
tgtagtaagcttgttattgccaaac

SEQ ID NO: 3502760 - DNA, 25 bp, Homo sapien
ggttgtgctgcttccaaatgtagta

SEQ ID NO: 3502761 - DNA, 25 bp, Homo sapien
tgtcccaaaaagacctccaggctgt

SEQ ID NO: 3502762 - DNA, 25 bp, Homo sapien
ccagtattggtctgcccaaagagac

SEQ ID NO: 3502763 - DNA, 25 bp, Homo sapien
gaggcttgggttactccaaataatc

SEQ ID NO: 3502764 - DNA, 25 bp, Homo sapien
aaatccagtattggtctgcccaaag

SEQ ID NO: 3502765 - DNA, 25 bp, Homo sapien
ggtgttggtgcttggctgtcctatg

SEQ ID NO: 3502766 - DNA, 25 bp, Homo sapien
ggctgtcctatggtgctggtattac

SEQ ID NO: 3502767 - DNA, 25 bp, Homo sapien
tggctgtcctatggtgctggtatta

SEQ ID NO: 3502768 - DNA, 25 bp, Homo sapien
ctggtattaccaaaggaaaagccag

SEQ ID NO: 3502769 - DNA, 25 bp, Homo sapien
ctggatttgttccaaatccagttgt

SEQ ID NO: 3502770 - DNA, 25 bp, Homo sapien
ggatttgttccaaatccagttgtac

SEQ ID NO: 3502771 - DNA, 25 bp, Homo sapien
tggatttgttccaaatccagttgta

SEQ ID NO: 3502772 - DNA, 25 bp, Homo sapien
agttccaaaggcagttttgttctga

SEQ ID NO: 3502773 - DNA, 25 bp, Homo sapien
gttccaaaggcagttttgttctgac

SEQ ID NO: 3502774 - DNA, 25 bp, Homo sapien
tagttccaaaggcagttttgttctg

SEQ ID NO: 3502775 - DNA, 25 bp, Homo sapien
aaacaagccagttgtggtacctgct

SEQ ID NO: 3502776 - DNA, 25 bp, Homo sapien
gcaaagcctgaattagtggtggagg

SEQ ID NO: 3502777 - DNA, 25 bp, Homo sapien
tgcaaagcctgaattagtggtggag

SEQ ID NO: 3502778 - DNA, 25 bp, Homo sapien
ccaaacaagccagttgtggtacctg

SEQ ID NO: 3502779 - DNA, 25 bp, Homo sapien
tcctgttagcctgataatcctctaa

SEQ ID NO: 3502780 - DNA, 25 bp, Homo sapien
ccatagtatctgtaccagttggagg

SEQ ID NO: 3502781 - DNA, 25 bp, Homo sapien
tccagctttgaccatagtatctgta

SEQ ID NO: 3502782 - DNA, 25 bp, Homo sapien
gcttggtacttatgttagtgctaac

SEQ ID NO: 3502783 - DNA, 25 bp, Homo sapien
tagcagtaatacactggtgcttggt

SEQ ID NO: 3502784 - DNA, 25 bp, Homo sapien
aagagggagccagatgtgctgccaa

SEQ ID NO: 3502785 - DNA, 25 bp, Homo sapien
gctgccaaaaggattagaggtggta

SEQ ID NO: 3502786 - DNA, 25 bp, Homo sapien
tggtatttgtggttccaaagagtcc

SEQ ID NO: 3502787 - DNA, 25 bp, Homo sapien
taatagtagtcccagtaggagcagc

SEQ ID NO: 3502788 - DNA, 25 bp, Homo sapien
ctgaatgaacttgtctttctgaaaa

SEQ ID NO: 3502789 - DNA, 25 bp, Homo sapien
gaatgaacttgtctttctgaaaaca

SEQ ID NO: 3502790 - DNA, 25 bp, Homo sapien
atgctgaatgaacttgtctttctga

SEQ ID NO: 3502791 - DNA, 25 bp, Homo sapien
aatgaacttgtctttctgaaaacat

SEQ ID NO: 3502792 - DNA, 25 bp, Homo sapien
aatgaactggttccaaacaatcctc

SEQ ID NO: 3502793 - DNA, 25 bp, Homo sapien
tgcttgtggaggtagctggctggct

SEQ ID NO: 3502794 - DNA, 25 bp, Homo sapien
gtgcttgcagttccaaacaaggtat

SEQ ID NO: 3502795 - DNA, 25 bp, Homo sapien
ttccaaacaaggtatttgctgttcc

SEQ ID NO: 3502796 - DNA, 25 bp, Homo sapien
gttgctagaaccaaatgcagatgtt

SEQ ID NO: 3502797 - DNA, 25 bp, Homo sapien
tgcccctccactagtagtgccaaag

SEQ ID NO: 3502798 - DNA, 25 bp, Homo sapien
ccagtattgttgctagaaccaaatg

SEQ ID NO: 3502799 - DNA, 25 bp, Homo sapien
ttccaaatgcccctccactagtagt

SEQ ID NO: 3502800 - DNA, 25 bp, Homo sapien
atgttgaagttgtgccaaagccacc

SEQ ID NO: 3502801 - DNA, 25 bp, Homo sapien
caaatgttgaagttgtgccaaagcc

SEQ ID NO: 3502802 - DNA, 25 bp, Homo sapien
tctgtccaaatgttgaagttgtgcc

SEQ ID NO: 3502803 - DNA, 25 bp, Homo sapien
gtccaaatgttgaagttgtgccaaa

SEQ ID NO: 3502804 - DNA, 25 bp, Homo sapien
caaaatgagtctttgtttcagaaag

SEQ ID NO: 3502805 - DNA, 25 bp, Homo sapien
cttcaaaatgagtctttgtttcaga

SEQ ID NO: 3502806 - DNA, 25 bp, Homo sapien
ttcaaaatgagtctttgtttcagaa

SEQ ID NO: 3502807 - DNA, 25 bp, Homo sapien
tcaaaatgagtctttgtttcagaaa

SEQ ID NO: 3502808 - DNA, 25 bp, Homo sapien
aaatatttcaggtctacaaggcaag

SEQ ID NO: 3502809 - DNA, 25 bp, Homo sapien
taaaacacagtctgctaacccaacc

SEQ ID NO: 3502810 - DNA, 25 bp, Homo sapien
tcataggaggttatgaatcatatcc

SEQ ID NO: 3502811 - DNA, 25 bp, Homo sapien
ggttaaacttcagatcccaacatta

SEQ ID NO: 3502812 - DNA, 25 bp, Homo sapien
gaagtagccttataatacacccagt

SEQ ID NO: 3502813 - DNA, 25 bp, Homo sapien
tatctgaaagactatgcaagcttcc

SEQ ID NO: 3502814 - DNA, 25 bp, Homo sapien
tacacccagtagtccaatcaatgga

SEQ ID NO: 3502815 - DNA, 25 bp, Homo sapien
gtcaaaacgtttacaactccaggca

SEQ ID NO: 3502816 - DNA, 25 bp, Homo sapien
taaatgtcagggaccaaagtatcac

SEQ ID NO: 3502817 - DNA, 25 bp, Homo sapien
gccccatatttcaggagcctctcta

SEQ ID NO: 3502818 - DNA, 25 bp, Homo sapien
gactactgttaggtataactcctcc

SEQ ID NO: 3502819 - DNA, 25 bp, Homo sapien
aactatcttatctgggccccatatt

SEQ ID NO: 3502820 - DNA, 25 bp, Homo sapien
tagggtaccactaacgaagcttcca

SEQ ID NO: 3502821 - DNA, 25 bp, Homo sapien
cagagctggtagcaactaaacggaa

SEQ ID NO: 3502822 - DNA, 25 bp, Homo sapien
tctcaagctctaggttagggtacca

SEQ ID NO: 3502823 - DNA, 25 bp, Homo sapien
tttccgatacataacaacgctgacg

SEQ ID NO: 3502824 - DNA, 25 bp, Homo sapien
tgccacccgccgctcacagagcagc

SEQ ID NO: 3502825 - DNA, 25 bp, Homo sapien
ccctgccaccgaccgccgcttcggg

SEQ ID NO: 3502826 - DNA, 25 bp, Homo sapien
cgccgctcacagagcagcgcgcggc

SEQ ID NO: 3502827 - DNA, 25 bp, Homo sapien
gcttcgggcgcagcgcgcagagggc

SEQ ID NO: 3502828 - DNA, 25 bp, Homo sapien
tgggaaggcttcctagtctctctgc

SEQ ID NO: 3502829 - DNA, 25 bp, Homo sapien
cgtgtcgtgacgtcacacagggcct

SEQ ID NO: 3502830 - DNA, 25 bp, Homo sapien
tggtgacgcaacatagagactccgc

SEQ ID NO: 3502831 - DNA, 25 bp, Homo sapien
ggacggccccagaatggcatggtaa

SEQ ID NO: 3502832 - DNA, 25 bp, Homo sapien
gagcccctcagagtgcgtctgaggt

SEQ ID NO: 3502833 - DNA, 25 bp, Homo sapien
ctcagagtgcgtctgaggtatctct

SEQ ID NO: 3502834 - DNA, 25 bp, Homo sapien
gcccctcagagtgcgtctgaggtat

SEQ ID NO: 3502835 - DNA, 25 bp, Homo sapien
ccctcagagtgcgtctgaggtatct

SEQ ID NO: 3502836 - DNA, 25 bp, Homo sapien
ttttaacaagattagccagctctcc

SEQ ID NO: 3502837 - DNA, 25 bp, Homo sapien
gtacggctccgcttcaccatggtgg

SEQ ID NO: 3502838 - DNA, 25 bp, Homo sapien
tacctcatattcaggccgatctgga

SEQ ID NO: 3502839 - DNA, 25 bp, Homo sapien
tcacggtctgctgtccacttgtcgc

SEQ ID NO: 3502840 - DNA, 25 bp, Homo sapien
ggcaggaataccactgctcctcggc

SEQ ID NO: 3502841 - DNA, 25 bp, Homo sapien
atagtcgtcattcttgctgcccctg

SEQ ID NO: 3502842 - DNA, 25 bp, Homo sapien
cccctgaagtggaagcggcaggaat

SEQ ID NO: 3502843 - DNA, 25 bp, Homo sapien
ggcagggacgtgaacacatagtcgt

SEQ ID NO: 3502844 - DNA, 25 bp, Homo sapien
tggactgtatgatttccaaggactc

SEQ ID NO: 3502845 - DNA, 25 bp, Homo sapien
ttctgatgtcatcgggtggaggtgg

SEQ ID NO: 3502846 - DNA, 25 bp, Homo sapien
aaaggatgacctgctccagaaacag

SEQ ID NO: 3502847 - DNA, 25 bp, Homo sapien
gaggtggtgttctatacctaaagga

SEQ ID NO: 3502848 - DNA, 25 bp, Homo sapien
aactggtcagtagcggaaaatggga

SEQ ID NO: 3502849 - DNA, 25 bp, Homo sapien
gatgagctcatgagaatacccagtg

SEQ ID NO: 3502850 - DNA, 25 bp, Homo sapien
tcagcaaatgcgtaaggcctaggca

SEQ ID NO: 3502851 - DNA, 25 bp, Homo sapien
cacagaggagcaggttagggcacat

SEQ ID NO: 3502852 - DNA, 25 bp, Homo sapien
acagcctcggcgaacacttccttga

SEQ ID NO: 3502853 - DNA, 25 bp, Homo sapien
ggctgagcattcgaggtagcgcaca

SEQ ID NO: 3502854 - DNA, 25 bp, Homo sapien
gacaccatcctgttgcagggctgag

SEQ ID NO: 3502855 - DNA, 25 bp, Homo sapien
gtagcgcacagcgtggatctgcttg

SEQ ID NO: 3502856 - DNA, 25 bp, Homo sapien
ctggccctgctgcggtgtgatgggc

SEQ ID NO: 3502857 - DNA, 25 bp, Homo sapien
ggccctgctgcggtgtgatgggcgc

SEQ ID NO: 3502858 - DNA, 25 bp, Homo sapien
tggccctgctgcggtgtgatgggcg

SEQ ID NO: 3502859 - DNA, 25 bp, Homo sapien
tctgcgcgctgtaattgtcgaacac

SEQ ID NO: 3502860 - DNA, 25 bp, Homo sapien
caggttcaggttcactgtgcgcccg

SEQ ID NO: 3502861 - DNA, 25 bp, Homo sapien
gttctcataggacggcggactggca

SEQ ID NO: 3502862 - DNA, 25 bp, Homo sapien
acacctctggatgccacttgtgccg

SEQ ID NO: 3502863 - DNA, 25 bp, Homo sapien
gcagttgctgtagtggaggcagtgc

SEQ ID NO: 3502864 - DNA, 25 bp, Homo sapien
gtgcagttgctgtagtggaggcagt

SEQ ID NO: 3502865 - DNA, 25 bp, Homo sapien
gggtgcagttgctgtagtggaggca

SEQ ID NO: 3502866 - DNA, 25 bp, Homo sapien
cagttgctgtagtggaggcagtgcc

SEQ ID NO: 3502867 - DNA, 25 bp, Homo sapien
tgcagtgggctatgatcacaccact

SEQ ID NO: 3502868 - DNA, 25 bp, Homo sapien
ggagcatcacttgatcccagggtgg

SEQ ID NO: 3502869 - DNA, 25 bp, Homo sapien
gcactccagcctgtgcgacagagca

SEQ ID NO: 3502870 - DNA, 25 bp, Homo sapien
cacttgatcccagggtggtcaaggc

SEQ ID NO: 3502871 - DNA, 25 bp, Homo sapien
ctttcccagcattgaccgtactttt

SEQ ID NO: 3502872 - DNA, 25 bp, Homo sapien
tttcccagcattgaccgtacttttc

SEQ ID NO: 3502873 - DNA, 25 bp, Homo sapien
ttcccagcattgaccgtacttttca

SEQ ID NO: 3502874 - DNA, 25 bp, Homo sapien
tcccagcattgaccgtacttttcat

SEQ ID NO: 3502875 - DNA, 25 bp, Homo sapien
ctttttgcttccaagttcccaggct

SEQ ID NO: 3502876 - DNA, 25 bp, Homo sapien
ctctcggctccctagaggcggtaca

SEQ ID NO: 3502877 - DNA, 25 bp, Homo sapien
ctgcgtccgatctcccagctctgag

SEQ ID NO: 3502878 - DNA, 25 bp, Homo sapien
gagacacttatcttggagcccggga

SEQ ID NO: 3502879 - DNA, 25 bp, Homo sapien
tacttggactgaaccgagaagctcc

SEQ ID NO: 3502880 - DNA, 25 bp, Homo sapien
agcggctccgggctcgagaaggaag

SEQ ID NO: 3502881 - DNA, 25 bp, Homo sapien
ggctccgggctcgagaaggaagtga

SEQ ID NO: 3502882 - DNA, 25 bp, Homo sapien
ggcagcggctccgggctcgagaagg

SEQ ID NO: 3502883 - DNA, 25 bp, Homo sapien
ctccgggctcgagaaggaagtgaga

SEQ ID NO: 3502884 - DNA, 25 bp, Homo sapien
acggcgcctggtcatttatttgtat

SEQ ID NO: 3502885 - DNA, 25 bp, Homo sapien
cataacatacattttgccagcttaa

SEQ ID NO: 3502886 - DNA, 25 bp, Homo sapien
ccacggcgcctggtcatttatttgt

SEQ ID NO: 3502887 - DNA, 25 bp, Homo sapien
taacatacattttgccagcttaatt

SEQ ID NO: 3502888 - DNA, 25 bp, Homo sapien
taacgaaggctagtgtgacaggagc

SEQ ID NO: 3502889 - DNA, 25 bp, Homo sapien
tgacaggagcttaacagagccggga

SEQ ID NO: 3502890 - DNA, 25 bp, Homo sapien
caaattcgtgttcccagtcttcagg

SEQ ID NO: 3502891 - DNA, 25 bp, Homo sapien
tgacagcacgcttgagaagagaaca

SEQ ID NO: 3502892 - DNA, 25 bp, Homo sapien
gccgggtcaggctgttgtcgcctca

SEQ ID NO: 3502893 - DNA, 25 bp, Homo sapien
cggaagccgattggttgtcaggcga

SEQ ID NO: 3502894 - DNA, 25 bp, Homo sapien
tcctgggaggctaacgtcgtgtcct

SEQ ID NO: 3502895 - DNA, 25 bp, Homo sapien
tctgtttagacagctctagaactga

SEQ ID NO: 3502896 - DNA, 25 bp, Homo sapien
tgcgcgggatcctggcaaagactag

SEQ ID NO: 3502897 - DNA, 25 bp, Homo sapien
gacggcccgcggttggcgctggaga

SEQ ID NO: 3502898 - DNA, 25 bp, Homo sapien
ctgagtaactgcgggtcagggaccc

SEQ ID NO: 3502899 - DNA, 25 bp, Homo sapien
tgggacttgatcctttgcgcgggat

SEQ ID NO: 3502900 - DNA, 25 bp, Homo sapien
gcattgaattgggactcacaatgac

SEQ ID NO: 3502901 - DNA, 25 bp, Homo sapien
ggagcctttactactccaacttggc

SEQ ID NO: 3502902 - DNA, 25 bp, Homo sapien
gagagttagatttgtagatggcatt

SEQ ID NO: 3502903 - DNA, 25 bp, Homo sapien
gactcacaatgacagatgaaaaact

SEQ ID NO: 3502904 - DNA, 25 bp, Homo sapien
cggcctctcaagatatgtcttttac

SEQ ID NO: 3502905 - DNA, 25 bp, Homo sapien
gtacctaagagcactgggcattggt

SEQ ID NO: 3502906 - DNA, 25 bp, Homo sapien
ctcggcctctcaagatatgtctttt

SEQ ID NO: 3502907 - DNA, 25 bp, Homo sapien
ttacagcaagccagtacctaagagc

SEQ ID NO: 3502908 - DNA, 25 bp, Homo sapien
cctgagctgagcgtatgcttgtact

SEQ ID NO: 3502909 - DNA, 25 bp, Homo sapien
caagagggcagttctgttagctcag

SEQ ID NO: 3502910 - DNA, 25 bp, Homo sapien
tctgaactgaggaccaaaactagct

SEQ ID NO: 3502911 - DNA, 25 bp, Homo sapien
tcagtttacctacgcaggaagggtg

SEQ ID NO: 3502912 - DNA, 25 bp, Homo sapien
gaactttggcattagaattgttggt

SEQ ID NO: 3502913 - DNA, 25 bp, Homo sapien
catgtttttctgaagaactttggca

SEQ ID NO: 3502914 - DNA, 25 bp, Homo sapien
tctgaagaactttggcattagaatt

SEQ ID NO: 3502915 - DNA, 25 bp, Homo sapien
aactttgggagtaaaatctttcatg

SEQ ID NO: 3502916 - DNA, 25 bp, Homo sapien
tgatagtaatgacaccagacaccat

SEQ ID NO: 3502917 - DNA, 25 bp, Homo sapien
ttgatagtaatgacaccagacacca

SEQ ID NO: 3502918 - DNA, 25 bp, Homo sapien
gcagtgggataggaccccatcctta

SEQ ID NO: 3502919 - DNA, 25 bp, Homo sapien
gggccagaagtctaaagctccatga

SEQ ID NO: 3502920 - DNA, 25 bp, Homo sapien
caactagaggtagtgctttcctgat

SEQ ID NO: 3502921 - DNA, 25 bp, Homo sapien
tatgtacaataccagcttgagctct

SEQ ID NO: 3502922 - DNA, 25 bp, Homo sapien
tttactttgatatcctcctaccaga

SEQ ID NO: 3502923 - DNA, 25 bp, Homo sapien
ctgcatctttctagagtgtagcata

SEQ ID NO: 3502924 - DNA, 25 bp, Homo sapien
ccactgtgcaggctcactattgtat

SEQ ID NO: 3502925 - DNA, 25 bp, Homo sapien
taccaatgtgtttatctatgtaacc

SEQ ID NO: 3502926 - DNA, 25 bp, Homo sapien
aaacagagaaaacatggagcccaaa

SEQ ID NO: 3502927 - DNA, 25 bp, Homo sapien
aaaacagagaaaacatggagcccaa

SEQ ID NO: 3502928 - DNA, 25 bp, Homo sapien
tccagctagtcatggaagaaaacag

SEQ ID NO: 3502929 - DNA, 25 bp, Homo sapien
caatccagctagtcatggaagaaaa

SEQ ID NO: 3502930 - DNA, 25 bp, Homo sapien
gtcaaacttattaagagttgtccac

SEQ ID NO: 3502931 - DNA, 25 bp, Homo sapien
cacaagtcaaacttattaagagttg

SEQ ID NO: 3502932 - DNA, 25 bp, Homo sapien
aacacaagtcaaacttattaagagt

SEQ ID NO: 3502933 - DNA, 25 bp, Homo sapien
caagtcaaacttattaagagttgtc

SEQ ID NO: 3502934 - DNA, 25 bp, Homo sapien
ctgcaaatagcttgaaggagacatg

SEQ ID NO: 3502935 - DNA, 25 bp, Homo sapien
aatagcttgaaggagacatggccca

SEQ ID NO: 3502936 - DNA, 25 bp, Homo sapien
acttgctgctagtgccattatggtg

SEQ ID NO: 3502937 - DNA, 25 bp, Homo sapien
cgtagatggacttgctgctagtgcc

SEQ ID NO: 3502938 - DNA, 25 bp, Homo sapien
ctgttgacagcaatgtcgaagaaca

SEQ ID NO: 3502939 - DNA, 25 bp, Homo sapien
tgttgacagcaatgtcgaagaacac

SEQ ID NO: 3502940 - DNA, 25 bp, Homo sapien
gttgacagcaatgtcgaagaacacg

SEQ ID NO: 3502941 - DNA, 25 bp, Homo sapien
cacaagtacacagccaaaataacca

SEQ ID NO: 3502942 - DNA, 25 bp, Homo sapien
acaagtacacagccaaaataaccaa

SEQ ID NO: 3502943 - DNA, 25 bp, Homo sapien
aagtacacagccaaaataaccaact

SEQ ID NO: 3502944 - DNA, 25 bp, Homo sapien
caagtacacagccaaaataaccaac

SEQ ID NO: 3502945 - DNA, 25 bp, Homo sapien
tctctagcctttgtggaggtcacag

SEQ ID NO: 3502946 - DNA, 25 bp, Homo sapien
taaaagccggataggtggaatgaca

SEQ ID NO: 3502947 - DNA, 25 bp, Homo sapien
tagtttcaaaccaacggtcctgtga

SEQ ID NO: 3502948 - DNA, 25 bp, Homo sapien
caatacatttgtcactctggccaag

SEQ ID NO: 3502949 - DNA, 25 bp, Homo sapien
tgctgaaggcgttaatttctggcca

SEQ ID NO: 3502950 - DNA, 25 bp, Homo sapien
aggagctgggcagattgcaattggt

SEQ ID NO: 3502951 - DNA, 25 bp, Homo sapien
tgtggatagaggcaaaggatcataa

SEQ ID NO: 3502952 - DNA, 25 bp, Homo sapien
atcataaatgatcgtcagaagggag

SEQ ID NO: 3502953 - DNA, 25 bp, Homo sapien
tcttcttccttaactgggtctgctt

SEQ ID NO: 3502954 - DNA, 25 bp, Homo sapien
tcttccttaactgggtctgcttctt

SEQ ID NO: 3502955 - DNA, 25 bp, Homo sapien
ttccttaactgggtctgcttctttc

SEQ ID NO: 3502956 - DNA, 25 bp, Homo sapien
ttcttccttaactgggtctgcttct

SEQ ID NO: 3502957 - DNA, 25 bp, Homo sapien
cctttttcgcagtttgccctaggct

SEQ ID NO: 3502958 - DNA, 25 bp, Homo sapien
ggctcttttggtcttagccactcat

SEQ ID NO: 3502959 - DNA, 25 bp, Homo sapien
cactcatcatggactttgactctga

SEQ ID NO: 3502960 - DNA, 25 bp, Homo sapien
ctttttcgcagtttgccctaggctc

SEQ ID NO: 3502961 - DNA, 25 bp, Homo sapien
cagtgatggtggtgcaggtagcaaa

SEQ ID NO: 3502962 - DNA, 25 bp, Homo sapien
gtgcagtgatggtggtgcaggtagc

SEQ ID NO: 3502963 - DNA, 25 bp, Homo sapien
gatggtggtgcaggtagcaaattga

SEQ ID NO: 3502964 - DNA, 25 bp, Homo sapien
gtggtgcaggtagcaaattgagttc

SEQ ID NO: 3502965 - DNA, 25 bp, Homo sapien
tggtaatttcttcagtgcccggaca

SEQ ID NO: 3502966 - DNA, 25 bp, Homo sapien
ggtaatttcttcagtgcccggacaa

SEQ ID NO: 3502967 - DNA, 25 bp, Homo sapien
tctacttccagcagcctgcttgctg

SEQ ID NO: 3502968 - DNA, 25 bp, Homo sapien
gggagcaagaggcccagagataggc

SEQ ID NO: 3502969 - DNA, 25 bp, Homo sapien
ggtgttggggagcaagaggcccaga

SEQ ID NO: 3502970 - DNA, 25 bp, Homo sapien
aatctaagcactaggaggggtgttg

SEQ ID NO: 3502971 - DNA, 25 bp, Homo sapien
agcaagaggcccagagataggcagt

SEQ ID NO: 3502972 - DNA, 25 bp, Homo sapien
ggtcatattgtagttttctcttcat

SEQ ID NO: 3502973 - DNA, 25 bp, Homo sapien
gacagttaacagctgtggacaggaa

SEQ ID NO: 3502974 - DNA, 25 bp, Homo sapien
acagctgtggacaggaaacccttga

SEQ ID NO: 3502975 - DNA, 25 bp, Homo sapien
gggttttgcacttagtgacaggcct

SEQ ID NO: 3502976 - DNA, 25 bp, Homo sapien
ttcataagatattaaacaaagctag

SEQ ID NO: 3502977 - DNA, 25 bp, Homo sapien
tacacgtgttcttaacaattatgct

SEQ ID NO: 3502978 - DNA, 25 bp, Homo sapien
tgcttggattattaatgaaaatttc

SEQ ID NO: 3502979 - DNA, 25 bp, Homo sapien
aattatgcttggattattaatgaaa

SEQ ID NO: 3502980 - DNA, 25 bp, Homo sapien
aagtttcctcctttcgtgcatccaa

SEQ ID NO: 3502981 - DNA, 25 bp, Homo sapien
tgtgttttggccagtatagaatcca

SEQ ID NO: 3502982 - DNA, 25 bp, Homo sapien
ggccagtatagaatccagagcttct

SEQ ID NO: 3502983 - DNA, 25 bp, Homo sapien
ctcctttcgtgcatccaaaatttga

SEQ ID NO: 3502984 - DNA, 25 bp, Homo sapien
tgatttccataatcctgcctccact

SEQ ID NO: 3502985 - DNA, 25 bp, Homo sapien
gcttccttcagcgtaaccagggctg

SEQ ID NO: 3502986 - DNA, 25 bp, Homo sapien
gagagctgacactcctgctgtagcc

SEQ ID NO: 3502987 - DNA, 25 bp, Homo sapien
gctgtgagagctgacactcctgctg

SEQ ID NO: 3502988 - DNA, 25 bp, Homo sapien
ccaccagcatggctgctaccaaagt

SEQ ID NO: 3502989 - DNA, 25 bp, Homo sapien
cagcatggctgctaccaaagtcacc

SEQ ID NO: 3502990 - DNA, 25 bp, Homo sapien
accagcatggctgctaccaaagtca

SEQ ID NO: 3502991 - DNA, 25 bp, Homo sapien
taccagatcaccaccagcatggctg

SEQ ID NO: 3502992 - DNA, 25 bp, Homo sapien
cagctcttctgtccaccttatgtag

SEQ ID NO: 3502993 - DNA, 25 bp, Homo sapien
tacagctcttctgtccaccttatgt

SEQ ID NO: 3502994 - DNA, 25 bp, Homo sapien
gatacagctcttctgtccaccttat

SEQ ID NO: 3502995 - DNA, 25 bp, Homo sapien
ttgatacagctcttctgtccacctt

SEQ ID NO: 3502996 - DNA, 25 bp, Homo sapien
ctttgacagatagggaaattctttc

SEQ ID NO: 3502997 - DNA, 25 bp, Homo sapien
gatggtacccctcatgtttccagga

SEQ ID NO: 3502998 - DNA, 25 bp, Homo sapien
cccgacggtggcttgctttgacaga

SEQ ID NO: 3502999 - DNA, 25 bp, Homo sapien
ccagatacaagatgaggcagcagct

SEQ ID NO: 3503000 - DNA, 25 bp, Homo sapien
ttccgcggagctgaccttgctctta

SEQ ID NO: 3503001 - DNA, 25 bp, Homo sapien
tcttttccctgtttactgcaggtaa

SEQ ID NO: 3503002 - DNA, 25 bp, Homo sapien
cccttccgcggagctgaccttgctc

SEQ ID NO: 3503003 - DNA, 25 bp, Homo sapien
cgcggagctgaccttgctcttaggc

SEQ ID NO: 3503004 - DNA, 25 bp, Homo sapien
atcccttatgagatacgtgatttga

SEQ ID NO: 3503005 - DNA, 25 bp, Homo sapien
tattttaggtacaaatcccttatga

SEQ ID NO: 3503006 - DNA, 25 bp, Homo sapien
aatgtggcagaacttggtctctaca

SEQ ID NO: 3503007 - DNA, 25 bp, Homo sapien
tcccagcgctttgggtggcgggtgg

SEQ ID NO: 3503008 - DNA, 25 bp, Homo sapien
tgaagcttaatgtgcactagatgga

SEQ ID NO: 3503009 - DNA, 25 bp, Homo sapien
tccattgtttcaattgcctgggcaa

SEQ ID NO: 3503010 - DNA, 25 bp, Homo sapien
catctcagttgaaggcaagtccatt

SEQ ID NO: 3503011 - DNA, 25 bp, Homo sapien
caagtctcaatagtctcctagcaga

SEQ ID NO: 3503012 - DNA, 25 bp, Homo sapien
ggcgaatgcgcagcctttcatctgg

SEQ ID NO: 3503013 - DNA, 25 bp, Homo sapien
ttgacaagccgggtatctctgcggc

SEQ ID NO: 3503014 - DNA, 25 bp, Homo sapien
cacttcttgacaagccgggtatctc

SEQ ID NO: 3503015 - DNA, 25 bp, Homo sapien
tatctctgcggcgaatgcgcagcct

SEQ ID NO: 3503016 - DNA, 25 bp, Homo sapien
gataggacgagtagcttctgacatg

SEQ ID NO: 3503017 - DNA, 25 bp, Homo sapien
caccagagacttttaaagagaggcc

SEQ ID NO: 3503018 - DNA, 25 bp, Homo sapien
tattaactgaccaccatggcctgcc

SEQ ID NO: 3503019 - DNA, 25 bp, Homo sapien
ggagaggcatctgttcattggagca

SEQ ID NO: 3503020 - DNA, 25 bp, Homo sapien
ccttcccaccctctagacaactctc

SEQ ID NO: 3503021 - DNA, 25 bp, Homo sapien
tctcccttacctgtttttgctatgg

SEQ ID NO: 3503022 - DNA, 25 bp, Homo sapien
cttacctgtttttgctatggctgta

SEQ ID NO: 3503023 - DNA, 25 bp, Homo sapien
gctgcagactgccttgtactccctg

SEQ ID NO: 3503024 - DNA, 25 bp, Homo sapien
aggcttatctcaacacctggcctca

SEQ ID NO: 3503025 - DNA, 25 bp, Homo sapien
cagtgagaaaccaacgaaaaggctt

SEQ ID NO: 3503026 - DNA, 25 bp, Homo sapien
gctgcaattacaggctcacttacga

SEQ ID NO: 3503027 - DNA, 25 bp, Homo sapien
acttacgactttccatgatttttga

SEQ ID NO: 3503028 - DNA, 25 bp, Homo sapien
ctctggccgatctaaaagccctggg

SEQ ID NO: 3503029 - DNA, 25 bp, Homo sapien
gggccgcagcgtcgagtaacgtcat

SEQ ID NO: 3503030 - DNA, 25 bp, Homo sapien
cagactcaacatggcggctacacgt

SEQ ID NO: 3503031 - DNA, 25 bp, Homo sapien
cagagcaagaaaaacgttcccgccg

SEQ ID NO: 3503032 - DNA, 25 bp, Homo sapien
ggcagggtggtcttcctagcttgcc

SEQ ID NO: 3503033 - DNA, 25 bp, Homo sapien
ttttttaatagtgtcgtgaactgct

SEQ ID NO: 3503034 - DNA, 25 bp, Homo sapien
gtggtcttcctagcttgcccaggct

SEQ ID NO: 3503035 - DNA, 25 bp, Homo sapien
tcgtgaactgctaagcttaagtgat

SEQ ID NO: 3503036 - DNA, 25 bp, Homo sapien
gaaatagtggagtacaccagcaaag

SEQ ID NO: 3503037 - DNA, 25 bp, Homo sapien
ctgtgcacagaaatagtggagtaca

SEQ ID NO: 3503038 - DNA, 25 bp, Homo sapien
ccagcagaacctgggaaccatcaaa

SEQ ID NO: 3503039 - DNA, 25 bp, Homo sapien
cctgggaaccatcaaatgcagcaac

SEQ ID NO: 3503040 - DNA, 25 bp, Homo sapien
ttccctggccctgaatatgtatgtc

SEQ ID NO: 3503041 - DNA, 25 bp, Homo sapien
tgatataaactactatcctgtacca

SEQ ID NO: 3503042 - DNA, 25 bp, Homo sapien
cacatacgactttaagaagttggct

SEQ ID NO: 3503043 - DNA, 25 bp, Homo sapien
aagttggctgaagtcactaaagtcg

SEQ ID NO: 3503044 - DNA, 25 bp, Homo sapien
tggcagatgcttttatcctgatgag

SEQ ID NO: 3503045 - DNA, 25 bp, Homo sapien
aggcatgcctatcaaataaacgcca

SEQ ID NO: 3503046 - DNA, 25 bp, Homo sapien
gatgagatacccttttgagagtgca

SEQ ID NO: 3503047 - DNA, 25 bp, Homo sapien
acgccatcgccccattggaattggg

SEQ ID NO: 3503048 - DNA, 25 bp, Homo sapien
aatggtaaggtcagatctggcagga

SEQ ID NO: 3503049 - DNA, 25 bp, Homo sapien
ctttagagcataccagaaattcctg

SEQ ID NO: 3503050 - DNA, 25 bp, Homo sapien
tataaaactgtgtgggaaatctctc

SEQ ID NO: 3503051 - DNA, 25 bp, Homo sapien
tcatggttgacgactgatagtccaa

SEQ ID NO: 3503052 - DNA, 25 bp, Homo sapien
gtaaggtcactgatcaacaggctca

SEQ ID NO: 3503053 - DNA, 25 bp, Homo sapien
tgatcaacaggctcacaaggcagaa

SEQ ID NO: 3503054 - DNA, 25 bp, Homo sapien
tcactgatcaacaggctcacaaggc

SEQ ID NO: 3503055 - DNA, 25 bp, Homo sapien
aggtcactgatcaacaggctcacaa

SEQ ID NO: 3503056 - DNA, 25 bp, Homo sapien
ggaatgtctagtattctcacagagt

SEQ ID NO: 3503057 - DNA, 25 bp, Homo sapien
gacggggcggctggacaggaatgta

SEQ ID NO: 3503058 - DNA, 25 bp, Homo sapien
tccttgtagggtttgaagactggga

SEQ ID NO: 3503059 - DNA, 25 bp, Homo sapien
tctcctaataattgtctttactttc

SEQ ID NO: 3503060 - DNA, 25 bp, Homo sapien
ggtgggtctctagaagcaaaactga

SEQ ID NO: 3503061 - DNA, 25 bp, Homo sapien
gaaagacttggaagagaccagcatg

SEQ ID NO: 3503062 - DNA, 25 bp, Homo sapien
taaggctttgctggaccctgttgca

SEQ ID NO: 3503063 - DNA, 25 bp, Homo sapien
taagtcatcttgcatacagggagtg

SEQ ID NO: 3503064 - DNA, 25 bp, Homo sapien
gctatgttgaagactgtagtactcc

SEQ ID NO: 3503065 - DNA, 25 bp, Homo sapien
taatcagattctcctactccagagc

SEQ ID NO: 3503066 - DNA, 25 bp, Homo sapien
gtagtactccatttgagacatttcc

SEQ ID NO: 3503067 - DNA, 25 bp, Homo sapien
gactgttataatgaggtaactccag

SEQ ID NO: 3503068 - DNA, 25 bp, Homo sapien
gttagtactaccaagggcactgtca

SEQ ID NO: 3503069 - DNA, 25 bp, Homo sapien
gaaggtcaggtctccacaagctatg

SEQ ID NO: 3503070 - DNA, 25 bp, Homo sapien
ccagcagggccatatcagagattac

SEQ ID NO: 3503071 - DNA, 25 bp, Homo sapien
ccaagaagagatccggaaggcagca

SEQ ID NO: 3503072 - DNA, 25 bp, Homo sapien
agatggctacgtagcagtccagggc

SEQ ID NO: 3503073 - DNA, 25 bp, Homo sapien
caggtcagaatagcagagtgggtgg

SEQ ID NO: 3503074 - DNA, 25 bp, Homo sapien
ggtcagaatagcagagtgggtggca

SEQ ID NO: 3503075 - DNA, 25 bp, Homo sapien
gtggcagatggctacgtagcagtcc

SEQ ID NO: 3503076 - DNA, 25 bp, Homo sapien
agaggaagttgtagtccaggaggag

SEQ ID NO: 3503077 - DNA, 25 bp, Homo sapien
gaggagggtgaagtagataaagaac

SEQ ID NO: 3503078 - DNA, 25 bp, Homo sapien
tccaggaggagggtgaagtagataa

SEQ ID NO: 3503079 - DNA, 25 bp, Homo sapien
aagttgtagtccaggaggagggtga

SEQ ID NO: 3503080 - DNA, 25 bp, Homo sapien
gttagcataatatacaaagccctcc

SEQ ID NO: 3503081 - DNA, 25 bp, Homo sapien
tggggttagcataatatacaaagcc

SEQ ID NO: 3503082 - DNA, 25 bp, Homo sapien
gccatgcagcgatatggggttagca

SEQ ID NO: 3503083 - DNA, 25 bp, Homo sapien
cgatatggggttagcataatataca

SEQ ID NO: 3503084 - DNA, 25 bp, Homo sapien
gtggcagcacgaatattgacagcca

SEQ ID NO: 3503085 - DNA, 25 bp, Homo sapien
tgtggcagcacgaatattgacagcc

SEQ ID NO: 3503086 - DNA, 25 bp, Homo sapien
tggcagcacgaatattgacagccag

SEQ ID NO: 3503087 - DNA, 25 bp, Homo sapien
ccaggaagaacttggtgcaggagat

SEQ ID NO: 3503088 - DNA, 25 bp, Homo sapien
acgtaggctgatgcagattttgccg

SEQ ID NO: 3503089 - DNA, 25 bp, Homo sapien
ccaccactctcgaagtccagggaaa

SEQ ID NO: 3503090 - DNA, 25 bp, Homo sapien
ttttgccgggcaaccactgtgtgga

SEQ ID NO: 3503091 - DNA, 25 bp, Homo sapien
tgatgcaggctcttttttgattcca

SEQ ID NO: 3503092 - DNA, 25 bp, Homo sapien
gtgatgcaggctcttttttgattcc

SEQ ID NO: 3503093 - DNA, 25 bp, Homo sapien
tggtgatgcaggctcttttttgatt

SEQ ID NO: 3503094 - DNA, 25 bp, Homo sapien
cttggtgatgcaggctcttttttga

SEQ ID NO: 3503095 - DNA, 25 bp, Homo sapien
tgaggcctcggttcaatgagggccc

SEQ ID NO: 3503096 - DNA, 25 bp, Homo sapien
atgaggcctcggttcaatgagggcc

SEQ ID NO: 3503097 - DNA, 25 bp, Homo sapien
gaggcctcggttcaatgagggcccc

SEQ ID NO: 3503098 - DNA, 25 bp, Homo sapien
gatgaggcctcggttcaatgagggc

SEQ ID NO: 3503099 - DNA, 25 bp, Homo sapien
ggagggcgcgttcggggatggcact

SEQ ID NO: 3503100 - DNA, 25 bp, Homo sapien
gggaggcgctcagtgtagagctcgt

SEQ ID NO: 3503101 - DNA, 25 bp, Homo sapien
agcccggtcttcctctacggcgact

SEQ ID NO: 3503102 - DNA, 25 bp, Homo sapien
tctacggcgacttcgccgcggggca

SEQ ID NO: 3503103 - DNA, 25 bp, Homo sapien
ctttggtggtactgcccttccgaca

SEQ ID NO: 3503104 - DNA, 25 bp, Homo sapien
tcctgaaggtacagaagtggcactg

SEQ ID NO: 3503105 - DNA, 25 bp, Homo sapien
cattgagcaccagtcatggccgctg

SEQ ID NO: 3503106 - DNA, 25 bp, Homo sapien
ctgctgtctggaaaatgttagccac

SEQ ID NO: 3503107 - DNA, 25 bp, Homo sapien
cctgcactgtgaacggtatcggtcg

SEQ ID NO: 3503108 - DNA, 25 bp, Homo sapien
cagtgtcactgtcccgtggtggctt

SEQ ID NO: 3503109 - DNA, 25 bp, Homo sapien
tcagtgggaattcacttccccaggg

SEQ ID NO: 3503110 - DNA, 25 bp, Homo sapien
ggaagtgctggaatccccatataca

SEQ ID NO: 3503111 - DNA, 25 bp, Homo sapien
ctcctctgttttattctgggcccct

SEQ ID NO: 3503112 - DNA, 25 bp, Homo sapien
gcagggcttacatcagagccagtcc

SEQ ID NO: 3503113 - DNA, 25 bp, Homo sapien
gtcggaaaaatggagcagtgctgcc

SEQ ID NO: 3503114 - DNA, 25 bp, Homo sapien
agtcctccttggctgattcaaaggg

SEQ ID NO: 3503115 - DNA, 25 bp, Homo sapien
tgtgtttatgccacttgtagacggc

SEQ ID NO: 3503116 - DNA, 25 bp, Homo sapien
gcctgaaagggcgttgtcattgttg

SEQ ID NO: 3503117 - DNA, 25 bp, Homo sapien
gctaccccatgcctcacagaaaggt

SEQ ID NO: 3503118 - DNA, 25 bp, Homo sapien
tgtagacggcacaatacaaacctgg

SEQ ID NO: 3503119 - DNA, 25 bp, Homo sapien
tgtgcttgtgactgctaatgatgag

SEQ ID NO: 3503120 - DNA, 25 bp, Homo sapien
cttgtgactgctaatgatgagttat

SEQ ID NO: 3503121 - DNA, 25 bp, Homo sapien
atgtgcttgtgactgctaatgatga

SEQ ID NO: 3503122 - DNA, 25 bp, Homo sapien
tgcttgtgactgctaatgatgagtt

SEQ ID NO: 3503123 - DNA, 25 bp, Homo sapien
tgttttaacattcttagcctgaaga

SEQ ID NO: 3503124 - DNA, 25 bp, Homo sapien
catggcctgttttaacattcttagc

SEQ ID NO: 3503125 - DNA, 25 bp, Homo sapien
ggcctgttttaacattcttagcctg

SEQ ID NO: 3503126 - DNA, 25 bp, Homo sapien
cagccttagcattaatctcatcatg

SEQ ID NO: 3503127 - DNA, 25 bp, Homo sapien
agtcttctgggctgcaaaagctttg

SEQ ID NO: 3503128 - DNA, 25 bp, Homo sapien
tccaagtcttctgggctgcaaaagc

SEQ ID NO: 3503129 - DNA, 25 bp, Homo sapien
tggtcttttccaagtcttctgggct

SEQ ID NO: 3503130 - DNA, 25 bp, Homo sapien
cttttccaagtcttctgggctgcaa

SEQ ID NO: 3503131 - DNA, 25 bp, Homo sapien
cttcttggcttcttctagaagtaca

SEQ ID NO: 3503132 - DNA, 25 bp, Homo sapien
ccactcagtagcttcctcttccttt

SEQ ID NO: 3503133 - DNA, 25 bp, Homo sapien
ttcttcttggcttcttctagaagta

SEQ ID NO: 3503134 - DNA, 25 bp, Homo sapien
tcttggcttcttctagaagtacaat

SEQ ID NO: 3503135 - DNA, 25 bp, Homo sapien
ctcttcagcagctcgacgctccttt

SEQ ID NO: 3503136 - DNA, 25 bp, Homo sapien
ttcagcagctcgacgctccttttca

SEQ ID NO: 3503137 - DNA, 25 bp, Homo sapien
tcttcagcagctcgacgctcctttt

SEQ ID NO: 3503138 - DNA, 25 bp, Homo sapien
tcagcagctcgacgctccttttcaa

SEQ ID NO: 3503139 - DNA, 25 bp, Homo sapien
caggtggctttttattgattggctt

SEQ ID NO: 3503140 - DNA, 25 bp, Homo sapien
tcatagaaccctccctttgtattcc

SEQ ID NO: 3503141 - DNA, 25 bp, Homo sapien
ttcaggtagtccatcatagaaccct

SEQ ID NO: 3503142 - DNA, 25 bp, Homo sapien
tgtgcaatcttcaggtagtccatca

SEQ ID NO: 3503143 - DNA, 25 bp, Homo sapien
atcttgtgcaatcttcaggtagtcc

SEQ ID NO: 3503144 - DNA, 25 bp, Homo sapien
tcttgttagtttgtgttgttccaat

SEQ ID NO: 3503145 - DNA, 25 bp, Homo sapien
gttcttgttagtttgtgttgttcca

SEQ ID NO: 3503146 - DNA, 25 bp, Homo sapien
ttgttagtttgtgttgttccaatac

SEQ ID NO: 3503147 - DNA, 25 bp, Homo sapien
tgttcttgttagtttgtgttgttcc

SEQ ID NO: 3503148 - DNA, 25 bp, Homo sapien
tctgtcggacaatatatctcatcct

SEQ ID NO: 3503149 - DNA, 25 bp, Homo sapien
gtagcctgggttatgaatttctttg

SEQ ID NO: 3503150 - DNA, 25 bp, Homo sapien
ttctgtcggacaatatatctcatcc

SEQ ID NO: 3503151 - DNA, 25 bp, Homo sapien
gtttgccagttgttttgggctgaat

SEQ ID NO: 3503152 - DNA, 25 bp, Homo sapien
catggtcaaaaagttgtttgccagt

SEQ ID NO: 3503153 - DNA, 25 bp, Homo sapien
tttgggctgaatggcaaatttccag

SEQ ID NO: 3503154 - DNA, 25 bp, Homo sapien
ctattttcaccacatggtcaaaaag

SEQ ID NO: 3503155 - DNA, 25 bp, Homo sapien
tagttactgttacgttgattggttc

SEQ ID NO: 3503156 - DNA, 25 bp, Homo sapien
tgtagttactgttacgttgattggt

SEQ ID NO: 3503157 - DNA, 25 bp, Homo sapien
ttgtagttactgttacgttgattgg

SEQ ID NO: 3503158 - DNA, 25 bp, Homo sapien
cctctccatggatgggtccttcagg

SEQ ID NO: 3503159 - DNA, 25 bp, Homo sapien
tcgccccagggtatctgggaggacc

SEQ ID NO: 3503160 - DNA, 25 bp, Homo sapien
ccccagggtatctgggaggacctct

SEQ ID NO: 3503161 - DNA, 25 bp, Homo sapien
cctcgccccagggtatctgggagga

SEQ ID NO: 3503162 - DNA, 25 bp, Homo sapien
caaggttggccataggcactagagt

SEQ ID NO: 3503163 - DNA, 25 bp, Homo sapien
ggtgctttggccatgcctttccaag

SEQ ID NO: 3503164 - DNA, 25 bp, Homo sapien
cacacaggtgctttggccatgcctt

SEQ ID NO: 3503165 - DNA, 25 bp, Homo sapien
gccatgcctttccaaggttggccat

SEQ ID NO: 3503166 - DNA, 25 bp, Homo sapien
tgataatgtcgtgtccttcctccca

SEQ ID NO: 3503167 - DNA, 25 bp, Homo sapien
cactgataatgtcatgtccttcaac

SEQ ID NO: 3503168 - DNA, 25 bp, Homo sapien
tcttcactgataatgtcatgtcctt

SEQ ID NO: 3503169 - DNA, 25 bp, Homo sapien
cattgatcaacattgataatgtcgt

SEQ ID NO: 3503170 - DNA, 25 bp, Homo sapien
gggtggcatcttccagggtatcttg

SEQ ID NO: 3503171 - DNA, 25 bp, Homo sapien
ctgttgacattgctcacgcacacca

SEQ ID NO: 3503172 - DNA, 25 bp, Homo sapien
gtggcatcttccagggtatcttgga

SEQ ID NO: 3503173 - DNA, 25 bp, Homo sapien
ttgacattgctcacgcacaccacag

SEQ ID NO: 3503174 - DNA, 25 bp, Homo sapien
cattcccaccaattgttgttcaggt

SEQ ID NO: 3503175 - DNA, 25 bp, Homo sapien
tcacattcccaccaattgttgttca

SEQ ID NO: 3503176 - DNA, 25 bp, Homo sapien
acattcccaccaattgttgttcagg

SEQ ID NO: 3503177 - DNA, 25 bp, Homo sapien
attcccaccaattgttgttcaggtt

SEQ ID NO: 3503178 - DNA, 25 bp, Homo sapien
tgtcatctttctcccctcccctctg

SEQ ID NO: 3503179 - DNA, 25 bp, Homo sapien
catctttctcccctcccctctgcat

SEQ ID NO: 3503180 - DNA, 25 bp, Homo sapien
tttttgtccaagttgtcatctttct

SEQ ID NO: 3503181 - DNA, 25 bp, Homo sapien
ttttgtccaagttgtcatctttctc

SEQ ID NO: 3503182 - DNA, 25 bp, Homo sapien
ctcggagccgaggagacgaccacct

SEQ ID NO: 3503183 - DNA, 25 bp, Homo sapien
ggagccgaggagacgaccacctata

SEQ ID NO: 3503184 - DNA, 25 bp, Homo sapien
cggagccgaggagacgaccacctat

SEQ ID NO: 3503185 - DNA, 25 bp, Homo sapien
gactcggagccgaggagacgaccac

SEQ ID NO: 3503186 - DNA, 25 bp, Homo sapien
gggtggcatcttccagggtatcttg

SEQ ID NO: 3503187 - DNA, 25 bp, Homo sapien
ctgttgacattgctcacgcacacca

SEQ ID NO: 3503188 - DNA, 25 bp, Homo sapien
gtggcatcttccagggtatcttgga

SEQ ID NO: 3503189 - DNA, 25 bp, Homo sapien
ttgacattgctcacgcacaccacag

SEQ ID NO: 3503190 - DNA, 25 bp, Homo sapien
ctcggagccgaggagacgaccacct

SEQ ID NO: 3503191 - DNA, 25 bp, Homo sapien
ggagccgaggagacgaccacctata

SEQ ID NO: 3503192 - DNA, 25 bp, Homo sapien
tgcagggactcggagccgaggagac

SEQ ID NO: 3503193 - DNA, 25 bp, Homo sapien
gactcggagccgaggagacgaccac

SEQ ID NO: 3503194 - DNA, 25 bp, Homo sapien
ctgttttaaatggagttctcttggg

SEQ ID NO: 3503195 - DNA, 25 bp, Homo sapien
gaagatgccagacccataaaagagg

SEQ ID NO: 3503196 - DNA, 25 bp, Homo sapien
tgagtgatgcaacgatccagggaga

SEQ ID NO: 3503197 - DNA, 25 bp, Homo sapien
gaatgtggcgtccaaacctctgggt

SEQ ID NO: 3503198 - DNA, 25 bp, Homo sapien
gaatgcagacattagccaacgggat

SEQ ID NO: 3503199 - DNA, 25 bp, Homo sapien
ccttctcagatcctcatctttcact

SEQ ID NO: 3503200 - DNA, 25 bp, Homo sapien
tcccttctcagatcctcatctttca

SEQ ID NO: 3503201 - DNA, 25 bp, Homo sapien
gatcctcatctttcacttccgccat

SEQ ID NO: 3503202 - DNA, 25 bp, Homo sapien
cctcccttctcagatcctcatcttt

SEQ ID NO: 3503203 - DNA, 25 bp, Homo sapien
tattctcttagagactcttcctggc

SEQ ID NO: 3503204 - DNA, 25 bp, Homo sapien
aactttacttactagggcattacag

SEQ ID NO: 3503205 - DNA, 25 bp, Homo sapien
gggtgccagaaaaaggactatcaaa

SEQ ID NO: 3503206 - DNA, 25 bp, Homo sapien
tgcagagacctacgaattaagattc

SEQ ID NO: 3503207 - DNA, 25 bp, Homo sapien
gaagtgacttccctgctaaagctcg

SEQ ID NO: 3503208 - DNA, 25 bp, Homo sapien
taaagctcgcttgctgggatccgga

SEQ ID NO: 3503209 - DNA, 25 bp, Homo sapien
tggagggaatcacaaagccatctgg

SEQ ID NO: 3503210 - DNA, 25 bp, Homo sapien
ggatccggatgcctctgcagagaca

SEQ ID NO: 3503211 - DNA, 25 bp, Homo sapien
aatattcagtggacagagggttaga

SEQ ID NO: 3503212 - DNA, 25 bp, Homo sapien
gatccttgtgatccaatattcagtg

SEQ ID NO: 3503213 - DNA, 25 bp, Homo sapien
tccaatattcagtggacagagggtt

SEQ ID NO: 3503214 - DNA, 25 bp, Homo sapien
tcaatagtcagtggatccttgtgat

SEQ ID NO: 3503215 - DNA, 25 bp, Homo sapien
actgaagaagggccgcagaggtcct

SEQ ID NO: 3503216 - DNA, 25 bp, Homo sapien
agaggtcctgtaaaggcacattcag

SEQ ID NO: 3503217 - DNA, 25 bp, Homo sapien
aggtcctgtaaaggcacattcagag

SEQ ID NO: 3503218 - DNA, 25 bp, Homo sapien
agaagggccgcagaggtcctgtaaa

SEQ ID NO: 3503219 - DNA, 25 bp, Homo sapien
ttgttccacaaccaaattgtccaga

SEQ ID NO: 3503220 - DNA, 25 bp, Homo sapien
aaccaaattgtccagaagccactct

SEQ ID NO: 3503221 - DNA, 25 bp, Homo sapien
aaagtgccccttcctgcgcacagag

SEQ ID NO: 3503222 - DNA, 25 bp, Homo sapien
actaagcaaaaagtgccccttcctg

SEQ ID NO: 3503223 - DNA, 25 bp, Homo sapien
tttccaggtatgctctgctgggtgt

SEQ ID NO: 3503224 - DNA, 25 bp, Homo sapien
ctgaaagtatcagccacggattggc

SEQ ID NO: 3503225 - DNA, 25 bp, Homo sapien
ggaccataggataactatcaaatct

SEQ ID NO: 3503226 - DNA, 25 bp, Homo sapien
gcacccaggaccataggataactat

SEQ ID NO: 3503227 - DNA, 25 bp, Homo sapien
caggccttgcatggggggagttcac

SEQ ID NO: 3503228 - DNA, 25 bp, Homo sapien
catggggggagttcactaagtctgt

SEQ ID NO: 3503229 - DNA, 25 bp, Homo sapien
ggaccacagtcaggccttgcatggg

SEQ ID NO: 3503230 - DNA, 25 bp, Homo sapien
gcagagagaggaccacagtcaggcc

SEQ ID NO: 3503231 - DNA, 25 bp, Homo sapien
catgtcctcagcatcttcttcagcc

SEQ ID NO: 3503232 - DNA, 25 bp, Homo sapien
gcacatgtcctcagcatcttcttca

SEQ ID NO: 3503233 - DNA, 25 bp, Homo sapien
cacatgtcctcagcatcttcttcag

SEQ ID NO: 3503234 - DNA, 25 bp, Homo sapien
ctgcacatgtcctcagcatcttctt

SEQ ID NO: 3503235 - DNA, 25 bp, Homo sapien
ttctggagaggtaatatccaggtcc

SEQ ID NO: 3503236 - DNA, 25 bp, Homo sapien
tctggagaggtaatatccaggtcct

SEQ ID NO: 3503237 - DNA, 25 bp, Homo sapien
tggagaggtaatatccaggtccttc

SEQ ID NO: 3503238 - DNA, 25 bp, Homo sapien
gagaggtaatatccaggtccttcag

SEQ ID NO: 3503239 - DNA, 25 bp, Homo sapien
ggggaaagagagtttgagactcctg

SEQ ID NO: 3503240 - DNA, 25 bp, Homo sapien
ctgggggaaagagagtttgagactc

SEQ ID NO: 3503241 - DNA, 25 bp, Homo sapien
aaagagagtttgagactcctgtctc

SEQ ID NO: 3503242 - DNA, 25 bp, Homo sapien
ggaaagagagtttgagactcctgtc

SEQ ID NO: 3503243 - DNA, 25 bp, Homo sapien
tttctgctggcccctcttctaacaa

SEQ ID NO: 3503244 - DNA, 25 bp, Homo sapien
tctgctggcccctcttctaacaaag

SEQ ID NO: 3503245 - DNA, 25 bp, Homo sapien
gctggcccctcttctaacaaagaaa

SEQ ID NO: 3503246 - DNA, 25 bp, Homo sapien
tgctttctgctggcccctcttctaa

SEQ ID NO: 3503247 - DNA, 25 bp, Homo sapien
ggattgctggatcgccactgagaca

SEQ ID NO: 3503248 - DNA, 25 bp, Homo sapien
tgtgaggtaaccagaagcccagcat

SEQ ID NO: 3503249 - DNA, 25 bp, Homo sapien
actgagacatcagccctgtgggtga

SEQ ID NO: 3503250 - DNA, 25 bp, Homo sapien
ccagcatggatgtgacctatggcta

SEQ ID NO: 3503251 - DNA, 25 bp, Homo sapien
tctgcgtgaatcctagatttctgtg

SEQ ID NO: 3503252 - DNA, 25 bp, Homo sapien
ccttcgatctagctctgagatgagc

SEQ ID NO: 3503253 - DNA, 25 bp, Homo sapien
tggcaccttcgatctagctctgaga

SEQ ID NO: 3503254 - DNA, 25 bp, Homo sapien
agctgtggcaccttcgatctagctc

SEQ ID NO: 3503255 - DNA, 25 bp, Homo sapien
catgagggtctgttttgtcaccaca

SEQ ID NO: 3503256 - DNA, 25 bp, Homo sapien
tcagaggagctcgaaactttagggt

SEQ ID NO: 3503257 - DNA, 25 bp, Homo sapien
tcagagaggcacagctacggttaag

SEQ ID NO: 3503258 - DNA, 25 bp, Homo sapien
ttctggagagtgagacggaccaact

SEQ ID NO: 3503259 - DNA, 25 bp, Homo sapien
attgcaatttccacttccaacttct

SEQ ID NO: 3503260 - DNA, 25 bp, Homo sapien
tccaacttctcagccaactcctgct

SEQ ID NO: 3503261 - DNA, 25 bp, Homo sapien
tttcttctcagttcccctaatgcca

SEQ ID NO: 3503262 - DNA, 25 bp, Homo sapien
tctcagttcccctaatgccacctgg

SEQ ID NO: 3503263 - DNA, 25 bp, Homo sapien
tagctgtcgattgggccggagattc

SEQ ID NO: 3503264 - DNA, 25 bp, Homo sapien
tcccaacctgagagatgcattcctg

SEQ ID NO: 3503265 - DNA, 25 bp, Homo sapien
tcttgagcagaaagcgctgccggca

SEQ ID NO: 3503266 - DNA, 25 bp, Homo sapien
tcctcaagagggaccatggcgtggt

SEQ ID NO: 3503267 - DNA, 25 bp, Homo sapien
ttgtcaagcgtgctgctgaagccat

SEQ ID NO: 3503268 - DNA, 25 bp, Homo sapien
attgtcaagcgtgctgctgaagcca

SEQ ID NO: 3503269 - DNA, 25 bp, Homo sapien
cattgtcaagcgtgctgctgaagcc

SEQ ID NO: 3503270 - DNA, 25 bp, Homo sapien
tgtcaagtgtgccgttaaacagcag

SEQ ID NO: 3503271 - DNA, 25 bp, Homo sapien
tcaagtgtgccgttaaacagcagtg

SEQ ID NO: 3503272 - DNA, 25 bp, Homo sapien
caagtgtgccgttaaacagcagtgt

SEQ ID NO: 3503273 - DNA, 25 bp, Homo sapien
gtcaagtgtgccgttaaacagcagt

SEQ ID NO: 3503274 - DNA, 25 bp, Homo sapien
aactcctccattgtttggtccattg

SEQ ID NO: 3503275 - DNA, 25 bp, Homo sapien
gaactcctccattgtttggtccatt

SEQ ID NO: 3503276 - DNA, 25 bp, Homo sapien
gggactcaacgctggtagccagctc

SEQ ID NO: 3503277 - DNA, 25 bp, Homo sapien
gctggtagccagctccctatttcac

SEQ ID NO: 3503278 - DNA, 25 bp, Homo sapien
gccagctccctatttcactttcagt

SEQ ID NO: 3503279 - DNA, 25 bp, Homo sapien
tttacaggggactcaacgctggtag

SEQ ID NO: 3503280 - DNA, 25 bp, Homo sapien
gggctccctgagctttgtaaccata

SEQ ID NO: 3503281 - DNA, 25 bp, Homo sapien
gtcctatcatgttgggagccaccag

SEQ ID NO: 3503282 - DNA, 25 bp, Homo sapien
gcagaattggattccctgggaggcc

SEQ ID NO: 3503283 - DNA, 25 bp, Homo sapien
gaagtacgggtaccattgagcatga

SEQ ID NO: 3503284 - DNA, 25 bp, Homo sapien
aggaaagacctaacacagctcggag

SEQ ID NO: 3503285 - DNA, 25 bp, Homo sapien
ggtcttagcccttgcctccttggag

SEQ ID NO: 3503286 - DNA, 25 bp, Homo sapien
tggcacaaccaggtagaggtcagct

SEQ ID NO: 3503287 - DNA, 25 bp, Homo sapien
cgtgctggccaaaccgctgtgtgta

SEQ ID NO: 3503288 - DNA, 25 bp, Homo sapien
ttcatggccaagtaaggtggttaga

SEQ ID NO: 3503289 - DNA, 25 bp, Homo sapien
catggccaagtaaggtggttagaga

SEQ ID NO: 3503290 - DNA, 25 bp, Homo sapien
gaagacctcactgccttgctctgag

SEQ ID NO: 3503291 - DNA, 25 bp, Homo sapien
ctgatggtatggtttatgagtttca

SEQ ID NO: 3503292 - DNA, 25 bp, Homo sapien
tatttagttttctgtacgcaagatt

SEQ ID NO: 3503293 - DNA, 25 bp, Homo sapien
agggacagtttaacttctttctgat

SEQ ID NO: 3503294 - DNA, 25 bp, Homo sapien
gttttctgtacgcaagattatttca

SEQ ID NO: 3503295 - DNA, 25 bp, Homo sapien
tttattttttcgtagctatcatgaa

SEQ ID NO: 3503296 - DNA, 25 bp, Homo sapien
ttcaatgttttagcccagggtgtca

SEQ ID NO: 3503297 - DNA, 25 bp, Homo sapien
tatagacagtgctccaatgccatag

SEQ ID NO: 3503298 - DNA, 25 bp, Homo sapien
catgatcagaaagcacccaggttag

SEQ ID NO: 3503299 - DNA, 25 bp, Homo sapien
catcctgagatacgaaagaactgga

SEQ ID NO: 3503300 - DNA, 25 bp, Homo sapien
gatgaggaggtaaatgttggccaaa

SEQ ID NO: 3503301 - DNA, 25 bp, Homo sapien
agcatagactattgggttgaggata

SEQ ID NO: 3503302 - DNA, 25 bp, Homo sapien
agagccacatgtccctaaggtttta

SEQ ID NO: 3503303 - DNA, 25 bp, Homo sapien
ttcagaggtggccaagcccattaca

SEQ ID NO: 3503304 - DNA, 25 bp, Homo sapien
ttaataccagaaagccaatccccat

SEQ ID NO: 3503305 - DNA, 25 bp, Homo sapien
tccatataagttgttgacccttgtg

SEQ ID NO: 3503306 - DNA, 25 bp, Homo sapien
taagttgttgacccttgtgtcacac

SEQ ID NO: 3503307 - DNA, 25 bp, Homo sapien
ataagttgttgacccttgtgtcaca

SEQ ID NO: 3503308 - DNA, 25 bp, Homo sapien
cactgccaggatggttatgttcccc

SEQ ID NO: 3503309 - DNA, 25 bp, Homo sapien
gctcacagtacgaatgggcaatgat

SEQ ID NO: 3503310 - DNA, 25 bp, Homo sapien
tgttgtgggcaccaaaccagaagat

SEQ ID NO: 3503311 - DNA, 25 bp, Homo sapien
caacaaggtatgatgcagtgggtca

SEQ ID NO: 3503312 - DNA, 25 bp, Homo sapien
ctggggtatccaggagacaggagct

SEQ ID NO: 3503313 - DNA, 25 bp, Homo sapien
gacactggtgacatgcccacaaacc

SEQ ID NO: 3503314 - DNA, 25 bp, Homo sapien
tggacactggtgacatgcccacaaa

SEQ ID NO: 3503315 - DNA, 25 bp, Homo sapien
tggtgacatgcccacaaaccctggg

SEQ ID NO: 3503316 - DNA, 25 bp, Homo sapien
gtgacatgcccacaaaccctgggag

SEQ ID NO: 3503317 - DNA, 25 bp, Homo sapien
ccttccacaggatacagacagtgct

SEQ ID NO: 3503318 - DNA, 25 bp, Homo sapien
gatcccttccacaggatacagacag

SEQ ID NO: 3503319 - DNA, 25 bp, Homo sapien
caggatacagacagtgctatttcat

SEQ ID NO: 3503320 - DNA, 25 bp, Homo sapien
gtctttgatcccttccacaggatac

SEQ ID NO: 3503321 - DNA, 25 bp, Homo sapien
ctggagtattgtctgtagagccctg

SEQ ID NO: 3503322 - DNA, 25 bp, Homo sapien
gagccctgggttctgtttcttaaca

SEQ ID NO: 3503323 - DNA, 25 bp, Homo sapien
gggttctgtttcttaacagtgctca

SEQ ID NO: 3503324 - DNA, 25 bp, Homo sapien
ccactggagtattgtctgtagagcc

SEQ ID NO: 3503325 - DNA, 25 bp, Homo sapien
tcagggcagggacttcaagtagttc

SEQ ID NO: 3503326 - DNA, 25 bp, Homo sapien
tgcggtccaattcaatggcccagtc

SEQ ID NO: 3503327 - DNA, 25 bp, Homo sapien
gagcagtgctaggatggaatattct

SEQ ID NO: 3503328 - DNA, 25 bp, Homo sapien
tccacatgaagtagaacacgatcca

SEQ ID NO: 3503329 - DNA, 25 bp, Homo sapien
ggaaacacgttccagatagcaaggt

SEQ ID NO: 3503330 - DNA, 25 bp, Homo sapien
cagaaagaaagcgtgataagatcca

SEQ ID NO: 3503331 - DNA, 25 bp, Homo sapien
ctgagatccaggaaatagagattcc

SEQ ID NO: 3503332 - DNA, 25 bp, Homo sapien
taagtcacatagaagctggtgtttc

SEQ ID NO: 3503333 - DNA, 25 bp, Homo sapien
caaggtgtggccgttatcacccatc

SEQ ID NO: 3503334 - DNA, 25 bp, Homo sapien
tccttatctaagttaaaggctctgt

SEQ ID NO: 3503335 - DNA, 25 bp, Homo sapien
catcaccacactagacggcactgtt

SEQ ID NO: 3503336 - DNA, 25 bp, Homo sapien
ggttggcctggtgtatgaacacatc

SEQ ID NO: 3503337 - DNA, 25 bp, Homo sapien
ctgggcaccagtgtgagctgtgttg

SEQ ID NO: 3503338 - DNA, 25 bp, Homo sapien
tgggcaccagtgtgagctgtgttgt

SEQ ID NO: 3503339 - DNA, 25 bp, Homo sapien
gaatatttctatttggaagtcttct

SEQ ID NO: 3503340 - DNA, 25 bp, Homo sapien
tttggaatatttctatttggaagtc

SEQ ID NO: 3503341 - DNA, 25 bp, Homo sapien
ggaatatttctatttggaagtcttc

SEQ ID NO: 3503342 - DNA, 25 bp, Homo sapien
tttctatttggaagtcttctgccat

SEQ ID NO: 3503343 - DNA, 25 bp, Homo sapien
tgactgaactgtgacaccggacggg

SEQ ID NO: 3503344 - DNA, 25 bp, Homo sapien
gaaataacttgctcccttaaggcca

SEQ ID NO: 3503345 - DNA, 25 bp, Homo sapien
ggatctatacaacagctccatgagg

SEQ ID NO: 3503346 - DNA, 25 bp, Homo sapien
tggctactacatggacaaagtcctg

SEQ ID NO: 3503347 - DNA, 25 bp, Homo sapien
gcttcccaggacgatattatagcgg

SEQ ID NO: 3503348 - DNA, 25 bp, Homo sapien
gattgggtactcatcggtgcctgct

SEQ ID NO: 3503349 - DNA, 25 bp, Homo sapien
taagcagtatctggatccaagcgca

SEQ ID NO: 3503350 - DNA, 25 bp, Homo sapien
tgggagccacagtcagtcacattgt

SEQ ID NO: 3503351 - DNA, 25 bp, Homo sapien
gcacacggcaatctgtcttcaactc

SEQ ID NO: 3503352 - DNA, 25 bp, Homo sapien
tccagggagattggttctggctgct

SEQ ID NO: 3503353 - DNA, 25 bp, Homo sapien
ctgcataagtcttcaggatctctct

SEQ ID NO: 3503354 - DNA, 25 bp, Homo sapien
tagccccagcacacggcaatctgtc

SEQ ID NO: 3503355 - DNA, 25 bp, Homo sapien
ccccagctgccgatgtggtggctgc

SEQ ID NO: 3503356 - DNA, 25 bp, Homo sapien
gctttttctctagtaatcgctggta

SEQ ID NO: 3503357 - DNA, 25 bp, Homo sapien
gatgagctcgctatggttcaactcc

SEQ ID NO: 3503358 - DNA, 25 bp, Homo sapien
gtttctgcatggtctccgctgcctc

SEQ ID NO: 3503359 - DNA, 25 bp, Homo sapien
ctgtggagccaagatggaaatcagc

SEQ ID NO: 3503360 - DNA, 25 bp, Homo sapien
tgtggagccaagatggaaatcagca

SEQ ID NO: 3503361 - DNA, 25 bp, Homo sapien
gttcgagggcctcatgaagttccca

SEQ ID NO: 3503362 - DNA, 25 bp, Homo sapien
atgttcgagggcctcatgaagttcc

SEQ ID NO: 3503363 - DNA, 25 bp, Homo sapien
ttcagatgttcgagggcctcatgaa

SEQ ID NO: 3503364 - DNA, 25 bp, Homo sapien
gtggcagttcgtttcctttcaccaa

SEQ ID NO: 3503365 - DNA, 25 bp, Homo sapien
ccggggttagactggagtggccagc

SEQ ID NO: 3503366 - DNA, 25 bp, Homo sapien
ttgatctagaaacagccaacttggg

SEQ ID NO: 3503367 - DNA, 25 bp, Homo sapien
gcccttgatctagaaacagccaact

SEQ ID NO: 3503368 - DNA, 25 bp, Homo sapien
tcaagcccttgatctagaaacagcc

SEQ ID NO: 3503369 - DNA, 25 bp, Homo sapien
aacactgtgggcctcatgctctggg

SEQ ID NO: 3503370 - DNA, 25 bp, Homo sapien
agtcaatgctcatgggctccctcag

SEQ ID NO: 3503371 - DNA, 25 bp, Homo sapien
ttttctacaacattggccagctgcc

SEQ ID NO: 3503372 - DNA, 25 bp, Homo sapien
tggatgtagccttagcagacggact

SEQ ID NO: 3503373 - DNA, 25 bp, Homo sapien
tcacaccctcctcagaacatgaatg

SEQ ID NO: 3503374 - DNA, 25 bp, Homo sapien
acatgaatgaaaccagggagaagta

SEQ ID NO: 3503375 - DNA, 25 bp, Homo sapien
accctcctcagaacatgaatgaaac

SEQ ID NO: 3503376 - DNA, 25 bp, Homo sapien
tgaatgaaaccagggagaagtagta

SEQ ID NO: 3503377 - DNA, 25 bp, Homo sapien
ctgacttcagaaaaggcagagttat

SEQ ID NO: 3503378 - DNA, 25 bp, Homo sapien
gacttcagaaaaggcagagttatct

SEQ ID NO: 3503379 - DNA, 25 bp, Homo sapien
cttcagaaaaggcagagttatctac

SEQ ID NO: 3503380 - DNA, 25 bp, Homo sapien
ttcagaaaaggcagagttatctacc

SEQ ID NO: 3503381 - DNA, 25 bp, Homo sapien
ggcgcttcgcggcggaaactcaaag

SEQ ID NO: 3503382 - DNA, 25 bp, Homo sapien
cagaatactacacccggctctaggc

SEQ ID NO: 3503383 - DNA, 25 bp, Homo sapien
aaactcaaagtgaagaagcctggtt

SEQ ID NO: 3503384 - DNA, 25 bp, Homo sapien
gcagcgtccaatggcccagcgtcag

SEQ ID NO: 3503385 - DNA, 25 bp, Homo sapien
catggcggcttctggggaagactta

SEQ ID NO: 3503386 - DNA, 25 bp, Homo sapien
aaagtgggagcaggcgtcttacatg

SEQ ID NO: 3503387 - DNA, 25 bp, Homo sapien
acttaggaaactttgactcatggtg

SEQ ID NO: 3503388 - DNA, 25 bp, Homo sapien
ggaagacttaggaaactttgactca

SEQ ID NO: 3503389 - DNA, 25 bp, Homo sapien
tgtctctgcagctatagcaaagctt

SEQ ID NO: 3503390 - DNA, 25 bp, Homo sapien
gtctctgcagctatagcaaagcttt

SEQ ID NO: 3503391 - DNA, 25 bp, Homo sapien
tctctgcagctatagcaaagctttc

SEQ ID NO: 3503392 - DNA, 25 bp, Homo sapien
aaagctttctatgaaggcactgtgg

SEQ ID NO: 3503393 - DNA, 25 bp, Homo sapien
tctagcagtgcgaaaagccaggatt

SEQ ID NO: 3503394 - DNA, 25 bp, Homo sapien
tatgtaatagttgggcaaggcccct

SEQ ID NO: 3503395 - DNA, 25 bp, Homo sapien
tgctccttaggatacacgcggctgg

SEQ ID NO: 3503396 - DNA, 25 bp, Homo sapien
gccaggattgggacaccgcagttta

SEQ ID NO: 3503397 - DNA, 25 bp, Homo sapien
tctcaaactctgttgtgctcttgat

SEQ ID NO: 3503398 - DNA, 25 bp, Homo sapien
caaactctgttgtgctcttgatgct

SEQ ID NO: 3503399 - DNA, 25 bp, Homo sapien
tcaaactctgttgtgctcttgatgc

SEQ ID NO: 3503400 - DNA, 25 bp, Homo sapien
cttctcaaactctgttgtgctcttg

SEQ ID NO: 3503401 - DNA, 25 bp, Homo sapien
catcagcatcctgaggatggcctcc

SEQ ID NO: 3503402 - DNA, 25 bp, Homo sapien
tcagcatcctgaggatggcctccct

SEQ ID NO: 3503403 - DNA, 25 bp, Homo sapien
caaagacagccggaatgtgggaaac

SEQ ID NO: 3503404 - DNA, 25 bp, Homo sapien
aagatgagcagcgagtctaagcccc

SEQ ID NO: 3503405 - DNA, 25 bp, Homo sapien
tattgatcgtgatgtccgcacaggc

SEQ ID NO: 3503406 - DNA, 25 bp, Homo sapien
tgtagaaacaaccacgtagacccca

SEQ ID NO: 3503407 - DNA, 25 bp, Homo sapien
cttaaccggaaatggcacaggaaga

SEQ ID NO: 3503408 - DNA, 25 bp, Homo sapien
aaccggaaatggcacaggaagaggc

SEQ ID NO: 3503409 - DNA, 25 bp, Homo sapien
ttaaccggaaatggcacaggaagag

SEQ ID NO: 3503410 - DNA, 25 bp, Homo sapien
ccggaaatggcacaggaagaggcac

SEQ ID NO: 3503411 - DNA, 25 bp, Homo sapien
acaatggccagcccaatcctgatga

SEQ ID NO: 3503412 - DNA, 25 bp, Homo sapien
aatggccagcccaatcctgatgatg

SEQ ID NO: 3503413 - DNA, 25 bp, Homo sapien
tggccagcccaatcctgatgatgac

SEQ ID NO: 3503414 - DNA, 25 bp, Homo sapien
gccacaatggccagcccaatcctga

SEQ ID NO: 3503415 - DNA, 25 bp, Homo sapien
caaagtggtcaaaggatatggccag

SEQ ID NO: 3503416 - DNA, 25 bp, Homo sapien
aagtggtcaaaggatatggccagga

SEQ ID NO: 3503417 - DNA, 25 bp, Homo sapien
gccacaaagtggtcaaaggatatgg

SEQ ID NO: 3503418 - DNA, 25 bp, Homo sapien
cacaaagtggtcaaaggatatggcc

SEQ ID NO: 3503419 - DNA, 25 bp, Homo sapien
caggcaggcattgaagcccatgagc

SEQ ID NO: 3503420 - DNA, 25 bp, Homo sapien
tcatgagaagagcaggcggttggaa

SEQ ID NO: 3503421 - DNA, 25 bp, Homo sapien
ctgggatgccaatcatgagaagagc

SEQ ID NO: 3503422 - DNA, 25 bp, Homo sapien
ggtggtcaaaccagagcacagccaa

SEQ ID NO: 3503423 - DNA, 25 bp, Homo sapien
ggcagccgaaggctctggagagatg

SEQ ID NO: 3503424 - DNA, 25 bp, Homo sapien
ctagggaggcagccgaaggctctgg

SEQ ID NO: 3503425 - DNA, 25 bp, Homo sapien
ctctggagagatgtgagttcttcaa

SEQ ID NO: 3503426 - DNA, 25 bp, Homo sapien
gaggcagccgaaggctctggagaga

SEQ ID NO: 3503427 - DNA, 25 bp, Homo sapien
ccttctcatctctcatcccactgat

SEQ ID NO: 3503428 - DNA, 25 bp, Homo sapien
cctttcctgcttctgacaccttctc

SEQ ID NO: 3503429 - DNA, 25 bp, Homo sapien
tcatcccactgattcctccttttgg

SEQ ID NO: 3503430 - DNA, 25 bp, Homo sapien
cactcctttcctgcttctgacacct

SEQ ID NO: 3503431 - DNA, 25 bp, Homo sapien
tctttacacccttggctagatgccc

SEQ ID NO: 3503432 - DNA, 25 bp, Homo sapien
tggctagatgccctggtgagatgct

SEQ ID NO: 3503433 - DNA, 25 bp, Homo sapien
aggctctggaactgacgtcccgtct

SEQ ID NO: 3503434 - DNA, 25 bp, Homo sapien
gtgagatgctgttccccagggatcc

SEQ ID NO: 3503435 - DNA, 25 bp, Homo sapien
actgagggctctcaatacatttggt

SEQ ID NO: 3503436 - DNA, 25 bp, Homo sapien
cttgtttattcctccatgggcgcac

SEQ ID NO: 3503437 - DNA, 25 bp, Homo sapien
tccatgggcgcactgagggctctca

SEQ ID NO: 3503438 - DNA, 25 bp, Homo sapien
tgagggctctcaatacatttggttt

SEQ ID NO: 3503439 - DNA, 25 bp, Homo sapien
taaaaagttgtacacaggccgggca

SEQ ID NO: 3503440 - DNA, 25 bp, Homo sapien
cacaactagggcaaggttatctctc

SEQ ID NO: 3503441 - DNA, 25 bp, Homo sapien
aaaatttttgacaggtacagagcac

SEQ ID NO: 3503442 - DNA, 25 bp, Homo sapien
caataagatcacgaaaggcagctgt

SEQ ID NO: 3503443 - DNA, 25 bp, Homo sapien
agctgatcttgaacatagccagcac

SEQ ID NO: 3503444 - DNA, 25 bp, Homo sapien
cagctgatcttgaacatagccagca

SEQ ID NO: 3503445 - DNA, 25 bp, Homo sapien
cacagctgatcttgaacatagccag

SEQ ID NO: 3503446 - DNA, 25 bp, Homo sapien
acagctgatcttgaacatagccagc

SEQ ID NO: 3503447 - DNA, 25 bp, Homo sapien
aaagcggtgtaccactgagaggcca

SEQ ID NO: 3503448 - DNA, 25 bp, Homo sapien
gaacatctgggtaagacaggcctca

SEQ ID NO: 3503449 - DNA, 25 bp, Homo sapien
tagaaggcgagtaccacaccaatgt

SEQ ID NO: 3503450 - DNA, 25 bp, Homo sapien
gaaatgggctttctctaatcctggg

SEQ ID NO: 3503451 - DNA, 25 bp, Homo sapien
ggagagggtgaggtcacactggcag

SEQ ID NO: 3503452 - DNA, 25 bp, Homo sapien
ctggaactgaggaggggtgactgga

SEQ ID NO: 3503453 - DNA, 25 bp, Homo sapien
agctggaactgaggaggggtgactg

SEQ ID NO: 3503454 - DNA, 25 bp, Homo sapien
gagagggtgaggtcacactggcagt

SEQ ID NO: 3503455 - DNA, 25 bp, Homo sapien
tgagaatggtacagtcctacttaga

SEQ ID NO: 3503456 - DNA, 25 bp, Homo sapien
cagtgagagtatgaactgaggcccc

SEQ ID NO: 3503457 - DNA, 25 bp, Homo sapien
tttaataatgccactcagaaagccc

SEQ ID NO: 3503458 - DNA, 25 bp, Homo sapien
cctacttagaaagagcagctggagc

SEQ ID NO: 3503459 - DNA, 25 bp, Homo sapien
atgtttctttggaatggagaatttt

SEQ ID NO: 3503460 - DNA, 25 bp, Homo sapien
ctttggaatggagaatttttatcac

SEQ ID NO: 3503461 - DNA, 25 bp, Homo sapien
ttatgtttctttggaatggagaatt

SEQ ID NO: 3503462 - DNA, 25 bp, Homo sapien
ttctttggaatggagaatttttatc

SEQ ID NO: 3503463 - DNA, 25 bp, Homo sapien
aggtgttagcaatcatagtatgtac

SEQ ID NO: 3503464 - DNA, 25 bp, Homo sapien
gtgggagacacatgtactgaaggtt

SEQ ID NO: 3503465 - DNA, 25 bp, Homo sapien
tagtatgtacataggctggggcttg

SEQ ID NO: 3503466 - DNA, 25 bp, Homo sapien
gagatcagcaggtaggtgttagcaa

SEQ ID NO: 3503467 - DNA, 25 bp, Homo sapien
tagagaacatggcagtcagcccaac

SEQ ID NO: 3503468 - DNA, 25 bp, Homo sapien
aggaaagtcttataagaagtgctac

SEQ ID NO: 3503469 - DNA, 25 bp, Homo sapien
ggatgagaagtaagtctacaccaac

SEQ ID NO: 3503470 - DNA, 25 bp, Homo sapien
ctaaggacagtcctaatgatcaaaa

SEQ ID NO: 3503471 - DNA, 25 bp, Homo sapien
ggattagagacggccacaaaacgat

SEQ ID NO: 3503472 - DNA, 25 bp, Homo sapien
ccagaatatactcagcatggtgacc

SEQ ID NO: 3503473 - DNA, 25 bp, Homo sapien
taaagaacatgtgggacaagcaggc

SEQ ID NO: 3503474 - DNA, 25 bp, Homo sapien
gagtcagttaaaatcatggcatacc

SEQ ID NO: 3503475 - DNA, 25 bp, Homo sapien
aagggaatggagatccaggtgtgga

SEQ ID NO: 3503476 - DNA, 25 bp, Homo sapien
ctgtttcccaagagagcagttacag

SEQ ID NO: 3503477 - DNA, 25 bp, Homo sapien
ccaggaacaccagtgagcaggaaaa

SEQ ID NO: 3503478 - DNA, 25 bp, Homo sapien
gagcagttacagagaggaagcagaa

SEQ ID NO: 3503479 - DNA, 25 bp, Homo sapien
agctgaaaggccaattcctggtggt

SEQ ID NO: 3503480 - DNA, 25 bp, Homo sapien
agggccgagcttgcaaatatgagga

SEQ ID NO: 3503481 - DNA, 25 bp, Homo sapien
cctggtggtggtgctaactcactgt

SEQ ID NO: 3503482 - DNA, 25 bp, Homo sapien
gaggagacttattccagcctgactg

SEQ ID NO: 3503483 - DNA, 25 bp, Homo sapien
taatttgacctatttcgtattttga

SEQ ID NO: 3503484 - DNA, 25 bp, Homo sapien
tgtgtataaaatacggtttcattta

SEQ ID NO: 3503485 - DNA, 25 bp, Homo sapien
ataatttgacctatttcgtattttg

SEQ ID NO: 3503486 - DNA, 25 bp, Homo sapien
atagatgccaattggtttttcacca

SEQ ID NO: 3503487 - DNA, 25 bp, Homo sapien
taatagatgccaattggtttttcac

SEQ ID NO: 3503488 - DNA, 25 bp, Homo sapien
aatagatgccaattggtttttcacc

SEQ ID NO: 3503489 - DNA, 25 bp, Homo sapien
tagatgccaattggtttttcaccac

SEQ ID NO: 3503490 - DNA, 25 bp, Homo sapien
tagacactggtggtctttgtatgga

SEQ ID NO: 3503491 - DNA, 25 bp, Homo sapien
gcatagacactggtggtctttgtat

SEQ ID NO: 3503492 - DNA, 25 bp, Homo sapien
ctgcatagacactggtggtctttgt

SEQ ID NO: 3503493 - DNA, 25 bp, Homo sapien
tttgtatggatactcatgttctgca

SEQ ID NO: 3503494 - DNA, 25 bp, Homo sapien
agccggctctcctcgccatccagca

SEQ ID NO: 3503495 - DNA, 25 bp, Homo sapien
tccagccggctctcctcgccatcca

SEQ ID NO: 3503496 - DNA, 25 bp, Homo sapien
gctctcctcgccatccagcagcttc

SEQ ID NO: 3503497 - DNA, 25 bp, Homo sapien
ggctctcctcgccatccagcagctt

SEQ ID NO: 3503498 - DNA, 25 bp, Homo sapien
gatatccagggccagtttgactttc

SEQ ID NO: 3503499 - DNA, 25 bp, Homo sapien
tatccagggccagtttgactttcat

SEQ ID NO: 3503500 - DNA, 25 bp, Homo sapien
tcgatatccagggccagtttgactt

SEQ ID NO: 3503501 - DNA, 25 bp, Homo sapien
ctcgatatccagggccagtttgact

SEQ ID NO: 3503502 - DNA, 25 bp, Homo sapien
ggcatgttctgcttggcccgctgca

SEQ ID NO: 3503503 - DNA, 25 bp, Homo sapien
gcatgttctgcttggcccgctgcag

SEQ ID NO: 3503504 - DNA, 25 bp, Homo sapien
gcttggagttggcatccttaatggc

SEQ ID NO: 3503505 - DNA, 25 bp, Homo sapien
ctcggacagcttggagttggcatcc

SEQ ID NO: 3503506 - DNA, 25 bp, Homo sapien
cagtcttgtgcgctgcgggtcatcc

SEQ ID NO: 3503507 - DNA, 25 bp, Homo sapien
gtcttgtgcgctgcgggtcatcctc

SEQ ID NO: 3503508 - DNA, 25 bp, Homo sapien
tctcagtcttgtgcgctgcgggtca

SEQ ID NO: 3503509 - DNA, 25 bp, Homo sapien
atctcagtcttgtgcgctgcgggtc

SEQ ID NO: 3503510 - DNA, 25 bp, Homo sapien
ctcagcgatagtgttgtccatgtcc

SEQ ID NO: 3503511 - DNA, 25 bp, Homo sapien
cttgacctcagcgatagtgttgtcc

SEQ ID NO: 3503512 - DNA, 25 bp, Homo sapien
acctcagcgatagtgttgtccatgt

SEQ ID NO: 3503513 - DNA, 25 bp, Homo sapien
tgacctcagcgatagtgttgtccat

SEQ ID NO: 3503514 - DNA, 25 bp, Homo sapien
cgcatggcctggatgttgggatcta

SEQ ID NO: 3503515 - DNA, 25 bp, Homo sapien
tgcgcatggcctggatgttgggatc

SEQ ID NO: 3503516 - DNA, 25 bp, Homo sapien
ggtgcgcatggcctggatgttggga

SEQ ID NO: 3503517 - DNA, 25 bp, Homo sapien
gcatggcctggatgttgggatctac

SEQ ID NO: 3503518 - DNA, 25 bp, Homo sapien
ctccaggttaaggggactcagcagg

SEQ ID NO: 3503519 - DNA, 25 bp, Homo sapien
tccaggttaaggggactcagcaggt

SEQ ID NO: 3503520 - DNA, 25 bp, Homo sapien
ccaggttaaggggactcagcaggtt

SEQ ID NO: 3503521 - DNA, 25 bp, Homo sapien
ctggttgactgtgtcagtggtgatg

SEQ ID NO: 3503522 - DNA, 25 bp, Homo sapien
gttgactgtgtcagtggtgatgcct

SEQ ID NO: 3503523 - DNA, 25 bp, Homo sapien
ggtgatgcctcccatgccgctggac

SEQ ID NO: 3503524 - DNA, 25 bp, Homo sapien
gatgcctcccatgccgctggaccca

SEQ ID NO: 3503525 - DNA, 25 bp, Homo sapien
tggggggctagaggtggacacctcg

SEQ ID NO: 3503526 - DNA, 25 bp, Homo sapien
acaatttggtgtggcctcgctgaca

SEQ ID NO: 3503527 - DNA, 25 bp, Homo sapien
cactggcataaggactacggctagc

SEQ ID NO: 3503528 - DNA, 25 bp, Homo sapien
cactttgggttttagagatggacac

SEQ ID NO: 3503529 - DNA, 25 bp, Homo sapien
tgagagctctaagtatccactggca

SEQ ID NO: 3503530 - DNA, 25 bp, Homo sapien
gagtttaccaatccacacctcagag

SEQ ID NO: 3503531 - DNA, 25 bp, Homo sapien
taagatatcctgtcatcgggaggca

SEQ ID NO: 3503532 - DNA, 25 bp, Homo sapien
ctaaaggatggcacaaataggccag

SEQ ID NO: 3503533 - DNA, 25 bp, Homo sapien
cagtgagttgaagtgtagacctacc

SEQ ID NO: 3503534 - DNA, 25 bp, Homo sapien
ccctacggatctgcttggttttcac

SEQ ID NO: 3503535 - DNA, 25 bp, Homo sapien
tggccctacggatctgcttggtttt

SEQ ID NO: 3503536 - DNA, 25 bp, Homo sapien
ttaatggccctacggatctgcttgg

SEQ ID NO: 3503537 - DNA, 25 bp, Homo sapien
tttttaatggccctacggatctgct

SEQ ID NO: 3503538 - DNA, 25 bp, Homo sapien
taaataataggattcatcactggtg

SEQ ID NO: 3503539 - DNA, 25 bp, Homo sapien
gcaaatatgcattggccataagagt

SEQ ID NO: 3503540 - DNA, 25 bp, Homo sapien
cattggccataagagtgtgggcata

SEQ ID NO: 3503541 - DNA, 25 bp, Homo sapien
tgggcataaggaggcgctcttttcc

SEQ ID NO: 3503542 - DNA, 25 bp, Homo sapien
gaagcaatgcttaggacggtcttaa

SEQ ID NO: 3503543 - DNA, 25 bp, Homo sapien
aatggcaacagcacctatgtaggag

SEQ ID NO: 3503544 - DNA, 25 bp, Homo sapien
taaagaccttatgccgctcctctgg

SEQ ID NO: 3503545 - DNA, 25 bp, Homo sapien
cactcctgcagtaactatgagggca

SEQ ID NO: 3503546 - DNA, 25 bp, Homo sapien
atggaaacagtaggaatgatggagc

SEQ ID NO: 3503547 - DNA, 25 bp, Homo sapien
ctggatgatatcaggatggaaacag

SEQ ID NO: 3503548 - DNA, 25 bp, Homo sapien
caggatggaaacagtaggaatgatg

SEQ ID NO: 3503549 - DNA, 25 bp, Homo sapien
tgatatcaggatggaaacagtagga

SEQ ID NO: 3503550 - DNA, 25 bp, Homo sapien
taggatcacggtccccctgacaagg

SEQ ID NO: 3503551 - DNA, 25 bp, Homo sapien
gatggcaaaccatactttgacgatc

SEQ ID NO: 3503552 - DNA, 25 bp, Homo sapien
aaggatggcaaaccatactttgacg

SEQ ID NO: 3503553 - DNA, 25 bp, Homo sapien
aggcaataggatcacggtccccctg

SEQ ID NO: 3503554 - DNA, 25 bp, Homo sapien
ggttacaaatggcaatgaagcgatc

SEQ ID NO: 3503555 - DNA, 25 bp, Homo sapien
gttacaaatggcaatgaagcgatca

SEQ ID NO: 3503556 - DNA, 25 bp, Homo sapien
tacaaatggcaatgaagcgatcaaa

SEQ ID NO: 3503557 - DNA, 25 bp, Homo sapien
gggttacaaatggcaatgaagcgat

SEQ ID NO: 3503558 - DNA, 25 bp, Homo sapien
ctgatctgtcttgcattgaaccaga

SEQ ID NO: 3503559 - DNA, 25 bp, Homo sapien
actgatctgtcttgcattgaaccag

SEQ ID NO: 3503560 - DNA, 25 bp, Homo sapien
aaactgatctgtcttgcattgaacc

SEQ ID NO: 3503561 - DNA, 25 bp, Homo sapien
aactgatctgtcttgcattgaacca

SEQ ID NO: 3503562 - DNA, 25 bp, Homo sapien
cataggttcgtggagactggactca

SEQ ID NO: 3503563 - DNA, 25 bp, Homo sapien
gagagagcagttatgtagagacagc

SEQ ID NO: 3503564 - DNA, 25 bp, Homo sapien
tagtcctggaactccagtcaggaaa

SEQ ID NO: 3503565 - DNA, 25 bp, Homo sapien
tgactagtgtcgaaacacacaagcc

SEQ ID NO: 3503566 - DNA, 25 bp, Homo sapien
tctagtctaggtttacacttctgat

SEQ ID NO: 3503567 - DNA, 25 bp, Homo sapien
ttcttatctgttgtcactatagctg

SEQ ID NO: 3503568 - DNA, 25 bp, Homo sapien
gtcactatagctgagttgatatata

SEQ ID NO: 3503569 - DNA, 25 bp, Homo sapien
tttctagtctaggtttacacttctg

SEQ ID NO: 3503570 - DNA, 25 bp, Homo sapien
tcacactgtagatgatgggggattc

SEQ ID NO: 3503571 - DNA, 25 bp, Homo sapien
cactgtagatgatgggggattcatc

SEQ ID NO: 3503572 - DNA, 25 bp, Homo sapien
cacactgtagatgatgggggattca

SEQ ID NO: 3503573 - DNA, 25 bp, Homo sapien
ctgtagatgatgggggattcatcac

SEQ ID NO: 3503574 - DNA, 25 bp, Homo sapien
cagtgatatgagaaatgcaggtgct

SEQ ID NO: 3503575 - DNA, 25 bp, Homo sapien
aaaggacaggctgatcaaagggatg

SEQ ID NO: 3503576 - DNA, 25 bp, Homo sapien
aacagcagtgatatgagaaatgcag

SEQ ID NO: 3503577 - DNA, 25 bp, Homo sapien
caggctgatcaaagggatgtagaat

SEQ ID NO: 3503578 - DNA, 25 bp, Homo sapien
gagacctgagcgaatgatcagcaga

SEQ ID NO: 3503579 - DNA, 25 bp, Homo sapien
cactccggcagtagagatgattgca

SEQ ID NO: 3503580 - DNA, 25 bp, Homo sapien
caagataaagatggagtccactccg

SEQ ID NO: 3503581 - DNA, 25 bp, Homo sapien
gatgattgcacttaatcgtagtgca

SEQ ID NO: 3503582 - DNA, 25 bp, Homo sapien
ctgaacatgagagtttcatcacatc

SEQ ID NO: 3503583 - DNA, 25 bp, Homo sapien
aacagtaggagtggcagagcacgtg

SEQ ID NO: 3503584 - DNA, 25 bp, Homo sapien
ggtggaaacagtaggagtggcagag

SEQ ID NO: 3503585 - DNA, 25 bp, Homo sapien
caaaccaatctgtgctattcttgca

SEQ ID NO: 3503586 - DNA, 25 bp, Homo sapien
taagaagtaggattagtggtgtcaa

SEQ ID NO: 3503587 - DNA, 25 bp, Homo sapien
cctggtaatgactgccaaaccaatc

SEQ ID NO: 3503588 - DNA, 25 bp, Homo sapien
tcttgcatgagttagaatggtagca

SEQ ID NO: 3503589 - DNA, 25 bp, Homo sapien
gacatgggcccattcaagtccaggg

SEQ ID NO: 3503590 - DNA, 25 bp, Homo sapien
cagggatccccgtcaagaggaaagt

SEQ ID NO: 3503591 - DNA, 25 bp, Homo sapien
tacgtaagccaatgtcagtggtgga

SEQ ID NO: 3503592 - DNA, 25 bp, Homo sapien
tgatctcccgagcattgagccagaa

SEQ ID NO: 3503593 - DNA, 25 bp, Homo sapien
ggagcagaattctcttgtaggatct

SEQ ID NO: 3503594 - DNA, 25 bp, Homo sapien
cagaattctcttgtaggatcttgac

SEQ ID NO: 3503595 - DNA, 25 bp, Homo sapien
ttgggagcagaattctcttgtagga

SEQ ID NO: 3503596 - DNA, 25 bp, Homo sapien
ctttgggagcagaattctcttgtag

SEQ ID NO: 3503597 - DNA, 25 bp, Homo sapien
ttatagctgtagatggaaattagtt

SEQ ID NO: 3503598 - DNA, 25 bp, Homo sapien
gctgtagatggaaattagtttggct

SEQ ID NO: 3503599 - DNA, 25 bp, Homo sapien
ctgtagatggaaattagtttggcta

SEQ ID NO: 3503600 - DNA, 25 bp, Homo sapien
gtagatggaaattagtttggctatt

SEQ ID NO: 3503601 - DNA, 25 bp, Homo sapien
gccatcactgaatggactactctgg

SEQ ID NO: 3503602 - DNA, 25 bp, Homo sapien
tgaccgaccatagcgatacaccaag

SEQ ID NO: 3503603 - DNA, 25 bp, Homo sapien
gcagactgagcatagccttgcggat

SEQ ID NO: 3503604 - DNA, 25 bp, Homo sapien
aaagcaactgctcccacatgggaga

SEQ ID NO: 3503605 - DNA, 25 bp, Homo sapien
gaagaccttgtgccattcttcaggg

SEQ ID NO: 3503606 - DNA, 25 bp, Homo sapien
ccagtggtcaggatgagatcaatta

SEQ ID NO: 3503607 - DNA, 25 bp, Homo sapien
tgctatttgcccgaatgtctgaaca

SEQ ID NO: 3503608 - DNA, 25 bp, Homo sapien
catggtgtatctattccagtggtca

SEQ ID NO: 3503609 - DNA, 25 bp, Homo sapien
cacatctggatggtaacaataggag

SEQ ID NO: 3503610 - DNA, 25 bp, Homo sapien
caaaagtagtggcaatattagtact

SEQ ID NO: 3503611 - DNA, 25 bp, Homo sapien
tagagaggcttaaggagcaaaagta

SEQ ID NO: 3503612 - DNA, 25 bp, Homo sapien
ggaattagtgagaatggtagtgtac

SEQ ID NO: 3503613 - DNA, 25 bp, Homo sapien
ctatagcacgtgtaatcatcagaag

SEQ ID NO: 3503614 - DNA, 25 bp, Homo sapien
tttcacgtgcctcaaaccagaggat

SEQ ID NO: 3503615 - DNA, 25 bp, Homo sapien
tatatagactgatttcacgtgcctc

SEQ ID NO: 3503616 - DNA, 25 bp, Homo sapien
ctggacaatgcagctatatagactg

SEQ ID NO: 3503617 - DNA, 25 bp, Homo sapien
cagaggatacctaatgttgttgaca

SEQ ID NO: 3503618 - DNA, 25 bp, Homo sapien
caggaatgccggtcaacaagaaggt

SEQ ID NO: 3503619 - DNA, 25 bp, Homo sapien
tccagacatgggcagactctaggcc

SEQ ID NO: 3503620 - DNA, 25 bp, Homo sapien
catggagactctgctgggtaatgat

SEQ ID NO: 3503621 - DNA, 25 bp, Homo sapien
gatcacgctgttcccagagagggca

SEQ ID NO: 3503622 - DNA, 25 bp, Homo sapien
agcacagttgctctcttagggaaca

SEQ ID NO: 3503623 - DNA, 25 bp, Homo sapien
gatggccatggcttttgaccgcttt

SEQ ID NO: 3503624 - DNA, 25 bp, Homo sapien
tgtcctctggttcagtgcacgtgaa

SEQ ID NO: 3503625 - DNA, 25 bp, Homo sapien
tgttgccatttgcagacccctcaga

SEQ ID NO: 3503626 - DNA, 25 bp, Homo sapien
tcaggggatgtttccacaacatcct

SEQ ID NO: 3503627 - DNA, 25 bp, Homo sapien
tagatagagattagcaaacaggatg

SEQ ID NO: 3503628 - DNA, 25 bp, Homo sapien
taaaagctttgaggcgggcttcacc

SEQ ID NO: 3503629 - DNA, 25 bp, Homo sapien
cagatatgggaggaacgtgtgctaa

SEQ ID NO: 3503630 - DNA, 25 bp, Homo sapien
gcacatcatggccaaagcggtaggt

SEQ ID NO: 3503631 - DNA, 25 bp, Homo sapien
tccccagtttgatcacgaccgatgg

SEQ ID NO: 3503632 - DNA, 25 bp, Homo sapien
aaagagcccattcccacgacttatg

SEQ ID NO: 3503633 - DNA, 25 bp, Homo sapien
gaagcagatagccacgtagcagtcc

SEQ ID NO: 3503634 - DNA, 25 bp, Homo sapien
gaagggcatcctagacaccatgaag

SEQ ID NO: 3503635 - DNA, 25 bp, Homo sapien
catacgtggcacagaacggaaaggc

SEQ ID NO: 3503636 - DNA, 25 bp, Homo sapien
tctctgctgggaacgcaatctactc

SEQ ID NO: 3503637 - DNA, 25 bp, Homo sapien
tttccaacaacagccacagcatacg

SEQ ID NO: 3503638 - DNA, 25 bp, Homo sapien
gctcatgcagggtgtggtcaattct

SEQ ID NO: 3503639 - DNA, 25 bp, Homo sapien
gcagaggtgcctgaagtacagatga

SEQ ID NO: 3503640 - DNA, 25 bp, Homo sapien
gaggtgcctgaagtacagatgatca

SEQ ID NO: 3503641 - DNA, 25 bp, Homo sapien
ggtgcctgaagtacagatgatcact

SEQ ID NO: 3503642 - DNA, 25 bp, Homo sapien
gcctgaagtacagatgatcactcac

SEQ ID NO: 3503643 - DNA, 25 bp, Homo sapien
tgtctttaaccaagcatggcatggc

SEQ ID NO: 3503644 - DNA, 25 bp, Homo sapien
ttggcagagacctcagatcaaggca

SEQ ID NO: 3503645 - DNA, 25 bp, Homo sapien
tatgtctggacgtttccgaccttta

SEQ ID NO: 3503646 - DNA, 25 bp, Homo sapien
gactggagactagagcttgaagcat

SEQ ID NO: 3503647 - DNA, 25 bp, Homo sapien
tagcctttccaagatgagagttcta

SEQ ID NO: 3503648 - DNA, 25 bp, Homo sapien
gcctttccaagatgagagttctaat

SEQ ID NO: 3503649 - DNA, 25 bp, Homo sapien
tttccaagatgagagttctaattgt

SEQ ID NO: 3503650 - DNA, 25 bp, Homo sapien
ttagcctttccaagatgagagttct

SEQ ID NO: 3503651 - DNA, 25 bp, Homo sapien
gatttgggctgtctttgataatgcc

SEQ ID NO: 3503652 - DNA, 25 bp, Homo sapien
tagatagagccattgctggatttgg

SEQ ID NO: 3503653 - DNA, 25 bp, Homo sapien
ctttgataatgccttagagtgactg

SEQ ID NO: 3503654 - DNA, 25 bp, Homo sapien
tagagtgactgtacccaaatcctgc

SEQ ID NO: 3503655 - DNA, 25 bp, Homo sapien
agtaaagctgactccaggagtatga

SEQ ID NO: 3503656 - DNA, 25 bp, Homo sapien
gttacccaaagtgtcagtaaagctg

SEQ ID NO: 3503657 - DNA, 25 bp, Homo sapien
gactccaggagtatgatcaggatca

SEQ ID NO: 3503658 - DNA, 25 bp, Homo sapien
cccaaagtgtcagtaaagctgactc

SEQ ID NO: 3503659 - DNA, 25 bp, Homo sapien
caggtttgaccagccttccagcgat

SEQ ID NO: 3503660 - DNA, 25 bp, Homo sapien
tagggatatagaagaggagcactgc

SEQ ID NO: 3503661 - DNA, 25 bp, Homo sapien
catggcgagcaagacagaggactcc

SEQ ID NO: 3503662 - DNA, 25 bp, Homo sapien
acaaataggctgtaggctgcacccc

SEQ ID NO: 3503663 - DNA, 25 bp, Homo sapien
caccagcaagaaggtgggggccatt

SEQ ID NO: 3503664 - DNA, 25 bp, Homo sapien
ccaccagcaagaaggtgggggccat

SEQ ID NO: 3503665 - DNA, 25 bp, Homo sapien
caagaaggtgggggccattgaagtg

SEQ ID NO: 3503666 - DNA, 25 bp, Homo sapien
cagcaagaaggtgggggccattgaa

SEQ ID NO: 3503667 - DNA, 25 bp, Homo sapien
tattgggggctatctgagttggtaa

SEQ ID NO: 3503668 - DNA, 25 bp, Homo sapien
ggggctatctgagttggtaatgttg

SEQ ID NO: 3503669 - DNA, 25 bp, Homo sapien
ctgctattgggggctatctgagttg

SEQ ID NO: 3503670 - DNA, 25 bp, Homo sapien
gggctatctgagttggtaatgttga

SEQ ID NO: 3503671 - DNA, 25 bp, Homo sapien
catagaagaggagcacggtagacat

SEQ ID NO: 3503672 - DNA, 25 bp, Homo sapien
gaccatgtgcactactggtgataaa

SEQ ID NO: 3503673 - DNA, 25 bp, Homo sapien
gagcagtaggtatatatcagccatg

SEQ ID NO: 3503674 - DNA, 25 bp, Homo sapien
gataaatgctcccaaaatctgtgga

SEQ ID NO: 3503675 - DNA, 25 bp, Homo sapien
tcaaaggccatggacactaggactc

SEQ ID NO: 3503676 - DNA, 25 bp, Homo sapien
cttgatgacagctaggatggtacca

SEQ ID NO: 3503677 - DNA, 25 bp, Homo sapien
aggagaacatcgagccccagtgtga

SEQ ID NO: 3503678 - DNA, 25 bp, Homo sapien
tgcccgggtgaggacagctattcca

SEQ ID NO: 3503679 - DNA, 25 bp, Homo sapien
tactgacaccgttgttgtagaccca

SEQ ID NO: 3503680 - DNA, 25 bp, Homo sapien
ttactgacaccgttgttgtagaccc

SEQ ID NO: 3503681 - DNA, 25 bp, Homo sapien
actgacaccgttgttgtagacccag

SEQ ID NO: 3503682 - DNA, 25 bp, Homo sapien
tgacaccgttgttgtagacccagtt

SEQ ID NO: 3503683 - DNA, 25 bp, Homo sapien
gattcataagaggtggcactagcaa

SEQ ID NO: 3503684 - DNA, 25 bp, Homo sapien
taagaggtggcactagcaagaaaac

SEQ ID NO: 3503685 - DNA, 25 bp, Homo sapien
cacaatatacaatgggattcataag

SEQ ID NO: 3503686 - DNA, 25 bp, Homo sapien
aggtggcactagcaagaaaacatca

SEQ ID NO: 3503687 - DNA, 25 bp, Homo sapien
ccaaagcaatgacgggcgcatagaa

SEQ ID NO: 3503688 - DNA, 25 bp, Homo sapien
tgccaaagcaatgacgggcgcatag

SEQ ID NO: 3503689 - DNA, 25 bp, Homo sapien
caaagcaatgacgggcgcatagaag

SEQ ID NO: 3503690 - DNA, 25 bp, Homo sapien
atgccaaagcaatgacgggcgcata

SEQ ID NO: 3503691 - DNA, 25 bp, Homo sapien
tgagccgctccctatgggatccaat

SEQ ID NO: 3503692 - DNA, 25 bp, Homo sapien
cagtgttgtcggagcaggccagctt

SEQ ID NO: 3503693 - DNA, 25 bp, Homo sapien
tgacatcatacagagggcaagaaag

SEQ ID NO: 3503694 - DNA, 25 bp, Homo sapien
tcaggatgagcacataagacacagt

SEQ ID NO: 3503695 - DNA, 25 bp, Homo sapien
gaatgagagagtaggcttttcctac

SEQ ID NO: 3503696 - DNA, 25 bp, Homo sapien
ctgatggagacaataggaatgagag

SEQ ID NO: 3503697 - DNA, 25 bp, Homo sapien
tatgtcaaccttgtaagagtgaaag

SEQ ID NO: 3503698 - DNA, 25 bp, Homo sapien
aaaggaaatgggagtactaacagca

SEQ ID NO: 3503699 - DNA, 25 bp, Homo sapien
cattttggcaactctggcactggtg

SEQ ID NO: 3503700 - DNA, 25 bp, Homo sapien
tacctcagatatgtacctcagaggg

SEQ ID NO: 3503701 - DNA, 25 bp, Homo sapien
ggatacagctcaccagtacctcaga

SEQ ID NO: 3503702 - DNA, 25 bp, Homo sapien
ggcatatggccaaaaccggtcaaaa

SEQ ID NO: 3503703 - DNA, 25 bp, Homo sapien
ggctaccaagtacatgaggcagatg

SEQ ID NO: 3503704 - DNA, 25 bp, Homo sapien
tgtgcaattgcctaggatggctacc

SEQ ID NO: 3503705 - DNA, 25 bp, Homo sapien
cactgaggactccatatctgtgaat

SEQ ID NO: 3503706 - DNA, 25 bp, Homo sapien
gatatccatatatgggcatgctcca

SEQ ID NO: 3503707 - DNA, 25 bp, Homo sapien
gaaggtgcatgatgagtccattgaa

SEQ ID NO: 3503708 - DNA, 25 bp, Homo sapien
actcagtatggatctcctgtgttca

SEQ ID NO: 3503709 - DNA, 25 bp, Homo sapien
gaaagaaggtggtaatcgcaatttc

SEQ ID NO: 3503710 - DNA, 25 bp, Homo sapien
aggtggtaatcgcaatttcagaaga

SEQ ID NO: 3503711 - DNA, 25 bp, Homo sapien
gtaccagattggaagcttttgagtg

SEQ ID NO: 3503712 - DNA, 25 bp, Homo sapien
tggaagcttttgagtggtgtagccc

SEQ ID NO: 3503713 - DNA, 25 bp, Homo sapien
gtggtgtagcccatgatacaagcat

SEQ ID NO: 3503714 - DNA, 25 bp, Homo sapien
ttttgagtggtgtagcccatgatac

SEQ ID NO: 3503715 - DNA, 25 bp, Homo sapien
agtacctcaatctgtttccacttca

SEQ ID NO: 3503716 - DNA, 25 bp, Homo sapien
gcgtcactcgatcccggatctgttt

SEQ ID NO: 3503717 - DNA, 25 bp, Homo sapien
gcatgcgtcactcgatcccggatct

SEQ ID NO: 3503718 - DNA, 25 bp, Homo sapien
aaggcatgcgtcactcgatcccgga

SEQ ID NO: 3503719 - DNA, 25 bp, Homo sapien
atgcgtcactcgatcccggatctgt

SEQ ID NO: 3503720 - DNA, 25 bp, Homo sapien
ctgtagacaatgggattcatcacag

SEQ ID NO: 3503721 - DNA, 25 bp, Homo sapien
gacaatgggattcatcacaggagga

SEQ ID NO: 3503722 - DNA, 25 bp, Homo sapien
agacaatgggattcatcacaggagg

SEQ ID NO: 3503723 - DNA, 25 bp, Homo sapien
aatgggattcatcacaggaggaaag

SEQ ID NO: 3503724 - DNA, 25 bp, Homo sapien
tgagtgctacactacgacccagaga

SEQ ID NO: 3503725 - DNA, 25 bp, Homo sapien
cacggtgcgcaggatcagagcataa

SEQ ID NO: 3503726 - DNA, 25 bp, Homo sapien
catagacagtagcacagaggactcg

SEQ ID NO: 3503727 - DNA, 25 bp, Homo sapien
tgtagagacgatgacaaacatgccg

SEQ ID NO: 3503728 - DNA, 25 bp, Homo sapien
tcctgaagtaaattgaggcagtact

SEQ ID NO: 3503729 - DNA, 25 bp, Homo sapien
ggtgggtgccctccaaaatcctgaa

SEQ ID NO: 3503730 - DNA, 25 bp, Homo sapien
tgaagtaaattgaggcagtactggt

SEQ ID NO: 3503731 - DNA, 25 bp, Homo sapien
aaggtgggtgccctccaaaatcctg

SEQ ID NO: 3503732 - DNA, 25 bp, Homo sapien
tctccaggtgaagacaataagcatg

SEQ ID NO: 3503733 - DNA, 25 bp, Homo sapien
gaggagagcacttctaagcactgag

SEQ ID NO: 3503734 - DNA, 25 bp, Homo sapien
gatgttcaccaaagcgatgcacaag

SEQ ID NO: 3503735 - DNA, 25 bp, Homo sapien
aacttcttaatgatgcgctggcgaa

SEQ ID NO: 3503736 - DNA, 25 bp, Homo sapien
ggcaaaggcctaagtctgtgacagc

SEQ ID NO: 3503737 - DNA, 25 bp, Homo sapien
catggagaccttctagaccttggaa

SEQ ID NO: 3503738 - DNA, 25 bp, Homo sapien
gaagggaatagagatccagccatgg

SEQ ID NO: 3503739 - DNA, 25 bp, Homo sapien
tgtgacagctagcatgcccaagaaa

SEQ ID NO: 3503740 - DNA, 25 bp, Homo sapien
cccaagatcagccagtaaggaagca

SEQ ID NO: 3503741 - DNA, 25 bp, Homo sapien
taaggaagcatctgcagatggcata

SEQ ID NO: 3503742 - DNA, 25 bp, Homo sapien
gatgaggaggcaaataatagtaggc

SEQ ID NO: 3503743 - DNA, 25 bp, Homo sapien
gatctattagccttttctactgggt

SEQ ID NO: 3503744 - DNA, 25 bp, Homo sapien
aaaatatcagccatgaggacgtgga

SEQ ID NO: 3503745 - DNA, 25 bp, Homo sapien
cacagtacacgatgggattcaacag

SEQ ID NO: 3503746 - DNA, 25 bp, Homo sapien
gatcataggagacacatccctggca

SEQ ID NO: 3503747 - DNA, 25 bp, Homo sapien
caaactggtggagcatggcagcact

SEQ ID NO: 3503748 - DNA, 25 bp, Homo sapien
ctgtctgggggtagcaattcccagt

SEQ ID NO: 3503749 - DNA, 25 bp, Homo sapien
tctgggggtagcaattcccagtaca

SEQ ID NO: 3503750 - DNA, 25 bp, Homo sapien
gggggtagcaattcccagtacagcc

SEQ ID NO: 3503751 - DNA, 25 bp, Homo sapien
tgggggtagcaattcccagtacagc

SEQ ID NO: 3503752 - DNA, 25 bp, Homo sapien
aagtccagcatagtagaaagtcctg

SEQ ID NO: 3503753 - DNA, 25 bp, Homo sapien
ccattacagacagtacagaggcttc

SEQ ID NO: 3503754 - DNA, 25 bp, Homo sapien
gaaagtcctgcacagagtccgtaga

SEQ ID NO: 3503755 - DNA, 25 bp, Homo sapien
tctcaaaggactgtggattgccaca

SEQ ID NO: 3503756 - DNA, 25 bp, Homo sapien
ggtacacagataagaaaggaatgga

SEQ ID NO: 3503757 - DNA, 25 bp, Homo sapien
cccgataaggaggaatctaaggact

SEQ ID NO: 3503758 - DNA, 25 bp, Homo sapien
tatccaggtgcgacttttctccagt

SEQ ID NO: 3503759 - DNA, 25 bp, Homo sapien
tctccagtccagtgatcccgataag

SEQ ID NO: 3503760 - DNA, 25 bp, Homo sapien
aagcttctaaacgttgactcaaggg

SEQ ID NO: 3503761 - DNA, 25 bp, Homo sapien
tcctcttttatgcttgtaggcactg

SEQ ID NO: 3503762 - DNA, 25 bp, Homo sapien
ctgttttatgaagctctaagagccc

SEQ ID NO: 3503763 - DNA, 25 bp, Homo sapien
gccccttgggatgcctaacagcagg

SEQ ID NO: 3503764 - DNA, 25 bp, Homo sapien
aatcttccgttgacacaattttgct

SEQ ID NO: 3503765 - DNA, 25 bp, Homo sapien
tcttccgttgacacaattttgctac

SEQ ID NO: 3503766 - DNA, 25 bp, Homo sapien
taaatcttccgttgacacaattttg

SEQ ID NO: 3503767 - DNA, 25 bp, Homo sapien
gacacaattttgctacaactctcac

SEQ ID NO: 3503768 - DNA, 25 bp, Homo sapien
tctaatctgtttagtttttacacaa

SEQ ID NO: 3503769 - DNA, 25 bp, Homo sapien
taatctgtttagtttttacacaata

SEQ ID NO: 3503770 - DNA, 25 bp, Homo sapien
ctaatctgtttagtttttacacaat

SEQ ID NO: 3503771 - DNA, 25 bp, Homo sapien
aattgggttcgtcagtggaggtaca

SEQ ID NO: 3503772 - DNA, 25 bp, Homo sapien
gggttcgtcagtggaggtacaagta

SEQ ID NO: 3503773 - DNA, 25 bp, Homo sapien
atgaggggagagacatgccgggcaa

SEQ ID NO: 3503774 - DNA, 25 bp, Homo sapien
gttcgtcagtggaggtacaagtagg

SEQ ID NO: 3503775 - DNA, 25 bp, Homo sapien
gcaatgagaataaagtctaccataa

SEQ ID NO: 3503776 - DNA, 25 bp, Homo sapien
taccataaggcagagtgctccaaaa

SEQ ID NO: 3503777 - DNA, 25 bp, Homo sapien
ttgaggatcagggtgtaagacacag

SEQ ID NO: 3503778 - DNA, 25 bp, Homo sapien
gataacatcaattctgttgtcagaa

SEQ ID NO: 3503779 - DNA, 25 bp, Homo sapien
cagttgtcaggattgaggtgtatct

SEQ ID NO: 3503780 - DNA, 25 bp, Homo sapien
gaagaaccaggagcatgctcttaaa

SEQ ID NO: 3503781 - DNA, 25 bp, Homo sapien
tgtggatggctaggaatctatcaaa

SEQ ID NO: 3503782 - DNA, 25 bp, Homo sapien
tgctcttaaaggagaatactatccc

SEQ ID NO: 3503783 - DNA, 25 bp, Homo sapien
gcaaagcaggcattggatgaaattt

SEQ ID NO: 3503784 - DNA, 25 bp, Homo sapien
tgaaatttcaggagcattgaacagg

SEQ ID NO: 3503785 - DNA, 25 bp, Homo sapien
ggatgaaatttcaggagcattgaac

SEQ ID NO: 3503786 - DNA, 25 bp, Homo sapien
gggcaaagcaggcattggatgaaat

SEQ ID NO: 3503787 - DNA, 25 bp, Homo sapien
ctggcatcccaaccaagaagaaggt

SEQ ID NO: 3503788 - DNA, 25 bp, Homo sapien
tggcatcccaaccaagaagaaggtg

SEQ ID NO: 3503789 - DNA, 25 bp, Homo sapien
aatcttccattgacacaattttgct

SEQ ID NO: 3503790 - DNA, 25 bp, Homo sapien
aaatcttccattgacacaattttgc

SEQ ID NO: 3503791 - DNA, 25 bp, Homo sapien
ttaaatcttccattgacacaatttt

SEQ ID NO: 3503792 - DNA, 25 bp, Homo sapien
tcttccattgacacaattttgctac

SEQ ID NO: 3503793 - DNA, 25 bp, Homo sapien
tttttggatgcaattcccggtacag

SEQ ID NO: 3503794 - DNA, 25 bp, Homo sapien
taaacaattggtttcatcagcggag

SEQ ID NO: 3503795 - DNA, 25 bp, Homo sapien
tttcatcagcggaggtacaagtagg

SEQ ID NO: 3503796 - DNA, 25 bp, Homo sapien
cacaagtattgagagccttaagctc

SEQ ID NO: 3503797 - DNA, 25 bp, Homo sapien
caggattgaggtgtatctcagagga

SEQ ID NO: 3503798 - DNA, 25 bp, Homo sapien
gattgaggtgtatctcagaggattg

SEQ ID NO: 3503799 - DNA, 25 bp, Homo sapien
ttgaggtgtatctcagaggattgtg

SEQ ID NO: 3503800 - DNA, 25 bp, Homo sapien
agaagtttcaggggcattgaacagg

SEQ ID NO: 3503801 - DNA, 25 bp, Homo sapien
ctggcatcccaaccaagaagaaggt

SEQ ID NO: 3503802 - DNA, 25 bp, Homo sapien
tggcatcccaaccaagaagaaggtg

SEQ ID NO: 3503803 - DNA, 25 bp, Homo sapien
gctggctcttcacacagtatacaat

SEQ ID NO: 3503804 - DNA, 25 bp, Homo sapien
tgtgtttggcaaaccggtagatgac

SEQ ID NO: 3503805 - DNA, 25 bp, Homo sapien
aagacaagatttcttatctgctggc

SEQ ID NO: 3503806 - DNA, 25 bp, Homo sapien
aaagcatcagctatgaggatcctag

SEQ ID NO: 3503807 - DNA, 25 bp, Homo sapien
tagggagataatgggcacatagaag

SEQ ID NO: 3503808 - DNA, 25 bp, Homo sapien
tgggaaacacatgtattgaggacct

SEQ ID NO: 3503809 - DNA, 25 bp, Homo sapien
ctagggagataatgggcacatagaa

SEQ ID NO: 3503810 - DNA, 25 bp, Homo sapien
acacatgtattgaggaccttgagcc

SEQ ID NO: 3503811 - DNA, 25 bp, Homo sapien
aaataaatgtcaagtctaggatgcc

SEQ ID NO: 3503812 - DNA, 25 bp, Homo sapien
gcaagcccaatttgaatgactctgg

SEQ ID NO: 3503813 - DNA, 25 bp, Homo sapien
ttgaccttgttgtcagtgcaggcca

SEQ ID NO: 3503814 - DNA, 25 bp, Homo sapien
taggattgggacaggaggttcttct

SEQ ID NO: 3503815 - DNA, 25 bp, Homo sapien
gaggagagggatagtcccaggtcag

SEQ ID NO: 3503816 - DNA, 25 bp, Homo sapien
gggaaattcctggagcattgaacag

SEQ ID NO: 3503817 - DNA, 25 bp, Homo sapien
ctcttgagcaatacaggcatcaggg

SEQ ID NO: 3503818 - DNA, 25 bp, Homo sapien
aatccttaacatggtagggagagag

SEQ ID NO: 3503819 - DNA, 25 bp, Homo sapien
tccctaggatagcaacagtgtacat

SEQ ID NO: 3503820 - DNA, 25 bp, Homo sapien
agaatggtacaattccctaggatag

SEQ ID NO: 3503821 - DNA, 25 bp, Homo sapien
tacatgagacatatggggatagaga

SEQ ID NO: 3503822 - DNA, 25 bp, Homo sapien
acagaatggtacaattccctaggat

SEQ ID NO: 3503823 - DNA, 25 bp, Homo sapien
gagaatggacatcccagtatttgag

SEQ ID NO: 3503824 - DNA, 25 bp, Homo sapien
tggacatcccagtatttgagggaaa

SEQ ID NO: 3503825 - DNA, 25 bp, Homo sapien
cagaggtattgagaatggacatccc

SEQ ID NO: 3503826 - DNA, 25 bp, Homo sapien
aagatgagaagctcataagaggttt

SEQ ID NO: 3503827 - DNA, 25 bp, Homo sapien
cagtatgatggctgtctgctttaaa

SEQ ID NO: 3503828 - DNA, 25 bp, Homo sapien
caggtgtgtcaagtggtccaactac

SEQ ID NO: 3503829 - DNA, 25 bp, Homo sapien
tcccaagtcttgcttctgatattaa

SEQ ID NO: 3503830 - DNA, 25 bp, Homo sapien
gcctgttaggcctagtgtcctccaa

SEQ ID NO: 3503831 - DNA, 25 bp, Homo sapien
ttcctcccaaatgttctctagcgaa

SEQ ID NO: 3503832 - DNA, 25 bp, Homo sapien
tatggagatacggttcctcttttga

SEQ ID NO: 3503833 - DNA, 25 bp, Homo sapien
tggatgtatggagatacggttcctc

SEQ ID NO: 3503834 - DNA, 25 bp, Homo sapien
ctttcgctgcttgagatcattctgc

SEQ ID NO: 3503835 - DNA, 25 bp, Homo sapien
ttttctttgcttactggtatcttag

SEQ ID NO: 3503836 - DNA, 25 bp, Homo sapien
tgcttactggtatcttagaatgaca

SEQ ID NO: 3503837 - DNA, 25 bp, Homo sapien
gtatcttagaatgacatgatgccat

SEQ ID NO: 3503838 - DNA, 25 bp, Homo sapien
cacatcaagtgtcagcacttctaac

SEQ ID NO: 3503839 - DNA, 25 bp, Homo sapien
gggacagacctacttgacatgcaga

SEQ ID NO: 3503840 - DNA, 25 bp, Homo sapien
acttacaggtgcttgttactaaggc

SEQ ID NO: 3503841 - DNA, 25 bp, Homo sapien
tctcgccaggaagatgcaagtggaa

SEQ ID NO: 3503842 - DNA, 25 bp, Homo sapien
gaataagcacactctaacttacagg

SEQ ID NO: 3503843 - DNA, 25 bp, Homo sapien
cttccagctcagtgccgatgatatc

SEQ ID NO: 3503844 - DNA, 25 bp, Homo sapien
cgatgatatccaaaggatccagcat

SEQ ID NO: 3503845 - DNA, 25 bp, Homo sapien
tcagtgccgatgatatccaaaggat

SEQ ID NO: 3503846 - DNA, 25 bp, Homo sapien
ggtatcacgaccctagaaccttcca

SEQ ID NO: 3503847 - DNA, 25 bp, Homo sapien
tcagaacctcgtatgtattaggtac

SEQ ID NO: 3503848 - DNA, 25 bp, Homo sapien
cagaacctcgtatgtattaggtact

SEQ ID NO: 3503849 - DNA, 25 bp, Homo sapien
gaacctcgtatgtattaggtactct

SEQ ID NO: 3503850 - DNA, 25 bp, Homo sapien
cctcgtatgtattaggtactcttcc

SEQ ID NO: 3503851 - DNA, 25 bp, Homo sapien
gccattgccacaaggactgctgact

SEQ ID NO: 3503852 - DNA, 25 bp, Homo sapien
agtgaagttccctatgagtgcgatc

SEQ ID NO: 3503853 - DNA, 25 bp, Homo sapien
tggtagctgttgagagacccacatc

SEQ ID NO: 3503854 - DNA, 25 bp, Homo sapien
tgagtaggaagacggaaaacagcac

SEQ ID NO: 3503855 - DNA, 25 bp, Homo sapien
tgcttgtgaatgcataagtccacag

SEQ ID NO: 3503856 - DNA, 25 bp, Homo sapien
agaaatgtatgctcacccaatctgc

SEQ ID NO: 3503857 - DNA, 25 bp, Homo sapien
cataagtccacagtctacagaaatg

SEQ ID NO: 3503858 - DNA, 25 bp, Homo sapien
caatctgcatgtaaccacacaggct

SEQ ID NO: 3503859 - DNA, 25 bp, Homo sapien
tcatgttcaagttataacctttctc

SEQ ID NO: 3503860 - DNA, 25 bp, Homo sapien
tcaaactactggagcaacatgtttc

SEQ ID NO: 3503861 - DNA, 25 bp, Homo sapien
actactggagcaacatgtttctccc

SEQ ID NO: 3503862 - DNA, 25 bp, Homo sapien
tttctccatatcctgattcactatg

SEQ ID NO: 3503863 - DNA, 25 bp, Homo sapien
tgagaagtgctatgcccctgagaac

SEQ ID NO: 3503864 - DNA, 25 bp, Homo sapien
gcggaattttgtctcagcacaggca

SEQ ID NO: 3503865 - DNA, 25 bp, Homo sapien
tctaccaccccagtaaggaaggcaa

SEQ ID NO: 3503866 - DNA, 25 bp, Homo sapien
tctcccaattacagcgcgtgtcaga

SEQ ID NO: 3503867 - DNA, 25 bp, Homo sapien
tgaatcaggaacacgagtgaggcag

SEQ ID NO: 3503868 - DNA, 25 bp, Homo sapien
tcaaagcgaatctctccatcatgga

SEQ ID NO: 3503869 - DNA, 25 bp, Homo sapien
cgagtgaggcaggtttcaaagcgaa

SEQ ID NO: 3503870 - DNA, 25 bp, Homo sapien
agagtgaatcaggaacacgagtgag

SEQ ID NO: 3503871 - DNA, 25 bp, Homo sapien
ccagaagagactgagaagtttgggc

SEQ ID NO: 3503872 - DNA, 25 bp, Homo sapien
cagaagagactgagaagtttgggca

SEQ ID NO: 3503873 - DNA, 25 bp, Homo sapien
aagagactgagaagtttgggcacag

SEQ ID NO: 3503874 - DNA, 25 bp, Homo sapien
gaagagactgagaagtttgggcaca

SEQ ID NO: 3503875 - DNA, 25 bp, Homo sapien
gtagaacacacaacaagatcaacta

SEQ ID NO: 3503876 - DNA, 25 bp, Homo sapien
tgtagaacacacaacaagatcaact

SEQ ID NO: 3503877 - DNA, 25 bp, Homo sapien
ctgtagaacacacaacaagatcaac

SEQ ID NO: 3503878 - DNA, 25 bp, Homo sapien
tagaacacacaacaagatcaactac

SEQ ID NO: 3503879 - DNA, 25 bp, Homo sapien
taaacagaagagagccgtttcccag

SEQ ID NO: 3503880 - DNA, 25 bp, Homo sapien
tagggccaacaggtagaccacacaa

SEQ ID NO: 3503881 - DNA, 25 bp, Homo sapien
catgcataggaagaggtacattggc

SEQ ID NO: 3503882 - DNA, 25 bp, Homo sapien
taagaataaaggttgatggacgggc

SEQ ID NO: 3503883 - DNA, 25 bp, Homo sapien
gactgctcaggagactaggaactaa

SEQ ID NO: 3503884 - DNA, 25 bp, Homo sapien
gattgtcgactagagatttcaggta

SEQ ID NO: 3503885 - DNA, 25 bp, Homo sapien
tgtgctcttaaggaagtgccctgtt

SEQ ID NO: 3503886 - DNA, 25 bp, Homo sapien
tacagttggtcagacaggagacaca

SEQ ID NO: 3503887 - DNA, 25 bp, Homo sapien
agcccaggagtgagatatcagcctg

SEQ ID NO: 3503888 - DNA, 25 bp, Homo sapien
ggaggctctggtttgcagatagctt

SEQ ID NO: 3503889 - DNA, 25 bp, Homo sapien
tttgggaggctctggtttgcagata

SEQ ID NO: 3503890 - DNA, 25 bp, Homo sapien
gctctggtttgcagatagcttgagc

SEQ ID NO: 3503891 - DNA, 25 bp, Homo sapien
tctttggaacagaatgtttttacta

SEQ ID NO: 3503892 - DNA, 25 bp, Homo sapien
catctttggaacagaatgtttttac

SEQ ID NO: 3503893 - DNA, 25 bp, Homo sapien
ctcatctttggaacagaatgttttt

SEQ ID NO: 3503894 - DNA, 25 bp, Homo sapien
tcaagcctcatctttggaacagaat

SEQ ID NO: 3503895 - DNA, 25 bp, Homo sapien
atggtgggaccagtaggtaaagact

SEQ ID NO: 3503896 - DNA, 25 bp, Homo sapien
ttgaggaatggtgggaccagtaggt

SEQ ID NO: 3503897 - DNA, 25 bp, Homo sapien
gtaaagactggacaaggtgatatgt

SEQ ID NO: 3503898 - DNA, 25 bp, Homo sapien
catatgatgggatataagatccaaa

SEQ ID NO: 3503899 - DNA, 25 bp, Homo sapien
atatatggggaatacatgtattaaa

SEQ ID NO: 3503900 - DNA, 25 bp, Homo sapien
tgatgaaaatgaagtcaagcccacc

SEQ ID NO: 3503901 - DNA, 25 bp, Homo sapien
gaattaccagaatggcaggccgcaa

SEQ ID NO: 3503902 - DNA, 25 bp, Homo sapien
tgaatactatagcacgcctcagagg

SEQ ID NO: 3503903 - DNA, 25 bp, Homo sapien
caagggccacgcgttcacagtaagt

SEQ ID NO: 3503904 - DNA, 25 bp, Homo sapien
aacaaggtaccatttgtaataggca

SEQ ID NO: 3503905 - DNA, 25 bp, Homo sapien
aggtaccatttgtaataggcagggc

SEQ ID NO: 3503906 - DNA, 25 bp, Homo sapien
gaacaaggtaccatttgtaataggc

SEQ ID NO: 3503907 - DNA, 25 bp, Homo sapien
taccatttgtaataggcagggccat

SEQ ID NO: 3503908 - DNA, 25 bp, Homo sapien
aaaaacactttcacaatatggtcac

SEQ ID NO: 3503909 - DNA, 25 bp, Homo sapien
tttgaagaaaaacactttcacaata

SEQ ID NO: 3503910 - DNA, 25 bp, Homo sapien
agaaaaacactttcacaatatggtc

SEQ ID NO: 3503911 - DNA, 25 bp, Homo sapien
tgaagaaaaacactttcacaatatg

SEQ ID NO: 3503912 - DNA, 25 bp, Homo sapien
tcaaaccctaggattgcaaaggcaa

SEQ ID NO: 3503913 - DNA, 25 bp, Homo sapien
tgactcggatatcttcagtagccag

SEQ ID NO: 3503914 - DNA, 25 bp, Homo sapien
gagtgtcaccccaagtccaatatga

SEQ ID NO: 3503915 - DNA, 25 bp, Homo sapien
tatgtgtgaaccaaacctgtgtgtg

SEQ ID NO: 3503916 - DNA, 25 bp, Homo sapien
cacaccaataagatacatggcagag

SEQ ID NO: 3503917 - DNA, 25 bp, Homo sapien
agactgagccattgaatgtcggcat

SEQ ID NO: 3503918 - DNA, 25 bp, Homo sapien
caattagtataaacgcagagggcat

SEQ ID NO: 3503919 - DNA, 25 bp, Homo sapien
aaatgtacatgggtatatggaggct

SEQ ID NO: 3503920 - DNA, 25 bp, Homo sapien
atttgttcatcagaatcaagtggta

SEQ ID NO: 3503921 - DNA, 25 bp, Homo sapien
tttgttcatcagaatcaagtggtag

SEQ ID NO: 3503922 - DNA, 25 bp, Homo sapien
aatcaagtggtagatttgctgtttc

SEQ ID NO: 3503923 - DNA, 25 bp, Homo sapien
ttgttcatcagaatcaagtggtaga

SEQ ID NO: 3503924 - DNA, 25 bp, Homo sapien
catgaatgcgaatctgtgtggtctt

SEQ ID NO: 3503925 - DNA, 25 bp, Homo sapien
tgaatgcgaatctgtgtggtctttg

SEQ ID NO: 3503926 - DNA, 25 bp, Homo sapien
gaatgcgaatctgtgtggtctttgc

SEQ ID NO: 3503927 - DNA, 25 bp, Homo sapien
cacatgaatgcgaatctgtgtggtc

SEQ ID NO: 3503928 - DNA, 25 bp, Homo sapien
gaaggccacaaacaaaccatagatt

SEQ ID NO: 3503929 - DNA, 25 bp, Homo sapien
gaggtcaaatcctgctacagtgaag

SEQ ID NO: 3503930 - DNA, 25 bp, Homo sapien
tgtgagacccaaacctatgtgtgaa

SEQ ID NO: 3503931 - DNA, 25 bp, Homo sapien
gacacagatgtgagcaatgcaggta

SEQ ID NO: 3503932 - DNA, 25 bp, Homo sapien
ctgctagtttcacaatggccatatg

SEQ ID NO: 3503933 - DNA, 25 bp, Homo sapien
gctagtttcacaatggccatatgct

SEQ ID NO: 3503934 - DNA, 25 bp, Homo sapien
agtttcacaatggccatatgctcac

SEQ ID NO: 3503935 - DNA, 25 bp, Homo sapien
tagtttcacaatggccatatgctca

SEQ ID NO: 3503936 - DNA, 25 bp, Homo sapien
ttcctatctgaatgacaagctggtg

SEQ ID NO: 3503937 - DNA, 25 bp, Homo sapien
gaaaccggcactttatcagtactag

SEQ ID NO: 3503938 - DNA, 25 bp, Homo sapien
tagcagccctgagtacgaccatagt

SEQ ID NO: 3503939 - DNA, 25 bp, Homo sapien
tgtcttagtggataacagatggcca

SEQ ID NO: 3503940 - DNA, 25 bp, Homo sapien
tgtgtggatgaaccacatttgaagc

SEQ ID NO: 3503941 - DNA, 25 bp, Homo sapien
tggatgaaccacatttgaagcaagc

SEQ ID NO: 3503942 - DNA, 25 bp, Homo sapien
ccacatttgaagcaagcaggaatca

SEQ ID NO: 3503943 - DNA, 25 bp, Homo sapien
gaaccacatttgaagcaagcaggaa

SEQ ID NO: 3503944 - DNA, 25 bp, Homo sapien
tagtgtcaacacagagggcatgtag

SEQ ID NO: 3503945 - DNA, 25 bp, Homo sapien
tagcaagtgcaatgtctgtggctcc

SEQ ID NO: 3503946 - DNA, 25 bp, Homo sapien
taagaaaatgtacaagggctcatgg

SEQ ID NO: 3503947 - DNA, 25 bp, Homo sapien
ctgtggctcctagcatgcctaagaa

SEQ ID NO: 3503948 - DNA, 25 bp, Homo sapien
ccatttttcataacactttcattca

SEQ ID NO: 3503949 - DNA, 25 bp, Homo sapien
gatacctgaagaatattgtccattt

SEQ ID NO: 3503950 - DNA, 25 bp, Homo sapien
gtccatttttcataacactttcatt

SEQ ID NO: 3503951 - DNA, 25 bp, Homo sapien
cagatacctgaagaatattgtccat

SEQ ID NO: 3503952 - DNA, 25 bp, Homo sapien
taagttgtgggttctgtgatggctc

SEQ ID NO: 3503953 - DNA, 25 bp, Homo sapien
aaactcatagtgaggtctgtagcat

SEQ ID NO: 3503954 - DNA, 25 bp, Homo sapien
tgtttggtgccaggatatgtgccaa

SEQ ID NO: 3503955 - DNA, 25 bp, Homo sapien
catttatctctaacacggacatctt

SEQ ID NO: 3503956 - DNA, 25 bp, Homo sapien
tcctggatagtgtaagaacaacgct

SEQ ID NO: 3503957 - DNA, 25 bp, Homo sapien
gaacaacgctgttgcgaatttcttt

SEQ ID NO: 3503958 - DNA, 25 bp, Homo sapien
aaaaaagaggtaagcattggccgtg

SEQ ID NO: 3503959 - DNA, 25 bp, Homo sapien
ggtaaatgccgtccaaagcggtgca

SEQ ID NO: 3503960 - DNA, 25 bp, Homo sapien
tgggagcataagcattacactgcgc

SEQ ID NO: 3503961 - DNA, 25 bp, Homo sapien
aagttcaacaaaggccggcatggcc

SEQ ID NO: 3503962 - DNA, 25 bp, Homo sapien
tacactgcgcaaggcaatggcggca

SEQ ID NO: 3503963 - DNA, 25 bp, Homo sapien
gatgctattgggacgtgtgtctcca

SEQ ID NO: 3503964 - DNA, 25 bp, Homo sapien
cccggaaagatgatggtgtatatca

SEQ ID NO: 3503965 - DNA, 25 bp, Homo sapien
attcggatgatgtgaagaatgatgc

SEQ ID NO: 3503966 - DNA, 25 bp, Homo sapien
aaggaagagtcaattcggatgatgt

SEQ ID NO: 3503967 - DNA, 25 bp, Homo sapien
agaatgatgccatttcccggaaaga

SEQ ID NO: 3503968 - DNA, 25 bp, Homo sapien
gttgatgccatgatgctccattgat

SEQ ID NO: 3503969 - DNA, 25 bp, Homo sapien
gctccattgatgacttgggtctaaa

SEQ ID NO: 3503970 - DNA, 25 bp, Homo sapien
catgatgctccattgatgacttggg

SEQ ID NO: 3503971 - DNA, 25 bp, Homo sapien
ccattgatgacttgggtctaaaatc

SEQ ID NO: 3503972 - DNA, 25 bp, Homo sapien
aacagcatacactgataggagagaa

SEQ ID NO: 3503973 - DNA, 25 bp, Homo sapien
taacagcatacactgataggagaga

SEQ ID NO: 3503974 - DNA, 25 bp, Homo sapien
acagcatacactgataggagagaaa

SEQ ID NO: 3503975 - DNA, 25 bp, Homo sapien
ttaacagcatacactgataggagag

SEQ ID NO: 3503976 - DNA, 25 bp, Homo sapien
ggttttacctccaaagcgatgggca

SEQ ID NO: 3503977 - DNA, 25 bp, Homo sapien
tagagactgcccactaggatgtgaa

SEQ ID NO: 3503978 - DNA, 25 bp, Homo sapien
gacacagatatgagagccgcacgta

SEQ ID NO: 3503979 - DNA, 25 bp, Homo sapien
ggcagcccaggaagatatctgaaac

SEQ ID NO: 3503980 - DNA, 25 bp, Homo sapien
tataccaggaagatgaacggacagc

SEQ ID NO: 3503981 - DNA, 25 bp, Homo sapien
gctgatgaggttaaaatggtgtatc

SEQ ID NO: 3503982 - DNA, 25 bp, Homo sapien
caatatgtaagtcggtataccagga

SEQ ID NO: 3503983 - DNA, 25 bp, Homo sapien
gctgctatgccaatcttcctgacgg

SEQ ID NO: 3503984 - DNA, 25 bp, Homo sapien
cagtggcgagcaggaagtcggctga

SEQ ID NO: 3503985 - DNA, 25 bp, Homo sapien
gatagccagcaccttaggggctgca

SEQ ID NO: 3503986 - DNA, 25 bp, Homo sapien
ctaccaaaggatatgtccatggagt

SEQ ID NO: 3503987 - DNA, 25 bp, Homo sapien
gtcggctgaggccagcatggatagg

SEQ ID NO: 3503988 - DNA, 25 bp, Homo sapien
aagatcaagaagatattgcctgcaa

SEQ ID NO: 3503989 - DNA, 25 bp, Homo sapien
gactgcgctcagtcatgatcaggaa

SEQ ID NO: 3503990 - DNA, 25 bp, Homo sapien
gcctgcaacagccacaatgtacata

SEQ ID NO: 3503991 - DNA, 25 bp, Homo sapien
gattcccatcaggacataccacaca

SEQ ID NO: 3503992 - DNA, 25 bp, Homo sapien
tcagagaaaagagtctaagcattct

SEQ ID NO: 3503993 - DNA, 25 bp, Homo sapien
cagagaaaagagtctaagcattctg

SEQ ID NO: 3503994 - DNA, 25 bp, Homo sapien
tgttgccaatgagaacgtgggccac

SEQ ID NO: 3503995 - DNA, 25 bp, Homo sapien
caaaacggtgcaccattgtgaggct

SEQ ID NO: 3503996 - DNA, 25 bp, Homo sapien
aatcggatgtctgaacaggctaagc

SEQ ID NO: 3503997 - DNA, 25 bp, Homo sapien
tcaaaggccatagtgaggaggacag

SEQ ID NO: 3503998 - DNA, 25 bp, Homo sapien
ttggctcagtccatatcacatggag

SEQ ID NO: 3503999 - DNA, 25 bp, Homo sapien
ccatgcaattgcccaaaagcaccat

SEQ ID NO: 3504000 - DNA, 25 bp, Homo sapien
gcttggctcagtccatatcacatgg

SEQ ID NO: 3504001 - DNA, 25 bp, Homo sapien
ggctcagtccatatcacatggagaa

SEQ ID NO: 3504002 - DNA, 25 bp, Homo sapien
tccatgccagaaaatccagtgagaa

SEQ ID NO: 3504003 - DNA, 25 bp, Homo sapien
gaaacatgtgagagtattttttcaa

SEQ ID NO: 3504004 - DNA, 25 bp, Homo sapien
gccaggggtattgctgctccatgcc

SEQ ID NO: 3504005 - DNA, 25 bp, Homo sapien
gaagaattcgtgctggtgctagggc

SEQ ID NO: 3504006 - DNA, 25 bp, Homo sapien
agaagggctcacaggacagtcaaac

SEQ ID NO: 3504007 - DNA, 25 bp, Homo sapien
tagttccgggagactagcactgcag

SEQ ID NO: 3504008 - DNA, 25 bp, Homo sapien
catctcgccgtaaaacatggaagga

SEQ ID NO: 3504009 - DNA, 25 bp, Homo sapien
taagggacatgataagggagccagc

SEQ ID NO: 3504010 - DNA, 25 bp, Homo sapien
ataatatcccccagtttagtagttg

SEQ ID NO: 3504011 - DNA, 25 bp, Homo sapien
ccttcataatatcccccagtttagt

SEQ ID NO: 3504012 - DNA, 25 bp, Homo sapien
cctttaatagaaattggacagcaag

SEQ ID NO: 3504013 - DNA, 25 bp, Homo sapien
aacctttaatagaaattggacagca

SEQ ID NO: 3504014 - DNA, 25 bp, Homo sapien
ttagtgatacttgtgggccagggca

SEQ ID NO: 3504015 - DNA, 25 bp, Homo sapien
agtgatacttgtgggccagggcatt

SEQ ID NO: 3504016 - DNA, 25 bp, Homo sapien
tagtgatacttgtgggccagggcat

SEQ ID NO: 3504017 - DNA, 25 bp, Homo sapien
aattctttgccaaagtgatgggcca

SEQ ID NO: 3504018 - DNA, 25 bp, Homo sapien
tctttgccaaagtgatgggccagca

SEQ ID NO: 3504019 - DNA, 25 bp, Homo sapien
tttgccaaagtgatgggccagcaca

SEQ ID NO: 3504020 - DNA, 25 bp, Homo sapien
ttctttgccaaagtgatgggccagc

SEQ ID NO: 3504021 - DNA, 25 bp, Homo sapien
tgggaggaagataagaggtatgaac

SEQ ID NO: 3504022 - DNA, 25 bp, Homo sapien
tgtgggaggaagataagaggtatga

SEQ ID NO: 3504023 - DNA, 25 bp, Homo sapien
ctgtgggaggaagataagaggtatg

SEQ ID NO: 3504024 - DNA, 25 bp, Homo sapien
ggaggaagataagaggtatgaacat

SEQ ID NO: 3504025 - DNA, 25 bp, Homo sapien
aaagaaaacatcaagcgtcccatag

SEQ ID NO: 3504026 - DNA, 25 bp, Homo sapien
gatgcaatcattcgtctgtttccca

SEQ ID NO: 3504027 - DNA, 25 bp, Homo sapien
tagtaatgtactaggcagactgtgt

SEQ ID NO: 3504028 - DNA, 25 bp, Homo sapien
tacttatccccttcctatgacatga

SEQ ID NO: 3504029 - DNA, 25 bp, Homo sapien
caggatccacgtgcagcttgtcaca

SEQ ID NO: 3504030 - DNA, 25 bp, Homo sapien
tctcaggatccacgtgcagcttgtc

SEQ ID NO: 3504031 - DNA, 25 bp, Homo sapien
agttctcaggatccacgtgcagctt

SEQ ID NO: 3504032 - DNA, 25 bp, Homo sapien
gaagttctcaggatccacgtgcagc

SEQ ID NO: 3504033 - DNA, 25 bp, Homo sapien
ccttgaggttgtccaggtgagccag

SEQ ID NO: 3504034 - DNA, 25 bp, Homo sapien
tgcccttgaggttgtccaggtgagc

SEQ ID NO: 3504035 - DNA, 25 bp, Homo sapien
ctcagtgtggcaaaggtgcccttga

SEQ ID NO: 3504036 - DNA, 25 bp, Homo sapien
ggcaaaggtgcccttgaggttgtcc

SEQ ID NO: 3504037 - DNA, 25 bp, Homo sapien
catgagccttcaccttagggttgcc

SEQ ID NO: 3504038 - DNA, 25 bp, Homo sapien
ggacagatccccaaaggactcaaag

SEQ ID NO: 3504039 - DNA, 25 bp, Homo sapien
tcaccttagggttgcccataacagc

SEQ ID NO: 3504040 - DNA, 25 bp, Homo sapien
ttcttgccatgagccttcaccttag

SEQ ID NO: 3504041 - DNA, 25 bp, Homo sapien
ctgggtccaagggtagaccaccagc

SEQ ID NO: 3504042 - DNA, 25 bp, Homo sapien
ttctattggtctccttaaacctgtc

SEQ ID NO: 3504043 - DNA, 25 bp, Homo sapien
tgcctatcagaaacccaagagtctt

SEQ ID NO: 3504044 - DNA, 25 bp, Homo sapien
taaacctgtcttgtaaccttgatac

SEQ ID NO: 3504045 - DNA, 25 bp, Homo sapien
aatagaccaataggcagagagagtc

SEQ ID NO: 3504046 - DNA, 25 bp, Homo sapien
cacagggcagtaacggcagacttct

SEQ ID NO: 3504047 - DNA, 25 bp, Homo sapien
taacggcagacttctcctcaggagt

SEQ ID NO: 3504048 - DNA, 25 bp, Homo sapien
ttcaccttgccccacagggcagtaa

SEQ ID NO: 3504049 - DNA, 25 bp, Homo sapien
tgccccacagggcagtaacggcaga

SEQ ID NO: 3504050 - DNA, 25 bp, Homo sapien
cctgctcctgggagtagattggcca

SEQ ID NO: 3504051 - DNA, 25 bp, Homo sapien
taagcaatagatggctctgccctga

SEQ ID NO: 3504052 - DNA, 25 bp, Homo sapien
tagtgaacacagttgtgtcagaagc

SEQ ID NO: 3504053 - DNA, 25 bp, Homo sapien
aaccctagggtgtggctccacaggg

SEQ ID NO: 3504054 - DNA, 25 bp, Homo sapien
gaaacactgtgcgatggtattatta

SEQ ID NO: 3504055 - DNA, 25 bp, Homo sapien
tatgttgtagcattaacaacaaaga

SEQ ID NO: 3504056 - DNA, 25 bp, Homo sapien
gcttcctctttgtatgttgtagcat

SEQ ID NO: 3504057 - DNA, 25 bp, Homo sapien
aataactgttcggttgtttactgca

SEQ ID NO: 3504058 - DNA, 25 bp, Homo sapien
taaacaagtgctccctatctgtaga

SEQ ID NO: 3504059 - DNA, 25 bp, Homo sapien
gctccctatctgtagagcctcagga

SEQ ID NO: 3504060 - DNA, 25 bp, Homo sapien
caagtgctccctatctgtagagcct

SEQ ID NO: 3504061 - DNA, 25 bp, Homo sapien
aaataaacaagtgctccctatctgt

SEQ ID NO: 3504062 - DNA, 25 bp, Homo sapien
tagggtcttcttatggttatcagga

SEQ ID NO: 3504063 - DNA, 25 bp, Homo sapien
tcttatggttatcaggaaacagtcc

SEQ ID NO: 3504064 - DNA, 25 bp, Homo sapien
ccttgaagtaggcattgtgttccca

SEQ ID NO: 3504065 - DNA, 25 bp, Homo sapien
gaaatagggtcttcttatggttatc

SEQ ID NO: 3504066 - DNA, 25 bp, Homo sapien
ttgtgagccagggcattagccacac

SEQ ID NO: 3504067 - DNA, 25 bp, Homo sapien
ccaccttctgataggcagcctgcat

SEQ ID NO: 3504068 - DNA, 25 bp, Homo sapien
gggtgaattccttgccaaagttgcg

SEQ ID NO: 3504069 - DNA, 25 bp, Homo sapien
gccaaagttgcgggccagcacacac

SEQ ID NO: 3504070 - DNA, 25 bp, Homo sapien
agcctgcatttgtggggtgaattcc

SEQ ID NO: 3504071 - DNA, 25 bp, Homo sapien
tgagccaggccatcactaaaggcac

SEQ ID NO: 3504072 - DNA, 25 bp, Homo sapien
tgggtccaagggtagaccaccagta

SEQ ID NO: 3504073 - DNA, 25 bp, Homo sapien
ctgggtccaagggtagaccaccagt

SEQ ID NO: 3504074 - DNA, 25 bp, Homo sapien
aaaacagcccaagggacagagagtc

SEQ ID NO: 3504075 - DNA, 25 bp, Homo sapien
agcccaagggacagagagtcagtgc

SEQ ID NO: 3504076 - DNA, 25 bp, Homo sapien
gtaggaaaacagcccaagggacaga

SEQ ID NO: 3504077 - DNA, 25 bp, Homo sapien
ctgagggtaggaaaacagcccaagg

SEQ ID NO: 3504078 - DNA, 25 bp, Homo sapien
gggcctcaccaccaactgcatccac

SEQ ID NO: 3504079 - DNA, 25 bp, Homo sapien
gcccagggcctcaccaccaactgca

SEQ ID NO: 3504080 - DNA, 25 bp, Homo sapien
ctgcccagggcctcaccaccaactg

SEQ ID NO: 3504081 - DNA, 25 bp, Homo sapien
ccagggcctcaccaccaactgcatc

SEQ ID NO: 3504082 - DNA, 25 bp, Homo sapien
tgccccacagggcattgacagcagt

SEQ ID NO: 3504083 - DNA, 25 bp, Homo sapien
cacagggcattgacagcagtcttct

SEQ ID NO: 3504084 - DNA, 25 bp, Homo sapien
ttcactttgccccacagggcattga

SEQ ID NO: 3504085 - DNA, 25 bp, Homo sapien
cactttgccccacagggcattgaca

SEQ ID NO: 3504086 - DNA, 25 bp, Homo sapien
aacactgttatgtcagaagaaagtg

SEQ ID NO: 3504087 - DNA, 25 bp, Homo sapien
gaaccttcattccactattccctta

SEQ ID NO: 3504088 - DNA, 25 bp, Homo sapien
gtaagcaacagtcgactctgccctg

SEQ ID NO: 3504089 - DNA, 25 bp, Homo sapien
tcattccactattcccttaacttgc

SEQ ID NO: 3504090 - DNA, 25 bp, Homo sapien
agaactcagtatcgattttaattag

SEQ ID NO: 3504091 - DNA, 25 bp, Homo sapien
taattagtgtaatgccaatgtgggt

SEQ ID NO: 3504092 - DNA, 25 bp, Homo sapien
gagataaggttctagattttgacac

SEQ ID NO: 3504093 - DNA, 25 bp, Homo sapien
ggttagaatggaagtcaacttgctg

SEQ ID NO: 3504094 - DNA, 25 bp, Homo sapien
ccattctccaacattctcatttcca

SEQ ID NO: 3504095 - DNA, 25 bp, Homo sapien
caggattgcaagaaagtatcttctc

SEQ ID NO: 3504096 - DNA, 25 bp, Homo sapien
cttgcaggattgcaagaaagtatct

SEQ ID NO: 3504097 - DNA, 25 bp, Homo sapien
tttcttgcaggattgcaagaaagta

SEQ ID NO: 3504098 - DNA, 25 bp, Homo sapien
taaaatcctcgctgaagtgggttgc

SEQ ID NO: 3504099 - DNA, 25 bp, Homo sapien
gggctacagcattaaccacagcatt

SEQ ID NO: 3504100 - DNA, 25 bp, Homo sapien
gaactcagtggtcttgtgggctaca

SEQ ID NO: 3504101 - DNA, 25 bp, Homo sapien
gacataggtacaaacatagtggacc

SEQ ID NO: 3504102 - DNA, 25 bp, Homo sapien
aagaagaaagcgtgagtgtacttac

SEQ ID NO: 3504103 - DNA, 25 bp, Homo sapien
tcaaaagtacccatagtgcaaatat

SEQ ID NO: 3504104 - DNA, 25 bp, Homo sapien
agtacccatagtgcaaatatctaag

SEQ ID NO: 3504105 - DNA, 25 bp, Homo sapien
ccatagtgcaaatatctaagggtaa

SEQ ID NO: 3504106 - DNA, 25 bp, Homo sapien
cattattgcacagtcagagcccaga

SEQ ID NO: 3504107 - DNA, 25 bp, Homo sapien
gtgtagcaaaggtgcctttgaggtc

SEQ ID NO: 3504108 - DNA, 25 bp, Homo sapien
cagcttttccgaaggagatcagcac

SEQ ID NO: 3504109 - DNA, 25 bp, Homo sapien
tcatccgtgagcataacagcttttc

SEQ ID NO: 3504110 - DNA, 25 bp, Homo sapien
tatttctcaaggacttcgccagcag

SEQ ID NO: 3504111 - DNA, 25 bp, Homo sapien
gccgctaataacctgaatgctgaca

SEQ ID NO: 3504112 - DNA, 25 bp, Homo sapien
tgcactacagtgtcagatctgggag

SEQ ID NO: 3504113 - DNA, 25 bp, Homo sapien
gaatctattgaccagccctttgcct

SEQ ID NO: 3504114 - DNA, 25 bp, Homo sapien
actgacaatattccacaggctgctg

SEQ ID NO: 3504115 - DNA, 25 bp, Homo sapien
tgtgctgcacgtctcatgcgtctca

SEQ ID NO: 3504116 - DNA, 25 bp, Homo sapien
gctgcacgtgtctcatgtgctgcac

SEQ ID NO: 3504117 - DNA, 25 bp, Homo sapien
cccgtgctgggcattaggtcatttg

SEQ ID NO: 3504118 - DNA, 25 bp, Homo sapien
ggtacatacatctaaaaccctgcgt

SEQ ID NO: 3504119 - DNA, 25 bp, Homo sapien
aaccctgcgtaccagtgaacagctg

SEQ ID NO: 3504120 - DNA, 25 bp, Homo sapien
tcatacttagaggttcaggatgctg

SEQ ID NO: 3504121 - DNA, 25 bp, Homo sapien
ggtcatgtcctttaatggccctaaa

SEQ ID NO: 3504122 - DNA, 25 bp, Homo sapien
cttccctcaatataaaccctttgtg

SEQ ID NO: 3504123 - DNA, 25 bp, Homo sapien
cacatacacacttccctcaatataa

SEQ ID NO: 3504124 - DNA, 25 bp, Homo sapien
aaaaataaatgaggagcatgcacac

SEQ ID NO: 3504125 - DNA, 25 bp, Homo sapien
tgctcatcaaaatgcacatctcata

SEQ ID NO: 3504126 - DNA, 25 bp, Homo sapien
tgcagaataaagcctatccttgaaa

SEQ ID NO: 3504127 - DNA, 25 bp, Homo sapien
gcagaataaagcctatccttgaaag

SEQ ID NO: 3504128 - DNA, 25 bp, Homo sapien
ggtatctggaggacagggcactggc

SEQ ID NO: 3504129 - DNA, 25 bp, Homo sapien
gtggtatctggaggacagggcactg

SEQ ID NO: 3504130 - DNA, 25 bp, Homo sapien
tcagtggtatctggaggacagggca

SEQ ID NO: 3504131 - DNA, 25 bp, Homo sapien
tatctggaggacagggcactggcca

SEQ ID NO: 3504132 - DNA, 25 bp, Homo sapien
ttgccgaaatggattgccaaaacgg

SEQ ID NO: 3504133 - DNA, 25 bp, Homo sapien
cctcaggggtgaattctttgccgaa

SEQ ID NO: 3504134 - DNA, 25 bp, Homo sapien
atggattgccaaaacggtcaccagc

SEQ ID NO: 3504135 - DNA, 25 bp, Homo sapien
aattctttgccgaaatggattgcca

SEQ ID NO: 3504136 - DNA, 25 bp, Homo sapien
tctcaggatccacatgcagcttgtc

SEQ ID NO: 3504137 - DNA, 25 bp, Homo sapien
tgcagttcactcagctgggcaaagg

SEQ ID NO: 3504138 - DNA, 25 bp, Homo sapien
ctctgggtccatgggtagacaacca

SEQ ID NO: 3504139 - DNA, 25 bp, Homo sapien
tcacagtgcagttcactcagctggg

SEQ ID NO: 3504140 - DNA, 25 bp, Homo sapien
ccccacaggcttgtgatagtagcct

SEQ ID NO: 3504141 - DNA, 25 bp, Homo sapien
acaggcttgtgatagtagccttgtc

SEQ ID NO: 3504142 - DNA, 25 bp, Homo sapien
gccccacaggcttgtgatagtagcc

SEQ ID NO: 3504143 - DNA, 25 bp, Homo sapien
ccacaggcttgtgatagtagccttg

SEQ ID NO: 3504144 - DNA, 25 bp, Homo sapien
tccagaagcgagtgtgtggaactgc

SEQ ID NO: 3504145 - DNA, 25 bp, Homo sapien
attgataacctcagacgttccagaa

SEQ ID NO: 3504146 - DNA, 25 bp, Homo sapien
ggcgtctggactaggagcttattga

SEQ ID NO: 3504147 - DNA, 25 bp, Homo sapien
gactaggagcttattgataacctca

SEQ ID NO: 3504148 - DNA, 25 bp, Homo sapien
tgcagaataaagcctatccttgaaa

SEQ ID NO: 3504149 - DNA, 25 bp, Homo sapien
gcagaataaagcctatccttgaaag

SEQ ID NO: 3504150 - DNA, 25 bp, Homo sapien
cctcaggggtgaattctttgccgaa

SEQ ID NO: 3504151 - DNA, 25 bp, Homo sapien
atggattgccaaaacggtcaccagc

SEQ ID NO: 3504152 - DNA, 25 bp, Homo sapien
ttgccgaaatggattgccaaaacgg

SEQ ID NO: 3504153 - DNA, 25 bp, Homo sapien
aattctttgccgaaatggattgcca

SEQ ID NO: 3504154 - DNA, 25 bp, Homo sapien
ccttagcaatgtatgtttggccacc

SEQ ID NO: 3504155 - DNA, 25 bp, Homo sapien
gaaccctgtatgctgtaggctgaaa

SEQ ID NO: 3504156 - DNA, 25 bp, Homo sapien
aaagttccccactttgactgagcca

SEQ ID NO: 3504157 - DNA, 25 bp, Homo sapien
taaagatgaacccatagtgagctga

SEQ ID NO: 3504158 - DNA, 25 bp, Homo sapien
tctcaggatccacatgcagcttgtc

SEQ ID NO: 3504159 - DNA, 25 bp, Homo sapien
ctctgggtccatgggtagacaacca

SEQ ID NO: 3504160 - DNA, 25 bp, Homo sapien
tgcagttcactcagctgggcaaagg

SEQ ID NO: 3504161 - DNA, 25 bp, Homo sapien
tcacagtgcagttcactcagctggg

SEQ ID NO: 3504162 - DNA, 25 bp, Homo sapien
tttctcctccagcatcttccacatt

SEQ ID NO: 3504163 - DNA, 25 bp, Homo sapien
tctcctccagcatcttccacattca

SEQ ID NO: 3504164 - DNA, 25 bp, Homo sapien
ggtttctcctccagcatcttccaca

SEQ ID NO: 3504165 - DNA, 25 bp, Homo sapien
cttcccagggtttctcctccagcat

SEQ ID NO: 3504166 - DNA, 25 bp, Homo sapien
ggcctcactggatactctaagacta

SEQ ID NO: 3504167 - DNA, 25 bp, Homo sapien
tagccagggaccgtttcagacagat

SEQ ID NO: 3504168 - DNA, 25 bp, Homo sapien
tcaaggctattggtcaaggcaaggc

SEQ ID NO: 3504169 - DNA, 25 bp, Homo sapien
caacccatgggtggagtttagccag

SEQ ID NO: 3504170 - DNA, 25 bp, Homo sapien
aacagaaggctttctctcaaggcca

SEQ ID NO: 3504171 - DNA, 25 bp, Homo sapien
cttgccaaagtgagtagccagaata

SEQ ID NO: 3504172 - DNA, 25 bp, Homo sapien
gccagggcaatggcgacagcagaca

SEQ ID NO: 3504173 - DNA, 25 bp, Homo sapien
tagccagaataatcaccatcacgtt

SEQ ID NO: 3504174 - DNA, 25 bp, Homo sapien
aagtgagtagccagaataatcacca

SEQ ID NO: 3504175 - DNA, 25 bp, Homo sapien
gttctaacatcaagctcgacccatg

SEQ ID NO: 3504176 - DNA, 25 bp, Homo sapien
gtcctttactgtcactagttctgaa

SEQ ID NO: 3504177 - DNA, 25 bp, Homo sapien
tggtctttccaataagattatgagc

SEQ ID NO: 3504178 - DNA, 25 bp, Homo sapien
ttggttatgctcactagaagtctgc

SEQ ID NO: 3504179 - DNA, 25 bp, Homo sapien
tcagcttagcaaaggcgggcttgag

SEQ ID NO: 3504180 - DNA, 25 bp, Homo sapien
gggagacgacaggtttccaaagctg

SEQ ID NO: 3504181 - DNA, 25 bp, Homo sapien
tccaaagctgtcaaaaaatctctgg

SEQ ID NO: 3504182 - DNA, 25 bp, Homo sapien
gcagctcactcagcttagcaaaggc

SEQ ID NO: 3504183 - DNA, 25 bp, Homo sapien
cttgaggactttcccaatcaacttg

SEQ ID NO: 3504184 - DNA, 25 bp, Homo sapien
atcttgaggactttcccaatcaact

SEQ ID NO: 3504185 - DNA, 25 bp, Homo sapien
tcttgaggactttcccaatcaactt

SEQ ID NO: 3504186 - DNA, 25 bp, Homo sapien
acattcatcttgctccacaggctag

SEQ ID NO: 3504187 - DNA, 25 bp, Homo sapien
tgctccacaggctagtgacggcagc

SEQ ID NO: 3504188 - DNA, 25 bp, Homo sapien
catcttgctccacaggctagtgacg

SEQ ID NO: 3504189 - DNA, 25 bp, Homo sapien
cacaggctagtgacggcagccttct

SEQ ID NO: 3504190 - DNA, 25 bp, Homo sapien
gtgtgctggatcctgaggctctttt

SEQ ID NO: 3504191 - DNA, 25 bp, Homo sapien
tctttactgccgaagttctggcccc

SEQ ID NO: 3504192 - DNA, 25 bp, Homo sapien
gcctgagagcttgctagtgattgca

SEQ ID NO: 3504193 - DNA, 25 bp, Homo sapien
gctgtgtcggaagcagatatgtgct

SEQ ID NO: 3504194 - DNA, 25 bp, Homo sapien
caacagctataatttaggtggtggt

SEQ ID NO: 3504195 - DNA, 25 bp, Homo sapien
tataggaaactatcagaagactttg

SEQ ID NO: 3504196 - DNA, 25 bp, Homo sapien
tagtgcatgctaatttctggctgtg

SEQ ID NO: 3504197 - DNA, 25 bp, Homo sapien
gtgacagtgacttagaccagagtgg

SEQ ID NO: 3504198 - DNA, 25 bp, Homo sapien
ttcatcactcatcacagtcagctct

SEQ ID NO: 3504199 - DNA, 25 bp, Homo sapien
ttagaggccccactggtacccagat

SEQ ID NO: 3504200 - DNA, 25 bp, Homo sapien
agatgagaaggcaccttcatcactc

SEQ ID NO: 3504201 - DNA, 25 bp, Homo sapien
tggtacccagatgagaaggcacctt

SEQ ID NO: 3504202 - DNA, 25 bp, Homo sapien
caagttgcttaacttcttgaagtct

SEQ ID NO: 3504203 - DNA, 25 bp, Homo sapien
ttcttagatgatcttgagcaagttg

SEQ ID NO: 3504204 - DNA, 25 bp, Homo sapien
cttagatgatcttgagcaagttgct

SEQ ID NO: 3504205 - DNA, 25 bp, Homo sapien
agcaagttgcttaacttcttgaagt

SEQ ID NO: 3504206 - DNA, 25 bp, Homo sapien
ggaccacaacttccaatcgacaaga

SEQ ID NO: 3504207 - DNA, 25 bp, Homo sapien
tcctgaagaaatgcaattatggttg

SEQ ID NO: 3504208 - DNA, 25 bp, Homo sapien
cacagggcaggaatatctacttcta

SEQ ID NO: 3504209 - DNA, 25 bp, Homo sapien
tatggttgaggaagtatggtctgca

SEQ ID NO: 3504210 - DNA, 25 bp, Homo sapien
gaacttgcctgctacattgagacca

SEQ ID NO: 3504211 - DNA, 25 bp, Homo sapien
catctgtgccctgcttaggagctta

SEQ ID NO: 3504212 - DNA, 25 bp, Homo sapien
ggaagcccatagctctgtcctgaac

SEQ ID NO: 3504213 - DNA, 25 bp, Homo sapien
ggagcagtcccatgtagtagtagaa

SEQ ID NO: 3504214 - DNA, 25 bp, Homo sapien
tgcttccccatagtttgtctcaaca

SEQ ID NO: 3504215 - DNA, 25 bp, Homo sapien
gaattatgagagagccttcagtcat

SEQ ID NO: 3504216 - DNA, 25 bp, Homo sapien
tgttgataatctgattcatgcaacc

SEQ ID NO: 3504217 - DNA, 25 bp, Homo sapien
tgcaaccaagaattatgagagagcc

SEQ ID NO: 3504218 - DNA, 25 bp, Homo sapien
gcagcttcagctacctctctaaaga

SEQ ID NO: 3504219 - DNA, 25 bp, Homo sapien
ccctctagtggtcataacagcagct

SEQ ID NO: 3504220 - DNA, 25 bp, Homo sapien
gggctccaccatcttggaccattag

SEQ ID NO: 3504221 - DNA, 25 bp, Homo sapien
gcttcagctacctctctaaagagtc

SEQ ID NO: 3504222 - DNA, 25 bp, Homo sapien
ctgcgtgtgtggagtttgttcgttc

SEQ ID NO: 3504223 - DNA, 25 bp, Homo sapien
tttagtgactcatattgtttctgac

SEQ ID NO: 3504224 - DNA, 25 bp, Homo sapien
ttgtttctgacatactgtgtccgga

SEQ ID NO: 3504225 - DNA, 25 bp, Homo sapien
gagaagtatattgatttagtgactc

SEQ ID NO: 3504226 - DNA, 25 bp, Homo sapien
gaactccaatccagagctaagtggg

SEQ ID NO: 3504227 - DNA, 25 bp, Homo sapien
aatattactttagggccctgtgcct

SEQ ID NO: 3504228 - DNA, 25 bp, Homo sapien
gagtctttctctgcaaagcgaggga

SEQ ID NO: 3504229 - DNA, 25 bp, Homo sapien
gacatgctgctttttgactcagagg

SEQ ID NO: 3504230 - DNA, 25 bp, Homo sapien
taagctttagccacaccagacaagt

SEQ ID NO: 3504231 - DNA, 25 bp, Homo sapien
gaagctgcacttgtttgaaaggaca

SEQ ID NO: 3504232 - DNA, 25 bp, Homo sapien
gcttcacaaggttctcaagtatggc

SEQ ID NO: 3504233 - DNA, 25 bp, Homo sapien
gcttatagacacaacgcctgcttca

SEQ ID NO: 3504234 - DNA, 25 bp, Homo sapien
taagttagtttcagcagacaatggg

SEQ ID NO: 3504235 - DNA, 25 bp, Homo sapien
tatctggcttccacgagatgataag

SEQ ID NO: 3504236 - DNA, 25 bp, Homo sapien
tgctgtttagcctcacacaagtttg

SEQ ID NO: 3504237 - DNA, 25 bp, Homo sapien
taaaatatgccagtctactaaggga

SEQ ID NO: 3504238 - DNA, 25 bp, Homo sapien
catagagatccggtagtgaactgcc

SEQ ID NO: 3504239 - DNA, 25 bp, Homo sapien
gtagtgaatgtcatcccaaggtccg

SEQ ID NO: 3504240 - DNA, 25 bp, Homo sapien
tacctcagtggtgtgcggatggcaa

SEQ ID NO: 3504241 - DNA, 25 bp, Homo sapien
gaaacaggcagcatgggcaatctcc

SEQ ID NO: 3504242 - DNA, 25 bp, Homo sapien
tcaacataatggcagaaatgaatgc

SEQ ID NO: 3504243 - DNA, 25 bp, Homo sapien
gcctaatgactgtgagacaaaaagt

SEQ ID NO: 3504244 - DNA, 25 bp, Homo sapien
ggcacagatgtaagaggatagcaaa

SEQ ID NO: 3504245 - DNA, 25 bp, Homo sapien
gagagaaacattgggaaactaggac

SEQ ID NO: 3504246 - DNA, 25 bp, Homo sapien
attagctcacggtaatgtgcaccac

SEQ ID NO: 3504247 - DNA, 25 bp, Homo sapien
tatataatagggttcatgaatggag

SEQ ID NO: 3504248 - DNA, 25 bp, Homo sapien
aaagaaatgagtcattagctcacgg

SEQ ID NO: 3504249 - DNA, 25 bp, Homo sapien
tggtttgatgctgtatataataggg

SEQ ID NO: 3504250 - DNA, 25 bp, Homo sapien
tcagagcgtctaggaagaaaatcaa

SEQ ID NO: 3504251 - DNA, 25 bp, Homo sapien
aataccaagacacagctgatatggg

SEQ ID NO: 3504252 - DNA, 25 bp, Homo sapien
cacatgttgagagctttggcttgct

SEQ ID NO: 3504253 - DNA, 25 bp, Homo sapien
aatgaaagtctcactgatcacggtg

SEQ ID NO: 3504254 - DNA, 25 bp, Homo sapien
cataggccattgacaggagaatacc

SEQ ID NO: 3504255 - DNA, 25 bp, Homo sapien
gatgataatgaaacggtcataggcc

SEQ ID NO: 3504256 - DNA, 25 bp, Homo sapien
gaaatagttatacctgagaagcatg

SEQ ID NO: 3504257 - DNA, 25 bp, Homo sapien
ttggaggcacgagggataaaaagtc

SEQ ID NO: 3504258 - DNA, 25 bp, Homo sapien
caagtggataatgggagtggataat

SEQ ID NO: 3504259 - DNA, 25 bp, Homo sapien
gataatgggagtggataatgtaaac

SEQ ID NO: 3504260 - DNA, 25 bp, Homo sapien
gagtggataatgtaaacctgcaaga

SEQ ID NO: 3504261 - DNA, 25 bp, Homo sapien
ctgcaagaagcaggccccatggata

SEQ ID NO: 3504262 - DNA, 25 bp, Homo sapien
cagtacatgggttcgtgaagactgt

SEQ ID NO: 3504263 - DNA, 25 bp, Homo sapien
tgtgattcatccacaagacgcccat

SEQ ID NO: 3504264 - DNA, 25 bp, Homo sapien
gacgcccattacagtgggcatcatg

SEQ ID NO: 3504265 - DNA, 25 bp, Homo sapien
gagatcgagtgataagttgcctcca

SEQ ID NO: 3504266 - DNA, 25 bp, Homo sapien
aaactattacactgaaatccctgcc

SEQ ID NO: 3504267 - DNA, 25 bp, Homo sapien
tgtatttctgcagcctcaatcctaa

SEQ ID NO: 3504268 - DNA, 25 bp, Homo sapien
gtgttcacaagtggcaagtagcttt

SEQ ID NO: 3504269 - DNA, 25 bp, Homo sapien
gccaggcagcaaaaaaggagccgca

SEQ ID NO: 3504270 - DNA, 25 bp, Homo sapien
ttcttgctggaataaggacccattc

SEQ ID NO: 3504271 - DNA, 25 bp, Homo sapien
taggtgttggtcatcccagatggag

SEQ ID NO: 3504272 - DNA, 25 bp, Homo sapien
caaaagccatgagccctctgtggag

SEQ ID NO: 3504273 - DNA, 25 bp, Homo sapien
tcctgaagctaatccatgagcacca

SEQ ID NO: 3504274 - DNA, 25 bp, Homo sapien
acacaaaaggcatgccagtgatgct

SEQ ID NO: 3504275 - DNA, 25 bp, Homo sapien
tacacaaaaggcatgccagtgatgc

SEQ ID NO: 3504276 - DNA, 25 bp, Homo sapien
gtttagataaaaggcggataatgcc

SEQ ID NO: 3504277 - DNA, 25 bp, Homo sapien
agtagatgtaactcatgataatgtg

SEQ ID NO: 3504278 - DNA, 25 bp, Homo sapien
tgtaactcatgataatgtggacaac

SEQ ID NO: 3504279 - DNA, 25 bp, Homo sapien
cggataatgccatattgtatttgct

SEQ ID NO: 3504280 - DNA, 25 bp, Homo sapien
catatctcaaaggattgcggatggc

SEQ ID NO: 3504281 - DNA, 25 bp, Homo sapien
ggcaggatggatacaaaacccctta

SEQ ID NO: 3504282 - DNA, 25 bp, Homo sapien
tggagatccagtgatgagctgcctc

SEQ ID NO: 3504283 - DNA, 25 bp, Homo sapien
ggagcatgccattgcccagaaggat

SEQ ID NO: 3504284 - DNA, 25 bp, Homo sapien
gcaaaaaaggggctgcagtaatatt

SEQ ID NO: 3504285 - DNA, 25 bp, Homo sapien
aaaaaaggggctgcagtaatattgg

SEQ ID NO: 3504286 - DNA, 25 bp, Homo sapien
cagcaaaaaaggggctgcagtaata

SEQ ID NO: 3504287 - DNA, 25 bp, Homo sapien
aaaaggggctgcagtaatattgggc

SEQ ID NO: 3504288 - DNA, 25 bp, Homo sapien
gtaaagatcagatttcttgaaacct

SEQ ID NO: 3504289 - DNA, 25 bp, Homo sapien
gataaatttgactctgcaactattt

SEQ ID NO: 3504290 - DNA, 25 bp, Homo sapien
gtgtatccaccggtaaagatcagat

SEQ ID NO: 3504291 - DNA, 25 bp, Homo sapien
tgcttggagatgattaactggtgtg

SEQ ID NO: 3504292 - DNA, 25 bp, Homo sapien
tacaagtatttagggccttagtctg

SEQ ID NO: 3504293 - DNA, 25 bp, Homo sapien
aatgtgagaaatacaagtatttagg

SEQ ID NO: 3504294 - DNA, 25 bp, Homo sapien
gtgagaaatacaagtatttagggcc

SEQ ID NO: 3504295 - DNA, 25 bp, Homo sapien
aaaaaccagaacacagctaatgtga

SEQ ID NO: 3504296 - DNA, 25 bp, Homo sapien
catgggattgacagtaggggaatcc

SEQ ID NO: 3504297 - DNA, 25 bp, Homo sapien
tccagagagggtgatgattatgggc

SEQ ID NO: 3504298 - DNA, 25 bp, Homo sapien
gcacaattagcataacaaatcccct

SEQ ID NO: 3504299 - DNA, 25 bp, Homo sapien
ggtgatgattatgggcacaattagc

SEQ ID NO: 3504300 - DNA, 25 bp, Homo sapien
tgccattgccaaggactgtagagac

SEQ ID NO: 3504301 - DNA, 25 bp, Homo sapien
tacaccaaggtctatggctgccagt

SEQ ID NO: 3504302 - DNA, 25 bp, Homo sapien
tatagtcagagagtagtacacgggc

SEQ ID NO: 3504303 - DNA, 25 bp, Homo sapien
catgggccatgatgagcaacactct

SEQ ID NO: 3504304 - DNA, 25 bp, Homo sapien
tgaggagaaacaaacaaacaaaaca

SEQ ID NO: 3504305 - DNA, 25 bp, Homo sapien
ggtggatacctgaggagaaacaaac

SEQ ID NO: 3504306 - DNA, 25 bp, Homo sapien
gtggatacctgaggagaaacaaaca

SEQ ID NO: 3504307 - DNA, 25 bp, Homo sapien
tccgatgtcctgtgtctgtattcat

SEQ ID NO: 3504308 - DNA, 25 bp, Homo sapien
ctccgatgtcctgtgtctgtattca

SEQ ID NO: 3504309 - DNA, 25 bp, Homo sapien
tgcctatggcctgctacctaaggag

SEQ ID NO: 3504310 - DNA, 25 bp, Homo sapien
catttcctgctgagttgagaacaac

SEQ ID NO: 3504311 - DNA, 25 bp, Homo sapien
ctcaggtgacatggcgtgacaagga

SEQ ID NO: 3504312 - DNA, 25 bp, Homo sapien
ctacaagcatgacggaatacaaggc

SEQ ID NO: 3504313 - DNA, 25 bp, Homo sapien
gaaagcagaaacatgaacaatgagc

SEQ ID NO: 3504314 - DNA, 25 bp, Homo sapien
cagaaagcagaaacatgaacaatga

SEQ ID NO: 3504315 - DNA, 25 bp, Homo sapien
acattcacaggtgcacaattctgta

SEQ ID NO: 3504316 - DNA, 25 bp, Homo sapien
agccaacattcacaggtgcacaatt

SEQ ID NO: 3504317 - DNA, 25 bp, Homo sapien
caggttccaattctatgggtagtaa

SEQ ID NO: 3504318 - DNA, 25 bp, Homo sapien
gctttccaaaacgatgaatcagaga

SEQ ID NO: 3504319 - DNA, 25 bp, Homo sapien
gaacaatatgtggaacctgctttcc

SEQ ID NO: 3504320 - DNA, 25 bp, Homo sapien
gattcattagtggagggaacagaaa

SEQ ID NO: 3504321 - DNA, 25 bp, Homo sapien
cctctctggaggcaatgctcaggac

SEQ ID NO: 3504322 - DNA, 25 bp, Homo sapien
tctctggaggcaatgctcaggacag

SEQ ID NO: 3504323 - DNA, 25 bp, Homo sapien
ctctggaggcaatgctcaggacagt

SEQ ID NO: 3504324 - DNA, 25 bp, Homo sapien
tcctctctggaggcaatgctcagga

SEQ ID NO: 3504325 - DNA, 25 bp, Homo sapien
taggagatgaagataatcagataat

SEQ ID NO: 3504326 - DNA, 25 bp, Homo sapien
cttgagtatcaacacataggagatg

SEQ ID NO: 3504327 - DNA, 25 bp, Homo sapien
cagaggtatatctaagagggttgca

SEQ ID NO: 3504328 - DNA, 25 bp, Homo sapien
caagcagaatgccagactcgagaaa

SEQ ID NO: 3504329 - DNA, 25 bp, Homo sapien
gcctgggaaaagcaggccgcacttc

SEQ ID NO: 3504330 - DNA, 25 bp, Homo sapien
tcagcacaggcgagtttaatgacat

SEQ ID NO: 3504331 - DNA, 25 bp, Homo sapien
gagctgccgctggacgacatcctgg

SEQ ID NO: 3504332 - DNA, 25 bp, Homo sapien
gttattaccacagtgcacagttcta

SEQ ID NO: 3504333 - DNA, 25 bp, Homo sapien
gattgtgatcttccttaatgagaag

SEQ ID NO: 3504334 - DNA, 25 bp, Homo sapien
cggaaatccagtgatgagcttcctc

SEQ ID NO: 3504335 - DNA, 25 bp, Homo sapien
caaggtatcacttcgactatatcat

SEQ ID NO: 3504336 - DNA, 25 bp, Homo sapien
tcaaggtatcacttcgactatatca

SEQ ID NO: 3504337 - DNA, 25 bp, Homo sapien
tcacttcgactatatcattctcaga

SEQ ID NO: 3504338 - DNA, 25 bp, Homo sapien
ggtatcacttcgactatatcattct

SEQ ID NO: 3504339 - DNA, 25 bp, Homo sapien
aattatcagctaaagtctcaacagc

SEQ ID NO: 3504340 - DNA, 25 bp, Homo sapien
aatagtttcagtgaagagatgccag

SEQ ID NO: 3504341 - DNA, 25 bp, Homo sapien
ttccacccatagagatgagatctaa

SEQ ID NO: 3504342 - DNA, 25 bp, Homo sapien
tgccagacaactgggcgtgaggcaa

SEQ ID NO: 3504343 - DNA, 25 bp, Homo sapien
tgagatctaactgtaatagtttcag

SEQ ID NO: 3504344 - DNA, 25 bp, Homo sapien
aattcttgtgtcctcagctagtcgt

SEQ ID NO: 3504345 - DNA, 25 bp, Homo sapien
gatctatggaatcactctactttgt

SEQ ID NO: 3504346 - DNA, 25 bp, Homo sapien
tcctcagctagtcgtggctcttggt

SEQ ID NO: 3504347 - DNA, 25 bp, Homo sapien
ctggtaatgcagctataatagtgat

SEQ ID NO: 3504348 - DNA, 25 bp, Homo sapien
ctaaagacttagatcatgttgttcc

SEQ ID NO: 3504349 - DNA, 25 bp, Homo sapien
taaagacttagatcatgttgttcct

SEQ ID NO: 3504350 - DNA, 25 bp, Homo sapien
aagacttagatcatgttgttccttc

SEQ ID NO: 3504351 - DNA, 25 bp, Homo sapien
gacttagatcatgttgttccttctc

SEQ ID NO: 3504352 - DNA, 25 bp, Homo sapien
tgcaatctactcatccgacaaaggg

SEQ ID NO: 3504353 - DNA, 25 bp, Homo sapien
agacatttatgcagtcaacagacac

SEQ ID NO: 3504354 - DNA, 25 bp, Homo sapien
tttatgcagtcaacagacacatgaa

SEQ ID NO: 3504355 - DNA, 25 bp, Homo sapien
tccagaatctatgatgaactcaaac

SEQ ID NO: 3504356 - DNA, 25 bp, Homo sapien
aacgttcgtagaatcagctctgagg

SEQ ID NO: 3504357 - DNA, 25 bp, Homo sapien
tgactaacaccacacaagaaggcat

SEQ ID NO: 3504358 - DNA, 25 bp, Homo sapien
tggatttgaggcctcccacatctgg

SEQ ID NO: 3504359 - DNA, 25 bp, Homo sapien
ccctgagtgaagatcctgaatctga

SEQ ID NO: 3504360 - DNA, 25 bp, Homo sapien
gataagcaatgagtccagcccgaaa

SEQ ID NO: 3504361 - DNA, 25 bp, Homo sapien
tttgcgagaacaatggctaagccca

SEQ ID NO: 3504362 - DNA, 25 bp, Homo sapien
tagctcatggctagtaggacccctg

SEQ ID NO: 3504363 - DNA, 25 bp, Homo sapien
catgtttggcagcacgatgcatcac

SEQ ID NO: 3504364 - DNA, 25 bp, Homo sapien
ggccaggcagccatcaaagtcaact

SEQ ID NO: 3504365 - DNA, 25 bp, Homo sapien
gggccaggcagccatcaaagtcaac

SEQ ID NO: 3504366 - DNA, 25 bp, Homo sapien
ctgggccaggcagccatcaaagtca

SEQ ID NO: 3504367 - DNA, 25 bp, Homo sapien
tgggccaggcagccatcaaagtcaa

SEQ ID NO: 3504368 - DNA, 25 bp, Homo sapien
ctgtgggcatcaaaccaaagaatgc

SEQ ID NO: 3504369 - DNA, 25 bp, Homo sapien
agcagtgtagacacagagacgccca

SEQ ID NO: 3504370 - DNA, 25 bp, Homo sapien
agtagcagtgtagacacagagacgc

SEQ ID NO: 3504371 - DNA, 25 bp, Homo sapien
ctgtaacagtagcagtgtagacaca

SEQ ID NO: 3504372 - DNA, 25 bp, Homo sapien
tgtaacagtagcagtgtagacacag

SEQ ID NO: 3504373 - DNA, 25 bp, Homo sapien
tcctgcactgctgccataattagga

SEQ ID NO: 3504374 - DNA, 25 bp, Homo sapien
gggcagagtcttcctgcactgctgc

SEQ ID NO: 3504375 - DNA, 25 bp, Homo sapien
gcactgctgccataattaggatgtt

SEQ ID NO: 3504376 - DNA, 25 bp, Homo sapien
ctcatgtagggcagagtcttcctgc

SEQ ID NO: 3504377 - DNA, 25 bp, Homo sapien
caagactttcattgctttcagctcc

SEQ ID NO: 3504378 - DNA, 25 bp, Homo sapien
gaagacagataggaggtcaagactt

SEQ ID NO: 3504379 - DNA, 25 bp, Homo sapien
accaacagcagagatcagtcttcgc

SEQ ID NO: 3504380 - DNA, 25 bp, Homo sapien
agtcaggaagacagataggaggtca

SEQ ID NO: 3504381 - DNA, 25 bp, Homo sapien
ggaagtaagaatcaagacttcgaag

SEQ ID NO: 3504382 - DNA, 25 bp, Homo sapien
ctggtccctggtaaagcatcatctt

SEQ ID NO: 3504383 - DNA, 25 bp, Homo sapien
caggaagtaagaatcaagacttcga

SEQ ID NO: 3504384 - DNA, 25 bp, Homo sapien
tggtccctggtaaagcatcatcttc

SEQ ID NO: 3504385 - DNA, 25 bp, Homo sapien
tcaggcctgggatttatggaagaac

SEQ ID NO: 3504386 - DNA, 25 bp, Homo sapien
tctcaggatcaatgcgtaggaaagc

SEQ ID NO: 3504387 - DNA, 25 bp, Homo sapien
tcttggtaaggatgcccagacccat

SEQ ID NO: 3504388 - DNA, 25 bp, Homo sapien
ggcagtcgtttcaccacaaaaggga

SEQ ID NO: 3504389 - DNA, 25 bp, Homo sapien
gcagtatgcctgactccatgaagga

SEQ ID NO: 3504390 - DNA, 25 bp, Homo sapien
cagggcaacccaggtgaggcctgtt

SEQ ID NO: 3504391 - DNA, 25 bp, Homo sapien
ctgtttgtatcccaggaatgcctgt

SEQ ID NO: 3504392 - DNA, 25 bp, Homo sapien
gatcatgtagaggatgcagaaaatc

SEQ ID NO: 3504393 - DNA, 25 bp, Homo sapien
tatcccaggaatgcctgtcagctgg

SEQ ID NO: 3504394 - DNA, 25 bp, Homo sapien
ttagatacctcatatgttcctgggt

SEQ ID NO: 3504395 - DNA, 25 bp, Homo sapien
tacctcatatgttcctgggtcccct

SEQ ID NO: 3504396 - DNA, 25 bp, Homo sapien
cctcatatgttcctgggtccccttt

SEQ ID NO: 3504397 - DNA, 25 bp, Homo sapien
gatacctcatatgttcctgggtccc

SEQ ID NO: 3504398 - DNA, 25 bp, Homo sapien
catttgctcgtaaatgctttcagga

SEQ ID NO: 3504399 - DNA, 25 bp, Homo sapien
taagaagtaatctacttgtaggtgc

SEQ ID NO: 3504400 - DNA, 25 bp, Homo sapien
gacaactgaggagagcatttgctcg

SEQ ID NO: 3504401 - DNA, 25 bp, Homo sapien
ttgaacacaggcaaccagatgccct

SEQ ID NO: 3504402 - DNA, 25 bp, Homo sapien
tggaatagataattgggtagagcat

SEQ ID NO: 3504403 - DNA, 25 bp, Homo sapien
ctccttagtcttgatggaatagata

SEQ ID NO: 3504404 - DNA, 25 bp, Homo sapien
tagctcccaataacatcttgtgtag

SEQ ID NO: 3504405 - DNA, 25 bp, Homo sapien
tagtctcctgcgaatctccttagtc

SEQ ID NO: 3504406 - DNA, 25 bp, Homo sapien
cacatgtgttgagtgtcttaagcct

SEQ ID NO: 3504407 - DNA, 25 bp, Homo sapien
gagcatgcctcccaaatcgatgaac

SEQ ID NO: 3504408 - DNA, 25 bp, Homo sapien
tcgatgaaccatggacacactaacc

SEQ ID NO: 3504409 - DNA, 25 bp, Homo sapien
tcagcactgcatagatatgtgacac

SEQ ID NO: 3504410 - DNA, 25 bp, Homo sapien
cacagcagccagtacagtgggcaat

SEQ ID NO: 3504411 - DNA, 25 bp, Homo sapien
ttgtgggccacacggacatcagtga

SEQ ID NO: 3504412 - DNA, 25 bp, Homo sapien
cactgtggcatagcgcagcgggtta

SEQ ID NO: 3504413 - DNA, 25 bp, Homo sapien
cccaggaaggaaatagcacaaagca

SEQ ID NO: 3504414 - DNA, 25 bp, Homo sapien
cttgagatgttagtcccaaagcccc

SEQ ID NO: 3504415 - DNA, 25 bp, Homo sapien
gggtttctgagtgacttttaggcaa

SEQ ID NO: 3504416 - DNA, 25 bp, Homo sapien
ctggtagtacttgagatgttagtcc

SEQ ID NO: 3504417 - DNA, 25 bp, Homo sapien
tcagggtttctgagtgacttttagg

SEQ ID NO: 3504418 - DNA, 25 bp, Homo sapien
tttttatatctgtctctaatagcac

SEQ ID NO: 3504419 - DNA, 25 bp, Homo sapien
ttttatatctgtctctaatagcact

SEQ ID NO: 3504420 - DNA, 25 bp, Homo sapien
ttatatctgtctctaatagcacttg

SEQ ID NO: 3504421 - DNA, 25 bp, Homo sapien
atatctgtctctaatagcacttgcc

SEQ ID NO: 3504422 - DNA, 25 bp, Homo sapien
ttcatttcccctagcaccaccataa

SEQ ID NO: 3504423 - DNA, 25 bp, Homo sapien
tagcaccaccataaacaataggttt

SEQ ID NO: 3504424 - DNA, 25 bp, Homo sapien
aactatcccctaatggggagtggag

SEQ ID NO: 3504425 - DNA, 25 bp, Homo sapien
aactgaagctgtatttgtccgtttt

SEQ ID NO: 3504426 - DNA, 25 bp, Homo sapien
aagtcacatcctactggaatggcag

SEQ ID NO: 3504427 - DNA, 25 bp, Homo sapien
agcaagtcacatcctactggaatgg

SEQ ID NO: 3504428 - DNA, 25 bp, Homo sapien
acaaccatggccaggagaagcaagt

SEQ ID NO: 3504429 - DNA, 25 bp, Homo sapien
aaccatggccaggagaagcaagtca

SEQ ID NO: 3504430 - DNA, 25 bp, Homo sapien
ccccagtggtatagtggtacaagtg

SEQ ID NO: 3504431 - DNA, 25 bp, Homo sapien
tacaagtggttgactcacacacagc

SEQ ID NO: 3504432 - DNA, 25 bp, Homo sapien
tctcaagataggcataagcagagct

SEQ ID NO: 3504433 - DNA, 25 bp, Homo sapien
tagtcttcctcgttgactctggaac

SEQ ID NO: 3504434 - DNA, 25 bp, Homo sapien
cccgtagcaatgagggcctgaagat

SEQ ID NO: 3504435 - DNA, 25 bp, Homo sapien
gaagattggcttcacgattcagaaa

SEQ ID NO: 3504436 - DNA, 25 bp, Homo sapien
ttcagaaagcccatggaccgcagtt

SEQ ID NO: 3504437 - DNA, 25 bp, Homo sapien
tcaatctgccgcagggcttgcaggg

SEQ ID NO: 3504438 - DNA, 25 bp, Homo sapien
catctggcctcagagatcttggata

SEQ ID NO: 3504439 - DNA, 25 bp, Homo sapien
actgtggagctggattcatgccatc

SEQ ID NO: 3504440 - DNA, 25 bp, Homo sapien
taactgtggagctggattcatgcca

SEQ ID NO: 3504441 - DNA, 25 bp, Homo sapien
tctggcctcagagatcttggataag

SEQ ID NO: 3504442 - DNA, 25 bp, Homo sapien
gctatgtccagtagagcttttccct

SEQ ID NO: 3504443 - DNA, 25 bp, Homo sapien
acaagatcaggcaagtttgtgctat

SEQ ID NO: 3504444 - DNA, 25 bp, Homo sapien
tttgtgctatgtccagtagagcttt

SEQ ID NO: 3504445 - DNA, 25 bp, Homo sapien
gaatctcccagccccgagacaagat

SEQ ID NO: 3504446 - DNA, 25 bp, Homo sapien
tgtagataagttcctagggactggg

SEQ ID NO: 3504447 - DNA, 25 bp, Homo sapien
tatttctaatgtcaggtgcatcctg

SEQ ID NO: 3504448 - DNA, 25 bp, Homo sapien
aattgctggagatagtcatagagcc

SEQ ID NO: 3504449 - DNA, 25 bp, Homo sapien
gcaggaggaccttcccttgattgct

SEQ ID NO: 3504450 - DNA, 25 bp, Homo sapien
tcagggaagccacgataggccaagc

SEQ ID NO: 3504451 - DNA, 25 bp, Homo sapien
cctactgaggcctgtgaggagacct

SEQ ID NO: 3504452 - DNA, 25 bp, Homo sapien
tcaagaaccagctggcgtactaggc

SEQ ID NO: 3504453 - DNA, 25 bp, Homo sapien
tacgtaaaaactccagtgtctgccg

SEQ ID NO: 3504454 - DNA, 25 bp, Homo sapien
gcaggaggcccagatctgtggggac

SEQ ID NO: 3504455 - DNA, 25 bp, Homo sapien
aggaggcccagatctgtggggacac

SEQ ID NO: 3504456 - DNA, 25 bp, Homo sapien
gcagcaggaggcccagatctgtggg

SEQ ID NO: 3504457 - DNA, 25 bp, Homo sapien
cagcaggaggcccagatctgtgggg

SEQ ID NO: 3504458 - DNA, 25 bp, Homo sapien
ggggcatggggattggagaccaaga

SEQ ID NO: 3504459 - DNA, 25 bp, Homo sapien
gcatggggattggagaccaagatca

SEQ ID NO: 3504460 - DNA, 25 bp, Homo sapien
ctaggggcatggggattggagacca

SEQ ID NO: 3504461 - DNA, 25 bp, Homo sapien
ggcatggggattggagaccaagatc

SEQ ID NO: 3504462 - DNA, 25 bp, Homo sapien
tccaaacctccctcatcttgctaca

SEQ ID NO: 3504463 - DNA, 25 bp, Homo sapien
tccctcatcttgctacacagccacc

SEQ ID NO: 3504464 - DNA, 25 bp, Homo sapien
ctgtggtcccgtccttctctttatg

SEQ ID NO: 3504465 - DNA, 25 bp, Homo sapien
tctctttatgcagggctccaaacct

SEQ ID NO: 3504466 - DNA, 25 bp, Homo sapien
ggagggcctgctcaatctgcaatat

SEQ ID NO: 3504467 - DNA, 25 bp, Homo sapien
cattccaggaacagggcactgtgtc

SEQ ID NO: 3504468 - DNA, 25 bp, Homo sapien
cataggtagggtgcaacccaaggca

SEQ ID NO: 3504469 - DNA, 25 bp, Homo sapien
gatctcttgagcttgcggatagcag

SEQ ID NO: 3504470 - DNA, 25 bp, Homo sapien
tgctgcctccactgttcactcagct

SEQ ID NO: 3504471 - DNA, 25 bp, Homo sapien
taagcactaagcagatcagaaatct

SEQ ID NO: 3504472 - DNA, 25 bp, Homo sapien
ctgcctccactgttcactcagctgg

SEQ ID NO: 3504473 - DNA, 25 bp, Homo sapien
gcctccactgttcactcagctgggg

SEQ ID NO: 3504474 - DNA, 25 bp, Homo sapien
gctgggtaagctctatgctaggtaa

SEQ ID NO: 3504475 - DNA, 25 bp, Homo sapien
ttgtgaacaacataatctgagctgc

SEQ ID NO: 3504476 - DNA, 25 bp, Homo sapien
tgtctgtctggagctacttagagaa

SEQ ID NO: 3504477 - DNA, 25 bp, Homo sapien
ggagatcaccctttaatgtctgtct

SEQ ID NO: 3504478 - DNA, 25 bp, Homo sapien
tgagctggtcttgttgttcctgtga

SEQ ID NO: 3504479 - DNA, 25 bp, Homo sapien
gctgtgtgagctggtcttgttgttc

SEQ ID NO: 3504480 - DNA, 25 bp, Homo sapien
ttatagatgactcgggttgcaggat

SEQ ID NO: 3504481 - DNA, 25 bp, Homo sapien
ctattatagatgactcgggttgcag

SEQ ID NO: 3504482 - DNA, 25 bp, Homo sapien
tgttctagcacttgtcctgccagga

SEQ ID NO: 3504483 - DNA, 25 bp, Homo sapien
aagccgctggatgctaggattctcc

SEQ ID NO: 3504484 - DNA, 25 bp, Homo sapien
gaactccatgttggacagaagccgc

SEQ ID NO: 3504485 - DNA, 25 bp, Homo sapien
ggatcatagcaaggttcctggccag

SEQ ID NO: 3504486 - DNA, 25 bp, Homo sapien
ttgagaaggcaacccatgaagacca

SEQ ID NO: 3504487 - DNA, 25 bp, Homo sapien
cccggaaggaatgggctagagatct

SEQ ID NO: 3504488 - DNA, 25 bp, Homo sapien
ggatcattcgttggcaggtcccgga

SEQ ID NO: 3504489 - DNA, 25 bp, Homo sapien
tccttgaactgccttaccgagatgt

SEQ ID NO: 3504490 - DNA, 25 bp, Homo sapien
ctgatggacatccactctgggacat

SEQ ID NO: 3504491 - DNA, 25 bp, Homo sapien
agacctgatggacatccactctggg

SEQ ID NO: 3504492 - DNA, 25 bp, Homo sapien
cctgatggacatccactctgggaca

SEQ ID NO: 3504493 - DNA, 25 bp, Homo sapien
gacctgatggacatccactctggga

SEQ ID NO: 3504494 - DNA, 25 bp, Homo sapien
tgaggcctggcatagctactgattc

SEQ ID NO: 3504495 - DNA, 25 bp, Homo sapien
ttgtgatgttgtgccctcaccccag

SEQ ID NO: 3504496 - DNA, 25 bp, Homo sapien
gatggcatgccacatgggctttagt

SEQ ID NO: 3504497 - DNA, 25 bp, Homo sapien
ccctaaaagggatgagtgaccagac

SEQ ID NO: 3504498 - DNA, 25 bp, Homo sapien
ggtggtcttggtagcctggtcttca

SEQ ID NO: 3504499 - DNA, 25 bp, Homo sapien
ttatcaggtaaccatcactgaagac

SEQ ID NO: 3504500 - DNA, 25 bp, Homo sapien
ggttttggtggagcatgagccccag

SEQ ID NO: 3504501 - DNA, 25 bp, Homo sapien
tcagggtctggaagcctcgttaggt

SEQ ID NO: 3504502 - DNA, 25 bp, Homo sapien
tctagggtgctagcgttgagacgac

SEQ ID NO: 3504503 - DNA, 25 bp, Homo sapien
aaagcggttgttataggtggcacca

SEQ ID NO: 3504504 - DNA, 25 bp, Homo sapien
tgagacgactcacaaccaggttgcc

SEQ ID NO: 3504505 - DNA, 25 bp, Homo sapien
tgaatgtaaggcatagagcacccca

SEQ ID NO: 3504506 - DNA, 25 bp, Homo sapien
cagaattattgggtgacagccataa

SEQ ID NO: 3504507 - DNA, 25 bp, Homo sapien
cgagtgagctgcaccacaagggatt

SEQ ID NO: 3504508 - DNA, 25 bp, Homo sapien
tatgagaagcctctccgagtgagct

SEQ ID NO: 3504509 - DNA, 25 bp, Homo sapien
catctgtacgtagaggagcaaccca

SEQ ID NO: 3504510 - DNA, 25 bp, Homo sapien
tggaggcctccatgggcacaagaag

SEQ ID NO: 3504511 - DNA, 25 bp, Homo sapien
ggtgtccaaaggcctattctttctc

SEQ ID NO: 3504512 - DNA, 25 bp, Homo sapien
tgtccaaaggcctattctttctcct

SEQ ID NO: 3504513 - DNA, 25 bp, Homo sapien
gtgtccaaaggcctattctttctcc

SEQ ID NO: 3504514 - DNA, 25 bp, Homo sapien
cagggtgtccaaaggcctattcttt

SEQ ID NO: 3504515 - DNA, 25 bp, Homo sapien
ttagttgactctcaaggacatccac

SEQ ID NO: 3504516 - DNA, 25 bp, Homo sapien
tgagtgtgagactggcgttagtcac

SEQ ID NO: 3504517 - DNA, 25 bp, Homo sapien
gagcaccaaagctgcactggtcaga

SEQ ID NO: 3504518 - DNA, 25 bp, Homo sapien
aaaagtttgagtgtgagactggcgt

SEQ ID NO: 3504519 - DNA, 25 bp, Homo sapien
cctgggttctcatagggagaagcaa

SEQ ID NO: 3504520 - DNA, 25 bp, Homo sapien
gccacactaacacctcccatggctt

SEQ ID NO: 3504521 - DNA, 25 bp, Homo sapien
ccatggctttaagttgagtcaccaa

SEQ ID NO: 3504522 - DNA, 25 bp, Homo sapien
aggaggtccccagccacactaacac

SEQ ID NO: 3504523 - DNA, 25 bp, Homo sapien
ctttatcttcaatggcgcgtgcaca

SEQ ID NO: 3504524 - DNA, 25 bp, Homo sapien
tgtctttatcttcaatggcgcgtgc

SEQ ID NO: 3504525 - DNA, 25 bp, Homo sapien
atttccagaacctcattgtctttat

SEQ ID NO: 3504526 - DNA, 25 bp, Homo sapien
gtgactcatttccagaacctcattg

SEQ ID NO: 3504527 - DNA, 25 bp, Homo sapien
acatcagcatgcaggggatgaacag

SEQ ID NO: 3504528 - DNA, 25 bp, Homo sapien
agctgtactttgtagctgttccagc

SEQ ID NO: 3504529 - DNA, 25 bp, Homo sapien
gttgggtaggtgaaccatacaatgg

SEQ ID NO: 3504530 - DNA, 25 bp, Homo sapien
ggtgaaccatacaatggcatgtgcc

SEQ ID NO: 3504531 - DNA, 25 bp, Homo sapien
tgtactttgtagctgttccagctgc

SEQ ID NO: 3504532 - DNA, 25 bp, Homo sapien
caggcacagtaaacataatgaagca

SEQ ID NO: 3504533 - DNA, 25 bp, Homo sapien
catggccacaggcacagtaaacata

SEQ ID NO: 3504534 - DNA, 25 bp, Homo sapien
caaaccatggccacaggcacagtaa

SEQ ID NO: 3504535 - DNA, 25 bp, Homo sapien
gccacaggcacagtaaacataatga

SEQ ID NO: 3504536 - DNA, 25 bp, Homo sapien
ctggctgcagttcacattactggaa

SEQ ID NO: 3504537 - DNA, 25 bp, Homo sapien
tctggctgcagttcacattactgga

SEQ ID NO: 3504538 - DNA, 25 bp, Homo sapien
ggatctggctgcagttcacattact

SEQ ID NO: 3504539 - DNA, 25 bp, Homo sapien
gatctggctgcagttcacattactg

SEQ ID NO: 3504540 - DNA, 25 bp, Homo sapien
ctgccacatgatgctgtggagcctc

SEQ ID NO: 3504541 - DNA, 25 bp, Homo sapien
tgctgtggagcctcaagtcttctgg

SEQ ID NO: 3504542 - DNA, 25 bp, Homo sapien
tctggcctctgaactgccgttatcc

SEQ ID NO: 3504543 - DNA, 25 bp, Homo sapien
cacatgatgctgtggagcctcaagt

SEQ ID NO: 3504544 - DNA, 25 bp, Homo sapien
tcctgcccagaaaagttgaagcaag

SEQ ID NO: 3504545 - DNA, 25 bp, Homo sapien
gaacaccactgcgtagaggttagcc

SEQ ID NO: 3504546 - DNA, 25 bp, Homo sapien
gctagcataggtcccgcagttaccc

SEQ ID NO: 3504547 - DNA, 25 bp, Homo sapien
cagacggcagacagcacggaaaatg

SEQ ID NO: 3504548 - DNA, 25 bp, Homo sapien
tgatgatggggcacgtatctccaca

SEQ ID NO: 3504549 - DNA, 25 bp, Homo sapien
cacccatgtgttcgcagtaggtgtg

SEQ ID NO: 3504550 - DNA, 25 bp, Homo sapien
caggcaagccacacccatgtgttcg

SEQ ID NO: 3504551 - DNA, 25 bp, Homo sapien
ggggcacgtatctccacatgccagg

SEQ ID NO: 3504552 - DNA, 25 bp, Homo sapien
gccagcaacgccccatagcgcaaag

SEQ ID NO: 3504553 - DNA, 25 bp, Homo sapien
cccatagcgcaaaggctggcagtct

SEQ ID NO: 3504554 - DNA, 25 bp, Homo sapien
ccatagcgcaaaggctggcagtcta

SEQ ID NO: 3504555 - DNA, 25 bp, Homo sapien
acaaactgggccagcaacgccccat

SEQ ID NO: 3504556 - DNA, 25 bp, Homo sapien
aacaaagagttgagccaagcagcct

SEQ ID NO: 3504557 - DNA, 25 bp, Homo sapien
acaaagagttgagccaagcagcctc

SEQ ID NO: 3504558 - DNA, 25 bp, Homo sapien
atgtggcaatgattgacacatgggc

SEQ ID NO: 3504559 - DNA, 25 bp, Homo sapien
gcaatgtggcaatgattgacacatg

SEQ ID NO: 3504560 - DNA, 25 bp, Homo sapien
ccccaaagtacagccagagctttgg

SEQ ID NO: 3504561 - DNA, 25 bp, Homo sapien
gagctttgggcactgtggatgtggc

SEQ ID NO: 3504562 - DNA, 25 bp, Homo sapien
ctggtacatgggtgcccagagtgcc

SEQ ID NO: 3504563 - DNA, 25 bp, Homo sapien
agagtgccttgtcagtgaccaccag

SEQ ID NO: 3504564 - DNA, 25 bp, Homo sapien
tggtacatgggtgcccagagtgcct

SEQ ID NO: 3504565 - DNA, 25 bp, Homo sapien
cccagagtgccttgtcagtgaccac

SEQ ID NO: 3504566 - DNA, 25 bp, Homo sapien
atgcagagcctccagtcccggcatc

SEQ ID NO: 3504567 - DNA, 25 bp, Homo sapien
gacccagacccagagatcagcaagt

SEQ ID NO: 3504568 - DNA, 25 bp, Homo sapien
gcatgcagagcctccagtcccggca

SEQ ID NO: 3504569 - DNA, 25 bp, Homo sapien
agagatcagcaagttctgactgaaa

SEQ ID NO: 3504570 - DNA, 25 bp, Homo sapien
gcctccttccactgcattcttaatt

SEQ ID NO: 3504571 - DNA, 25 bp, Homo sapien
ttaaagcctccttccactgcattct

SEQ ID NO: 3504572 - DNA, 25 bp, Homo sapien
cttccactgcattcttaattctcag

SEQ ID NO: 3504573 - DNA, 25 bp, Homo sapien
tgcattcttaattctcagtttcata

SEQ ID NO: 3504574 - DNA, 25 bp, Homo sapien
tttgcactccaaagttgctctctga

SEQ ID NO: 3504575 - DNA, 25 bp, Homo sapien
ggctcaatgtggaacaaatccagtg

SEQ ID NO: 3504576 - DNA, 25 bp, Homo sapien
tatttggaagcagaatagtcccaac

SEQ ID NO: 3504577 - DNA, 25 bp, Homo sapien
tctttgccaatagagccacaggaat

SEQ ID NO: 3504578 - DNA, 25 bp, Homo sapien
gaggaatgagcatcccgtctccatc

SEQ ID NO: 3504579 - DNA, 25 bp, Homo sapien
ctactgcctcaacatcgccattcag

SEQ ID NO: 3504580 - DNA, 25 bp, Homo sapien
tggaggtgagattaaaaacgaggaa

SEQ ID NO: 3504581 - DNA, 25 bp, Homo sapien
ctctctgctgttggaggtgagatta

SEQ ID NO: 3504582 - DNA, 25 bp, Homo sapien
tcatcctgtacccttagaaaacaaa

SEQ ID NO: 3504583 - DNA, 25 bp, Homo sapien
gaacatttgtgtaaggcatcctggg

SEQ ID NO: 3504584 - DNA, 25 bp, Homo sapien
cattgtgtccaaagcgatgggcgag

SEQ ID NO: 3504585 - DNA, 25 bp, Homo sapien
ggaatgtgatttcgcgagcccctag

SEQ ID NO: 3504586 - DNA, 25 bp, Homo sapien
cagaagcttcgaaaggagatgccca

SEQ ID NO: 3504587 - DNA, 25 bp, Homo sapien
aggcagatggcataaatctcagccc

SEQ ID NO: 3504588 - DNA, 25 bp, Homo sapien
gaggcagatggcataaatctcagcc

SEQ ID NO: 3504589 - DNA, 25 bp, Homo sapien
agaggcagatggcataaatctcagc

SEQ ID NO: 3504590 - DNA, 25 bp, Homo sapien
aagagcaaaaggattctgttctgga

SEQ ID NO: 3504591 - DNA, 25 bp, Homo sapien
gttctggatttgcttggtctttatt

SEQ ID NO: 3504592 - DNA, 25 bp, Homo sapien
cactgggaccccttgggaaagagca

SEQ ID NO: 3504593 - DNA, 25 bp, Homo sapien
gatttgcttggtctttattctgtag

SEQ ID NO: 3504594 - DNA, 25 bp, Homo sapien
gcaaagggccttctgacgggcatct

SEQ ID NO: 3504595 - DNA, 25 bp, Homo sapien
tatgagggacattatgcccaaagca

SEQ ID NO: 3504596 - DNA, 25 bp, Homo sapien
gaaagaataattgggtgagacagcc

SEQ ID NO: 3504597 - DNA, 25 bp, Homo sapien
aaatgatatgtgtcctgcagaaggg

SEQ ID NO: 3504598 - DNA, 25 bp, Homo sapien
cacatgtggtggacaatatgagatc

SEQ ID NO: 3504599 - DNA, 25 bp, Homo sapien
tgtggtggacaatatgagatcagta

SEQ ID NO: 3504600 - DNA, 25 bp, Homo sapien
gggacacatgtggtggacaatatga

SEQ ID NO: 3504601 - DNA, 25 bp, Homo sapien
ttttggggacacatgtggtggacaa

SEQ ID NO: 3504602 - DNA, 25 bp, Homo sapien
gcagaatgggatgctgatccagacg

SEQ ID NO: 3504603 - DNA, 25 bp, Homo sapien
tgctcaagtccagggatacccaaaa

SEQ ID NO: 3504604 - DNA, 25 bp, Homo sapien
gaggtagagaaggatactattggcc

SEQ ID NO: 3504605 - DNA, 25 bp, Homo sapien
gccacgacagccatgagatagatta

SEQ ID NO: 3504606 - DNA, 25 bp, Homo sapien
ggctggtccgcctctttcctatatt

SEQ ID NO: 3504607 - DNA, 25 bp, Homo sapien
caaattgcttataatgaacatgagg

SEQ ID NO: 3504608 - DNA, 25 bp, Homo sapien
gaggaaattgtatggtaattcttcc

SEQ ID NO: 3504609 - DNA, 25 bp, Homo sapien
gcctttaagatcaatagcttctgtg

SEQ ID NO: 3504610 - DNA, 25 bp, Homo sapien
gacaaaaggtagtttgcacagttaa

SEQ ID NO: 3504611 - DNA, 25 bp, Homo sapien
gaacattacctgctaaagtcaacag

SEQ ID NO: 3504612 - DNA, 25 bp, Homo sapien
caatgtgagtcttgaggatgatgca

SEQ ID NO: 3504613 - DNA, 25 bp, Homo sapien
taaatgtgatggaagcaagtctagc

SEQ ID NO: 3504614 - DNA, 25 bp, Homo sapien
tgcaagagatactctggccaaagtg

SEQ ID NO: 3504615 - DNA, 25 bp, Homo sapien
gagggattgccctatagaggcccac

SEQ ID NO: 3504616 - DNA, 25 bp, Homo sapien
tggctggtgtgtacaacatgagaat

SEQ ID NO: 3504617 - DNA, 25 bp, Homo sapien
aattatggaattgagtacaggaggg

SEQ ID NO: 3504618 - DNA, 25 bp, Homo sapien
ccaccggtgcttagggccttcagaa

SEQ ID NO: 3504619 - DNA, 25 bp, Homo sapien
gaaatatcagtgaggatcagatctg

SEQ ID NO: 3504620 - DNA, 25 bp, Homo sapien
cagatctgagataatagtcattacc

SEQ ID NO: 3504621 - DNA, 25 bp, Homo sapien
caatatagtaaagtcataccagata

SEQ ID NO: 3504622 - DNA, 25 bp, Homo sapien
aatcaatgggcaaaatgttattaaa

SEQ ID NO: 3504623 - DNA, 25 bp, Homo sapien
cttccccaggaaatcaatgggcaaa

SEQ ID NO: 3504624 - DNA, 25 bp, Homo sapien
gcttccccaggaaatcaatgggcaa

SEQ ID NO: 3504625 - DNA, 25 bp, Homo sapien
atcaatgggcaaaatgttattaaac

SEQ ID NO: 3504626 - DNA, 25 bp, Homo sapien
tgaagagtcctggattgaagctact

SEQ ID NO: 3504627 - DNA, 25 bp, Homo sapien
tcctggattgaagctacttaaattc

SEQ ID NO: 3504628 - DNA, 25 bp, Homo sapien
aatgtggccatcgtggtgattgcca

SEQ ID NO: 3504629 - DNA, 25 bp, Homo sapien
aacagaatgaagagtcctggattga

SEQ ID NO: 3504630 - DNA, 25 bp, Homo sapien
gctttcattattaccaaatccgtta

SEQ ID NO: 3504631 - DNA, 25 bp, Homo sapien
accaccatagccactttagtttcga

SEQ ID NO: 3504632 - DNA, 25 bp, Homo sapien
agtttcgaggtttggcaaaatattg

SEQ ID NO: 3504633 - DNA, 25 bp, Homo sapien
gaaaccacctccataccaccatcaa

SEQ ID NO: 3504634 - DNA, 25 bp, Homo sapien
ttaccacacaatccatgagtgttcc

SEQ ID NO: 3504635 - DNA, 25 bp, Homo sapien
cattaccacacaatccatgagtgtt

SEQ ID NO: 3504636 - DNA, 25 bp, Homo sapien
ccacacaatccatgagtgttcccat

SEQ ID NO: 3504637 - DNA, 25 bp, Homo sapien
taccacacaatccatgagtgttccc

SEQ ID NO: 3504638 - DNA, 25 bp, Homo sapien
aactgtttgtcaccaggcaatttgg

SEQ ID NO: 3504639 - DNA, 25 bp, Homo sapien
cagtcaccatattcagtacatacta

SEQ ID NO: 3504640 - DNA, 25 bp, Homo sapien
tggtaattatcctctttaagcctca

SEQ ID NO: 3504641 - DNA, 25 bp, Homo sapien
cagacgggttagattgcagtcacca

SEQ ID NO: 3504642 - DNA, 25 bp, Homo sapien
tattcatcggtattactccagagcc

SEQ ID NO: 3504643 - DNA, 25 bp, Homo sapien
taaaagttaaaccagatgagtccgc

SEQ ID NO: 3504644 - DNA, 25 bp, Homo sapien
ggactttgtcagctaggaaactgga

SEQ ID NO: 3504645 - DNA, 25 bp, Homo sapien
tagttactcacatggactctggagc

SEQ ID NO: 3504646 - DNA, 25 bp, Homo sapien
tcttcaaccaggagccgagatttct

SEQ ID NO: 3504647 - DNA, 25 bp, Homo sapien
ctctgtcgggagcaaaggctagctt

SEQ ID NO: 3504648 - DNA, 25 bp, Homo sapien
taaactgattcgagggaccatgtgc

SEQ ID NO: 3504649 - DNA, 25 bp, Homo sapien
catggtactttggtaggtagcacac

SEQ ID NO: 3504650 - DNA, 25 bp, Homo sapien
taccccctgtggaaccataattctg

SEQ ID NO: 3504651 - DNA, 25 bp, Homo sapien
ccttcccaaagttagctctcttgct

SEQ ID NO: 3504652 - DNA, 25 bp, Homo sapien
agtcccgtgatcttctccatgtaca

SEQ ID NO: 3504653 - DNA, 25 bp, Homo sapien
taacagatgatcctagagtacagtc

SEQ ID NO: 3504654 - DNA, 25 bp, Homo sapien
taatcaattaggaagtgttccctgc

SEQ ID NO: 3504655 - DNA, 25 bp, Homo sapien
aatctttttgctggattgccagatt

SEQ ID NO: 3504656 - DNA, 25 bp, Homo sapien
tcctttatcagggtaggatgagcct

SEQ ID NO: 3504657 - DNA, 25 bp, Homo sapien
tttaaacctttagcagaattagcca

SEQ ID NO: 3504658 - DNA, 25 bp, Homo sapien
ttcaggctttgaactcgggcacagg

SEQ ID NO: 3504659 - DNA, 25 bp, Homo sapien
tgtttgtcatacacatggagggcct

SEQ ID NO: 3504660 - DNA, 25 bp, Homo sapien
caaaagtagactcgagcctcaggac

SEQ ID NO: 3504661 - DNA, 25 bp, Homo sapien
gaaggtaccggatcattatgcaagg

SEQ ID NO: 3504662 - DNA, 25 bp, Homo sapien
tatcatatagttaccgtgtgtcggg

SEQ ID NO: 3504663 - DNA, 25 bp, Homo sapien
ggtaaagtgattactacagccaagt

SEQ ID NO: 3504664 - DNA, 25 bp, Homo sapien
gcaaattcccagtagacaatacaat

SEQ ID NO: 3504665 - DNA, 25 bp, Homo sapien
caataaaaaagtacgataggctggg

SEQ ID NO: 3504666 - DNA, 25 bp, Homo sapien
ttacccagatgtgacaactgctctc

SEQ ID NO: 3504667 - DNA, 25 bp, Homo sapien
actgctctcttcatctcatctagtc

SEQ ID NO: 3504668 - DNA, 25 bp, Homo sapien
caactgctctcttcatctcatctag

SEQ ID NO: 3504669 - DNA, 25 bp, Homo sapien
tgctctcttcatctcatctagtctt

SEQ ID NO: 3504670 - DNA, 25 bp, Homo sapien
tcagcgtcagtaaggaaccaatgtt

SEQ ID NO: 3504671 - DNA, 25 bp, Homo sapien
ggtcatcctacatgaatagcattgg

SEQ ID NO: 3504672 - DNA, 25 bp, Homo sapien
gaggcttcatcggtttttagtgacg

SEQ ID NO: 3504673 - DNA, 25 bp, Homo sapien
agattgccatgctcctcagcgtcag

SEQ ID NO: 3504674 - DNA, 25 bp, Homo sapien
aacccatcatcactggttactagag

SEQ ID NO: 3504675 - DNA, 25 bp, Homo sapien
aaaacccatcatcactggttactag

SEQ ID NO: 3504676 - DNA, 25 bp, Homo sapien
aaaaaacccatcatcactggttact

SEQ ID NO: 3504677 - DNA, 25 bp, Homo sapien
acacaccagggccttcgatgggtgg

SEQ ID NO: 3504678 - DNA, 25 bp, Homo sapien
gttgctgtggggttagagccccaca

SEQ ID NO: 3504679 - DNA, 25 bp, Homo sapien
agaggttgctgtggggttagagccc

SEQ ID NO: 3504680 - DNA, 25 bp, Homo sapien
agcagggcactgaagcgagccattc

SEQ ID NO: 3504681 - DNA, 25 bp, Homo sapien
tcccctagagctttgagcagcaggg

SEQ ID NO: 3504682 - DNA, 25 bp, Homo sapien
gaggttcattactagggccaggagc

SEQ ID NO: 3504683 - DNA, 25 bp, Homo sapien
caataattcaagctagtccagactg

SEQ ID NO: 3504684 - DNA, 25 bp, Homo sapien
tgttcccagtgagtgaaagcctcaa

SEQ ID NO: 3504685 - DNA, 25 bp, Homo sapien
cactggtttctgcttgaggcctgct

SEQ ID NO: 3504686 - DNA, 25 bp, Homo sapien
gtacttattagatcaagacacttag

SEQ ID NO: 3504687 - DNA, 25 bp, Homo sapien
aaatccaatcctagtttccctgaag

SEQ ID NO: 3504688 - DNA, 25 bp, Homo sapien
gataaagactaatatgtagcaacac

SEQ ID NO: 3504689 - DNA, 25 bp, Homo sapien
gcacaacctgttccatgagacatta

SEQ ID NO: 3504690 - DNA, 25 bp, Homo sapien
tatacttcaggaatttattttttca

SEQ ID NO: 3504691 - DNA, 25 bp, Homo sapien
ggaatttattttttcacaatgatcc

SEQ ID NO: 3504692 - DNA, 25 bp, Homo sapien
aatttattttttcacaatgatccaa

SEQ ID NO: 3504693 - DNA, 25 bp, Homo sapien
tttattttttcacaatgatccaaag

SEQ ID NO: 3504694 - DNA, 25 bp, Homo sapien
cattgcgtaataaccgaaccagggt

SEQ ID NO: 3504695 - DNA, 25 bp, Homo sapien
ataggttattgttaactctagtcac

SEQ ID NO: 3504696 - DNA, 25 bp, Homo sapien
tgtatacattgcgtaataaccgaac

SEQ ID NO: 3504697 - DNA, 25 bp, Homo sapien
acatgtatacattgcgtaataaccg

SEQ ID NO: 3504698 - DNA, 25 bp, Homo sapien
taactcacaaataagggcatcgagg

SEQ ID NO: 3504699 - DNA, 25 bp, Homo sapien
gacacagggctaaggactcattcat

SEQ ID NO: 3504700 - DNA, 25 bp, Homo sapien
tacactgctggtatatggagagaca

SEQ ID NO: 3504701 - DNA, 25 bp, Homo sapien
catcgagggtaaactgacacagggc

SEQ ID NO: 3504702 - DNA, 25 bp, Homo sapien
catgaaatgttgtttggagccactg

SEQ ID NO: 3504703 - DNA, 25 bp, Homo sapien
taggaaaactccaacacgatcagga

SEQ ID NO: 3504704 - DNA, 25 bp, Homo sapien
ttatctgtggtttcggagagctcac

SEQ ID NO: 3504705 - DNA, 25 bp, Homo sapien
cccaggatgccagtacaataattga

SEQ ID NO: 3504706 - DNA, 25 bp, Homo sapien
tatttgtgatatgagagaaatcttg

SEQ ID NO: 3504707 - DNA, 25 bp, Homo sapien
atttgtgatatgagagaaatcttga

SEQ ID NO: 3504708 - DNA, 25 bp, Homo sapien
tttatttgtgatatgagagaaatct

SEQ ID NO: 3504709 - DNA, 25 bp, Homo sapien
taacaggtcagctaagggatataat

SEQ ID NO: 3504710 - DNA, 25 bp, Homo sapien
taataataatgataagccgcagggt

SEQ ID NO: 3504711 - DNA, 25 bp, Homo sapien
gagcctaatagagaacataaaattc

SEQ ID NO: 3504712 - DNA, 25 bp, Homo sapien
catgagcctaatagagaacataaaa

SEQ ID NO: 3504713 - DNA, 25 bp, Homo sapien
cagggtggcttatgataatgtgact

SEQ ID NO: 3504714 - DNA, 25 bp, Homo sapien
cagtagcgtcggacatctgtcagct

SEQ ID NO: 3504715 - DNA, 25 bp, Homo sapien
ccagtagcgtcggacatctgtcagc

SEQ ID NO: 3504716 - DNA, 25 bp, Homo sapien
cccagtagcgtcggacatctgtcag

SEQ ID NO: 3504717 - DNA, 25 bp, Homo sapien
aatacaaacaaaggagtcagcactg

SEQ ID NO: 3504718 - DNA, 25 bp, Homo sapien
gataaaaatgcacaatattgaatac

SEQ ID NO: 3504719 - DNA, 25 bp, Homo sapien
cctatggtagggcagtaaattgctg

SEQ ID NO: 3504720 - DNA, 25 bp, Homo sapien
tagggaaagagtaggtatgccctat

SEQ ID NO: 3504721 - DNA, 25 bp, Homo sapien
tccataaccctgttgttgatctagc

SEQ ID NO: 3504722 - DNA, 25 bp, Homo sapien
cctgttgttgatctagctctcctca

SEQ ID NO: 3504723 - DNA, 25 bp, Homo sapien
caccacttgaattccataaccctgt

SEQ ID NO: 3504724 - DNA, 25 bp, Homo sapien
tatttagcaccctaacaccacttga

SEQ ID NO: 3504725 - DNA, 25 bp, Homo sapien
taaacacttctagcattcctttcag

SEQ ID NO: 3504726 - DNA, 25 bp, Homo sapien
aaacacttctagcattcctttcaga

SEQ ID NO: 3504727 - DNA, 25 bp, Homo sapien
ctctaaacacttctagcattccttt

SEQ ID NO: 3504728 - DNA, 25 bp, Homo sapien
tctaaacacttctagcattcctttc

SEQ ID NO: 3504729 - DNA, 25 bp, Homo sapien
tcaggagctcgaaacactctccttt

SEQ ID NO: 3504730 - DNA, 25 bp, Homo sapien
agctcgaaacactctcctttgattt

SEQ ID NO: 3504731 - DNA, 25 bp, Homo sapien
caggagctcgaaacactctcctttg

SEQ ID NO: 3504732 - DNA, 25 bp, Homo sapien
ggagctcgaaacactctcctttgat

SEQ ID NO: 3504733 - DNA, 25 bp, Homo sapien
taatgggtggaaacatcatcgctat

SEQ ID NO: 3504734 - DNA, 25 bp, Homo sapien
tattactggcctgaatatcgtgtgg

SEQ ID NO: 3504735 - DNA, 25 bp, Homo sapien
gtttggagaggcctaagaccttcaa

SEQ ID NO: 3504736 - DNA, 25 bp, Homo sapien
tcgctatgtatgttgagttcccagg

SEQ ID NO: 3504737 - DNA, 25 bp, Homo sapien
catgtgggaattgtcccaatggaca

SEQ ID NO: 3504738 - DNA, 25 bp, Homo sapien
aacattcgaatgctgatttatgacc

SEQ ID NO: 3504739 - DNA, 25 bp, Homo sapien
cccaggacaattctaatggctataa

SEQ ID NO: 3504740 - DNA, 25 bp, Homo sapien
tcactgcacaaaaggaccatctctg

SEQ ID NO: 3504741 - DNA, 25 bp, Homo sapien
gaaacacttcttgctgggtagagac

SEQ ID NO: 3504742 - DNA, 25 bp, Homo sapien
gagtaagttatatgcaaccctggcc

SEQ ID NO: 3504743 - DNA, 25 bp, Homo sapien
gacagaagccttactgccttgaggg

SEQ ID NO: 3504744 - DNA, 25 bp, Homo sapien
gattcatcaggagacgacagaagcc

SEQ ID NO: 3504745 - DNA, 25 bp, Homo sapien
gttggagctagaagataaagacttc

SEQ ID NO: 3504746 - DNA, 25 bp, Homo sapien
gaaacaagatagaataccacagctc

SEQ ID NO: 3504747 - DNA, 25 bp, Homo sapien
gcaccactacatactagcatgggca

SEQ ID NO: 3504748 - DNA, 25 bp, Homo sapien
caagtgaccccagatgttggagcta

SEQ ID NO: 3504749 - DNA, 25 bp, Homo sapien
tcataataaacctaaacaaaatgga

SEQ ID NO: 3504750 - DNA, 25 bp, Homo sapien
caaaggaagccagttaaggatgcag

SEQ ID NO: 3504751 - DNA, 25 bp, Homo sapien
tgtatcttcacctaacaacagggct

SEQ ID NO: 3504752 - DNA, 25 bp, Homo sapien
gaagaagattcggttatcactacct

SEQ ID NO: 3504753 - DNA, 25 bp, Homo sapien
gcaagaactgctatgtgagaataac

SEQ ID NO: 3504754 - DNA, 25 bp, Homo sapien
gaatctctgcccgaaacactgagag

SEQ ID NO: 3504755 - DNA, 25 bp, Homo sapien
cactgaacgtagagcctgagacaag

SEQ ID NO: 3504756 - DNA, 25 bp, Homo sapien
ggtgatttacctgaccccaggaagc

SEQ ID NO: 3504757 - DNA, 25 bp, Homo sapien
tagacacatcctaaggtgccctggg

SEQ ID NO: 3504758 - DNA, 25 bp, Homo sapien
aaattttcacaacccactcatctga

SEQ ID NO: 3504759 - DNA, 25 bp, Homo sapien
aagagcccgcatcaccaaggcaatc

SEQ ID NO: 3504760 - DNA, 25 bp, Homo sapien
gaaaattttcacaacccactcatct

SEQ ID NO: 3504761 - DNA, 25 bp, Homo sapien
ttcacaacccactcatctgacaaag

SEQ ID NO: 3504762 - DNA, 25 bp, Homo sapien
gggattatctcttgctacttctaca

SEQ ID NO: 3504763 - DNA, 25 bp, Homo sapien
tataacttcagcaattgattcagaa

SEQ ID NO: 3504764 - DNA, 25 bp, Homo sapien
tcatctccactacgtcaaatttttc

SEQ ID NO: 3504765 - DNA, 25 bp, Homo sapien
tcagaaaagcggtcctgcagagaac

SEQ ID NO: 3504766 - DNA, 25 bp, Homo sapien
caggatgtctctcagttgctcaaaa

SEQ ID NO: 3504767 - DNA, 25 bp, Homo sapien
cctgcagccgatgctccagatctga

SEQ ID NO: 3504768 - DNA, 25 bp, Homo sapien
tcagagttcgtaaggcttttcagaa

SEQ ID NO: 3504769 - DNA, 25 bp, Homo sapien
gccgatgctccagatctgagatgag

SEQ ID NO: 3504770 - DNA, 25 bp, Homo sapien
gacgttggttttgtcatactgtatt

SEQ ID NO: 3504771 - DNA, 25 bp, Homo sapien
ttcagagataagagaagagaaaggg

SEQ ID NO: 3504772 - DNA, 25 bp, Homo sapien
cagagataagagaagagaaaggggc

SEQ ID NO: 3504773 - DNA, 25 bp, Homo sapien
cttcagagataagagaagagaaagg

SEQ ID NO: 3504774 - DNA, 25 bp, Homo sapien
agagataagagaagagaaaggggca

SEQ ID NO: 3504775 - DNA, 25 bp, Homo sapien
aaagagctccctactgtgttcactg

SEQ ID NO: 3504776 - DNA, 25 bp, Homo sapien
gagtcacggactcaaaaagtagcac

SEQ ID NO: 3504777 - DNA, 25 bp, Homo sapien
gagtaggtcttaggaaagctgcctt

SEQ ID NO: 3504778 - DNA, 25 bp, Homo sapien
tgtcttccccaagtagagtcacgga

SEQ ID NO: 3504779 - DNA, 25 bp, Homo sapien
tctgatgtcagcttctaactcttca

SEQ ID NO: 3504780 - DNA, 25 bp, Homo sapien
tgtcagcttctaactcttcagcttc

SEQ ID NO: 3504781 - DNA, 25 bp, Homo sapien
tgcctcagcatctccagagctgcct

SEQ ID NO: 3504782 - DNA, 25 bp, Homo sapien
tcttctctgatgtcagcttctaact

SEQ ID NO: 3504783 - DNA, 25 bp, Homo sapien
tcaggtctatcatgacaaggcagtt

SEQ ID NO: 3504784 - DNA, 25 bp, Homo sapien
aagctatgaggttttccagcaccta

SEQ ID NO: 3504785 - DNA, 25 bp, Homo sapien
gaatgtgctccctacatctcaggta

SEQ ID NO: 3504786 - DNA, 25 bp, Homo sapien
aaataatcccgggtctcaggtctat

SEQ ID NO: 3504787 - DNA, 25 bp, Homo sapien
cccgggcaacctcctctgtgaggaa

SEQ ID NO: 3504788 - DNA, 25 bp, Homo sapien
gccgattaggccgtatgttctcagg

SEQ ID NO: 3504789 - DNA, 25 bp, Homo sapien
gctggtaactgatccggcacacagg

SEQ ID NO: 3504790 - DNA, 25 bp, Homo sapien
ctccactatgttggctacatgccga

SEQ ID NO: 3504791 - DNA, 25 bp, Homo sapien
gaagtttctctccatggcgtgcaca

SEQ ID NO: 3504792 - DNA, 25 bp, Homo sapien
attccactgctcctgcctgtcctgg

SEQ ID NO: 3504793 - DNA, 25 bp, Homo sapien
agtagctattccactgctcctgcct

SEQ ID NO: 3504794 - DNA, 25 bp, Homo sapien
tccactgctcctgcctgtcctggct

SEQ ID NO: 3504795 - DNA, 25 bp, Homo sapien
cactgctcctgcctgtcctggctgc

SEQ ID NO: 3504796 - DNA, 25 bp, Homo sapien
gaagacgtggttaggattcactcac

SEQ ID NO: 3504797 - DNA, 25 bp, Homo sapien
caaaatcactcaatacaccttcaga

SEQ ID NO: 3504798 - DNA, 25 bp, Homo sapien
accagtgcagaagtggtgattctgg

SEQ ID NO: 3504799 - DNA, 25 bp, Homo sapien
tgtcccaaagacttcctacttctgc

SEQ ID NO: 3504800 - DNA, 25 bp, Homo sapien
gcatttctccacgtagggcctggtg

SEQ ID NO: 3504801 - DNA, 25 bp, Homo sapien
tctgaatgaatcagccgggccgtgt

SEQ ID NO: 3504802 - DNA, 25 bp, Homo sapien
cacgggcctgatctgcacaaaggaa

SEQ ID NO: 3504803 - DNA, 25 bp, Homo sapien
tagaggaaccgcaggaaattcttgc

SEQ ID NO: 3504804 - DNA, 25 bp, Homo sapien
tgaactgtctcaggaacaccaaggt

SEQ ID NO: 3504805 - DNA, 25 bp, Homo sapien
tcaaggaatgtcaggtaggctccaa

SEQ ID NO: 3504806 - DNA, 25 bp, Homo sapien
gtcaccatagaacggagagccctgt

SEQ ID NO: 3504807 - DNA, 25 bp, Homo sapien
cattccgcataaacgaggtggtcaa

SEQ ID NO: 3504808 - DNA, 25 bp, Homo sapien
tgtgttggtttaccagtgacacccc

SEQ ID NO: 3504809 - DNA, 25 bp, Homo sapien
aaatttgaggaaggcacgatttcac

SEQ ID NO: 3504810 - DNA, 25 bp, Homo sapien
tatccacgttatctagcaaagtaca

SEQ ID NO: 3504811 - DNA, 25 bp, Homo sapien
gaaacttgtcaactcatatccacgt

SEQ ID NO: 3504812 - DNA, 25 bp, Homo sapien
tgtacagtattttacccatgcaggt

SEQ ID NO: 3504813 - DNA, 25 bp, Homo sapien
tgctcgtgtaggacctaggccctct

SEQ ID NO: 3504814 - DNA, 25 bp, Homo sapien
tactatggttgttgcctcttcaagg

SEQ ID NO: 3504815 - DNA, 25 bp, Homo sapien
cagagtagggaaggacctatttcca

SEQ ID NO: 3504816 - DNA, 25 bp, Homo sapien
caatacacccctcaggaaggtggca

SEQ ID NO: 3504817 - DNA, 25 bp, Homo sapien
taacgcaaagggtagcaaatggcta

SEQ ID NO: 3504818 - DNA, 25 bp, Homo sapien
acatgtggtcgcagtacgtatggga

SEQ ID NO: 3504819 - DNA, 25 bp, Homo sapien
ggcaaacgcttaaccaagaatggga

SEQ ID NO: 3504820 - DNA, 25 bp, Homo sapien
ccagaccaggtattccattaagaat

SEQ ID NO: 3504821 - DNA, 25 bp, Homo sapien
catacatgtactctttccagaccag

SEQ ID NO: 3504822 - DNA, 25 bp, Homo sapien
agtgggagggagatccatacatgta

SEQ ID NO: 3504823 - DNA, 25 bp, Homo sapien
catcggatgatgtaaggactcctca

SEQ ID NO: 3504824 - DNA, 25 bp, Homo sapien
aagaaagaacctaatgacactttct

SEQ ID NO: 3504825 - DNA, 25 bp, Homo sapien
gttatgagaattgtcctttccctta

SEQ ID NO: 3504826 - DNA, 25 bp, Homo sapien
agaacctaatgacactttctcgtac

SEQ ID NO: 3504827 - DNA, 25 bp, Homo sapien
aagttatgagaattgtcctttccct

SEQ ID NO: 3504828 - DNA, 25 bp, Homo sapien
ggataacaagcatcacacccctaag

SEQ ID NO: 3504829 - DNA, 25 bp, Homo sapien
accatagatggcgttaaccctgaca

SEQ ID NO: 3504830 - DNA, 25 bp, Homo sapien
tgacgttgcccttgcagtatggaag

SEQ ID NO: 3504831 - DNA, 25 bp, Homo sapien
ttagtgaggatggtggcataacgca

SEQ ID NO: 3504832 - DNA, 25 bp, Homo sapien
tgaggtacataaggccgaagttccc

SEQ ID NO: 3504833 - DNA, 25 bp, Homo sapien
tgggaaggagatccacaaatgcaca

SEQ ID NO: 3504834 - DNA, 25 bp, Homo sapien
aaccagggatgccatttaggatgaa

SEQ ID NO: 3504835 - DNA, 25 bp, Homo sapien
cataggtctgtgtaaggcctcatca

SEQ ID NO: 3504836 - DNA, 25 bp, Homo sapien
gagttaggctggtgccatttagaaa

SEQ ID NO: 3504837 - DNA, 25 bp, Homo sapien
ctggagttaggctggtgccatttag

SEQ ID NO: 3504838 - DNA, 25 bp, Homo sapien
agttaggctggtgccatttagaaat

SEQ ID NO: 3504839 - DNA, 25 bp, Homo sapien
ggagttaggctggtgccatttagaa

SEQ ID NO: 3504840 - DNA, 25 bp, Homo sapien
ggccaataaatgaccctgcaatggt

SEQ ID NO: 3504841 - DNA, 25 bp, Homo sapien
taagcactgtcaattaggtccttct

SEQ ID NO: 3504842 - DNA, 25 bp, Homo sapien
gtattctcattgctacactggccag

SEQ ID NO: 3504843 - DNA, 25 bp, Homo sapien
attccttcaggcacaacaatattga

SEQ ID NO: 3504844 - DNA, 25 bp, Homo sapien
atttgtggggattctgtccatcgta

SEQ ID NO: 3504845 - DNA, 25 bp, Homo sapien
gggattctgtccatcgtagctgctt

SEQ ID NO: 3504846 - DNA, 25 bp, Homo sapien
tttgtggggattctgtccatcgtag

SEQ ID NO: 3504847 - DNA, 25 bp, Homo sapien
attctgtccatcgtagctgcttgtg

SEQ ID NO: 3504848 - DNA, 25 bp, Homo sapien
gccttcagtacctgtacagcacata

SEQ ID NO: 3504849 - DNA, 25 bp, Homo sapien
ttttcatcacttatgtcccagcctt

SEQ ID NO: 3504850 - DNA, 25 bp, Homo sapien
ccatgattatccgtgctgtagtgaa

SEQ ID NO: 3504851 - DNA, 25 bp, Homo sapien
caacttcttcactcaccgctttggg

SEQ ID NO: 3504852 - DNA, 25 bp, Homo sapien
tctttgtggttcagacttggaaggg

SEQ ID NO: 3504853 - DNA, 25 bp, Homo sapien
tcaattttggaacttactatcattt

SEQ ID NO: 3504854 - DNA, 25 bp, Homo sapien
tagatgagttgggaaggactccctc

SEQ ID NO: 3504855 - DNA, 25 bp, Homo sapien
ctatggggtcagtagtaatatttcc

SEQ ID NO: 3504856 - DNA, 25 bp, Homo sapien
cactgtctccctaatatgtttggtt

SEQ ID NO: 3504857 - DNA, 25 bp, Homo sapien
ggttctgaccccatagattacagga

SEQ ID NO: 3504858 - DNA, 25 bp, Homo sapien
tggttctgaccccatagattacagg

SEQ ID NO: 3504859 - DNA, 25 bp, Homo sapien
ctccctaatatgtttggttctgacc

SEQ ID NO: 3504860 - DNA, 25 bp, Homo sapien
ggaatggtggccgtagacaagctca

SEQ ID NO: 3504861 - DNA, 25 bp, Homo sapien
gaatgaccatgtacaagctcctcag

SEQ ID NO: 3504862 - DNA, 25 bp, Homo sapien
aactgggtgtcgttagctataggca

SEQ ID NO: 3504863 - DNA, 25 bp, Homo sapien
tatgagggatgatacgatgtccaca

SEQ ID NO: 3504864 - DNA, 25 bp, Homo sapien
gtgttcttcctgcaattatcttcct

SEQ ID NO: 3504865 - DNA, 25 bp, Homo sapien
atgaaactgctaatagccacacaat

SEQ ID NO: 3504866 - DNA, 25 bp, Homo sapien
tgaaactgctaatagccacacaatt

SEQ ID NO: 3504867 - DNA, 25 bp, Homo sapien
aaggtgttcttcctgcaattatctt

SEQ ID NO: 3504868 - DNA, 25 bp, Homo sapien
tagtgattggtcttgagaaaaatcc

SEQ ID NO: 3504869 - DNA, 25 bp, Homo sapien
tcagcactctctctcgaatctgctt

SEQ ID NO: 3504870 - DNA, 25 bp, Homo sapien
tgtcctgactccatagattacagga

SEQ ID NO: 3504871 - DNA, 25 bp, Homo sapien
tgctttgtcctgactccatagatta

SEQ ID NO: 3504872 - DNA, 25 bp, Homo sapien
tctggatcacaaacaagagagcagt

SEQ ID NO: 3504873 - DNA, 25 bp, Homo sapien
gcagtgtttcccaggagtgcaacaa

SEQ ID NO: 3504874 - DNA, 25 bp, Homo sapien
caagagagatatgttgccaaggcca

SEQ ID NO: 3504875 - DNA, 25 bp, Homo sapien
gaacaaccatgtacaggctcctcag

SEQ ID NO: 3504876 - DNA, 25 bp, Homo sapien
atggaactgggtgtgattagacgta

SEQ ID NO: 3504877 - DNA, 25 bp, Homo sapien
gctgggcacaccagcgacgattata

SEQ ID NO: 3504878 - DNA, 25 bp, Homo sapien
tgtgattagacgtagacattcttcc

SEQ ID NO: 3504879 - DNA, 25 bp, Homo sapien
cacaccagcgacgattataatattc

SEQ ID NO: 3504880 - DNA, 25 bp, Homo sapien
tcttggaggcgttgatgtagtatag

SEQ ID NO: 3504881 - DNA, 25 bp, Homo sapien
tatgccaataggagatatttatact

SEQ ID NO: 3504882 - DNA, 25 bp, Homo sapien
aaatctctacaaaacatcccttggc

SEQ ID NO: 3504883 - DNA, 25 bp, Homo sapien
cccctgggatgggtaccatagtatc

SEQ ID NO: 3504884 - DNA, 25 bp, Homo sapien
taagtctcgatgaattgcccgacgg

SEQ ID NO: 3504885 - DNA, 25 bp, Homo sapien
tctcacattcatggtgcgggtaagg

SEQ ID NO: 3504886 - DNA, 25 bp, Homo sapien
gattggaagctgcacaacgctggct

SEQ ID NO: 3504887 - DNA, 25 bp, Homo sapien
ttttaaagccatggccgctagcagt

SEQ ID NO: 3504888 - DNA, 25 bp, Homo sapien
caatacccctgctagatcagccgga

SEQ ID NO: 3504889 - DNA, 25 bp, Homo sapien
gctttggtctcaccaagattgggaa

SEQ ID NO: 3504890 - DNA, 25 bp, Homo sapien
atcagccggactgaaccgccaatgg

SEQ ID NO: 3504891 - DNA, 25 bp, Homo sapien
ccaatggcacagttatggaagagcc

SEQ ID NO: 3504892 - DNA, 25 bp, Homo sapien
gacaatttccctagcacatttactg

SEQ ID NO: 3504893 - DNA, 25 bp, Homo sapien
tgtgtcatgtttccagcaatgccat

SEQ ID NO: 3504894 - DNA, 25 bp, Homo sapien
tttaccaaagatcagttcgttgtag

SEQ ID NO: 3504895 - DNA, 25 bp, Homo sapien
tacccagttgattgtttttgttgac

SEQ ID NO: 3504896 - DNA, 25 bp, Homo sapien
cggcacagaacaggcgggccttaga

SEQ ID NO: 3504897 - DNA, 25 bp, Homo sapien
gcaacagatgacttcggtagcacag

SEQ ID NO: 3504898 - DNA, 25 bp, Homo sapien
tgcagttggccattgaggcatcggc

SEQ ID NO: 3504899 - DNA, 25 bp, Homo sapien
gtagcacaggtcacggcacagaaca

SEQ ID NO: 3504900 - DNA, 25 bp, Homo sapien
ggtggcactccgtgttccttcacaa

SEQ ID NO: 3504901 - DNA, 25 bp, Homo sapien
gactccgctgggatgtggcgtctca

SEQ ID NO: 3504902 - DNA, 25 bp, Homo sapien
caaggtttacaagaagcgccaagct

SEQ ID NO: 3504903 - DNA, 25 bp, Homo sapien
tcctgaagagaagcgtccacagctt

SEQ ID NO: 3504904 - DNA, 25 bp, Homo sapien
aatccaacccaacctctatattagg

SEQ ID NO: 3504905 - DNA, 25 bp, Homo sapien
tcttgggtctgaaggaaccctagaa

SEQ ID NO: 3504906 - DNA, 25 bp, Homo sapien
cccttgtttgtaagtggtgataatg

SEQ ID NO: 3504907 - DNA, 25 bp, Homo sapien
taacatatgggcagttaagaacctg

SEQ ID NO: 3504908 - DNA, 25 bp, Homo sapien
tcagtactactctagaaattttgct

SEQ ID NO: 3504909 - DNA, 25 bp, Homo sapien
ttttaattcagactacccagattcc

SEQ ID NO: 3504910 - DNA, 25 bp, Homo sapien
gctttgaaagtcagatatggataga

SEQ ID NO: 3504911 - DNA, 25 bp, Homo sapien
gcattcaatagccacgtgaggctag

SEQ ID NO: 3504912 - DNA, 25 bp, Homo sapien
taatgcatggataattgttcaaatt

SEQ ID NO: 3504913 - DNA, 25 bp, Homo sapien
gcatggataattgttcaaattatcc

SEQ ID NO: 3504914 - DNA, 25 bp, Homo sapien
ttacaacctcctcagcaggttctgg

SEQ ID NO: 3504915 - DNA, 25 bp, Homo sapien
gttctggattccctgcttgatctcc

SEQ ID NO: 3504916 - DNA, 25 bp, Homo sapien
acctcctcagcaggttctggattcc

SEQ ID NO: 3504917 - DNA, 25 bp, Homo sapien
caacctcctcagcaggttctggatt

SEQ ID NO: 3504918 - DNA, 25 bp, Homo sapien
cacagacacgttagtacagatgcag

SEQ ID NO: 3504919 - DNA, 25 bp, Homo sapien
cattcctggccacaacaaagatggc

SEQ ID NO: 3504920 - DNA, 25 bp, Homo sapien
agtgggaaccacaagtacctagagc

SEQ ID NO: 3504921 - DNA, 25 bp, Homo sapien
gcagccctagcgacaaattgatcag

SEQ ID NO: 3504922 - DNA, 25 bp, Homo sapien
cagggaagctgattgatctgaggtc

SEQ ID NO: 3504923 - DNA, 25 bp, Homo sapien
ccagatagatggtgatcagaagggt

SEQ ID NO: 3504924 - DNA, 25 bp, Homo sapien
tcagaagggtggcattggcccccat

SEQ ID NO: 3504925 - DNA, 25 bp, Homo sapien
ggtgcagagaggcttccagatagat

SEQ ID NO: 3504926 - DNA, 25 bp, Homo sapien
gtttgataagacacaggaattagaa

SEQ ID NO: 3504927 - DNA, 25 bp, Homo sapien
aatgaggaagaattcaaagactggg

SEQ ID NO: 3504928 - DNA, 25 bp, Homo sapien
aagactggggaagtggagttgttgc

SEQ ID NO: 3504929 - DNA, 25 bp, Homo sapien
aattgtgtttgataagacacaggaa

SEQ ID NO: 3504930 - DNA, 25 bp, Homo sapien
gattgagcgcaggtggcatgaggag

SEQ ID NO: 3504931 - DNA, 25 bp, Homo sapien
tgaggagataccatgtggccagaag

SEQ ID NO: 3504932 - DNA, 25 bp, Homo sapien
agaccaggatgacacaaatatgaga

SEQ ID NO: 3504933 - DNA, 25 bp, Homo sapien
gctggcggatctgctgagtcttcac

SEQ ID NO: 3504934 - DNA, 25 bp, Homo sapien
acccaatctcgtgggcatgaaccag

SEQ ID NO: 3504935 - DNA, 25 bp, Homo sapien
atctggatcaggcagacgatgtacc

SEQ ID NO: 3504936 - DNA, 25 bp, Homo sapien
gagaatggtaacattgcccactaaa

SEQ ID NO: 3504937 - DNA, 25 bp, Homo sapien
gacgatgtacccaatctcgtgggca

SEQ ID NO: 3504938 - DNA, 25 bp, Homo sapien
agaaggctgggatagcctccagctt

SEQ ID NO: 3504939 - DNA, 25 bp, Homo sapien
gagaaaagaaggctgggatagcctc

SEQ ID NO: 3504940 - DNA, 25 bp, Homo sapien
aggagaaaagaaggctgggatagcc

SEQ ID NO: 3504941 - DNA, 25 bp, Homo sapien
ctgggatagcctccagcttgaattg

SEQ ID NO: 3504942 - DNA, 25 bp, Homo sapien
agcattatcaatggcttggagagga

SEQ ID NO: 3504943 - DNA, 25 bp, Homo sapien
gcattatcaatggcttggagaggaa

SEQ ID NO: 3504944 - DNA, 25 bp, Homo sapien
attatcaatggcttggagaggaaag

SEQ ID NO: 3504945 - DNA, 25 bp, Homo sapien
cattatcaatggcttggagaggaaa

SEQ ID NO: 3504946 - DNA, 25 bp, Homo sapien
cttaagtgatgctctgggtgcttca

SEQ ID NO: 3504947 - DNA, 25 bp, Homo sapien
ttaagtgatgctctgggtgcttcat

SEQ ID NO: 3504948 - DNA, 25 bp, Homo sapien
cctgtctgcttaggtctctgccagc

SEQ ID NO: 3504949 - DNA, 25 bp, Homo sapien
tgcctgtctgcttaggtctctgcca

SEQ ID NO: 3504950 - DNA, 25 bp, Homo sapien
gcctgtctgcttaggtctctgccag

SEQ ID NO: 3504951 - DNA, 25 bp, Homo sapien
cctcaggctgttctctaagctggcc

SEQ ID NO: 3504952 - DNA, 25 bp, Homo sapien
ttcagatttctcatccagtccaggt

SEQ ID NO: 3504953 - DNA, 25 bp, Homo sapien
cagggcatagcaggcctccacctcc

SEQ ID NO: 3504954 - DNA, 25 bp, Homo sapien
ctgcagggcatagcaggcctccacc

SEQ ID NO: 3504955 - DNA, 25 bp, Homo sapien
ctcctcaatctgctgagaccagtac

SEQ ID NO: 3504956 - DNA, 25 bp, Homo sapien
ttggcggactgcatgtgaccactgt

SEQ ID NO: 3504957 - DNA, 25 bp, Homo sapien
ggtgctctcctcaatctgctgagac

SEQ ID NO: 3504958 - DNA, 25 bp, Homo sapien
cttggcggactgcatgtgaccactg

SEQ ID NO: 3504959 - DNA, 25 bp, Homo sapien
agccagctcgtcgtattgttcctga

SEQ ID NO: 3504960 - DNA, 25 bp, Homo sapien
cgtcgtattgttcctgatgtctgcc

SEQ ID NO: 3504961 - DNA, 25 bp, Homo sapien
ccagccagctcgtcgtattgttcct

SEQ ID NO: 3504962 - DNA, 25 bp, Homo sapien
agctcgtcgtattgttcctgatgtc

SEQ ID NO: 3504963 - DNA, 25 bp, Homo sapien
agatctgagccctctggtcctcaaa

SEQ ID NO: 3504964 - DNA, 25 bp, Homo sapien
acttccttttcatggttcttcatga

SEQ ID NO: 3504965 - DNA, 25 bp, Homo sapien
atttgcagaatgatgcgggcattgt

SEQ ID NO: 3504966 - DNA, 25 bp, Homo sapien
atttcgctcttcacagactggcaca

SEQ ID NO: 3504967 - DNA, 25 bp, Homo sapien
aagtaatgtccccagtctacctggg

SEQ ID NO: 3504968 - DNA, 25 bp, Homo sapien
tctacctggggtcccttcctctcca

SEQ ID NO: 3504969 - DNA, 25 bp, Homo sapien
ttgaagtaatgtccccagtctacct

SEQ ID NO: 3504970 - DNA, 25 bp, Homo sapien
cttgaagtaatgtccccagtctacc

SEQ ID NO: 3504971 - DNA, 25 bp, Homo sapien
gcagtcattcaggctttgcatggtc

SEQ ID NO: 3504972 - DNA, 25 bp, Homo sapien
gtccgggtaggaggccaggcagtca

SEQ ID NO: 3504973 - DNA, 25 bp, Homo sapien
tctgtccgggtaggaggccaggcag

SEQ ID NO: 3504974 - DNA, 25 bp, Homo sapien
cgggtaggaggccaggcagtcattc

SEQ ID NO: 3504975 - DNA, 25 bp, Homo sapien
gcctcccattcctgccagacccccg

SEQ ID NO: 3504976 - DNA, 25 bp, Homo sapien
ccattcctgccagacccccggccat

SEQ ID NO: 3504977 - DNA, 25 bp, Homo sapien
tcccattcctgccagacccccggcc

SEQ ID NO: 3504978 - DNA, 25 bp, Homo sapien
atgcctcccattcctgccagacccc

SEQ ID NO: 3504979 - DNA, 25 bp, Homo sapien
gcactgctgactggccgggtgccat

SEQ ID NO: 3504980 - DNA, 25 bp, Homo sapien
gaacatggagatccgggaacctgag

SEQ ID NO: 3504981 - DNA, 25 bp, Homo sapien
tggtggaccagaacatggagatccg

SEQ ID NO: 3504982 - DNA, 25 bp, Homo sapien
ctggaagctggtggaccagaacatg

SEQ ID NO: 3504983 - DNA, 25 bp, Homo sapien
tggttctcacaccataaacaatggg

SEQ ID NO: 3504984 - DNA, 25 bp, Homo sapien
aacaatggggttcagagctggggga

SEQ ID NO: 3504985 - DNA, 25 bp, Homo sapien
tcttcctggccaggttagtgatgac

SEQ ID NO: 3504986 - DNA, 25 bp, Homo sapien
cttggttctcacaccataaacaatg

SEQ ID NO: 3504987 - DNA, 25 bp, Homo sapien
aggatgaggatgaagtgggaaccac

SEQ ID NO: 3504988 - DNA, 25 bp, Homo sapien
ggatgaggatgaagtgggaaccaca

SEQ ID NO: 3504989 - DNA, 25 bp, Homo sapien
gatgaggatgaagtgggaaccacac

SEQ ID NO: 3504990 - DNA, 25 bp, Homo sapien
tgggaagctgatcgacctgaggtca

SEQ ID NO: 3504991 - DNA, 25 bp, Homo sapien
gataagatcagagcccaacagagtc

SEQ ID NO: 3504992 - DNA, 25 bp, Homo sapien
gccacaaactggtagagctgattga

SEQ ID NO: 3504993 - DNA, 25 bp, Homo sapien
gcattccgggctataacaaagacca

SEQ ID NO: 3504994 - DNA, 25 bp, Homo sapien
ttgctgggagatgccatgtaaagtt

SEQ ID NO: 3504995 - DNA, 25 bp, Homo sapien
tgccatgtaaagtttcctgatcaat

SEQ ID NO: 3504996 - DNA, 25 bp, Homo sapien
tctggagacccagtgtaccttaaaa

SEQ ID NO: 3504997 - DNA, 25 bp, Homo sapien
gggcagtggagtcattgctgggaga

SEQ ID NO: 3504998 - DNA, 25 bp, Homo sapien
cattaggggctactgcatcccaagt

SEQ ID NO: 3504999 - DNA, 25 bp, Homo sapien
gcattaggggctactgcatcccaag

SEQ ID NO: 3505000 - DNA, 25 bp, Homo sapien
attaggggctactgcatcccaagtt

SEQ ID NO: 3505001 - DNA, 25 bp, Homo sapien
ctccctctctgcagtaacttctgaa

SEQ ID NO: 3505002 - DNA, 25 bp, Homo sapien
gcagtaacttctgaattccctgttt

SEQ ID NO: 3505003 - DNA, 25 bp, Homo sapien
ctctctgcagtaacttctgaattcc

SEQ ID NO: 3505004 - DNA, 25 bp, Homo sapien
tccctgttttatctctttggtccga

SEQ ID NO: 3505005 - DNA, 25 bp, Homo sapien
cacaatagggttcaatgcaggagga

SEQ ID NO: 3505006 - DNA, 25 bp, Homo sapien
tgggtgcagtaagaagcgcattccg

SEQ ID NO: 3505007 - DNA, 25 bp, Homo sapien
ttagtgatgatggatgggtaccgca

SEQ ID NO: 3505008 - DNA, 25 bp, Homo sapien
gaaggacgttcagcaggatcaggat

SEQ ID NO: 3505009 - DNA, 25 bp, Homo sapien
cctaagatcataccagaagatggcc

SEQ ID NO: 3505010 - DNA, 25 bp, Homo sapien
gatcgacctaagatcataccagaag

SEQ ID NO: 3505011 - DNA, 25 bp, Homo sapien
ggcagggaagctgatcgacctaaga

SEQ ID NO: 3505012 - DNA, 25 bp, Homo sapien
agggtggtgttagctcccatggcca

SEQ ID NO: 3505013 - DNA, 25 bp, Homo sapien
gctgggtgacgccataggctgaatc

SEQ ID NO: 3505014 - DNA, 25 bp, Homo sapien
tggagctgttgctgggtgacgccat

SEQ ID NO: 3505015 - DNA, 25 bp, Homo sapien
ctgttgctgggtgacgccataggct

SEQ ID NO: 3505016 - DNA, 25 bp, Homo sapien
gacgccataggctgaatcatgagct

SEQ ID NO: 3505017 - DNA, 25 bp, Homo sapien
aggatgaggataaagtgggagccac

SEQ ID NO: 3505018 - DNA, 25 bp, Homo sapien
tcaacaccacaaccagcaggtgctg

SEQ ID NO: 3505019 - DNA, 25 bp, Homo sapien
gaagaggatgaggataaagtgggag

SEQ ID NO: 3505020 - DNA, 25 bp, Homo sapien
agaggatgaggataaagtgggagcc

SEQ ID NO: 3505021 - DNA, 25 bp, Homo sapien
atgtgctcagggccttcactgccac

SEQ ID NO: 3505022 - DNA, 25 bp, Homo sapien
agggccttcactgccaccccctcca

SEQ ID NO: 3505023 - DNA, 25 bp, Homo sapien
gtgctcagggccttcactgccaccc

SEQ ID NO: 3505024 - DNA, 25 bp, Homo sapien
ctcagggccttcactgccaccccct

SEQ ID NO: 3505025 - DNA, 25 bp, Homo sapien
tccaaccagccacaaattggtagag

SEQ ID NO: 3505026 - DNA, 25 bp, Homo sapien
gatgaaatccgagcccaggaaggtc

SEQ ID NO: 3505027 - DNA, 25 bp, Homo sapien
gaagatgaggatgaaatccgagccc

SEQ ID NO: 3505028 - DNA, 25 bp, Homo sapien
gagcctggacacagacaggttggca

SEQ ID NO: 3505029 - DNA, 25 bp, Homo sapien
tttggccacaaattgatgagtgatg

SEQ ID NO: 3505030 - DNA, 25 bp, Homo sapien
tttcctacagtaatggagctgggca

SEQ ID NO: 3505031 - DNA, 25 bp, Homo sapien
tttttcctacagtaatggagctggg

SEQ ID NO: 3505032 - DNA, 25 bp, Homo sapien
ttttcctacagtaatggagctgggc

SEQ ID NO: 3505033 - DNA, 25 bp, Homo sapien
acggtgaggcagagcacgatgtcca

SEQ ID NO: 3505034 - DNA, 25 bp, Homo sapien
accttggggatgacggtgaggcaga

SEQ ID NO: 3505035 - DNA, 25 bp, Homo sapien
cggtgaggcagagcacgatgtccag

SEQ ID NO: 3505036 - DNA, 25 bp, Homo sapien
tggccaggaccttggggatgacggt

SEQ ID NO: 3505037 - DNA, 25 bp, Homo sapien
aggtagtacaggggcaggtgcagag

SEQ ID NO: 3505038 - DNA, 25 bp, Homo sapien
ctgggcaggtagtacaggggcaggt

SEQ ID NO: 3505039 - DNA, 25 bp, Homo sapien
gtagtacaggggcaggtgcagagag

SEQ ID NO: 3505040 - DNA, 25 bp, Homo sapien
agtacaggggcaggtgcagagaggc

SEQ ID NO: 3505041 - DNA, 25 bp, Homo sapien
taagacacatgaattaggtcaatgg

SEQ ID NO: 3505042 - DNA, 25 bp, Homo sapien
aaaaatgtatgatatactcccaatc

SEQ ID NO: 3505043 - DNA, 25 bp, Homo sapien
cctggatttttgtatgataagacac

SEQ ID NO: 3505044 - DNA, 25 bp, Homo sapien
gacagtggagtcatcgctgggtaat

SEQ ID NO: 3505045 - DNA, 25 bp, Homo sapien
gaatggtaacattgcccactagagc

SEQ ID NO: 3505046 - DNA, 25 bp, Homo sapien
cattcccgggatatagaagaccagg

SEQ ID NO: 3505047 - DNA, 25 bp, Homo sapien
caggtggcacaaggcgatacagtat

SEQ ID NO: 3505048 - DNA, 25 bp, Homo sapien
cagacagtgtaaccaatctcttggg

SEQ ID NO: 3505049 - DNA, 25 bp, Homo sapien
agcctccagctggaattgctaagcg

SEQ ID NO: 3505050 - DNA, 25 bp, Homo sapien
tccagctggaattgctaagcgccat

SEQ ID NO: 3505051 - DNA, 25 bp, Homo sapien
cctccagctggaattgctaagcgcc

SEQ ID NO: 3505052 - DNA, 25 bp, Homo sapien
ctccagctggaattgctaagcgcca

SEQ ID NO: 3505053 - DNA, 25 bp, Homo sapien
gaatcatcaatagccgctcctagat

SEQ ID NO: 3505054 - DNA, 25 bp, Homo sapien
aatagccgctcctagatctgcttgg

SEQ ID NO: 3505055 - DNA, 25 bp, Homo sapien
tagatctgcttggtctccatgccat

SEQ ID NO: 3505056 - DNA, 25 bp, Homo sapien
atctgcttggggcttagaatcatca

SEQ ID NO: 3505057 - DNA, 25 bp, Homo sapien
caagtagagattggcaaggatgacc

SEQ ID NO: 3505058 - DNA, 25 bp, Homo sapien
gaaagaaagcccagtccatagaaga

SEQ ID NO: 3505059 - DNA, 25 bp, Homo sapien
tgctttcgcacgttcctcaggtgaa

SEQ ID NO: 3505060 - DNA, 25 bp, Homo sapien
tgtgggtgctccaaagcgctgcatg

SEQ ID NO: 3505061 - DNA, 25 bp, Homo sapien
tacagtcctcacaatcagcccataa

SEQ ID NO: 3505062 - DNA, 25 bp, Homo sapien
gaataggcaataagaccacatcccc

SEQ ID NO: 3505063 - DNA, 25 bp, Homo sapien
cccataagaataggcaataagacca

SEQ ID NO: 3505064 - DNA, 25 bp, Homo sapien
tcacaatcagcccataagaataggc

SEQ ID NO: 3505065 - DNA, 25 bp, Homo sapien
cctatgggccaagcttggaaaggag

SEQ ID NO: 3505066 - DNA, 25 bp, Homo sapien
catatgctcacagaaggtataggca

SEQ ID NO: 3505067 - DNA, 25 bp, Homo sapien
ggtataggcaatcatgtgtgagcca

SEQ ID NO: 3505068 - DNA, 25 bp, Homo sapien
caaaggcatagaggttgtccacagt

SEQ ID NO: 3505069 - DNA, 25 bp, Homo sapien
ggaccaagtcgacaaaggagagcat

SEQ ID NO: 3505070 - DNA, 25 bp, Homo sapien
cgaaggctgcattctgtccggatga

SEQ ID NO: 3505071 - DNA, 25 bp, Homo sapien
caatcttggcaacaacaacaggtgg

SEQ ID NO: 3505072 - DNA, 25 bp, Homo sapien
tgtagcaccaaaccagaaaatggcc

SEQ ID NO: 3505073 - DNA, 25 bp, Homo sapien
ggatgccagccaggaagaaagtatg

SEQ ID NO: 3505074 - DNA, 25 bp, Homo sapien
ccagccaggaagaaagtatgtggga

SEQ ID NO: 3505075 - DNA, 25 bp, Homo sapien
aagaaagtatgtgggaagagaacag

SEQ ID NO: 3505076 - DNA, 25 bp, Homo sapien
gaagaaagtatgtgggaagagaaca

SEQ ID NO: 3505077 - DNA, 25 bp, Homo sapien
ttttaccaactgatgctagcatggg

SEQ ID NO: 3505078 - DNA, 25 bp, Homo sapien
tccaggaatgaaatcgagcactgcc

SEQ ID NO: 3505079 - DNA, 25 bp, Homo sapien
tactggctgcccagagacactactg

SEQ ID NO: 3505080 - DNA, 25 bp, Homo sapien
gccacagggttcatcatgctcagga

SEQ ID NO: 3505081 - DNA, 25 bp, Homo sapien
aaaaagagactatcaacttcctcca

SEQ ID NO: 3505082 - DNA, 25 bp, Homo sapien
cattctttcttgacagtgattcaaa

SEQ ID NO: 3505083 - DNA, 25 bp, Homo sapien
cttcctccaaaagaattggctgctt

SEQ ID NO: 3505084 - DNA, 25 bp, Homo sapien
tgacagtgattcaaatggaagcaac

SEQ ID NO: 3505085 - DNA, 25 bp, Homo sapien
ttccaattatgcttgacagtgtgtg

SEQ ID NO: 3505086 - DNA, 25 bp, Homo sapien
tgacagtgtgtgctctattttggtc

SEQ ID NO: 3505087 - DNA, 25 bp, Homo sapien
tatgcttgacagtgtgtgctctatt

SEQ ID NO: 3505088 - DNA, 25 bp, Homo sapien
tagcctataagccaataatttccaa

SEQ ID NO: 3505089 - DNA, 25 bp, Homo sapien
tcttcaggaaatggatgaatccact

SEQ ID NO: 3505090 - DNA, 25 bp, Homo sapien
gaccatgaactgagggtagtcttca

SEQ ID NO: 3505091 - DNA, 25 bp, Homo sapien
gaggatcacctctttggaggacaga

SEQ ID NO: 3505092 - DNA, 25 bp, Homo sapien
cagtgataggaaccatgaggccatc

SEQ ID NO: 3505093 - DNA, 25 bp, Homo sapien
ttggtcttctctccgtagataatgg

SEQ ID NO: 3505094 - DNA, 25 bp, Homo sapien
gataacatatgagccatactgtccc

SEQ ID NO: 3505095 - DNA, 25 bp, Homo sapien
tattcttgccaaagcggtgggtcag

SEQ ID NO: 3505096 - DNA, 25 bp, Homo sapien
gggaacaagcaagtagagatttgcc

SEQ ID NO: 3505097 - DNA, 25 bp, Homo sapien
catctaccaaaaccgatgccattgg

SEQ ID NO: 3505098 - DNA, 25 bp, Homo sapien
accgatgccattggcactgaaaagc

SEQ ID NO: 3505099 - DNA, 25 bp, Homo sapien
gcctggaggatcaaagtgtaggaaa

SEQ ID NO: 3505100 - DNA, 25 bp, Homo sapien
ggaaaaaccaatgaatgcaacatct

SEQ ID NO: 3505101 - DNA, 25 bp, Homo sapien
tattggtctgacagtatggcagcct

SEQ ID NO: 3505102 - DNA, 25 bp, Homo sapien
tggatagcaggatatcagtgccagc

SEQ ID NO: 3505103 - DNA, 25 bp, Homo sapien
atcaaaggctatctccccagcgtgg

SEQ ID NO: 3505104 - DNA, 25 bp, Homo sapien
tctcaagggagtacaaatggctaca

SEQ ID NO: 3505105 - DNA, 25 bp, Homo sapien
gggatggaaggtggtgagattagca

SEQ ID NO: 3505106 - DNA, 25 bp, Homo sapien
aaggagaatgaatagagtgggatgg

SEQ ID NO: 3505107 - DNA, 25 bp, Homo sapien
ggaaggtggtgagattagcaccaaa

SEQ ID NO: 3505108 - DNA, 25 bp, Homo sapien
ggagaatgaatagagtgggatggaa

SEQ ID NO: 3505109 - DNA, 25 bp, Homo sapien
tggagtctctctatgaagactaaag

SEQ ID NO: 3505110 - DNA, 25 bp, Homo sapien
ttttggagtctctctatgaagacta

SEQ ID NO: 3505111 - DNA, 25 bp, Homo sapien
ggagtctctctatgaagactaaaga

SEQ ID NO: 3505112 - DNA, 25 bp, Homo sapien
tttggagtctctctatgaagactaa

SEQ ID NO: 3505113 - DNA, 25 bp, Homo sapien
agttgaagagaaagttattctccaa

SEQ ID NO: 3505114 - DNA, 25 bp, Homo sapien
agaaagttattctccaacatgggga

SEQ ID NO: 3505115 - DNA, 25 bp, Homo sapien
gaagagaaagttattctccaacatg

SEQ ID NO: 3505116 - DNA, 25 bp, Homo sapien
agagaaagttattctccaacatggg

SEQ ID NO: 3505117 - DNA, 25 bp, Homo sapien
atgagcccagaggggaggtacagca

SEQ ID NO: 3505118 - DNA, 25 bp, Homo sapien
tcatgagcccagaggggaggtacag

SEQ ID NO: 3505119 - DNA, 25 bp, Homo sapien
tgagcccagaggggaggtacagcac

SEQ ID NO: 3505120 - DNA, 25 bp, Homo sapien
catgagcccagaggggaggtacagc

SEQ ID NO: 3505121 - DNA, 25 bp, Homo sapien
tcttgatgtcaaagaaccggtgggc

SEQ ID NO: 3505122 - DNA, 25 bp, Homo sapien
gatgtcaaagaaccggtgggctaca

SEQ ID NO: 3505123 - DNA, 25 bp, Homo sapien
agtcttgatgtcaaagaaccggtgg

SEQ ID NO: 3505124 - DNA, 25 bp, Homo sapien
tgatgtcaaagaaccggtgggctac

SEQ ID NO: 3505125 - DNA, 25 bp, Homo sapien
catgggcacatgaaggttacgttcc

SEQ ID NO: 3505126 - DNA, 25 bp, Homo sapien
gacagccaaatgtgataagcctcca

SEQ ID NO: 3505127 - DNA, 25 bp, Homo sapien
ggatgtccatgacggccagcattga

SEQ ID NO: 3505128 - DNA, 25 bp, Homo sapien
cctgggagggcaaacgaaacactgc

SEQ ID NO: 3505129 - DNA, 25 bp, Homo sapien
atctttatgtcaagtgaaagaatcc

SEQ ID NO: 3505130 - DNA, 25 bp, Homo sapien
ggacaaaccaattgtgatatattca

SEQ ID NO: 3505131 - DNA, 25 bp, Homo sapien
aatgagcaaactactaaaacatgca

SEQ ID NO: 3505132 - DNA, 25 bp, Homo sapien
tgcaacaatacagactaaactcaag

SEQ ID NO: 3505133 - DNA, 25 bp, Homo sapien
tggagagaggacaggatgaaaagat

SEQ ID NO: 3505134 - DNA, 25 bp, Homo sapien
cttggtagtagaggagaggctggag

SEQ ID NO: 3505135 - DNA, 25 bp, Homo sapien
gagaggacaggatgaaaagattatt

SEQ ID NO: 3505136 - DNA, 25 bp, Homo sapien
tattaaaattttcttgaggagccaa

SEQ ID NO: 3505137 - DNA, 25 bp, Homo sapien
gatcaaactgcaaggcggcagcgag

SEQ ID NO: 3505138 - DNA, 25 bp, Homo sapien
caaactgcaaggcggcagcgaggct

SEQ ID NO: 3505139 - DNA, 25 bp, Homo sapien
gagatcaaactgcaaggcggcagcg

SEQ ID NO: 3505140 - DNA, 25 bp, Homo sapien
atcaaactgcaaggcggcagcgagg

SEQ ID NO: 3505141 - DNA, 25 bp, Homo sapien
gtctttattgtatgactttacatag

SEQ ID NO: 3505142 - DNA, 25 bp, Homo sapien
gactttacatagtgtggtgagttta

SEQ ID NO: 3505143 - DNA, 25 bp, Homo sapien
catttttccaataggccctgtggtc

SEQ ID NO: 3505144 - DNA, 25 bp, Homo sapien
tcatttttccaataggccctgtggt

SEQ ID NO: 3505145 - DNA, 25 bp, Homo sapien
gttccagagctgtacgttgtccatt

SEQ ID NO: 3505146 - DNA, 25 bp, Homo sapien
caacttttcaaggtagctggttcca

SEQ ID NO: 3505147 - DNA, 25 bp, Homo sapien
tgcagccaacgttcataaacaatga

SEQ ID NO: 3505148 - DNA, 25 bp, Homo sapien
tatgtatgataatcctgcgtctcac

SEQ ID NO: 3505149 - DNA, 25 bp, Homo sapien
tctgtctctcatgccataccagagg

SEQ ID NO: 3505150 - DNA, 25 bp, Homo sapien
gaatgtatgggcttctaactgagaa

SEQ ID NO: 3505151 - DNA, 25 bp, Homo sapien
tcccaaaagtcctaaagagatcctc

SEQ ID NO: 3505152 - DNA, 25 bp, Homo sapien
taagcaggatatggcccaaagagcg

SEQ ID NO: 3505153 - DNA, 25 bp, Homo sapien
ttatacatattgcaacaagttctcc

SEQ ID NO: 3505154 - DNA, 25 bp, Homo sapien
tgcctccaaacataaaaaggagcct

SEQ ID NO: 3505155 - DNA, 25 bp, Homo sapien
ataaaaaggagcctgtgccctagcc

SEQ ID NO: 3505156 - DNA, 25 bp, Homo sapien
ttgcaacaagttctccataaaacat

SEQ ID NO: 3505157 - DNA, 25 bp, Homo sapien
gggagatggcagccaactccttgag

SEQ ID NO: 3505158 - DNA, 25 bp, Homo sapien
aacaagaaaggcgaggtgacggcat

SEQ ID NO: 3505159 - DNA, 25 bp, Homo sapien
gcattcttgactcgaagagcctcac

SEQ ID NO: 3505160 - DNA, 25 bp, Homo sapien
cagggaaaatgactgcacagtagac

SEQ ID NO: 3505161 - DNA, 25 bp, Homo sapien
tgtgcatgccgcaggagtaactccc

SEQ ID NO: 3505162 - DNA, 25 bp, Homo sapien
cccaggctgaaggaccaattgtgcc

SEQ ID NO: 3505163 - DNA, 25 bp, Homo sapien
ggctgaaggaccaattgtgccgcct

SEQ ID NO: 3505164 - DNA, 25 bp, Homo sapien
ccgggccctggttggactgtgtgca

SEQ ID NO: 3505165 - DNA, 25 bp, Homo sapien
ctaggggatcagaacggcgtggggc

SEQ ID NO: 3505166 - DNA, 25 bp, Homo sapien
gatcagaacggcgtggggcaggtcc

SEQ ID NO: 3505167 - DNA, 25 bp, Homo sapien
tccaacttgccacgggcaatgaggt

SEQ ID NO: 3505168 - DNA, 25 bp, Homo sapien
agcccagtccaacttgccacgggca

SEQ ID NO: 3505169 - DNA, 25 bp, Homo sapien
agttctcaatcttattcttcacaga

SEQ ID NO: 3505170 - DNA, 25 bp, Homo sapien
tcctcctgggaagccgcaaagttct

SEQ ID NO: 3505171 - DNA, 25 bp, Homo sapien
tcttggctttggacagcagtgctgg

SEQ ID NO: 3505172 - DNA, 25 bp, Homo sapien
gggaagccgcaaagttctcaatctt

SEQ ID NO: 3505173 - DNA, 25 bp, Homo sapien
catgttggtgttgagcaggaaagag

SEQ ID NO: 3505174 - DNA, 25 bp, Homo sapien
aagaccatgttggtgttgagcagga

SEQ ID NO: 3505175 - DNA, 25 bp, Homo sapien
actgggctggaagaccatgttggtg

SEQ ID NO: 3505176 - DNA, 25 bp, Homo sapien
ctgcagcagggacttgacactgggc

SEQ ID NO: 3505177 - DNA, 25 bp, Homo sapien
ccagccccgtcagcaggaagttgac

SEQ ID NO: 3505178 - DNA, 25 bp, Homo sapien
accagccccgtcagcaggaagttga

SEQ ID NO: 3505179 - DNA, 25 bp, Homo sapien
cagccccgtcagcaggaagttgaca

SEQ ID NO: 3505180 - DNA, 25 bp, Homo sapien
cagcatgttctcgagtttggcaaag

SEQ ID NO: 3505181 - DNA, 25 bp, Homo sapien
catgttctcgagtttggcaaagagc

SEQ ID NO: 3505182 - DNA, 25 bp, Homo sapien
tctcgagtttggcaaagagcacagc

SEQ ID NO: 3505183 - DNA, 25 bp, Homo sapien
ctgcagcatgttctcgagtttggca

SEQ ID NO: 3505184 - DNA, 25 bp, Homo sapien
gactgtggtaaaacctgcacgctat

SEQ ID NO: 3505185 - DNA, 25 bp, Homo sapien
cgtggccacctattctggaggaaat

SEQ ID NO: 3505186 - DNA, 25 bp, Homo sapien
ggaattggcacaactccatggcaga

SEQ ID NO: 3505187 - DNA, 25 bp, Homo sapien
tatgtttaaatatcccgtggccacc

SEQ ID NO: 3505188 - DNA, 25 bp, Homo sapien
cagataaactggacggaatggcata

SEQ ID NO: 3505189 - DNA, 25 bp, Homo sapien
tacaaatcgcaggaaatggccagac

SEQ ID NO: 3505190 - DNA, 25 bp, Homo sapien
cacaagcatggaagacgtacagaca

SEQ ID NO: 3505191 - DNA, 25 bp, Homo sapien
tcagatcgagtctagctccagggca

SEQ ID NO: 3505192 - DNA, 25 bp, Homo sapien
tttggcaccagacgaaccttcttgg

SEQ ID NO: 3505193 - DNA, 25 bp, Homo sapien
gttgagagtccgcaaagggctgctg

SEQ ID NO: 3505194 - DNA, 25 bp, Homo sapien
tctaagggggactctgagccagttc

SEQ ID NO: 3505195 - DNA, 25 bp, Homo sapien
tagtcctgccatgccctcggagatg

SEQ ID NO: 3505196 - DNA, 25 bp, Homo sapien
gtcctcctcaggcagtaggctgcgt

SEQ ID NO: 3505197 - DNA, 25 bp, Homo sapien
cttagtccgggagccaaaaggactg

SEQ ID NO: 3505198 - DNA, 25 bp, Homo sapien
cagtaggctgcgtttcttagtccgg

SEQ ID NO: 3505199 - DNA, 25 bp, Homo sapien
aggagagggccgctcgccatcatag

SEQ ID NO: 3505200 - DNA, 25 bp, Homo sapien
cgacgtgcctcacgcagatactcca

SEQ ID NO: 3505201 - DNA, 25 bp, Homo sapien
gatactccaggtaattgtcttccag

SEQ ID NO: 3505202 - DNA, 25 bp, Homo sapien
ctgtcgtcacagaagaggagtccac

SEQ ID NO: 3505203 - DNA, 25 bp, Homo sapien
ccgcaggaagagagccagacgagat

SEQ ID NO: 3505204 - DNA, 25 bp, Homo sapien
ctccctgtctctctgctaggcccac

SEQ ID NO: 3505205 - DNA, 25 bp, Homo sapien
ccgtgatgtcctcccttctccctgt

SEQ ID NO: 3505206 - DNA, 25 bp, Homo sapien
ttctccctgtctctctgctaggccc

SEQ ID NO: 3505207 - DNA, 25 bp, Homo sapien
ccttctccctgtctctctgctaggc

SEQ ID NO: 3505208 - DNA, 25 bp, Homo sapien
catataggtccacatcacgaacagc

SEQ ID NO: 3505209 - DNA, 25 bp, Homo sapien
tgtcagctgctcgtccatataggtc

SEQ ID NO: 3505210 - DNA, 25 bp, Homo sapien
tggtgccgacaacagcgtgggatta

SEQ ID NO: 3505211 - DNA, 25 bp, Homo sapien
tcgtgcccatgaggcatgctctgga

SEQ ID NO: 3505212 - DNA, 25 bp, Homo sapien
cacagctgaggttcaggagggtcct

SEQ ID NO: 3505213 - DNA, 25 bp, Homo sapien
ttcaggagggtcctgaagagactca

SEQ ID NO: 3505214 - DNA, 25 bp, Homo sapien
cagcaggacatcctcacagctgagg

SEQ ID NO: 3505215 - DNA, 25 bp, Homo sapien
gctgcagcaggacatcctcacagct

SEQ ID NO: 3505216 - DNA, 25 bp, Homo sapien
caacaggaatcgcaggaaggtacgg

SEQ ID NO: 3505217 - DNA, 25 bp, Homo sapien
tgtcatgccggtgcaacaacaggaa

SEQ ID NO: 3505218 - DNA, 25 bp, Homo sapien
ccaatacgagcaacgagggtgtcga

SEQ ID NO: 3505219 - DNA, 25 bp, Homo sapien
gataggcggtactggcgatcatctc

SEQ ID NO: 3505220 - DNA, 25 bp, Homo sapien
aggaacccattatggatataatcaa

SEQ ID NO: 3505221 - DNA, 25 bp, Homo sapien
gaacccattatggatataatcaacc

SEQ ID NO: 3505222 - DNA, 25 bp, Homo sapien
caactgcttctgcaccagggggtga

SEQ ID NO: 3505223 - DNA, 25 bp, Homo sapien
aggacccatgacaggcaccaggaac

SEQ ID NO: 3505224 - DNA, 25 bp, Homo sapien
cccctggaacctcaatctttcgagg

SEQ ID NO: 3505225 - DNA, 25 bp, Homo sapien
gccagtcttcccgtcgcagacagtg

SEQ ID NO: 3505226 - DNA, 25 bp, Homo sapien
tctttcgaggcagtgatgagtacag

SEQ ID NO: 3505227 - DNA, 25 bp, Homo sapien
agacagtgccaatcatcccctggaa

SEQ ID NO: 3505228 - DNA, 25 bp, Homo sapien
tcagcagatcctcgtgcagagcaaa

SEQ ID NO: 3505229 - DNA, 25 bp, Homo sapien
aagaagtagggcatcacgggcctgc

SEQ ID NO: 3505230 - DNA, 25 bp, Homo sapien
gaactggaccatgccgcaacagtgg

SEQ ID NO: 3505231 - DNA, 25 bp, Homo sapien
catgtcaacacacgggtcagcagat

SEQ ID NO: 3505232 - DNA, 25 bp, Homo sapien
cagtgattcttgaagaccatgaggc

SEQ ID NO: 3505233 - DNA, 25 bp, Homo sapien
catgaggcaggtctcgggatcagcc

SEQ ID NO: 3505234 - DNA, 25 bp, Homo sapien
aggccagtctgctcagccaattcat

SEQ ID NO: 3505235 - DNA, 25 bp, Homo sapien
gattggccccttgaggtatacggtg

SEQ ID NO: 3505236 - DNA, 25 bp, Homo sapien
tctgtaggagccagtagctgcccat

SEQ ID NO: 3505237 - DNA, 25 bp, Homo sapien
ccagaggcctacactctgaggattt

SEQ ID NO: 3505238 - DNA, 25 bp, Homo sapien
cctacactctgaggatttgccagct

SEQ ID NO: 3505239 - DNA, 25 bp, Homo sapien
gtctccagtctgcttcatccggtct

SEQ ID NO: 3505240 - DNA, 25 bp, Homo sapien
agaggtcactggccagtccagattt

SEQ ID NO: 3505241 - DNA, 25 bp, Homo sapien
gaggtcactggccagtccagatttc

SEQ ID NO: 3505242 - DNA, 25 bp, Homo sapien
ggtcactggccagtccagatttcta

SEQ ID NO: 3505243 - DNA, 25 bp, Homo sapien
tcactggccagtccagatttctaaa

SEQ ID NO: 3505244 - DNA, 25 bp, Homo sapien
gtagccaggaccacaagtatgtgca

SEQ ID NO: 3505245 - DNA, 25 bp, Homo sapien
aggaccacaagtatgtgcaaccaca

SEQ ID NO: 3505246 - DNA, 25 bp, Homo sapien
tagccaggaccacaagtatgtgcaa

SEQ ID NO: 3505247 - DNA, 25 bp, Homo sapien
ccaggaccacaagtatgtgcaacca

SEQ ID NO: 3505248 - DNA, 25 bp, Homo sapien
ttaggtgagttcaggccgccgccat

SEQ ID NO: 3505249 - DNA, 25 bp, Homo sapien
gcccggttgctgctgcggtgttagg

SEQ ID NO: 3505250 - DNA, 25 bp, Homo sapien
atcgcttctcaagcgcaccagccgc

SEQ ID NO: 3505251 - DNA, 25 bp, Homo sapien
gttcactcacggaacgccgaacctg

SEQ ID NO: 3505252 - DNA, 25 bp, Homo sapien
agatgtggcagcacgcgcttgtaat

SEQ ID NO: 3505253 - DNA, 25 bp, Homo sapien
agaactttctgtctgattaaccctg

SEQ ID NO: 3505254 - DNA, 25 bp, Homo sapien
taaaaatttgaagccaacgcctgta

SEQ ID NO: 3505255 - DNA, 25 bp, Homo sapien
tctgattaaccctgtgacatattaa

SEQ ID NO: 3505256 - DNA, 25 bp, Homo sapien
tgtccaggtgactgcaatacagcta

SEQ ID NO: 3505257 - DNA, 25 bp, Homo sapien
gcccgtttagttagacaaggtgcaa

SEQ ID NO: 3505258 - DNA, 25 bp, Homo sapien
catacagatgaagggttcctagtcc

SEQ ID NO: 3505259 - DNA, 25 bp, Homo sapien
gatatgatagcctctgcccgtttag

SEQ ID NO: 3505260 - DNA, 25 bp, Homo sapien
tgaatgtcaaccgaaaagtaccctg

SEQ ID NO: 3505261 - DNA, 25 bp, Homo sapien
gattggcagttcaaataccggtcaa

SEQ ID NO: 3505262 - DNA, 25 bp, Homo sapien
taccggtcaagtgaaaggcctgaaa

SEQ ID NO: 3505263 - DNA, 25 bp, Homo sapien
tattctgaaccatacctagtagggc

SEQ ID NO: 3505264 - DNA, 25 bp, Homo sapien
ttacttttattgatggtgagcgcaa

SEQ ID NO: 3505265 - DNA, 25 bp, Homo sapien
tacttttattgatggtgagcgcaag

SEQ ID NO: 3505266 - DNA, 25 bp, Homo sapien
acttttattgatggtgagcgcaagc

SEQ ID NO: 3505267 - DNA, 25 bp, Homo sapien
tcgctccttattagggcgtgagtgc

SEQ ID NO: 3505268 - DNA, 25 bp, Homo sapien
cagagcgcccgccttggtggatgta

SEQ ID NO: 3505269 - DNA, 25 bp, Homo sapien
aggacacaggactgggcttaaggaa

SEQ ID NO: 3505270 - DNA, 25 bp, Homo sapien
ggatgtaggattcgctccttattag

SEQ ID NO: 3505271 - DNA, 25 bp, Homo sapien
aggatttattttgggacaaggcaca

SEQ ID NO: 3505272 - DNA, 25 bp, Homo sapien
ctgaaaggatttattttgggacaag

SEQ ID NO: 3505273 - DNA, 25 bp, Homo sapien
tttattttgggacaaggcacaagca

SEQ ID NO: 3505274 - DNA, 25 bp, Homo sapien
tttgggacaaggcacaagcacaggg

SEQ ID NO: 3505275 - DNA, 25 bp, Homo sapien
tttggagcagagcttcttcggcagc

SEQ ID NO: 3505276 - DNA, 25 bp, Homo sapien
gaaagggcccttcggaggctctgta

SEQ ID NO: 3505277 - DNA, 25 bp, Homo sapien
aggtctcccgggatcttcctcggtg

SEQ ID NO: 3505278 - DNA, 25 bp, Homo sapien
tcctcggtgtcctgcggaggctctg

SEQ ID NO: 3505279 - DNA, 25 bp, Homo sapien
tgctctgggcccagctcggactggt

SEQ ID NO: 3505280 - DNA, 25 bp, Homo sapien
ttctgcaatccggtgcgccgcagcc

SEQ ID NO: 3505281 - DNA, 25 bp, Homo sapien
agctctctccaacttcggcctccag

SEQ ID NO: 3505282 - DNA, 25 bp, Homo sapien
ggaaagcgctggctgggacttcacc

SEQ ID NO: 3505283 - DNA, 25 bp, Homo sapien
ctgcatgtgacggacacagcactga

SEQ ID NO: 3505284 - DNA, 25 bp, Homo sapien
cagcagcccgaaactcactccttaa

SEQ ID NO: 3505285 - DNA, 25 bp, Homo sapien
tgcatgtgacggacacagcactgat

SEQ ID NO: 3505286 - DNA, 25 bp, Homo sapien
gctccttacccccagcagcccgaaa

SEQ ID NO: 3505287 - DNA, 25 bp, Homo sapien
ctgcaaaacgctgtaaagtaggtga

SEQ ID NO: 3505288 - DNA, 25 bp, Homo sapien
cgaactgcaaaacgctgtaaagtag

SEQ ID NO: 3505289 - DNA, 25 bp, Homo sapien
gctgcgtgcgaactgcaaaacgctg

SEQ ID NO: 3505290 - DNA, 25 bp, Homo sapien
cgtgcgaactgcaaaacgctgtaaa

SEQ ID NO: 3505291 - DNA, 25 bp, Homo sapien
ccaaattctgcggacgtggcctgag

SEQ ID NO: 3505292 - DNA, 25 bp, Homo sapien
ccaccgttattttagggattggctg

SEQ ID NO: 3505293 - DNA, 25 bp, Homo sapien
cgagaagaggatagtgcccgcagtc

SEQ ID NO: 3505294 - DNA, 25 bp, Homo sapien
cagtcacggaatgccctttcaacca

SEQ ID NO: 3505295 - DNA, 25 bp, Homo sapien
tcgtggctgcgactcagagcgccca

SEQ ID NO: 3505296 - DNA, 25 bp, Homo sapien
caaggtgttgctggtggtgtcgtgg

SEQ ID NO: 3505297 - DNA, 25 bp, Homo sapien
agggtcaccaccgtcacggcgtgca

SEQ ID NO: 3505298 - DNA, 25 bp, Homo sapien
ttggcgtgcgagctcacgcgctccg

SEQ ID NO: 3505299 - DNA, 25 bp, Homo sapien
ctcaggcaggcggagttggccttct

SEQ ID NO: 3505300 - DNA, 25 bp, Homo sapien
actcaggcaggcggagttggccttc

SEQ ID NO: 3505301 - DNA, 25 bp, Homo sapien
cgcactacggtcaggggcctccttt

SEQ ID NO: 3505302 - DNA, 25 bp, Homo sapien
ctgcaactgctggccgcactacggt

SEQ ID NO: 3505303 - DNA, 25 bp, Homo sapien
tgagataagccttaagaattccagg

SEQ ID NO: 3505304 - DNA, 25 bp, Homo sapien
ggagcagcctacttacactggtgaa

SEQ ID NO: 3505305 - DNA, 25 bp, Homo sapien
gactagcacttgagcctgagataag

SEQ ID NO: 3505306 - DNA, 25 bp, Homo sapien
taaataattgttctgcaccccaccc

SEQ ID NO: 3505307 - DNA, 25 bp, Homo sapien
ccaaaattttcgctgccccaacact

SEQ ID NO: 3505308 - DNA, 25 bp, Homo sapien
ttttcgctgccccaacacttcaaca

SEQ ID NO: 3505309 - DNA, 25 bp, Homo sapien
caaaattttcgctgccccaacactt

SEQ ID NO: 3505310 - DNA, 25 bp, Homo sapien
aaattttcgctgccccaacacttca

SEQ ID NO: 3505311 - DNA, 25 bp, Homo sapien
taactgaggacatatcaccacaaaa

SEQ ID NO: 3505312 - DNA, 25 bp, Homo sapien
aggatgctgagccaaagctaagcca

SEQ ID NO: 3505313 - DNA, 25 bp, Homo sapien
gccttaactgaggacatatcaccac

SEQ ID NO: 3505314 - DNA, 25 bp, Homo sapien
tgctgagccaaagctaagccatcat

SEQ ID NO: 3505315 - DNA, 25 bp, Homo sapien
taagcatgcattccgttaccaaggg

SEQ ID NO: 3505316 - DNA, 25 bp, Homo sapien
caacatagaagggaggtagcgtgct

SEQ ID NO: 3505317 - DNA, 25 bp, Homo sapien
tcagatcagtcccagcaatggcctt

SEQ ID NO: 3505318 - DNA, 25 bp, Homo sapien
taccaagggaggaaccagagaagct

SEQ ID NO: 3505319 - DNA, 25 bp, Homo sapien
ggttacatcgcatagtgccccggct

SEQ ID NO: 3505320 - DNA, 25 bp, Homo sapien
gagagggtggcatctacaatccatc

SEQ ID NO: 3505321 - DNA, 25 bp, Homo sapien
caacctcgggctgaaggtgagcact

SEQ ID NO: 3505322 - DNA, 25 bp, Homo sapien
tgggctcagaatgcatccctgatgg

SEQ ID NO: 3505323 - DNA, 25 bp, Homo sapien
aatctgctgaagatagcaccacctg

SEQ ID NO: 3505324 - DNA, 25 bp, Homo sapien
caatccattgtccacctctttgagg

SEQ ID NO: 3505325 - DNA, 25 bp, Homo sapien
gaaggaacccaatgtggctcgcgtg

SEQ ID NO: 3505326 - DNA, 25 bp, Homo sapien
gctccgtggccatcaagctgtgcaa

SEQ ID NO: 3505327 - DNA, 25 bp, Homo sapien
tctttgctcatgttggccctctgga

SEQ ID NO: 3505328 - DNA, 25 bp, Homo sapien
gtctggcagcataacctctctatgc

SEQ ID NO: 3505329 - DNA, 25 bp, Homo sapien
ctttgctcatgttggccctctggaa

SEQ ID NO: 3505330 - DNA, 25 bp, Homo sapien
ctctctatgccccagctgtgtcttt

SEQ ID NO: 3505331 - DNA, 25 bp, Homo sapien
atacagcagaggtgcccatggagca

SEQ ID NO: 3505332 - DNA, 25 bp, Homo sapien
cagactttattagtgatatcaatac

SEQ ID NO: 3505333 - DNA, 25 bp, Homo sapien
catgcctggaccagtcccttcctcc

SEQ ID NO: 3505334 - DNA, 25 bp, Homo sapien
ggaagggacccatgcctggaccagt

SEQ ID NO: 3505335 - DNA, 25 bp, Homo sapien
tggcctggaccagttcctcctgttc

SEQ ID NO: 3505336 - DNA, 25 bp, Homo sapien
ggcctggaccagttcctcctgttcc

SEQ ID NO: 3505337 - DNA, 25 bp, Homo sapien
tgttaccactccagtgttatcactt

SEQ ID NO: 3505338 - DNA, 25 bp, Homo sapien
cctgctcctcttgttaccactccag

SEQ ID NO: 3505339 - DNA, 25 bp, Homo sapien
ccagctcctaggcagggaaccgtag

SEQ ID NO: 3505340 - DNA, 25 bp, Homo sapien
ccttgaagggattagatctctccct

SEQ ID NO: 3505341 - DNA, 25 bp, Homo sapien
ggcctgaggcctaggaatagcctct

SEQ ID NO: 3505342 - DNA, 25 bp, Homo sapien
ggcctaggaatagcctctagacccc

SEQ ID NO: 3505343 - DNA, 25 bp, Homo sapien
actgaacacccctgcggacagtcca

SEQ ID NO: 3505344 - DNA, 25 bp, Homo sapien
tacacgccgtgccacagactcagca

SEQ ID NO: 3505345 - DNA, 25 bp, Homo sapien
cctgggaacgggcatccagacactt

SEQ ID NO: 3505346 - DNA, 25 bp, Homo sapien
ggacagtccaccctacacgccgtgc

SEQ ID NO: 3505347 - DNA, 25 bp, Homo sapien
aacgtgtggacatctctgcccacgg

SEQ ID NO: 3505348 - DNA, 25 bp, Homo sapien
tgggccggcagccatgatgaatgca

SEQ ID NO: 3505349 - DNA, 25 bp, Homo sapien
gcattgggctcgcaccagaacatgt

SEQ ID NO: 3505350 - DNA, 25 bp, Homo sapien
gagaggaaacgcacccgacactctc

SEQ ID NO: 3505351 - DNA, 25 bp, Homo sapien
caggggccacactgacatgacttgg

SEQ ID NO: 3505352 - DNA, 25 bp, Homo sapien
ggactgactcgagggccccattaat

SEQ ID NO: 3505353 - DNA, 25 bp, Homo sapien
ctgctggtgcaagatggtgagggta

SEQ ID NO: 3505354 - DNA, 25 bp, Homo sapien
ggtccattgttcacggctgctggag

SEQ ID NO: 3505355 - DNA, 25 bp, Homo sapien
gacatcacattgcttcacaccacaa

SEQ ID NO: 3505356 - DNA, 25 bp, Homo sapien
tcagcgctcatcacactcagacatc

SEQ ID NO: 3505357 - DNA, 25 bp, Homo sapien
caaatcatgctctctcagcgctcat

SEQ ID NO: 3505358 - DNA, 25 bp, Homo sapien
taactcccaaatcagaccctacagg

SEQ ID NO: 3505359 - DNA, 25 bp, Homo sapien
gagcagtcaagggtcacaggcagtt

SEQ ID NO: 3505360 - DNA, 25 bp, Homo sapien
cagttgatctggcatagggaggacc

SEQ ID NO: 3505361 - DNA, 25 bp, Homo sapien
gagaccacttgtccaagcggagcag

SEQ ID NO: 3505362 - DNA, 25 bp, Homo sapien
ggcagtgccatcgaatccaaatgaa

SEQ ID NO: 3505363 - DNA, 25 bp, Homo sapien
caacaggtttagcaacaggtacatt

SEQ ID NO: 3505364 - DNA, 25 bp, Homo sapien
tacattccccaggtaatagacttgg

SEQ ID NO: 3505365 - DNA, 25 bp, Homo sapien
caactcattcttaggcgctgggaat

SEQ ID NO: 3505366 - DNA, 25 bp, Homo sapien
gaacttctggaccaactcattctta

SEQ ID NO: 3505367 - DNA, 25 bp, Homo sapien
tatgggaaagaagagaaggttgatc

SEQ ID NO: 3505368 - DNA, 25 bp, Homo sapien
ctatgggaaagaagagaaggttgat

SEQ ID NO: 3505369 - DNA, 25 bp, Homo sapien
atgggaaagaagagaaggttgatca

SEQ ID NO: 3505370 - DNA, 25 bp, Homo sapien
ccaagcagcgggcattacgccgttc

SEQ ID NO: 3505371 - DNA, 25 bp, Homo sapien
cacaagtttagagtggtccagggag

SEQ ID NO: 3505372 - DNA, 25 bp, Homo sapien
acatccacaagtttagagtggtcca

SEQ ID NO: 3505373 - DNA, 25 bp, Homo sapien
gggcattacgccgttcggccatgat

SEQ ID NO: 3505374 - DNA, 25 bp, Homo sapien
acccttgtagagcaaaggtggcaac

SEQ ID NO: 3505375 - DNA, 25 bp, Homo sapien
agtccagggagtggagggggccgtg

SEQ ID NO: 3505376 - DNA, 25 bp, Homo sapien
gtccagggagtggagggggccgtgc

SEQ ID NO: 3505377 - DNA, 25 bp, Homo sapien
agagcagatctcatgcaggctggtg

SEQ ID NO: 3505378 - DNA, 25 bp, Homo sapien
cttagagcagatctcatgcaggctg

SEQ ID NO: 3505379 - DNA, 25 bp, Homo sapien
atctcatgcaggctggtggcgatgt

SEQ ID NO: 3505380 - DNA, 25 bp, Homo sapien
ctcatgcaggctggtggcgatgttc

SEQ ID NO: 3505381 - DNA, 25 bp, Homo sapien
catctgggtcagcttatcacgagct

SEQ ID NO: 3505382 - DNA, 25 bp, Homo sapien
gggtcagcttatcacgagctacgta

SEQ ID NO: 3505383 - DNA, 25 bp, Homo sapien
atcacgagctacgtaggcaaagtcc

SEQ ID NO: 3505384 - DNA, 25 bp, Homo sapien
gcttatcacgagctacgtaggcaaa

SEQ ID NO: 3505385 - DNA, 25 bp, Homo sapien
ccaccctcgaatcccaagccctatt

SEQ ID NO: 3505386 - DNA, 25 bp, Homo sapien
gctggatgaactcccaccctcgaat

SEQ ID NO: 3505387 - DNA, 25 bp, Homo sapien
taacagagttagagaggaggactct

SEQ ID NO: 3505388 - DNA, 25 bp, Homo sapien
ctgatgctggatgaactcccaccct

SEQ ID NO: 3505389 - DNA, 25 bp, Homo sapien
ccactagctttagtgtctcatcctc

SEQ ID NO: 3505390 - DNA, 25 bp, Homo sapien
cacgcggatgctgatgatgggttgg

SEQ ID NO: 3505391 - DNA, 25 bp, Homo sapien
gatgggttgggcgtgcagcagtgcc

SEQ ID NO: 3505392 - DNA, 25 bp, Homo sapien
gctccactagctttagtgtctcatc

SEQ ID NO: 3505393 - DNA, 25 bp, Homo sapien
ctcctcctcggtcatctctacccag

SEQ ID NO: 3505394 - DNA, 25 bp, Homo sapien
ggtaagagagctgacggatgcaatt

SEQ ID NO: 3505395 - DNA, 25 bp, Homo sapien
gagctgacggatgcaattgttgact

SEQ ID NO: 3505396 - DNA, 25 bp, Homo sapien
ccagcctagggagcgcacggcgaaa

SEQ ID NO: 3505397 - DNA, 25 bp, Homo sapien
tgccagacacagaagaggggcagga

SEQ ID NO: 3505398 - DNA, 25 bp, Homo sapien
ccagacacagaagaggggcaggagg

SEQ ID NO: 3505399 - DNA, 25 bp, Homo sapien
agacacagaagaggggcaggaggta

SEQ ID NO: 3505400 - DNA, 25 bp, Homo sapien
ctgccagacacagaagaggggcagg

SEQ ID NO: 3505401 - DNA, 25 bp, Homo sapien
cttgatccctgggttggtattccgt

SEQ ID NO: 3505402 - DNA, 25 bp, Homo sapien
tgatccctgggttggtattccgtgg

SEQ ID NO: 3505403 - DNA, 25 bp, Homo sapien
ctcctcttggggcaacggctctggg

SEQ ID NO: 3505404 - DNA, 25 bp, Homo sapien
cctcctcttggggcaacggctctgg

SEQ ID NO: 3505405 - DNA, 25 bp, Homo sapien
tgggaaggtcaacgtcccctcctca

SEQ ID NO: 3505406 - DNA, 25 bp, Homo sapien
atgcccctcctccagctatcccgtg

SEQ ID NO: 3505407 - DNA, 25 bp, Homo sapien
ctcctccagctatcccgtggtaaag

SEQ ID NO: 3505408 - DNA, 25 bp, Homo sapien
gctatcccgtggtaaagcaggtccc

SEQ ID NO: 3505409 - DNA, 25 bp, Homo sapien
tccagctatcccgtggtaaagcagg

SEQ ID NO: 3505410 - DNA, 25 bp, Homo sapien
tctccatgagcaaaacctgtccagg

SEQ ID NO: 3505411 - DNA, 25 bp, Homo sapien
tccatgagcaaaacctgtccaggtg

SEQ ID NO: 3505412 - DNA, 25 bp, Homo sapien
gccttctccatgagcaaaacctgtc

SEQ ID NO: 3505413 - DNA, 25 bp, Homo sapien
catgagcaaaacctgtccaggtgag

SEQ ID NO: 3505414 - DNA, 25 bp, Homo sapien
gtgtcctggaccctcatccatccag

SEQ ID NO: 3505415 - DNA, 25 bp, Homo sapien
atccagccggcaggtcggaatccgt

SEQ ID NO: 3505416 - DNA, 25 bp, Homo sapien
tcggaatccgtctcgaaggcgttgg

SEQ ID NO: 3505417 - DNA, 25 bp, Homo sapien
ggatgtgccagtaataggtccctga

SEQ ID NO: 3505418 - DNA, 25 bp, Homo sapien
ctgcaggataatggccaggaaaaag

SEQ ID NO: 3505419 - DNA, 25 bp, Homo sapien
tgctgtcctgcaggataatggccag

SEQ ID NO: 3505420 - DNA, 25 bp, Homo sapien
caggataatggccaggaaaaagtcc

SEQ ID NO: 3505421 - DNA, 25 bp, Homo sapien
ctgcgctgctgtcctgcaggataat

SEQ ID NO: 3505422 - DNA, 25 bp, Homo sapien
gcccctcctgcctccaccctccctc

SEQ ID NO: 3505423 - DNA, 25 bp, Homo sapien
gagcgtctgccaggcaagatcctcc

SEQ ID NO: 3505424 - DNA, 25 bp, Homo sapien
ccatgctagggaatctccttggggg

SEQ ID NO: 3505425 - DNA, 25 bp, Homo sapien
tcccccgcttggagcttgctaggga

SEQ ID NO: 3505426 - DNA, 25 bp, Homo sapien
aagggaggttcatgagaccccagcc

SEQ ID NO: 3505427 - DNA, 25 bp, Homo sapien
ggaatcctgactggtccaagaggca

SEQ ID NO: 3505428 - DNA, 25 bp, Homo sapien
gagcgcccagactgctgacgtgctt

SEQ ID NO: 3505429 - DNA, 25 bp, Homo sapien
agggcccagctaggctgcagcgtct

SEQ ID NO: 3505430 - DNA, 25 bp, Homo sapien
taggctgcagcgtctcctcggcaac

SEQ ID NO: 3505431 - DNA, 25 bp, Homo sapien
atccctgtcagcctgtaccttcctg

SEQ ID NO: 3505432 - DNA, 25 bp, Homo sapien
tcatccttccgatctgtcctggaag

SEQ ID NO: 3505433 - DNA, 25 bp, Homo sapien
aagagcttcatccttccgatctgtc

SEQ ID NO: 3505434 - DNA, 25 bp, Homo sapien
atctgggaggcccttctggagcttg

SEQ ID NO: 3505435 - DNA, 25 bp, Homo sapien
ttcatgaattcatgcatttatgcat

SEQ ID NO: 3505436 - DNA, 25 bp, Homo sapien
tgcattcaatccatagctctatgaa

SEQ ID NO: 3505437 - DNA, 25 bp, Homo sapien
catttatgcattcaatccatagctc

SEQ ID NO: 3505438 - DNA, 25 bp, Homo sapien
tatgcattcaatccatagctctatg

SEQ ID NO: 3505439 - DNA, 25 bp, Homo sapien
ggcaagtgagcaactaggcctctat

SEQ ID NO: 3505440 - DNA, 25 bp, Homo sapien
gccctcatggtcatagcaacacagt

SEQ ID NO: 3505441 - DNA, 25 bp, Homo sapien
aggcctctatttggtcactgactca

SEQ ID NO: 3505442 - DNA, 25 bp, Homo sapien
tccaccagtgcatgatccttgagaa

SEQ ID NO: 3505443 - DNA, 25 bp, Homo sapien
aagagaggcaatcagactttgcctt

SEQ ID NO: 3505444 - DNA, 25 bp, Homo sapien
tttccctttaactggctgcattgag

SEQ ID NO: 3505445 - DNA, 25 bp, Homo sapien
tttaaaaggagttgagacaatgacc

SEQ ID NO: 3505446 - DNA, 25 bp, Homo sapien
atgaccaccaaaggccactaacatc

SEQ ID NO: 3505447 - DNA, 25 bp, Homo sapien
ttttggttgtaactatagcccatta

SEQ ID NO: 3505448 - DNA, 25 bp, Homo sapien
gtaactatagcccattatctccact

SEQ ID NO: 3505449 - DNA, 25 bp, Homo sapien
cattatctccactctttgttcctca

SEQ ID NO: 3505450 - DNA, 25 bp, Homo sapien
tatagcccattatctccactctttg

SEQ ID NO: 3505451 - DNA, 25 bp, Homo sapien
gtagcccagcttgagtcctcatcac

SEQ ID NO: 3505452 - DNA, 25 bp, Homo sapien
tgcactgttccgcatgccaaacagg

SEQ ID NO: 3505453 - DNA, 25 bp, Homo sapien
ttccgcatgccaaacaggaggctgg

SEQ ID NO: 3505454 - DNA, 25 bp, Homo sapien
tgccctgggataaggtagcccagct

SEQ ID NO: 3505455 - DNA, 25 bp, Homo sapien
tgctgatgatcaggccaggtcctcg

SEQ ID NO: 3505456 - DNA, 25 bp, Homo sapien
ctcttgagtgctgatgatcaggcca

SEQ ID NO: 3505457 - DNA, 25 bp, Homo sapien
gagtgctgatgatcaggccaggtcc

SEQ ID NO: 3505458 - DNA, 25 bp, Homo sapien
tgatgatcaggccaggtcctcgtag

SEQ ID NO: 3505459 - DNA, 25 bp, Homo sapien
caaggtcacattgcgattctggtca

SEQ ID NO: 3505460 - DNA, 25 bp, Homo sapien
cccaagggtgccatctcaggctcct

SEQ ID NO: 3505461 - DNA, 25 bp, Homo sapien
ttggctgcgttgtgagctgagagct

SEQ ID NO: 3505462 - DNA, 25 bp, Homo sapien
aggtcaaggtcacattgcgattctg

SEQ ID NO: 3505463 - DNA, 25 bp, Homo sapien
ttagccacttggcattggcagggcc

SEQ ID NO: 3505464 - DNA, 25 bp, Homo sapien
cttttagccacttggcattggcagg

SEQ ID NO: 3505465 - DNA, 25 bp, Homo sapien
ttttagccacttggcattggcaggg

SEQ ID NO: 3505466 - DNA, 25 bp, Homo sapien
tcttttagccacttggcattggcag

SEQ ID NO: 3505467 - DNA, 25 bp, Homo sapien
gcattaatggccgactggctcagtg

SEQ ID NO: 3505468 - DNA, 25 bp, Homo sapien
gcctccgtggctgttggcattaatg

SEQ ID NO: 3505469 - DNA, 25 bp, Homo sapien
ggtaggctcagtgcggggcctccgt

SEQ ID NO: 3505470 - DNA, 25 bp, Homo sapien
catggcgctgcgcaggtccttgggt

SEQ ID NO: 3505471 - DNA, 25 bp, Homo sapien
ccgggcccagatgacggaggtggct

SEQ ID NO: 3505472 - DNA, 25 bp, Homo sapien
gcccagatgacggaggtggctcagg

SEQ ID NO: 3505473 - DNA, 25 bp, Homo sapien
ccagatgacggaggtggctcaggct

SEQ ID NO: 3505474 - DNA, 25 bp, Homo sapien
tcaggctgcggggttcgggctccgc

SEQ ID NO: 3505475 - DNA, 25 bp, Homo sapien
agacgcgcggacggggctggagccc

SEQ ID NO: 3505476 - DNA, 25 bp, Homo sapien
ctggtcccgcacccacgccgggaga

SEQ ID NO: 3505477 - DNA, 25 bp, Homo sapien
acgcgcggacggggctggagcccga

SEQ ID NO: 3505478 - DNA, 25 bp, Homo sapien
tggtcccgcacccacgccgggagac

SEQ ID NO: 3505479 - DNA, 25 bp, Homo sapien
cttcttgatggcggttttcatttgg

SEQ ID NO: 3505480 - DNA, 25 bp, Homo sapien
tcttgatggcggttttcatttggaa

SEQ ID NO: 3505481 - DNA, 25 bp, Homo sapien
ttcttgatggcggttttcatttgga

SEQ ID NO: 3505482 - DNA, 25 bp, Homo sapien
tcttcttgatggcggttttcatttg

SEQ ID NO: 3505483 - DNA, 25 bp, Homo sapien
gggacatcagtctgcaaagccttca

SEQ ID NO: 3505484 - DNA, 25 bp, Homo sapien
tcttcaacaggtggagcaattgtga

SEQ ID NO: 3505485 - DNA, 25 bp, Homo sapien
tttggccatagtaattgggtagctg

SEQ ID NO: 3505486 - DNA, 25 bp, Homo sapien
caactgagagaacataggaggctgg

SEQ ID NO: 3505487 - DNA, 25 bp, Homo sapien
aaaatggtgcagatgtgctgataca

SEQ ID NO: 3505488 - DNA, 25 bp, Homo sapien
tgtgctgatacagcttcccatccac

SEQ ID NO: 3505489 - DNA, 25 bp, Homo sapien
tggtgcagatgtgctgatacagctt

SEQ ID NO: 3505490 - DNA, 25 bp, Homo sapien
gcagatgtgctgatacagcttccca

SEQ ID NO: 3505491 - DNA, 25 bp, Homo sapien
gtttgtacatgtaaacgatgtacgt

SEQ ID NO: 3505492 - DNA, 25 bp, Homo sapien
tacatgtaaacgatgtacgtgtaca

SEQ ID NO: 3505493 - DNA, 25 bp, Homo sapien
tagagcctgttctcaaggctggagg

SEQ ID NO: 3505494 - DNA, 25 bp, Homo sapien
ctggggtagagcctgttctcaaggc

SEQ ID NO: 3505495 - DNA, 25 bp, Homo sapien
gaagcaatctgtctttattatgaga

SEQ ID NO: 3505496 - DNA, 25 bp, Homo sapien
ttatgagaaactggggaggtggggc

SEQ ID NO: 3505497 - DNA, 25 bp, Homo sapien
tattatgagaaactggggaggtggg

SEQ ID NO: 3505498 - DNA, 25 bp, Homo sapien
aagaagcaatctgtctttattatga

SEQ ID NO: 3505499 - DNA, 25 bp, Homo sapien
tcatgtcagaaggcccctcagtgag

SEQ ID NO: 3505500 - DNA, 25 bp, Homo sapien
tgtcagaaggcccctcagtgagaag

SEQ ID NO: 3505501 - DNA, 25 bp, Homo sapien
catgtcagaaggcccctcagtgaga

SEQ ID NO: 3505502 - DNA, 25 bp, Homo sapien
gtcagaaggcccctcagtgagaagc

SEQ ID NO: 3505503 - DNA, 25 bp, Homo sapien
caggccagactcatgtcagaaggcc

SEQ ID NO: 3505504 - DNA, 25 bp, Homo sapien
aggccagactcatgtcagaaggccc

SEQ ID NO: 3505505 - DNA, 25 bp, Homo sapien
ggccagactcatgtcagaaggcccc

SEQ ID NO: 3505506 - DNA, 25 bp, Homo sapien
catggatgaggtacaagccgggacc

SEQ ID NO: 3505507 - DNA, 25 bp, Homo sapien
cactgtagcagtacaaattgggacc

SEQ ID NO: 3505508 - DNA, 25 bp, Homo sapien
tttccatacacaaggctccgtctac

SEQ ID NO: 3505509 - DNA, 25 bp, Homo sapien
cattggcggaacatgagttagggcc

SEQ ID NO: 3505510 - DNA, 25 bp, Homo sapien
ccatgatatggagccgagaagaccc

SEQ ID NO: 3505511 - DNA, 25 bp, Homo sapien
aggccgcatccacagagtccaggat

SEQ ID NO: 3505512 - DNA, 25 bp, Homo sapien
aagacccagggcagataaaggccgc

SEQ ID NO: 3505513 - DNA, 25 bp, Homo sapien
taaccgcttactagggtatagcctc

SEQ ID NO: 3505514 - DNA, 25 bp, Homo sapien
gtgtccagacgccagtagtgggtcc

SEQ ID NO: 3505515 - DNA, 25 bp, Homo sapien
tatgccagccatcccggctggtgtc

SEQ ID NO: 3505516 - DNA, 25 bp, Homo sapien
ccggctggtgtccagacgccagtag

SEQ ID NO: 3505517 - DNA, 25 bp, Homo sapien
aatgggccagctatgccagccatcc

SEQ ID NO: 3505518 - DNA, 25 bp, Homo sapien
gagagaatgcatccagaggccaaga

SEQ ID NO: 3505519 - DNA, 25 bp, Homo sapien
gacttggtcagcaatgttgggcact

SEQ ID NO: 3505520 - DNA, 25 bp, Homo sapien
gtttccaggtaaggccaacatcatg

SEQ ID NO: 3505521 - DNA, 25 bp, Homo sapien
taccataggttgctctagggccgct

SEQ ID NO: 3505522 - DNA, 25 bp, Homo sapien
gctgcctacctgacatgcttatggg

SEQ ID NO: 3505523 - DNA, 25 bp, Homo sapien
gaaagctgagtcattcttgaagcct

SEQ ID NO: 3505524 - DNA, 25 bp, Homo sapien
cagttgctgagtccacgaaagctga

SEQ ID NO: 3505525 - DNA, 25 bp, Homo sapien
gaggtttaggctccaaatcagctgc

SEQ ID NO: 3505526 - DNA, 25 bp, Homo sapien
gtggcaccatggttgtcagacgtca

SEQ ID NO: 3505527 - DNA, 25 bp, Homo sapien
cataggtggcaccatggttgtcaga

SEQ ID NO: 3505528 - DNA, 25 bp, Homo sapien
ggtggcaccatggttgtcagacgtc

SEQ ID NO: 3505529 - DNA, 25 bp, Homo sapien
taggtggcaccatggttgtcagacg

SEQ ID NO: 3505530 - DNA, 25 bp, Homo sapien
gatgtgggctacagcgcatatactc

SEQ ID NO: 3505531 - DNA, 25 bp, Homo sapien
tacagcgcatatactcagggccatg

SEQ ID NO: 3505532 - DNA, 25 bp, Homo sapien
gggccatggtgggtactgttcccat

SEQ ID NO: 3505533 - DNA, 25 bp, Homo sapien
tgggctacagcgcatatactcaggg

SEQ ID NO: 3505534 - DNA, 25 bp, Homo sapien
gggcaatgggaaaatccagaatgga

SEQ ID NO: 3505535 - DNA, 25 bp, Homo sapien
gggctagattaagggccaaggtgtc

SEQ ID NO: 3505536 - DNA, 25 bp, Homo sapien
tgtgggtttccccatatgagggcaa

SEQ ID NO: 3505537 - DNA, 25 bp, Homo sapien
gaggtcagagtgaggtccaaggtgg

SEQ ID NO: 3505538 - DNA, 25 bp, Homo sapien
gaattggttaccctggaagcagtag

SEQ ID NO: 3505539 - DNA, 25 bp, Homo sapien
cagggcatgaagtagtctcggacat

SEQ ID NO: 3505540 - DNA, 25 bp, Homo sapien
gcagaggagcagttcccaacagctg

SEQ ID NO: 3505541 - DNA, 25 bp, Homo sapien
gaacgctccttcatggttcccgtag

SEQ ID NO: 3505542 - DNA, 25 bp, Homo sapien
actaccaacccaccactactccagg

SEQ ID NO: 3505543 - DNA, 25 bp, Homo sapien
tggcatcactaccaacccaccacta

SEQ ID NO: 3505544 - DNA, 25 bp, Homo sapien
ggcatcactaccaacccaccactac

SEQ ID NO: 3505545 - DNA, 25 bp, Homo sapien
ctaccaacccaccactactccaggt

SEQ ID NO: 3505546 - DNA, 25 bp, Homo sapien
caggaaattcatcttggagcaactt

SEQ ID NO: 3505547 - DNA, 25 bp, Homo sapien
cttggagcaactttgggtatccttt

SEQ ID NO: 3505548 - DNA, 25 bp, Homo sapien
ggatgggattccaggaaattcatct

SEQ ID NO: 3505549 - DNA, 25 bp, Homo sapien
gattccaggaaattcatcttggagc

SEQ ID NO: 3505550 - DNA, 25 bp, Homo sapien
caggagggtatacccagactttgtc

SEQ ID NO: 3505551 - DNA, 25 bp, Homo sapien
tcaggagggtatacccagactttgt

SEQ ID NO: 3505552 - DNA, 25 bp, Homo sapien
ttcaggagggtatacccagactttg

SEQ ID NO: 3505553 - DNA, 25 bp, Homo sapien
cttttcaggagggtatacccagact

SEQ ID NO: 3505554 - DNA, 25 bp, Homo sapien
gcatagatattcctcagagccaagg

SEQ ID NO: 3505555 - DNA, 25 bp, Homo sapien
catgtagattcgtatggctggcaca

SEQ ID NO: 3505556 - DNA, 25 bp, Homo sapien
caaagaggaagcattgggcccaaga

SEQ ID NO: 3505557 - DNA, 25 bp, Homo sapien
tggaaggtttcacaccaaagaggaa

SEQ ID NO: 3505558 - DNA, 25 bp, Homo sapien
catttgtgactcttccacacaaact

SEQ ID NO: 3505559 - DNA, 25 bp, Homo sapien
tgaccttgacggaatgcagcatcca

SEQ ID NO: 3505560 - DNA, 25 bp, Homo sapien
acactgttgtgaccttgacggaatg

SEQ ID NO: 3505561 - DNA, 25 bp, Homo sapien
gattaactcccggtcccatttgtga

SEQ ID NO: 3505562 - DNA, 25 bp, Homo sapien
cattgtcatccagggtggtagcatc

SEQ ID NO: 3505563 - DNA, 25 bp, Homo sapien
gtagcatcaaagctccagccatctg

SEQ ID NO: 3505564 - DNA, 25 bp, Homo sapien
aaaacagcatggttccattgtcatc

SEQ ID NO: 3505565 - DNA, 25 bp, Homo sapien
gtcatccagggtggtagcatcaaag

SEQ ID NO: 3505566 - DNA, 25 bp, Homo sapien
gcttggtctcgccttcagcaacatt

SEQ ID NO: 3505567 - DNA, 25 bp, Homo sapien
gtctggcttggtctcgccttcagca

SEQ ID NO: 3505568 - DNA, 25 bp, Homo sapien
ctggcttggtctcgccttcagcaac

SEQ ID NO: 3505569 - DNA, 25 bp, Homo sapien
ggcttggtctcgccttcagcaacat

SEQ ID NO: 3505570 - DNA, 25 bp, Homo sapien
tagcccagaactcaatccttcgctt

SEQ ID NO: 3505571 - DNA, 25 bp, Homo sapien
gaactcaatccttcgcttctagtcc

SEQ ID NO: 3505572 - DNA, 25 bp, Homo sapien
cagaactcaatccttcgcttctagt

SEQ ID NO: 3505573 - DNA, 25 bp, Homo sapien
cccagaactcaatccttcgcttcta

SEQ ID NO: 3505574 - DNA, 25 bp, Homo sapien
ccacaaccccagtgcaacgggtgct

SEQ ID NO: 3505575 - DNA, 25 bp, Homo sapien
ccagtgcaacgggtgctcccagtac

SEQ ID NO: 3505576 - DNA, 25 bp, Homo sapien
gcaacgggtgctcccagtaccctag

SEQ ID NO: 3505577 - DNA, 25 bp, Homo sapien
gtgcaacgggtgctcccagtaccct

SEQ ID NO: 3505578 - DNA, 25 bp, Homo sapien
gaccagttgaactccctatatagag

SEQ ID NO: 3505579 - DNA, 25 bp, Homo sapien
cctatatagagttggcagcagcacc

SEQ ID NO: 3505580 - DNA, 25 bp, Homo sapien
ctgggtgaccagttgaactccctat

SEQ ID NO: 3505581 - DNA, 25 bp, Homo sapien
gaactccctatatagagttggcagc

SEQ ID NO: 3505582 - DNA, 25 bp, Homo sapien
caagcttcatcaggggcctttctgg

SEQ ID NO: 3505583 - DNA, 25 bp, Homo sapien
tctcgccttccctgactggcaaagg

SEQ ID NO: 3505584 - DNA, 25 bp, Homo sapien
gggcatgcccaagcctcttcagctt

SEQ ID NO: 3505585 - DNA, 25 bp, Homo sapien
gtctcactgttgtcaaatgtccaag

SEQ ID NO: 3505586 - DNA, 25 bp, Homo sapien
cacattccggaacctctggaacaac

SEQ ID NO: 3505587 - DNA, 25 bp, Homo sapien
gaacctctggaacaacatgtcacca

SEQ ID NO: 3505588 - DNA, 25 bp, Homo sapien
gaaaacacacattccggaacctctg

SEQ ID NO: 3505589 - DNA, 25 bp, Homo sapien
ctctggaacaacatgtcaccaggcc

SEQ ID NO: 3505590 - DNA, 25 bp, Homo sapien
tcctacagattttgctgggcctgcc

SEQ ID NO: 3505591 - DNA, 25 bp, Homo sapien
tgcagtctccttctggcctaacagg

SEQ ID NO: 3505592 - DNA, 25 bp, Homo sapien
ttgccagtccaagggtgcagtctcc

SEQ ID NO: 3505593 - DNA, 25 bp, Homo sapien
tcaatagtcctattagcagggcctt

SEQ ID NO: 3505594 - DNA, 25 bp, Homo sapien
aggctcacccagtcaccaaagcaag

SEQ ID NO: 3505595 - DNA, 25 bp, Homo sapien
tagggagacaactagagggactcct

SEQ ID NO: 3505596 - DNA, 25 bp, Homo sapien
cgaataaataaagtgcaaccgtggg

SEQ ID NO: 3505597 - DNA, 25 bp, Homo sapien
gaagctctgcacacatccttgggac

SEQ ID NO: 3505598 - DNA, 25 bp, Homo sapien
taaagcagtggttgccagcatcagc

SEQ ID NO: 3505599 - DNA, 25 bp, Homo sapien
acatggccatccgaggtcagtgcca

SEQ ID NO: 3505600 - DNA, 25 bp, Homo sapien
cagatgtgttgatataggacaggaa

SEQ ID NO: 3505601 - DNA, 25 bp, Homo sapien
gaggtagcgataggctttaaagcag

SEQ ID NO: 3505602 - DNA, 25 bp, Homo sapien
gcatatgggacacaccaggaaaccg

SEQ ID NO: 3505603 - DNA, 25 bp, Homo sapien
acgggcatatgggacacaccaggaa

SEQ ID NO: 3505604 - DNA, 25 bp, Homo sapien
ctcatgtcattcccaggccttactc

SEQ ID NO: 3505605 - DNA, 25 bp, Homo sapien
gggaacgggcatatgggacacacca

SEQ ID NO: 3505606 - DNA, 25 bp, Homo sapien
gccctcgccatgggagccaaacttg

SEQ ID NO: 3505607 - DNA, 25 bp, Homo sapien
cggctgttgccccagtcagccacaa

SEQ ID NO: 3505608 - DNA, 25 bp, Homo sapien
gggagccaaacttgaagaggaactc

SEQ ID NO: 3505609 - DNA, 25 bp, Homo sapien
ggaactctccatcggcactgtacac

SEQ ID NO: 3505610 - DNA, 25 bp, Homo sapien
gggacctggcctcaggcagagggta

SEQ ID NO: 3505611 - DNA, 25 bp, Homo sapien
tagggactggggacctggcctcagg

SEQ ID NO: 3505612 - DNA, 25 bp, Homo sapien
ggctagggactggggacctggcctc

SEQ ID NO: 3505613 - DNA, 25 bp, Homo sapien
gacctggcctcaggcagagggtagg

SEQ ID NO: 3505614 - DNA, 25 bp, Homo sapien
cctgggacaaagcagccatgcataa

SEQ ID NO: 3505615 - DNA, 25 bp, Homo sapien
gatttctcgaacacactattaaggt

SEQ ID NO: 3505616 - DNA, 25 bp, Homo sapien
tataccctatgcatacactgtctcg

SEQ ID NO: 3505617 - DNA, 25 bp, Homo sapien
ttgggaggagagcaagccccttaag

SEQ ID NO: 3505618 - DNA, 25 bp, Homo sapien
atggttatggaagtccgttactaca

SEQ ID NO: 3505619 - DNA, 25 bp, Homo sapien
atggaagtccgttactacaatttca

SEQ ID NO: 3505620 - DNA, 25 bp, Homo sapien
tggttatggaagtccgttactacaa

SEQ ID NO: 3505621 - DNA, 25 bp, Homo sapien
tatggaagtccgttactacaatttc

SEQ ID NO: 3505622 - DNA, 25 bp, Homo sapien
gggtatcagcatagatcttggagct

SEQ ID NO: 3505623 - DNA, 25 bp, Homo sapien
ccagagccaagatataggaggagag

SEQ ID NO: 3505624 - DNA, 25 bp, Homo sapien
tctgggaagataaaagctagggtgt

SEQ ID NO: 3505625 - DNA, 25 bp, Homo sapien
taacgtaagggaagtgggatctcca

SEQ ID NO: 3505626 - DNA, 25 bp, Homo sapien
cattgggctggaaggtaaagacgca

SEQ ID NO: 3505627 - DNA, 25 bp, Homo sapien
tgatatgtccattccggtctacggc

SEQ ID NO: 3505628 - DNA, 25 bp, Homo sapien
gcagcaagacttgttgtcgaccaca

SEQ ID NO: 3505629 - DNA, 25 bp, Homo sapien
ggccaaccagtttgccattgggctg

SEQ ID NO: 3505630 - DNA, 25 bp, Homo sapien
aacccagtaccaaagcagaatcttg

SEQ ID NO: 3505631 - DNA, 25 bp, Homo sapien
gtagtcctaacccagtaccaaagca

SEQ ID NO: 3505632 - DNA, 25 bp, Homo sapien
tccataagaggctttattctgacag

SEQ ID NO: 3505633 - DNA, 25 bp, Homo sapien
ggaagagaatatccataagaggctt

SEQ ID NO: 3505634 - DNA, 25 bp, Homo sapien
ccaacggttgtcatagtctgccaca

SEQ ID NO: 3505635 - DNA, 25 bp, Homo sapien
tatgtctccattggtgtccactgcc

SEQ ID NO: 3505636 - DNA, 25 bp, Homo sapien
agctgcccaggtgagcgtcctcgga

SEQ ID NO: 3505637 - DNA, 25 bp, Homo sapien
ggaacttgaactggccctcattgga

SEQ ID NO: 3505638 - DNA, 25 bp, Homo sapien
gggagggagcaggtaggaggggaga

SEQ ID NO: 3505639 - DNA, 25 bp, Homo sapien
ggagcagaggagcaaggggagggag

SEQ ID NO: 3505640 - DNA, 25 bp, Homo sapien
ctggagcagaggagcaaggggaggg

SEQ ID NO: 3505641 - DNA, 25 bp, Homo sapien
gcagaggagcaaggggagggagcag

SEQ ID NO: 3505642 - DNA, 25 bp, Homo sapien
tcagaggctgttgcagtattccagt

SEQ ID NO: 3505643 - DNA, 25 bp, Homo sapien
tatgggcaccacttgaggacttgtc

SEQ ID NO: 3505644 - DNA, 25 bp, Homo sapien
tctaggcatagcagtgacaagatca

SEQ ID NO: 3505645 - DNA, 25 bp, Homo sapien
taaaaggcacaaagtccagtatggg

SEQ ID NO: 3505646 - DNA, 25 bp, Homo sapien
gacacaagatgaacgagagccagga

SEQ ID NO: 3505647 - DNA, 25 bp, Homo sapien
tggcaggacagcactcatcagtatg

SEQ ID NO: 3505648 - DNA, 25 bp, Homo sapien
cagtttagcggtgaggtaatgcccc

SEQ ID NO: 3505649 - DNA, 25 bp, Homo sapien
tctaaggatgtaagcctcgcatggc

SEQ ID NO: 3505650 - DNA, 25 bp, Homo sapien
gttgctgtctgctaccacgatgcgg

SEQ ID NO: 3505651 - DNA, 25 bp, Homo sapien
ctgaatacactggttgttgctgtct

SEQ ID NO: 3505652 - DNA, 25 bp, Homo sapien
tgctaccacgatgcggccgctgctg

SEQ ID NO: 3505653 - DNA, 25 bp, Homo sapien
tgaatacactggttgttgctgtctg

SEQ ID NO: 3505654 - DNA, 25 bp, Homo sapien
ataattcattcagaggtcatcttga

SEQ ID NO: 3505655 - DNA, 25 bp, Homo sapien
agaggtcatcttgaacctcccttcc

SEQ ID NO: 3505656 - DNA, 25 bp, Homo sapien
ctggcccatctggctctgccctcgg

SEQ ID NO: 3505657 - DNA, 25 bp, Homo sapien
ccatctggctctgccctcggctgtc

SEQ ID NO: 3505658 - DNA, 25 bp, Homo sapien
tctggctctgccctcggctgtctgt

SEQ ID NO: 3505659 - DNA, 25 bp, Homo sapien
tggctctgccctcggctgtctgtac

SEQ ID NO: 3505660 - DNA, 25 bp, Homo sapien
ggctgtccgtagagcagcaccgaga

SEQ ID NO: 3505661 - DNA, 25 bp, Homo sapien
tttgccgcctgtgctgtacatggag

SEQ ID NO: 3505662 - DNA, 25 bp, Homo sapien
gacgagctcatcctcaattgggttg

SEQ ID NO: 3505663 - DNA, 25 bp, Homo sapien
tccgtgcgcgctgtgtacactagct

SEQ ID NO: 3505664 - DNA, 25 bp, Homo sapien
cgcccgtccttgtctttggtagtga

SEQ ID NO: 3505665 - DNA, 25 bp, Homo sapien
cagtgcgcccagattgagcaccgat

SEQ ID NO: 3505666 - DNA, 25 bp, Homo sapien
ccaccgtttcgtgtgcagtggcgct

SEQ ID NO: 3505667 - DNA, 25 bp, Homo sapien
gccggtgatctctgcacgcagctca

SEQ ID NO: 3505668 - DNA, 25 bp, Homo sapien
gcagctactgccgatgtgttcctga

SEQ ID NO: 3505669 - DNA, 25 bp, Homo sapien
gcattctcatgtggccgctccggga

SEQ ID NO: 3505670 - DNA, 25 bp, Homo sapien
tcgcatgtgcttgcgcaccagcaac

SEQ ID NO: 3505671 - DNA, 25 bp, Homo sapien
tgttcctgaccctggcgcagtgtgt

SEQ ID NO: 3505672 - DNA, 25 bp, Homo sapien
cagggggagtctctgtgattactga

SEQ ID NO: 3505673 - DNA, 25 bp, Homo sapien
agggggagtctctgtgattactgaa

SEQ ID NO: 3505674 - DNA, 25 bp, Homo sapien
tggcacagggggagtctctgtgatt

SEQ ID NO: 3505675 - DNA, 25 bp, Homo sapien
cacagggggagtctctgtgattact

SEQ ID NO: 3505676 - DNA, 25 bp, Homo sapien
gcctgcttgcgctgctgcagtgctt

SEQ ID NO: 3505677 - DNA, 25 bp, Homo sapien
cctgcttgcgctgctgcagtgcttg

SEQ ID NO: 3505678 - DNA, 25 bp, Homo sapien
tccaggtcctcgaacgctgcactga

SEQ ID NO: 3505679 - DNA, 25 bp, Homo sapien
ccaggtcctcgaacgctgcactgat

SEQ ID NO: 3505680 - DNA, 25 bp, Homo sapien
ctccaggtcctcgaacgctgcactg

SEQ ID NO: 3505681 - DNA, 25 bp, Homo sapien
ccccgactaaggcaattgctgcgga

SEQ ID NO: 3505682 - DNA, 25 bp, Homo sapien
ctgctggctgatgcccccgactaag

SEQ ID NO: 3505683 - DNA, 25 bp, Homo sapien
gctgatgcccccgactaaggcaatt

SEQ ID NO: 3505684 - DNA, 25 bp, Homo sapien
cgactaaggcaattgctgcggacag

SEQ ID NO: 3505685 - DNA, 25 bp, Homo sapien
cggccacgcacagcctcgagctggc

SEQ ID NO: 3505686 - DNA, 25 bp, Homo sapien
gccacgcacagcctcgagctggcgc

SEQ ID NO: 3505687 - DNA, 25 bp, Homo sapien
gcacagcctcgagctggcgctgcag

SEQ ID NO: 3505688 - DNA, 25 bp, Homo sapien
acgcacagcctcgagctggcgctgc

SEQ ID NO: 3505689 - DNA, 25 bp, Homo sapien
ccaccacatccctcagcagcactgt

SEQ ID NO: 3505690 - DNA, 25 bp, Homo sapien
accacatccctcagcagcactgtgc

SEQ ID NO: 3505691 - DNA, 25 bp, Homo sapien
cacatccctcagcagcactgtgcca

SEQ ID NO: 3505692 - DNA, 25 bp, Homo sapien
catccctcagcagcactgtgccatg

SEQ ID NO: 3505693 - DNA, 25 bp, Homo sapien
ctcaccacacatggccgtctcacag

SEQ ID NO: 3505694 - DNA, 25 bp, Homo sapien
caccacacatggccgtctcacaggc

SEQ ID NO: 3505695 - DNA, 25 bp, Homo sapien
tcacaggcctcacagtaaaactcca

SEQ ID NO: 3505696 - DNA, 25 bp, Homo sapien
cacaggcctcacagtaaaactccat

SEQ ID NO: 3505697 - DNA, 25 bp, Homo sapien
agagggcggccagccactacactga

SEQ ID NO: 3505698 - DNA, 25 bp, Homo sapien
tgctgcattgcctccatgaggctgc

SEQ ID NO: 3505699 - DNA, 25 bp, Homo sapien
gtctgccggcatactggacaggata

SEQ ID NO: 3505700 - DNA, 25 bp, Homo sapien
tgcagtgccgagacgccctgctctg

SEQ ID NO: 3505701 - DNA, 25 bp, Homo sapien
ggcagggatatagttttggagacat

SEQ ID NO: 3505702 - DNA, 25 bp, Homo sapien
gggcagggatatagttttggagaca

SEQ ID NO: 3505703 - DNA, 25 bp, Homo sapien
tgggcagggatatagttttggagac

SEQ ID NO: 3505704 - DNA, 25 bp, Homo sapien
ctgggcagggatatagttttggaga

SEQ ID NO: 3505705 - DNA, 25 bp, Homo sapien
agaaccttggggcactggtaccgat

SEQ ID NO: 3505706 - DNA, 25 bp, Homo sapien
ggcactggtaccgatccaggcagat

SEQ ID NO: 3505707 - DNA, 25 bp, Homo sapien
actggtaccgatccaggcagatgct

SEQ ID NO: 3505708 - DNA, 25 bp, Homo sapien
cttgtccattggctggacctctggg

SEQ ID NO: 3505709 - DNA, 25 bp, Homo sapien
ggcgcccacagatggctcccgccac

SEQ ID NO: 3505710 - DNA, 25 bp, Homo sapien
gcccacagatggctcccgccactca

SEQ ID NO: 3505711 - DNA, 25 bp, Homo sapien
ccacagatggctcccgccactcaca

SEQ ID NO: 3505712 - DNA, 25 bp, Homo sapien
gcgcccacagatggctcccgccact

SEQ ID NO: 3505713 - DNA, 25 bp, Homo sapien
tagaagaccttccatgactacccag

SEQ ID NO: 3505714 - DNA, 25 bp, Homo sapien
tcctggctgatgtgacacctactca

SEQ ID NO: 3505715 - DNA, 25 bp, Homo sapien
gcttctgggagatcaggcattcgtt

SEQ ID NO: 3505716 - DNA, 25 bp, Homo sapien
tctggcttgggtgctctacctctgt

SEQ ID NO: 3505717 - DNA, 25 bp, Homo sapien
gatatcaactgaacttggtggctgg

SEQ ID NO: 3505718 - DNA, 25 bp, Homo sapien
cagttggcagttggaaagatacgct

SEQ ID NO: 3505719 - DNA, 25 bp, Homo sapien
tatttaagagataggcccaggaagc

SEQ ID NO: 3505720 - DNA, 25 bp, Homo sapien
gccatgggcgtggatgacattaccc

SEQ ID NO: 3505721 - DNA, 25 bp, Homo sapien
gggctcaggctacaggagaaccaga

SEQ ID NO: 3505722 - DNA, 25 bp, Homo sapien
ctgaagccaattgcagaagggagga

SEQ ID NO: 3505723 - DNA, 25 bp, Homo sapien
gcagggctcaggctacaggagaacc

SEQ ID NO: 3505724 - DNA, 25 bp, Homo sapien
gctcaggctacaggagaaccagagg

SEQ ID NO: 3505725 - DNA, 25 bp, Homo sapien
agagagaggcacagcttttgaaaat

SEQ ID NO: 3505726 - DNA, 25 bp, Homo sapien
ctgctgctctcacggacatggacac

SEQ ID NO: 3505727 - DNA, 25 bp, Homo sapien
tggacacgcctcacgtgggcagaga

SEQ ID NO: 3505728 - DNA, 25 bp, Homo sapien
tgagcagccacagcccgaagaatcc

SEQ ID NO: 3505729 - DNA, 25 bp, Homo sapien
cttggggcccgcccgtcgcactcac

SEQ ID NO: 3505730 - DNA, 25 bp, Homo sapien
gatgcgagggcaaagctcggactgc

SEQ ID NO: 3505731 - DNA, 25 bp, Homo sapien
tgcggccactctgaagggcccgcgg

SEQ ID NO: 3505732 - DNA, 25 bp, Homo sapien
cggactagccgcacaggccggaggg

SEQ ID NO: 3505733 - DNA, 25 bp, Homo sapien
gctactgctgccagcgcccgtccgc

SEQ ID NO: 3505734 - DNA, 25 bp, Homo sapien
ccagtgcttgtgaaggaaacccaga

SEQ ID NO: 3505735 - DNA, 25 bp, Homo sapien
ggtgatgacacctagccctgactaa

SEQ ID NO: 3505736 - DNA, 25 bp, Homo sapien
gatttaggctcaacacctgggtgca

SEQ ID NO: 3505737 - DNA, 25 bp, Homo sapien
aagtcatgcctgtgaggatccctgc

SEQ ID NO: 3505738 - DNA, 25 bp, Homo sapien
tgatgtttccccagggcctaacgca

SEQ ID NO: 3505739 - DNA, 25 bp, Homo sapien
tagagtccccgacaaattgacctcg

SEQ ID NO: 3505740 - DNA, 25 bp, Homo sapien
gctttggctccaactgaggctggga

SEQ ID NO: 3505741 - DNA, 25 bp, Homo sapien
tcagtaggccctaagcactgtgggc

SEQ ID NO: 3505742 - DNA, 25 bp, Homo sapien
tctgtcattggtcagggagcacacc

SEQ ID NO: 3505743 - DNA, 25 bp, Homo sapien
caggaagatagacagggcagcaact

SEQ ID NO: 3505744 - DNA, 25 bp, Homo sapien
tattcagatgcaaggccagcaatgg

SEQ ID NO: 3505745 - DNA, 25 bp, Homo sapien
tagacgcaacatcattggcccaggg

SEQ ID NO: 3505746 - DNA, 25 bp, Homo sapien
ctagccaggagggtttctcagctcc

SEQ ID NO: 3505747 - DNA, 25 bp, Homo sapien
ctggaggccgcagcttgatgttgaa

SEQ ID NO: 3505748 - DNA, 25 bp, Homo sapien
tgctcctctagccaggagggtttct

SEQ ID NO: 3505749 - DNA, 25 bp, Homo sapien
tcagctcctggaggccgcagcttga

SEQ ID NO: 3505750 - DNA, 25 bp, Homo sapien
taggcggacacagcattgtggaaga

SEQ ID NO: 3505751 - DNA, 25 bp, Homo sapien
ttcccagcaaagtaggcggacacag

SEQ ID NO: 3505752 - DNA, 25 bp, Homo sapien
ctggttcccagcaaagtaggcggac

SEQ ID NO: 3505753 - DNA, 25 bp, Homo sapien
gcaaagtaggcggacacagcattgt

SEQ ID NO: 3505754 - DNA, 25 bp, Homo sapien
aatcctccaacaggaaagggccagg

SEQ ID NO: 3505755 - DNA, 25 bp, Homo sapien
tcttgagggtctatgagcctgagcc

SEQ ID NO: 3505756 - DNA, 25 bp, Homo sapien
ccagttatgttcctgggaccagcag

SEQ ID NO: 3505757 - DNA, 25 bp, Homo sapien
gaaacctcactggatttgtgggcct

SEQ ID NO: 3505758 - DNA, 25 bp, Homo sapien
tgttcggtaggcatcatattccagc

SEQ ID NO: 3505759 - DNA, 25 bp, Homo sapien
cagctcctctaagtctgttcggtag

SEQ ID NO: 3505760 - DNA, 25 bp, Homo sapien
catacttgtcccgatgggcctggaa

SEQ ID NO: 3505761 - DNA, 25 bp, Homo sapien
tgggcactctcaagtcgaccacgtg

SEQ ID NO: 3505762 - DNA, 25 bp, Homo sapien
aagttcacggctcctagcagcgttt

SEQ ID NO: 3505763 - DNA, 25 bp, Homo sapien
tccccattcttgcatagtagtttct

SEQ ID NO: 3505764 - DNA, 25 bp, Homo sapien
ttcacagtcatgagcgtgtcttcca

SEQ ID NO: 3505765 - DNA, 25 bp, Homo sapien
gaccaatgtgttgatgctagagaca

SEQ ID NO: 3505766 - DNA, 25 bp, Homo sapien
tgaagctgtagagcccttcattccc

SEQ ID NO: 3505767 - DNA, 25 bp, Homo sapien
actgaagctgtagagcccttcattc

SEQ ID NO: 3505768 - DNA, 25 bp, Homo sapien
gaagctgtagagcccttcattcccc

SEQ ID NO: 3505769 - DNA, 25 bp, Homo sapien
gactgaagctgtagagcccttcatt

SEQ ID NO: 3505770 - DNA, 25 bp, Homo sapien
ccagcaaggctctcttagccggaaa

SEQ ID NO: 3505771 - DNA, 25 bp, Homo sapien
ctctcttagccggaaagttagtggg

SEQ ID NO: 3505772 - DNA, 25 bp, Homo sapien
aaggctctcttagccggaaagttag

SEQ ID NO: 3505773 - DNA, 25 bp, Homo sapien
ctcttagccggaaagttagtgggat

SEQ ID NO: 3505774 - DNA, 25 bp, Homo sapien
caccctgaaggggttctccctgtgg

SEQ ID NO: 3505775 - DNA, 25 bp, Homo sapien
taggctgcctccacaggtgagtgct

SEQ ID NO: 3505776 - DNA, 25 bp, Homo sapien
tgcctccacaggtgagtgctgctgg

SEQ ID NO: 3505777 - DNA, 25 bp, Homo sapien
ccttaggctgcctccacaggtgagt

SEQ ID NO: 3505778 - DNA, 25 bp, Homo sapien
tagaggtgggctgtcagtgcccggc

SEQ ID NO: 3505779 - DNA, 25 bp, Homo sapien
aaggcatcacccagtgcatgctggg

SEQ ID NO: 3505780 - DNA, 25 bp, Homo sapien
aaaggcatcacccagtgcatgctgg

SEQ ID NO: 3505781 - DNA, 25 bp, Homo sapien
tgcagcaggctgtagaggtgggctg

SEQ ID NO: 3505782 - DNA, 25 bp, Homo sapien
tccgtgagcctcgaccaaatcgttc

SEQ ID NO: 3505783 - DNA, 25 bp, Homo sapien
agcaactcaatctgcagctctagct

SEQ ID NO: 3505784 - DNA, 25 bp, Homo sapien
aatcgttctgataacagttgctttg

SEQ ID NO: 3505785 - DNA, 25 bp, Homo sapien
aactcaatctgcagctctagctcca

SEQ ID NO: 3505786 - DNA, 25 bp, Homo sapien
tattacgatcacgaagaaaagggaa

SEQ ID NO: 3505787 - DNA, 25 bp, Homo sapien
agatgggatattacgatcacgaaga

SEQ ID NO: 3505788 - DNA, 25 bp, Homo sapien
gggatattacgatcacgaagaaaag

SEQ ID NO: 3505789 - DNA, 25 bp, Homo sapien
gatattacgatcacgaagaaaaggg

SEQ ID NO: 3505790 - DNA, 25 bp, Homo sapien
tttcttgacgatgtcaaacttttct

SEQ ID NO: 3505791 - DNA, 25 bp, Homo sapien
gttgatgccccatttcttgacgatg

SEQ ID NO: 3505792 - DNA, 25 bp, Homo sapien
tgccccatttcttgacgatgtcaaa

SEQ ID NO: 3505793 - DNA, 25 bp, Homo sapien
gatgccccatttcttgacgatgtca

SEQ ID NO: 3505794 - DNA, 25 bp, Homo sapien
ggtgctgtgagatggatggcggcca

SEQ ID NO: 3505795 - DNA, 25 bp, Homo sapien
ggccagaaggagtggtgctgtgaga

SEQ ID NO: 3505796 - DNA, 25 bp, Homo sapien
gaaggagtggtgctgtgagatggat

SEQ ID NO: 3505797 - DNA, 25 bp, Homo sapien
ctgtgagatggatggcggccagacc

SEQ ID NO: 3505798 - DNA, 25 bp, Homo sapien
taaaggatcaagttctctgacacca

SEQ ID NO: 3505799 - DNA, 25 bp, Homo sapien
ctaaaggatcaagttctctgacacc

SEQ ID NO: 3505800 - DNA, 25 bp, Homo sapien
acttctcttcgagcacatgaaattg

SEQ ID NO: 3505801 - DNA, 25 bp, Homo sapien
acccatacttctcttcgagcacatg

SEQ ID NO: 3505802 - DNA, 25 bp, Homo sapien
ccatacttctcttcgagcacatgaa

SEQ ID NO: 3505803 - DNA, 25 bp, Homo sapien
catacttctcttcgagcacatgaaa

SEQ ID NO: 3505804 - DNA, 25 bp, Homo sapien
gaactcggactttgcgcggtgagaa

SEQ ID NO: 3505805 - DNA, 25 bp, Homo sapien
cctgcttactaggaggaactcggac

SEQ ID NO: 3505806 - DNA, 25 bp, Homo sapien
actggatgctcctgcttactaggag

SEQ ID NO: 3505807 - DNA, 25 bp, Homo sapien
ctgaaggagatgctagagacaactg

SEQ ID NO: 3505808 - DNA, 25 bp, Homo sapien
gtttgcagggagttgttggtgtaca

SEQ ID NO: 3505809 - DNA, 25 bp, Homo sapien
tgcagggagttgttggtgtacaggg

SEQ ID NO: 3505810 - DNA, 25 bp, Homo sapien
ggtgtacaggggcagaggaaacaga

SEQ ID NO: 3505811 - DNA, 25 bp, Homo sapien
gggtttgcagggagttgttggtgta

SEQ ID NO: 3505812 - DNA, 25 bp, Homo sapien
gagtccatgaggttcctacaagcag

SEQ ID NO: 3505813 - DNA, 25 bp, Homo sapien
caaaagggaaatggatggacaacgc

SEQ ID NO: 3505814 - DNA, 25 bp, Homo sapien
gaaacctggttgcattcccatgtgg

SEQ ID NO: 3505815 - DNA, 25 bp, Homo sapien
agcagaagttcccaagatctccaga

SEQ ID NO: 3505816 - DNA, 25 bp, Homo sapien
tggggatgagtccatcaccagagcc

SEQ ID NO: 3505817 - DNA, 25 bp, Homo sapien
gtttcattgaggttgggtcctgaca

SEQ ID NO: 3505818 - DNA, 25 bp, Homo sapien
tggtttcattgaggttgggtcctga

SEQ ID NO: 3505819 - DNA, 25 bp, Homo sapien
ctgtggggatgagtccatcaccaga

SEQ ID NO: 3505820 - DNA, 25 bp, Homo sapien
ttcccgtggatagggatctccattg

SEQ ID NO: 3505821 - DNA, 25 bp, Homo sapien
cctggcttcgccgttcccgtggata

SEQ ID NO: 3505822 - DNA, 25 bp, Homo sapien
tggcttcgccgttcccgtggatagg

SEQ ID NO: 3505823 - DNA, 25 bp, Homo sapien
cgtggatagggatctccattgtggc

SEQ ID NO: 3505824 - DNA, 25 bp, Homo sapien
tattggagtaaaactctccacccca

SEQ ID NO: 3505825 - DNA, 25 bp, Homo sapien
ttggagtaaaactctccaccccagc

SEQ ID NO: 3505826 - DNA, 25 bp, Homo sapien
tggagtaaaactctccaccccagca

SEQ ID NO: 3505827 - DNA, 25 bp, Homo sapien
gagtaaaactctccaccccagcacc

SEQ ID NO: 3505828 - DNA, 25 bp, Homo sapien
gagtgtcccagcgtttggccatcat

SEQ ID NO: 3505829 - DNA, 25 bp, Homo sapien
caaaacgcacatttgaaacaggcac

SEQ ID NO: 3505830 - DNA, 25 bp, Homo sapien
cactggccagcactctagaagaagg

SEQ ID NO: 3505831 - DNA, 25 bp, Homo sapien
aaagcacggtgtcttctcacaagcc

SEQ ID NO: 3505832 - DNA, 25 bp, Homo sapien
ctctcccaggatatcggtgaccctt

SEQ ID NO: 3505833 - DNA, 25 bp, Homo sapien
ccacagtcagttatgtctcccaggt

SEQ ID NO: 3505834 - DNA, 25 bp, Homo sapien
tcccaggtgtgtgagtccccgcccc

SEQ ID NO: 3505835 - DNA, 25 bp, Homo sapien
ggatatcggtgacccttccacagtc

SEQ ID NO: 3505836 - DNA, 25 bp, Homo sapien
gccctctggacaggtttgtgcgttc

SEQ ID NO: 3505837 - DNA, 25 bp, Homo sapien
gtttgtgcgttcaacttcccgtcgc

SEQ ID NO: 3505838 - DNA, 25 bp, Homo sapien
tggacaggtttgtgcgttcaacttc

SEQ ID NO: 3505839 - DNA, 25 bp, Homo sapien
ccgtcgcccaagcatgttcctctca

SEQ ID NO: 3505840 - DNA, 25 bp, Homo sapien
ctcgggctccagttcccgtcgcgat

SEQ ID NO: 3505841 - DNA, 25 bp, Homo sapien
ggaaatgacgtcctctccgggcaga

SEQ ID NO: 3505842 - DNA, 25 bp, Homo sapien
gtcgcgatcctagcagcaggtcagg

SEQ ID NO: 3505843 - DNA, 25 bp, Homo sapien
agggactcggcggaaatgacgtcct

SEQ ID NO: 3505844 - DNA, 25 bp, Homo sapien
gacttcagtggctcataaccgtgag

SEQ ID NO: 3505845 - DNA, 25 bp, Homo sapien
cctccttgggaagttagtggccaca

SEQ ID NO: 3505846 - DNA, 25 bp, Homo sapien
ggagctatcgaagtacaacggatca

SEQ ID NO: 3505847 - DNA, 25 bp, Homo sapien
caacggatcaaaaaaccacagggct

SEQ ID NO: 3505848 - DNA, 25 bp, Homo sapien
caaaggtctgtgtggttgtcttcac

SEQ ID NO: 3505849 - DNA, 25 bp, Homo sapien
tcttcacgggcaatcaggaagggag

SEQ ID NO: 3505850 - DNA, 25 bp, Homo sapien
tgcaatgcagccaaatccgaggaag

SEQ ID NO: 3505851 - DNA, 25 bp, Homo sapien
ttctcaggatgagcagtaaaacctt

SEQ ID NO: 3505852 - DNA, 25 bp, Homo sapien
taggaccttacccacagggtggcac

SEQ ID NO: 3505853 - DNA, 25 bp, Homo sapien
cacggccggcctatacaaagtttct

SEQ ID NO: 3505854 - DNA, 25 bp, Homo sapien
gatgggacctgtgatactgtgctgc

SEQ ID NO: 3505855 - DNA, 25 bp, Homo sapien
ggcacattctgcagatttcgtgcaa

SEQ ID NO: 3505856 - DNA, 25 bp, Homo sapien
tcaaaatttcagttccagacctagc

SEQ ID NO: 3505857 - DNA, 25 bp, Homo sapien
atttcagttccagacctagcgtgta

SEQ ID NO: 3505858 - DNA, 25 bp, Homo sapien
tagcgtgtaaccactggcattgtta

SEQ ID NO: 3505859 - DNA, 25 bp, Homo sapien
cagacctagcgtgtaaccactggca

SEQ ID NO: 3505860 - DNA, 25 bp, Homo sapien
gtgttggctgagcctaagctttcaa

SEQ ID NO: 3505861 - DNA, 25 bp, Homo sapien
gccatatccgtagcccttgttgaag

SEQ ID NO: 3505862 - DNA, 25 bp, Homo sapien
attaggccatatccgtagcccttgt

SEQ ID NO: 3505863 - DNA, 25 bp, Homo sapien
gtagcccttgttgaagacattcctg

SEQ ID NO: 3505864 - DNA, 25 bp, Homo sapien
agcatttggagattgagagaattcc

SEQ ID NO: 3505865 - DNA, 25 bp, Homo sapien
tagcatttggagattgagagaattc

SEQ ID NO: 3505866 - DNA, 25 bp, Homo sapien
catttggagattgagagaattcctt

SEQ ID NO: 3505867 - DNA, 25 bp, Homo sapien
tttagcatttggagattgagagaat

SEQ ID NO: 3505868 - DNA, 25 bp, Homo sapien
gaatttcattttgacccttccagag

SEQ ID NO: 3505869 - DNA, 25 bp, Homo sapien
acttaaaccggctccaaggcagagt

SEQ ID NO: 3505870 - DNA, 25 bp, Homo sapien
gcactctggccccttgagtgatata

SEQ ID NO: 3505871 - DNA, 25 bp, Homo sapien
ccttcccacatgtctatgtgactta

SEQ ID NO: 3505872 - DNA, 25 bp, Homo sapien
gagcatctggcgagagtctcatccc

SEQ ID NO: 3505873 - DNA, 25 bp, Homo sapien
ggcgagagtctcatcccatggtgga

SEQ ID NO: 3505874 - DNA, 25 bp, Homo sapien
ccaagagcatctggcgagagtctca

SEQ ID NO: 3505875 - DNA, 25 bp, Homo sapien
gaagtccaagagcatctggcgagag

SEQ ID NO: 3505876 - DNA, 25 bp, Homo sapien
cagaagctcttacgtttaactggat

SEQ ID NO: 3505877 - DNA, 25 bp, Homo sapien
agctcttacgtttaactggatccca

SEQ ID NO: 3505878 - DNA, 25 bp, Homo sapien
gaagctcttacgtttaactggatcc

SEQ ID NO: 3505879 - DNA, 25 bp, Homo sapien
ctcttacgtttaactggatcccatt

SEQ ID NO: 3505880 - DNA, 25 bp, Homo sapien
atgttgatcaagtgacataacctct

SEQ ID NO: 3505881 - DNA, 25 bp, Homo sapien
ataatgaagtggagccatgctgcct

SEQ ID NO: 3505882 - DNA, 25 bp, Homo sapien
tgatgttgatcaagtgacataacct

SEQ ID NO: 3505883 - DNA, 25 bp, Homo sapien
atataatgaagtggagccatgctgc

SEQ ID NO: 3505884 - DNA, 25 bp, Homo sapien
ttgggcagcaacatgaagacacttt

SEQ ID NO: 3505885 - DNA, 25 bp, Homo sapien
caccaatgtgtcagtggttgttaca

SEQ ID NO: 3505886 - DNA, 25 bp, Homo sapien
tagtgcgcacacactttaactagtg

SEQ ID NO: 3505887 - DNA, 25 bp, Homo sapien
tagggctttagtccgtacatttgat

SEQ ID NO: 3505888 - DNA, 25 bp, Homo sapien
gtaaaggctctggataatgtgggcc

SEQ ID NO: 3505889 - DNA, 25 bp, Homo sapien
tgcagcacattgataaatggcaccc

SEQ ID NO: 3505890 - DNA, 25 bp, Homo sapien
gattgaaaggagattgtcttcccac

SEQ ID NO: 3505891 - DNA, 25 bp, Homo sapien
gcctgtgggcataatttcagatacc

SEQ ID NO: 3505892 - DNA, 25 bp, Homo sapien
gagttacgtggatactcatagcagc

SEQ ID NO: 3505893 - DNA, 25 bp, Homo sapien
caaagcacttccatggagttacgtg

SEQ ID NO: 3505894 - DNA, 25 bp, Homo sapien
cccaggaagcatagtacagtgagct

SEQ ID NO: 3505895 - DNA, 25 bp, Homo sapien
tactggctctacatattggctgatg

SEQ ID NO: 3505896 - DNA, 25 bp, Homo sapien
aactctcgtttcaaggtcatggatg

SEQ ID NO: 3505897 - DNA, 25 bp, Homo sapien
ccctgcagaaggtagaaccctagtg

SEQ ID NO: 3505898 - DNA, 25 bp, Homo sapien
catggatgaccagtatcgaaccctg

SEQ ID NO: 3505899 - DNA, 25 bp, Homo sapien
ctctgtagctgaccccatggttctg

SEQ ID NO: 3505900 - DNA, 25 bp, Homo sapien
catcatgagtctggagagcgtgctc

SEQ ID NO: 3505901 - DNA, 25 bp, Homo sapien
gaatcatgcgaagcccagctatggg

SEQ ID NO: 3505902 - DNA, 25 bp, Homo sapien
gctggctgctcgactggaatcatgc

SEQ ID NO: 3505903 - DNA, 25 bp, Homo sapien
gctatgggtacgacgctgctttcct

SEQ ID NO: 3505904 - DNA, 25 bp, Homo sapien
ggaggtgctgcagtaagtcccactt

SEQ ID NO: 3505905 - DNA, 25 bp, Homo sapien
gaggtgctggtagagccacatcacc

SEQ ID NO: 3505906 - DNA, 25 bp, Homo sapien
gactgaacggctcttgtatgtggtg

SEQ ID NO: 3505907 - DNA, 25 bp, Homo sapien
ttcttgctggaggacctgcacctag

SEQ ID NO: 3505908 - DNA, 25 bp, Homo sapien
aaacaacagtgaatacgagtccata

SEQ ID NO: 3505909 - DNA, 25 bp, Homo sapien
tcaatggactcatattttcatgaag

SEQ ID NO: 3505910 - DNA, 25 bp, Homo sapien
gactgctgaaggttgtggcaatttc

SEQ ID NO: 3505911 - DNA, 25 bp, Homo sapien
gaagaatttgtctgtggcatgtgat

SEQ ID NO: 3505912 - DNA, 25 bp, Homo sapien
gaagctgttctgtagcacggatgga

SEQ ID NO: 3505913 - DNA, 25 bp, Homo sapien
tttaggcccacaggagtatgcggca

SEQ ID NO: 3505914 - DNA, 25 bp, Homo sapien
tactgactagagaggctttaggccc

SEQ ID NO: 3505915 - DNA, 25 bp, Homo sapien
tatgatgtaatcaacctgacctggg

SEQ ID NO: 3505916 - DNA, 25 bp, Homo sapien
gcaataagcacctaatcaaaaaagt

SEQ ID NO: 3505917 - DNA, 25 bp, Homo sapien
aatacgacagaccaaaatctacggg

SEQ ID NO: 3505918 - DNA, 25 bp, Homo sapien
tggccagtggatcaacaaataagaa

SEQ ID NO: 3505919 - DNA, 25 bp, Homo sapien
tatattcttcccctcaacacgtgtt

SEQ ID NO: 3505920 - DNA, 25 bp, Homo sapien
tagacattctcagcaaccgaaagtg

SEQ ID NO: 3505921 - DNA, 25 bp, Homo sapien
ccgaaagtgctatagatcaattggg

SEQ ID NO: 3505922 - DNA, 25 bp, Homo sapien
caaataaagggatatggagcagcca

SEQ ID NO: 3505923 - DNA, 25 bp, Homo sapien
aatctgttcaataagtctggaaggc

SEQ ID NO: 3505924 - DNA, 25 bp, Homo sapien
aataagttggacatatttgcgtggc

SEQ ID NO: 3505925 - DNA, 25 bp, Homo sapien
tatctatgtgaggataactggtatc

SEQ ID NO: 3505926 - DNA, 25 bp, Homo sapien
tcttgattaccgtaactacagtaag

SEQ ID NO: 3505927 - DNA, 25 bp, Homo sapien
tacaattgggtagattcagtcctcc

SEQ ID NO: 3505928 - DNA, 25 bp, Homo sapien
gcaatcttgctgaactgacttattt

SEQ ID NO: 3505929 - DNA, 25 bp, Homo sapien
attttgcaatcttgctgaactgact

SEQ ID NO: 3505930 - DNA, 25 bp, Homo sapien
tttgcaatcttgctgaactgactta

SEQ ID NO: 3505931 - DNA, 25 bp, Homo sapien
tcttgctgaactgacttatttttgt

SEQ ID NO: 3505932 - DNA, 25 bp, Homo sapien
ggtaaacttgcagcaatataactcc

SEQ ID NO: 3505933 - DNA, 25 bp, Homo sapien
cactataaatctcattgcagtccac

SEQ ID NO: 3505934 - DNA, 25 bp, Homo sapien
tcctaggttattgaggtgagagctt

SEQ ID NO: 3505935 - DNA, 25 bp, Homo sapien
caccttctgagctattgccatgtat

SEQ ID NO: 3505936 - DNA, 25 bp, Homo sapien
tacctgttgaatgtccagtccgagg

SEQ ID NO: 3505937 - DNA, 25 bp, Homo sapien
ctgttgcagaaagcccaatatgtac

SEQ ID NO: 3505938 - DNA, 25 bp, Homo sapien
ttcttggcttcaatgggaatgctgc

SEQ ID NO: 3505939 - DNA, 25 bp, Homo sapien
taaccacagtttattgtagtcaaac

SEQ ID NO: 3505940 - DNA, 25 bp, Homo sapien
ccacttggcagtctgagatcagtca

SEQ ID NO: 3505941 - DNA, 25 bp, Homo sapien
tctgccaatgggataccctaaagga

SEQ ID NO: 3505942 - DNA, 25 bp, Homo sapien
cagcagtctgactacccacttggca

SEQ ID NO: 3505943 - DNA, 25 bp, Homo sapien
cattgccaaatttcctgttagggtc

SEQ ID NO: 3505944 - DNA, 25 bp, Homo sapien
attcccaggagagctgcgtacaagg

SEQ ID NO: 3505945 - DNA, 25 bp, Homo sapien
tgaagcactttagcacgaggaggct

SEQ ID NO: 3505946 - DNA, 25 bp, Homo sapien
caaccaaagtcagttagtgccccag

SEQ ID NO: 3505947 - DNA, 25 bp, Homo sapien
tataagtaagagtcaggctggctgc

SEQ ID NO: 3505948 - DNA, 25 bp, Homo sapien
agcagctttaaactggataagttgc

SEQ ID NO: 3505949 - DNA, 25 bp, Homo sapien
tgaccatgttctcccaaaccactga

SEQ ID NO: 3505950 - DNA, 25 bp, Homo sapien
taaagaatgagtgaaataatgacca

SEQ ID NO: 3505951 - DNA, 25 bp, Homo sapien
taaactggataagttgctgacaggt

SEQ ID NO: 3505952 - DNA, 25 bp, Homo sapien
gaagcaattagaccaccagtaaggc

SEQ ID NO: 3505953 - DNA, 25 bp, Homo sapien
gatctcagttatccaggccggagta

SEQ ID NO: 3505954 - DNA, 25 bp, Homo sapien
gaataatggaaatggctcagccacc

SEQ ID NO: 3505955 - DNA, 25 bp, Homo sapien
tagaaggacccttgaaacgaagcca

SEQ ID NO: 3505956 - DNA, 25 bp, Homo sapien
tgttcggaaagatgagcaaactgcc

SEQ ID NO: 3505957 - DNA, 25 bp, Homo sapien
caaacagtctcaagttggtggctca

SEQ ID NO: 3505958 - DNA, 25 bp, Homo sapien
tcactgctgattgctctgggcccaa

SEQ ID NO: 3505959 - DNA, 25 bp, Homo sapien
tatatctcaaatgacaagctccggg

SEQ ID NO: 3505960 - DNA, 25 bp, Homo sapien
ttcataacacctgaagtgtcatgag

SEQ ID NO: 3505961 - DNA, 25 bp, Homo sapien
ggccatgtggcttcttagttggaaa

SEQ ID NO: 3505962 - DNA, 25 bp, Homo sapien
aggaagctgatctgtagacagatca

SEQ ID NO: 3505963 - DNA, 25 bp, Homo sapien
tgccttgaattccaaaccatctagt

SEQ ID NO: 3505964 - DNA, 25 bp, Homo sapien
tattgtttagctagccccagtgact

SEQ ID NO: 3505965 - DNA, 25 bp, Homo sapien
tcccctttcaaggaagatccagagg

SEQ ID NO: 3505966 - DNA, 25 bp, Homo sapien
gaaacagtcttcacagttctgagcc

SEQ ID NO: 3505967 - DNA, 25 bp, Homo sapien
ccaagaagccttcagtagagcaagt

SEQ ID NO: 3505968 - DNA, 25 bp, Homo sapien
gcgcttgtagagacatggctgaagc

SEQ ID NO: 3505969 - DNA, 25 bp, Homo sapien
ggctgaagctgcaggcctgaaagct

SEQ ID NO: 3505970 - DNA, 25 bp, Homo sapien
caggcctgaaagctgagccttgggc

SEQ ID NO: 3505971 - DNA, 25 bp, Homo sapien
ctgcgcttgtagagacatggctgaa

SEQ ID NO: 3505972 - DNA, 25 bp, Homo sapien
agaagaaatggctgttggtcaggtc

SEQ ID NO: 3505973 - DNA, 25 bp, Homo sapien
cagtcttttggaaatcaaacaagaa

SEQ ID NO: 3505974 - DNA, 25 bp, Homo sapien
ggcccagtcttttggaaatcaaaca

SEQ ID NO: 3505975 - DNA, 25 bp, Homo sapien
aacaagaagaaatggctgttggtca

SEQ ID NO: 3505976 - DNA, 25 bp, Homo sapien
aacaccagtaccctgaatagggcca

SEQ ID NO: 3505977 - DNA, 25 bp, Homo sapien
aatgtctgttcctgtgcctaaagcc

SEQ ID NO: 3505978 - DNA, 25 bp, Homo sapien
tctgctcacaaagcttcccagggct

SEQ ID NO: 3505979 - DNA, 25 bp, Homo sapien
gggccacatgagacaaaaacaggta

SEQ ID NO: 3505980 - DNA, 25 bp, Homo sapien
tggagacaatcttgaagcctagctt

SEQ ID NO: 3505981 - DNA, 25 bp, Homo sapien
gtcacagcccgcagaaaggttcgaa

SEQ ID NO: 3505982 - DNA, 25 bp, Homo sapien
tcctcaaagcggctgctgacctcag

SEQ ID NO: 3505983 - DNA, 25 bp, Homo sapien
ttgaagcctagcttggtcacagccc

SEQ ID NO: 3505984 - DNA, 25 bp, Homo sapien
gcttcagtactctatttgcctcctc

SEQ ID NO: 3505985 - DNA, 25 bp, Homo sapien
ttcagtactctatttgcctcctcta

SEQ ID NO: 3505986 - DNA, 25 bp, Homo sapien
cctggcttcagtactctatttgcct

SEQ ID NO: 3505987 - DNA, 25 bp, Homo sapien
gtactctatttgcctcctctaggaa

SEQ ID NO: 3505988 - DNA, 25 bp, Homo sapien
agtcaaagcaatgcacagggttccg

SEQ ID NO: 3505989 - DNA, 25 bp, Homo sapien
cagggttccggatacttgaagccaa

SEQ ID NO: 3505990 - DNA, 25 bp, Homo sapien
tacttgaagccaagcggcaatcccc

SEQ ID NO: 3505991 - DNA, 25 bp, Homo sapien
tcacacacagtgaccctagggtcca

SEQ ID NO: 3505992 - DNA, 25 bp, Homo sapien
ggcaagggtcacatattggtctgat

SEQ ID NO: 3505993 - DNA, 25 bp, Homo sapien
aaggcaagggtcacatattggtctg

SEQ ID NO: 3505994 - DNA, 25 bp, Homo sapien
agggtcacatattggtctgatctga

SEQ ID NO: 3505995 - DNA, 25 bp, Homo sapien
tgagcctatgactgacccaccacat

SEQ ID NO: 3505996 - DNA, 25 bp, Homo sapien
tcctgggaacaggagacacctctgt

SEQ ID NO: 3505997 - DNA, 25 bp, Homo sapien
cattgaggtagcgaaatcgggcccc

SEQ ID NO: 3505998 - DNA, 25 bp, Homo sapien
tcttgttcttttgccggttccgcca

SEQ ID NO: 3505999 - DNA, 25 bp, Homo sapien
cgctggcgaagatccctggcgatgc

SEQ ID NO: 3506000 - DNA, 25 bp, Homo sapien
cttgcggcttaatgtatgagggggt

SEQ ID NO: 3506001 - DNA, 25 bp, Homo sapien
tggtggatcatttgtagtactaccc

SEQ ID NO: 3506002 - DNA, 25 bp, Homo sapien
tttgctttggtggatcatttgtagt

SEQ ID NO: 3506003 - DNA, 25 bp, Homo sapien
tggatcatttgtagtactacccttc

SEQ ID NO: 3506004 - DNA, 25 bp, Homo sapien
cagagtcacttatacataggctggg

SEQ ID NO: 3506005 - DNA, 25 bp, Homo sapien
agagatgctgcctctagggcccgta

SEQ ID NO: 3506006 - DNA, 25 bp, Homo sapien
tacttcagcagaggcactggcaaat

SEQ ID NO: 3506007 - DNA, 25 bp, Homo sapien
tcagagtcactgcaaggtgggccct

SEQ ID NO: 3506008 - DNA, 25 bp, Homo sapien
ggatgacagtgggcctaaagagaat

SEQ ID NO: 3506009 - DNA, 25 bp, Homo sapien
atgacagtgggcctaaagagaatgg

SEQ ID NO: 3506010 - DNA, 25 bp, Homo sapien
cagtgggcctaaagagaatggatga

SEQ ID NO: 3506011 - DNA, 25 bp, Homo sapien
gacagtgggcctaaagagaatggat

SEQ ID NO: 3506012 - DNA, 25 bp, Homo sapien
ggccgcaggcggaggtcgtgagatt

SEQ ID NO: 3506013 - DNA, 25 bp, Homo sapien
tcggcccactcaggctcttcgaaca

SEQ ID NO: 3506014 - DNA, 25 bp, Homo sapien
cggaggtcgtgagattacgggccca

SEQ ID NO: 3506015 - DNA, 25 bp, Homo sapien
gtcgtgagattacgggcccaaggcc

SEQ ID NO: 3506016 - DNA, 25 bp, Homo sapien
cagacctgccagaaccgacccggaa

SEQ ID NO: 3506017 - DNA, 25 bp, Homo sapien
ggaaaccaaagcgtgacagccaggg

SEQ ID NO: 3506018 - DNA, 25 bp, Homo sapien
cgacccggaaaccaaagcgtgacag

SEQ ID NO: 3506019 - DNA, 25 bp, Homo sapien
tcctctggaagtcggagcgctcaga

SEQ ID NO: 3506020 - DNA, 25 bp, Homo sapien
ccgggacgctgctatggacgacatt

SEQ ID NO: 3506021 - DNA, 25 bp, Homo sapien
ttttcactcagtgccgggagggcaa

SEQ ID NO: 3506022 - DNA, 25 bp, Homo sapien
gtcgccgttcgcctgtggctggaca

SEQ ID NO: 3506023 - DNA, 25 bp, Homo sapien
tctctcctgtagaggataaagcttg

SEQ ID NO: 3506024 - DNA, 25 bp, Homo sapien
aaagctgtatagtgacataatgaga

SEQ ID NO: 3506025 - DNA, 25 bp, Homo sapien
aattgcctagttcatcgtagaagta

SEQ ID NO: 3506026 - DNA, 25 bp, Homo sapien
cagtatcgtcttggatgctttgtga

SEQ ID NO: 3506027 - DNA, 25 bp, Homo sapien
agttcatcgtagaagtaatgatgtc

SEQ ID NO: 3506028 - DNA, 25 bp, Homo sapien
tgtgtgcgactctaggcaaggcctg

SEQ ID NO: 3506029 - DNA, 25 bp, Homo sapien
tccagatgcccgtacagctgaaggg

SEQ ID NO: 3506030 - DNA, 25 bp, Homo sapien
aatatcacggtgtccatgactggct

SEQ ID NO: 3506031 - DNA, 25 bp, Homo sapien
gattatccccaggaagcattacgcc

SEQ ID NO: 3506032 - DNA, 25 bp, Homo sapien
tatcagcttccagtactgcctgtgg

SEQ ID NO: 3506033 - DNA, 25 bp, Homo sapien
gaagccatgatcgtccctttgagga

SEQ ID NO: 3506034 - DNA, 25 bp, Homo sapien
acaacactaaggcatccggaggctg

SEQ ID NO: 3506035 - DNA, 25 bp, Homo sapien
gaatgaacacgggaatgtgcccctg

SEQ ID NO: 3506036 - DNA, 25 bp, Homo sapien
tacatgccatgagggtcagtcacag

SEQ ID NO: 3506037 - DNA, 25 bp, Homo sapien
cctagagtcgcacacaggaagtgac

SEQ ID NO: 3506038 - DNA, 25 bp, Homo sapien
tcctcaaagggacgatcatggcttc

SEQ ID NO: 3506039 - DNA, 25 bp, Homo sapien
cagctgtacgggcatctggatggcc

SEQ ID NO: 3506040 - DNA, 25 bp, Homo sapien
tggctttgtccacaggcatctctcc

SEQ ID NO: 3506041 - DNA, 25 bp, Homo sapien
caggcatctctccatacttgttaca

SEQ ID NO: 3506042 - DNA, 25 bp, Homo sapien
gacacaagctaggggatgggggaga

SEQ ID NO: 3506043 - DNA, 25 bp, Homo sapien
aggcatctctccatacttgttacag

SEQ ID NO: 3506044 - DNA, 25 bp, Homo sapien
acaggcatctctccatacttgttac

SEQ ID NO: 3506045 - DNA, 25 bp, Homo sapien
aggacacaagctaggggatggggga

SEQ ID NO: 3506046 - DNA, 25 bp, Homo sapien
ggagagatgcctgtggacaaagcca

SEQ ID NO: 3506047 - DNA, 25 bp, Homo sapien
tcccccatcccctagcttgtgtcct

SEQ ID NO: 3506048 - DNA, 25 bp, Homo sapien
tgtaacaagtatggagagatgcctg

SEQ ID NO: 3506049 - DNA, 25 bp, Homo sapien
ctcccccatcccctagcttgtgtcc

SEQ ID NO: 3506050 - DNA, 25 bp, Homo sapien
gtaacaagtatggagagatgcctgt

SEQ ID NO: 3506051 - DNA, 25 bp, Homo sapien
ctgtaacaagtatggagagatgcct

SEQ ID NO: 3506052 - DNA, 25 bp, Homo sapien
ggttgagattctggcccatcttctc

SEQ ID NO: 3506053 - DNA, 25 bp, Homo sapien
tgtccttgtatggaatacggttgag

SEQ ID NO: 3506054 - DNA, 25 bp, Homo sapien
gccgagtgcgggtggtccccttcca

SEQ ID NO: 3506055 - DNA, 25 bp, Homo sapien
ggaatacggttgagattctggccca

SEQ ID NO: 3506056 - DNA, 25 bp, Homo sapien
cgggtggtccccttccagaatgtgt

SEQ ID NO: 3506057 - DNA, 25 bp, Homo sapien
cagaatgtgtccttgtatggaatac

SEQ ID NO: 3506058 - DNA, 25 bp, Homo sapien
acacattctggaaggggaccacccg

SEQ ID NO: 3506059 - DNA, 25 bp, Homo sapien
caaccgtattccatacaaggacaca

SEQ ID NO: 3506060 - DNA, 25 bp, Homo sapien
gtattccatacaaggacacattctg

SEQ ID NO: 3506061 - DNA, 25 bp, Homo sapien
gagaagatgggccagaatctcaacc

SEQ ID NO: 3506062 - DNA, 25 bp, Homo sapien
gaatctcaaccgtattccatacaag

SEQ ID NO: 3506063 - DNA, 25 bp, Homo sapien
gatgggccagaatctcaaccgtatt

SEQ ID NO: 3506064 - DNA, 25 bp, Homo sapien
catttcctaagagtgtgggcaggtc

SEQ ID NO: 3506065 - DNA, 25 bp, Homo sapien
aagtcaaatagttcagagaggctcc

SEQ ID NO: 3506066 - DNA, 25 bp, Homo sapien
tgtgtgtaggaaggccatgcccctt

SEQ ID NO: 3506067 - DNA, 25 bp, Homo sapien
ctagcactgggagcacatttggatg

SEQ ID NO: 3506068 - DNA, 25 bp, Homo sapien
ggctctggtccacgacgaaatctga

SEQ ID NO: 3506069 - DNA, 25 bp, Homo sapien
ccagagtgtttgttcagggttccat

SEQ ID NO: 3506070 - DNA, 25 bp, Homo sapien
cggctcaggtagtgcaaggcgtaac

SEQ ID NO: 3506071 - DNA, 25 bp, Homo sapien
atggaaccctgaacaaacactctgg

SEQ ID NO: 3506072 - DNA, 25 bp, Homo sapien
tgtcctgcagctatggaagggccgc

SEQ ID NO: 3506073 - DNA, 25 bp, Homo sapien
tcagatttcgtcgtggaccagagcc

SEQ ID NO: 3506074 - DNA, 25 bp, Homo sapien
ttcaatgaagagtgtccccggctca

SEQ ID NO: 3506075 - DNA, 25 bp, Homo sapien
catccaaatgtgctcccagtgctag

SEQ ID NO: 3506076 - DNA, 25 bp, Homo sapien
tgcatacatgcgaccaggacattgg

SEQ ID NO: 3506077 - DNA, 25 bp, Homo sapien
gcaagtgacaaagctctgagcccgc

SEQ ID NO: 3506078 - DNA, 25 bp, Homo sapien
ggagccaaggcccactacagttatt

SEQ ID NO: 3506079 - DNA, 25 bp, Homo sapien
ccgaacaaatatgtgaggagccaag

SEQ ID NO: 3506080 - DNA, 25 bp, Homo sapien
gctaattcgggcagtcatgtcctca

SEQ ID NO: 3506081 - DNA, 25 bp, Homo sapien
gcagatcttcatgagcttacacaca

SEQ ID NO: 3506082 - DNA, 25 bp, Homo sapien
tgtgtgtaagctcatgaagatctgc

SEQ ID NO: 3506083 - DNA, 25 bp, Homo sapien
gattgatgaggacatgactgcccga

SEQ ID NO: 3506084 - DNA, 25 bp, Homo sapien
catgtatgcacctgcctgggtagcc

SEQ ID NO: 3506085 - DNA, 25 bp, Homo sapien
aataactgtagtgggccttggctcc

SEQ ID NO: 3506086 - DNA, 25 bp, Homo sapien
ccccgaaggtgagtgaagtcatcat

SEQ ID NO: 3506087 - DNA, 25 bp, Homo sapien
ccaatgtcctggtcgcatgtatgca

SEQ ID NO: 3506088 - DNA, 25 bp, Homo sapien
gccacccaacctaaatgtacttatc

SEQ ID NO: 3506089 - DNA, 25 bp, Homo sapien
tgtccccacaccagcctgttttcat

SEQ ID NO: 3506090 - DNA, 25 bp, Homo sapien
gtccccacaccagcctgttttcata

SEQ ID NO: 3506091 - DNA, 25 bp, Homo sapien
atgaaaacaggctggtgtggggaca

SEQ ID NO: 3506092 - DNA, 25 bp, Homo sapien
gataagtacatttaggttgggtggc

SEQ ID NO: 3506093 - DNA, 25 bp, Homo sapien
tatgaaaacaggctggtgtggggac

SEQ ID NO: 3506094 - DNA, 25 bp, Homo sapien
gccacccaacctaaatgtacttatc

SEQ ID NO: 3506095 - DNA, 25 bp, Homo sapien
aatgtacttatctgtccccatgtcc

SEQ ID NO: 3506096 - DNA, 25 bp, Homo sapien
cacaccagcctgttttcataataaa

SEQ ID NO: 3506097 - DNA, 25 bp, Homo sapien
tgtccccacaccagcctgttttcat

SEQ ID NO: 3506098 - DNA, 25 bp, Homo sapien
caacctaaatgtacttatctgtccc

SEQ ID NO: 3506099 - DNA, 25 bp, Homo sapien
caccagcctgttttcataataaact

SEQ ID NO: 3506100 - DNA, 25 bp, Homo sapien
gacagataagtacatttaggttggg

SEQ ID NO: 3506101 - DNA, 25 bp, Homo sapien
tttattatgaaaacaggctggtgtg

SEQ ID NO: 3506102 - DNA, 25 bp, Homo sapien
gataagtacatttaggttgggtggc

SEQ ID NO: 3506103 - DNA, 25 bp, Homo sapien
tattatgaaaacaggctggtgtggg

SEQ ID NO: 3506104 - DNA, 25 bp, Homo sapien
ggacatggggacagataagtacatt

SEQ ID NO: 3506105 - DNA, 25 bp, Homo sapien
aaagtttattatgaaaacaggctgg

SEQ ID NO: 3506106 - DNA, 25 bp, Homo sapien
cctgccctcagcgagtatggcatca

SEQ ID NO: 3506107 - DNA, 25 bp, Homo sapien
caatgtgaagaagccgcactacttc

SEQ ID NO: 3506108 - DNA, 25 bp, Homo sapien
taaccatggaggacttgacccctgc

SEQ ID NO: 3506109 - DNA, 25 bp, Homo sapien
gaccgcaagtacactctaaccatgg

SEQ ID NO: 3506110 - DNA, 25 bp, Homo sapien
gccctcagcgagtatggcatcaatg

SEQ ID NO: 3506111 - DNA, 25 bp, Homo sapien
ctcagcgagtatggcatcaatgtga

SEQ ID NO: 3506112 - DNA, 25 bp, Homo sapien
gaagtagtgcggcttcttcacattg

SEQ ID NO: 3506113 - DNA, 25 bp, Homo sapien
ccatggttagagtgtacttgcggtc

SEQ ID NO: 3506114 - DNA, 25 bp, Homo sapien
cattgatgccatactcgctgagggc

SEQ ID NO: 3506115 - DNA, 25 bp, Homo sapien
tgatgccatactcgctgagggcagg

SEQ ID NO: 3506116 - DNA, 25 bp, Homo sapien
gcaggggtcaagtcctccatggtta

SEQ ID NO: 3506117 - DNA, 25 bp, Homo sapien
tcacattgatgccatactcgctgag

SEQ ID NO: 3506118 - DNA, 25 bp, Homo sapien
aatgatgccctacagcactgcaaaa

SEQ ID NO: 3506119 - DNA, 25 bp, Homo sapien
atgaagggcacggcctccggcagct

SEQ ID NO: 3506120 - DNA, 25 bp, Homo sapien
atgatgccctacagcactgcaaaat

SEQ ID NO: 3506121 - DNA, 25 bp, Homo sapien
caaaatgaagggcacggcctccggc

SEQ ID NO: 3506122 - DNA, 25 bp, Homo sapien
aattcggctcatctccttagctgcc

SEQ ID NO: 3506123 - DNA, 25 bp, Homo sapien
aaatgaagggcacggcctccggcag

SEQ ID NO: 3506124 - DNA, 25 bp, Homo sapien
ttttgcagtgctgtagggcatcatt

SEQ ID NO: 3506125 - DNA, 25 bp, Homo sapien
gccggaggccgtgcccttcattttg

SEQ ID NO: 3506126 - DNA, 25 bp, Homo sapien
tgccggaggccgtgcccttcatttt

SEQ ID NO: 3506127 - DNA, 25 bp, Homo sapien
attttgcagtgctgtagggcatcat

SEQ ID NO: 3506128 - DNA, 25 bp, Homo sapien
ctgccggaggccgtgcccttcattt

SEQ ID NO: 3506129 - DNA, 25 bp, Homo sapien
ggcagctaaggagatgagccgaatt

SEQ ID NO: 3506130 - DNA, 25 bp, Homo sapien
gatgcagtgactggttactacctga

SEQ ID NO: 3506131 - DNA, 25 bp, Homo sapien
gttactacctgaaccgtgctggctt

SEQ ID NO: 3506132 - DNA, 25 bp, Homo sapien
tacctgaaccgtgctggctttgagg

SEQ ID NO: 3506133 - DNA, 25 bp, Homo sapien
tggttactacctgaaccgtgctggc

SEQ ID NO: 3506134 - DNA, 25 bp, Homo sapien
ctgaaccgtgctggctttgaggcct

SEQ ID NO: 3506135 - DNA, 25 bp, Homo sapien
actacctgaaccgtgctggctttga

SEQ ID NO: 3506136 - DNA, 25 bp, Homo sapien
aggcctcaaagccagcacggttcag

SEQ ID NO: 3506137 - DNA, 25 bp, Homo sapien
tcaaagccagcacggttcaggtagt

SEQ ID NO: 3506138 - DNA, 25 bp, Homo sapien
gcctcaaagccagcacggttcaggt

SEQ ID NO: 3506139 - DNA, 25 bp, Homo sapien
tcaggtagtaaccagtcactgcatc

SEQ ID NO: 3506140 - DNA, 25 bp, Homo sapien
gccagcacggttcaggtagtaacca

SEQ ID NO: 3506141 - DNA, 25 bp, Homo sapien
aagccagcacggttcaggtagtaac

SEQ ID NO: 3506142 - DNA, 25 bp, Homo sapien
ttcagccacatcgtgcttttcagcg

SEQ ID NO: 3506143 - DNA, 25 bp, Homo sapien
gcttttcagcgttctcttccatttg

SEQ ID NO: 3506144 - DNA, 25 bp, Homo sapien
taatcaggcctatccatttccctca

SEQ ID NO: 3506145 - DNA, 25 bp, Homo sapien
ctgtgagcttcctgataatcaggcc

SEQ ID NO: 3506146 - DNA, 25 bp, Homo sapien
tttgctcccctagtcgctcttctgt

SEQ ID NO: 3506147 - DNA, 25 bp, Homo sapien
gctgacagttctcttaattgatttc

SEQ ID NO: 3506148 - DNA, 25 bp, Homo sapien
gaaatcaattaagagaactgtcagc

SEQ ID NO: 3506149 - DNA, 25 bp, Homo sapien
ggcctgattatcaggaagctcacag

SEQ ID NO: 3506150 - DNA, 25 bp, Homo sapien
cgctgaaaagcacgatgtggctgaa

SEQ ID NO: 3506151 - DNA, 25 bp, Homo sapien
ggagcaaatggaagagaacgctgaa

SEQ ID NO: 3506152 - DNA, 25 bp, Homo sapien
gaagagaacgctgaaaagcacgatg

SEQ ID NO: 3506153 - DNA, 25 bp, Homo sapien
tgagggaaatggataggcctgatta

SEQ ID NO: 3506154 - DNA, 25 bp, Homo sapien
ggtttacgtactgccgagcgcggcc

SEQ ID NO: 3506155 - DNA, 25 bp, Homo sapien
tttggtggacttcttgatgcagctg

SEQ ID NO: 3506156 - DNA, 25 bp, Homo sapien
cggccaacggagacgtgaagcccgt

SEQ ID NO: 3506157 - DNA, 25 bp, Homo sapien
gcacgcctttggtggacttcttgat

SEQ ID NO: 3506158 - DNA, 25 bp, Homo sapien
aagcccgtggtgtccagcacgcctt

SEQ ID NO: 3506159 - DNA, 25 bp, Homo sapien
tggtgtccagcacgcctttggtgga

SEQ ID NO: 3506160 - DNA, 25 bp, Homo sapien
tcaagaagtccaccaaaggcgtgct

SEQ ID NO: 3506161 - DNA, 25 bp, Homo sapien
cagtacgtaaaccccgttagatatg

SEQ ID NO: 3506162 - DNA, 25 bp, Homo sapien
gggcttcacgtctccgttggccgcg

SEQ ID NO: 3506163 - DNA, 25 bp, Homo sapien
cagctgcatcaagaagtccaccaaa

SEQ ID NO: 3506164 - DNA, 25 bp, Homo sapien
gttggccgcgctcggcagtacgtaa

SEQ ID NO: 3506165 - DNA, 25 bp, Homo sapien
aaggcgtgctggacaccacgggctt

SEQ ID NO: 3506166 - DNA, 25 bp, Homo sapien
agagggtatagacagacctagctgg

SEQ ID NO: 3506167 - DNA, 25 bp, Homo sapien
gcagagggtatagacagacctagct

SEQ ID NO: 3506168 - DNA, 25 bp, Homo sapien
tagacagacctagctggggccctgc

SEQ ID NO: 3506169 - DNA, 25 bp, Homo sapien
agggcagagggtatagacagaccta

SEQ ID NO: 3506170 - DNA, 25 bp, Homo sapien
ggcagagggtatagacagacctagc

SEQ ID NO: 3506171 - DNA, 25 bp, Homo sapien
gtccagcggcgggtgagggcagagg

SEQ ID NO: 3506172 - DNA, 25 bp, Homo sapien
cagggccccagctaggtctgtctat

SEQ ID NO: 3506173 - DNA, 25 bp, Homo sapien
gcgcagggccccagctaggtctgtc

SEQ ID NO: 3506174 - DNA, 25 bp, Homo sapien
gctaggtctgtctataccctctgcc

SEQ ID NO: 3506175 - DNA, 25 bp, Homo sapien
taggtctgtctataccctctgccct

SEQ ID NO: 3506176 - DNA, 25 bp, Homo sapien
cagctaggtctgtctataccctctg

SEQ ID NO: 3506177 - DNA, 25 bp, Homo sapien
gggccccagctaggtctgtctatac

SEQ ID NO: 3506178 - DNA, 25 bp, Homo sapien
ggagccagctgagcggcgtggggcg

SEQ ID NO: 3506179 - DNA, 25 bp, Homo sapien
gccggggagccagctgagcggcgtg

SEQ ID NO: 3506180 - DNA, 25 bp, Homo sapien
agcggggggacctggggctggagca

SEQ ID NO: 3506181 - DNA, 25 bp, Homo sapien
ctgctgggggcacgggacccttggc

SEQ ID NO: 3506182 - DNA, 25 bp, Homo sapien
gcacgggacccttggcggcgcgggc

SEQ ID NO: 3506183 - DNA, 25 bp, Homo sapien
gcgcgggccggggagccagctgagc

SEQ ID NO: 3506184 - DNA, 25 bp, Homo sapien
gccaagggtcccgtgcccccagcag

SEQ ID NO: 3506185 - DNA, 25 bp, Homo sapien
ccacgccgctcagctggctccccgg

SEQ ID NO: 3506186 - DNA, 25 bp, Homo sapien
gctcagctggctccccggcccgcgc

SEQ ID NO: 3506187 - DNA, 25 bp, Homo sapien
cgccccacgccgctcagctggctcc

SEQ ID NO: 3506188 - DNA, 25 bp, Homo sapien
acgccgctcagctggctccccggcc

SEQ ID NO: 3506189 - DNA, 25 bp, Homo sapien
gcccgcgccgccaagggtcccgtgc

SEQ ID NO: 3506190 - DNA, 25 bp, Homo sapien
cccggtctcggctcccgccgcgctg

SEQ ID NO: 3506191 - DNA, 25 bp, Homo sapien
cggtctcggctcccgccgcgctgcc

SEQ ID NO: 3506192 - DNA, 25 bp, Homo sapien
ccccggtctcggctcccgccgcgct

SEQ ID NO: 3506193 - DNA, 25 bp, Homo sapien
ccggtctcggctcccgccgcgctgc

SEQ ID NO: 3506194 - DNA, 25 bp, Homo sapien
gcagcgcggcgggagccgagaccgg

SEQ ID NO: 3506195 - DNA, 25 bp, Homo sapien
cagcgcggcgggagccgagaccggg

SEQ ID NO: 3506196 - DNA, 25 bp, Homo sapien
agcgcggcgggagccgagaccgggg

SEQ ID NO: 3506197 - DNA, 25 bp, Homo sapien
ggcagcgcggcgggagccgagaccg

SEQ ID NO: 3506198 - DNA, 25 bp, Homo sapien
ctccggcgcggaccccgaggcggcg

SEQ ID NO: 3506199 - DNA, 25 bp, Homo sapien
cccggtctcggctcccgccgcgctg

SEQ ID NO: 3506200 - DNA, 25 bp, Homo sapien
cggcgccggcctccgccgcctcggc

SEQ ID NO: 3506201 - DNA, 25 bp, Homo sapien
gagctgcagcggctccggcgcggac

SEQ ID NO: 3506202 - DNA, 25 bp, Homo sapien
gcgcggaccccgaggcggcgccggc

SEQ ID NO: 3506203 - DNA, 25 bp, Homo sapien
ccggtctcggctcccgccgcgctgc

SEQ ID NO: 3506204 - DNA, 25 bp, Homo sapien
gcagcgcggcgggagccgagaccgg

SEQ ID NO: 3506205 - DNA, 25 bp, Homo sapien
cagcgcggcgggagccgagaccggg

SEQ ID NO: 3506206 - DNA, 25 bp, Homo sapien
ggcagcgcggcgggagccgagaccg

SEQ ID NO: 3506207 - DNA, 25 bp, Homo sapien
ctggagggcagcgcggcgggagccg

SEQ ID NO: 3506208 - DNA, 25 bp, Homo sapien
gccgaggcggcggaggccggcgccg

SEQ ID NO: 3506209 - DNA, 25 bp, Homo sapien
gtccgcgccggagccgctgcagctc

SEQ ID NO: 3506210 - DNA, 25 bp, Homo sapien
ggaagcggctctgttcgccgcctct

SEQ ID NO: 3506211 - DNA, 25 bp, Homo sapien
tctgttcgccgcctctcccaccggc

SEQ ID NO: 3506212 - DNA, 25 bp, Homo sapien
agcggaagcggctctgttcgccgcc

SEQ ID NO: 3506213 - DNA, 25 bp, Homo sapien
gaagcggctctgttcgccgcctctc

SEQ ID NO: 3506214 - DNA, 25 bp, Homo sapien
aagcggaagcggctctgttcgccgc

SEQ ID NO: 3506215 - DNA, 25 bp, Homo sapien
gcggaagcggctctgttcgccgcct

SEQ ID NO: 3506216 - DNA, 25 bp, Homo sapien
gccggtgggagaggcggcgaacaga

SEQ ID NO: 3506217 - DNA, 25 bp, Homo sapien
gcggcgaacagagccgcttccgctt

SEQ ID NO: 3506218 - DNA, 25 bp, Homo sapien
aggcggcgaacagagccgcttccgc

SEQ ID NO: 3506219 - DNA, 25 bp, Homo sapien
agaggcggcgaacagagccgcttcc

SEQ ID NO: 3506220 - DNA, 25 bp, Homo sapien
ggcggcgaacagagccgcttccgct

SEQ ID NO: 3506221 - DNA, 25 bp, Homo sapien
gagaggcggcgaacagagccgcttc

SEQ ID NO: 3506222 - DNA, 25 bp, Homo sapien
gccggtgggagaggcggcgaacaga

SEQ ID NO: 3506223 - DNA, 25 bp, Homo sapien
gggccggtgggagaggcggcgaaca

SEQ ID NO: 3506224 - DNA, 25 bp, Homo sapien
gcggcgaacagagccgcttccgctt

SEQ ID NO: 3506225 - DNA, 25 bp, Homo sapien
aggcggcgaacagagccgcttccgc

SEQ ID NO: 3506226 - DNA, 25 bp, Homo sapien
agaggcggcgaacagagccgcttcc

SEQ ID NO: 3506227 - DNA, 25 bp, Homo sapien
ggcggcgaacagagccgcttccgct

SEQ ID NO: 3506228 - DNA, 25 bp, Homo sapien
gaaccagcgtgcgtctggctctcct

SEQ ID NO: 3506229 - DNA, 25 bp, Homo sapien
gccgctctgggacacctcattctgt

SEQ ID NO: 3506230 - DNA, 25 bp, Homo sapien
tcattctgtctgacgctcaagacct

SEQ ID NO: 3506231 - DNA, 25 bp, Homo sapien
agccttggcgaactgcgctgccgta

SEQ ID NO: 3506232 - DNA, 25 bp, Homo sapien
tagtcctctaggcaccaacggtctt

SEQ ID NO: 3506233 - DNA, 25 bp, Homo sapien
tacgtggtcgttacaatgctagagg

SEQ ID NO: 3506234 - DNA, 25 bp, Homo sapien
caacggtcttggaaaggaaggcaga

SEQ ID NO: 3506235 - DNA, 25 bp, Homo sapien
gaggaagggcgttaacatctgccac

SEQ ID NO: 3506236 - DNA, 25 bp, Homo sapien
cagggaatcaaaacattcacgaaag

SEQ ID NO: 3506237 - DNA, 25 bp, Homo sapien
gaaaggcaggtattgatattcacac

SEQ ID NO: 3506238 - DNA, 25 bp, Homo sapien
aactgagtcttgcaagaattctgga

SEQ ID NO: 3506239 - DNA, 25 bp, Homo sapien
ggagataagcttacttgacccagtc

SEQ ID NO: 3506240 - DNA, 25 bp, Homo sapien
acagcttgagcaagagtgagagttc

SEQ ID NO: 3506241 - DNA, 25 bp, Homo sapien
ctggcagttgtatcaggggtggtaa

SEQ ID NO: 3506242 - DNA, 25 bp, Homo sapien
gacggaacagcttgagcaagagtga

SEQ ID NO: 3506243 - DNA, 25 bp, Homo sapien
ggtaaggggacggaacagcttgagc

SEQ ID NO: 3506244 - DNA, 25 bp, Homo sapien
taaacggtgacagtagaggtctcct

SEQ ID NO: 3506245 - DNA, 25 bp, Homo sapien
tacaaatggagcaatgaaggtcagc

SEQ ID NO: 3506246 - DNA, 25 bp, Homo sapien
gaaggtcagcattccatgaagaagc

SEQ ID NO: 3506247 - DNA, 25 bp, Homo sapien
gacaagccatctctcctgataggaa

SEQ ID NO: 3506248 - DNA, 25 bp, Homo sapien
tcttcatccagacaggactcatggc

SEQ ID NO: 3506249 - DNA, 25 bp, Homo sapien
cctcttcatccagacaggactcatg

SEQ ID NO: 3506250 - DNA, 25 bp, Homo sapien
aggactcatggcagccacgggttac

SEQ ID NO: 3506251 - DNA, 25 bp, Homo sapien
cttcatccagacaggactcatggca

SEQ ID NO: 3506252 - DNA, 25 bp, Homo sapien
gctggtagagccttgggttgagaaa

SEQ ID NO: 3506253 - DNA, 25 bp, Homo sapien
ggccactaaggatcctgtgctcatt

SEQ ID NO: 3506254 - DNA, 25 bp, Homo sapien
tgatcaaggataggatccccccaaa

SEQ ID NO: 3506255 - DNA, 25 bp, Homo sapien
tgctgctggtagagccttgggttga

SEQ ID NO: 3506256 - DNA, 25 bp, Homo sapien
gcagccacatctgggtaggcacggc

SEQ ID NO: 3506257 - DNA, 25 bp, Homo sapien
ggacacccatggaatgggcactctg

SEQ ID NO: 3506258 - DNA, 25 bp, Homo sapien
cgaggttccggacacccatggaatg

SEQ ID NO: 3506259 - DNA, 25 bp, Homo sapien
ggtaggcacggccactggcattgaa

SEQ ID NO: 3506260 - DNA, 25 bp, Homo sapien
ctagagctcaggaacttcgttacag

SEQ ID NO: 3506261 - DNA, 25 bp, Homo sapien
gagctcaggaacttcgttacagctt

SEQ ID NO: 3506262 - DNA, 25 bp, Homo sapien
gctcaggaacttcgttacagcttcc

SEQ ID NO: 3506263 - DNA, 25 bp, Homo sapien
tcaggaacttcgttacagcttcctc

SEQ ID NO: 3506264 - DNA, 25 bp, Homo sapien
aggcatttttgagtgagtattggca

SEQ ID NO: 3506265 - DNA, 25 bp, Homo sapien
caccaccactgatatagtcaacaat

SEQ ID NO: 3506266 - DNA, 25 bp, Homo sapien
caatttcatttgtgatgaggaaagg

SEQ ID NO: 3506267 - DNA, 25 bp, Homo sapien
gggaacacattgctgaagccaccac

SEQ ID NO: 3506268 - DNA, 25 bp, Homo sapien
ggaaggatgtgcctcccactgtggt

SEQ ID NO: 3506269 - DNA, 25 bp, Homo sapien
cttgctggaggaactagactctgtg

SEQ ID NO: 3506270 - DNA, 25 bp, Homo sapien
gtgagtatagcccaggtcttgctgg

SEQ ID NO: 3506271 - DNA, 25 bp, Homo sapien
gggattgactaagagattttgagcc

SEQ ID NO: 3506272 - DNA, 25 bp, Homo sapien
gggaagcatgtatatgggattgact

SEQ ID NO: 3506273 - DNA, 25 bp, Homo sapien
ctgagtggtaggctagagtacttac

SEQ ID NO: 3506274 - DNA, 25 bp, Homo sapien
cagggaaggtagggcggaactggtg

SEQ ID NO: 3506275 - DNA, 25 bp, Homo sapien
cagaccaacacccggccccactgtc

SEQ ID NO: 3506276 - DNA, 25 bp, Homo sapien
agaccaacacccggccccactgtca

SEQ ID NO: 3506277 - DNA, 25 bp, Homo sapien
tagggcggaactggtgtcttccaga

SEQ ID NO: 3506278 - DNA, 25 bp, Homo sapien
cacagtatgcacatgtggcagggct

SEQ ID NO: 3506279 - DNA, 25 bp, Homo sapien
acccgctggatgtaggcgctgctga

SEQ ID NO: 3506280 - DNA, 25 bp, Homo sapien
ccgagcggcagccttcatgagctca

SEQ ID NO: 3506281 - DNA, 25 bp, Homo sapien
catgagctcagtgttgacccgctgg

SEQ ID NO: 3506282 - DNA, 25 bp, Homo sapien
gccactgcaggaagggctcctgtcc

SEQ ID NO: 3506283 - DNA, 25 bp, Homo sapien
catgagccactgcaggaagggctcc

SEQ ID NO: 3506284 - DNA, 25 bp, Homo sapien
gcaggaagggctcctgtccctcatg

SEQ ID NO: 3506285 - DNA, 25 bp, Homo sapien
ggaagggctcctgtccctcatgccg

SEQ ID NO: 3506286 - DNA, 25 bp, Homo sapien
gggagcagggatcaacacccatctc

SEQ ID NO: 3506287 - DNA, 25 bp, Homo sapien
ctctccagcttatagcattcccttg

SEQ ID NO: 3506288 - DNA, 25 bp, Homo sapien
cagcttatagcattcccttgaggga

SEQ ID NO: 3506289 - DNA, 25 bp, Homo sapien
ccttgagggagcagggatcaacacc

SEQ ID NO: 3506290 - DNA, 25 bp, Homo sapien
tggcaccagcactcatcaggtactg

SEQ ID NO: 3506291 - DNA, 25 bp, Homo sapien
tgccaccgaagaggcgcatgaactg

SEQ ID NO: 3506292 - DNA, 25 bp, Homo sapien
ggtactgcacatctagactggcctc

SEQ ID NO: 3506293 - DNA, 25 bp, Homo sapien
gatgcctgatgtgcaaagttgccac

SEQ ID NO: 3506294 - DNA, 25 bp, Homo sapien
tcgtgggtccgagggtgagtcccag

SEQ ID NO: 3506295 - DNA, 25 bp, Homo sapien
tgagtcccagggtggtaaggaattg

SEQ ID NO: 3506296 - DNA, 25 bp, Homo sapien
actgtggggaggctatgaggaccct

SEQ ID NO: 3506297 - DNA, 25 bp, Homo sapien
gagtcagagcagagatcgtgggtcc

SEQ ID NO: 3506298 - DNA, 25 bp, Homo sapien
ttgtatcgcttacggatcacagagg

SEQ ID NO: 3506299 - DNA, 25 bp, Homo sapien
ccagagcccacgtcttgtgaggtca

SEQ ID NO: 3506300 - DNA, 25 bp, Homo sapien
gaggtcaagttgtatcgcttacgga

SEQ ID NO: 3506301 - DNA, 25 bp, Homo sapien
tcttgtgaggtcaagttgtatcgct

SEQ ID NO: 3506302 - DNA, 25 bp, Homo sapien
caggacgttgcctcagggatgatgt

SEQ ID NO: 3506303 - DNA, 25 bp, Homo sapien
ctcaggacgttgcctcagggatgat

SEQ ID NO: 3506304 - DNA, 25 bp, Homo sapien
gcggctcaggacgttgcctcaggga

SEQ ID NO: 3506305 - DNA, 25 bp, Homo sapien
ctgcggctcaggacgttgcctcagg

SEQ ID NO: 3506306 - DNA, 25 bp, Homo sapien
ccagtccccaatggcatctaaactt

SEQ ID NO: 3506307 - DNA, 25 bp, Homo sapien
ccaatggcatctaaacttcctcagc

SEQ ID NO: 3506308 - DNA, 25 bp, Homo sapien
tatagactgtaatgcccaccttaca

SEQ ID NO: 3506309 - DNA, 25 bp, Homo sapien
tcaggcttgaggagatcttatagac

SEQ ID NO: 3506310 - DNA, 25 bp, Homo sapien
gctggtagggatgtggggaccttac

SEQ ID NO: 3506311 - DNA, 25 bp, Homo sapien
gaagctggtagggatgtggggacct

SEQ ID NO: 3506312 - DNA, 25 bp, Homo sapien
tggaagctggtagggatgtggggac

SEQ ID NO: 3506313 - DNA, 25 bp, Homo sapien
ggcctgtggaagctggtagggatgt

SEQ ID NO: 3506314 - DNA, 25 bp, Homo sapien
tcctcccacatagtgatgaaactca

SEQ ID NO: 3506315 - DNA, 25 bp, Homo sapien
tttccgtaggtcctcccacatagtg

SEQ ID NO: 3506316 - DNA, 25 bp, Homo sapien
cgtaggtcctcccacatagtgatga

SEQ ID NO: 3506317 - DNA, 25 bp, Homo sapien
cccacatagtgatgaaactcagccc

SEQ ID NO: 3506318 - DNA, 25 bp, Homo sapien
atcagccacattctctagggtcagg

SEQ ID NO: 3506319 - DNA, 25 bp, Homo sapien
catttttgcaccgtgtggagggtca

SEQ ID NO: 3506320 - DNA, 25 bp, Homo sapien
gctcagccagcaagtcagaaagtcc

SEQ ID NO: 3506321 - DNA, 25 bp, Homo sapien
gggatggcctcaccagatcagccac

SEQ ID NO: 3506322 - DNA, 25 bp, Homo sapien
taagttgtactagatgcctggtagc

SEQ ID NO: 3506323 - DNA, 25 bp, Homo sapien
gaactggcagccttagtatgtgaac

SEQ ID NO: 3506324 - DNA, 25 bp, Homo sapien
gagttggtcgtaacaaaagacggca

SEQ ID NO: 3506325 - DNA, 25 bp, Homo sapien
taaagcctgtatactgaaccacatc

SEQ ID NO: 3506326 - DNA, 25 bp, Homo sapien
gagagctgggatccgacacagcctg

SEQ ID NO: 3506327 - DNA, 25 bp, Homo sapien
gcaccagctccgagagtctttccac

SEQ ID NO: 3506328 - DNA, 25 bp, Homo sapien
gctgtctcagggcaaaggtgagact

SEQ ID NO: 3506329 - DNA, 25 bp, Homo sapien
tattgaggagagctgggatccgaca

SEQ ID NO: 3506330 - DNA, 25 bp, Homo sapien
aagctatggagtgcgtactaggagc

SEQ ID NO: 3506331 - DNA, 25 bp, Homo sapien
tcctaggagcagatacagatcacat

SEQ ID NO: 3506332 - DNA, 25 bp, Homo sapien
gggcagtctgtgctaagtcaactca

SEQ ID NO: 3506333 - DNA, 25 bp, Homo sapien
tgagagaagctaggaccaggacagt

SEQ ID NO: 3506334 - DNA, 25 bp, Homo sapien
actgcatttgccagagaggatgagg

SEQ ID NO: 3506335 - DNA, 25 bp, Homo sapien
gtaactgcatttgccagagaggatg

SEQ ID NO: 3506336 - DNA, 25 bp, Homo sapien
ctgtaactgcatttgccagagagga

SEQ ID NO: 3506337 - DNA, 25 bp, Homo sapien
gtcctccgctggtcgggctccgggc

SEQ ID NO: 3506338 - DNA, 25 bp, Homo sapien
tgttcccaccctcccaatgtgtgct

SEQ ID NO: 3506339 - DNA, 25 bp, Homo sapien
gctacgttgtccttgtgttcccacc

SEQ ID NO: 3506340 - DNA, 25 bp, Homo sapien
cagtgggagctacgttgtccttgtg

SEQ ID NO: 3506341 - DNA, 25 bp, Homo sapien
ggtttcagtgggagctacgttgtcc

SEQ ID NO: 3506342 - DNA, 25 bp, Homo sapien
gcccttccgcggatctgctgtcatg

SEQ ID NO: 3506343 - DNA, 25 bp, Homo sapien
tctgcccttccgcggatctgctgtc

SEQ ID NO: 3506344 - DNA, 25 bp, Homo sapien
cccttccgcggatctgctgtcatgt

SEQ ID NO: 3506345 - DNA, 25 bp, Homo sapien
tgcccttccgcggatctgctgtcat

SEQ ID NO: 3506346 - DNA, 25 bp, Homo sapien
tcatcagcctcaggctaggctcctg

SEQ ID NO: 3506347 - DNA, 25 bp, Homo sapien
tatccacaatactctgccaggtgtc

SEQ ID NO: 3506348 - DNA, 25 bp, Homo sapien
tgtgcctcctgaggtatccacaata

SEQ ID NO: 3506349 - DNA, 25 bp, Homo sapien
gatgtgatcatcagcctcaggctag

SEQ ID NO: 3506350 - DNA, 25 bp, Homo sapien
gagaaatggcacttggttctgggca

SEQ ID NO: 3506351 - DNA, 25 bp, Homo sapien
cacaggtcagtgagcaacagggctt

SEQ ID NO: 3506352 - DNA, 25 bp, Homo sapien
ggcttctgtggtcctagtactctga

SEQ ID NO: 3506353 - DNA, 25 bp, Homo sapien
tagccagtcatagtccgaggctgcc

SEQ ID NO: 3506354 - DNA, 25 bp, Homo sapien
ctccgtgtcatcaggtggctccagg

SEQ ID NO: 3506355 - DNA, 25 bp, Homo sapien
gacagggagccttcatggctgatgg

SEQ ID NO: 3506356 - DNA, 25 bp, Homo sapien
gagcggtgagaagctggtgggaaga

SEQ ID NO: 3506357 - DNA, 25 bp, Homo sapien
caaatggtgagacaacgggtgagcg

SEQ ID NO: 3506358 - DNA, 25 bp, Homo sapien
gtggtgggtcgatacggggagctgg

SEQ ID NO: 3506359 - DNA, 25 bp, Homo sapien
ggtggtgggtcgatacggggagctg

SEQ ID NO: 3506360 - DNA, 25 bp, Homo sapien
tggtgggtcgatacggggagctggg

SEQ ID NO: 3506361 - DNA, 25 bp, Homo sapien
gatctctgtgaagacactggccagt

SEQ ID NO: 3506362 - DNA, 25 bp, Homo sapien
tagtcccagttatagctgccacgga

SEQ ID NO: 3506363 - DNA, 25 bp, Homo sapien
catgcagagtggtcacgagagtgcc

SEQ ID NO: 3506364 - DNA, 25 bp, Homo sapien
tactgtcacacggtaggatgctcgg

SEQ ID NO: 3506365 - DNA, 25 bp, Homo sapien
gttggcacctgagtcccgatcagtg

SEQ ID NO: 3506366 - DNA, 25 bp, Homo sapien
tcagtggcagagacggagagaatgg

SEQ ID NO: 3506367 - DNA, 25 bp, Homo sapien
agagacggagagaatggcactgcct

SEQ ID NO: 3506368 - DNA, 25 bp, Homo sapien
cactgaagccatcggcaggggaagc

SEQ ID NO: 3506369 - DNA, 25 bp, Homo sapien
acataccacagcacgggtcctgagt

SEQ ID NO: 3506370 - DNA, 25 bp, Homo sapien
tgttacctgtgcaatctctgagccc

SEQ ID NO: 3506371 - DNA, 25 bp, Homo sapien
tgaggcccatcatgtgccagcagct

SEQ ID NO: 3506372 - DNA, 25 bp, Homo sapien
ggcctccatagcggccaacactgaa

SEQ ID NO: 3506373 - DNA, 25 bp, Homo sapien
gaccatcaccgtcaaggtagctgag

SEQ ID NO: 3506374 - DNA, 25 bp, Homo sapien
attgtcattggtgtcgatgaccatc

SEQ ID NO: 3506375 - DNA, 25 bp, Homo sapien
ccgtcaaggtagctgagcccaccag

SEQ ID NO: 3506376 - DNA, 25 bp, Homo sapien
tgtcgatgaccatcaccgtcaaggt

SEQ ID NO: 3506377 - DNA, 25 bp, Homo sapien
gaacaatccacgtgccggctgggat

SEQ ID NO: 3506378 - DNA, 25 bp, Homo sapien
gatgcagccagactgtaggaaatct

SEQ ID NO: 3506379 - DNA, 25 bp, Homo sapien
ccagatctcacggtccaggatggct

SEQ ID NO: 3506380 - DNA, 25 bp, Homo sapien
ggttgggtctacgtggaacaatcca

SEQ ID NO: 3506381 - DNA, 25 bp, Homo sapien
cctcgaagtctagcccctctgctga

SEQ ID NO: 3506382 - DNA, 25 bp, Homo sapien
aaacggggagcattgtcgttggcat

SEQ ID NO: 3506383 - DNA, 25 bp, Homo sapien
agtcgcagccgtggactcacctcga

SEQ ID NO: 3506384 - DNA, 25 bp, Homo sapien
aaggccacataatggggccgcagga

SEQ ID NO: 3506385 - DNA, 25 bp, Homo sapien
ctaggctggatggagaatgtccctt

SEQ ID NO: 3506386 - DNA, 25 bp, Homo sapien
gatgggtccatttgtgcctcctgca

SEQ ID NO: 3506387 - DNA, 25 bp, Homo sapien
gtgatgggtccatttgtgcctcctg

SEQ ID NO: 3506388 - DNA, 25 bp, Homo sapien
gcctcctgcatggacggccctgggg

SEQ ID NO: 3506389 - DNA, 25 bp, Homo sapien
tgcagctgtgcgcagttctccagag
